United States Patent Application Publication US 2025/0084491 A1 - sequence listing, part 39

SEQ ID NO: 745775 - DNA, 75 bp, synthetic construct
  source 1..75: mol_type = other DNA
atggagaaaccggcgtcgggaaggttagcatcaccacggggggggatgtgggaggtcaataagaatgtctatacc

SEQ ID NO: 745776 - DNA, 75 bp, synthetic construct
  source 1..75: mol_type = other DNA
caggctaaccgctatgtattgcagctaggcggcgatttggcgcagtggagtagcaacgcgcaggatcgctggcat

SEQ ID NO: 745777 - DNA, 75 bp, synthetic construct
  source 1..75: mol_type = other DNA
aatgtgatgccgcaggatgaagccgacttaccgctacccaaaaaatttgacgatctggttttcccctggcttggc

SEQ ID NO: 745778 - DNA, 75 bp, synthetic construct
  source 1..75: mol_type = other DNA
ccccgtggttgcctgttcgtttcaaagatggaacgacaggcaaactggcgcctgtcgatctggcggatgaaaatg

SEQ ID NO: 745779 - DNA, 75 bp, synthetic construct
  source 1..75: mol_type = other DNA
tgaagatatgaaggttcgttgttggtatgaacaccatttcccgctgttgttaaacaaaaaagaagacctaatacc

SEQ ID NO: 745780 - DNA, 75 bp, synthetic construct
  source 1..75: mol_type = other DNA
atcgtggggggggaaattgctttcggttccgactctgccattaatatggcaagtcaacacattaatatccataac

SEQ ID NO: 745781 - DNA, 75 bp, synthetic construct
  source 1..75: mol_type = other DNA
gctaaaaaacgtgactggcgaactgcgcaatagcataagcgggaagggtatcgtgagcgcaaccgccaggacaga

SEQ ID NO: 745782 - DNA, 75 bp, synthetic construct
  source 1..75: mol_type = other DNA
aatgtcgtttctctgtactgttcattgactgggaggctcagtaccagtgcaccattgaacatattcagaagatgc

SEQ ID NO: 745783 - DNA, 75 bp, synthetic construct
  source 1..75: mol_type = other DNA
tggcgctaacaatttaacccccttaatcgccagaccatggaggaaagctggtcgtgtcccgtggcatttaacccc

SEQ ID NO: 745784 - DNA, 75 bp, synthetic construct
  source 1..75: mol_type = other DNA
cggctggcgaatagctggtggcctggtgcggtgattagcgaagagctggcaacggcggcagcagcaggcgttgct

SEQ ID NO: 745785 - DNA, 75 bp, synthetic construct
  source 1..75: mol_type = other DNA
ttacccactacgtcgcctggcgcaaaagcgagtcggctgtgtatttgccacccgcggcgatttgagcttttttgc

SEQ ID NO: 745786 - DNA, 75 bp, synthetic construct
  source 1..75: mol_type = other DNA
aagccgaagtcgcggaaatcgccgccgaaatcgccgatgccgccgcagaggtggcagagctggcagaagaagtgg

SEQ ID NO: 745787 - DNA, 75 bp, synthetic construct
  source 1..75: mol_type = other DNA
gatatccccgccagtctggggacggaaaaaatacgcttcaccctgaacaacgaggaatacacggcacagcgggcg

SEQ ID NO: 745788 - DNA, 75 bp, synthetic construct
  source 1..75: mol_type = other DNA
atcgccagaccatggaggaaagctggtcgtgtcccgtggtatttaacccccttaatcgccagaccatggggggaa

SEQ ID NO: 745789 - DNA, 75 bp, synthetic construct
  source 1..75: mol_type = other DNA
atgcctcattcaggggcgtccgcttcgatgtggttaatacccgtgacagcgccagccgcgacattgcgacgtatg

SEQ ID NO: 745790 - DNA, 75 bp, synthetic construct
  source 1..75: mol_type = other DNA
aattgccattacggcagcctgacgcccgcatggcacgttacttccgcttattcagccagttcacgatcatactgg

SEQ ID NO: 745791 - DNA, 75 bp, synthetic construct
  source 1..75: mol_type = other DNA
ttaataaaaaaaccaaaaatattattggctgatgaaccaacagcgagtttggataatgataataaagagaaagtt

SEQ ID NO: 745792 - DNA, 75 bp, synthetic construct
  source 1..75: mol_type = other DNA
cagacggccatcgacaatattctctcgcctctgcgtacagcgaaaaagtggatgaaaaaagcgaaatcgctggca

SEQ ID NO: 745793 - DNA, 75 bp, synthetic construct
  source 1..75: mol_type = other DNA
tgaaagcctcaaggatatcgccctgaccgttcaggagctgggcgcagcggttattaccagcagaccgccactgac

SEQ ID NO: 745794 - DNA, 75 bp, synthetic construct
  source 1..75: mol_type = other DNA
aatggccgtaacaatctgcaggaggtggccgcattacctcagcaaatcgtgaccgggcaaaagacggttgctgtt

SEQ ID NO: 745795 - DNA, 75 bp, synthetic construct
  source 1..75: mol_type = other DNA
cccccgtaaacctgaatcattcctgaaacgcctgttcagcgcaggacagaccgacaacaccgataccagtaagcc

SEQ ID NO: 745796 - DNA, 75 bp, synthetic construct
  source 1..75: mol_type = other DNA
aagagatatagttttagaaagtcttcagccttatttagttattaataaagacgctgtgacgccatgtacgtttct

SEQ ID NO: 745797 - DNA, 75 bp, synthetic construct
  source 1..75: mol_type = other DNA
gataaaagattatcctgtatgtttctatgaccccaaatacaaaataatggcaaatcatcatgggataacttttga

SEQ ID NO: 745798 - DNA, 75 bp, synthetic construct
  source 1..75: mol_type = other DNA
tggagttcgcgaaaaagcaaaatttaagccttgtatatggtgattgcgggtatgtttattcatccacggaaatgg

SEQ ID NO: 745799 - DNA, 75 bp, synthetic construct
  source 1..75: mol_type = other DNA
catagacaacatgaatattaatgttactatctggttgagactgttgataaaacgtaaaaaggaatgctctgttcc

SEQ ID NO: 745800 - DNA, 75 bp, synthetic construct
  source 1..75: mol_type = other DNA
acaatgctcggtgaagttgtggaaaaaatagatgactggcaaatagaacgtttccaacaatcttttcaagatgac

SEQ ID NO: 745801 - DNA, 75 bp, synthetic construct
  source 1..75: mol_type = other DNA
ctcacgacagtactatgacaatccccgcaaatgatattatgcaagatcatgttaccaacttcactaaagaactgt

SEQ ID NO: 745802 - DNA, 75 bp, synthetic construct
  source 1..75: mol_type = other DNA
gccacagtaacacctctctggcgtggggagctggcgtgcagtttaacccgaccgaatccgtggccgttgacgtcg

SEQ ID NO: 745803 - DNA, 75 bp, synthetic construct
  source 1..75: mol_type = other DNA
agatgccaatcgtatggggcaaaagcttttcacatctgcggaatttgtttctgattttgggggcagcggtcgtga

SEQ ID NO: 745804 - DNA, 75 bp, synthetic construct
  source 1..75: mol_type = other DNA
aggccgctgatgtggtggcagatgttgccgcccagatcgctgatgctgccgacgaggtggccgagctggcgcagg

SEQ ID NO: 745805 - DNA, 75 bp, synthetic construct
  source 1..75: mol_type = other DNA
tgagtctagtaaaagggtgtgacagattatatattatagctcacggagataccaatggtatcggtcacggcttaa

SEQ ID NO: 745806 - DNA, 75 bp, synthetic construct
  source 1..75: mol_type = other DNA
cgaagcgacatttcgaactaatcttgtgcagcataataagcaggcagaactgattgcgctaagcaatgctgagtc

SEQ ID NO: 745807 - DNA, 75 bp, synthetic construct
  source 1..75: mol_type = other DNA
ttgatgagatagagtcaaaaatcaaaaaaggacttcctcttaatcgtcaaaggctccaaaaatcatgtttagtta

SEQ ID NO: 745808 - DNA, 75 bp, synthetic construct
  source 1..75: mol_type = other DNA
atggatgtaatgcttgattatcataaaggcggtggaacagttgttatgataacacatgatacaaatctaattaca

SEQ ID NO: 745809 - DNA, 75 bp, synthetic construct
  source 1..75: mol_type = other DNA
atggtcatatcacattattatatggggaaaataatgtgatatatggcggcttggatgattatctttggaagtatg

SEQ ID NO: 745810 - DNA, 75 bp, synthetic construct
  source 1..75: mol_type = other DNA
cagaatcaggcttacagggaactaagaagaataagagataatattcatagtgaaatatacttcaaacaaactgat

SEQ ID NO: 745811 - DNA, 75 bp, synthetic construct
  source 1..75: mol_type = other DNA
gtgaaacgccatgaaaacgccgacaagctgtacattgtacaggttgatgtggggaaaaaacgctgcaaaccgtga

SEQ ID NO: 745812 - DNA, 75 bp, synthetic construct
  source 1..75: mol_type = other DNA
acaaaaggaattcaggtggatattatttctttttgtcataatgctgattatgtttttgtttaattatattttctc

SEQ ID NO: 745813 - DNA, 75 bp, synthetic construct
  source 1..75: mol_type = other DNA
ttggtgttacatttcctaatatagaacatataccagacgctatacgaggaatacatagaatagagaatgattatt

SEQ ID NO: 745814 - DNA, 75 bp, synthetic construct
  source 1..75: mol_type = other DNA
gggttcggcaatactttgacaatgttatcaactgccaaatatgcatttattggtagcgccaaaagtatacataat

SEQ ID NO: 745815 - DNA, 75 bp, synthetic construct
  source 1..75: mol_type = other DNA
atgattgcttgtctaaaaagaattggtttggtgctttattcatagcaatatcacttcctgacatctgtggcgcga

SEQ ID NO: 745816 - DNA, 75 bp, synthetic construct
  source 1..75: mol_type = other DNA
actcaaggtcgcggggacgccacgggcagtcaatgtcggtttatccccgctggcgcggggaactcactaaacata

SEQ ID NO: 745817 - DNA, 75 bp, synthetic construct
  source 1..75: mol_type = other DNA
acactcaatatttacgaagttcttagcgcgctggggcggtttatccccgctggcgcggggaacacactaagcata

SEQ ID NO: 745818 - DNA, 75 bp, synthetic construct
  source 1..75: mol_type = other DNA
ggtgatcgaccgcagagttaaaggcttccagctccgcaggggtaagtttataacgtgtgtgggaactcacttttt

SEQ ID NO: 745819 - DNA, 75 bp, synthetic construct
  source 1..75: mol_type = other DNA
cagtaagtacactgttcaacgaaagcttagttccaggtcgttattctgacgttattactgttattctgaacggcc

SEQ ID NO: 745820 - DNA, 75 bp, synthetic construct
  source 1..75: mol_type = other DNA
ggttatggaaaaacttacgaaaatgatgaccatcgatagtctgatttttgacgggtttattgaatacaaaactgc

SEQ ID NO: 745821 - DNA, 75 bp, synthetic construct
  source 1..75: mol_type = other DNA
gaaaagggtcaggcgatggatgacatgctgggggagactgccgaacgggggcgacatgatgccgatggcagcggc

SEQ ID NO: 745822 - DNA, 75 bp, synthetic construct
  source 1..75: mol_type = other DNA
cctgatgcaattggttttcttgggctaaaaaaatacttagaatcttaccaaattataaaaatagcttgtttgttt

SEQ ID NO: 745823 - DNA, 75 bp, synthetic construct
  source 1..75: mol_type = other DNA
ctcatgcaattagtattggctaatgcgtaccgtaatttttatttgcaaaaaatacgcaataatatatcagagttt

SEQ ID NO: 745824 - DNA, 75 bp, synthetic construct
  source 1..75: mol_type = other DNA
attgtcgggatctgcacagccattttcgttgccagcgtattgtggttaagttcgttagccgccagtcgtattagc

SEQ ID NO: 745825 - DNA, 75 bp, synthetic construct
  source 1..75: mol_type = other DNA
aaacggatgaatcaggggaggcccgggggcgggcctccgtttttccggagtcagtccggtctgtggtttatgcga

SEQ ID NO: 745826 - DNA, 75 bp, synthetic construct
  source 1..75: mol_type = other DNA
aacacaccaatgttgatggaagctgaagagagaattgctgaatacgctcctggagcacgcgccccggcgtatcga

SEQ ID NO: 745827 - DNA, 75 bp, synthetic construct
  source 1..75: mol_type = other DNA
gtttattcagaacacgccagccttccataacacaccaatgttgatggaagctgaagagagaattgctgaatacgc

SEQ ID NO: 745828 - DNA, 75 bp, synthetic construct
  source 1..75: mol_type = other DNA
ctgttgaagaagctcgcgaaatggcacaacgtgtgaatcagcccctccccgtctggcttgctgatcgaatcctcg

SEQ ID NO: 745829 - DNA, 75 bp, synthetic construct
  source 1..75: mol_type = other DNA
tgacggcaatgtagctggtggacttcggaaaaatatctttaaaaaaatcaaatcatccagagaaaatatggaacg

SEQ ID NO: 745830 - DNA, 75 bp, synthetic construct
  source 1..75: mol_type = other DNA
tatatgttcttcgctggccgcgcgctgcgcgcagaagaagatgcagaaaaacaactggcagaacagtctgcttaa

SEQ ID NO: 745831 - DNA, 75 bp, synthetic construct
  source 1..75: mol_type = other DNA
gcctttgccatgtggacactggcggcgggcgtcagcctgttggccgtgtggttactgctgttgacgatggacgcg

SEQ ID NO: 745832 - DNA, 75 bp, synthetic construct
  source 1..75: mol_type = other DNA
ctggatttgactcacttctctttcctgcctgcactgctggaaatcggcgttttagtcgctctgggtggtgtcata

SEQ ID NO: 745833 - DNA, 75 bp, synthetic construct
  source 1..75: mol_type = other DNA
gtcgctgtagggttaattgatgctcacgctggtggcatcggtacggttggcgtagaaggtggagcgctgaacaat

SEQ ID NO: 745834 - DNA, 75 bp, synthetic construct
  source 1..75: mol_type = other DNA
ccggttcaatcgcaacaaaatcaaccggcagctgagcaaacccaaccttgcctctctggcgctggagcatgaagt

SEQ ID NO: 745835 - DNA, 75 bp, synthetic construct
  source 1..75: mol_type = other DNA
acgatgccatcatgacaggcaatgcagaaaaagcgcgccaggcgtcactgaatcatctgctggactcgaaacacc

SEQ ID NO: 745836 - DNA, 75 bp, synthetic construct
  source 1..75: mol_type = other DNA
tatctctgttggcgcgggcgcacgctatatcggcagtatgcataaaggttcagacggcgcggtgggaacgccagc

SEQ ID NO: 745837 - DNA, 75 bp, synthetic construct
  source 1..75: mol_type = other DNA
ttgtttcccggcatggaaaggatagtgacgttgctggaaggcggcgagatgttccttgaaagcgcagaccgcttt

SEQ ID NO: 745838 - DNA, 75 bp, synthetic construct
  source 1..75: mol_type = other DNA
ttgaaattaacagacgagtatgtgaggctttagatatggaggagtatttcttcatacctgatgacgaagcagatt

SEQ ID NO: 745839 - DNA, 75 bp, synthetic construct
  source 1..75: mol_type = other DNA
aataatcctgaagatgcagagccgattatcgtagagaacagaattggcattattccagcgccagaaaatggatta

SEQ ID NO: 745840 - DNA, 75 bp, synthetic construct
  source 1..75: mol_type = other DNA
aaagatgatgattttgattcagataccgttggttttacatttgtgttcaagatgccaagaggccagttttttgta

SEQ ID NO: 745841 - DNA, 75 bp, synthetic construct
  source 1..75: mol_type = other DNA
ccccttctgccagcggtgcgattatattgagaaaagcttcttatgaattcggcaaaagtataggtgtatttgatt

SEQ ID NO: 745842 - DNA, 75 bp, synthetic construct
  source 1..75: mol_type = other DNA
ttatttatttgtctggttaacgtttattggcgcgattgtagcttttatggataacgcccacgttcaggtgatgct

SEQ ID NO: 745843 - DNA, 75 bp, synthetic construct
  source 1..75: mol_type = other DNA
ctgatatcgaaaatgaagttgagcaaaatgatgacggaacttactcgcaatacggtaagaaacgcgtcgaaggct

SEQ ID NO: 745844 - DNA, 75 bp, synthetic construct
  source 1..75: mol_type = other DNA
caacagttggctcagtctgcacctgccgttgaggctatagacacagctaatatgggcattgatttcgcgaaggtg

SEQ ID NO: 745845 - DNA, 75 bp, synthetic construct
  source 1..75: mol_type = other DNA
ttgcaatattaacctcttgctgtactcaggcgaaaatactaacaaatgaggagattgtttcacgatttattagta

SEQ ID NO: 745846 - DNA, 75 bp, synthetic construct
  source 1..75: mol_type = other DNA
aatgaatggctctgaaagcgagtggttatttgtatcgcggcatgggggggctttaagccggcagcgtgtctggca

SEQ ID NO: 745847 - DNA, 75 bp, synthetic construct
  source 1..75: mol_type = other DNA
atgtcacaaactgagaataatactcatgaagtagctatgaagattactgcagatattatgcaacacgcagattga

SEQ ID NO: 745848 - DNA, 75 bp, synthetic construct
  source 1..75: mol_type = other DNA
aatataaacttaattgatagtaaactcttttttacacggctaacaaatacgttcctcgaaatggttatatgcacc

SEQ ID NO: 745849 - DNA, 75 bp, synthetic construct
  source 1..75: mol_type = other DNA
tttataaataatgtcaccgtccataataatactatcgaaattccacagacagtaaatggtggttacgatttttca

SEQ ID NO: 745850 - DNA, 75 bp, synthetic construct
  source 1..75: mol_type = other DNA
ccattccagaagttgacttggataaaactatagatggggttgcacctaaaattacttgggatgatggtgttaatg

SEQ ID NO: 745851 - DNA, 75 bp, synthetic construct
  source 1..75: mol_type = other DNA
atacccttcaaaagggaaaatgaacgatttatttctgctggttataaatataataacagtaaatctcaaggggaa

SEQ ID NO: 745852 - DNA, 75 bp, synthetic construct
  source 1..75: mol_type = other DNA
agtcaaaagacgatgctgctggaggtgataaagagcttcaccccgttgccaccggagaatgatgtcaaacaggac

SEQ ID NO: 745853 - DNA, 75 bp, synthetic construct
  source 1..75: mol_type = other DNA
agttactgaaagtttctatacggcgggatacggtgcgggtgtttcgcccgatgccactaaacattgatgcgatct

SEQ ID NO: 745854 - DNA, 75 bp, synthetic construct
  source 1..75: mol_type = other DNA
tacagccaggaatggctgttttcctgggcaggcgtagccatgacactgttgctgatgatagtgacattgccaggc

SEQ ID NO: 745855 - DNA, 75 bp, synthetic construct
  source 1..75: mol_type = other DNA
ggcgcgaaaaatccacctgtaccactgcgaccatcgcggcctgccgctggcccttatcagtaaggaaggggcaac

SEQ ID NO: 745856 - DNA, 75 bp, synthetic construct
  source 1..75: mol_type = other DNA
actaaatcagtaagttggcagcatcacctagcttcacatgcaaataataaatgtgacgatagaattacgagaaga

SEQ ID NO: 745857 - DNA, 75 bp, synthetic construct
  source 1..75: mol_type = other DNA
catgttcaattctacaatgcaacaatgaatagagccaatattaaaaataccttccttgattattcaatttttata

SEQ ID NO: 745858 - DNA, 75 bp, synthetic construct
  source 1..75: mol_type = other DNA
tttcatttcatgaaaaattcaatgccaaaaggactcatgaagacgacattcattatttttatgaagtatttccta

SEQ ID NO: 745859 - DNA, 75 bp, synthetic construct
  source 1..75: mol_type = other DNA
tatgagattgccagttacgggactttagcgacgctggctgaacaattaggttaccgtaaagcagcgaagcttctg

SEQ ID NO: 745860 - DNA, 75 bp, synthetic construct
  source 1..75: mol_type = other DNA
tgtatcgccataacggcagttggaagctacgggcgcttggcctcggtttcaacggtgggcttgagcccctggcga

SEQ ID NO: 745861 - DNA, 75 bp, synthetic construct
  source 1..75: mol_type = other DNA
agccaacttcccgatcttctggaaatttgtcggcctcggtggatctagctacggaatcctgaaaaacctggatga

SEQ ID NO: 745862 - DNA, 75 bp, synthetic construct
  source 1..75: mol_type = other DNA
tccttctatcttcatcatcagtcactcttaatttgcgatacccggtacgtcccggttttaacggcgaacccgaca

SEQ ID NO: 745863 - DNA, 75 bp, synthetic construct
  source 1..75: mol_type = other DNA
tattggtccccacggacacaccatcaccgttaatgctacggggaacgcagaaaacaccgtaaaaaacatcgcatt

SEQ ID NO: 745864 - DNA, 75 bp, synthetic construct
  source 1..75: mol_type = other DNA
gctccttgaaagcgcagaccgctttaaccataccttaaaaccgttacagccttttgcctttgcagcggaccaggt

SEQ ID NO: 745865 - DNA, 75 bp, synthetic construct
  source 1..75: mol_type = other DNA
gccagtgacagtatcgagaaacaagccaatgacagtaccgataaacaagccaataacagtaccgataaacaagcc

SEQ ID NO: 745866 - DNA, 75 bp, synthetic construct
  source 1..75: mol_type = other DNA
tgtcggtgaatctgtggcgaaacgctgccggtgaaacgcgagaaatttgcactttcccaccggcaaaacgtgatt

SEQ ID NO: 745867 - DNA, 75 bp, synthetic construct
  source 1..75: mol_type = other DNA
atttacctttattttcgtggcaccggtactgtacgtatttaacgcgataatggctggcctctcctatatggcgat

SEQ ID NO: 745868 - DNA, 75 bp, synthetic construct
  source 1..75: mol_type = other DNA
gaaacgctggctaaggatattcgtgatgaactgattcgtcggagggtgataaaagttaaagaaagcaaaattacc

SEQ ID NO: 745869 - DNA, 75 bp, synthetic construct
  source 1..75: mol_type = other DNA
gtacatcaaggccgtagaggtgttcacggcacatttcaggtgcaaggatttccgcctgcacgagatcaacagaac

SEQ ID NO: 745870 - DNA, 75 bp, synthetic construct
  source 1..75: mol_type = other DNA
ttgaactggtggttgtcaaaagcgaaaccaccgatgactcatgtgcattggtgcttaagctgcgttcagttcaaa

SEQ ID NO: 745871 - DNA, 75 bp, synthetic construct
  source 1..75: mol_type = other DNA
atcattcgtgacaaagtcatgcacgaattttttgctatcagagaccgactcaagccaaaaccccaacgtaacagt

SEQ ID NO: 745872 - DNA, 75 bp, synthetic construct
  source 1..75: mol_type = other DNA
tgacgttgctggaaggcggcgagatgttccttgaaagcgcagaccgctttaaccataccttaaaaccgttacagc

SEQ ID NO: 745873 - DNA, 75 bp, synthetic construct
  source 1..75: mol_type = other DNA
tacaccctccggcatgcagtcacaggtaatcttcctggcagaccgtttcgccgtgactactatggtcggcgggac

SEQ ID NO: 745874 - DNA, 75 bp, synthetic construct
  source 1..75: mol_type = other DNA
aacgcagctgatcgtgtccacgccgttcacggcggcgccgttacctaatgccgtgttcgtaattgatgctggtca

SEQ ID NO: 745875 - DNA, 75 bp, synthetic construct
  source 1..75: mol_type = other DNA
tatgagcgcagtcaccgcgtcaatcttccgaaagcctcgactggatggcagttgcgggttcgcagaatcacgccg

SEQ ID NO: 745876 - DNA, 75 bp, synthetic construct
  source 1..75: mol_type = other DNA
caacgtaaagcggaaatacttcgacgtggatatgagtttggagaaagtcgggtcatctgcggtgcgcattggcaa

SEQ ID NO: 745877 - DNA, 75 bp, synthetic construct
  source 1..75: mol_type = other DNA
gcaacgccacaagggcttaaaaaaatttcaacagataatgggattattgcagcaaggccattggttattatggat

SEQ ID NO: 745878 - DNA, 75 bp, synthetic construct
  source 1..75: mol_type = other DNA
gatgcagcaagtgcatgcgcgggtgtgagatgcgcggcatggtggctaattttggcggtttcctttccatcaata

SEQ ID NO: 745879 - DNA, 75 bp, synthetic construct
  source 1..75: mol_type = other DNA
aaacatccctgttccatcgcggctttgatcatacccttgcctttatacatgctgatggcagttatccgtcagacg

SEQ ID NO: 745880 - DNA, 75 bp, synthetic construct
  source 1..75: mol_type = other DNA
gcgtttatgatgcagatatcagtggcgcatcgacattaatcctccacttcaatatgaatgcggggagttgccctg

SEQ ID NO: 745881 - DNA, 75 bp, synthetic construct
  source 1..75: mol_type = other DNA
agatagcactgctgcggcatggtccgaatgggcacagatctatacgtcaaaagattccgttcccggcgttaatac

SEQ ID NO: 745882 - DNA, 75 bp, synthetic construct
  source 1..75: mol_type = other DNA
catgaaaatatggcgttaagcggcctgaccatcagtaccgacaatcaaacgatggaaactaagtttgaagccagt

SEQ ID NO: 745883 - DNA, 75 bp, synthetic construct
  source 1..75: mol_type = other DNA
acgcccccattatcttcaactccagctcatccggcacttcgttatacgacagcacatgcagccccggtgcaaaca

SEQ ID NO: 745884 - DNA, 75 bp, synthetic construct
  source 1..75: mol_type = other DNA
cctgcactggtccctactctccgccatgaacctgaattatctgtcattactggatacggacgcgctgaagcaggt

SEQ ID NO: 745885 - DNA, 75 bp, synthetic construct
  source 1..75: mol_type = other DNA
cgctgacgccggatggcattcagctacaggtcggggaatcgacggtaatcaggctgtcgaaggatggcatcacca

SEQ ID NO: 745886 - DNA, 75 bp, synthetic construct
  source 1..75: mol_type = other DNA
ccgctgctgggtgcaaaggtccttcccggtgaaaccgacatcgccctgcccgccccgctgccgttcatcctctcc

SEQ ID NO: 745887 - DNA, 75 bp, synthetic construct
  source 1..75: mol_type = other DNA
tggccaggcagacggcggacagcagcatgaagcaattgcagaacaaaacgctctggtaatcgcacaccgagctga

SEQ ID NO: 745888 - DNA, 75 bp, synthetic construct
  source 1..75: mol_type = other DNA
cgcatcacctgtaccagtcgtaccgccttccgggtcagcagtacgatgaggagtcggggctgtactataaccgga

SEQ ID NO: 745889 - DNA, 75 bp, synthetic construct
  source 1..75: mol_type = other DNA
atgtcaaacgctgacgttcccttcctgattctcgatttgcttaacactatttctgacaacccaataataatcctg

SEQ ID NO: 745890 - DNA, 75 bp, synthetic construct
  source 1..75: mol_type = other DNA
gtggcacaggcgtgggcaggcaccggttttggccacctggcgataccgcgtgtgggtcaggaggtgattgtagac

SEQ ID NO: 745891 - DNA, 75 bp, synthetic construct
  source 1..75: mol_type = other DNA
gtcactgattactgaagatggtgaagcgatcgagggcgaagccctggacgatgttactgtcatcggcgtcgtgac

SEQ ID NO: 745892 - DNA, 75 bp, synthetic construct
  source 1..75: mol_type = other DNA
actacgttgagcaaaggttgtctgttaactcgatctgcaatgtcggcccaaacacgctagttttcgagcgatctg

SEQ ID NO: 745893 - DNA, 75 bp, synthetic construct
  source 1..75: mol_type = other DNA
aaagcataaacgatgatatgacagttgtagcaaatcgaataagagttattaagcatgaaaatagttctgttacat

SEQ ID NO: 745894 - DNA, 75 bp, synthetic construct
  source 1..75: mol_type = other DNA
tagcgatctttatgctggtaagataattgatttattgcaaatgaagtatttcagaaaagaaaatataacaatata

SEQ ID NO: 745895 - DNA, 75 bp, synthetic construct
  source 1..75: mol_type = other DNA
ggaaggtgaggccctggatgatgttacagttgtcggggtagtgacattcgttatcaatcggatagggaaggatga

SEQ ID NO: 745896 - DNA, 75 bp, synthetic construct
  source 1..75: mol_type = other DNA
agatgttatctgcggtgtagacaacaactgccgggttattgaaacttcatgcggctgggccgttattaacgtcag

SEQ ID NO: 745897 - DNA, 75 bp, synthetic construct
  source 1..75: mol_type = other DNA
ggcagcgcagccggacggccacacgctggcacggctgtgggcgtcgctgccgccggatatccggttaagcccgca

SEQ ID NO: 745898 - DNA, 75 bp, synthetic construct
  source 1..75: mol_type = other DNA
aaagcggtcagcagcacgcagggcgggctgacgcgcagcatggagtacgacattgccggacgtgtcaccacgctg

SEQ ID NO: 745899 - DNA, 75 bp, synthetic construct
  source 1..75: mol_type = other DNA
aagaaaatgtcccacaggtatagatagagttgctgcttatcatactcacggtgcagatagtcatggcgattatgt

SEQ ID NO: 745900 - DNA, 75 bp, synthetic construct
  source 1..75: mol_type = other DNA
actaccactacgacagccagcaccgtctggtgttccacacgcggatacagcaaggggagccaccggtcgagagcc

SEQ ID NO: 745901 - DNA, 75 bp, synthetic construct
  source 1..75: mol_type = other DNA
gatggaatctgtaccaatatccgctgaatccagtgcaacacgttgatccattaggccttagtactatgataatag

SEQ ID NO: 745902 - DNA, 75 bp, synthetic construct
  source 1..75: mol_type = other DNA
tcagcgttccccgacacactgcccggtaccgaatacggccccgacaggggcatccgcctttcggcggtgtggctg

SEQ ID NO: 745903 - DNA, 75 bp, synthetic construct
  source 1..75: mol_type = other DNA
gaatccggtgaatggtattgatccattagggttaagtcctgcagatgtagcgttaatgcgaaaaaaagaacaact

SEQ ID NO: 745904 - DNA, 75 bp, synthetic construct
  source 1..75: mol_type = other DNA
cgggggaactgctgtggcagcatgagacgaaacacgcctacaacgaacaggggctggcaaaccgcgtcacgccgg

SEQ ID NO: 745905 - DNA, 75 bp, synthetic construct
  source 1..75: mol_type = other DNA
tgctgccggacgggtcatccgcctgaccagtgaaaacggcagccacaccaccttccgttacgatgtactcgaccg

SEQ ID NO: 745906 - DNA, 75 bp, synthetic construct
  source 1..75: mol_type = other DNA
gtggtgtccccggacgggctggagagccgccgggaatatgatgaaccgggcaggctggtatcggagacatcgcgc

SEQ ID NO: 745907 - DNA, 75 bp, synthetic construct
  source 1..75: mol_type = other DNA
actaccactacgacagccagcaccgactggtgttcgacacgcggatacagcaaggggagccactggtcgagagcc

SEQ ID NO: 745908 - DNA, 75 bp, synthetic construct
  source 1..75: mol_type = other DNA
actaccactacgacagccagcaccgactggtgttctacacgcggatacagcaaggggagccacgggtcgagagcc

SEQ ID NO: 745909 - DNA, 75 bp, synthetic construct
  source 1..75: mol_type = other DNA
cggggagcttcgcgccgctcatccgcatcgaaacagacaacggtgagcgggagaaagcgcagcgccgcagcctgg

SEQ ID NO: 745910 - DNA, 75 bp, synthetic construct
  source 1..75: mol_type = other DNA
tcgaagctattaaggaagcttcagctgtaggttttcgcgggcgcctgattgcacgcgggcaagcccggtcggtga

SEQ ID NO: 745911 - DNA, 75 bp, synthetic construct
  source 1..75: mol_type = other DNA
aaatcaatcatacgtaccatcgacctggataaatatgagtcgatctccccgcaaaacggtgaaagagagattttg

SEQ ID NO: 745912 - DNA, 75 bp, synthetic construct
  source 1..75: mol_type = other DNA
atcaggaggccacagctgaagtatttcgacgtcttggatgtaatgctttggttgattatcgagccaaaggtgttc

SEQ ID NO: 745913 - DNA, 75 bp, synthetic construct
  source 1..75: mol_type = other DNA
accttctatccgtttatacccgatccattgcctggcgactggagaggtattttacgttcctggctattgggtgaa

SEQ ID NO: 745914 - DNA, 75 bp, synthetic construct
  source 1..75: mol_type = other DNA
ttggtggggatttaaaagcactcactgaatatgtgaccaacaacgccgtagcgtgggaatttccagaaattatga

SEQ ID NO: 745915 - DNA, 75 bp, synthetic construct
  source 1..75: mol_type = other DNA
ctcagtcaggaccttcaaggctatgcttatgccctaatcgatctcggccttcgtcttcgagaacttaatggagac

SEQ ID NO: 745916 - DNA, 69 bp, synthetic construct
  source 1..69: mol_type = other DNA
catttaaatggagagccggatgcgctgaaaggtgcacgtccggttcggggaggagaggcagggaaatag

SEQ ID NO: 745917 - DNA, 75 bp, synthetic construct
  source 1..75: mol_type = other DNA
gttactgggataaagcaagttatcaatattttgacgtgtcttatcaaggacaaataaaaggcatatcttattcat

SEQ ID NO: 745918 - DNA, 75 bp, synthetic construct
  source 1..75: mol_type = other DNA
gcagaaatgaatacattgacgtttcgtttgatggtgttttaaaagagattgcctattcactgggttatacggcaa

SEQ ID NO: 745919 - DNA, 75 bp, synthetic construct
  source 1..75: mol_type = other DNA
gctgcatttgcttgacgcgacgcacacgcttacaaccatcgccaggcaaatcattgccgatgagcagttgcaaac

SEQ ID NO: 745920 - DNA, 75 bp, synthetic construct
  source 1..75: mol_type = other DNA
gcagattgacgacgccgcgcgccgggtcattaccgaggctggatttggcgactatttcggtcataacactggtca

SEQ ID NO: 745921 - DNA, 75 bp, synthetic construct
  source 1..75: mol_type = other DNA
aataaattaatatgtttatgcaaagccattaactggcttaaacgacagattaaaaccaatgaattttccggtgta

SEQ ID NO: 745922 - DNA, 75 bp, synthetic construct
  source 1..75: mol_type = other DNA
cgagaatgggctggtgtatcgacttccgtgggcaatggaggctattagggtacgtgcaacagctaatggagacct

SEQ ID NO: 745923 - DNA, 75 bp, synthetic construct
  source 1..75: mol_type = other DNA
aagtgggcgtggttaacaaaacgctcggtctgctggcgaccatcgtcggcgcgttgtacggtggtattctgatgc

SEQ ID NO: 745924 - DNA, 75 bp, synthetic construct
  source 1..75: mol_type = other DNA
tcctgaagcggctgtttgcggtgagtatcacctcgtccggcaatcccccgacgttttccctgacgccggaaggga

SEQ ID NO: 745925 - DNA, 75 bp, synthetic construct
  source 1..75: mol_type = other DNA
gctggaagaccagagcgccaccattcagcagatacagcgcgtgcagaaggacacaaatgatgaccttgctgcact

SEQ ID NO: 745926 - DNA, 75 bp, synthetic construct
  source 1..75: mol_type = other DNA
cccaatcatataactatgctcgaaataatggttcattacttgatgaatttgtcgtgctaatctcatcaattagat

SEQ ID NO: 745927 - DNA, 75 bp, synthetic construct
  source 1..75: mol_type = other DNA
ggtggcgcgggaatggcgggaaattccccgcacggagcctgacccggaaatcaccccggataacagttaccgcaa

SEQ ID NO: 745928 - DNA, 75 bp, synthetic construct
  source 1..75: mol_type = other DNA
gccggaagggaagctgacagccaggaacgcggatatcagtggagcaattaccgcgaataccggcacgctcaataa

SEQ ID NO: 745929 - DNA, 75 bp, synthetic construct
  source 1..75: mol_type = other DNA
actatgcgctgtatccccataagactgtatttgacaatatggcttttggtttaaaaatgcaaaaaaggccaaaag

SEQ ID NO: 745930 - DNA, 75 bp, synthetic construct
  source 1..75: mol_type = other DNA
ggcgtactggctgtcattaccgccagtaacgccggggcactcggcaaaggcgacaaaaacaccgccaggctgtta

SEQ ID NO: 745931 - DNA, 75 bp, synthetic construct
  source 1..75: mol_type = other DNA
ttatgccagtggcaccatcacggtaagaatcagtgatgatcagaaatttgaccggcaggtcatgataccgccagt

SEQ ID NO: 745932 - DNA, 75 bp, synthetic construct
  source 1..75: mol_type = other DNA
actgccagcgccgctgccgccgtaccgggtgcttaccgggctggcagaccgcttcgggcggacgctgacgtaccg

SEQ ID NO: 745933 - DNA, 75 bp, synthetic construct
  source 1..75: mol_type = other DNA
cgctgtcgcgtaaaccggaggtgacgtggtatggctgggacggagacaggctgacgacggtgcagactgacacca

SEQ ID NO: 745934 - DNA, 75 bp, synthetic construct
  source 1..75: mol_type = other DNA
gcataattgccaaattaaccctggtgcagggcctgagataaccactccctggaagtcttaccagcatgaaaaaaa

SEQ ID NO: 745935 - DNA, 75 bp, synthetic construct
  source 1..75: mol_type = other DNA
accaggctctggaacatttcccgcaaggcagtattgatttgctgcatattgatggcctgcataccctcgaagccg

SEQ ID NO: 745936 - DNA, 75 bp, synthetic construct
  source 1..75: mol_type = other DNA
cacaggcaaacaacaagcaagcatcaatgaaacaaataaataccgagctggatttcattttcaagcgctctattt

SEQ ID NO: 745937 - DNA, 75 bp, synthetic construct
  source 1..75: mol_type = other DNA
tattgcgccctgtccggggtgccggatgcacatgtctctggcgcaatgcccgggctttttattcgcacatcgtga

SEQ ID NO: 745938 - DNA, 75 bp, synthetic construct
  source 1..75: mol_type = other DNA
acaaaactattgaaataactgagagcggataccacattttaaaagctattttggaaatagagttctcaccgccga

SEQ ID NO: 745939 - DNA, 75 bp, synthetic construct
  source 1..75: mol_type = other DNA
tgcggtagatacttggggcggtgatgaacatgcgggccagtatggcgaagaggtttatcgccaggtatccgaata

SEQ ID NO: 745940 - DNA, 75 bp, synthetic construct
  source 1..75: mol_type = other DNA
gggaactcattatggaagttcttatttctcattttgccaagcagtctctaaactagatttagaaacatgctgctt

SEQ ID NO: 745941 - DNA, 75 bp, synthetic construct
  source 1..75: mol_type = other DNA
ggaacggccgcacgtggaacgctgacgcctcgtcagtggcccgcctgtccccggtggtcatgctggcaaaatctg

SEQ ID NO: 745942 - DNA, 75 bp, synthetic construct
  source 1..75: mol_type = other DNA
ccgttcacgtttgaatggaacggtcgtatctggaatgctggtcccgactcactgggccgcctgtccccggtagtc

SEQ ID NO: 745943 - DNA, 75 bp, synthetic construct
  source 1..75: mol_type = other DNA
aggccagacgtcaggaaattgaagcatggcgcgcagaacaggaggcgaagccgttcacgtttgaatggaacggtc

SEQ ID NO: 745944 - DNA, 75 bp, synthetic construct
  source 1..75: mol_type = other DNA
cccgacacacggtttgaaggggtgctcagcatccggtggactgatgcacgccctgagacaacagaaccgcggtac

SEQ ID NO: 745945 - DNA, 75 bp, synthetic construct
  source 1..75: mol_type = other DNA
tggcgacattgctgtatatgaggactcaaagcccggcacgctgaatgactttctgattgctcctgatgagggcga

SEQ ID NO: 745946 - DNA, 75 bp, synthetic construct
  source 1..75: mol_type = other DNA
atgcgctgccaggtgaatattccgttgctggcccctacggcatcatcatacccgacacacggtttgaaggggtgc

SEQ ID NO: 745947 - DNA, 75 bp, synthetic construct
  source 1..75: mol_type = other DNA
atcccacaaaagatattagatggattgatgtagagagatctgaagcttcttttatgaatgcaacgctggatgcag

SEQ ID NO: 745948 - DNA, 75 bp, synthetic construct
  source 1..75: mol_type = other DNA
tgaacacccctgccgaggcggcacttagcgctcagcgcgtacccggcgcaaaatttatcgcgggcgggaccaatc

SEQ ID NO: 745949 - DNA, 75 bp, synthetic construct
  source 1..75: mol_type = other DNA
cagtgatatcgaaaatcgtgctgattacaaagttgaacaccagagcgtgggtatcagcactggcggcagcatcgg

SEQ ID NO: 745950 - DNA, 75 bp, synthetic construct
  source 1..75: mol_type = other DNA
tgccttacggtatccgcaaaacagctgagggggcttgggaagcattcaacagagactaccagcccttaggggagg

SEQ ID NO: 745951 - DNA, 75 bp, synthetic construct
  source 1..75: mol_type = other DNA
tgatcccttgtattatcgcgacgttgcttgcaccagaaccgaccgacaccattcctgtgccaaaaacgctggaac

SEQ ID NO: 745952 - DNA, 75 bp, synthetic construct
  source 1..75: mol_type = other DNA
tataaatagcccaaagaaatttccaccaaaccgtattgttgaactcgttgacagcgctgcaaccaatgtcaggga

SEQ ID NO: 745953 - DNA, 75 bp, synthetic construct
  source 1..75: mol_type = other DNA
caccggggactgccgctggcgcttatcagcgaagacggcaatacggcgtggagcgcggaatatgatgaatggggc

SEQ ID NO: 745954 - DNA, 75 bp, synthetic construct
  source 1..75: mol_type = other DNA
gataataaaaaataatctaacaattcaagcaagcattgatgaaattgataggattatttctgaaattgataaaat

SEQ ID NO: 745955 - DNA, 75 bp, synthetic construct
  source 1..75: mol_type = other DNA
ttctgaccaaacgtcgctacacccgggaaaatgcgctcgaccgcgcttatgcctcctttaacgccaaccgtaaca

SEQ ID NO: 745956 - DNA, 75 bp, synthetic construct
  source 1..75: mol_type = other DNA
atgaacgcaaagggctgctgctataataatgcctgcgtggaaagcttctttcattcactgaaagtggaatgtctc

SEQ ID NO: 745957 - DNA, 75 bp, synthetic construct
  source 1..75: mol_type = other DNA
taacagtgctgttaacagtgaatcagaaacagaagcagctacgccaaaagcggtcaagattgcgatggataacgc

SEQ ID NO: 745958 - DNA, 75 bp, synthetic construct
  source 1..75: mol_type = other DNA
gacgtttccgatatcatttccgtcagcatgtaccagcatcactattaccaacgcatacacccgtgctgattactc

SEQ ID NO: 745959 - DNA, 75 bp, synthetic construct
  source 1..75: mol_type = other DNA
aagttcggcggataacatcggtggtgtgtattacaaatccgcgcagatttatatcaatggttcatggcgcaccgt

SEQ ID NO: 745960 - DNA, 75 bp, synthetic construct
  source 1..75: mol_type = other DNA
accgaagttaccacatcgctgtggtgaattatggtggtgggggaaggattcgaaccttcgaagtcgatgacggca

SEQ ID NO: 745961 - DNA, 75 bp, synthetic construct
  source 1..75: mol_type = other DNA
ttcctgaacttgaaatttcaggttatgaattttcttatgcagagtcaataccatattttgcggaaaacagaattg

SEQ ID NO: 745962 - DNA, 75 bp, synthetic construct
  source 1..75: mol_type = other DNA
acaatatttcaaggttacacctaaagagtttagaaaaaataatgaatggggtatggtggaaggttgtgtaactcc

SEQ ID NO: 745963 - DNA, 75 bp, synthetic construct
  source 1..75: mol_type = other DNA
cccgatggttaatgcggtgaatcaggtacgtgcagcgggaatacgcgttataccggttacatcaccaacaagaac

SEQ ID NO: 745964 - DNA, 75 bp, synthetic construct
  source 1..75: mol_type = other DNA
cttcctcggtagtagctgttagtttgactgacaaaactaactcaaacgaagtatctaatggtgcgctaattaatc

SEQ ID NO: 745965 - DNA, 75 bp, synthetic construct
  source 1..75: mol_type = other DNA
accagcacaactgtaaatgttataggaactgtcaacaccgcaacctgtgatgtggttgcaaatacccagtccgta

SEQ ID NO: 745966 - DNA, 75 bp, synthetic construct
  source 1..75: mol_type = other DNA
cgtcatttcactcccacatggatgtcgggcatcaacttctgtcacgaacggtgcaatagtgatccacacccaacg

SEQ ID NO: 745967 - DNA, 75 bp, synthetic construct
  source 1..75: mol_type = other DNA
gcccgatgaagcaagcccgcgtcgcagcagtgccagtggagcgccagctaaagtgatgatgccatcgggtggttt

SEQ ID NO: 745968 - DNA, 75 bp, synthetic construct
  source 1..75: mol_type = other DNA
gaaaggcggcgaagcgatggtgagtcgtgcagccactgtgccgcccgttcaccggattgaggcaccgacgcagat

SEQ ID NO: 745969 - DNA, 75 bp, synthetic construct
  source 1..75: mol_type = other DNA
tggtaaaggatgccataaaactcacctctgatttctacagaacgatatatgatgagttcggtaaacaagcatccg

SEQ ID NO: 745970 - DNA, 75 bp, synthetic construct
  source 1..75: mol_type = other DNA
tctatattctcaacctcgaatcgagtggattttatggcagagtttaatgaatagaaaagaacttgccagaaatgt

SEQ ID NO: 745971 - DNA, 75 bp, synthetic construct
  source 1..75: mol_type = other DNA
aagacttcgaagcaagtaaagataatatttctaaggatgaatgggaaaacctccatgcattaaaagaaatcgttt

SEQ ID NO: 745972 - DNA, 75 bp, synthetic construct
  source 1..75: mol_type = other DNA
attggctatgactcaggtgcagaatcgcaatacgaaagcgatgtagaggctatccgcgccgctggagtcaaagtg

SEQ ID NO: 745973 - DNA, 75 bp, synthetic construct
  source 1..75: mol_type = other DNA
tagtaagcatgccttcgcaactcttcactatggcgcgttcttttaaagccgtagccaatggcaaaatttatatcg

SEQ ID NO: 745974 - DNA, 75 bp, synthetic construct
  source 1..75: mol_type = other DNA
gtctttagttgctcaaacgttgactgtatcaatgtgtaatgctctattattaaattttataaccaaatggactcc

SEQ ID NO: 745975 - DNA, 75 bp, synthetic construct
  source 1..75: mol_type = other DNA
tggccggtattgggattatcgcacagccactcttttttattattttagggcctcaatggattgatgcatctaggc

SEQ ID NO: 745976 - DNA, 75 bp, synthetic construct
  source 1..75: mol_type = other DNA
ttaataagaaaaaatgatcgtacacatattgattatgctacagcattttatttcaatattacagtggcaatctta

SEQ ID NO: 745977 - DNA, 75 bp, synthetic construct
  source 1..75: mol_type = other DNA
gccgccgcagacaaaaaagcggcagcggcaaaagcagcagctgaaaaagccgctgcagcaaaagctgccgcagag

SEQ ID NO: 745978 - DNA, 75 bp, synthetic construct
  source 1..75: mol_type = other DNA
ccatctaaggtattatggaaattcatcaatgattatggtggggaaacaccggagtatttatatacctttaaaagg

SEQ ID NO: 745979 - DNA, 75 bp, synthetic construct
  source 1..75: mol_type = other DNA
aactattatatcttgtgctatcgcatatttgggagcattgaatataagtgataatgcactattacaggtgttatt

SEQ ID NO: 745980 - DNA, 75 bp, synthetic construct
  source 1..75: mol_type = other DNA
cttttttacgtcattacgggcctattcctgctggtgacaacatgtatgatgaactgatacagaccgaaattgaac

SEQ ID NO: 745981 - DNA, 75 bp, synthetic construct
  source 1..75: mol_type = other DNA
acggcaggccgacatcgtttttgcaataggtgatgcactcgactccggcaccatctatgaagtcggttacgcacg

SEQ ID NO: 745982 - DNA, 75 bp, synthetic construct
  source 1..75: mol_type = other DNA
attattctgtaacgatatcgctttctgatgcttcaaatgtttctgttggtgattatatcataattagacatgacg

SEQ ID NO: 745983 - DNA, 75 bp, synthetic construct
  source 1..75: mol_type = other DNA
aactcatcaagtgaaagcaaagctatcgcaatatcgttctgaatatgtcaaagctatttataaagcagcatgtat

SEQ ID NO: 745984 - DNA, 75 bp, synthetic construct
  source 1..75: mol_type = other DNA
ttaccttgcctcgtcaggtggtgatgggcggggtcgtatcgcttctcttttgaattatgagttgccgactattcg

SEQ ID NO: 745985 - DNA, 75 bp, synthetic construct
  source 1..75: mol_type = other DNA
gggttatatctagattttgttgaaggtttaaaaaaaggtagtgacatatctagtataacagaacttttagttcgg

SEQ ID NO: 745986 - DNA, 75 bp, synthetic construct
  source 1..75: mol_type = other DNA
cttatttttgccattttaaatgtaattggactgataataggtattgttaatgtttatagtttgcaagggcatatc

SEQ ID NO: 745987 - DNA, 75 bp, synthetic construct
  source 1..75: mol_type = other DNA
ttgagcgaaatctgggacagtttcggcaaaagccaaatgaagggcatctcttttatggattaatccagaatggaa

SEQ ID NO: 745988 - DNA, 75 bp, synthetic construct
  source 1..75: mol_type = other DNA
gttgttaccagaacggtgattaacgggagatataccgagaacatgtaccgaattatagacaggggcgcacctaaa

SEQ ID NO: 745989 - DNA, 75 bp, synthetic construct
  source 1..75: mol_type = other DNA
tttttgactatttgctgggtttctctaaaaggttattaccagttcttattgtttttgatttctccgatgaagaag

SEQ ID NO: 745990 - DNA, 75 bp, synthetic construct
  source 1..75: mol_type = other DNA
tttttttctccgtagggcttatcgatgctactgtcaccgatattatgtcttatgttctgccgtatctgtttattg

SEQ ID NO: 745991 - DNA, 75 bp, synthetic construct
  source 1..75: mol_type = other DNA
tgcttggctattttcaagtttgttttccacttgaccgcgagattttaccattacctgcagatccaatactcaggc

SEQ ID NO: 745992 - DNA, 75 bp, synthetic construct
  source 1..75: mol_type = other DNA
tattcccgtggcgagcgataacccagcgcactatgcggatgccattcgttataatgctcgaacgcctctgcaagg

SEQ ID NO: 745993 - DNA, 75 bp, synthetic construct
  source 1..75: mol_type = other DNA
taaggaaacttcatggtaagccagcggagaaaaacacgttttatagcgatggcggaaatctgagcgtgaaatatt

SEQ ID NO: 745994 - DNA, 75 bp, synthetic construct
  source 1..75: mol_type = other DNA
tatatggggcttgtgagacgtgcggatgaacaatataaaaataaagaagaggcgagagttatcactttaattgaa

SEQ ID NO: 745995 - DNA, 75 bp, synthetic construct
  source 1..75: mol_type = other DNA
agcaggatctggaagatcagatttccaatatcaaacatggtcgtgaagaagaggatgtgctctacgaggtgctgc

SEQ ID NO: 745996 - DNA, 75 bp, synthetic construct
  source 1..75: mol_type = other DNA
ggccgtgaagagcgttacagctttacctggaatggcaaaagcaaagcccgcatgctggcacaaaccccaagtgcc

SEQ ID NO: 745997 - DNA, 75 bp, synthetic construct
  source 1..75: mol_type = other DNA
ctggtggagaaacgggtgtttggcgcgttgttcggatggatgccgtggcgggagcccctctccctggaatccccc

SEQ ID NO: 745998 - DNA, 75 bp, synthetic construct
  source 1..75: mol_type = other DNA
actactccccaaacctcattaatgctatatgtaatctatatggaaaatcgcgttcttttactatatgctttatat

SEQ ID NO: 745999 - DNA, 75 bp, synthetic construct
  source 1..75: mol_type = other DNA
ctacgataatgcctgcgtggaaagcttctttcattcgctgaaagtggaatgtctccacggagaacactttatcag

SEQ ID NO: 746000 - DNA, 75 bp, synthetic construct
  source 1..75: mol_type = other DNA
acatggcctgcagatggcgctgtggcggcgtaagagaccccggaacgttatcgttcactcggaccgcggaagtca

SEQ ID NO: 746001 - DNA, 75 bp, synthetic construct
  source 1..75: mol_type = other DNA
gatatcgggccgatcttgtcgtattggatagccagaatccctttatcgccagcgcagaagaccagatgttgctca

SEQ ID NO: 746002 - DNA, 75 bp, synthetic construct
  source 1..75: mol_type = other DNA
ttgctaacgggaaatataccgcacaggacgcgaccacagcgcgaaaaggtcttgtccagctcagtagcgccacca

SEQ ID NO: 746003 - DNA, 75 bp, synthetic construct
  source 1..75: mol_type = other DNA
gcagtgaaggcggcatatgaccttgcagcaggtaaggcacctgtcagtcacacgcacccgtggagccagataacg

SEQ ID NO: 746004 - DNA, 75 bp, synthetic construct
  source 1..75: mol_type = other DNA
tagttatcctgtcactatcggcgcaggtggggccggcggcgttagtgcgacgaacggcctcaagggcggtgatag

SEQ ID NO: 746005 - DNA, 75 bp, synthetic construct
  source 1..75: mol_type = other DNA
aatccttcctacttcataaagatgtttaaagattatttcggagttacccctaagcaatatacactctattttaga

SEQ ID NO: 746006 - DNA, 75 bp, synthetic construct
  source 1..75: mol_type = other DNA
aaataaatgagaagaataacaataaacacattacttactttcccgttgatgccattttagatgggaataaacatc

SEQ ID NO: 746007 - DNA, 75 bp, synthetic construct
  source 1..75: mol_type = other DNA
gtcaccatttatgaagacgtcactgacgaaaaactgccaccgcagcatgcgctggacgccattgacgaatccgcc

SEQ ID NO: 746008 - DNA, 75 bp, synthetic construct
  source 1..75: mol_type = other DNA
ccgggtatgccgaacctgcactcccatgccttccagcgggcgatggccgggttaacggaggtggcgggaaacccg

SEQ ID NO: 746009 - DNA, 75 bp, synthetic construct
  source 1..75: mol_type = other DNA
gggaccccccgcattatcaatgggcaacatgcgcagcaacaggccgttgccgctgattttctgcaggtactgcgc

SEQ ID NO: 746010 - DNA, 75 bp, synthetic construct
  source 1..75: mol_type = other DNA
cttcagataagccattatcaattaacataaaaaatgtattagcacataaacacttaataatttatttagatcagt

SEQ ID NO: 746011 - DNA, 75 bp, synthetic construct
  source 1..75: mol_type = other DNA
atgaaaacttgctggcagatcctcgatatatctcaaacgactgacgtcgatattatccgtcgcgcttatctggcc

SEQ ID NO: 746012 - DNA, 75 bp, synthetic construct
  source 1..75: mol_type = other DNA
cggacgtcgcgctgtgatgtactccgccttcctcaggcgaaccagcacctccgcacacggctgtgcgacatcacg

SEQ ID NO: 746013 - DNA, 75 bp, synthetic construct
  source 1..75: mol_type = other DNA
gtgccctgcagatatcggatctttgccataacctgttacgggaggcgcacgcctcccgtcctccttatcagactc

SEQ ID NO: 746014 - DNA, 75 bp, synthetic construct
  source 1..75: mol_type = other DNA
tggctttaaggagcagttcatactgccctacccttgttctaatggccctggaaacagattgcatttgcgagtgtc

SEQ ID NO: 746015 - DNA, 75 bp, synthetic construct
  source 1..75: mol_type = other DNA
cgcatgagtagcataaaggaggaggttcgagcgatagtcagtattatttctgatctaatgattaataatccaaga

SEQ ID NO: 746016 - DNA, 75 bp, synthetic construct
  source 1..75: mol_type = other DNA
ctgccgatatcgcgatgtatcaggagaaaaaacataaacagaaaacaccttttgtcacgcattcagcgctacatt

SEQ ID NO: 746017 - DNA, 75 bp, synthetic construct
  source 1..75: mol_type = other DNA
atgcggatatttcgtcgctgcgagaacgtattcaacaacaaatacgcggagaatatcacttaggtgatgttgatt

SEQ ID NO: 746018 - DNA, 75 bp, synthetic construct
  source 1..75: mol_type = other DNA
cgatattttctttgtctactcagtttcgaaagactgtccttttcttttactacaacaaaattggtaataaaacga

SEQ ID NO: 746019 - DNA, 75 bp, synthetic construct
  source 1..75: mol_type = other DNA
gctatatatagtaaaccttttgtatttttgatttttgggccacaatggcatattactgctgatgtgcttcagtgg

SEQ ID NO: 746020 - DNA, 75 bp, synthetic construct
  source 1..75: mol_type = other DNA
ttgctaatgttattaattttttccctgtcatgtggtctttaatgggtttgttaggggagaatctcaatgtttttt

SEQ ID NO: 746021 - DNA, 75 bp, synthetic construct
  source 1..75: mol_type = other DNA
agtgccagttttcagcgccccgtcacggacagggtgtggtggctgaccagcgcttatgcccagtggtcaccggac

SEQ ID NO: 746022 - DNA, 75 bp, synthetic construct
  source 1..75: mol_type = other DNA
tattaattatttttcgagaaatgctgatagttttataataggtaagtttttgtctgcagcaatattaggtagtta

SEQ ID NO: 746023 - DNA, 75 bp, synthetic construct
  source 1..75: mol_type = other DNA
tgtttcagcaccttttgtctcatctttttatggacaggtgaaactatttccagttttaattttattaagtattac

SEQ ID NO: 746024 - DNA, 75 bp, synthetic construct
  source 1..75: mol_type = other DNA
ttggaagaagtgttaatgccacaactattcaaaagactcttttgaagcttgttatcttttctcgtaagtataaaa

SEQ ID NO: 746025 - DNA, 75 bp, synthetic construct
  source 1..75: mol_type = other DNA
gataagccagcagttcagccgggaacggcaggcgcatccgtcggtggccccgcagtgggtgacgcggacgaatca

SEQ ID NO: 746026 - DNA, 75 bp, synthetic construct
  source 1..75: mol_type = other DNA
cgcgatgataaactgtacagcgtacggcacctggtgtttaacggctttgagctgataagccagcagttcagccgg

SEQ ID NO: 746027 - DNA, 75 bp, synthetic construct
  source 1..75: mol_type = other DNA
ttgaaccgatgaaagagatggcgggatttatcgtgatggtttttcccctcgcccagtttgtcgccatgtttaact

SEQ ID NO: 746028 - DNA, 75 bp, synthetic construct
  source 1..75: mol_type = other DNA
gaatctcgtcccttctgccagcaccgttataacttagcggtaagcgtacagcctgaaccgtctggtcagaatctg

SEQ ID NO: 746029 - DNA, 75 bp, synthetic construct
  source 1..75: mol_type = other DNA
cttcactgcttcacaaaagattatgaacatcagacgaacgaagaaaaacaatcgttaatgtaccacgcgcctaaa

SEQ ID NO: 746030 - DNA, 75 bp, synthetic construct
  source 1..75: mol_type = other DNA
tatgctgatgttgaggcacgactcgcagacgcagctaaggctaatggggaacaaggtgttcttgatgagttagat

SEQ ID NO: 746031 - DNA, 75 bp, synthetic construct
  source 1..75: mol_type = other DNA
tatttaatattcagggagacatcctcataaagccgttattgccaaaagtgacggtagattccagacaattatggc

SEQ ID NO: 746032 - DNA, 75 bp, synthetic construct
  source 1..75: mol_type = other DNA
gcgaaactgtcagagccctgcggcttaaaggatgtgtcaaagacttcgccgccacattctgggcaagaaaacttg

SEQ ID NO: 746033 - DNA, 75 bp, synthetic construct
  source 1..75: mol_type = other DNA
ccacatgggccaccaaaaccggcatgaaatatatccatgatgactggaaagagggaaatgcccgcgaaaaccagg

SEQ ID NO: 746034 - DNA, 75 bp, synthetic construct
  source 1..75: mol_type = other DNA
tgcccgcagacaccggctacccggacccgcgcggggaactggacccggaagccgcccccggcctgctgtatgcgg

SEQ ID NO: 746035 - DNA, 75 bp, synthetic construct
  source 1..75: mol_type = other DNA
tatggactagggagtgcagaaacgcacgttaaggatttcatgataagacacaaaaaatgcttgggttatctgatg

SEQ ID NO: 746036 - DNA, 75 bp, synthetic construct
  source 1..75: mol_type = other DNA
tagtagaccagtacaacctggtcgccaggcgaagaagttcagacaatgtgcccgatgtcggtattcgtattgaaa

SEQ ID NO: 746037 - DNA, 75 bp, synthetic construct
  source 1..75: mol_type = other DNA
atcaatatggcgcactttaataatggtaaacctagtgagaagactctgtctgaaatacaattattaatgacacgc

SEQ ID NO: 746038 - DNA, 75 bp, synthetic construct
  source 1..75: mol_type = other DNA
acacaaaaaagcggcgtcagaaatcagctttaagttcgcgttccagtttatcgcgacagaaatgatagtactggg

SEQ ID NO: 746039 - DNA, 75 bp, synthetic construct
  source 1..75: mol_type = other DNA
cgtaccagggcttattttactgctggtttgccgccagacgcttgaatatacacgagtaaatgacaactttatctc

SEQ ID NO: 746040 - DNA, 75 bp, synthetic construct
  source 1..75: mol_type = other DNA
catcacaaaaattgatgctacaagagagctaagtgatgatgaaaaaatattattctggatggagtcgcatcttgt

SEQ ID NO: 746041 - DNA, 75 bp, synthetic construct
  source 1..75: mol_type = other DNA
tttatcgagcagagcctcaggattgcaggtatttttcaggttactggtgaccctgattcgacagagattgtaagg

SEQ ID NO: 746042 - DNA, 75 bp, synthetic construct
  source 1..75: mol_type = other DNA
gataccatcgccagagttgtatcctgtatcagtcctgcaaaatttcacgagtgctttattaactggatgcgtgac

SEQ ID NO: 746043 - DNA, 75 bp, synthetic construct
  source 1..75: mol_type = other DNA
atgatcaataaagctacaactcttgactgtcttgaagaactgaaaaacctcggcagtctcattacactaatagcc

SEQ ID NO: 746044 - DNA, 75 bp, synthetic construct
  source 1..75: mol_type = other DNA
ctagcgatatagagtcatgcgcaggactggcatgggatatgacaaatagcatatccagaaagctatcgtcagcaa

SEQ ID NO: 746045 - DNA, 75 bp, synthetic construct
  source 1..75: mol_type = other DNA
atgatcaataaagctacaactcttgactgtctcgaagaactgaaaaacctcggcagcctcattacactaatagca

SEQ ID NO: 746046 - DNA, 75 bp, synthetic construct
  source 1..75: mol_type = other DNA
gcattgttcggcggaattttgatgcagcgcctgtcattgttccgtgcgctcatgattttcggtattttacaaggc

SEQ ID NO: 746047 - DNA, 75 bp, synthetic construct
  source 1..75: mol_type = other DNA
ctgttaactggtgaggttactcctccggagcaaccaaaaagtgaggagcagcaacaccatgacgcatctcaacaa

SEQ ID NO: 746048 - DNA, 75 bp, synthetic construct
  source 1..75: mol_type = other DNA
tgcttttacagaacaaaaattctgcaatcaacaaccgtcttcgcacccaacgcgaagcctgcggcttaacaaccg

SEQ ID NO: 746049 - DNA, 75 bp, synthetic construct
  source 1..75: mol_type = other DNA
gatagacagggcatccagtgaaagttttgttattgaaaattatgtattttcatgttttttaatgatgcaacctca

SEQ ID NO: 746050 - DNA, 75 bp, synthetic construct
  source 1..75: mol_type = other DNA
ataaaggccgcctgacgggcgaacggcagacggtggagaacccggagacgggggagatactgtgggagcatgaga

SEQ ID NO: 746051 - DNA, 75 bp, synthetic construct
  source 1..75: mol_type = other DNA
ctgccagaaacttccagcgcattatgggtgatattgacaagcctgtaccaaagcctatgacgctggctgaactgg

SEQ ID NO: 746052 - DNA, 75 bp, synthetic construct
  source 1..75: mol_type = other DNA
gcatgggttggctcgattctgagtggcatggcagtagattacttttcggtggatggcgtaaaagactggcaaact

SEQ ID NO: 746053 - DNA, 75 bp, synthetic construct
  source 1..75: mol_type = other DNA
atggctaaagaatattcatacgatcccacaggccctgtaaaaacccgggatttgcgggtgtgcaaattttatgca

SEQ ID NO: 746054 - DNA, 75 bp, synthetic construct
  source 1..75: mol_type = other DNA
gcaggataaaaatggcaacccattaaaagataaagaaatcaccttctctgtgccaaacgacgtcgcaagtcggtt

SEQ ID NO: 746055 - DNA, 75 bp, synthetic construct
  source 1..75: mol_type = other DNA
aaagtcgttaagaatttaagccgccgctttgaagcggaacagtatgacccacagcgggtacgtgcagcggcttac

SEQ ID NO: 746056 - DNA, 75 bp, synthetic construct
  source 1..75: mol_type = other DNA
taacccaagctgtttttcctagagtaacttatataatgaaggataatcatgacgatggactattattagccagga

SEQ ID NO: 746057 - DNA, 75 bp, synthetic construct
  source 1..75: mol_type = other DNA
gttattgcaggtataatatctacatattttttattttctcttaaaaaaataatatgggtaccaccatccttatcc

SEQ ID NO: 746058 - DNA, 75 bp, synthetic construct
  source 1..75: mol_type = other DNA
tcggatctaacttctacgaaaataatgcagccagaaactttggttggagttctcaatctatccaatacaagtatt

SEQ ID NO: 746059 - DNA, 75 bp, synthetic construct
  source 1..75: mol_type = other DNA
ttgtttatggctgtgcattcgatttcttcaatatttctggttcggtatttgtcgaacaggaagttgattccagca

SEQ ID NO: 746060 - DNA, 75 bp, synthetic construct
  source 1..75: mol_type = other DNA
tagttgtttgcggtcttgcgtggcagggagcaggcatctttaacttgcctttcacagtgatgctatggactatca

SEQ ID NO: 746061 - DNA, 75 bp, synthetic construct
  source 1..75: mol_type = other DNA
cacgaagaatttgtagaagtgctttgctactgcgactaacaacacttcctttatctgaaatatccaatcggctgt

SEQ ID NO: 746062 - DNA, 75 bp, synthetic construct
  source 1..75: mol_type = other DNA
gaaagcagtatttgccaaggcaaaagcggatttactgggcgagttcgccactatcgggcgacgtgaagctcatcc

SEQ ID NO: 746063 - DNA, 75 bp, synthetic construct
  source 1..75: mol_type = other DNA
gactgcgtcctacgtgaagcgccgcgaggggtacaactatttcgcccttcagcaggactacagagagacgcagat

SEQ ID NO: 746064 - DNA, 75 bp, synthetic construct
  source 1..75: mol_type = other DNA
gtgaaaactggcaaggttacaggggtgtaccaggccagaattcacgtagcgcaacttccctttctgtgtattctt

SEQ ID NO: 746065 - DNA, 75 bp, synthetic construct
  source 1..75: mol_type = other DNA
gaatactgggaaaaacgctgggcggcagcctgccagcccacaaggaaaccgtacaaactcgcccgtttctcctga

SEQ ID NO: 746066 - DNA, 75 bp, synthetic construct
  source 1..75: mol_type = other DNA
gaaacctgcccggcggcacgccggaaacggcggtacagcaaagcgaattactctacgccggggcgaatcgtcata

SEQ ID NO: 746067 - DNA, 75 bp, synthetic construct
  source 1..75: mol_type = other DNA
ataaccgataatcctcgtcatttgcagattatggaactcgagggggcgcagctcccgcgcgtactggatgatccc

SEQ ID NO: 746068 - DNA, 75 bp, synthetic construct
  source 1..75: mol_type = other DNA
gttacatcgcaaactgttgcgctggtacagctcggtgcaaacaggtatggcggaactcattcctgtagccaaaca

SEQ ID NO: 746069 - DNA, 75 bp, synthetic construct
  source 1..75: mol_type = other DNA
tgtgctgacaactgtattagcttcatacctgatgagatgctggagagcctgactcgcctgaaagtatttgactgt

SEQ ID NO: 746070 - DNA, 75 bp, synthetic construct
  source 1..75: mol_type = other DNA
ttgctaacagcattggatcttatgaataaagcagttgatgagtcaatgaatattcttcctgtaaaactctctcca

SEQ ID NO: 746071 - DNA, 75 bp, synthetic construct
  source 1..75: mol_type = other DNA
ctacagttatctgacaggggggactgtcggggcgccatcttcatctgaccatattattgcaagtagtcccggaaa

SEQ ID NO: 746072 - DNA, 75 bp, synthetic construct
  source 1..75: mol_type = other DNA
tcacttagctatttttcatgtaaagccgcagaggctgaactcggactggcatatatggctgctaatgataacaag

SEQ ID NO: 746073 - DNA, 75 bp, synthetic construct
  source 1..75: mol_type = other DNA
gattatttgtgctgtcatcgctgatgcagaaggttgggaagatatagagtatttttgcgaaacgcaactcgattt

SEQ ID NO: 746074 - DNA, 75 bp, synthetic construct
  source 1..75: mol_type = other DNA
ttgatacggacgccgcgcaaaaaagcgccgggcgtactggctgtcattaccgccagtaacgccggggcactcggc

SEQ ID NO: 746075 - DNA, 75 bp, synthetic construct
  source 1..75: mol_type = other DNA
tccgtgtggttagcgagtattttgactgtctttatctggggcattacggctgcctgtgaagcaacaacactggaa

SEQ ID NO: 746076 - DNA, 75 bp, synthetic construct
  source 1..75: mol_type = other DNA
ccgcaatggcgctgatttgctcttgtagtaatagggttatcccaccagtcagacagttatattcatatattttct

SEQ ID NO: 746077 - DNA, 75 bp, synthetic construct
  source 1..75: mol_type = other DNA
attgccgcattcagtttcgagacgattggctataccagttttacaaatatggtaaagccaatcgaaagattccaa

SEQ ID NO: 746078 - DNA, 75 bp, synthetic construct
  source 1..75: mol_type = other DNA
cgtcagttaaagcggaggaggcatcagccagtgccaccgccgccggaaaatcggcagaaagtgccgcatcgtccg

SEQ ID NO: 746079 - DNA, 75 bp, synthetic construct
  source 1..75: mol_type = other DNA
aagctaataaactccttgtaagtactatatggggagtgtttgttcgttatcaaaaatggaagaaaaaattcagtg

SEQ ID NO: 746080 - DNA, 75 bp, synthetic construct
  source 1..75: mol_type = other DNA
acaaccgaaacacaagcacaatttgcttcatttggtgcatctgcaacgactacgatgggtcttgaagggtcagaa

SEQ ID NO: 746081 - DNA, 75 bp, synthetic construct
  source 1..75: mol_type = other DNA
taatatgaccaagctgaaaggtcttaacccaattgtcgagaaatacattaagagtcagttttacgcattaagtag

SEQ ID NO: 746082 - DNA, 75 bp, synthetic construct
  source 1..75: mol_type = other DNA
gatgtgaaagtactgtacgcctgtgaatcagggagccgcggctggggatttgcctcgcccgacagcgactacgat

SEQ ID NO: 746083 - DNA, 75 bp, synthetic construct
  source 1..75: mol_type = other DNA
ctgcccttatcgggcatcatcaggcgctggaaaaacgagtgagcacgctgactgaggagtttcaggctgcctccg

SEQ ID NO: 746084 - DNA, 75 bp, synthetic construct
  source 1..75: mol_type = other DNA
aaagccagaggtcatacatccaccagcattaatagtgacaaagcagctagttctcttgatagtctgtcttcagca

SEQ ID NO: 746085 - DNA, 75 bp, synthetic construct
  source 1..75: mol_type = other DNA
tggataattctaagtttaatgaatcccttgctaaactaaatgcttcattaagagaagcgcttgttaaagccaaag

SEQ ID NO: 746086 - DNA, 75 bp, synthetic construct
  source 1..75: mol_type = other DNA
gaagcggtacccgcctgcttgatcatcttggcaggatattcagcattcaggattacgtctggcatcccatgccgg

SEQ ID NO: 746087 - DNA, 75 bp, synthetic construct
  source 1..75: mol_type = other DNA
agtattaggtggtgattttaagtttttggactattatagtactactaataatataaatcctaaaatgatacgact

SEQ ID NO: 746088 - DNA, 75 bp, synthetic construct
  source 1..75: mol_type = other DNA
accaataaaaaggtagtaaagaacaacttcaaaaagctacctcatatattagctataggaagcgttctttcaagt

SEQ ID NO: 746089 - DNA, 75 bp, synthetic construct
  source 1..75: mol_type = other DNA
atggtaaagttatagatggtggtatggtcgcaccatttagccatcgccaacaatcatggtgtaaatcgcaagggg

SEQ ID NO: 746090 - DNA, 75 bp, synthetic construct
  source 1..75: mol_type = other DNA
ctttaatagcaccaataaccagccagggcagattgttgttttaccggaaaaatccggctgggtaggtgtgtcagc

SEQ ID NO: 746091 - DNA, 75 bp, synthetic construct
  source 1..75: mol_type = other DNA
aataggcggggtggtgaatatcatcacgacgcgcgatgaacccggaacggaaatttcagcagggtggggaagcaa

SEQ ID NO: 746092 - DNA, 75 bp, synthetic construct
  source 1..75: mol_type = other DNA
attggaatacgtaatgtatcgaatgggaaacttgaaagacaaaagtttcttttcccactggactatgagaataaa

SEQ ID NO: 746093 - DNA, 75 bp, synthetic construct
  source 1..75: mol_type = other DNA
cggtatagacctaaggcgcaagatggggaagactttcggagtcatttacaatataagttgcctctttccgctcat

SEQ ID NO: 746094 - DNA, 75 bp, synthetic construct
  source 1..75: mol_type = other DNA
aatgcattcatcgcattacaacgatatttgtagtgtaagtgtggatatgacaaaaggcaagcaatgcatgattca

SEQ ID NO: 746095 - DNA, 75 bp, synthetic construct
  source 1..75: mol_type = other DNA
cgagcaaaaaatttctggtgaatgcctcccggtaaaaaaagtatcgctgtacctgaataacgaaacaccggctgg

SEQ ID NO: 746096 - DNA, 75 bp, synthetic construct
  source 1..75: mol_type = other DNA
accgacaccattcctgtgcccaaaacgctggaacaagcggttgttgcacctctgcgagatttctttggtcgcaat

SEQ ID NO: 746097 - DNA, 75 bp, synthetic construct
  source 1..75: mol_type = other DNA
gaatggaaaacttgaaagacaacagtttcttttcccactggactatgagaataaattacaagatcaattagacaa

SEQ ID NO: 746098 - DNA, 75 bp, synthetic construct
  source 1..75: mol_type = other DNA
gtgaacctgaccgggggaaccagctccaaaacgtctgccagccagtacgcgctgtttgtggaagatgaatggcgg

SEQ ID NO: 746099 - DNA, 75 bp, synthetic construct
  source 1..75: mol_type = other DNA
acacctacgaacaaaaatacggtctgcgcgattatcgcggcggtggacgttcttccgcccgcgaaaccgccatgc

SEQ ID NO: 746100 - DNA, 75 bp, synthetic construct
  source 1..75: mol_type = other DNA
gatatgataaaaaaagtgaaaaacaagattttgatgtatttactggcttaacagccacatatacacatagtaatg

SEQ ID NO: 746101 - DNA, 75 bp, synthetic construct
  source 1..75: mol_type = other DNA
catcctcacaggaaaagctaaatctacctctgattgaagctccgctaaacactaagttagatatatttaaaccag

SEQ ID NO: 746102 - DNA, 75 bp, synthetic construct
  source 1..75: mol_type = other DNA
taacccacaatctggcggggtgttagtccccgtccggttcaggtacaaggtgcgcgactatacgaaggggtgcga

SEQ ID NO: 746103 - DNA, 75 bp, synthetic construct
  source 1..75: mol_type = other DNA
cgctcactcgtttccggatttttgtgcacagaaaaaccccagctaggctgggggccggaaagctttcagctttga

SEQ ID NO: 746104 - DNA, 75 bp, synthetic construct
  source 1..75: mol_type = other DNA
tacaaaaacattactaggacataaagtccaggcaaccaccgaccgctataacgatactcgaggtcaggaatgggt

SEQ ID NO: 746105 - DNA, 75 bp, synthetic construct
  source 1..75: mol_type = other DNA
aaaatttggatgcttggtatgtatatgatgggaatccgtgtcaaaaaattaaaaaaagggtgatggaaaatgagt

SEQ ID NO: 746106 - DNA, 75 bp, synthetic construct
  source 1..75: mol_type = other DNA
gatggtattgccagacggcgaggatgtaaaggttaagatggcggatgctggttttcttgagcgagtaaatttaaa

SEQ ID NO: 746107 - DNA, 75 bp, synthetic construct
  source 1..75: mol_type = other DNA
gcaacaactagggttagtattaaggcaattcaggaaggatcttttactgttcttgtctctgttttgggtagttta

SEQ ID NO: 746108 - DNA, 75 bp, synthetic construct
  source 1..75: mol_type = other DNA
aaaatggtcactttccggggattcagaagttgattctttaataatcagcaatacttctgttggatatcatgccaa

SEQ ID NO: 746109 - DNA, 75 bp, synthetic construct
  source 1..75: mol_type = other DNA
agagctgtcgctaagagaaatttatcttcatggtctgtatacgatggtaacccatgtaataaacttaaagaaaga

SEQ ID NO: 746110 - DNA, 75 bp, synthetic construct
  source 1..75: mol_type = other DNA
actttagctttaaaaataaattacatcgcttaatttggggaggggtgtatataatattttttaaatattctcctg

SEQ ID NO: 746111 - DNA, 75 bp, synthetic construct
  source 1..75: mol_type = other DNA
tctacttgcatctgatattagcaataaatgctgatagtgatctcatgaaaaatgatgagttgctagcggaaaata

SEQ ID NO: 746112 - DNA, 75 bp, synthetic construct
  source 1..75: mol_type = other DNA
ttgaaagatttgaccggcagctttaacagtggattgtggtttgttgccgcgctgctggtgattggtgcggggatt

SEQ ID NO: 746113 - DNA, 75 bp, synthetic construct
  source 1..75: mol_type = other DNA
cacaggaaaaaattcagtatttatcttagacttggaaaaacatgggcatcatctcagaataaatctattgtcatt

SEQ ID NO: 746114 - DNA, 75 bp, synthetic construct
  source 1..75: mol_type = other DNA
atgcctactttagcgaaaatgatgaacttcaaattacctacagaccgtactttcgatggtgaatcgctggttcct

SEQ ID NO: 746115 - DNA, 75 bp, synthetic construct
  source 1..75: mol_type = other DNA
tacctaaaagcgcccgcattttgaggtctatttcttttttcgtgttcttcttatttatcgagaaatctttagtga

SEQ ID NO: 746116 - DNA, 75 bp, synthetic construct
  source 1..75: mol_type = other DNA
aaataagatgtacatcagcgacagttgagtctatttcgaaaacatcacccggcaaaacagttgtattagccacac

SEQ ID NO: 746117 - DNA, 75 bp, synthetic construct
  source 1..75: mol_type = other DNA
aaaaccgaaacgcctgaagagaaggcggctcgcgaaaaggctgagaaagaagagcgtgagcgcgcaaataaccag

SEQ ID NO: 746118 - DNA, 75 bp, synthetic construct
  source 1..75: mol_type = other DNA
gaagtaaattattacccttttcagaaacttttataaaagagcaggtgttatcctattcaaaatgggaacctgtat

SEQ ID NO: 746119 - DNA, 75 bp, synthetic construct
  source 1..75: mol_type = other DNA
atatgctggagaaactgattaatgagtactatcaggaacatttttgcaggcaacacaaccacacagaaacagaaa

SEQ ID NO: 746120 - DNA, 75 bp, synthetic construct
  source 1..75: mol_type = other DNA
tgattaatgagtactaccaggagcattattgcaggcagcacaaccacacagaaacagaaaacccgactgacgaca

SEQ ID NO: 746121 - DNA, 75 bp, synthetic construct
  source 1..75: mol_type = other DNA
cctgaacttcttaacatgatggatattaaaggaaaaatcatcacaactgatgcgatgggctgccagaaagatatt

SEQ ID NO: 746122 - DNA, 75 bp, synthetic construct
  source 1..75: mol_type = other DNA
aggcgcaagtactatagaccaacagtttgttagaacaataactaagagatatgagaaaacagttcgaagaaaaat

SEQ ID NO: 746123 - DNA, 75 bp, synthetic construct
  source 1..75: mol_type = other DNA
aggaacgatttaaacataggtcgctctatctttccactttatataaattaaatgcacaaagggatatgatttttt

SEQ ID NO: 746124 - DNA, 75 bp, synthetic construct
  source 1..75: mol_type = other DNA
gcattcttgagtcggccgaaggtaagctgtttaacattgccgaacagggagccatgcagctcaacagtgagaccg

SEQ ID NO: 746125 - DNA, 75 bp, synthetic construct
  source 1..75: mol_type = other DNA
agtggctcacggaacagcaggccggtgaaatctggcggcaatatgtgccgcatcagttcctgttcgccgaaatac

SEQ ID NO: 746126 - DNA, 75 bp, synthetic construct
  source 1..75: mol_type = other DNA
attattccggcgcaatcaaaatgtatgccgtttatttataacctgagcatgttggttagcccaactgagcacagt

SEQ ID NO: 746127 - DNA, 75 bp, synthetic construct
  source 1..75: mol_type = other DNA
aactcatcggcatgatcgcacaggaagaatgcgaaggcattgaggctggcgatcgcgtgctggtggaaggtcaag

SEQ ID NO: 746128 - DNA, 75 bp, synthetic construct
  source 1..75: mol_type = other DNA
ataacgtgaaggttgctgcggatgctttccttgaaatactttattctcttaaaaataaatattgtattaaactat

SEQ ID NO: 746129 - DNA, 75 bp, synthetic construct
  source 1..75: mol_type = other DNA
tattcagcaaataattattttaattctttttttagtagtgctttcgaaactggtactaaaacataccttggtaca

SEQ ID NO: 746130 - DNA, 75 bp, synthetic construct
  source 1..75: mol_type = other DNA
ggaaacttgaaagacaaaaatttcttttcccactggactatgagaataaattacaacatcaattagacaagtatt

SEQ ID NO: 746131 - DNA, 75 bp, synthetic construct
  source 1..75: mol_type = other DNA
gctaatggtaccttttaccttctttcttgatcctattcccgccctggcattaatgattgccgttggtgcgtcatc

SEQ ID NO: 746132 - DNA, 75 bp, synthetic construct
  source 1..75: mol_type = other DNA
cgtgattggatcacttattttgatgttggctgcgcctgtactggcgaaatttgcccttaattttagttcttatga

SEQ ID NO: 746133 - DNA, 75 bp, synthetic construct
  source 1..75: mol_type = other DNA
catttctcaattttgcactgctttttgacgaacaggccagggaaagcccagacggcaacgggtttgctgttaaat

SEQ ID NO: 746134 - DNA, 75 bp, synthetic construct
  source 1..75: mol_type = other DNA
gttatataaaaaagtttttgatttaaaataccaaagtttcagtaaaaaaaacaaaactgattttgaacaggcatg

SEQ ID NO: 746135 - DNA, 75 bp, synthetic construct
  source 1..75: mol_type = other DNA
aatatttgagaacacagattcttataccctaagaaaacactttcgtaactcgctgaaaaaacatagggctaatga

SEQ ID NO: 746136 - DNA, 75 bp, synthetic construct
  source 1..75: mol_type = other DNA
ctgaagtatgggaagcatttgaagcgctaccttcgcaaacccgaccacagaaaggagccagacctgccagacgtc

SEQ ID NO: 746137 - DNA, 75 bp, synthetic construct
  source 1..75: mol_type = other DNA
aatggcaatgggcaatatcaaagacagtatatggcacattttgcggaagcgaatttgaatgcgcaactgaagatg

SEQ ID NO: 746138 - DNA, 75 bp, synthetic construct
  source 1..75: mol_type = other DNA
cactggaagcgcgtggtctgtaccggagagcggcggcgcggtgggctgaggtcatcatgctggcgaatgatgaca

SEQ ID NO: 746139 - DNA, 75 bp, synthetic construct
  source 1..75: mol_type = other DNA
atggtgcatgatgacaaagcggaagaactggaagcgaaaggtttatggcgacgggcggctaatcgctggggtgag

SEQ ID NO: 746140 - DNA, 75 bp, synthetic construct
  source 1..75: mol_type = other DNA
cgggaagctgggttgaatcaggtggcgtgtataccacaacccgaatggcgacgattgccagtaccaatcagcacg

SEQ ID NO: 746141 - DNA, 75 bp, synthetic construct
  source 1..75: mol_type = other DNA
gtggctggcactgacccgtcagaaacgggaagctgggttgaatcaggtggcgtgtataccacaacccgaatggcg

SEQ ID NO: 746142 - DNA, 75 bp, synthetic construct
  source 1..75: mol_type = other DNA
cttggttcacagcttcgtatacgagaagttttagtagtggaaggggcggatttacctgtcagtgctttattagtt

SEQ ID NO: 746143 - DNA, 75 bp, synthetic construct
  source 1..75: mol_type = other DNA
ttaaaagaaattgaagttttctatcttaacctaaaatcccttggttttatttctgggctaaaaaatttaaattat

SEQ ID NO: 746144 - DNA, 75 bp, synthetic construct
  source 1..75: mol_type = other DNA
aatctgtgctgacaggaccaaatatcgttgcattaacaaacattgaacatattcatgatcagggatatgatgttt

SEQ ID NO: 746145 - DNA, 75 bp, synthetic construct
  source 1..75: mol_type = other DNA
ccgcaggaaaccacctacaaatatctgcaaagcctgaaacccgatccacgcaaagtacgtacgtcggaatttcct

SEQ ID NO: 746146 - DNA, 75 bp, synthetic construct
  source 1..75: mol_type = other DNA
tgaactgtatgacaaaccggaagcagttcagaaggcgctggaaaaagttattccttttttcaacacccatctggg

SEQ ID NO: 746147 - DNA, 75 bp, synthetic construct
  source 1..75: mol_type = other DNA
atgttgttctcacatgcacagaaaacgctggcctgggatgccttcgcatttactgaagtgttactgactcagccg

SEQ ID NO: 746148 - DNA, 75 bp, synthetic construct
  source 1..75: mol_type = other DNA
tgcaggcatcagagccagcgacgggcagtaaggtgttatcgcttctggaaagcagtaaacgatatctctggcacg

SEQ ID NO: 746149 - DNA, 75 bp, synthetic construct
  source 1..75: mol_type = other DNA
gacatacagtccggttctccggcgcaagccacatcaactatcgctacggataaaaacgcctacaccgctggtgac

SEQ ID NO: 746150 - DNA, 75 bp, synthetic construct
  source 1..75: mol_type = other DNA
ttgtgatcaggatgacttgtggttgccaaataaaatgcacatctttatggatagattcaacatcgaagaagttaa

SEQ ID NO: 746151 - DNA, 75 bp, synthetic construct
  source 1..75: mol_type = other DNA
cgatgcacaattggagatcgcaacattacatcggccaagtttgatgatcttcggatacctcaaggcattgccatc

SEQ ID NO: 746152 - DNA, 75 bp, synthetic construct
  source 1..75: mol_type = other DNA
gcgggctgttgtggccatcgccgccaaaaatgcgcggctgtgttgggcatcactacattacggtgatgatttccg

SEQ ID NO: 746153 - DNA, 75 bp, synthetic construct
  source 1..75: mol_type = other DNA
attatgattatacactagtttgctcaaaaaaaggtccactaacaaaagcattgctggaatatgatgtcgattgtc

SEQ ID NO: 746154 - DNA, 75 bp, synthetic construct
  source 1..75: mol_type = other DNA
ttgtttatggagaaatgcgtcgagtacggtaaaactctcgcggtcgccggggaaaccagtacagggaaaactacc

SEQ ID NO: 746155 - DNA, 75 bp, synthetic construct
  source 1..75: mol_type = other DNA
atcagcaaaggaaacttgcctgtgtctggaatccctttcttgatggttgggaactgaacgctcagcatgtagata

SEQ ID NO: 746156 - DNA, 75 bp, synthetic construct
  source 1..75: mol_type = other DNA
acttcatctttaccactgtgaccaccgtgggctgccgctggcgcttatcagcccggaaggggaaacggcgtggca

SEQ ID NO: 746157 - DNA, 75 bp, synthetic construct
  source 1..75: mol_type = other DNA
gttgtcacactcggtcaatatcgtaccgatattttcaatgctgttggtaatacctctgcattaattccattcacc

SEQ ID NO: 746158 - DNA, 75 bp, synthetic construct
  source 1..75: mol_type = other DNA
agggggcgagtccttattgtctggtgataacgtaacagtagaaggagccgtacgttcaggaggatggtctgaaac

SEQ ID NO: 746159 - DNA, 75 bp, synthetic construct
  source 1..75: mol_type = other DNA
atgctgcaacaacacgctcctgccgagatgcatattcttccgcaacaggcgatacgcgatccctttgtgctcgaa

SEQ ID NO: 746160 - DNA, 75 bp, synthetic construct
  source 1..75: mol_type = other DNA
acattaaaagtgtgaagacaatagctatatatcatgggtatgatgtaagtgtgaaaaaaattcttgaaaaatggc

SEQ ID NO: 746161 - DNA, 75 bp, synthetic construct
  source 1..75: mol_type = other DNA
atgtgcacgtccgcatcccgtcagcactgacggaagaagccctggagcagatcggtcagttgtacgccatagagg

SEQ ID NO: 746162 - DNA, 75 bp, synthetic construct
  source 1..75: mol_type = other DNA
ttttgtacgccagtcgatgaaacttgcgctgaaccatgtcctgcttgttggcgcaacggaaggcggcaactacta

SEQ ID NO: 746163 - DNA, 75 bp, synthetic construct
  source 1..75: mol_type = other DNA
gaaggaaaatacggccagcgcctttacagcctgaccagctacggaatgcgcttcgcccctgacacgatacttggc

SEQ ID NO: 746164 - DNA, 75 bp, synthetic construct
  source 1..75: mol_type = other DNA
ttcagcggacggacacaaatgtgatctgccaggagtgccgcaacagcgcggcgatgagaagggtattgatggttt

SEQ ID NO: 746165 - DNA, 75 bp, synthetic construct
  source 1..75: mol_type = other DNA
gagcaagaacaaatgcttaaggacatgaaagacaaaaaagaatcaatggatcgcaccgttgcaagatggctcgcc

SEQ ID NO: 746166 - DNA, 75 bp, synthetic construct
  source 1..75: mol_type = other DNA
tctttttattacttactggtctgtgtgttggtagctttttaaatgtggtaatttatcgcatcccaaaatcaatca

SEQ ID NO: 746167 - DNA, 75 bp, synthetic construct
  source 1..75: mol_type = other DNA
actctcagtacgattgttcagttatttatttttatccgtaaaaaggaggggttgggagcaggtgatattaagctt

SEQ ID NO: 746168 - DNA, 75 bp, synthetic construct
  source 1..75: mol_type = other DNA
atcatttgctattgccagacagtcttgtttatatcatgctttgggggggggtcttggctgcggcatttgagttat

SEQ ID NO: 746169 - DNA, 75 bp, synthetic construct
  source 1..75: mol_type = other DNA
tttacaggtacaccaactttcaattatcgtattaaatctgatagtggtattgattgtacaggtaatattgatatc

SEQ ID NO: 746170 - DNA, 75 bp, synthetic construct
  source 1..75: mol_type = other DNA
gttactgttggtgaagtggcacaattaatttaccgatttaaagaaagtcgccaaacattaatcaccgaagatgta

SEQ ID NO: 746171 - DNA, 75 bp, synthetic construct
  source 1..75: mol_type = other DNA
agataaaaatacactggaatgaaattctgagactggcgacctcaataaaacagggaacagtgaccgcttctctga

SEQ ID NO: 746172 - DNA, 75 bp, synthetic construct
  source 1..75: mol_type = other DNA
gtcactgagctggaaaccgccttcgcacagctaaagcaggacgtgaccagccagaccacgcaaagcgcgcaggcg

SEQ ID NO: 746173 - DNA, 75 bp, synthetic construct
  source 1..75: mol_type = other DNA
tgaactggtgagcatggtgcgtgccggtcagaaggtttacacctccatggaaattcgcccgaatttctcaaataa

SEQ ID NO: 746174 - DNA, 75 bp, synthetic construct
  source 1..75: mol_type = other DNA
gacgacagcattcagaacctgaaaaccacctggctgatatccggggtgacctggacagatggtgcacaggggcgg

SEQ ID NO: 746175 - DNA, 75 bp, synthetic construct
  source 1..75: mol_type = other DNA
actaaatgtgataataaaattcttaaaagggataatataccagtaataagctggtttctattaaaaggtaaatgc

SEQ ID NO: 746176 - DNA, 75 bp, synthetic construct
  source 1..75: mol_type = other DNA
ttgcagttattaagcacagggggtagcaatgataacattcttcattttattaatgcatttctcattcgggtgaaa

SEQ ID NO: 746177 - DNA, 75 bp, synthetic construct
  source 1..75: mol_type = other DNA
atggcaaggaggcagattctttctctatcggaaagagaatcattactggcattgccagacgatgagttaacactg

SEQ ID NO: 746178 - DNA, 75 bp, synthetic construct
  source 1..75: mol_type = other DNA
ttaagcgattttcctgaccgagtgatcaatgttgggatcagggaacaactgatgattgacatgacaggcggtttg

SEQ ID NO: 746179 - DNA, 75 bp, synthetic construct
  source 1..75: mol_type = other DNA
gtgaactataacgcttgctttggttttgtcgcctctgccgctggtttgcttaacctcgccgtgattactgactgc

SEQ ID NO: 746180 - DNA, 75 bp, synthetic construct
  source 1..75: mol_type = other DNA
cgggcatctctgctggcgatattgatttggtatgtggtaccagcaacggtagcgatgaccattctcgtatcgaaa

SEQ ID NO: 746181 - DNA, 75 bp, synthetic construct
  source 1..75: mol_type = other DNA
tgttatcgattcactggataacgcagcgctctgggcctacaaagtgggtaaagatgcgctgagtcaggccggcct

SEQ ID NO: 746182 - DNA, 75 bp, synthetic construct
  source 1..75: mol_type = other DNA
aacgcaatcctgccatgtgattccttttggtcctgcaatttcactttcagggtttgttgtttatttgttaactgt

SEQ ID NO: 746183 - DNA, 75 bp, synthetic construct
  source 1..75: mol_type = other DNA
tctcttaccttagttgcacatatatttactattatttggaaaaaagatggtttaggtgcaggtgacgttaaatta

SEQ ID NO: 746184 - DNA, 75 bp, synthetic construct
  source 1..75: mol_type = other DNA
atcatttattgttaccagatagcttggtttacacattgttatgggctggattactgattgcaagctttgatatgt

SEQ ID NO: 746185 - DNA, 75 bp, synthetic construct
  source 1..75: mol_type = other DNA
aaaatggaaaagagaatagaatatgatttagaatatataagagaatggagtatatggtttgatttaaaaataatt

SEQ ID NO: 746186 - DNA, 75 bp, synthetic construct
  source 1..75: mol_type = other DNA
tgcctaaaactaatgcttccttgatttcaatttttcaaagattctccgatatcacaatcatattcttatcattat

SEQ ID NO: 746187 - DNA, 75 bp, synthetic construct
  source 1..75: mol_type = other DNA
gatgaatttatcattgtcctgactgaagcttctgaaaacgaaacgttacgtactgcagaacgtattcgcagtcgg

SEQ ID NO: 746188 - DNA, 75 bp, synthetic construct
  source 1..75: mol_type = other DNA
cctaccttattacaacgcactattgaaattgctaatcgtatttggtgcaagaacacaagagattcgtctttcaac

SEQ ID NO: 746189 - DNA, 75 bp, synthetic construct
  source 1..75: mol_type = other DNA
atatcaaacctcattgtcaataatggttacagggatgttagttggtatgggatggtggatacagtgcattacttc

SEQ ID NO: 746190 - DNA, 75 bp, synthetic construct
  source 1..75: mol_type = other DNA
agtggtatgatcgcttagaacttcttgcgggtaatcatcaaaatgtggttctgttaactgtagcgaatagagatt

SEQ ID NO: 746191 - DNA, 75 bp, synthetic construct
  source 1..75: mol_type = other DNA
tgtcagagccagagtgctcatcgatctcaatgtagcgagatcggcaatgaggacagcgaaatttaatatccataa

SEQ ID NO: 746192 - DNA, 75 bp, synthetic construct
  source 1..75: mol_type = other DNA
gtgaagggtttccgagaagtacacaggaggctatggccatgggccgcgctgtcataaccagcgatgtgccaggtt

SEQ ID NO: 746193 - DNA, 75 bp, synthetic construct
  source 1..75: mol_type = other DNA
ctcagaaacaggaccctgcagcctttgaaggaataatctacctttcaaaaaaatggaacggaacactgatgaatc

SEQ ID NO: 746194 - DNA, 75 bp, synthetic construct
  source 1..75: mol_type = other DNA
tggcacatttaccggaaaatgccaaattcgcctgggctgcacagccatatcaaggaacaggtagctacagccaaa

SEQ ID NO: 746195 - DNA, 75 bp, synthetic construct
  source 1..75: mol_type = other DNA
ttatagcaaagcacaaagagtgtgttacattcaaaacaaatgagacatcattgcaaataaacactcagaaattaa

SEQ ID NO: 746196 - DNA, 75 bp, synthetic construct
  source 1..75: mol_type = other DNA
tagtttgagaagtgctcacttagcaggacagtctatattatcaggatattccacttactatatatatgttatagc

SEQ ID NO: 746197 - DNA, 75 bp, synthetic construct
  source 1..75: mol_type = other DNA
gacaaaatcatccggctatcttctaggagtagtgaagaatagcgaggcagttagccagtggggccgtagcgttta

SEQ ID NO: 746198 - DNA, 75 bp, synthetic construct
  source 1..75: mol_type = other DNA
ttttatgctgatggtgccgggttgagcgctaaggtaactctcaaagaggcccgttactcgcgtgataaatgtcgc

SEQ ID NO: 746199 - DNA, 75 bp, synthetic construct
  source 1..75: mol_type = other DNA
tctcactatcactaagcaattgtctgttgcgatggtagaggcacataacaatggggtaaagttatttaaaaccgc

SEQ ID NO: 746200 - DNA, 75 bp, synthetic construct
  source 1..75: mol_type = other DNA
tctgcgccaccggaccggccaacggcgtgctgtaccgtcagcctctgccggcggtgcagtatcagccaggaccac

SEQ ID NO: 746201 - DNA, 75 bp, synthetic construct
  source 1..75: mol_type = other DNA
gacgtacagcgccgggtgaaaggtatggtgacctggtttgaactgggggagaacgacaaaaaccagatgctgtac

SEQ ID NO: 746202 - DNA, 75 bp, synthetic construct
  source 1..75: mol_type = other DNA
ttataaaaaatgcctgtttaaaattatataatttggcacataccgcaaccaaacacccctcaaatcacatgattc

SEQ ID NO: 746203 - DNA, 75 bp, synthetic construct
  source 1..75: mol_type = other DNA
agcgatggctctgatttcaacagaagcggcggtcgcccagcccgcaccaagtacagcagattcttcagtccgtct

SEQ ID NO: 746204 - DNA, 75 bp, synthetic construct
  source 1..75: mol_type = other DNA
tcgaaactgccaccggtgagctggcgaaaacgcagcgccgcagcctggcggatgcccttcagcagtccggcggcg

SEQ ID NO: 746205 - DNA, 75 bp, synthetic construct
  source 1..75: mol_type = other DNA
ccgctgctgggtgcaaaggtccttcccggtgaaaccgacatcgcccagcccggcccgctgccgttcattctctcc

SEQ ID NO: 746206 - DNA, 75 bp, synthetic construct
  source 1..75: mol_type = other DNA
gtcgggctggccttcagtaacgcaattaagacgcatcctgaaatcaatctgtatcatagcgatggaaatcacccc

SEQ ID NO: 746207 - DNA, 75 bp, synthetic construct
  source 1..75: mol_type = other DNA
aacccggtttcagctgcgctaaagccatccgttttatcgttgaccgcctgtcacgctcacaactggacgagcgca

SEQ ID NO: 746208 - DNA, 75 bp, synthetic construct
  source 1..75: mol_type = other DNA
tatatgctcgatatcatgccgtcttatgacaccattcgccgcgcaatgaagaaactgccggaagtggtgaaacaa

SEQ ID NO: 746209 - DNA, 75 bp, synthetic construct
  source 1..75: mol_type = other DNA
ctgcccgccgtgcagtatcagcaggggccggtgcgactgcgtacggccctgcaggtgatggcgggaccggcctgg

SEQ ID NO: 746210 - DNA, 75 bp, synthetic construct
  source 1..75: mol_type = other DNA
atgcagcttcttaaattgcagatgcccaaatttgccgcactgtgggggcaactgattgtttttatgggttcgttt

SEQ ID NO: 746211 - DNA, 75 bp, synthetic construct
  source 1..75: mol_type = other DNA
gatgctcgtaaaagccgccgccatattcgcgcgctgcgccgggattttgtcgatcagctaagccgccatccaaca

SEQ ID NO: 746212 - DNA, 75 bp, synthetic construct
  source 1..75: mol_type = other DNA
gaagaaactgccggaagtggtgaaacaaaaaggccgggtgacaggcagtgaataccgtcagcttgagggattcac

SEQ ID NO: 746213 - DNA, 75 bp, synthetic construct
  source 1..75: mol_type = other DNA
gcagatgacagtacgctgctttcgggtgtttccgagctggatgctattccaccgcagtctcaggtgctcacagaa

SEQ ID NO: 746214 - DNA, 75 bp, synthetic construct
  source 1..75: mol_type = other DNA
gcaaattaaatatccttattcgcgaaacaggtgatagcattgacagtaatgaactagccgggcttatagtgaaaa

SEQ ID NO: 746215 - DNA, 75 bp, synthetic construct
  source 1..75: mol_type = other DNA
aataaaacattactgtccgtgataaacagcaccttgagcaatcaaggtgctcttaccgaacttattgctgtgact

SEQ ID NO: 746216 - DNA, 75 bp, synthetic construct
  source 1..75: mol_type = other DNA
ataacactggcgttctttaaagaagccatctggcccataaccattaacatagaaaatagtgcattttattacatt

SEQ ID NO: 746217 - DNA, 75 bp, synthetic construct
  source 1..75: mol_type = other DNA
gtatcgccaatttgtttgtgattccgttcgccattgccattcgccatttcgccccgttactttattcgtacccct

SEQ ID NO: 746218 - DNA, 75 bp, synthetic construct
  source 1..75: mol_type = other DNA
tatccattgccaggattgcagcatcagccagctttgcatcccgttcccactcaacgaacatgagcttgatcagct

SEQ ID NO: 746219 - DNA, 75 bp, synthetic construct
  source 1..75: mol_type = other DNA
cttcaggtggacgaaaaaacactttgagttttgtatggataataaaatctttttaaatcataaggggaagaagtc

SEQ ID NO: 746220 - DNA, 75 bp, synthetic construct
  source 1..75: mol_type = other DNA
accgctataaacagcgtttctttggcgactttctagagcttccaggactgacagaaatagctgttaatcgtccag

SEQ ID NO: 746221 - DNA, 75 bp, synthetic construct
  source 1..75: mol_type = other DNA
gagtctccatgctggttcaccttatgaagcaataatggggctggtagaacgctgttatcagaatacagagtgttc

SEQ ID NO: 746222 - DNA, 75 bp, synthetic construct
  source 1..75: mol_type = other DNA
atgacagataataatattagtcttaattatatccgtgatacttactttggagcgtttttaaaaactgaagggcta

SEQ ID NO: 746223 - DNA, 75 bp, synthetic construct
  source 1..75: mol_type = other DNA
gtgctgcgtagtatcagcggcaattacctgatggactgggcatttcatgcgctgtgcgtcgttgggctgatgatt

SEQ ID NO: 746224 - DNA, 75 bp, synthetic construct
  source 1..75: mol_type = other DNA
ggatcggcgcaaactgttaatgctggcgctggtgttacaactggtggggttctgcggctttatctggttgccgct

SEQ ID NO: 746225 - DNA, 75 bp, synthetic construct
  source 1..75: mol_type = other DNA
ggacggtggtgaagatgcaatagtcactccgaccaggctgattcgcgcctgttatcgcatgaaccccgacaggat

SEQ ID NO: 746226 - DNA, 75 bp, synthetic construct
  source 1..75: mol_type = other DNA
aatatcagttttatcaacgcgtccctgattggggccgacctctcgtccagcgcactgatgtgtgcctggttaaac

SEQ ID NO: 746227 - DNA, 75 bp, synthetic construct
  source 1..75: mol_type = other DNA
tggatgttctcatcaatggcgtctggacatgacgctggcggacttcaatctccggcgtgcggcgttgtttgcgac

SEQ ID NO: 746228 - DNA, 75 bp, synthetic construct
  source 1..75: mol_type = other DNA
agctataccctgtcaggtcctgcgacaggaagtggtggtactgtattcgcaaatacggcaacatcaggggccggc

SEQ ID NO: 746229 - DNA, 75 bp, synthetic construct
  source 1..75: mol_type = other DNA
tttatcgctatgggaaaggaatcgtagcagatctgtggagcactaatgcctccgagatgaaaaatatactactcc

SEQ ID NO: 746230 - DNA, 75 bp, synthetic construct
  source 1..75: mol_type = other DNA
actaatgatatcattattcggtaatgacgatacagtagtttattatcaacatatacgcatacataaaggtaatgt

SEQ ID NO: 746231 - DNA, 75 bp, synthetic construct
  source 1..75: mol_type = other DNA
agacgggaatagtgaaagagagtggctgcagcggtaaagaagtttaccgccgcgagtggattactgtttttccgg

SEQ ID NO: 746232 - DNA, 75 bp, synthetic construct
  source 1..75: mol_type = other DNA
atgacatccctctccccggacaccgtccgccgcattgaagacgccgccgccgccctgatcgccgccggcaccccg

SEQ ID NO: 746233 - DNA, 75 bp, synthetic construct
  source 1..75: mol_type = other DNA
tggcatgatgattcatatggaacatcatcaattgatattactggcagtggagatctaatatcattaggtggtcat

SEQ ID NO: 746234 - DNA, 75 bp, synthetic construct
  source 1..75: mol_type = other DNA
tcgatatgtattaatatctttatctcaattatgtggttgtgtggttcctcccatatgaacaaaataccatttgtg

SEQ ID NO: 746235 - DNA, 75 bp, synthetic construct
  source 1..75: mol_type = other DNA
tgattttagacattcacgactttgtggggcagattttaccgctgccgatttaagaggtgctaatttcgctgggac

SEQ ID NO: 746236 - DNA, 75 bp, synthetic construct
  source 1..75: mol_type = other DNA
tccgccgccgtcaccggcaaaatagatctccgcaactggaccgcccccatcgccaaaacggaagcacccacggag

SEQ ID NO: 746237 - DNA, 75 bp, synthetic construct
  source 1..75: mol_type = other DNA
gatattaagtcaggtaaaaatagtcgtatgatggttgagtactcttttgacgatgaagataatatggaagtaaca

SEQ ID NO: 746238 - DNA, 75 bp, synthetic construct
  source 1..75: mol_type = other DNA
gtcagcaattcagtaggtgtaacggttggcggcggagttgggggggcattttgcgtatacttatgtagtggatgt

SEQ ID NO: 746239 - DNA, 75 bp, synthetic construct
  source 1..75: mol_type = other DNA
ctggcgggaaataccggcccggtggtgtcgaaaacggtagtggtcgatacgattaaccccaccgccacgccgacc

SEQ ID NO: 746240 - DNA, 75 bp, synthetic construct
  source 1..75: mol_type = other DNA
ttggtggcaaaacctacaccaccacggtggcggctaacggtagctggagcaccaccgttccggcggcggatattg

SEQ ID NO: 746241 - DNA, 75 bp, synthetic construct
  source 1..75: mol_type = other DNA
cgctcaataacaacacttaccagaccaccgtccaggccgatggcacctggagcgtgaacgttccggcaacggaat

SEQ ID NO: 746242 - DNA, 75 bp, synthetic construct
  source 1..75: mol_type = other DNA
caccgatgccagcggcaactggagcgtcggcgtgcctgccagcgtgatttccggccttgcggatggcacggtgac

SEQ ID NO: 746243 - DNA, 75 bp, synthetic construct
  source 1..75: mol_type = other DNA
ttatcgaacacgctcaggcgcaggtgattactggcagcagctccggctttgccgcaggtacagcgctgacggtgg

SEQ ID NO: 746244 - DNA, 75 bp, synthetic construct
  source 1..75: mol_type = other DNA
taacgccatcagcggcggcagtacggggctggcgacgggcgcgcaggtcaccgtcacgctcaacggtcacaacta

SEQ ID NO: 746245 - DNA, 75 bp, synthetic construct
  source 1..75: mol_type = other DNA
aacggcgtgctgggaagtccggtggcagtgggggcaacggcaactacctatgccagccagtttagcctggcggtg

SEQ ID NO: 746246 - DNA, 75 bp, synthetic construct
  source 1..75: mol_type = other DNA
cctggaccacgctcaccgttaccggcacgacctggcgctataacgacagccgcacgctgaccgatggcaactatc

SEQ ID NO: 746247 - DNA, 75 bp, synthetic construct
  source 1..75: mol_type = other DNA
gtgcaggtcaatacggcggcagtgtcgctctcggtcagcaccatcagcggcgataaccttattaatgccgccgaa

SEQ ID NO: 746248 - DNA, 75 bp, synthetic construct
  source 1..75: mol_type = other DNA
gccgaagcggggcagattgttacgataacgcttaacagcccgaccgtgcagacgtatcaggcaacggtacaggcc

SEQ ID NO: 746249 - DNA, 75 bp, synthetic construct
  source 1..75: mol_type = other DNA
tttgcgacagctaacgtggtcacgctgacgggcgtgcataccgacctcgccaccttactggcgaatcatcagttg

SEQ ID NO: 746250 - DNA, 75 bp, synthetic construct
  source 1..75: mol_type = other DNA
accgtgacagatgccgccggaaatactggcacggcatcacgtgcaatcacgctggtgggcgtgtctccattgatc

SEQ ID NO: 746251 - DNA, 75 bp, synthetic construct
  source 1..75: mol_type = other DNA
ctgcaagccgacactggccttagcgccagtgactttatcaccagcgtcagcccggtggtggtcaacggctcgctc

SEQ ID NO: 746252 - DNA, 75 bp, synthetic construct
  source 1..75: mol_type = other DNA
caccacggttgccacagataatagctgggagctgacgatccccgccgccgatctcgcgaccttgccggacggcgc

SEQ ID NO: 746253 - DNA, 75 bp, synthetic construct
  source 1..75: mol_type = other DNA
atgaccgaacataccagcagttactacgccgccagtgcgaataaatatgcgcctttcgacacgctgaatgagtcg

SEQ ID NO: 746254 - DNA, 75 bp, synthetic construct
  source 1..75: mol_type = other DNA
gggcgcacgctgcgcgtgccgtttaccgcgatgggcgcggcttattacagcctgcgcgatcgtctgggcgtttaa

SEQ ID NO: 746255 - DNA, 75 bp, synthetic construct
  source 1..75: mol_type = other DNA
ggcaacactggcagcggcacgcgggatatcaccattgacgccaacctgccaggtctgcgggtggataccgtggcg

SEQ ID NO: 746256 - DNA, 75 bp, synthetic construct
  source 1..75: mol_type = other DNA
ggtggatattacggtaagcggcaccaacagcgccggaacaacctccaccattacccatccggtcaccgtcgatct

SEQ ID NO: 746257 - DNA, 75 bp, synthetic construct
  source 1..75: mol_type = other DNA
tgacgctgggcggcaacacctacaccgccacggtgcaggctaatttaagctggagtgtcagcgttccggcggcgg

SEQ ID NO: 746258 - DNA, 75 bp, synthetic construct
  source 1..75: mol_type = other DNA
gcggcggctataccgggctttcctccgcgctgcatctggcggaagcgggctttgacgtggtggtactcgaagcct

SEQ ID NO: 746259 - DNA, 75 bp, synthetic construct
  source 1..75: mol_type = other DNA
ggaatgcgtatctgggcgataaagtagagccggaactggcgaaacgcagcatgccgtgcggcacgcaggtgatca

SEQ ID NO: 746260 - DNA, 75 bp, synthetic construct
  source 1..75: mol_type = other DNA
tggatgtgctggtgaccaaacagtcgggcagcgtgttcctgatccgcaacaccaacacggtgagctacggcactt

SEQ ID NO: 746261 - DNA, 75 bp, synthetic construct
  source 1..75: mol_type = other DNA
atgaccgaacataccagcagttactacgccgccagtgcgaataaatacgcgccattcgacacgctgaatgagtca

SEQ ID NO: 746262 - DNA, 75 bp, synthetic construct
  source 1..75: mol_type = other DNA
ggcgtggtctacggcgcgcgcgacccggatgacgttgagcgtcttgtggtgccgaaactgctgaaaaccttcccg

SEQ ID NO: 746263 - DNA, 75 bp, synthetic construct
  source 1..75: mol_type = other DNA
cgccattcgtctgaacggcggacgtgtgtatgagctttctgcggtgacgcagatccagcacaccacgccagccgt

SEQ ID NO: 746264 - DNA, 75 bp, synthetic construct
  source 1..75: mol_type = other DNA
atgccagcggcaactggagcgttggcgtgcctgccagcgtgatttccggccttgcggacggcacagtgactatca

SEQ ID NO: 746265 - DNA, 75 bp, synthetic construct
  source 1..75: mol_type = other DNA
tgagtttttgggggtatttccgttggcgctgactgaagctcgtctggctgtcttacggagtgggtatggtgatta

SEQ ID NO: 746266 - DNA, 75 bp, synthetic construct
  source 1..75: mol_type = other DNA
tgttcaacaccttattaaggcaaggtgtagaaacgacgaaaccccgcactgtaggagcagtaacggggcttctaa

SEQ ID NO: 746267 - DNA, 75 bp, synthetic construct
  source 1..75: mol_type = other DNA
ccggtgggacagccgtgaccagctgaccgggtattgcagcgcacagggtgagcagtgggaataccgccacgacgc

SEQ ID NO: 746268 - DNA, 75 bp, synthetic construct
  source 1..75: mol_type = other DNA
ggggaccgtgaaaaaatcattgctgcgtcttgatgttgtacgcacaaggcaaggtgtttcgcctgatatcaccgg

SEQ ID NO: 746269 - DNA, 75 bp, synthetic construct
  source 1..75: mol_type = other DNA
tcgtcgattttgaaaatatggaccagccaacgcggcgcaaattgatgcggcgactacgtgaaacaccattcaaaa

SEQ ID NO: 746270 - DNA, 75 bp, synthetic construct
  source 1..75: mol_type = other DNA
tcgaagcacgtttattatcagagccgttcttcattcgtgaagtctggcgtaaaaaaattgagtggttacgggtca

SEQ ID NO: 746271 - DNA, 75 bp, synthetic construct
  source 1..75: mol_type = other DNA
atggttaaactgatggcagattcagctgataagctggtagggcagcgtattcagaccagacgtaaagaagcaggg

SEQ ID NO: 746272 - DNA, 75 bp, synthetic construct
  source 1..75: mol_type = other DNA
gagcatttattttataaagactttcatgaaaacagaattattattgaactggaagaaaaagatgatgggtggtgg

SEQ ID NO: 746273 - DNA, 75 bp, synthetic construct
  source 1..75: mol_type = other DNA
cacagcccaggtcgccacacctatggcaagtagctgggttaaaacactcgactggtatgtctcttcttgggcaga

SEQ ID NO: 746274 - DNA, 75 bp, synthetic construct
  source 1..75: mol_type = other DNA
gtgttcgacgttacaacaaataaagcactccaagcgcatatatacagatatactaaagctggtgtgtatactccc

SEQ ID NO: 746275 - DNA, 75 bp, synthetic construct
  source 1..75: mol_type = other DNA
cagcgcgccggacttttcccggcggaagccacatggggcggactgctcccctcactggtgcgggagtaccgttac

SEQ ID NO: 746276 - DNA, 75 bp, synthetic construct
  source 1..75: mol_type = other DNA
gggatgtacctggtgagtgatccgctggggttgctggggggtgagcagacttaccggtatgtgccaaatccgtgt

SEQ ID NO: 746277 - DNA, 75 bp, synthetic construct
  source 1..75: mol_type = other DNA
cagatgcttttttaatagcccatgcgatgacacatggatatactattattacccatgagaaaccatccggtggca

SEQ ID NO: 746278 - DNA, 75 bp, synthetic construct
  source 1..75: mol_type = other DNA
gcaggcattggtgatttccggctccagcactggcggagagtcgggagatgtcgtcagcgtcacgctaaacaataa

SEQ ID NO: 746279 - DNA, 75 bp, synthetic construct
  source 1..75: mol_type = other DNA
gcggcacgcgggatatcaccatcgacgccaatctacccggtctgcgggtcgatacggtggcgggcgatgatgtgg

SEQ ID NO: 746280 - DNA, 75 bp, synthetic construct
  source 1..75: mol_type = other DNA
aatcatcagcggcacagtcaccggcgcgcaagcgggcgatatcgttactgtgacgctgaataatgtgaattacac

SEQ ID NO: 746281 - DNA, 75 bp, synthetic construct
  source 1..75: mol_type = other DNA
gccagcgtcagcaacgtcgcgggtaacaacgcccaggcaacgcatgtttatagcgtcgatgccaccgcgccctcc

SEQ ID NO: 746282 - DNA, 75 bp, synthetic construct
  source 1..75: mol_type = other DNA
agactattaccgttattttcggtggcaaaagctacaccaccacggttgccgcggataatacctgggggctgacga

SEQ ID NO: 746283 - DNA, 75 bp, synthetic construct
  source 1..75: mol_type = other DNA
gtcacgggaacggcggttgcggggaatacggtgattgtcaccattggcggcaatcaatacaccgccaccgtgcag

SEQ ID NO: 746284 - DNA, 75 bp, synthetic construct
  source 1..75: mol_type = other DNA
attgcgggcattagcgatgacactgggttaagcagcagcgatttcgttactcgcgacaccacgttgaccgtgcgc

SEQ ID NO: 746285 - DNA, 75 bp, synthetic construct
  source 1..75: mol_type = other DNA
agccagaatgtggtgatcgacaccatcgcgccagatcccgcggtgaaaaccatcgccatcagcgcgatcactacc

SEQ ID NO: 746286 - DNA, 75 bp, synthetic construct
  source 1..75: mol_type = other DNA
tcggctggttgaccacctcgccaatggtgattctgctggtcatgatgctggcgatgggaacgcatattccacaac

SEQ ID NO: 746287 - DNA, 75 bp, synthetic construct
  source 1..75: mol_type = other DNA
gcgatgttgttaatctggcgaataccaattacaccgttactgccagcgccacagatgtgaccggcaacaccggca

SEQ ID NO: 746288 - DNA, 75 bp, synthetic construct
  source 1..75: mol_type = other DNA
gcagccgctaacgttaagcggcaccagcaatttacccgatggcggcacggttaacgtgacgttgaataatgtcac

SEQ ID NO: 746289 - DNA, 75 bp, synthetic construct
  source 1..75: mol_type = other DNA
cctctggataattgtgttcctttgcaggtctcaccgctttcagagttaatttacagtatgttaccgcgtcctaaa

SEQ ID NO: 746290 - DNA, 75 bp, synthetic construct
  source 1..75: mol_type = other DNA
tggcacggttcaaacggacggtagctggagcgtcagcgtaccgccagccgacgtaagcgccctgaccgccagcaa

SEQ ID NO: 746291 - DNA, 75 bp, synthetic construct
  source 1..75: mol_type = other DNA
ttaacgccgccgaaaaaggcgcggcgctaacgctctccggcagcacgtccggcgtcgaagcggggcaaaccgtta

SEQ ID NO: 746292 - DNA, 75 bp, synthetic construct
  source 1..75: mol_type = other DNA
ccggcaccgcaacgcacgatatcgtgatagatgccaacctgccaggcctgcgggtcgataccgtggcaggcgatg

SEQ ID NO: 746293 - DNA, 75 bp, synthetic construct
  source 1..75: mol_type = other DNA
ccgtcacgctaaacagtaaaacctacaccaccacgctggacgcttccggcaactggagcgtcggcgttccgctgt

SEQ ID NO: 746294 - DNA, 75 bp, synthetic construct
  source 1..75: mol_type = other DNA
cagcgccacggtcaacgacaaagcgggcaaccccggcagcaccagccataatctggcggtagacaccaccgcgcc

SEQ ID NO: 746295 - DNA, 75 bp, synthetic construct
  source 1..75: mol_type = other DNA
ttaccgtaacgcttggcgggaaaacctacaccgctaccgtgcagggcaatttaagctggagcgtggacgttccgg

SEQ ID NO: 746296 - DNA, 75 bp, synthetic construct
  source 1..75: mol_type = other DNA
caacactgccaacgtcagcactggcacggtaacggtcaacgcggcgattgattacactccgacctggaccaccgc

SEQ ID NO: 746297 - DNA, 75 bp, synthetic construct
  source 1..75: mol_type = other DNA
cgcgcaaatcagtatcgacggcggcaccacctggcagaacctgtcagtaagcggcttaacctggacctggcttga

SEQ ID NO: 746298 - DNA, 75 bp, synthetic construct
  source 1..75: mol_type = other DNA
gtgaaaaccatcgccattagcgcgatcaccaccgatactggattgattactaacgattttgtcaccagcgacacg

SEQ ID NO: 746299 - DNA, 75 bp, synthetic construct
  source 1..75: mol_type = other DNA
aaggcgccacaccgctatttagcgatgtggatgagttatacagtttgctggaagaggcggcgcaagcggaggctg

SEQ ID NO: 746300 - DNA, 75 bp, synthetic construct
  source 1..75: mol_type = other DNA
gttgtctccctcggtcaatatcgaacagatctctttaatgctgttggcgcaacttctgcatcaattccgtttact

SEQ ID NO: 746301 - DNA, 75 bp, synthetic construct
  source 1..75: mol_type = other DNA
atatcgaccagacggtcaacaccagctggggcggcttacaggccaccgatgccactcacgcttacgacctcagcg

SEQ ID NO: 746302 - DNA, 75 bp, synthetic construct
  source 1..75: mol_type = other DNA
gtcaacggctcgctcaccgccgcgcttgccagtaacgagacggcacaaatcagtatcgacggcggcgtaacctgg

SEQ ID NO: 746303 - DNA, 75 bp, synthetic construct
  source 1..75: mol_type = other DNA
tgggctgccggaggtggcaaggctcaaatcgtggatgatgccggagccagcgggggtaaggcaatgaaactgacc

SEQ ID NO: 746304 - DNA, 75 bp, synthetic construct
  source 1..75: mol_type = other DNA
taaaggaaggtaggaagtttggttattttgtaactatttcaagccagcgaccatttgatatatcgccaacaatcg

SEQ ID NO: 746305 - DNA, 75 bp, synthetic construct
  source 1..75: mol_type = other DNA
ttacccaaataaagggcacaacagtaagggccaaaatcaatcatgacttttttcagtcaacatactttcataaag

SEQ ID NO: 746306 - DNA, 75 bp, synthetic construct
  source 1..75: mol_type = other DNA
gaatattcatcttgttcttgaaaacgataatacggttttaataaaaggacagggtaaggttgtaaatgtaagatt

SEQ ID NO: 746307 - DNA, 75 bp, synthetic construct
  source 1..75: mol_type = other DNA
acctttgccgactggcgctttaacctgcgctcctccaacaccgaaccggtggtgcggttgaatgtggaatcgcgc

SEQ ID NO: 746308 - DNA, 75 bp, synthetic construct
  source 1..75: mol_type = other DNA
gcgtcagtgacgttgccagaacgctctgtttcgcccgttcatctgtcgggcgctggattaactggttcacacagt

SEQ ID NO: 746309 - DNA, 75 bp, synthetic construct
  source 1..75: mol_type = other DNA
gaaacaggctatcagtacgatggcccgctgacgccgcacagcgtacatggtgactacctgacctaccgcgccgac

SEQ ID NO: 746310 - DNA, 75 bp, synthetic construct
  source 1..75: mol_type = other DNA
gtacttagtattaacaccatcgccgtcgatgacatcatcaacgccacggagaaaggtgcggatctggcgatttcc

SEQ ID NO: 746311 - DNA, 75 bp, synthetic construct
  source 1..75: mol_type = other DNA
acatgctcaggcgcagattatcagcggctcggcaacgggcgcgacgaccggtaacacggtttccgtgaccattgg

SEQ ID NO: 746312 - DNA, 75 bp, synthetic construct
  source 1..75: mol_type = other DNA
acgatttaagtgagaaaaccggcagccatgacattgtacgtctgcatcggttgattttgcagatgaatcgcgcgc

SEQ ID NO: 746313 - DNA, 75 bp, synthetic construct
  source 1..75: mol_type = other DNA
tagatgtaccagatgagaacattgatatttacagtgagattcaaaacattattcaaattgataatcaaatagata

SEQ ID NO: 746314 - DNA, 75 bp, synthetic construct
  source 1..75: mol_type = other DNA
aaggccttataatgaccacggttccagacaagcaggactatgtgtttatggagatttcctgtctgttttattgaa

SEQ ID NO: 746315 - DNA, 75 bp, synthetic construct
  source 1..75: mol_type = other DNA
acgccgccgaacaacagcagccgttaacccttaacggctcgaccagcgcggaagtagggcagacggtcactgtca

SEQ ID NO: 746316 - DNA, 75 bp, synthetic construct
  source 1..75: mol_type = other DNA
cttaatccggtagcgagcgacgatattatcaacgctgccgaatcgggcgtggcgcagactatcagcggtcaggta

SEQ ID NO: 746317 - DNA, 75 bp, synthetic construct
  source 1..75: mol_type = other DNA
cgttaaccttaccgcgccgaccattggcattaacaccatcgccaccgatgacgtgattaacgccaccgaaaaagg

SEQ ID NO: 746318 - DNA, 75 bp, synthetic construct
  source 1..75: mol_type = other DNA
aactggagcgtcaccgttccggcctcggcggtaaccgcactgggccaggccaactatacggtgacggcggcggtg

SEQ ID NO: 746319 - DNA, 75 bp, synthetic construct
  source 1..75: mol_type = other DNA
cggctccgccaccggtgcggcaaccggtagcaccgtgacggtgactatcggcacaaatacctttaccacggtgct

SEQ ID NO: 746320 - DNA, 75 bp, synthetic construct
  source 1..75: mol_type = other DNA
aacacgcccaggcgcagatcatcagcggctccgccaccggtgcggcaaccggtagcaccgtgacggtgactatcg

SEQ ID NO: 746321 - DNA, 75 bp, synthetic construct
  source 1..75: mol_type = other DNA
gcgggcagcaacgtcacgctgaccattaacgggcaaacctatgttgcggcggtactggcggatggctcatggagc

SEQ ID NO: 746322 - DNA, 75 bp, synthetic construct
  source 1..75: mol_type = other DNA
aacgtgcctgcggcagatctggccgcgctcgggcagggcgcgcagaccattaccgccagcgtgaacgatcgcgcc

SEQ ID NO: 746323 - DNA, 75 bp, synthetic construct
  source 1..75: mol_type = other DNA
ccgaacagcagcagccgttaacccttaacggctcgaccagcgcggaagtggggcagacggtcaccgtgacctttg

SEQ ID NO: 746324 - DNA, 75 bp, synthetic construct
  source 1..75: mol_type = other DNA
atgttgcaaccttgccagacggcgcagcaaacgtccaggccagcgtcagcaatgtcgcagggaacagcgcccagg

SEQ ID NO: 746325 - DNA, 75 bp, synthetic construct
  source 1..75: mol_type = other DNA
accggcaccaccgccagcaatatcgaccagacggtcaacaccagctggggtggtttgcaggctaccgatgccact

SEQ ID NO: 746326 - DNA, 75 bp, synthetic construct
  source 1..75: mol_type = other DNA
acaatcgtatctttacaccaacgttggtggtgccagcaactggacgcaatcggccctcggcggcagccagagcgg

SEQ ID NO: 746327 - DNA, 75 bp, synthetic construct
  source 1..75: mol_type = other DNA
aacaccgtctccggcgatgacattattaacgccgccgaacacggacaggcgctggtgatctccggctccagcact

SEQ ID NO: 746328 - DNA, 75 bp, synthetic construct
  source 1..75: mol_type = other DNA
tcttaccataaataccgtggcgggcgatgacatcatcaacgatgccgaacatgcgcaggcgctggtgatctccgg

SEQ ID NO: 746329 - DNA, 75 bp, synthetic construct
  source 1..75: mol_type = other DNA
ttgtcaccatcaacacggtggcgggcgatgacgtgattaatgccacagaacacgcccaggcacaggttatcagcg

SEQ ID NO: 746330 - DNA, 75 bp, synthetic construct
  source 1..75: mol_type = other DNA
tgcagccagatttaagctggagcgtcagcgtaccggcggcagatttgcaggcgctgggcaacggtgaactgacca

SEQ ID NO: 746331 - DNA, 75 bp, synthetic construct
  source 1..75: mol_type = other DNA
cggcaacagcgcccaggccgatcgcgcgtacagcgtcgatgccaccgcgccgcttgtgaccatcaacaccatcgc

SEQ ID NO: 746332 - DNA, 75 bp, synthetic construct
  source 1..75: mol_type = other DNA
tttccggccttgcggacggcacagtgactatcagcgccaccatcaccgatagtgcaggcaacagcagcacgcaga

SEQ ID NO: 746333 - DNA, 75 bp, synthetic construct
  source 1..75: mol_type = other DNA
aaaggcgcggatctggcgatttccggcaccagcaaccagcctgcgggcacgcaggtaaccgtcacgttcaatggg

SEQ ID NO: 746334 - DNA, 75 bp, synthetic construct
  source 1..75: mol_type = other DNA
acgccaacggcaactggagcatcggcgtgcctgccagcgtgatttccgcactggcgcagggcgatgtaaccatta

SEQ ID NO: 746335 - DNA, 75 bp, synthetic construct
  source 1..75: mol_type = other DNA
tgggcctaacgaccttattgtcacggttaccgatgctgccggaaataccggtacagcgactcataacatcaccct

SEQ ID NO: 746336 - DNA, 75 bp, synthetic construct
  source 1..75: mol_type = other DNA
gccatcaatgctatcgctcaggacaacattgtcagcgccgcggaacataacgccgcgctggtgttaagtggtaca

SEQ ID NO: 746337 - DNA, 75 bp, synthetic construct
  source 1..75: mol_type = other DNA
gtgcaaattgtcggcaacaccatcaccgatgccggttcgataacgttaactatcgacaacagtcaggccgccgta

SEQ ID NO: 746338 - DNA, 75 bp, synthetic construct
  source 1..75: mol_type = other DNA
aggtcaataccgcgctacctggcgtcacccttaatccggtggcgaccgacgatattattaacgcggcggaatcgg

SEQ ID NO: 746339 - DNA, 75 bp, synthetic construct
  source 1..75: mol_type = other DNA
tcaccgtcacgctcaacggtcacaattacagtgctaccaccgatgccgcgggcaactggaccttaaccgtgccgg

SEQ ID NO: 746340 - DNA, 75 bp, synthetic construct
  source 1..75: mol_type = other DNA
tggtcactgagcgtgccagtaagcgatgtcctgaacctggcaaacaccaactatattgttaccgccagcgccacg

SEQ ID NO: 746341 - DNA, 75 bp, synthetic construct
  source 1..75: mol_type = other DNA
cactacggctatgacgataaaggccgcctgacgggcgaacggcagacggtggagaacccggagacgggggagatg

SEQ ID NO: 746342 - DNA, 75 bp, synthetic construct
  source 1..75: mol_type = other DNA
gcagttattgcaaaatattcatggtgttcaaagtagacagaacctccctgtttcagaagcgttagtcagcaatgc

SEQ ID NO: 746343 - DNA, 75 bp, synthetic construct
  source 1..75: mol_type = other DNA
ttgccatccgcgagggtgtcaccaagtcgttggaaatcacggccgagcactttcaggagacctaccaaaagaagg

SEQ ID NO: 746344 - DNA, 75 bp, synthetic construct
  source 1..75: mol_type = other DNA
gcaggagagaatagtgcatatattctcactggtgatctggggattaaatataaattctgataatttcccgagcct

SEQ ID NO: 746345 - DNA, 75 bp, synthetic construct
  source 1..75: mol_type = other DNA
taggaaattctttgaaaaaattaatgcagagataacgagtgaaaacgtcaaatatgatgttgtaacgagttactc

SEQ ID NO: 746346 - DNA, 75 bp, synthetic construct
  source 1..75: mol_type = other DNA
gatcatcgagaagctatcatatgatccaacgaacgaatcttatgatgttgatatattcacggcagagcaaaaaat

SEQ ID NO: 746347 - DNA, 75 bp, synthetic construct
  source 1..75: mol_type = other DNA
ttcgtggtatctcagtaaagggtttagcgggcactacagcctatctatatctggaatccatcgaaatctcaaaaa

SEQ ID NO: 746348 - DNA, 75 bp, synthetic construct
  source 1..75: mol_type = other DNA
agcaaaagagtcgctatcatatcaatgaagatgcgttgattacactcccttctggtgaaattgttgctatttcta

SEQ ID NO: 746349 - DNA, 75 bp, synthetic construct
  source 1..75: mol_type = other DNA
cctcgactatttttaaatattattaacgatatcaaagttgatgaggtagacggtttgatttatctaagaaaattt

SEQ ID NO: 746350 - DNA, 75 bp, synthetic construct
  source 1..75: mol_type = other DNA
atgcatccttgcaccatggtggatgcacctcgctgctttaacaagaaatttagttacaagacttccaaactataa

SEQ ID NO: 746351 - DNA, 75 bp, synthetic construct
  source 1..75: mol_type = other DNA
catctggtggaagtgctgtaagtacaacaattgataatgctggtactcagactgtttatgctggtgcaaaagtta

SEQ ID NO: 746352 - DNA, 75 bp, synthetic construct
  source 1..75: mol_type = other DNA
gtaagcggaacagtcatcaaaaacggcggggctatacgcgtggattccggtgccagcgccctgaatattgcatta

SEQ ID NO: 746353 - DNA, 75 bp, synthetic construct
  source 1..75: mol_type = other DNA
caaaaggtacaacaatcagtgtgagaagaaagctgtatgagaaaattttctctatcgtctcagaagtaaatttta

SEQ ID NO: 746354 - DNA, 75 bp, synthetic construct
  source 1..75: mol_type = other DNA
gcaagagtattcggacgaacttcctgtgaagcaagaattgatgataattgcgtagattatttgtacgtaagattc

SEQ ID NO: 746355 - DNA, 75 bp, synthetic construct
  source 1..75: mol_type = other DNA
atgggaacttatagcgtaaccaccaatccagttaaacagagtgttctgtttcaccaaaaacagcaaaatttaaat

SEQ ID NO: 746356 - DNA, 75 bp, synthetic construct
  source 1..75: mol_type = other DNA
ctctctgaatatttttcttatgatgtttatgaggaaatattcaagaaagttgttttcacacctggtgaatgtgat

SEQ ID NO: 746357 - DNA, 75 bp, synthetic construct
  source 1..75: mol_type = other DNA
atcctgttaaacagagtgttctgtttaaccaaaagaagcaaaatttaaataagagtgttaagcgtgatcttaata

SEQ ID NO: 746358 - DNA, 75 bp, synthetic construct
  source 1..75: mol_type = other DNA
gcggcgctgacggtggtgattaacacggtcacttacgctgcaacagtattagccgatggcacatggagcgttggt

SEQ ID NO: 746359 - DNA, 75 bp, synthetic construct
  source 1..75: mol_type = other DNA
agatacagaaagacaagttctggagggaagttcatttgttttatgttgtggtgaaaaaataaacggcactataag

SEQ ID NO: 746360 - DNA, 75 bp, synthetic construct
  source 1..75: mol_type = other DNA
aggcaagttctggagggaagttcatttgttttatgttgtggtgaaaaaataaacgccactataagtaaattactt

SEQ ID NO: 746361 - DNA, 75 bp, synthetic construct
  source 1..75: mol_type = other DNA
tagcattagtgttagttctatgttaagaaaaacaaagaatagccgacctgggaatttaagtggtactgcagttat

SEQ ID NO: 746362 - DNA, 75 bp, synthetic construct
  source 1..75: mol_type = other DNA
ccggcgtgggcagcagagacaatcacgacgacctggcagtgtctgcgcgaggatgtacgtgaatggctggacaaa

SEQ ID NO: 746363 - DNA, 75 bp, synthetic construct
  source 1..75: mol_type = other DNA
gcccaaaatttcgcgacatatggctatccttcgcgaggctgatctggttcttgaccgtcgggaaggcaaatggat

SEQ ID NO: 746364 - DNA, 75 bp, synthetic construct
  source 1..75: mol_type = other DNA
aaaagtgaaattattcgaatatttagagaaagagcatggtgtagaaaatatctctccagttaagctaagaagacc

SEQ ID NO: 746365 - DNA, 75 bp, synthetic construct
  source 1..75: mol_type = other DNA
aatatgaaggcacgattgcctatcagacaaaattggggtacttccgtaatggaaagttcttcccatactctgact

SEQ ID NO: 746366 - DNA, 75 bp, synthetic construct
  source 1..75: mol_type = other DNA
tttcgaaatagactcaactgtcgctgatgtacatcttatttcgagtttaaacagacgaaaagtcattgggcgtcc

SEQ ID NO: 746367 - DNA, 75 bp, synthetic construct
  source 1..75: mol_type = other DNA
aagagggagaagaagcaaatataaagattatgagtctacaaaggttctatctggaacaaaatttaactatgacgc

SEQ ID NO: 746368 - DNA, 75 bp, synthetic construct
  source 1..75: mol_type = other DNA
ttatttctaaagacaaacggacttacataaaaagaaaagagaataaaacaaacagaactctaatatttacattat

SEQ ID NO: 746369 - DNA, 75 bp, synthetic construct
  source 1..75: mol_type = other DNA
caggaaataatatctctatttccaatcgcgtcagaacttaactttaatgactacaagatattattcaattattat

SEQ ID NO: 746370 - DNA, 75 bp, synthetic construct
  source 1..75: mol_type = other DNA
tcgtagaagagcatctgcaatatatgcaggagcagatcttgaagttctatattcaaaagaatatatatctactct

SEQ ID NO: 746371 - DNA, 75 bp, synthetic construct
  source 1..75: mol_type = other DNA
agccggggagcttcacaccactcatcagagttgaaactgccaccggtgaactggccagaacgcagcgccgcagcc

SEQ ID NO: 746372 - DNA, 75 bp, synthetic construct
  source 1..75: mol_type = other DNA
gcggctaaactactgtgtataattttaatactaggtatattttctagcattgttaatttttttattttaggtgac

SEQ ID NO: 746373 - DNA, 75 bp, synthetic construct
  source 1..75: mol_type = other DNA
ggaagtctccagcgttgactcttcctctaactcgacgctcggcccgacgtttaatacccgtactattcaaaacgc

SEQ ID NO: 746374 - DNA, 75 bp, synthetic construct
  source 1..75: mol_type = other DNA
tgatgaacagaacttattctgtactattactttccaacacgttatcgatgaaaacaaaacatatatatgccagta

SEQ ID NO: 746375 - DNA, 75 bp, synthetic construct
  source 1..75: mol_type = other DNA
tactatcgcagatttgcaactctcgggcagcggctctgatctcgatgtcagcataaaggaagctgatggcagtgt

SEQ ID NO: 746376 - DNA, 75 bp, synthetic construct
  source 1..75: mol_type = other DNA
agtaatactctttacctggaacgtggctggtcgcagatattaagcacagttcagataggagaaaattacacatcc

SEQ ID NO: 746377 - DNA, 75 bp, synthetic construct
  source 1..75: mol_type = other DNA
gcgagctggtgcaactgattgttgagcgtctgggtgagcaggacaccgcttacgcagcattcaccgagaagatgc

SEQ ID NO: 746378 - DNA, 75 bp, synthetic construct
  source 1..75: mol_type = other DNA
tgggccagatgcctcgaaagataagctgaaaggttcgctgggtgagttgaagcaactttctggcttaagtggcgt

SEQ ID NO: 746379 - DNA, 75 bp, synthetic construct
  source 1..75: mol_type = other DNA
cgaaaccggtggagccgcctaaaccaaaggttgaagcaccacctgcgccgaagccagaaccgaagccggtcgtgg

SEQ ID NO: 746380 - DNA, 75 bp, synthetic construct
  source 1..75: mol_type = other DNA
gcttatcatactcatggtgcagatagtcatggagaatattgggacgaaatattttcaggtgaagatgagaaaata

SEQ ID NO: 746381 - DNA, 75 bp, synthetic construct
  source 1..75: mol_type = other DNA
cggtcagcgtgttcgcaggcaacggtgccacgactgctccgacggtcaccacgcagccggacggaacggtggaga

SEQ ID NO: 746382 - DNA, 75 bp, synthetic construct
  source 1..75: mol_type = other DNA
cccgaatggcgacgattgccggtaacgatcagcacgccaacctgcaattgcagtcgtggagtgttggcgtaacgt

SEQ ID NO: 746383 - DNA, 75 bp, synthetic construct
  source 1..75: mol_type = other DNA
cattgaagccgccgccctgcaatcagcgggcggaaaagtagcagtttccggcaaggatattcaggtcactattcc

SEQ ID NO: 746384 - DNA, 75 bp, synthetic construct
  source 1..75: mol_type = other DNA
ctggtcgtttttactggaactggcattagtggttgccgccattgccatgtggtgcaggcgtaatgccaaaatggt

SEQ ID NO: 746385 - DNA, 75 bp, synthetic construct
  source 1..75: mol_type = other DNA
acagcggtatgatattttatccaggagatggtcatctctcgattgcgtcacgttcatccccactgtgtatgaaaa

SEQ ID NO: 746386 - DNA, 75 bp, synthetic construct
  source 1..75: mol_type = other DNA
ctgtcatcacagggccggacggcacggtggaaatcagtgtcaccagtcagaccgccggaaccagtacagtcactg

SEQ ID NO: 746387 - DNA, 75 bp, synthetic construct
  source 1..75: mol_type = other DNA
gttgaaaaatcagggaacggaatccccatcaatattaacataaccgaagagaaaaaaataagattccacggtaca

SEQ ID NO: 746388 - DNA, 75 bp, synthetic construct
  source 1..75: mol_type = other DNA
aatgactatgaagtaattcctttcattgaatcatgccttattaaaatcagaatttttattatcgaagcctataat

SEQ ID NO: 746389 - DNA, 75 bp, synthetic construct
  source 1..75: mol_type = other DNA
ggttggaaatgatgtgtaatctcactaatgaagtaaagcacagacaaccaatccccttaagagaagagagttctg

SEQ ID NO: 746390 - DNA, 75 bp, synthetic construct
  source 1..75: mol_type = other DNA
gtcctcgaatatcgcaagaaagagctggtacggctgacgctgaccgatccgctgaaaggcaagccgggtgaggtt

SEQ ID NO: 746391 - DNA, 75 bp, synthetic construct
  source 1..75: mol_type = other DNA
cgattgtcgcggacaaaacgatatatattgctggggatagcataacggtgaccgttgttcttaaagatgcccagg

SEQ ID NO: 746392 - DNA, 75 bp, synthetic construct
  source 1..75: mol_type = other DNA
aaccaaattaaaattatcaatatttaacaaatgtaatttattaagtttatttttatcaaaattaaaagcattaca

SEQ ID NO: 746393 - DNA, 75 bp, synthetic construct
  source 1..75: mol_type = other DNA
accgccgatgatgtgattaacgctgctgaaaaaggcgcggcgttaacgctcaccggcagcacttctggtgtcgaa

SEQ ID NO: 746394 - DNA, 75 bp, synthetic construct
  source 1..75: mol_type = other DNA
gcgcctggcctgcggggacggtcacgattacggcgagcggtagcaccacagccggaaattcggtcagcgttacgc

SEQ ID NO: 746395 - DNA, 75 bp, synthetic construct
  source 1..75: mol_type = other DNA
ccaggccaactacacggtaacggcggcggtaaccagcagtatcggcaacagcgccactgccagccataacgtgct

SEQ ID NO: 746396 - DNA, 75 bp, synthetic construct
  source 1..75: mol_type = other DNA
atttactggtcgacagcggcctgccgggcgtcaccatcaacaccgtggcaggcgacgatattatcaacgccgccg

SEQ ID NO: 746397 - DNA, 75 bp, synthetic construct
  source 1..75: mol_type = other DNA
gccacggtagccgccaatggcacctgggcgctgaacgtgcctgcggcggatctggcagcgctggggcagggcgcg

SEQ ID NO: 746398 - DNA, 75 bp, synthetic construct
  source 1..75: mol_type = other DNA
gggcaatccgctaaccatcagcggcagcagcaccgccgaagcggggcagacggtaaccgtcacgcttaatggcgt

SEQ ID NO: 746399 - DNA, 75 bp, synthetic construct
  source 1..75: mol_type = other DNA
aggagatacggtcactgtcacgctcggcggtaatcaatacaccaccactgtacagccagatttaagctggagcgt

SEQ ID NO: 746400 - DNA, 75 bp, synthetic construct
  source 1..75: mol_type = other DNA
taacgctcaatagcccgaccgtgcagacctatcaggcaacggtgcaggccgacggtagctggagtattaatattc

SEQ ID NO: 746401 - DNA, 75 bp, synthetic construct
  source 1..75: mol_type = other DNA
gaaagtagcgccgaaaatccggtgagcattacgcatccggttatggtcgatctcactccggcggcgatcaccatc

SEQ ID NO: 746402 - DNA, 75 bp, synthetic construct
  source 1..75: mol_type = other DNA
tggagtgtcagcgttccggcggcggatattcaggcgctgggtaacggcaacctgacagttaacgcctcggtcacc

SEQ ID NO: 746403 - DNA, 75 bp, synthetic construct
  source 1..75: mol_type = other DNA
cgcgctgcctgccgtcactattaacgcggtggcgaccgacgatattattaacgatgccgagtcgggaaatgccca

SEQ ID NO: 746404 - DNA, 75 bp, synthetic construct
  source 1..75: mol_type = other DNA
ccgacaccgatcgcattgatatccgcgagttgttacagggcagcggctacaccggcaacggcaaagccagctacg

SEQ ID NO: 746405 - DNA, 75 bp, synthetic construct
  source 1..75: mol_type = other DNA
cggtgaaaaccatcaccattagcgcgatcaccaccgatacaggtctgattactaatgattttgtcaccagcgaca

SEQ ID NO: 746406 - DNA, 75 bp, synthetic construct
  source 1..75: mol_type = other DNA
gcccttagctctgctacgtcgcatggatttcgtcaaagtacccgcgtgctggcagggatgagtctgggattttga

SEQ ID NO: 746407 - DNA, 75 bp, synthetic construct
  source 1..75: mol_type = other DNA
ggatatggcggcgctgcgtgacggcgatgccagcgcccaggtgcgggtgactaacgtcaacggcaacagcgccac

SEQ ID NO: 746408 - DNA, 75 bp, synthetic construct
  source 1..75: mol_type = other DNA
gctctctgcgccgcttgccagcggtgaagtagtttacctctaccgtaacggtctgctgttaggtgcggtaacgat

SEQ ID NO: 746409 - DNA, 75 bp, synthetic construct
  source 1..75: mol_type = other DNA
cggtgcgggcaacgtgcaggcgagcgtcagcaacatcaacggcaacagcgcccaggccgatcgcgcgtacagcgt

SEQ ID NO: 746410 - DNA, 75 bp, synthetic construct
  source 1..75: mol_type = other DNA
agcggtgtggaagcagggcagacggtgaccgtcacctttggcggtaaaaattacaccaccaccgtggaagccaac

SEQ ID NO: 746411 - DNA, 75 bp, synthetic construct
  source 1..75: mol_type = other DNA
aggggacattaagcagttcgcaggccaccgacgacactacgccgttgctgaacggcgtgctctccggcccgcttg

SEQ ID NO: 746412 - DNA, 75 bp, synthetic construct
  source 1..75: mol_type = other DNA
gctcggcgcgccgatactcggcattaacaccattgccgtcgacgatatcatcaacgccaccgagaaaggcgcgga

SEQ ID NO: 746413 - DNA, 75 bp, synthetic construct
  source 1..75: mol_type = other DNA
cctatacctacagtgcgcgtgtggtggatctggcggggaatatcacctcctccagcgattttgttctgacggtcg

SEQ ID NO: 746414 - DNA, 75 bp, synthetic construct
  source 1..75: mol_type = other DNA
cacgcttaccgttaccggcacgacctggcgctataacgacagccgcacgctgaccgatggtaactatctctatca

SEQ ID NO: 746415 - DNA, 75 bp, synthetic construct
  source 1..75: mol_type = other DNA
caactacacggtaaccgcgaacgtcaccgacagcgcaggcaacagcaattccgccagccataacgtgctggtcaa

SEQ ID NO: 746416 - DNA, 75 bp, synthetic construct
  source 1..75: mol_type = other DNA
acccatgcgtatagcgttgacgccagcgcgccgacgctcaccattaacaccatcgccagcgacgatatccttaac

SEQ ID NO: 746417 - DNA, 75 bp, synthetic construct
  source 1..75: mol_type = other DNA
gccgccgaagcgggggccgatcaaaccatcagcggggtggtgactcgcgccgccgctggcgatacggtcaccgtg

SEQ ID NO: 746418 - DNA, 75 bp, synthetic construct
  source 1..75: mol_type = other DNA
acctacaccaccacggtgcagacgggcggtagctggagctacaccctcggcagcgccgatgtcaccgcgctggcg

SEQ ID NO: 746419 - DNA, 75 bp, synthetic construct
  source 1..75: mol_type = other DNA
cagcttgccgggcagaccattagcggcaccaccaccgccgaagtgggccagacggtgaccgttacctttaacggg

SEQ ID NO: 746420 - DNA, 75 bp, synthetic construct
  source 1..75: mol_type = other DNA
aacaccctttccggcgatgatgtgatcaacgccgtggagaaaggcgaaacgctggtcgtaagcggcagcaccagc

SEQ ID NO: 746421 - DNA, 75 bp, synthetic construct
  source 1..75: mol_type = other DNA
cggtagctggacggtgaatgtgccgcctgccgatctcgctgcgctgccggacggcgcgggcaacgtgcaggcgag

SEQ ID NO: 746422 - DNA, 75 bp, synthetic construct
  source 1..75: mol_type = other DNA
cgtcactgatacggcaggcaacagtaattccgccagtcataatgtgctggtcaacagcgccttgcctgccgttac

SEQ ID NO: 746423 - DNA, 75 bp, synthetic construct
  source 1..75: mol_type = other DNA
caaactggcctgcgggaacggtcaatattgccgtctctggcaccaacaccgccggaaccacaaccagcattagcc

SEQ ID NO: 746424 - DNA, 75 bp, synthetic construct
  source 1..75: mol_type = other DNA
gacgacggacgctgcaggcaactggagcaccacggtgccagcttccgcagtaggtgcgctgggcgaagccagcta

SEQ ID NO: 746425 - DNA, 75 bp, synthetic construct
  source 1..75: mol_type = other DNA
gcgccacggtggctgcgaatggttcctggagcacctcggttccggcggcagatatggcggctctgcgtgatggcg

SEQ ID NO: 746426 - DNA, 75 bp, synthetic construct
  source 1..75: mol_type = other DNA
tgacgccgatggcaacagcggttccgccagccataacgtacaggttaataccgcgctgccgggcgtcaccattaa

SEQ ID NO: 746427 - DNA, 75 bp, synthetic construct
  source 1..75: mol_type = other DNA
agcgccacggtgggcggggcggtgacggggtatctttcgctcaacgaaggttctggcgtcgatctgaacaatgac

SEQ ID NO: 746428 - DNA, 75 bp, synthetic construct
  source 1..75: mol_type = other DNA
taccgcctcggtcaccaacgctaatggcaacaccgggagcggcacgcgggatatcaccattgatgccaacctgcc

SEQ ID NO: 746429 - DNA, 75 bp, synthetic construct
  source 1..75: mol_type = other DNA
gcggcaggcgatgtggtgaccgtctcgctcaacggcaaaaactacaccaccacgctggatgcctctggtaactgg

SEQ ID NO: 746430 - DNA, 75 bp, synthetic construct
  source 1..75: mol_type = other DNA
taagcggattaaccgccagcagttataccgtgactgcgacggtgagcgacaaagcgagcaacccggcaagcgccg

SEQ ID NO: 746431 - DNA, 75 bp, synthetic construct
  source 1..75: mol_type = other DNA
agcaatctgactgccagcccgtacacgatcagcgcctcggtaagcgataaagcaggtaattcggcgaccgccacc

SEQ ID NO: 746432 - DNA, 75 bp, synthetic construct
  source 1..75: mol_type = other DNA
acgctgaatgatgtggattacaccacggtggtggatgcttccggcaactggagtctgggcgttccggcctccgtt

SEQ ID NO: 746433 - DNA, 75 bp, synthetic construct
  source 1..75: mol_type = other DNA
cgtgcctgcggcggatctggccgcgctcgggcagggcgcgcagaccattaccgccagcgtgaacgatcgcgccgg

SEQ ID NO: 746434 - DNA, 75 bp, synthetic construct
  source 1..75: mol_type = other DNA
gacattattaatgccgccgaacacggacaggcgctggtgatctccggttccagcactggcggcgaagcgggcgat

SEQ ID NO: 746435 - DNA, 75 bp, synthetic construct
  source 1..75: mol_type = other DNA
ctcggcggcagccagagcggtaccaccagcggcgtggcggcaatggactacgactgggacggcgcggtggatgtg

SEQ ID NO: 746436 - DNA, 75 bp, synthetic construct
  source 1..75: mol_type = other DNA
aatgggacgtttgtctgggggcagaacaccaccaataccttcctgagcggggcgggcagtggcgctatgagcagc

SEQ ID NO: 746437 - DNA, 75 bp, synthetic construct
  source 1..75: mol_type = other DNA
caccgacagcgcgggcaacagcggcagcaccacccatacggtgaatgtcgaatcgctcctgcctggggtgatcat

SEQ ID NO: 746438 - DNA, 75 bp, synthetic construct
  source 1..75: mol_type = other DNA
accgtgatgttgaacggcctggcgtacagcgccaccaccgatagttccggcaactggagcgttaccgtgcctgct

SEQ ID NO: 746439 - DNA, 75 bp, synthetic construct
  source 1..75: mol_type = other DNA
ggcgagcgtcaccaatgctcagggtaacagcagcaccgccagccataacgtgcaggtcaataccgcgctgccggg

SEQ ID NO: 746440 - DNA, 75 bp, synthetic construct
  source 1..75: mol_type = other DNA
cggattaagtcaggtgtaagtataagtgccattgcccgggaattcaaaacctcgcggcaaaccattttaagagcc

SEQ ID NO: 746441 - DNA, 75 bp, synthetic construct
  source 1..75: mol_type = other DNA
accatcatcggggtcagcactggcacgccgtctgcagctgaatcactggccggtactgataacggacagcggaat

SEQ ID NO: 746442 - DNA, 75 bp, synthetic construct
  source 1..75: mol_type = other DNA
acatcttcacccccgtcacccgtgctgcagggcgaggccgccatgctgccggtattcacgccggagttgcgcccg

SEQ ID NO: 746443 - DNA, 75 bp, synthetic construct
  source 1..75: mol_type = other DNA
cacggtgtggtgttcccggctgaactggtgcggctgctggacagactggaggaagaaatccgggcagaccgcgtg

SEQ ID NO: 746444 - DNA, 75 bp, synthetic construct
  source 1..75: mol_type = other DNA
gggcggagcattcactttgagccgctgctgccgggggaggcggtgtacagccgcagtgagtcaatgtggctggtg

SEQ ID NO: 746445 - DNA, 75 bp, synthetic construct
  source 1..75: mol_type = other DNA
cagcatgatgaggaatcagggctgtactataaccggaaccggtactatgacccgctacaggggaggtatattaca

SEQ ID NO: 746446 - DNA, 75 bp, synthetic construct
  source 1..75: mol_type = other DNA
ctaccactacgacagccagcaccgtctggtgttctacacgcggatacagcacggtgagccccgggtggagagccg

SEQ ID NO: 746447 - DNA, 75 bp, synthetic construct
  source 1..75: mol_type = other DNA
ctaccactacgacagccagcaccgtctggtgttctacacgcggatacagcacggtgagcctccggttgagagccg

SEQ ID NO: 746448 - DNA, 75 bp, synthetic construct
  source 1..75: mol_type = other DNA
ctaccactacgacagccagcaccgtctggtgttctacacgcggatacagcacggtgagcctctggtcgagagccg

SEQ ID NO: 746449 - DNA, 75 bp, synthetic construct
  source 1..75: mol_type = other DNA
gaacagcctggtgtatgaccgtgactacgggtggaatgacaacggcgacctggtgcgcatcagcggcccgcgaca

SEQ ID NO: 746450 - DNA, 75 bp, synthetic construct
  source 1..75: mol_type = other DNA
tatggctataacagccagcggcaggtgacgtcagtgacgtacccggacgggcttcgcagcagccgggagtatgat

SEQ ID NO: 746451 - DNA, 75 bp, synthetic construct
  source 1..75: mol_type = other DNA
ctaccactacgacagccagcaccgtctggtgttctacacgcggatacagcacggtgagccgcaggtagagagccg

SEQ ID NO: 746452 - DNA, 75 bp, synthetic construct
  source 1..75: mol_type = other DNA
ggcggagaagttacagcaggaagggagcgaagacggtcacggtgtggtgttcccggctgaactggtggggctgct

SEQ ID NO: 746453 - DNA, 75 bp, synthetic construct
  source 1..75: mol_type = other DNA
tcaaactaaatccagatgtaaatcaaacagataaaattgtttgtgatacactgaacagtatcccgcaaggggaac

SEQ ID NO: 746454 - DNA, 75 bp, synthetic construct
  source 1..75: mol_type = other DNA
cgctggtgtacttgagaaacagaaaccgatttgcagcggcacggcatatatgggtggccatgagaataccgttat

SEQ ID NO: 746455 - DNA, 75 bp, synthetic construct
  source 1..75: mol_type = other DNA
tcatttggcctggttaaacagactaacgcaccagttgtgttctggttcgagcggtatcaagagggggataacttg

SEQ ID NO: 746456 - DNA, 75 bp, synthetic construct
  source 1..75: mol_type = other DNA
gctgaacaatttatacgtgttttacataatgcagcaaaacatattcctgatgactttagcattgatgaattgcgc

SEQ ID NO: 746457 - DNA, 75 bp, synthetic construct
  source 1..75: mol_type = other DNA
tttcaagaaactggcgcaaaaaattaacgatgaacttattcaccagcaacaagcgttaggcgatatgttcggcgg

SEQ ID NO: 746458 - DNA, 75 bp, synthetic construct
  source 1..75: mol_type = other DNA
aatataccaagagttgatacttggaaatataaaataaaaaattataaaaaattactggaaattcttaataaaatt

SEQ ID NO: 746459 - DNA, 75 bp, synthetic construct
  source 1..75: mol_type = other DNA
tccggtatgacccggttgacaggctgactgaacagcgcggttttgacggccggacgcaacgttaccactatgacc

SEQ ID NO: 746460 - DNA, 75 bp, synthetic construct
  source 1..75: mol_type = other DNA
gcgtgaaacccgttatgagtacagcgccgcaggagacctgacagcaacggtatcaccggacggtaaacgcagcac

SEQ ID NO: 746461 - DNA, 75 bp, synthetic construct
  source 1..75: mol_type = other DNA
tttatcactgtgaccaccggggcctgccgctggcgcttatcagtgaagacggcaatacggcgtggagcgcggaat

SEQ ID NO: 746462 - DNA, 75 bp, synthetic construct
  source 1..75: mol_type = other DNA
cagaactgcgcatgaagtttggcggtcgctgtgcttattgcggctgtgaacttggcgataagtggcatgcagacc

SEQ ID NO: 746463 - DNA, 75 bp, synthetic construct
  source 1..75: mol_type = other DNA
gtccggggaacagagcttgatcagttgtatcagtttgcccccctcatcagccgtcagggatggctgccgccggtc

SEQ ID NO: 746464 - DNA, 75 bp, synthetic construct
  source 1..75: mol_type = other DNA
gggcaggctggagagtgtgcgcaccctcgcaccggacctggacatccgcatcccgtatgccaccgacccggcggg

SEQ ID NO: 746465 - DNA, 75 bp, synthetic construct
  source 1..75: mol_type = other DNA
aacattgatccgatggggctatctgttatggctccagcattgtcaatgcaaaacttatccgcattacttaaaagt

SEQ ID NO: 746466 - DNA, 75 bp, synthetic construct
  source 1..75: mol_type = other DNA
cctggtacagcagggcggctttgacgggcggacgcaacgttatcattatgacctgaccggaaaactcacgcagag

SEQ ID NO: 746467 - DNA, 75 bp, synthetic construct
  source 1..75: mol_type = other DNA
agatgtattgattatattaatccagagcataaaaaaacgataaaggctttacaagatgctggctatctcaagtaa

SEQ ID NO: 746468 - DNA, 75 bp, synthetic construct
  source 1..75: mol_type = other DNA
catcagcacttacagcagttataacccgcgtgggcaactggtcagtcagaaggatgcgcaggggcgtgaaatccg

SEQ ID NO: 746469 - DNA, 75 bp, synthetic construct
  source 1..75: mol_type = other DNA
ataatgttaaggtcttggatcgcatctgcgaggtttacggctttactcaaaaaattcagctagcaaatcacttcg

SEQ ID NO: 746470 - DNA, 75 bp, synthetic construct
  source 1..75: mol_type = other DNA
ggatgcgcactatgtctaccgccacgatgaatacggcaggctgacggagaagacggaccgcatcccggcgggtgt

SEQ ID NO: 746471 - DNA, 75 bp, synthetic construct
  source 1..75: mol_type = other DNA
agacgcgggaatacggctacagcgccacgggcaggctggagagcgtgcgcaccctcgcaccggacctggacatcc

SEQ ID NO: 746472 - DNA, 75 bp, synthetic construct
  source 1..75: mol_type = other DNA
aggtgagtgtaccagaggagctcatagtggactgcctttttatcgggtggatggaccgttgcagacgatgaaaat

SEQ ID NO: 746473 - DNA, 75 bp, synthetic construct
  source 1..75: mol_type = other DNA
ggaggagacctggtacgggtgggacggtgacaggctgaccactgtacagacccaacagacaagaatccagacggt

SEQ ID NO: 746474 - DNA, 75 bp, synthetic construct
  source 1..75: mol_type = other DNA
cccgcagcttgaccgggactacgactggaacgacaacggacagctaatccgcatcagcggcccgcaggagagccg

SEQ ID NO: 746475 - DNA, 75 bp, synthetic construct
  source 1..75: mol_type = other DNA
agagccgctacctctatgacccgctgggccgccggacgggaaaacgggtatggcggcgggagcgtgacctgacgg

SEQ ID NO: 746476 - DNA, 75 bp, synthetic construct
  source 1..75: mol_type = other DNA
gaaggggaaacggcgtggcgcggggagtatgacgagtgggggaaccagcttaatgaggagaccccgcctcacctg

SEQ ID NO: 746477 - DNA, 75 bp, synthetic construct
  source 1..75: mol_type = other DNA
gtatgttgtgcaactgggtgcgctgaaaaatgccgacaaagtgaatgagattgttggtaaattgcgcggtgcggg

SEQ ID NO: 746478 - DNA, 75 bp, synthetic construct
  source 1..75: mol_type = other DNA
cacctggaacgacaacggcgaactcatccgcatcagcagcccgcgccagacccggagttacagctacagcaccac

SEQ ID NO: 746479 - DNA, 75 bp, synthetic construct
  source 1..75: mol_type = other DNA
gacggcaatgccttctccaacccgcgcaaagggaacgagaaagaaattgccgagatcttccgtcaggcattctga

SEQ ID NO: 746480 - DNA, 75 bp, synthetic construct
  source 1..75: mol_type = other DNA
gccctaatggtactgagaaagtatcagcttatcatactcatggtgcagatagtcatggagaatattgggacgaaa

SEQ ID NO: 746481 - DNA, 75 bp, synthetic construct
  source 1..75: mol_type = other DNA
aggcttaagctacacgtatcagtatgagaaagaccgcatcaccatcaccgacagcctggaccgccgtgaagtgct

SEQ ID NO: 746482 - DNA, 75 bp, synthetic construct
  source 1..75: mol_type = other DNA
cgcctgcattaggtttgggacatgagtttgctcatgcgcagtattaccttcttgataaggaaaatttcatggctc

SEQ ID NO: 746483 - DNA, 75 bp, synthetic construct
  source 1..75: mol_type = other DNA
acgacggctatggcgtctgctgcccctgctcttggagcaatggctgtggtcgctgggccaatgggatatgacctt

SEQ ID NO: 746484 - DNA, 75 bp, synthetic construct
  source 1..75: mol_type = other DNA
tgaggagtcggggctgtactataaccggaaccggtactacgatccgttgcagggacgctatatcacccaggatcc

SEQ ID NO: 746485 - DNA, 75 bp, synthetic construct
  source 1..75: mol_type = other DNA
acccgctgcaggggcggtatatcactcaggatccgattgggctgaaggggggatggaatttttatcagtatccgt

SEQ ID NO: 746486 - DNA, 75 bp, synthetic construct
  source 1..75: mol_type = other DNA
tgaaacgcggtatgaatacaacgccgccggtgacctgaccgccgtcattgccccggacggcagcagaaacgggac

SEQ ID NO: 746487 - DNA, 75 bp, synthetic construct
  source 1..75: mol_type = other DNA
gcggtaatgagtatgcggttgcagtcttcggtgtcgcggatgttggcggtcataaaatggttaaggccgggtatc

SEQ ID NO: 746488 - DNA, 75 bp, synthetic construct
  source 1..75: mol_type = other DNA
atgtgggaggatgcaaaatcgggggcatgtactaatggtctttgcggcacactatccgctatgataggtccagat

SEQ ID NO: 746489 - DNA, 75 bp, synthetic construct
  source 1..75: mol_type = other DNA
cggtgcactatggttatgacagtaaaggccgcctcgccagtgaacacctgacggtgcatcatccgcagacggaag

SEQ ID NO: 746490 - DNA, 75 bp, synthetic construct
  source 1..75: mol_type = other DNA
cagtagtgcgcctaatgttttcaaaacattcttcagagcattaagcccttacgactacacactgtattgcaggaa

SEQ ID NO: 746491 - DNA, 75 bp, synthetic construct
  source 1..75: mol_type = other DNA
atttttatcatactaataataacatcaagtatatcaagatattttatatttcaaatcactgatggaaacccatac

SEQ ID NO: 746492 - DNA, 75 bp, synthetic construct
  source 1..75: mol_type = other DNA
gtgtgagaggtattgcggtgctcattgtaatgctttttcatgccaaagtttcaggattttctcttggttggtctg

SEQ ID NO: 746493 - DNA, 75 bp, synthetic construct
  source 1..75: mol_type = other DNA
ctcgttggcggaaatatcaggtatttactgaacgaacggtctacccgcctgttcaactaccagttgtacatggct

SEQ ID NO: 746494 - DNA, 75 bp, synthetic construct
  source 1..75: mol_type = other DNA
atggcgctactggcatcgatatcgccagtggcttggcaaaacgatgccctggggagtcctggataccctggaccg

SEQ ID NO: 746495 - DNA, 75 bp, synthetic construct
  source 1..75: mol_type = other DNA
gctgggaccggcgtggtctggtggtcggccatgttcagtcggggaaaaccagccactataccggtctaatctgta

SEQ ID NO: 746496 - DNA, 75 bp, synthetic construct
  source 1..75: mol_type = other DNA
cttgataaccgggagattctggtcgaagagttgatccgccgttatagcatctggataggcgaagatacttctctg

SEQ ID NO: 746497 - DNA, 75 bp, synthetic construct
  source 1..75: mol_type = other DNA
cggaatacgcagaacaaccggggggttctccaccacatgcagggttaacgtctaatcaactggaattattgcaga

SEQ ID NO: 746498 - DNA, 75 bp, synthetic construct
  source 1..75: mol_type = other DNA
ttatacgtcgccatccacgccagtgcagggtaaaattacccgtattctggttgggcctgatgcctcgaaagataa

SEQ ID NO: 746499 - DNA, 75 bp, synthetic construct
  source 1..75: mol_type = other DNA
tatttctgagagggtgagctggtttgacggtcgcccggtttttattgatgaacaggatgaaccgccccgggtttc

SEQ ID NO: 746500 - DNA, 75 bp, synthetic construct
  source 1..75: mol_type = other DNA
ttatacagaaccgaggatggtatatggtacagttggtaaagaagaaattaggaccattgtcaacgagaaccagta

SEQ ID NO: 746501 - DNA, 75 bp, synthetic construct
  source 1..75: mol_type = other DNA
atggaaagcttctggggaacgctgaaaaatgaaagcctgagccactatcgttttaagagccgggatgaggccatc

SEQ ID NO: 746502 - DNA, 75 bp, synthetic construct
  source 1..75: mol_type = other DNA
aaatatttagtgcatttcctgataatgagcagcaagagatcataaaagaactaaggaacaaaaaagaggcaatgg

SEQ ID NO: 746503 - DNA, 75 bp, synthetic construct
  source 1..75: mol_type = other DNA
cccacgctcgatacgctaacccatttcccggactcgttaaaacatgccatcgatagctttttgctggcgtgctgt

SEQ ID NO: 746504 - DNA, 75 bp, synthetic construct
  source 1..75: mol_type = other DNA
caatggggagagggagaaaaccagcgcaatattcaatatcgagcacaatcggtcccctcgcccctctggggagag

SEQ ID NO: 746505 - DNA, 75 bp, synthetic construct
  source 1..75: mol_type = other DNA
gataacttacagtttattggcgatatgcatggcgatgactggatttgtcgtggcaacccggaaactcagaaggcg

SEQ ID NO: 746506 - DNA, 75 bp, synthetic construct
  source 1..75: mol_type = other DNA
ggtgccggaactattggtctggaactggctgccagcgccacgcagcgcagatgtaaggtgacagtgattgaactg

SEQ ID NO: 746507 - DNA, 75 bp, synthetic construct
  source 1..75: mol_type = other DNA
tccgggttatgctgaagaaacttttgatacgcactttatgattggcggcatgagaggagaaaaagtttccgaata

SEQ ID NO: 746508 - DNA, 75 bp, synthetic construct
  source 1..75: mol_type = other DNA
tggcagtgccaccatcgctcgttttttgtaccgtggtggcagtaccaccatcgctcgttttttgtaccgtggtgg

SEQ ID NO: 746509 - DNA, 75 bp, synthetic construct
  source 1..75: mol_type = other DNA
ttgcaaattttatccccggagtaaacctgtcacgcatagagccggaagagtcaggtaaagtatatcgcttttata

SEQ ID NO: 746510 - DNA, 75 bp, synthetic construct
  source 1..75: mol_type = other DNA
ttcgaaatataataatttatataaaatagcctccttatattccaaggagcattcatatcagaatttggtaaagtt

SEQ ID NO: 746511 - DNA, 75 bp, synthetic construct
  source 1..75: mol_type = other DNA
attattcatcaggaaaaatgacagacagcaacagacagcaacagacagcaacagacagcaatattttacaactat

SEQ ID NO: 746512 - DNA, 75 bp, synthetic construct
  source 1..75: mol_type = other DNA
taaacgacatcccggcacagcgtcaaaaagggctactgctcatttacttactggacccgcaacaggcattgtcgc

SEQ ID NO: 746513 - DNA, 75 bp, synthetic construct
  source 1..75: mol_type = other DNA
tcggtggcgggcaagcggcggcaatggctgcggcctcgctacgccagcaagggttcaccggtgagctgcatctgt

SEQ ID NO: 746514 - DNA, 75 bp, synthetic construct
  source 1..75: mol_type = other DNA
aaggaatacaggcacaaaaaaagactcatatcatctcaccttatgagtcccctgctgaaggtcgaggtacacgta

SEQ ID NO: 746515 - DNA, 75 bp, synthetic construct
  source 1..75: mol_type = other DNA
ccttgctgtgaagaaaataaatttattattgaatattataaatatgcagttgttgaatttttggaacttacaccg

SEQ ID NO: 746516 - DNA, 75 bp, synthetic construct
  source 1..75: mol_type = other DNA
tgtcaaaatagagaaccagaccggaattcataccgactggcgtggctatgccatattaccatttgcgacagaata

SEQ ID NO: 746517 - DNA, 75 bp, synthetic construct
  source 1..75: mol_type = other DNA
ctctgatttatcaatgataaaaaaacatggcgatatattccctcgcgatactcataaacttataatctataaacc

SEQ ID NO: 746518 - DNA, 75 bp, synthetic construct
  source 1..75: mol_type = other DNA
gttattttctctgtttggaaatattacacctgcccctgtagagaacagcaatataatgggacgcatctttttctc

SEQ ID NO: 746519 - DNA, 75 bp, synthetic construct
  source 1..75: mol_type = other DNA
ttgcttatctggaataaagctgaccacgatgagacattaaattcacccgggaaaattataaggaaattatcttca

SEQ ID NO: 746520 - DNA, 75 bp, synthetic construct
  source 1..75: mol_type = other DNA
agtcagctcctgctatgcctgcaacatcagggcgctgggcatctgtttatcttgaaccaatgatcggctcaggag

SEQ ID NO: 746521 - DNA, 75 bp, synthetic construct
  source 1..75: mol_type = other DNA
aaagcggcatcacagttcagtgacagccgtctggatctgcgcattccgcagactcagccgggcaaatcccggcct

SEQ ID NO: 746522 - DNA, 75 bp, synthetic construct
  source 1..75: mol_type = other DNA
gtgctttcttagcacttcaagatcttgcttatacttacgatatatctattacagctgtaaactctgtagaacaag

SEQ ID NO: 746523 - DNA, 75 bp, synthetic construct
  source 1..75: mol_type = other DNA
atcgactgaagccaatggcctacggagtgattttggcaactctggcagcgattaccgtaccagccggtcagagcc

SEQ ID NO: 746524 - DNA, 75 bp, synthetic construct
  source 1..75: mol_type = other DNA
gtaaagcatacagtattcgcgagacaattgaaaaagcctatattatttcaggagggactttatctacattaaaaa

SEQ ID NO: 746525 - DNA, 75 bp, synthetic construct
  source 1..75: mol_type = other DNA
agaaaggaaatgaataaagctggaagcgcagaagagatggtgcgcataatccaaaatactttgaagttattcaaa

SEQ ID NO: 746526 - DNA, 75 bp, synthetic construct
  source 1..75: mol_type = other DNA
ttttatcagcgcatgtgaaaagtcaactgcataacatttttttaaacaagccggttgaaagccaaattattaaaa

SEQ ID NO: 746527 - DNA, 75 bp, synthetic construct
  source 1..75: mol_type = other DNA
cagggttacctcactgtcgagaatggcgaggttaagcgcgagaccctgtttggtcatgtgaggatagaacgatgc

SEQ ID NO: 746528 - DNA, 75 bp, synthetic construct
  source 1..75: mol_type = other DNA
accactccagtggagcgtcctgtcactctggatgggatggcggtggatgcgatacctcaagttcatccagttact

SEQ ID NO: 746529 - DNA, 75 bp, synthetic construct
  source 1..75: mol_type = other DNA
ccatgaagtgggaatggatgtgttgactaagctacttaaccgccgtttcctgccgactatcttcaaacgtgaaat

SEQ ID NO: 746530 - DNA, 75 bp, synthetic construct
  source 1..75: mol_type = other DNA
ggccagctaaatactcaggctaaccgctatgtattgcagctaggcggcgatttggcgcagtggagtagcaacgcg

SEQ ID NO: 746531 - DNA, 75 bp, synthetic construct
  source 1..75: mol_type = other DNA
ccgtggcagtcctgctgcgtattctccgcaaatccaaaagcgggaagatgccggggctgggggaggaagataaat

SEQ ID NO: 746532 - DNA, 75 bp, synthetic construct
  source 1..75: mol_type = other DNA
cgtgaaaggcgatacccaagggaacactcgcattcgggttgataacattggcggcgtcggtgcacaaacggtcaa

SEQ ID NO: 746533 - DNA, 75 bp, synthetic construct
  source 1..75: mol_type = other DNA
ctgtggaagcagttcctgttcgccgtcatcagctttgtcggcggggttttcttctcggtgccgatggcgaagata

SEQ ID NO: 746534 - DNA, 75 bp, synthetic construct
  source 1..75: mol_type = other DNA
acaggcagatccgcccattcgtgctaaagccgcggaaattgccgttgcgcatgctcattatctgagtatcgagtt

SEQ ID NO: 746535 - DNA, 75 bp, synthetic construct
  source 1..75: mol_type = other DNA
gtatcgcaaattattaccttgctgcgtgaattgtttgaagaagtatcgcgccacgaagtcggtatggatgtactg

SEQ ID NO: 746536 - DNA, 75 bp, synthetic construct
  source 1..75: mol_type = other DNA
tcattcaaatagccgatgaagctctgtatatcgccaaaagacgaggtagtttacgtgatgtatgccggaagcgtg

SEQ ID NO: 746537 - DNA, 75 bp, synthetic construct
  source 1..75: mol_type = other DNA
atgaaaaagaataagtactcaactcccttatggatgcttgccacgattcttgcgggtatgctctcccctatgcaa

SEQ ID NO: 746538 - DNA, 75 bp, synthetic construct
  source 1..75: mol_type = other DNA
attttagcccgcaaagcatgcatatcagcgatacggtcggcagtacaggtcctgatcggctcaccggtaccgaca

SEQ ID NO: 746539 - DNA, 75 bp, synthetic construct
  source 1..75: mol_type = other DNA
tctcccgtctgattcaggatttcgacggtattttcaatcaaaccatgcgtaacaccaggaatttgaataacagaa

SEQ ID NO: 746540 - DNA, 75 bp, synthetic construct
  source 1..75: mol_type = other DNA
gaaagacttgatagataaaaaagaattggattttaatgtaattctgcaggagatgaaaaatcaggccggagaaga

SEQ ID NO: 746541 - DNA, 75 bp, synthetic construct
  source 1..75: mol_type = other DNA
gaattttgtttgtaatccaatggaaaatagtgatgtaactctaatagacaagtgtactttcgacgtaataaatca

SEQ ID NO: 746542 - DNA, 75 bp, synthetic construct
  source 1..75: mol_type = other DNA
tatataataaatcggttgattatgcaacgatgagtaatcgcgctgcgattattgcaaaaatagatttgtttattc

SEQ ID NO: 746543 - DNA, 75 bp, synthetic construct
  source 1..75: mol_type = other DNA
ccagtgggaatataccaacagtagtccgtcatccaataataatagtggtatcatgtgcattagttcagcattacc

SEQ ID NO: 746544 - DNA, 75 bp, synthetic construct
  source 1..75: mol_type = other DNA
ggtttctataaccatcttggcatgactgattttggcgtcgaccatgaaaaagaaaatctccgattttatgaggca

SEQ ID NO: 746545 - DNA, 75 bp, synthetic construct
  source 1..75: mol_type = other DNA
tgtcacttctggtgaatgaaggaaagctcgaacctgatattttaagcaaaatgcgagatgctgcaccgcaattaa

SEQ ID NO: 746546 - DNA, 75 bp, synthetic construct
  source 1..75: mol_type = other DNA
ttcttttcccctcccttgaccggaacctgccagtcaaagaaggggtggaaaaatatattgttgaacaagtcagag

SEQ ID NO: 746547 - DNA, 75 bp, synthetic construct
  source 1..75: mol_type = other DNA
tacggcatgcggactgcaggcagagaaaactggccgattttctctgcactggagggataatacaaggcctgataa

SEQ ID NO: 746548 - DNA, 75 bp, synthetic construct
  source 1..75: mol_type = other DNA
gcaaattcttgatcaggccgagcgccgggggcttaccgattttgagcgggtgaagctggcgcaattccaggcggg

SEQ ID NO: 746549 - DNA, 75 bp, synthetic construct
  source 1..75: mol_type = other DNA
tatcttagattgccattgatgaacttacagccttttttcattatctggaaaatacgcatttatatgtaccagcgt

SEQ ID NO: 746550 - DNA, 75 bp, synthetic construct
  source 1..75: mol_type = other DNA
gtcggcggtcagccgctcacttacggtcaatccattaccgacccgtgtctgggctgggaagataccgaacgcctg

SEQ ID NO: 746551 - DNA, 75 bp, synthetic construct
  source 1..75: mol_type = other DNA
ggagctccccgtcagtacaatggcggatatggtcggtgttgccggagctgcactggccccgctggcgaaactgct

SEQ ID NO: 746552 - DNA, 75 bp, synthetic construct
  source 1..75: mol_type = other DNA
acgcaagccccgtgattgcggttatgctgggcggtgaagctgtcctgggattgctggcacgttatgcttcacaac

SEQ ID NO: 746553 - DNA, 75 bp, synthetic construct
  source 1..75: mol_type = other DNA
gaataactggcttagtgctttcaaaatccctccccgtcgcctggtcaaaattaacactgcaagcctcgcgggggc

SEQ ID NO: 746554 - DNA, 75 bp, synthetic construct
  source 1..75: mol_type = other DNA
ttgcagcgtcaatttttccatttcaccggaaacacaggtgattgattttgaagtggtcaacaaaaactggccacc

SEQ ID NO: 746555 - DNA, 75 bp, synthetic construct
  source 1..75: mol_type = other DNA
tcgtcatctgcctgttatttctgccgttgaagtctgcaatggcgctgaactgctattttggtacatctggtggcg

SEQ ID NO: 746556 - DNA, 75 bp, synthetic construct
  source 1..75: mol_type = other DNA
gattcgcgaaatgccgccgcatgattatcaaagtacgcttagcgactacatcgtcgtgcaatttgatggtgccgg

SEQ ID NO: 746557 - DNA, 75 bp, synthetic construct
  source 1..75: mol_type = other DNA
agatcattgcgatgggctggcaaaacaaactttgctccggtgagccgacaaatattcataaatcacggactttta

SEQ ID NO: 746558 - DNA, 75 bp, synthetic construct
  source 1..75: mol_type = other DNA
tgcggttatacgtcaaaatacgagaaatgccgccgcatgattatcaaagtacgcttagcgactatatcgtcgtgc

SEQ ID NO: 746559 - DNA, 75 bp, synthetic construct
  source 1..75: mol_type = other DNA
ggtattaaaacgacaaaatcacaaaacgatcaatgtaccgacggattcaaagtcagctcctcgttttataccgaa

SEQ ID NO: 746560 - DNA, 75 bp, synthetic construct
  source 1..75: mol_type = other DNA
aatgtttgttagtcaggtttctaattattctgaacatggctttgaaaatatttgtaagtcgatgttgttgcggaa

SEQ ID NO: 746561 - DNA, 75 bp, synthetic construct
  source 1..75: mol_type = other DNA
accgaggagacaacagacaagaccgaagtatttgaaaaggcttgcagtaatttacgccaggtaatggccctgaac

SEQ ID NO: 746562 - DNA, 75 bp, synthetic construct
  source 1..75: mol_type = other DNA
cgggcgagcagagtgcagcatatcgtgcgatgtttgcagtacagaaaggttttgcaatggcatccgcagcattga

SEQ ID NO: 746563 - DNA, 75 bp, synthetic construct
  source 1..75: mol_type = other DNA
ggcgttgaaacgtatgattacgccgacgcaatggaacagctaaacgacatgggcctacgcggtgcgcagatccat

SEQ ID NO: 746564 - DNA, 75 bp, synthetic construct
  source 1..75: mol_type = other DNA
ttcggttcaatcaacgtcatacttactatttctatgttgatagttcgctattgggatagctatatttttgtatca

SEQ ID NO: 746565 - DNA, 75 bp, synthetic construct
  source 1..75: mol_type = other DNA
ctttaccactgtgaccaccgtgggctgccgctggcgcttatcagcccggaaggggaaacggcgtggtgcggggag

SEQ ID NO: 746566 - DNA, 75 bp, synthetic construct
  source 1..75: mol_type = other DNA
aaaagaagcgctctttgatatgtgccaggaattaatggcggtcgctaaagcgccgacagcggacagcatttcagc

SEQ ID NO: 746567 - DNA, 75 bp, synthetic construct
  source 1..75: mol_type = other DNA
gtggaatcacggtttgagtggctgaaatcacccaatgacgtattgagtaagccgatgacagagcctgacctggat

SEQ ID NO: 746568 - DNA, 75 bp, synthetic construct
  source 1..75: mol_type = other DNA
tttttactacagaacccaataaccaactcccagttgaaaatgcctatttttcttgcgatgccgggggatactttt

SEQ ID NO: 746569 - DNA, 75 bp, synthetic construct
  source 1..75: mol_type = other DNA
agattttggtgaacgcagtcgcgcctggggcgatagccacgccaatgaacagcatggatgatagcgacgtgaagc

SEQ ID NO: 746570 - DNA, 75 bp, synthetic construct
  source 1..75: mol_type = other DNA
cgaaggtggaaagatggagctattcaccactactgacgggaagcagtacatgatcccaggtgaaaacgggcgtat

SEQ ID NO: 746571 - DNA, 75 bp, synthetic construct
  source 1..75: mol_type = other DNA
gtaacaaaaacatcacgcgctattagcggcaacttacgcgccggattccagcaggctggctatcagattcaggat

SEQ ID NO: 746572 - DNA, 75 bp, synthetic construct
  source 1..75: mol_type = other DNA
acaactggaagaagagattgtcaaattcgaacatttatcgccgcattaccaactggaggtgaaccgccggggcat

SEQ ID NO: 746573 - DNA, 75 bp, synthetic construct
  source 1..75: mol_type = other DNA
acattggttcgtatctgacagccgatggcgatgcctgggtgacggtatttgaggcatatgctgagaactgggcga

SEQ ID NO: 746574 - DNA, 75 bp, synthetic construct
  source 1..75: mol_type = other DNA
tgatgatgccagagtatgggtaaaccgttttgtaaactggtacaactttgaacataagcacagcgggatcaaata

SEQ ID NO: 746575 - DNA, 75 bp, synthetic construct
  source 1..75: mol_type = other DNA
tataaaaacaccccaaaaaaatacaagcgtgctgacttgaagtatataccatttgacgccaatggtagttctagt

SEQ ID NO: 746576 - DNA, 75 bp, synthetic construct
  source 1..75: mol_type = other DNA
ataaagcttgagaatcaagaagaatttgtcattgccagatttgctgaattagttaatgatatattcccaaatagt

SEQ ID NO: 746577 - DNA, 75 bp, synthetic construct
  source 1..75: mol_type = other DNA
cttttctcaataattccccattgaattggactactagtgtttgggcgggagttttaggcatacatggaactattg

SEQ ID NO: 746578 - DNA, 75 bp, synthetic construct
  source 1..75: mol_type = other DNA
attaaccagtgaagggaaataccttgattacagctctgatgtggtgctggactttccttttaaggattgtgttct

SEQ ID NO: 746579 - DNA, 75 bp, synthetic construct
  source 1..75: mol_type = other DNA
ccggcgcttcgtcgtagggttcaggcaggtctgaacaaaggggaagcgcggaatgcccttgccagagctgtcttc

SEQ ID NO: 746580 - DNA, 75 bp, synthetic construct
  source 1..75: mol_type = other DNA
tcgattatgtcctctaatcccagatatcacttgttgtatcgcagttggctatatcctgtttctgcgcagcgcttt

SEQ ID NO: 746581 - DNA, 75 bp, synthetic construct
  source 1..75: mol_type = other DNA
tggtgatgcgtgggtgacggtgttcgaggcatatgctgaaaacaagctgaagtcacaggggcagacagcacacaa

SEQ ID NO: 746582 - DNA, 75 bp, synthetic construct
  source 1..75: mol_type = other DNA
ccagagccgtggacgggcaaatatacggagattggttcgctggctatggtcgtaaaaaacgcctctattgcgatg

SEQ ID NO: 746583 - DNA, 75 bp, synthetic construct
  source 1..75: mol_type = other DNA
aatataatgagaatagctcaacaggcgctcagtaatgttccggaagaagactatactgaaacaagcgattacatt

SEQ ID NO: 746584 - DNA, 75 bp, synthetic construct
  source 1..75: mol_type = other DNA
aactgaacattgaaagtcaaatccctgaacatgacgatatactttgtgaaataatctattgttttttaaaggtga

SEQ ID NO: 746585 - DNA, 75 bp, synthetic construct
  source 1..75: mol_type = other DNA
attacaaattttgctgactggatcactgagtttggtaaggctgcccggacagataacgggtgtcctttttttgtt

SEQ ID NO: 746586 - DNA, 75 bp, synthetic construct
  source 1..75: mol_type = other DNA
gtatgcctcaagagaagtcacccgctgggagcatctggccgaactctaccgctatctggaattatcccccttcaa

SEQ ID NO: 746587 - DNA, 75 bp, synthetic construct
  source 1..75: mol_type = other DNA
atgattttatgaatgagcaaagcattagtgcatcgtattatgttgtatctccaagtaacgtattatctgaggttt

SEQ ID NO: 746588 - DNA, 75 bp, synthetic construct
  source 1..75: mol_type = other DNA
tctaaatatattaatgaggtactcggtaagaatttatatttagatataattaaatctcttgatgctaagttgaaa

SEQ ID NO: 746589 - DNA, 75 bp, synthetic construct
  source 1..75: mol_type = other DNA
cttctccgtatttataaaaatacgactatgttagtatgcatcttgggagtaagcgcatcgctagttgttgctatc

SEQ ID NO: 746590 - DNA, 75 bp, synthetic construct
  source 1..75: mol_type = other DNA
tcgctaaggctccgcaggagccgagttaccactttaacgccgatatcctcggtggccgactgctgagagtcgctt

SEQ ID NO: 746591 - DNA, 75 bp, synthetic construct
  source 1..75: mol_type = other DNA
aggtgcgtggcaatgacgcggtaaacgatgcccagcacccaccccatgatctcgggccggctggcaaacaggaaa

SEQ ID NO: 746592 - DNA, 75 bp, synthetic construct
  source 1..75: mol_type = other DNA
cctgtattcaacgccgctattgatgagtatttcaatggtcccaaagaatttcgcgatcagctagacaattatttt

SEQ ID NO: 746593 - DNA, 75 bp, synthetic construct
  source 1..75: mol_type = other DNA
gcggcgattcgcctggcgttacaacacgggttcactttcgatgaaattgtggagcagtttacccgcgactttgat

SEQ ID NO: 746594 - DNA, 75 bp, synthetic construct
  source 1..75: mol_type = other DNA
gtatttcgacggtgacgatctggtcaataaaagtatccgtgaatatttcgatggcagcgacgagtttaatcgccg

SEQ ID NO: 746595 - DNA, 75 bp, synthetic construct
  source 1..75: mol_type = other DNA
tcctttactgatccaaatttaagacgtctgcttgatgctgctaaaaagttaaggggtaatgattctaaacctcat

SEQ ID NO: 746596 - DNA, 75 bp, synthetic construct
  source 1..75: mol_type = other DNA
tccgacatcgctacagagacaaataaagcgcctgatgcacgtcaatactttgaaggggaattagacgactggtcg

SEQ ID NO: 746597 - DNA, 75 bp, synthetic construct
  source 1..75: mol_type = other DNA
atgttggctgtaatggggtcaaacagcgctctcggtgtgtatttagcaaagactgatgagttagctggctttaaa

SEQ ID NO: 746598 - DNA, 75 bp, synthetic construct
  source 1..75: mol_type = other DNA
cattacgatggataggtgggttatataggggaatcattagcggtagcgaaaggttagactggctaagctatttaa

SEQ ID NO: 746599 - DNA, 75 bp, synthetic construct
  source 1..75: mol_type = other DNA
tgtggtaatcttggagatgaaggtgggcatttaatagccagtatatttaatggtccaggtgaaaaattaaacctg

SEQ ID NO: 746600 - DNA, 75 bp, synthetic construct
  source 1..75: mol_type = other DNA
gtcaggggctgccggggtgtgtttgctggttatgatgagcctgtgcgtactggctgaattctgtaccggcctggt

SEQ ID NO: 746601 - DNA, 75 bp, synthetic construct
  source 1..75: mol_type = other DNA
tggcaaacaagttaatgttaaaatagaacccgtttacactggggagaataagcgtcctgatagttttagtgtaac

SEQ ID NO: 746602 - DNA, 75 bp, synthetic construct
  source 1..75: mol_type = other DNA
gacagaagatcagaagcaaactgtaagcacgctggcaacgctgtcagcgggtatggccggcggcattgccagtgg

SEQ ID NO: 746603 - DNA, 75 bp, synthetic construct
  source 1..75: mol_type = other DNA
atgcagggaatccggggcaggtactggctggcggtctgaatccggcagtagcacagcttataaaacagtccaccg

SEQ ID NO: 746604 - DNA, 75 bp, synthetic construct
  source 1..75: mol_type = other DNA
ctatgaaaaccaaatgtggcttggtaaaaaacacaattattgcgtcgttatccccgtaattaacgaaggcaatcg

SEQ ID NO: 746605 - DNA, 75 bp, synthetic construct
  source 1..75: mol_type = other DNA
atgactgaatctatatctcaaacacttcgcgccaaatggcaagtccctgcctatgaaaaccaaatgtggcttggt

SEQ ID NO: 746606 - DNA, 75 bp, synthetic construct
  source 1..75: mol_type = other DNA
aagaaaatatttataaagcaatgttttattttttcttcaacaaggaaaaatttattacgcttggtgctatcaata

SEQ ID NO: 746607 - DNA, 75 bp, synthetic construct
  source 1..75: mol_type = other DNA
tgaaatctgtacctgatgccacaattaactttgattttgcagcgatgcgcctgaacatcactattcctcagatag

SEQ ID NO: 746608 - DNA, 75 bp, synthetic construct
  source 1..75: mol_type = other DNA
cagcttgagtacaagcagctctggcgtggcggtcaggtgcttgctgttccgccagcgtatacaagccagcgttgc

SEQ ID NO: 746609 - DNA, 75 bp, synthetic construct
  source 1..75: mol_type = other DNA
taccgtcgtacgatgttaccttgtggacggaaaaaaaacatgacgcatgtgtcgtgatcccggtgattaatgaag

SEQ ID NO: 746610 - DNA, 75 bp, synthetic construct
  source 1..75: mol_type = other DNA
agtggatttgagcaatccactggcgcgactgctgcgctactcgccgaatcagtacatgaccgcccaagaattcag

SEQ ID NO: 746611 - DNA, 75 bp, synthetic construct
  source 1..75: mol_type = other DNA
ttaattagtgagcttgctttgtctggtcgctcttcgtggtcgtcacatactcaagcgaccccaaaagcaggttga

SEQ ID NO: 746612 - DNA, 75 bp, synthetic construct
  source 1..75: mol_type = other DNA
tcttcaatgaagaagaagcgataccaattttttataaaacggtacgtgaattcgaagaattgaagtcatataaag

SEQ ID NO: 746613 - DNA, 75 bp, synthetic construct
  source 1..75: mol_type = other DNA
cgatgctgatacagaacaatttatccctttaggttcttgcttacctcctgatattactttatcagtaataaaaga

SEQ ID NO: 746614 - DNA, 75 bp, synthetic construct
  source 1..75: mol_type = other DNA
tactgctggccctggcatttacctctgctaagtcctgggcctttacctgccagtcgctgggcaaatcaatcagta

SEQ ID NO: 746615 - DNA, 75 bp, synthetic construct
  source 1..75: mol_type = other DNA
actctattaaagaatatgaaatagagaacagtaaactcataaacattaactatattcatttgaattatgattttt

SEQ ID NO: 746616 - DNA, 75 bp, synthetic construct
  source 1..75: mol_type = other DNA
tggcctgctcaccatctccactgagcgtagctgggcgatgacgcacagtatcagcggtagcggtgatgtgacaaa

SEQ ID NO: 746617 - DNA, 75 bp, synthetic construct
  source 1..75: mol_type = other DNA
cctcggtcaggaaggcgctggcgggggtttttaaagacaacggagaacgggacaacatcctcctgtccgcgctgg

SEQ ID NO: 746618 - DNA, 75 bp, synthetic construct
  source 1..75: mol_type = other DNA
gccgctacgggcagttgctggcgttcactgactgctcgggctaccagacccgctatgaatacgaccgcttcggcc

SEQ ID NO: 746619 - DNA, 75 bp, synthetic construct
  source 1..75: mol_type = other DNA
gacgcgctgttgcagtacctgtcgccgctcggttgggagcacatcaacctcaccggcgattacctctggcgcagc

SEQ ID NO: 746620 - DNA, 75 bp, synthetic construct
  source 1..75: mol_type = other DNA
aacggtgttccttctgcatatcactggtatacggaacagtatggcgtgaagtggcctgtggggtatgaggtgaat

SEQ ID NO: 746621 - DNA, 75 bp, synthetic construct
  source 1..75: mol_type = other DNA
tacccttttcgtcggatgaaacagaaaatgtgattggacaggcaaggccggtaaagctcgatgaagaggttgtcg

SEQ ID NO: 746622 - DNA, 75 bp, synthetic construct
  source 1..75: mol_type = other DNA
acggtaagagggaaactgatagacagggaaaccattaaatatttgcttgaagggtcggtacccccagagaacgac

SEQ ID NO: 746623 - DNA, 75 bp, synthetic construct
  source 1..75: mol_type = other DNA
gcccaatatggcctaacctcgggtcaggtcacggccgggctggttaaatcagttattgatgtcacttttacttat

SEQ ID NO: 746624 - DNA, 75 bp, synthetic construct
  source 1..75: mol_type = other DNA
actaagaatcagaagaaagagccggaagcgaagcagggcgattacctggtgggtacggatgaaaacgtgctggta

SEQ ID NO: 746625 - DNA, 75 bp, synthetic construct
  source 1..75: mol_type = other DNA
gcagtgggaacgcctgcaacgcggtgttgcgtcactctcgctacaactggcggaagggcgggcagatctctacac

SEQ ID NO: 746626 - DNA, 75 bp, synthetic construct
  source 1..75: mol_type = other DNA
aaatcgtggcacaagaccacagttggggaagtggtgaaggaaatagccgcgcgtcacaagctgaagatggcactg

SEQ ID NO: 746627 - DNA, 75 bp, synthetic construct
  source 1..75: mol_type = other DNA
cgccgctacgcgaccctggccgccgtggtgctggagagcaccgcgaccgtgatcgatgagctggtcgatctgcat

SEQ ID NO: 746628 - DNA, 75 bp, synthetic construct
  source 1..75: mol_type = other DNA
gctgccggccgagaagttcgccgcactcaagcgcgagcaggccctgcccctggcgatcaacccgaacagcgacca

SEQ ID NO: 746629 - DNA, 75 bp, synthetic construct
  source 1..75: mol_type = other DNA
attttcgggaaacgctgaatacccgccgtgaaaaatcgtggcataacaccaccgtcggggaagtggtgaaggaaa

SEQ ID NO: 746630 - DNA, 75 bp, synthetic construct
  source 1..75: mol_type = other DNA
aacgcaatgtcttctccggtattcgttctgcctacccggatccgcaggcactgatcgggcgtcacaccattatgg

SEQ ID NO: 746631 - DNA, 75 bp, synthetic construct
  source 1..75: mol_type = other DNA
catggtgatggctgctggccccggcgggaaagatatcttcctgttaagcccggatgctggtgctaaacctggcca

SEQ ID NO: 746632 - DNA, 75 bp, synthetic construct
  source 1..75: mol_type = other DNA
gaactttaccctgtcgggtaccacggcgggcagcgacaccgtattccaaaatgtggccgctaacggtgcgcaggg

SEQ ID NO: 746633 - DNA, 75 bp, synthetic construct
  source 1..75: mol_type = other DNA
tatgccgggggcggtggatgtggatctgggactggatgacggcgcactggatactgaattttccattggcggtac

SEQ ID NO: 746634 - DNA, 75 bp, synthetic construct
  source 1..75: mol_type = other DNA
gaattagaaagtgttgtatttaaatggtctgaaaaattgaatatcactattgtcaggctaccggtaaatgttggg

SEQ ID NO: 746635 - DNA, 75 bp, synthetic construct
  source 1..75: mol_type = other DNA
ttgtcgaaggttctgacaaactgcttcgcctgacgctggatctcggtggtgaaaagcgtaatgtcttctcaggca

SEQ ID NO: 746636 - DNA, 75 bp, synthetic construct
  source 1..75: mol_type = other DNA
gcggcatgtaatttacgcgccaacggtttgaatcattatctggccgataaaccgacggtgatggcagcgatgaag

SEQ ID NO: 746637 - DNA, 75 bp, synthetic construct
  source 1..75: mol_type = other DNA
ctttcagttcttttggtataagttgccatagagaaaactccttcaggaactctttccgagggaagaatgatgagg

SEQ ID NO: 746638 - DNA, 75 bp, synthetic construct
  source 1..75: mol_type = other DNA
ctcatcaatcatcacatcttgagggggtgtccatgcttctagctctgttgcgagagcaaggcgaatgtcctcagt

SEQ ID NO: 746639 - DNA, 75 bp, synthetic construct
  source 1..75: mol_type = other DNA
agttaacgcgatggcgcttgccggtgatttgcccgatgttgatatttcagataaaggagtaaaaatcactccgct

SEQ ID NO: 746640 - DNA, 75 bp, synthetic construct
  source 1..75: mol_type = other DNA
tcactcgaaggtattcaggcatggtacatcagagatgaaacttattcagcggcactggccgagctggtcaacgct

SEQ ID NO: 746641 - DNA, 75 bp, synthetic construct
  source 1..75: mol_type = other DNA
acgccaccagcgaaacagaatatgccggggctttcgttcctcactcactggctgtcatgcaatttagtgctgata

SEQ ID NO: 746642 - DNA, 75 bp, synthetic construct
  source 1..75: mol_type = other DNA
tccacaaatgccgattatgcgcgcctgtgttcgtggtcgcggctatcgtaaatttgtttatcatccagaccgttt

SEQ ID NO: 746643 - DNA, 75 bp, synthetic construct
  source 1..75: mol_type = other DNA
atagcctggtagttggttttgttattttctccattgttactattgttcagtttatcgtgattactaaaggttcgg

SEQ ID NO: 746644 - DNA, 75 bp, synthetic construct
  source 1..75: mol_type = other DNA
cctacttaatcgattttttgattgggctgaacttaacattggcaatacttgtgtttttaggatcattctatgttg

SEQ ID NO: 746645 - DNA, 75 bp, synthetic construct
  source 1..75: mol_type = other DNA
ggaaaacatgctggctccattatacctatagactacagaaaagactctctttccggcagtagtcgccctcccgaa

SEQ ID NO: 746646 - DNA, 75 bp, synthetic construct
  source 1..75: mol_type = other DNA
atcttcacttgccgatcagtggatcccgctgttgccgaccacggacaatgcgttgatggacgcgatgatgtacgt

SEQ ID NO: 746647 - DNA, 75 bp, synthetic construct
  source 1..75: mol_type = other DNA
caaaacggtacacgttttatcgtggtggatccgcgctattccgacaccgtatcttcacttgccgatcagtggatc

SEQ ID NO: 746648 - DNA, 75 bp, synthetic construct
  source 1..75: mol_type = other DNA
ctagatgaaataaaaagagaattaataaaaaaggaaaatgaaattgaactatataaaatgcatgtgttttttatt

SEQ ID NO: 746649 - DNA, 75 bp, synthetic construct
  source 1..75: mol_type = other DNA
ggaagttcaatcgttttaggagataacgataccgggtttaaacaaaatggcgatggtctgcttgatgtttatgca

SEQ ID NO: 746650 - DNA, 75 bp, synthetic construct
  source 1..75: mol_type = other DNA
gctgacaaaggtgaacaggcccagtctgatgccagaaagcatatgggcctcggcgacagcgccacccttaatgtt

SEQ ID NO: 746651 - DNA, 75 bp, synthetic construct
  source 1..75: mol_type = other DNA
gaatataacggtgggttacccccaaacgaatcggaaaatcgatactggaaaaactctaactcggtggccagtttt

SEQ ID NO: 746652 - DNA, 75 bp, synthetic construct
  source 1..75: mol_type = other DNA
tgtcgatattgttgatggtcgttttgatgccgggatacgcctgggtgaaattgttgataacgatatggttgcagt

SEQ ID NO: 746653 - DNA, 75 bp, synthetic construct
  source 1..75: mol_type = other DNA
tgtcgatattgttgaaggtcgttttgatgccgggatacgcctgggtgaaattgtagataacgatatggttgcagt

SEQ ID NO: 746654 - DNA, 75 bp, synthetic construct
  source 1..75: mol_type = other DNA
tctattgtccttggtgataatgataccggatttaaacagaatggagacggtattcttgatgtttatgctaacagt

SEQ ID NO: 746655 - DNA, 75 bp, synthetic construct
  source 1..75: mol_type = other DNA
taaagttattgaaaaatgagttgcagtatctggagtggggactccggaatgaatataatattcctcaaaatatgt

SEQ ID NO: 746656 - DNA, 75 bp, synthetic construct
  source 1..75: mol_type = other DNA
tggaggtaagttttttctaaataataagaagctattattatcagatgatttacaagaaatagctattgagaaaga

SEQ ID NO: 746657 - DNA, 75 bp, synthetic construct
  source 1..75: mol_type = other DNA
aaattgaatccctgttaaaagagtatcagcacaaacaaaaagaagcagatatagaaaacaaacgtttgcagtact

SEQ ID NO: 746658 - DNA, 75 bp, synthetic construct
  source 1..75: mol_type = other DNA
actttagtgatgttaaaataaattcaaacaatggtagcttagagactaaagattttaaattgcgtactacctgtc

SEQ ID NO: 746659 - DNA, 75 bp, synthetic construct
  source 1..75: mol_type = other DNA
taattatttgctggaaaagtctactgattatccatctctctcactgtccttaagtataagaccccaaaagggagg

SEQ ID NO: 746660 - DNA, 75 bp, synthetic construct
  source 1..75: mol_type = other DNA
gaatatcatatccctcaaaatatgtttggatttattgattcaagcacaataaaattatgcaaaagaaatagttta

SEQ ID NO: 746661 - DNA, 75 bp, synthetic construct
  source 1..75: mol_type = other DNA
actggcagcagtatcggatgaacgagcagcctatgaattatttatggagaagcgtttcggagaatctgtagatcg

SEQ ID NO: 746662 - DNA, 75 bp, synthetic construct
  source 1..75: mol_type = other DNA
atttcaggaagtgtttttaatggtgtatgggaacatttctatgatgatggttttttttctgaaggcgaggcaaca

SEQ ID NO: 746663 - DNA, 75 bp, synthetic construct
  source 1..75: mol_type = other DNA
ttcctgatttttttactcgtgttgatcttctatctttaactcaggagtttaaagataatggaacatctgtttggc

SEQ ID NO: 746664 - DNA, 75 bp, synthetic construct
  source 1..75: mol_type = other DNA
taccagcaagtaataagcacgcatggatgtgcggtaatgactccaacttattgatagtgttttatgttcagataa

SEQ ID NO: 746665 - DNA, 75 bp, synthetic construct
  source 1..75: mol_type = other DNA
actaccccggacgtttcaagggcgcccacgggcagaactttgcccgctggcagatggagggctggcgaaacaatg

SEQ ID NO: 746666 - DNA, 75 bp, synthetic construct
  source 1..75: mol_type = other DNA
attttttaggatacggtgttaagatggggatcagaagggaggcctgtactattactactgttgtaattgataaaa

SEQ ID NO: 746667 - DNA, 75 bp, synthetic construct
  source 1..75: mol_type = other DNA
gcgctttctcgtaaagctgatgagcaaggagcaacgtcgttcaaaatcctgtctacgactgggaataacaaactg

SEQ ID NO: 746668 - DNA, 75 bp, synthetic construct
  source 1..75: mol_type = other DNA
ggtgaaagcggcaattaaacttgccgataaagcaccggaaagcacaccaactgtctatcgccgtatcagcgaata

SEQ ID NO: 746669 - DNA, 75 bp, synthetic construct
  source 1..75: mol_type = other DNA
tcgttttcatagcggggccgatgaccggttatcacaactttaaccgtgatgaattcaacgctgaggctcgcatct

SEQ ID NO: 746670 - DNA, 75 bp, synthetic construct
  source 1..75: mol_type = other DNA
acctgcaaattacattgtccatgcttgagcaggctgatgcggtattcctgctgaacgggtgggaaaagagcaccg

SEQ ID NO: 746671 - DNA, 75 bp, synthetic construct
  source 1..75: mol_type = other DNA
tcgttcacattatcggcttcgcgccgttctttattgccctggctttctttgacattattggtgctattgcgttgt

SEQ ID NO: 746672 - DNA, 75 bp, synthetic construct
  source 1..75: mol_type = other DNA
atgtcattagtaggatataatagtaacatcataataaccatcgcgctgatatcgttgctctctgcatgcaccata

SEQ ID NO: 746673 - DNA, 75 bp, synthetic construct
  source 1..75: mol_type = other DNA
tccaaatcctttccgtactcggcctgctggcgttaactgccctgctcgtcacgaactctaacccgcaatcggtcg

SEQ ID NO: 746674 - DNA, 75 bp, synthetic construct
  source 1..75: mol_type = other DNA
aaaccacggtattgcaagatttacgtaaaatttgcacgccacaggcgtcattatcagatgaagcgtgggaaaagt

SEQ ID NO: 746675 - DNA, 75 bp, synthetic construct
  source 1..75: mol_type = other DNA
taatacctttgtgccggggcgcaatattttattcctgactctggcagcaatttatgcgtatcaggtgaaggcaga

SEQ ID NO: 746676 - DNA, 75 bp, synthetic construct
  source 1..75: mol_type = other DNA
atattggttcagagattcatgtagagctgttaattacataaaaaataaacaatttgaattaaatgaattaggctc

SEQ ID NO: 746677 - DNA, 75 bp, synthetic construct
  source 1..75: mol_type = other DNA
gaatatattcggcaacaaactccggagtcattatgcgacgtttttacctggcacaaactttgtcatcaggctcga

SEQ ID NO: 746678 - DNA, 75 bp, synthetic construct
  source 1..75: mol_type = other DNA
ttccgctgacaccggtaggtatgcagttggtctgcctgaaatgtaatccgctgcacaaagttaccggatacatcg

SEQ ID NO: 746679 - DNA, 75 bp, synthetic construct
  source 1..75: mol_type = other DNA
gacgtggtttgttaggtggtggtgttttcgtagctgtatcagggaattacacagatgatgatggagtatttattt

SEQ ID NO: 746680 - DNA, 75 bp, synthetic construct
  source 1..75: mol_type = other DNA
accgtgctggacaaatttattcagggtaatcgataccaggataatactggcaatataacaaccttaacgaaagac

SEQ ID NO: 746681 - DNA, 75 bp, synthetic construct
  source 1..75: mol_type = other DNA
atgacagaactccgttcgtccttgaaattgacggagggtgataatcagactgtattatcatcaggattattttta

SEQ ID NO: 746682 - DNA, 75 bp, synthetic construct
  source 1..75: mol_type = other DNA
gctgggcctttattacctgcctgttttgtacattgctcacgaaaccggacttgatcctgaaggggcttctaaggg

SEQ ID NO: 746683 - DNA, 75 bp, synthetic construct
  source 1..75: mol_type = other DNA
gcgcttcttcctgcaagtctggcgaaaataggttctgtcgctatatggggatggattattgcggcaattggtgca

SEQ ID NO: 746684 - DNA, 75 bp, synthetic construct
  source 1..75: mol_type = other DNA
atgtcggataccaccgaactggttgatttagccgtaatcttccctgatctggagatcgaattgaaatacgcctgc

SEQ ID NO: 746685 - DNA, 75 bp, synthetic construct
  source 1..75: mol_type = other DNA
tattctaccgttgttaacggcattgattttcgtgacatggctatggtagtgggaggctctctcctgaccacgagt

SEQ ID NO: 746686 - DNA, 75 bp, synthetic construct
  source 1..75: mol_type = other DNA
catgggataaaaactttgcctgtctgcaaaaaaacggctcttcaataaactatcgcttaagttcagataacctct

SEQ ID NO: 746687 - DNA, 75 bp, synthetic construct
  source 1..75: mol_type = other DNA
tggcggaggaaatgctcagttggctacataacaataatgttattttcccgtcggttgatgtgatcgagcggacgc

SEQ ID NO: 746688 - DNA, 75 bp, synthetic construct
  source 1..75: mol_type = other DNA
cagttcgcatattatctggccggatttccctggtatgaggggaatatcctgtttgcctttgcagtggcggcacag

SEQ ID NO: 746689 - DNA, 75 bp, synthetic construct
  source 1..75: mol_type = other DNA
acatatcgatcgacttaattctatcaccgcgttggaattacctgatggtattgagctttgcgttcaccagaacaa

SEQ ID NO: 746690 - DNA, 75 bp, synthetic construct
  source 1..75: mol_type = other DNA
tgccacatgggcggtcaagatccatccagacggatttcacaactgctgcgtctgataacacaatcagaagggctg

SEQ ID NO: 746691 - DNA, 75 bp, synthetic construct
  source 1..75: mol_type = other DNA
ctgtattgtctcggcagtatgataattgtcttaatttttgattttatcgctgaatattttttatttatgaaagat

SEQ ID NO: 746692 - DNA, 75 bp, synthetic construct
  source 1..75: mol_type = other DNA
aatataatgactcacaccatagtgtatgcaagtcctgtgattgcagtcatgttagggggagaggccgttcttggg

SEQ ID NO: 746693 - DNA, 75 bp, synthetic construct
  source 1..75: mol_type = other DNA
aaaggacgtggtctgatggatacaggggatctcaatgacagtccgaacttttttttcagtgagcgcaggaggtaa

SEQ ID NO: 746694 - DNA, 75 bp, synthetic construct
  source 1..75: mol_type = other DNA
tcatattattctgtttaaacgtgcgcttcactgcggaggagatgcgaaccatcgggcgttatctgcactgttcgg

SEQ ID NO: 746695 - DNA, 75 bp, synthetic construct
  source 1..75: mol_type = other DNA
atgtggttcttacggggaaatgaaaacaaggatgtaacccttgttattacgattggtaataaccaccaaaaatta

SEQ ID NO: 746696 - DNA, 75 bp, synthetic construct
  source 1..75: mol_type = other DNA
ggcaatatcggcattgtaaatctggatggtagcctgactgttacaggcggtgcgcatggtgttgagaacattggt

SEQ ID NO: 746697 - DNA, 75 bp, synthetic construct
  source 1..75: mol_type = other DNA
gattgatctgcacgagcgtatcctgggtagtctgttcagcagggcaaaacgcacgcaggccgaacggctccagca

SEQ ID NO: 746698 - DNA, 75 bp, synthetic construct
  source 1..75: mol_type = other DNA
gggacagtcaccgcatcactgatgatgaaaaagttagccagttacccaaaacagaatggacttgccaaagcgctg

SEQ ID NO: 746699 - DNA, 75 bp, synthetic construct
  source 1..75: mol_type = other DNA
caacacgaccatttttggtcgtaaaaatggttcggtaactttttcggcagcacctgccagctttaccggtgcccg

SEQ ID NO: 746700 - DNA, 75 bp, synthetic construct
  source 1..75: mol_type = other DNA
aggggcggtatatcactcaggatccgattgggcttaaggggggatggaatttttatcagtatccgttaaatccgg

SEQ ID NO: 746701 - DNA, 75 bp, synthetic construct
  source 1..75: mol_type = other DNA
ggctggatctctcccggaggtaacgacggaaactccgtgaaattacaagtcaagtcgcttaaagacgcattgaca

SEQ ID NO: 746702 - DNA, 75 bp, synthetic construct
  source 1..75: mol_type = other DNA
aattgcaaactccatcaataatattaatgaacagtatctgaaagtatatgaacatgccgttagttcatatactca

SEQ ID NO: 746703 - DNA, 75 bp, synthetic construct
  source 1..75: mol_type = other DNA
tagagaatttaatgctgctgatatagtaacatattttgcatcggtaaaaatcaactgcatgaatgtttactttac

SEQ ID NO: 746704 - DNA, 75 bp, synthetic construct
  source 1..75: mol_type = other DNA
tgggccagcaacagcagggatagatgatttgggtgaaattttagctaaaatgaaacagagaacatcgagaggaat

SEQ ID NO: 746705 - DNA, 75 bp, synthetic construct
  source 1..75: mol_type = other DNA
aatggcggatatggagcgagacccaacaaaccgcctacgcccgatccaagtaagttgccagacatagcgaaacaa

SEQ ID NO: 746706 - DNA, 75 bp, synthetic construct
  source 1..75: mol_type = other DNA
cgataaccatgacctttgccgccactgagcgatcgctacgattctcacttattgccaggtgggcaaaaacgcggt

SEQ ID NO: 746707 - DNA, 75 bp, synthetic construct
  source 1..75: mol_type = other DNA
atattgctgatgcaaaatcttctgaagattatagcgtcctgtgtaactgtgattcaaaacacagcgatggcgctt

SEQ ID NO: 746708 - DNA, 75 bp, synthetic construct
  source 1..75: mol_type = other DNA
gaaaatgattcccgtgatatgggggcgtttatccgtgggtgtgacgaactgaaacggcgcacaggggcaacggtg

SEQ ID NO: 746709 - DNA, 75 bp, synthetic construct
  source 1..75: mol_type = other DNA
cggctactgaaactcgcgcgggaaggccgcaaaatgagcagccgcgatctggctgattttgcccctgcacgtcga

SEQ ID NO: 746710 - DNA, 75 bp, synthetic construct
  source 1..75: mol_type = other DNA
aggtgggatcagtcagggtgaactgacaggtggcggaaacctgaatgttacagggggaacgctggctatcgaggg

SEQ ID NO: 746711 - DNA, 75 bp, synthetic construct
  source 1..75: mol_type = other DNA
gctttttgttgctgattagcctcagcacaggagtgcaggccgcgaaaaagatcgcgacgttatacgttcctgcag

SEQ ID NO: 746712 - DNA, 75 bp, synthetic construct
  source 1..75: mol_type = other DNA
tatggcgtatgactctggaattcttgagtggggtgaagacgaaatttttgcaacgctgataaccgcttttgatat

SEQ ID NO: 746713 - DNA, 75 bp, synthetic construct
  source 1..75: mol_type = other DNA
tgccggaaagggtctgatccctgtgagtactgtgcctgcgatgaacacttactttcgtgctgccgcgactttgcc

SEQ ID NO: 746714 - DNA, 75 bp, synthetic construct
  source 1..75: mol_type = other DNA
aggactgcggtcaccgtatagaaataattaaggccaattcagcgcaatattatgggaccgccgggcgggtattta

SEQ ID NO: 746715 - DNA, 75 bp, synthetic construct
  source 1..75: mol_type = other DNA
ccaaacccgagaaacaaaatttaatttcccgattggcaaatcgtacttatcattattataaaaatctgactttcg

SEQ ID NO: 746716 - DNA, 75 bp, synthetic construct
  source 1..75: mol_type = other DNA
gcagcactgaagctgattgcggagaaggtgaagaaggggtatgtggagcaagtagacgctaacgctcactcacat

SEQ ID NO: 746717 - DNA, 75 bp, synthetic construct
  source 1..75: mol_type = other DNA
aggtgaacttcctgatgcaggcggcaacgggttttatcaacatcgagcagaacagcatcatcaaaatcttctcgg

SEQ ID NO: 746718 - DNA, 75 bp, synthetic construct
  source 1..75: mol_type = other DNA
tgtcgatattgttgacggtcgttttgatgccgggatacgcctgggtgaaattgtggataaggatatggttgcagt

SEQ ID NO: 746719 - DNA, 75 bp, synthetic construct
  source 1..75: mol_type = other DNA
tgtcgatattgttgacggtcgttttgatgccgggatacgcctgggtgaaattgtcgataacgatatggttgcagt

SEQ ID NO: 746720 - DNA, 75 bp, synthetic construct
  source 1..75: mol_type = other DNA
tgtcgatattgttgacggtcgttttgatgccgggatacgcctgggtgaaattgtagataaagatatggttgcagt

SEQ ID NO: 746721 - DNA, 75 bp, synthetic construct
  source 1..75: mol_type = other DNA
ttctgatgaatccatcagcagataacatcgcgaaattattcgcagccatgatattagttgtttttttacttgggg

SEQ ID NO: 746722 - DNA, 75 bp, synthetic construct
  source 1..75: mol_type = other DNA
gagaatcaaagcgctggctgctgtaaacaacgcaattatccaactcatggtctatggtgtgccatcactgaacag

SEQ ID NO: 746723 - DNA, 75 bp, synthetic construct
  source 1..75: mol_type = other DNA
tgtcgatattgttgagggtcgttttgatgccgggatacgcctgggtgaaattgtggataacgatatggttgcagt

SEQ ID NO: 746724 - DNA, 75 bp, synthetic construct
  source 1..75: mol_type = other DNA
acagacatggtgagcaaattttctagtattgctttagagtacttctgtatatttacatccctttttgtttttaaa

SEQ ID NO: 746725 - DNA, 75 bp, synthetic construct
  source 1..75: mol_type = other DNA
gcgcatgaaagcccgcgtcctgagcagctttttgactgtgtgcgtcacacactgaaatctcttgaactctcaaaa

SEQ ID NO: 746726 - DNA, 75 bp, synthetic construct
  source 1..75: mol_type = other DNA
caaaagtgcgctgctgggctggaccagcttcctcggcacaccggaagaacgaccctcagtcaccatcagggtacg

SEQ ID NO: 746727 - DNA, 75 bp, synthetic construct
  source 1..75: mol_type = other DNA
tgggcgcaatgcgcctgggcgataacaaaagtgcgctgctgggctggaccagcttcctcggcacaccggaagaac

SEQ ID NO: 746728 - DNA, 75 bp, synthetic construct
  source 1..75: mol_type = other DNA
tgaagctacgcgtggacacgacatctcgacagcccatagattctacctgccgattcacttacatactgaatatgt

SEQ ID NO: 746729 - DNA, 75 bp, synthetic construct
  source 1..75: mol_type = other DNA
ggcgatagttctactcaaccatctatgtcgaaaatttcggacagcagggtatccatgtcagcctgtcctggatta

SEQ ID NO: 746730 - DNA, 75 bp, synthetic construct
  source 1..75: mol_type = other DNA
tgattcgacttgtccgggcctcgcagaacatgacactctaaactcacaaacagactggttttgtactgagctggc

SEQ ID NO: 746731 - DNA, 75 bp, synthetic construct
  source 1..75: mol_type = other DNA
atgtggttgaagcccaggctccgaagcagttgcagctcaaccgcttcctgccaccgacgccggtacgtatgctgc

SEQ ID NO: 746732 - DNA, 75 bp, synthetic construct
  source 1..75: mol_type = other DNA
atgttgttgattcgagagggattaaaggtcgcgttattgcggtcgatcccagcagcccggtcactggcggtagca

SEQ ID NO: 746733 - DNA, 75 bp, synthetic construct
  source 1..75: mol_type = other DNA
ttgcagcgtcaactttgctatctcacctgaaacccaggtcgttgattttggccgatttaacgtgctggatattcg

SEQ ID NO: 746734 - DNA, 75 bp, synthetic construct
  source 1..75: mol_type = other DNA
ccgaaaacagttcctctcttttctgccgtccggcgaaaacttcctgccactgacgatgttcgtgtccttcatcct

SEQ ID NO: 746735 - DNA, 75 bp, synthetic construct
  source 1..75: mol_type = other DNA
aagtcattgaactgttgcaacagcatcaacacgacgacttcgtcctgtgttcggtctggtacgaagacgatgtac

SEQ ID NO: 746736 - DNA, 75 bp, synthetic construct
  source 1..75: mol_type = other DNA
gtaataatatttcattagatcctatgtcaatgaatatgcatactgaactggatatcacttccactgaagttattc

SEQ ID NO: 746737 - DNA, 75 bp, synthetic construct
  source 1..75: mol_type = other DNA
ctgatcagatcgataactttgcggcgagggcgaaaggttgtgaggcccgtggtgactgtggtcagatcgtgaaag

SEQ ID NO: 746738 - DNA, 75 bp, synthetic construct
  source 1..75: mol_type = other DNA
atgaaaatctcaaaggtatctgacgaacatttttctaattacaacatgttgccgaatggtaatgaaggaattgat

SEQ ID NO: 746739 - DNA, 75 bp, synthetic construct
  source 1..75: mol_type = other DNA
tgtcattggagggatgcttgcatgtggctatatacttttacgtcatgccatggaggccagaaagatgagtgtgat

SEQ ID NO: 746740 - DNA, 75 bp, synthetic construct
  source 1..75: mol_type = other DNA
ttgtaaatatggttctttggtcgaaatttacagaattttggatgcaagggttttatacaaaaatcaaggttatct

SEQ ID NO: 746741 - DNA, 75 bp, synthetic construct
  source 1..75: mol_type = other DNA
aataataaataattctaataagacttcaaatttgaatatttctcgctctgactctaacttgagcatttttcatgg

SEQ ID NO: 746742 - DNA, 75 bp, synthetic construct
  source 1..75: mol_type = other DNA
aagattaatatttaatgctggtttaaatatggttaataacaatatccgtttcggagtggaggcggaaaaatctat

SEQ ID NO: 746743 - DNA, 75 bp, synthetic construct
  source 1..75: mol_type = other DNA
atgctggtttaaatatggttaataacaatatccgtttcggagtggaggcggaaaaatctatattaggaaactata

SEQ ID NO: 746744 - DNA, 75 bp, synthetic construct
  source 1..75: mol_type = other DNA
aatattacacaaataggagattattctcctcaactagttgaatggacgggctcagtcgagaatgctgagaaatgg

SEQ ID NO: 746745 - DNA, 75 bp, synthetic construct
  source 1..75: mol_type = other DNA
tttgccgtccttctttgctatctgaaaaatgtcggctttgccccggataaaaaaatcccaccctctgatgcgctg

SEQ ID NO: 746746 - DNA, 75 bp, synthetic construct
  source 1..75: mol_type = other DNA
attgcatattattgaaggtcgtgaagggggaagggtaacgcagatcccttgcccgctgttgctccgttgttccac

SEQ ID NO: 746747 - DNA, 75 bp, synthetic construct
  source 1..75: mol_type = other DNA
ttattttgctgggtggtgcgtgtctatttattgttggttttttattcaggaagtgtgcgcatgataaaatcaata

SEQ ID NO: 746748 - DNA, 75 bp, synthetic construct
  source 1..75: mol_type = other DNA
gactttggcatatcaaatcagatacgaaatgaaagtaagattttaattgttcaagataataaagaaagtatacga

SEQ ID NO: 746749 - DNA, 75 bp, synthetic construct
  source 1..75: mol_type = other DNA
atggcaaggaggcagattctttctctgtcggaaagagaatcattactggcattgccagacgatgagttaacgctg

SEQ ID NO: 746750 - DNA, 75 bp, synthetic construct
  source 1..75: mol_type = other DNA
tggtttccatacggttacacctttagtagatgttagagagtcagataaaactaaagactggttgctaaaaggatt

SEQ ID NO: 746751 - DNA, 75 bp, synthetic construct
  source 1..75: mol_type = other DNA
tgttccactgattcaccatatccagaaactgactgaaagagttgatgaacttgagtcagaattgaagttgttatc

SEQ ID NO: 746752 - DNA, 75 bp, synthetic construct
  source 1..75: mol_type = other DNA
tgttccactgattcaccatatccagaagctgactgaaagagttgatgaacttgagtcagaattaaagttgttatc

SEQ ID NO: 746753 - DNA, 75 bp, synthetic construct
  source 1..75: mol_type = other DNA
gcatttcgatgtgccagtccgatccaatggtggtgccgtttggcggcgcggaaatttactacggtactaaccccc

SEQ ID NO: 746754 - DNA, 75 bp, synthetic construct
  source 1..75: mol_type = other DNA
aaatatttaaaaggcattgcattatcatcaccgctacctgcagatgcatttgtacgaaaattgttagcttcatta

SEQ ID NO: 746755 - DNA, 75 bp, synthetic construct
  source 1..75: mol_type = other DNA
tttttagtcgactacatcccttcaggactgctcgcatcattaagacgacaccaaacagcaaactcaatgtctaac

SEQ ID NO: 746756 - DNA, 75 bp, synthetic construct
  source 1..75: mol_type = other DNA
ctagaagatattactatattagatattgaagggaaggagcatgaaatacctaactcttataatatagtttccaaa

SEQ ID NO: 746757 - DNA, 75 bp, synthetic construct
  source 1..75: mol_type = other DNA
actgtattgcaggaagtgggtaaaaccaaatctgacttgtacgccacaggatgattcccagtatccagggatgga

SEQ ID NO: 746758 - DNA, 75 bp, synthetic construct
  source 1..75: mol_type = other DNA
tacaaattggttaggatcaatcgatgggaataatattacgcttacaatgaataataataattggcttgccaatca

SEQ ID NO: 746759 - DNA, 75 bp, synthetic construct
  source 1..75: mol_type = other DNA
accaaacaaggaaaagtagtaggtgataattcattacgagcatttagtgtagaattaaataatatgtacaaacga

SEQ ID NO: 746760 - DNA, 75 bp, synthetic construct
  source 1..75: mol_type = other DNA
gcatgatgattctgatcctggcaccgaccgtccttattggtttattgctgagtactgagagatcccctcataatt

SEQ ID NO: 746761 - DNA, 75 bp, synthetic construct
  source 1..75: mol_type = other DNA
agcattttaagcagttcgaagcatccccagtgttatttgtcggctccggtgtgtctcgtcgttatcttggtgtgc

SEQ ID NO: 746762 - DNA, 75 bp, synthetic construct
  source 1..75: mol_type = other DNA
ttttggcgtctcacaaggcaaggcgacgaaagagaaagtgatcgagcaggaacgagtcagcgccgcgccgttttg

SEQ ID NO: 746763 - DNA, 75 bp, synthetic construct
  source 1..75: mol_type = other DNA
ctacgttacccattcgtcgtgatagcccgaagaaggcaatcactttgattctggcggtgctgctgggcggcatgg

SEQ ID NO: 746764 - DNA, 75 bp, synthetic construct
  source 1..75: mol_type = other DNA
cgacaggttccacatctacggatgaaaacaatacaatacaacaacaaatcacaagagtaaaatcttcagttgaat

SEQ ID NO: 746765 - DNA, 75 bp, synthetic construct
  source 1..75: mol_type = other DNA
gcattactggcagccttctgctctgtacagaagttcaggcccagccttataaccggacgctgcctgctgtcgtca

SEQ ID NO: 746766 - DNA, 75 bp, synthetic construct
  source 1..75: mol_type = other DNA
atgcagtcattgagaaattgcagggggacactgttgctgggtggacttcagtcatgattgccattttcttccttg

SEQ ID NO: 746767 - DNA, 75 bp, synthetic construct
  source 1..75: mol_type = other DNA
cagtatggaaaaatattattgttagtgacgagtccctgacaagatgtgtccttgacccacgatattcagacagtc

SEQ ID NO: 746768 - DNA, 75 bp, synthetic construct
  source 1..75: mol_type = other DNA
ggacccttacagggattcgctatgaaatatcgcagcgaaaatatattgttatgaatcccgccgattatgataaat

SEQ ID NO: 746769 - DNA, 75 bp, synthetic construct
  source 1..75: mol_type = other DNA
ggcgaaatgaacatccaggagaaacggaaagaccaatattaaaacatattgaacacttgagaaaccatcatcatc

SEQ ID NO: 746770 - DNA, 75 bp, synthetic construct
  source 1..75: mol_type = other DNA
aagattttcatcgttgaccgtgtcgatgcgatgaacccagaaacggagcgcgagaggctgaaggaatttgcgacc

SEQ ID NO: 746771 - DNA, 75 bp, synthetic construct
  source 1..75: mol_type = other DNA
atgctgaaggggcgtagggcgctgaatggatttttggtcaaaagtccccgtgcgtttgaagagtttacgatggtg

SEQ ID NO: 746772 - DNA, 75 bp, synthetic construct
  source 1..75: mol_type = other DNA
gctcgttcaggacaacgactatgacctggtctcccacgatgtccttttggcacatgcataccatcagacggagga

SEQ ID NO: 746773 - DNA, 75 bp, synthetic construct
  source 1..75: mol_type = other DNA
catcactcgcaattgtagtgccatgttacaacgaaaaggacgcgttccctttctgtttggatggtttaacgtcag

SEQ ID NO: 746774 - DNA, 75 bp, synthetic construct
  source 1..75: mol_type = other DNA
ctttgcagcacatcgtccggcgactgcgtgaaaattacaaagaccggttggtgctgaaaaagagcggcttctctg

SEQ ID NO: 746775 - DNA, 75 bp, synthetic construct
  source 1..75: mol_type = other DNA
gcaggacaaaattttcgtccgccatttcaataaacttcatcctactgacccgtccaggtggagacgctacacccg

SEQ ID NO: 746776 - DNA, 75 bp, synthetic construct
  source 1..75: mol_type = other DNA
ttaccttcacgtttaatctggtggctgaaatcaaaagcaaaaaatccggtgataaaacgccgccggattattttg

SEQ ID NO: 746777 - DNA, 75 bp, synthetic construct
  source 1..75: mol_type = other DNA
atgggcgtcgatatcagccatgtccatacgaaacacggcgttaccgcacaaactcaggtggaactgcacgacaat

SEQ ID NO: 746778 - DNA, 75 bp, synthetic construct
  source 1..75: mol_type = other DNA
aagctggaggtgacactgatgtcggcaaacaaccccgttggggggaatatgtgggtcgacattcagacgccggaa

SEQ ID NO: 746779 - DNA, 75 bp, synthetic construct
  source 1..75: mol_type = other DNA
ggcaacctcgataaagcagggaacagtgacggcatccctgatgctgaaaaagcttgccagctactcaaagcaaaa

SEQ ID NO: 746780 - DNA, 75 bp, synthetic construct
  source 1..75: mol_type = other DNA
gcgaagcgctggagtcgatgattaagcatgaggcgacccgtccgttggtgttctcaccaaactactatcagactc

SEQ ID NO: 746781 - DNA, 75 bp, synthetic construct
  source 1..75: mol_type = other DNA
aatgcggtgaacgtggcggtgtattgcactcgctacggcataaagccaggatgcattacctgggtgggcgatgat

SEQ ID NO: 746782 - DNA, 75 bp, synthetic construct
  source 1..75: mol_type = other DNA
gtgcacgcggcaatctggggacatgcggaagacgcattcccacagctgcacgctgcgggcaaacttaccgctttc

SEQ ID NO: 746783 - DNA, 75 bp, synthetic construct
  source 1..75: mol_type = other DNA
tggccgtgccagcaatatgctgttggagaacggtggtagtctgactgtccttccaggacattctgttaaagatac

SEQ ID NO: 746784 - DNA, 75 bp, synthetic construct
  source 1..75: mol_type = other DNA
atgaatacggatattgctgctcacaccggagatttgttgaatgtaaagggaaatgccagcggtaactttgtgctg

SEQ ID NO: 746785 - DNA, 75 bp, synthetic construct
  source 1..75: mol_type = other DNA
tggaggggccattatcacagatacggcggcaaccgtaagcggatccaatactaatggcgagttcagtgtcgctga

SEQ ID NO: 746786 - DNA, 75 bp, synthetic construct
  source 1..75: mol_type = other DNA
atctggaaaagcaaccggataccggcttccggtaagtttcgtcggttgagaccagctaaagtcggaaggtcaaaa

SEQ ID NO: 746787 - DNA, 75 bp, synthetic construct
  source 1..75: mol_type = other DNA
ggctgccgcgctcattcacccgcgtctgggtgctgaccgacaccgggcgggagaccaccggctacgtcaaatcgg

SEQ ID NO: 746788 - DNA, 75 bp, synthetic construct
  source 1..75: mol_type = other DNA
ctcgctttaggaccttatccgcttttgacgcttgcacaggcaagacgcatgcgtgaagaggcccaattactgctg

SEQ ID NO: 746789 - DNA, 75 bp, synthetic construct
  source 1..75: mol_type = other DNA
tcaaaggcaaaaaagcgggcacgcatacggttaccgcaacgctgagtaataacaataccagtgattcacagccgg

SEQ ID NO: 746790 - DNA, 75 bp, synthetic construct
  source 1..75: mol_type = other DNA
atggggagatatggggcattacacgactgaagctggttttcaatcaaatatgtattggtcatctagtcccgcaaa

SEQ ID NO: 746791 - DNA, 75 bp, synthetic construct
  source 1..75: mol_type = other DNA
caatttcatcgccaataacattggaatgaccaggctacaggcaacagtgactgatggaaacggcaacccagtaga

SEQ ID NO: 746792 - DNA, 75 bp, synthetic construct
  source 1..75: mol_type = other DNA
tcggtttggtgaaggggttgtggagtccgtggatacagcccgtattcctgatagcaataagcgctggcgtgggag

SEQ ID NO: 746793 - DNA, 75 bp, synthetic construct
  source 1..75: mol_type = other DNA
aaaattaattctgtttgtcgcgatggacggttggacaatgttatcgaaaggactcattttacaatattttgacct

SEQ ID NO: 746794 - DNA, 75 bp, synthetic construct
  source 1..75: mol_type = other DNA
tgttttattaaattctcgattgtttttgttattgtccgaaacgctttgggacttcagcaagtgccatcaaatatg

SEQ ID NO: 746795 - DNA, 75 bp, synthetic construct
  source 1..75: mol_type = other DNA
ttcagcagaggcgaaactgagccaaacagaagtgaatagccacgacgggatcgccacagctacgctgaccagttt

SEQ ID NO: 746796 - DNA, 75 bp, synthetic construct
  source 1..75: mol_type = other DNA
ggatgtcgctgtcgcgtaaaccggaggagacctggtacgggtgggacggtgacaggctgacgacggtacagaccg

SEQ ID NO: 746797 - DNA, 75 bp, synthetic construct
  source 1..75: mol_type = other DNA
tgccttgtatatttagctctcgtagaggctggtgttggaggggcagctattgtagcactattcaaaccattgtca

SEQ ID NO: 746798 - DNA, 75 bp, synthetic construct
  source 1..75: mol_type = other DNA
gtgaccctcagtaataacggtatatatactaccaactactacggctatttttacgcaagctttaccgctacaaaa

SEQ ID NO: 746799 - DNA, 75 bp, synthetic construct
  source 1..75: mol_type = other DNA
cggcccaggtaaacaccaccgaagatgagtttcaggaggctgccgggaagcgacgagaattacgcaaaaaactgg

SEQ ID NO: 746800 - DNA, 75 bp, synthetic construct
  source 1..75: mol_type = other DNA
cattctgtcaaagacatctatgcatggcgcaggcttcctctcaaacatgatgaaataatccgtttttcaaagaaa

SEQ ID NO: 746801 - DNA, 75 bp, synthetic construct
  source 1..75: mol_type = other DNA
gtaggtgccaattatggtaaagatattggaacccttgttttcacaacaaatgatttaacagatattacattgatg

SEQ ID NO: 746802 - DNA, 75 bp, synthetic construct
  source 1..75: mol_type = other DNA
gggaaatcaggcagatcaacaatgtcagtttgcttttagtacaccggattcagaaccaacaacctctgtattaca

SEQ ID NO: 746803 - DNA, 75 bp, synthetic construct
  source 1..75: mol_type = other DNA
atcatctgctcaaaaccatcagcggcataggtgatataccagtgagccggatgagcaaaagagctttgatggatt

SEQ ID NO: 746804 - DNA, 75 bp, synthetic construct
  source 1..75: mol_type = other DNA
tcatcagatgggcagaacttcagaactggtaattctggtcgttatgctgggcagattaacccgaaatatgggcaa

SEQ ID NO: 746805 - DNA, 75 bp, synthetic construct
  source 1..75: mol_type = other DNA
ccggcgttggttttggtattggtgctttgtttacaatcgtgcgcttgcctattcctgtaccaaatgtattaccgg

SEQ ID NO: 746806 - DNA, 75 bp, synthetic construct
  source 1..75: mol_type = other DNA
tatgggcaactgatcgatatccttatcgatataaagtcaatatatgctatggcctcgaattatcatcagcgcatc

SEQ ID NO: 746807 - DNA, 75 bp, synthetic construct
  source 1..75: mol_type = other DNA
atcagccagacaatatttgatggggtaagtctgtatgcctccggttcgcagcaagactattggggcaataacgat

SEQ ID NO: 746808 - DNA, 75 bp, synthetic construct
  source 1..75: mol_type = other DNA
ccagcaactgcgagtatagagtaaacagtttgctacttaacgacggtaatgtttatttatcagcacaaacagcag

SEQ ID NO: 746809 - DNA, 75 bp, synthetic construct
  source 1..75: mol_type = other DNA
aacgctgagttacaacatgcgtctggggaacggcatggaagttgagccgtggctgaaggcggctgtgcgcaaaga

SEQ ID NO: 746810 - DNA, 75 bp, synthetic construct
  source 1..75: mol_type = other DNA
agcgtaagggcatgaaaataaatgctcaactattatcgcatttatcaccattaggttgggaacatatcaatctga

SEQ ID NO: 746811 - DNA, 75 bp, synthetic construct
  source 1..75: mol_type = other DNA
atgttatccctcaagaagtatttagaggatgtaagtctgatatcttagaaatcatgaatccttattctttggggc

SEQ ID NO: 746812 - DNA, 75 bp, synthetic construct
  source 1..75: mol_type = other DNA
ccaaatgagtttatggatgttgagattcaggatacaattagaatacaggaattaaagatacaaaaaataatgaac

SEQ ID NO: 746813 - DNA, 75 bp, synthetic construct
  source 1..75: mol_type = other DNA
ctgttctgcgcttcaccgacggctcgcatgttgagttgacgccaggcgtgcacagctttgaaaagcgcgtgaccg

SEQ ID NO: 746814 - DNA, 75 bp, synthetic construct
  source 1..75: mol_type = other DNA
gccccgttatttcagcgctaactccttacatggtaagaacaaaaaactatattattttttacaaaattatagtgg

SEQ ID NO: 746815 - DNA, 75 bp, synthetic construct
  source 1..75: mol_type = other DNA
gttgacggcacgctgaaaggcaacagttatatgcagtggatgatcccagggcttcatctggaactgggccaaaca

SEQ ID NO: 746816 - DNA, 75 bp, synthetic construct
  source 1..75: mol_type = other DNA
gggcggcgcgctgcgcgaacagctggagattggcgttaatctttccggtccggtggatatggatttacgcgccca

SEQ ID NO: 746817 - DNA, 75 bp, synthetic construct
  source 1..75: mol_type = other DNA
gtcaccggcggctggcgcgatctcaccttgtctgacgttcgttatgagcagccaggcgtggcggtaaaagcgggc

SEQ ID NO: 746818 - DNA, 75 bp, synthetic construct
  source 1..75: mol_type = other DNA
gttatggggcgcatcgataatgggggttgggtccgccaatgtgatggtgcaacttgccgctgataatatcgcaaa

SEQ ID NO: 746819 - DNA, 75 bp, synthetic construct
  source 1..75: mol_type = other DNA
ctgccggcagcaactctatttttggtcgactggtcaatgccgttagcggcttatctgatgccgcaaaggcttttc

SEQ ID NO: 746820 - DNA, 75 bp, synthetic construct
  source 1..75: mol_type = other DNA
ttaaaattgattgggtttaacctaacaagaatgactaactggacagccacttatctgagcggtacaggtaccaca

SEQ ID NO: 746821 - DNA, 75 bp, synthetic construct
  source 1..75: mol_type = other DNA
caacgtttgtattgcgtttgtctctcactgaggtacgtcagtttactgcaacgctacctcctcttaataagcaga

SEQ ID NO: 746822 - DNA, 75 bp, synthetic construct
  source 1..75: mol_type = other DNA
ggcacgcagatgatgcgcatgttcgtatccgggcggaaaccttatgcggggatccacacagtagatcactgccct

SEQ ID NO: 746823 - DNA, 75 bp, synthetic construct
  source 1..75: mol_type = other DNA
gggagagtatggcgcactacaacatatattaccaaccgatctataacgcaaaaaatggaaatattgctggatgtg

SEQ ID NO: 746824 - DNA, 75 bp, synthetic construct
  source 1..75: mol_type = other DNA
cgagttatatactgacgtaagaaacaagcttgttcatgatggtaaagatttttacgaacttaacgtcaacgcgaa

SEQ ID NO: 746825 - DNA, 75 bp, synthetic construct
  source 1..75: mol_type = other DNA
gatggcattacatttaaatataccaaggatagttatcaaaaaagcagtatcgaaattctagaagacttctcaata

SEQ ID NO: 746826 - DNA, 75 bp, synthetic construct
  source 1..75: mol_type = other DNA
ggaaatcagggagcattacaccgataccgctggtttcaccgatcatgtctttgccctgatgcatctgctgggatt

SEQ ID NO: 746827 - DNA, 75 bp, synthetic construct
  source 1..75: mol_type = other DNA
gtgataaagaaaatggggctattccctcatttgactatagctccttatctcggttattacggtataatcgtgttg

SEQ ID NO: 746828 - DNA, 75 bp, synthetic construct
  source 1..75: mol_type = other DNA
tatcttcaaaagggagtgctgaaggctctggagggtaaacctgatgtgagcttttacccaccaagactgacgatt

SEQ ID NO: 746829 - DNA, 75 bp, synthetic construct
  source 1..75: mol_type = other DNA
atattgacccggatattgttggagagttccttgcgctgctggattcgcgctgcaggacaacggaagaggttattg

SEQ ID NO: 746830 - DNA, 75 bp, synthetic construct
  source 1..75: mol_type = other DNA
acaacccggatgataaaatgatctccgcttttgctaactatgctgtacaaactgaaaattggcagcaaaatgcgt

SEQ ID NO: 746831 - DNA, 75 bp, synthetic construct
  source 1..75: mol_type = other DNA
gcgggtcctttccggcgatccagaacgttacggggcgtcaggcgcgcagtttttctctatttatggaaattttcc

SEQ ID NO: 746832 - DNA, 75 bp, synthetic construct
  source 1..75: mol_type = other DNA
gataacaaaaaggcaacactatgacatcggaaaacccgttactggcgctgcgagagaaaatcagcgcgctggatg

SEQ ID NO: 746833 - DNA, 75 bp, synthetic construct
  source 1..75: mol_type = other DNA
tattaaaatatgactactttgatgtaaatgagtataaaaaaatattacttatgacacatcttttattgacaaaga

SEQ ID NO: 746834 - DNA, 75 bp, synthetic construct
  source 1..75: mol_type = other DNA
aagtaacgaactttcaaattaaaagtactgaaccgatctattctaatcaaacatggacaggtcaacgtatcatga

SEQ ID NO: 746835 - DNA, 75 bp, synthetic construct
  source 1..75: mol_type = other DNA
tgatgatcgaagcagtactggaccctgataatgactatacattgccagtcggtaacataatgaatatgacattta

SEQ ID NO: 746836 - DNA, 75 bp, synthetic construct
  source 1..75: mol_type = other DNA
cataaaaatattaatagattcaaacacagcaagattaaataattatactcatgataatactacatatgtaaattc

SEQ ID NO: 746837 - DNA, 75 bp, synthetic construct
  source 1..75: mol_type = other DNA
ccgttttgaaattacccattcctgtgctccctttacctatacagagacgcgcagtagccagataccagcaatcag

SEQ ID NO: 746838 - DNA, 75 bp, synthetic construct
  source 1..75: mol_type = other DNA
gcacgattaaagcaatcgatttaaccttagcgccgcatgacgtgcaggccaagggctacatccggattagcgatc

SEQ ID NO: 746839 - DNA, 75 bp, synthetic construct
  source 1..75: mol_type = other DNA
ctattttccctgctctacaaaatacagtacaggcaagtgaagcactcaaatataacaatctcatgatcgaggctg

SEQ ID NO: 746840 - DNA, 75 bp, synthetic construct
  source 1..75: mol_type = other DNA
gcatccctggctttttggggcagcggttattgccggaggaagtggggctttcactggcgtggcgagtgcggttgt

SEQ ID NO: 746841 - DNA, 75 bp, synthetic construct
  source 1..75: mol_type = other DNA
catgaagcgttatggtggtgatatagcaaaagttctggcccagtataatggaggcaatgttgctgtagggaaaga

SEQ ID NO: 746842 - DNA, 75 bp, synthetic construct
  source 1..75: mol_type = other DNA
actaccgtatcgtgggggacaaaacttgcggttatgggcgttgccgggccgtttggctttggcatgatggctcgt

SEQ ID NO: 746843 - DNA, 75 bp, synthetic construct
  source 1..75: mol_type = other DNA
acattactctctttgatattaaggaaatgattgaaagacttcgattaatgaaaccagaattgtatattgttaagt

SEQ ID NO: 746844 - DNA, 75 bp, synthetic construct
  source 1..75: mol_type = other DNA
ttaatggcccggattttaataacgacctgaataattttgctgagaacgttgcaaaggtcaccaaagctcttggcg

SEQ ID NO: 746845 - DNA, 75 bp, synthetic construct
  source 1..75: mol_type = other DNA
cgtgcagcgcagaatgattcgttactgacctctgcacatacaagtaaatatcagaatcttaccagtaacttagaa

SEQ ID NO: 746846 - DNA, 75 bp, synthetic construct
  source 1..75: mol_type = other DNA
aatggagactgtaaaatatttaattaaattattgcctcagatacagggagccttggatcaacaccctggtattat

SEQ ID NO: 746847 - DNA, 75 bp, synthetic construct
  source 1..75: mol_type = other DNA
acctcacgccagctatgcagtcaggttatcaggacacggtgagtaacctgatggtaaatggaaacagaatatcaa

SEQ ID NO: 746848 - DNA, 75 bp, synthetic construct
  source 1..75: mol_type = other DNA
agcaaaaaaccgccctgaaaaaccagatgcgatccctgctggaaaaagccgacagtgaaaaccgcagcctgaacg

SEQ ID NO: 746849 - DNA, 75 bp, synthetic construct
  source 1..75: mol_type = other DNA
ttacgctggacattaatgaggaacaactcaaacgactcgaggcggtatttgaaaaatatcgcaacgggttgatga

SEQ ID NO: 746850 - DNA, 75 bp, synthetic construct
  source 1..75: mol_type = other DNA
gcaggtaattaaaccttccgaatctctggcgtggacatctgcggacccgctgatcgacctgaaatttgcattacg

SEQ ID NO: 746851 - DNA, 75 bp, synthetic construct
  source 1..75: mol_type = other DNA
gtacccgcgcaccacacaggaaatcgtggatttttccgatgtggacatcctttcatggctgacgggtgagattgg

SEQ ID NO: 746852 - DNA, 75 bp, synthetic construct
  source 1..75: mol_type = other DNA
gatatcgttcattatttttatccttaaaagaaattattaaggagacggagcaacaggctatccttgaggaaaatg

SEQ ID NO: 746853 - DNA, 75 bp, synthetic construct
  source 1..75: mol_type = other DNA
ttcatcaacaatcagcctgccgcacgcaaaggggacaaactggagtgcagcgcggcaatcgtggaaggttcgccg

SEQ ID NO: 746854 - DNA, 75 bp, synthetic construct
  source 1..75: mol_type = other DNA
tgaggtgctgacgctgaaatttgactgtcgcccgtgtgaaatgcacgttatcggcaagattaaagatcacattct

SEQ ID NO: 746855 - DNA, 75 bp, synthetic construct
  source 1..75: mol_type = other DNA
tttgactcacaaaaattcatcggtttacccgttggcgaagtgctgaaagtggcgaaagatcaccttgatgttgaa

SEQ ID NO: 746856 - DNA, 75 bp, synthetic construct
  source 1..75: mol_type = other DNA
ttgaatcggcagcggaaaaagcagtaccactggcgaaggcctgggagaacgctgttatcaccctgacggacagca

SEQ ID NO: 746857 - DNA, 75 bp, synthetic construct
  source 1..75: mol_type = other DNA
gacgtctttattgggggtgagcaggtcacctacctgaaagccattcaccgcacggataacggcatacagacgctg

SEQ ID NO: 746858 - DNA, 75 bp, synthetic construct
  source 1..75: mol_type = other DNA
tacgacgctgcggaccggatcatccgctggtccgataaccccactgaccccagagcaaaatcagcaacgcttcaa

SEQ ID NO: 746859 - DNA, 75 bp, synthetic construct
  source 1..75: mol_type = other DNA
tatacaaagttttagtaaatattactctataactccttggcagtggttaaaacagcatcgctataaatatatagc

SEQ ID NO: 746860 - DNA, 75 bp, synthetic construct
  source 1..75: mol_type = other DNA
tgcacgctgttttttctgagttaaagcgtcttggcgcgtgggctggtgaaaatcctttagaaggtgtgcgccatt

SEQ ID NO: 746861 - DNA, 75 bp, synthetic construct
  source 1..75: mol_type = other DNA
taaagataaggagttgaaatatatagatgctgatttaaaggttgagaaaagtgaggtgtcggatagcctgtctgg

SEQ ID NO: 746862 - DNA, 75 bp, synthetic construct
  source 1..75: mol_type = other DNA
aaccaaaaagaagcccaagtctaaaaagctacaagttgaagatgagacccaggatctgtttgggtttatggaaaa

SEQ ID NO: 746863 - DNA, 75 bp, synthetic construct
  source 1..75: mol_type = other DNA
aacatcataaaattgatcaaagagttgattgatccatctgtatcggaatatttaagtcgacttccaaatcattat

SEQ ID NO: 746864 - DNA, 75 bp, synthetic construct
  source 1..75: mol_type = other DNA
ccgatggtatcaaccttggactgacaaaaatggccgaatcctgtccgggaacgaccaaatcgtcactcgagggca

SEQ ID NO: 746865 - DNA, 75 bp, synthetic construct
  source 1..75: mol_type = other DNA
ctacaaaaatcacgccaaatcaggctattgcgctgtctgacgtaggcctgataagacacgtcagcatcgcatcag

SEQ ID NO: 746866 - DNA, 75 bp, synthetic construct
  source 1..75: mol_type = other DNA
ctggcttctgtctgggcctgtgtacgtctgctgagtgaatccgtttcaaccctgccgatgaaggtatacgaacgg

SEQ ID NO: 746867 - DNA, 75 bp, synthetic construct
  source 1..75: mol_type = other DNA
atatgtttgacaggcttgagcaaaaaggaattctttttatcgatacaacagagacaaatgtcttatatgatcgca

SEQ ID NO: 746868 - DNA, 75 bp, synthetic construct
  source 1..75: mol_type = other DNA
tgttcttccacgcagccttcatcgttcgtgcagccttcgcaccgaatggcttggacatggccttcacgatctaca

SEQ ID NO: 746869 - DNA, 75 bp, synthetic construct
  source 1..75: mol_type = other DNA
gacagcgcgggccgtgctgcgtactataccagcgcgctccagaatgggtggatgtcccgcaatgacgtgcgccgt

SEQ ID NO: 746870 - DNA, 75 bp, synthetic construct
  source 1..75: mol_type = other DNA
ttcgcgttccgcctttcatggtcggtcacaccacgaagcaaagcagctgggcatccagtctggagggcatgaacc

SEQ ID NO: 746871 - DNA, 75 bp, synthetic construct
  source 1..75: mol_type = other DNA
agtattgaggaaatctgtcgctggtttcgcgttccgcctttcatggtcggtcacaccacgaagcaaagcagctgg

SEQ ID NO: 746872 - DNA, 75 bp, synthetic construct
  source 1..75: mol_type = other DNA
gactgatacagctggtttacgccaggttcatcgtaaaacatcagaaacagaagtaattaaattgaacatgcttgg

SEQ ID NO: 746873 - DNA, 75 bp, synthetic construct
  source 1..75: mol_type = other DNA
ctttttcggcattggtgtaatagtcattcctaggagttgtatatgcctcaacctgctgcaagagttactgatatg

SEQ ID NO: 746874 - DNA, 75 bp, synthetic construct
  source 1..75: mol_type = other DNA
gagggtaataaagatagccgtattaataaaaatgtcatcgttctggctggaaatcatgaaatcaattttaatggt

SEQ ID NO: 746875 - DNA, 75 bp, synthetic construct
  source 1..75: mol_type = other DNA
cctgctctcaagttacccgtcaggggagatagcacaggctgtgtatccgtgccatcgggagccaaggagttggag

SEQ ID NO: 746876 - DNA, 75 bp, synthetic construct
  source 1..75: mol_type = other DNA
acgtctggagaacgaacctcaaactgggacagggtaaataccgcgcattacgctcagtgaatagtaatatgtaca

SEQ ID NO: 746877 - DNA, 75 bp, synthetic construct
  source 1..75: mol_type = other DNA
tccctcgacagcatggcttagccattggaagctttcaggaaaaggagaacgctcgacaacttggtactggttatt

SEQ ID NO: 746878 - DNA, 75 bp, synthetic construct
  source 1..75: mol_type = other DNA
ttcgttctgttttaatgtgtgattttcggggaatggttgttccggaaatagtcaaggtcaggccagtggtagtcg

SEQ ID NO: 746879 - DNA, 75 bp, synthetic construct
  source 1..75: mol_type = other DNA
agcgatgaagagcaggcgcggcgcgtgctggaagagtacatccaggtgcgctttatcgacagcgacagcgtttag

SEQ ID NO: 746880 - DNA, 75 bp, synthetic construct
  source 1..75: mol_type = other DNA
gcatattcaagaaaaacttttcattcccaccgggaaagtataagaacaggataagcaattcctcaaaacttattc

SEQ ID NO: 746881 - DNA, 75 bp, synthetic construct
  source 1..75: mol_type = other DNA
catgaagcagtaaaacttgcaaatgattttccagatacagtcataatacttaaccatacaggacttcctgcacaa

SEQ ID NO: 746882 - DNA, 75 bp, synthetic construct
  source 1..75: mol_type = other DNA
tgattattggaaagagaatgatacattaatagattatttcttaattgattatctgatcttgctaacatatgtatc

SEQ ID NO: 746883 - DNA, 75 bp, synthetic construct
  source 1..75: mol_type = other DNA
tcaaggacatcgtatttatcttgagccacctttagatggggtgttcaaagggggagaggcattaatttatcgtcg

SEQ ID NO: 746884 - DNA, 75 bp, synthetic construct
  source 1..75: mol_type = other DNA
ggattaaatgggcaagggatttcgcgtgtagtatcttttagaaaaaaagtttgtgcgcaaaataagcttctttta

SEQ ID NO: 746885 - DNA, 75 bp, synthetic construct
  source 1..75: mol_type = other DNA
gcggataaaaccaacatgaaggaaggggccagcacgtcggcggtacagaacagcggcaacaaaaccacaaagcct

SEQ ID NO: 746886 - DNA, 75 bp, synthetic construct
  source 1..75: mol_type = other DNA
catgcagcgcgtagtggggatgccagatttacaccccggacgcggctacccgattggcgcagcgttcttctctgt

SEQ ID NO: 746887 - DNA, 75 bp, synthetic construct
  source 1..75: mol_type = other DNA
tattactgccccggatgccatcatcaatggcaaatcgacggataagcatatccaccgtggcgacagcggcggaac

SEQ ID NO: 746888 - DNA, 75 bp, synthetic construct
  source 1..75: mol_type = other DNA
aatgacaggttatccaaatgctgttgtcggtcaggcttggttaaaccatgatgatatagattctgtattaaaaat

SEQ ID NO: 746889 - DNA, 75 bp, synthetic construct
  source 1..75: mol_type = other DNA
tcgatcccggtaacggcgtccgtgcccgccagcgtgccagccgacaaaaccgaaagccagcgcatccgcgaaacc

SEQ ID NO: 746890 - DNA, 75 bp, synthetic construct
  source 1..75: mol_type = other DNA
tcacgctatctacgatttttgctttctcctgatgaaactcatggtcagtcatcactgtttctaaagggatttctc

SEQ ID NO: 746891 - DNA, 75 bp, synthetic construct
  source 1..75: mol_type = other DNA
aaaaatgttgttctcacatgcacagaaaacgctggcctgggatgccttcgcatttactgaagtgttactgactca

SEQ ID NO: 746892 - DNA, 75 bp, synthetic construct
  source 1..75: mol_type = other DNA
accggggactgccgctggcgcttatcagcgaagacggcaatacggcgtggagcgcggaatatgatgaatggggca

SEQ ID NO: 746893 - DNA, 75 bp, synthetic construct
  source 1..75: mol_type = other DNA
tgcgggtcaggtcaatctgaaatacggtcaggagccaggcgtgcagatttacacgcatatttcggatcagtacag

SEQ ID NO: 746894 - DNA, 75 bp, synthetic construct
  source 1..75: mol_type = other DNA
cagccaagcctgcggaaaaatcatatcgcctggctgatgctggaggtcttttcctctttgtccctccgtcgggta

SEQ ID NO: 746895 - DNA, 75 bp, synthetic construct
  source 1..75: mol_type = other DNA
tctttctttcaataaattacgtaatcacagcaaatgttttcgagccttctgtagtttttcaatctcccaggtatt

SEQ ID NO: 746896 - DNA, 75 bp, synthetic construct
  source 1..75: mol_type = other DNA
gtgattattctcattacaggacctttttatttgatattggtaatcaatataaggttaaacttacacaaagcggaa

SEQ ID NO: 746897 - DNA, 75 bp, synthetic construct
  source 1..75: mol_type = other DNA
atgcccgtattgcggactttaaaaagcagggcaccacgctgctgctggtctcacacagcgccggggatatcgtca

SEQ ID NO: 746898 - DNA, 75 bp, synthetic construct
  source 1..75: mol_type = other DNA
cagagtattattacctgaagatgttaatacgacgggaatatataatttaacagcagtatgtactcttaatggtta

SEQ ID NO: 746899 - DNA, 75 bp, synthetic construct
  source 1..75: mol_type = other DNA
tatcaccagtaacgcgctggaatacgtgcgcgaaaacgtgtttaccaacgctgcagcaccagtggcagaaggtac

SEQ ID NO: 746900 - DNA, 75 bp, synthetic construct
  source 1..75: mol_type = other DNA
attaggtatgggcttccacccggattttactgggcggcagaatgtctacatgtctggactaatgatgggtctatc

SEQ ID NO: 746901 - DNA, 75 bp, synthetic construct
  source 1..75: mol_type = other DNA
tatcaatttcagcattgaacccggtgaagcggtcggcattgttggggtgaacggcgcaggtaaaagtacgttact

SEQ ID NO: 746902 - DNA, 75 bp, synthetic construct
  source 1..75: mol_type = other DNA
ggcaccgcccgtgacgtgaccaaccgttatctggatgagctgtttggaaaagccgacaaaaacagcgcgccaaaa

SEQ ID NO: 746903 - DNA, 75 bp, synthetic construct
  source 1..75: mol_type = other DNA
gttatcggaccctatcctgaaatttctcttaccgaagcccgggcccggcaggctgaagcgaagatgaaattgctg

SEQ ID NO: 746904 - DNA, 75 bp, synthetic construct
  source 1..75: mol_type = other DNA
taactgcaaaagaatcctttgattataatggagttatcattgaacaaggcattccatgtgagatacaggttagat

SEQ ID NO: 746905 - DNA, 75 bp, synthetic construct
  source 1..75: mol_type = other DNA
ttacatcgctacagggggaggcaaatattgctggtggagagcagaagcgcattaatggaatcagtgaagtgttca

SEQ ID NO: 746906 - DNA, 75 bp, synthetic construct
  source 1..75: mol_type = other DNA
aaaaacagccttaacgaatggaagggacttcccctgattatgcgcctgattaactcttgtgcaatcatggggtaa

SEQ ID NO: 746907 - DNA, 75 bp, synthetic construct
  source 1..75: mol_type = other DNA
gttcccgaataaggattttaatatatggcacttcccgcaagagatgcgagctatgccgggttccaagagtatccg

SEQ ID NO: 746908 - DNA, 75 bp, synthetic construct
  source 1..75: mol_type = other DNA
atgaagaagctggttaagtctgtgacgatgcacgactctaagcaccatctgggattgcaggttgtggacatcctg

SEQ ID NO: 746909 - DNA, 75 bp, synthetic construct
  source 1..75: mol_type = other DNA
gtgctgaatggtgacaatactgacgaaaacaaacagcctaatctgggcaaggacgtggcgagcgctacggacaag

SEQ ID NO: 746910 - DNA, 75 bp, synthetic construct
  source 1..75: mol_type = other DNA
taaagttgccagtatcatggatgagtttacttacctatcttatgatcctgaatgtaatttattgcaactgacacc

SEQ ID NO: 746911 - DNA, 75 bp, synthetic construct
  source 1..75: mol_type = other DNA
atatttatgtgcccaacacgaatggacacacaaggcgtatccagagatgaagcaatgtcttctggattagttccg

SEQ ID NO: 746912 - DNA, 75 bp, synthetic construct
  source 1..75: mol_type = other DNA
tatgcgatcgtaactggcagggctaagtacaacccatcaagagaccttgctggcgctatgcgtggctaccggaaa

SEQ ID NO: 746913 - DNA, 75 bp, synthetic construct
  source 1..75: mol_type = other DNA
atgctagattttaaaaaaatgaatgctaatcaagctgacggcgacattgtggtttatggcgactcgctcatacaa

SEQ ID NO: 746914 - DNA, 75 bp, synthetic construct
  source 1..75: mol_type = other DNA
aactctgctcagtgcaacacaagctgatactatacggctacgcgattcttgtgataattgctggctatcagttat

SEQ ID NO: 746915 - DNA, 75 bp, synthetic construct
  source 1..75: mol_type = other DNA
atagaagaattctcaactttgttacagcatttttctcgacaggagtacaataacaaacgacttattatggtaaca

SEQ ID NO: 746916 - DNA, 75 bp, synthetic construct
  source 1..75: mol_type = other DNA
ccatcctttgcgaagagcgcctggcgctggcccactatcgcccggcagcgattgtgacgggtgatattgctgtca

SEQ ID NO: 746917 - DNA, 75 bp, synthetic construct
  source 1..75: mol_type = other DNA
ggatctcttcctgcccgccagccagggaagagctaactacggctcgctgttattcaacaccaacggcgtactggg

SEQ ID NO: 746918 - DNA, 75 bp, synthetic construct
  source 1..75: mol_type = other DNA
cggcggggccgcagggaccaaaaggggatacaggagccacaggtccggcaggaccgcagggaccgaaaggggata

SEQ ID NO: 746919 - DNA, 75 bp, synthetic construct
  source 1..75: mol_type = other DNA
ctcggtctggtatgggcttcgttaggcggcgcatatttgtggtatctgatccgccgctatcgcaaagtgccgttg

SEQ ID NO: 746920 - DNA, 75 bp, synthetic construct
  source 1..75: mol_type = other DNA
tctttgccaccgcaggcaccgacacttacgacggttccggcggctgggtgtacagctccggcaccggaacgtggc

SEQ ID NO: 746921 - DNA, 75 bp, synthetic construct
  source 1..75: mol_type = other DNA
ccggcggctgggtgtacagctccggcaccggaacgtggctggcgaacggcgggatggacgtggttgatttccggc

SEQ ID NO: 746922 - DNA, 75 bp, synthetic construct
  source 1..75: mol_type = other DNA
caccggttttaacacctcgacatttaccaatatcgaaggcatttccggctcgaattttaacgacattctgaccgg

SEQ ID NO: 746923 - DNA, 75 bp, synthetic construct
  source 1..75: mol_type = other DNA
ggcagggcctcagggtccaaaaggagatacgggagccgcaggtccggcaggacctcaggggccaaagggagacac

SEQ ID NO: 746924 - DNA, 75 bp, synthetic construct
  source 1..75: mol_type = other DNA
ttctaaaaccacttaacccacaatatccgatgattgagatcaacgggaactgcaaaatcatcggtgtagttgtcg

SEQ ID NO: 746925 - DNA, 75 bp, synthetic construct
  source 1..75: mol_type = other DNA
agcgtgcaatagataactggtacgatacaaccgtagactgttcagaagattcgttttggttggacgtgaagggag

SEQ ID NO: 746926 - DNA, 75 bp, synthetic construct
  source 1..75: mol_type = other DNA
tacttttggcattgtgtccggcattagcgacggtcacgttccggcatcctacctgctggcgctggcaggcgtgct

SEQ ID NO: 746927 - DNA, 75 bp, synthetic construct
  source 1..75: mol_type = other DNA
accttcgtcgccattttaaccgccgcgaatctgaagagcgtcaacctggtcgctaacttcaataccctgtttgta

SEQ ID NO: 746928 - DNA, 75 bp, synthetic construct
  source 1..75: mol_type = other DNA
atctcacgccgatgactgtgttcgatacctttggcattgtttccggcattagcgacggtcacgttccggcgtcct

SEQ ID NO: 746929 - DNA, 75 bp, synthetic construct
  source 1..75: mol_type = other DNA
tgacttgttagccggtcagcgagtgttgcgagagcagattgcccgcctgatgctcgacagcggctcggaagaaag

SEQ ID NO: 746930 - DNA, 75 bp, synthetic construct
  source 1..75: mol_type = other DNA
atgtttaacctgatgttgacctctaaaaagctgacaaaaacggcaattaacgaggcgctccggaggatgaaaaaa

SEQ ID NO: 746931 - DNA, 75 bp, synthetic construct
  source 1..75: mol_type = other DNA
atgagtcaggacagtaaagttttctttcgtatattcctcggtatcggtctggtactgatcctcatttctgttgtt

SEQ ID NO: 746932 - DNA, 75 bp, synthetic construct
  source 1..75: mol_type = other DNA
tatcatatttctggtataagaatgaaacatcccatcatcagaaaagtaatttaatacctttttttgaaaaaagaa

SEQ ID NO: 746933 - DNA, 75 bp, synthetic construct
  source 1..75: mol_type = other DNA
atgactcatcttcctgggactattcagatagataaaaaagaatatgcagttaatttattatggagtgaagttcct

SEQ ID NO: 746934 - DNA, 75 bp, synthetic construct
  source 1..75: mol_type = other DNA
aagactacaaacagcgaattacagaccatcagcgacagcagctcgtctacgaactgaagtccagaggatttgatg

SEQ ID NO: 746935 - DNA, 75 bp, synthetic construct
  source 1..75: mol_type = other DNA
cgcgtgcgcgactctactcacgtacttgacggtttgctgtatcacgaaagcgatcttgaaatcacagagcattac

SEQ ID NO: 746936 - DNA, 75 bp, synthetic construct
  source 1..75: mol_type = other DNA
atgctaggtaatgaaacacatagttccgcaaagctaggaatgacaaagaagaacaaaacaaacgaaaagaagaac

SEQ ID NO: 746937 - DNA, 75 bp, synthetic construct
  source 1..75: mol_type = other DNA
cttgtggcgaacgggccagcctggcatgatcgcttcccgtcgctaaaattcgataatatctctcaggaagccttc

SEQ ID NO: 746938 - DNA, 75 bp, synthetic construct
  source 1..75: mol_type = other DNA
ttggtgattgaagttcttcccaccggacgaaaaatctggcgtttccgctaccgctttgacaacaaatcgcaaaag

SEQ ID NO: 746939 - DNA, 75 bp, synthetic construct
  source 1..75: mol_type = other DNA
ggaacgccctagttgagtttaagcttcggtggaagattagtcttaaaatgtgcatttaccgagcaacaactctag

SEQ ID NO: 746940 - DNA, 75 bp, synthetic construct
  source 1..75: mol_type = other DNA
aagccaggagttggttagggagttattctcggtaaaccgcccactgtcaaatccaagaaatctacttcaactggt

SEQ ID NO: 746941 - DNA, 75 bp, synthetic construct
  source 1..75: mol_type = other DNA
atgcactaattaatttcaaagaacgatggaaaatcagtcttcgcatgtgtatttatcgtgctacggttttggggc

SEQ ID NO: 746942 - DNA, 75 bp, synthetic construct
  source 1..75: mol_type = other DNA
ccctcttttaagagataaaccctgggatagtgaatttccgaaagtgttggagatcgaggatgtaaatgttccaac

SEQ ID NO: 746943 - DNA, 75 bp, synthetic construct
  source 1..75: mol_type = other DNA
aacatgagtatgaagttactgccgataaagatcataatgatttcttgcaagaaatacgtgactttgatgctggat

SEQ ID NO: 746944 - DNA, 75 bp, synthetic construct
  source 1..75: mol_type = other DNA
aaactagggaaattagcacatgctcttttatggtatgaactgtttttaataattaaccaaaatatcagtgaaagt

SEQ ID NO: 746945 - DNA, 75 bp, synthetic construct
  source 1..75: mol_type = other DNA
atttacccgctgttgtcctcaaggaattacagcaaaatacgccacgcaatgatatttgggcgaagttttttctga

SEQ ID NO: 746946 - DNA, 75 bp, synthetic construct
  source 1..75: mol_type = other DNA
atcgcatcgaaaaaataatccgaaagcagattctgcagcatatgaaaccagcgctgatatgattttgtctgagct

SEQ ID NO: 746947 - DNA, 75 bp, synthetic construct
  source 1..75: mol_type = other DNA
aatttagtggtggaaggtaatatagagagtaatgaaaaattgattgttcttggcaatttgacagtcaaaggaaat

SEQ ID NO: 746948 - DNA, 75 bp, synthetic construct
  source 1..75: mol_type = other DNA
ctgtctgctatatccttgatgacgcatttgaaaataacgttgctaaaacaaatctttgcgccattctggaacaac

SEQ ID NO: 746949 - DNA, 75 bp, synthetic construct
  source 1..75: mol_type = other DNA
tgtttcttgtgttgacggtggcaaattgtttacctgctttgctaaacaaatccctgcatcttcagtagaagaact

SEQ ID NO: 746950 - DNA, 75 bp, synthetic construct
  source 1..75: mol_type = other DNA
ttgaagaactgcttgcccagcaaaaagcgtgcgatgctgcaccgaccctgcgttgtcgcagtgatgtcgggcaga

SEQ ID NO: 746951 - DNA, 75 bp, synthetic construct
  source 1..75: mol_type = other DNA
tgctatggagttcacgttcatgcttgcttctatccgcttctttgattacagataactactggaagtatgatgaga

SEQ ID NO: 746952 - DNA, 75 bp, synthetic construct
  source 1..75: mol_type = other DNA
tttgaagaaaatcttcaatttgcatatgaaagtattgcatcatcaactaattcctcaaaatgggagaaagtttta

SEQ ID NO: 746953 - DNA, 75 bp, synthetic construct
  source 1..75: mol_type = other DNA
atggcgcggcgctacaccctaggtacagctaaaccccgcgacgaaaaactcgaacgaatagcagaatttctggga

SEQ ID NO: 746954 - DNA, 75 bp, synthetic construct
  source 1..75: mol_type = other DNA
aagtggcggaaaagtgggaaccaactcttcaggtcaggctccagtcgttctgaccagcaataaagtcggtacata

SEQ ID NO: 746955 - DNA, 75 bp, synthetic construct
  source 1..75: mol_type = other DNA
ctaaacttcaaaccatatttcatgaaacgcagaaagatatccatcgttttaatttagaacagacttaccatattg

SEQ ID NO: 746956 - DNA, 75 bp, synthetic construct
  source 1..75: mol_type = other DNA
tggcgtgaccgtgactggtggtatcgaaattatgaatggcgagacaatcgctggcacccacacggatcgccgcgt

SEQ ID NO: 746957 - DNA, 75 bp, synthetic construct
  source 1..75: mol_type = other DNA
tcgcactttccctgattctggtcgctcctatggcagcgcaggctggggaaataatgctagtaccttcagtgacat

SEQ ID NO: 746958 - DNA, 75 bp, synthetic construct
  source 1..75: mol_type = other DNA
ctcatgccccggtacgctgaacgactttctgaccgctctcgatgaaggcgaactgaagccggatgtggtgaaacg

SEQ ID NO: 746959 - DNA, 75 bp, synthetic construct
  source 1..75: mol_type = other DNA
atactaactaatgaagctggtgagtattcgtttaatattgaaaccggaaagtacagtgtttatttaaaacaggac

SEQ ID NO: 746960 - DNA, 75 bp, synthetic construct
  source 1..75: mol_type = other DNA
ctgctgctgtaaaagttgaattaaagaaagttgaaaatcgcgatttgatggaggccattgttggtggctgtctgc

SEQ ID NO: 746961 - DNA, 75 bp, synthetic construct
  source 1..75: mol_type = other DNA
gggacggtgacaggctgaccactgtacagacccaacagacaagaatccagacggtataccagccgggaagcttca

SEQ ID NO: 746962 - DNA, 75 bp, synthetic construct
  source 1..75: mol_type = other DNA
gaaaatacactggcgataaagaagggaaaagacacgctatcgtcaacggtgttcttatggttcaccgcggatggg

SEQ ID NO: 746963 - DNA, 75 bp, synthetic construct
  source 1..75: mol_type = other DNA
gaaacaccggtgcctcaaaaatttggcagccttgaggctctcctcatggaattaaaccgggctggccatcctgat

SEQ ID NO: 746964 - DNA, 75 bp, synthetic construct
  source 1..75: mol_type = other DNA
gatcgtgattactggcatcgtaattatgaatggcgcaaaaaccgctggtggcgtcatgataatggctatcatcgt

SEQ ID NO: 746965 - DNA, 75 bp, synthetic construct
  source 1..75: mol_type = other DNA
tatttatgtgccgaagtatggaagaaccgcattgtcggcggtaacagcctgccgacggcgatccatgcattgcgc

SEQ ID NO: 746966 - DNA, 75 bp, synthetic construct
  source 1..75: mol_type = other DNA
acgccggtctataacgcgccgagtgcgggcagtgcgccattatggggtactggcggacaatttgcgctacccgat

SEQ ID NO: 746967 - DNA, 75 bp, synthetic construct
  source 1..75: mol_type = other DNA
cggccccggctggaaaatgcctgcggataaccgtatcgcccgtgacgcgcactatctttaccggtatgaccgtca

SEQ ID NO: 746968 - DNA, 75 bp, synthetic construct
  source 1..75: mol_type = other DNA
cggaaggttccattattaatgggggttcacaggtagttaatgagggcggtctggctgaaaactcggtgcttaatg

SEQ ID NO: 746969 - DNA, 75 bp, synthetic construct
  source 1..75: mol_type = other DNA
caataccgatatcgtctctggcctacaacaaattatggcaaacgggacagcggaaggttccattattaatggggg

SEQ ID NO: 746970 - DNA, 75 bp, synthetic construct
  source 1..75: mol_type = other DNA
ttcacgtatagagggggggactgcaaatggaacaatcattgatggtggaggccagtcagtatcaactcaggggca

SEQ ID NO: 746971 - DNA, 75 bp, synthetic construct
  source 1..75: mol_type = other DNA
gcactgaaaaagaaatttctttacaggcagaaaaacaaggaaaatcatataaaattctgggcgcggttttcaaga

SEQ ID NO: 746972 - DNA, 75 bp, synthetic construct
  source 1..75: mol_type = other DNA
cacaactactgaacgctggcgataccacggcactcgtcccttttagcctgcggctggagggatgtcctccgggtt

SEQ ID NO: 746973 - DNA, 75 bp, synthetic construct
  source 1..75: mol_type = other DNA
tcgggggatatgacgttacaggaacacagagaccgtggcgatacttatgggggacagttcagtgcaggtggacct

SEQ ID NO: 746974 - DNA, 75 bp, synthetic construct
  source 1..75: mol_type = other DNA
gatatctgccttgatatatgccccgcccgggatggctgccttcactcctgatgttattggtgtggtaaacgatga

SEQ ID NO: 746975 - DNA, 75 bp, synthetic construct
  source 1..75: mol_type = other DNA
cgagcggttgaacataatgaaagcgagtccacacaacaataatgtctggggggcgacgtataacacccgtaataa

SEQ ID NO: 746976 - DNA, 75 bp, synthetic construct
  source 1..75: mol_type = other DNA
cctgaaaagtgacggcaacagcaactggaacctgaccaatgatgtcaaacccaacccggaccccatcccaaatcc

SEQ ID NO: 746977 - DNA, 75 bp, synthetic construct
  source 1..75: mol_type = other DNA
agagcaggccggagggaacagacagcctgtacatctacagggacccggggagttatgaaccgctggcgcgggtgg

SEQ ID NO: 746978 - DNA, 75 bp, synthetic construct
  source 1..75: mol_type = other DNA
aaacgggactgcactacaatctgcacaggtactatgatccggatgtcgggcggttcatggtaacggacccgatag

SEQ ID NO: 746979 - DNA, 75 bp, synthetic construct
  source 1..75: mol_type = other DNA
ggctacgcaattttggtgccacgctgggcacacgtgaatcacggcttatcgaggggaaaatccgtattgctgacg

SEQ ID NO: 746980 - DNA, 75 bp, synthetic construct
  source 1..75: mol_type = other DNA
atgaatactatctgttctttaattgttgtggttacactgtctttattatcattcagtagcgtcgccaaaacgatt

SEQ ID NO: 746981 - DNA, 75 bp, synthetic construct
  source 1..75: mol_type = other DNA
gttcaaaatcaaaatggttgaactctcgcatcgaccagatatccgagtctttgcgtttgccagcgaggataagga

SEQ ID NO: 746982 - DNA, 75 bp, synthetic construct
  source 1..75: mol_type = other DNA
atcatcactacgcatcagaacaccaggagaaaatcatcacgaaatcagaagaaatcatcttctgcgtcagatatg

SEQ ID NO: 746983 - DNA, 75 bp, synthetic construct
  source 1..75: mol_type = other DNA
ggcagtgctgtatcgcgatcagctcggtgcgcgggaggcgatgattatctggccggattttgtcggctttgatac

SEQ ID NO: 746984 - DNA, 75 bp, synthetic construct
  source 1..75: mol_type = other DNA
aaaagatgaaacttggattaacagaaatgaaatgatcgaggactttagagatatatgtgaaagtatccctaatga

SEQ ID NO: 746985 - DNA, 75 bp, synthetic construct
  source 1..75: mol_type = other DNA
aattgtgtttgattaaggagggggtaggaaaggatagtattagtgattttaccactaatttaattaaatcgtttt

SEQ ID NO: 746986 - DNA, 75 bp, synthetic construct
  source 1..75: mol_type = other DNA
cagatttttttaatgtatctcctgaaaaaataaaagagtatggtgcatttaatatttctctgattaatgatttgc

SEQ ID NO: 746987 - DNA, 75 bp, synthetic construct
  source 1..75: mol_type = other DNA
tacattgataatgttatggctcagctgcttggtactatgccgatgagcgatcagtcgtttctcggatgggagcag

SEQ ID NO: 746988 - DNA, 75 bp, synthetic construct
  source 1..75: mol_type = other DNA
gtgaatgtcagagtcattgccgccaccaaccgtgatttgtggcaaatggttgaagatcgccagtttcgcagcgat

SEQ ID NO: 746989 - DNA, 75 bp, synthetic construct
  source 1..75: mol_type = other DNA
gcactgaaaaagaaatttctttacaggcagaaaaacaagggaaatcatataaaattctgggcgcgttttttaaga

SEQ ID NO: 746990 - DNA, 75 bp, synthetic construct
  source 1..75: mol_type = other DNA
agccatctgctcagacatagctttgcaacagagatgcgtacactgaatacgccactggacgtactggctttgttg

SEQ ID NO: 746991 - DNA, 75 bp, synthetic construct
  source 1..75: mol_type = other DNA
tagaccagtttgactgtgataccttttttgaggcgtatcatcaaggtgaccttattccggaagacaatataggac

SEQ ID NO: 746992 - DNA, 75 bp, synthetic construct
  source 1..75: mol_type = other DNA
taagcaaccgggcctgagaaacacggcattttttatcatggcgacctgttacagtaacagaagaaatgacattac

SEQ ID NO: 746993 - DNA, 75 bp, synthetic construct
  source 1..75: mol_type = other DNA
aaagaaaatcgcctgtcacaaagtcaattcagatgccaggtatgtggatatacagcgaacgccgatgtaaatggc

SEQ ID NO: 746994 - DNA, 75 bp, synthetic construct
  source 1..75: mol_type = other DNA
cggcagcaggcggtcgtcgccggagcaaaacgaccggacattcctgattcactgccggagagcacagagtacggc

SEQ ID NO: 746995 - DNA, 75 bp, synthetic construct
  source 1..75: mol_type = other DNA
gccagacaggtggagccggaatacacaccagtgcgaaacgttcatctttaccactgcgaccaccggggcctgccg

SEQ ID NO: 746996 - DNA, 75 bp, synthetic construct
  source 1..75: mol_type = other DNA
aattgcaagcctctattattacaaaaataagttttctttcacttcttctatctgctttagtgaaagtgtatttat

SEQ ID NO: 746997 - DNA, 75 bp, synthetic construct
  source 1..75: mol_type = other DNA
cgttcaggatttaagtaacccttattctgaatcagaatggctatcatgtatgatcatacagaccaatacgcgaac

SEQ ID NO: 746998 - DNA, 75 bp, synthetic construct
  source 1..75: mol_type = other DNA
tatatttaaaattggaagttggctactttcttacattatgttgagtaaagcattaacgaagacatatattattac

SEQ ID NO: 746999 - DNA, 75 bp, synthetic construct
  source 1..75: mol_type = other DNA
ttatgacctgaccgggaaactcacgcagagcgaggatgaggggcttatcaccctctggcactacgacgaatcgga

SEQ ID NO: 747000 - DNA, 75 bp, synthetic construct
  source 1..75: mol_type = other DNA
tgtttaattgtacttattcacatctgaactatcttctggataactctggtattgaactgatccctctgaagcatg

SEQ ID NO: 747001 - DNA, 75 bp, synthetic construct
  source 1..75: mol_type = other DNA
tcgtcatgaaatgacggaaatgtgccttgtaactgttccagatgagctaaaaaaaatggggctaacactaatgtg

SEQ ID NO: 747002 - DNA, 75 bp, synthetic construct
  source 1..75: mol_type = other DNA
gcgtggtatttccggctgaactggtgcggctgctggacagactggaggaagaaatccgggcagaccgcgtgagca

SEQ ID NO: 747003 - DNA, 75 bp, synthetic construct
  source 1..75: mol_type = other DNA
ggtatacgagccgggaagcttcacgccgctcatccgggtcgagacagagaacggcgagcgggagaaagcgcagcg

SEQ ID NO: 747004 - DNA, 75 bp, synthetic construct
  source 1..75: mol_type = other DNA
cccggcagagcagtggcagtatgacggccacggctggctgagagaaatcagccacctgagcgaaggccaccgtgt

SEQ ID NO: 747005 - DNA, 75 bp, synthetic construct
  source 1..75: mol_type = other DNA
ctgcagcattagttacatcatattatccattgatttctaaatcccctagtaatgacaatattcgattttattttg

SEQ ID NO: 747006 - DNA, 75 bp, synthetic construct
  source 1..75: mol_type = other DNA
aagcaggaagatgaagtactttgcgctatcaagccactcgcgttcgtccagcaggaacctggtaagatgatggaa

SEQ ID NO: 747007 - DNA, 75 bp, synthetic construct
  source 1..75: mol_type = other DNA
ttgtaagatatgcgccgtttgctgaaactgaagagtttgcaaacatcggcgtagtcgtctgcgcacctcaaaaac

SEQ ID NO: 747008 - DNA, 75 bp, synthetic construct
  source 1..75: mol_type = other DNA
cgttttaaccctaaagaatttccaaaagagcatttagttacttgcgataaaaacaaaaaaaacaaagcatctata

SEQ ID NO: 747009 - DNA, 75 bp, synthetic construct
  source 1..75: mol_type = other DNA
aatatattcaacggaaataagactggtgggctatcgttggtaaactgtaaagaaatatctgttattggcggctct

SEQ ID NO: 747010 - DNA, 75 bp, synthetic construct
  source 1..75: mol_type = other DNA
cgggtgtttttctataacgcacaaactactatgaacaactaccattacgttaacttcttccggtgcgaacgttgg

SEQ ID NO: 747011 - DNA, 75 bp, synthetic construct
  source 1..75: mol_type = other DNA
cactatggcgcgttcttttaaagccgttgccaatggcaaaatttatatcggtaaaattgacactgacccggtaaa

SEQ ID NO: 747012 - DNA, 75 bp, synthetic construct
  source 1..75: mol_type = other DNA
caaccatggtccgtctacggaagcactggtccctgccccgctttaccagggaatgcgcgacggcaaaatcgtccg

SEQ ID NO: 747013 - DNA, 75 bp, synthetic construct
  source 1..75: mol_type = other DNA
atcatcaataattattgttctttatactcgcttagatcaattaatgattatgcgaatgttaggggcagattcagt

SEQ ID NO: 747014 - DNA, 75 bp, synthetic construct
  source 1..75: mol_type = other DNA
ctcaagacgaaatccatgctgtgatagtggatgacggtgtaactggatatataaaaaatgccagtgtgatgacta

SEQ ID NO: 747015 - DNA, 75 bp, synthetic construct
  source 1..75: mol_type = other DNA
atgactgacgaaaataaatccccctctacggaagaagaaaagccagtgacgacacctgatcaggatgatatcgct

SEQ ID NO: 747016 - DNA, 75 bp, synthetic construct
  source 1..75: mol_type = other DNA
caacgctctataagaatcagggcgagatcatcaacctgatcacaggcgaggatattgatttttccaacatctata

SEQ ID NO: 747017 - DNA, 75 bp, synthetic construct
  source 1..75: mol_type = other DNA
ctgcgtcatcggtcaggttatctgactgggaccacggtcccacctgcgtcgtcggtcaggttatctgcctgggac

SEQ ID NO: 747018 - DNA, 75 bp, synthetic construct
  source 1..75: mol_type = other DNA
gaccttgcttatgaaggttccggcagtggcgactggcgcactgacggtttcatcgtgggtgtcggctataagttc

SEQ ID NO: 747019 - DNA, 75 bp, synthetic construct
  source 1..75: mol_type = other DNA
cggcaatgtgagttctggtgaaaaatcacgggcgattatagccagcaaattctatttttcacgtagcaacaccaa

SEQ ID NO: 747020 - DNA, 75 bp, synthetic construct
  source 1..75: mol_type = other DNA
acgtgaaccccaaagagataagcccacacgctattccaccttggtggaaacgtcagaaattaattcctgctcaac

SEQ ID NO: 747021 - DNA, 75 bp, synthetic construct
  source 1..75: mol_type = other DNA
tgctggcgctacgcagcgcagcggaacaggtctgggcaaagctgatgccactggaacgccagcccgaatttgccg

SEQ ID NO: 747022 - DNA, 75 bp, synthetic construct
  source 1..75: mol_type = other DNA
gcaatggtctgaagcttgacctggttactaaccctgaactgctggagaaagacatcaatgctgcgcgttctgctg

SEQ ID NO: 747023 - DNA, 75 bp, synthetic construct
  source 1..75: mol_type = other DNA
tacttcacctgaacagctcgaacaggaacttcaggcagcacgctctgccgcctggttctacacatccaaagggtg

SEQ ID NO: 747024 - DNA, 75 bp, synthetic construct
  source 1..75: mol_type = other DNA
gagatcttaattctcacacgccttcgctggcaacatacgaacgcatgatgcatgtattcaatccattatttcatg

SEQ ID NO: 747025 - DNA, 75 bp, synthetic construct
  source 1..75: mol_type = other DNA
taattctaatgatgctgtgtgacctgtacgataaaaacgagattgaaggcgaaatcgatcacacatttgtccgtg

SEQ ID NO: 747026 - DNA, 75 bp, synthetic construct
  source 1..75: mol_type = other DNA
acggtttcgccgtggcgctcggtttgctgcaacagaagattcacgcggtggattatcgcgatcccaccggggtga

SEQ ID NO: 747027 - DNA, 75 bp, synthetic construct
  source 1..75: mol_type = other DNA
gcagtttccacggcatcaacgaagctatggccttccgagatcagatcgaacgcccacgccgccaggaactgcgcg

SEQ ID NO: 747028 - DNA, 75 bp, synthetic construct
  source 1..75: mol_type = other DNA
tctaatagtagatgtaggggataaagagtattatcaattaattaatggtatgattgaaagaggaatgaaagtcgt

SEQ ID NO: 747029 - DNA, 75 bp, synthetic construct
  source 1..75: mol_type = other DNA
catcggaaggctctaaattttttggttttgatatggataacgaattcatcagtggttttgatgtaggggcatggg

SEQ ID NO: 747030 - DNA, 75 bp, synthetic construct
  source 1..75: mol_type = other DNA
atgaagattgaatatgcgcccgaacgtgggcggggattcgttcgccctggtgaaactgaaaaacaacaaaattgg

SEQ ID NO: 747031 - DNA, 75 bp, synthetic construct
  source 1..75: mol_type = other DNA
gacgacggcaattttgtcggcctttggcgtcagtgcgaaaaacccgaccgatggtacgccggtggtggtgaaaaa

SEQ ID NO: 747032 - DNA, 75 bp, synthetic construct
  source 1..75: mol_type = other DNA
tgtcgaactggtggtggataacggttttgtcgatattgttgaaggtcgttttgatgccgggatccggctgggtga

SEQ ID NO: 747033 - DNA, 75 bp, synthetic construct
  source 1..75: mol_type = other DNA
cgccctccgggaatattcgtttatcagccggggaacatgctgcgcgcagtctggtctggccgaagctaaaatcgt

SEQ ID NO: 747034 - DNA, 75 bp, synthetic construct
  source 1..75: mol_type = other DNA
gaaagtggcaaactagattccctcacaacgcataccggcagggctccagatagtgactttgaggttgctgtaatg

SEQ ID NO: 747035 - DNA, 75 bp, synthetic construct
  source 1..75: mol_type = other DNA
acattaaacgactctggtttttgaaggattgcgtggttttttcgagagctactggcaaacctattgcgttttcca

SEQ ID NO: 747036 - DNA, 75 bp, synthetic construct
  source 1..75: mol_type = other DNA
attaacgccagcgcagcacggacgcattcacaagtaccaagcaaacgatcccatgcgcggtatttgcttgattca

SEQ ID NO: 747037 - DNA, 75 bp, synthetic construct
  source 1..75: mol_type = other DNA
ttatgcaacaaatttattcaatgagtattgtcaggctgaccattttacgaaacggggagcgccacaacatatctg

SEQ ID NO: 747038 - DNA, 75 bp, synthetic construct
  source 1..75: mol_type = other DNA
gcaaaactggtttggtgagtatcaccccgttactgtgccggagtacagtccgttgacattgatggtgaaagaaaa

SEQ ID NO: 747039 - DNA, 75 bp, synthetic construct
  source 1..75: mol_type = other DNA
ccgggtcgtgttcgtgcaggtggtcgtgtccgcatcctttacgcgcagtggaaagaaaagcaggtccgtgatgca

SEQ ID NO: 747040 - DNA, 75 bp, synthetic construct
  source 1..75: mol_type = other DNA
gttgcagtgctaataattatttgaaaacagcctgggccgatataaaaaccaggcgcgaagaaaatcaaaaatgtt

SEQ ID NO: 747041 - DNA, 75 bp, synthetic construct
  source 1..75: mol_type = other DNA
tgaactttttgctcaggcttacgagttaaacaataaggaaaggaatgcgcaaattgattttttaactcgttatgc

SEQ ID NO: 747042 - DNA, 75 bp, synthetic construct
  source 1..75: mol_type = other DNA
atatattgaaaacattaatgcgtgtgatgatgttttttctgagtattgtttagaagatgaaaatataagtgtcca

SEQ ID NO: 747043 - DNA, 75 bp, synthetic construct
  source 1..75: mol_type = other DNA
cagcggtaatatttccggtcatccgatcgtctttgacaacgacatggcaattaagcaactcgggaaaatcgcgga

SEQ ID NO: 747044 - DNA, 75 bp, synthetic construct
  source 1..75: mol_type = other DNA
aagcgcaacgtcctgctggcgagtaccgttgcgccacataatccgaacatcggtgtaatgctgccttcaacgccg

SEQ ID NO: 747045 - DNA, 75 bp, synthetic construct
  source 1..75: mol_type = other DNA
gttggtataaatttatagcatatgttgatatcttaaatgagtgtaatgatgttttttctgagtattgctttgatg

SEQ ID NO: 747046 - DNA, 75 bp, synthetic construct
  source 1..75: mol_type = other DNA
attcaggaacactgacgatagagattaacggaagagttgtcattaaggcagaaccgagaattgctgatacgggtt

SEQ ID NO: 747047 - DNA, 75 bp, synthetic construct
  source 1..75: mol_type = other DNA
tgagtcggttgacggtgtgatacgtgccgcaccggagaaacccgaccccgccccggtgacaccaccgccgccgcg

SEQ ID NO: 747048 - DNA, 75 bp, synthetic construct
  source 1..75: mol_type = other DNA
tgaatccatcgacggggttattcgttcaccggtgacagagccggttatcccgctacccgcaccggcggccaccgt

SEQ ID NO: 747049 - DNA, 75 bp, synthetic construct
  source 1..75: mol_type = other DNA
atcattatgacgtttacctccctcctgaactttttgctcaggcttacaagttaaacaataaggaaatgaatgcgc

SEQ ID NO: 747050 - DNA, 75 bp, synthetic construct
  source 1..75: mol_type = other DNA
tgatggatctcaaccagctttatacggtgttgttttgtttgtggttcttagcactgggcgccattgagtatctgg

SEQ ID NO: 747051 - DNA, 75 bp, synthetic construct
  source 1..75: mol_type = other DNA
gccagctatatggcggcatttaaggattatctgaaggaagaaggtatcaccccaagtgatgagatcatcgagcta

SEQ ID NO: 747052 - DNA, 75 bp, synthetic construct
  source 1..75: mol_type = other DNA
tggtccgcacggtgtttcgcaacgacgccattacctcgcagctatcgtttttgcgccgctcccgcggttacgcgc

SEQ ID NO: 747053 - DNA, 75 bp, synthetic construct
  source 1..75: mol_type = other DNA
tgtccgacctccaacctttacctcggcagcggcttattcaacttgaaaaaagcatggcagaagaaagttaaagtg

SEQ ID NO: 747054 - DNA, 75 bp, synthetic construct
  source 1..75: mol_type = other DNA
cataataaacactcaatttctaacctatgctacagttgaaaactttagaaccttacttatttccatcattccatt

SEQ ID NO: 747055 - DNA, 75 bp, synthetic construct
  source 1..75: mol_type = other DNA
gaaggctaacggcatgccaatcgatgatacgcacactcgtggcggtgttcagcgcggtggaagcaataccgatag

SEQ ID NO: 747056 - DNA, 75 bp, synthetic construct
  source 1..75: mol_type = other DNA
aacgctgcgccagcatgaagcgcggatgaatgacatgagtcgtaagattgatgataataacgacgaaatgagacg

SEQ ID NO: 747057 - DNA, 75 bp, synthetic construct
  source 1..75: mol_type = other DNA
agaattgataccgttaacagtacttccggggtaaacgcacgcgcagtggcagaaaaccgtcaggctattggtaca

SEQ ID NO: 747058 - DNA, 75 bp, synthetic construct
  source 1..75: mol_type = other DNA
atgaatatggacttcaccaatttcaataaatatgttttctcactcacgccagacacttatgaacctccattaaaa

SEQ ID NO: 747059 - DNA, 75 bp, synthetic construct
  source 1..75: mol_type = other DNA
ttataattcagcgttaactccagatcccaattttaatatagatgcatcgtcagatttagactcatatttaaacct

SEQ ID NO: 747060 - DNA, 75 bp, synthetic construct
  source 1..75: mol_type = other DNA
ttataattcagcgtcatctccagatcccaactttaatatagatgcaacgtcagatttagactcatatttaaacct

SEQ ID NO: 747061 - DNA, 75 bp, synthetic construct
  source 1..75: mol_type = other DNA
ttcaagaaaaaataagcaggaaaagtataatgaattttttaaatatatacaagcagaagccaaacaatatttcaa

SEQ ID NO: 747062 - DNA, 75 bp, synthetic construct
  source 1..75: mol_type = other DNA
tgacttatcgtgattctggtgtgatatttcgtattaagccagttgtgacagaagagaatatttccctgcatgtca

SEQ ID NO: 747063 - DNA, 75 bp, synthetic construct
  source 1..75: mol_type = other DNA
aaggcatttaaatcaattaataaatacatgaatacattaagtattggaaatgaacgtatagaaccggatcccaac

SEQ ID NO: 747064 - DNA, 75 bp, synthetic construct
  source 1..75: mol_type = other DNA
taacaaaaaatgattatttaaagaaaatacctttaactgcacaattaattgcaaaatacaaaatggatgatcaat

SEQ ID NO: 747065 - DNA, 75 bp, synthetic construct
  source 1..75: mol_type = other DNA
ctacaccagcgtgacaatggtaaacagcgtgagttccagccttacattgaagcgaactggatcaacaacagcaaa

SEQ ID NO: 747066 - DNA, 75 bp, synthetic construct
  source 1..75: mol_type = other DNA
tatccgaagagcagttaattgcgctgaaaggaataaaaaaaggtacgttaaaagtaagcgactcgtcagaaccgt

SEQ ID NO: 747067 - DNA, 75 bp, synthetic construct
  source 1..75: mol_type = other DNA
ttaccataaaccgaaacacaaaaatggttgtacgtggaactccgcttacaagagtgctctgcactcaaaagacca

SEQ ID NO: 747068 - DNA, 75 bp, synthetic construct
  source 1..75: mol_type = other DNA
ttgcaacgattcaaaatcgattagatgtagtgacagctattcctaacaccagaacatttcctgagtgtcttcctc

SEQ ID NO: 747069 - DNA, 75 bp, synthetic construct
  source 1..75: mol_type = other DNA
atgatgcggaagcactcgctaccgatttaggcattggctttctggctggcggcgctattaacgctgccggacgtg

SEQ ID NO: 747070 - DNA, 75 bp, synthetic construct
  source 1..75: mol_type = other DNA
tcttggtaagaagctgcccaccagctatgaagtaaatgctatttcgttcgaccaatataacagtgttgcaacggt

SEQ ID NO: 747071 - DNA, 75 bp, synthetic construct
  source 1..75: mol_type = other DNA
acttcaaaatgggcacacaaaggccattatggcgtatggagatatactaaaaatactcccccctcaccaggaata

SEQ ID NO: 747072 - DNA, 75 bp, synthetic construct
  source 1..75: mol_type = other DNA
aggccgcatggatcgttaccgacgataatgcggctgaacagggctgccgtgacagcgcctggacgcgagatgaga

SEQ ID NO: 747073 - DNA, 75 bp, synthetic construct
  source 1..75: mol_type = other DNA
atcaaacaataaaaacgtttatatatcacacaaagtttcatcagaaaaatgtggaaaattagtggttaatgccgt

SEQ ID NO: 747074 - DNA, 75 bp, synthetic construct
  source 1..75: mol_type = other DNA
gcccggtggtgtcgaaaacggtggtggtcgatacgattaaccccaccgccacaccaacgattgtgtcgtataccg

SEQ ID NO: 747075 - DNA, 75 bp, synthetic construct
  source 1..75: mol_type = other DNA
aacttacagcaaagagaaatattatttacgggaaaaaacaaaaaaattttttttagaaaagtatgaaaaagataa

SEQ ID NO: 747076 - DNA, 75 bp, synthetic construct
  source 1..75: mol_type = other DNA
aaatctattaagggcagaaacaacgtgtataaatatattcatatgaatgacgatttctcgttgggtgaatatatt

SEQ ID NO: 747077 - DNA, 75 bp, synthetic construct
  source 1..75: mol_type = other DNA
atggaattacaggactggcgaaaagaacctcgtaaaaagtatttggtgcaaatcgttggttcctttgctgaattt

SEQ ID NO: 747078 - DNA, 75 bp, synthetic construct
  source 1..75: mol_type = other DNA
gttattacgtcgcgtgttctacttcctggatcatgccgccccgttccccggtaatggacatgggcttatgcaact

SEQ ID NO: 747079 - DNA, 75 bp, synthetic construct
  source 1..75: mol_type = other DNA
agaaaaaattaattgtctgtttgttcatcactcccattgtaacaatctcattagttaattcatcatctccctatg

SEQ ID NO: 747080 - DNA, 75 bp, synthetic construct
  source 1..75: mol_type = other DNA
ctgcaatctaaaggtaaggatttaggcggttgggctcatgacggcaacggcgacccacgttacaccaataaagat

SEQ ID NO: 747081 - DNA, 75 bp, synthetic construct
  source 1..75: mol_type = other DNA
gaaacgcgtaatatgaccccgtttggcgacagcgattatgctgtggcaaacaaaacccagaattttgaagtcact

SEQ ID NO: 747082 - DNA, 75 bp, synthetic construct
  source 1..75: mol_type = other DNA
tccaacagccgattctgataacttggttatttatattaacggtagtggcaatggtgggaaaccgttctctgcatt

SEQ ID NO: 747083 - DNA, 75 bp, synthetic construct
  source 1..75: mol_type = other DNA
cagtcgtgatgcatgggtttataacttctcagcaaaaaaattaattgaaaatgtgtcagaaatgattgtgtatta

SEQ ID NO: 747084 - DNA, 75 bp, synthetic construct
  source 1..75: mol_type = other DNA
ttcatggtcagatatattttcatgacattggtgattacttaagtcgtgaagagaaattggagaaagtttctgaat

SEQ ID NO: 747085 - DNA, 75 bp, synthetic construct
  source 1..75: mol_type = other DNA
tcggtatcatctctcaataatgtgtatgtatctttagcgcttgttatttttgttggggcaaattatagtaggaga

SEQ ID NO: 747086 - DNA, 75 bp, synthetic construct
  source 1..75: mol_type = other DNA
gtgattcttcattcttttatcatgcgagtaatctatgatcacggcataataggttttgctttcctcattttttgt

SEQ ID NO: 747087 - DNA, 75 bp, synthetic construct
  source 1..75: mol_type = other DNA
caaaaaagcacagcgatggctggcaaaaaatccggcactgttgcaaatagtcggtggtgataaacttatcatccc

SEQ ID NO: 747088 - DNA, 75 bp, synthetic construct
  source 1..75: mol_type = other DNA
acaaaccataccgaactcttaccggttaataaagatttagccgaaaccgcactttatcaattacaggtgacaaca

SEQ ID NO: 747089 - DNA, 75 bp, synthetic construct
  source 1..75: mol_type = other DNA
gccagccttgccttcccgtgcagtgatatcagtgcgctgaaacgggatacgtcagtaagcgactcgtcagaaccg

SEQ ID NO: 747090 - DNA, 75 bp, synthetic construct
  source 1..75: mol_type = other DNA
ctcttgacaggtttgcattgggaattgaaagacctcagttgctggtggaaaataactatgagttaatattattaa

SEQ ID NO: 747091 - DNA, 75 bp, synthetic construct
  source 1..75: mol_type = other DNA
atgagcactacatacaaaaacattacagaaaaggcggttatggctattggttctccttctgctgtaagtcgcatg

SEQ ID NO: 747092 - DNA, 75 bp, synthetic construct
  source 1..75: mol_type = other DNA
ccagcatggtggcaaatatgattggtgccccaattaacggctcactgcttagcatgcacggctttatggggctgg

SEQ ID NO: 747093 - DNA, 75 bp, synthetic construct
  source 1..75: mol_type = other DNA
tgtaaattatgaattagattatgtttttgctgaccagaatattataactgatacgattaacttcatagaacagca

SEQ ID NO: 747094 - DNA, 75 bp, synthetic construct
  source 1..75: mol_type = other DNA
acaaattatggttatggattaatagctttatgaattttgacgatgagtttttagagaaatctatcaatactgctc

SEQ ID NO: 747095 - DNA, 75 bp, synthetic construct
  source 1..75: mol_type = other DNA
atgcagcaaatcctgtcgcagccgcatcgccctactgccgtcttctgtggtggcgatatcatggcaatgggcgca

SEQ ID NO: 747096 - DNA, 75 bp, synthetic construct
  source 1..75: mol_type = other DNA
gtgaatatacattctatgtgttttcgtgttatgcattttactatatggcctttaggttattatctgcgcaggtga

SEQ ID NO: 747097 - DNA, 75 bp, synthetic construct
  source 1..75: mol_type = other DNA
cagagcgactggtttacaaagtggtggccggacagcgattcagtgtctgggagcccattcccggccgggcgaacg

SEQ ID NO: 747098 - DNA, 75 bp, synthetic construct
  source 1..75: mol_type = other DNA
cgaccatcatcgaaaagcaaagccagtttccgccctgtcattctgggggttaactcagcgaaagacgtgatacgc

SEQ ID NO: 747099 - DNA, 75 bp, synthetic construct
  source 1..75: mol_type = other DNA
tgttggcggatgaggtggataaatacccgattacacgtgaaggtgatcccattgccctggcggaagaacgaaccg

SEQ ID NO: 747100 - DNA, 75 bp, synthetic construct
  source 1..75: mol_type = other DNA
ttcgccgcggtcaccgatacaccgacaaagagtgcgacaacatgctgaaggccgatctgcgaaaggtggcaaatg

SEQ ID NO: 747101 - DNA, 75 bp, synthetic construct
  source 1..75: mol_type = other DNA
taatttgatggggataagtttgcagctgttattaaagatgtgccttttatgcaggaaaaaccagcgaagcgtctg

SEQ ID NO: 747102 - DNA, 75 bp, synthetic construct
  source 1..75: mol_type = other DNA
aagcgcttgactgcctcgtttacagctatgccgcgctgtgcggtctcaaacatatggggttaaaactcaacgtcc

SEQ ID NO: 747103 - DNA, 75 bp, synthetic construct
  source 1..75: mol_type = other DNA
ttttcaggagatgttgtattccttaataactgctatcagcgaagtgattgtttcgaacaatcacgaaccgctgct

SEQ ID NO: 747104 - DNA, 75 bp, synthetic construct
  source 1..75: mol_type = other DNA
gcctcggtgatggtgccggtggatatcgccgcgattgttgccacgctggtgatgttacatctctattttcgcaaa

SEQ ID NO: 747105 - DNA, 75 bp, synthetic construct
  source 1..75: mol_type = other DNA
cgtggggctggcgtatttcggggcgatgtcccccgaaaagctggcgctctatgtggggagtgcctgcgccatttt

SEQ ID NO: 747106 - DNA, 75 bp, synthetic construct
  source 1..75: mol_type = other DNA
tacggcggcggtgaatttctggtaccggcgcaaaacctttcgctatctgaccgaaatgggaatcgataaaggggt

SEQ ID NO: 747107 - DNA, 75 bp, synthetic construct
  source 1..75: mol_type = other DNA
tatcctccgggagccggcaggttgttgagaaagatggtacggcaattggcagcaatattagcgccggaggctcgc

SEQ ID NO: 747108 - DNA, 75 bp, synthetic construct
  source 1..75: mol_type = other DNA
tttgtaagaggactaaatgtaaaaaaagatgttctctgctcaagagtcaaatttgaaagctttcagtatctcaag

SEQ ID NO: 747109 - DNA, 75 bp, synthetic construct
  source 1..75: mol_type = other DNA
cgatgccggctacaccggcgtcgaaaagcgctccgagcatgccgaccgagaagtgatctggcaggtcgcagcacg

SEQ ID NO: 747110 - DNA, 75 bp, synthetic construct
  source 1..75: mol_type = other DNA
ttcccggcggagtacggatgtgctgtcagccgtcacaacttaccgatgtcttcagggcactcaaatatgctcagt

SEQ ID NO: 747111 - DNA, 75 bp, synthetic construct
  source 1..75: mol_type = other DNA
aagatctccacaaacttggctttgttataaatcaattaaatatctcccaagaaaatctaaaattcttggctaaga

SEQ ID NO: 747112 - DNA, 75 bp, synthetic construct
  source 1..75: mol_type = other DNA
gccaaaacacaggttaatgcgggcggtcgggagatcgtcaaaacaaaagccactgcgacaggcacgacgctcact

SEQ ID NO: 747113 - DNA, 75 bp, synthetic construct
  source 1..75: mol_type = other DNA
gggcaaaaatgctgccgatggcacccagcatggcaaaaaagcattcctttttatcgcgatatccagttgctgttg

SEQ ID NO: 747114 - DNA, 75 bp, synthetic construct
  source 1..75: mol_type = other DNA
ttctgaaaacccatgactttggtaatacttttcataactccaaccttaaagacatgagtacgtattgctatgaat

SEQ ID NO: 747115 - DNA, 75 bp, synthetic construct
  source 1..75: mol_type = other DNA
cataaactattatttccagcataatgatgcgttctacaataaaggaataggtggatttttcgagttgctatacaa

SEQ ID NO: 747116 - DNA, 75 bp, synthetic construct
  source 1..75: mol_type = other DNA
tatgcacttcccggatgatcgtgacctcggatatttcaaccagctactggctgagcgactggtttacaaagtggt

SEQ ID NO: 747117 - DNA, 75 bp, synthetic construct
  source 1..75: mol_type = other DNA
gtggtagccttaatgtaaatattttagtgagaaattgcattaagttgattaatcgaccgaaatcattagaagata

SEQ ID NO: 747118 - DNA, 75 bp, synthetic construct
  source 1..75: mol_type = other DNA
ataatgttggttctataaatgttgatgtaatggtaaaaaattgcattaaaataatatcaaggcctgccgaattgg

SEQ ID NO: 747119 - DNA, 75 bp, synthetic construct
  source 1..75: mol_type = other DNA
aaggatttgaagttgcattagatagaactattgaatttatagcaactaatagtgttatatatgattatgttttta

SEQ ID NO: 747120 - DNA, 75 bp, synthetic construct
  source 1..75: mol_type = other DNA
ctggagatcgcccgttacgcgatgacgtatggcctgaccatgccgaccggcggccaccgccgcacaacgccgtat

SEQ ID NO: 747121 - DNA, 75 bp, synthetic construct
  source 1..75: mol_type = other DNA
tcaatagcgtgcttcaggctacgactgtgaatctggctaaggttctgaaggaccgaggggatttcacatggtggg

SEQ ID NO: 747122 - DNA, 75 bp, synthetic construct
  source 1..75: mol_type = other DNA
gtccgtgcgtggctgattgagactgggtgtctctcctatacgcagcttgttgaggcgtacccgtgggctgacgat

SEQ ID NO: 747123 - DNA, 75 bp, synthetic construct
  source 1..75: mol_type = other DNA
gggcggagtggcttgttcagtctaaaagagagttgataccagcatacaggggcgaagttggtcaacaagtcaaca

SEQ ID NO: 747124 - DNA, 75 bp, synthetic construct
  source 1..75: mol_type = other DNA
atggcagattggaatggttatattatggatatcagcaaacaatttgatcagggcgttgatgatctgaaccagcaa

SEQ ID NO: 747125 - DNA, 75 bp, synthetic construct
  source 1..75: mol_type = other DNA
aagcaggcattctggcgatgtctgttggtgctgcattgctgtcctccggtgtttcagctcaggggaatgacacaa

SEQ ID NO: 747126 - DNA, 75 bp, synthetic construct
  source 1..75: mol_type = other DNA
gtatcgttaggagcagtagggacttcggcggtaagtctgggattaacggcaaattacgcacgtaccggagggcag

SEQ ID NO: 747127 - DNA, 75 bp, synthetic construct
  source 1..75: mol_type = other DNA
agcagtgcgggcggggtggcgattaaagctggctcattaattgccgtgcttattttgcgacagaccaacaactat

SEQ ID NO: 747128 - DNA, 75 bp, synthetic construct
  source 1..75: mol_type = other DNA
gagggtgttaaaaatcttcatcatgatggttactcatacctcctgaaaaaactcatagagtcattagacaatgcc

SEQ ID NO: 747129 - DNA, 75 bp, synthetic construct
  source 1..75: mol_type = other DNA
gtgttgcgggataacaaacagcccgccgacgcgctggcccacctcaagcgagcgatgcagctcgattgtcaggca

SEQ ID NO: 747130 - DNA, 75 bp, synthetic construct
  source 1..75: mol_type = other DNA
ttaaagatggtcgcagtttaggacaagggagttttggcgaagtatttaaggttgatgtctataacttaacccaga

SEQ ID NO: 747131 - DNA, 75 bp, synthetic construct
  source 1..75: mol_type = other DNA
tgcgaagttcagttggatgcaaaggatgcacgtgagctcgcgtccacgttgagtgaggttcagcgtgatttaacg

SEQ ID NO: 747132 - DNA, 75 bp, synthetic construct
  source 1..75: mol_type = other DNA
agttcagtatgttaatccggcgactgagcacgcaatggcgcgtcctggcgccttctgccgagtttcgcggcgggc

SEQ ID NO: 747133 - DNA, 75 bp, synthetic construct
  source 1..75: mol_type = other DNA
cgtgaaattaatccagcgagagctaagaaattttatgaatacttattgaatgctcatgagaataaagagccattc

SEQ ID NO: 747134 - DNA, 75 bp, synthetic construct
  source 1..75: mol_type = other DNA
ttgagttccctgcgtctcgcggcgttcagggcggagcgattgtccttatgatgacagtgccagcacgaaccttgg

SEQ ID NO: 747135 - DNA, 75 bp, synthetic construct
  source 1..75: mol_type = other DNA
aaagggataaaaacatatcgctttattgggttgcagctcctgaagatctatatatagaactaataattgtaccgt

SEQ ID NO: 747136 - DNA, 75 bp, synthetic construct
  source 1..75: mol_type = other DNA
gctcactgtgagggccatgaaacggtctgtgtgtttggcgagaacttcctgtgcacacgatgtcttgagatccat

SEQ ID NO: 747137 - DNA, 75 bp, synthetic construct
  source 1..75: mol_type = other DNA
tactcgaaatgtttagacgaatgaatgcttatacatctccactaacatcagcagaaaaacggcatgctacttttc

SEQ ID NO: 747138 - DNA, 75 bp, synthetic construct
  source 1..75: mol_type = other DNA
tgcaaatgcaccatccgtcaggtcagtcgtggtgaatatgcgcaactggcggcacagggcaccattcacaccgaa

SEQ ID NO: 747139 - DNA, 75 bp, synthetic construct
  source 1..75: mol_type = other DNA
agctttatagcctcccgttaccgctgagccagtatcacaccggcccgctgcgcctgaatgccgccctgcaactgc

SEQ ID NO: 747140 - DNA, 75 bp, synthetic construct
  source 1..75: mol_type = other DNA
tacgtgaagatgaatttgtcacatcattacaggctttgaaagagatagggcttaaggctggattttttgcttttg

SEQ ID NO: 747141 - DNA, 75 bp, synthetic construct
  source 1..75: mol_type = other DNA
ggacttatggtggacggttttattttacgtgaagatgaatttgtcacatcattacaggctttgaaagagataggg

SEQ ID NO: 747142 - DNA, 75 bp, synthetic construct
  source 1..75: mol_type = other DNA
tagtgagtatgccttcgcaactcttcactatggcgcgttcttttaaagcggttgccaatggaaaaatttatatcg

SEQ ID NO: 747143 - DNA, 75 bp, synthetic construct
  source 1..75: mol_type = other DNA
ggaccaacatcaaccttaaacgtgtccgcccggtggtgcttccaggcatccgttacgctgtgatgtgtgttccca

SEQ ID NO: 747144 - DNA, 75 bp, synthetic construct
  source 1..75: mol_type = other DNA
cgcccgttgggcagatattccgctaactcaggactggagtgaagacagtacgcaaccgcgttgctgcagcattcc

SEQ ID NO: 747145 - DNA, 75 bp, synthetic construct
  source 1..75: mol_type = other DNA
gcaaactgccgactcgtgaagatatcgcccgttgggcagatattccgctaactcaggactggagtgaagacagta

SEQ ID NO: 747146 - DNA, 75 bp, synthetic construct
  source 1..75: mol_type = other DNA
aatgcgtgttactaccgacaaaaggcgatatttaaaatcggtctgagaaaccggaatgatattgcatggataatg

SEQ ID NO: 747147 - DNA, 75 bp, synthetic construct
  source 1..75: mol_type = other DNA
aaactttcatcaattgaaaaatatttttctgcgcattctggccgtgccttctcgctatataagtagtgggtatag

SEQ ID NO: 747148 - DNA, 75 bp, synthetic construct
  source 1..75: mol_type = other DNA
tggaaacaccggagcagattgtgtcgcatattctgtctgacggacacctcccggggaaacagcgtgtcattgtgg

SEQ ID NO: 747149 - DNA, 75 bp, synthetic construct
  source 1..75: mol_type = other DNA
tctaaacagtctgaagttgcgattctaacaactgagaggctatttgctaagtgtacggaaatgcttaaatcgaga

SEQ ID NO: 747150 - DNA, 75 bp, synthetic construct
  source 1..75: mol_type = other DNA
ctatcgacttgatcaatcggtcacttctaaacagtctgaagttgcgattctaacaactgagaggctatttgctaa

SEQ ID NO: 747151 - DNA, 75 bp, synthetic construct
  source 1..75: mol_type = other DNA
attggctatgaggcaaaagattcctgggatgtgataattgttaaccatctaaggttggcaaacgaacagtttcca

SEQ ID NO: 747152 - DNA, 75 bp, synthetic construct
  source 1..75: mol_type = other DNA
tttaaccagaaagaaaatgtaattttggcatctgatgaggccaagggatgcaatcgagttgaagtcaaacttgag

SEQ ID NO: 747153 - DNA, 75 bp, synthetic construct
  source 1..75: mol_type = other DNA
tgggcgaagtagatgatgatgaagacgacgaatacgaagaggaagaggatgatgatgacgacagggacgaggagg

SEQ ID NO: 747154 - DNA, 75 bp, synthetic construct
  source 1..75: mol_type = other DNA
ttgctgacactgaaaacgttactccgaatatcgttatttttgacaccccgctgatgcgcggtgaacagaaaattg

SEQ ID NO: 747155 - DNA, 75 bp, synthetic construct
  source 1..75: mol_type = other DNA
tctttctgtcttttgtggttgtcttttatttatattgaatatatttgacggtcttattaacccaaatataaacat

SEQ ID NO: 747156 - DNA, 75 bp, synthetic construct
  source 1..75: mol_type = other DNA
gaggaaccggtgaacttgatagaataattatcaataattcctcagttacttatattgatattagctccaatgata

SEQ ID NO: 747157 - DNA, 75 bp, synthetic construct
  source 1..75: mol_type = other DNA
cttgagcttataaaaaatgccatacgaggaaacagcgatcctgagagaattaatatcaataattccgcagttact

SEQ ID NO: 747158 - DNA, 75 bp, synthetic construct
  source 1..75: mol_type = other DNA
atgctaccatctatttcaatcaacaataccagcgcagcttacacagaatccatcaatgaaaataacaatgatgaa

SEQ ID NO: 747159 - DNA, 75 bp, synthetic construct
  source 1..75: mol_type = other DNA
aacaggttccgatcatcaagttgtaaacgaactcaaaggggaaagactgagagaacctaacgaagcttttaatcc

SEQ ID NO: 747160 - DNA, 75 bp, synthetic construct
  source 1..75: mol_type = other DNA
aatgaaaacatagtagagaatactcatgatatcaataacaagaaaatgatcttcagcgcaataaaagaaatatat

SEQ ID NO: 747161 - DNA, 75 bp, synthetic construct
  source 1..75: mol_type = other DNA
accaacaaaatcacctgcaaacgatgaaaacaaaaaagtcggtcaaaccatcatcagtgaaaatgtagtagagaa

SEQ ID NO: 747162 - DNA, 75 bp, synthetic construct
  source 1..75: mol_type = other DNA
gtggaattgaaatgggaatttaccccctctcaattgtaaatacgctagatggaaaagtatcccccacagcgcaaa

SEQ ID NO: 747163 - DNA, 75 bp, synthetic construct
  source 1..75: mol_type = other DNA
gtgtgacggaaggcggtctgacgcgcagcatggggtatgacgctgccgggcgcatcaccgtgctgaccaacgaga

SEQ ID NO: 747164 - DNA, 75 bp, synthetic construct
  source 1..75: mol_type = other DNA
tatttttggcctttaccagctccctcatgttttaagctcttgggtaaggcttggatatgatagactggtattggg

SEQ ID NO: 747165 - DNA, 75 bp, synthetic construct
  source 1..75: mol_type = other DNA
gaaaacgccaggagtgcttcagcgtggtttgaaagcagtaaagctatcatggtagaatcattgcaacaggttccg

SEQ ID NO: 747166 - DNA, 75 bp, synthetic construct
  source 1..75: mol_type = other DNA
ggtaacaaaattaacgttggccattctcaaaaaatatataagcattttaaggatctcgaaggtaaaattgaataa

SEQ ID NO: 747167 - DNA, 75 bp, synthetic construct
  source 1..75: mol_type = other DNA
caaaaccagatggacccggtgtacacgccggcgcgaaaaatccacctgtaccactgcgaccatcgcggcctgccg

SEQ ID NO: 747168 - DNA, 75 bp, synthetic construct
  source 1..75: mol_type = other DNA
acaattctaccgccgacttaacgttcccggacagaagatttaaagttccaaaagattcgttctttagtaaaggat

SEQ ID NO: 747169 - DNA, 75 bp, synthetic construct
  source 1..75: mol_type = other DNA
attctttctgaattggaaagagaataccgccttaacaccttacaaattaaaattcttaaagatatttcaactttt

SEQ ID NO: 747170 - DNA, 75 bp, synthetic construct
  source 1..75: mol_type = other DNA
ggatatttacaaagactataataataatcatgaagatgataattttgataaaatgcaaaagatttttttagcatt

SEQ ID NO: 747171 - DNA, 75 bp, synthetic construct
  source 1..75: mol_type = other DNA
cgcgatcgaagagtttaaacgctactaccgttccgtagatgcacgtgctgatcgacgatattcagttttttgcta

SEQ ID NO: 747172 - DNA, 75 bp, synthetic construct
  source 1..75: mol_type = other DNA
tttccactagcaattatctccgttattttgatagccgttatctcggagcgcgtaatatccctgaagggatcataa

SEQ ID NO: 747173 - DNA, 75 bp, synthetic construct
  source 1..75: mol_type = other DNA
gttgataatgtttattgatatcgataacctgcttgaaccttatgcaataaaaaaaattgtttcttttttccatgg

SEQ ID NO: 747174 - DNA, 75 bp, synthetic construct
  source 1..75: mol_type = other DNA
ggtcatcggcggcaccttgctaagccttccgctgatgtggcaactggcagatatcataatggcctgcatggctat

SEQ ID NO: 747175 - DNA, 75 bp, synthetic construct
  source 1..75: mol_type = other DNA
gtatctactttcctggagagttacatactctgcgataagaagagcatggcctctggcctgcgatcggtattgttg

SEQ ID NO: 747176 - DNA, 75 bp, synthetic construct
  source 1..75: mol_type = other DNA
gctatcggcggtcagcacaaaggacgtatctactttcctggagagttacatactctgcgataagaagagcatggc

SEQ ID NO: 747177 - DNA, 75 bp, synthetic construct
  source 1..75: mol_type = other DNA
atagaagccaacaactacatcgaccagaactacctcccgtcctcacttctggaccgcattaaagacgcgccgact

SEQ ID NO: 747178 - DNA, 75 bp, synthetic construct
  source 1..75: mol_type = other DNA
ggataacgtcccggctccggcagaaccgacctatcgttctaacgtaaacgtcaaacacacgtttgataacttcgt

SEQ ID NO: 747179 - DNA, 75 bp, synthetic construct
  source 1..75: mol_type = other DNA
gcagtcgatcaccgatccttgtctgagctggatggatagtgtgcagttattgtctatgctggcggaagcagtaga

SEQ ID NO: 747180 - DNA, 75 bp, synthetic construct
  source 1..75: mol_type = other DNA
caccaacttttcacgaaatcagaagcctggctggacgattgtacaaagaaatatgtggagaagaatttgctcagc

SEQ ID NO: 747181 - DNA, 75 bp, synthetic construct
  source 1..75: mol_type = other DNA
aatacaatcggtggttttgatgagacgttctatcattacggctgtgaagatgaggagcttggaatccgagtttca

SEQ ID NO: 747182 - DNA, 75 bp, synthetic construct
  source 1..75: mol_type = other DNA
ccaataactcccgcgttgcaggtattgcattatctcaaggtaatactttacactaccgaatctcatacttgggat

SEQ ID NO: 747183 - DNA, 75 bp, synthetic construct
  source 1..75: mol_type = other DNA
acctggcgctgatgtttgccttatccgcgctactgattgtttccgttatcggcatcctgctcagaagctccttgc

SEQ ID NO: 747184 - DNA, 75 bp, synthetic construct
  source 1..75: mol_type = other DNA
cccctccaacagtacggttacggtgcggttaagcgaaaccggtcatcaagcctgtgttgaagtgtcaaacccggg

SEQ ID NO: 747185 - DNA, 75 bp, synthetic construct
  source 1..75: mol_type = other DNA
ctggggcattatacgtttacgctaccggaggatattttgaagggggaactgagagaactaaatttcaatttaaac

SEQ ID NO: 747186 - DNA, 75 bp, synthetic construct
  source 1..75: mol_type = other DNA
gtgaaaaccgtcaattcaggacctaacagaaaatattttggttccggacgtggcatcacctggtacaacttcgtc

SEQ ID NO: 747187 - DNA, 75 bp, synthetic construct
  source 1..75: mol_type = other DNA
aagcagtaacaatgggacatataaaacgagagcatttgtcccaagcaaaatgcctaatgccttcatctgaaacag

SEQ ID NO: 747188 - DNA, 75 bp, synthetic construct
  source 1..75: mol_type = other DNA
atgagttttaaacgtttggttataattaccgcaatatcctgtatgtataccggatttgcatttgcagcgaacgtc

SEQ ID NO: 747189 - DNA, 75 bp, synthetic construct
  source 1..75: mol_type = other DNA
caacgagcaaaaactgggactggagccgttattacgcctggcgggccttaccctctttaaaagcgaaggtaatga

SEQ ID NO: 747190 - DNA, 75 bp, synthetic construct
  source 1..75: mol_type = other DNA
ggggcacctattacaggtctggatacctcatgggataaactttcagtttcaaatgaagcaacctttaatattaat

SEQ ID NO: 747191 - DNA, 75 bp, synthetic construct
  source 1..75: mol_type = other DNA
tgttatggcatgcaataaaaactataaccaacatgaagtggcagactgtttaaccctgtcttaccgtgaggttaa

SEQ ID NO: 747192 - DNA, 75 bp, synthetic construct
  source 1..75: mol_type = other DNA
aaacatataaaaagtcatctaattatgttgagcgcatttgtcataggcgcatattctgcatattggctatgggtg

SEQ ID NO: 747193 - DNA, 75 bp, synthetic construct
  source 1..75: mol_type = other DNA
cagaagcggtataccgacgtagataaggttattttcgatcagggaaaacataatatgcagcgtctgatctcacct

SEQ ID NO: 747194 - DNA, 75 bp, synthetic construct
  source 1..75: mol_type = other DNA
tgcgtctgaaagggaagccttcgctgtatgtggtaccactggattttgtgcgtaaccttccggaagcgcatgtgg

SEQ ID NO: 747195 - DNA, 75 bp, synthetic construct
  source 1..75: mol_type = other DNA
gacgtgacaacgctttgttccacggaacaggagaatatcaacggcctgggatctccatccgagatttcaatgtcg

SEQ ID NO: 747196 - DNA, 75 bp, synthetic construct
  source 1..75: mol_type = other DNA
ttctgaggggaaggattaccagacaattagcgccatatggagttctttagaaccaacagaattggagaaattatc

SEQ ID NO: 747197 - DNA, 75 bp, synthetic construct
  source 1..75: mol_type = other DNA
gcgtaaagtctggcgccagttgttacgcgaaggtatcagggtggccagatgtacagtggcgcgtctcatggcggt

SEQ ID NO: 747198 - DNA, 75 bp, synthetic construct
  source 1..75: mol_type = other DNA
acttccggcatacagcgtcatttcgcgagttacttgggggcccgttttaaaatcccatacaatgtggccaaaacc

SEQ ID NO: 747199 - DNA, 75 bp, synthetic construct
  source 1..75: mol_type = other DNA
gcatgggccgcgtggcggtagacctctacagccagcagattggtgcccgtctggaggatgtgtcgagcttcgcca

SEQ ID NO: 747200 - DNA, 75 bp, synthetic construct
  source 1..75: mol_type = other DNA
aatgcatggcggactttggtgataacggcattacagcaacagctttcggggggagaggacagcgagatttgttac

SEQ ID NO: 747201 - DNA, 75 bp, synthetic construct
  source 1..75: mol_type = other DNA
attgggaaggcctggatggtccggagcggattggttatttacacagtcgccgcactcggacgcgtgagatatttg

SEQ ID NO: 747202 - DNA, 75 bp, synthetic construct
  source 1..75: mol_type = other DNA
tctgaaacttgagtatgatggcaatgattacagccgagagtttgcaaatggatatagtagtttgccacaaagctc

SEQ ID NO: 747203 - DNA, 75 bp, synthetic construct
  source 1..75: mol_type = other DNA
ggtccgcagcactgtatatatgttccaaaagaagtgaatttactctttcgcaaagttaaaaccacttacagtaaa

SEQ ID NO: 747204 - DNA, 75 bp, synthetic construct
  source 1..75: mol_type = other DNA
cggtaatttattggtattagcaggtaccgaagctcgcgactccacggttggcagcggtggagccgccaacggcag

SEQ ID NO: 747205 - DNA, 75 bp, synthetic construct
  source 1..75: mol_type = other DNA
atataaaacaatgtttatgatactggactggcgctcgatatgtccgataaagaccgactttccgttagtattgaa

SEQ ID NO: 747206 - DNA, 75 bp, synthetic construct
  source 1..75: mol_type = other DNA
ggccagatgtacagtggcgcgcctcatggcggttatgggacttgccggtgttctccggggtaaaaaggtccgtac

SEQ ID NO: 747207 - DNA, 75 bp, synthetic construct
  source 1..75: mol_type = other DNA
gtttaatgatgtgtttgcagaaatggtggcctggcacaatgcagcgggaataaccggaaacggacacttcaccat

SEQ ID NO: 747208 - DNA, 75 bp, synthetic construct
  source 1..75: mol_type = other DNA
ctggttaatgtcggcgcacaaatagccgccatgacgccgggcgagctggcatcatggcttgcggagaatcttcag

SEQ ID NO: 747209 - DNA, 75 bp, synthetic construct
  source 1..75: mol_type = other DNA
ttttaacggtaatgccatcagttatgaaatcatgctcaaagatgaagggcgaccagctgcagggcgcagagacgg

SEQ ID NO: 747210 - DNA, 75 bp, synthetic construct
  source 1..75: mol_type = other DNA
ccaggctgatgtacagggggctgtagctcaattgggttccgctaatgttgatgttcgtcgttgcaaagctgtgat

SEQ ID NO: 747211 - DNA, 75 bp, synthetic construct
  source 1..75: mol_type = other DNA
attcaaaaggaagaactcatggaagaacagaacaaacctgttgagacggaaattactcaggaagtcgaagttgaa

SEQ ID NO: 747212 - DNA, 75 bp, synthetic construct
  source 1..75: mol_type = other DNA
accggggaacactgacgcagatcggcggggaaaccatccgtgaaaaggcgcggataaacaagcctggagcctgcc

SEQ ID NO: 747213 - DNA, 75 bp, synthetic construct
  source 1..75: mol_type = other DNA
acttatctggagctgacggtactcagttatccagcagctgccatcactctaattggtagcggggcacttcgtggt

SEQ ID NO: 747214 - DNA, 75 bp, synthetic construct
  source 1..75: mol_type = other DNA
cccctgcaccgccatacccgcttcagacgccaggagctggcacaggatgagattaacccggacgtcctggcgatg

SEQ ID NO: 747215 - DNA, 75 bp, synthetic construct
  source 1..75: mol_type = other DNA
gagcgactaaaagaagcaaaactgctggcatcaacagggagtacaggtgactcgtatgacaatgtattttattag

SEQ ID NO: 747216 - DNA, 75 bp, synthetic construct
  source 1..75: mol_type = other DNA
gataaggaccgttatctctccgggaatcctatcgaggtgacggtagaactgagtgaaccgccccgggtttcctgg

SEQ ID NO: 747217 - DNA, 75 bp, synthetic construct
  source 1..75: mol_type = other DNA
tgaagatgtcaaaggcaatttttcgaatcgtgaacagagcatggtggtcgttcaggcacctacgctaagccagaa

SEQ ID NO: 747218 - DNA, 75 bp, synthetic construct
  source 1..75: mol_type = other DNA
catgttgccgtatattcgcggtgacgaggtgtggggtgtatgccggatttacgggcaggaaatcatcgattacat

SEQ ID NO: 747219 - DNA, 75 bp, synthetic construct
  source 1..75: mol_type = other DNA
agtttttgttatcgtagtgatagctactcaggaagtggcgggaatttcgaattcaataatctatttcatggccct

SEQ ID NO: 747220 - DNA, 75 bp, synthetic construct
  source 1..75: mol_type = other DNA
ggctatgaaagcctgattatctcacctaaccgtggttataatcagtctgcactggatgatgcggagatcccgcgc

SEQ ID NO: 747221 - DNA, 75 bp, synthetic construct
  source 1..75: mol_type = other DNA
tctcagctttaccacgataatccagagaagttttttagccttttagccggtaatgggcttaactgtgtgtccggg

SEQ ID NO: 747222 - DNA, 75 bp, synthetic construct
  source 1..75: mol_type = other DNA
catcgactaccgtccggtgctgtggggactaacctctctaggagacggcgaaacgcgttttatcgttgccgaaca

SEQ ID NO: 747223 - DNA, 75 bp, synthetic construct
  source 1..75: mol_type = other DNA
tatccatttttgtatcgttatactttatttttaattatggttcaatgtatctgaaattatataatgttactgaga

SEQ ID NO: 747224 - DNA, 75 bp, synthetic construct
  source 1..75: mol_type = other DNA
cggaaaactagttttttaaagtttagtttaaattctatttttagtcttttaagtggtatcgtattgctttcatgt

SEQ ID NO: 747225 - DNA, 75 bp, synthetic construct
  source 1..75: mol_type = other DNA
gcgcagcaggtgtcaggtgttcaggctgacgtgcgaattgtaaaccagaatgccaggaaaaaacaaaacccgccg

SEQ ID NO: 747226 - DNA, 75 bp, synthetic construct
  source 1..75: mol_type = other DNA
atctttcggatttgcccgtaccggatgccatcgtggtgcctgatgcggcggtgattttcggggcctggctggcac

SEQ ID NO: 747227 - DNA, 75 bp, synthetic construct
  source 1..75: mol_type = other DNA
gcgtttaaacagggagaggtgaatgcatatcagctgacgctggcctttcagcgtgtcaatgatgcagtgcgggca

SEQ ID NO: 747228 - DNA, 75 bp, synthetic construct
  source 1..75: mol_type = other DNA
cgaaccggaaacggtacggcatcgcaacccctgctggataaggtggcagcgtcagtcaatgatgatgaaattcga

SEQ ID NO: 747229 - DNA, 75 bp, synthetic construct
  source 1..75: mol_type = other DNA
catctttacccgggagattcactgaatctgcagacagcccagaatgcggataatggtttttctgaactggaaaag

SEQ ID NO: 747230 - DNA, 75 bp, synthetic construct
  source 1..75: mol_type = other DNA
atgggcagcctttacggcaaagtatgggatattctggtggtggttccgggttcggtgggcaaatggcagaatggc

SEQ ID NO: 747231 - DNA, 75 bp, synthetic construct
  source 1..75: mol_type = other DNA
tgcccttcttacccctctacgttgagcagcttggcgttaccggtcactccgccctgaatatgtggtccggtattg

SEQ ID NO: 747232 - DNA, 75 bp, synthetic construct
  source 1..75: mol_type = other DNA
aagaattgtccaagaggtttttgtgtttaatgttgaagacaaaaaagtaaaattaaaaggttataggtatgattc

SEQ ID NO: 747233 - DNA, 75 bp, synthetic construct
  source 1..75: mol_type = other DNA
aaagggctggagctttttaatgagaaaattacacaaaagtcgaaaatcagtaacggaatgtcaacgctggatgct

SEQ ID NO: 747234 - DNA, 75 bp, synthetic construct
  source 1..75: mol_type = other DNA
gttcggggaatattggtattcctgtacaatatgaaaaaactgttatttttcctggagatattgttgtcggggaca

SEQ ID NO: 747235 - DNA, 75 bp, synthetic construct
  source 1..75: mol_type = other DNA
gagcgtctcgcagaagataacgccagagtcgattttttcggacatacccatgcctggtcgcctgagttctctgcc

SEQ ID NO: 747236 - DNA, 75 bp, synthetic construct
  source 1..75: mol_type = other DNA
gaatttagctttaactatatggatgaccaagagtaccgtcgctggtctatctctatgcaaccattcgaatggttt

SEQ ID NO: 747237 - DNA, 75 bp, synthetic construct
  source 1..75: mol_type = other DNA
caacgggagatagaacgctcagttaatgccgatatagcccgtcgcgacaggttccgcgaaatgatgcgagcacct

SEQ ID NO: 747238 - DNA, 75 bp, synthetic construct
  source 1..75: mol_type = other DNA
tctactggtcctggaactggcccgtgaggagtttgattacctttccgcagaagagattgctgaagaaatacgccg

SEQ ID NO: 747239 - DNA, 75 bp, synthetic construct
  source 1..75: mol_type = other DNA
cagtattatgaccccggataactccaaaattaacattgattatttttgtagcaaaatcagcctgatgaaagaaaa

SEQ ID NO: 747240 - DNA, 75 bp, synthetic construct
  source 1..75: mol_type = other DNA
taacagaaatacaacatgatgagcatctgcgcccggaaacgacgctggaacagttacgtgggttaaaagcaccat

SEQ ID NO: 747241 - DNA, 75 bp, synthetic construct
  source 1..75: mol_type = other DNA
agcttatgaactatttcaattgagctataacctttctcccttcaatgattttttgattatttaccgtatgggaca

SEQ ID NO: 747242 - DNA, 75 bp, synthetic construct
  source 1..75: mol_type = other DNA
cgtggcgtacggtaccgcgcgtcagggcttacgctcgtcaatgctggcgcgcgttggcgatgaacatatggggcg

SEQ ID NO: 747243 - DNA, 75 bp, synthetic construct
  source 1..75: mol_type = other DNA
taatgtgcaactgggattcgttgatgaacccagtgacagcaccaggagcagttcaggaagacaacagctactctg

SEQ ID NO: 747244 - DNA, 75 bp, synthetic construct
  source 1..75: mol_type = other DNA
attctatctcaaatggattatggggacatttaatgaacttgagtatggaaggaaaacatataccaaagaagcctt

SEQ ID NO: 747245 - DNA, 75 bp, synthetic construct
  source 1..75: mol_type = other DNA
tcagagcgtttattcaatttttatgagtgctgctatatatttttaccaagagcgcagcctcaagataaaatcgaa

SEQ ID NO: 747246 - DNA, 75 bp, synthetic construct
  source 1..75: mol_type = other DNA
aaaatacggcttctgaagttcatgaatcagcgaataaaggtgaggttgagcaattagttgaatgctctaagagaa

SEQ ID NO: 747247 - DNA, 75 bp, synthetic construct
  source 1..75: mol_type = other DNA
gcgaaaacggtttaagtggagtcttgtctgatcgtaataataaaataaaactaatcacgggcgtggcaccattcg

SEQ ID NO: 747248 - DNA, 75 bp, synthetic construct
  source 1..75: mol_type = other DNA
acagagacggtgatggcgccctctgcgattgccggtgtgatgaaaaaacgggatgcggatttccgcctcccgtcc

SEQ ID NO: 747249 - DNA, 75 bp, synthetic construct
  source 1..75: mol_type = other DNA
acagatcactgctgacttgcgaaagctctatttctcaggaacggatccacgcacttattttgaagagaaggtgga

SEQ ID NO: 747250 - DNA, 75 bp, synthetic construct
  source 1..75: mol_type = other DNA
atgctctccttatcgcgcatcctggatctcattggcgatgtgccagcatacgggtatcgccgtgtctgggcgata

SEQ ID NO: 747251 - DNA, 75 bp, synthetic construct
  source 1..75: mol_type = other DNA
tttatattatgaagaaatagatttttgtttgcgtgttcgggataaatataaaataagtgtcgattttgatagtca

SEQ ID NO: 747252 - DNA, 75 bp, synthetic construct
  source 1..75: mol_type = other DNA
atggtgttttttgcgtcagacatatgatatccgtaacatggaaaactcatggttccggtaattatgtggatgaca

SEQ ID NO: 747253 - DNA, 75 bp, synthetic construct
  source 1..75: mol_type = other DNA
ggttgggtatcacttcgtgaaatattccagttgattgatcataaattagccggaatggctataatgcctgatgct

SEQ ID NO: 747254 - DNA, 75 bp, synthetic construct
  source 1..75: mol_type = other DNA
cgggagatagccaaaattaacattactctccaaaaagaagaggatggtttatataatttaggtggattggatttt

SEQ ID NO: 747255 - DNA, 75 bp, synthetic construct
  source 1..75: mol_type = other DNA
gtcatcgaatgaaaataatgttgatcatttttttcaatccgctaagagagatgaacagaccctattcggcaatat

SEQ ID NO: 747256 - DNA, 75 bp, synthetic construct
  source 1..75: mol_type = other DNA
gtgttttctgaaactaacaaattatcgaataaaaataatgccgatcagttttttgaatgcgctaaaagaaatgaa

SEQ ID NO: 747257 - DNA, 75 bp, synthetic construct
  source 1..75: mol_type = other DNA
agatattgacaccgcgttatctgtggcactgaaaacagccaacaacctgtcagaaattgctgccggaggtgaaga

SEQ ID NO: 747258 - DNA, 75 bp, synthetic construct
  source 1..75: mol_type = other DNA
atttattcatcgaagaagctgccacacgtaataacaatattctttttaatgatggattcaatagaagagcaagta

SEQ ID NO: 747259 - DNA, 75 bp, synthetic construct
  source 1..75: mol_type = other DNA
gtgccggatgacgagattgtgcagcatcgcagagtcgccctgttggagttgatccaaaagcacattcgccagcgc

SEQ ID NO: 747260 - DNA, 75 bp, synthetic construct
  source 1..75: mol_type = other DNA
tatactggactttcggcagagcaaatgcaggcattagagcaacccttgcctgaaagcaagcgcgatccatggatc

SEQ ID NO: 747261 - DNA, 75 bp, synthetic construct
  source 1..75: mol_type = other DNA
tatcctaaaactgatgccgcgaaaatggtgcaggcgaaaccctgctatgttgaagaccgcgtaacggctgatgcc

SEQ ID NO: 747262 - DNA, 75 bp, synthetic construct
  source 1..75: mol_type = other DNA
ggtaccaataccattgatggtaactggcaggccgatgaaggacgccgttaccgggataatgtaagaatctatttt

SEQ ID NO: 747263 - DNA, 75 bp, synthetic construct
  source 1..75: mol_type = other DNA
caaggtccgcgatataaaacaaggaatgatgcaacaactgctgaccggacgtatccgtctgccattggatcatca

SEQ ID NO: 747264 - DNA, 75 bp, synthetic construct
  source 1..75: mol_type = other DNA
tgtccgccagggtgatgaactggatgtcccggctcaagttagtgaaaataatttaaccccgccaccgggtaatag

SEQ ID NO: 747265 - DNA, 75 bp, synthetic construct
  source 1..75: mol_type = other DNA
aggtacaactaacggcgtaaaaaagatttattttttttacggtgttaatggtgcggtttattacgcccgtggcac

SEQ ID NO: 747266 - DNA, 75 bp, synthetic construct
  source 1..75: mol_type = other DNA
tcggtttacgacgactcaaagcccggcacgctgaacgactttctgactgcccttgatgaaagcgatttaaagccg

SEQ ID NO: 747267 - DNA, 75 bp, synthetic construct
  source 1..75: mol_type = other DNA
acagtgaagctgattcgtcagtaccgtgggtttcaaaaatcccgctaataggtgcgctctttacctccaaaagca

SEQ ID NO: 747268 - DNA, 75 bp, synthetic construct
  source 1..75: mol_type = other DNA
attctctcccgcacctacagcagctaccggacgaagacgcctgcgccggtgggcgttttcggccccggctggaaa

SEQ ID NO: 747269 - DNA, 75 bp, synthetic construct
  source 1..75: mol_type = other DNA
ggatgggcctcttctcaggcttcaggcgcaatgacagactggttaagccgcttcggtaccgcaagtgtcaatgac

SEQ ID NO: 747270 - DNA, 75 bp, synthetic construct
  source 1..75: mol_type = other DNA
aatagttttaaacttaaaatatgacaaacaatttgttcaaatgcaatggtttgtagcttttttaagttttatatt

SEQ ID NO: 747271 - DNA, 75 bp, synthetic construct
  source 1..75: mol_type = other DNA
gtcttgtctgatcgtaataaaaaaataaaactcatcacgggcgtggcaccattcgatgatattttatttatggat

SEQ ID NO: 747272 - DNA, 75 bp, synthetic construct
  source 1..75: mol_type = other DNA
aatatgatgctaatgaaaataaattaaaagtatacaacgtacactttgataataatcaagagttagttgctgatg

SEQ ID NO: 747273 - DNA, 75 bp, synthetic construct
  source 1..75: mol_type = other DNA
ggtttatataatttacgtggattggattttaagggatgcttcttttctggacagaacttcagtaactatgatatt

SEQ ID NO: 747274 - DNA, 75 bp, synthetic construct
  source 1..75: mol_type = other DNA
ttagccatccttctgcttctgatgcgcttaaccgtctacagcgtcacgatctgcgctggctggttaaacgtctgg

SEQ ID NO: 747275 - DNA, 75 bp, synthetic construct
  source 1..75: mol_type = other DNA
attaaactaaagctggagaacaaagaaaatgcggtttctgaaactgacctgtcatcgaatgaaaataatgttgat

SEQ ID NO: 747276 - DNA, 75 bp, synthetic construct
  source 1..75: mol_type = other DNA
atggaaggtcatcagagtttctacttaattttttatgagtgttgctataagtttttaccaagagcgcagcctcaa

SEQ ID NO: 747277 - DNA, 75 bp, synthetic construct
  source 1..75: mol_type = other DNA
atgaaatatggaaagcgatgctgaccttgcaattccatgacatccttcccggctcatgtatttcaagagtttatc

SEQ ID NO: 747278 - DNA, 75 bp, synthetic construct
  source 1..75: mol_type = other DNA
agacacaaactcgtcgctctcgttgatatcggtggcgaaggtcttattgtggataagaatggttcacccatctgc

SEQ ID NO: 747279 - DNA, 75 bp, synthetic construct
  source 1..75: mol_type = other DNA
cgggaatgcaaagtttaaaatatacaaaccacatggctctattagcttcttgtatgaaggatatatgtcaaaaga

SEQ ID NO: 747280 - DNA, 75 bp, synthetic construct
  source 1..75: mol_type = other DNA
caatgagagttatgaaaaatcattaaagcctgtgagcgaaaacggtttaaatggagtcttatctgatcgtaataa

SEQ ID NO: 747281 - DNA, 75 bp, synthetic construct
  source 1..75: mol_type = other DNA
aactggccagacaggtggagccggaatacacaccggcgcgaaaagttcatttttaccactgcgaccaccggggcc

SEQ ID NO: 747282 - DNA, 75 bp, synthetic construct
  source 1..75: mol_type = other DNA
atgctttgctcaacagaccatgaatggtggcgtgaacaaacactatcctgtgatatgcgcaaaaagcccgagcgc

SEQ ID NO: 747283 - DNA, 75 bp, synthetic construct
  source 1..75: mol_type = other DNA
ggtatgcctgtagtcttgttttcctgcgaaacaggaaaaggcaaaaattcatttgcacagaaactagctaacgaa

SEQ ID NO: 747284 - DNA, 75 bp, synthetic construct
  source 1..75: mol_type = other DNA
agggttcattgaacgagttaatagcattagagtttaaagatgaatatggggcagtggtaattgatgtagatgcta

SEQ ID NO: 747285 - DNA, 75 bp, synthetic construct
  source 1..75: mol_type = other DNA
tggtcaggtaactgaagctgttctgacccaggatggccctgtactggagaatttcactgcagggcaaagtggcac

SEQ ID NO: 747286 - DNA, 75 bp, synthetic construct
  source 1..75: mol_type = other DNA
ggatggaaatgatactctcattgttggggcatcaaacagcaatctgaatgtaattctgttcaatgatggtagcat

SEQ ID NO: 747287 - DNA, 75 bp, synthetic construct
  source 1..75: mol_type = other DNA
tttttctttggtggaaaagtcatactcatcatgatgggtgcacaatttaaggatagcattaacgttctgaatgtg

SEQ ID NO: 747288 - DNA, 75 bp, synthetic construct
  source 1..75: mol_type = other DNA
ggcacgataaacaaggccatctttcacattacatggtgctgatccagcgcagtggtttaagcaaactgctggagc

SEQ ID NO: 747289 - DNA, 75 bp, synthetic construct
  source 1..75: mol_type = other DNA
aatatctggccagtatctatttattatcgtttgctttcatttgattatttttctgcgcgattggattcattattg

SEQ ID NO: 747290 - DNA, 75 bp, synthetic construct
  source 1..75: mol_type = other DNA
gtggcggcggatgaggcacaaaatctaaaaaatccggcctcggcacagacgaaggctgcaaaatcaattcctgcc

SEQ ID NO: 747291 - DNA, 75 bp, synthetic construct
  source 1..75: mol_type = other DNA
aaaatattacgccccagactcagcatgcaggtgaaatcatcctccggcgcgggaggcagcagcgggtttcaactg

SEQ ID NO: 747292 - DNA, 75 bp, synthetic construct
  source 1..75: mol_type = other DNA
ctataaccttgtgctcgctgatgcttgatcggttggtacagtcggttcccctgaagaaaggcgatacgccatatg

SEQ ID NO: 747293 - DNA, 75 bp, synthetic construct
  source 1..75: mol_type = other DNA
gcagcgacacgtaatgacatgaaggtaatgactggtgatggcgatgatataattatcactggtcgggattacggt

SEQ ID NO: 747294 - DNA, 75 bp, synthetic construct
  source 1..75: mol_type = other DNA
ccggctgccggtggtgatcgtcgggggcgggccgctggaggcggaagtgcggcgtgaggcgcagcaacgcgggct

SEQ ID NO: 747295 - DNA, 75 bp, synthetic construct
  source 1..75: mol_type = other DNA
gtgcagcacgatccgcagcgggtggcgcactggcgggaaaccgtcggcgataacttcttcctcttcgtcggcgct

SEQ ID NO: 747296 - DNA, 75 bp, synthetic construct
  source 1..75: mol_type = other DNA
tttataccgacaagcacatattatatcggtggggcaattttagctattgtaatatatataattattcacctttgg

SEQ ID NO: 747297 - DNA, 75 bp, synthetic construct
  source 1..75: mol_type = other DNA
taaaaaataaccacgcatcagaatatgaactaacggtagttgatgattacgggaataacatccatagtaaaatcg

SEQ ID NO: 747298 - DNA, 75 bp, synthetic construct
  source 1..75: mol_type = other DNA
acaactcctccacaaactgttggtgtatcgtcaacaacaccaataggattttccgcaaaagtaacgacaagtgat

SEQ ID NO: 747299 - DNA, 75 bp, synthetic construct
  source 1..75: mol_type = other DNA
gggcattcgacaaaagaatcacattgagaaagaggaatgatgggacatatgtatttttccatctgcaggattgtt

SEQ ID NO: 747300 - DNA, 75 bp, synthetic construct
  source 1..75: mol_type = other DNA
tctcgtaacggctgtttttaatgagtatcttattaataccaaaactgtagacgtcagacatttaaaattagtact

SEQ ID NO: 747301 - DNA, 75 bp, synthetic construct
  source 1..75: mol_type = other DNA
gatgcagggattatcgcagtgattcgagctcgacctataaccctgaacacaagaattttattaatgagttgcata

SEQ ID NO: 747302 - DNA, 75 bp, synthetic construct
  source 1..75: mol_type = other DNA
aactaccgcgataaatcggcgtatcgcttgggtacggtggtgtttcatcacaactcagagcatttggatattgtt

SEQ ID NO: 747303 - DNA, 75 bp, synthetic construct
  source 1..75: mol_type = other DNA
gatccgattgggctgaaagggggatggaatttttatcagtatccgttgaatccgatctcaaatatagatccatta

SEQ ID NO: 747304 - DNA, 75 bp, synthetic construct
  source 1..75: mol_type = other DNA
aatcgcaaaattttaacccctgaactggagcagcggttgcagaaactggtgcaatccggttcttcggtgatgttt

SEQ ID NO: 747305 - DNA, 75 bp, synthetic construct
  source 1..75: mol_type = other DNA
agatttttgcaaaagatggtaaatcagtgacattagcactggatggttactatttttccacgaaaacaaatggta

SEQ ID NO: 747306 - DNA, 75 bp, synthetic construct
  source 1..75: mol_type = other DNA
aaatggaagacgataggttaagagataatagtcctgaagttcttaatgagcttatcgaaactgttagaggattac

SEQ ID NO: 747307 - DNA, 75 bp, synthetic construct
  source 1..75: mol_type = other DNA
ctatataacgctccttgattatgataggaaaagaggaggtggtggttatgggcgaattaaatatgctctaaaaca

SEQ ID NO: 747308 - DNA, 75 bp, synthetic construct
  source 1..75: mol_type = other DNA
cccctcctgaaagctgtctcttgatcagatctcctgatcaagagacttcatcaccaggtaaccctcaaccatatc

SEQ ID NO: 747309 - DNA, 75 bp, synthetic construct
  source 1..75: mol_type = other DNA
caaataccagcaggcgatacaggccgcaacggcagcagtacaggggctggccggcggtaatctgagtgcagccct

SEQ ID NO: 747310 - DNA, 75 bp, synthetic construct
  source 1..75: mol_type = other DNA
atggtatctggggtctgctgcgtcagcaggtaaagttcttggtggcgggcttcttggactggcggccaatagtgg

SEQ ID NO: 747311 - DNA, 75 bp, synthetic construct
  source 1..75: mol_type = other DNA
aaactctctgataatgctcaactgacaagcactgccggtttgcaatcggatggtactatcgagttcggaaatggg

SEQ ID NO: 747312 - DNA, 75 bp, synthetic construct
  source 1..75: mol_type = other DNA
caacattagaaagctatccacggacagggatgcactgaacgaactacacatcgatggtatggtactttttattac

SEQ ID NO: 747313 - DNA, 75 bp, synthetic construct
  source 1..75: mol_type = other DNA
gcaaaggaaaacgtgtcaggacattacggcaggattttttatgctgcggtgcgggagttggtcataaggtcggat

SEQ ID NO: 747314 - DNA, 75 bp, synthetic construct
  source 1..75: mol_type = other DNA
acttctcggattgttataacggggttcaaaagaaaaatcaaaaaaagaaatgaagttcattctgttgataatctt

SEQ ID NO: 747315 - DNA, 75 bp, synthetic construct
  source 1..75: mol_type = other DNA
atgtctgagagacatttccgggatgtcagtcgactggtttacttaactgcgatgactaaagctggcagtaatgcc

SEQ ID NO: 747316 - DNA, 75 bp, synthetic construct
  source 1..75: mol_type = other DNA
acgatgcgcagctggtggcgcgcatccgggacaactacctgcagcttatcgcctggtggcgcgagcgcggacacg

SEQ ID NO: 747317 - DNA, 75 bp, synthetic construct
  source 1..75: mol_type = other DNA
aaatcacagctgcgatggaagaaaagctgaaagtgaacatggcgcgccagtggccggagccgaaggacggagagc

SEQ ID NO: 747318 - DNA, 75 bp, synthetic construct
  source 1..75: mol_type = other DNA
ttataccaacagcgcaaatcaccgcaaatataaatgctgatactgataaacctgttaccagtgaggccgggagcg

SEQ ID NO: 747319 - DNA, 75 bp, synthetic construct
  source 1..75: mol_type = other DNA
ggatggaacccctgtttcccgtgatacggttgtctatgcccgtgggatgaatccgtctgttgatgatgaatggta

SEQ ID NO: 747320 - DNA, 75 bp, synthetic construct
  source 1..75: mol_type = other DNA
atgaatatgactaaaaaagaagcattagcattccttgctctaaatcaatctatgcctaatgattatgacatcact

SEQ ID NO: 747321 - DNA, 75 bp, synthetic construct
  source 1..75: mol_type = other DNA
ttaaagtggcgttattaatggcgcagaacaagatgtcgcggaagtcgctaaaaaggtggcaaaagagaaatatgg

SEQ ID NO: 747322 - DNA, 75 bp, synthetic construct
  source 1..75: mol_type = other DNA
cggggcctgccgctggcgcttatcagcgaagacggcaatacggcgtggagcgcggaatatgatgaatggggcaac

SEQ ID NO: 747323 - DNA, 75 bp, synthetic construct
  source 1..75: mol_type = other DNA
ggcaacaatactggcatactgatgatgttgaacgattaatgcaatttggctatagcagtagctggaagcgtctct

SEQ ID NO: 747324 - DNA, 75 bp, synthetic construct
  source 1..75: mol_type = other DNA
catgatgatacagaaacgggtcagtcatatcgctttctctattcaaaacgatttgacgacacagacaccagcttg

SEQ ID NO: 747325 - DNA, 75 bp, synthetic construct
  source 1..75: mol_type = other DNA
cggtgcaccgcgaggaagggctgagtcagtaccgcgcatacgacagccgtggacagttaattgccgtgaaagaca

SEQ ID NO: 747326 - DNA, 75 bp, synthetic construct
  source 1..75: mol_type = other DNA
ccgtgaagtgctgcacacgcagggcgaagccgggctgaagcgggtggtgaaaaaggaacacgcggacggcagcgt

SEQ ID NO: 747327 - DNA, 75 bp, synthetic construct
  source 1..75: mol_type = other DNA
cagcgggcagaagaagcccggcagcaggccatttccggcgggacggaaccgtccgcttttcctgataccctgccg

SEQ ID NO: 747328 - DNA, 75 bp, synthetic construct
  source 1..75: mol_type = other DNA
gccgtattcaccctgaatgaaatccatctggttcaacccctgcaggagtcttttcgccgcaacgacagtctgtgc

SEQ ID NO: 747329 - DNA, 75 bp, synthetic construct
  source 1..75: mol_type = other DNA
gaacgtagcggtggggccagtggcatgttaggaacggctcgtctactgggtcagagtagtggcgcggcgctggtg

SEQ ID NO: 747330 - DNA, 75 bp, synthetic construct
  source 1..75: mol_type = other DNA
ttcccttaatttcatctgagctcgctgggatggctttaatgccagaaacggaaaggttaataggggaatgcctca

SEQ ID NO: 747331 - DNA, 75 bp, synthetic construct
  source 1..75: mol_type = other DNA
gcagaaaacagaaaaactggacggcatcgcctctcagatacagggggtttttctgaccggaggccgggcggaacg

SEQ ID NO: 747332 - DNA, 75 bp, synthetic construct
  source 1..75: mol_type = other DNA
ttcaggccttaccccattttcgctttatccagcattcactgcttacgtttgttccggccgacagcccaccggaat

SEQ ID NO: 747333 - DNA, 75 bp, synthetic construct
  source 1..75: mol_type = other DNA
tcatccaccagcagacctggtatctggtggctgaacacgaagggcatatcgccgtattcacacttgatgaaatcc

SEQ ID NO: 747334 - DNA, 75 bp, synthetic construct
  source 1..75: mol_type = other DNA
gcgaaaacgcagcgccgcagcctggcggatgcgcttcagcagtccggcggcgaagacggtggcagtgtggtgttc

SEQ ID NO: 747335 - DNA, 75 bp, synthetic construct
  source 1..75: mol_type = other DNA
ggggcctgctggtcctgcgggcccgcgaggcgaaaccggagccagaggcgaaaaaggagagccgggagatcccgg

SEQ ID NO: 747336 - DNA, 75 bp, synthetic construct
  source 1..75: mol_type = other DNA
gaagtcacctccagtacagtcgttttcccctctttttatggcggtgcgcagggggaaaatgcagcccctgatggc

SEQ ID NO: 747337 - DNA, 75 bp, synthetic construct
  source 1..75: mol_type = other DNA
gtgaccccggcccggcaggccctgccggtgagcgggggccgaaaggtgataccgggccgacgggccccgcaggga

SEQ ID NO: 747338 - DNA, 75 bp, synthetic construct
  source 1..75: mol_type = other DNA
tggctggacggcactgagcgagattatccagcgtcgggatccgcactgccatggggtggtgatcctcgggctgga

SEQ ID NO: 747339 - DNA, 75 bp, synthetic construct
  source 1..75: mol_type = other DNA
cagggaagtctgccagtctggatgatattgccgacaaggaggcgtttattcgtaagcttggggtggcaagagctt

SEQ ID NO: 747340 - DNA, 75 bp, synthetic construct
  source 1..75: mol_type = other DNA
cgaggcgaaaccggagccagaggcgaaaaaggagagccgggagatcccggaggacctccgggaccaaaaggtgac

SEQ ID NO: 747341 - DNA, 75 bp, synthetic construct
  source 1..75: mol_type = other DNA
gtcatcagcgttatcaacacctggcccgccaaccgggtgaaagagttactgccttggaacgtcaccctatctgta

SEQ ID NO: 747342 - DNA, 75 bp, synthetic construct
  source 1..75: mol_type = other DNA
acccggagctgcacccggacagcgccctcagcatgtggccggataaccgtatcgcccgtgacgcgcactatcttt

SEQ ID NO: 747343 - DNA, 75 bp, synthetic construct
  source 1..75: mol_type = other DNA
ttgaatctataataaataaaatgattccgccgccagatggaacaatacttactgaaaatccaaaagaatatgtcc

SEQ ID NO: 747344 - DNA, 75 bp, synthetic construct
  source 1..75: mol_type = other DNA
acgaggtccacagggcgctaccggccccagaggaccgcagggggtaaaaggggataaaggtgaccccggcccggc

SEQ ID NO: 747345 - DNA, 75 bp, synthetic construct
  source 1..75: mol_type = other DNA
ggcgtttattcgtaagcttggggtggcaagagcttacgggcgtgatctcaaaacaggagaaggggagtggacgac

SEQ ID NO: 747346 - DNA, 75 bp, synthetic construct
  source 1..75: mol_type = other DNA
ttatagtaaagctttttttgtatcatcttcattaacgataccttttatgttttggtttagttcttggatacctgc

SEQ ID NO: 747347 - DNA, 75 bp, synthetic construct
  source 1..75: mol_type = other DNA
acgccagcgacgccaccggcggcaacggctcagacgtggtgaatggctttacggtagggacatgggaaggcaccg

SEQ ID NO: 747348 - DNA, 75 bp, synthetic construct
  source 1..75: mol_type = other DNA
ggtactggcggatggcacctggagtgtcggtgttccggcggcagatgtcagcgcctggcctgcggggtcggtcac

SEQ ID NO: 747349 - DNA, 75 bp, synthetic construct
  source 1..75: mol_type = other DNA
tcggcggagcgacttacaccgccacggtgcaggcgaatttaagctggagcgtcgatgttccggcctccgcgttac

SEQ ID NO: 747350 - DNA, 75 bp, synthetic construct
  source 1..75: mol_type = other DNA
attccgccagccataacgtgcaggtcaataccgcgctgcctggcgtcatcattaatccagtggcgaccgacgata

SEQ ID NO: 747351 - DNA, 75 bp, synthetic construct
  source 1..75: mol_type = other DNA
agatttaagctggaacgtgagcgtgcctgccgccgactggcaggcgctgggtaacggtgagttaaccgttaacgc

SEQ ID NO: 747352 - DNA, 75 bp, synthetic construct
  source 1..75: mol_type = other DNA
gacattatcaacgccgctgaagcaggcagtgcacaaactatcagcggccaggtaaccggtgcggcggcgggcagc

SEQ ID NO: 747353 - DNA, 75 bp, synthetic construct
  source 1..75: mol_type = other DNA
caccacagtggaagctaacggtagctggacggtgaatgtgccgcctgccgatctcgctgcgctgccggatggcgc

SEQ ID NO: 747354 - DNA, 75 bp, synthetic construct
  source 1..75: mol_type = other DNA
cggtattagccgacggcacgtggagcctcggtattccggcggcagacgtcagcaactggcctgcgggtacggtgg

SEQ ID NO: 747355 - DNA, 75 bp, synthetic construct
  source 1..75: mol_type = other DNA
cagccagtttagcctggcggtggactggaaccatgacggcctgatggatatcgcccgtatcgcccagaccggaca

SEQ ID NO: 747356 - DNA, 75 bp, synthetic construct
  source 1..75: mol_type = other DNA
gcgggcgacgacattcttaacgccgccgaagccggcgcggcgctgaccatcactggcagcagcacggcggaagcg

SEQ ID NO: 747357 - DNA, 75 bp, synthetic construct
  source 1..75: mol_type = other DNA
agctggagcgtgggcgtcacggcggcgcaggttagcgcctggcctgcggggacggtgtctattgctgtatccggg

SEQ ID NO: 747358 - DNA, 75 bp, synthetic construct
  source 1..75: mol_type = other DNA
cagccagtcggcgcagatcgacaccgttaacccggcgcaggtgttgaccatcgccagcatcagcaccgacacggg

SEQ ID NO: 747359 - DNA, 75 bp, synthetic construct
  source 1..75: mol_type = other DNA
tccggcgtggaagcggggcaaaccgtcaccgtcacctttggcgggaaaacctataccgccaccgtagcaggcgat

SEQ ID NO: 747360 - DNA, 75 bp, synthetic construct
  source 1..75: mol_type = other DNA
attggggacaatgtgatccctcttccggtaatcaatgaacattactattcggcgtcagaagttggatcacaactc

SEQ ID NO: 747361 - DNA, 75 bp, synthetic construct
  source 1..75: mol_type = other DNA
gccgtggccccgccatgccgccggaggcggcctggcggccccccgtcacgggttgccggaaacggacttagtgga

SEQ ID NO: 747362 - DNA, 75 bp, synthetic construct
  source 1..75: mol_type = other DNA
gccctgcgtgatggcgatgccagcgcacaggccagcgtcagcaatgttaacggcaacagcgccaccactacccac

SEQ ID NO: 747363 - DNA, 75 bp, synthetic construct
  source 1..75: mol_type = other DNA
ggataatgtcggcggcgattatgtggcgagcaacctgagcatactggcgcctggtggacgtcatgtcagcctgtc

SEQ ID NO: 747364 - DNA, 75 bp, synthetic construct
  source 1..75: mol_type = other DNA
ggcggcacagataagatcagggcgctgcgacagcttggcgtagggcgcgccattgatcgtcacagcgaagatttc

SEQ ID NO: 747365 - DNA, 75 bp, synthetic construct
  source 1..75: mol_type = other DNA
tcagcgccccggcgaagctttcggtgctggacgccaacggcagtctgttgcaaaccgtcaatgtcacgctggatg

SEQ ID NO: 747366 - DNA, 75 bp, synthetic construct
  source 1..75: mol_type = other DNA
tcagggcatcgtgcagtcagacggcacctggagcgtgaccgttcccgccgccaatgttgacgcactggctgacgg

SEQ ID NO: 747367 - DNA, 75 bp, synthetic construct
  source 1..75: mol_type = other DNA
cggcgcggtggcgattaccgcttctgtgacggatctcagcggtaacactggcgacacctcccgcaccattaccgt

SEQ ID NO: 747368 - DNA, 75 bp, synthetic construct
  source 1..75: mol_type = other DNA
aactggagcgtcggcgttccgctgtcagatgtcaccgcgcttggcagcggcccgcataccatcactgcggcaatt

SEQ ID NO: 747369 - DNA, 75 bp, synthetic construct
  source 1..75: mol_type = other DNA
ccggcagcacttctggtgtcgaagccggacaaacggtcaccgtgacctttggcggcaaaacttacactgcaagcg

SEQ ID NO: 747370 - DNA, 75 bp, synthetic construct
  source 1..75: mol_type = other DNA
aacggacggtagctggagcgtcagcgtaccgccagccgacgtaagcgccctgaccgccagcaactacaccgttag

SEQ ID NO: 747371 - DNA, 75 bp, synthetic construct
  source 1..75: mol_type = other DNA
gatattcaggcgctgggtaatggcgatttaacggtgagcgcctcggtcaccaatcaaaacggcaacaccggcagc

SEQ ID NO: 747372 - DNA, 75 bp, synthetic construct
  source 1..75: mol_type = other DNA
ccgctaccgtagcgggcgatggtagctggacaaccaccgtacctgccgccgatctcagcgcgttacgcgacggcg

SEQ ID NO: 747373 - DNA, 75 bp, synthetic construct
  source 1..75: mol_type = other DNA
cacggcgacggtgggcagcaatctcacctggagcgtgaatgttccggcggcagatttacaggcgctgggcgatgg

SEQ ID NO: 747374 - DNA, 75 bp, synthetic construct
  source 1..75: mol_type = other DNA
cgccaccgtgcagccagatttaagctggagcgtcagcgtaccggcgaacgttttgcaggcgctgggcaacggtga

SEQ ID NO: 747375 - DNA, 75 bp, synthetic construct
  source 1..75: mol_type = other DNA
cgcgaacttaagcgtcaccaccgcgcaggctaccggttttaacacctcgacatttaccaatatcgaaggcatttc

SEQ ID NO: 747376 - DNA, 75 bp, synthetic construct
  source 1..75: mol_type = other DNA
ggcgctggtgataaccggtagcagcagcgggctggcggcgggcgcggcgctgacggtggtgattaacacggtcac

SEQ ID NO: 747377 - DNA, 75 bp, synthetic construct
  source 1..75: mol_type = other DNA
caccgccggaaatatcggcgcgaccgccagccagatagtcaccgtggataccaccgcgccgctggcgagcaaaac

SEQ ID NO: 747378 - DNA, 75 bp, synthetic construct
  source 1..75: mol_type = other DNA
caacgcatgcttacagcgtcgatgccaccgcgccctccgttaccatcaacaccatcgccagcgacgatattctta

SEQ ID NO: 747379 - DNA, 75 bp, synthetic construct
  source 1..75: mol_type = other DNA
accggcagccagtcggcgctgatcgataccgttaacccggcgcaggtactcactatcgccagcatcagcaccgac

SEQ ID NO: 747380 - DNA, 75 bp, synthetic construct
  source 1..75: mol_type = other DNA
tcgataccaccgcgccggtgatcagctttaacaccgtggcgggcgatgacgtaattaacaacgttgaacacactc

SEQ ID NO: 747381 - DNA, 75 bp, synthetic construct
  source 1..75: mol_type = other DNA
aaccgttgacgtggcaggccagagcagcgccggaaatccggtcagcgtcagccatccgttcaccgtcgatttaac

SEQ ID NO: 747382 - DNA, 75 bp, synthetic construct
  source 1..75: mol_type = other DNA
gaccatcagcggcaccagcacggcggaagccgggcagacggtaaccgtgacgcttaacggcgttaattacagcgg

SEQ ID NO: 747383 - DNA, 75 bp, synthetic construct
  source 1..75: mol_type = other DNA
ctacacggtaaccgcgagcgtcaccgacacggcaggcaacagtaattccgccagccataatgtgctggtcaacag

SEQ ID NO: 747384 - DNA, 75 bp, synthetic construct
  source 1..75: mol_type = other DNA
agctggagcgtcagcgtaccgacaacagatctcagcaatctgaccgccagccagtacacggtcagcgcctcggta

SEQ ID NO: 747385 - DNA, 75 bp, synthetic construct
  source 1..75: mol_type = other DNA
cgatctggcggcggtggcgatttccattaacaccgtctccggcgatgatgtgattaacgccgccgaaaaaggggc

SEQ ID NO: 747386 - DNA, 75 bp, synthetic construct
  source 1..75: mol_type = other DNA
cagtggacttacaccgacagccgcacgctgaccgacggcagctacgtttatcaggttcgggtgctggatctggcg

SEQ ID NO: 747387 - DNA, 75 bp, synthetic construct
  source 1..75: mol_type = other DNA
tcgatagcgccgcgccaacggtgaccatcaacaccattgccagcgataacatcatcaacgccagcgaagcggcgg

SEQ ID NO: 747388 - DNA, 75 bp, synthetic construct
  source 1..75: mol_type = other DNA
ggcaccaccgatgcccagccggggcagacggtaacggtgacgcttaacgggcagacgtatcagggcgtcgtgcag

SEQ ID NO: 747389 - DNA, 75 bp, synthetic construct
  source 1..75: mol_type = other DNA
caccgtttccggcgacgatgtgattaatgccgctgaaaaaagtgcagatttaaccctttcaggcagcacctccgg

SEQ ID NO: 747390 - DNA, 75 bp, synthetic construct
  source 1..75: mol_type = other DNA
gttgacggacgcacgctcaccaacggcaccaccacctggcaggtgcgggtggtcgatctggcgggcaacgttggc

SEQ ID NO: 747391 - DNA, 75 bp, synthetic construct
  source 1..75: mol_type = other DNA
gcgccgaccacgcgctggcggtggacgttaccgcgccggatctcaccattaacaccgtcgcgggcgatgacatca

SEQ ID NO: 747392 - DNA, 75 bp, synthetic construct
  source 1..75: mol_type = other DNA
ggtcgtcaccatcaacacggtggcaggcgatgatgtgatcaacgcgacggaacacgcccaggcgcagattatcag

SEQ ID NO: 747393 - DNA, 75 bp, synthetic construct
  source 1..75: mol_type = other DNA
agcgtaccgccagccgacgtaagcgccctgaccgccagcaactacaccgttagcgcggcggtgagcgacaaagcc

SEQ ID NO: 747394 - DNA, 75 bp, synthetic construct
  source 1..75: mol_type = other DNA
gccgggcgtcaccattaacgtggtggcaacggacgatattattaacgccgccgaagcgggcgcgggccagaccat

SEQ ID NO: 747395 - DNA, 75 bp, synthetic construct
  source 1..75: mol_type = other DNA
cccggtgatgtggtcaccgtcacgctcaacggtaaaaactacaccaccacgctggacgcctccggtaactggagt

SEQ ID NO: 747396 - DNA, 75 bp, synthetic construct
  source 1..75: mol_type = other DNA
ggcgaagcgggtgatgtcatcaccgtcacgctaaacagtaaaacctacaccaccacgctggacgcttccggcaac

SEQ ID NO: 747397 - DNA, 75 bp, synthetic construct
  source 1..75: mol_type = other DNA
ccggtgagttcgcgcaaatcagcatcgacggcggcaccacctggcagaatctttcggtaagcggtttgacctgga

SEQ ID NO: 747398 - DNA, 75 bp, synthetic construct
  source 1..75: mol_type = other DNA
cgccttgctcatcgttcctggaaaaagagcctcaaactgggcagcttcctgtgggtggtcgcctgttttgccatc

SEQ ID NO: 747399 - DNA, 75 bp, synthetic construct
  source 1..75: mol_type = other DNA
cgatgcaagtacccaatagcactgatactgggttggataaggtcggacctatcaaatatgacatagcagccaaag

SEQ ID NO: 747400 - DNA, 75 bp, synthetic construct
  source 1..75: mol_type = other DNA
agacgcctgcgccggtgggaatttttggccccggctggaaagcgccttctgatatccgcttacagctacgcgatg

SEQ ID NO: 747401 - DNA, 75 bp, synthetic construct
  source 1..75: mol_type = other DNA
gtcaactggcacaacaacaggcccaattaaaacaactgcagagctatatgaaagcaaccgcacctgctgttgttt

SEQ ID NO: 747402 - DNA, 75 bp, synthetic construct
  source 1..75: mol_type = other DNA
ctgacattacacttagacgaactatccggagtgctgacaatagaattgcaagcctttgaccctgcttacggtcag

SEQ ID NO: 747403 - DNA, 75 bp, synthetic construct
  source 1..75: mol_type = other DNA
cgagttagttattaaacaagcagatcagattaaaatgctgcccgatgctctgtcgatgttgggcattggtggcag

SEQ ID NO: 747404 - DNA, 75 bp, synthetic construct
  source 1..75: mol_type = other DNA
cggacaggaacgtgtcgagcgccttgagtctgataacgagccgcgccggttcgatatcccataccttcagcgcat

SEQ ID NO: 747405 - DNA, 75 bp, synthetic construct
  source 1..75: mol_type = other DNA
ggtaactttattactgatggtgtcgttcagcttaatgaggaaaacgtacaagtcaggaacgctgattctattcaa

SEQ ID NO: 747406 - DNA, 75 bp, synthetic construct
  source 1..75: mol_type = other DNA
tttagatctgatgttctcgggaaatcagttctttttattgggtatagtctgtcagatattaatatcagactacta

SEQ ID NO: 747407 - DNA, 75 bp, synthetic construct
  source 1..75: mol_type = other DNA
aaatgaccaactaccgccgtgaagacttcatccggatccgggatgagtaccgcgacaagctcaaagcactgaaac

SEQ ID NO: 747408 - DNA, 75 bp, synthetic construct
  source 1..75: mol_type = other DNA
ggtgcttaccctgaactgcgctttgaagaacgcaacgcccataagcagtgcaaatcctgtaatgccggagctggc

SEQ ID NO: 747409 - DNA, 75 bp, synthetic construct
  source 1..75: mol_type = other DNA
tcaacgtgtttaacgtccactcagcctgcacccgctgcaaccgccagttgagcggcaatgccgttgaataccgca

SEQ ID NO: 747410 - DNA, 75 bp, synthetic construct
  source 1..75: mol_type = other DNA
gcctcgcagtccgtccttaagaacaatcggtcctcactgaaaggggactttaccgatagtgctgagctacatctt

SEQ ID NO: 747411 - DNA, 75 bp, synthetic construct
  source 1..75: mol_type = other DNA
cgaacttgccaaactgcttgatctcgatgaagagatcatcctgcaatgggagagcggagagttcgaaccgaccat

SEQ ID NO: 747412 - DNA, 75 bp, synthetic construct
  source 1..75: mol_type = other DNA
atgaaaattttttgcaaaaaagaatttctgacagtgagtcggggcttgtttttagggataatagaatatctgatt

SEQ ID NO: 747413 - DNA, 75 bp, synthetic construct
  source 1..75: mol_type = other DNA
ttttttggtattggtaataatgcgcatttaaggactggctgtgatgtatcatcatataagatgtatatatatgat

SEQ ID NO: 747414 - DNA, 75 bp, synthetic construct
  source 1..75: mol_type = other DNA
gtggtaattttaaagcaatagataaccacgggaaggaaataacaaacggaaaaggattacctaatgtctgcagag

SEQ ID NO: 747415 - DNA, 75 bp, synthetic construct
  source 1..75: mol_type = other DNA
agcttatcatactcatggtgcagatagtcatggagaatattggggcgaaatattttcaggtaaagatgagaaaat

SEQ ID NO: 747416 - DNA, 75 bp, synthetic construct
  source 1..75: mol_type = other DNA
gggctgaaggggggatggaacctgtatggatatcaattgaatccgatatcagacatcgaccccctgggtttatct

SEQ ID NO: 747417 - DNA, 75 bp, synthetic construct
  source 1..75: mol_type = other DNA
ttgggaggtcatagagaacaacgctcattgttccgtaatcaatgacatttaccatgctctgaatgacgtttatgg

SEQ ID NO: 747418 - DNA, 75 bp, synthetic construct
  source 1..75: mol_type = other DNA
aagtaataatggttggttaattactcgtaacagtaaaggctggctcaatgaaactcacggtggcggattttatat

SEQ ID NO: 747419 - DNA, 75 bp, synthetic construct
  source 1..75: mol_type = other DNA
ctgtattgaatggtgttcatcaagctggtctgagtaccacaatacaattcactcgcgcagaagacaaaataatga

SEQ ID NO: 747420 - DNA, 75 bp, synthetic construct
  source 1..75: mol_type = other DNA
aaaaaacacgtaaacagcattcgcctgaatttcgcagtgaagccctgaagcttgctgaacgcatcggtgttgctg

SEQ ID NO: 747421 - DNA, 75 bp, synthetic construct
  source 1..75: mol_type = other DNA
tatcggaaaaggcgcaccgtaatctttgcgctgacgtggtgctcttcattgacgttctgtgtgacaccgataagc

SEQ ID NO: 747422 - DNA, 75 bp, synthetic construct
  source 1..75: mol_type = other DNA
gggttatataacacaacttcttactgacgaagatggttttttggttgaagaaacaattgatgtattaaagcgaat

SEQ ID NO: 747423 - DNA, 75 bp, synthetic construct
  source 1..75: mol_type = other DNA
ttgtgtacgtcataacggagacggtgagaaagacggcgatgcaaatcaggtggagagggatgtatcagcggttac

SEQ ID NO: 747424 - DNA, 75 bp, synthetic construct
  source 1..75: mol_type = other DNA
ccatggcatgctgtactgaagcgtacggaagctgaccgctgggtgcaggcagaagagcagaaatatgagatgctg

SEQ ID NO: 747425 - DNA, 75 bp, synthetic construct
  source 1..75: mol_type = other DNA
acgcattaaccgtctttcctccaaaagcagaaaccgcacctttcaccggaattaatacactgtttccttttattg

SEQ ID NO: 747426 - DNA, 75 bp, synthetic construct
  source 1..75: mol_type = other DNA
agacacaggcgagccaatgaaaagcatgattaacggaggcgttaccatcccgccagaacccagcgagcaaaagca

SEQ ID NO: 747427 - DNA, 75 bp, synthetic construct
  source 1..75: mol_type = other DNA
cttgatatggcttttgatgagtggcgcaagatttttaccgttgatgttgatggtgcatttttatgctcgcaaatt

SEQ ID NO: 747428 - DNA, 75 bp, synthetic construct
  source 1..75: mol_type = other DNA
cttaaataatccacgtataacccaactcaccgcccagctttttgcagagtaccgaacaaaacggcgggcagaagg

SEQ ID NO: 747429 - DNA, 75 bp, synthetic construct
  source 1..75: mol_type = other DNA
tcccgttacccgaaacactggctgaccgtgggcgatccgtcctgtgaattcaccatgacgcagtccgcgccgctg

SEQ ID NO: 747430 - DNA, 75 bp, synthetic construct
  source 1..75: mol_type = other DNA
tactggaccgccgagaattactggactatgtggaatgcgtacagatggaccgttggtatgagccgcccgtcagct

SEQ ID NO: 747431 - DNA, 75 bp, synthetic construct
  source 1..75: mol_type = other DNA
agagcaacagaacacacagcaaataaggattgaacagatacaggaagagacagccctgtatgaagccatgctggc

SEQ ID NO: 747432 - DNA, 75 bp, synthetic construct
  source 1..75: mol_type = other DNA
tgtgtagataattataaaaaagaatatagagataaacgcattgctaaatttgactttattaaatttgtatctgaa

SEQ ID NO: 747433 - DNA, 75 bp, synthetic construct
  source 1..75: mol_type = other DNA
ttcctttctcaccgagcatgacgtatacaaaacagatggtgggtttattttatttaggggattggcgcatgggct

SEQ ID NO: 747434 - DNA, 75 bp, synthetic construct
  source 1..75: mol_type = other DNA
attgtctgcgccgatcgtcgctcacttcacgctgccagccgtcgtcgcgcgaatcttcatagtctcgcccacggt

SEQ ID NO: 747435 - DNA, 75 bp, synthetic construct
  source 1..75: mol_type = other DNA
aaatatggccatatgtatggctacgacgcatctatgcctgctaatatcgaaatggcaataagattggccggttct

SEQ ID NO: 747436 - DNA, 75 bp, synthetic construct
  source 1..75: mol_type = other DNA
ccagatgctgctggacgcgaagaatccgcaaagcgcgggcaaccggcgcattgagattatggtgctgaccaaaag

SEQ ID NO: 747437 - DNA, 75 bp, synthetic construct
  source 1..75: mol_type = other DNA
cgcgccagatcttgacctggatgcaagctcatcagaacagacgctgaactttttcgcctggatggaacaaattga

SEQ ID NO: 747438 - DNA, 75 bp, synthetic construct
  source 1..75: mol_type = other DNA
agtaatgaaataaaaacaggagagcaacttacaacgtctcatgtattttctggatttgggtgtgagggggtaata

SEQ ID NO: 747439 - DNA, 75 bp, synthetic construct
  source 1..75: mol_type = other DNA
gatgatgaagaaccacaacaaaaaaacgaaacacgatccgaacgtggggagagtgagaaccgaaattcggtggat

SEQ ID NO: 747440 - DNA, 75 bp, synthetic construct
  source 1..75: mol_type = other DNA
ccgcactggccgtatctctgttgttcactgcacctgtttatgcagctgatgaaggatccggtgcaattcatttta

SEQ ID NO: 747441 - DNA, 75 bp, synthetic construct
  source 1..75: mol_type = other DNA
gcgcagatccgattctcaacaacaccagcacgggtgaagccaccggcgtcggcgtacgtttaatgaataaagatc

SEQ ID NO: 747442 - DNA, 75 bp, synthetic construct
  source 1..75: mol_type = other DNA
tgaaatacatcaggatgatattgataaagaggttgaactcggtcaggtgaccaccagccacattaatcagtcaca

SEQ ID NO: 747443 - DNA, 75 bp, synthetic construct
  source 1..75: mol_type = other DNA
gcacgcgagcaaacgtatttcgtcgacaatacggcagatcatagagaaaaccgcctgtggatgatggccaacatg

SEQ ID NO: 747444 - DNA, 75 bp, synthetic construct
  source 1..75: mol_type = other DNA
gcacgcgagcaaacgtatttcgtcgacaaaacggctgatcatagagaaaaccgactgtggatgatggccaacatg

SEQ ID NO: 747445 - DNA, 75 bp, synthetic construct
  source 1..75: mol_type = other DNA
atgcttagacagtcagacatcgccgcggctttccgcgagtccattttgcgcagttccaaggggttccagtacctc

SEQ ID NO: 747446 - DNA, 75 bp, synthetic construct
  source 1..75: mol_type = other DNA
gtacgtccgggagaagtgtttcgtgtatctgccgtggtggcagccagcatggcagaaagtggcctcgtgaaaatg

SEQ ID NO: 747447 - DNA, 75 bp, synthetic construct
  source 1..75: mol_type = other DNA
atccagttatgcatcgtacatatggtgcgcaacagccaacggttcatatcgtggaaagacgacattgttggccgt

SEQ ID NO: 747448 - DNA, 75 bp, synthetic construct
  source 1..75: mol_type = other DNA
gcacgcgagcaaacgtatttcgtcgacaacacggcagatcatagagaaaaccgtctgtggatgatggccaacatg

SEQ ID NO: 747449 - DNA, 75 bp, synthetic construct
  source 1..75: mol_type = other DNA
aaaacacgttcattatcagagcttgaatcgatttacagcaatttaaatattagaggtttttgtaatgtagagcag

SEQ ID NO: 747450 - DNA, 75 bp, synthetic construct
  source 1..75: mol_type = other DNA
gaaccggatcacggcaattccggaaagcatacttggcctcaggaatcccctaatgatttttatcaaaatcattaa

SEQ ID NO: 747451 - DNA, 75 bp, synthetic construct
  source 1..75: mol_type = other DNA
ggcggcgatttatggtccaggtacacctatgctcgacagtgtgcgcgacgtactgaatctgataagccagcatca

SEQ ID NO: 747452 - DNA, 75 bp, synthetic construct
  source 1..75: mol_type = other DNA
accaaatagaactaaatgatgatagttctgaattggttgtagaactattccatagaataaacacttatggtgtaa

SEQ ID NO: 747453 - DNA, 75 bp, synthetic construct
  source 1..75: mol_type = other DNA
aaacaaaggctatattactttcgcagcacataattaccaagcagacttttggtataggaataaaatttaccctaa

SEQ ID NO: 747454 - DNA, 75 bp, synthetic construct
  source 1..75: mol_type = other DNA
agataagtgggtcgttgttgatggtttacaacggatcacaacaatttatgatttcatgagtggagaatttaaact

SEQ ID NO: 747455 - DNA, 75 bp, synthetic construct
  source 1..75: mol_type = other DNA
tgaacatctgtatgacgcggacttcgttgcacgctacaccacagggtttgaccaactggccgaagcggtacaaga

SEQ ID NO: 747456 - DNA, 75 bp, synthetic construct
  source 1..75: mol_type = other DNA
ttcagtgaagagcgtggcttcgaggtgcgcccgaagtggaaccctccggcccttgaacatctgcgtaataacgaa

SEQ ID NO: 747457 - DNA, 75 bp, synthetic construct
  source 1..75: mol_type = other DNA
gcatggtctcccgggttgtggcgctcaatcagccggtgaaaattgactacaaccaccagaccctgattaaggggc

SEQ ID NO: 747458 - DNA, 75 bp, synthetic construct
  source 1..75: mol_type = other DNA
ccctgaaactgttcgggattatgctggtgccgcacctcataaaacgggtgccgggattggcgtcccggatatgtt

SEQ ID NO: 747459 - DNA, 75 bp, synthetic construct
  source 1..75: mol_type = other DNA
ttgttcgggtcacccgcgaaatggccgcctgtgcgcctcatgctatcgtcagccctggccatcgcgcgacgtttt

SEQ ID NO: 747460 - DNA, 75 bp, synthetic construct
  source 1..75: mol_type = other DNA
atcgggagtgggggattccgctgctgctgcgggaacctgaagcagtgcgtcagtttgtggcgcgttatccgggcg

SEQ ID NO: 747461 - DNA, 75 bp, synthetic construct
  source 1..75: mol_type = other DNA
acagtgccggatgcgtggtggtggctccgccagccgtgccgggcggcaagttccgcattcttgagcgtcaccagt

SEQ ID NO: 747462 - DNA, 75 bp, synthetic construct
  source 1..75: mol_type = other DNA
tatataagaagaaaaaatataaaataatgattaatttatttggtggttttttgagtttttcattcggaaagttga

SEQ ID NO: 747463 - DNA, 75 bp, synthetic construct
  source 1..75: mol_type = other DNA
atattcagaacgatataccaagcagaaagttaatgagctagggataacaataagaaatctcgaacataagctaag

SEQ ID NO: 747464 - DNA, 75 bp, synthetic construct
  source 1..75: mol_type = other DNA
ggagaaagagtatttcaagagacatcaaatggaatggttaggctgggaagacgcagaagtacaattacatactaa

SEQ ID NO: 747465 - DNA, 75 bp, synthetic construct
  source 1..75: mol_type = other DNA
cgactctggaaaccaggcggcaggcacgtattaaccgccagatggttaaggatcgggctaaagtagagcgagcag

SEQ ID NO: 747466 - DNA, 75 bp, synthetic construct
  source 1..75: mol_type = other DNA
gaaacagaggcgaatggtgctgagttaaagcgcctgctctgggcgattatgcagggtgctggacttctctacgaa

SEQ ID NO: 747467 - DNA, 75 bp, synthetic construct
  source 1..75: mol_type = other DNA
gaatttatcttcgctaccaacagagataaatccctgtgtcagtttactacgataggggatgaaattcttaccgat

SEQ ID NO: 747468 - DNA, 75 bp, synthetic construct
  source 1..75: mol_type = other DNA
cgttagccacaattgcggtcagtttcatcaaacgcatcatctggattgataaagcgattctgtacccgattattc

SEQ ID NO: 747469 - DNA, 75 bp, synthetic construct
  source 1..75: mol_type = other DNA
cctgctcttgaagcactgaaggagcaatacaaactgaccgggcatcatcgcaaaagcgaaatcactttttatcat

SEQ ID NO: 747470 - DNA, 75 bp, synthetic construct
  source 1..75: mol_type = other DNA
gctgatgttatcgaagaaaatggtcaggtttttgccgaactggagtcccgtaattgtggcaaaccgctgcatagt

SEQ ID NO: 747471 - DNA, 75 bp, synthetic construct
  source 1..75: mol_type = other DNA
atgaaaaaaaaacatcactcttatttagagataaaattaaaagtggcatccagttttgtatgggcaggacatatg

SEQ ID NO: 747472 - DNA, 75 bp, synthetic construct
  source 1..75: mol_type = other DNA
gaaattggaaaagagtcacaaggacgtttgaaaattgaacctcactggaacggtgaaatcgccatcagctatgac

SEQ ID NO: 747473 - DNA, 75 bp, synthetic construct
  source 1..75: mol_type = other DNA
tatgttcagagcctggggaaaagtcaggaaaacatacttaaccacgggagaatttccccaggaaacatgttacgc

SEQ ID NO: 747474 - DNA, 75 bp, synthetic construct
  source 1..75: mol_type = other DNA
aaagcggacgtagcccggcggcacagcgactgctcaacacgacggcaggaatggacccggcatgggatgcggcta

SEQ ID NO: 747475 - DNA, 75 bp, synthetic construct
  source 1..75: mol_type = other DNA
tcagatatacttccacatcaagagattgcttatgaacatcctaaaaacgtcatactttttaaaacaggagacgct

SEQ ID NO: 747476 - DNA, 75 bp, synthetic construct
  source 1..75: mol_type = other DNA
tttgttacaaagctagggataactcattaaggatatttaaaatgagagatgctttttttgaaatttcaaagccat

SEQ ID NO: 747477 - DNA, 75 bp, synthetic construct
  source 1..75: mol_type = other DNA
ccggttgatgaccgaacgggagcagcgctttctgcgccggctggacagggtgacagatacccgccagtggcggtt

SEQ ID NO: 747478 - DNA, 75 bp, synthetic construct
  source 1..75: mol_type = other DNA
catttactctggcatctttaatgctgaccgggcatgcactggcagaagatggtgttgttcacttcgtcggtgaaa

SEQ ID NO: 747479 - DNA, 75 bp, synthetic construct
  source 1..75: mol_type = other DNA
tactgaagcacctggcggagacggtgacctgaaagtgggtacaccgctgacatcgggtacacctggcgattttac

SEQ ID NO: 747480 - DNA, 75 bp, synthetic construct
  source 1..75: mol_type = other DNA
tacgtgacggtgaagcgcatccgtatgtctatggtcgctacgttaacgatggtgaatttatcgttcacgaagcca

SEQ ID NO: 747481 - DNA, 75 bp, synthetic construct
  source 1..75: mol_type = other DNA
tctctggaatttaaaaacgtcatctactaacgcccaattgctacaggtcggtgtattaggtacgggtgaactgaa

SEQ ID NO: 747482 - DNA, 75 bp, synthetic construct
  source 1..75: mol_type = other DNA
taaattaccgattggcgaaatcaggcagcccaatgcgacgctcgatctcagccaaagcgttgataatgagtatta

SEQ ID NO: 747483 - DNA, 75 bp, synthetic construct
  source 1..75: mol_type = other DNA
tgtaggaacgctaaacattggtgctgctcacggtgaggcggcggcagatgccggatttatcaccaatgcgacgaa

SEQ ID NO: 747484 - DNA, 75 bp, synthetic construct
  source 1..75: mol_type = other DNA
aacagcaaagtctacgccgtgaagatgaatggtcaaaccgtaagccgtgatggtgcgcgtaatctcggtgaagta

SEQ ID NO: 747485 - DNA, 75 bp, synthetic construct
  source 1..75: mol_type = other DNA
acagtgcaggagattacacgctgaccaatgcgctcaaaggcgatggcttgatgcgagtgcagctgtcatcctccg

SEQ ID NO: 747486 - DNA, 75 bp, synthetic construct
  source 1..75: mol_type = other DNA
gacgaataacggtacgctgaatgtcgaaggtggagaagtttacttaggtgtttttgagcctgctgtaggaacgct

SEQ ID NO: 747487 - DNA, 75 bp, synthetic construct
  source 1..75: mol_type = other DNA
atggatgcaggcatttcgaatactacttaccagtcgaagtgcatgatattaatttcaaaccagaaaaaaaagaat

SEQ ID NO: 747488 - DNA, 75 bp, synthetic construct
  source 1..75: mol_type = other DNA
tttatcaacaatcagcctgccgcgcgcaagggcgacaaactggagtgcagtgcggcgatcgtggaaggttcgccg

SEQ ID NO: 747489 - DNA, 75 bp, synthetic construct
  source 1..75: mol_type = other DNA
tgggaaacctgctggggaaaagcgggaagctgctgggcgcaaagctcggcgcgttgctggggaaaacaggtaagt

SEQ ID NO: 747490 - DNA, 75 bp, synthetic construct
  source 1..75: mol_type = other DNA
aaacatttgcggatgagcgttgtggccgttcaggcgtagtgtatcaggctgcaaattttgactacatcggtagcc

SEQ ID NO: 747491 - DNA, 75 bp, synthetic construct
  source 1..75: mol_type = other DNA
cgttgacaccaccctgctcgcccgcgccgctgaagcgctggcagcacggtttggcgcacaggccacgaccgttaa

SEQ ID NO: 747492 - DNA, 75 bp, synthetic construct
  source 1..75: mol_type = other DNA
gaaattgtgcgaaaatctatggatgcagacgataaattaatcgttgttgatgcaagcaacaatgttgcaagttgg

SEQ ID NO: 747493 - DNA, 75 bp, synthetic construct
  source 1..75: mol_type = other DNA
gccgctgacctgctcgacgcgcaccgcatcccgttccagttgatgggcggcaagcctgagaacgtcggctcagtg

SEQ ID NO: 747494 - DNA, 75 bp, synthetic construct
  source 1..75: mol_type = other DNA
gtggtaaggcaaggctggtgctgacgaaggacggacaaatttttctcaacggcacaaaaattcatttgcagggta

SEQ ID NO: 747495 - DNA, 75 bp, synthetic construct
  source 1..75: mol_type = other DNA
ggagaaagaaaaggatcatatccattcaatagcccttgccctaatggtactgagaaagtatcagcttatcatact

SEQ ID NO: 747496 - DNA, 75 bp, synthetic construct
  source 1..75: mol_type = other DNA
aatccacctgtaccactgcgaccatcgcggcctgccgctggcgctcatcagcacggaaggggcaacagcgtggtg

SEQ ID NO: 747497 - DNA, 75 bp, synthetic construct
  source 1..75: mol_type = other DNA
gcgagccactggtcgagagccgctacctctacgacccgctgggacggcgaatggcgaaacgggtatggcggcggg

SEQ ID NO: 747498 - DNA, 75 bp, synthetic construct
  source 1..75: mol_type = other DNA
gacgcgctggaacgggaagtgatgaaagatgacattttctttcgcacgtccggcggcggcgtcacgctttctggc

SEQ ID NO: 747499 - DNA, 75 bp, synthetic construct
  source 1..75: mol_type = other DNA
cgcaacaacgatcccacactgccttatctggcgcagagctggatagaggatgcaaagggcaacaaaatcagctcg

SEQ ID NO: 747500 - DNA, 75 bp, synthetic construct
  source 1..75: mol_type = other DNA
ttgccgctccggtcgtcaccatcaacacggtggcgggcgatgacatcatcaacgccactgaacacggacaggcgc

SEQ ID NO: 747501 - DNA, 75 bp, synthetic construct
  source 1..75: mol_type = other DNA
gcattacgcatccggtaacggtggatctcactccggcggcgatcaccatcaacaccatcgccacggatgacgtga

SEQ ID NO: 747502 - DNA, 75 bp, synthetic construct
  source 1..75: mol_type = other DNA
cacctggtcgaaaactgccctgacgctgtaccagagcggcaacagctatgccaccagctccatcgccgattatga

SEQ ID NO: 747503 - DNA, 75 bp, synthetic construct
  source 1..75: mol_type = other DNA
tggtggtcgatacgattaaccccaccgccacgccgaccattgtgtcgtataccgatgatgtcgggcagcggcagg

SEQ ID NO: 747504 - DNA, 75 bp, synthetic construct
  source 1..75: mol_type = other DNA
tggtgatcgacactactgcgccagatcccgcggtgaaaaccatcgccattagcgcgatcaccaccgatacaggtc

SEQ ID NO: 747505 - DNA, 75 bp, synthetic construct
  source 1..75: mol_type = other DNA
gcaaaaactacaccgcaagcgtcgccgctaacggtagctggagcgtgaacgttccagcggcagatctggcaacct

SEQ ID NO: 747506 - DNA, 75 bp, synthetic construct
  source 1..75: mol_type = other DNA
ggcgatacggtcaccgtgacgctgggcggcaacacttacaccaccacggtacagagcaacttaagctggagcgtc

SEQ ID NO: 747507 - DNA, 75 bp, synthetic construct
  source 1..75: mol_type = other DNA
gcgggcgatgtcatcaccgtcacgttaaacagtaaaacctataccaccacgctggacgcttccggcaactggagc

SEQ ID NO: 747508 - DNA, 75 bp, synthetic construct
  source 1..75: mol_type = other DNA
gccaccaccgcgggcgataacatcattaacgccagcgaacaggccgccgggtttacgctttctggcacgacgagc

SEQ ID NO: 747509 - DNA, 75 bp, synthetic construct
  source 1..75: mol_type = other DNA
aacggcgggatggacgtggttgatttccggctttcgactgtgggcgtgaccgcgaacttaagcagcaccgccgcg

SEQ ID NO: 747510 - DNA, 75 bp, synthetic construct
  source 1..75: mol_type = other DNA
caaattagtaccgacaacggcgcaacctgggtgaatgtgaccgttgctgcagatggtctgaactggagttatgtt

SEQ ID NO: 747511 - DNA, 75 bp, synthetic construct
  source 1..75: mol_type = other DNA
gcaggccagcgttagcagcgcgagcggtaacagcgcctcggcgatccatgcgtacagcgttgacgccagcgcgcc

SEQ ID NO: 747512 - DNA, 75 bp, synthetic construct
  source 1..75: mol_type = other DNA
ggcgtgctctctgcgccgcttgccagcggtgaagtcgtttacctctaccgtaacggtctgctgttaggtgcggta

SEQ ID NO: 747513 - DNA, 75 bp, synthetic construct
  source 1..75: mol_type = other DNA
cgtcaaccttaccgcgccaaccattggcattaacaccatcgctaccgatgacataattaacgccacggaaaaagg

SEQ ID NO: 747514 - DNA, 75 bp, synthetic construct
  source 1..75: mol_type = other DNA
cagcgacacgacgcttgcggtgagcggcacgctgggggcgacgctttctgccggtgagttcgcgcaaatcagcat

SEQ ID NO: 747515 - DNA, 75 bp, synthetic construct
  source 1..75: mol_type = other DNA
cagggtaacagcagcaccgccagccataacgtgcaggtcaataccgcgctgccgggcgtcaccattaatccggtg

SEQ ID NO: 747516 - DNA, 75 bp, synthetic construct
  source 1..75: mol_type = other DNA
gaccattaacgcttcggtcaccaacgcgaatggcaatacgggcagcggtacgcgggatatcaccattgacgctaa

SEQ ID NO: 747517 - DNA, 75 bp, synthetic construct
  source 1..75: mol_type = other DNA
accagcagtatcggcaacagcgccactgccagccataacgtgctggtcgacagcgcgctgcccggcgtgaccatt

SEQ ID NO: 747518 - DNA, 75 bp, synthetic construct
  source 1..75: mol_type = other DNA
caccgcgccgcttgtgaccatcaacaccatcgccagcgacgatatccttaacgtgagcgaagcgggcgcggggat

SEQ ID NO: 747519 - DNA, 75 bp, synthetic construct
  source 1..75: mol_type = other DNA
caccaccaccgtgcaggccaatttaagctggagcgtgagcgttccggcggcagatattcaggcgctgggcaatgg

SEQ ID NO: 747520 - DNA, 75 bp, synthetic construct
  source 1..75: mol_type = other DNA
tgattaatgccagcgaaaaaggggccgatgtccagattaccggcaccagcgatcagccagcgggtacagccatca

SEQ ID NO: 747521 - DNA, 75 bp, synthetic construct
  source 1..75: mol_type = other DNA
tgtcgcggcgaatggttcctggagcaccacggttccggcggcggatatggcagccctgcgtgatggtgatgccag

SEQ ID NO: 747522 - DNA, 75 bp, synthetic construct
  source 1..75: mol_type = other DNA
catttcggcttcggtaacgaacagcgtaggcaataccggcaacggcacgcgtgaaatcaccatcgacgcgaatct

SEQ ID NO: 747523 - DNA, 75 bp, synthetic construct
  source 1..75: mol_type = other DNA
atctcgctgcgctgccggatggcgcgggcaacgtgcaggcgagcgtcagcaacatcaacggcaataacgcccagg

SEQ ID NO: 747524 - DNA, 75 bp, synthetic construct
  source 1..75: mol_type = other DNA
agctggactgccaccgtacccgccgccgatctggcgtcattacccgagggcagcgcctccgcactggccagcgtc

SEQ ID NO: 747525 - DNA, 75 bp, synthetic construct
  source 1..75: mol_type = other DNA
gacggcagctggagcattaatattccggcggcagatcttgaggcattgaccgatggcagccacaccctgaccgcc

SEQ ID NO: 747526 - DNA, 75 bp, synthetic construct
  source 1..75: mol_type = other DNA
gtgaggaaagccgccgctggcgcttatcagtgcggaaggggcaacagaatggtgcgcagaatacgatgaatgggg

SEQ ID NO: 747527 - DNA, 75 bp, synthetic construct
  source 1..75: mol_type = other DNA
gatgacgccttcccagtgcgcaggcttcacttaaatttgttaagccagcccgatttagaaactgggtcgatgtat

SEQ ID NO: 747528 - DNA, 75 bp, synthetic construct
  source 1..75: mol_type = other DNA
gaaaacaattcgtcatgcaaggtggtggatgggcgtatgaggaaaccgtccttagactaaaaagcattttcagag

SEQ ID NO: 747529 - DNA, 75 bp, synthetic construct
  source 1..75: mol_type = other DNA
aaaagcgcagcggcgcagcctggcagagacgctccagcaggaagggagtgagaacggccgacggcgtggtgttcc

SEQ ID NO: 747530 - DNA, 75 bp, synthetic construct
  source 1..75: mol_type = other DNA
tgacgacggtgcagactgacaccacacgtatccagacggtatacgagccgggaagcttcacgccgctcatccggg

SEQ ID NO: 747531 - DNA, 75 bp, synthetic construct
  source 1..75: mol_type = other DNA
cttatcccggcgggtgttatccggacggacgacgagcggacccaccactaccactacgacagccagcaccgtctg

SEQ ID NO: 747532 - DNA, 75 bp, synthetic construct
  source 1..75: mol_type = other DNA
cttgctgccactggtgtaattgcaggtggttccctgattggctcaatgggtgttgctcgtgttggtcagaccctc

SEQ ID NO: 747533 - DNA, 75 bp, synthetic construct
  source 1..75: mol_type = other DNA
aaactggacaggtgaatttcagcggcggtggcgagttcgcagatatcatcaacaatgtgctgacctccaccaacg

SEQ ID NO: 747534 - DNA, 75 bp, synthetic construct
  source 1..75: mol_type = other DNA
acgggatgcagtctcccacgctaataaaatgacctcattacaggcgcgtcagttatcccagcaggaacaggccgc

SEQ ID NO: 747535 - DNA, 75 bp, synthetic construct
  source 1..75: mol_type = other DNA
ggcggcggaggctgcatcaataccagtcaggtccattgtggggggaggtatttgcctgagctgtctgatgaaggc

SEQ ID NO: 747536 - DNA, 75 bp, synthetic construct
  source 1..75: mol_type = other DNA
tcagagcggcggcacggtcaagatcgatgacctataacccagatatgggtggcacagctcccgaaccaggattat

SEQ ID NO: 747537 - DNA, 75 bp, synthetic construct
  source 1..75: mol_type = other DNA
aggcctggacaaatccggggttaacccgtggggttgctggattcagtcaaccacaactaacctttactccgcctg

SEQ ID NO: 747538 - DNA, 75 bp, synthetic construct
  source 1..75: mol_type = other DNA
cgttatgaatatgaccgcttcgggcaaatgacggcggttcaccgtgaggaaagcatcagcctttaccgcagttac

SEQ ID NO: 747539 - DNA, 75 bp, synthetic construct
  source 1..75: mol_type = other DNA
agcagtggtctgaatgccggtgtgccattgacgatcacgattaacggtacggcttattccgccacggtacaggcg

SEQ ID NO: 747540 - DNA, 75 bp, synthetic construct
  source 1..75: mol_type = other DNA
cggtctgcgggtcgataccgtggcgggcgatgatgtggtcaatattatcgagcacggacaggcgctggtgattac

SEQ ID NO: 747541 - DNA, 75 bp, synthetic construct
  source 1..75: mol_type = other DNA
cattaccgccacggtcaccgactccgcaggcaacagcggcacggcctcgcacactgtcaccgtggcgctcggcgc

SEQ ID NO: 747542 - DNA, 75 bp, synthetic construct
  source 1..75: mol_type = other DNA
taacgctcaatagcccgaccgtgcagacctatcaggcaacggtacaggccgacggcagctggagcattaatattc

SEQ ID NO: 747543 - DNA, 75 bp, synthetic construct
  source 1..75: mol_type = other DNA
cctggaccacgttaaccgttatcggcaccagctggagctatgccgatggtcgcacactgaccgacggcacctgga

SEQ ID NO: 747544 - DNA, 75 bp, synthetic construct
  source 1..75: mol_type = other DNA
tcgcggagccaatacgattttcgtcaccgtgacagatgctgcaggaaatactggcgcggcgtctcgagcaatcac

SEQ ID NO: 747545 - DNA, 75 bp, synthetic construct
  source 1..75: mol_type = other DNA
ccaacgttggcgcactggctgacggcaacgccaccgtcaccgccagcgtgaacgatatcgccggtaacccgacca

SEQ ID NO: 747546 - DNA, 75 bp, synthetic construct
  source 1..75: mol_type = other DNA
tcgtttttggtaaccgataatcagggcgatcaacgcggtattctttccgccaacgataccaccgatgacactacg

SEQ ID NO: 747547 - DNA, 75 bp, synthetic construct
  source 1..75: mol_type = other DNA
gcgcggctttgacgggcggacgcagcgttaccgttatgacctgaccgggaaactcacgcagagcgaggatgaggg

SEQ ID NO: 747548 - DNA, 75 bp, synthetic construct
  source 1..75: mol_type = other DNA
tcacgttaaacagtaaaacctacaccaccacgctggatgcctccggtaactggagcgtcggcgttccggcggcag

SEQ ID NO: 747549 - DNA, 75 bp, synthetic construct
  source 1..75: mol_type = other DNA
acggtggcgggcgatgatgtggtcaatatcatcgagcacgggcaggcgctggtggtcaccggcagcagttcgggg

SEQ ID NO: 747550 - DNA, 75 bp, synthetic construct
  source 1..75: mol_type = other DNA
tctccagatcaccggcaccagcgatcagcctgttaataccgccatcaccgtgacgctgaacgggcaaaattacac

SEQ ID NO: 747551 - DNA, 75 bp, synthetic construct
  source 1..75: mol_type = other DNA
ctgtcaacaacgctgccaaaacgtgggcaacctcaacaccggacgaaatccgcgcaagcattaaccaggtgctgt

SEQ ID NO: 747552 - DNA, 75 bp, synthetic construct
  source 1..75: mol_type = other DNA
ctttgacgccaattatgggttcgattcccacattcattcctgaaatgaatactggttttaacttattaaataaaa

SEQ ID NO: 747553 - DNA, 75 bp, synthetic construct
  source 1..75: mol_type = other DNA
cggataagagcactgaccggacgcaacacagggagaagccttgaacagctaacccggttgctaaaacgatgtctg

SEQ ID NO: 747554 - DNA, 75 bp, synthetic construct
  source 1..75: mol_type = other DNA
gccagaaggtgtcagaaagggttttgatagccagtttgagtggacccacaccgagtcaggcgttaaatacttagg

SEQ ID NO: 747555 - DNA, 75 bp, synthetic construct
  source 1..75: mol_type = other DNA
agtaaagataacatctctaaggatgaatgggaaaacctccatgcattaaaagaaaagcgtttaaatggaatgcct

SEQ ID NO: 747556 - DNA, 75 bp, synthetic construct
  source 1..75: mol_type = other DNA
acttgaaaaataccgtccggatatcttaagtgcctgcgaaaaatcgatggcagtggttgatcttgatctcgattt

SEQ ID NO: 747557 - DNA, 75 bp, synthetic construct
  source 1..75: mol_type = other DNA
tgcacttaaacctgccgttgtaattggtattttacttgaggtattagcatctttgcctgtgaaagatgatttgac

SEQ ID NO: 747558 - DNA, 75 bp, synthetic construct
  source 1..75: mol_type = other DNA
tatcacttcgacgttcaataccggctcgataggccatgatgtcagcgccggcgtggagtttatccgggaaaacca

SEQ ID NO: 747559 - DNA, 75 bp, synthetic construct
  source 1..75: mol_type = other DNA
ggggatgccatctacatgcgcggcgtggatacctctaacagcatctatgtggacggtattcgcgacatcggcagt

SEQ ID NO: 747560 - DNA, 75 bp, synthetic construct
  source 1..75: mol_type = other DNA
gcctgtcgctgttgactcaaaataacctgaataaatcacagtcttctctgagttcggctatcgagcgtctgtcct

SEQ ID NO: 747561 - DNA, 75 bp, synthetic construct
  source 1..75: mol_type = other DNA
taaacatgaaaaaaacattactggctcgtgtggtcaaaggtattgcagtctgtggtctggcaatgagtagtatca

SEQ ID NO: 747562 - DNA, 75 bp, synthetic construct
  source 1..75: mol_type = other DNA
ggtagccgatgccaaactgggctatcgggtcaacagcaacctcgatctgcagctcaatatgtacaacctgtttga

SEQ ID NO: 747563 - DNA, 75 bp, synthetic construct
  source 1..75: mol_type = other DNA
cgtcaactacgctatctcacagcagccgccggggggcagcagcttcgccctggccgccagcggcagcggcaatag

SEQ ID NO: 747564 - DNA, 75 bp, synthetic construct
  source 1..75: mol_type = other DNA
attctgtgaacattaatcactctcctcatgatggactagttataataaataaaggaaacgaagaagttgaaggta

SEQ ID NO: 747565 - DNA, 75 bp, synthetic construct
  source 1..75: mol_type = other DNA
agcactcgtttaatccaggtagctaatgaggtgtcgccgtctgctttggctgcctcctcaagttgtgccctaaat

SEQ ID NO: 747566 - DNA, 75 bp, synthetic construct
  source 1..75: mol_type = other DNA
aaagaaaaagcgccccgttgccggagcgcctttgtgaacgaatagcctactgcgccatattgcttactgtctacg

SEQ ID NO: 747567 - DNA, 75 bp, synthetic construct
  source 1..75: mol_type = other DNA
ttgaaaaacgtaagcagctttccgacagccttctgtgggctaatggcattgacccttcagaggggcttgaggatg

SEQ ID NO: 747568 - DNA, 75 bp, synthetic construct
  source 1..75: mol_type = other DNA
atgaagccaccggtaaagacgagctttcgcggcagggacgtcgcctacctggtaatttccattgttttagtgggc

SEQ ID NO: 747569 - DNA, 75 bp, synthetic construct
  source 1..75: mol_type = other DNA
atgagcagcaaaaacacattacgcgcctggacttttttccgccagggggtccgtattcagggagcgcatgaattc

SEQ ID NO: 747570 - DNA, 75 bp, synthetic construct
  source 1..75: mol_type = other DNA
agggaatgtatgatatatataatgagtttgttaaatgccgaaatgaaatagttcatgaaaacatcggcaaaatag

SEQ ID NO: 747571 - DNA, 75 bp, synthetic construct
  source 1..75: mol_type = other DNA
tatcctcaggatttaaaagacagagaaattatatcaacttttcacgcagaaaaagttattaatgatctgttaaaa

SEQ ID NO: 747572 - DNA, 75 bp, synthetic construct
  source 1..75: mol_type = other DNA
ccctggctattggcaaggtcaggttttgattccattcattaaagatccagtaacaaaagaacgtaaacaaatcca

SEQ ID NO: 747573 - DNA, 75 bp, synthetic construct
  source 1..75: mol_type = other DNA
tattgctgggtaagatcaattaacattcctgactatgagctggcagccgatgtatataatattaacgtgacgtca

SEQ ID NO: 747574 - DNA, 75 bp, synthetic construct
  source 1..75: mol_type = other DNA
cacatcgaggccaccagcgaacaggaagcccgccagcaatccccggctggctgcgtgatggtattcgctgcccgt

SEQ ID NO: 747575 - DNA, 75 bp, synthetic construct
  source 1..75: mol_type = other DNA
atagcagaagtatcgaggtagctatgagaaatcataccacacacccgcaagggcgggactcgcacaacctgaata

SEQ ID NO: 747576 - DNA, 75 bp, synthetic construct
  source 1..75: mol_type = other DNA
tgcccaaagtatctgcgtgcatggtgattcccctggtgccgtcgagatggcaatcaaagtgcgggctgcactgga

SEQ ID NO: 747577 - DNA, 75 bp, synthetic construct
  source 1..75: mol_type = other DNA
aaagaacagaaatatcagatatcgttcactagtaaataattcaacaggaaatgcaaaacttatagcgacaaaaaa

SEQ ID NO: 747578 - DNA, 75 bp, synthetic construct
  source 1..75: mol_type = other DNA
atgggttcaacagaactggctgctaatctctttcgagctacccaaacagaagaaaaactcaagcgggatggcgtg

SEQ ID NO: 747579 - DNA, 75 bp, synthetic construct
  source 1..75: mol_type = other DNA
atttcgatgcttctgaaggtgacaggcgaggtatcggtggttgtctggatgaggccgagcaagaacttatcgtta

SEQ ID NO: 747580 - DNA, 75 bp, synthetic construct
  source 1..75: mol_type = other DNA
aaagagcttacacctgcgattatgcgcaaccatatcgctgtattcgaacgatacggaataaccccaaacgatagc

SEQ ID NO: 747581 - DNA, 75 bp, synthetic construct
  source 1..75: mol_type = other DNA
ctggttactgtgactgcacagctcgatgagactgtgcggcaggctctgttcgtagatttcctggaagtttccgct

SEQ ID NO: 747582 - DNA, 75 bp, synthetic construct
  source 1..75: mol_type = other DNA
caactgggtgaactggcgctgtttctctgttcggatgcggcagcacaagtgcgtggggtggcgtggaatatggat

SEQ ID NO: 747583 - DNA, 75 bp, synthetic construct
  source 1..75: mol_type = other DNA
atgaatttacaaggtaaaactgcgctggtgacggggtccaccagcggtatcggactcggtattgctcagacactg

SEQ ID NO: 747584 - DNA, 75 bp, synthetic construct
  source 1..75: mol_type = other DNA
gcggtggggccggcgggacagtaattgtcacgctgaccctgacgaaggatagttatcctgtcactatcggcgcag

SEQ ID NO: 747585 - DNA, 75 bp, synthetic construct
  source 1..75: mol_type = other DNA
gaccgataacaccgcgttgccgaaagcagtagaaatgcaatatctgccggggcagggtcctgatgaatcccctaa

SEQ ID NO: 747586 - DNA, 75 bp, synthetic construct
  source 1..75: mol_type = other DNA
ttgatgccgctctggatatgacacagaccgataacaccgcgttgccgaaagcagtagaaatgcaatatctgccgg

SEQ ID NO: 747587 - DNA, 75 bp, synthetic construct
  source 1..75: mol_type = other DNA
tgatcgagaataatattgacatctcgacggtgaccaaaaaaaataatgatgtttttattggggacaatttgacta

SEQ ID NO: 747588 - DNA, 75 bp, synthetic construct
  source 1..75: mol_type = other DNA
ggtatacatgattttaaacggataagagaactacagatttctttagaagatgatttgactgtttttgtcggggat

SEQ ID NO: 747589 - DNA, 75 bp, synthetic construct
  source 1..75: mol_type = other DNA
ccagttagttactttgttgcaaaataacggggcattcaatacgaaagcatggatcgctcgttgtgcatgggcgta

SEQ ID NO: 747590 - DNA, 75 bp, synthetic construct
  source 1..75: mol_type = other DNA
agcgcaaagacatccttgcgggcatcttcgagcccgccacaaccgattctgacttggcgattctgctaacaaagg

SEQ ID NO: 747591 - DNA, 75 bp, synthetic construct
  source 1..75: mol_type = other DNA
aaataatactatggctggtgcagttaaacgattaaatttaattaagtgtaagtggtacagagagcagatctgcag

SEQ ID NO: 747592 - DNA, 75 bp, synthetic construct
  source 1..75: mol_type = other DNA
attaaagattttaccctatcttaataagattagacgcagaccaagagatcgcatgtatttagcaattgcaatact

SEQ ID NO: 747593 - DNA, 75 bp, synthetic construct
  source 1..75: mol_type = other DNA
taattaaatcacagccaatggtaaaatatgattatgtatttgaagcaggtgggccaggttgtacttatgttataa

SEQ ID NO: 747594 - DNA, 75 bp, synthetic construct
  source 1..75: mol_type = other DNA
tggtatggtatacttagaggtgatgctataattgattataaaagccctgttaatggcattatagattctctaaac

SEQ ID NO: 747595 - DNA, 75 bp, synthetic construct
  source 1..75: mol_type = other DNA
catatagcttcgatgctgataatgtgacaaatgccaatgctcttaattacttagcccctaaagctggtgattctt

SEQ ID NO: 747596 - DNA, 75 bp, synthetic construct
  source 1..75: mol_type = other DNA
cgataaaagtgacgcagcagcccttaagagagtagcaacgactattactactgatgcaggtgttgttattaaatc

SEQ ID NO: 747597 - DNA, 75 bp, synthetic construct
  source 1..75: mol_type = other DNA
ctgttggtatacccgctttttatggaggttttgagtcattagttgagaatttaactagttattcaagcaacaatg

SEQ ID NO: 747598 - DNA, 75 bp, synthetic construct
  source 1..75: mol_type = other DNA
tattcctcaaagtatctgaaaaattagcagttaagtattctgatgttgttattgctgataatcaagctatagggg

SEQ ID NO: 747599 - DNA, 75 bp, synthetic construct
  source 1..75: mol_type = other DNA
aacttaagccgcgtgctggacaccatctacggcgtgatcgacaaattcaacattccgacccagggctgcgtgctg

SEQ ID NO: 747600 - DNA, 75 bp, synthetic construct
  source 1..75: mol_type = other DNA
aaacagtagaacttcctggtgttacagtaatatcagaaataactggtgtatatgctaatgatgaagttttaacaa

SEQ ID NO: 747601 - DNA, 75 bp, synthetic construct
  source 1..75: mol_type = other DNA
agagttaagggttaattgtggtatcatatctggagcatctcaggttgtcaggcaatacataacgccggtatgcag

SEQ ID NO: 747602 - DNA, 75 bp, synthetic construct
  source 1..75: mol_type = other DNA
tatctgaatcgtttgcagtaaagttttctgatgtgattataactgataataaagctatcggtgattatgttgatt

SEQ ID NO: 747603 - DNA, 75 bp, synthetic construct
  source 1..75: mol_type = other DNA
acgtaacagtagaaggagccgtacgttcaggaggatggtctgaaaccgccggtgtttatactgctacatggtcgg

SEQ ID NO: 747604 - DNA, 75 bp, synthetic construct
  source 1..75: mol_type = other DNA
caggatttgatggggctaaattcaccttagtattaacccataatatgaagaatacagattatgattggacggcag

SEQ ID NO: 747605 - DNA, 75 bp, synthetic construct
  source 1..75: mol_type = other DNA
cctgcaattgcagacgtggagtgatggcgtaacgtcagaccgctatgacatacagtccggttctccggcgcaagc

SEQ ID NO: 747606 - DNA, 75 bp, synthetic construct
  source 1..75: mol_type = other DNA
tccagtccggttctccggcgcaagccacatcaactatcgctacggataaaaacgcctacaccgctggcgacacta

SEQ ID NO: 747607 - DNA, 75 bp, synthetic construct
  source 1..75: mol_type = other DNA
ctgcgctttttagcggatgatccccaggctgtggccgatttatcgcgttttgaaaatgggcaagaattaccgcca

SEQ ID NO: 747608 - DNA, 75 bp, synthetic construct
  source 1..75: mol_type = other DNA
atggcggacaacggcgcaacggttgccccgacggtgatcaccgagccggacggcacggtggaaatcagtgtcacc

SEQ ID NO: 747609 - DNA, 75 bp, synthetic construct
  source 1..75: mol_type = other DNA
ccggacggcacggtggaaatcagtgtcaccagtcagacggcgggaatcagtgcagtcacagccagcatcaacagc

SEQ ID NO: 747610 - DNA, 75 bp, synthetic construct
  source 1..75: mol_type = other DNA
agagccggaacgtgacgtttatcgccgatgtcaggacggcgcagatcgcggagctggtggttattaaggatggtt

SEQ ID NO: 747611 - DNA, 75 bp, synthetic construct
  source 1..75: mol_type = other DNA
taatgctgctggttacccggtatataacgggcagattgccaaattcgtaactgagcaaggccattctatggctgt

SEQ ID NO: 747612 - DNA, 75 bp, synthetic construct
  source 1..75: mol_type = other DNA
gtggggagtgcaactagcggtgctgtcccgcgaaaagtaggttcgttatggggtgaatatggtaatctgacttct

SEQ ID NO: 747613 - DNA, 75 bp, synthetic construct
  source 1..75: mol_type = other DNA
ccgtcagaaacgggaagctgggttgaatcaggtggcgtgtataccacaacccgaatggcgacgattgccagtacc

SEQ ID NO: 747614 - DNA, 75 bp, synthetic construct
  source 1..75: mol_type = other DNA
tacagtcaccgccagcatcaacaacagcagccagagccagaacgtcacctttgtacctggtgatgcatcgcaact

SEQ ID NO: 747615 - DNA, 75 bp, synthetic construct
  source 1..75: mol_type = other DNA
agccattaaccgtcacaataacgttgcgggatgagtttggtaaccctgctttagggctgacatcagaagtcatcg

SEQ ID NO: 747616 - DNA, 75 bp, synthetic construct
  source 1..75: mol_type = other DNA
agcgaagagtctgatggcgtttacaccaccacccgaaccgcgaagattgctggcgatcgccattacgccacgctg

SEQ ID NO: 747617 - DNA, 75 bp, synthetic construct
  source 1..75: mol_type = other DNA
aaaatataacattgggcaactcttcgggttagatggtataaaagcagataatccaataaaagcaaagcaagggag

SEQ ID NO: 747618 - DNA, 75 bp, synthetic construct
  source 1..75: mol_type = other DNA
gactaatttatgccgtatctggtgtacctggattgattgttgcaaacagcattactaacagtgcttaccagttcg

SEQ ID NO: 747619 - DNA, 75 bp, synthetic construct
  source 1..75: mol_type = other DNA
aaggttctggcgtcgatctgaacaatgacggcaggatcgacctggttcagcacacctataacctgaacaactatt

SEQ ID NO: 747620 - DNA, 75 bp, synthetic construct
  source 1..75: mol_type = other DNA
tggcaaccaaggccgttgcgccgcgctatgcggtaattgccgcgatgattattgggatcgtgatcgtcatcgcgt

SEQ ID NO: 747621 - DNA, 75 bp, synthetic construct
  source 1..75: mol_type = other DNA
gcgacgatcaaaaaacatcagcagcagttacgcgatctgggagcattgcctcgctatagtctgaaatcaggccat

SEQ ID NO: 747622 - DNA, 75 bp, synthetic construct
  source 1..75: mol_type = other DNA
ggacaacagcgcaacgactgccccgacggtaatcacagagccggacgggacggtggagatctcagtcaccagcca

SEQ ID NO: 747623 - DNA, 75 bp, synthetic construct
  source 1..75: mol_type = other DNA
gcgaatttgaatgcgcaactgaagatggctggttggagcgatgccaattattcaaacaattacactattaaacca

SEQ ID NO: 747624 - DNA, 75 bp, synthetic construct
  source 1..75: mol_type = other DNA
aacggcgcaacggtcgccccgacggtcaccacgcagccggacggtacagtggagatctctgttaccagccagacg

SEQ ID NO: 747625 - DNA, 75 bp, synthetic construct
  source 1..75: mol_type = other DNA
aggctgaaaaaattaacagtgatggttatcagttcgaagctaaacttatttccgatgcagccggtactgtaggta

SEQ ID NO: 747626 - DNA, 75 bp, synthetic construct
  source 1..75: mol_type = other DNA
tttaggagatcagggtgtgagcaatgtcaatggttcagctgaaaaagcaagagttgagctgaaagctaaaaactc

SEQ ID NO: 747627 - DNA, 75 bp, synthetic construct
  source 1..75: mol_type = other DNA
ggatggcggcggaggaaggcatcttcttttatgaggatcacgcgcaaaaaagtaccgaccagagcctggtcctgt

SEQ ID NO: 747628 - DNA, 75 bp, synthetic construct
  source 1..75: mol_type = other DNA
attatatgatgatgttggttctggaaattttcccagtaagatgggatacatacacaacactttgcatgcaacatt

SEQ ID NO: 747629 - DNA, 75 bp, synthetic construct
  source 1..75: mol_type = other DNA
gaatctaatcatgagatctatgcgatcgttgatcatgaaataagaaagatgaaatttatgactgattatgaaaat

SEQ ID NO: 747630 - DNA, 75 bp, synthetic construct
  source 1..75: mol_type = other DNA
gaaatttatgactgattatgaaaataatccatcttattcatttgacttttttctgacacgcccgcaattgtttta

SEQ ID NO: 747631 - DNA, 75 bp, synthetic construct
  source 1..75: mol_type = other DNA
acctataaagtggctgattgtttcgaacttaaagcaaatagccccttatgcaaagtgattagtatcgtatatggg

SEQ ID NO: 747632 - DNA, 75 bp, synthetic construct
  source 1..75: mol_type = other DNA
tattatcaatctaattttggattgccagacgtctatgatgctaataatattatttcaaatgttataatatcaagt

SEQ ID NO: 747633 - DNA, 75 bp, synthetic construct
  source 1..75: mol_type = other DNA
caaaagtaccgaccagagcctggtgctgtgcgacacagtccgccatctgcccgaatcttttgaaatcccatggaa

SEQ ID NO: 747634 - DNA, 75 bp, synthetic construct
  source 1..75: mol_type = other DNA
agagaaactggctgttctatttatggaatttatcaggatgaatacggcatgaccttacttcctgatcatcccggc

SEQ ID NO: 747635 - DNA, 75 bp, synthetic construct
  source 1..75: mol_type = other DNA
caaacggtagtagatggtatgacacgctcatttgagttggggagagaggtcaaacgtaggggagaaactagtctt

SEQ ID NO: 747636 - DNA, 75 bp, synthetic construct
  source 1..75: mol_type = other DNA
gcggcggcggcgtgaaagcggcgattaaaggctatcgtatcgccattaaaaccggtaccgcgaaaaaggtcgggc

SEQ ID NO: 747637 - DNA, 75 bp, synthetic construct
  source 1..75: mol_type = other DNA
atcgagcggctggacgacatcgagcactcaaagtccaagccagacgcaaatgcagccaacaataaacagaagaaa

SEQ ID NO: 747638 - DNA, 75 bp, synthetic construct
  source 1..75: mol_type = other DNA
aggttgaaatatcttgatgaaattttaaagcttataagcaacaataaacaaatctcaaaatatatttttcttttt

SEQ ID NO: 747639 - DNA, 75 bp, synthetic construct
  source 1..75: mol_type = other DNA
ttgtcaacgtcaacaactaattttaagaatcgtgagatgtattcactcaaatgttgggttgaaaataatttaaaa

SEQ ID NO: 747640 - DNA, 75 bp, synthetic construct
  source 1..75: mol_type = other DNA
gatcctctcagggcattttatgggtactgtcagaatccatcggcgctctggcactggtgccgctgggattgttat

SEQ ID NO: 747641 - DNA, 75 bp, synthetic construct
  source 1..75: mol_type = other DNA
ttataaatcatgacaaagcacgcatcaatcgatgtacttatttcaacacatggttcgagaataaaacaggttcct

SEQ ID NO: 747642 - DNA, 75 bp, synthetic construct
  source 1..75: mol_type = other DNA
ttctgctatcaggacagataaattggcatatatcgctggggagccattaaccgtcacaataacgttgcgggatga

SEQ ID NO: 747643 - DNA, 75 bp, synthetic construct
  source 1..75: mol_type = other DNA
gtcaccagccagacggcaggaaccagtacagtcaccgccagcatcaacaacagcagccagagccggaacgtcacc

SEQ ID NO: 747644 - DNA, 75 bp, synthetic construct
  source 1..75: mol_type = other DNA
atgaaaaatcgaataaattttggtggatagattacaaaggggatagtttagctgtcaactatggcaaggtaggta

SEQ ID NO: 747645 - DNA, 75 bp, synthetic construct
  source 1..75: mol_type = other DNA
gccattttgcacctcacgcgctacgcacgctgaaactggctgacgagcaaatcgccgaactctccatgctctgcg

SEQ ID NO: 747646 - DNA, 75 bp, synthetic construct
  source 1..75: mol_type = other DNA
aagtgaagttactattactgggaaacccaagaatggtaaagggaatgatgttgtatttaaattcaagattaaaaa

SEQ ID NO: 747647 - DNA, 75 bp, synthetic construct
  source 1..75: mol_type = other DNA
tgatgcagtgtacttacaaaatgtagaaaaaaaagaaggggaaaaatggagatatgtgggtgatggcatatatga

SEQ ID NO: 747648 - DNA, 75 bp, synthetic construct
  source 1..75: mol_type = other DNA
gcggtggggccggtgggacaataatttcaataatgaccccgacacagaatagttatccagtcactatcggcgcag

SEQ ID NO: 747649 - DNA, 75 bp, synthetic construct
  source 1..75: mol_type = other DNA
ataaaacaggtaatcagagcactactggtaatgctgcaactgcaacaaaactgcaaacagcacgcacaataggcg

SEQ ID NO: 747650 - DNA, 75 bp, synthetic construct
  source 1..75: mol_type = other DNA
ttaggagtaatgaagttcttggagtaatgcgatttacatttttattcgccgaaccatctcattattctatacttt

SEQ ID NO: 747651 - DNA, 75 bp, synthetic construct
  source 1..75: mol_type = other DNA
atgctcattatatgttattacataaaaactgttcgcatattgtggccagagtattgaatgccggttgtattcgac

SEQ ID NO: 747652 - DNA, 75 bp, synthetic construct
  source 1..75: mol_type = other DNA
gtgctcattatatgttattaagtaaaaactgttcgcatattgtggctagagtattgaatgccggttttattcgac

SEQ ID NO: 747653 - DNA, 75 bp, synthetic construct
  source 1..75: mol_type = other DNA
cgcattcgctttctatgatacagtcgcggcaaaagcacgtgaaggcgtagaagccagagacgaaattaaatatac

SEQ ID NO: 747654 - DNA, 75 bp, synthetic construct
  source 1..75: mol_type = other DNA
tatattttatcgaaaactttgttttttaccctcttgggtttggacctggtaattttaaagaattctatcttgcta

SEQ ID NO: 747655 - DNA, 75 bp, synthetic construct
  source 1..75: mol_type = other DNA
aaataggagtaaataatatgcatgtggtaaatttaattggcgcaaagaacattttaaattactttgcaagaattt

SEQ ID NO: 747656 - DNA, 75 bp, synthetic construct
  source 1..75: mol_type = other DNA
ctaattgctgtgcatttcattacatttatcacgatggtgtttgttttgcgtcgtaagatggggaaacgttggctg

SEQ ID NO: 747657 - DNA, 75 bp, synthetic construct
  source 1..75: mol_type = other DNA
gatttcagccgctttgcgctcgattatctggtattcggtaacgcctttcttgagcagcgccacagcgtcaccggc

SEQ ID NO: 747658 - DNA, 75 bp, synthetic construct
  source 1..75: mol_type = other DNA
cgtccacgacaaacctttcgctatgtggtgctgccgctggcaatcccgggtattgccgctggctctatctttacc

SEQ ID NO: 747659 - DNA, 75 bp, synthetic construct
  source 1..75: mol_type = other DNA
tgcatcagtaacggcaaatggtacgagccgccggtcagcttttccgggctggcaaagagcctgcgctctgccgta

SEQ ID NO: 747660 - DNA, 75 bp, synthetic construct
  source 1..75: mol_type = other DNA
acaaaaaaaatgctggcctcatgtcacggccactcagatgcgaataaatattcttgtctggtatattaaaaatgt

SEQ ID NO: 747661 - DNA, 75 bp, synthetic construct
  source 1..75: mol_type = other DNA
ctgaaatggttatgaattattcaggatgttcagaattcactcctgattcaacagactcctggtctcagctcaaca

SEQ ID NO: 747662 - DNA, 75 bp, synthetic construct
  source 1..75: mol_type = other DNA
acatagaaaatgttggcctcaggctacggccactcaaatgcgaattaacattcttgcctggtatattaaaaatgt

SEQ ID NO: 747663 - DNA, 75 bp, synthetic construct
  source 1..75: mol_type = other DNA
acagccagccagatgcgaaccaatactcttatctggtatattaaaaatgtcattccagcgatgcagatgttgtct

SEQ ID NO: 747664 - DNA, 75 bp, synthetic construct
  source 1..75: mol_type = other DNA
atagcttatgatatgaaaaatacttttcttgcttatgacttacctgtgaatgaaagaatatcaaagttatataac

SEQ ID NO: 747665 - DNA, 75 bp, synthetic construct
  source 1..75: mol_type = other DNA
taacaattttcataagttattcatgcaggccagaaacagcactgaaactcaggaagctaatgccggatagtttcc

SEQ ID NO: 747666 - DNA, 75 bp, synthetic construct
  source 1..75: mol_type = other DNA
gcgggcaagccttcttagcaatggctggctttacaccacagtcaattcaggccgcgttgcctggcgttctgaata

SEQ ID NO: 747667 - DNA, 75 bp, synthetic construct
  source 1..75: mol_type = other DNA
ctacactttctttttttacgctattaccatttttagttgctgctggtacctgttatataaagttttctattgttt

SEQ ID NO: 747668 - DNA, 75 bp, synthetic construct
  source 1..75: mol_type = other DNA
atgacacgacaattaagggcggtacttcacgcatagaggggggagtgcgaatggaacactcattgatggtggtag

SEQ ID NO: 747669 - DNA, 75 bp, synthetic construct
  source 1..75: mol_type = other DNA
gtcgtcgctcagtactttccttattgatatctgccttgatatatgccccgcccgggatggctgccttcagtcctg

SEQ ID NO: 747670 - DNA, 75 bp, synthetic construct
  source 1..75: mol_type = other DNA
attaattctttttgttgcgatggatggttggacaatgttgtcaaaaggattgattttgcaatattttgatctatc

SEQ ID NO: 747671 - DNA, 75 bp, synthetic construct
  source 1..75: mol_type = other DNA
actttaggaatgatgatgatgagtcccgtaacaatatctacacctataaaattaattctttttgttgcgatggat

SEQ ID NO: 747672 - DNA, 75 bp, synthetic construct
  source 1..75: mol_type = other DNA
attatttgttgcgcttgatgggtggggtatcctgtctaaggccttgattgaacaatatatcaatgttcctgctta

SEQ ID NO: 747673 - DNA, 75 bp, synthetic construct
  source 1..75: mol_type = other DNA
gatgaacgatttgagcctcaaacttgagcgtctcaatgaggtccgtgcgcgtgaagttcagcgaatgcgcgaact

SEQ ID NO: 747674 - DNA, 75 bp, synthetic construct
  source 1..75: mol_type = other DNA
ttatctcgccaggtgccgccttgggaggaattgtaaaagggctttctagtctcctgctccgcctgaccggtatac

SEQ ID NO: 747675 - DNA, 75 bp, synthetic construct
  source 1..75: mol_type = other DNA
cgctgccggtgaatccgctaccgtcgcaaaaaaaatggcggacaacctgggcggagatctaaaagaactcgatag

SEQ ID NO: 747676 - DNA, 75 bp, synthetic construct
  source 1..75: mol_type = other DNA
ggtccctgcgcaggtaacggttatcaccttcgctcttgctgtaaacatccagattattacgggcggttcccttat

SEQ ID NO: 747677 - DNA, 75 bp, synthetic construct
  source 1..75: mol_type = other DNA
gcatatgataatttctcattcaatgcggatgtacattatggttatggtaagctattatggcatgataaaaaacca

SEQ ID NO: 747678 - DNA, 75 bp, synthetic construct
  source 1..75: mol_type = other DNA
gccgaaaaaggacgaggataaaaaagacggcgaaaaacccaaaggggggcaaccacccctgacgggggagaatac

SEQ ID NO: 747679 - DNA, 75 bp, synthetic construct
  source 1..75: mol_type = other DNA
accttcagacaggtgtatggttttgtcttatttctacccatctatatggctgggaaggcctggctatttcttcat

SEQ ID NO: 747680 - DNA, 75 bp, synthetic construct
  source 1..75: mol_type = other DNA
gccgcattacgtcatgagtgcaactgcagagatagggcgtgtcgcggctggtgcggtttctggcgatgtaaaaac

SEQ ID NO: 747681 - DNA, 75 bp, synthetic construct
  source 1..75: mol_type = other DNA
gaaaatctcagacggattcgatcgggctggagaaaggctttaagaacatcacacaaaaggacgtcatcgtcgaag

SEQ ID NO: 747682 - DNA, 75 bp, synthetic construct
  source 1..75: mol_type = other DNA
cgacattgcccaacgccgctgggggtttgtcgaagaaaaaaagaccctcgaagagatcggggccgattacgtcgt

SEQ ID NO: 747683 - DNA, 75 bp, synthetic construct
  source 1..75: mol_type = other DNA
gagtggcctgttcggtatgtccgggagggattacctatgctaacccggtgaacccgctgctgggtgcgaaggtgc

SEQ ID NO: 747684 - DNA, 75 bp, synthetic construct
  source 1..75: mol_type = other DNA
gtggccagtttgcttcgaagccgtattgagatcgccgttgccgctcgtctcaagggagagtttgaagcggcatca

SEQ ID NO: 747685 - DNA, 75 bp, synthetic construct
  source 1..75: mol_type = other DNA
ctgagagacattaaagacttttatccggacaagcgcccttctctctcagatttactggatccgagcgtagatagt

SEQ ID NO: 747686 - DNA, 75 bp, synthetic construct
  source 1..75: mol_type = other DNA
cggtaacactcgctattccatcctgacggagctgtatgcagaaacaggcgatgagcgttttcgccgtgttcagtg

SEQ ID NO: 747687 - DNA, 75 bp, synthetic construct
  source 1..75: mol_type = other DNA
gattttatttctgaccgcccggtgcgccgctggagcgaagaacgtaaggctgcggtacgacggcggaatctggag

SEQ ID NO: 747688 - DNA, 75 bp, synthetic construct
  source 1..75: mol_type = other DNA
cgtggtgtggggaaaaaggatcgcatggttgcgtacaccaacgataaaaaatacgtccgctacccgctggttccg

SEQ ID NO: 747689 - DNA, 75 bp, synthetic construct
  source 1..75: mol_type = other DNA
atgtcgcaaaccttgtagaatccaagcaagctggagccgggaatgcggtgatcaagcgtctacaatctacagact

SEQ ID NO: 747690 - DNA, 75 bp, synthetic construct
  source 1..75: mol_type = other DNA
cattacgcgaagagcaaggcagcgttctggtccattgcgcgttgggattatcgcgcagtgcgctggtagtggcgg

SEQ ID NO: 747691 - DNA, 75 bp, synthetic construct
  source 1..75: mol_type = other DNA
tatataattaaaaaagggaacaacaaaactagtaaaatattttattatttttgttttttattcaggttgataata

SEQ ID NO: 747692 - DNA, 75 bp, synthetic construct
  source 1..75: mol_type = other DNA
aaaactcacgcagagtgaagatgaggggcttatcaccataagcgctaacttaagggttgaaccatctgaagaatg

SEQ ID NO: 747693 - DNA, 75 bp, synthetic construct
  source 1..75: mol_type = other DNA
gtagccaatggaaaaatttatatcggtaaaattgacactgacccggtaaatccagaaaaccagattcaggtttat

SEQ ID NO: 747694 - DNA, 75 bp, synthetic construct
  source 1..75: mol_type = other DNA
gtgcgctgggttatcgctcgccacgggaatatctgcggcagcgggccagtgatgggttaagtgataacaggtgtc

SEQ ID NO: 747695 - DNA, 75 bp, synthetic construct
  source 1..75: mol_type = other DNA
acagtgcaggatgtgatgttaggagcgatagaaaaacgctttggcgataaagtgccggaacagtccatccagtgg

SEQ ID NO: 747696 - DNA, 75 bp, synthetic construct
  source 1..75: mol_type = other DNA
atggaaatttgcagattcatttgtaaaagaaaatgctggcctcatgttacggccactcagatgcggacgaatatt

SEQ ID NO: 747697 - DNA, 75 bp, synthetic construct
  source 1..75: mol_type = other DNA
ccgctgcgcagaaagcacgcgcaccacagcaactgaccgccagcgccccgcaaaaaatggaggcgttcaccttcg

SEQ ID NO: 747698 - DNA, 75 bp, synthetic construct
  source 1..75: mol_type = other DNA
gataatgtactccgaaagtttgaaagactcaaacaaataggggtggaattggcaattgatgattttggaacgaga

SEQ ID NO: 747699 - DNA, 75 bp, synthetic construct
  source 1..75: mol_type = other DNA
ctgccggggcagcagtatgatgaggagtcggggctgtactacaaccgtcaccggtactatgacccgctacagggg

SEQ ID NO: 747700 - DNA, 75 bp, synthetic construct
  source 1..75: mol_type = other DNA
ccgggggaggcggtgtacagccgcagcgagtcaatgtggctggtgcgcggtggtaaggcagcgcagccggacggc

SEQ ID NO: 747701 - DNA, 75 bp, synthetic construct
  source 1..75: mol_type = other DNA
ctatggcattaaaattgataaaagcagcagtgatactgacaataaaaagaatcagtgttttaaatggaactctat

SEQ ID NO: 747702 - DNA, 75 bp, synthetic construct
  source 1..75: mol_type = other DNA
tcagcctaccgttcttatcagacgcgtcagttcgccagaatggtaggactggagcctaaacatacggcggtacgt

SEQ ID NO: 747703 - DNA, 75 bp, synthetic construct
  source 1..75: mol_type = other DNA
tcgcatacatcaagagcatctggaagttattaccttaaaaataaaattagatatttttctgatgcgtatgagtca

SEQ ID NO: 747704 - DNA, 75 bp, synthetic construct
  source 1..75: mol_type = other DNA
aaacgcccgcgccggtggggagcctcggccccggctcggaaaatgcctgcggatatccgcttacagctgcgcgat

SEQ ID NO: 747705 - DNA, 75 bp, synthetic construct
  source 1..75: mol_type = other DNA
aagccgccaccgccacgcgcgacagcgccgaaacatgggcgaaagccgcgctcgcgactcatgatcgactgaata

SEQ ID NO: 747706 - DNA, 75 bp, synthetic construct
  source 1..75: mol_type = other DNA
tcataaaaacagattattaatatcagttattgcattgatagtcccgctacttctcatacagttgaaattttccaa

SEQ ID NO: 747707 - DNA, 75 bp, synthetic construct
  source 1..75: mol_type = other DNA
tcatatttgataaaatattccgaaccggagttggttaacttttttgaaaagattcagaaggtgaatagctctgaa

SEQ ID NO: 747708 - DNA, 75 bp, synthetic construct
  source 1..75: mol_type = other DNA
cggggccagcgccagtgcggcggcggagaatttcgaccactttctgcaaaccaccttttcgaaaaaaaccgatag

SEQ ID NO: 747709 - DNA, 75 bp, synthetic construct
  source 1..75: mol_type = other DNA
ctgtttaacggtgcgctgaatgttttaaagctgggcgcgaacttcatcgcctcgccgtttattcgtctggtcgat

SEQ ID NO: 747710 - DNA, 75 bp, synthetic construct
  source 1..75: mol_type = other DNA
aacaaacgcagtggatagagaaatttgcaggtaaaaccggcgctcagggtctggaaggtatggctgaactggccg

SEQ ID NO: 747711 - DNA, 75 bp, synthetic construct
  source 1..75: mol_type = other DNA
gggaaaattgattacttgattgacgtgatccgctttatccgtgatgaagagcatttaccggttgaagacacgccg

SEQ ID NO: 747712 - DNA, 75 bp, synthetic construct
  source 1..75: mol_type = other DNA
gcggtttatccccgctggcgcggggaactcactaaacataacctattattaattattgattttttaagtcagtca

SEQ ID NO: 747713 - DNA, 75 bp, synthetic construct
  source 1..75: mol_type = other DNA
accaggtgacgatggaagcgcgtaactatgggctggcgcgtcattacgatccgtttatcgtcaacaccgtggtcg

SEQ ID NO: 747714 - DNA, 75 bp, synthetic construct
  source 1..75: mol_type = other DNA
ttgacctatccattaatccctgaggaaaaaatatggacgatattgtttttgcggggaatagggcgctgtatctga

SEQ ID NO: 747715 - DNA, 75 bp, synthetic construct
  source 1..75: mol_type = other DNA
tatgggatgtttctgtatataatacacagaaaatttaaatatataaaaaacgcaaaggcgatatcattccttttg

SEQ ID NO: 747716 - DNA, 75 bp, synthetic construct
  source 1..75: mol_type = other DNA
ttctcatacagttgaaattttccaacagcctttctctatcaagtaagtttacgattggtgatacaggtcattggc

SEQ ID NO: 747717 - DNA, 75 bp, synthetic construct
  source 1..75: mol_type = other DNA
agggccgacgggccattgaataccaccaccccgatgaacacaccgtcatccgctgtatcctgccaccggaagatg

SEQ ID NO: 747718 - DNA, 75 bp, synthetic construct
  source 1..75: mol_type = other DNA
tttctttgctgggaggcgctatcggggcgctgttcagtccggtcggattgattgctgctgcgtttgtggctgcgg

SEQ ID NO: 747719 - DNA, 75 bp, synthetic construct
  source 1..75: mol_type = other DNA
tgacggttccttacccaaactgagaaaagaacttgagggcgcacgcggtgaggctgaacgcacggcaaaggttat

SEQ ID NO: 747720 - DNA, 75 bp, synthetic construct
  source 1..75: mol_type = other DNA
atgcagacaataaagcctcttgacaccggggtcgctttcggcgccgttgacgggctgccccgccctgccgaaaac

SEQ ID NO: 747721 - DNA, 75 bp, synthetic construct
  source 1..75: mol_type = other DNA
gctcgttgtcgctggctattggtgtgcttgctggcccgctggcaaaactgcgtcttggtttttccctcctgaccg

SEQ ID NO: 747722 - DNA, 75 bp, synthetic construct
  source 1..75: mol_type = other DNA
gaactgcgttcgggggatgtgctggcgggggttgcggcaacaagctcgcaggagcgggtagcggcaaagcaggtg

SEQ ID NO: 747723 - DNA, 75 bp, synthetic construct
  source 1..75: mol_type = other DNA
ggtctgctgccgattctgtggggaacgggggctggttcagaggtgatgagccggattgccgcaccgatgattggc

SEQ ID NO: 747724 - DNA, 75 bp, synthetic construct
  source 1..75: mol_type = other DNA
aatgtctataaaacaaatatttatataaacaatgatgatgagttaataaagctcatcgatgatatagcagagaaa

SEQ ID NO: 747725 - DNA, 75 bp, synthetic construct
  source 1..75: mol_type = other DNA
ggcctggaggaaaccatcctctacagccgggatgccgcaggccgcctggcagaagtcatctcgccggaagggaaa

SEQ ID NO: 747726 - DNA, 75 bp, synthetic construct
  source 1..75: mol_type = other DNA
gaatgctgtcaggctcctgccagcactatggggaatggtgacgggttccgtttcgttactggggggcgctatcgg

SEQ ID NO: 747727 - DNA, 75 bp, synthetic construct
  source 1..75: mol_type = other DNA
ccgctgcctccggcgctggtccctgttgttgcggccagctcccgcccggtggcggaggccatacgatctcagtgg

SEQ ID NO: 747728 - DNA, 75 bp, synthetic construct
  source 1..75: mol_type = other DNA
gtcttcgtattcgcatcagtgatctggttgacggtccgctgcgttctgtcacgcagtggctcacgcgggtgcttg

SEQ ID NO: 747729 - DNA, 75 bp, synthetic construct
  source 1..75: mol_type = other DNA
atgtcatcgtatatggggttaccaacaaatcaacacgatgctcttgagaatattcaactcttagtaggggctgga

SEQ ID NO: 747730 - DNA, 75 bp, synthetic construct
  source 1..75: mol_type = other DNA
tgctcggccatatccggctggctgacagcacaagtccgccgtttggctccatggtggtgtcagggaaaaccggca

SEQ ID NO: 747731 - DNA, 75 bp, synthetic construct
  source 1..75: mol_type = other DNA
taaaaatgaaatgcttcttagtatagtaaatgaaatagactcaacttatgatttaaatagcgctattagaaccaa

SEQ ID NO: 747732 - DNA, 75 bp, synthetic construct
  source 1..75: mol_type = other DNA
taaaagagttgaccaggaaatttaattttagccaggaagacctggaaactctactccttgcgaaagataatgatg

SEQ ID NO: 747733 - DNA, 75 bp, synthetic construct
  source 1..75: mol_type = other DNA
tcgctggcccgtcgattgtcgggcatgctctccgctgggctgcattttgatcacagtatttatatgaacgcatcc

SEQ ID NO: 747734 - DNA, 75 bp, synthetic construct
  source 1..75: mol_type = other DNA
gctaacgcagtcgttggggagagattatggcaatttatacctgacattaagccggcaacaatactggcataccga

SEQ ID NO: 747735 - DNA, 75 bp, synthetic construct
  source 1..75: mol_type = other DNA
acacccttccggcagtgaaaaaggactggcaaatcccaaaaataaccgtgacttcagaggactctatctcaaggc

SEQ ID NO: 747736 - DNA, 75 bp, synthetic construct
  source 1..75: mol_type = other DNA
aacttaagccgcgtgttggacaccatttacggcgtgatcgacaaattcaacattccgacccagggctgcgtgctg

SEQ ID NO: 747737 - DNA, 75 bp, synthetic construct
  source 1..75: mol_type = other DNA
tggtttgttagataaacgttttgatatgcaatgtgctggagattactgcactgatgatgccatgccttgggatat

SEQ ID NO: 747738 - DNA, 75 bp, synthetic construct
  source 1..75: mol_type = other DNA
gagcatatttcgtgggttgggcggcagattatcccgtcgacagcagatgaagatgagttgctggagcactgccgg

SEQ ID NO: 747739 - DNA, 75 bp, synthetic construct
  source 1..75: mol_type = other DNA
tgtaggaataactccttatctccctcgagaacaagcccatttattaagtggtataaataatgagttgcaaccacc

SEQ ID NO: 747740 - DNA, 75 bp, synthetic construct
  source 1..75: mol_type = other DNA
ttcaatctcaaacacacgctatggccgtccgcttgaggatcaaaaaaacgcctgctggtgaaacagaatatgttg

SEQ ID NO: 747741 - DNA, 75 bp, synthetic construct
  source 1..75: mol_type = other DNA
aaatggcaatcctgtacttaaagaactattctggaaagcagtagacgaatttaactttccgcaagaggagcttaa

SEQ ID NO: 747742 - DNA, 75 bp, synthetic construct
  source 1..75: mol_type = other DNA
acatgacgggtaggttgcagctttatatccggctttattgcagccgtaacgctgcgagcccctatgtaattcgcc

SEQ ID NO: 747743 - DNA, 75 bp, synthetic construct
  source 1..75: mol_type = other DNA
gacgacctgatacaggatatcgccatccgagaactggcgtttggcgctggtacattacatgcagcagtggcgtct

SEQ ID NO: 747744 - DNA, 75 bp, synthetic construct
  source 1..75: mol_type = other DNA
atgcacagtaatctgccgcagtgttctaaagagtacagataatataaagtatataaaaatcgacgatgaaactta

SEQ ID NO: 747745 - DNA, 75 bp, synthetic construct
  source 1..75: mol_type = other DNA
gatcgacaaattcaacatcccaactcagggctgcgtactggcgcacgtcaccacccagatcgaagcgattcgtcg

SEQ ID NO: 747746 - DNA, 75 bp, synthetic construct
  source 1..75: mol_type = other DNA
ttgatggcctgtctggtgaatatgcggagaaatcccttgaagaatgggcggaacagattcgcaaaggaggaaacc

SEQ ID NO: 747747 - DNA, 75 bp, synthetic construct
  source 1..75: mol_type = other DNA
gcgcgaagaaaatgccggtgatcaaaaaggccaataccaccattggtattccgggcacctttagcgcccgtttgc

SEQ ID NO: 747748 - DNA, 75 bp, synthetic construct
  source 1..75: mol_type = other DNA
gccggtgaggcaataccggtcaccacctggtcaggtgatgaggccttcattaatgaatttgagtctgaaaaccgg

SEQ ID NO: 747749 - DNA, 75 bp, synthetic construct
  source 1..75: mol_type = other DNA
gcgtcttgagagctccgtatactcgttcagaagcaccttgcaatctctccatgataaccatgttcgtgttctagg

SEQ ID NO: 747750 - DNA, 75 bp, synthetic construct
  source 1..75: mol_type = other DNA
aggaacaagtccgtacttctactgtgtccgaaaaaattggcagataactggctcaactttaatcgaaacttaaag

SEQ ID NO: 747751 - DNA, 75 bp, synthetic construct
  source 1..75: mol_type = other DNA
gaaagtctatttcattattttgtataacatttttaatgagttccttgatgatattacagaggatgtattaccaaa

SEQ ID NO: 747752 - DNA, 75 bp, synthetic construct
  source 1..75: mol_type = other DNA
gggcatccgcaggcgaacctgaaccgggaatggcaggtggtggcaagtgaactgcacggcgaacagccacaggcg

SEQ ID NO: 747753 - DNA, 75 bp, synthetic construct
  source 1..75: mol_type = other DNA
caacactggcactgggatgcgacatcgttattgctgcccgttcagcaaaattcgtcatggcgtttagtaagttag

SEQ ID NO: 747754 - DNA, 75 bp, synthetic construct
  source 1..75: mol_type = other DNA
gagcgtgcgcttcgccattctattttatttaataatggtaaatttgatacaacttttcttatgatgtctatttgg

SEQ ID NO: 747755 - DNA, 75 bp, synthetic construct
  source 1..75: mol_type = other DNA
acctagttctaataaagataaggattatgagaaaattcgcttcacgaaaagtatattaaaagagtctgcggatta

SEQ ID NO: 747756 - DNA, 75 bp, synthetic construct
  source 1..75: mol_type = other DNA
ccgtggctggaatgtcaacgtatcccgggtgatggataacgccacacatgtggcggtgtacttcggctcttacct

SEQ ID NO: 747757 - DNA, 75 bp, synthetic construct
  source 1..75: mol_type = other DNA
acggggcgaaaggttgaagcccggataacggatgttacggacctgtcagactggctggaggattatgttttgtta

SEQ ID NO: 747758 - DNA, 75 bp, synthetic construct
  source 1..75: mol_type = other DNA
aaaaaccttcatttttacgcccgtaaggtgatgagcatgtggcgttaccggataacgcggttgctgtcacggaaa

SEQ ID NO: 747759 - DNA, 75 bp, synthetic construct
  source 1..75: mol_type = other DNA
gcctgaagcgtggctaccgactggcagagctggtcatgatgcatgagccactggcacgacagcgggtgtgcggct

SEQ ID NO: 747760 - DNA, 75 bp, synthetic construct
  source 1..75: mol_type = other DNA
tcaccggacaaaacgggaagaataccttgtgatgagcggtgatgagttcatggaaaggttctcctggcatgtggc

SEQ ID NO: 747761 - DNA, 75 bp, synthetic construct
  source 1..75: mol_type = other DNA
gacatcgggccacacctggaaaaatcttcatttttacgcccgtaaggtgatgagcatgtggcgctaccggataac

SEQ ID NO: 747762 - DNA, 75 bp, synthetic construct
  source 1..75: mol_type = other DNA
atgccatttgcttgttatttcttcattttcataaacgttggtttgggagaaggttcggcattacccgttggtgtg

SEQ ID NO: 747763 - DNA, 75 bp, synthetic construct
  source 1..75: mol_type = other DNA
aacggggtggctgaaatgtaacggcgcagcattttcttctgaaatgtaccccaatctggcaaaggcctactccac

SEQ ID NO: 747764 - DNA, 75 bp, synthetic construct
  source 1..75: mol_type = other DNA
tctgcgctgcccgttggtgtgcccgttccatggccctcagccacgccgccaacggggtggctgaaatgtaacggc

SEQ ID NO: 747765 - DNA, 75 bp, synthetic construct
  source 1..75: mol_type = other DNA
atttatcgacaactgccggtggtgtgacgtcgggccacacctggaaaaatcttcatttatacgcccgtaaggtga

SEQ ID NO: 747766 - DNA, 75 bp, synthetic construct
  source 1..75: mol_type = other DNA
aatatggggggcgactggtccagacggaacgggcggcccatacgtcgtgggggctgatgccactggcgcgagaat

SEQ ID NO: 747767 - DNA, 75 bp, synthetic construct
  source 1..75: mol_type = other DNA
taaattacctgatttacgcggtgagtttattcgtggctgggatgacgggcgcggtattgatgcaggacgtgtttt

SEQ ID NO: 747768 - DNA, 75 bp, synthetic construct
  source 1..75: mol_type = other DNA
catgtggcggataaggggttccgtatggtgaggtactacggtttcctgagtccgtcgaaacggcggttactggaa

SEQ ID NO: 747769 - DNA, 75 bp, synthetic construct
  source 1..75: mol_type = other DNA
atgcttccccgttttgccgatatctttcagcagggaaaccgctggcttaactggctggagaagcagccggaaggg

SEQ ID NO: 747770 - DNA, 75 bp, synthetic construct
  source 1..75: mol_type = other DNA
tgtacttcggctcttacctgaaaaagccaccggtgccgatgagtcggctggagcattatgccggtcaggatgaaa

SEQ ID NO: 747771 - DNA, 75 bp, synthetic construct
  source 1..75: mol_type = other DNA
ggctgaagcggggttaccgactggcagagctggtcctgatgcatgagcgactggcacgacagcaggtgtgcggct

SEQ ID NO: 747772 - DNA, 75 bp, synthetic construct
  source 1..75: mol_type = other DNA
ctgcgatccgtctgacatgctcatcattcagatgacggaagagaaagcgcgcgaacactcaaaaaaacgtctggc

SEQ ID NO: 747773 - DNA, 75 bp, synthetic construct
  source 1..75: mol_type = other DNA
tacagtatctgctgagcctggtccccgactgcccgtggcagcatattgtgttcacgttaccctgccagtactggt

SEQ ID NO: 747774 - DNA, 75 bp, synthetic construct
  source 1..75: mol_type = other DNA
cggtgaccaaaatcatggcgtgcgggaccacactgatggggtatacacagtggtgctgttcatcaccggactgtt

SEQ ID NO: 747775 - DNA, 75 bp, synthetic construct
  source 1..75: mol_type = other DNA
attctgtgcggaagtcagatgcgttttacggggctgaagcggggttaccgactggcagaactggtcctgatgcat

SEQ ID NO: 747776 - DNA, 75 bp, synthetic construct
  source 1..75: mol_type = other DNA
ttcagcagggtaaccgctggcttaactggctggagaaacagccggaaggttcagtgcgtccggtggtgattgagt

SEQ ID NO: 747777 - DNA, 75 bp, synthetic construct
  source 1..75: mol_type = other DNA
gaaaggttctcgtggcatgtggcggataagggggtccgtatggtgaggtactacggtttcctgagtccgtcgaaa

SEQ ID NO: 747778 - DNA, 75 bp, synthetic construct
  source 1..75: mol_type = other DNA
ctggaaatctgccatcaggcagatgtggagccggggatattcacggtgatccacacatgggggcgtgaccagcag

SEQ ID NO: 747779 - DNA, 75 bp, synthetic construct
  source 1..75: mol_type = other DNA
ggaagtcagatgcgctttacggggctgaaacggggttaccgactggcagagctggtcctgatgcatgagcgactg

SEQ ID NO: 747780 - DNA, 75 bp, synthetic construct
  source 1..75: mol_type = other DNA
tcacggtgatccacacatggggacgtgaccagcagtggcatccgcacattcacctgtcgacaacggccggcggcg

SEQ ID NO: 747781 - DNA, 75 bp, synthetic construct
  source 1..75: mol_type = other DNA
atgagctggacggactggatttgtttaccggcttcactgtcacacacactgacagcagtgcctctgctgatgctt

SEQ ID NO: 747782 - DNA, 75 bp, synthetic construct
  source 1..75: mol_type = other DNA
ctaaaatcccagcctgccagtgagcaatcacctgcgcagtcgcggcggcgtatcgctgaacaagagccaaactgg

SEQ ID NO: 747783 - DNA, 75 bp, synthetic construct
  source 1..75: mol_type = other DNA
tggttttgccgtggtggcgggtgaagtgcgtaatcttgccagtcgcagcgcccaggcggcaaaagagatcaaagc

SEQ ID NO: 747784 - DNA, 75 bp, synthetic construct
  source 1..75: mol_type = other DNA
attcagagcgttcttgattaccttggtttaggagaaggctcggcgctgcccgttggtgtgcctgttccgtggccc

SEQ ID NO: 747785 - DNA, 75 bp, synthetic construct
  source 1..75: mol_type = other DNA
ctgcccgttggcgtgcctgttccgtggccctcagccacaccaccaacggggtggctgaaatgtaacggagcagca

SEQ ID NO: 747786 - DNA, 75 bp, synthetic construct
  source 1..75: mol_type = other DNA
cagtcagctaaaccacaaaccaccactaaaatcccagcctgccagtgagcaatcacctgcgcagtcgcggcggcg

SEQ ID NO: 747787 - DNA, 75 bp, synthetic construct
  source 1..75: mol_type = other DNA
ctgcagaacagaatgattgggagacaaggtattttaccctcaataccctcaatctggatggttctgatttccatt

SEQ ID NO: 747788 - DNA, 75 bp, synthetic construct
  source 1..75: mol_type = other DNA
tttgttgaattgctgggatcggggtttgctgttgaatacctgagccgcaagaatccgtttggtgatatcaaatcg

SEQ ID NO: 747789 - DNA, 75 bp, synthetic construct
  source 1..75: mol_type = other DNA
ttaatttcaccagtaactctgtgggtgatggtgtgaattttgttgcagtcagaccgcgaaatattgcatttaact

SEQ ID NO: 747790 - DNA, 75 bp, synthetic construct
  source 1..75: mol_type = other DNA
atgattaaccgtatccgcgtagtcacgctgctgatgatggtgctgggggtatttgcactgttacagcttatttcc

SEQ ID NO: 747791 - DNA, 75 bp, synthetic construct
  source 1..75: mol_type = other DNA
atggttatggcgcttataactggacattcgacgcatctcgctcagttcgcacagcatctgaaacccgctcccgta

SEQ ID NO: 747792 - DNA, 75 bp, synthetic construct
  source 1..75: mol_type = other DNA
tggcaaaggtttacccaacgttaaaattacctgatttacgcggtgagtttatccgtggttgggatgattcgagag

SEQ ID NO: 747793 - DNA, 75 bp, synthetic construct
  source 1..75: mol_type = other DNA
ctggcattttttacaggtgccggaacaatggatatgacagcgctgactcaaaatggcagggaaattttaagtaaa

SEQ ID NO: 747794 - DNA, 75 bp, synthetic construct
  source 1..75: mol_type = other DNA
caatagttatttctccttagtcagaagtatggtgacagaaagaacagatggcgctgtttacccaaaagtgattgg

SEQ ID NO: 747795 - DNA, 75 bp, synthetic construct
  source 1..75: mol_type = other DNA
atgccagttagccgtaatcgctgcattttcttaaacgttggtttgggagaaggttcggcattacccgttggtgtg

SEQ ID NO: 747796 - DNA, 75 bp, synthetic construct
  source 1..75: mol_type = other DNA
accattacaccagtaattcagtgggtgatggtgtgaattttattgccgtcagaccacgtaacatcgcatttaact

SEQ ID NO: 747797 - DNA, 75 bp, synthetic construct
  source 1..75: mol_type = other DNA
gttccgtggccttcagccactccgccaacaggctggctgaaatgcaatggtgcggctttttctgctgaagaatac

SEQ ID NO: 747798 - DNA, 75 bp, synthetic construct
  source 1..75: mol_type = other DNA
accgccatattgttgtagctaacgatggatatgacacaaaagatgaatgggagttggctacgattttcaaaaaaa

SEQ ID NO: 747799 - DNA, 75 bp, synthetic construct
  source 1..75: mol_type = other DNA
gtacctgttccgtggccctcagccactccgccaacaggctggctaaaatgcaacggagcagctttttctgctgaa

SEQ ID NO: 747800 - DNA, 75 bp, synthetic construct
  source 1..75: mol_type = other DNA
tgttaagaacagcaatgctggattattataaccaggacactacgggaacctcggggatagtcggcatgggattca

SEQ ID NO: 747801 - DNA, 75 bp, synthetic construct
  source 1..75: mol_type = other DNA
aaagacgaaaacgttggtttaggagaaggctctgcactgcccgttggtgtgcccgttccgtggcccttagcaaca

SEQ ID NO: 747802 - DNA, 75 bp, synthetic construct
  source 1..75: mol_type = other DNA
gccacaccgccagcaggctggttaaagtgcgacgggcgcgcctttacaaaagaacaatatcctgttctggccaga

SEQ ID NO: 747803 - DNA, 75 bp, synthetic construct
  source 1..75: mol_type = other DNA
taccctgtgctggcgaaagtgtttccttcactggtattacctgaagcccgcggtgatttcattcgtatctgggat

SEQ ID NO: 747804 - DNA, 75 bp, synthetic construct
  source 1..75: mol_type = other DNA
ttacagaccttcgtgagggcagctttaaaatgccggacgggacaacattcagcgatcctgtcgtggcaatgtcag

SEQ ID NO: 747805 - DNA, 75 bp, synthetic construct
  source 1..75: mol_type = other DNA
aggacgtaagttgctgtccgcacaaggggcaacgctgttaagaacagcaatgctggattattataaccaggacac

SEQ ID NO: 747806 - DNA, 75 bp, synthetic construct
  source 1..75: mol_type = other DNA
atgctccatatgcaccacatactgctggaacgaacccggtacagagaaaatatccatgatgcagaatgtattcgt

SEQ ID NO: 747807 - DNA, 75 bp, synthetic construct
  source 1..75: mol_type = other DNA
gcgatcattttcgtttctggaagctaattgatttgcttgaccccactttgttttccagtgaaacagagatggtgg

SEQ ID NO: 747808 - DNA, 75 bp, synthetic construct
  source 1..75: mol_type = other DNA
agcgcatcactgcactgcctataagcaaggtggcaaaacccgcaagacccagaactacaaattagcggaagcctt

SEQ ID NO: 747809 - DNA, 75 bp, synthetic construct
  source 1..75: mol_type = other DNA
tcagccattttgaatttggccaaggcgttgttatctcggcagcgggtggctacgcccgtgtcttctttccccaag

SEQ ID NO: 747810 - DNA, 75 bp, synthetic construct
  source 1..75: mol_type = other DNA
acaacctcgaaccaaactttgactaccttaaggactcatttattttagggctggcttggaaaaaaacggatcgtt

SEQ ID NO: 747811 - DNA, 75 bp, synthetic construct
  source 1..75: mol_type = other DNA
cctcacactcagctaagttgatgtctgacaaagaaattaataaccgaagtgacttgaagaatttttcaaaggtct

SEQ ID NO: 747812 - DNA, 75 bp, synthetic construct
  source 1..75: mol_type = other DNA
actgattgtgacctctggtgttggactcccccaacaagaaggcaagccggtgcaggtgatccgtgctggcgatgt

SEQ ID NO: 747813 - DNA, 75 bp, synthetic construct
  source 1..75: mol_type = other DNA
tggaacgaacccggtacagagaaaatatccatgacgcagaatgtatccgtgaaatccacgaagcccccctgcagg

SEQ ID NO: 747814 - DNA, 75 bp, synthetic construct
  source 1..75: mol_type = other DNA
tgaactcagcgccgcactggccagaatgctccacatgcaccacatactgctggaacgaacgaacgaacgaaccga

SEQ ID NO: 747815 - DNA, 75 bp, synthetic construct
  source 1..75: mol_type = other DNA
cccgctgttccgctttaaagatgaagctgatgtgattgcgcaggccaatgacaccgagtttggccttgccgccta

SEQ ID NO: 747816 - DNA, 75 bp, synthetic construct
  source 1..75: mol_type = other DNA
gatcacagatcctcggccaattatcggagcaggtgaactatcagcaactttattcgcaggcactgcaagacccag

SEQ ID NO: 747817 - DNA, 75 bp, synthetic construct
  source 1..75: mol_type = other DNA
atggaagaaaataatacgagtacagataaaaacaccctgacagcccttattgattatgaaaactgtggcagtctg

SEQ ID NO: 747818 - DNA, 75 bp, synthetic construct
  source 1..75: mol_type = other DNA
ggcgacataattgtagctgttgacccacgttatttccgtccggctgaagtggaaaccttacttggagacccttcg

SEQ ID NO: 747819 - DNA, 75 bp, synthetic construct
  source 1..75: mol_type = other DNA
tatgacttttacccacagttcagtatcccggttcgtacggaactggagttttatgctcgcggaaaagctgacaca

SEQ ID NO: 747820 - DNA, 75 bp, synthetic construct
  source 1..75: mol_type = other DNA
gcaactctatatgggagccgtttctccacttgcaggttttcagaaacaatttcaaatattcgactttccatttct

SEQ ID NO: 747821 - DNA, 75 bp, synthetic construct
  source 1..75: mol_type = other DNA
gatcagcaattcctagctgaaaaacttggagttagcagaagcacaattattcgttggctcaattacttagaatca

SEQ ID NO: 747822 - DNA, 75 bp, synthetic construct
  source 1..75: mol_type = other DNA
ggcaatggttacgaagctctgtcgttccggtcgcattccagtgctgaaaagcggcaagctggattttgataaagc

SEQ ID NO: 747823 - DNA, 75 bp, synthetic construct
  source 1..75: mol_type = other DNA
gaagaaattgaatttagcaatggaaagatgatattaaagttaaaacgtaaaaaaactgagtctacaactgacaaa

SEQ ID NO: 747824 - DNA, 75 bp, synthetic construct
  source 1..75: mol_type = other DNA
tggtaaaagatggtctcgaacaaatgctgtttaccactgttcgagaaaacgcgaccaattcagaaaaattgcatt

SEQ ID NO: 747825 - DNA, 75 bp, synthetic construct
  source 1..75: mol_type = other DNA
gttctggcagcatcccccgttatttgtattgatgttattgtgcgctgggtagataaaattcagttatatgccaga

SEQ ID NO: 747826 - DNA, 75 bp, synthetic construct
  source 1..75: mol_type = other DNA
gcgcggtgaatggcgtgatgccctgaccaacggtatccgggatgaactggtccgtcgcggggtaatgaaaattca

SEQ ID NO: 747827 - DNA, 75 bp, synthetic construct
  source 1..75: mol_type = other DNA
aaaatggaaaaagagggcatgggatatcttcggaacaaccagagttacccgctgatgatgccggattagctggtg

SEQ ID NO: 747828 - DNA, 75 bp, synthetic construct
  source 1..75: mol_type = other DNA
tttatcggtcgtgtccgggttgatccgctgttcaacgctgacaacgacatccgtgtttccgcggcttatgtcacc

SEQ ID NO: 747829 - DNA, 75 bp, synthetic construct
  source 1..75: mol_type = other DNA
gttgcgcgtgcaacggttacgttatgaggatctgcttaataaacagccgctgctacggcaaatccatcaggccga

SEQ ID NO: 747830 - DNA, 75 bp, synthetic construct
  source 1..75: mol_type = other DNA
ccgtgaatatgacgcggtggtgtttgtcggaccggcgcgaaccgggaaaaccgaagggctgattgatggctggat

SEQ ID NO: 747831 - DNA, 75 bp, synthetic construct
  source 1..75: mol_type = other DNA
ctgacggccggggcagaaaaacgccgtcgccggaagaaaaaactgcggacggagcgtgcggaagataatccatgg

SEQ ID NO: 747832 - DNA, 75 bp, synthetic construct
  source 1..75: mol_type = other DNA
tccgccttaaatgcgcttgaggaacgaaaaggttcccttgagcgcatcaaacaatatcaagacgttattgataat

SEQ ID NO: 747833 - DNA, 75 bp, synthetic construct
  source 1..75: mol_type = other DNA
tccggttcgctgggacggctttgctttatcctcatttgcggtgcactggcggtggtcaccctcagcctgaaaaag

SEQ ID NO: 747834 - DNA, 75 bp, synthetic construct
  source 1..75: mol_type = other DNA
tgctaattgccattctggtatttatcatcaccacgcagctggtgcgcaacctacccgcgctgctggaactggcga

SEQ ID NO: 747835 - DNA, 75 bp, synthetic construct
  source 1..75: mol_type = other DNA
aggaaattctccaccgattatcgaaactttctacaaagacctgtctatataggtagggaaactgtaaataaaatt

SEQ ID NO: 747836 - DNA, 75 bp, synthetic construct
  source 1..75: mol_type = other DNA
gatatctatcgaaaactgtccccagagtgtacctctgattatcagaaattgatgagtgaagttacatcatttgcc

SEQ ID NO: 747837 - DNA, 75 bp, synthetic construct
  source 1..75: mol_type = other DNA
cctgtacgttcgtctcctgtttctgtaactgaacagcccagcccgctttctggtggctggctgggtgtcagtgac

SEQ ID NO: 747838 - DNA, 75 bp, synthetic construct
  source 1..75: mol_type = other DNA
ctgacggatgtgttccataaaacatggccgctggcttctgatccggatgtgcgcatgcgtctgatggccatggcg

SEQ ID NO: 747839 - DNA, 75 bp, synthetic construct
  source 1..75: mol_type = other DNA
ccgtgaatatgacgcggtggtgtttgtgggacctgcgcgaaccgggaaaaccgaagggctgattgacggctggat

SEQ ID NO: 747840 - DNA, 75 bp, synthetic construct
  source 1..75: mol_type = other DNA
gaagtgaagagacactcaagacggttatcaataccgactggggattaccttatcttccccgcgccagcatggagc

SEQ ID NO: 747841 - DNA, 75 bp, synthetic construct
  source 1..75: mol_type = other DNA
ccggaagtcttcctggtggatctgcaacaggggattcagattttcgagctgcgtatttacgccgctgagatgggt

SEQ ID NO: 747842 - DNA, 75 bp, synthetic construct
  source 1..75: mol_type = other DNA
gccgccggtggccgtgtggtaactgcgccaactaacggtgcctgcggtatcgttccggcagtgctggcatactat

SEQ ID NO: 747843 - DNA, 75 bp, synthetic construct
  source 1..75: mol_type = other DNA
gttcagcatccaccagaaaccgttacatcaaaaagaactcggcgtttttcaaatggcttgcaactcgcacggatg

SEQ ID NO: 747844 - DNA, 75 bp, synthetic construct
  source 1..75: mol_type = other DNA
ccctgataacaccggacgaacgggccgccgggcgcaggccgcaggtgatgtgccgctctggcttcttcagacgga

SEQ ID NO: 747845 - DNA, 75 bp, synthetic construct
  source 1..75: mol_type = other DNA
agggatttaccggggcgtattatcagttgaataatgacagctttgcaccaggaaaaacggcggctgattatttgt

SEQ ID NO: 747846 - DNA, 75 bp, synthetic construct
  source 1..75: mol_type = other DNA
gacggcagcgcagttacgacagttagcacaggttctgcgtgaacatggcgacaatgatgcagctacaagagctga

SEQ ID NO: 747847 - DNA, 75 bp, synthetic construct
  source 1..75: mol_type = other DNA
ccgggcggatgacccggtctgggagtatttctacgcgccggacggatacggatgccgctgccgtatccgggcgcg

SEQ ID NO: 747848 - DNA, 75 bp, synthetic construct
  source 1..75: mol_type = other DNA
gcggtggtcaccctcagcctgaaaaaggccgggatcccgctgtatctcaacaaagagggcagcggcgacaacatt

SEQ ID NO: 747849 - DNA, 75 bp, synthetic construct
  source 1..75: mol_type = other DNA
tctctgactcggtcacgcgcgtggtgttgacgattccggcccctgccgatgccaacagtgaagaagtgacggaaa

SEQ ID NO: 747850 - DNA, 75 bp, synthetic construct
  source 1..75: mol_type = other DNA
taacggccaccgtgccgctgctgtgggtagtgatgatttgcgccacctttgctcgcccgaacggcttgtttatcg

SEQ ID NO: 747851 - DNA, 75 bp, synthetic construct
  source 1..75: mol_type = other DNA
tgagatcgagcgccgcctgggaacgcttaccggcaatactccgctcaatcaggcacaaaatttcgcgttgcagtc

SEQ ID NO: 747852 - DNA, 75 bp, synthetic construct
  source 1..75: mol_type = other DNA
gctggatgcatatttgcaagcactacgcaaccagttgaatagtcaacgccaacaggaagcggaacgggctctgga

SEQ ID NO: 747853 - DNA, 75 bp, synthetic construct
  source 1..75: mol_type = other DNA
atctctggcctgattatcctgttcgaaaaaccgattcgcattggcgatacggtaacgatccgcgatcttaccggt

SEQ ID NO: 747854 - DNA, 75 bp, synthetic construct
  source 1..75: mol_type = other DNA
gaacagttgctggaggacaaactggaggtgggctgcgcgccgctgccgttgtggcaggcggcaacgcaaaacgtc

SEQ ID NO: 747855 - DNA, 75 bp, synthetic construct
  source 1..75: mol_type = other DNA
ttcaggaggcgatcttctgcggattatggcgagtgcgcagacgtcgcggcgaacagttgctggaggacaaactgg

SEQ ID NO: 747856 - DNA, 75 bp, synthetic construct
  source 1..75: mol_type = other DNA
tggcagcgccagaagatttggtcgactctgcgcagcggcttagcgaggtatgtcagtggctggcggaagctgcac

SEQ ID NO: 747857 - DNA, 75 bp, synthetic construct
  source 1..75: mol_type = other DNA
tacgtaaaggcgaatggttcaacaggtgctgaaactcgcccgcgcaacctcgcattcaactacattgtaagggca

SEQ ID NO: 747858 - DNA, 75 bp, synthetic construct
  source 1..75: mol_type = other DNA
tggcagcgccagaagatctggtcgattctacgcaacgattgggtgaggtctgtcggtggctggcggaaagcgcgc

SEQ ID NO: 747859 - DNA, 75 bp, synthetic construct
  source 1..75: mol_type = other DNA
cgcgccgctggcgttgtggcaggcggcaacgcaaaatctcttgccgacagattcgctgttaccgccgcccattga

SEQ ID NO: 747860 - DNA, 75 bp, synthetic construct
  source 1..75: mol_type = other DNA
aggctctgcattacctgtcggtgtgcctgttccgtggccttccgctactccgccgacaggctggctgaaatgcaa

SEQ ID NO: 747861 - DNA, 75 bp, synthetic construct
  source 1..75: mol_type = other DNA
atgccatttgctcgttatttctgcattttcataaacgttggtttgggagaaggctctgcattacctgtcggtgtg

SEQ ID NO: 747862 - DNA, 75 bp, synthetic construct
  source 1..75: mol_type = other DNA
gagggagtattggtaacacaggtgggagcgaaacccgtccacgaaatattgcatttaactatatcgtgagagctg

SEQ ID NO: 747863 - DNA, 75 bp, synthetic construct
  source 1..75: mol_type = other DNA
aggctggctgcgcgccgctggcgttgtggcagggggcaacgcaaaaactctttccgacagaattcgctgttaccg

SEQ ID NO: 747864 - DNA, 75 bp, synthetic construct
  source 1..75: mol_type = other DNA
gggcgaggtgctggcagtcgatctgttaaatctcaacgccgacgatcgtcactttatcaatacgcttctcgggga

SEQ ID NO: 747865 - DNA, 75 bp, synthetic construct
  source 1..75: mol_type = other DNA
acctgatgcctcctctttaattaaagaaaccagaccacggaacctggcatttgcgtatatcgtgagggctgcata

SEQ ID NO: 747866 - DNA, 75 bp, synthetic construct
  source 1..75: mol_type = other DNA
tcaaatcggacggcacggtaccaacggctctcgaaaaccttggtttaggggaaggctcggcgctgcccgttggtg

SEQ ID NO: 747867 - DNA, 75 bp, synthetic construct
  source 1..75: mol_type = other DNA
gagggtaagccgtcagaaacgcgcttcaaagtggaagaacgctatgcgtttgccacgctggtgcgttgtagcccg

SEQ ID NO: 747868 - DNA, 75 bp, synthetic construct
  source 1..75: mol_type = other DNA
gtgtgcatactcaatacgctggtcatccgattgcgtttgatgatcgttacggcgatcgtgagtttgatcaacagc

SEQ ID NO: 747869 - DNA, 75 bp, synthetic construct
  source 1..75: mol_type = other DNA
gaaggtaaaccgtcagaaactcgcttcaaagtggaagaacgctatgcgtttgccacgctggttcgttgcagtccg

SEQ ID NO: 747870 - DNA, 75 bp, synthetic construct
  source 1..75: mol_type = other DNA
aaaagagcatcaggtaaaagttatcattcagacaacagcggttccggtggaggctcaagtggcggcggatttagc

SEQ ID NO: 747871 - DNA, 75 bp, synthetic construct
  source 1..75: mol_type = other DNA
gttgcctggtcggatcgtactgtccgcatccaggtaggttatgggctggaagaaaaggtaaccgatgctctggct

SEQ ID NO: 747872 - DNA, 75 bp, synthetic construct
  source 1..75: mol_type = other DNA
gcggttccgctggaggctcagatagcggcggatttagcggcggggggggttgttttgggggggggggggcgtccg

SEQ ID NO: 747873 - DNA, 75 bp, synthetic construct
  source 1..75: mol_type = other DNA
tgcagttttttgacaactacacagttacatccttaactgaccaaacatggaccggaggtggtatcattactgaaa

SEQ ID NO: 747874 - DNA, 75 bp, synthetic construct
  source 1..75: mol_type = other DNA
ggctctcgaaaaccttggtttgggagaaggtgctccagctattggcgttccgttcttctggccctccgcggcaat

SEQ ID NO: 747875 - DNA, 75 bp, synthetic construct
  source 1..75: mol_type = other DNA
ggtgcacaaagatatgattggtgggcttacgtatccgcgcgtccccgtaatattgcatttaattatatcgtgaga

SEQ ID NO: 747876 - DNA, 75 bp, synthetic construct
  source 1..75: mol_type = other DNA
gctggtgcgcggtcagtggcagtcacacgtgaagagtgtccaggctccgctgctgaagaatattctgcaaagcgg

SEQ ID NO: 747877 - DNA, 75 bp, synthetic construct
  source 1..75: mol_type = other DNA
atgatttaccgtattttgcgtaaaggcgaagtgcgggtgaacaaaaaacgtattaagcctgaatataaactcgaa

SEQ ID NO: 747878 - DNA, 75 bp, synthetic construct
  source 1..75: mol_type = other DNA
cagcattgcctgttggcgtacctgttccgtggccctcagccactccgccaacaggctggctaaaatgcaacggag

SEQ ID NO: 747879 - DNA, 75 bp, synthetic construct
  source 1..75: mol_type = other DNA
agggagtctgatcccatcaccgacacttcattcacgagggagtatcggtaatactggcgggagtgaaacccgtcc

SEQ ID NO: 747880 - DNA, 75 bp, synthetic construct
  source 1..75: mol_type = other DNA
tgaagaatacccggaactggcaaaggcttatccgacaaataaattgcctgatttacgtggtgagtttattcgtgg

SEQ ID NO: 747881 - DNA, 75 bp, synthetic construct
  source 1..75: mol_type = other DNA
catgaatgatgtagacagggttgggggcaaaaatgcctccctgggggaaatgattactaacctttccggaatggg

SEQ ID NO: 747882 - DNA, 75 bp, synthetic construct
  source 1..75: mol_type = other DNA
tctggccaacgggacatccggcacatggttttacactgacgacattgcagttactgacgcgtggcttcgcgcgca

SEQ ID NO: 747883 - DNA, 75 bp, synthetic construct
  source 1..75: mol_type = other DNA
aaaaagcggtagcaaaagtggaagagcatattgccgatgcgctggagaaaggcgcgcgcgtggtttgcggtggta

SEQ ID NO: 747884 - DNA, 75 bp, synthetic construct
  source 1..75: mol_type = other DNA
tcaaatcggatggcacggtgaaaacggctctcgaaaaccttggtttgggagaagcggcaaaacggaatgtgggca

SEQ ID NO: 747885 - DNA, 75 bp, synthetic construct
  source 1..75: mol_type = other DNA
tcaaatcggatggcacggtgaaaacagctctcgaaaaccttggtttgggagaaggctcagcattacccgttggtg

SEQ ID NO: 747886 - DNA, 75 bp, synthetic construct
  source 1..75: mol_type = other DNA
atttacgctgtacggacaccttaaaaggcccgttacttgagagttatgaaatctgcccaataccggaagtggtgc

SEQ ID NO: 747887 - DNA, 75 bp, synthetic construct
  source 1..75: mol_type = other DNA
tggcagcgccagaagatttggtcgactctgcgcagcggcttagcgaggtatgccagtggctggcggaaggggcac

SEQ ID NO: 747888 - DNA, 75 bp, synthetic construct
  source 1..75: mol_type = other DNA
gccacggggttacgccatgtctggcatttacgctgcacggacaccttaaaaggcccgttactggaaagttatgaa

SEQ ID NO: 747889 - DNA, 75 bp, synthetic construct
  source 1..75: mol_type = other DNA
tgcagcgatcaaaaactttggttctggctggacctggctggtgaaaaacagcgatggcaaactggctatcgtttc

SEQ ID NO: 747890 - DNA, 75 bp, synthetic construct
  source 1..75: mol_type = other DNA
gggaacacgcttactacatcgactatcgcaatgcgcgtcctggctacctggaacacttctgggcgctggtgaact

SEQ ID NO: 747891 - DNA, 75 bp, synthetic construct
  source 1..75: mol_type = other DNA
gaacgttccgctgaagcagaagcccgcgccaccaaaatggtgtctgaagccatcgcctccggtgatattcaggcg

SEQ ID NO: 747892 - DNA, 75 bp, synthetic construct
  source 1..75: mol_type = other DNA
ccgttcggcggtatcaaagcctcaggcctgggtcgtgaaggttcgaagtatggtatcgaagattacttagaaatc

SEQ ID NO: 747893 - DNA, 75 bp, synthetic construct
  source 1..75: mol_type = other DNA
aacgctacatacacgagggagtattggtaacacaggtgggagcgaaacccgtccacgaaatattgcatttaacta

SEQ ID NO: 747894 - DNA, 75 bp, synthetic construct
  source 1..75: mol_type = other DNA
ccggaggaaccctgattccatcaccaacgctacatacacgagggagtattggtaacacaggtgggagcgaaaccc

SEQ ID NO: 747895 - DNA, 75 bp, synthetic construct
  source 1..75: mol_type = other DNA
cccgttggcgtgcctgttccgtggccctcagccacaccaccaacggggtggctgaaatgtaacggagcagcattt

SEQ ID NO: 747896 - DNA, 75 bp, synthetic construct
  source 1..75: mol_type = other DNA
cgcggtgaatttattcgtggatgggatgatgggcgcggggtggattcctctcgtggtttgttgacatctcaagac

SEQ ID NO: 747897 - DNA, 75 bp, synthetic construct
  source 1..75: mol_type = other DNA
gcaatgtcagacaatggtatgcaggctactattctgacctctatcagaagcgggtatgcgaagggtatcactgtc

SEQ ID NO: 747898 - DNA, 75 bp, synthetic construct
  source 1..75: mol_type = other DNA
ttgtttcgtgaaaaatacagagttggtataggtagggataaaaacgaaaacgttggtttaggagaaggctcggcg

SEQ ID NO: 747899 - DNA, 75 bp, synthetic construct
  source 1..75: mol_type = other DNA
cttcagagttagtgattatcgtacaaaagaaataccagcatcagaagttatgggaagaggatatattgcaagcct

SEQ ID NO: 747900 - DNA, 75 bp, synthetic construct
  source 1..75: mol_type = other DNA
attgacgaggggcgtaagttgctttcatggcagaaaggtacactggtcggcggtcatgacgataacgattcttcg

SEQ ID NO: 747901 - DNA, 75 bp, synthetic construct
  source 1..75: mol_type = other DNA
tgccgatctcgataaagccgtggaaggcgcgctggcttctaaattccgcaacgccgggcaaacctgcgtctgtgc

SEQ ID NO: 747902 - DNA, 75 bp, synthetic construct
  source 1..75: mol_type = other DNA
aaatcggatggcacggtgaaaacggctctcgaaaaccttggtttgggagaaggtgctccagctattggcgttccg

SEQ ID NO: 747903 - DNA, 75 bp, synthetic construct
  source 1..75: mol_type = other DNA
gctggaatgacaacctcagccggccagagtgattgggaaaatcgtcagtttacaatggataaactgaggcttgat

SEQ ID NO: 747904 - DNA, 75 bp, synthetic construct
  source 1..75: mol_type = other DNA
ggtaaaagagcttattgcgtctaactcagtgtttcttgtacatgcaaacaatagccaggctgaccagttgaacgt

SEQ ID NO: 747905 - DNA, 75 bp, synthetic construct
  source 1..75: mol_type = other DNA
ggccaaataataatactgtcggcgcatttacctcttcaacattgacaccaaatctcgcatcaattgcgacaggtg

SEQ ID NO: 747906 - DNA, 75 bp, synthetic construct
  source 1..75: mol_type = other DNA
caaaaaataccccttacacaggattcagttttgatgcatccagggttgtaccaacagcatcagagaatcgccctc

SEQ ID NO: 747907 - DNA, 75 bp, synthetic construct
  source 1..75: mol_type = other DNA
aatagcattgattatggcggtgataaaacattctcaactgattatcggagcgattatttatggtacgcatctctg

SEQ ID NO: 747908 - DNA, 75 bp, synthetic construct
  source 1..75: mol_type = other DNA
gaggcatccggtgccagtctggagaaggcgcggcacgaccagctgcttaccgcgcttcgtgcgctgctgttaagt

SEQ ID NO: 747909 - DNA, 75 bp, synthetic construct
  source 1..75: mol_type = other DNA
cgttggtttgggagaaggttcggcattacccgttggcgtgcctgttccgtggccttccgccactccgccaacagg

SEQ ID NO: 747910 - DNA, 75 bp, synthetic construct
  source 1..75: mol_type = other DNA
ttacgcggtgaatttattcgtggctgggatgatggacgtggagtggatgcggggcgagccttgctaagtcttcag

SEQ ID NO: 747911 - DNA, 75 bp, synthetic construct
  source 1..75: mol_type = other DNA
gcaacatttattcgtacagctttgcaggattattacggttacgatctgaatactaatgtcaaagtaggtatcgct

SEQ ID NO: 747912 - DNA, 75 bp, synthetic construct
  source 1..75: mol_type = other DNA
aatacccgaaactggcaaaggcttacccgaccaataaattgcctgatttacgcggtgagtttattcgtggctggg

SEQ ID NO: 747913 - DNA, 75 bp, synthetic construct
  source 1..75: mol_type = other DNA
ccccagaccggcacacctgccaccgatcttgatgatgactactttgatatgttgcaggaagaactctgcagcgtg

SEQ ID NO: 747914 - DNA, 75 bp, synthetic construct
  source 1..75: mol_type = other DNA
aacgctacatacacgagggagtattggtaacacaggcgggagcgaaacacgaccgcgcaatattgcattcaactt

SEQ ID NO: 747915 - DNA, 75 bp, synthetic construct
  source 1..75: mol_type = other DNA
atcagaggggctttttacgatgcaggaacacgatcagcgagaatgccgaataacacaactactatagacaaaacc

SEQ ID NO: 747916 - DNA, 75 bp, synthetic construct
  source 1..75: mol_type = other DNA
ttggtgtacctgttccatggccctcagccacgccgccaacgggctggctgaaatgtaacggtgcagtattttctt

SEQ ID NO: 747917 - DNA, 75 bp, synthetic construct
  source 1..75: mol_type = other DNA
aatggtgcgcctttttctgccgaagagtatccggaactggcaaaagtttatccgacaaataaattgccagattta

SEQ ID NO: 747918 - DNA, 75 bp, synthetic construct
  source 1..75: mol_type = other DNA
gactatcgtttccggctttgatgacaatgatacaggggatatcagttcgctgggttctgcaaactatggattcgg

SEQ ID NO: 747919 - DNA, 75 bp, synthetic construct
  source 1..75: mol_type = other DNA
tcctcactacgagctattagctctcgtagtgttaaacgttatggtgaaattagtggaaatgtaggtacagaaact

SEQ ID NO: 747920 - DNA, 75 bp, synthetic construct
  source 1..75: mol_type = other DNA
aacaatgtcagacaatggtatgcaggctactattctgacctctatcagaagcgggtatgcgaagggtatcactgt

SEQ ID NO: 747921 - DNA, 75 bp, synthetic construct
  source 1..75: mol_type = other DNA
aaaagatgaatgggaactggctacgattttcaaaaagacatacacacaaggacggggacttgatgccacaaatac

SEQ ID NO: 747922 - DNA, 75 bp, synthetic construct
  source 1..75: mol_type = other DNA
agggaaactaatgcgacgggtgggactgaaacaaggccgcgcaacattgcatttaactacattgtaagggcagca

SEQ ID NO: 747923 - DNA, 75 bp, synthetic construct
  source 1..75: mol_type = other DNA
acaaagatatgattggtgggcttacgtatccgcgcgtccccgtaatattgcatttaattatatcgtgagagctgc

SEQ ID NO: 747924 - DNA, 75 bp, synthetic construct
  source 1..75: mol_type = other DNA
taacaatggcattcctgatttgcgttttgatcggcatgtactttaatgaagatacgcgtatgtcgctgtttgttg

SEQ ID NO: 747925 - DNA, 75 bp, synthetic construct
  source 1..75: mol_type = other DNA
gaaataggcagcaacggcagcccgttcgtactgactttcgccaaaatcggtattaccgcagcggcgggcattatc

SEQ ID NO: 747926 - DNA, 75 bp, synthetic construct
  source 1..75: mol_type = other DNA
ctgttggtgtgcctgttccgtggccttcagctacaccaccgacaggctggttgaaatgcaatggtgcagcttttt

SEQ ID NO: 747927 - DNA, 75 bp, synthetic construct
  source 1..75: mol_type = other DNA
actgtgcatgagtctttccaagctggggctacctggctcccgctgcggcattatcatcgccaatgaaaaaatcat

SEQ ID NO: 747928 - DNA, 75 bp, synthetic construct
  source 1..75: mol_type = other DNA
ttgggatatcgaaccacagaatattgcactaacaaacggcagccagagcgcgtttttctacttatttaatctgtt

SEQ ID NO: 747929 - DNA, 75 bp, synthetic construct
  source 1..75: mol_type = other DNA
cgccggactggaagaagatctgtttgtctctgcgcgtccgaatattgaactgctgccggaaggccagtttaaata

SEQ ID NO: 747930 - DNA, 75 bp, synthetic construct
  source 1..75: mol_type = other DNA
ccagcatcagaagttatgggaagaggatatattgcaagcctgacgccgggtgctgatagcccacttgattttgat

SEQ ID NO: 747931 - DNA, 75 bp, synthetic construct
  source 1..75: mol_type = other DNA
aaaccttggtttgggagaaggtgccccagctattggcgttccgttcttctggccgtccgctgcaatgccaaattc

SEQ ID NO: 747932 - DNA, 75 bp, synthetic construct
  source 1..75: mol_type = other DNA
tgatgggcgcgggattgatgtcggacgtaccctactttcagggcaatcacacacaattatggatcatgcacacaa

SEQ ID NO: 747933 - DNA, 75 bp, synthetic construct
  source 1..75: mol_type = other DNA
atcggctggagatgttactaatttttcacttacagctgcatcaaacacatctaactataaaaatggggggtttac

SEQ ID NO: 747934 - DNA, 75 bp, synthetic construct
  source 1..75: mol_type = other DNA
cgcaggaagtacacgggaaggagtaaacccaggaatactggctacatatggtgacgggggaatagttaaaacgga

SEQ ID NO: 747935 - DNA, 75 bp, synthetic construct
  source 1..75: mol_type = other DNA
gatttcattcgtatctgggatgacggacgcgggattgatgtcggacgtaccctactttcagggcaatcacacaca

SEQ ID NO: 747936 - DNA, 75 bp, synthetic construct
  source 1..75: mol_type = other DNA
ttcctcactacgagctcttagctctcgtagtgttaaacgttatggtgaaattagtggaaatgtaggtacagaaac

SEQ ID NO: 747937 - DNA, 75 bp, synthetic construct
  source 1..75: mol_type = other DNA
ttattcaatatgggaatcagtaggctcgtttaagggggcagtagtgcctttgaacccctcaacgaacaatagtta

SEQ ID NO: 747938 - DNA, 75 bp, synthetic construct
  source 1..75: mol_type = other DNA
atgccagttagccgtaatctctgcattttcataaacgttggtttgggagaaggttcggcattacccgttggtgtg

SEQ ID NO: 747939 - DNA, 75 bp, synthetic construct
  source 1..75: mol_type = other DNA
attcagacaacagcggttccgctggaggctcagatagcggcggcttcagcgatggtggcggttcttctggcggtg

SEQ ID NO: 747940 - DNA, 75 bp, synthetic construct
  source 1..75: mol_type = other DNA
tcaatcaataactatgaccaaattgtttctaaccaaccaggcttttcccgtttttcatttgcagggccttcacga

SEQ ID NO: 747941 - DNA, 75 bp, synthetic construct
  source 1..75: mol_type = other DNA
ccgtggccttccgccactccgccaacaggctggctgaaatgcaacggtgcagcattttctgctgaagaatacccg

SEQ ID NO: 747942 - DNA, 75 bp, synthetic construct
  source 1..75: mol_type = other DNA
tttctccataatcaatagtatgttgacacaaagaacagatggctctgtttacccaacagtgattggccttgatgc

SEQ ID NO: 747943 - DNA, 75 bp, synthetic construct
  source 1..75: mol_type = other DNA
ggcggtgctggcgcgacgtcaggcgggcttcgagtgtgaaatcgtcgccttcccgcagcacggtttgctgctgtc

SEQ ID NO: 747944 - DNA, 75 bp, synthetic construct
  source 1..75: mol_type = other DNA
aatattgaggggttcgcagatggcgggattggcatgtcttttgatgcaatcagaggggctttttatgatgcagga

SEQ ID NO: 747945 - DNA, 75 bp, synthetic construct
  source 1..75: mol_type = other DNA
ctgttggtgtccctgttccgtggccttcagccactccgcctacaggctggctgaaatgcaatggtgcagcttttt

SEQ ID NO: 747946 - DNA, 75 bp, synthetic construct
  source 1..75: mol_type = other DNA
tctgaacaaacgtatgggagatttacgggatagtcagggagatgctggagggtgggcgcgtatcatgaatggtac

SEQ ID NO: 747947 - DNA, 75 bp, synthetic construct
  source 1..75: mol_type = other DNA
gaagcggcaaaaatgcctgctgcaacagcattggccagcagtgcaggtaacatcactattccagtattaattggt

SEQ ID NO: 747948 - DNA, 75 bp, synthetic construct
  source 1..75: mol_type = other DNA
agaatacccggaactggcaaaggcttatccgacaaataaattgcctgatttacgtggtgagtttattcgtggctg

SEQ ID NO: 747949 - DNA, 75 bp, synthetic construct
  source 1..75: mol_type = other DNA
cgccagcaaatgtggcggttgttcatcaaacaaaatcattaacaggggccagcatctggcaggcaggtcccgggg

SEQ ID NO: 747950 - DNA, 75 bp, synthetic construct
  source 1..75: mol_type = other DNA
atattcatctcgacaaaaccttttacggcgggccgtggcgctcgctcaatcgtccggcaggcaccaccatccagg

SEQ ID NO: 747951 - DNA, 75 bp, synthetic construct
  source 1..75: mol_type = other DNA
cgcacggcgcgccagactgtggaaattcagaacggcaaaattgttgcactgcgcgagaacaatcagcatccggac

SEQ ID NO: 747952 - DNA, 75 bp, synthetic construct
  source 1..75: mol_type = other DNA
aaccatatactcaggaacgggcggaaaaactgatcgatttattgcagtcaaaaggcaccaccattgcccgcagcc

SEQ ID NO: 747953 - DNA, 75 bp, synthetic construct
  source 1..75: mol_type = other DNA
gttgcatatgccgctcaaacagttgcacgacaaaggcgtaaaagtgatgaccggcaccgacagcgttatcgacca

SEQ ID NO: 747954 - DNA, 75 bp, synthetic construct
  source 1..75: mol_type = other DNA
aaaaccttttacggcgggccgtggcgctcgctcaatcgcccggcaggcaccactatccaggacatgatcaaactc

SEQ ID NO: 747955 - DNA, 75 bp, synthetic construct
  source 1..75: mol_type = other DNA
gtattgccgctgaatgaaaaaggcgagcgtgtatggccaaaagcgcaggatgacgccagctttgtgctggtggac

SEQ ID NO: 747956 - DNA, 75 bp, synthetic construct
  source 1..75: mol_type = other DNA
gtgtctgcaaattgccagcggcgcagtgtacaccgacgacgccgggagctggtcagaactgcacgacgcgaagct

SEQ ID NO: 747957 - DNA, 75 bp, synthetic construct
  source 1..75: mol_type = other DNA
cggatcgcgacctgttctcttggccgcagtactgggccgcctgttttggaccggcaccgtttttgccgatgtcac

SEQ ID NO: 747958 - DNA, 75 bp, synthetic construct
  source 1..75: mol_type = other DNA
agacgcctgctacggcaaaaaaagcgtcgtctacgcaatctcgtccggtgaatgctggtgcgaagaaacgcccta

SEQ ID NO: 747959 - DNA, 75 bp, synthetic construct
  source 1..75: mol_type = other DNA
ggacactaaccacgaaccgacgatcaacctctatcgccgtgcgcgcgatctgaaaggcattaaaaagatcctgat

SEQ ID NO: 747960 - DNA, 75 bp, synthetic construct
  source 1..75: mol_type = other DNA
cacaggtaagctggttgatgagacgaaaaaacgcattggccccggcgatattgtctttaagaacctgccccacgc

SEQ ID NO: 747961 - DNA, 75 bp, synthetic construct
  source 1..75: mol_type = other DNA
gcgaatatgggtatcagggggagtgatgccgggacggcaatgcgtgccagcctggctcgtctggcatcaccgcca

SEQ ID NO: 747962 - DNA, 75 bp, synthetic construct
  source 1..75: mol_type = other DNA
tatcggggcgttgttcagtccggttggtcttatcgtggctgcgcttgccggagctgccgttcttatctggaaata

SEQ ID NO: 747963 - DNA, 75 bp, synthetic construct
  source 1..75: mol_type = other DNA
ggaacacaacggcgccgaaggcgatctggaagcagattatcaggctgccagcgatcacctgaatctggtgcagac

SEQ ID NO: 747964 - DNA, 75 bp, synthetic construct
  source 1..75: mol_type = other DNA
atatggaagcggcgctgcgtgaaaaccgtatgacgctggaagcgattcgcgtcactcagtcggaccgtgacctgt

SEQ ID NO: 747965 - DNA, 75 bp, synthetic construct
  source 1..75: mol_type = other DNA
ctgattcccgacctgactctgctgcatttccgtaacaccacggaagcaggggccacaagtggttcacgcgataaa

SEQ ID NO: 747966 - DNA, 75 bp, synthetic construct
  source 1..75: mol_type = other DNA
acaggtgatgcgtatgttgatcacccaagcttcgggatggcgatttgtggtcgtatgctggaagcgcagggcttt

SEQ ID NO: 747967 - DNA, 75 bp, synthetic construct
  source 1..75: mol_type = other DNA
ttgatgcaaaaacatggcgaccgctatgtatggatcaacccgcctgctattccgctttctaccgaagagatggat

SEQ ID NO: 747968 - DNA, 75 bp, synthetic construct
  source 1..75: mol_type = other DNA
atcccgcatccgtatggtgaagatttgccgtgcgcggataacaaaccggtggccccgaaaaagcaggaagcgaaa

SEQ ID NO: 747969 - DNA, 75 bp, synthetic construct
  source 1..75: mol_type = other DNA
gttttgacattcttacccggtcaatgaatgtcgtcagggtgttgcctgcgctatggggaatggtgacgggttccg

SEQ ID NO: 747970 - DNA, 75 bp, synthetic construct
  source 1..75: mol_type = other DNA
tgatttcacgcccatacatcttcctcgtactgctcaacctggtgggtgtcgctgtcggcatctggcgttacttct

SEQ ID NO: 747971 - DNA, 75 bp, synthetic construct
  source 1..75: mol_type = other DNA
tggttcctgaaagaaaaacaactggcgatgatgcagacgccgcaccacttcttctcaccggacccgtttgaacgc

SEQ ID NO: 747972 - DNA, 75 bp, synthetic construct
  source 1..75: mol_type = other DNA
atgttgattgtgctgtcgctgaccgtttcttgccgttatatctggtggcgctacacctctacgctgaactgggac

SEQ ID NO: 747973 - DNA, 75 bp, synthetic construct
  source 1..75: mol_type = other DNA
cgcgttagccataaaacacagcatcttgatgagaaaaaagagctcggtcatttgagtgccggggcgcggcggttg

SEQ ID NO: 747974 - DNA, 75 bp, synthetic construct
  source 1..75: mol_type = other DNA
tttgaacgcaacctggggcgtttccgtaaaacgccgaacgaaggcacgctgttctatggtctggtgcaggatggc

SEQ ID NO: 747975 - DNA, 75 bp, synthetic construct
  source 1..75: mol_type = other DNA
attttgtgcagtgtacgtttgcccgtgcggatacatgggcgctctggcaggacagctacccggaagataagccgc

SEQ ID NO: 747976 - DNA, 75 bp, synthetic construct
  source 1..75: mol_type = other DNA
ccccgggtttcctggagagtgttttcgcacgcgcaggaaaccgcgggaaaactgaaaacaggtggtgcgctggca

SEQ ID NO: 747977 - DNA, 75 bp, synthetic construct
  source 1..75: mol_type = other DNA
atgccgggacggcaatgcgtgccagcctggctcgtctggcatcaccgccaaaggcagcagcagaggcgctgaaag

SEQ ID NO: 747978 - DNA, 75 bp, synthetic construct
  source 1..75: mol_type = other DNA
ctggttattggggtgctttacgggaagctggccaccctgcgtcttggttttgacattcttacccggtcaatgaat

SEQ ID NO: 747979 - DNA, 75 bp, synthetic construct
  source 1..75: mol_type = other DNA
tcggcgcatatcggtcagcgtattcgctgggcgcgcgggatggtgcaaatcttccgtctcgataacccgctcacc

SEQ ID NO: 747980 - DNA, 75 bp, synthetic construct
  source 1..75: mol_type = other DNA
cggatattggctcaaatatcctgacgcagttcggcctttctgctgaccagatggaccgggtcggcgacacactca

SEQ ID NO: 747981 - DNA, 75 bp, synthetic construct
  source 1..75: mol_type = other DNA
cccgcgttcaggcgctgacgcgaatcgacaaaaacagcccgcagtttaaggcgctgcgtgagcaggcgttaaaac

SEQ ID NO: 747982 - DNA, 75 bp, synthetic construct
  source 1..75: mol_type = other DNA
ttctcggcgctgtatggcccgtcacgccacgccatcgtggtgccagatctgtcacaggtaaccgaacacctggaa

SEQ ID NO: 747983 - DNA, 75 bp, synthetic construct
  source 1..75: mol_type = other DNA
tcggcggttctactggggcaatttatcgtcagttctctatcaccatcgtttcggcaatggcgctttctgttctgg

SEQ ID NO: 747984 - DNA, 75 bp, synthetic construct
  source 1..75: mol_type = other DNA
tctgggccgtatcgttaccgagatcttcgaagaagtggcagaagctcatctgatccagccgaccttcattactga

SEQ ID NO: 747985 - DNA, 75 bp, synthetic construct
  source 1..75: mol_type = other DNA
gctgcagaaactggttgatgaaaaacacggccaggtggtttctgtcggtaaaattgcagacatctacgccaactg

SEQ ID NO: 747986 - DNA, 75 bp, synthetic construct
  source 1..75: mol_type = other DNA
caacgtcaatagtataacccgcaatgcgactctctatgatgcgttaaaagcgatgaagttcgccgatttcgccgt

SEQ ID NO: 747987 - DNA, 75 bp, synthetic construct
  source 1..75: mol_type = other DNA
acgccggacgtaccagtaagcgtattcataaaggcctggtggtgcgtaaaggctggctgggtaaactgccttcat

SEQ ID NO: 747988 - DNA, 75 bp, synthetic construct
  source 1..75: mol_type = other DNA
ccgatggtgcgcgagggaaaaatcagtggctatatgtcgattcgtacccggcgacggatgaagagatcgcggcgg

SEQ ID NO: 747989 - DNA, 75 bp, synthetic construct
  source 1..75: mol_type = other DNA
acaaactccagctcgccacgccgttgctgccgcaggaagttcagcagcaggggatcagtgttgaaaagtccagta

SEQ ID NO: 747990 - DNA, 75 bp, synthetic construct
  source 1..75: mol_type = other DNA
attgacggtccgctgcgttctgtcacgcagtggctcacgcgggtggtatcaaaggtgacggcgctggcgcaggcc

SEQ ID NO: 747991 - DNA, 75 bp, synthetic construct
  source 1..75: mol_type = other DNA
gttgctgacgccagaggcaaaatgcgcccgatggaggatgtgctgcttgatctctataaggcgacacaaaaatac

SEQ ID NO: 747992 - DNA, 75 bp, synthetic construct
  source 1..75: mol_type = other DNA
ctgaccaacggcggctacaacatcggtcgtgttatcgcccgtccgtttatcggtgacaaagccggtaacttccag

SEQ ID NO: 747993 - DNA, 75 bp, synthetic construct
  source 1..75: mol_type = other DNA
gcattactggtcaagatggttcatatttggcagagtttctactaaataaaggttacgaggttcatggaataaaac

SEQ ID NO: 747994 - DNA, 75 bp, synthetic construct
  source 1..75: mol_type = other DNA
ttattgctcagacgcggttaaaaaatccggaagaattcggcaaagtgaccctgcgcgtaaacagtgacggctcgg

SEQ ID NO: 747995 - DNA, 75 bp, synthetic construct
  source 1..75: mol_type = other DNA
atgaaagccacgtcggaagaactcgccatttttgtttcggtagtcgaaagcggaagttttagccgggcggcagaa

SEQ ID NO: 747996 - DNA, 75 bp, synthetic construct
  source 1..75: mol_type = other DNA
tggtcaggtgaacagcgtgcgtctcaacgtgaacgtgcgtgaaacgcacgccatgctgctggatgtgctctctga

SEQ ID NO: 747997 - DNA, 75 bp, synthetic construct
  source 1..75: mol_type = other DNA
gaacagcgtctgcgcgagcagcaagaagctgagcgtctgctggcagatttctgcaaacgtcagggcaagaatttt

SEQ ID NO: 747998 - DNA, 75 bp, synthetic construct
  source 1..75: mol_type = other DNA
caaccaggtactggcctcgctgaaaagttcttacgacaccaaaaaagagctgcttaacgatctgcaacgcgaatt

SEQ ID NO: 747999 - DNA, 75 bp, synthetic construct
  source 1..75: mol_type = other DNA
ttcacgtagtcggcctacgaggatttgcgccgcaactccctgaaacgcttccaggaacagacgaagcgccttctc

SEQ ID NO: 748000 - DNA, 75 bp, synthetic construct
  source 1..75: mol_type = other DNA
aaggtattccagaataccgaacacgtacatgtggttggtttgcgtggctttgcgccgcagcttcctgaaacgctt

SEQ ID NO: 748001 - DNA, 75 bp, synthetic construct
  source 1..75: mol_type = other DNA
acagcatgagcaacatcaggatctgttcaagagcaaccgtctgaccttctcggaggcgctggcaaaactgtatca

SEQ ID NO: 748002 - DNA, 75 bp, synthetic construct
  source 1..75: mol_type = other DNA
gcccgtgaagagcgcatggcactgcgccaggaacaggaacagctgcagtctcgcattcagagtttgatgcagcgt

SEQ ID NO: 748003 - DNA, 75 bp, synthetic construct
  source 1..75: mol_type = other DNA
atcgtcgtgagctggcttatctctctgctgacgatctgcgttccatgtcggataaggcgttgggtgcgctgcgtc

SEQ ID NO: 748004 - DNA, 75 bp, synthetic construct
  source 1..75: mol_type = other DNA
gccgccgaactggaagtggacgagctgaaaagccagcttgctgactaccagcaggcgctggacgtccagcaaacg

SEQ ID NO: 748005 - DNA, 75 bp, synthetic construct
  source 1..75: mol_type = other DNA
ttaagcatctgatcagcgaagccaccaactacgtggcggcggactacatgcgccacgccaacgagcgccgtgtac

SEQ ID NO: 748006 - DNA, 75 bp, synthetic construct
  source 1..75: mol_type = other DNA
gatattattcgtaccgatgatccggtggaagccatcgagcagatggaaatcgaacttagccgactgaccgaggag

SEQ ID NO: 748007 - DNA, 75 bp, synthetic construct
  source 1..75: mol_type = other DNA
ttacgcgtactctcagcagatgcagcgcgatgcccgtcagcaggcgtttgccctgacggaagtggtgcagcgtcg

SEQ ID NO: 748008 - DNA, 75 bp, synthetic construct
  source 1..75: mol_type = other DNA
acgaaaagctcatggagcttcacaagtggttttgggaacaaagtgaagccgagcgcgccgctggtattcacataa

SEQ ID NO: 748009 - DNA, 75 bp, synthetic construct
  source 1..75: mol_type = other DNA
atgagcaagattgactatcaggcactgcgtgaaaaggcagagaaagcaacgagtggtgtgtggtcgctcgaatat

SEQ ID NO: 748010 - DNA, 75 bp, synthetic construct
  source 1..75: mol_type = other DNA
tgaaacattcgtaacacgtaaaatcacgcgtgctattgcaaatatttcgcagggaatcgaaaaatgtctctatct

SEQ ID NO: 748011 - DNA, 75 bp, synthetic construct
  source 1..75: mol_type = other DNA
tgtcataactcctgccatttcggtgatgtccgctatagaaggtctggaaatcgtcgctccgcagctggatacctg

SEQ ID NO: 748012 - DNA, 75 bp, synthetic construct
  source 1..75: mol_type = other DNA
gataatgccggagaagggggaattctgacgttgatgtcgcttgccgggcgtaatacatcggcgcgaacgacctca

SEQ ID NO: 748013 - DNA, 75 bp, synthetic construct
  source 1..75: mol_type = other DNA
tttgaaccgggggatgacggtctccctcgttgcccggcaacatggtgtagcagccagccagttatttctctggcg

SEQ ID NO: 748014 - DNA, 75 bp, synthetic construct
  source 1..75: mol_type = other DNA
cacatctgattcagcctaccttcattactgaatatccggcagaagtctccccgctggcccgccgtaatgaggtta

SEQ ID NO: 748015 - DNA, 75 bp, synthetic construct
  source 1..75: mol_type = other DNA
cacatctgattcagcctacctttattactgaatatccggcagaagtttcaccgctggcccgccgtaatgaggtta

SEQ ID NO: 748016 - DNA, 75 bp, synthetic construct
  source 1..75: mol_type = other DNA
cacatctgattcagcctaccttaattactgaatatccggcagaagtgtcaccgctggcccgccgtaatgaggtta

SEQ ID NO: 748017 - DNA, 75 bp, synthetic construct
  source 1..75: mol_type = other DNA
tgcgtgaggcggcacagaacgcgaaagatttaggtgggattaagaattacaagcgaggcgagcaagctgttgcag

SEQ ID NO: 748018 - DNA, 75 bp, synthetic construct
  source 1..75: mol_type = other DNA
cacatctgattcagcctaccttgattactgaatatccggcagaagtatcaccgctggcccgccgtaatgaggtta

SEQ ID NO: 748019 - DNA, 75 bp, synthetic construct
  source 1..75: mol_type = other DNA
atcaccgcctgttcgtgtgcccggaactgcggtgtatatgtcgcgcgcaatcaatgtcattccctttgctctaat

SEQ ID NO: 748020 - DNA, 75 bp, synthetic construct
  source 1..75: mol_type = other DNA
attctgatcggaatgtctacaggtatggcgggggctactatcagcctaccgataattgcggctgttgggtttgtc

SEQ ID NO: 748021 - DNA, 75 bp, synthetic construct
  source 1..75: mol_type = other DNA
gcgttgatcggtatgccaacaggcatggcgggggctactatcagcctaccaatcattgcagctattgggtttgtt

SEQ ID NO: 748022 - DNA, 75 bp, synthetic construct
  source 1..75: mol_type = other DNA
tggccggggctactatcagcctcccggtaatcgctatcgtaggatttgtagctggtaaggttattttttctgaca

SEQ ID NO: 748023 - DNA, 75 bp, synthetic construct
  source 1..75: mol_type = other DNA
ctctcaggaatttcaggatctgccagacggtgctgagacgacgcttacttatctctgcattttcataaacgttgg

SEQ ID NO: 748024 - DNA, 75 bp, synthetic construct
  source 1..75: mol_type = other DNA
ttcctggcacgaatatcattcccggcctgcgctttgattatctcagcgactccggcgggaacttcagccccagtc

SEQ ID NO: 748025 - DNA, 75 bp, synthetic construct
  source 1..75: mol_type = other DNA
ttaaaaagacccctccggtaaacgacctttcagatattattcgtaaaatgcctggtgtcaatcttaccggcaata

SEQ ID NO: 748026 - DNA, 75 bp, synthetic construct
  source 1..75: mol_type = other DNA
tgcgactggcggcagaaaatgcaacaccaggcgaatggtgtgctgatgactaccatgtagtaattgccgatgccg

SEQ ID NO: 748027 - DNA, 75 bp, synthetic construct
  source 1..75: mol_type = other DNA
tttgaacctggaaatgacggtctcccttgttgcccggcaacatggtgtggcagccagccagttatttctctggcg

SEQ ID NO: 748028 - DNA, 75 bp, synthetic construct
  source 1..75: mol_type = other DNA
tttgggatatctgtcgccgatgcgcatcattcacacttcagaaatggagtcagggcaaatctacattccgtttgt

SEQ ID NO: 748029 - DNA, 75 bp, synthetic construct
  source 1..75: mol_type = other DNA
aataattttttctgtagcttttatagctggtaaggcgatcttcgctgataatgttatgttcaggcggagaatgta

SEQ ID NO: 748030 - DNA, 75 bp, synthetic construct
  source 1..75: mol_type = other DNA
gacgctgggtgattgaaggcgacctgtccagttacttcgacaccgtacatcatcgactgctgatgaaggttgtac

SEQ ID NO: 748031 - DNA, 75 bp, synthetic construct
  source 1..75: mol_type = other DNA
gcctgattgaatcagatgctcaggcttatgcaaacgctgaattcatagcagaggctaacccggctaccgtgctgg

SEQ ID NO: 748032 - DNA, 75 bp, synthetic construct
  source 1..75: mol_type = other DNA
cacatctgattcagcctaccttaattactgaatatccggcagaagtatcgccgctggcccgccgtaatgaggtta

SEQ ID NO: 748033 - DNA, 75 bp, synthetic construct
  source 1..75: mol_type = other DNA
ttactgcgcgtggatgcgggcagttggtacagcaaagcgtttaaaggtgagccgctaccgttgctttcgcaggtg

SEQ ID NO: 748034 - DNA, 75 bp, synthetic construct
  source 1..75: mol_type = other DNA
tgatggcgaatatcgaaatcaaacccaccactggcactggaccattaacgggcaaaatggtggcgttggcggcac

SEQ ID NO: 748035 - DNA, 75 bp, synthetic construct
  source 1..75: mol_type = other DNA
gcggaacgctgtcgcaaacacgggatgatggcgaatatcgaaatcaaacccaccactggcactggaccattaacg

SEQ ID NO: 748036 - DNA, 75 bp, synthetic construct
  source 1..75: mol_type = other DNA
tgaacgacattctgccggtttatcagcaagtgttggcagaactggcaaaacgcggcattgagtgggtacagatcg

SEQ ID NO: 748037 - DNA, 75 bp, synthetic construct
  source 1..75: mol_type = other DNA
tggagacgcgtctggatgcggaggtgaaaagctggtttgccttcgctctgcaaaaatgtgaagaactggtgctgt

SEQ ID NO: 748038 - DNA, 75 bp, synthetic construct
  source 1..75: mol_type = other DNA
ttcaaacatgctggttactgatcggtacatcgcgcaaagaaacgccgaaaccgcgcaggcggacattttcaggtc

SEQ ID NO: 748039 - DNA, 75 bp, synthetic construct
  source 1..75: mol_type = other DNA
ctgcaaatgaccatgggctggttcctgaaagaaaaacagctggcgatgatgcagacgccgcaccacttcttctca

SEQ ID NO: 748040 - DNA, 75 bp, synthetic construct
  source 1..75: mol_type = other DNA
ccggacccgtttgaacgcaacctggggcgttttcgtaaaacgccgaacgaaggcacgctgttctatggtctggtg

SEQ ID NO: 748041 - DNA, 75 bp, synthetic construct
  source 1..75: mol_type = other DNA
gcggaacgctgccgtgaatacgggatgatggcgaatattgaaatcaaacccaccaccggcaccgggccgttgacg

SEQ ID NO: 748042 - DNA, 75 bp, synthetic construct
  source 1..75: mol_type = other DNA
gcaatcgacgtcggggcaaaatacggtcataagatgatcgaatttgacgcgaagttatcgaaagatggcgagatc

SEQ ID NO: 748043 - DNA, 75 bp, synthetic construct
  source 1..75: mol_type = other DNA
tggctacacctccgcgtatatgcgtattccgcaggcggcggggctggcgaccgaaagtctctcggcgcatatcgg

SEQ ID NO: 748044 - DNA, 75 bp, synthetic construct
  source 1..75: mol_type = other DNA
cgcggcatcgagtgggtacagattgatgaacccgcgctggtactggaactaccacaggcgtggctggacgcatac

SEQ ID NO: 748045 - DNA, 75 bp, synthetic construct
  source 1..75: mol_type = other DNA
accatgatggaactctatatggcttacgcggattacaaagatctgatcgaactgaccgaatcgctgttccgcact

SEQ ID NO: 748046 - DNA, 75 bp, synthetic construct
  source 1..75: mol_type = other DNA
tgaaactgctgctgaccacctattttgaaggcgtaacgccaaatctcgacacgattactgcgctgcctgttcagg

SEQ ID NO: 748047 - DNA, 75 bp, synthetic construct
  source 1..75: mol_type = other DNA
gaacagtttgaccgcctgagcctgctgaacgacattctgccggtttatcagcaggttctggcagaactggccaaa

SEQ ID NO: 748048 - DNA, 75 bp, synthetic construct
  source 1..75: mol_type = other DNA
gggattggtatcgaccgtatggtaatgctgttcaccaacagtcataccatccgcgacgttattctgttcccggcg

SEQ ID NO: 748049 - DNA, 75 bp, synthetic construct
  source 1..75: mol_type = other DNA
ccgcactggaacatggcttaccgccgacagcaggtctgggaattggtatcgaccgtatggtaatgctgttcacca

SEQ ID NO: 748050 - DNA, 75 bp, synthetic construct
  source 1..75: mol_type = other DNA
tctaacgatgaatcccgcaacacctttaaagttcgctcgcagatcctcgctggcatccgtcagttcatggtgaac

SEQ ID NO: 748051 - DNA, 75 bp, synthetic construct
  source 1..75: mol_type = other DNA
attacgtgcccgtcactgggatcaacaaaagcaggcgggtatcgacctgctgccggtgggcgattttgcctggta

SEQ ID NO: 748052 - DNA, 75 bp, synthetic construct
  source 1..75: mol_type = other DNA
gccccgattcaggcgcgtcgtcactctactcgtgtacataatccggcggtagaaaagcgtctggcggcgatcacc

SEQ ID NO: 748053 - DNA, 75 bp, synthetic construct
  source 1..75: mol_type = other DNA
ggactggatgtgctggtacatggcgaggccgagcgtaatgacatggtggaatactttggcgagcacctcgacgga

SEQ ID NO: 748054 - DNA, 75 bp, synthetic construct
  source 1..75: mol_type = other DNA
acgaaccggcgctggtactggaactgccgcaggcgtggctggacgcgtataaacctgcttacgatgcactgcaag

SEQ ID NO: 748055 - DNA, 75 bp, synthetic construct
  source 1..75: mol_type = other DNA
attgcgtgcccgtcactgggatcaacaaaagcaggccggtatcgacttgctgccggtgggcgactttgcctggta

SEQ ID NO: 748056 - DNA, 75 bp, synthetic construct
  source 1..75: mol_type = other DNA
cagcgtgcgaatgtctatgaagtgcgtgctgaagcccagcgtgcgcgttttaaactgccagcgtggccgaccacc

SEQ ID NO: 748057 - DNA, 75 bp, synthetic construct
  source 1..75: mol_type = other DNA
gggtttgctcagggaatgaccgaaggtcaggagcagggctttagcgaaggtcatcagcaaggttttgccgagggg

SEQ ID NO: 748058 - DNA, 75 bp, synthetic construct
  source 1..75: mol_type = other DNA
gcaaccgacgcagttgctggcgctggtggaagaggcgctggcggccttcccggcgatgccggaaaccctgcaagt

SEQ ID NO: 748059 - DNA, 75 bp, synthetic construct
  source 1..75: mol_type = other DNA
gcgccagcgtgcggtgaccggagaaccgctcactgccagcattagcgccgccgattaccagcgccagttgatgga

SEQ ID NO: 748060 - DNA, 75 bp, synthetic construct
  source 1..75: mol_type = other DNA
tgccgaccacagcgaactgcaatggcctgctcagcccgccgtacacattgccgaaaccagcgatttaggccagca

SEQ ID NO: 748061 - DNA, 75 bp, synthetic construct
  source 1..75: mol_type = other DNA
tgggcgttttctgtcgaccgctgggatgagaactggccggaagaaacgaagcgcgcggtcatccgtgatgcgtac

SEQ ID NO: 748062 - DNA, 75 bp, synthetic construct
  source 1..75: mol_type = other DNA
aactggatatcggctgcgagcatcgcctggaacaatgcatgaccgcactgaaagaaacactcacgccggagtcac

SEQ ID NO: 748063 - DNA, 75 bp, synthetic construct
  source 1..75: mol_type = other DNA
tagccatcttccgtattgagcaggataatgtcgctcagtccaccggtacacctatccccggcagcaacggcgaaa

SEQ ID NO: 748064 - DNA, 75 bp, synthetic construct
  source 1..75: mol_type = other DNA
atcgccagtctgaacgatcaaatctcccgtttaacaggcgtgggggcaggggcgtctcctgacgatctgctggat

SEQ ID NO: 748065 - DNA, 75 bp, synthetic construct
  source 1..75: mol_type = other DNA
acaggaacgcctgccgttaacgacagcttcacgctgaaaccagtaagtgacgccatcgtcaacatggatgtatta

SEQ ID NO: 748066 - DNA, 75 bp, synthetic construct
  source 1..75: mol_type = other DNA
tctcggttacctgattgaagtaaaggagtggtggcaactcaacgaggagccgggaacatttcgcattgttgtcgg

SEQ ID NO: 748067 - DNA, 75 bp, synthetic construct
  source 1..75: mol_type = other DNA
tcatggatatgtttatcgatggcgcacgccgtggctttactatcgccaccaccaacctgctgccaaacgtggtga

SEQ ID NO: 748068 - DNA, 75 bp, synthetic construct
  source 1..75: mol_type = other DNA
ctcaacggcgcaattaccgacaactggcagctgacgtttggcgcaacgcgctatattgcagaggataacgaagga

SEQ ID NO: 748069 - DNA, 75 bp, synthetic construct
  source 1..75: mol_type = other DNA
cccggacgccttaggcctgccggaaactgacattgccgaccacagcgaactgcaatggcctgctcagcccgccgt

SEQ ID NO: 748070 - DNA, 75 bp, synthetic construct
  source 1..75: mol_type = other DNA
ctttcttgcgaaactccattagtaataacaaatgagcaacatcgctttgtggttgcagaacaattacgtcaaatt

SEQ ID NO: 748071 - DNA, 75 bp, synthetic construct
  source 1..75: mol_type = other DNA
aggcaccgctgattgactccttacttaatgaaattggcgtttcaggcggctcgctggcggcattgacttccccct

SEQ ID NO: 748072 - DNA, 75 bp, synthetic construct
  source 1..75: mol_type = other DNA
gttgatattggttggagtgacgttggatcttggcaatcgttatgggacattagtctaaaatcgaaaacaggagat

SEQ ID NO: 748073 - DNA, 75 bp, synthetic construct
  source 1..75: mol_type = other DNA
ctgaccgaacatgcggcaaaggccggtgagcgtacttttgccgggatggaagtcaggatgatccagatccccagc

SEQ ID NO: 748074 - DNA, 75 bp, synthetic construct
  source 1..75: mol_type = other DNA
gagggtgaagcactgcgggcaacccgcgtctgcctgaacgcatggctgaaagatcgcgggcacaccgccaatcag

SEQ ID NO: 748075 - DNA, 75 bp, synthetic construct
  source 1..75: mol_type = other DNA
acgcgctggagggatgcgccagccgccgcaacgatgccgccatgatgcttgatgagatccgggaagttgacggac

SEQ ID NO: 748076 - DNA, 75 bp, synthetic construct
  source 1..75: mol_type = other DNA
gtctggatctgcctgaagatctctttggcgcaacgttgcgttatcaaaccgatcacgatgaatttggccgtgcca

SEQ ID NO: 748077 - DNA, 75 bp, synthetic construct
  source 1..75: mol_type = other DNA
gtgccggtgctcattcagggcgaaaccggcgcgggcaaagagtgcgtggcgaaatatattcacaccgtcgccttt

SEQ ID NO: 748078 - DNA, 75 bp, synthetic construct
  source 1..75: mol_type = other DNA
gagaacgccattcagcggggaatgattttaaatcgcgacggcgtgatttacccggacgccttaggcctgccggaa

SEQ ID NO: 748079 - DNA, 75 bp, synthetic construct
  source 1..75: mol_type = other DNA
aacagcgattcgtatcctgaccagtgatgaaggagaaaatagacgagtcgcaggggtgatcgcaatcgataaagc

SEQ ID NO: 748080 - DNA, 75 bp, synthetic construct
  source 1..75: mol_type = other DNA
aagtttacgctaaataatcaacatcttaatggcggaattgaagttgatatttggggacgtacatcgctaactggt

SEQ ID NO: 748081 - DNA, 75 bp, synthetic construct
  source 1..75: mol_type = other DNA
ttctggggaacttccgcctgttctggttctgataaacaaacgcttcacaccgcgaatacccgtgcaaatggtgac

SEQ ID NO: 748082 - DNA, 75 bp, synthetic construct
  source 1..75: mol_type = other DNA
caacctgcaacgctttcagcagtattacctggcgaatgcgcaggttttgcagacggcgaacgccatttttgatgc

SEQ ID NO: 748083 - DNA, 75 bp, synthetic construct
  source 1..75: mol_type = other DNA
gattcctgttctctttgcacacccagccagcgcgggccacggcctgaacatgcaggacggcggaaatatactggt

SEQ ID NO: 748084 - DNA, 75 bp, synthetic construct
  source 1..75: mol_type = other DNA
cagtgtgagttacaaggacgagtggggcgataaatataaatcagaggttgatgttaaaagtcatgacatcctgct

SEQ ID NO: 748085 - DNA, 75 bp, synthetic construct
  source 1..75: mol_type = other DNA
acaatattccagtacgcacggaagtggaattttatggccgtggagctgcagactcccgttatacactggatacat

SEQ ID NO: 748086 - DNA, 75 bp, synthetic construct
  source 1..75: mol_type = other DNA
atgaaaaaggttattgctttttcagcgcttgctatggcgggcgtattttcagcccaagctctggctgataggggc

SEQ ID NO: 748087 - DNA, 75 bp, synthetic construct
  source 1..75: mol_type = other DNA
accaagatctcatcatcaatcatcaaatcgagaccctgcgcggcaacatctgggcagggatggggatgggtaaaa

SEQ ID NO: 748088 - DNA, 75 bp, synthetic construct
  source 1..75: mol_type = other DNA
tatgatttttacccgcagttcagtattccggttcgtacggaactggagttttacgctcgtggaaaagctgattcg

SEQ ID NO: 748089 - DNA, 75 bp, synthetic construct
  source 1..75: mol_type = other DNA
caacgtccacgataaaatgtttcttgacggctcattcctgaaaattggctggccgtcgatcaccgtattttcctc

SEQ ID NO: 748090 - DNA, 75 bp, synthetic construct
  source 1..75: mol_type = other DNA
tatgctcgggttcatcataaaacttcgtacatatataccgataacagtccggcaggcagtgaagtatattcagct

SEQ ID NO: 748091 - DNA, 75 bp, synthetic construct
  source 1..75: mol_type = other DNA
aacgcatcgggccaacccggcagattcaggccggacacaaccgcccggtgttcattcaccacattatcgccgccg

SEQ ID NO: 748092 - DNA, 75 bp, synthetic construct
  source 1..75: mol_type = other DNA
cagcggcggaacagcgtaaaagtgaactgcttgagcagcgggcagagcccgttcctcaccgcagtgtaccggatg

SEQ ID NO: 748093 - DNA, 75 bp, synthetic construct
  source 1..75: mol_type = other DNA
gccgcgcatccgatatctggcgcgaagtggcctcgctgtttcgcccacctggccggttacctgtggcggaagcca

SEQ ID NO: 748094 - DNA, 75 bp, synthetic construct
  source 1..75: mol_type = other DNA
tgtgtacggcatcatctgtgatccggcggatatgctggtggtgcagatgaccgagaccaaggcgcgggaacactc

SEQ ID NO: 748095 - DNA, 75 bp, synthetic construct
  source 1..75: mol_type = other DNA
gttaagccgccgtgagagtagcgatgaagaacgttgcgccaggtttattctcgcccatgcgattttgttaagttt

SEQ ID NO: 748096 - DNA, 75 bp, synthetic construct
  source 1..75: mol_type = other DNA
gtttaatgatgcctacgccacactggttagcgatatcggtaataaaactgccacgttgaaaaccagtagtacctc

SEQ ID NO: 748097 - DNA, 75 bp, synthetic construct
  source 1..75: mol_type = other DNA
ttaatcactgatgaagcgaaaattgcgatggcaagtgataaagatgcgggggaaagtgacaatcgtaacggtcag

SEQ ID NO: 748098 - DNA, 75 bp, synthetic construct
  source 1..75: mol_type = other DNA
tgatgcctgatgctaacggtaaagtctcgttcgatggtatggagttaacgttcactggaacgcccaaagccaatg

SEQ ID NO: 748099 - DNA, 75 bp, synthetic construct
  source 1..75: mol_type = other DNA
gtaaaacggtgggcggggcgaaatcctttaacgacgcctatgcctcgttggtcagcgacatcggtaataaaaccg

SEQ ID NO: 748100 - DNA, 75 bp, synthetic construct
  source 1..75: mol_type = other DNA
ctacgttgaaaaccagcagtacgacgcaaggtaatgtggtgacgcaactctctaatcagcagcaatctatttccg

SEQ ID NO: 748101 - DNA, 75 bp, synthetic construct
  source 1..75: mol_type = other DNA
tgtatttgatggtctggagttgacgtttacaggcacgcctgccgctaacgacagcttcacgctgaaaccggtaag

SEQ ID NO: 748102 - DNA, 75 bp, synthetic construct
  source 1..75: mol_type = other DNA
gttcagatgtggagtgtggccatacgtttgtgatgaatctgacgttctcccacactctcagccccagcgcgaaaa

SEQ ID NO: 748103 - DNA, 75 bp, synthetic construct
  source 1..75: mol_type = other DNA
tgtctgactggattgtttaatgtcagtaaaaatattcagcatgtaaatattactaatctgcatggtccggatctg

SEQ ID NO: 748104 - DNA, 75 bp, synthetic construct
  source 1..75: mol_type = other DNA
gaagaacgttgcgccaggtttattctcgcccatgcgattttgttaagtttccccggtgtgccagcgatatatatt

SEQ ID NO: 748105 - DNA, 75 bp, synthetic construct
  source 1..75: mol_type = other DNA
aacacaaagccggatttgatgctaacggcgatgccggtgaagatttctttgctatcggtaagcccgcggttctgc

SEQ ID NO: 748106 - DNA, 75 bp, synthetic construct
  source 1..75: mol_type = other DNA
tgagtcaattgatgctgagggaggcgcaaactatggcattttcggatacctttctgctaatcagtggtctgttat

SEQ ID NO: 748107 - DNA, 75 bp, synthetic construct
  source 1..75: mol_type = other DNA
attaaatgtcctgaatgcggctcaccggccatcattcgcaaatctgactggaaagataaaaaactggcgtcttta

SEQ ID NO: 748108 - DNA, 75 bp, synthetic construct
  source 1..75: mol_type = other DNA
gacaggaagagctattaagcaaaacctattactctgtcggcggcgggtttattgtcgaagaagaacacttcggcc

SEQ ID NO: 748109 - DNA, 75 bp, synthetic construct
  source 1..75: mol_type = other DNA
gggtcgttgtcactgacgggcaaaggccatgccacggatgtcgccatcatcatgggactggcaggaaacagtccg

SEQ ID NO: 748110 - DNA, 75 bp, synthetic construct
  source 1..75: mol_type = other DNA
caagtttttggtttttattctttcagaaacttttacctttggttaaatgtgctctatccagtcgagatcgcaaac

SEQ ID NO: 748111 - DNA, 75 bp, synthetic construct
  source 1..75: mol_type = other DNA
ggggccaaaccgctggcagaatctgcctgccgctcaggcgatggccaatgccgatgatttgattaaaagctacgt

SEQ ID NO: 748112 - DNA, 75 bp, synthetic construct
  source 1..75: mol_type = other DNA
tacaccggatgccgcccgcaccacgctggaagcccatcgtcatgcttttgaaaagcaaggtctgaatgccatctg

SEQ ID NO: 748113 - DNA, 75 bp, synthetic construct
  source 1..75: mol_type = other DNA
tttgatgaagtggcagaagcacatctgattcagccaacctttattacggaatatccggcagaagtgtccccgctg

SEQ ID NO: 748114 - DNA, 75 bp, synthetic construct
  source 1..75: mol_type = other DNA
aagcatctacttcagaactttttggtttagtgcaagagattcctcagcgtgaaacaactccattctacccgcgtt

SEQ ID NO: 748115 - DNA, 75 bp, synthetic construct
  source 1..75: mol_type = other DNA
ccttccggatgaagcggaaagggcgcgcaagaaaattgaagacgcacagcgtgcggccattcttcaggacaaggt

SEQ ID NO: 748116 - DNA, 75 bp, synthetic construct
  source 1..75: mol_type = other DNA
atgtctgacatttcacgagttaaaatactcagtgctttgatggatgggcgagcttggacggccactgagctaagt

SEQ ID NO: 748117 - DNA, 75 bp, synthetic construct
  source 1..75: mol_type = other DNA
aggccgatcgcgtcgcaaaagtaatggccgataatcttgatggggacctgaaaaatctcgacagcgcatgggaag

SEQ ID NO: 748118 - DNA, 75 bp, synthetic construct
  source 1..75: mol_type = other DNA
ggtgtaaatgttggagacgttatagttcgggttgatcctcgttatttccgtcctgctgaagttgaaacactctta

SEQ ID NO: 748119 - DNA, 75 bp, synthetic construct
  source 1..75: mol_type = other DNA
ctttcagcgccgttgacaggctgacccggcctgccgaaaatgcccgccgcctgatggggcagtttggtgactcca

SEQ ID NO: 748120 - DNA, 75 bp, synthetic construct
  source 1..75: mol_type = other DNA
acaccacgggaactcattatcaaccatattcaggacatcctggcgcagtaccacacagcctgtgaaggccaataa

SEQ ID NO: 748121 - DNA, 75 bp, synthetic construct
  source 1..75: mol_type = other DNA
cgcaggccattcaggctgcgcttcccggcgtactgagcatggcaacggctggcggtatggatctcggcgagacgg

SEQ ID NO: 748122 - DNA, 75 bp, synthetic construct
  source 1..75: mol_type = other DNA
ccatcccgcactgacgcgccagctactgattgcaggcggtgcactgctggcaatgactgtaacggttggctcgtt

SEQ ID NO: 748123 - DNA, 75 bp, synthetic construct
  source 1..75: mol_type = other DNA
gccaataatggtcttcgcggaagcgatgctggtacggccatgcgcgcaagtctgtcccgccttgcatcaccgcca

SEQ ID NO: 748124 - DNA, 75 bp, synthetic construct
  source 1..75: mol_type = other DNA
gaatccccgcgaactggcgaaactggtcggtgaaatggtcagggcagaaatggaacggcgcgcccgtgccgggcg

SEQ ID NO: 748125 - DNA, 75 bp, synthetic construct
  source 1..75: mol_type = other DNA
tcatccggtactgacgcgccagctgctgatagcaggcggtgcgctgctggcaatgactgcaacggttggctcgtt

SEQ ID NO: 748126 - DNA, 75 bp, synthetic construct
  source 1..75: mol_type = other DNA
cgtgctgagcatggcaacggctggcggtatggatctcggcgagacggcagatattggctcaaatatcctgacgca

SEQ ID NO: 748127 - DNA, 75 bp, synthetic construct
  source 1..75: mol_type = other DNA
cgcgtctgcctcgataaagttatcgaaaccatgtacgaaacaggtaaagatatgaacgccaagtaccgcgaaacc

SEQ ID NO: 748128 - DNA, 75 bp, synthetic construct
  source 1..75: mol_type = other DNA
cggaaatctggattcactgcgtgattggggacatgctaaagattatgtgcgtatgcaatggatgatgcttcagca

SEQ ID NO: 748129 - DNA, 75 bp, synthetic construct
  source 1..75: mol_type = other DNA
gacagcacaaagcgggcaaaacaaatggaatttatgccgtttgttccgcacatccgctggtgctggaagctgcaa

SEQ ID NO: 748130 - DNA, 75 bp, synthetic construct
  source 1..75: mol_type = other DNA
acgcagtggctcacgcgggtagtctcaaaagtgacggcactggcgcaggcccatccggcactgacgcgccagtta

SEQ ID NO: 748131 - DNA, 75 bp, synthetic construct
  source 1..75: mol_type = other DNA
gcgaatatggggatcagggggagtgatgctggcacagcgttgcgtaaaagccttgccaatctgtcatcgccgcca

SEQ ID NO: 748132 - DNA, 75 bp, synthetic construct
  source 1..75: mol_type = other DNA
tggcggagagctgaaacgccacggcatttccctgacaggcagcgataacaccatccagcaggccatcagacgcac

SEQ ID NO: 748133 - DNA, 75 bp, synthetic construct
  source 1..75: mol_type = other DNA
ctgacccgtcaaaatttgatgcgtcgaaatctggcaaaaaagcgggttttcacccgtcagaatctggcggggatc

SEQ ID NO: 748134 - DNA, 75 bp, synthetic construct
  source 1..75: mol_type = other DNA
tgcaacgggtgttcactccggacgaccgtgagcaggtgctggccgtctatggtccggtacatgccggttgctgcg

SEQ ID NO: 748135 - DNA, 75 bp, synthetic construct
  source 1..75: mol_type = other DNA
tggaccaggggcaacgtctcgggcgcacttacggcgcgtttacctcacgctggttcaactcgatacagtttccgg

SEQ ID NO: 748136 - DNA, 75 bp, synthetic construct
  source 1..75: mol_type = other DNA
ccgccgaaggcccgtcagcagtatcgtgaaatggaaaaggaaatgttcctcgagctgaacggcgaaggcatcgaa

SEQ ID NO: 748137 - DNA, 75 bp, synthetic construct
  source 1..75: mol_type = other DNA
ttttatccaaggtcaccttatgcagtagctaagatgtatgcatattggattacagtcaattatagagaatcttat

SEQ ID NO: 748138 - DNA, 75 bp, synthetic construct
  source 1..75: mol_type = other DNA
atggcaaaagatctgaaaacactggcactggccaggctgtcggggttccgtcataaaacggtgaaggtgccggaa

SEQ ID NO: 748139 - DNA, 75 bp, synthetic construct
  source 1..75: mol_type = other DNA
atgaaaaaggatctgaaaacgctggcgctggtcagactgtcagggtttcgtcataaaacggtgaaggtgccggaa

SEQ ID NO: 748140 - DNA, 75 bp, synthetic construct
  source 1..75: mol_type = other DNA
aatctcgacgccaacaactatcgtacgggcattgcagaacatatcaagcaggccattgttgagcaggaacgtctg

SEQ ID NO: 748141 - DNA, 75 bp, synthetic construct
  source 1..75: mol_type = other DNA
tcacctggtcggcaaactgtttatggattatctgtcaccgttgaaacaacaacgtattcgtcagaaagttgaaaa

SEQ ID NO: 748142 - DNA, 75 bp, synthetic construct
  source 1..75: mol_type = other DNA
aatcagttcggcggctatacaggtatgaaaccagctgattttcgaacttacgttgaaggaattgctagaaaaatt

SEQ ID NO: 748143 - DNA, 75 bp, synthetic construct
  source 1..75: mol_type = other DNA
gatgttctgtgtggtaccggactgcaacctgtattttcagaggatgatcgtgaacaggtgattgccgtgtatggc

SEQ ID NO: 748144 - DNA, 75 bp, synthetic construct
  source 1..75: mol_type = other DNA
tccctcggtggtttgttcaaatccagtcagaatacgcgccacgagtttctgcgtgctgtgcgtcatcacaactga

SEQ ID NO: 748145 - DNA, 75 bp, synthetic construct
  source 1..75: mol_type = other DNA
atgatcaatttttctcctcgcctctatcaagacctgattattaatcaccaaatcgaaaccctgcgcggcaacatc

SEQ ID NO: 748146 - DNA, 75 bp, synthetic construct
  source 1..75: mol_type = other DNA
ctacatcatgagaaacaaagtttttttcttcattacggtgatcttaccgattcgttgaatatagttagattggta

SEQ ID NO: 748147 - DNA, 75 bp, synthetic construct
  source 1..75: mol_type = other DNA
ctggcaaaaaagcgggttttcacccgtcagaatctggcggggatccgtcagtaaaatcaaaacatgatccgtcag

SEQ ID NO: 748148 - DNA, 75 bp, synthetic construct
  source 1..75: mol_type = other DNA
tacgaaacgctgattttcgaagcgcactctaccgattatcaaacgccgcaatcgctgcgccagctggtgattgac

SEQ ID NO: 748149 - DNA, 75 bp, synthetic construct
  source 1..75: mol_type = other DNA
cctgcgtgaagctctgttctctctggcggcgattgaagaagaactggtgccagcgaaagcctgttctggtctgcg

SEQ ID NO: 748150 - DNA, 75 bp, synthetic construct
  source 1..75: mol_type = other DNA
ttcacccgtcagaatctggcggggatccgtcagtaaaatcaaaacatgatccatcagataaaaaaccttctcgtc

SEQ ID NO: 748151 - DNA, 75 bp, synthetic construct
  source 1..75: mol_type = other DNA
taaacaaatctgcgagatgtacaaccgtgtcagccgcgacccgttctggtgccgtaacgtgctcagcccgtcgaa

SEQ ID NO: 748152 - DNA, 75 bp, synthetic construct
  source 1..75: mol_type = other DNA
acagccgcgtcagccgcgatccgttctggtgccgtaacgtgctcagcccgtcgaagctgcgggaaaaatgggatg

SEQ ID NO: 748153 - DNA, 75 bp, synthetic construct
  source 1..75: mol_type = other DNA
caaatttgatgcgtcgaaatctggcaaaaaagcgggttttcacccgtcagaatctggcggggatccgtcagtaaa

SEQ ID NO: 748154 - DNA, 75 bp, synthetic construct
  source 1..75: mol_type = other DNA
acaggaacagccggaagatttcgtcatcgcgaccggcgttcagtactccgtgcgtcagttcgtggaaatggcggc

SEQ ID NO: 748155 - DNA, 75 bp, synthetic construct
  source 1..75: mol_type = other DNA
gcacgtacacagaaaaacgcgaagacccgtacttcaaagccagttacgacaacgtggactacagccagatcccgg

SEQ ID NO: 748156 - DNA, 75 bp, synthetic construct
  source 1..75: mol_type = other DNA
tcgccaaactgtacgcctactggatcaccgttaactaccgcgaatcctacggcatgtacgcctgcaacggtattc

SEQ ID NO: 748157 - DNA, 75 bp, synthetic construct
  source 1..75: mol_type = other DNA
tgttgtgcgtgtttagattggagtgaacgccgtttccatttaggtgggtacgttggagccgcattattttcgctt

SEQ ID NO: 748158 - DNA, 75 bp, synthetic construct
  source 1..75: mol_type = other DNA
cccgtacttcaaagccagttacgacaacgtggactacagccagatcccggcaggattcaggggtgagcatgagtc

SEQ ID NO: 748159 - DNA, 75 bp, synthetic construct
  source 1..75: mol_type = other DNA
gtttgctgcaccattcttaatcagtattgcatggttaagaaaaataccaattttatttccacccggacaacgctt

SEQ ID NO: 748160 - DNA, 75 bp, synthetic construct
  source 1..75: mol_type = other DNA
tgtaaccaacggacatagagatagttggggagcccgcagaattcggaaaaaatcgtacgctaaggttttccgggc

SEQ ID NO: 748161 - DNA, 75 bp, synthetic construct
  source 1..75: mol_type = other DNA
gtatatctccggtaataacggtggttatctgcgaaatgagctgtcctggtctctgttctccctgccatatgtggg

SEQ ID NO: 748162 - DNA, 75 bp, synthetic construct
  source 1..75: mol_type = other DNA
agtgcacgcagacatcccatcagcccagcaaaaaatggccagtgcggtagagaaaaccctgcaaccgcgcagcga

SEQ ID NO: 748163 - DNA, 75 bp, synthetic construct
  source 1..75: mol_type = other DNA
gcgttgacacaaccggctcgacgcccgcaccgattgatgccgacggtaacgtgctggcgctgcgcccggagtttg

SEQ ID NO: 748164 - DNA, 75 bp, synthetic construct
  source 1..75: mol_type = other DNA
gctggcggtggcgttccacgggagacctgcagactcaccggctgggactgtcgcatgtcctgttccgtaacgggg

SEQ ID NO: 748165 - DNA, 75 bp, synthetic construct
  source 1..75: mol_type = other DNA
cctgaatatttcatattttgttctttccttgatcattttcttggacttcatgctcctgtgaatagctttactcgc

SEQ ID NO: 748166 - DNA, 75 bp, synthetic construct
  source 1..75: mol_type = other DNA
ccatcatcaattaataatggtgatcctgatggtgattttgattgtgatatagatattgctcagctgcgaataact

SEQ ID NO: 748167 - DNA, 75 bp, synthetic construct
  source 1..75: mol_type = other DNA
cggattttatgagagtgaagtaacacttccacaaaaagggaacgtttcttatatacataacctcatactggacta

SEQ ID NO: 748168 - DNA, 75 bp, synthetic construct
  source 1..75: mol_type = other DNA
cgtaatcttgccccccaatttttgtgtcactacccatcgtcatgtatcgtttcatttgaaccagataggaaatcc

SEQ ID NO: 748169 - DNA, 75 bp, synthetic construct
  source 1..75: mol_type = other DNA
tgtcaggggatgtcctttcaattgatgcaatatgtacaaatggtgatattccgtcatcaatgaataatggtgatc

SEQ ID NO: 748170 - DNA, 75 bp, synthetic construct
  source 1..75: mol_type = other DNA
tattcaacaatcatgtaatatattctggcatacttcatgttatcgcatgtcttctgaaagaagaaattttgagga

SEQ ID NO: 748171 - DNA, 75 bp, synthetic construct
  source 1..75: mol_type = other DNA
cgcaccgattgacgccgacggtaacgtgctggcgctgcgcccggagtttgccgaaaacccgaacgcgatgttcgt

SEQ ID NO: 748172 - DNA, 75 bp, synthetic construct
  source 1..75: mol_type = other DNA
cttggtatttcacagtatggagcggttaattataaaacagcagcgtatctcctactgccttttaggttctttgag

SEQ ID NO: 748173 - DNA, 75 bp, synthetic construct
  source 1..75: mol_type = other DNA
atgagcgaacaaatcacgtttgccaccagcgattttgccagtaacccggaaccacgttgcccctgcattctgctg

SEQ ID NO: 748174 - DNA, 75 bp, synthetic construct
  source 1..75: mol_type = other DNA
cgtttgtcacgaaccgtaacggcagtttgtggaaattaaatattgacgatgttgattttgcgcggtttcctcagg

SEQ ID NO: 748175 - DNA, 75 bp, synthetic construct
  source 1..75: mol_type = other DNA
cagtgaaggtgcatcgcttgatgatgtcgcaagcgatattttgcactgcattgaggaagtcagcagcggtaaact

SEQ ID NO: 748176 - DNA, 75 bp, synthetic construct
  source 1..75: mol_type = other DNA
tattgatactgcttttgcggtggcaaatattgctgaatatcggcgtagtgtggcaattgatctgatcaacacgct

SEQ ID NO: 748177 - DNA, 75 bp, synthetic construct
  source 1..75: mol_type = other DNA
atgaatataatgctaaaaacgccatcttcaccgtttcggaagcgatggagcacttcgcctatttgccgaccggat

SEQ ID NO: 748178 - DNA, 75 bp, synthetic construct
  source 1..75: mol_type = other DNA
cacagcctaacgcgctggtaaaagttatcggcacttccacctgcgacattctgattgccgacaaacacagcgtcg

SEQ ID NO: 748179 - DNA, 75 bp, synthetic construct
  source 1..75: mol_type = other DNA
attgtggaaagaccacaccgcggttgaagaagcggaagagattacccgcttatgtcacacgccgggcaacgttga

SEQ ID NO: 748180 - DNA, 75 bp, synthetic construct
  source 1..75: mol_type = other DNA
gtctcggcctgcctgaaagcgtggtgatttccggcggcgcgtttgactgccatatgggcgcagttggcgcaggcg

SEQ ID NO: 748181 - DNA, 75 bp, synthetic construct
  source 1..75: mol_type = other DNA
agaaaaccaggatcagcctttcctgcatttagaacgtgaagtacgtaaagctgtaaaagaacgggcattggaaaa

SEQ ID NO: 748182 - DNA, 75 bp, synthetic construct
  source 1..75: mol_type = other DNA
ctaagcgtcggtgccaccaccggcgtaaaaaacagaaagctggtcgaacaattgctggaagaatacgaaggataa

SEQ ID NO: 748183 - DNA, 75 bp, synthetic construct
  source 1..75: mol_type = other DNA
gcgataactttgcttcaggttttattgcagcactgttagaaggtaaaaatctgcgtgaatgcgcacgctttgcca

SEQ ID NO: 748184 - DNA, 75 bp, synthetic construct
  source 1..75: mol_type = other DNA
ggagcagattaatcgtctgcgtacggagtcggtacagattgaaatatcgcccggtgaccgtgagggatggtcggt

SEQ ID NO: 748185 - DNA, 75 bp, synthetic construct
  source 1..75: mol_type = other DNA
cggaagtgctctctaacggcctgtgttcgctcaacccgcaggtagaccgcctgtgtatggtgtgcgagatgacgg

SEQ ID NO: 748186 - DNA, 75 bp, synthetic construct
  source 1..75: mol_type = other DNA
ttgtggctttgtggttacgtcgccagttagatgaaacttcgcaacatgaaacgcgagcgttaaaagaagcgggct

SEQ ID NO: 748187 - DNA, 75 bp, synthetic construct
  source 1..75: mol_type = other DNA
ggtgatgtgcgccctgctgatagtgagtttttatacttcaatcagtggaatactgaaggctgaaatgttcccggc

SEQ ID NO: 748188 - DNA, 75 bp, synthetic construct
  source 1..75: mol_type = other DNA
tgaaagatgagttaaaacaagcgggtatcacctggagcggaacactgctgcgacaaacgcaggttaacgaaccgg

SEQ ID NO: 748189 - DNA, 75 bp, synthetic construct
  source 1..75: mol_type = other DNA
atgtactcatagatacctccatttttgccagccatgataaagctcccggctggccatggaatgacatgacacaat

SEQ ID NO: 748190 - DNA, 75 bp, synthetic construct
  source 1..75: mol_type = other DNA
aatgaatgataatagtattaaaccaagctccactgcttttgcttcaatgcaaaggatagtaaaagcccatgacaa

SEQ ID NO: 748191 - DNA, 75 bp, synthetic construct
  source 1..75: mol_type = other DNA
ttcttctgattagcgcctgttccagcgggcataaaccgccaccggagccggactggagcaacaccgttccagtaa

SEQ ID NO: 748192 - DNA, 75 bp, synthetic construct
  source 1..75: mol_type = other DNA
gtggaaatgggagggccgcgattatcatattgcttgaagtcagtgcgcgaaatggcaataaaaaaaatcatgcct

SEQ ID NO: 748193 - DNA, 75 bp, synthetic construct
  source 1..75: mol_type = other DNA
aaaaataacggcctgctaccggataaaccaatatttgagatcgaaaaacttaacggcgaaacggggttggaatta

SEQ ID NO: 748194 - DNA, 75 bp, synthetic construct
  source 1..75: mol_type = other DNA
acaggttcgcgcattaggtgttggtctgtcatatgcggtcgcgaatgccatatttggtggctcagcggagtatgt

SEQ ID NO: 748195 - DNA, 75 bp, synthetic construct
  source 1..75: mol_type = other DNA
accgagcggcgctatctggggctgctctccggcgaagacggcgaagacggcgacaaaatcaaacgattgccgttg

SEQ ID NO: 748196 - DNA, 75 bp, synthetic construct
  source 1..75: mol_type = other DNA
tgtcgacgattggctataacggcacaaaaattcttgagattgattccagagcgccctacagcgaagtgctggaac

SEQ ID NO: 748197 - DNA, 75 bp, synthetic construct
  source 1..75: mol_type = other DNA
gtctcgctttacagcgcacaaaaatctggtgatatggcttttattcgtgtggcgtcatattaccccgttacgatg

SEQ ID NO: 748198 - DNA, 75 bp, synthetic construct
  source 1..75: mol_type = other DNA
cgtactgcacataacggtcatggaaggcaggctgcagcaaatccgggcggaaggcgctgaccttcctgcccgcac

SEQ ID NO: 748199 - DNA, 75 bp, synthetic construct
  source 1..75: mol_type = other DNA
gacggctatatacgccggggatatatcaccagccgggcctttctgacagagcaggacctttcagggggcgtactg

SEQ ID NO: 748200 - DNA, 75 bp, synthetic construct
  source 1..75: mol_type = other DNA
atgctggcggcgggcgatactttccgtgcggcagcggttgaacagcttcaggtctggggtcagcgcaacaatatt

SEQ ID NO: 748201 - DNA, 75 bp, synthetic construct
  source 1..75: mol_type = other DNA
tggtttgtcagcgggggacggagcagtgacttttcggtgtcacatgatgcgaggaattttgccgccggtgtcagt

SEQ ID NO: 748202 - DNA, 75 bp, synthetic construct
  source 1..75: mol_type = other DNA
acgggggatgccctggttcggcgcagaaagcgaccacgggaaaaggggagacctgcccgtaaatcagttccggaa

SEQ ID NO: 748203 - DNA, 75 bp, synthetic construct
  source 1..75: mol_type = other DNA
gcagcagttgctggatgaaaaccagcgtcagcgtgatgcgctggagcgcagtgcgccgctgaccatcacgccgcc

SEQ ID NO: 748204 - DNA, 75 bp, synthetic construct
  source 1..75: mol_type = other DNA
ctacaaattctacgaagcggtgatgagctctcacgcgcgtctgacctacaccaaagtctggcatattctgcaggg

SEQ ID NO: 748205 - DNA, 75 bp, synthetic construct
  source 1..75: mol_type = other DNA
cgagaaaagcgaaaaagccatcggcgaaaacgcagaaaatagctgctgcgaccaaagcgaagcgtgcggcgaaga

SEQ ID NO: 748206 - DNA, 75 bp, synthetic construct
  source 1..75: mol_type = other DNA
cgttgcagggggtatataacctggcgggattcattaccacggcgagcgggcaacgaatggcgtttgtacaatatc

SEQ ID NO: 748207 - DNA, 75 bp, synthetic construct
  source 1..75: mol_type = other DNA
accgacgaagagctggaagcacaggcgctggctgccgaagcggcagaagaggcggtgatggtggttcctccggca

SEQ ID NO: 748208 - DNA, 75 bp, synthetic construct
  source 1..75: mol_type = other DNA
ggcaggctgaagcggaaaccgtagagattgtcgaagcggcggaagaagaagcggctaaagaagaaatcaccgacg

SEQ ID NO: 748209 - DNA, 75 bp, synthetic construct
  source 1..75: mol_type = other DNA
gaagagcagccggtggaagaaatcgctcaggagcaggaaaaaccgaccaaagaaggtttcttcgcgcgcctgaaa

SEQ ID NO: 748210 - DNA, 75 bp, synthetic construct
  source 1..75: mol_type = other DNA
ccgattgcacaagagctgggaatggacccagtacatttcggtattatgatggtggccaacctttgtattgggctg

SEQ ID NO: 748211 - DNA, 75 bp, synthetic construct
  source 1..75: mol_type = other DNA
aaataaaactgttttatcggcctgaatctattaaagcaaaacccaacgcagtatggcaggaccagctggtgctga

SEQ ID NO: 748212 - DNA, 75 bp, synthetic construct
  source 1..75: mol_type = other DNA
acgatgatctggcagcctgagttcacagataaaacactctccaggaaacccggggcggttcacaatgacagcctg

SEQ ID NO: 748213 - DNA, 75 bp, synthetic construct
  source 1..75: mol_type = other DNA
tggctttgtttgtagtgatggcaatcatttgctatttcccacagattagcttgatgctaccaaggctattttcga

SEQ ID NO: 748214 - DNA, 75 bp, synthetic construct
  source 1..75: mol_type = other DNA
atttcacaaaagatgaccgtaggtctggacggttttacgctattagctattccctttttcgtgttagccggaaac

SEQ ID NO: 748215 - DNA, 75 bp, synthetic construct
  source 1..75: mol_type = other DNA
tgctagtagcgttgatgatgatcacttacattccgcaaatatccttgttcattccacagctactagggctaatgt

SEQ ID NO: 748216 - DNA, 75 bp, synthetic construct
  source 1..75: mol_type = other DNA
gctgaagaacaattacgacaatatgtgtaatgaaatgaatcactttgcgaagcatgtgatcattactggcggcgg

SEQ ID NO: 748217 - DNA, 75 bp, synthetic construct
  source 1..75: mol_type = other DNA
ctgcaaatgcaagcgaaagagcgcgttttctttggaatggtgatagtattgccaaaaaatatgaatccattttct

SEQ ID NO: 748218 - DNA, 75 bp, synthetic construct
  source 1..75: mol_type = other DNA
gcgcgtgaactgggtattccggcggtggttggctgtggtgatgcgaccgaacggatgaaagacggtgagaacgtc

SEQ ID NO: 748219 - DNA, 75 bp, synthetic construct
  source 1..75: mol_type = other DNA
atgaaaagagcgcctcttataacaggtcttttgttgatatccacatcctgcgcttatgcctcctcaggagggtgt

SEQ ID NO: 748220 - DNA, 75 bp, synthetic construct
  source 1..75: mol_type = other DNA
cctttaccctgtatgtcaccaagccatttctcggctcgatgaccattccgaaaacggatattgccgtcattaaag

SEQ ID NO: 748221 - DNA, 75 bp, synthetic construct
  source 1..75: mol_type = other DNA
atttacagcctcatggcgttatgggaaaaatggaaccgcgcatcctggggaaagagaatatcaaagatgtcgcca

SEQ ID NO: 748222 - DNA, 75 bp, synthetic construct
  source 1..75: mol_type = other DNA
ttgtgatgacggatatcgcccctttactcgaagaatatttctttgatgatccctataaacaacagatatggaccg

SEQ ID NO: 748223 - DNA, 75 bp, synthetic construct
  source 1..75: mol_type = other DNA
gtcatatcaaacgttatggctgaaagcgcactatccggcagagtttatggcggcggtaatgaccgccgatatgga

SEQ ID NO: 748224 - DNA, 75 bp, synthetic construct
  source 1..75: mol_type = other DNA
cgcactctgcggcctatgctttggtgtcatatcaaacgttatggctgaaagcgcactatccggcagagtttatgg

SEQ ID NO: 748225 - DNA, 75 bp, synthetic construct
  source 1..75: mol_type = other DNA
gccgccgggccgatcatcgatcgcgactggcttatcgaattaaacgaagggttgatccttctttccggcggacgc

SEQ ID NO: 748226 - DNA, 75 bp, synthetic construct
  source 1..75: mol_type = other DNA
catcggtcaggccgatatgttcggcgtgctggcagaagagccggaacaaattgaacaatcctacgccagctgcca

SEQ ID NO: 748227 - DNA, 75 bp, synthetic construct
  source 1..75: mol_type = other DNA
gtggcagcatgaaagcctgaaaccggttctggagccaacttacggtattatcctgtatcaggaacaggtaatgca

SEQ ID NO: 748228 - DNA, 75 bp, synthetic construct
  source 1..75: mol_type = other DNA
gaagagcgtctggcatttttattccctgacgaggaagaacgtcttaagcgccgcccggaatatgacgagcgtctg

SEQ ID NO: 748229 - DNA, 75 bp, synthetic construct
  source 1..75: mol_type = other DNA
ttgagtctttatgccaaaaaatgaatgagttaaaccaggaaatcagcaaagaggccactatccttgggaaaggat

SEQ ID NO: 748230 - DNA, 75 bp, synthetic construct
  source 1..75: mol_type = other DNA
cgagttaaaccaggaaatcagcaaagaggccactatccttgggaaaggattccgcattgggcatagttacttctg

SEQ ID NO: 748231 - DNA, 75 bp, synthetic construct
  source 1..75: mol_type = other DNA
atgaggaaggcacatcttatggaatcaattcaagcctggattgaaaaatttattgagcaagcacagcaacaaagt

SEQ ID NO: 748232 - DNA, 75 bp, synthetic construct
  source 1..75: mol_type = other DNA
ctccgtcagtctctggaaccccaccgctctgggacaattccagtacatctctactatcagaggacggatgcacgt

SEQ ID NO: 748233 - DNA, 75 bp, synthetic construct
  source 1..75: mol_type = other DNA
taacccggaacgtgtctccatgcctgacttcgacgttgatttctgtatggagaaacgcgaccaggttatcgagca

SEQ ID NO: 748234 - DNA, 75 bp, synthetic construct
  source 1..75: mol_type = other DNA
taatagcaaatgcgaataatttcgaaataacaaaatttggcatcgattgcaattacttcaccagcgcctggaatt

SEQ ID NO: 748235 - DNA, 75 bp, synthetic construct
  source 1..75: mol_type = other DNA
cgatcagaaagacgctgatgccatttatgccaacccgctgctcgcgcacctgcctgcagtacagaacaagcaggt

SEQ ID NO: 748236 - DNA, 75 bp, synthetic construct
  source 1..75: mol_type = other DNA
caaatgagcgcctggtgcagctatcataccttcgaaggtgctgccgcgttcctgcgccgccacgcccaggaagag

SEQ ID NO: 748237 - DNA, 75 bp, synthetic construct
  source 1..75: mol_type = other DNA
tcctcggcaaagaaacggtgcatctggctgatgtgctgttcgccccagaacaaaccagcaaatatgagctggtgg

SEQ ID NO: 748238 - DNA, 75 bp, synthetic construct
  source 1..75: mol_type = other DNA
tggagtttatctccaccattttgcagaccgttctcaatcttggcctgctgtgcctcggcctgattctggtcgtat

SEQ ID NO: 748239 - DNA, 75 bp, synthetic construct
  source 1..75: mol_type = other DNA
atgcaacgttctaaagactccttagctaaatggttaagcgcgatcctccccgtggtcattgttgggctggtgggg

SEQ ID NO: 748240 - DNA, 75 bp, synthetic construct
  source 1..75: mol_type = other DNA
cagcagcaggccttactggaagaaatggccgggcagcctggagtacgttggtttgcggtcacggatgaacaagga

SEQ ID NO: 748241 - DNA, 75 bp, synthetic construct
  source 1..75: mol_type = other DNA
tgattcgcgattatgggcgcgagactgccgccgccagacaaacgctgctggaaaaaggcagtgtacttattcgcg

SEQ ID NO: 748242 - DNA, 75 bp, synthetic construct
  source 1..75: mol_type = other DNA
gccaaccgggtatccgtaatacagtgcaggtgatctttatggtggagtgcgccagccatgttgctaaagagattg

SEQ ID NO: 748243 - DNA, 75 bp, synthetic construct
  source 1..75: mol_type = other DNA
gccagccatgtcgctaaaaagattgccgaaggatttccttgtcacgacgtgcagtattttggtttttcaggttgt

SEQ ID NO: 748244 - DNA, 75 bp, synthetic construct
  source 1..75: mol_type = other DNA
cgccagtggtcgcccatgccataagctggttatccaggaaaataagggaactacagaaaccatcaaacggggcaa

SEQ ID NO: 748245 - DNA, 75 bp, synthetic construct
  source 1..75: mol_type = other DNA
tgtcgataaaccttttaccgtgacactgtcacaagcgcgggagcttgatgcgctggcaaagcgtgtagggcgcgt

SEQ ID NO: 748246 - DNA, 75 bp, synthetic construct
  source 1..75: mol_type = other DNA
aaggtttgctcgcggaaggcgtactgggtgaagttgcttactttgagtctcattttgaccgcttccgtccgcagg

SEQ ID NO: 748247 - DNA, 75 bp, synthetic construct
  source 1..75: mol_type = other DNA
aaggattacttgcggaaggtgtgctgggtgaggttgcttactttgagtcacattttgatcgtttccgtccgcagg

SEQ ID NO: 748248 - DNA, 75 bp, synthetic construct
  source 1..75: mol_type = other DNA
atgaagcagttaaagccagaggaaaacgttcgctggagactgatggataacacaggaaatgaacctgcacttgag

SEQ ID NO: 748249 - DNA, 75 bp, synthetic construct
  source 1..75: mol_type = other DNA
agctctcgaaaaccttggtttgggagaagcggctaaaagaaatgtagggaccggcaccaatcaaattcctgacat

SEQ ID NO: 748250 - DNA, 75 bp, synthetic construct
  source 1..75: mol_type = other DNA
gcctttaggcgctgggcgagggttcgtgatgactgcagaaggcccaacgttaaccggctttaattctgcttacag

SEQ ID NO: 748251 - DNA, 75 bp, synthetic construct
  source 1..75: mol_type = other DNA
gccttttggtgcagggcgtggattcgttatgtccgtagaaggcccaacattaaccggctttaattctgcttacag

SEQ ID NO: 748252 - DNA, 75 bp, synthetic construct
  source 1..75: mol_type = other DNA
cgctgctggcgattgatgccccagtgattgccagcggcgcgaccacgccaaataaccgcgtagcagatggccagg

SEQ ID NO: 748253 - DNA, 75 bp, synthetic construct
  source 1..75: mol_type = other DNA
tccaccagcgtcaccctgaccggctcactgctggcgattgatgcaccagtgatcgccagcggcgcgaccacgccg

SEQ ID NO: 748254 - DNA, 75 bp, synthetic construct
  source 1..75: mol_type = other DNA
ctgggaaccgagacgttccgcctggattactacagcgccatgcaagtgctggaacgacttaaggcgctgttttaa

SEQ ID NO: 748255 - DNA, 75 bp, synthetic construct
  source 1..75: mol_type = other DNA
atgcagaaaaaacgcctgcgcttgaggtctatcgtttgttccagccaatgtcattgccttggcggcatggtatgc

SEQ ID NO: 748256 - DNA, 75 bp, synthetic construct
  source 1..75: mol_type = other DNA
ctgaccgtttaaaccgcgtggtaagcgagctgctggaactggttaagccaacgcatctggctttgcaggcggtgg

SEQ ID NO: 748257 - DNA, 75 bp, synthetic construct
  source 1..75: mol_type = other DNA
ctatctgcgctcgcgccagcttctacaagatgaaatgaagcgcaaagagaagctggtggcgctggggcatcttgc

SEQ ID NO: 748258 - DNA, 75 bp, synthetic construct
  source 1..75: mol_type = other DNA
ctggttatcgtattgccacgtcttttgacagtgcaattaacggtgcgacagattgccctgcctttgcgacaactc

SEQ ID NO: 748259 - DNA, 75 bp, synthetic construct
  source 1..75: mol_type = other DNA
tacctgtagctttccctgctgcttgtcgttcggtaaacgctcttatttcaactaatgatccttctgcccgttctg

SEQ ID NO: 748260 - DNA, 75 bp, synthetic construct
  source 1..75: mol_type = other DNA
gtcagcctggaaaagaaatccgagttctaatcgctggagaaaattgcctgatggaaccatcattcaaatgggaat

SEQ ID NO: 748261 - DNA, 75 bp, synthetic construct
  source 1..75: mol_type = other DNA
gtgtggctgccattattgcagaggcgaaagatgaggcgaccgacggtgaaatccgtgaaatgcacggcgtaccgg

SEQ ID NO: 748262 - DNA, 75 bp, synthetic construct
  source 1..75: mol_type = other DNA
cgatgcaggcggttcaatttggtaaccccgctgaacgcaacgacattgcgatggggccgttgattaacgccgcgg

SEQ ID NO: 748263 - DNA, 75 bp, synthetic construct
  source 1..75: mol_type = other DNA
atgtcagtacccgttcaacatcctatgtatatcgatggacagttaccacatcaatccatgcgtctccacgagggc

SEQ ID NO: 748264 - DNA, 75 bp, synthetic construct
  source 1..75: mol_type = other DNA
agccgcttgatgggcgcttttaacgtcagcaacctgatgctggcgctggcgacactgctggcgctgggctatccg

SEQ ID NO: 748265 - DNA, 75 bp, synthetic construct
  source 1..75: mol_type = other DNA
gccgttatgcaggctaaagagaatgatgtggtactggtcgcgggcaaaggccatgaagattaccagattgttggc

SEQ ID NO: 748266 - DNA, 75 bp, synthetic construct
  source 1..75: mol_type = other DNA
cgatgaagtgggccgccgctggctggcaaaactgccggacgcggttgcggtatcaatggaagatcatattaatcc

SEQ ID NO: 748267 - DNA, 75 bp, synthetic construct
  source 1..75: mol_type = other DNA
gagctttatacaaaaatgatatacctgaccaggaactggtcattgtatccgaacggtgatggctgtgtcactata

SEQ ID NO: 748268 - DNA, 75 bp, synthetic construct
  source 1..75: mol_type = other DNA
ccagagacttgccgaccatttccgcgcagcattttcatactgccgtacataacgaagaacaacttgcggctctgg

SEQ ID NO: 748269 - DNA, 75 bp, synthetic construct
  source 1..75: mol_type = other DNA
attttgcgcgcgcggatgaaccaaaatgcggcgcaaccgagaaacaactcgctatctttaataccttttgcgaag

SEQ ID NO: 748270 - DNA, 75 bp, synthetic construct
  source 1..75: mol_type = other DNA
gggtaacccaaaggtcgcaatggtcagtatgacaggcagcgtctctgcaggtgagaagatcatggcgactgcggc

SEQ ID NO: 748271 - DNA, 75 bp, synthetic construct
  source 1..75: mol_type = other DNA
caataaagacaatataaaagtgatttacagcctaaaaataaaccagacaacgccaggtatacttgttagctgtga

SEQ ID NO: 748272 - DNA, 75 bp, synthetic construct
  source 1..75: mol_type = other DNA
tacagcctaaaaataaaccagacaacaccaggcatacttgttagctgtgatagcaataataattttgcctgtcag

SEQ ID NO: 748273 - DNA, 75 bp, synthetic construct
  source 1..75: mol_type = other DNA
tcttagccgcttattaggcgaaaaacgaggctctacgaaggtacaaatgattctgaaaggtttatgtgctgctgg

SEQ ID NO: 748274 - DNA, 75 bp, synthetic construct
  source 1..75: mol_type = other DNA
ctggccggtattgtgatgttgaacgaaaactcaccgtgtcgcagatgttacgcctgggatttcgtcacaagctta

SEQ ID NO: 748275 - DNA, 75 bp, synthetic construct
  source 1..75: mol_type = other DNA
cagagagtggggatggcgtattcctttcgcgttaggggctgtgttagctgttgtggcgttgtggttacgtcgtca

SEQ ID NO: 748276 - DNA, 75 bp, synthetic construct
  source 1..75: mol_type = other DNA
tgctggttgaattgggtgttctggaagaagaacaaaaagcaactctgaatcttcctaagccgaacaacactattc

SEQ ID NO: 748277 - DNA, 75 bp, synthetic construct
  source 1..75: mol_type = other DNA
ctgacgggagaccttatcaggcaccaaaacccagcatgttgacgggcggtagccgggtgccatatgacgccgcgg

SEQ ID NO: 748278 - DNA, 75 bp, synthetic construct
  source 1..75: mol_type = other DNA
atcagcgccagagagaaattgagtcatgtcttaaacgcggattaccgcttccgagctgggcacaggctgaccagt

SEQ ID NO: 748279 - DNA, 75 bp, synthetic construct
  source 1..75: mol_type = other DNA
gctcagcccattctcaccgcctttgttgaagaagttcacgacaatgaggatttacccctgcccgcaggcgcacct

SEQ ID NO: 748280 - DNA, 75 bp, synthetic construct
  source 1..75: mol_type = other DNA
cgccggtgaaacgctcgctcaacaggcgtttagcgcgggagccaactggatgaccattatctgcgccgcaccgct

SEQ ID NO: 748281 - DNA, 75 bp, synthetic construct
  source 1..75: mol_type = other DNA
cagtggggcgaagccgatctggcacgcatgaaggcgctttcagatatcggccttgagctttccattactggcggg

SEQ ID NO: 748282 - DNA, 75 bp, synthetic construct
  source 1..75: mol_type = other DNA
gaaggtcgccgacgctggtgaaacgctcgcgcaacaggcgtttggcgcaggcgctaactggatgaccatcatctg

SEQ ID NO: 748283 - DNA, 75 bp, synthetic construct
  source 1..75: mol_type = other DNA
ctgcgtgcggtggttgataaacatgccctgcttgcccatcaacaacgggtggtgagtggggaacaggaacccagt

SEQ ID NO: 748284 - DNA, 75 bp, synthetic construct
  source 1..75: mol_type = other DNA
cccagtttgatggcattcctttttactatgcgcacatgcgtggcgcggatattcgcgtggagtgtctgcttaatg

SEQ ID NO: 748285 - DNA, 75 bp, synthetic construct
  source 1..75: mol_type = other DNA
ctgcgtgcggttgttgataaacacgccctgcttgcccatcaacagcgagtggtcagtggggaacaggaacccagt

SEQ ID NO: 748286 - DNA, 75 bp, synthetic construct
  source 1..75: mol_type = other DNA
ccagagatctaccgacgatttctgcgcaacattttcataccgccgtgcataacgaagaacagcttgctgcgctgg

SEQ ID NO: 748287 - DNA, 75 bp, synthetic construct
  source 1..75: mol_type = other DNA
gtcatcatgactatcgcgcgtttctcgaagcagaaaatccccagcgtctgtttgccctcaccacgaaaggtacgc

SEQ ID NO: 748288 - DNA, 75 bp, synthetic construct
  source 1..75: mol_type = other DNA
atgctaaacatcgtactttacgaaccagaaattccgccaaatactggcaacatcatccgtctttgcgctaatacc

SEQ ID NO: 748289 - DNA, 75 bp, synthetic construct
  source 1..75: mol_type = other DNA
tggtaagaaaagaaaatgacagaaggattgtttcatttgataaaaaattacatatagaaaaaatagaaaaaacgg

SEQ ID NO: 748290 - DNA, 75 bp, synthetic construct
  source 1..75: mol_type = other DNA
tctcgataaaaggcactgatggtaaagtaggtaaaatagaaatttatacagacacaggtgaacttatttttgaac

SEQ ID NO: 748291 - DNA, 75 bp, synthetic construct
  source 1..75: mol_type = other DNA
tcatatcaaaagaaaacggacaacgcattgtttcctttgataaagaactggatatagacagaatatctgctacag

SEQ ID NO: 748292 - DNA, 75 bp, synthetic construct
  source 1..75: mol_type = other DNA
ggaagcagaaaatccccagcgtctgtttgccctcaccacgaaaggcacacccgcacacagcgccgtaagttatca

SEQ ID NO: 748293 - DNA, 75 bp, synthetic construct
  source 1..75: mol_type = other DNA
gtggtcgcaaaagataaaactgtcacaaatgtcactgcgggtgatttcactgccccggcaacattcaccgtgact

SEQ ID NO: 748294 - DNA, 75 bp, synthetic construct
  source 1..75: mol_type = other DNA
ttgtcgcactacgtgaaacaaatgcagggcaaggtgtacctggaaagtttcgcgcactggcaacttttaacttca

SEQ ID NO: 748295 - DNA, 75 bp, synthetic construct
  source 1..75: mol_type = other DNA
atggattatcgggtagtctatttctggcttcatcactgttaaccatttcctcacatgcggccactgatagtattg

SEQ ID NO: 748296 - DNA, 75 bp, synthetic construct
  source 1..75: mol_type = other DNA
agcactggcaggctcagcaaatccggcgcaggtggctggcgatttccatgcgcaaatcgacgctatctggggagg

SEQ ID NO: 748297 - DNA, 75 bp, synthetic construct
  source 1..75: mol_type = other DNA
aaagacagcgtcgatattgtcgaagcaggcaccattctctgtttaaacgaagggcttggcgcagtgaaagccttg

SEQ ID NO: 748298 - DNA, 75 bp, synthetic construct
  source 1..75: mol_type = other DNA
cgattacccaatgagtgcggtgttggtggtcgcaaaagataaaactgtcacaaatgtcactgcaggtgatttcac

SEQ ID NO: 748299 - DNA, 75 bp, synthetic construct
  source 1..75: mol_type = other DNA
tggtgttttagcaaaaacgaaaaattattatatcgccgggctgattccacttttcccgacctttgcgcttatcgc

SEQ ID NO: 748300 - DNA, 75 bp, synthetic construct
  source 1..75: mol_type = other DNA
ctggcttccatcatttctaccattctggttatcgcaggtcatcagagcattggtgcaggtatcgcactggcaatc

SEQ ID NO: 748301 - DNA, 75 bp, synthetic construct
  source 1..75: mol_type = other DNA
caacataaaccccgatggtcgttatgcccgtgttttgaccgccccatgtagagctctattacttgaccaacaagg

SEQ ID NO: 748302 - DNA, 75 bp, synthetic construct
  source 1..75: mol_type = other DNA
tgcgcgtgaactcctgaaacacaaagaaatcagctttaaccacttgcaaggccagggtgaaattaaccgtttctg

SEQ ID NO: 748303 - DNA, 75 bp, synthetic construct
  source 1..75: mol_type = other DNA
tgaatatcgtcagccattttgcgcgcgcggatgaaccaaaatgtggcgcaaccgagaaacaactcgctatcttta

SEQ ID NO: 748304 - DNA, 75 bp, synthetic construct
  source 1..75: mol_type = other DNA
agccggggacccggtcattttatggggcgaaggtttgcccgtagaacgtatcgctgaaatgacaaaagtgagcgc

SEQ ID NO: 748305 - DNA, 75 bp, synthetic construct
  source 1..75: mol_type = other DNA
gaaatgacgaaagtgagcgcttacgaacttattacgcgcctgacttcaagggtcgcgatgaaatacgtggattaa

SEQ ID NO: 748306 - DNA, 75 bp, synthetic construct
  source 1..75: mol_type = other DNA
acagcgacaacctgcgaagtatgacgctggataaattgatgctaatgggggaaaagtcggctgtatccgttgctg

SEQ ID NO: 748307 - DNA, 75 bp, synthetic construct
  source 1..75: mol_type = other DNA
gtaagtgtttctcctatttcaaattcatcatcgagcaactctgagaatagtattaataatacaatcaatgtgacg

SEQ ID NO: 748308 - DNA, 75 bp, synthetic construct
  source 1..75: mol_type = other DNA
caaccatcatttttagtatgtggtcgattattccctattttgtttacctggtgtcgctgtggtatttcaccggaa

SEQ ID NO: 748309 - DNA, 75 bp, synthetic construct
  source 1..75: mol_type = other DNA
cgcgtgcattaatagctcagggtatcgactatcgcagccatcaaaaagtcgaacaacgccgtcgggcggaatcaa

SEQ ID NO: 748310 - DNA, 75 bp, synthetic construct
  source 1..75: mol_type = other DNA
tctgctggtggttgcatacggggtagagcaagcggcaaaagccttacgcggttctggcaaaaagcgtaagcgtaa

SEQ ID NO: 748311 - DNA, 75 bp, synthetic construct
  source 1..75: mol_type = other DNA
ccagcgtccagagaggcggagtacaaccaccgatgaccgtactcccttacgtgatgccgttaatatgctggtcgg

SEQ ID NO: 748312 - DNA, 75 bp, synthetic construct
  source 1..75: mol_type = other DNA
gctgcaagggaagcagaaggtcgccagatggccagcctcttcgaaccggaggttgcctccggagaagacgtgact

SEQ ID NO: 748313 - DNA, 75 bp, synthetic construct
  source 1..75: mol_type = other DNA
atgtcggtccctgagcatcctgccaaaccggatttttatgtcagaaatgagcaaaaaaataaactctacaaattg

SEQ ID NO: 748314 - DNA, 75 bp, synthetic construct
  source 1..75: mol_type = other DNA
acgcattagttaattatcttgtaactgttaaatcaggcaaggcaatgtttgaagtaattattacttctgacatgc

SEQ ID NO: 748315 - DNA, 75 bp, synthetic construct
  source 1..75: mol_type = other DNA
ggttatttgcctgatcaccttctttgttgtctcctggattctggggcatcaggggaaacagcagagtgaaaatga

SEQ ID NO: 748316 - DNA, 75 bp, synthetic construct
  source 1..75: mol_type = other DNA
gtcatccatgacatcagcgaaatgaaccgcatcgaacctggagacgtgctggttactgacatgaccgacccggac

SEQ ID NO: 748317 - DNA, 75 bp, synthetic construct
  source 1..75: mol_type = other DNA
gttaaaagttactatgatccctccatcgataagatcctgaatccgctggatgcccgctgtgccgcctgggattta

SEQ ID NO: 748318 - DNA, 75 bp, synthetic construct
  source 1..75: mol_type = other DNA
ttgtgatgccccgaataaccagttccgtcatcatccgcgtgactacattgagtcaatggaagcggcgctgaaaac

SEQ ID NO: 748319 - DNA, 75 bp, synthetic construct
  source 1..75: mol_type = other DNA
caccaatgtaagacacataactttcccccggtcgtttacaacaacgaactattccatctcaattaactggaatga

SEQ ID NO: 748320 - DNA, 75 bp, synthetic construct
  source 1..75: mol_type = other DNA
atgggaaaatgtggctacgaggtcctggaaaggaagcaaaattaattcaacagtattataaagaaaggttttata

SEQ ID NO: 748321 - DNA, 75 bp, synthetic construct
  source 1..75: mol_type = other DNA
tcatgaaatagaaaggtatctgtacagcacgtttaaatatgaattgattttagaagaaaagctatatctctctat

SEQ ID NO: 748322 - DNA, 75 bp, synthetic construct
  source 1..75: mol_type = other DNA
ggctaaccgaattttttatgtcaggaatgagcaaaaaaataaactctacaaactgattgagcatgtggatattga

SEQ ID NO: 748323 - DNA, 75 bp, synthetic construct
  source 1..75: mol_type = other DNA
attgattccagagcgccctacagcgaagtgctggaacaggcgcagaaagcggtttctctggttgccatcgtttct

SEQ ID NO: 748324 - DNA, 75 bp, synthetic construct
  source 1..75: mol_type = other DNA
gccgcaagggaagcagaaggtcgtcagatggccagcctcttcgaaccggatgtcccggaggttgtttccggagaa

SEQ ID NO: 748325 - DNA, 75 bp, synthetic construct
  source 1..75: mol_type = other DNA
atgttctccggcccgtttcgtgcgctggcagcaaacgccgcaggggctggaatcccgcctgaacgaagtgctgat

SEQ ID NO: 748326 - DNA, 75 bp, synthetic construct
  source 1..75: mol_type = other DNA
gatcctcgccgacctcgccatgctggagtacgccgcccagcgatacccgcatattgagcgtcatgtgtcagtgca

SEQ ID NO: 748327 - DNA, 75 bp, synthetic construct
  source 1..75: mol_type = other DNA
attgagcgggtgatcgaggaacggatatctaccgatcccttcaatccgcaataccgtcagggagatactttaggc

SEQ ID NO: 748328 - DNA, 75 bp, synthetic construct
  source 1..75: mol_type = other DNA
actatgaatttaccactgactatcttgagaatgccgccagcggtgaaaaagtggtggaagagacgctggttagcc

SEQ ID NO: 748329 - DNA, 75 bp, synthetic construct
  source 1..75: mol_type = other DNA
gatgaccaggatatcactatcgataactatgaattcactactgactatctggagaatgccaccagcggtgaaaaa

SEQ ID NO: 748330 - DNA, 75 bp, synthetic construct
  source 1..75: mol_type = other DNA
ttttaagctctatctcaacagttttaaccagacgcgttttaataactgggatgaggtgcgccagacgctggagcg

SEQ ID NO: 748331 - DNA, 75 bp, synthetic construct
  source 1..75: mol_type = other DNA
ggtacaaattcattagtttttcccggcgtaacaattgaagaaggatgctcaatcggagctatgacaatggttaca

SEQ ID NO: 748332 - DNA, 75 bp, synthetic construct
  source 1..75: mol_type = other DNA
atggtcaaagtgctggccagtgtctggagtcaggaagccgctgctattgcgcaagagataaagcgtctaccttaa

SEQ ID NO: 748333 - DNA, 75 bp, synthetic construct
  source 1..75: mol_type = other DNA
aattgatcgaacatgtggatattgagtatgtgtttgttgccgaaaagatagtgtactacgcggagtgtaatcttg

SEQ ID NO: 748334 - DNA, 75 bp, synthetic construct
  source 1..75: mol_type = other DNA
accggcattctgccgtggaactttccgttcttcctcattgcccgcaaaatggctcccgctcttttgaccggtaat

SEQ ID NO: 748335 - DNA, 75 bp, synthetic construct
  source 1..75: mol_type = other DNA
aatagatgatttttgtctgttgtctggaaaaatatctataggaaataatgttcatattgccgcatactgtaatgt

SEQ ID NO: 748336 - DNA, 75 bp, synthetic construct
  source 1..75: mol_type = other DNA
atttcgggattcctgcaaagagaataaaggaaagaaaaaaagatctgctggagcttgaacaactctttcataaag

SEQ ID NO: 748337 - DNA, 75 bp, synthetic construct
  source 1..75: mol_type = other DNA
tcttaaaaagaatgtttctgttataaaagaatctacagagattaccgagctcgatgttaaggttgtcgcaaaagt

SEQ ID NO: 748338 - DNA, 75 bp, synthetic construct
  source 1..75: mol_type = other DNA
gaaccgcgcttgcacgttccggcaggttctgtcgggatcggcgggccgcagaccggtgtttatccgctggcaacg

SEQ ID NO: 748339 - DNA, 75 bp, synthetic construct
  source 1..75: mol_type = other DNA
taaaagacataacgataacgttacggccggaaagtattaatggggacagttatcactattcgcatggactgaaaa

SEQ ID NO: 748340 - DNA, 75 bp, synthetic construct
  source 1..75: mol_type = other DNA
atgaaactcgcttttcatctgatggcgaagcctgcgggctggcgctgtaatctggcctgtgattactgtttttac

SEQ ID NO: 748341 - DNA, 75 bp, synthetic construct
  source 1..75: mol_type = other DNA
aatttttttgcaccataaatccaacaacacattcaataacacattgctgtattgctatgaaaataaatgtgtttt

SEQ ID NO: 748342 - DNA, 75 bp, synthetic construct
  source 1..75: mol_type = other DNA
ggtttacggtggcgcaggcggaccggatttggcggtggtcgcggcgcattgtggattgagcgaaaaacaggttgt

SEQ ID NO: 748343 - DNA, 75 bp, synthetic construct
  source 1..75: mol_type = other DNA
tccggcaggttctgtcgggatcggcgggccgcagactggtgtttatccgctggcaacgccgggtggctggcagtt

SEQ ID NO: 748344 - DNA, 75 bp, synthetic construct
  source 1..75: mol_type = other DNA
actggtattgctctgctaactttggcgagcagtttgcgcgatgccgaagcgatcaatattgccggatcgctacgt

SEQ ID NO: 748345 - DNA, 75 bp, synthetic construct
  source 1..75: mol_type = other DNA
aaccatacggtttatattcgtgataacggtatcggtattggcgaaccgaccgaacccgaaggtcactacggtttg

SEQ ID NO: 748346 - DNA, 75 bp, synthetic construct
  source 1..75: mol_type = other DNA
ttgcctcaatcagtgctaaaacttatgaagattgagaaaaacctggaaataagatacgttacaaatattgggcca

SEQ ID NO: 748347 - DNA, 75 bp, synthetic construct
  source 1..75: mol_type = other DNA
gggtctgaaagcggataacctgccttttcacggtacggatatctggacgctatatgaactttcctggctgaatgc

SEQ ID NO: 748348 - DNA, 75 bp, synthetic construct
  source 1..75: mol_type = other DNA
acaaccttccggtggcggcacgttagtgagtattagctttcgctctgcggcgggtgaggaaagtcaactgatgta

SEQ ID NO: 748349 - DNA, 75 bp, synthetic construct
  source 1..75: mol_type = other DNA
cgagctgcactggcaaaacagcaacgtgtcggcctccgaaccgctgcttaatagcgtttcatcgatgctggggcg

SEQ ID NO: 748350 - DNA, 75 bp, synthetic construct
  source 1..75: mol_type = other DNA
atgatgcacaagaattaatcgcacgcggcgcaaagttaatcgatattcgtgacgctgatgaatatcttcgtgaac

SEQ ID NO: 748351 - DNA, 75 bp, synthetic construct
  source 1..75: mol_type = other DNA
caaatgtggtgcaggaaaaagaccggaatattgcagaacttcagaaccgtatccgcatcctggaagaatgtaatg

SEQ ID NO: 748352 - DNA, 75 bp, synthetic construct
  source 1..75: mol_type = other DNA
gaacttttccagtaacgattatttaggtttaagccatcatccgcaaattatccgtgcctggcagcagggtgcgga

SEQ ID NO: 748353 - DNA, 75 bp, synthetic construct
  source 1..75: mol_type = other DNA
catggggaatgacccgaaaaccggcaaaccttacgtcgataaggaatcaggcaaaaccatggccgaaaccgtgga

SEQ ID NO: 748354 - DNA, 75 bp, synthetic construct
  source 1..75: mol_type = other DNA
ggattttaataaggtttttctgcaaaaaaacattgaaaaaataaatcaatatacagagattaatcatctcgaagt

SEQ ID NO: 748355 - DNA, 75 bp, synthetic construct
  source 1..75: mol_type = other DNA
ttacttcggtgatgaggctaataaagagctgaagctaatctctgcagatggcgaagttgttggcgatcagcccac

SEQ ID NO: 748356 - DNA, 75 bp, synthetic construct
  source 1..75: mol_type = other DNA
atgtcattcctaaatatccggtgtatctgattaatggcgatgatgaagcaaaagaatatcagcaaattaaggcta

SEQ ID NO: 748357 - DNA, 75 bp, synthetic construct
  source 1..75: mol_type = other DNA
actgtaggtcctgacggggaggtgcatatcaacattaccggtggtatggaaaaagatcctccaggaaaacatcac

SEQ ID NO: 748358 - DNA, 75 bp, synthetic construct
  source 1..75: mol_type = other DNA
gagttgattatttagatggggcattgacatataactttcagggaaagaatagagtcgaaagttttcacaaacaac

SEQ ID NO: 748359 - DNA, 75 bp, synthetic construct
  source 1..75: mol_type = other DNA
gtgacgcacaagaattaatcgcgcatggtgcgaagttaatcgatattcgtgatgctgatgaatatcttcgtgaac

SEQ ID NO: 748360 - DNA, 75 bp, synthetic construct
  source 1..75: mol_type = other DNA
aaaacaacaatacacacgtggctgataactttgttcgccgtggactgcgcacacgcctgaaacgcatcgaacagg

SEQ ID NO: 748361 - DNA, 75 bp, synthetic construct
  source 1..75: mol_type = other DNA
ctgactcgtgatactataaaaagctttttagaattcaaggcagaaaatgaagctaatgctgtaaatgatgcaata

SEQ ID NO: 748362 - DNA, 75 bp, synthetic construct
  source 1..75: mol_type = other DNA
tattggtattttagggtttgcagtaattatggcagtgactagtgccttaattacagatgaaaggctgaaacaact

SEQ ID NO: 748363 - DNA, 75 bp, synthetic construct
  source 1..75: mol_type = other DNA
aggataacggcgtaccggtagggcctggccgtggttccggtgcagggtcactggtggcctacgcgctgaaaatta

SEQ ID NO: 748364 - DNA, 75 bp, synthetic construct
  source 1..75: mol_type = other DNA
aaaatccgcaccgctcagaaagctaacgcagccctggaaccgtgggtgctgttcaccagaatcaactcagcaaaa

SEQ ID NO: 748365 - DNA, 75 bp, synthetic construct
  source 1..75: mol_type = other DNA
ttaatttttatctagaacatttaattaatacatcaattaatgaagtttatttgattagtccatatttaaagattt

SEQ ID NO: 748366 - DNA, 75 bp, synthetic construct
  source 1..75: mol_type = other DNA
aagtgtgacttcatgctcgaccaggtaggtaacgtctttaaaggcgtaatttccagcgtcactggctttggcttc

SEQ ID NO: 748367 - DNA, 75 bp, synthetic construct
  source 1..75: mol_type = other DNA
gcactccaccaaacccaaatgcgaaaatccgtcctggtatcgtcctgagcgctataaagcgctgaaagggcagct

SEQ ID NO: 748368 - DNA, 75 bp, synthetic construct
  source 1..75: mol_type = other DNA
tgcaaaagcggcagccagtaagcgcgccagacgcctgaagaaactgcctgccgaccagcagattcatgagatggc

SEQ ID NO: 748369 - DNA, 75 bp, synthetic construct
  source 1..75: mol_type = other DNA
gctataaggcgctgagcgggcagctcgggcacgcctacaaccgtctggtgaaaaaggacccggtgaccggcgagc

SEQ ID NO: 748370 - DNA, 75 bp, synthetic construct
  source 1..75: mol_type = other DNA
ttgaagagtgtatgattctggcgaatatctcggcggcgcgtttcgttgagaaagcgaaagaaccggcactgttcc

SEQ ID NO: 748371 - DNA, 75 bp, synthetic construct
  source 1..75: mol_type = other DNA
tcggtaaaacggcgcgcgagaaagcgaaaaaggcgatgcaggcaaaaaaggcggcaagcgtcgtcaggtcggtaa

SEQ ID NO: 748372 - DNA, 75 bp, synthetic construct
  source 1..75: mol_type = other DNA
ccgcgtactggtgccaaaaaccagccagattgttggtcgctactttaccgaagcgggcgtcggctttgtggttcc

SEQ ID NO: 748373 - DNA, 75 bp, synthetic construct
  source 1..75: mol_type = other DNA
aaaaggtaaactttgagccagacagtgccttccgcggcgagaaaaaaccgaagcgtgcggcgaagaaaaaagtgg

SEQ ID NO: 748374 - DNA, 75 bp, synthetic construct
  source 1..75: mol_type = other DNA
tgcgcgcgatggagcgcgacggtcaactggtcttcactcgccgtcagtgctatgcgctgccggaacgcctcgatc

SEQ ID NO: 748375 - DNA, 75 bp, synthetic construct
  source 1..75: mol_type = other DNA
gcgaaaaaagacgcgagaaaagcgaaaaagccatcggcgaaaacgcagaaaatagctgcagcgaccaaagcgaag

SEQ ID NO: 748376 - DNA, 75 bp, synthetic construct
  source 1..75: mol_type = other DNA
cgtcgacatgattaaacttcacgaacagcagcagaagcggctgcgtgaaagtgaaatccgccagcagcttatccg

SEQ ID NO: 748377 - DNA, 75 bp, synthetic construct
  source 1..75: mol_type = other DNA
cctttctttaccccgtttttcaatggactggcgtcagcaacgcaggaacaactcgatttattggtaatgactcca

SEQ ID NO: 748378 - DNA, 75 bp, synthetic construct
  source 1..75: mol_type = other DNA
atgcaggttgtctgcctaaacgaccagcaaccattactggtgatgttccttgctgatggcgcaggtagcgtttcg

SEQ ID NO: 748379 - DNA, 75 bp, synthetic construct
  source 1..75: mol_type = other DNA
gattttgcctgcacatttctgggactgatttcatcgcctgacggcaccttgattatgcagattggcgatggcggc

SEQ ID NO: 748380 - DNA, 75 bp, synthetic construct
  source 1..75: mol_type = other DNA
tcagtgatgcgggcacacataccgtaggcatgagtgtttcccgtctggccagagaaatcagcccgaaagacagca

SEQ ID NO: 748381 - DNA, 75 bp, synthetic construct
  source 1..75: mol_type = other DNA
cctgcgcatgcgtatgtcgcgacaccccttttacgtgcagaaacggacgttcgctggccgtaaatatgctttccg

SEQ ID NO: 748382 - DNA, 75 bp, synthetic construct
  source 1..75: mol_type = other DNA
cagattggcgatggcggcgtggtggtagatttgggtcacggtttgcaattgccgctcacgccgatggtgggtgaa

SEQ ID NO: 748383 - DNA, 75 bp, synthetic construct
  source 1..75: mol_type = other DNA
aatgtgggaccgtgaaacccgccagcgtctgccacgctatgtctggataacaccggcagggtggcagatgctggg

SEQ ID NO: 748384 - DNA, 75 bp, synthetic construct
  source 1..75: mol_type = other DNA
tcgctggccgtaaatatgctttccgtccggaaaaacaacgcctcctcgatgctgtctggccggttctggtcagtt

SEQ ID NO: 748385 - DNA, 75 bp, synthetic construct
  source 1..75: mol_type = other DNA
ctgctggccgaacaggtacgttttggtgtgctgggggtgtcagaggaaacgatgtgggaccgtgaaacccgccag

SEQ ID NO: 748386 - DNA, 75 bp, synthetic construct
  source 1..75: mol_type = other DNA
atgcaggttgtctggataaacgaccaacaaccgttactggtgatgtttcttgccgatggcgcaggtagcgtttcg

SEQ ID NO: 748387 - DNA, 75 bp, synthetic construct
  source 1..75: mol_type = other DNA
ggaaacttacacctgcactgaacgggcggtaaaagtggcaacatttacggatggcattcaacggctggcattaaa

SEQ ID NO: 748388 - DNA, 75 bp, synthetic construct
  source 1..75: mol_type = other DNA
atgaagcctactggtgcacgccggaacgcttacagcagctggccatcagggagctgtaccagcttgaactgacgc

SEQ ID NO: 748389 - DNA, 75 bp, synthetic construct
  source 1..75: mol_type = other DNA
ggcgcgtttcgttgagaaagcgaaagaaccggcactgttccgtattcacgacaagccgagcaccgaagcaattac

SEQ ID NO: 748390 - DNA, 75 bp, synthetic construct
  source 1..75: mol_type = other DNA
gtacaaaaaaggctcaatggcgaagcgctggaggaatacgttaaacctaatcggcggcggttattttttgttcgc

SEQ ID NO: 748391 - DNA, 75 bp, synthetic construct
  source 1..75: mol_type = other DNA
tgaatgaaccgtcacgccgacgtttactgaaagggattggtgcactggcgctggcgggaagttgtccggtcgctc

SEQ ID NO: 748392 - DNA, 75 bp, synthetic construct
  source 1..75: mol_type = other DNA
gaaaaaggcttcctgacagttcaaaaaaggctgaatggtgaggctctggaggaatacgtcaaacccatcggcggg

SEQ ID NO: 748393 - DNA, 75 bp, synthetic construct
  source 1..75: mol_type = other DNA
gcacccgtacagtacgctattgtggatggtgctgtggaggaaggattgctggattttttacaggaaaaaaatcct

SEQ ID NO: 748394 - DNA, 75 bp, synthetic construct
  source 1..75: mol_type = other DNA
gaaattctcttaggaacagacataaagtatacctatattaataatgaaggaaataatgttggggttgcacatgcc

SEQ ID NO: 748395 - DNA, 75 bp, synthetic construct
  source 1..75: mol_type = other DNA
agatcgggccgagtttggcatcaagcccctgatgggcagtgaggatttctctttcatgctggaagcccagccgaa

SEQ ID NO: 748396 - DNA, 75 bp, synthetic construct
  source 1..75: mol_type = other DNA
gtgaatcgtttctgtcgcagcatggacacgcgcggttttcctgattttaaacttcatctggcacagagtctggcg

SEQ ID NO: 748397 - DNA, 75 bp, synthetic construct
  source 1..75: mol_type = other DNA
tacattgcgcccgataatctcaccataacgttatcggtgggccactcattgtttgatgagcggtttggccttaca

SEQ ID NO: 748398 - DNA, 75 bp, synthetic construct
  source 1..75: mol_type = other DNA
tacattgcacccgataatctcaccattacgttatcggtaggccactcgttgttcgatgagcgctttggccttgcg

SEQ ID NO: 748399 - DNA, 75 bp, synthetic construct
  source 1..75: mol_type = other DNA
agatgacgcgtttccccaacgactcgctggatgcggcgttatgtcatggtgatgtgttgctacaaatttgcgcca

SEQ ID NO: 748400 - DNA, 75 bp, synthetic construct
  source 1..75: mol_type = other DNA
ccacactgctgtctgtatgcagaacccatacagccggatctggtcgcgctggccccctatctcgtggaagttgtt

SEQ ID NO: 748401 - DNA, 75 bp, synthetic construct
  source 1..75: mol_type = other DNA
ccgccgaggcggtggcgcgtatttcgccgagaacggcgacgttccataaagggcaactggtgtgggggagtgtgg

SEQ ID NO: 748402 - DNA, 75 bp, synthetic construct
  source 1..75: mol_type = other DNA
gctcgctcaattgtccggcaggcaccactatccaggacatgatcaaactcgagcagaaaatgctgccggaactgc

SEQ ID NO: 748403 - DNA, 75 bp, synthetic construct
  source 1..75: mol_type = other DNA
tgctgctggaaaccggttttgactacgaaaacggcgtggcggtacagacccgcacggcgcaccagaccgtagaga

SEQ ID NO: 748404 - DNA, 75 bp, synthetic construct
  source 1..75: mol_type = other DNA
gtattgaagttcgtcgtgatgcttatgggcgttacagcctgaacgatctgcacagggctgctggttctctggata

SEQ ID NO: 748405 - DNA, 75 bp, synthetic construct
  source 1..75: mol_type = other DNA
aactggcagttgtgcaaaaccgcaccgcacaaggactggcgcactatgtcggtggatgaataccagaaacacggg

SEQ ID NO: 748406 - DNA, 75 bp, synthetic construct
  source 1..75: mol_type = other DNA
gcttatcagtttaaagatggtgtaggtgcaaatggtgatggtttttttgaaataacaaatcaaaaagttaagtca

SEQ ID NO: 748407 - DNA, 75 bp, synthetic construct
  source 1..75: mol_type = other DNA
atgcaggcattaacaggaatggttaattcctttagccactttattattatgcgtattggactgggtattggtgaa

SEQ ID NO: 748408 - DNA, 75 bp, synthetic construct
  source 1..75: mol_type = other DNA
tgtattgatgcagttggcatggggctggcgggcgatgttcgttatcatcggcgtagcggggattctggttgggat

SEQ ID NO: 748409 - DNA, 75 bp, synthetic construct
  source 1..75: mol_type = other DNA
tcattctgattttaatgaaaaaatcaaatcaagcattttgcaatatatgaatggcaagttcacgccaccaatgtg

SEQ ID NO: 748410 - DNA, 75 bp, synthetic construct
  source 1..75: mol_type = other DNA
ggtaatttcatggatgacagcgccatcactgcgaaagtgaaggcggctctggtggatcatgacaacatcaaaagc

SEQ ID NO: 748411 - DNA, 75 bp, synthetic construct
  source 1..75: mol_type = other DNA
acagtgaagaagagcttaaccttgttgacccacgtccaaaagctggcgtcataagcataaacgcagcgcgtaaaa

SEQ ID NO: 748412 - DNA, 75 bp, synthetic construct
  source 1..75: mol_type = other DNA
atttttaactcatctaccgttatcggtcaggctatcgcgcctcctgctcttgtattgatgcaactggcatggggc

SEQ ID NO: 748413 - DNA, 75 bp, synthetic construct
  source 1..75: mol_type = other DNA
tccggcagggctgctggtaaacctggctatctggcaccaacagccgcactggccaacgtttattacaggcgcgct

SEQ ID NO: 748414 - DNA, 75 bp, synthetic construct
  source 1..75: mol_type = other DNA
gtggcgctacttatcatcaccactattctgtgggccttctcctttagcttttatggcgagtaccttgcggggcac

SEQ ID NO: 748415 - DNA, 75 bp, synthetic construct
  source 1..75: mol_type = other DNA
ggtgatcctgacctcactgtgggttcatcgaaagtgggtcgctccgcgctcttcacaaacggcagatggtcgcaa

SEQ ID NO: 748416 - DNA, 75 bp, synthetic construct
  source 1..75: mol_type = other DNA
atgaaagatttaactttgaagtttcatgacaaactgcagtttaaggccttcctgtcatctcttggctgggcggat

SEQ ID NO: 748417 - DNA, 75 bp, synthetic construct
  source 1..75: mol_type = other DNA
atgaaagatttaactttgaagtttcatgacaaactgcagtttaaggccttcctgtcatctcttggctgggtggac

SEQ ID NO: 748418 - DNA, 75 bp, synthetic construct
  source 1..75: mol_type = other DNA
aacgcctgatggaaacccgcccgatgccgcagcataacgcctttgcgtggttctatctcggcgcgttcctggtgg

SEQ ID NO: 748419 - DNA, 75 bp, synthetic construct
  source 1..75: mol_type = other DNA
ggacgctctgtttgagcatgggatccgggtggactccggtcttaccccgcttaacagctatgaaaaccgtgtcta

SEQ ID NO: 748420 - DNA, 75 bp, synthetic construct
  source 1..75: mol_type = other DNA
ctcgccctgctggtaagttcattcgggtatatgtggatgggatcgtttatgaagagttgagaaaaatagccaaga

SEQ ID NO: 748421 - DNA, 75 bp, synthetic construct
  source 1..75: mol_type = other DNA
cgagaatccgccagtcgaaaccggagcatggaaagacgctgttgactgggtgctcaaagaggcttgccaggctgt

SEQ ID NO: 748422 - DNA, 75 bp, synthetic construct
  source 1..75: mol_type = other DNA
gtctgcgctgggggtatgcttttagcgccttgttagcggtgatcggcgccgggattatccgctacgatcaggtca

SEQ ID NO: 748423 - DNA, 75 bp, synthetic construct
  source 1..75: mol_type = other DNA
ttctgtgggccttctcctttagcttttatggcgagtaccttgcggggcacgtcgatagctattttgcggtgctgg

SEQ ID NO: 748424 - DNA, 75 bp, synthetic construct
  source 1..75: mol_type = other DNA
aaaggcgtctcgcctgatattgtccatgcttatcttgatgggaaatatcctaccaagtatggcttaggaaagtat

SEQ ID NO: 748425 - DNA, 75 bp, synthetic construct
  source 1..75: mol_type = other DNA
gttgtatgttgatctcccaggtcatggtggttcggcggcgattagcgtcgatggatttgatgatgtcaccgactt

SEQ ID NO: 748426 - DNA, 75 bp, synthetic construct
  source 1..75: mol_type = other DNA
aagagttattccataagtatggaaaagaaaatcttgtgaaatctttagatgaattattcataaaaaataataatt

SEQ ID NO: 748427 - DNA, 75 bp, synthetic construct
  source 1..75: mol_type = other DNA
atatgcggatttttattctgcgctcaacagaacgacaaataaagagcactatctggattcaatagaaaatactta

SEQ ID NO: 748428 - DNA, 75 bp, synthetic construct
  source 1..75: mol_type = other DNA
gtacgctgaaccatctcgctttttgccgccaacatggcaaagggatggtgattggcaccacgggttttgatgacg

SEQ ID NO: 748429 - DNA, 75 bp, synthetic construct
  source 1..75: mol_type = other DNA
attgtccgtctctctgattttaaatcgaacgaatatgccaacctggtcggtggtgagcgttacgagccagatgaa

SEQ ID NO: 748430 - DNA, 75 bp, synthetic construct
  source 1..75: mol_type = other DNA
ttgctggagagcttcagaaaaaaagtagtaaacgtgtaaaaaatccacaatttagtaattccattttttgtgaga

SEQ ID NO: 748431 - DNA, 75 bp, synthetic construct
  source 1..75: mol_type = other DNA
aaagtgttgtctttatatgatagtcaatcaagtgagataacaaatgtattgaaaatatttaatgagtgtgatggt

SEQ ID NO: 748432 - DNA, 75 bp, synthetic construct
  source 1..75: mol_type = other DNA
agaacgatggccttttcggatgctgtatctggttaatctccgcgacagaaaactggacgaatggcaagtgccgcc

SEQ ID NO: 748433 - DNA, 75 bp, synthetic construct
  source 1..75: mol_type = other DNA
ccacgtatcaggacagggcaggggtagtgaaaacgttaaaacttgaaaaagctggtggtactgcaatcccgttgc

SEQ ID NO: 748434 - DNA, 75 bp, synthetic construct
  source 1..75: mol_type = other DNA
gcagccgtcatggtgccaacacctttaatactgctcagtcgcttagcaagctctttgaagtggctatggatatgg

SEQ ID NO: 748435 - DNA, 75 bp, synthetic construct
  source 1..75: mol_type = other DNA
ctttgctaacggcgcggtaagatcggctttgtggctgaatggcaaagaaagtgggctttttgacatgcgagatgt

SEQ ID NO: 748436 - DNA, 75 bp, synthetic construct
  source 1..75: mol_type = other DNA
agccgctcaggtaatgggtggctacacggatatcgagattattgaagcacatcacaggcataaagtggatgcgcc

SEQ ID NO: 748437 - DNA, 75 bp, synthetic construct
  source 1..75: mol_type = other DNA
gaaatgtcgcccgccagcgtcgagcgtccatcgacgggaaatttgactactcagatctacctgatgaagccacgt

SEQ ID NO: 748438 - DNA, 75 bp, synthetic construct
  source 1..75: mol_type = other DNA
cgcaaaacgtgcggagataacacctgaaccactattcgctgccccacctgtgccggtagtgcctgaagggcttgt

SEQ ID NO: 748439 - DNA, 75 bp, synthetic construct
  source 1..75: mol_type = other DNA
tggcgcagcccgccacgctaaaatgctcgaaaccgatcaggcatgggcattctttgaaaaactggaagacagcta

SEQ ID NO: 748440 - DNA, 75 bp, synthetic construct
  source 1..75: mol_type = other DNA
agaatttaagaacagagtaaccggaagttactctgttggtaagaacgccagaagccttacactctggacagagcg

SEQ ID NO: 748441 - DNA, 75 bp, synthetic construct
  source 1..75: mol_type = other DNA
ctggaacagaaagcccaccagctaaatcagcagctggtggccgccgctcctaaggtcgattttgccgaccgggta

SEQ ID NO: 748442 - DNA, 75 bp, synthetic construct
  source 1..75: mol_type = other DNA
tatcagtggctaaggggatcctgattggtaattttgcaaaggttgttgggctgaagcaaaacgcgctgtttgcct

SEQ ID NO: 748443 - DNA, 75 bp, synthetic construct
  source 1..75: mol_type = other DNA
gcgaatacctgctcgaacagggtcatctgaattacgcaaccgtcgcagccgaagcacgcaaggaggcacacagaa

SEQ ID NO: 748444 - DNA, 75 bp, synthetic construct
  source 1..75: mol_type = other DNA
ccggagaaaggacaagaacgcggttcaccgtatcctgctgtctgatatccgcgaatacctgctcgaacaggggca

SEQ ID NO: 748445 - DNA, 75 bp, synthetic construct
  source 1..75: mol_type = other DNA
cgctttgttgaagggaagcactttttcaaagttgaaggagaatcattgcgcgagttgaagcacagagtagcttta

SEQ ID NO: 748446 - DNA, 75 bp, synthetic construct
  source 1..75: mol_type = other DNA
gagttgcagcaggttagcgctgcttctccagcgatcccccagacactccccgaagccctccgcctggctgccgaa

SEQ ID NO: 748447 - DNA, 75 bp, synthetic construct
  source 1..75: mol_type = other DNA
cggtgaaagaagtggtgctggatgatgaaaatggctaccagatacggctgacgccccaattaacgggtaaaggcc

SEQ ID NO: 748448 - DNA, 75 bp, synthetic construct
  source 1..75: mol_type = other DNA
agtggccaatggaatcctgatcgggaactttgcaaaggtcgttggacttaagcaaaacgcccttttctcatggtt

SEQ ID NO: 748449 - DNA, 75 bp, synthetic construct
  source 1..75: mol_type = other DNA
gaatcagaactggtggttgttcaaagtcagccggatgaaattcccgttctagagtggcagggagtgcgtgtagtg

SEQ ID NO: 748450 - DNA, 75 bp, synthetic construct
  source 1..75: mol_type = other DNA
aaaaattcatgcaccttcagttcaggaatcggagctggtggttgctcaaaatcagcctgatgaaattcccgttct

SEQ ID NO: 748451 - DNA, 75 bp, synthetic construct
  source 1..75: mol_type = other DNA
gaatcagagctggtggttgctcaaaatcagcctgatgaaattcccgttctggaatggcagggagtgcgtgtagtg

SEQ ID NO: 748452 - DNA, 75 bp, synthetic construct
  source 1..75: mol_type = other DNA
tccggccggaaaaacaacgtctcctcgatgccatctggccggttctggtcagcttcagtgatgccggcacacaca

SEQ ID NO: 748453 - DNA, 75 bp, synthetic construct
  source 1..75: mol_type = other DNA
agaaaacgctggtatctgcagcgcagccaggatgcactgaaacaccgtcgtgcaaaagcggcagccagtaagcgc

SEQ ID NO: 748454 - DNA, 75 bp, synthetic construct
  source 1..75: mol_type = other DNA
atgagcgagattaattatcaggaagggcatgaaacggtagggcaggaaaaaccagttgcatggcgatatcgctat

SEQ ID NO: 748455 - DNA, 75 bp, synthetic construct
  source 1..75: mol_type = other DNA
aagctaagccggactgcaaattaccggagaaggcgatggactacctgaagcgaaacggactgataagcgcggagg

SEQ ID NO: 748456 - DNA, 75 bp, synthetic construct
  source 1..75: mol_type = other DNA
gatgtgggatcgtgaaaaccgccagcgtctgccacgctatgtctggataacaccggctggctggcagatgctggg

SEQ ID NO: 748457 - DNA, 75 bp, synthetic construct
  source 1..75: mol_type = other DNA
cctttttacgtgcagaaacggacgttcgctggtcgcaaatatgctttccgtccggaaaaacagcacctcctcgat

SEQ ID NO: 748458 - DNA, 75 bp, synthetic construct
  source 1..75: mol_type = other DNA
ggcaactgaggaaagcgaaaccggactgcaaattaccggataaagcgatggactacctgaagcgaaacggactga

SEQ ID NO: 748459 - DNA, 75 bp, synthetic construct
  source 1..75: mol_type = other DNA
taatcgaagaggctaaattaagaatagcgattgcgaaatgtcacccaagttcagaaatggcacgggtagagtgcg

SEQ ID NO: 748460 - DNA, 75 bp, synthetic construct
  source 1..75: mol_type = other DNA
tgacgcctcaattaacgggtaaaggccagcagtggttgacgcgtaaactgctcgatgctggcttgttaaaaccgg

SEQ ID NO: 748461 - DNA, 75 bp, synthetic construct
  source 1..75: mol_type = other DNA
cgctcggtctggatcgtgactccggcgtggtgtctgaactgttcgatgagcgcaacgatgcggtgaaagcactgc

SEQ ID NO: 748462 - DNA, 75 bp, synthetic construct
  source 1..75: mol_type = other DNA
gctgtgctgccattctgggtaaagctgacaatccactagcatccagtaatcaggttagcgaattaacaatgtggg

SEQ ID NO: 748463 - DNA, 75 bp, synthetic construct
  source 1..75: mol_type = other DNA
aggtacggcgtgagaatccgccagttgaaaccggagcatggaaagacgccattgactgggtgctcaaagaggtct

SEQ ID NO: 748464 - DNA, 75 bp, synthetic construct
  source 1..75: mol_type = other DNA
gctattgaggcggatgtcagccggagtgagtcggaagccgagtattaccgttataaagttgatgaggctggcgag

SEQ ID NO: 748465 - DNA, 75 bp, synthetic construct
  source 1..75: mol_type = other DNA
tggataaagccgctgctgtccgtcattgaaaagggtaacaacaactttgctgggattaggcagattgagcaaaac

SEQ ID NO: 748466 - DNA, 75 bp, synthetic construct
  source 1..75: mol_type = other DNA
tgctgaccaaagataaatctggcggtaacggtaaggcgcaccgtaaaggcgaagtgttgttcatcgacgctcgcc

SEQ ID NO: 748467 - DNA, 75 bp, synthetic construct
  source 1..75: mol_type = other DNA
caaggcgggcagggcgtgcatatccctttacccgaaggggactggcggaagcagaacctgaagctgaatatggcg

SEQ ID NO: 748468 - DNA, 75 bp, synthetic construct
  source 1..75: mol_type = other DNA
caaatatcaccttaggcaagccatttattgtgattagcgtcggggatgcgcgtggtattggtgtggtgaaagcgc

SEQ ID NO: 748469 - DNA, 75 bp, synthetic construct
  source 1..75: mol_type = other DNA
gtggggactgttgaattctgccgatagtgcgcttctgttggggacgagtgtgctggtggcggcgctggcaggtat

SEQ ID NO: 748470 - DNA, 75 bp, synthetic construct
  source 1..75: mol_type = other DNA
ccgagaagatggcgcgcctgacggcgcagcttaaagatcagcttgaagagagcgcgaagttggaagcgcagatta

SEQ ID NO: 748471 - DNA, 75 bp, synthetic construct
  source 1..75: mol_type = other DNA
gcagctgaaagatcagctggaagagagcgcgaagctggaagcacagattaaggcgaatctgggggggctgggtta

SEQ ID NO: 748472 - DNA, 75 bp, synthetic construct
  source 1..75: mol_type = other DNA
cacccggatctgcgtgccgacttcgtgatggcaaccccgccgttcaacatgaaggagtggtggaacgcgaagctg

SEQ ID NO: 748473 - DNA, 75 bp, synthetic construct
  source 1..75: mol_type = other DNA
tccagaactggcaggcggataaaaactacgaagacgaagccgggttctgcttctccgcaacgctggaagatatcc

SEQ ID NO: 748474 - DNA, 75 bp, synthetic construct
  source 1..75: mol_type = other DNA
ggcgagattcgtcgtaacctgatcgaagccgatctggtggagtgcatggtggcattgccgggccagttgtttacc

SEQ ID NO: 748475 - DNA, 75 bp, synthetic construct
  source 1..75: mol_type = other DNA
ttctccgcgacgctggaagatattcagaaaaacgactttgtgctgaccccagggcgttacgttggtgccgccgag

SEQ ID NO: 748476 - DNA, 75 bp, synthetic construct
  source 1..75: mol_type = other DNA
tttgcaggcggtattgggtaatgactccaacttattgatagtgttttatgttcagataatgcccgatgactttgt

SEQ ID NO: 748477 - DNA, 75 bp, synthetic construct
  source 1..75: mol_type = other DNA
atgaacacaaaacagtctgttgctcaactcgccgtaccgcaccgcaagcgcctttcatcaacgatggtggtggcg

SEQ ID NO: 748478 - DNA, 75 bp, synthetic construct
  source 1..75: mol_type = other DNA
cagagttgtggacttttatcgtcttcagtttcgggtggcaagaaaaacactgattgaattactgaatgctgaaaa

SEQ ID NO: 748479 - DNA, 75 bp, synthetic construct
  source 1..75: mol_type = other DNA
attcttaatgacctgaataccatcagtattcatgataccgggcgggagtctgagcttgttcaggccgaagccaga

SEQ ID NO: 748480 - DNA, 75 bp, synthetic construct
  source 1..75: mol_type = other DNA
caaataaaaacagtgttgcattaggtgctaattctgtaaccactcgtgataacgaagtttatattggctataaaa

SEQ ID NO: 748481 - DNA, 75 bp, synthetic construct
  source 1..75: mol_type = other DNA
ccagaagaccagtgaggttaacgaaaaagtcgaatcccgcacactggttggtgtgagttctgatggcaccctgac

SEQ ID NO: 748482 - DNA, 75 bp, synthetic construct
  source 1..75: mol_type = other DNA
caggtaaagcattagatgcagcggttgatgccgttaaaaatacccctgcggcaatgattgtatcaaaaataccca

SEQ ID NO: 748483 - DNA, 75 bp, synthetic construct
  source 1..75: mol_type = other DNA
cgcaggagcttgcccggtatcccagggtggatttaacgggatctgtgacccgggatgacaggcagataggtgtca

SEQ ID NO: 748484 - DNA, 75 bp, synthetic construct
  source 1..75: mol_type = other DNA
tgaatttaagcggtaccggcgatctttctgtggtgcctgccgggcgtaatagcgaaatgaccttaaccagcaact

SEQ ID NO: 748485 - DNA, 75 bp, synthetic construct
  source 1..75: mol_type = other DNA
ggccgcatcccagttttttaggtgattttctaccagccaaacgggaagttagcgagtcaggttttcaggcgcaat

SEQ ID NO: 748486 - DNA, 75 bp, synthetic construct
  source 1..75: mol_type = other DNA
tatatttgcttctggagctattgaggctgatgtgcgtcggagtgaatcagaagctgaatattattattttaaaga

SEQ ID NO: 748487 - DNA, 75 bp, synthetic construct
  source 1..75: mol_type = other DNA
caggctcgttcagcacactggccggtcgtcacagcaacaggcagtaaactcctttcccagagtcaccgctacgac

SEQ ID NO: 748488 - DNA, 75 bp, synthetic construct
  source 1..75: mol_type = other DNA
attcttaatgatctgaatactatcagtattcatgataccgggcgggagtctgagtttgttcaggctgaagccaga

SEQ ID NO: 748489 - DNA, 75 bp, synthetic construct
  source 1..75: mol_type = other DNA
gtacgaagacgaagccggattctgcttctcagcaacgctggaggatatccagaaaaacgactttgtgctgacccc

SEQ ID NO: 748490 - DNA, 75 bp, synthetic construct
  source 1..75: mol_type = other DNA
taatcaactttgcccgtattctcggcggtcgtctgccaggctcacttgcccactgtaatattctcgccaatatgc

SEQ ID NO: 748491 - DNA, 75 bp, synthetic construct
  source 1..75: mol_type = other DNA
tgttcggggcaatttctggttcagctgttgcttcggcggctgcgatgggcggcgtcatgcatccacagcaggtta

SEQ ID NO: 748492 - DNA, 75 bp, synthetic construct
  source 1..75: mol_type = other DNA
cactgcagattatgttgatgcgggttactgggcagcaagtgctatcaaagaagcgaaaaaatactgcacaccaaa

SEQ ID NO: 748493 - DNA, 75 bp, synthetic construct
  source 1..75: mol_type = other DNA
taaaaacagatgaattagagcgattgataaagcatctcgaaagagtttacccaatagatccagagggaaaaataa

SEQ ID NO: 748494 - DNA, 75 bp, synthetic construct
  source 1..75: mol_type = other DNA
cagaattcatgcgtttattattatttttgaatttgaaaatcacattagtataatcaaaaaaagctgctctaatat

SEQ ID NO: 748495 - DNA, 75 bp, synthetic construct
  source 1..75: mol_type = other DNA
gcggtgtcagtctggctgcggtcgcgaactccgaagtcgatgcactgattaaggtgctgccgcgcatgacggcac

SEQ ID NO: 748496 - DNA, 75 bp, synthetic construct
  source 1..75: mol_type = other DNA
tcgtacctgtcacgcggcgatcatcgctcgtgaactcggcattccggcggtagtgggctgtggtgatgcaacaga

SEQ ID NO: 748497 - DNA, 75 bp, synthetic construct
  source 1..75: mol_type = other DNA
gacgcatgggcgacgttggtcgcagccttttgcgtggcaacagtgcgctggtagatgagtgtgtcgccttttatg

SEQ ID NO: 748498 - DNA, 75 bp, synthetic construct
  source 1..75: mol_type = other DNA
tcgacgttgacttctgtatggagaaacgtgaccaggttatcgaacacgtggcggacatgtacggtcgcgatgcgg

SEQ ID NO: 748499 - DNA, 75 bp, synthetic construct
  source 1..75: mol_type = other DNA
tcgttcgtgaagatttgctgggcaaagcgaatatcgcgtgtccgtcgattctggattattccatcctcaacgata

SEQ ID NO: 748500 - DNA, 75 bp, synthetic construct
  source 1..75: mol_type = other DNA
tcgacgaaacgccagacttcggcaaagatgtggtggtcgccgctgacttctcttcaaccattctttcccgtccga

SEQ ID NO: 748501 - DNA, 75 bp, synthetic construct
  source 1..75: mol_type = other DNA
tggaaaatccggtcaatcgtggtgagcaggtcatcgaacaggtcacgctgatgaaacctaacgccgggacgctgc

SEQ ID NO: 748502 - DNA, 75 bp, synthetic construct
  source 1..75: mol_type = other DNA
aggttgaactaaaaacgaaggaattagagcgattgataaagcatctcgaaagagtttatcccatcgattcagaag

SEQ ID NO: 748503 - DNA, 75 bp, synthetic construct
  source 1..75: mol_type = other DNA
gtcgttaacggcctgctgacgctgatgatgcgtctgatcgagcgcaaagcactggcgtttgagcgaaggaattaa

SEQ ID NO: 748504 - DNA, 75 bp, synthetic construct
  source 1..75: mol_type = other DNA
acgttgcaggaatatccggcactgtggcatctgttgtcagaaccgtggttatgcgcgctgattgcgctgtcactg

SEQ ID NO: 748505 - DNA, 75 bp, synthetic construct
  source 1..75: mol_type = other DNA
ggcggggattatttacctggttgtgaacggcctgctgacactgatgatgcgtctgatcgagcgtaaagcgctggc

SEQ ID NO: 748506 - DNA, 75 bp, synthetic construct
  source 1..75: mol_type = other DNA
agaaaaacgactttgtgctgacccctgggcgctatgttagtgctgccgagcaggaagaagatactgaaccctttg

SEQ ID NO: 748507 - DNA, 75 bp, synthetic construct
  source 1..75: mol_type = other DNA
gaagtgggtatgggtaaagttggtatgccgctgcgtgtcgccgtaaccggtgcggggcagtctccagcactggat

SEQ ID NO: 748508 - DNA, 75 bp, synthetic construct
  source 1..75: mol_type = other DNA
tggaagtgggtatgggtaaagttggtatgccgctgcgtgtcgccgtaaccggtgcggggcagtctccggcgctgg

SEQ ID NO: 748509 - DNA, 75 bp, synthetic construct
  source 1..75: mol_type = other DNA
cggctggatggcccaatagccgggctttgctcacttgaaaaaggggccgcctacatcggattaacaaaaacagca

SEQ ID NO: 748510 - DNA, 75 bp, synthetic construct
  source 1..75: mol_type = other DNA
caaactgcacgttcgcgacgctaaagaaggctctgtgaagggctacgcgggtgacaccgccaccaccagtgaaat

SEQ ID NO: 748511 - DNA, 75 bp, synthetic construct
  source 1..75: mol_type = other DNA
tgagatcattaaaagtaaatgtatcaggaagtaatgttacgctacaaagttatataattaaaaatggattttata

SEQ ID NO: 748512 - DNA, 75 bp, synthetic construct
  source 1..75: mol_type = other DNA
tggtgtatgtgctttcggctgcatggctgcacggagaggctaaccataatgccgaagaaggcacggcagatcttg

SEQ ID NO: 748513 - DNA, 75 bp, synthetic construct
  source 1..75: mol_type = other DNA
ccctgaagatgaaaattcggatggcgtatggtggtttaacgccagagagtgggacaagctggctgacgaactacc

SEQ ID NO: 748514 - DNA, 75 bp, synthetic construct
  source 1..75: mol_type = other DNA
accgtcaatggtaagagggtttacaaaggcagaaagtcaaagttagagcagaacctagataacagaaaaaaccag

SEQ ID NO: 748515 - DNA, 75 bp, synthetic construct
  source 1..75: mol_type = other DNA
acacactaccaggtatttaccgtgaggtgtaccagcgggatctggattgggtcgtagatgatcaatcacgttttg

SEQ ID NO: 748516 - DNA, 75 bp, synthetic construct
  source 1..75: mol_type = other DNA
cgaagatgtctggaagttgctgcgcggcgcattccgatatgctcctgaagatattgatgaatgggaaagtccgtg

SEQ ID NO: 748517 - DNA, 75 bp, synthetic construct
  source 1..75: mol_type = other DNA
atccgatgccaaacagagtaatattgctacccgcgtgataaatgcggcactggacacggcgaaagatagcaataa

SEQ ID NO: 748518 - DNA, 75 bp, synthetic construct
  source 1..75: mol_type = other DNA
aagcatgttccaggtccttactggctaaaataccgtcagcaatggctcaaagaattgctggagatagagcgcgat

SEQ ID NO: 748519 - DNA, 75 bp, synthetic construct
  source 1..75: mol_type = other DNA
tcacgctagtgtatctggccctgcttggcctgcccccggaaatgcgcaacaaagatgtttttgtagtgtcatccg

SEQ ID NO: 748520 - DNA, 75 bp, synthetic construct
  source 1..75: mol_type = other DNA
tgaacttcaggttttacagcgcagaattatcgatgccagcgaatcctctgtattggtcagtgaggaaaacgaacg

SEQ ID NO: 748521 - DNA, 75 bp, synthetic construct
  source 1..75: mol_type = other DNA
ctggcagtaatctatggagtgccgcaaaagagctttcaggtgaggttgcagatgccgctgttcagagcacccctg

SEQ ID NO: 748522 - DNA, 75 bp, synthetic construct
  source 1..75: mol_type = other DNA
atcaatgcaaatgccgtagaaacaggaaataaagcggcacaaacaattgatgctgctttgggccagtctgctaca

SEQ ID NO: 748523 - DNA, 75 bp, synthetic construct
  source 1..75: mol_type = other DNA
atgagcgatatcccggcactggcaggactgattaccacgatggttacgcagggctatgagtatcgtcgtgatgac

SEQ ID NO: 748524 - DNA, 75 bp, synthetic construct
  source 1..75: mol_type = other DNA
gacttatcgaaagaaaaccgtgagtacgcgatcaaggtcaatactcatcgtgctcgctatttaggtggtgaaatc

SEQ ID NO: 748525 - DNA, 75 bp, synthetic construct
  source 1..75: mol_type = other DNA
aatggcaacttggatgtaaaagtcggaagtcttggcgctgaaggtaaggcaaatctcgataagttggctccatat

SEQ ID NO: 748526 - DNA, 75 bp, synthetic construct
  source 1..75: mol_type = other DNA
ttcctgaaaacgcctttgttgatcagtctacgggcctggcgtttacccctggcgaaaacccgtttgaaaaagggg

SEQ ID NO: 748527 - DNA, 75 bp, synthetic construct
  source 1..75: mol_type = other DNA
agagccagagccagagccagagccagagccaataagatcctctttaaaggaaaatactgagactgtagaaatgaa

SEQ ID NO: 748528 - DNA, 75 bp, synthetic construct
  source 1..75: mol_type = other DNA
accatatacatcatgaatataatattgaaacttcattagattttagttctcctttgccagagccggagcgagagc

SEQ ID NO: 748529 - DNA, 75 bp, synthetic construct
  source 1..75: mol_type = other DNA
accataaacagcatgaatataatattgaaacttcattagattttagttctcctttgccagagccggagcgagagc

SEQ ID NO: 748530 - DNA, 75 bp, synthetic construct
  source 1..75: mol_type = other DNA
actatacacatcatgaatataatattgaaacttcattagattttagttctcctttgccagagccggagcgagagc

SEQ ID NO: 748531 - DNA, 75 bp, synthetic construct
  source 1..75: mol_type = other DNA
acgatacacaacatgaatataatattgaaacttcattagattttagttctcctttgccagagccggagcgagagc

SEQ ID NO: 748532 - DNA, 75 bp, synthetic construct
  source 1..75: mol_type = other DNA
acgataaacaccatgaatataatattgaaacttcattagattttagttctcctttgccagagccggagcgagagc

SEQ ID NO: 748533 - DNA, 75 bp, synthetic construct
  source 1..75: mol_type = other DNA
accatagacaacatgaatataatattgaaacttcattagattttagttctcctttgccagagccggagcgagagc

SEQ ID NO: 748534 - DNA, 75 bp, synthetic construct
  source 1..75: mol_type = other DNA
attactttcctcgcaagggataagaaaacccaaaaaccatttacgcttgaaattgatgtttctgactggaataaa

SEQ ID NO: 748535 - DNA, 75 bp, synthetic construct
  source 1..75: mol_type = other DNA
gatcttataaagatacatttcaacttattttttacaaaaacaacatacgttattacaaacctgctatttattatg

SEQ ID NO: 748536 - DNA, 75 bp, synthetic construct
  source 1..75: mol_type = other DNA
tcacaaggatgaaaaaaaaggtaatgaacatcctgtatcttcatcaagtattaagccagtcgttgactattacat

SEQ ID NO: 748537 - DNA, 75 bp, synthetic construct
  source 1..75: mol_type = other DNA
actatatacaccatgaatataatattgaaacttcattagattttagttctcctttgccagagccggagcgagagc

SEQ ID NO: 748538 - DNA, 75 bp, synthetic construct
  source 1..75: mol_type = other DNA
acaatagacaccatgaatataatattgaaacttcattagattttagttctcctttgccagagccggagcgagagc

SEQ ID NO: 748539 - DNA, 75 bp, synthetic construct
  source 1..75: mol_type = other DNA
acaatacacagcatgaatataatattgaaacttcattagattttagttctcctttgccagagccggagcgagagc

SEQ ID NO: 748540 - DNA, 75 bp, synthetic construct
  source 1..75: mol_type = other DNA
atggaaagccggatttatccggcggtgactgcgatcccggcactggcagacctgattacgacgatggttacgcag

SEQ ID NO: 748541 - DNA, 75 bp, synthetic construct
  source 1..75: mol_type = other DNA
tggagcgtttttctttactgtcaaaatcgctggcgatggatagcgagaacctgatgttctctctgtttaagaacg

SEQ ID NO: 748542 - DNA, 75 bp, synthetic construct
  source 1..75: mol_type = other DNA
atcgggtgccagttgcctctatctggtacgcagagtgattaatcgtggtattgtggagaaagaagccatcattaa

SEQ ID NO: 748543 - DNA, 75 bp, synthetic construct
  source 1..75: mol_type = other DNA
tcgcaaatgaagtaagagttcaagcagaaagagacaatataataaactggagtagcctatcatgggggaaaggag

SEQ ID NO: 748544 - DNA, 75 bp, synthetic construct
  source 1..75: mol_type = other DNA
cgattgaaaatgctggcggatgagcggctgtataagagtaagaaaaacggcagggcacagattagctggcagtaa

SEQ ID NO: 748545 - DNA, 75 bp, synthetic construct
  source 1..75: mol_type = other DNA
accaaagcaatgggcagaaaatcctttgacgaagatttaaaagccttaccggaaaaaggcggttatttatgcctg

SEQ ID NO: 748546 - DNA, 75 bp, synthetic construct
  source 1..75: mol_type = other DNA
cgggtttgtacattgattattttctttgccgcattggtggcagtgatatcgggtgccagttgcctctatctggta

SEQ ID NO: 748547 - DNA, 75 bp, synthetic construct
  source 1..75: mol_type = other DNA
ggtgctctatgaagtggaccttataaacatggtggaaattgtggacggtgtggacctgatggaagcgcaccgcaa

SEQ ID NO: 748548 - DNA, 75 bp, synthetic construct
  source 1..75: mol_type = other DNA
ttagaacagcgccggctgttaatccgcgttcgaaatatcgacgatttggaaaaaatttataagcttctcgtttca

SEQ ID NO: 748549 - DNA, 75 bp, synthetic construct
  source 1..75: mol_type = other DNA
aaccgaaagcgataaaacatacggcacccgtgttcttggtggcttaagcgatggtacgcgtaacagtgatgcggc

SEQ ID NO: 748550 - DNA, 75 bp, synthetic construct
  source 1..75: mol_type = other DNA
atgagtcattataataattatgatgttttagctaatgaagtaaggatacaggcaaaaaaagaaaatattataaat

SEQ ID NO: 748551 - DNA, 75 bp, synthetic construct
  source 1..75: mol_type = other DNA
agcgttcatcaaggacgcaatgaacagggtatggcacatatagcaacaggatttgcgcgtcagatgcgtcgtcag

SEQ ID NO: 748552 - DNA, 75 bp, synthetic construct
  source 1..75: mol_type = other DNA
agcgttcatcaagggcgtaacgaacagggaatggcgcatatcgcgacgggatttgcccgccagatgcgtcgccat

SEQ ID NO: 748553 - DNA, 75 bp, synthetic construct
  source 1..75: mol_type = other DNA
catgttaaaaatacggggtttatctcttttgacggtaaaactttcgtctattatctctatccggttaaccacaac

SEQ ID NO: 748554 - DNA, 75 bp, synthetic construct
  source 1..75: mol_type = other DNA
gcagaacagaccgtattgattatgcagttggtagcgttgaccgccgggttactaaaaatacacaggctattcagt

SEQ ID NO: 748555 - DNA, 75 bp, synthetic construct
  source 1..75: mol_type = other DNA
caaaaattacaggtttcagcgtcgaagatggggagaatgggaaggtttctctgggtagcgatgcgaaagcctctg

SEQ ID NO: 748556 - DNA, 75 bp, synthetic construct
  source 1..75: mol_type = other DNA
tgatagcgttgttcgtgatgtatataacaaagtatacagtctgcagagaacaaaaattacaggtttcagcgtcga

SEQ ID NO: 748557 - DNA, 75 bp, synthetic construct
  source 1..75: mol_type = other DNA
cccgcgaccgcaaaccgaagtcggcggcttttctgctgcaaaaacgctggactggcatgaacttcggtgaaaaac

SEQ ID NO: 748558 - DNA, 75 bp, synthetic construct
  source 1..75: mol_type = other DNA
ctcagcaggcgcacttacaggcgattaaagagctgattgcgcgtgacaaaaaccacccaagcgtggtgatgtgga

SEQ ID NO: 748559 - DNA, 75 bp, synthetic construct
  source 1..75: mol_type = other DNA
atgttacgtcctgtagaaaccccaactcgtgaaatcaaaaaactcgatggcctgtgggcattcagcctggatcac

SEQ ID NO: 748560 - DNA, 75 bp, synthetic construct
  source 1..75: mol_type = other DNA
gggggggtacagtgataaacaggctgttgccgtgggtgttggttaccgtttcaacgagcagaccgcagcgaaagc

SEQ ID NO: 748561 - DNA, 75 bp, synthetic construct
  source 1..75: mol_type = other DNA
tgctgttggtaacgatgctagggctacagaaaaagcgtcaacagcagtgggctcatgggctgctgcggacggtaa

SEQ ID NO: 748562 - DNA, 75 bp, synthetic construct
  source 1..75: mol_type = other DNA
tactgttggtagtgttgaccgccgggttactaaaaatacacaggctattcagtccacttcccgtcagttgcagga

SEQ ID NO: 748563 - DNA, 75 bp, synthetic construct
  source 1..75: mol_type = other DNA
gtgaggatgaggtttatatcggttatgagagtggaccagatgaaacttataaaacgcgaatgcttggaggactga

SEQ ID NO: 748564 - DNA, 75 bp, synthetic construct
  source 1..75: mol_type = other DNA
tctgttatacacggtagtacttatcgtatttactataacaaatcctctggttggggaacaatgcgatatgttctg

SEQ ID NO: 748565 - DNA, 75 bp, synthetic construct
  source 1..75: mol_type = other DNA
gtgagttctcagtagctgttggtaacggtgctaaggctacaggaaaagcgtcaacatctgttggctcatggtcat

SEQ ID NO: 748566 - DNA, 75 bp, synthetic construct
  source 1..75: mol_type = other DNA
aacttgccacatgggcaacagccgatccgtcccgacggattgaacggttgctgcgtctgataacactgccagaat

SEQ ID NO: 748567 - DNA, 75 bp, synthetic construct
  source 1..75: mol_type = other DNA
tgggggaatgaaccgggcgtgctggctggtcgtctctgcaaccgtgcggtcaccatcgccgacagtccggcacgg

SEQ ID NO: 748568 - DNA, 75 bp, synthetic construct
  source 1..75: mol_type = other DNA
aagtgaagccaccaaaggacggtgacatcaccatcacctggaccagtagcgaagcggtacagatttaccttgtgg

SEQ ID NO: 748569 - DNA, 75 bp, synthetic construct
  source 1..75: mol_type = other DNA
gccggaaaaagacaaagtgcagattgcgatcgtggttcgcccgtataactgcccgaaagaaatcaccatcagcat

SEQ ID NO: 748570 - DNA, 75 bp, synthetic construct
  source 1..75: mol_type = other DNA
ttcgctcaaccggcgtattaaccggcccggactggctgcggatggggctttcttcgcgccgttggactcacgttg

SEQ ID NO: 748571 - DNA, 75 bp, synthetic construct
  source 1..75: mol_type = other DNA
gggtatggttcattctggccacgcagggaatgcaggatgaagaggggcaggcggattaccttgtgcgtatgtcca

SEQ ID NO: 748572 - DNA, 75 bp, synthetic construct
  source 1..75: mol_type = other DNA
gacgctgcgtattgtggataaggctgcacgccgcgttcgtctgctggccatcggtaagattgccgatcgctcact

SEQ ID NO: 748573 - DNA, 75 bp, synthetic construct
  source 1..75: mol_type = other DNA
gccacacttcaggcgcttgaagcacagcgtttcagtgtgccgatgtggtacccggattatgacggtttttactgg

SEQ ID NO: 748574 - DNA, 75 bp, synthetic construct
  source 1..75: mol_type = other DNA
atgacctggccaaacgtgaccgtgaaccaggtaaaccagctgctgggtgaaaccaatgaagtggaacgcacgctg

SEQ ID NO: 748575 - DNA, 75 bp, synthetic construct
  source 1..75: mol_type = other DNA
agacgaagactggatgaacgcggtcaaacaggcccagagcgtggcatccgtggaaggggttgtcctggcatttga

SEQ ID NO: 748576 - DNA, 75 bp, synthetic construct
  source 1..75: mol_type = other DNA
gaaatggcccgtcaggtgcgtttgctggctatcccaaaaatcgccgatcgctcactgaactccaccccggcaagt

SEQ ID NO: 748577 - DNA, 75 bp, synthetic construct
  source 1..75: mol_type = other DNA
tgacaattgacacaaatggtcagatggtcatgaagagcaaacagcagttaaaagaagattttggtatctcagcaa

SEQ ID NO: 748578 - DNA, 75 bp, synthetic construct
  source 1..75: mol_type = other DNA
atgacctggccaattgtgaccgtaaaccaggtaaatcagctgatgggcgaaaccaatgaggtggaacgcacactg

SEQ ID NO: 748579 - DNA, 75 bp, synthetic construct
  source 1..75: mol_type = other DNA
ttattacccgccaacggatgattgctgagatatttacttccggtatgtataagcgcctgattaccaatgtgcgca

SEQ ID NO: 748580 - DNA, 75 bp, synthetic construct
  source 1..75: mol_type = other DNA
gctgacctacgtcaacgactatggcgcgcggatgccgctgtattttaaatgtggcggcgatacctgccaggtgga

SEQ ID NO: 748581 - DNA, 75 bp, synthetic construct
  source 1..75: mol_type = other DNA
ggtgcgcgtttgccgctgttcttccgctgtacgggaaatacctgtcaggtggacgaagagcaaaacagcaaaggc

SEQ ID NO: 748582 - DNA, 75 bp, synthetic construct
  source 1..75: mol_type = other DNA
tgggagtgaaaatggacagcgtaccggtactgacttacgtcaacgactttgacgcgcggatgccactgtttttca

SEQ ID NO: 748583 - DNA, 75 bp, synthetic construct
  source 1..75: mol_type = other DNA
cgctgtatatcatcgcctttgccgttgccacgctgatgctctctcttggcggttacgctggatataaatatctgg

SEQ ID NO: 748584 - DNA, 75 bp, synthetic construct
  source 1..75: mol_type = other DNA
atgacgaatctcaaaacatccataacgttgctggcattgctactaaccactgccagcctgtcagcacaggcctct

SEQ ID NO: 748585 - DNA, 75 bp, synthetic construct
  source 1..75: mol_type = other DNA
tccaacacgctgcaaatcgccctccagacgcgtatcaaacttttctggcgaccgaaagccctggaaaaaaccact

SEQ ID NO: 748586 - DNA, 75 bp, synthetic construct
  source 1..75: mol_type = other DNA
actgtggtctttccgcttatggcaatggcgcgacaaaacacagtcgcaccatcgcatcacgcgcagcgcttttaa

SEQ ID NO: 748587 - DNA, 75 bp, synthetic construct
  source 1..75: mol_type = other DNA
gttatcaggcgttactgtggtctttccgcttatggcaatggcgcgacaaaacgcggtcgcaccatcgcattacgc

SEQ ID NO: 748588 - DNA, 75 bp, synthetic construct
  source 1..75: mol_type = other DNA
gcgcgtaatcgtgggatcgaggcggcgacgggtaaatatgtcgcttttgtcgatgctgacgatgaggtctatccc

SEQ ID NO: 748589 - DNA, 75 bp, synthetic construct
  source 1..75: mol_type = other DNA
acctaaagccctggaaaaagctagcatgcaaaacccatggcagcataaagtgaccttaacccgtaacggtcagga

SEQ ID NO: 748590 - DNA, 75 bp, synthetic construct
  source 1..75: mol_type = other DNA
tgaatgtgaagatgggtagcgtgccggtactgacctatgtcaacgactatggcgctcggatgccgctctttttca

SEQ ID NO: 748591 - DNA, 75 bp, synthetic construct
  source 1..75: mol_type = other DNA
aattgggtgctacgacgctagcgttactgcttagcgctgccagtttgtctgcccaggcttctgtaacgccagatc

SEQ ID NO: 748592 - DNA, 75 bp, synthetic construct
  source 1..75: mol_type = other DNA
acggttcaatcagcatcggccaaaaaaacaccttattgcgtcatgattatggatattgaccacttcaaaaaagtc

SEQ ID NO: 748593 - DNA, 75 bp, synthetic construct
  source 1..75: mol_type = other DNA
gatactgttgcagcacggcattgactccggtgtcgccacagcgatatgtcgatcatcggcctctgtgccctgctc

SEQ ID NO: 748594 - DNA, 75 bp, synthetic construct
  source 1..75: mol_type = other DNA
ctgcgcgcgttatcggagcgcttccgcgcaacccgtgtgcgagcacaaaaataccttgcagtctattttccgttc

SEQ ID NO: 748595 - DNA, 75 bp, synthetic construct
  source 1..75: mol_type = other DNA
cgatcctgaaagcatcgataatattcgcggtgccctgcattatctggcgaaagaagagcaaaaagacgggctgtg

SEQ ID NO: 748596 - DNA, 75 bp, synthetic construct
  source 1..75: mol_type = other DNA
ccatattacgtcattattagcaatgccagtgtgcagaagaatggtaattcaccagccagttttaagccgctggtg

SEQ ID NO: 748597 - DNA, 75 bp, synthetic construct
  source 1..75: mol_type = other DNA
atatatccctttgcggagccggaagcccgttgcctcgccggtaatcccggctatcccggatctgcaggaccgttc

SEQ ID NO: 748598 - DNA, 75 bp, synthetic construct
  source 1..75: mol_type = other DNA
tggtggataccggaaccccggcagaacttgaagcgcgctgtccggcgttccgcgcactgatgaccggcgacagcg

SEQ ID NO: 748599 - DNA, 75 bp, synthetic construct
  source 1..75: mol_type = other DNA
cagcaagatgaagtcaccgacagcgaacgtcagcaacttatgcagagcgtcaatccggcgctggtgttgcgtaac

SEQ ID NO: 748600 - DNA, 75 bp, synthetic construct
  source 1..75: mol_type = other DNA
tttattatcgccgcgagccggaaaaagttcgccagttggctgattttgccattcgtcattactggccgcaccttc

SEQ ID NO: 748601 - DNA, 75 bp, synthetic construct
  source 1..75: mol_type = other DNA
ggcgcgggcgtctggggaggagaaacattactaccgggcatgtcaccactggcgcaggtctacagtggtcatcag

SEQ ID NO: 748602 - DNA, 75 bp, synthetic construct
  source 1..75: mol_type = other DNA
atttagtagtcaatgtgaggactacagtttaaatattgctgagttaacaaatgaaaatggccgagttgtgtggaa

SEQ ID NO: 748603 - DNA, 75 bp, synthetic construct
  source 1..75: mol_type = other DNA
tggtcaccatcctgtcggctgtggcacaggctgaacgccggaggatcctagaacgcacgaatgagggccgacagg

SEQ ID NO: 748604 - DNA, 75 bp, synthetic construct
  source 1..75: mol_type = other DNA
atgaggcgttgcgaaatcctttcagcgacagagatgatgactatgtcagtcgtccacctgactggggtaaacggc

SEQ ID NO: 748605 - DNA, 75 bp, synthetic construct
  source 1..75: mol_type = other DNA
cgcaataacgacccgaagcagccctacctggcacaaagctggatggaggacgaaaagggcaacaaaatcagctcg

SEQ ID NO: 748606 - DNA, 75 bp, synthetic construct
  source 1..75: mol_type = other DNA
tgaaaatatggttggcttcttctgggtgattgaatggacggttgatcatggttttcatgcgcatgtggtcttctg

SEQ ID NO: 748607 - DNA, 75 bp, synthetic construct
  source 1..75: mol_type = other DNA
aaagagttatcccggcgctggcgctgctggtggcggccgccagttttacaacccacgcatcggtgacgcccgacc

SEQ ID NO: 748608 - DNA, 75 bp, synthetic construct
  source 1..75: mol_type = other DNA
atgcgatgatgaacggccaggtgaaggtgcaggggctgccggatatcaacaagctgccagccgaccgcgagagcg

SEQ ID NO: 748609 - DNA, 75 bp, synthetic construct
  source 1..75: mol_type = other DNA
gtttgatttactttgttaaaaccgtcattatcattcagcaaattattgaggggcgtttgacaagcagtgttgttc

SEQ ID NO: 748610 - DNA, 75 bp, synthetic construct
  source 1..75: mol_type = other DNA
gataacgcactttacgaggcgaaagagaccgggcgtaataaggtggttgtgagggatgtggtgaatttttgtgag

SEQ ID NO: 748611 - DNA, 75 bp, synthetic construct
  source 1..75: mol_type = other DNA
aatttacacattgccgagttaaccaatgaaaatgatcaggtggtttggaaagcctcatatgttaccataatgatt

SEQ ID NO: 748612 - DNA, 75 bp, synthetic construct
  source 1..75: mol_type = other DNA
ggcgcacgtttaccgctggtcttccgttgtgaaggagacacctgcaaggtggatgaagctcaaagcctaaaaggc

SEQ ID NO: 748613 - DNA, 75 bp, synthetic construct
  source 1..75: mol_type = other DNA
ggcgcgcgactgtcgctgatctttaaatgtaatggcaatagttgccaggtggatgcagagcagagccgcaaaggc

SEQ ID NO: 748614 - DNA, 75 bp, synthetic construct
  source 1..75: mol_type = other DNA
ggtgctgacttacgtcaacgactacggcgcgcgactttcgctgatctttaaatgcaacggcaatagttgccaggt

SEQ ID NO: 748615 - DNA, 75 bp, synthetic construct
  source 1..75: mol_type = other DNA
tgaaaatatggttggcttcttctgggtgattgaatggacggttgatcatggttttcatgcgcatgcggttttctg

SEQ ID NO: 748616 - DNA, 75 bp, synthetic construct
  source 1..75: mol_type = other DNA
cggaatgctggcggtctattacacataacagcggttcggcacaccgctgtacatatcagccgcattatacataca

SEQ ID NO: 748617 - DNA, 75 bp, synthetic construct
  source 1..75: mol_type = other DNA
cgatcccgggagcatcgataatattcgcggtgtcctgcattatctggcgaaagaagaacaaaaagacgggctgtg

SEQ ID NO: 748618 - DNA, 75 bp, synthetic construct
  source 1..75: mol_type = other DNA
gcatggtacaagctggatacacaggccaaagataaaaaatggacagcgttagctgcattccctggtggaccaaga

SEQ ID NO: 748619 - DNA, 75 bp, synthetic construct
  source 1..75: mol_type = other DNA
ctgtgccatcctcagccgaaacctccagcgcctccggcatgggcaatgatgccaccgtcgaactctctccagttg

SEQ ID NO: 748620 - DNA, 75 bp, synthetic construct
  source 1..75: mol_type = other DNA
cgggtgctcgtcaaaggaaaatgccctgtgccatcctcagccgaaacctccagcgcctccggcatgggcaatgat

SEQ ID NO: 748621 - DNA, 75 bp, synthetic construct
  source 1..75: mol_type = other DNA
ctctatttctacgacaacagcgttgtggacgttgccaagggtctcaagccatcgccgcgtggtgagttggaaatc

SEQ ID NO: 748622 - DNA, 75 bp, synthetic construct
  source 1..75: mol_type = other DNA
caaaaaacgcatctgctcttgggagtgcgcttttaactccaggttgtatggatgaggagcatttcttgttgttga

SEQ ID NO: 748623 - DNA, 75 bp, synthetic construct
  source 1..75: mol_type = other DNA
agctgcattcccaggtggaccgagagatcaagcaacctctgcatttattgatggcaatctgtatgtgtttggcgg

SEQ ID NO: 748624 - DNA, 75 bp, synthetic construct
  source 1..75: mol_type = other DNA
acaattaatgagggaactagttttaccgttaatatgccggatgtctgggccagcgaattaagtcgggctggtgct

SEQ ID NO: 748625 - DNA, 75 bp, synthetic construct
  source 1..75: mol_type = other DNA
ggttccgcaaggttgcacaattaatgaggtacgagttttactgttaatatgccggatgtgtgggccagtgaattg

SEQ ID NO: 748626 - DNA, 75 bp, synthetic construct
  source 1..75: mol_type = other DNA
gagccgggctggtgccggagcgaagcccgctggtgttactcctgtagcaaccactattccgattaattgtacgaa

SEQ ID NO: 748627 - DNA, 75 bp, synthetic construct
  source 1..75: mol_type = other DNA
ctccccgtcagtaccacagggcgactacctgctgcgggtcgttataacgccctggctattttgcgggtggaatat

SEQ ID NO: 748628 - DNA, 75 bp, synthetic construct
  source 1..75: mol_type = other DNA
aaatattgaggttccacaaggttgcacaattaatgagggcaccagttttaccgttaatatgccggatgtctgggc

SEQ ID NO: 748629 - DNA, 75 bp, synthetic construct
  source 1..75: mol_type = other DNA
ctgtacgaacaaagatattgatgccgtaatgacgctggtttttgatggcaatatttcatcaacgagagatgttaa

SEQ ID NO: 748630 - DNA, 75 bp, synthetic construct
  source 1..75: mol_type = other DNA
accgtctgaagtttatcgatgccgaccaggtgcgcaagttagccgcgccgctggcgaagaatgcttacgggcaat

SEQ ID NO: 748631 - DNA, 75 bp, synthetic construct
  source 1..75: mol_type = other DNA
cgagtccggatggtcttgcgcaggcatttattatcggtgaagagtttattggtggtgatgattgtgctttggtac

SEQ ID NO: 748632 - DNA, 75 bp, synthetic construct
  source 1..75: mol_type = other DNA
ctttatttctatgacaatgacgttgtagaaatggcgaaaaacttgaaaccatctgcacgtggcgaactggaaatt

SEQ ID NO: 748633 - DNA, 75 bp, synthetic construct
  source 1..75: mol_type = other DNA
gacattctgatcatcagtacgccacaggataccccgcgctttgaacagcttctgggcgacggcagtcagtggggg

SEQ ID NO: 748634 - DNA, 75 bp, synthetic construct
  source 1..75: mol_type = other DNA
aacaaggacgtttgtctgtcgctatgatggggcgtggttatgcatggctggatacagggacgcatcaaagcctta

SEQ ID NO: 748635 - DNA, 75 bp, synthetic construct
  source 1..75: mol_type = other DNA
tttgataaaaacggtacagccattagccttgaagaaaaaccgttagagccaaaaagtaacttcgctgtaactggg

SEQ ID NO: 748636 - DNA, 75 bp, synthetic construct
  source 1..75: mol_type = other DNA
aacgcttatgttagcgggtattcgcgatattcttattatcagtacgccacaggatacaccgcgtttccaacaatt

SEQ ID NO: 748637 - DNA, 75 bp, synthetic construct
  source 1..75: mol_type = other DNA
ttttattctgggtgaagaattcattggttcagccccgtgtgcactggtgctgggggataacatcttctacggtca

SEQ ID NO: 748638 - DNA, 75 bp, synthetic construct
  source 1..75: mol_type = other DNA
accgtaaaggatttattgattctgagcaggtcaaagtattagccgaaccgcttatcaagaatcaatatggtcaat

SEQ ID NO: 748639 - DNA, 75 bp, synthetic construct
  source 1..75: mol_type = other DNA
accgatattaaccgtatttatatggaacaggggcgtttatccgttgccatgatgggacgtggttatgcatggctg

SEQ ID NO: 748640 - DNA, 75 bp, synthetic construct
  source 1..75: mol_type = other DNA
atttatcatcggtgaagagtttatcggtggtgatgattgtgctttggttctaggtgataatatcttttacggtca

SEQ ID NO: 748641 - DNA, 75 bp, synthetic construct
  source 1..75: mol_type = other DNA
aaacagctgttaccgatttatgataaaccgatgatctattacccgctctctacactgatgttggcgggtattcgc

SEQ ID NO: 748642 - DNA, 75 bp, synthetic construct
  source 1..75: mol_type = other DNA
ctttatttctatgataacgacgttgtcgaaatggcgaaaaaccttaagccttctgcccgtggtgaactggaaatt

SEQ ID NO: 748643 - DNA, 75 bp, synthetic construct
  source 1..75: mol_type = other DNA
attacttattacttattacttattacttattacttattacttatttattgttttcgcgttgtggttggtttttaa

SEQ ID NO: 748644 - DNA, 75 bp, synthetic construct
  source 1..75: mol_type = other DNA
ttctggcgtgaattcggttgtattcctgttagttgggaaccgctgtatgcacctgtaaatatagaaaaacacccc

SEQ ID NO: 748645 - DNA, 75 bp, synthetic construct
  source 1..75: mol_type = other DNA
tcctgtaagcacagtatgtgtatggaaatataccgcttacttagcgaaacccaatcgatgttggcgggatattac

SEQ ID NO: 748646 - DNA, 75 bp, synthetic construct
  source 1..75: mol_type = other DNA
ttagcgaaacccaatcgatgttggcgggatattactgggtaatggaatatacacaaaacaagggacttcatattc

SEQ ID NO: 748647 - DNA, 75 bp, synthetic construct
  source 1..75: mol_type = other DNA
cgtgaatgaacacatggaaggtctgtttcaacgtttttctaaactgttacctttcagaattgattttgcctacag

SEQ ID NO: 748648 - DNA, 75 bp, synthetic construct
  source 1..75: mol_type = other DNA
gcatgacgcctgaggtttaccagcgtttatcgactgccgttgaactgggaaaatggccagatggtgttgcgctga

SEQ ID NO: 748649 - DNA, 75 bp, synthetic construct
  source 1..75: mol_type = other DNA
tttatcgacagccgttgaactgggtaaatggccagatggtgttgcattgactgaagaacaaaaagagaactgtct

SEQ ID NO: 748650 - DNA, 75 bp, synthetic construct
  source 1..75: mol_type = other DNA
atatttcgcggttaacagagaacatactgtttcttgccagagcagataaaagcaatgttttggtgaaactggatt

SEQ ID NO: 748651 - DNA, 75 bp, synthetic construct
  source 1..75: mol_type = other DNA
aattaatgagcctgaaaaactcttccgtagattttggcggggagataattcgcgtcattccgtaggtcagggact

SEQ ID NO: 748652 - DNA, 75 bp, synthetic construct
  source 1..75: mol_type = other DNA
gaccatcttcccctgtatcgtcagcagcacattttcgcccggatgggtgtggagcttcccgtcagtacaatggcg

SEQ ID NO: 748653 - DNA, 75 bp, synthetic construct
  source 1..75: mol_type = other DNA
cgaatgttatcgaatcttattgttaacgctattcgatattcgccagaaaaatcgcgtattcatataaccagtttt

SEQ ID NO: 748654 - DNA, 75 bp, synthetic construct
  source 1..75: mol_type = other DNA
cgaatgttatcgaatcttattgttaatgccattagatattcaccagaaaaatcgcgtattcatataaccagtttt

SEQ ID NO: 748655 - DNA, 75 bp, synthetic construct
  source 1..75: mol_type = other DNA
caatcagcgcagctggcatttacagaagcattattaatgacacagagatagatgctttacgaattaatattgatg

SEQ ID NO: 748656 - DNA, 75 bp, synthetic construct
  source 1..75: mol_type = other DNA
aaatataccgtttacttagcgaaacccagacgatgttggcgggatattactgggttatggaatatacaccaaaca

SEQ ID NO: 748657 - DNA, 75 bp, synthetic construct
  source 1..75: mol_type = other DNA
cgattatgggcaggattatgccctgattggttcgccaaaaatttatgctgccattcatcagtggggcggtacacc

SEQ ID NO: 748658 - DNA, 75 bp, synthetic construct
  source 1..75: mol_type = other DNA
atcgagtgcgttttatcacctttcatcagagctttggttatgaagagtttattgaaggtttaagagctgagacta

SEQ ID NO: 748659 - DNA, 75 bp, synthetic construct
  source 1..75: mol_type = other DNA
gtgtctccagcctgatgcaaggagggatgtcattggttgaatttgaaaatgcacaaaaagaccttctaacgctca

SEQ ID NO: 748660 - DNA, 75 bp, synthetic construct
  source 1..75: mol_type = other DNA
acttattacttattacttattacttattacttattacttattacttatttattgttttcgcgttgtggttggttt

SEQ ID NO: 748661 - DNA, 75 bp, synthetic construct
  source 1..75: mol_type = other DNA
caaaaaatacagagtatacatcaacaactgtgggtcagcgaaaaatatatgattatttaaacgaaaatgtcaaaa

SEQ ID NO: 748662 - DNA, 75 bp, synthetic construct
  source 1..75: mol_type = other DNA
accagttttcacctggcagcagaggatgacaacgtttgggacaatccaatcgcctggcagcaaatttatgcacct

SEQ ID NO: 748663 - DNA, 75 bp, synthetic construct
  source 1..75: mol_type = other DNA
ttcagatccgagggaaatggatgcagacgaggtctttgatgaattgagtcgtgcagatatccggattttagatga

SEQ ID NO: 748664 - DNA, 75 bp, synthetic construct
  source 1..75: mol_type = other DNA
aaatgaatttcgcgattctgaaagatgtgaatgaacacatggaggggttgtttcaacgtttttctaaactgttac

SEQ ID NO: 748665 - DNA, 75 bp, synthetic construct
  source 1..75: mol_type = other DNA
tgggagatatctggagtcggatcacggaaggggagggttattttcacctgtgcagtactaaagacaaatacccgg

SEQ ID NO: 748666 - DNA, 75 bp, synthetic construct
  source 1..75: mol_type = other DNA
attaatcaacgttatctgcctctgaatactcagagcgtagcttcagaaaaaaaggaaaactatgttctcattatt

SEQ ID NO: 748667 - DNA, 75 bp, synthetic construct
  source 1..75: mol_type = other DNA
gtgtcgtgaatgttaataatttttttagttgctacaattattgcaacaaccatttccagctaggtctttccggag

SEQ ID NO: 748668 - DNA, 75 bp, synthetic construct
  source 1..75: mol_type = other DNA
cactagcctggttgatgctattgagatcagtgattcggggaaaatcagcctaatgctgtcggaaggacgtaaact

SEQ ID NO: 748669 - DNA, 75 bp, synthetic construct
  source 1..75: mol_type = other DNA
caactggtacacctgatggcaaagcggttgccggtaccattattggcgggatgggtgagcaagcagggcgtgtcc

SEQ ID NO: 748670 - DNA, 75 bp, synthetic construct
  source 1..75: mol_type = other DNA
cagctgttaggggaactcatcaatgaggtgtttgccctgaacgtccagcttcatgggcgagaaattaatcaatca

SEQ ID NO: 748671 - DNA, 75 bp, synthetic construct
  source 1..75: mol_type = other DNA
tggggagcatcgcgaacttgttgaacagcttttaggtgagttgatcaatgaggtgtttgccttgaatgttcaact

SEQ ID NO: 748672 - DNA, 75 bp, synthetic construct
  source 1..75: mol_type = other DNA
ggtgattgctgggggactgattttcctgttgcgtcgctactggagcgggacgaaaaagcgcgatcgcatccaccg

SEQ ID NO: 748673 - DNA, 75 bp, synthetic construct
  source 1..75: mol_type = other DNA
gcttgctctggcatttgtgttgttctacgaagcaatcaatggttttcatgacacggcgaatgcggtggcaaccgt

SEQ ID NO: 748674 - DNA, 75 bp, synthetic construct
  source 1..75: mol_type = other DNA
gtacttacgttgacggcagcaccaactccgacgcttggggctttggtttgaaagccggttacgacttcaaactgg

SEQ ID NO: 748675 - DNA, 75 bp, synthetic construct
  source 1..75: mol_type = other DNA
ggcgcgggaaatagcctgccggctttggaatatgggctggccgccggaacggattcaggaggcaaccggactttc

SEQ ID NO: 748676 - DNA, 75 bp, synthetic construct
  source 1..75: mol_type = other DNA
cggctgcgggatatgggctggacgccggaacggattcaggaggcgaccggactttccggtgaagaactgaaaaag

SEQ ID NO: 748677 - DNA, 75 bp, synthetic construct
  source 1..75: mol_type = other DNA
ggctggccgccggaacggattcaggaggtcacgggactttccggtgaagaactgaaaaagctgtttcctgatgag

SEQ ID NO: 748678 - DNA, 75 bp, synthetic construct
  source 1..75: mol_type = other DNA
gaaaattgaggaagttgcaaaggccgtgtgggggattgaaaaaacaagaagtgcaactaatcatgaggtaaaaga

SEQ ID NO: 748679 - DNA, 75 bp, synthetic construct
  source 1..75: mol_type = other DNA
cgcataacgatttaggcattatccgttacatggtcgccatgggaacggcacattatgtcgtcatgatcgaccccg

SEQ ID NO: 748680 - DNA, 75 bp, synthetic construct
  source 1..75: mol_type = other DNA
atgacgattgcagaacgtcttatacagaaaggtttcgacgagggttttaaagaaggttttaaacaaggggctctt

SEQ ID NO: 748681 - DNA, 75 bp, synthetic construct
  source 1..75: mol_type = other DNA
gccagtttccacaacacacgtactttcttcggcggtagcagggacgatggtcgtggatggtggaggcttacagcg

SEQ ID NO: 748682 - DNA, 75 bp, synthetic construct
  source 1..75: mol_type = other DNA
cgcctgtcgtcactgccgacagaagctgaggtcaaccgtctgaatgtggaaatcgtgaccctgcggggtgaactg

SEQ ID NO: 748683 - DNA, 75 bp, synthetic construct
  source 1..75: mol_type = other DNA
ccaagaaacgcgcccgtatccacctgaccccagcggagcgtgagaagaaagacggcaagaaaaagccgccgttct

SEQ ID NO: 748684 - DNA, 75 bp, synthetic construct
  source 1..75: mol_type = other DNA
tcgttgatggcggcggcttacagcgcaaaacggtgaccagcattctgatggcctgggtattcaccctgccagctg

SEQ ID NO: 748685 - DNA, 75 bp, synthetic construct
  source 1..75: mol_type = other DNA
aaactatccataatatgccattcgtggtcactgcgcaggacgttctttgcgcaattttaaccgcgcatcatttgg

SEQ ID NO: 748686 - DNA, 75 bp, synthetic construct
  source 1..75: mol_type = other DNA
acgcaccacaggaggaaattgaaaccgtactcaatttctgccatagcgttggcttgccgacaaatcttcatatgt

SEQ ID NO: 748687 - DNA, 75 bp, synthetic construct
  source 1..75: mol_type = other DNA
aatcaccaccctgcgcggtgagcttaaggccaccaatgccaccctgaaatccgtctcccatcagaacgaactgct

SEQ ID NO: 748688 - DNA, 75 bp, synthetic construct
  source 1..75: mol_type = other DNA
ttaatgtagaccagttcgatgataatccgttccagactgatactttggaactgaccagcggcaacatcgctgacc

SEQ ID NO: 748689 - DNA, 75 bp, synthetic construct
  source 1..75: mol_type = other DNA
cgaaaaagcgtgaccgtattcaccgcattccggaagatcgcaaaaagaaaaaaggcaaacgtaagccgccattct

SEQ ID NO: 748690 - DNA, 75 bp, synthetic construct
  source 1..75: mol_type = other DNA
cagcatcctgaactgccgcagaagttgattgcgatggaacctccattgcctgcggcatcgactgatggcacgcaa

SEQ ID NO: 748691 - DNA, 75 bp, synthetic construct
  source 1..75: mol_type = other DNA
caacaacgtggaagcttactttgagcaacaccctgcactgctgaaacaggcgaccggtgctgatcagttagtacc

SEQ ID NO: 748692 - DNA, 75 bp, synthetic construct
  source 1..75: mol_type = other DNA
tgatcgtttcccctattgtcggcctggtgtttgctggcggtctgattttcttgctgcgtcgctactggagcggca

SEQ ID NO: 748693 - DNA, 75 bp, synthetic construct
  source 1..75: mol_type = other DNA
atggcgtatcgaatctttgtttcgtataaaaatggcgctaagagccactctctgaacacaacaagtcgctttctt

SEQ ID NO: 748694 - DNA, 75 bp, synthetic construct
  source 1..75: mol_type = other DNA
cgactgtcaggcgcactgaccaacaaccagttcggtctgggaatttatctgtataccgatgtagcgttacctgac

SEQ ID NO: 748695 - DNA, 75 bp, synthetic construct
  source 1..75: mol_type = other DNA
caactcatcttaatttatcctatgcttgatgcgactgcgcatttcgaaagctacatacgcaatggtcacgattac

SEQ ID NO: 748696 - DNA, 75 bp, synthetic construct
  source 1..75: mol_type = other DNA
ccttacgaatagtgtcgccgctgaatgccccgacattactcccgacgataatttattactacggtggctgttttg

SEQ ID NO: 748697 - DNA, 75 bp, synthetic construct
  source 1..75: mol_type = other DNA
aacggcagcgttatttaaacgtgcaatgggcagtaataccaactggcggttaggcagcgacacatttaacgcgcc

SEQ ID NO: 748698 - DNA, 75 bp, synthetic construct
  source 1..75: mol_type = other DNA
catccctgtctttgaaggatgccagacagatcactgctgacttgcgaaagctctatttctcaggaacggatccac

SEQ ID NO: 748699 - DNA, 75 bp, synthetic construct
  source 1..75: mol_type = other DNA
atgacggtcgcccagtgtctcgactactggttcgacaactacgtctctacaactctcagagaaaagacccaggca

SEQ ID NO: 748700 - DNA, 75 bp, synthetic construct
  source 1..75: mol_type = other DNA
tactttccccgccgcccatgatgatgcgcaacgaggtgcagaattagtccggcaacacgccgaacgactcggcgt

SEQ ID NO: 748701 - DNA, 75 bp, synthetic construct
  source 1..75: mol_type = other DNA
agctggcatcgagccgtgggcatgggtcgttaataacagcctggcagctgctcaagtcggaaggtcaaaaaacag

SEQ ID NO: 748702 - DNA, 75 bp, synthetic construct
  source 1..75: mol_type = other DNA
aaacctgcagcaggatctgcgtcgcgctggcattgagccgtgggcatgggttgtgaataacagcctggcagctgc

SEQ ID NO: 748703 - DNA, 75 bp, synthetic construct
  source 1..75: mol_type = other DNA
ggagcgatctcatgctgcaggcttgccacttatctcgtgaccagatgcccgcattatacgaaggcagcgaaatta

SEQ ID NO: 748704 - DNA, 75 bp, synthetic construct
  source 1..75: mol_type = other DNA
ggaacggagcagggcggcgacatcaaacaagctgttacaccagatgttgatgctttggggggcgagggtatcaga

SEQ ID NO: 748705 - DNA, 75 bp, synthetic construct
  source 1..75: mol_type = other DNA
caaagattgagtcttgggcgatatcctgccttgcaactcaaagatgccagaagcattactgctgacttgaggata

SEQ ID NO: 748706 - DNA, 75 bp, synthetic construct
  source 1..75: mol_type = other DNA
atgagcatccaaccaagggacttcggctccagcgctgaggtaggggatcgggtactgtcgtatcacgaactggct

SEQ ID NO: 748707 - DNA, 75 bp, synthetic construct
  source 1..75: mol_type = other DNA
cgaacacatgatttcagaagaacgcttgttacacgtctgtccgagatgaatgtcgagcctcatgttactgagcga

SEQ ID NO: 748708 - DNA, 75 bp, synthetic construct
  source 1..75: mol_type = other DNA
actgtttcttgccagggcagacaaaaacaatgttttggtgaaactggattcgctttctctcaataaggaagttga

SEQ ID NO: 748709 - DNA, 75 bp, synthetic construct
  source 1..75: mol_type = other DNA
ctttagtcaaagcgattgccgaattacatggaggaagtgctacgtatcactatctcagtaagcataacgtgttcc

SEQ ID NO: 748710 - DNA, 75 bp, synthetic construct
  source 1..75: mol_type = other DNA
tactttgctcagtattaagtccgctgttaatcagaacggggttacgagagatcaaaaagttgagtggtgtaacgg

SEQ ID NO: 748711 - DNA, 75 bp, synthetic construct
  source 1..75: mol_type = other DNA
gttgtagctataacgaaataatccctgcggatcactgcctgcatgatgtgcaggacatgagtatttttaatcatc

SEQ ID NO: 748712 - DNA, 75 bp, synthetic construct
  source 1..75: mol_type = other DNA
attgcagctattgcggaaaagagctgttcggcggggcaattaaacgcccgtatctggaggttaaagatcaaaatg

SEQ ID NO: 748713 - DNA, 75 bp, synthetic construct
  source 1..75: mol_type = other DNA
caggattcttttacggcaaaacacatgaatattatgtcagcataataaacacaactctaaaattaaatgtgttat

SEQ ID NO: 748714 - DNA, 75 bp, synthetic construct
  source 1..75: mol_type = other DNA
gtgacagagatcgaggttgaaaaaaaggctatctatgttgaggcgactaaaggcgggcagccaccactattcagt

SEQ ID NO: 748715 - DNA, 75 bp, synthetic construct
  source 1..75: mol_type = other DNA
atgaacaatattaaaatgatcacactcttccatccacatgataaaacaccatttatgatctgtattgtatgcaaa

SEQ ID NO: 748716 - DNA, 75 bp, synthetic construct
  source 1..75: mol_type = other DNA
tgttccaggttccagcggtagcgtcgaatttcggtagcggtgtttctgctgatatagcttctgcggcccgccatg

SEQ ID NO: 748717 - DNA, 75 bp, synthetic construct
  source 1..75: mol_type = other DNA
tgtaacggaagcgctgaattataacgatagccgagtgccggttgaggttagcgcattaccgagagaactaaaacc

SEQ ID NO: 748718 - DNA, 75 bp, synthetic construct
  source 1..75: mol_type = other DNA
ttgatatcgccagtcctggaacgaaaattaatgagcctgaaaaactcttccgtagattttggcggggagataatt

SEQ ID NO: 748719 - DNA, 75 bp, synthetic construct
  source 1..75: mol_type = other DNA
gtagaggactcaggcgttgcctctgtccagcgtgcacttaagaaaatgctattgtcggggctaccttcagagttt

SEQ ID NO: 748720 - DNA, 75 bp, synthetic construct
  source 1..75: mol_type = other DNA
ggacagcggcaaaggtaagattattgatggcagtcggatttgtaatgaactgggatttgaataccagtatcccga

SEQ ID NO: 748721 - DNA, 75 bp, synthetic construct
  source 1..75: mol_type = other DNA
gtaacggttttattggttcccatatcgttacattgctaaaagaacaagggcataatgtcgttgttcccgatcgta

SEQ ID NO: 748722 - DNA, 75 bp, synthetic construct
  source 1..75: mol_type = other DNA
gttcttgcatgttcaagtcctggagagtctcgaacatgtgtcgatgctgtagatgatgaagttagtgattctaac

SEQ ID NO: 748723 - DNA, 75 bp, synthetic construct
  source 1..75: mol_type = other DNA
tctataatatatgtgcgccagctcaccctgcgcgtaatgttttctatccgcagatggcccgtactggggctggaa

SEQ ID NO: 748724 - DNA, 75 bp, synthetic construct
  source 1..75: mol_type = other DNA
cgcatggaacctgagttagtttgcgattctgacgatctggatgccctgatggatgctgatgcgctggtcatcacg

SEQ ID NO: 748725 - DNA, 75 bp, synthetic construct
  source 1..75: mol_type = other DNA
cgaagactggctgcacaatttacctggtacttcggtcgatattttgcgtcttgctggcctggtggggccggggcg

SEQ ID NO: 748726 - DNA, 75 bp, synthetic construct
  source 1..75: mol_type = other DNA
tggtactgggtgcgctattacgaaacggcaggtagtacgacatttgtcgccagaccaggaggcatcgaaggctgg

SEQ ID NO: 748727 - DNA, 75 bp, synthetic construct
  source 1..75: mol_type = other DNA
gtgattggttacgcgatgtatgcaggtgtatggcaaagcccggtgccagaggaattgtaccgacgcttaattcca

SEQ ID NO: 748728 - DNA, 75 bp, synthetic construct
  source 1..75: mol_type = other DNA
ttgcgggtctggtcgggccggagcgtcatcccggtcgcttctttgcgggcaaaacagcgccagatggcgaacatg

SEQ ID NO: 748729 - DNA, 75 bp, synthetic construct
  source 1..75: mol_type = other DNA
ccagcggcaaacatattgatgaactactggcgacagaaggcactgagaacctcgggtcctcttcggtcctccctg

SEQ ID NO: 748730 - DNA, 75 bp, synthetic construct
  source 1..75: mol_type = other DNA
tcagggcgtggcagtccggttcattgatgacgggatcagtaccgacggtgatatggggcaaatggtggtcaccat

SEQ ID NO: 748731 - DNA, 75 bp, synthetic construct
  source 1..75: mol_type = other DNA
atgtgcagctccatcagcaaaaggggatgataagtttatcaccaccgactatttgcaacagtgccgccgatatga

SEQ ID NO: 748732 - DNA, 75 bp, synthetic construct
  source 1..75: mol_type = other DNA
gaatttacagcgtctggcacagacattgtcgccatttatttctgtggatgcgctcaatacggagctggacagcta

SEQ ID NO: 748733 - DNA, 75 bp, synthetic construct
  source 1..75: mol_type = other DNA
ggcgcgatgaattgccagaaacctatacagcactttcccctacgcctttaaataatgcccggctgatttggcata

SEQ ID NO: 748734 - DNA, 75 bp, synthetic construct
  source 1..75: mol_type = other DNA
tctcaaccagtcagcagtccctagatattcaaattggggcacttaagaacgcgggggtaaaagccaaccgtattt

SEQ ID NO: 748735 - DNA, 75 bp, synthetic construct
  source 1..75: mol_type = other DNA
aatccagctatctgccagcagttatatggtgagatgaaactcgcggttacccccattgtgctgcatgaaggatcg

SEQ ID NO: 748736 - DNA, 75 bp, synthetic construct
  source 1..75: mol_type = other DNA
ctggtgcaacggaaattgctcatcagctcagtattgcccgctccacggtttataaattcttgaagacgaaagggc

SEQ ID NO: 748737 - DNA, 75 bp, synthetic construct
  source 1..75: mol_type = other DNA
gatctacttatatgccataatgataatcgtaaattatttaatcttatgaagttagcggctgaagaaatctgcaga

SEQ ID NO: 748738 - DNA, 75 bp, synthetic construct
  source 1..75: mol_type = other DNA
gctgtggcacaggctgaacgccggaggatcctagaacgcacgaatgagggccgacaggaagcaaagctgaaagga

SEQ ID NO: 748739 - DNA, 75 bp, synthetic construct
  source 1..75: mol_type = other DNA
catgtgcagctccatcagcaaaaggggatgataagtttatcaccaccgactatttgcaacagtgccgccgatatg

SEQ ID NO: 748740 - DNA, 75 bp, synthetic construct
  source 1..75: mol_type = other DNA
caatctggagcgcaatggatactggtatgcgcaaattcattactgctcgtaccccagggatgaccatgatggacc

SEQ ID NO: 748741 - DNA, 75 bp, synthetic construct
  source 1..75: mol_type = other DNA
gaatatttatattgccatcacgttctggtattgggtgcgctattacgaaacggcaggtagtacgatatttgtcgc

SEQ ID NO: 748742 - DNA, 75 bp, synthetic construct
  source 1..75: mol_type = other DNA
ggcaaaggagttcgccaggaagtgctggaggcagctaaagacagccctgagttcgaagaacttatggatgcctac

SEQ ID NO: 748743 - DNA, 75 bp, synthetic construct
  source 1..75: mol_type = other DNA
atagaacaaaatacatcggaggaagcgatgttgcagggattcttggaattagcccatggcgcaccccgcttgagg

SEQ ID NO: 748744 - DNA, 75 bp, synthetic construct
  source 1..75: mol_type = other DNA
attttcgccatgctggaaacgcgtcgggcatccgtcatgtatttttcagatcacggtctggagtatgacccgaca

SEQ ID NO: 748745 - DNA, 75 bp, synthetic construct
  source 1..75: mol_type = other DNA
tctcggtggcggcacgtttgacgttacggtgcttgagtacgccacgccggtgattgaagttcacgcctccgctgg

SEQ ID NO: 748746 - DNA, 75 bp, synthetic construct
  source 1..75: mol_type = other DNA
ttggtataaatggttcagggaagacaaaatccttatgtagcataattaactatttctttcctaaaaataacatgc

SEQ ID NO: 748747 - DNA, 75 bp, synthetic construct
  source 1..75: mol_type = other DNA
ttggccttcaaaccccgtgactgccggaagattaccggcagcaagcaaagcctaacggatgatgattttttcctt

SEQ ID NO: 748748 - DNA, 75 bp, synthetic construct
  source 1..75: mol_type = other DNA
cagcatgggattacataaactcgctgaataccgggcatccgggcgggatcacatccacccacgccgacgatgcaa

SEQ ID NO: 748749 - DNA, 75 bp, synthetic construct
  source 1..75: mol_type = other DNA
tgtggcaactggcagatatcataatggcctgcatggctattaccaatttgaccgccattttactgctctcgcctg

SEQ ID NO: 748750 - DNA, 75 bp, synthetic construct
  source 1..75: mol_type = other DNA
taatgagagcatgtgtaatcgtgcatcagaaattcttattacagaaattaataagttcgcgaaaaacacatatcc

SEQ ID NO: 748751 - DNA, 75 bp, synthetic construct
  source 1..75: mol_type = other DNA
aggttttatctaacatccgttctttaagagcttttgcgcgtgaggttccgtttgaacttctttctgatatggctg

SEQ ID NO: 748752 - DNA, 75 bp, synthetic construct
  source 1..75: mol_type = other DNA
accgaaagctattgaggaagctttagcagcaggtaaaaaacttgatgattttttgattcctgattctgaaaaata

SEQ ID NO: 748753 - DNA, 75 bp, synthetic construct
  source 1..75: mol_type = other DNA
aacgatacgcgggtacatgggaacatcagccaccatgacatccggtgagcagtccggcgcagtaatacgtggtgt

SEQ ID NO: 748754 - DNA, 75 bp, synthetic construct
  source 1..75: mol_type = other DNA
ccatcacctgcaacgcctgattgatgaaactggcgtgacgcctgtgataaaccagatcgaacttcatccgctgat

SEQ ID NO: 748755 - DNA, 75 bp, synthetic construct
  source 1..75: mol_type = other DNA
ttggatcttgtttggtcaacggttaaatcgtaaaggctggattggcctggtcttgctgttggctggaatgatcat

SEQ ID NO: 748756 - DNA, 75 bp, synthetic construct
  source 1..75: mol_type = other DNA
gctggaaatcgttgctaacgtctttttgaaattttctgacggctttcgtcgcaaaatatttggcttgctctccct

SEQ ID NO: 748757 - DNA, 75 bp, synthetic construct
  source 1..75: mol_type = other DNA
tacaggatggcaatgtcatgccccagctgggactgggcgtctggcaagcaagtaatgaggaagttatcaccgcta

SEQ ID NO: 748758 - DNA, 75 bp, synthetic construct
  source 1..75: mol_type = other DNA
tataaaaacgaagaaggcgtcggcaaggcactgaaaaatgccgcacttgccagagaagagttgttcatcactacc

SEQ ID NO: 748759 - DNA, 75 bp, synthetic construct
  source 1..75: mol_type = other DNA
gtggaacgacgaccacaagcgccccgcgaagccctgctcgacagcctgaaaaaactacagcttgattatatcgac

SEQ ID NO: 748760 - DNA, 75 bp, synthetic construct
  source 1..75: mol_type = other DNA
taacgcaattttgctgaatgtgcttgccggagctgcattgtttactctcgcgcggatgtacgagcggcgtatttt

SEQ ID NO: 748761 - DNA, 75 bp, synthetic construct
  source 1..75: mol_type = other DNA
ccggactgatgatgtgcggcagctgcggcgtggcgacacgctgaccatcggtgaggaaaacttctggatagaccg

SEQ ID NO: 748762 - DNA, 75 bp, synthetic construct
  source 1..75: mol_type = other DNA
aaccatcatgtgccaccttggctttactgaagaagtgagcaaaaagcatggtgtagctatctggagcgcaatgga

SEQ ID NO: 748763 - DNA, 75 bp, synthetic construct
  source 1..75: mol_type = other DNA
tgcgcttgtttgatcccttcttccaggtcggaacgggcgtacagcgtaacttccaggggactggtctgggtctgg

SEQ ID NO: 748764 - DNA, 75 bp, synthetic construct
  source 1..75: mol_type = other DNA
gtggggattccggcgaaagaagtggtgcgcttgtttgatcccttcttccaggtcggaacgggcgtacagcgaaac

SEQ ID NO: 748765 - DNA, 75 bp, synthetic construct
  source 1..75: mol_type = other DNA
agcaggtcaattttgttgatgtcctgaccagcaacaataccaatctgcaaatcagcttcgtccattcgcgctatc

SEQ ID NO: 748766 - DNA, 75 bp, synthetic construct
  source 1..75: mol_type = other DNA
aggtgaggattttattggaaacgataattgtgcattgattttaggggataatatattctatggacatgatctcca

SEQ ID NO: 748767 - DNA, 75 bp, synthetic construct
  source 1..75: mol_type = other DNA
aatcagcgaaatcggacaaaacaaaagaacttgcctggttaaagattcgttggaaatacccgcagggtaaagaaa

SEQ ID NO: 748768 - DNA, 75 bp, synthetic construct
  source 1..75: mol_type = other DNA
gcaggcaaacatataacgttgttattcgaattaacgctgaacgggcaaaaagcatcaattgataagttacgctat

SEQ ID NO: 748769 - DNA, 75 bp, synthetic construct
  source 1..75: mol_type = other DNA
agggcggtatcaatcgcattttattggccactgacggtgactttaacgttggtattgacgatccaaaatcgattg

SEQ ID NO: 748770 - DNA, 75 bp, synthetic construct
  source 1..75: mol_type = other DNA
tggcgaaagatcgcaaaagtgaagagttacccgcttctaatctggtctttcttatcgacacttctggttcaatga

SEQ ID NO: 748771 - DNA, 75 bp, synthetic construct
  source 1..75: mol_type = other DNA
gcgtttccttaatcaagggctgttacctccgccagacgctgtgcgggtggaggaggtagtcaattatttcccgtc

SEQ ID NO: 748772 - DNA, 75 bp, synthetic construct
  source 1..75: mol_type = other DNA
cggacaaaaagcgtcaattgataaattacgctatgcaccggatcagaaatcagcgaaatcggacaaagcgaaaga

SEQ ID NO: 748773 - DNA, 75 bp, synthetic construct
  source 1..75: mol_type = other DNA
tcgtgtttctccggatgacgggggcagctgttatctctggctcaaccgtgggcaaccacccgcagttaaccggcg

SEQ ID NO: 748774 - DNA, 75 bp, synthetic construct
  source 1..75: mol_type = other DNA
agtgtggcagcgaagttcagggggtttttgacgatccggagtcgctgggttttgccggtggcggggtccgtattg

SEQ ID NO: 748775 - DNA, 75 bp, synthetic construct
  source 1..75: mol_type = other DNA
attggtgacgcccctttcctgctggtgacatctgcgtctcatttgccgcgcgcgatgatctttttccagcaggaa

SEQ ID NO: 748776 - DNA, 75 bp, synthetic construct
  source 1..75: mol_type = other DNA
aatgaacagctaacattgctgaaaattgatatcctggcgaaagatcataaaagtgaagagttaccagcttctaat

SEQ ID NO: 748777 - DNA, 75 bp, synthetic construct
  source 1..75: mol_type = other DNA
aagcgaaaggaccggatcaacaaggctacagagcggaatttattcgcctgattgggctggcggaaggtctggaca

SEQ ID NO: 748778 - DNA, 75 bp, synthetic construct
  source 1..75: mol_type = other DNA
aaagactacaaagatttgacgccagaagtcagcttccgccgcatttatgaatatgctggcggcgactggcaggaa

SEQ ID NO: 748779 - DNA, 75 bp, synthetic construct
  source 1..75: mol_type = other DNA
gttattaatgacaaacaatctattccggcttctaagccaatacctttcgctatgcgctatgaactggcgccagcg

SEQ ID NO: 748780 - DNA, 75 bp, synthetic construct
  source 1..75: mol_type = other DNA
cttcaagcattcaactatgccaatgtgaatatttttcagagccagtttctattcggtatggaccatgccgtaata

SEQ ID NO: 748781 - DNA, 75 bp, synthetic construct
  source 1..75: mol_type = other DNA
gaatggaagaaattccatccttcatccccatcggttcctaatacagtgattcctggtctggctgaagagaaaaca

SEQ ID NO: 748782 - DNA, 75 bp, synthetic construct
  source 1..75: mol_type = other DNA
aacgaggcagttgaaagagctaagcaagatataagcaatgcaactggtatcgatgtatcttctattacgataact

SEQ ID NO: 748783 - DNA, 75 bp, synthetic construct
  source 1..75: mol_type = other DNA
ctgtggaacaccggcgcgcgtattaatgaagcactagcgctgacgcgggggatttttcgctcacgcctccgtatc

SEQ ID NO: 748784 - DNA, 75 bp, synthetic construct
  source 1..75: mol_type = other DNA
tctgcttgaacaaagaatcagcgaactggaaaatcgcagtactgagatcaaaaagcagccagatccagagactct

SEQ ID NO: 748785 - DNA, 75 bp, synthetic construct
  source 1..75: mol_type = other DNA
aaattgctcgccaggttcacgaatcaatgccaaaaggaatcagggagttcggggaagatgtggagaaaaaaatcc

SEQ ID NO: 748786 - DNA, 75 bp, synthetic construct
  source 1..75: mol_type = other DNA
ccgcgtgggtaacggaataccgtcagattggttatgaaaagcgccaacttcgggtggaacattttggtaatggtg

SEQ ID NO: 748787 - DNA, 75 bp, synthetic construct
  source 1..75: mol_type = other DNA
caaaagggcaggatcaacagggctaccgggcagaatttattcgactggttgggttggcggaaggactgatggata

SEQ ID NO: 748788 - DNA, 75 bp, synthetic construct
  source 1..75: mol_type = other DNA
atatttgaacgatacctcctggcaacaaatcaaacagtgggcgcagcaggcaaaagggcaggatcaacagggcta

SEQ ID NO: 748789 - DNA, 75 bp, synthetic construct
  source 1..75: mol_type = other DNA
caaaacccgttggcgacgtttagccttgacgtcgacaccggcagctatgcaaatgtacggcgtttcctcaatcaa

SEQ ID NO: 748790 - DNA, 75 bp, synthetic construct
  source 1..75: mol_type = other DNA
tgcttattagtagtttgattttgtcaggatgtgggcaggaatctgatgataaggaaagtcagcaacaacaatcta

SEQ ID NO: 748791 - DNA, 75 bp, synthetic construct
  source 1..75: mol_type = other DNA
cccggataacaaattagcgaaatcggacaaaacgaaagaactggcctggttaaaaattcgcggtgatgctgccaa

SEQ ID NO: 748792 - DNA, 75 bp, synthetic construct
  source 1..75: mol_type = other DNA
cccgcagtgggcaccaggctcgaatttaattaataacagtttgccgcgcctgaacgagggggttcgtctgtggcg

SEQ ID NO: 748793 - DNA, 75 bp, synthetic construct
  source 1..75: mol_type = other DNA
cctttgatgccgcccttgccggggtggacagtacgattgttgaagtgatggggatccgtgcgcagttcacctccg

SEQ ID NO: 748794 - DNA, 75 bp, synthetic construct
  source 1..75: mol_type = other DNA
tttgccggtagcggggtccgtattgaaggaagcagcccgtcattatttgtgcggacggatacggtgcgtgccgtg

SEQ ID NO: 748795 - DNA, 75 bp, synthetic construct
  source 1..75: mol_type = other DNA
ggtaaaggaacggttattgtcaccgcgctttcgtaaccgtcagtttgcaggattactgctcgatcaggcgtttct

SEQ ID NO: 748796 - DNA, 75 bp, synthetic construct
  source 1..75: mol_type = other DNA
ggcgtcagtgagattcgcctggcgctacgctataaatcgaacgattcgctgttgcgtcacttcaaagacacttcc

SEQ ID NO: 748797 - DNA, 75 bp, synthetic construct
  source 1..75: mol_type = other DNA
actttattcagcctgggcgttttgtcttgccgggcgatatggcaggtgcgcccgcgttgcaattcttcccgtggc

SEQ ID NO: 748798 - DNA, 75 bp, synthetic construct
  source 1..75: mol_type = other DNA
tgctggtggattgcctgcaacctctcaacagtggaccacaagcattcaatgatatgcgtctggcgctgacgcagc

SEQ ID NO: 748799 - DNA, 75 bp, synthetic construct
  source 1..75: mol_type = other DNA
cctcagaccccaaaataaagggcgctatataggtaataatcaaattgatatgtgtttctatgatgggtatagcac

SEQ ID NO: 748800 - DNA, 75 bp, synthetic construct
  source 1..75: mol_type = other DNA
agcagcgtgaacggcgtgattgatacgcgctatggcgcactgatgccccgactggcggttaatctggtcgggccg

SEQ ID NO: 748801 - DNA, 75 bp, synthetic construct
  source 1..75: mol_type = other DNA
cggtactacaaccataaccttgcagtttacagaaaaaagaagtctgataaaaagaaatattaaccttgcaggtaa

SEQ ID NO: 748802 - DNA, 75 bp, synthetic construct
  source 1..75: mol_type = other DNA
ggaacaactgaccacgcatccgtttttacaacgcgttggtcccgatgtgctggatccgaatctgacgccggaggt

SEQ ID NO: 748803 - DNA, 75 bp, synthetic construct
  source 1..75: mol_type = other DNA
tcaacacgtcacccatgtggaaactcgtggtaaggcgttgttaactcatttttctgatggtttaacgctctatag

SEQ ID NO: 748804 - DNA, 75 bp, synthetic construct
  source 1..75: mol_type = other DNA
gcggacggatacggtgcgtgccgtgcggcgtggtgacacgctgaccattaacggcgagatgttctgggtggatcg

SEQ ID NO: 748805 - DNA, 75 bp, synthetic construct
  source 1..75: mol_type = other DNA
tcgaaacactggaagcggaaggtttcccaatctttgcttatgacggctcgcttggcggtcagtatccagtgatct

SEQ ID NO: 748806 - DNA, 75 bp, synthetic construct
  source 1..75: mol_type = other DNA
atgccgcccttgccggggtggacagtacgattgttgaagtgatggggatccgtgcgcagttcacctccggtgcac

SEQ ID NO: 748807 - DNA, 75 bp, synthetic construct
  source 1..75: mol_type = other DNA
tattaataatggggttttattcaacccatcaatacctgtttacgaagacatgattttttcatgtcatgcattaac

SEQ ID NO: 748808 - DNA, 75 bp, synthetic construct
  source 1..75: mol_type = other DNA
tgatgatggttcaacagataaaagtgttgcagcaattgagtattttattgcaccggatataaaccggcgtgtaat

SEQ ID NO: 748809 - DNA, 75 bp, synthetic construct
  source 1..75: mol_type = other DNA
cgtgttggctatgaaacgcttggccgcatctggcagtggctgaaaggttcgtcaggcgagccacggcaagagtga

SEQ ID NO: 748810 - DNA, 75 bp, synthetic construct
  source 1..75: mol_type = other DNA
cgaaaatccgggatcaaagctgatcttcacaggaggcgtggcaaaaaccaatacggtgagtacagccgaagtggg

SEQ ID NO: 748811 - DNA, 75 bp, synthetic construct
  source 1..75: mol_type = other DNA
cgaaaatccgggatcaaaactgatcttcacgggaggcgtagcaaaaaccaatacggtgagtacagcggaagtagg

SEQ ID NO: 748812 - DNA, 75 bp, synthetic construct
  source 1..75: mol_type = other DNA
atgactttgtgcataagtttgttttttgtttttggggggccgatagttgctcacatactttctagtcattatgag

SEQ ID NO: 748813 - DNA, 75 bp, synthetic construct
  source 1..75: mol_type = other DNA
agtttacacattgctgagttaacaaataaaaatggccgagttgtctggaaaacctcatatgttaccataataatt

SEQ ID NO: 748814 - DNA, 75 bp, synthetic construct
  source 1..75: mol_type = other DNA
accaggcagcgagtgggaaaaagaagattacctgaacctcatcgagcaactggatgaagaaggttttgatgactt

SEQ ID NO: 748815 - DNA, 75 bp, synthetic construct
  source 1..75: mol_type = other DNA
ttgtgtataagcctgttttttatttttgggggggcggcagttgctcacatgctaagtagtcattatgatgactac

SEQ ID NO: 748816 - DNA, 75 bp, synthetic construct
  source 1..75: mol_type = other DNA
attagtcgcactattgaagtagtcagtaagttaaccgttatggtaatatttatgtgccatatattcagtgcgcta

SEQ ID NO: 748817 - DNA, 75 bp, synthetic construct
  source 1..75: mol_type = other DNA
atacttagtttagcgtttctgagttgtttgatttactttgttaaaactgtcattatcattcagcaatttattgag

SEQ ID NO: 748818 - DNA, 75 bp, synthetic construct
  source 1..75: mol_type = other DNA
gcgtgatgtattaccgaacatgctgcaatggctcattgagtatgacatcaacgtctcgtcttctttatggtctga

SEQ ID NO: 748819 - DNA, 75 bp, synthetic construct
  source 1..75: mol_type = other DNA
attttatgcggtggctagttgtcgcaaggatattatttatcctgcgggcaagggagcctcaagtatggttgcagc

SEQ ID NO: 748820 - DNA, 75 bp, synthetic construct
  source 1..75: mol_type = other DNA
agaaaagcggactattttatctttgctagtagcagctcaaagcatcaggcattttatgcggtggctagttgtcgc

SEQ ID NO: 748821 - DNA, 75 bp, synthetic construct
  source 1..75: mol_type = other DNA
aaccgtggtcactacagccaaccggtggtggatttaccggaaaccaaagcctgggctgaaaaactgaccgctatg

SEQ ID NO: 748822 - DNA, 75 bp, synthetic construct
  source 1..75: mol_type = other DNA
cagccggtggtggatttgccggaaaccaaagcctgggctgaaaagctgaccgctatgctggccgcacgtaaataa

SEQ ID NO: 748823 - DNA, 75 bp, synthetic construct
  source 1..75: mol_type = other DNA
atgtacacccacggcctgctggcgattatctccaccaaaaaacgctacggtggctttgcccgcgcggtgggcctg

SEQ ID NO: 748824 - DNA, 75 bp, synthetic construct
  source 1..75: mol_type = other DNA
atggtttacgccgagaccagttaatcggagttctgactatttcagagtttccggtagttatggtagaaagccact

SEQ ID NO: 748825 - DNA, 75 bp, synthetic construct
  source 1..75: mol_type = other DNA
cactttccagccagattacctttaatacgacccagcaaggcgacatgtacaccattgttcctgaagttacactga

SEQ ID NO: 748826 - DNA, 75 bp, synthetic construct
  source 1..75: mol_type = other DNA
atgaacgcgttattacttctcgcggcactttccagccagataacctttaatacaacccagcaaggtgacatgtac

SEQ ID NO: 748827 - DNA, 75 bp, synthetic construct
  source 1..75: mol_type = other DNA
gaccataacatttaaagcggcattcacggggaataggcagcttctagctaaaacggatgcaaaaacctttttaaa

SEQ ID NO: 748828 - DNA, 75 bp, synthetic construct
  source 1..75: mol_type = other DNA
ggtataaacggatggcaaaaatatgtacgattcttacgtgcattcgttgatgcgtataaaaattccgacatgatt

SEQ ID NO: 748829 - DNA, 75 bp, synthetic construct
  source 1..75: mol_type = other DNA
tcttcatccaggctacataattgaaattcgcccgactgaaagacaattgttcttattaaactctgtctttgactt

SEQ ID NO: 748830 - DNA, 75 bp, synthetic construct
  source 1..75: mol_type = other DNA
aaaggaagctctgcggaggttgcctgggcaaaaaaatgtatcgatgttatgaaaaattaccttatctctttaagg

SEQ ID NO: 748831 - DNA, 75 bp, synthetic construct
  source 1..75: mol_type = other DNA
gaccacgccgcatggtctgggctacgtgaagatggtgattatggtcgatgaagacgttgacccgttcaacctgcc

SEQ ID NO: 748832 - DNA, 75 bp, synthetic construct
  source 1..75: mol_type = other DNA
aatcgactacctgatggggccagccacctgcgtaccgctgtatcaacaactgaaagccgagttcccggaagtgca

SEQ ID NO: 748833 - DNA, 75 bp, synthetic construct
  source 1..75: mol_type = other DNA
tgcacaaataacacaaaatgcgatagctggattttctacatgctctcgggatgattattgcttcggcccagtaag

SEQ ID NO: 748834 - DNA, 75 bp, synthetic construct
  source 1..75: mol_type = other DNA
atgccatttataagggtctttctttccccgggagggaaaaatgaaaaaacaattgcgcttgttttcgcggtcagt

SEQ ID NO: 748835 - DNA, 75 bp, synthetic construct
  source 1..75: mol_type = other DNA
aatgaagacctacgatgaaccgttcagtttccagatgagtgacggcacaaccatcggctatcacatcggcgtggc

SEQ ID NO: 748836 - DNA, 75 bp, synthetic construct
  source 1..75: mol_type = other DNA
atgctttctgccctggttgtggttaaaacgaaacgccagtatctggctgttgcttccggcgggatttcactggcg

SEQ ID NO: 748837 - DNA, 75 bp, synthetic construct
  source 1..75: mol_type = other DNA
aaacaatacgataagattatatctttaagtgataatgacaagttaacccacgaacaagtatcatgtatttttatt

SEQ ID NO: 748838 - DNA, 75 bp, synthetic construct
  source 1..75: mol_type = other DNA
gtctttatgactggacgggggcgttgattgcgctttgcggcatgttgatcattgttgcgggctgggggcgcgcgt

SEQ ID NO: 748839 - DNA, 75 bp, synthetic construct
  source 1..75: mol_type = other DNA
tgtttgcgaaggaatacagggacactttttctttagattcgaaaaattgttatgaacagttaaaatctgctgcga

SEQ ID NO: 748840 - DNA, 75 bp, synthetic construct
  source 1..75: mol_type = other DNA
agaccttgattttaaagcgtgtctggtgcgtgggtattctgtttggtccggtgcttacgatacattttataatca

SEQ ID NO: 748841 - DNA, 75 bp, synthetic construct
  source 1..75: mol_type = other DNA
tgttatttgtgtcgttgctttctataaatgctaatgccaatgcagacgttagttctgatgttagttctgatgtta

SEQ ID NO: 748842 - DNA, 75 bp, synthetic construct
  source 1..75: mol_type = other DNA
gatagctacttctccggcgttaaatatgggatttatgattatggacgattattaatcgtcatttattcctgtgaa

SEQ ID NO: 748843 - DNA, 75 bp, synthetic construct
  source 1..75: mol_type = other DNA
atccattgctctatcaatatgttgatggagggggcttttttacctcacatggccaacccaacaaacaggtgcgtc

SEQ ID NO: 748844 - DNA, 75 bp, synthetic construct
  source 1..75: mol_type = other DNA
aactgtcagacgaaatgaaagcactgttcaaagaaccgaatgacaaggcactgttcaaagaaccgaatgacaagg

SEQ ID NO: 748845 - DNA, 75 bp, synthetic construct
  source 1..75: mol_type = other DNA
tgtcgtcggtcaccgtgaatcttcagtacctttctcttattacgacaatcagcaaaaagtggtgggttactcgca

SEQ ID NO: 748846 - DNA, 75 bp, synthetic construct
  source 1..75: mol_type = other DNA
gctgcttgaacaaagaatgagcgaactggaaaatcgcagtactgagattaaaaagcagccagatccagagactct

SEQ ID NO: 748847 - DNA, 75 bp, synthetic construct
  source 1..75: mol_type = other DNA
tggccggtgaacgtgcgaaagcgaagaaaccagacaactgggaaatcgtcggcaagccgcagtctcaggaggcct

SEQ ID NO: 748848 - DNA, 75 bp, synthetic construct
  source 1..75: mol_type = other DNA
ggattactccaacgccattgttgaagcagtgaaaaagaaactcaacaaaccggacttacaggtgaaactgattcc

SEQ ID NO: 748849 - DNA, 75 bp, synthetic construct
  source 1..75: mol_type = other DNA
ttctctgacaccattttcgtggtcggtacgcgcctgctgaccaaaaaaggcggcgatgttaaagattttgccgat

SEQ ID NO: 748850 - DNA, 75 bp, synthetic construct
  source 1..75: mol_type = other DNA
cccgccgtcagggcaatggcctgtattgagtcaaaacgaattgaggattttgagcatatgccaaaagaaattaaa

SEQ ID NO: 748851 - DNA, 75 bp, synthetic construct
  source 1..75: mol_type = other DNA
tcgctatatagagacattattattccgttgacggatgattcatgccagaacgcagaagacgagcaaactttgaag

SEQ ID NO: 748852 - DNA, 75 bp, synthetic construct
  source 1..75: mol_type = other DNA
tcagcaaattcaccggctggttccgctctccgacacctggtacgtcagccagctgcaaacgatggtggcaacact

SEQ ID NO: 748853 - DNA, 75 bp, synthetic construct
  source 1..75: mol_type = other DNA
ataagcacgggcagctacggcacacgctcgcagatagtaaacgcggcattcacccacagcagcagcgattttacc

SEQ ID NO: 748854 - DNA, 75 bp, synthetic construct
  source 1..75: mol_type = other DNA
gtcttgctgattcagggtgtagcgttgaggatgcgcgcgaacgtcttttactcactatgggtaaagaatcgacac

SEQ ID NO: 748855 - DNA, 75 bp, synthetic construct
  source 1..75: mol_type = other DNA
gcgatcctattaatgttatcccagcctatatccttgtacctgccgcgctggaaggcgcagccaatcgagctgtgc

SEQ ID NO: 748856 - DNA, 75 bp, synthetic construct
  source 1..75: mol_type = other DNA
gcctgatgagtattcatttgccaaactggcgtgaacacagagctaagttgaataaaatgcccttggcttataatc

SEQ ID NO: 748857 - DNA, 75 bp, synthetic construct
  source 1..75: mol_type = other DNA
acgttaccgaaacagtcgagcaaatcaaaagaggcaccatacgcgatggttatgcaggctaccgtcagctggtgg

SEQ ID NO: 748858 - DNA, 75 bp, synthetic construct
  source 1..75: mol_type = other DNA
gctgctttccatcgtatgatgagcgaagcggaaccgagaggaactcgttggtatcacccgaaaatggggctgttc

SEQ ID NO: 748859 - DNA, 75 bp, synthetic construct
  source 1..75: mol_type = other DNA
tgaccagcgttgaaatcgcagagctggttggaagtcaacacggcaatgtcagaatatcaatagagcgtctggcaa

SEQ ID NO: 748860 - DNA, 75 bp, synthetic construct
  source 1..75: mol_type = other DNA
acgttgccgaaacagttgagcaaatcaaaaagggcaacattcgtgagggctatgccggatatcgccaactgaaag

SEQ ID NO: 748861 - DNA, 75 bp, synthetic construct
  source 1..75: mol_type = other DNA
gaagaaaaagtcagccatgttgccgaaacagttgagcaaatcaaaaagggtaccattcgtgagggctatgccgga

SEQ ID NO: 748862 - DNA, 75 bp, synthetic construct
  source 1..75: mol_type = other DNA
ccgcgatggctcttgaagcagttcgtcagcaaaaacgcctcgacaagatggaagaaaaagtcagccatgttgccg

SEQ ID NO: 748863 - DNA, 75 bp, synthetic construct
  source 1..75: mol_type = other DNA
gaagaaaaagtcagccacgttgctgaaacagtcgagcaaattaaaaagggcactattcgtgagggctatgccgga

SEQ ID NO: 748864 - DNA, 75 bp, synthetic construct
  source 1..75: mol_type = other DNA
gagcatctgggtgtctacgcttgccgcattatcgtgcctggcatgtccgatatttatccggctgaagatctgtgg

SEQ ID NO: 748865 - DNA, 75 bp, synthetic construct
  source 1..75: mol_type = other DNA
aagaagcgaacaactacaaaggtggcatcatcgtaaaaaccaacggctacatgatgcagctggttggtaacaatg

SEQ ID NO: 748866 - DNA, 75 bp, synthetic construct
  source 1..75: mol_type = other DNA
ttttgatgacgttgaacttctggtatttcaggaagtattcaacggtgtctgggatgcgctttccgacgggcgcgt

SEQ ID NO: 748867 - DNA, 75 bp, synthetic construct
  source 1..75: mol_type = other DNA
cgctcgcttccagcaaaaactttcagacctcggttttcagattgaagaggcctcctggctgaatcccgtgcctaa

SEQ ID NO: 748868 - DNA, 75 bp, synthetic construct
  source 1..75: mol_type = other DNA
acgtgaactgacaattgcggtgaacaatattattcctggtgatttgctggtggcattcattcgagattttgaacg

SEQ ID NO: 748869 - DNA, 75 bp, synthetic construct
  source 1..75: mol_type = other DNA
atgaccggtaaatacactcttatctacgcagatccaccctggacataccgcgacaaagcagccgacggcgagcgc

SEQ ID NO: 748870 - DNA, 75 bp, synthetic construct
  source 1..75: mol_type = other DNA
tggtttcgacgtatggggcaatcagtgcgaaggcccgtcggtgcagttgctaccaggctgctctgttccggttgt

SEQ ID NO: 748871 - DNA, 75 bp, synthetic construct
  source 1..75: mol_type = other DNA
gtctggatatttatgcaacctgtaagttgtgagtatttcaggaaaatgtttaaagattacaaggatattattacg

SEQ ID NO: 748872 - DNA, 75 bp, synthetic construct
  source 1..75: mol_type = other DNA
aaaaccattctggctaacaagggatggagcaatgaggactgggccatcatggcagcggcagaactcaggccgatg

SEQ ID NO: 748873 - DNA, 75 bp, synthetic construct
  source 1..75: mol_type = other DNA
aggcaacagtgcgatcggaatggggcatatgacccgggcaaatagcgaggattgcttgtttgccgttcgagggcg

SEQ ID NO: 748874 - DNA, 75 bp, synthetic construct
  source 1..75: mol_type = other DNA
tgaacgtgctggatatctgccgcctgccagtgtgggatcttgccgccgacgattgcctactggcaatgtggtggg

SEQ ID NO: 748875 - DNA, 75 bp, synthetic construct
  source 1..75: mol_type = other DNA
cgctcagaagctaatgaccgcacttcttcagcatcgtggtctctttcgtaagaacccaatcagtaacgagtggtc

SEQ ID NO: 748876 - DNA, 75 bp, synthetic construct
  source 1..75: mol_type = other DNA
agagtctaccagcaacgacgacatgatgattctggtggttgatgatcatcctattaaccgtcgcttattggccga

SEQ ID NO: 748877 - DNA, 75 bp, synthetic construct
  source 1..75: mol_type = other DNA
atgtccgtgccgatggtgattatctttctattcgcgttcgcgataccggcgtgggtatcccggcgaaagaagtgg

SEQ ID NO: 748878 - DNA, 75 bp, synthetic construct
  source 1..75: mol_type = other DNA
ggcttcagagtcattcaccacagacaccggaatcgttgatcgctttttctccctcgaatcaaatcctcgtcgtga

SEQ ID NO: 748879 - DNA, 75 bp, synthetic construct
  source 1..75: mol_type = other DNA
gtcatcaatattccggagaaaacatcgctggttatggttcatggcgaggtgctgttcccgaacgcggtgagctgg

SEQ ID NO: 748880 - DNA, 75 bp, synthetic construct
  source 1..75: mol_type = other DNA
acatcgagaaatgtggtggcctgacgcaaaaatcgggtaacgccagaattatcgtcattcgtcagaacggtgcag

SEQ ID NO: 748881 - DNA, 75 bp, synthetic construct
  source 1..75: mol_type = other DNA
tcctgcaattgctggacgatcaggtgcttatcgcaaccgaaactcaagagacacgcgatctcttgcgtattctgg

SEQ ID NO: 748882 - DNA, 75 bp, synthetic construct
  source 1..75: mol_type = other DNA
gctgccgcaagaagttcaacagcaagggatcagcgttgaaaagtccagcagcagctatttaatggtggctggttt

SEQ ID NO: 748883 - DNA, 75 bp, synthetic construct
  source 1..75: mol_type = other DNA
tggcagtacgtatgcgtctgcgtcctatcctgatgacctctctcgcctttattctcggcgtattaccgctagcta

SEQ ID NO: 748884 - DNA, 75 bp, synthetic construct
  source 1..75: mol_type = other DNA
ttcactttctgacatcaatcagaccatttcaacggcgttgggtgggacttacgttaacgacttcattgaccgtgg

SEQ ID NO: 748885 - DNA, 75 bp, synthetic construct
  source 1..75: mol_type = other DNA
ttattgctgaaagcatcagcttgccggaaatcccggcagacgtgctggcgcgttaccctgcggtggttgaagcca

SEQ ID NO: 748886 - DNA, 75 bp, synthetic construct
  source 1..75: mol_type = other DNA
cagtggacccgaatatgctcaaccagttccagagcacgatgccacaggtgaaagagcagatgaaagcggcgggga

SEQ ID NO: 748887 - DNA, 75 bp, synthetic construct
  source 1..75: mol_type = other DNA
tcggcgcaacggggcgttatttgctgatttatgtgttgatcgttgcgggaatggtggtgctatttttacgcctgc

SEQ ID NO: 748888 - DNA, 75 bp, synthetic construct
  source 1..75: mol_type = other DNA
ccaatagcgttggcaaaatcctcggttccacagggcgatatttactgatctatgcgctgattgttgcaggaatgg

SEQ ID NO: 748889 - DNA, 75 bp, synthetic construct
  source 1..75: mol_type = other DNA
ctgaatggcgtcggtgacgtacagcttttcggcgcacagtatgcgatgcgtatctggctggacgccgatctgcta

SEQ ID NO: 748890 - DNA, 75 bp, synthetic construct
  source 1..75: mol_type = other DNA
gacaccatactgcttgatgccgcgaccaatagccgtagcgtggccgacctgatcgaacaactcaaagagccagcc

SEQ ID NO: 748891 - DNA, 75 bp, synthetic construct
  source 1..75: mol_type = other DNA
tccttcttacctgaagaggatcagggtgtctttctgaccatgattcagttacccgctggcgcgacgcaagagcgg

SEQ ID NO: 748892 - DNA, 75 bp, synthetic construct
  source 1..75: mol_type = other DNA
tgttgagcttggtggtgaaaactataacgtcatcgcccgtatcaacggtaaaccggcagcgggtctgggtattaa

SEQ ID NO: 748893 - DNA, 75 bp, synthetic construct
  source 1..75: mol_type = other DNA
tgcagaacgatcagatagctgccgggcaactgggcggaacaccagcgttgcctgggcaacagttgaacgcctcga

SEQ ID NO: 748894 - DNA, 75 bp, synthetic construct
  source 1..75: mol_type = other DNA
cgcggatgtacgagcgacgtattttcattccggcggaaagcgacgccctgcgactggaagaacatgagcagttta

SEQ ID NO: 748895 - DNA, 75 bp, synthetic construct
  source 1..75: mol_type = other DNA
gatacggggacacatcagagtcttattgaagcaagcaacttcatagcaacaattgaagagcgtcagggcttgaaa

SEQ ID NO: 748896 - DNA, 75 bp, synthetic construct
  source 1..75: mol_type = other DNA
atgaaaacgcgtaaaggtattattttagcgggtggttctggtactcgtctttatcctgtaactatggctgtcagt

SEQ ID NO: 748897 - DNA, 75 bp, synthetic construct
  source 1..75: mol_type = other DNA
gacacaggtacacaccaaagtcttattgaagcaagtaacttcatcgcaacgatcgaagagcgtcagggactgaaa

SEQ ID NO: 748898 - DNA, 75 bp, synthetic construct
  source 1..75: mol_type = other DNA
gcaggtgaaagtattagccgaaccgcttatcaagaatcaatatggtcaatatttgctgaaaatgatcagcgaata

SEQ ID NO: 748899 - DNA, 75 bp, synthetic construct
  source 1..75: mol_type = other DNA
gcctggaagaaaaaccgctggaaccaaaaagtaactatgcggttactgggctttatttctatgacaatgacgttg

SEQ ID NO: 748900 - DNA, 75 bp, synthetic construct
  source 1..75: mol_type = other DNA
gcaggtgaaagtattagctgaaccgctgaaaaaaaatgcttatggtcagtacctgctaaaaatgattaaaggtta

SEQ ID NO: 748901 - DNA, 75 bp, synthetic construct
  source 1..75: mol_type = other DNA
gatggggcgtggctatgcatggctggatacagtccctaatgagctggtaactaggcttggaatagttccaggctc

SEQ ID NO: 748902 - DNA, 75 bp, synthetic construct
  source 1..75: mol_type = other DNA
atgaaaattcgtatactgatgctgacttcgttactgacatttatttttcctttgtcttccttttctgctgttaaa

SEQ ID NO: 748903 - DNA, 75 bp, synthetic construct
  source 1..75: mol_type = other DNA
aggttatgcttggctagatactggaactcatgaaagtctaattgaagctagcaatttcatccagacaattgaagc

SEQ ID NO: 748904 - DNA, 75 bp, synthetic construct
  source 1..75: mol_type = other DNA
gatattctgattattagtacgccacaggatactcctcgttttcaacaactgctgggtgacggtagccagtggggg

SEQ ID NO: 748905 - DNA, 75 bp, synthetic construct
  source 1..75: mol_type = other DNA
gccgccgaagaagttattgtcgccgggtacgtgtttgaggttcagacgtctgagcgaaatggttctggcctggca

SEQ ID NO: 748906 - DNA, 75 bp, synthetic construct
  source 1..75: mol_type = other DNA
gcaactggggttactcctcatgaattgcgaccagatttatacccgaatccaactgacgggttgcctgctggagat

SEQ ID NO: 748907 - DNA, 75 bp, synthetic construct
  source 1..75: mol_type = other DNA
gtcaacatgccaaatatggatggttaccgcttgacgcaacgcattcgtcagttgggactgacgttgccggtaatc

SEQ ID NO: 748908 - DNA, 75 bp, synthetic construct
  source 1..75: mol_type = other DNA
agcggtcagcgataatgacgatatgatgattctggtcgtggatgatcatccgattaaccgacgtctgctggcaga

SEQ ID NO: 748909 - DNA, 75 bp, synthetic construct
  source 1..75: mol_type = other DNA
tcgatgataaccagcgtctccaggatctgattcgccccggccggttgattatcgtggatctgcgagatgaataca

SEQ ID NO: 748910 - DNA, 75 bp, synthetic construct
  source 1..75: mol_type = other DNA
tggagcgcattcgcatgttgatccttaacgcgattttgctgaatgtgcttgccggagccgcgttgtttactctcg

SEQ ID NO: 748911 - DNA, 75 bp, synthetic construct
  source 1..75: mol_type = other DNA
cggtatggacagttgcctgtcgaagccggtgacgctggatgtcataaaacagacgctgacggtatatgccgagag

SEQ ID NO: 748912 - DNA, 75 bp, synthetic construct
  source 1..75: mol_type = other DNA
gaatttaatctgagctcggatcaggcccagcggtttattcagcgtacctcggatgtgatgaaagagctgaagtac

SEQ ID NO: 748913 - DNA, 75 bp, synthetic construct
  source 1..75: mol_type = other DNA
atgcttgaagatactactattcataatgcaatagctgataaagcgttatcaagttactttcgcagttcgggtaat

SEQ ID NO: 748914 - DNA, 75 bp, synthetic construct
  source 1..75: mol_type = other DNA
agtgatattctcaaagctgatgtgattagaaaaacactggaaatcgtgttgcgatacacagctgatgatatgtaa

SEQ ID NO: 748915 - DNA, 75 bp, synthetic construct
  source 1..75: mol_type = other DNA
gcagtgtcactattcctgcacgttcagcggtgaccttgtacggcagcgccaattttctgggggcgcataaagtca

SEQ ID NO: 748916 - DNA, 75 bp, synthetic construct
  source 1..75: mol_type = other DNA
aaaaagatgacgaacaacccgctaccgttgatgtggaaccggaagaagctgttcgacccgctcttgaagtacagg

SEQ ID NO: 748917 - DNA, 75 bp, synthetic construct
  source 1..75: mol_type = other DNA
gcccagataaatcagagcgagcgcatcctccagcgtcactttgacccggccctgaaaaaaccggatcggccggat

SEQ ID NO: 748918 - DNA, 75 bp, synthetic construct
  source 1..75: mol_type = other DNA
atgtggagtactttcgaattatcaaacctactgaccatcgattcaacccaaacggtataaacattcggtttaacg

SEQ ID NO: 748919 - DNA, 75 bp, synthetic construct
  source 1..75: mol_type = other DNA
ctgcaggtgccgctgtgtgacttgtggaatccaacgacctgtccgatcagtttcctgccttatctcgcctgggcg

SEQ ID NO: 748920 - DNA, 75 bp, synthetic construct
  source 1..75: mol_type = other DNA
aaggcagtttttattctgacagtggtgagcgttgttttctcgtatctttcgtcagataagtttatgcctgttaag

SEQ ID NO: 748921 - DNA, 75 bp, synthetic construct
  source 1..75: mol_type = other DNA
atgaaggtgtgggtaataagaaataaacacgcagatgacttcagaaaaatatgtcttctgtttatccggttaacg

SEQ ID NO: 748922 - DNA, 75 bp, synthetic construct
  source 1..75: mol_type = other DNA
cgtggaagaccagggcattagtgaagaaacctatcaggaacttgaacgcctgatcgccgatgtgaagccgtgcag

SEQ ID NO: 748923 - DNA, 75 bp, synthetic construct
  source 1..75: mol_type = other DNA
ccgtgcggcggggggtggagccgttcggctttctgatccgcattattgagtggtggcagaccggagaaacaccgg

SEQ ID NO: 748924 - DNA, 75 bp, synthetic construct
  source 1..75: mol_type = other DNA
cggcttcctgatacgcattattgagtggtggcagactggagaaacaccgggcacgtttcgcctggacatcggcgt

SEQ ID NO: 748925 - DNA, 75 bp, synthetic construct
  source 1..75: mol_type = other DNA
tagcgaaaagaagaacctttgcaattatttctcacccggacgccggtaagactaccatcaccgagaaggtgctgc

SEQ ID NO: 748926 - DNA, 75 bp, synthetic construct
  source 1..75: mol_type = other DNA
atgaaaaaggcatgaagctgcgccaggtgcgcactgcgaaagatgtggtgatctccgacgcgctgacctttatgg

SEQ ID NO: 748927 - DNA, 75 bp, synthetic construct
  source 1..75: mol_type = other DNA
accagcatggtcaacctgcgcctggcacaggaacgttatccggacgttcagttccaccagacccgcgagcattaa

SEQ ID NO: 748928 - DNA, 75 bp, synthetic construct
  source 1..75: mol_type = other DNA
ccgcggtctggcgcagggtacggatgttagcttcggcagcttcggtctgaaagctgttggccgtggtcgtctgac

SEQ ID NO: 748929 - DNA, 75 bp, synthetic construct
  source 1..75: mol_type = other DNA
ctcgcttacatcgccaccagcatggttaacctacgcttagcgcaagagcgttatccggacgttcaattccaccag

SEQ ID NO: 748930 - DNA, 75 bp, synthetic construct
  source 1..75: mol_type = other DNA
aaccagcacgctaagtcggactggatggagatggaaaagcagcgtgggatctccattactacgtctgtgatgcag

SEQ ID NO: 748931 - DNA, 75 bp, synthetic construct
  source 1..75: mol_type = other DNA
cctggtggtgctgctggcggcgtatttgtcgctgtataccggactgtttgctggcgtgctgtcgcgcctgtggcc

SEQ ID NO: 748932 - DNA, 75 bp, synthetic construct
  source 1..75: mol_type = other DNA
cttgcgtccaactggtggtggcacatatattggaagaaattctgttgatatgtgcttttatgatggatatagtac

SEQ ID NO: 748933 - DNA, 75 bp, synthetic construct
  source 1..75: mol_type = other DNA
gttgaagggcaggaaacctatctggaagaaacctactaccaccgtttcgatccaccccagggattcagcttacag

SEQ ID NO: 748934 - DNA, 75 bp, synthetic construct
  source 1..75: mol_type = other DNA
gaggcccacagggaacgttatatggcaaaagcgctcagggcgggatcatcaacatcgtcacccagcagccggaca

SEQ ID NO: 748935 - DNA, 75 bp, synthetic construct
  source 1..75: mol_type = other DNA
acgaatcatgtggctggatatagtttgagtcatagcttatatgacaggattgtttttttatgtacatcctcgtcg

SEQ ID NO: 748936 - DNA, 75 bp, synthetic construct
  source 1..75: mol_type = other DNA
tacaattgatggcgaaacaaatataacattacaatttacggaaaaaagaagtctaattaaaagagaactgcaaat

SEQ ID NO: 748937 - DNA, 75 bp, synthetic construct
  source 1..75: mol_type = other DNA
acgtaaaaaatcacgaggctggacaatatatggggaatattaatattactttcacaccaagtagtcaaacactct

SEQ ID NO: 748938 - DNA, 75 bp, synthetic construct
  source 1..75: mol_type = other DNA
cggtgattggcccgcagggtgagattcaggcgatgatcccgcagttcacccgcgaggtgttgaccactaacgtga

SEQ ID NO: 748939 - DNA, 75 bp, synthetic construct
  source 1..75: mol_type = other DNA
attgccgcccctgccctctggcaagtgaccgagtttctgcgcggttgggtactgaccggcttcccgtggttacag

SEQ ID NO: 748940 - DNA, 75 bp, synthetic construct
  source 1..75: mol_type = other DNA
ctgtttgcccttcccttcccgctgcgttacatccagtggtttaccccgcaaccggagaaaaccattcaggtttcg

SEQ ID NO: 748941 - DNA, 75 bp, synthetic construct
  source 1..75: mol_type = other DNA
agtgcagagaaataatcgccgtgcagatcaggaagaatacaatcaccggcgctctttgcctgttactactcatga

SEQ ID NO: 748942 - DNA, 75 bp, synthetic construct
  source 1..75: mol_type = other DNA
acttatccgttaatttcttacttaggggttcttatcgttggcgcagccgccgtaaatagatacagcaaatcacgg

SEQ ID NO: 748943 - DNA, 75 bp, synthetic construct
  source 1..75: mol_type = other DNA
accgttaccaaagctttctttaaatttgagtgtcagagaaatagtgacgcagatagctatacccagagggatcac

SEQ ID NO: 748944 - DNA, 75 bp, synthetic construct
  source 1..75: mol_type = other DNA
cttatttgcaagaggtggcgaagcgccgcacttttgccattatttctcacccggacgccggtaagactaccatca

SEQ ID NO: 748945 - DNA, 75 bp, synthetic construct
  source 1..75: mol_type = other DNA
agcggcaccgtgcaccgtttgggttatccggattcaatcgagtacgacgagcttcccggtaagtctgacggcatg

SEQ ID NO: 748946 - DNA, 75 bp, synthetic construct
  source 1..75: mol_type = other DNA
caaacttaataagctgggtaaaaatcagcatcagtcgacgaaggcagagaaacagtcctggtggagtcagatcaa

SEQ ID NO: 748947 - DNA, 75 bp, synthetic construct
  source 1..75: mol_type = other DNA
cgccttcatcgtcgccgggtttgtcagccgtggtatgcgcgtcctgttctgtgcaccgtacaccatcctgatcgg

SEQ ID NO: 748948 - DNA, 75 bp, synthetic construct
  source 1..75: mol_type = other DNA
ttgtcgtcaccaaaggggccgagcgtatttccgaggtttctgcccgctttaccctggacgcgatgcccggcaaac

SEQ ID NO: 748949 - DNA, 75 bp, synthetic construct
  source 1..75: mol_type = other DNA
cgacccgtcacgactgattcagatttccagtgcggatacgctgattcgccgtgattttcctcagaatatcgacct

SEQ ID NO: 748950 - DNA, 75 bp, synthetic construct
  source 1..75: mol_type = other DNA
ggtgtgctcacactttcagggagaaattcggtgaatggcctgatgggttgagcagtttcccgatggaaataagcc

SEQ ID NO: 748951 - DNA, 75 bp, synthetic construct
  source 1..75: mol_type = other DNA
gtgcgtaaccagctgctggcaagcccgtcgttgctctacaccgccaccggaattatgtttgtgctggcggtggtg

SEQ ID NO: 748952 - DNA, 75 bp, synthetic construct
  source 1..75: mol_type = other DNA
gctgaaagtgtaccgtgcattactgaccgaaggcgtttccctgcgcgatatcgtcaccatcgccactgtgctggt

SEQ ID NO: 748953 - DNA, 75 bp, synthetic construct
  source 1..75: mol_type = other DNA
atgaagcggatattccggcggataaactgatggccctgccctccagcgaaacctacggcgagattgacggcgtgc

SEQ ID NO: 748954 - DNA, 75 bp, synthetic construct
  source 1..75: mol_type = other DNA
ctgacaatccagtttaacctggcgggtgttaacgctgaggtaatgaccgcagacactccggtagatgagcgccag

SEQ ID NO: 748955 - DNA, 75 bp, synthetic construct
  source 1..75: mol_type = other DNA
gttccaccggaaggaagtgaggcttggcgcattatgcaggcaaagcaacaactccagaaaaatataaacagtctg

SEQ ID NO: 748956 - DNA, 75 bp, synthetic construct
  source 1..75: mol_type = other DNA
atgctgaaaatcaccccaaactttgctcaggagcgcggtttaaaccagctgcggcaccagtggaaacagcatcgc

SEQ ID NO: 748957 - DNA, 75 bp, synthetic construct
  source 1..75: mol_type = other DNA
tgattctggcgatcaacctgatcggcggcgtctgtatcgggatcttcaaatacaacctgagcgccgacgccgcct

SEQ ID NO: 748958 - DNA, 75 bp, synthetic construct
  source 1..75: mol_type = other DNA
ttgtggtcaagcgcggcaaccgcgtgcgctccaacgtcaacctgtatgacttcctgctaaacggaaaactggggc

SEQ ID NO: 748959 - DNA, 75 bp, synthetic construct
  source 1..75: mol_type = other DNA
cgccaggccgtatgttgcagaacggcgataccttaatagtgagcactgaccgctatgccggcaccattcaggtac

SEQ ID NO: 748960 - DNA, 75 bp, synthetic construct
  source 1..75: mol_type = other DNA
gctgactcaaaccttacgggggcagcaccactgcccggtattctgagtgggcagcagtcggatacacaaaacatg

SEQ ID NO: 748961 - DNA, 75 bp, synthetic construct
  source 1..75: mol_type = other DNA
atgaaaaaggcatgaaactgcgccaggtgcgtaccgcgaaagacgtggtgatttccgacgcattgctcctttatg

SEQ ID NO: 748962 - DNA, 75 bp, synthetic construct
  source 1..75: mol_type = other DNA
ctgcggaaagtgatagatttgaagacctggatcaccgatttcatagcattattgccgaagcgacgcaaaatcggg

SEQ ID NO: 748963 - DNA, 75 bp, synthetic construct
  source 1..75: mol_type = other DNA
cagaacgtgaactgagcgagcggtttaataccagccgaactaccattcgtgaagccattattatgctggaactga

SEQ ID NO: 748964 - DNA, 75 bp, synthetic construct
  source 1..75: mol_type = other DNA
ggcaagccgcagtctcaggaagcctatggttgcatgttgcgtaaatgcgtaaagacgatccgcagttcaaaaagc

SEQ ID NO: 748965 - DNA, 75 bp, synthetic construct
  source 1..75: mol_type = other DNA
tttctgagctcgatccacttacagctgaacgatttttgcaagatagatgtatatctctcagctccaaaacaataa

SEQ ID NO: 748966 - DNA, 75 bp, synthetic construct
  source 1..75: mol_type = other DNA
tcgagcccatcagtttaagcctcggctacaagctggtggcgctggtggacaaagcacagggtaacccgctcaccc

SEQ ID NO: 748967 - DNA, 75 bp, synthetic construct
  source 1..75: mol_type = other DNA
ctcacattacgattatgcgtaaacaggggctgcaaaaacgcagcgaatactatccgatcagttctgcgccaggcc

SEQ ID NO: 748968 - DNA, 75 bp, synthetic construct
  source 1..75: mol_type = other DNA
ttcctgctgaacggcaaactggggctttcgcagttcgccgatggtgacaccatcatcgtcgggccgcgtcagcat

SEQ ID NO: 748969 - DNA, 75 bp, synthetic construct
  source 1..75: mol_type = other DNA
agcaaaaagtggtgggctactcgcaggattactccaacgccattgttgaagcagtgaaaaagaaactcaacaaac

SEQ ID NO: 748970 - DNA, 75 bp, synthetic construct
  source 1..75: mol_type = other DNA
aggaggctgcccgtcaggctgaaagtccgttgttaaacggtggaattgttgccacagccagtcatattgcttcag

SEQ ID NO: 748971 - DNA, 75 bp, synthetic construct
  source 1..75: mol_type = other DNA
tgacgacagattcactgctgatgccgaagaacaggacgcagtgtctgaagcagatacgggataacaatatgatgt

SEQ ID NO: 748972 - DNA, 75 bp, synthetic construct
  source 1..75: mol_type = other DNA
aggattttatcgcctggctgaagatggggttgtcatcaggaatgattgaagccaacacgccttctgcgagagtgc

SEQ ID NO: 748973 - DNA, 75 bp, synthetic construct
  source 1..75: mol_type = other DNA
gtgaactggtcgcgtcactgagcgaacgcctgcgtaatggcgaacgtgatatcgacgcactggtggaacaggcgc

SEQ ID NO: 748974 - DNA, 75 bp, synthetic construct
  source 1..75: mol_type = other DNA
tcccgatctacacaccggaagtgctgacgctatgcccgaaatgtggtcatgaccagttccagagacgcccgttcg

SEQ ID NO: 748975 - DNA, 75 bp, synthetic construct
  source 1..75: mol_type = other DNA
atcgacgcactggtggagcaggcgcgcgagcgcgtaataaaaacaggggagttaacgcgaaccgaggtcgatgag

SEQ ID NO: 748976 - DNA, 75 bp, synthetic construct
  source 1..75: mol_type = other DNA
agcatgataaaacattaaaatatcaatgcctcctagtgctggatgaatttacgtctatggggcgtgtgggtatta

SEQ ID NO: 748977 - DNA, 75 bp, synthetic construct
  source 1..75: mol_type = other DNA
ttatgcaaaggcgtaaagtagcaaccgacaatattccagaagtgccgattcttggcgagtttgaagtttacgagc

SEQ ID NO: 748978 - DNA, 75 bp, synthetic construct
  source 1..75: mol_type = other DNA
aagtgggtatttttattgttggcatatacaggtgctcgtcgctctgaaatcaccgctttaaaagtttcagatatc

SEQ ID NO: 748979 - DNA, 75 bp, synthetic construct
  source 1..75: mol_type = other DNA
tgggataacaatccgatgccccgtgatgtatacgacaggatgtgccttgcgccactcagccggctgttgctgaac

SEQ ID NO: 748980 - DNA, 75 bp, synthetic construct
  source 1..75: mol_type = other DNA
tactgagcatgttttatcacaccgctggaacccgctggactacataagccgttcaaaatcgcgtcgtgttggaga

SEQ ID NO: 748981 - DNA, 75 bp, synthetic construct
  source 1..75: mol_type = other DNA
taacaggaagaacggtattgatgatgatagggagcttatgaagccctatccggtttctatggcgcaactgtattc

SEQ ID NO: 748982 - DNA, 75 bp, synthetic construct
  source 1..75: mol_type = other DNA
ctcacccccgtctgggctatcgccatcgagcgtgagaactccggcgatagcgtaacctgctatctaacggaggct

SEQ ID NO: 748983 - DNA, 75 bp, synthetic construct
  source 1..75: mol_type = other DNA
ctcgtcacgctgtcatatagttttttcaaaaattacaacaacgctgacgcttacctcgaagtgcgtgaggcattt

SEQ ID NO: 748984 - DNA, 75 bp, synthetic construct
  source 1..75: mol_type = other DNA
ttacctcgaagtgcgtgaggcatttaacagaggaaagtatgaccagctacatcatgctgccgcctttttgtacct

SEQ ID NO: 748985 - DNA, 75 bp, synthetic construct
  source 1..75: mol_type = other DNA
catatggcagccagacggtcggtttcctgcaaggcgtcaacacgtgtagttgctaacgatataattgcaataatg

SEQ ID NO: 748986 - DNA, 75 bp, synthetic construct
  source 1..75: mol_type = other DNA
atgagtactattgatactttaagggaatacgccgaagtatggcggctatttggtagtatgccagatgatgcaacc

SEQ ID NO: 748987 - DNA, 75 bp, synthetic construct
  source 1..75: mol_type = other DNA
gacattgcagcgagaaggacattcgctcgtcacgctgtcatatagttttttccaaaattacaacaacgctgacgc

SEQ ID NO: 748988 - DNA, 75 bp, synthetic construct
  source 1..75: mol_type = other DNA
ttaattaggcaatatttacctaaagggatcctgattaccatcgagattcagccagttttagcaatcgctgtggca

SEQ ID NO: 748989 - DNA, 75 bp, synthetic construct
  source 1..75: mol_type = other DNA
atttaagtcttcacagtgaactggtgaaagcggtagaagaaggcaaattcaccatctgggcagtagacgatgtga

SEQ ID NO: 748990 - DNA, 75 bp, synthetic construct
  source 1..75: mol_type = other DNA
tgagatttccggccacaccatacgcttacgtaacgcagttagcgctgacgataattttgcgaccttaacccaggt

SEQ ID NO: 748991 - DNA, 75 bp, synthetic construct
  source 1..75: mol_type = other DNA
cctatgccggctataaatacagggtggatattgccggagagggcgatcagagaaaactcaggctacgacacatgg

SEQ ID NO: 748992 - DNA, 75 bp, synthetic construct
  source 1..75: mol_type = other DNA
gcggaatgacagcgaaaaaactgcggatgaggtgattgagcattatgcatcactggatctgctgattatcgacga

SEQ ID NO: 748993 - DNA, 75 bp, synthetic construct
  source 1..75: mol_type = other DNA
ccttcgatgccattgaagctgaaagtcattctggtaggcgaacgcgaatcattggctgatttccaggagatggag

SEQ ID NO: 748994 - DNA, 75 bp, synthetic construct
  source 1..75: mol_type = other DNA
acgtttgagcaatcatatagcgaagtagacggtgacagcgcctcaatggctgaactctgcgccctgatcagcgcc

SEQ ID NO: 748995 - DNA, 75 bp, synthetic construct
  source 1..75: mol_type = other DNA
ttggcctcagagtacgaccttctcttgagacattactgcgatgcacatatagcctttatggatcaacgacattct

SEQ ID NO: 748996 - DNA, 75 bp, synthetic construct
  source 1..75: mol_type = other DNA
gaccgtgaccgcggcatggagccgttcattcgaagcgttggcggctactataaagtcctgcaacaaggtatgccg

SEQ ID NO: 748997 - DNA, 75 bp, synthetic construct
  source 1..75: mol_type = other DNA
tttcctacggtaaacgcccactgggccatgcgttaataacgggtatgtcgggggaaggtaaaaccacgctgctta

SEQ ID NO: 748998 - DNA, 75 bp, synthetic construct
  source 1..75: mol_type = other DNA
caaccgccctgttagctccctgtggggggatgttgtccagatcagaacggtagatcacaacttctataccaccgg

SEQ ID NO: 748999 - DNA, 75 bp, synthetic construct
  source 1..75: mol_type = other DNA
agatcaatatcctgatggaagcaccgtttgagtttgtgttaacgcaaacgtattgctgtatgtcccagcaagcgg

SEQ ID NO: 749000 - DNA, 75 bp, synthetic construct
  source 1..75: mol_type = other DNA
gccttccttactgatgctgaatacgacgcgctgatgtcgattaccgaacactccagacagttcctggttaaacaa

SEQ ID NO: 749001 - DNA, 75 bp, synthetic construct
  source 1..75: mol_type = other DNA
ctatctatgtgtttgccacgcaggagccgaacgatgcgctgtccagccgtattggccgcacgatcatgtcgcaga

SEQ ID NO: 749002 - DNA, 75 bp, synthetic construct
  source 1..75: mol_type = other DNA
tatgaggggatctctcagcaaaaagtgttgctttcacgttggctactgacccgaccgcaatttctgatccttgat

SEQ ID NO: 749003 - DNA, 75 bp, synthetic construct
  source 1..75: mol_type = other DNA
gtaggaactgccattttcctatcctctactgcttccgactatatcaatggacaagttatttatgtcgatggtggt

SEQ ID NO: 749004 - DNA, 75 bp, synthetic construct
  source 1..75: mol_type = other DNA
tcgtcttgatacccctgggaaaatcgacccgatcccgcatccgtatggcgaagatttgccgtgtgcggataacaa

SEQ ID NO: 749005 - DNA, 75 bp, synthetic construct
  source 1..75: mol_type = other DNA
tgagaagttcgtaagagtagcgattgcagtaaatgactctggtacagaagacagtgtgatggatattcgtcaatt

SEQ ID NO: 749006 - DNA, 75 bp, synthetic construct
  source 1..75: mol_type = other DNA
cctgatactgccgcaaagcttcatatgcctatagagcgaaagccctggtcactagctgccaacggtggcgaagtg

SEQ ID NO: 749007 - DNA, 75 bp, synthetic construct
  source 1..75: mol_type = other DNA
taacgatatagatttgagtgtatgcctgaaaggagaatctggatcaggtaagactgaaatggcaatgtatattag

SEQ ID NO: 749008 - DNA, 75 bp, synthetic construct
  source 1..75: mol_type = other DNA
agcgatgaagtataacccgcgcatttttgcctttgaccgcgatcagggcatgatgccgatgattaaagcgttaca

SEQ ID NO: 749009 - DNA, 75 bp, synthetic construct
  source 1..75: mol_type = other DNA
cttttacctgcaaaccgtgctcgggcgtagtgaagtcgaaacaggtttacttctgacaccgtggccgttagcaac

SEQ ID NO: 749010 - DNA, 75 bp, synthetic construct
  source 1..75: mol_type = other DNA
cacaacgttttctgggacggggaatggggataaactcatttattgttgccgtatcctctgcagccggaccgacga

SEQ ID NO: 749011 - DNA, 75 bp, synthetic construct
  source 1..75: mol_type = other DNA
ttgctgcagcaatcctctccatcgcatcctggaaatggttatttttaatcaacgtaccgttaggtattatcgccc

SEQ ID NO: 749012 - DNA, 75 bp, synthetic construct
  source 1..75: mol_type = other DNA
cgcagtgaagtagaaacgggtttactcctgacgccgtggccgttagctaccatggtgatggcaccgctggcaggc

SEQ ID NO: 749013 - DNA, 75 bp, synthetic construct
  source 1..75: mol_type = other DNA
ccattattacctctgcacctcgtgagcgtagcggtggcgccagtggcatgttaggcactgctcgtctgcttggtc

SEQ ID NO: 749014 - DNA, 75 bp, synthetic construct
  source 1..75: mol_type = other DNA
ctgcccagcgccgtgatgaacgcgttaaccttcggcctgcttatcactgcgttgagtggtttcgctcaggggcaa

SEQ ID NO: 749015 - DNA, 75 bp, synthetic construct
  source 1..75: mol_type = other DNA
aagaagagaacgcccacctcaaggagttgcttgcagaagtcatgatggataaagaagcgttgcaggtggccctga

SEQ ID NO: 749016 - DNA, 75 bp, synthetic construct
  source 1..75: mol_type = other DNA
gatttacagtttggtgttcgcattgccggtaaagagcgtgctctcctcgcaaaatacatccagtttaatcagcct

SEQ ID NO: 749017 - DNA, 75 bp, synthetic construct
  source 1..75: mol_type = other DNA
gctttgatggatgagaactccctcattccgacagatttacgcaccgtggatatgttaattcagcagatgccgaat

SEQ ID NO: 749018 - DNA, 75 bp, synthetic construct
  source 1..75: mol_type = other DNA
ctgtgggttaaaaacagccaacttatgcctaatgattacaacccaaacaacgtggcaccacccgaaaaaaaactg

SEQ ID NO: 749019 - DNA, 75 bp, synthetic construct
  source 1..75: mol_type = other DNA
aggaagagaacgccagactcaagaagatgcttgccgaagccatgctggataaagaggcgcttcaggtggctcttg

SEQ ID NO: 749020 - DNA, 75 bp, synthetic construct
  source 1..75: mol_type = other DNA
atgaagaagcgtttttccgacgaacagatcatcagtattctccgcgaagccgaagctggggtacccgcccgtgaa

SEQ ID NO: 749021 - DNA, 75 bp, synthetic construct
  source 1..75: mol_type = other DNA
cacaaactgcatcagcaaactccgcgacagcagccaaaaaatcagaaaccaacgcgaaaaatagcgaggcagcag

SEQ ID NO: 749022 - DNA, 75 bp, synthetic construct
  source 1..75: mol_type = other DNA
gttgactacgccgccgtgacggggttacttgttcaggtcgcccgtgaaacagatggtcgcgttaccgcgctggaa

SEQ ID NO: 749023 - DNA, 75 bp, synthetic construct
  source 1..75: mol_type = other DNA
gaattgacagacacagaattagaaatccttcaaagtatgactggtgtttacttcaatccgcgcccacgcaaaaca

SEQ ID NO: 749024 - DNA, 75 bp, synthetic construct
  source 1..75: mol_type = other DNA
gaattagaaattattcaatcaatgggtgatggtgtgtatttcaaacccagaacaagaaagacaacgattatagaa

SEQ ID NO: 749025 - DNA, 75 bp, synthetic construct
  source 1..75: mol_type = other DNA
aactggaaatagtgagaaacatcataagagagtcattgtcaggtaatacggcttttgctttgctggtgtatttat

SEQ ID NO: 749026 - DNA, 75 bp, synthetic construct
  source 1..75: mol_type = other DNA
tattcataaaatgaatcttttaaccctgccgctgcaacaaggacttgcgttgtctgcgatcccggtaatttttac

SEQ ID NO: 749027 - DNA, 75 bp, synthetic construct
  source 1..75: mol_type = other DNA
ggcgcttgctgtactggcgttgattatcccttccctgctgacctggcaaagcagaaagcataatccacaagcagg

SEQ ID NO: 749028 - DNA, 75 bp, synthetic construct
  source 1..75: mol_type = other DNA
atttattacaggtagtgcgatccctctggtggcgtatatcttctggcaactggcgacgctgggcagcattgattc

SEQ ID NO: 749029 - DNA, 75 bp, synthetic construct
  source 1..75: mol_type = other DNA
aatggattgctttgtacgtgggtttgatagcaccggtaattctctcgcgtgggcgttgggttcatcagtcggcgt

SEQ ID NO: 749030 - DNA, 75 bp, synthetic construct
  source 1..75: mol_type = other DNA
ttactaacagtagacgatctcaattcatctaccgatcttgctgtcaggtcattaaccacatctaacccggtaaaa

SEQ ID NO: 749031 - DNA, 75 bp, synthetic construct
  source 1..75: mol_type = other DNA
agccatcaggttatattggatttgtcaggatttacatctcagcgaaaggttatccatcagtagcgtctagtgccg

SEQ ID NO: 749032 - DNA, 75 bp, synthetic construct
  source 1..75: mol_type = other DNA
cagctccgaacgtacattatcgagctgaaatcacagctcggtctgagtacgggacgccgccgtcccgtgggagtt

SEQ ID NO: 749033 - DNA, 75 bp, synthetic construct
  source 1..75: mol_type = other DNA
caccagtgaagattgctaattcattttatttaaagaatgaaacttataaagatgtgagttataaaagtgtaaata

SEQ ID NO: 749034 - DNA, 75 bp, synthetic construct
  source 1..75: mol_type = other DNA
tatgagctgtatctgaaatctcaggatgcattaggcaaaaaactacgcgccaaagatagcgccacggacaacgtt

SEQ ID NO: 749035 - DNA, 75 bp, synthetic construct
  source 1..75: mol_type = other DNA
caaagatagcgccacggacaacgttcgccggttgttaaaaaaagctcgcaccacggcaaacaggaagaatgccga

SEQ ID NO: 749036 - DNA, 75 bp, synthetic construct
  source 1..75: mol_type = other DNA
aaccgcgagcgttttgactgggttgcgtttgatgagtcgcgccctctccccgtctctgtgccttcgatgccattg

SEQ ID NO: 749037 - DNA, 75 bp, synthetic construct
  source 1..75: mol_type = other DNA
gccgcgcgtacgctacaaagcgatgcaggccaactggtgggcggtcactatgaggtttccggccactccatccgc

SEQ ID NO: 749038 - DNA, 75 bp, synthetic construct
  source 1..75: mol_type = other DNA
acatataagggatatgacaggatctataaattatttgagaacggtcagtatgtttccttggagaaaaaattcaat

SEQ ID NO: 749039 - DNA, 75 bp, synthetic construct
  source 1..75: mol_type = other DNA
tcgcaaaatggggattcgcacagcgagcaccggggtattccttggctgttccggctatgcgctgccgccgaaaga

SEQ ID NO: 749040 - DNA, 75 bp, synthetic construct
  source 1..75: mol_type = other DNA
gttgatttgcaggattacgctaaccgattaattgcacgctatagcaacccggcgttacgtcatcgaacctggcag

SEQ ID NO: 749041 - DNA, 75 bp, synthetic construct
  source 1..75: mol_type = other DNA
tggtttgacacaggctcagtatatggacatctgcctcgcaatgcttcgctgtgccgatacgatttatatgctcaa

SEQ ID NO: 749042 - DNA, 75 bp, synthetic construct
  source 1..75: mol_type = other DNA
gtgcgcgatcctgctggcgttgcctgtgaacctttccgccagtgggtaatagaagataactttgttgccggacgt

SEQ ID NO: 749043 - DNA, 75 bp, synthetic construct
  source 1..75: mol_type = other DNA
gttacggtaccggcgcaatggtgttgtgctggcactgcgacaaccagctgcgtgaccagacatccgaatcactga

SEQ ID NO: 749044 - DNA, 75 bp, synthetic construct
  source 1..75: mol_type = other DNA
tggttcagcgcttccggcgtggccagtggcgagggattacgcaccagcaaccgctgtttgcccttacggcgaaag

SEQ ID NO: 749045 - DNA, 75 bp, synthetic construct
  source 1..75: mol_type = other DNA
taagctgttgtcttcttcaaaccccgcgtggattctctttgatttgctgaccaatgctcgatatggccttggtca

SEQ ID NO: 749046 - DNA, 75 bp, synthetic construct
  source 1..75: mol_type = other DNA
gctgcgattacatctgaagcgactgcgcgtacaagctccgacaatgcactaagtgggagagttgacaccttaaaa

SEQ ID NO: 749047 - DNA, 75 bp, synthetic construct
  source 1..75: mol_type = other DNA
gtgcagctatatctgaagaaaaaattgcccgagcaactgctgatgaatctttagcacaacagataaccacattga

SEQ ID NO: 749048 - DNA, 75 bp, synthetic construct
  source 1..75: mol_type = other DNA
tcgatactctgaaagcagaggtggatggaaataccgcgacaattcaacagcaggcaacagccattgctgatacca

SEQ ID NO: 749049 - DNA, 75 bp, synthetic construct
  source 1..75: mol_type = other DNA
attgtgacgaagaggtcgatgatggctttgggggtaaagagaaacgctttgcaatcaatacgcagatcaccagtc

SEQ ID NO: 749050 - DNA, 75 bp, synthetic construct
  source 1..75: mol_type = other DNA
tttgcaatcaatacgcagatcaccagtcgacaggacgcataccggctaattcaggatattgctggagcattccgc

SEQ ID NO: 749051 - DNA, 75 bp, synthetic construct
  source 1..75: mol_type = other DNA
ctaagtgctgaagtttcggctctttatcttggtgttagtgtcaaaaccctcgctcgctatcgccagaatggtaat

SEQ ID NO: 749052 - DNA, 75 bp, synthetic construct
  source 1..75: mol_type = other DNA
ggccctgcttatatccagtaccaagcagaagacagcaaagcacggaatcaacgagtaaattatctactgggtgat

SEQ ID NO: 749053 - DNA, 75 bp, synthetic construct
  source 1..75: mol_type = other DNA
aatacgccgaagtatggcatttatttggtggtatgccagatgatgcaacccttagtgctgaagtttcggctcttt

SEQ ID NO: 749054 - DNA, 75 bp, synthetic construct
  source 1..75: mol_type = other DNA
tgaatcaaagattaacgatgatatttctgccgcaattgtgagtgaacaagaggcacgagctagtgccgatgaagc

SEQ ID NO: 749055 - DNA, 75 bp, synthetic construct
  source 1..75: mol_type = other DNA
ggcgtaattggcggcttggtaaatggcgcaagatctatttttgtcgacgatttgcccatagtaaatgaagacggc

SEQ ID NO: 749056 - DNA, 75 bp, synthetic construct
  source 1..75: mol_type = other DNA
caagaccaagcctggaagctctatgagaagttgagtatactcaactcaagagttaacgaaattgtgaaagatatg

SEQ ID NO: 749057 - DNA, 75 bp, synthetic construct
  source 1..75: mol_type = other DNA
ttacaacgtgacattatcaaaatcgtggcatttctggcgatggcaggtgaccacattgccacagcatttcatgtg

SEQ ID NO: 749058 - DNA, 75 bp, synthetic construct
  source 1..75: mol_type = other DNA
caccgccgcgacgctgctgctggtgttgggttccgcattgtttatggatgcgctggggttgtcgatggcgctcgg

SEQ ID NO: 749059 - DNA, 75 bp, synthetic construct
  source 1..75: mol_type = other DNA
ggggttgctgctcgggcttttttttatctcggtcggaatgtcgctcaacctcggtgtgctttatacccatctgtt

SEQ ID NO: 749060 - DNA, 75 bp, synthetic construct
  source 1..75: mol_type = other DNA
cgctttccatgatgaccacgccgctgctgatgaagctggtggataaatggctatcccgccagtttaacggaccgg

SEQ ID NO: 749061 - DNA, 75 bp, synthetic construct
  source 1..75: mol_type = other DNA
gcggcacaggtgctgttaagcgcggcgttgctggcgggattattgatgctgacggatttcgcctggcaggcggcg

SEQ ID NO: 749062 - DNA, 75 bp, synthetic construct
  source 1..75: mol_type = other DNA
tttgcctttgtcctcttttctaccgcttcttcacaacgcttattccagggcgaccagatggcgctgttgctggtg

SEQ ID NO: 749063 - DNA, 75 bp, synthetic construct
  source 1..75: mol_type = other DNA
ctgcgcccggtatttcgctttattgcttcttccggtgtgcgggaagtctttaccgctgccacgctgctgctggtg

SEQ ID NO: 749064 - DNA, 75 bp, synthetic construct
  source 1..75: mol_type = other DNA
ccataaccggaaccatgctggcactttatctgccgttcagtactgccagttatggctggcaggggctggtgatgc

SEQ ID NO: 749065 - DNA, 75 bp, synthetic construct
  source 1..75: mol_type = other DNA
acctgtattctggcaggcatttcgtgatacagaaaatcagtggtgggagctgaacatcctgttttgttttgccgt

SEQ ID NO: 749066 - DNA, 75 bp, synthetic construct
  source 1..75: mol_type = other DNA
atggaaaacaaagagtgttactgtaaggatgatgtacagaatcccggtgctttgcctttgttgtttctggcacca

SEQ ID NO: 749067 - DNA, 75 bp, synthetic construct
  source 1..75: mol_type = other DNA
cgcaagacgctggtttctttggggatgcatccgcatcaggcacagcgggcgcaactgcattttcgacgcctggat

SEQ ID NO: 749068 - DNA, 75 bp, synthetic construct
  source 1..75: mol_type = other DNA
ggcgttttgggcaggtgattggtcgtttgctgatggcaaataaaatgcgcattaccgtgctggagcgggatatca

SEQ ID NO: 749069 - DNA, 75 bp, synthetic construct
  source 1..75: mol_type = other DNA
gggaatgaaaaatggacgaccgcgcatagcctatgtgaaccagtattcaggtacaccaaatattaagaaaattac

SEQ ID NO: 749070 - DNA, 75 bp, synthetic construct
  source 1..75: mol_type = other DNA
cgcacaggaaaatacaggtgttcccggtaatatcatggggcacaccacccgacgagttattcgtgctccggcggt

SEQ ID NO: 749071 - DNA, 75 bp, synthetic construct
  source 1..75: mol_type = other DNA
cccgatctaatgcagcatgcggcggctgaggagaagccactggagctgttgcggcaagaaggcgttttctgtgaa

SEQ ID NO: 749072 - DNA, 75 bp, synthetic construct
  source 1..75: mol_type = other DNA
gctaatgaattgtcgctgatttgtgccgatcagggaattaacgtctgggaactgattcgcctggcgaatcgtcac

SEQ ID NO: 749073 - DNA, 75 bp, synthetic construct
  source 1..75: mol_type = other DNA
cgctacgtctgtatcatgcgggttttaaagtgatcatgctggaagtggaaaaaccgacagtgattcgttgtaccg

SEQ ID NO: 749074 - DNA, 75 bp, synthetic construct
  source 1..75: mol_type = other DNA
caggagatcgccatcagcgtgctggcagaaatattacaggtgaaaaataacgcgccgggtgggctgatgatgaaa

SEQ ID NO: 749075 - DNA, 75 bp, synthetic construct
  source 1..75: mol_type = other DNA
tgaaaccgctgtgcgtggtagatgccattctggcgaaacagaatttgggtacgcgtgtggacatggcaccggtaa

SEQ ID NO: 749076 - DNA, 75 bp, synthetic construct
  source 1..75: mol_type = other DNA
gagtaggtaaaaccagtatgctcgagcagatactgaattatctaccaaatgtgatagaacatgatttctatcatg

SEQ ID NO: 749077 - DNA, 75 bp, synthetic construct
  source 1..75: mol_type = other DNA
aaagtgctgcgtcatcgtggtggtgaaacccgcgtgttacgtccgggctacgtcaagccgaaacacgaatttaat

SEQ ID NO: 749078 - DNA, 75 bp, synthetic construct
  source 1..75: mol_type = other DNA
gttaatgacggctttatctttctggggcacaggatcattcgcaaacgcagtcgttatggcactgttgcaaatagt

SEQ ID NO: 749079 - DNA, 75 bp, synthetic construct
  source 1..75: mol_type = other DNA
caatggcacagtggtgaaacgctggttgttgaaccgaatattcaccagttgccgaaaaaactgaccgggctttgc

SEQ ID NO: 749080 - DNA, 75 bp, synthetic construct
  source 1..75: mol_type = other DNA
gttggtcgatcacagtcagttcaaagccatcagcggcgatcatgttaagcagcagtatgtcgtcgataccaaagg

SEQ ID NO: 749081 - DNA, 75 bp, synthetic construct
  source 1..75: mol_type = other DNA
atgggattgtttacgacccgccagttgctcggttataccgaacaaaaagtgaaatatcgtgcgctgtttctggag

SEQ ID NO: 749082 - DNA, 75 bp, synthetic construct
  source 1..75: mol_type = other DNA
gcggcgtatgtgtctccggtggtgtcaggcaaagtgctgcgcagccgtggtggtgaaacccgcgtgttacgtccc

SEQ ID NO: 749083 - DNA, 75 bp, synthetic construct
  source 1..75: mol_type = other DNA
cacggataacccggcggagctggacgaggattccggcaccatcagtgccaactttatcggtgaaaaatgcgtgaa

SEQ ID NO: 749084 - DNA, 75 bp, synthetic construct
  source 1..75: mol_type = other DNA
actggatacccgccggggctcaaattcgcaactggaaacggcagcgaaagacctgggggctgtggtttcctttaa

SEQ ID NO: 749085 - DNA, 75 bp, synthetic construct
  source 1..75: mol_type = other DNA
ccgttctgtatggtaagtacaccatggccggtgaacagtttgaaacggtggaagtggactttggtcgttctgccg

SEQ ID NO: 749086 - DNA, 75 bp, synthetic construct
  source 1..75: mol_type = other DNA
tttgtgattcgcaacgatgatttctctttttcatttgttaaagataaaataaataaattagaaattaaaaattat

SEQ ID NO: 749087 - DNA, 75 bp, synthetic construct
  source 1..75: mol_type = other DNA
caacttaccgaggagcaacattggcaattattttcagagcagttggaattactaaaatcatgccaacactttttt

SEQ ID NO: 749088 - DNA, 75 bp, synthetic construct
  source 1..75: mol_type = other DNA
tccgattgaaacggggaaattccgccaggcaatcagaacacggtcggctttcgtacctataaatccgtttttgac

SEQ ID NO: 749089 - DNA, 75 bp, synthetic construct
  source 1..75: mol_type = other DNA
cgtccgggctacgtcaagccgaaacacgaatttaattaccagcaggcggttgagcgtcttcccggtgaagatccg

SEQ ID NO: 749090 - DNA, 75 bp, synthetic construct
  source 1..75: mol_type = other DNA
atgaaagcggggatgagcagcgctatctgccggaaggcacactgattcttggaaacactcaggtggatggtgtcc

SEQ ID NO: 749091 - DNA, 75 bp, synthetic construct
  source 1..75: mol_type = other DNA
gtggaagaaatgcaggcggtcagcgctgttctgcagggtaagtacaccatgagcggtgaacagtttgagacggtg

SEQ ID NO: 749092 - DNA, 75 bp, synthetic construct
  source 1..75: mol_type = other DNA
gccattatggacggtacggtctggcgtctgctgaatggctttaagctgttccgcgaaaaactggatacccgtcgc

SEQ ID NO: 749093 - DNA, 75 bp, synthetic construct
  source 1..75: mol_type = other DNA
caaaattaccggaaaaacgccggtggcggcctatgtctccccggttgtcgaaggaaaagtgctgcgtcatcgtgg

SEQ ID NO: 749094 - DNA, 75 bp, synthetic construct
  source 1..75: mol_type = other DNA
gggatcccgcccgtgaatttaccatgacgcagtccgcgccgctgatggtgttgccggacccggatgagtttgtgg

SEQ ID NO: 749095 - DNA, 75 bp, synthetic construct
  source 1..75: mol_type = other DNA
actggatacccgccgtggctcaaaatctgaactggaaaccgcgctgaaagatctggggtccgtggtttcttttaa

SEQ ID NO: 749096 - DNA, 75 bp, synthetic construct
  source 1..75: mol_type = other DNA
tgattcagcctaccttgattacggaatatccggcagaagtctccccgctggcgcgccgtaacgatgttaacccgg

SEQ ID NO: 749097 - DNA, 75 bp, synthetic construct
  source 1..75: mol_type = other DNA
tgattcagcctaccttgattacggaatatccggcagaagtctccccgctggcgcgacgtaaagatgttaacccgg

SEQ ID NO: 749098 - DNA, 75 bp, synthetic construct
  source 1..75: mol_type = other DNA
tgattcagcctaccttgattacggaatatccggcagaagtttccccgctggcgcgccgtaatgatgttaacccgg

SEQ ID NO: 749099 - DNA, 75 bp, synthetic construct
  source 1..75: mol_type = other DNA
gtttgatttcggcaaaccgtttgaaaaactcaccatgcgcgaagcaatcaaaaaatatcgtccagaaaccgatat

SEQ ID NO: 749100 - DNA, 75 bp, synthetic construct
  source 1..75: mol_type = other DNA
tgattcagcctaccttgattacggaatatccggcagaagtgtccccgctggcgcgccgtaaggatgttaacccgg

SEQ ID NO: 749101 - DNA, 75 bp, synthetic construct
  source 1..75: mol_type = other DNA
tgattcagcctaccttgattacggaatatccggcagaagtctccccgctggcgcggcgtaaggatgttaacccgg

SEQ ID NO: 749102 - DNA, 75 bp, synthetic construct
  source 1..75: mol_type = other DNA
atgcgtaaagcgcttcgcgctaaattcgaacaacatgcagaactgcgtacactcttgctggcaaccgcgtccgca

SEQ ID NO: 749103 - DNA, 75 bp, synthetic construct
  source 1..75: mol_type = other DNA
gctctgctgcggatcgcagcagtgaaaatcattctcaaatcagtgcgctgtatattgaaaataacattgagccgg

SEQ ID NO: 749104 - DNA, 75 bp, synthetic construct
  source 1..75: mol_type = other DNA
catcgtcgccagacaacattccatttcaaaaaaccagctcattattgatgtcttagaacgtgagttttcagccca

SEQ ID NO: 749105 - DNA, 75 bp, synthetic construct
  source 1..75: mol_type = other DNA
tgattcagcctaccttgattacggaatatccggcagaagtatccccgctggcgcgccgtaaagatgttaacccgg

SEQ ID NO: 749106 - DNA, 75 bp, synthetic construct
  source 1..75: mol_type = other DNA
aagatcaggccgaacgtttccaggagcaggttaatgccaaagctgcaggtgacgacgaagccatgttctacgacg

SEQ ID NO: 749107 - DNA, 75 bp, synthetic construct
  source 1..75: mol_type = other DNA
atgaataaagcatcgaacattattacgattaaaggtcaaccagccgcagtgacatttgaagctgatatcaacgca

SEQ ID NO: 749108 - DNA, 75 bp, synthetic construct
  source 1..75: mol_type = other DNA
ccaatgaggctattgattttaacgatgaactgagaaatcgccgcgaaaaactggcagcactgcgtcagcaaggtg

SEQ ID NO: 749109 - DNA, 75 bp, synthetic construct
  source 1..75: mol_type = other DNA
caaaattaccggaaaaacgccggtggcggcctatgtctccccggttgttgaaggaaaagtgctgcgtcatcgcgg

SEQ ID NO: 749110 - DNA, 75 bp, synthetic construct
  source 1..75: mol_type = other DNA
tgcgtatcattaccgataacctcaaacaggaagagcacgctattgtccaggtggaagaaatgcaggcggtgaatg

SEQ ID NO: 749111 - DNA, 75 bp, synthetic construct
  source 1..75: mol_type = other DNA
gtaaagcaaagctacaggccagactgcctgctgagttgcagagactcagcgaagaacttctctctggtcactacc

SEQ ID NO: 749112 - DNA, 75 bp, synthetic construct
  source 1..75: mol_type = other DNA
tggctgacggtgggggatcccgcccgtgaatttaccatgacgcagtccgcgccgctgatggtgttgccggacccg

SEQ ID NO: 749113 - DNA, 75 bp, synthetic construct
  source 1..75: mol_type = other DNA
ctgtgttgtatggcaaatatacgatggaaggagaccagttcgagaaaattgaggtcgattttggcaggtcgacga

SEQ ID NO: 749114 - DNA, 75 bp, synthetic construct
  source 1..75: mol_type = other DNA
gtggtggcgaaaacgtcttatgtggcagaagacggtaccgaaaaacgttatctgccggagggcacactggtcctg

SEQ ID NO: 749115 - DNA, 75 bp, synthetic construct
  source 1..75: mol_type = other DNA
gctcagcttatctgccaacaaaagggattccatgccgcctccaatacgccagttgcgggtaatcgtgctctggca

SEQ ID NO: 749116 - DNA, 75 bp, synthetic construct
  source 1..75: mol_type = other DNA
ctgctgcgcatcggcattcaggaggcggcaaagcagaatctggtggcattttcccgtgcgccaatgctcgattac

SEQ ID NO: 749117 - DNA, 75 bp, synthetic construct
  source 1..75: mol_type = other DNA
atggcgcttgaagcacaatctattttctggatagttttcttctccataatgctggcaaacattgcgcatgacatg

SEQ ID NO: 749118 - DNA, 75 bp, synthetic construct
  source 1..75: mol_type = other DNA
caccaaagcacaggcggaagccatcagggaggagtcggggtgtgctcgaaggcagtctgaaactcaggctgaaca

SEQ ID NO: 749119 - DNA, 75 bp, synthetic construct
  source 1..75: mol_type = other DNA
gctgaaggtagtggcagaaaacgaatgggcaaactgtacggcgatcactcttaacatgaccggagtgtctgatgg

SEQ ID NO: 749120 - DNA, 75 bp, synthetic construct
  source 1..75: mol_type = other DNA
cggcaggcacccgtgtcagcgcttccgacagcattattttcgccaccgatacggacgtggtgctgaaagccggat

SEQ ID NO: 749121 - DNA, 75 bp, synthetic construct
  source 1..75: mol_type = other DNA
ggcacgactcaggccgccgtggctgatggcaccatcaccatccgcgacaaggacaaccagaagcaggacgtggcg

SEQ ID NO: 749122 - DNA, 75 bp, synthetic construct
  source 1..75: mol_type = other DNA
gtgcagggcgacagcgggctgactcttacattgctgaatgccctgaccaaccaggccagcggtgtgcttctcagc

SEQ ID NO: 749123 - DNA, 75 bp, synthetic construct
  source 1..75: mol_type = other DNA
tcaggggcagaacatcactctggatgccagcagcctgaccagcagcggtgctgttcagagtgcgctggatttggc

SEQ ID NO: 749124 - DNA, 75 bp, synthetic construct
  source 1..75: mol_type = other DNA
atagaatttggcagcgattttattcctgtgtacagcgatataaagagctttgcagaggcggacagtgcgctgagt

SEQ ID NO: 749125 - DNA, 75 bp, synthetic construct
  source 1..75: mol_type = other DNA
ttggcccaagttggggttggagtgcaactgaaattaaaggcgttgacgttaatggcacttcaacaagtgaggttt

SEQ ID NO: 749126 - DNA, 75 bp, synthetic construct
  source 1..75: mol_type = other DNA
ttagaaattgcagcggcttcaatgacaccattatttggtcaggctgtggctaataaaattactgcattggttgat

SEQ ID NO: 749127 - DNA, 75 bp, synthetic construct
  source 1..75: mol_type = other DNA
gaggccttcagcttcctgaccgcccgcacgcagcttaaaattgatgctgaattcccccgattcacccagcgtctg

SEQ ID NO: 749128 - DNA, 75 bp, synthetic construct
  source 1..75: mol_type = other DNA
tgaaacagcccgtcatgtacgagggtctggagccggatcaagggctattgccgctggcgtggaacgtgttccacg

SEQ ID NO: 749129 - DNA, 75 bp, synthetic construct
  source 1..75: mol_type = other DNA
cctcaacaatcagccattgatgcattgaataatttatttgaaaatcatcatccgcaatcacacccgctcctcatc

SEQ ID NO: 749130 - DNA, 75 bp, synthetic construct
  source 1..75: mol_type = other DNA
aaggttgttcaagggccactggagaaagtaattaatcctaactggaaaaactgggaatggctcaatgttggtatg

SEQ ID NO: 749131 - DNA, 75 bp, synthetic construct
  source 1..75: mol_type = other DNA
cgtttacactggggagaataagcgtcctgatagttttagtgtaacatactctattgatggaggccgtcctgttat

SEQ ID NO: 749132 - DNA, 75 bp, synthetic construct
  source 1..75: mol_type = other DNA
ttgctaaggcggtcgctgaacgtaaagcccgagaggaagcattgattaaacgcttcggcaataaaggggccgctt

SEQ ID NO: 749133 - DNA, 75 bp, synthetic construct
  source 1..75: mol_type = other DNA
gatgcgggtaaaaatgtctccctcacaagcggacgtgataccaccctgtcgggggctcaggtcagtggcgagaaa

SEQ ID NO: 749134 - DNA, 75 bp, synthetic construct
  source 1..75: mol_type = other DNA
ttcggcgttactgcgggcaacatggactcgatgatcaaccgttacacagccgatcgccgtttgcgccatgatgac

SEQ ID NO: 749135 - DNA, 75 bp, synthetic construct
  source 1..75: mol_type = other DNA
catacgccgatggcgacccagcgtcagacgcctgctacggcaaaaaaagcgtcgtctacgcaatctcgcctgcag

SEQ ID NO: 749136 - DNA, 75 bp, synthetic construct
  source 1..75: mol_type = other DNA
tgcccgtattccggcttacgaaatgatccgtttttcggtcaacattatgcgtggctgctttggcggctgctcttt

SEQ ID NO: 749137 - DNA, 75 bp, synthetic construct
  source 1..75: mol_type = other DNA
tttatccggatatttgtccgcacatggacacgaaccacgaaccgacgatcaacctctatcgccgtgcgcgtgatc

SEQ ID NO: 749138 - DNA, 75 bp, synthetic construct
  source 1..75: mol_type = other DNA
ctggtggaagtggcgcatcgtctggcgatgggcgagccgattagtgaaatccgcgatgtacgtaataccgcgatt

SEQ ID NO: 749139 - DNA, 75 bp, synthetic construct
  source 1..75: mol_type = other DNA
tgatacaccggggaaaatcgacccgattccgcatccgtatggcgaagatttgccgtgtgcggataacaaaccggt

SEQ ID NO: 749140 - DNA, 75 bp, synthetic construct
  source 1..75: mol_type = other DNA
tcacaacgaagcggattataaagtcagtcacagtgggatcagtctgagcggtggtggcagcttcggggataaatt

SEQ ID NO: 749141 - DNA, 75 bp, synthetic construct
  source 1..75: mol_type = other DNA
ttaaggaaacgaagaaatccggtctgacgggtaccggcggtattggtttcaccattggcagcagtaagacaacgc

SEQ ID NO: 749142 - DNA, 75 bp, synthetic construct
  source 1..75: mol_type = other DNA
tcagccgggacccggaaaatgccaacggcagcattgcaccgatatttgacagggagaaagagcagaagcgtcttc

SEQ ID NO: 749143 - DNA, 75 bp, synthetic construct
  source 1..75: mol_type = other DNA
agatgatgaagccgggcatgggcagctatgaccgctttaaagagctgttcgatacctactcgaaacaggcaggta

SEQ ID NO: 749144 - DNA, 75 bp, synthetic construct
  source 1..75: mol_type = other DNA
gatccgcgacaccgttccaggttttacgggcgtgatttccgatctcggtgggccaactgccaacatgtatatgtt

SEQ ID NO: 749145 - DNA, 75 bp, synthetic construct
  source 1..75: mol_type = other DNA
atcgggaatcaacagacctgtttttgataagtggaaagagcagtattggcggcagcgtgctgcaagctatgggga

SEQ ID NO: 749146 - DNA, 75 bp, synthetic construct
  source 1..75: mol_type = other DNA
aagagcgggaatactccccttttatcaaaaaattaatgaatcaattaacggggaatgacgacaaaaacctgtttt

SEQ ID NO: 749147 - DNA, 75 bp, synthetic construct
  source 1..75: mol_type = other DNA
agaactggatcacgtgcatgacgaattacgcgccctgaaggttcgtgaattactcgatcaggccggtattgcccg

SEQ ID NO: 749148 - DNA, 75 bp, synthetic construct
  source 1..75: mol_type = other DNA
tcatgattggcaattgtggtaccgggaaaaatcacctggctgtatcaatggcaaaaaatattattcgccaccacc

SEQ ID NO: 749149 - DNA, 75 bp, synthetic construct
  source 1..75: mol_type = other DNA
tccgctttcaccgacgacgatgaattacctacactatccaacagatcgtcgtccaaatattgaaccaagaactgg

SEQ ID NO: 749150 - DNA, 75 bp, synthetic construct
  source 1..75: mol_type = other DNA
actccctgacaccaccgacggtcagtcagggggtgagcggtgaagccctgctgaatgaaagcggtaccgggataa

SEQ ID NO: 749151 - DNA, 75 bp, synthetic construct
  source 1..75: mol_type = other DNA
tactccttacgaacaacgagctctagcgccaggaactaaagctgaaaaatactatgaatatgaggtaataaaacc

SEQ ID NO: 749152 - DNA, 75 bp, synthetic construct
  source 1..75: mol_type = other DNA
agggggaaagctgtcaaacgggtatccggttgcctgtcctgcctcagtgacgagctggaccgcgtgtatgacgaa

SEQ ID NO: 749153 - DNA, 75 bp, synthetic construct
  source 1..75: mol_type = other DNA
agatgtagttcatcttggtggcggtgtgcaccaagcatggtgctctggcaatacaagcttaaatgtcataggtcc

SEQ ID NO: 749154 - DNA, 75 bp, synthetic construct
  source 1..75: mol_type = other DNA
gactcatcttttgaggcattatctgaagaatcaagggattatccagaattacttaaaactttagttttcaagatt

SEQ ID NO: 749155 - DNA, 75 bp, synthetic construct
  source 1..75: mol_type = other DNA
atcatcacatcgtgaggggttttccattcttctaactctgttacaagagcaaggcgaatatcctcagccgacatc

SEQ ID NO: 749156 - DNA, 75 bp, synthetic construct
  source 1..75: mol_type = other DNA
ttttgattgcagccgggattggtctggtagtccagaacacgctgatggtgcgcatcacccagacctcctctacca

SEQ ID NO: 749157 - DNA, 75 bp, synthetic construct
  source 1..75: mol_type = other DNA
taaaaattatgcggtaaaacatgcacttgagagaatccgctattatctaaccgacaagttcagctatgcaactaa

SEQ ID NO: 749158 - DNA, 75 bp, synthetic construct
  source 1..75: mol_type = other DNA
tttctagtatggctgcaaatacttggcgttcactcgaaggcaatcccaatatttcagtttctccaagccttgtaa

SEQ ID NO: 749159 - DNA, 75 bp, synthetic construct
  source 1..75: mol_type = other DNA
aataatctgtctgttgtcgcaaccggtaaaaacaggggtaagcgtcgtctcagcaccgtctggcagatcctgaaa

SEQ ID NO: 749160 - DNA, 75 bp, synthetic construct
  source 1..75: mol_type = other DNA
tttgaagactggaaggtgatagctcgctcgaatggacgttggaagctggaagccaggattgaccaagataacgcc

SEQ ID NO: 749161 - DNA, 75 bp, synthetic construct
  source 1..75: mol_type = other DNA
ctaagagggtatttaaattatctaaaatcttttgaaccctatggctttcattttaatgaaaaaaatataaagata

SEQ ID NO: 749162 - DNA, 75 bp, synthetic construct
  source 1..75: mol_type = other DNA
aaacacatattggctcgttgtccaaagcagatatgttgtctgttgaggacgcaatcaagatccatcttggtttac

SEQ ID NO: 749163 - DNA, 75 bp, synthetic construct
  source 1..75: mol_type = other DNA
ggcgtcaggcaaaagaggtctggcgagacaggcttgggaatgtcgtcgcgcgctacggtagtgataaacccgatg

SEQ ID NO: 749164 - DNA, 75 bp, synthetic construct
  source 1..75: mol_type = other DNA
tctgccgggcgcaggtgaatcactgaagcatgatgagatatatcgccagatgtaccaggaacagttaccgaagct

SEQ ID NO: 749165 - DNA, 75 bp, synthetic construct
  source 1..75: mol_type = other DNA
atgcattaaataaagcggatgaagcagatatcagagcccggctgcttcccgttgagcaggtttctatgaccagca

SEQ ID NO: 749166 - DNA, 75 bp, synthetic construct
  source 1..75: mol_type = other DNA
tgccatcgtctcatgaaactacgaaaccttattttcagtacgaaatactgaaaccaatagatgatgtgtctcagg

SEQ ID NO: 749167 - DNA, 75 bp, synthetic construct
  source 1..75: mol_type = other DNA
caatcgcggagcttacgggccggttgagaaagtgactttgccagcgggtacagtgattgatcggtatggttatcc

SEQ ID NO: 749168 - DNA, 75 bp, synthetic construct
  source 1..75: mol_type = other DNA
ataactatctgagccgtgatgaggcggcagagaaggcttcgctggagtacaaactcaaaaatgacctgctgtccg

SEQ ID NO: 749169 - DNA, 75 bp, synthetic construct
  source 1..75: mol_type = other DNA
cagatggaagtttgtggatgagtccagaatttactccgcaaaatctgattaataaagggacaatgtctacatcta

SEQ ID NO: 749170 - DNA, 75 bp, synthetic construct
  source 1..75: mol_type = other DNA
ccgatttacaccacgtctactggtgctacaggaaataaaatatattcctgtgagcattattccggtggtgcaaca

SEQ ID NO: 749171 - DNA, 75 bp, synthetic construct
  source 1..75: mol_type = other DNA
gaaagggcaaggtactcaatatgaattaccaaaacccgttcagtggtacttggataaagactatataaagaaggt

SEQ ID NO: 749172 - DNA, 75 bp, synthetic construct
  source 1..75: mol_type = other DNA
gtgaactgcatagactaatttctgaatatttgcagtgcaagcgacgtaaagataaatctgttgagcccgcccctt

SEQ ID NO: 749173 - DNA, 75 bp, synthetic construct
  source 1..75: mol_type = other DNA
ttgtacgccgtcaaccgtttgttgccagcactctgctgggcgcaaccacgatggatcagctgaaaactaacatcg

SEQ ID NO: 749174 - DNA, 75 bp, synthetic construct
  source 1..75: mol_type = other DNA
ttttatcgtccatgccgccgcgccagatgaaatcaccaccgcctggccggtgaacgtcgggccactaaacccgca

SEQ ID NO: 749175 - DNA, 75 bp, synthetic construct
  source 1..75: mol_type = other DNA
ttacgcggtaaacaaaaaatcgctgattgataacgcgttgtatggcacccagcaggtcgccgacaccctgtttgc

SEQ ID NO: 749176 - DNA, 75 bp, synthetic construct
  source 1..75: mol_type = other DNA
ggcttttacctgcgccagcatggccgggtgcgcgggcaggagattgcctgcgcgctgctggatgacctgctggcc

SEQ ID NO: 749177 - DNA, 75 bp, synthetic construct
  source 1..75: mol_type = other DNA
cattcattgatggacggaaagctacgctacagtattgttttcaccctggtgacagtaggcattatgtttggcgca

SEQ ID NO: 749178 - DNA, 75 bp, synthetic construct
  source 1..75: mol_type = other DNA
taacaaatagcgatagcctgactgagggcgaagaaacgacatggtcgctgccaggcgcagtggtcggttttttat

SEQ ID NO: 749179 - DNA, 75 bp, synthetic construct
  source 1..75: mol_type = other DNA
attatctcctcatttgtggctatgggaactaactgcggaaccttgagcgcaacggcaatctgggcctttatgttc

SEQ ID NO: 749180 - DNA, 75 bp, synthetic construct
  source 1..75: mol_type = other DNA
ttttgataaaaatcattaggggattcatcagcactgcgcttgaatttatggatttccagttatattcgctcggcg

SEQ ID NO: 749181 - DNA, 75 bp, synthetic construct
  source 1..75: mol_type = other DNA
cgcgatttgagtgcgctggaagatgctgcagaagatcaaccgcgcgttgtaagagctgcgcaaccttcaacaagt

SEQ ID NO: 749182 - DNA, 75 bp, synthetic construct
  source 1..75: mol_type = other DNA
ctcaatgatggtggtttcaaaaccggaactgggtaacatcccctacgcgccgatcgccaccgaaatcccgttcga

SEQ ID NO: 749183 - DNA, 75 bp, synthetic construct
  source 1..75: mol_type = other DNA
taaaaaccgctttacccggatggccatttctaaagaaattggtggtcttatcgcttccggtttggtcctatcctg

SEQ ID NO: 749184 - DNA, 75 bp, synthetic construct
  source 1..75: mol_type = other DNA
ccccattttgctggtgacgctacgtattattcaggggctgggtgctggggcggaaatttctggtgccggtactat

SEQ ID NO: 749185 - DNA, 75 bp, synthetic construct
  source 1..75: mol_type = other DNA
gccgggccgctgaagtcagcgccgtgcctgagctttctgggtcaggtggtgatggacgagctgagcgggcgtctg

SEQ ID NO: 749186 - DNA, 75 bp, synthetic construct
  source 1..75: mol_type = other DNA
tttggtcaggcgggtaactccgggttaattcagactttccttgcaggctatttagtgcagacgttattgtttaac

SEQ ID NO: 749187 - DNA, 75 bp, synthetic construct
  source 1..75: mol_type = other DNA
gatcggtgctaagctcaagccactaccagacagtgtgaatctgtatacttctgataaattaccgaagcaaaacgc

SEQ ID NO: 749188 - DNA, 75 bp, synthetic construct
  source 1..75: mol_type = other DNA
cgcatcccgattgactatcaagacgactggacagcgcccacctttcgcgcagagctgagccgcaacatggggaca

SEQ ID NO: 749189 - DNA, 75 bp, synthetic construct
  source 1..75: mol_type = other DNA
ctgcgtgtgccggaagaacaggagcgagaagggctggacgtcaacagccacggcgaaaatgcctataacgcgtaa

SEQ ID NO: 749190 - DNA, 75 bp, synthetic construct
  source 1..75: mol_type = other DNA
gcgatgtcttcggtgtgcacggcgtttgtggcattgtcggctgtatcatgaccgggatttttgccgccagctcgc

SEQ ID NO: 749191 - DNA, 75 bp, synthetic construct
  source 1..75: mol_type = other DNA
ttatgatgatttgtactgcgctggtgctgtttatgactattccggggattgccctgttttacggtgggttgattc

SEQ ID NO: 749192 - DNA, 75 bp, synthetic construct
  source 1..75: mol_type = other DNA
attaacaaaggctctcgatttttaatcagcaaggccgttttcggcaccagttcgctggttaccaaaaatgaagat

SEQ ID NO: 749193 - DNA, 75 bp, synthetic construct
  source 1..75: mol_type = other DNA
cgcaattatttgtgttcaggaagactcgctgtatgtgggaaaaacatataccgcagttatggccatcaacacgac

SEQ ID NO: 749194 - DNA, 75 bp, synthetic construct
  source 1..75: mol_type = other DNA
atgaaaaagtcattaccgcccgtattacgcgccgcactgtatcgtcgcgccgtggcctgtgcatggctgaccctg

SEQ ID NO: 749195 - DNA, 75 bp, synthetic construct
  source 1..75: mol_type = other DNA
ggcgtcgagttggctatgtcgcttgggtacgagtcattgagctgaacagttacccgcagggagccattaccgcgc

SEQ ID NO: 749196 - DNA, 75 bp, synthetic construct
  source 1..75: mol_type = other DNA
gacagcggggagcgaagaggacgccgcaaacgaattggttcacgccgtcaaagcggctgctaatcgcttcctcac

SEQ ID NO: 749197 - DNA, 75 bp, synthetic construct
  source 1..75: mol_type = other DNA
aagctgctgttaatcgattcctgactgagaaagatattccggtggcggagctggtactgcttatcgacccggctt

SEQ ID NO: 749198 - DNA, 75 bp, synthetic construct
  source 1..75: mol_type = other DNA
gtaaggagttaattacccggccttatttaacgttaggtattatcagctgggtaattttgcttgctttagcgttca

SEQ ID NO: 749199 - DNA, 75 bp, synthetic construct
  source 1..75: mol_type = other DNA
tccggaatgcagcgccattatgtgcatcatcgactgaatggagagaagcacaatgcaacagatttcctttctgtc

SEQ ID NO: 749200 - DNA, 75 bp, synthetic construct
  source 1..75: mol_type = other DNA
atattcgtgaagcacattcacgcggcgaacaggcaatgtccgtggttctgcgtgccagcattattaccccggaag

SEQ ID NO: 749201 - DNA, 75 bp, synthetic construct
  source 1..75: mol_type = other DNA
cgaaagccagcgcatccgcgaaaccatcatcgcccagctaccggaaggccagtttaccgaaagcctggtcgcgca

SEQ ID NO: 749202 - DNA, 75 bp, synthetic construct
  source 1..75: mol_type = other DNA
cggcctggcgatggtcttttccatgctgctggcggcgattatctggaacctgggaacgtggttcttcggtttacc

SEQ ID NO: 749203 - DNA, 75 bp, synthetic construct
  source 1..75: mol_type = other DNA
gaatggccagttatgacatgaccaaaggtgtggtttactcaggtaaccaggaagaccccattaaatttacgagca

SEQ ID NO: 749204 - DNA, 75 bp, synthetic construct
  source 1..75: mol_type = other DNA
ggttctatgtgctgggcatccagggggacgatcaattttaaaagtatggaaaaaatggcaaacgccgctccatcg

SEQ ID NO: 749205 - DNA, 75 bp, synthetic construct
  source 1..75: mol_type = other DNA
agttgcaggtgagcgaaggtgaaaaatcatatacctgtaatcaattttcgctctcatcagaacgtccgatgattg

SEQ ID NO: 749206 - DNA, 75 bp, synthetic construct
  source 1..75: mol_type = other DNA
ggggtgaaatgcgctatggtttactcaacgatgttcgcgtacttgataaagaagcctggccactgatggtggaac

SEQ ID NO: 749207 - DNA, 75 bp, synthetic construct
  source 1..75: mol_type = other DNA
cttgggttggcgacatgatgatgtcgcaaagtctctatcgcacgctccaggcgcgctatccccaggcgataatcg

SEQ ID NO: 749208 - DNA, 75 bp, synthetic construct
  source 1..75: mol_type = other DNA
tgcagccgagcttcaaatcggtgaccggcaaaggcggcatcaaagtgattgatggcagcagcgtcaagtttggtc

SEQ ID NO: 749209 - DNA, 75 bp, synthetic construct
  source 1..75: mol_type = other DNA
atcatatacctgtaatcaattttcgctttcatcagaacgtccgatgattggtttttgcccgggtgcggagtttgg

SEQ ID NO: 749210 - DNA, 75 bp, synthetic construct
  source 1..75: mol_type = other DNA
caacgatgtacgcgtgctcgataaagaagcctggccgctaatggtggaacgctatgtcgcgctggcctatgacaa

SEQ ID NO: 749211 - DNA, 75 bp, synthetic construct
  source 1..75: mol_type = other DNA
gtggcgttttcgcacggcgcgaacgacgggcagaaagggatcggcctggtgatgctggtactggtggggattgcc

SEQ ID NO: 749212 - DNA, 75 bp, synthetic construct
  source 1..75: mol_type = other DNA
atggttacgctttggggaaattatgaggggatctctcagaactctgcacttgctctgcaaactgatgcccgtaac

SEQ ID NO: 749213 - DNA, 75 bp, synthetic construct
  source 1..75: mol_type = other DNA
tgcaaactgatgcccgtaactctgacttgactattacccagcatggcggtggtaacggtgcagatgttggtcagg

SEQ ID NO: 749214 - DNA, 75 bp, synthetic construct
  source 1..75: mol_type = other DNA
tctgccaggggtatggtacaccgaattatcccatcaaagaaccccgtgagatgaaggaaccagcaacatgtccag

SEQ ID NO: 749215 - DNA, 75 bp, synthetic construct
  source 1..75: mol_type = other DNA
gagtacatccacagggtagtgcttgaaggtgagttcattggcaaacaagaagagttaccagcgccaaaactggat

SEQ ID NO: 749216 - DNA, 75 bp, synthetic construct
  source 1..75: mol_type = other DNA
ctgaacagcaggaagccattaaacaactcgtcatgagtcgcggtcagtctctgccaaaggaaaaacaggcgaagg

SEQ ID NO: 749217 - DNA, 75 bp, synthetic construct
  source 1..75: mol_type = other DNA
cattgcaggctgatgcccgcaactctgatctgactattacccagcacggcggcggtaacggcgcagacgtaggac

SEQ ID NO: 749218 - DNA, 75 bp, synthetic construct
  source 1..75: mol_type = other DNA
gtaaaataattgattttccacggggggtgcaaagtgagctacaagaattagtaaagatgcttgaatttaatgaaa

SEQ ID NO: 749219 - DNA, 75 bp, synthetic construct
  source 1..75: mol_type = other DNA
ttttcagtgatttcaagcttgttaaaaaccaagatgagtttataaagaggaccctgatctatactgagtcaaagg

SEQ ID NO: 749220 - DNA, 75 bp, synthetic construct
  source 1..75: mol_type = other DNA
ttaataaatgagctaaaagacgacttaggactgtctgaagaaaatgattatttaaaaatagcccaactttacttt

SEQ ID NO: 749221 - DNA, 75 bp, synthetic construct
  source 1..75: mol_type = other DNA
tgagtggggaattacaccaaatacagtccctctgccaccactctataaggattgggataaatatcaggcctggga

SEQ ID NO: 749222 - DNA, 75 bp, synthetic construct
  source 1..75: mol_type = other DNA
aaagccttataaaggatagaggctttgttgaatttcaagacacattggacatattcaatgaacgaatgcaatctc

SEQ ID NO: 749223 - DNA, 75 bp, synthetic construct
  source 1..75: mol_type = other DNA
acattagcgttaacaaaaatacaattatttgatgataagtggaaaagatccatcactaagagtttattattgaac

SEQ ID NO: 749224 - DNA, 75 bp, synthetic construct
  source 1..75: mol_type = other DNA
tgaatcgtttatatctcgcgccagaattttatttgagaacgcaaacagggagatggattattacaacataaggca

SEQ ID NO: 749225 - DNA, 75 bp, synthetic construct
  source 1..75: mol_type = other DNA
gatgaaacgctggcgatgttgaaggcgggggatgtggtgtattgcgatccgccgtatgacggtacgttttccggc

SEQ ID NO: 749226 - DNA, 75 bp, synthetic construct
  source 1..75: mol_type = other DNA
actgatttcatgaaagcggtatattttctgtatctcaatcgtcatggttaccgtggattatgtcgctataacaag

SEQ ID NO: 749227 - DNA, 75 bp, synthetic construct
  source 1..75: mol_type = other DNA
attgatattcgctttagttatgatatcaacgggttgcttgaagttgacgtgcttctggaagacggcagcgttaag

SEQ ID NO: 749228 - DNA, 75 bp, synthetic construct
  source 1..75: mol_type = other DNA
aatccaggccgcctgccgcttacgcagtgaagatattgaagaagtgatcctcactgatatttgcccttactcgtt

SEQ ID NO: 749229 - DNA, 75 bp, synthetic construct
  source 1..75: mol_type = other DNA
cgaggcgtttatatcgcggaccagaactttgtttgaggaagcaaacagtgatctagcttattacaacataaggca

SEQ ID NO: 749230 - DNA, 75 bp, synthetic construct
  source 1..75: mol_type = other DNA
atgggcagtaataccaactggcggttaggcagcgacacatttaacgcaccagaactgtcctctttggtcttacgt

SEQ ID NO: 749231 - DNA, 75 bp, synthetic construct
  source 1..75: mol_type = other DNA
gtttattgtgatccgccatacgatggcacatttagcggttatcacactgccggttttacagaagacgatcagtat

SEQ ID NO: 749232 - DNA, 75 bp, synthetic construct
  source 1..75: mol_type = other DNA
gtgtattgcgatccgccttatgacggtatgttttccggctatcacactgacggcttcactgaagatgaccagtat

SEQ ID NO: 749233 - DNA, 75 bp, synthetic construct
  source 1..75: mol_type = other DNA
ggagtttaattactccactgaaattactgatttcatgaaagcgatatattttctgtatctcaatcgtcatggtta

SEQ ID NO: 749234 - DNA, 75 bp, synthetic construct
  source 1..75: mol_type = other DNA
cacctggcatccgttcttgaacatcggtcatcagaaggatatccggtcattatttctaacagtgacacatccctg

SEQ ID NO: 749235 - DNA, 75 bp, synthetic construct
  source 1..75: mol_type = other DNA
ggcgatgttgaaggcgggagatgtggtgtattgcgatccgccatatgacggtgtgttttccggctatcacactga

SEQ ID NO: 749236 - DNA, 75 bp, synthetic construct
  source 1..75: mol_type = other DNA
tgtcgcgtgtagaaacttactcgaccatgcacccggaacaggattcaattacggttaacgtctatcagggagaaa

SEQ ID NO: 749237 - DNA, 75 bp, synthetic construct
  source 1..75: mol_type = other DNA
tgggtgaacagcattctctgcgagacgttaaagcattgggtattgccgggcaaatgcatggtgcaactttacttg

SEQ ID NO: 749238 - DNA, 75 bp, synthetic construct
  source 1..75: mol_type = other DNA
tgccattttgtggaacgacgggcgctgtgcgcaagagtgcactttgctggaagcgcgagttccgcaatcacgggt

SEQ ID NO: 749239 - DNA, 75 bp, synthetic construct
  source 1..75: mol_type = other DNA
atggtggtcgtggtggttctggcactgttctcgattaagacggcacttgcggcattgaaagatccgaagccaacg

SEQ ID NO: 749240 - DNA, 75 bp, synthetic construct
  source 1..75: mol_type = other DNA
caaatgcatggtgctactttacttgatgctcagcagcgggtgctacgtcccgccattttgtggaacgacgggcgc

SEQ ID NO: 749241 - DNA, 75 bp, synthetic construct
  source 1..75: mol_type = other DNA
aggcgtgggttatgcgctggcagatggcatggatgtcgtgcatgcctgcggcattaaaccgcaaagtgttacgtt

SEQ ID NO: 749242 - DNA, 75 bp, synthetic construct
  source 1..75: mol_type = other DNA
ttaccgaaagattacttgcgtctgcgtatgacgggggagtttgccagcgatatgtctgacgcagctggcaccatg

SEQ ID NO: 749243 - DNA, 75 bp, synthetic construct
  source 1..75: mol_type = other DNA
gtgaaaactgaaatcgcgaaagcatccgatgtggcttctgaatcaggtgagaatgtgtgcaggtggattgatgat

SEQ ID NO: 749244 - DNA, 75 bp, synthetic construct
  source 1..75: mol_type = other DNA
gatttacaacccggcaccattgactatgaacgctacaggctcacaaaagcgcaggcagatgcgcaggaactgaaa

SEQ ID NO: 749245 - DNA, 75 bp, synthetic construct
  source 1..75: mol_type = other DNA
ttgactatcgctactggctcacaaaagcacaggctgacgcacaggagctgaaaaatacccgcgaagaaggactgg

SEQ ID NO: 749246 - DNA, 75 bp, synthetic construct
  source 1..75: mol_type = other DNA
gctggcaacggcgctgtgcgtgctggcgtggggctacttcctgcatcagggcgtggtcgatccgctgggcggtat

SEQ ID NO: 749247 - DNA, 75 bp, synthetic construct
  source 1..75: mol_type = other DNA
ggcattgaaagagccgaagccaacggcgaaagaaacgccatatgagccgatgccggaaaatgtcgaggagatcgt

SEQ ID NO: 749248 - DNA, 75 bp, synthetic construct
  source 1..75: mol_type = other DNA
tttctggcgttttcatgtcgggccttgtatttgataatgggttgttctatgaaggttaataaaaagaggcttgcc

SEQ ID NO: 749249 - DNA, 75 bp, synthetic construct
  source 1..75: mol_type = other DNA
ctaaaattggcgaacgtcagtccaggaactgtataaagagatgcagaaacgtggctgggatgtcaaagaaagcgc

SEQ ID NO: 749250 - DNA, 75 bp, synthetic construct
  source 1..75: mol_type = other DNA
tcagatccatacctttagacttagatgttaagcaagaggctgtcattaacggtatagaaatgggggtactcgata

SEQ ID NO: 749251 - DNA, 75 bp, synthetic construct
  source 1..75: mol_type = other DNA
atggtaacgttaagtccagagtgattaatcacagcccggtgacgttaaatgcgcagcaaatagaagagagtcggg

SEQ ID NO: 749252 - DNA, 75 bp, synthetic construct
  source 1..75: mol_type = other DNA
tgataccggtcaaatatgggaaaaatgtcaattttttaagaggcatatgggactggaatactcatcggaaggatt

SEQ ID NO: 749253 - DNA, 75 bp, synthetic construct
  source 1..75: mol_type = other DNA
tctgcgaagctggcgaaactgcctggcgttagcaaagacgaccagaacttgctgaaaaaactgcgcagcgatatg

SEQ ID NO: 749254 - DNA, 75 bp, synthetic construct
  source 1..75: mol_type = other DNA
caaccgatttgttgctgaatatggggtcaacccacggcctggcgatggtcttttccatgctgctggcggcgatta

SEQ ID NO: 749255 - DNA, 75 bp, synthetic construct
  source 1..75: mol_type = other DNA
caccaacttcgaacactacctgcaacagcatcctgaactgccgcagaagttgattgcgatggaacctccattgcc

SEQ ID NO: 749256 - DNA, 75 bp, synthetic construct
  source 1..75: mol_type = other DNA
gggcacggcaaacgaaattgcggcactggcgtttgttaacaccgtggtagcaacggcggcggcaattcttggctg

SEQ ID NO: 749257 - DNA, 75 bp, synthetic construct
  source 1..75: mol_type = other DNA
aattgaccgcggtaatgggcagtatctatcagtatatccacgtggcgtttcagggatcgtttgcctgtattaccg

SEQ ID NO: 749258 - DNA, 75 bp, synthetic construct
  source 1..75: mol_type = other DNA
ctgcgtgtgccggaagaacaagagcgagaagggctggacgtcaacagccacggcgagaatgcctataacgcgtaa

SEQ ID NO: 749259 - DNA, 75 bp, synthetic construct
  source 1..75: mol_type = other DNA
tgtacgacaccgcgtttctggcgcaggtggtgccgaacctgtttgtggctcagaactggctgctggacagtttct

SEQ ID NO: 749260 - DNA, 75 bp, synthetic construct
  source 1..75: mol_type = other DNA
caagcaagtcatggcgtgctttccgactggacaccaccatcaaagataacgccatcacgttcccggcgctgagcc

SEQ ID NO: 749261 - DNA, 75 bp, synthetic construct
  source 1..75: mol_type = other DNA
atgaagatagcgacgataaaaactgggcttgcttcactggcgctgatgccggggctggtaatggcggcacctgcg

SEQ ID NO: 749262 - DNA, 75 bp, synthetic construct
  source 1..75: mol_type = other DNA
gcatgcggcgtttaatgcctgtgaagagatgtgccaacgcgtggcgctggagcgtcaactggacagcgaagaacg

SEQ ID NO: 749263 - DNA, 75 bp, synthetic construct
  source 1..75: mol_type = other DNA
ggtttggtaatactgaccgcgcttcgttaggtgtcgataaagatgtttacctgactattccgcgtggccgcatga

SEQ ID NO: 749264 - DNA, 75 bp, synthetic construct
  source 1..75: mol_type = other DNA
taaagaaactgatttagtgaccatcggcaacgacgcctgggctaccggtaacccggtgtttaaaggttcttcgct

SEQ ID NO: 749265 - DNA, 75 bp, synthetic construct
  source 1..75: mol_type = other DNA
cgaaaccgttaacccgctgaaagtaggcaaagagttcgcctctgaaccggtttggtttggtgattctgaccgtgc

SEQ ID NO: 749266 - DNA, 75 bp, synthetic construct
  source 1..75: mol_type = other DNA
cagccattggtctggcagccgttatgtcacaatccgctatggcggagaacctgaagctcggttttctggtgaagc

SEQ ID NO: 749267 - DNA, 75 bp, synthetic construct
  source 1..75: mol_type = other DNA
tctggagcagtttatccgtaccttttttcctcctctggcaaaaccttcaaatcagatttccactgtagtggcaca

SEQ ID NO: 749268 - DNA, 75 bp, synthetic construct
  source 1..75: mol_type = other DNA
ctgcagaagaatcaggtggtcggcacaattaacttccagcttgacggcaaaaccattgaacagcgtccgctggta

SEQ ID NO: 749269 - DNA, 75 bp, synthetic construct
  source 1..75: mol_type = other DNA
ctggcaaagcgactggcggcttagtgaagatgaagcgatggcggcacgggaatgtaacctggagaatatctgcca

SEQ ID NO: 749270 - DNA, 75 bp, synthetic construct
  source 1..75: mol_type = other DNA
gccggaaaaacaggttgaaagagaggcgttggcgttgcaaaaactgaacgtattttgcctcgcagacgacgcaaa

SEQ ID NO: 749271 - DNA, 75 bp, synthetic construct
  source 1..75: mol_type = other DNA
ggagaaatacgctgccggtctggcaaccgcactcagccgttctcctcaaataacgcttgaagagacacccgcctc

SEQ ID NO: 749272 - DNA, 75 bp, synthetic construct
  source 1..75: mol_type = other DNA
acagcctgaatgttgacggtatcaaaaccggtcatactgacaaggcaggttacaaccttgttgcttccgcgacag

SEQ ID NO: 749273 - DNA, 75 bp, synthetic construct
  source 1..75: mol_type = other DNA
acaaaaacgggaaagtcaccttcctggaaattggtgccgcctgggcgggttttcgcgctgaggaatgtgccggcc

SEQ ID NO: 749274 - DNA, 75 bp, synthetic construct
  source 1..75: mol_type = other DNA
atcaggcggcaatttccggacttgcccagagcttcagggagcagctcggggagagcgcattcctgcatttcacca

SEQ ID NO: 749275 - DNA, 75 bp, synthetic construct
  source 1..75: mol_type = other DNA
tgggataaatttcattcttcaattgataagttattaatagataattcatgtctttttgtaggtcaaacccttaca

SEQ ID NO: 749276 - DNA, 75 bp, synthetic construct
  source 1..75: mol_type = other DNA
gtatggtaaattcttaaaatacaaatctgatattgataatgattcattaatgaaagcccgaggcgataaaccaga

SEQ ID NO: 749277 - DNA, 75 bp, synthetic construct
  source 1..75: mol_type = other DNA
tgatccaaccgacgaatgggcgatacgtgatggtgactggaaaatgatcatcgatcgtaacaataagccaaagta

SEQ ID NO: 749278 - DNA, 75 bp, synthetic construct
  source 1..75: mol_type = other DNA
taaaataatgcaacaaccggtattaagagatgctcaaatgttttctggcgtcacaatggaaaattatttttccgg

SEQ ID NO: 749279 - DNA, 75 bp, synthetic construct
  source 1..75: mol_type = other DNA
ctttatatttcctctgaattagacaaaacaaaagagagcggaagtttatatgaccatttgattgacatttatgga

SEQ ID NO: 749280 - DNA, 75 bp, synthetic construct
  source 1..75: mol_type = other DNA
tcggaaaagaaattataaaggctgcacgtgcgctaaataaaaaagtgatattagtatctgatatatattatgaca

SEQ ID NO: 749281 - DNA, 75 bp, synthetic construct
  source 1..75: mol_type = other DNA
taacacctttcctaatgaacatccggaagccttaattttggttccgtcagcggaaaaatttattgtagatggcaa

SEQ ID NO: 749282 - DNA, 75 bp, synthetic construct
  source 1..75: mol_type = other DNA
aaagcgcatccggtgctgttaatcggcgtgacgtttgtgctctctattgtttgttctgcattcggcattttgtaa

SEQ ID NO: 749283 - DNA, 75 bp, synthetic construct
  source 1..75: mol_type = other DNA
gctgccagccaggccggattgaagtggtcaacaaaaactggccaccgagttaaagtttttccagtatcgattttc

SEQ ID NO: 749284 - DNA, 75 bp, synthetic construct
  source 1..75: mol_type = other DNA
tggcttatgctctgtgggaaggcatcggtattttatttataacgctctttagtgttctgttattcgacgaaagtt

SEQ ID NO: 749285 - DNA, 75 bp, synthetic construct
  source 1..75: mol_type = other DNA
actgtcatatatttttctttcattcgccgtgaaaaaaatagcgcttggtgtggcttatgctctgtgggaaggcat

SEQ ID NO: 749286 - DNA, 75 bp, synthetic construct
  source 1..75: mol_type = other DNA
tttttacagacaagtttatccagtgacaggtggagagcaccaggttgaagccttgatgtggacgcatttgcctgc

SEQ ID NO: 749287 - DNA, 75 bp, synthetic construct
  source 1..75: mol_type = other DNA
gaaactgaatcaatacgatgtctttatccgtaacgaaaactactggggtgaaaaacctgcgattaaaaagatcac

SEQ ID NO: 749288 - DNA, 75 bp, synthetic construct
  source 1..75: mol_type = other DNA
cctgcatcgtgccaatagccatgcgccggaagccgtagtggaaggggcgtcgcgtgctatgcgtatctccatgaa

SEQ ID NO: 749289 - DNA, 75 bp, synthetic construct
  source 1..75: mol_type = other DNA
ttgattttgattggtttttcaatcgcatcttgggccattattatccagcggacccgtattcttaacgcagcggcg

SEQ ID NO: 749290 - DNA, 75 bp, synthetic construct
  source 1..75: mol_type = other DNA
aagaatcgctaatcgtgaaaaattccagtcatacttatcagagaagggtatccaaaccttaattcactatccatt

SEQ ID NO: 749291 - DNA, 75 bp, synthetic construct
  source 1..75: mol_type = other DNA
cgcgtgcgatgcgtatttctatgaaccgtgaactggagaatctggagacgcacatcccgttcctcggcacggtag

SEQ ID NO: 749292 - DNA, 75 bp, synthetic construct
  source 1..75: mol_type = other DNA
ggtttttcaatcgcatcctgggccattattatccagcgaacccgtatccttaacgctgcggcacgcgaagctgaa

SEQ ID NO: 749293 - DNA, 75 bp, synthetic construct
  source 1..75: mol_type = other DNA
ggtttttcaatcgcatcctgggccattattatccagcggacccgtattcttaacgcagcggcgcgtgaagccgaa

SEQ ID NO: 749294 - DNA, 75 bp, synthetic construct
  source 1..75: mol_type = other DNA
gcggctgtagtgttcttattgttcgccatggattatcagaatctggagaacagtcgtattcaatgatacatatgc

SEQ ID NO: 749295 - DNA, 75 bp, synthetic construct
  source 1..75: mol_type = other DNA
gcgtaccgtcgcacgctgacttccaggcacagcaaggtttagccgacaagccgctgattgataaagagatcggcg

SEQ ID NO: 749296 - DNA, 75 bp, synthetic construct
  source 1..75: mol_type = other DNA
ttcctgcaagaactggccctgccccgtcctttccgttttatcgcaccctcgcagtttaaaaaccacgaaaccatg

SEQ ID NO: 749297 - DNA, 75 bp, synthetic construct
  source 1..75: mol_type = other DNA
aattctagccatcagtgaggcaggtttaaagcctgttttagttgaaccaaatgagttcagctataatttgtcagt

SEQ ID NO: 749298 - DNA, 75 bp, synthetic construct
  source 1..75: mol_type = other DNA
attaataaggaagagctggatgatgtactggccagttcggttgtgaaatttgatgatttttcatcccggagttaa

SEQ ID NO: 749299 - DNA, 75 bp, synthetic construct
  source 1..75: mol_type = other DNA
tttttacaggcaaatttatccagtgacaggtggagagcaccaggttgaagccttgatgtggacgcatttgcctgc

SEQ ID NO: 749300 - DNA, 75 bp, synthetic construct
  source 1..75: mol_type = other DNA
cactcagcgatcgccgacgcacggatgacggctggggtggtaaacgctattgctgcatatcatccctcattaatg

SEQ ID NO: 749301 - DNA, 75 bp, synthetic construct
  source 1..75: mol_type = other DNA
gtgacggaaatcaacggtaaccatatcagttttgatctgatgaaagagacgttacgcattactaatcttggcgat

SEQ ID NO: 749302 - DNA, 75 bp, synthetic construct
  source 1..75: mol_type = other DNA
cgacggtattagcctgaccgtcggcgaagtcacgccaacgcgtttttgcgtccatttaattccggaaactctgga

SEQ ID NO: 749303 - DNA, 75 bp, synthetic construct
  source 1..75: mol_type = other DNA
gagcctatccccgggcttatcaacatgcgtgtcgcacgaggtagcggcaatattgcttcagctccggcaatgagt

SEQ ID NO: 749304 - DNA, 75 bp, synthetic construct
  source 1..75: mol_type = other DNA
tgatttggtcggaatggctggcgtgatgttagggaaggtgcgaataagcaggtcatttcttcccaagctgactcg

SEQ ID NO: 749305 - DNA, 75 bp, synthetic construct
  source 1..75: mol_type = other DNA
aacacagtcagaaatcgaaacgtactctcaacagttcgcttaggcatggaagttttgcggcatgaaccgccccgg

SEQ ID NO: 749306 - DNA, 75 bp, synthetic construct
  source 1..75: mol_type = other DNA
atgagctggcctgaagcattcgcaacggtaggagttgcaatagcggtggcactggttgtgttttcgatttgccgc

SEQ ID NO: 749307 - DNA, 75 bp, synthetic construct
  source 1..75: mol_type = other DNA
caaaaaaaatggcccaaatggcatatagtctatcccctgaaagtgaaacatataaaaaaaggtatgaaacttatt

SEQ ID NO: 749308 - DNA, 75 bp, synthetic construct
  source 1..75: mol_type = other DNA
tttcctgtaacgtcctctggcaaaagtgtgtccttgcaactctgtatcgggctgcagctacacatcctaaaatta

SEQ ID NO: 749309 - DNA, 75 bp, synthetic construct
  source 1..75: mol_type = other DNA
cgacggtattagcctgaccgtaggcgaagtaacgtcgacccgtttctgtgtgcatttaattccggaaacgctgga

SEQ ID NO: 749310 - DNA, 75 bp, synthetic construct
  source 1..75: mol_type = other DNA
cattgtacttgttgactggtctgatatccgtgagcaaaaacggcttatggtattgagagcttcagtcgcactaca

SEQ ID NO: 749311 - DNA, 75 bp, synthetic construct
  source 1..75: mol_type = other DNA
taaatgattgcgtcatccgggcagataaagaggggtggcctattgagtataaacagaaggtctgggtagatgcag

SEQ ID NO: 749312 - DNA, 75 bp, synthetic construct
  source 1..75: mol_type = other DNA
cgctcgcagcctgccagatgtctcctgcaacaaaccgtatctcattccttctcacttgtcggcagaaaaaggcgc

SEQ ID NO: 749313 - DNA, 75 bp, synthetic construct
  source 1..75: mol_type = other DNA
gaaaattgcagcgcgcatgattgaagatggcgagctggataaacgcatcgcgcagcgttattccggctggaatag

SEQ ID NO: 749314 - DNA, 75 bp, synthetic construct
  source 1..75: mol_type = other DNA
ctggctggcaaacaagaagagagcggtgtgaaattgttgtggggaaccgctaactgctttactcatcctcgctat

SEQ ID NO: 749315 - DNA, 75 bp, synthetic construct
  source 1..75: mol_type = other DNA
gcgttttgccgcctgctactggcacaccttctgctggaacggggcggacatgtttggtgtgggggcgtttaatcg

SEQ ID NO: 749316 - DNA, 75 bp, synthetic construct
  source 1..75: mol_type = other DNA
gactaaacagcaccagtggccggatggcacggcaggcatatgactggctgagtctggcaccactctttctggata

SEQ ID NO: 749317 - DNA, 75 bp, synthetic construct
  source 1..75: mol_type = other DNA
gcaacccataaattgggcggtgaaaactatgtcctgtggggcggtcgtgaaggttacgaaacgctgttaaatacc

SEQ ID NO: 749318 - DNA, 75 bp, synthetic construct
  source 1..75: mol_type = other DNA
gcaacgcataaactgggtggtgaaaactatgtgctgtggggcggtcgtgaaggttatgaaactctgttgaatacc

SEQ ID NO: 749319 - DNA, 75 bp, synthetic construct
  source 1..75: mol_type = other DNA
ttctgaatcagatccccttattttcatccctgcaaagtggaacattgccattgtttggctattcaggacgggtca

SEQ ID NO: 749320 - DNA, 75 bp, synthetic construct
  source 1..75: mol_type = other DNA
aatttgaataaaaaagcatggattggttatatttatgactttcaacactgttactatccttcattttttagtaag

SEQ ID NO: 749321 - DNA, 75 bp, synthetic construct
  source 1..75: mol_type = other DNA
gttgctggatggatttctttcttatgctgctgcgctcgcagcctgccagatgtctcctgcaatcaaaccgtatct

SEQ ID NO: 749322 - DNA, 75 bp, synthetic construct
  source 1..75: mol_type = other DNA
gatcgactgtcattcgacattgtcaccgatgtggcgaaagcaatccatcctctgaatccttacgtaaatgtgata

SEQ ID NO: 749323 - DNA, 75 bp, synthetic construct
  source 1..75: mol_type = other DNA
cgttatatttgtcgaaacatccggaggtagccacccactgccattaattaagtatctgcagactcatgagcgatt

SEQ ID NO: 749324 - DNA, 75 bp, synthetic construct
  source 1..75: mol_type = other DNA
ccagtaatcattatcaatggtttccttggcgcaggaaaaaccactcttatgaaaaacctgctcacacaggcaaac

SEQ ID NO: 749325 - DNA, 75 bp, synthetic construct
  source 1..75: mol_type = other DNA
ctgcgatgttcgccgtacagggcgggttgatgggcgcgggatggtcggatgtggtttcgttgaacatttggcaat

SEQ ID NO: 749326 - DNA, 75 bp, synthetic construct
  source 1..75: mol_type = other DNA
tgcgatttatccattttacctccctgatgctggtctttggcttcgcgatgtatggcgcatggctggcaccaatag

SEQ ID NO: 749327 - DNA, 75 bp, synthetic construct
  source 1..75: mol_type = other DNA
gcccattgcgcccgagcacttaccgcgattgtttgaccgtttctaccgcgttgacccttcccgccagcgaaaagg

SEQ ID NO: 749328 - DNA, 75 bp, synthetic construct
  source 1..75: mol_type = other DNA
gccgtctggagtttgagcagtgccgctgcgatgttcgccgttcagggagggttgatgggcgcgggatggccggat

SEQ ID NO: 749329 - DNA, 75 bp, synthetic construct
  source 1..75: mol_type = other DNA
aaagggcgttggcgacatcaggccattcacgctctgatgcgtttttcctggtgcgggcattttgctgtgattggc

SEQ ID NO: 749330 - DNA, 75 bp, synthetic construct
  source 1..75: mol_type = other DNA
cattgttgattaccggatttcccccacgcttacgacttactggggccaactcttattgctcaaagccatcctggt

SEQ ID NO: 749331 - DNA, 75 bp, synthetic construct
  source 1..75: mol_type = other DNA
atactgcggcaatgttgatccttgaagccaataacactatcgccccggtgccaaaacccggtacgacgataacta

SEQ ID NO: 749332 - DNA, 75 bp, synthetic construct
  source 1..75: mol_type = other DNA
ctaggacgttacgcactgcgcctcgcgcatggtaatggcgaatacctcattcatggcactagtgcgccggacagc

SEQ ID NO: 749333 - DNA, 75 bp, synthetic construct
  source 1..75: mol_type = other DNA
acggggacgccggtgaaagtgatcaacgaaccggtgaaatactctgtagaaccgaacggaatgcgttatgtggaa

SEQ ID NO: 749334 - DNA, 75 bp, synthetic construct
  source 1..75: mol_type = other DNA
aagttaccgtcgaaaaccccggtacgcccattgcgcccgagcacttaccgcgattgtttgaccgtttctaccgcg

SEQ ID NO: 749335 - DNA, 75 bp, synthetic construct
  source 1..75: mol_type = other DNA
aaatgctcaacctggcggatgaagtcggcaaagtgttcgattttttcgaggctttagcggaagatcgcggcgtgg

SEQ ID NO: 749336 - DNA, 75 bp, synthetic construct
  source 1..75: mol_type = other DNA
atagtgaaatcgattgttgtcgcgcataaaggcacggttgcggttacgtcaaatgcgcgggggacaaggtttgtg

SEQ ID NO: 749337 - DNA, 75 bp, synthetic construct
  source 1..75: mol_type = other DNA
aacaccgcgaccgcgtggcgtttatgcgtgtggtgtccggtaaatatgaaaaaggcatgaagctgcgccaggtgc

SEQ ID NO: 749338 - DNA, 75 bp, synthetic construct
  source 1..75: mol_type = other DNA
tggacgagccgagtcgggattttgacgaaaattggttgagcgtgtttgaaagctggctggaaaagtgccgccagc

SEQ ID NO: 749339 - DNA, 75 bp, synthetic construct
  source 1..75: mol_type = other DNA
cagacgttattgtttaacaaagcaattccaacagatgcattgatgatcagttcgattctcggctttatgaccatt

SEQ ID NO: 749340 - DNA, 75 bp, synthetic construct
  source 1..75: mol_type = other DNA
ctttccttgcaggctatttagtgcagacgttattgtttaacaaagcaattccaacagatgcattgatgattagtt

SEQ ID NO: 749341 - DNA, 75 bp, synthetic construct
  source 1..75: mol_type = other DNA
cgatgctgcggaagggtatcaccagagtttgatcgacattacgcctcagcgcgtactggaagaactcaacacgct

SEQ ID NO: 749342 - DNA, 75 bp, synthetic construct
  source 1..75: mol_type = other DNA
cggtaatgttgcaacatctggcgctacatacactcaagaaccgccaacgcgcggcaaacattggtgtgctgtttc

SEQ ID NO: 749343 - DNA, 75 bp, synthetic construct
  source 1..75: mol_type = other DNA
cgttggatctgcatagtgcgcagcgacggatggtcgccgtcgcctgcctggaagcactctctccgccactattgc

SEQ ID NO: 749344 - DNA, 75 bp, synthetic construct
  source 1..75: mol_type = other DNA
ggcggcggtaacggcgcagatgttggccaaggttctgatgacagctcaatcgatctgactcagcgtggtttcggc

SEQ ID NO: 749345 - DNA, 75 bp, synthetic construct
  source 1..75: mol_type = other DNA
tacagaaaaatatggtatttcacggagacagcatttctacgttaagtcattgattaataaagacaactcaaaata

SEQ ID NO: 749346 - DNA, 75 bp, synthetic construct
  source 1..75: mol_type = other DNA
ttcaactctattaaaaatggtgacaagcacaaagccaatggtaacagatacgataaagatttaatcattgatgca

SEQ ID NO: 749347 - DNA, 75 bp, synthetic construct
  source 1..75: mol_type = other DNA
cgattattaccacactcgaagctactagtaattcaatttcagtttcctgctcggcgaatggtgacatttggcaag

SEQ ID NO: 749348 - DNA, 75 bp, synthetic construct
  source 1..75: mol_type = other DNA
gaccttatagaaaaaatattaccgttccgctcaacgatattggcacagatgattttgatgttaacaatgtgtcac

SEQ ID NO: 749349 - DNA, 75 bp, synthetic construct
  source 1..75: mol_type = other DNA
cagtccttcaatttcagtttcctgtacggcaaatggtgagatctggcaaggatataccgtattgacaaacggtga

SEQ ID NO: 749350 - DNA, 75 bp, synthetic construct
  source 1..75: mol_type = other DNA
cagcaggctttacgcaatttaaagacaataaggctgtagatcagaagttagtcgataaagcgttgtatcgtcggg

SEQ ID NO: 749351 - DNA, 75 bp, synthetic construct
  source 1..75: mol_type = other DNA
attgctaatctactcaaagcgcaagggtacgacacggcaatgatgggtaagctgcatctgaatgcaggcggcgat

SEQ ID NO: 749352 - DNA, 75 bp, synthetic construct
  source 1..75: mol_type = other DNA
taattgctgagaggtatattaatgaaattatgaatccgagcattatacttccgttaaatgaagagagggaattaa

SEQ ID NO: 749353 - DNA, 75 bp, synthetic construct
  source 1..75: mol_type = other DNA
ggtgcgtggggagatgctagtggtttcagtttttatccaggaaaaaatctaggagcattaggtgatgcaggagct

SEQ ID NO: 749354 - DNA, 75 bp, synthetic construct
  source 1..75: mol_type = other DNA
caaaaacgtctgcttccgccaccggtgacccgccctgcgacgcggccacgcccgacaacaacagcgccgctcaca

SEQ ID NO: 749355 - DNA, 75 bp, synthetic construct
  source 1..75: mol_type = other DNA
atcatttccttattactggaaaccacgcctattaaagctaaccatttgcgaagcatactggattatattgaacag

SEQ ID NO: 749356 - DNA, 75 bp, synthetic construct
  source 1..75: mol_type = other DNA
aaacatactatcggagtggctaacggattggatgcattgtctctcgttttacgagcttggaaagaaatggggatg

SEQ ID NO: 749357 - DNA, 75 bp, synthetic construct
  source 1..75: mol_type = other DNA
aaatatgctataggtgtagctaatggtttagatgccctttatctcgttttaaaagcgtggaaagaacaaggtaaa

SEQ ID NO: 749358 - DNA, 75 bp, synthetic construct
  source 1..75: mol_type = other DNA
tggttctcataaaaaataccataatgtttatcaaggtgttaatagtcgtctcgatgaactgcaggcagcattatt

SEQ ID NO: 749359 - DNA, 75 bp, synthetic construct
  source 1..75: mol_type = other DNA
aaatatgcaataggtgtagctaatggattagatgctctctatctcgtattaaaagcgtggaaagaacaggggaaa

SEQ ID NO: 749360 - DNA, 75 bp, synthetic construct
  source 1..75: mol_type = other DNA
aaattcctgagtaaacagagtattcaaacattaattcactatccacaccctccacataaacaaatagcttataag

SEQ ID NO: 749361 - DNA, 75 bp, synthetic construct
  source 1..75: mol_type = other DNA
tatataaaattaatgaacgatatcagaaagagttatccgaagcatgtttgaaagtaattaattccggatggtata

SEQ ID NO: 749362 - DNA, 75 bp, synthetic construct
  source 1..75: mol_type = other DNA
tggctctcatgaaaaatataaaaataaatatcaaggtctaaatagtcgtttggatgaaattcaagcggcaatgct

SEQ ID NO: 749363 - DNA, 75 bp, synthetic construct
  source 1..75: mol_type = other DNA
tgacccgccctgtgacgccgccccgcccgacaacaacagcgacgcccacaaccgcagtcagcagccagagtaccg

SEQ ID NO: 749364 - DNA, 75 bp, synthetic construct
  source 1..75: mol_type = other DNA
agctgcggtttgttggcgacgagtgtcaggttgcgggcgatccgctgatgttgcgtcgggcgttaagcaacctgc

SEQ ID NO: 749365 - DNA, 75 bp, synthetic construct
  source 1..75: mol_type = other DNA
atggccagtaagccgtttcagcgcccgttttcgctggcaacccgcctgaccttttttatcagccttgccaccatc

SEQ ID NO: 749366 - DNA, 75 bp, synthetic construct
  source 1..75: mol_type = other DNA
acggctcatcaaaaaggtgctccggaattcaaccataaatgctggtttgaagcgattgatccggcaacagtatcg

SEQ ID NO: 749367 - DNA, 75 bp, synthetic construct
  source 1..75: mol_type = other DNA
aatcatcagtatgttgattgtttttattgtgttatttgccgtacataaaggccacgcgccgatccgcaacgtcag

SEQ ID NO: 749368 - DNA, 75 bp, synthetic construct
  source 1..75: mol_type = other DNA
ttctacttttagccttgcgttataggagattattttctctattcaacaagttacggaagatgttttacaacaaag

SEQ ID NO: 749369 - DNA, 75 bp, synthetic construct
  source 1..75: mol_type = other DNA
cgaaggtagcggcattgggctggcgatagtgaaatcaattgttgtcgcgcataaaggcacggttgcagtaacgtc

SEQ ID NO: 749370 - DNA, 75 bp, synthetic construct
  source 1..75: mol_type = other DNA
acagctggtactgtcgttcaaccatatgatcgagcgtattgaggatgtctttactcgccagtccaatttctcagc

SEQ ID NO: 749371 - DNA, 75 bp, synthetic construct
  source 1..75: mol_type = other DNA
ccaatgtgttgatttccctggcagatagccacggtaaaacggtgtatcactcccccggtgcgccggatatccgcg

SEQ ID NO: 749372 - DNA, 75 bp, synthetic construct
  source 1..75: mol_type = other DNA
gctggcagactggcatgattactatgaaaaactgaatcattttgccagaaaatccaacatcgaacataccgttct

SEQ ID NO: 749373 - DNA, 75 bp, synthetic construct
  source 1..75: mol_type = other DNA
gtggtgtatgtctccggtacgctggcttttgatcaacataataacgtgctgtttgccgatgacccaaaggcgcaa

SEQ ID NO: 749374 - DNA, 75 bp, synthetic construct
  source 1..75: mol_type = other DNA
ccgtcaaatccagaatatcacctcgaaagatctcgacgttcgccttgacccgcagaccgtgccgattgagctgga

SEQ ID NO: 749375 - DNA, 75 bp, synthetic construct
  source 1..75: mol_type = other DNA
gtcctgaacggcgaaggtctggtactaccggaactgaaagatattcagaaagtctcccgcgcaattgcctttgcg

SEQ ID NO: 749376 - DNA, 75 bp, synthetic construct
  source 1..75: mol_type = other DNA
ccttccggtggtgctggatgtcggcaccaacaaccaacagctgcttaacgatccgctgtatatgggctggcgtaa

SEQ ID NO: 749377 - DNA, 75 bp, synthetic construct
  source 1..75: mol_type = other DNA
taaccgccgtgttgaaatcagtctggtaccgcaggccgatgcctgtcgtctgccggacatcacccgggcgccgta

SEQ ID NO: 749378 - DNA, 75 bp, synthetic construct
  source 1..75: mol_type = other DNA
atgtcacattgcgaaaaacgctgaccgccgggctggagaaaaaatacatcgcggcagggatgcagccggaaagag

SEQ ID NO: 749379 - DNA, 75 bp, synthetic construct
  source 1..75: mol_type = other DNA
gttctgcgtcattagatataatagttgaggcaatcatttcaaataattatatttttgagtcaaaattttactcta

SEQ ID NO: 749380 - DNA, 75 bp, synthetic construct
  source 1..75: mol_type = other DNA
tttcacaccgcacattacgaaactcgcatcacggagaatgaaagctatcagacactggttgctatttttgaccac

SEQ ID NO: 749381 - DNA, 75 bp, synthetic construct
  source 1..75: mol_type = other DNA
cctccccgtccggtgatacagaaagttactcagacgccgaaaacggttcgccttaacagcctggcactgtttgat

SEQ ID NO: 749382 - DNA, 75 bp, synthetic construct
  source 1..75: mol_type = other DNA
ctttgtcgccagacgggggcgattgtcggtgtttttcttctgctggctatgctggcgtcttttatgaataaccag

SEQ ID NO: 749383 - DNA, 75 bp, synthetic construct
  source 1..75: mol_type = other DNA
attcttcctgacgaacgtgaatatacccgggcgctgtctctgtcacgtctggcctacgatcttgaaagcgtcatc

SEQ ID NO: 749384 - DNA, 75 bp, synthetic construct
  source 1..75: mol_type = other DNA
aattagcgaacaggaggggtcaccgtctccccgtccggtgatacagaacgttagtcaggagccgaaaacggttcg

SEQ ID NO: 749385 - DNA, 75 bp, synthetic construct
  source 1..75: mol_type = other DNA
tcggcgtttttcttttgctggctatgctggcgtcttttgtgaataaccagcgactgattcgcaacgtgggggaac

SEQ ID NO: 749386 - DNA, 75 bp, synthetic construct
  source 1..75: mol_type = other DNA
ttgcggaactggcagcgtgcagtcatgcagtgccggcagtggctgaataccacgccaccggtgctggtgacattg

SEQ ID NO: 749387 - DNA, 75 bp, synthetic construct
  source 1..75: mol_type = other DNA
aaagcggcatgatcagaaacgccactgaacagggggcgattaatgcggcgcagggcggctattcacgctatcagg

SEQ ID NO: 749388 - DNA, 75 bp, synthetic construct
  source 1..75: mol_type = other DNA
ccggatactgaggtgccgatgccggtagataaaccgagcactcaccagcaggcgcgtggtgcgaaaattgaagac

SEQ ID NO: 749389 - DNA, 75 bp, synthetic construct
  source 1..75: mol_type = other DNA
cgcacaactgtttaatctggtgacacgaggcacagcgaagaccgttaaaagcggcattgtcagaaatgccacgga

SEQ ID NO: 749390 - DNA, 75 bp, synthetic construct
  source 1..75: mol_type = other DNA
aatgacgggaaaattacgtcaggtggcgactttatgacggaagcacagcgtgtcaggcgcatatttaaagacggc

SEQ ID NO: 749391 - DNA, 75 bp, synthetic construct
  source 1..75: mol_type = other DNA
ggaaaatgccgctggtcgccagggggaaatactggagggcgaaccggttcgtcgtggtctgccgtcaccggatga

SEQ ID NO: 749392 - DNA, 75 bp, synthetic construct
  source 1..75: mol_type = other DNA
aacgccaccatccgtgaagcctggcgtaaggttgatgcgtcttatggtaaggaatcaccggaagtgcaggcgggt

SEQ ID NO: 749393 - DNA, 75 bp, synthetic construct
  source 1..75: mol_type = other DNA
gacagggattatgccacgcagccgctgagcaaactgttcccgaaaccggactacgcaaaactggcgagcgaaggg

SEQ ID NO: 749394 - DNA, 75 bp, synthetic construct
  source 1..75: mol_type = other DNA
aagggaggatggaaaggccagagtatcggtgcatggaattcgttccttaaccttgtcgaggatgccaacggggcg

SEQ ID NO: 749395 - DNA, 75 bp, synthetic construct
  source 1..75: mol_type = other DNA
tgacatgttgcgtcgttctgaacgcctggatggcgttcgttcaaaaccgtactggtcaacggatgttgaaatggc

SEQ ID NO: 749396 - DNA, 75 bp, synthetic construct
  source 1..75: mol_type = other DNA
tgaaattaacgagagtggtgcgtccagaccagcagaacgcattgaaaaggtgcgtccggacaaccgttatttcac

SEQ ID NO: 749397 - DNA, 75 bp, synthetic construct
  source 1..75: mol_type = other DNA
tttggtttccgtggtgtgcagtttggtaactacgtggaaggtccgcgtcgtcaggctgatttgaaccgggcttat

SEQ ID NO: 749398 - DNA, 75 bp, synthetic construct
  source 1..75: mol_type = other DNA
gagatcttgagatgtatcgagatgttgttttatcaataaaacgtaaccttcggttgtatgaggagtgtattgaat

SEQ ID NO: 749399 - DNA, 75 bp, synthetic construct
  source 1..75: mol_type = other DNA
ggtgcccttcctggggaaaatttcgggtgaggtgatgccgtatgctgaccagcagaagatgtatgaccggatgac

SEQ ID NO: 749400 - DNA, 75 bp, synthetic construct
  source 1..75: mol_type = other DNA
aaagcgttagatatggctttgtaccgggcaagattgaaacgcaaaaaaggtggattgcacaatccagaaagtacg

SEQ ID NO: 749401 - DNA, 75 bp, synthetic construct
  source 1..75: mol_type = other DNA
gggcggtgcggggatctctcatacgttagaaagcattaatcagcagcgtgcgcagatggcggtgcagcaggaaaa

SEQ ID NO: 749402 - DNA, 75 bp, synthetic construct
  source 1..75: mol_type = other DNA
cggcgtgctggacagcgccaatcataactatcaggttttattgcaggcggtgaacggtcaggcgcgaatttccag

SEQ ID NO: 749403 - DNA, 75 bp, synthetic construct
  source 1..75: mol_type = other DNA
aaacagtggcccaacattgaaagcaccttaagcgtgcgcaccgatggtgataaatcagcgtttatgccactaaaa

SEQ ID NO: 749404 - DNA, 75 bp, synthetic construct
  source 1..75: mol_type = other DNA
tgaccagtacgcatgtgctgaatactgacctgctgttaaacctgacggccgtcgttctcgcttttgcgatcctct

SEQ ID NO: 749405 - DNA, 75 bp, synthetic construct
  source 1..75: mol_type = other DNA
ccttaagcgtgcgcaccgatggcgataaatcagcgtttatgccgctgaaaacctttgctgaaccctctgaggccg

SEQ ID NO: 749406 - DNA, 75 bp, synthetic construct
  source 1..75: mol_type = other DNA
tggcaaatctggtacacaattccacgccgggaacgcgtatgttcagcgtttttgacgggcggcagactcagcttt

SEQ ID NO: 749407 - DNA, 75 bp, synthetic construct
  source 1..75: mol_type = other DNA
gccgggaacgcgtatgttcagcgtctctgacgggcggcagactcagctttcggcggtgatgctgtctgaggatga

SEQ ID NO: 749408 - DNA, 75 bp, synthetic construct
  source 1..75: mol_type = other DNA
ttagaaagcattaatcagcagcgcgcgcagatggcggtgcagcaggaaaaagcccgccagttgatcgacggcatg

SEQ ID NO: 749409 - DNA, 75 bp, synthetic construct
  source 1..75: mol_type = other DNA
tatcaggtgttattgcaggcggtgaacggtcaggcgcgaatttccagccagacggtgaggaatttattggggtaa

SEQ ID NO: 749410 - DNA, 75 bp, synthetic construct
  source 1..75: mol_type = other DNA
cggcgtgttggatagcgcgaatcataactatcaggtgttattgcaggcggtgaatggtcaggcgcgaatttccag

SEQ ID NO: 749411 - DNA, 75 bp, synthetic construct
  source 1..75: mol_type = other DNA
cggtacaggcgtcggaaaatctcggcggtgtgctcgacagcgccaatcataactatcaggttttattgcaggcgg

SEQ ID NO: 749412 - DNA, 75 bp, synthetic construct
  source 1..75: mol_type = other DNA
aaacagtggcctgacattgaacgcacgttaagcgtgcgcaccgatggcgataaatcagcgtttatgccactaaaa

SEQ ID NO: 749413 - DNA, 75 bp, synthetic construct
  source 1..75: mol_type = other DNA
tgagaaaacgcctggtattcacctcggaaagtctgcctgtgcgatggaaacacgcggtatcgaaacagaacgcgg

SEQ ID NO: 749414 - DNA, 75 bp, synthetic construct
  source 1..75: mol_type = other DNA
tgcgcaggcacaggaagatcagaaacaggctgatgataaggccaggtcacaacgtgatcaggagaaaacacaaat

SEQ ID NO: 749415 - DNA, 75 bp, synthetic construct
  source 1..75: mol_type = other DNA
atgatctgggcattcgtaaaagcatactggaaacagttggttatcatggcgatccttgctgctctggtcatgtca

SEQ ID NO: 749416 - DNA, 75 bp, synthetic construct
  source 1..75: mol_type = other DNA
atgatcctgacattcgtaaaagcatattggaaacagttgattatcgtgttgatgcttgctgttctggtcatatca

SEQ ID NO: 749417 - DNA, 75 bp, synthetic construct
  source 1..75: mol_type = other DNA
ctcgcaatctcgctgcggctgtaagagcgcgtcttgatgagattgaaggtttgttagacaagggtattagtaggc

SEQ ID NO: 749418 - DNA, 75 bp, synthetic construct
  source 1..75: mol_type = other DNA
gctcaccagattgtgctggaaagctgtgttacaagcgcaactgaaaacttcatgagcgagcatggtgatgcactc

SEQ ID NO: 749419 - DNA, 75 bp, synthetic construct
  source 1..75: mol_type = other DNA
tttgccaatgtcaccgtccagccggtactgatagtgccggatgaaatggatttgcttacctgccatctcgacggt

SEQ ID NO: 749420 - DNA, 75 bp, synthetic construct
  source 1..75: mol_type = other DNA
gtttacgctttgcaggctatggtgaagcggtaaaccacgatgctgacagtccggcacgtcctgcgccggaactta

SEQ ID NO: 749421 - DNA, 75 bp, synthetic construct
  source 1..75: mol_type = other DNA
agcgcatggaaaaattgcggcagcatcactggaaggttgagaaacaggacattcccgcgagtcaaaaagcatttg

SEQ ID NO: 749422 - DNA, 75 bp, synthetic construct
  source 1..75: mol_type = other DNA
agcaaggaaggtggattttacgcagggacgtctgccaccgacgctgatgccggtcatgagttctgtcgaccggga

SEQ ID NO: 749423 - DNA, 75 bp, synthetic construct
  source 1..75: mol_type = other DNA
agactaaattcactatcgccacttttattggtgatgaaaagatgtttcgtgaggccgtcgaagcctacaggaaat

SEQ ID NO: 749424 - DNA, 75 bp, synthetic construct
  source 1..75: mol_type = other DNA
gtgatgcctttcccgggaatggattgccagttgtcacgaacggtgcaatagtgatccacacccaacgcctgaaat

SEQ ID NO: 749425 - DNA, 75 bp, synthetic construct
  source 1..75: mol_type = other DNA
taggccaatataatattcaggtgaatggtattgctcctggttattatgcaaccgatattacgctggcgacccgta

SEQ ID NO: 749426 - DNA, 75 bp, synthetic construct
  source 1..75: mol_type = other DNA
tgatcctgaggaattagcatatatatttaataaaaaacataaacaacatatggatgatcatcttttccatctaat

SEQ ID NO: 749427 - DNA, 75 bp, synthetic construct
  source 1..75: mol_type = other DNA
atgaaagcaattcacaatttgtttagaaacatcgcttcaagccatcaagataagcattcagataaagtaaacagt

SEQ ID NO: 749428 - DNA, 75 bp, synthetic construct
  source 1..75: mol_type = other DNA
tactcttcttagtggtaatttcaaacctgactggcgttgggatgtctctaaagagacgtttactaaggaaaagtt

SEQ ID NO: 749429 - DNA, 75 bp, synthetic construct
  source 1..75: mol_type = other DNA
gttacgattgagcgtaaggatgattattatttttttaatttctccggagataaatcagatataatttataaagtt

SEQ ID NO: 749430 - DNA, 75 bp, synthetic construct
  source 1..75: mol_type = other DNA
aaaaaattgataattataccatggggctaaattcctggaagatagcacctaacgaacgtggtgataaaaaaggtg

SEQ ID NO: 749431 - DNA, 75 bp, synthetic construct
  source 1..75: mol_type = other DNA
acactactgatttcagaccagcacgtgaacgtatcttcatatgtggggagacactcaaaggtgaagaccccagca

SEQ ID NO: 749432 - DNA, 75 bp, synthetic construct
  source 1..75: mol_type = other DNA
cgaagtttcactggcctaccgcaaaatagagtgggaacacgtcaaatctggcacctccggtgccgacgactggcg

SEQ ID NO: 749433 - DNA, 75 bp, synthetic construct
  source 1..75: mol_type = other DNA
gtacctctgtggaaggcaaacaggagcattatttcactacccgcctgactgattcgacgattgtcgatatgaaac

SEQ ID NO: 749434 - DNA, 75 bp, synthetic construct
  source 1..75: mol_type = other DNA
ggccacgaacatgctggcacagacggcaggcaggttgcgtattccccggtttatccatatctccacgcccgcggt

SEQ ID NO: 749435 - DNA, 75 bp, synthetic construct
  source 1..75: mol_type = other DNA
gataaaattatcgtctcccattaccgttacgattgagcgtaaggacggttattattttattaatttctccgggga

SEQ ID NO: 749436 - DNA, 75 bp, synthetic construct
  source 1..75: mol_type = other DNA
cgctgagttggttcgtcgcgaacatcctgaaggaaggcggtagtggacaaaggttaagcgaactgactgacataa

SEQ ID NO: 749437 - DNA, 75 bp, synthetic construct
  source 1..75: mol_type = other DNA
ctaccgccctaacctgcgggtcaaaagccgcgacggactgacgccgatgctttcaaccatcgtgccgaaagaggc

SEQ ID NO: 749438 - DNA, 75 bp, synthetic construct
  source 1..75: mol_type = other DNA
aggggtagatcagcatcaaaaaattgataattataccatggggctaaattcctggaagatagctcctaacgaacg

SEQ ID NO: 749439 - DNA, 75 bp, synthetic construct
  source 1..75: mol_type = other DNA
gttaaagataatggcgaaacaaaggaaatgattgaaaaacagggtgttgaggtggacttcatgcaggtggatatc

SEQ ID NO: 749440 - DNA, 75 bp, synthetic construct
  source 1..75: mol_type = other DNA
tgccactaaacatgctcttgccggattcaccaaagcctattgcgatgaattaggtcaatataatattcaggtgaa

SEQ ID NO: 749441 - DNA, 75 bp, synthetic construct
  source 1..75: mol_type = other DNA
taggtcaatataatattcaggtaaatggtattgcccctggctattatgcaacagatattacgctggcgacacgca

SEQ ID NO: 749442 - DNA, 75 bp, synthetic construct
  source 1..75: mol_type = other DNA
cgtcaacctgatcccaacgatgcagggcggtacgcacgttaatggcctgcgtcagggcctgctggacgcgatgcg

SEQ ID NO: 749443 - DNA, 75 bp, synthetic construct
  source 1..75: mol_type = other DNA
tcctccgacgaagtgctggcttcgcaggaagtgcacgatatttcggtagcgatcggtatcgatcctgacagcgac

SEQ ID NO: 749444 - DNA, 75 bp, synthetic construct
  source 1..75: mol_type = other DNA
ctatcaacctgaagaaagttgaagagcgtgaactgccggaactgactgcagaattcatcaaacgtttcggcgttg

SEQ ID NO: 749445 - DNA, 75 bp, synthetic construct
  source 1..75: mol_type = other DNA
tgaacgtatcttcatatgtggggagacactcaaaggtgaagaccccagcaaatacattagacaaaaatatggcca

SEQ ID NO: 749446 - DNA, 75 bp, synthetic construct
  source 1..75: mol_type = other DNA
taaataaaaatgacgtcgttctggctggaaattatgaaatcaatttcaatggtaactatactgcacgactagcaa

SEQ ID NO: 749447 - DNA, 75 bp, synthetic construct
  source 1..75: mol_type = other DNA
gattactccttgtattttccttggagatcatacaggcgacaggtttagtactatttttggagatcaatatatcct

SEQ ID NO: 749448 - DNA, 75 bp, synthetic construct
  source 1..75: mol_type = other DNA
gtcaaagataacggcgaaacaaaggaaatgattgaaaaacagggtgttgaggtggacttcatgcaggtggatatc

SEQ ID NO: 749449 - DNA, 75 bp, synthetic construct
  source 1..75: mol_type = other DNA
caggaggaattggagcagctgctgggggtgtggctggaggtgcaatatatgactatgggggaaccgcagaattcg

SEQ ID NO: 749450 - DNA, 75 bp, synthetic construct
  source 1..75: mol_type = other DNA
ttgatttgatggcttacttgttcggtgatttgctggcagtgacgccggaagatctcatctccatcgccattggcg

SEQ ID NO: 749451 - DNA, 75 bp, synthetic construct
  source 1..75: mol_type = other DNA
cagcaattgggcttgagctaccgaattgctgccgttccctggccattgctttctgtggttgcgcgaggcctggaa

SEQ ID NO: 749452 - DNA, 75 bp, synthetic construct
  source 1..75: mol_type = other DNA
gatgaagagcgtccgatgattttgattgcgggcggcaccgggttctcttatgcccgctcgattttgctgacagcg

SEQ ID NO: 749453 - DNA, 75 bp, synthetic construct
  source 1..75: mol_type = other DNA
cagcagccgcagattcagccacaattcacagccgaggaaatcatcctcctttgctacatgcaactctggatggaa

SEQ ID NO: 749454 - DNA, 75 bp, synthetic construct
  source 1..75: mol_type = other DNA
gattactatggaaagctgtttgatctggcctacgaaactcgtcatataaccaaccggactcgcgacacattgctc

SEQ ID NO: 749455 - DNA, 75 bp, synthetic construct
  source 1..75: mol_type = other DNA
ggtggtgaattgcgggaatttaagaacaaggttactcacagtaacttagttgcaccgcgagcaaagcacctcatc

SEQ ID NO: 749456 - DNA, 75 bp, synthetic construct
  source 1..75: mol_type = other DNA
acctttcccctgttacctataaccagattccggtaatcacaactgagttgcttgcccgcctttatggaacagaaa

SEQ ID NO: 749457 - DNA, 75 bp, synthetic construct
  source 1..75: mol_type = other DNA
cctcggtagaagctattacggataccgtgtaccgcgttcgaattgtgccagacgcggccttttcttttcgtgctg

SEQ ID NO: 749458 - DNA, 75 bp, synthetic construct
  source 1..75: mol_type = other DNA
atggcttattccgatgaacagcgccctgaagcgcaatttggcaaccagagccgcaacagcctgaacattcagcag

SEQ ID NO: 749459 - DNA, 75 bp, synthetic construct
  source 1..75: mol_type = other DNA
tgaaagggctggataacttatccgccctggctgtagtcaaagacagccgttctgcaatgtcagccgtgtacgcca

SEQ ID NO: 749460 - DNA, 75 bp, synthetic construct
  source 1..75: mol_type = other DNA
aagaaacagccatgcgtgaggctgaaagcgttcctcaggacgaatcggctccgcaacccgaaccggttgatccgg

SEQ ID NO: 749461 - DNA, 75 bp, synthetic construct
  source 1..75: mol_type = other DNA
gatcagcttgatacatctttgctgtatcttaataaagaaaaagccgctgaatggcttcatgcagtcgggctccaa

SEQ ID NO: 749462 - DNA, 75 bp, synthetic construct
  source 1..75: mol_type = other DNA
gaagggctaccggctccggacattacacacaatgtccgtatgcctcagcctgatcagcttccccgaactgttcgt

SEQ ID NO: 749463 - DNA, 75 bp, synthetic construct
  source 1..75: mol_type = other DNA
cagggcggctattcacgctatcaggaaaacacggcattgcgtgagaccgccggaatggatgtatcgccatgggag

SEQ ID NO: 749464 - DNA, 75 bp, synthetic construct
  source 1..75: mol_type = other DNA
gtggttcgtgacccagccgcgatttaattacagtccggagctgtcagcgagctttcagcgggccgcaattgagca

SEQ ID NO: 749465 - DNA, 75 bp, synthetic construct
  source 1..75: mol_type = other DNA
atcgcggtggtggagcgttttttgtcagtgcggtttagtctgactgaagcagacggcgtaacgcgggtgagcatt

SEQ ID NO: 749466 - DNA, 75 bp, synthetic construct
  source 1..75: mol_type = other DNA
gaagatattttttaatggaccatatccatgagatgatcgtgcgtactgttaacgggcaatgcccccagcctgtgg

SEQ ID NO: 749467 - DNA, 75 bp, synthetic construct
  source 1..75: mol_type = other DNA
gaatccatttaacggcgcggtggttcgtcccggaacgaaaaagaagaagacgctgacgcagacgcaaatggatgc

SEQ ID NO: 749468 - DNA, 75 bp, synthetic construct
  source 1..75: mol_type = other DNA
ctaggcacatcacaggacagagggagtcgtgctgcctacggttatatatatttaatagacagcatgataagacca

SEQ ID NO: 749469 - DNA, 75 bp, synthetic construct
  source 1..75: mol_type = other DNA
ctggatagcgccttacgttcaggccgtcatattggcctcgacgaactggataatcatgcattcctgatggatttt

SEQ ID NO: 749470 - DNA, 75 bp, synthetic construct
  source 1..75: mol_type = other DNA
tgaaactggtgaacaaccgttcaaccggttcagacgttgaccgtcagaagttgcaggagaaagtacgttcttcgc

SEQ ID NO: 749471 - DNA, 75 bp, synthetic construct
  source 1..75: mol_type = other DNA
cgttacgctggtgtgcgctgcttggcgcgattggtcatggttcccgaatgatcttaatgaccagcgggctgaata

SEQ ID NO: 749472 - DNA, 75 bp, synthetic construct
  source 1..75: mol_type = other DNA
ctggtcggcaccattggtattcaatggtcgcgctggtatctggcgcatccgaaagtgtttaccgtggcggccgtt

SEQ ID NO: 749473 - DNA, 75 bp, synthetic construct
  source 1..75: mol_type = other DNA
agggcgggaaccttcctggggatttaccgagaaaaatcgtacccacaatattcccgaaacgctcatgccactgat

SEQ ID NO: 749474 - DNA, 75 bp, synthetic construct
  source 1..75: mol_type = other DNA
taccactgaactgcactggtggcgcacctctgtggaaggcaaacaggaacattacttcaccacccgcctgacaga

SEQ ID NO: 749475 - DNA, 75 bp, synthetic construct
  source 1..75: mol_type = other DNA
ctgaaaggtaaagcagcgaaatttgctatcaacctgaagaaagttgaagagcgtgaactgccggaactgactgct

SEQ ID NO: 749476 - DNA, 75 bp, synthetic construct
  source 1..75: mol_type = other DNA
atgggtgtgatcgaatttctcatagcgttggtgcaggatatgatcctcgcggcaattcctgccgtcggatttgcg

SEQ ID NO: 749477 - DNA, 75 bp, synthetic construct
  source 1..75: mol_type = other DNA
tcaggtgcatcaggactataaaggtgaaccaggctggactgagatcccttcctatactcgttttgtcgaagagtt

SEQ ID NO: 749478 - DNA, 75 bp, synthetic construct
  source 1..75: mol_type = other DNA
gacgcgaaggctattattgggtgaaacagttacagggaaacagtgccagaactgtactaaaactggatatacgag

SEQ ID NO: 749479 - DNA, 75 bp, synthetic construct
  source 1..75: mol_type = other DNA
acttcgggcggcaagtgatgtggttattgccatcattcaggagacattcaatgggttcaccacagggaatcgtga

SEQ ID NO: 749480 - DNA, 75 bp, synthetic construct
  source 1..75: mol_type = other DNA
gctgaagcactggcaaaaatggccgcagaagaaactggcttcggcaactggcaggataaagtcctgaaaaaccgt

SEQ ID NO: 749481 - DNA, 75 bp, synthetic construct
  source 1..75: mol_type = other DNA
aaacttcggcgaaggaccacttgcaggacgtatcaaaacggcaaccaatcctgatggggttattgctgacaactc

SEQ ID NO: 749482 - DNA, 75 bp, synthetic construct
  source 1..75: mol_type = other DNA
aacctgtccaaggatatatcattagtaactgattttttggttatgaattatatcaaagctgtaaacgcggatatt

SEQ ID NO: 749483 - DNA, 75 bp, synthetic construct
  source 1..75: mol_type = other DNA
taatgaactcggactgcttggttttacaccgctggtagcgttagcggtgctctcgttgataggcgtcgatattgt

SEQ ID NO: 749484 - DNA, 75 bp, synthetic construct
  source 1..75: mol_type = other DNA
ggcatcaggacggcgatgcggcagagcaggcggcgcttaccatgatcgccagctcgacacgaaggttaaaggaaa

SEQ ID NO: 749485 - DNA, 75 bp, synthetic construct
  source 1..75: mol_type = other DNA
gtccggtccgccagaaggcggctggaccctgggagcgcagccacgattatgtggcgttgctggttgatgtgcaga

SEQ ID NO: 749486 - DNA, 75 bp, synthetic construct
  source 1..75: mol_type = other DNA
tcccctgcccggataatccggaaaaatcccttgccatccagtctgaaatcgttcggattctggataaatttactg

SEQ ID NO: 749487 - DNA, 75 bp, synthetic construct
  source 1..75: mol_type = other DNA
gagcagagctcaaaaacttgtagatgaaaatgacgtaatttttgcaacaactcgccctacacaacagcgattctg

SEQ ID NO: 749488 - DNA, 75 bp, synthetic construct
  source 1..75: mol_type = other DNA
agtgataaaagctggtttcagttttgccattatcgttatgctgttggtggcgttgatcaccggactggtgggagg

SEQ ID NO: 749489 - DNA, 75 bp, synthetic construct
  source 1..75: mol_type = other DNA
taaatgcttatcaattggttgctcataactcaatgtctcctcgtgatgcatgggaggctgctgtcgctgaggtta

SEQ ID NO: 749490 - DNA, 75 bp, synthetic construct
  source 1..75: mol_type = other DNA
gtagctgtgaacactacagaggccgttttagagcataaggcaaagggattgtcacaaagtcaggttgcaaagctt

SEQ ID NO: 749491 - DNA, 75 bp, synthetic construct
  source 1..75: mol_type = other DNA
gttttattttatgttgtggtgcaaagagtcactgatttatctgttgttttctgtgcttgttacatggtgctgcgg

SEQ ID NO: 749492 - DNA, 75 bp, synthetic construct
  source 1..75: mol_type = other DNA
aattccgcagaaagaaaccacgccgttctatccacgctctccgtatgcggtcgccaaactgtatgcctactggat

SEQ ID NO: 749493 - DNA, 75 bp, synthetic construct
  source 1..75: mol_type = other DNA
ggtatctgaaatggtcgccaaagacctggaagcagcgaagaaacattccctgctgaaatcccacggttatgaagt

SEQ ID NO: 749494 - DNA, 75 bp, synthetic construct
  source 1..75: mol_type = other DNA
gcattgcttctcttttttctcaggctgcgttcgcagcagaatctgacattgccgacgggcaaacccagcgttttg

SEQ ID NO: 749495 - DNA, 75 bp, synthetic construct
  source 1..75: mol_type = other DNA
agtaagttgtgtcgaaataaaaacattctaaaaaaaatattgataatatattttatttttcttgtcttggaatta

SEQ ID NO: 749496 - DNA, 75 bp, synthetic construct
  source 1..75: mol_type = other DNA
gggatgcccaagggcaacgtttctcgccttggcggattgcggttatctgaagaatgtagaaccacagtatgggga

SEQ ID NO: 749497 - DNA, 75 bp, synthetic construct
  source 1..75: mol_type = other DNA
atgtctcaatacgctcaagccgctttaaatgcttatcaattggttgctcataactcaatgtctcctcgtgatgca

SEQ ID NO: 749498 - DNA, 75 bp, synthetic construct
  source 1..75: mol_type = other DNA
gagaaaggtcggtaagttgtaccaaagggcaattgaagttgcgaatctgattcttgatttgcccggaatcagcaa

SEQ ID NO: 749499 - DNA, 75 bp, synthetic construct
  source 1..75: mol_type = other DNA
caaaacgctggctaagcttgccaatcatgcggcaaaaaaatggcagcggcagacggggggggggggatttatcaa

SEQ ID NO: 749500 - DNA, 75 bp, synthetic construct
  source 1..75: mol_type = other DNA
cattttacgcctcctgcgagagagtctttcggcccgatctggtgaacaagccaattgtatgcctttcgaacaatg

SEQ ID NO: 749501 - DNA, 75 bp, synthetic construct
  source 1..75: mol_type = other DNA
gacgtatgtaaagaaattgtaggtgaaaatcctgttgttgtttaccataacaacattttcaatattttaaataaa

SEQ ID NO: 749502 - DNA, 75 bp, synthetic construct
  source 1..75: mol_type = other DNA
gaggaacgcacacgactggaagcatggggacgctacagtgttctggtcagccgtgtggatacggcaaatcctgaa

SEQ ID NO: 749503 - DNA, 75 bp, synthetic construct
  source 1..75: mol_type = other DNA
tctcgggcagattgtagaactgggcgacgcgcagcaggtgctgacggcacctgcacatccatacacccgattatt

SEQ ID NO: 749504 - DNA, 75 bp, synthetic construct
  source 1..75: mol_type = other DNA
ataatgcgctatttcatactaatgttcactttcgtatgttcctttgttgcagcccaaccaactattgtcccacaa

SEQ ID NO: 749505 - DNA, 75 bp, synthetic construct
  source 1..75: mol_type = other DNA
cagtaacatttaatcctgaaattgagcgtttagagacacagattcgacaattagatagcagcggtgttgatattt

SEQ ID NO: 749506 - DNA, 75 bp, synthetic construct
  source 1..75: mol_type = other DNA
ctatatgattattcccgaaatcgccattaacctgggctgcgtattaccgtatcacggctcttattttgctgcggc

SEQ ID NO: 749507 - DNA, 75 bp, synthetic construct
  source 1..75: mol_type = other DNA
cacaatgtctcggtgatacgtcatatgagcgatcgggtggcggtgatgtatctcggacagattgtggaactagga

SEQ ID NO: 749508 - DNA, 75 bp, synthetic construct
  source 1..75: mol_type = other DNA
ccgcacgttgccacagggctgtttttttccgcgaacgttgcccccttgcaaccagcggatgcgaagtccggcaat

SEQ ID NO: 749509 - DNA, 75 bp, synthetic construct
  source 1..75: mol_type = other DNA
actggcgttctatggtagcaacatgccggcgtttattgcggcctttgagccgctgagagattatccttggcttag

SEQ ID NO: 749510 - DNA, 75 bp, synthetic construct
  source 1..75: mol_type = other DNA
gatgatcggtaatgccgtgccggtaaaattagggaaggttataggtgagtcaattataacccacctaaaagagaa

SEQ ID NO: 749511 - DNA, 75 bp, synthetic construct
  source 1..75: mol_type = other DNA
ccagtaaattaaatccgattaataaaaaaagaattatacactctgttcctggtggtacatggaaggactggccga

SEQ ID NO: 749512 - DNA, 75 bp, synthetic construct
  source 1..75: mol_type = other DNA
gcaatcggctggatgaagtggctacatagtcatgacctgggccaacaagcaattgaggcgatcgagagcgtaaac

SEQ ID NO: 749513 - DNA, 75 bp, synthetic construct
  source 1..75: mol_type = other DNA
tgccgggtcagcagtatgatgaggagtcaggcctgtattacaaccgccaccgctattatgacccgctgcaggggc

SEQ ID NO: 749514 - DNA, 75 bp, synthetic construct
  source 1..75: mol_type = other DNA
acattgccacaacaattctccgaacaaatgtattttgcctgcctttccattttcgccacacacagaggtttcatg

SEQ ID NO: 749515 - DNA, 75 bp, synthetic construct
  source 1..75: mol_type = other DNA
gggttaagacgcagccgtgcgcatgttgtggaaaacctgctgatgatccccaccacctgataggtcacggtcagg

SEQ ID NO: 749516 - DNA, 75 bp, synthetic construct
  source 1..75: mol_type = other DNA
tgattttactgtgcctgtgtcggacaaaaaccaggaacgggagtgtaaccggccatcctttgttgtatccggtga

SEQ ID NO: 749517 - DNA, 75 bp, synthetic construct
  source 1..75: mol_type = other DNA
agagacggtggttattgaccttgcttatgaaggctccggcagtggcgactggcgcactgacggtctcattgtggg

SEQ ID NO: 749518 - DNA, 75 bp, synthetic construct
  source 1..75: mol_type = other DNA
caccaccgccagtgatggtcatactgcgcgtcatctgtcgccggcctggaatgccgggattcagttcagtcccgt

SEQ ID NO: 749519 - DNA, 75 bp, synthetic construct
  source 1..75: mol_type = other DNA
agcggcgtctcctgccacgcataattgacgtgctgttgacgctgattgcctgggttgggtttctgtacctgattt

SEQ ID NO: 749520 - DNA, 75 bp, synthetic construct
  source 1..75: mol_type = other DNA
gagctactcgcctcgttacatcagtccggtattactctggtactggtgctcaatcgcttcgatgagatcccggaa

SEQ ID NO: 749521 - DNA, 75 bp, synthetic construct
  source 1..75: mol_type = other DNA
atggaaagaatcacaactatggtgactcatataaaaagcgtttggaaaaaaatcaaccgagaaatggcggaaccc

SEQ ID NO: 749522 - DNA, 75 bp, synthetic construct
  source 1..75: mol_type = other DNA
cggcaatatggattccctgcgtgactggggccatgccaaagactacgtaaaaatgcagtggatgatgctgcaaca

SEQ ID NO: 749523 - DNA, 75 bp, synthetic construct
  source 1..75: mol_type = other DNA
gcgtaaccggacaagatggttcttacctggcagaactgctgctggagaaaggttacgaggtgcatggtattaagc

SEQ ID NO: 749524 - DNA, 75 bp, synthetic construct
  source 1..75: mol_type = other DNA
tcgatgatattaaaaatatagatcccgacttattcgaagcattgttagtatatgatactttgattgagccgaacg

SEQ ID NO: 749525 - DNA, 75 bp, synthetic construct
  source 1..75: mol_type = other DNA
gcaggctggcgcgcatgcttaacgcatggaataaaacgctggcagctgattacgccgtcggtgaggcattcggtg

SEQ ID NO: 749526 - DNA, 75 bp, synthetic construct
  source 1..75: mol_type = other DNA
ttgtggttggccatcactctcgcataggtcatgcgcaacgacttaccgcgctgctggatgctcatctgcttattg

SEQ ID NO: 749527 - DNA, 75 bp, synthetic construct
  source 1..75: mol_type = other DNA
taacacctcagcaataaatggccttgatatacgccttactactgctgaaggtaatatcgtcagtctgcaaacaga

SEQ ID NO: 749528 - DNA, 75 bp, synthetic construct
  source 1..75: mol_type = other DNA
aagaaaatcttattacactggatccgacaactttcccggaaaatgtggaagtatcacagacagatactcgtgttg

SEQ ID NO: 749529 - DNA, 75 bp, synthetic construct
  source 1..75: mol_type = other DNA
tgtcggttgacggcattcattcccgcggtcagcagaagggacgggatacggagacgggagagacatggcgtctgc

SEQ ID NO: 749530 - DNA, 75 bp, synthetic construct
  source 1..75: mol_type = other DNA
aacgcttttgccatttggtacggttgttacccttgaaagaaaaacgggagaagcatttgagtctgcaggtgttgt

SEQ ID NO: 749531 - DNA, 75 bp, synthetic construct
  source 1..75: mol_type = other DNA
agaaatcttagatcttgagaaaaaaagaaaggaaatggagcttttagtaaagaaagccagtatggcattgttttt

SEQ ID NO: 749532 - DNA, 75 bp, synthetic construct
  source 1..75: mol_type = other DNA
ttttcgcggatatactctgactggctgggtatctccgtaccaggagaacgtagtcactctggatccgacgacgtt

SEQ ID NO: 749533 - DNA, 75 bp, synthetic construct
  source 1..75: mol_type = other DNA
gtctgatgggacaacgcagatatttactgttccgttcaccacgccggctattgctctgcgagagggatacatgaa

SEQ ID NO: 749534 - DNA, 75 bp, synthetic construct
  source 1..75: mol_type = other DNA
aacaaatcatttgagttgacggacacaagtttcactgttgcaagttatcagtattcttcggcaggatatcattct

SEQ ID NO: 749535 - DNA, 75 bp, synthetic construct
  source 1..75: mol_type = other DNA
gttctgtaggggtggtagatgacaagggggctgtgtatctgagtggcctgtctgaaacaggaaaactaaaggcac

SEQ ID NO: 749536 - DNA, 75 bp, synthetic construct
  source 1..75: mol_type = other DNA
gataatgatatctatgccacggcacagatgcagcgttcaaccagacaaaactccagttatgaagtaggcttgagt

SEQ ID NO: 749537 - DNA, 75 bp, synthetic construct
  source 1..75: mol_type = other DNA
tacccgggatatgctaatccgttatggtgtaaagacagagatgtatcctgagctatttcataccagtggtaagaa

SEQ ID NO: 749538 - DNA, 75 bp, synthetic construct
  source 1..75: mol_type = other DNA
gttccgttgtaacactggaagatgtgaataagaaaaattcttctgttggagtgatgggaaacaatggggaagtat

SEQ ID NO: 749539 - DNA, 75 bp, synthetic construct
  source 1..75: mol_type = other DNA
gtaatatgcgtcagatgagtgctggtatgtctggaagcatgatagctcatagtgaaggtattactctggggcaaa

SEQ ID NO: 749540 - DNA, 75 bp, synthetic construct
  source 1..75: mol_type = other DNA
agcaggcgaacgccaacactcgatgagctaacagagggtatgccatttatatttagaattatggctcgctcaaca

SEQ ID NO: 749541 - DNA, 75 bp, synthetic construct
  source 1..75: mol_type = other DNA
atgcgtgacaggagtggttatatctgtgaccgaagcgaaatcggtcaacgtccaccactgcaacgtgtttattcc

SEQ ID NO: 749542 - DNA, 75 bp, synthetic construct
  source 1..75: mol_type = other DNA
tgctgccgtcaacacaccagaaaaacagccggatcatctgttccgctcgctgggttttaatcgtacctgggagga

SEQ ID NO: 749543 - DNA, 75 bp, synthetic construct
  source 1..75: mol_type = other DNA
tcgcgcggagcagctcagaaaaaatgacaatgccgttatggattcaggggtgctgagagcagtcgttacggggta

SEQ ID NO: 749544 - DNA, 75 bp, synthetic construct
  source 1..75: mol_type = other DNA
taaatcagcgtttatgccgctgaaaatctttgccgaaccgtcacaggcggaccgcttagcgcaaagcctgcaaca

SEQ ID NO: 749545 - DNA, 75 bp, synthetic construct
  source 1..75: mol_type = other DNA
atggtgttcaacgttcccgttcgagcgttacgctggtgtgcgctgcttggtgcgataggtcatggttcccgaatg

SEQ ID NO: 749546 - DNA, 75 bp, synthetic construct
  source 1..75: mol_type = other DNA
aattccgcagaaagagaccacgccgttctatccgcgctctccgtatgcggtcgccaaactgtatgcctactggat

SEQ ID NO: 749547 - DNA, 75 bp, synthetic construct
  source 1..75: mol_type = other DNA
aactatatgacattattaataataataggtttaatttaacttcagaagataaatattgttgccctgagtgcaaat

SEQ ID NO: 749548 - DNA, 75 bp, synthetic construct
  source 1..75: mol_type = other DNA
ttacggtggctggtcgcgtacggaagacagtgtcagtatgtggatgagtgtgccgctgggacgctggtttggggg

SEQ ID NO: 749549 - DNA, 75 bp, synthetic construct
  source 1..75: mol_type = other DNA
aacggcagccgggatgagtaccgtgacagaccgcaccgtgattattttggcgcgtcatacagtacgtcctggaac

SEQ ID NO: 749550 - DNA, 75 bp, synthetic construct
  source 1..75: mol_type = other DNA
ttcccctgatgcaatgggcggcaccggaataccgtagcgaacagggaaaaatccagtcgctgagccagcaaatgg

SEQ ID NO: 749551 - DNA, 75 bp, synthetic construct
  source 1..75: mol_type = other DNA
cagcgggctgacagagcctgcccgccgtgtggctgaccttctgaatatcgtgcttcctgacaacgcaacttcgta

SEQ ID NO: 749552 - DNA, 75 bp, synthetic construct
  source 1..75: mol_type = other DNA
tggcgctgacaccttcaagttctttcccttcatccatcatcgtgcactgtatttaatggttggggatgcgttcat

SEQ ID NO: 749553 - DNA, 75 bp, synthetic construct
  source 1..75: mol_type = other DNA
ctcaagcccgaattgaagtacgtcaaaatgggtatctgatacatagtcagatagttgcaccgggggcttttgctt

SEQ ID NO: 749554 - DNA, 75 bp, synthetic construct
  source 1..75: mol_type = other DNA
tctgatagcaccggaagtctcactgcttctctcctacatcgatgatctgaacatccgtatgtactttgagacgct

SEQ ID NO: 749555 - DNA, 75 bp, synthetic construct
  source 1..75: mol_type = other DNA
aatgaagctctggcgctgaaacctgctgattttatgctgactccgacgcgccagtacccgcaacccgtggtgatc

SEQ ID NO: 749556 - DNA, 75 bp, synthetic construct
  source 1..75: mol_type = other DNA
acgtcctgacaggaagtggcctgtcctttacctgcgatccacggcgagcaaaacagcttctcggataccctgaac

SEQ ID NO: 749557 - DNA, 75 bp, synthetic construct
  source 1..75: mol_type = other DNA
tggtgctcggctgtgtattcggcgggtattttgaagcgggcggccaattaattgctatctggcagcctgcagaga

SEQ ID NO: 749558 - DNA, 75 bp, synthetic construct
  source 1..75: mol_type = other DNA
aatgaaaaacaatatggagaattacagaaactatcaggcaaaagggctgattaataaagatcagttaactaacca

SEQ ID NO: 749559 - DNA, 75 bp, synthetic construct
  source 1..75: mol_type = other DNA
actcaggcagcagattttgataatcgtatctatcagatggaactgcaacgactcgaattgcagaaagaactggtt

SEQ ID NO: 749560 - DNA, 75 bp, synthetic construct
  source 1..75: mol_type = other DNA
actgttcgctgaatggcttgatggaacggaaacggacgacgtgctttaccaccaggaagacgatctgttcccgat

SEQ ID NO: 749561 - DNA, 75 bp, synthetic construct
  source 1..75: mol_type = other DNA
tcgccaaattgtacgcctactggatcaccgttaactatcgtgaatcttacggaatgtacgcctgtaacggcattc

SEQ ID NO: 749562 - DNA, 75 bp, synthetic construct
  source 1..75: mol_type = other DNA
cgaagaattaatctcaatcgctgaatcaaataaacagcgattagttaatcaggccaacgaatacatgaacagcaa

SEQ ID NO: 749563 - DNA, 75 bp, synthetic construct
  source 1..75: mol_type = other DNA
tgttcaaccacgagtctccgcgccgcggcgaaacctttgtgacgcgtaaaatcacccgtgcgatcgctaacatcg

SEQ ID NO: 749564 - DNA, 75 bp, synthetic construct
  source 1..75: mol_type = other DNA
ggcacagctgggtattaaactgcgctttgaaggtaaaggcgtggaagaaaaagggattgtcgtttccgtcaccgg

SEQ ID NO: 749565 - DNA, 75 bp, synthetic construct
  source 1..75: mol_type = other DNA
cacacagattggtgatgttcgtgatcaacaggcactcgaccaggcgttagccggttttgacactgttgtactact

SEQ ID NO: 749566 - DNA, 75 bp, synthetic construct
  source 1..75: mol_type = other DNA
cgtttttaggcgtgtttatctgctactgcctgatggacccgctcgccaacgccatggaacaacaggcgcgggcgg

SEQ ID NO: 749567 - DNA, 75 bp, synthetic construct
  source 1..75: mol_type = other DNA
atgtgctggacacataccgggatgataatgtgcagacccggtggcgcggagaaaaccgcagtcgccggacggtgc

SEQ ID NO: 749568 - DNA, 75 bp, synthetic construct
  source 1..75: mol_type = other DNA
atgttacctcatctacagaagataatttcagtatctggatgaatattccactagaacggtggctaggggggatga

SEQ ID NO: 749569 - DNA, 75 bp, synthetic construct
  source 1..75: mol_type = other DNA
ctatcagtatgccgctcagcagctggcattgagtatcccacaggtggcatttcgtaaccgattgacagggattgc

SEQ ID NO: 749570 - DNA, 75 bp, synthetic construct
  source 1..75: mol_type = other DNA
cgacgaaaggggcggtggtcagtgcgggttttgttacccgcgtgggcggcagggcactggtgacgctgacccggg

SEQ ID NO: 749571 - DNA, 75 bp, synthetic construct
  source 1..75: mol_type = other DNA
tccttatctgaaaacctgtctgacccgggatatgctggcccgttacggggtgaaagtggaggattatccggggct

SEQ ID NO: 749572 - DNA, 75 bp, synthetic construct
  source 1..75: mol_type = other DNA
agatgactgcaatgtatggtttgccgttgaatatgacaacctttgttggattacagggagcagagcattatcagt

SEQ ID NO: 749573 - DNA, 75 bp, synthetic construct
  source 1..75: mol_type = other DNA
tggagatattacaggcccggcaccccgtgaggattcgtcttgtgaatattgatgcaccggaaaagaaacagcctt

SEQ ID NO: 749574 - DNA, 75 bp, synthetic construct
  source 1..75: mol_type = other DNA
agcgctcacagttcttaacaaaaaacccgaggtgcttggtggaaatgaaacgatgggggataaagtgatcagtgc

SEQ ID NO: 749575 - DNA, 75 bp, synthetic construct
  source 1..75: mol_type = other DNA
tcatcatcaccatgcagtcgattgacggctctatcgccctgattggcctgaaagtggcggcggcgctggtgggga

SEQ ID NO: 749576 - DNA, 75 bp, synthetic construct
  source 1..75: mol_type = other DNA
atgctgttgaagatagtactctgggacaggtgatgggcatgtatgggttgccatgggggctgacggtatttggcg

SEQ ID NO: 749577 - DNA, 75 bp, synthetic construct
  source 1..75: mol_type = other DNA
gttgatttgaccttatttgaagagggagggcaactgccgggcatttatcaaactgacataatcctgaatggttct

SEQ ID NO: 749578 - DNA, 75 bp, synthetic construct
  source 1..75: mol_type = other DNA
accgctacgggcgcattcttggacgggtatataccgaagacggcatggaagttaaccgctggctggtacagcatg

SEQ ID NO: 749579 - DNA, 75 bp, synthetic construct
  source 1..75: mol_type = other DNA
agtccacgcttttctgtttcgcgcctgacacatgtgctgaaagccaaagcagtgttgtgtcctggtgttgagatc

SEQ ID NO: 749580 - DNA, 75 bp, synthetic construct
  source 1..75: mol_type = other DNA
gttcgacgatctacaatctggccctcaaaaccttcggcccagaagctcaggctctgaagctgatggaagaagctg

SEQ ID NO: 749581 - DNA, 75 bp, synthetic construct
  source 1..75: mol_type = other DNA
ccgcctaaacgggatgggcctgatgattgattttcataagcagaaaaagctggaacgccttgccgaacgcctggg

SEQ ID NO: 749582 - DNA, 75 bp, synthetic construct
  source 1..75: mol_type = other DNA
tgattggattcctgccggatgtcttcgtttacccgattatcggccactggcaagacaccctgcccgctgcagaag

SEQ ID NO: 749583 - DNA, 75 bp, synthetic construct
  source 1..75: mol_type = other DNA
atgctttgtatccaggtcgcgtttgcgataacgacgattttaatgctgtggtcggtatcgataaaagccgcctca

SEQ ID NO: 749584 - DNA, 75 bp, synthetic construct
  source 1..75: mol_type = other DNA
gtgattgtctttacctttttgctgttccaaaaaattcgtactgctgatatcgcccccacaacggctaacagcaag

SEQ ID NO: 749585 - DNA, 75 bp, synthetic construct
  source 1..75: mol_type = other DNA
gtccttataggtataaagtaccgcaagatattgtagtgcccatggctttcaggattaataactatacctttatcg

SEQ ID NO: 749586 - DNA, 75 bp, synthetic construct
  source 1..75: mol_type = other DNA
ttcttctgacatttaacgcaacatcgttgttggctataattttctttgtacaaaagaaatacactctatattatt

SEQ ID NO: 749587 - DNA, 75 bp, synthetic construct
  source 1..75: mol_type = other DNA
cattgaagtcggtatggtgaactatctatggcccagcctgacgattctttttgccattctttttaacggacaaaa

SEQ ID NO: 749588 - DNA, 75 bp, synthetic construct
  source 1..75: mol_type = other DNA
aactgcgtctaatggtggctctggatgtcggtggcgcaatcaaaggccaacacttcgatatctatcaggggattg

SEQ ID NO: 749589 - DNA, 75 bp, synthetic construct
  source 1..75: mol_type = other DNA
ccgcgtctgtatggcaaccagagtaatgtttataacgcggtgcaagagtggctgcgcgcaggcggtgatacccgc

SEQ ID NO: 749590 - DNA, 75 bp, synthetic construct
  source 1..75: mol_type = other DNA
aataacggcaaatttaacggtcagtatgaactgcgtctgatggtggcgctggatgtcggtggcgcaatcaaaggc

SEQ ID NO: 749591 - DNA, 75 bp, synthetic construct
  source 1..75: mol_type = other DNA
cacctttatggctgcccaggcgctggaagaagcggcggtggaagcaggctatgaagtgaaaattgaaactcaggg

SEQ ID NO: 749592 - DNA, 75 bp, synthetic construct
  source 1..75: mol_type = other DNA
gtttgtgaaagatgaaattggctttagttacaacggctattaccgttctggttgggggaccgcctctcatggttc

SEQ ID NO: 749593 - DNA, 75 bp, synthetic construct
  source 1..75: mol_type = other DNA
tggaatatcaccgaccatgtactgcgttatctcattcttgattgttctccggttcccgcaacgatgcaggaggtg

SEQ ID NO: 749594 - DNA, 75 bp, synthetic construct
  source 1..75: mol_type = other DNA
gtgtcagcacattattacgggcttacggacgcctgacctgcggagttctggctgaaaaaatgaatatgctgccct

SEQ ID NO: 749595 - DNA, 75 bp, synthetic construct
  source 1..75: mol_type = other DNA
gtgttgattatggaaacggagctgtggcctaacctgattgcggcactacataagcgcaagatcccgctggttatc

SEQ ID NO: 749596 - DNA, 75 bp, synthetic construct
  source 1..75: mol_type = other DNA
gggttaaaaactggctgagtatttacgggcgtctgacctgcggagttctggctgaaaaaatgaatatgccgccat

SEQ ID NO: 749597 - DNA, 75 bp, synthetic construct
  source 1..75: mol_type = other DNA
gccagaggctgatttctgggtgggtaaacacggtgcgccgaaaattgaaatccagatgcttgactggaaaacgca

SEQ ID NO: 749598 - DNA, 75 bp, synthetic construct
  source 1..75: mol_type = other DNA
cggtaggcgatgaagtcattaccgataaagccgaagtgctgatgttttatgccgcgcgcgttcagttggtcgaga

SEQ ID NO: 749599 - DNA, 75 bp, synthetic construct
  source 1..75: mol_type = other DNA
ctggcacagtctatcacctgatgaaagaaacgatttcttagtgaaaaataatgcgacaccacaatggcgagagtt

SEQ ID NO: 749600 - DNA, 75 bp, synthetic construct
  source 1..75: mol_type = other DNA
atggatagtgacatctccgcgatcaaactatctgaactgacagaaaatgacgtaattgaacattgcaggctgaga

SEQ ID NO: 749601 - DNA, 75 bp, synthetic construct
  source 1..75: mol_type = other DNA
atgcgcagtaagtatatcgtcattgaagggctggaaggcgcaggcaaaaccaccgcacgcaacgtggtggttgag

SEQ ID NO: 749602 - DNA, 75 bp, synthetic construct
  source 1..75: mol_type = other DNA
cacgatctctccactcaagcctatcagggtggaggacgtggtattgaccaacatatgctggcaacactgcgtgat

SEQ ID NO: 749603 - DNA, 75 bp, synthetic construct
  source 1..75: mol_type = other DNA
atgcgcagtaagtatatcgtcattgaggggctggaaggcgcaggcaaaactaccgcgcgtaacgtggtggttgag

SEQ ID NO: 749604 - DNA, 75 bp, synthetic construct
  source 1..75: mol_type = other DNA
gaaaggctatttactcgccgggagtctgttattcgtcagctatgaaatctgtctggcgctttccttagggtatgc

SEQ ID NO: 749605 - DNA, 75 bp, synthetic construct
  source 1..75: mol_type = other DNA
cgcccggtagtgaaggctaccgggctatttctctctccctttttcagatctcatccatactgggtagtggcgaat

SEQ ID NO: 749606 - DNA, 75 bp, synthetic construct
  source 1..75: mol_type = other DNA
tatcactgacgacgaatactatgaattcgtggatgaatttatccaggctgtgaaacaacgctggccggacgtgct

SEQ ID NO: 749607 - DNA, 75 bp, synthetic construct
  source 1..75: mol_type = other DNA
gcctccggcgcatcgcgcattaccgacgagatgctgatgtcagccagcgaaaccctggcgcagtattcgccgctg

SEQ ID NO: 749608 - DNA, 75 bp, synthetic construct
  source 1..75: mol_type = other DNA
gccgaacctgctgcctttccagaccaaactggtgcagaagcgcgaaaacctcagtgactgggataccgacagcga

SEQ ID NO: 749609 - DNA, 75 bp, synthetic construct
  source 1..75: mol_type = other DNA
acgcgctggtcgccactggcagcccgtttaatccagtggtatggaaagataaaatctaccctatcgcccagtgta

SEQ ID NO: 749610 - DNA, 75 bp, synthetic construct
  source 1..75: mol_type = other DNA
actgagcgagaaaaagattgtcttcctcggcgcaggctctgcggggtgcggcattgccgaaatgatcatcgccca

SEQ ID NO: 749611 - DNA, 75 bp, synthetic construct
  source 1..75: mol_type = other DNA
caacaattgtattgcgtaagagtgtcgactcctggcaacaggcattggatatttgcggcaaaccgttactggacg

SEQ ID NO: 749612 - DNA, 75 bp, synthetic construct
  source 1..75: mol_type = other DNA
taatgacctttgctcggcgttcgttaaacacgcgaatctcgcgggaatggatgatggtgagctagtgagtcttaa

SEQ ID NO: 749613 - DNA, 75 bp, synthetic construct
  source 1..75: mol_type = other DNA
ctgcgcattaatcgtacgcatcattcccgcgacagctggcttgcattgctggatgaagcaggaatgaaaggtttc

SEQ ID NO: 749614 - DNA, 75 bp, synthetic construct
  source 1..75: mol_type = other DNA
aagtcggctgtcagggggagattggcgtggcctgttcaatggcggcggcagggttaactgaactactgggcggca

SEQ ID NO: 749615 - DNA, 75 bp, synthetic construct
  source 1..75: mol_type = other DNA
tcaggtatagccggtctgatacacctcggtattcgatatgcggatgttgaggtcatgaaaattgctggagatgcc

SEQ ID NO: 749616 - DNA, 75 bp, synthetic construct
  source 1..75: mol_type = other DNA
gaaaacgcgtaaaatttgatggtgcgacagcaacaggtgtttcctatttagttgatggtgataacacaattcatt

SEQ ID NO: 749617 - DNA, 75 bp, synthetic construct
  source 1..75: mol_type = other DNA
taatcgcagacgttccagactcccgccgccgcgacctcgataacatcctgaaaggtttactcgactcccttatcc

SEQ ID NO: 749618 - DNA, 75 bp, synthetic construct
  source 1..75: mol_type = other DNA
gtgaccgttaccggtagcctgaaatttgatatttctgtaacgccgcaactggctgctaaagccgtgacgctgcgc

SEQ ID NO: 749619 - DNA, 75 bp, synthetic construct
  source 1..75: mol_type = other DNA
ttttcatatacgttggtttgggagaaggctctgcattacctgttggtgtccctgttccgtggccttcagccactc

SEQ ID NO: 749620 - DNA, 75 bp, synthetic construct
  source 1..75: mol_type = other DNA
acgcggtgaatttattcgtggctgggatgacggacgtggagtggatgccgggcgacaattattatcttcacaagg

SEQ ID NO: 749621 - DNA, 75 bp, synthetic construct
  source 1..75: mol_type = other DNA
ggattattcaggcgggttattccgtcgagcaacagcgcgaagtgtttgagtttgtcgccagcagcgactacttct

SEQ ID NO: 749622 - DNA, 75 bp, synthetic construct
  source 1..75: mol_type = other DNA
ttcactctgctggtggtctacatgttgatcaactggctaccgctgcttttggtggagcaaggattccagccatcg

SEQ ID NO: 749623 - DNA, 75 bp, synthetic construct
  source 1..75: mol_type = other DNA
cctgttccgtggccttccgccactccgccaacaggctggctaaaatgcaatggtgcggctttttctgctgaagaa

SEQ ID NO: 749624 - DNA, 75 bp, synthetic construct
  source 1..75: mol_type = other DNA
atgaaaaacggagaacgatgtgagcaaatcacccgccataaactgaacaaaacagacaaacgacttctcgacacc

SEQ ID NO: 749625 - DNA, 75 bp, synthetic construct
  source 1..75: mol_type = other DNA
gcaattcgatgacattcgcgtaattcgtggtgtgaaagtatcaggtgggaggcttggaataaaaatcacagaact

SEQ ID NO: 749626 - DNA, 75 bp, synthetic construct
  source 1..75: mol_type = other DNA
ccgccaactcaagttagacattttcaccaaatcacgactacgaatcaaaataatcgcagacattccggactcacg

SEQ ID NO: 749627 - DNA, 75 bp, synthetic construct
  source 1..75: mol_type = other DNA
tatactgcgattgttaagaagtcgtcagccaataatgcccaagtcactgagggtgctttttctgcagtcgcaacc

SEQ ID NO: 749628 - DNA, 75 bp, synthetic construct
  source 1..75: mol_type = other DNA
agtctacccgaccctccgtcttcccgatttacgcggtgaatttattcgtggctgggatgacggacgtggtgtgga

SEQ ID NO: 749629 - DNA, 75 bp, synthetic construct
  source 1..75: mol_type = other DNA
agggggaggcaggcattgagaaacgtcgaaacagaacgaaccggagaaaatcaggatgaaaaaaaactgttggat

SEQ ID NO: 749630 - DNA, 75 bp, synthetic construct
  source 1..75: mol_type = other DNA
gaaatcacgctgatatcggtgtcgtgaagaatatgtttatcggcgtgggtcaggcgctgagcgtgtttgtacgca

SEQ ID NO: 749631 - DNA, 75 bp, synthetic construct
  source 1..75: mol_type = other DNA
atgaaagcctgtgggtacgccagtcgcgcccgtatgcgggagacacctacggcctgcatctgccgctgctggcgg

SEQ ID NO: 749632 - DNA, 75 bp, synthetic construct
  source 1..75: mol_type = other DNA
gtgaccgttaccggtagcctgaaattcgatatttctgtaacgccgcagttggctgctaaagccgtgacgctgcgc

SEQ ID NO: 749633 - DNA, 75 bp, synthetic construct
  source 1..75: mol_type = other DNA
gaggaaggcaacccggaccgaccttatattgcaggcgtaaaacacgactcggcacacactgaccatgtgaccatc

SEQ ID NO: 749634 - DNA, 75 bp, synthetic construct
  source 1..75: mol_type = other DNA
tcgcgcccgtatgcgggagacacctacggcctgcacctgccgctgctggcgggaacggaggtcagcatcgccttt

SEQ ID NO: 749635 - DNA, 75 bp, synthetic construct
  source 1..75: mol_type = other DNA
ccatctggtggatgccggaaaacagcagcgcggggaaggttttgaactgcgtaccgatctgtggggtgcagtacg

SEQ ID NO: 749636 - DNA, 75 bp, synthetic construct
  source 1..75: mol_type = other DNA
ggcgggtatcaaactgattgccaataaaggcgcagtatcggtacaggcgcagcacgatctgatggagttactggc

SEQ ID NO: 749637 - DNA, 75 bp, synthetic construct
  source 1..75: mol_type = other DNA
atgagcgcggcaaagagcatatcaaggtcagtaccgagtacggcggcaagagccagctcaacctcggtcatctgg

SEQ ID NO: 749638 - DNA, 75 bp, synthetic construct
  source 1..75: mol_type = other DNA
cacctacggcctgcatctgccgctgctggcgggaacggaagtcagcatcgcctttgaggaaggcaacccggaccg

SEQ ID NO: 749639 - DNA, 75 bp, synthetic construct
  source 1..75: mol_type = other DNA
tcccgtactcagaacgctatggctaccgcccggcgcttatcccctgccccgtgatggccggcacgctcccggcac

SEQ ID NO: 749640 - DNA, 75 bp, synthetic construct
  source 1..75: mol_type = other DNA
catatcaaggtcagtaccgagtacggcggcaagagccagctcaacctcggccatctggtggatgccgggaaacag

SEQ ID NO: 749641 - DNA, 75 bp, synthetic construct
  source 1..75: mol_type = other DNA
gcgccggagtcggtactgatgcaggatggcgcattcagcctgagcgccccgccggtacaggggatgccggtgcag

SEQ ID NO: 749642 - DNA, 75 bp, synthetic construct
  source 1..75: mol_type = other DNA
cacagaacgacctgatggaactgttggcacagaaatcgatagtgatcaccagtacggaagatgagatcaagatca

SEQ ID NO: 749643 - DNA, 75 bp, synthetic construct
  source 1..75: mol_type = other DNA
cggtgaaaaacctccagataaatgcgggaaacaacgccgatatcggcgtagtgaagaatatgtttatcggcgtgg

SEQ ID NO: 749644 - DNA, 75 bp, synthetic construct
  source 1..75: mol_type = other DNA
cgccatctaccagaagcagacggtgccgcaaatcgtcgaaaaaatcctgcgcgagcgtcatcacatgcgcggtca

SEQ ID NO: 749645 - DNA, 75 bp, synthetic construct
  source 1..75: mol_type = other DNA
cgccatctaccagaaccagacggtgccgcaaatcgtcgaaaaaatcctgcgcgagcgtcatcagatgcgcggtca

SEQ ID NO: 749646 - DNA, 75 bp, synthetic construct
  source 1..75: mol_type = other DNA
tccagtgattgagagcggggaatttaatgctaagttcctttttactgatgatgatggtctaccttatgccaacac

SEQ ID NO: 749647 - DNA, 75 bp, synthetic construct
  source 1..75: mol_type = other DNA
tatcagcgccgatacgcaggacaaggcgcagggtcaggtgcgcgaaatggctccggcgatggcaatactggatgg

SEQ ID NO: 749648 - DNA, 75 bp, synthetic construct
  source 1..75: mol_type = other DNA
accagagcggctatgagcgcgggctgacgctgccgcttcgccatccttcagggctgtttgatggtgaaacggaag

SEQ ID NO: 749649 - DNA, 75 bp, synthetic construct
  source 1..75: mol_type = other DNA
gatgcacgctccgaaaggtgtggcggtcgccagcggcgagcacctgcaactggccgctgtgaaaaacctccagat

SEQ ID NO: 749650 - DNA, 75 bp, synthetic construct
  source 1..75: mol_type = other DNA
gatgcacgcaccgaaaggtgtggcggtcgccagcggcgagcacctgcaactggccgcggtgaaaaacctccagat

SEQ ID NO: 749651 - DNA, 75 bp, synthetic construct
  source 1..75: mol_type = other DNA
atttaatgctaagttcctttttactgatgatgatggtctaccttatgccaacacaaaatatattgcatgtttttc

SEQ ID NO: 749652 - DNA, 75 bp, synthetic construct
  source 1..75: mol_type = other DNA
cgccatctaccagaatcagacggtgccgcaaatcgtcgaaaaaatcctgcgcgagcggcatcaaatgcgcggtca

SEQ ID NO: 749653 - DNA, 75 bp, synthetic construct
  source 1..75: mol_type = other DNA
cgccatctaccagaaacagacggtgccgcaaatcgtcgaaaaaatcctgcgcgagcggcatcatatgcgcggtca

SEQ ID NO: 749654 - DNA, 75 bp, synthetic construct
  source 1..75: mol_type = other DNA
gatgcacgcgccgaaaggtgtggcggtcgccagcggcgagcacctgcaactggccgcagtgaaaaacctccagat

SEQ ID NO: 749655 - DNA, 75 bp, synthetic construct
  source 1..75: mol_type = other DNA
ttgaccgtgacacgtggaaaccgggctatgagagcctgtgggtacgccagtcgcgcccgtatgcgggagacacct

SEQ ID NO: 749656 - DNA, 75 bp, synthetic construct
  source 1..75: mol_type = other DNA
caacggctggggcgcatcgatgtgctggtgaataatgcgggcacaatgaccaaagcgccgtttcttgatatggct

SEQ ID NO: 749657 - DNA, 75 bp, synthetic construct
  source 1..75: mol_type = other DNA
tgaacatacgccgctgccggatgccagcgcctacacagccgctaaacatgcgctcggcgggttaaccaaagcaat

SEQ ID NO: 749658 - DNA, 75 bp, synthetic construct
  source 1..75: mol_type = other DNA
cttgatatggctttcgatgagtggcgcaagatttttaccgttgatgtcgatggtgcatttttatgctcgcaaatt

SEQ ID NO: 749659 - DNA, 75 bp, synthetic construct
  source 1..75: mol_type = other DNA
aaaatggagtgataagaattagcgctgacgaaagagctattttcgatatactcgtcgatggtagacagaatgtag

SEQ ID NO: 749660 - DNA, 75 bp, synthetic construct
  source 1..75: mol_type = other DNA
ggaatttcttattctgctctgaccagttatgagtatggtcgtaaccttcctggccttgagatcactatcaagctt

SEQ ID NO: 749661 - DNA, 75 bp, synthetic construct
  source 1..75: mol_type = other DNA
gcgcgcccttccgctacgacattgaatttaccagtaccgataaagccatcacgccggagtcggtactgatgcagg

SEQ ID NO: 749662 - DNA, 75 bp, synthetic construct
  source 1..75: mol_type = other DNA
gcggacggattacccgtcagcatttcgcacatcagtaagatggaagacaccgtttctgttttattaccttatatg

SEQ ID NO: 749663 - DNA, 75 bp, synthetic construct
  source 1..75: mol_type = other DNA
gtgatcgaaatcttacatgaatactggaaaccgctgctgtggaccgacggttatcgctttactggtgtggcgatc

SEQ ID NO: 749664 - DNA, 75 bp, synthetic construct
  source 1..75: mol_type = other DNA
aagccgccagagcctatggcttctcgacctttaaaatgtatcgctgcattattttgccttctgcgctgcgtattg

SEQ ID NO: 749665 - DNA, 75 bp, synthetic construct
  source 1..75: mol_type = other DNA
atggtgaaacaagggcagggcggtcgcatcatcaacattacgtcggtgcatgaacatacgccgctgccggatgcc

SEQ ID NO: 749666 - DNA, 75 bp, synthetic construct
  source 1..75: mol_type = other DNA
cacaccacaagctcaaaattcgcggcctgcaaagtccggtggatgtgctgaccttcgaaggtcgcgaacaactga

SEQ ID NO: 749667 - DNA, 75 bp, synthetic construct
  source 1..75: mol_type = other DNA
gacgtgtcaggatctctggccggtggcctcacatctggatgatattgaacatcttcagacgcagatttatcgtac

SEQ ID NO: 749668 - DNA, 75 bp, synthetic construct
  source 1..75: mol_type = other DNA
gactttccgcaaccggccgttcgatgcggcaccgatggccttcgcgcaggggtagtgaatccgccaggattgact

SEQ ID NO: 749669 - DNA, 75 bp, synthetic construct
  source 1..75: mol_type = other DNA
tatggattgccaccagtactcatgatggcgaagagagcgtagtgattgccgcccatcaggcactgttgcaacagt

SEQ ID NO: 749670 - DNA, 75 bp, synthetic construct
  source 1..75: mol_type = other DNA
cagaactacaagcgtaacgtgctgcgcaccccggcgaacaacaaaatccgcctcgacgatgagcgcggcaaagag

SEQ ID NO: 749671 - DNA, 75 bp, synthetic construct
  source 1..75: mol_type = other DNA
ttccggcttgacgctgattctacgactgtttttctgttccggaatccgtctcatcttcactctgtgctgcgcatt

SEQ ID NO: 749672 - DNA, 75 bp, synthetic construct
  source 1..75: mol_type = other DNA
cagaacgacaagcgcaacgtgctgcgtaccccggccaacaataaaatccgcctcgacgatgagcgcggcaaagag

SEQ ID NO: 749673 - DNA, 75 bp, synthetic construct
  source 1..75: mol_type = other DNA
atattgcaggcgtaaaacacgactcggcacacactgaccatgtgaccatccagaacgacaagcgcaacgtgctgc

SEQ ID NO: 749674 - DNA, 75 bp, synthetic construct
  source 1..75: mol_type = other DNA
gccggggctggagataaaggttcagggcgacgacgcgccagcggggttccgcaagggcgtgctgattaccggcgt

SEQ ID NO: 749675 - DNA, 75 bp, synthetic construct
  source 1..75: mol_type = other DNA
cttcggtacatgatggtgtgccaaaactggttgctgatttcctggctgataaattcgtcgatcagagcactgatg

SEQ ID NO: 749676 - DNA, 75 bp, synthetic construct
  source 1..75: mol_type = other DNA
taaaaaataagtcacctgacttttgttatataaatgaccttatttcagttgttcataagcttgtcattaaagatg

SEQ ID NO: 749677 - DNA, 75 bp, synthetic construct
  source 1..75: mol_type = other DNA
ggtttgggagaagcggcaaaacggaatgtgggtaacggacaaaaccaaattccggatatggcggcgtttgcctgt

SEQ ID NO: 749678 - DNA, 75 bp, synthetic construct
  source 1..75: mol_type = other DNA
tggatacgctgaaagcgtcgctgatggaagaaaatcagatggaactggcattacgcaccagcgaggccttattac

SEQ ID NO: 749679 - DNA, 75 bp, synthetic construct
  source 1..75: mol_type = other DNA
cgcggtgtttatcgtctttccgatgcattatggttggatcaggtgttaaaaaatcggcagggcagtgcggtatca

SEQ ID NO: 749680 - DNA, 75 bp, synthetic construct
  source 1..75: mol_type = other DNA
tgaacagtgtccggaagacccgatcagcgaaatgatccgtgcgcaaataaataacatcgcgcataaacatattgt

SEQ ID NO: 749681 - DNA, 75 bp, synthetic construct
  source 1..75: mol_type = other DNA
atccgtgaggcaggactggaagagagcggcgtggtggatgcctggcagaaagcctaccgttactacgtccccctg

SEQ ID NO: 749682 - DNA, 75 bp, synthetic construct
  source 1..75: mol_type = other DNA
aatggatgtgtcgccgtgggagggcgtggctgacgcaacaatcgacggtgctgctcttggtgcagcgatgggggc

SEQ ID NO: 749683 - DNA, 75 bp, synthetic construct
  source 1..75: mol_type = other DNA
gtgctgccggtaatgttgttggtggtgtgcttggggcattcagcccgatcggcagtgagacgtcggaaacgttgt

SEQ ID NO: 749684 - DNA, 75 bp, synthetic construct
  source 1..75: mol_type = other DNA
agcatgttgtcacgccagcggaatatcagacgattattaagaccgtgctgaaaacccgtgacagtgataacgcca

SEQ ID NO: 749685 - DNA, 75 bp, synthetic construct
  source 1..75: mol_type = other DNA
gccgtaatccgtacgctggggaaagttaaccgcttcctggcaacggtgaacacgtcgtataacccggaatttctg

SEQ ID NO: 749686 - DNA, 75 bp, synthetic construct
  source 1..75: mol_type = other DNA
ggagatttcgcgtgaggagcagcgcaacgccaccaaccgcgaccgtaccggaccagaacgccgcaaggggaatgt

SEQ ID NO: 749687 - DNA, 75 bp, synthetic construct
  source 1..75: mol_type = other DNA
ccttgccagaatgatgaagtctctgcgctcaacggatttaacggtaaacatcgggcgtacgccgccggtattgcg

SEQ ID NO: 749688 - DNA, 75 bp, synthetic construct
  source 1..75: mol_type = other DNA
caggcgggcctgatcacccattccacagccagtgcacaggggcagagtgcaatggcggcagcagatgctgttctt

SEQ ID NO: 749689 - DNA, 75 bp, synthetic construct
  source 1..75: mol_type = other DNA
cccgcaggttgaagcggttgcccgtggcgtgatgagtggcattaaggacagtgacctgaaggtccgcgtggtgaa

SEQ ID NO: 749690 - DNA, 75 bp, synthetic construct
  source 1..75: mol_type = other DNA
cccgttttgttcgccagatgcaggataaattccaggtgctgaaggcggtgcaggagaatatccgtaaaactggcg

SEQ ID NO: 749691 - DNA, 75 bp, synthetic construct
  source 1..75: mol_type = other DNA
tcaggtggcagccagtaccgtcccggcgcggtggatatcacaccggaatcgctgaaatactgggtggactatatc

SEQ ID NO: 749692 - DNA, 75 bp, synthetic construct
  source 1..75: mol_type = other DNA
gcaaaacaccgttatgcacagcttgccgaaacactgggtaaaacgctggaagacagggattatgccacgcagccg

SEQ ID NO: 749693 - DNA, 75 bp, synthetic construct
  source 1..75: mol_type = other DNA
cacgcacagcttactgatcgccagaaaatggatctggcaaaagagcgtgttgccgatgaggtgcgcgcgcagctg

SEQ ID NO: 749694 - DNA, 75 bp, synthetic construct
  source 1..75: mol_type = other DNA
aaacgttctgatgtgaacggcgtatcgcgcggcgtcgagtacaacatggcgcagaacgctgtatatcgcgtgtgt

SEQ ID NO: 749695 - DNA, 75 bp, synthetic construct
  source 1..75: mol_type = other DNA
attgagcagaatgaaccgttcgtttacgacaaacgcgttttgtggaagcgagtcgggcgcatcaggaaaaatgtc

SEQ ID NO: 749696 - DNA, 75 bp, synthetic construct
  source 1..75: mol_type = other DNA
gggctgctctaaacctctcccccaactatcctgaagaaaaccactttctggaggataatctaacggatgaaatcg

SEQ ID NO: 749697 - DNA, 75 bp, synthetic construct
  source 1..75: mol_type = other DNA
ccatcgctgatggtgcagaaaggtattgccgggacttactgcaaaacgccgtttgctgattcgtatgcgttcatc

SEQ ID NO: 749698 - DNA, 75 bp, synthetic construct
  source 1..75: mol_type = other DNA
acaatcaagcagcttaccgaagctatgaccggcgtagttgctatcaaacctaaatccccaggggcatcaaaaccg

SEQ ID NO: 749699 - DNA, 75 bp, synthetic construct
  source 1..75: mol_type = other DNA
atggtcaactggtcgagtatcgctatgatggcacagttaaaacagtctcaaactggccttcagatagcggattca

SEQ ID NO: 749700 - DNA, 75 bp, synthetic construct
  source 1..75: mol_type = other DNA
gaccagaacgccgtaaaggggatgtttcaccggagcagttcagtgatgcgtttggtttccgtggtgtgcagtttg

SEQ ID NO: 749701 - DNA, 75 bp, synthetic construct
  source 1..75: mol_type = other DNA
tggaagttaaccgtattgcttctgtttacggaacaaaaggcgggatgagtaaagtgaatagtctggataaagccg

SEQ ID NO: 749702 - DNA, 75 bp, synthetic construct
  source 1..75: mol_type = other DNA
aaaacgctggaagacagggattatgtcacgcaaccgctgagcaaactgttcccgaaaccggactacgcaaaactg

SEQ ID NO: 749703 - DNA, 75 bp, synthetic construct
  source 1..75: mol_type = other DNA
gcgactgttccgtgacgatttgcaggacggcagtcttgaacaattgatgttgttgccgttacccttgcctgccgt

SEQ ID NO: 749704 - DNA, 75 bp, synthetic construct
  source 1..75: mol_type = other DNA
tggcaagtgatggcgctgacgctgctgctgggaacccctacgcttggctttctcggtgcaccgggcgtggcgctg

SEQ ID NO: 749705 - DNA, 75 bp, synthetic construct
  source 1..75: mol_type = other DNA
acagtgggacttaagcgcggtggtgtgctgctcagcatactggtattaccgctgactatcccattactcatcttt

SEQ ID NO: 749706 - DNA, 75 bp, synthetic construct
  source 1..75: mol_type = other DNA
tacctatgatgcaaagcagtttgcttcagaagtgcgtcgcattgccggattacaatcggttccacgaggtggaga

SEQ ID NO: 749707 - DNA, 75 bp, synthetic construct
  source 1..75: mol_type = other DNA
ttgtgtgaaagttttgactggattgccattagtagcatgaacaatagtaataatctggattatttcactctctat

SEQ ID NO: 749708 - DNA, 75 bp, synthetic construct
  source 1..75: mol_type = other DNA
taccaggctgctccaccccgcgtccgtggatgcgcactatactccgctcgcgttttcatgcaaccttttttttaa

SEQ ID NO: 749709 - DNA, 75 bp, synthetic construct
  source 1..75: mol_type = other DNA
tttaagcaacagaacaaaactcagcagggtgtgacactaaatgaatcggcttataaaacgacactctggcatgca

SEQ ID NO: 749710 - DNA, 75 bp, synthetic construct
  source 1..75: mol_type = other DNA
taccataaatttaatcaatgcacttgtttggttggtgatcaatttgcttaaccgattaagagaaaagtttgtaag

SEQ ID NO: 749711 - DNA, 75 bp, synthetic construct
  source 1..75: mol_type = other DNA
tacaaaatcaaacttcgcgcatcgggatttcgtctggtctatcaggtgattgatgacatgctaattattgcggtt

SEQ ID NO: 749712 - DNA, 75 bp, synthetic construct
  source 1..75: mol_type = other DNA
ttcgcaaaaaaactgaaaaaatgcagtgaaaatcctcatatagcttctgcaaaactacgtggattaaaggactgc

SEQ ID NO: 749713 - DNA, 75 bp, synthetic construct
  source 1..75: mol_type = other DNA
tacatgctgaccagtcgttagaagtgatagatgatggtcgcgggatgccggtggatattcaccctgaagaaggcg

SEQ ID NO: 749714 - DNA, 75 bp, synthetic construct
  source 1..75: mol_type = other DNA
tgttcgcaatgagatgattgccattcgcggtgatatgcacggcttggagcgtcgaattattgataagattgatga

SEQ ID NO: 749715 - DNA, 75 bp, synthetic construct
  source 1..75: mol_type = other DNA
aacatcaagccaaccacttctcggatgttcgcaatgagatgattgccattcgcggtgatatgcacggaatggagc

SEQ ID NO: 749716 - DNA, 75 bp, synthetic construct
  source 1..75: mol_type = other DNA
ctcacggcgaagatgtttatagttatgaaagtggcgctcatagtgattttgacagtattcgcactgtaataagac

SEQ ID NO: 749717 - DNA, 75 bp, synthetic construct
  source 1..75: mol_type = other DNA
gccttttgtctatttctattattacagcattgtttccgttgaacgcgatggcaacaaaattaaccatagagcagc

SEQ ID NO: 749718 - DNA, 75 bp, synthetic construct
  source 1..75: mol_type = other DNA
ttaaccgtaccgagctgttccttgtggaaggtgactccgcaggcggatctgccaagcaggcgcgcgatcgcgaat

SEQ ID NO: 749719 - DNA, 75 bp, synthetic construct
  source 1..75: mol_type = other DNA
atgatgcactgaaagaatggctgaaactggataaggccattcaacagcaatttgctaaaaagctaaagaagtgca

SEQ ID NO: 749720 - DNA, 75 bp, synthetic construct
  source 1..75: mol_type = other DNA
gcttatacagcagacagtagggacactgaaccaacaactgagtgagcgcaagcaggaactggcctcccagcagga

SEQ ID NO: 749721 - DNA, 75 bp, synthetic construct
  source 1..75: mol_type = other DNA
tacagcatgcccaaaacgagatccagcttttacagcagacagtagggacactgaaccagcaactgagtgagcgca

SEQ ID NO: 749722 - DNA, 75 bp, synthetic construct
  source 1..75: mol_type = other DNA
cgtcaacctgatcccaacgatgcagggtggtacgcacgttaatggcctgcgtcagggcctgctggatgcgatgcg

SEQ ID NO: 749723 - DNA, 75 bp, synthetic construct
  source 1..75: mol_type = other DNA
ggtgtcgcaactgtgcaggatatttttgccggtggcagcaggggggctgatgaggtcatcgataccctgcctgat

SEQ ID NO: 749724 - DNA, 75 bp, synthetic construct
  source 1..75: mol_type = other DNA
cgaacatctcaggctgtaggcgttaatggtcaactggtcgagtatcgctatgatggcacggttaaaaccgtctca

SEQ ID NO: 749725 - DNA, 75 bp, synthetic construct
  source 1..75: mol_type = other DNA
gaacacctgctgtttactccactcttcaaagcggataacgccagagttttcgaccttgaagttgaatcgtcaact

SEQ ID NO: 749726 - DNA, 75 bp, synthetic construct
  source 1..75: mol_type = other DNA
tgattggttgcggtgaaccgattccctttccacagggtgaaaaggtactgagcggtgcgactgttgcgctgattg

SEQ ID NO: 749727 - DNA, 75 bp, synthetic construct
  source 1..75: mol_type = other DNA
tgttttaaaataaaactaagagcatcagggtttcggcttatttataaggtcattgatgaagaaattgttatatgg

SEQ ID NO: 749728 - DNA, 75 bp, synthetic construct
  source 1..75: mol_type = other DNA
gtgtcgatgaaggcgtgatggaagacgctattctcgcgcctcaacagggcgttacgcgcgatgctaaaggcaatg

SEQ ID NO: 749729 - DNA, 75 bp, synthetic construct
  source 1..75: mol_type = other DNA
ctatgttctgtcggtgaaaatgcaggatccgcagtttgccgggcagaccaaagagcgtctctcttcgcgtcaatg

SEQ ID NO: 749730 - DNA, 75 bp, synthetic construct
  source 1..75: mol_type = other DNA
ccaccagcccattgagttatttcctggcgtttattggtgcgtttatctgggcagcctactgcacagtaacgaata

SEQ ID NO: 749731 - DNA, 75 bp, synthetic construct
  source 1..75: mol_type = other DNA
ggcacgctgatcctcatcgcgttctttaagccatggcgactgcgctttgccaaagagcaacgattaccgctgttg

SEQ ID NO: 749732 - DNA, 75 bp, synthetic construct
  source 1..75: mol_type = other DNA
ccaatagaaaatttcgtcaaaatagatatatgacagtagttcaatactgtatggatattgcacagttctttgtgg

SEQ ID NO: 749733 - DNA, 75 bp, synthetic construct
  source 1..75: mol_type = other DNA
gccgtacatctccgtgctgactgacccaaccatgggcggtgtttctgcgagtttcgcgatgctgggcgatctcaa

SEQ ID NO: 749734 - DNA, 75 bp, synthetic construct
  source 1..75: mol_type = other DNA
tgggttccgtggttggtgcgcgtttcgtgcgtgctgtcgaacaggcgctggaagataactgcccgctgatctgct

SEQ ID NO: 749735 - DNA, 75 bp, synthetic construct
  source 1..75: mol_type = other DNA
gccgagtaaaaacgtcagcaaagatgttttccatccggtgttcgacgttgatcaacagggtcgcccggtgatgcg

SEQ ID NO: 749736 - DNA, 75 bp, synthetic construct
  source 1..75: mol_type = other DNA
ccggatctgcgccgtgaactgatgcgtcagcgtggctacttcgcctacgccacaaaccactaccaaacgcatcag

SEQ ID NO: 749737 - DNA, 75 bp, synthetic construct
  source 1..75: mol_type = other DNA
atcagcagggtcgcccggtgatgcgctatatcgaccagttcgtccagccgaaagacttcgaagaaggcgtgtggt

SEQ ID NO: 749738 - DNA, 75 bp, synthetic construct
  source 1..75: mol_type = other DNA
aacgttcaccgaaacacaaggagagtttaatgactattgcggaaagattgcggcaggagggacatcgtcaagggg

SEQ ID NO: 749739 - DNA, 75 bp, synthetic construct
  source 1..75: mol_type = other DNA
aacgattttatcgacggcgttgccgaacattcaccgaaacacaaggagagcttaatgactattgcggaaagattg

SEQ ID NO: 749740 - DNA, 75 bp, synthetic construct
  source 1..75: mol_type = other DNA
ccatcactgatggtgcaaaaaggcatcgccgggacttactgcaaaacgccgtttgctgattcctatgcgttcatc

SEQ ID NO: 749741 - DNA, 75 bp, synthetic construct
  source 1..75: mol_type = other DNA
agaccgtctggcatctgcgcagaaagaaaccggcgaaaaagatgcgctggtggtgatgaaaggcactctgtatgg

SEQ ID NO: 749742 - DNA, 75 bp, synthetic construct
  source 1..75: mol_type = other DNA
ttgattgccggggataaaataacgagaggggttgagcgttatttatctgttgtttttgattcgatcagctatcag

SEQ ID NO: 749743 - DNA, 75 bp, synthetic construct
  source 1..75: mol_type = other DNA
ctggatattgcccaaacgatgctgaaagcgggtatcccccacgaagacataatcttatttaccagcctgacgatg

SEQ ID NO: 749744 - DNA, 75 bp, synthetic construct
  source 1..75: mol_type = other DNA
gcgaatcagctgcaaccgttgctgttgaagacgctgctaaaccgtgctgaaggtgcgctgttaattaatgcggta

SEQ ID NO: 749745 - DNA, 75 bp, synthetic construct
  source 1..75: mol_type = other DNA
tgccattgtcgatggcacccaaacccgggtcagtggcgcacacctgatcaaaacgttggtctggtgcgataacga

SEQ ID NO: 749746 - DNA, 75 bp, synthetic construct
  source 1..75: mol_type = other DNA
tttgatgatgagtcgcatttttttggggtgattacgtacatcatcaatgatgcgcgttccggtgagtttgatgat

SEQ ID NO: 749747 - DNA, 75 bp, synthetic construct
  source 1..75: mol_type = other DNA
ggatggagcgaagaggtcgatagtatttgctggggaatcatcatgcaatcgtcaacgaaggttggcgaacgacca

SEQ ID NO: 749748 - DNA, 75 bp, synthetic construct
  source 1..75: mol_type = other DNA
tcggtgttaccggaagagaatagcctgcagattaaagcctttttgcaacgtaccgctgatgccgaactttgcgaa

SEQ ID NO: 749749 - DNA, 75 bp, synthetic construct
  source 1..75: mol_type = other DNA
actgtgcattacctgattatggttggtttgtatcaactgctttatacccgcattccacctcatgctgcgctggct

SEQ ID NO: 749750 - DNA, 75 bp, synthetic construct
  source 1..75: mol_type = other DNA
gcgctggcagtggagaatgagctggctcgtaaggcagttcaggcattctgcgatgttgttggcgacaacactgag

SEQ ID NO: 749751 - DNA, 75 bp, synthetic construct
  source 1..75: mol_type = other DNA
cttcgtaaactggatcaaaggaatgaagttcagagggttaaactctctattgacgttccatttctagaggggctt

SEQ ID NO: 749752 - DNA, 75 bp, synthetic construct
  source 1..75: mol_type = other DNA
ggtgggtgcagggagcaaaaaaccgtacggttctctttcattataaaaaccttattactgaccttaaccaagcgc

SEQ ID NO: 749753 - DNA, 75 bp, synthetic construct
  source 1..75: mol_type = other DNA
gttgatcaatgcggtgggtatcgatgatgtggcgcaggcagatgagatggtgaagctggcaacggcggtagcgca

SEQ ID NO: 749754 - DNA, 75 bp, synthetic construct
  source 1..75: mol_type = other DNA
gactcaaagggtagcgtactaaaaaaattggagaattcacttgccactcttgattctagtcaaacgactgccgtc

SEQ ID NO: 749755 - DNA, 75 bp, synthetic construct
  source 1..75: mol_type = other DNA
cggtacgtgtgccgaccatcaacgtgacggcaatcgatttaagcgtaacggtgaagaaaccggtaaaagccaatg

SEQ ID NO: 749756 - DNA, 75 bp, synthetic construct
  source 1..75: mol_type = other DNA
ggtgggtgcagggagcaaaaaatcgtacagttctctttcattataaaaaccttattactgatcttaaccaagcgc

SEQ ID NO: 749757 - DNA, 75 bp, synthetic construct
  source 1..75: mol_type = other DNA
tgatggtacggttaaaaccgtctcaaactggcctacagacagtggattcactcagtatgagttaggttcagttcg

SEQ ID NO: 749758 - DNA, 75 bp, synthetic construct
  source 1..75: mol_type = other DNA
agccggacggcatcatcggtatcggaacgtggcgagacttcatcgtctgctttggttcatcgacgattgaatatt

SEQ ID NO: 749759 - DNA, 75 bp, synthetic construct
  source 1..75: mol_type = other DNA
ccgtctatatcatcgactcaggacgcgctaatcagatagcaacagcgagcatagagaagattatccgctcgtatt

SEQ ID NO: 749760 - DNA, 75 bp, synthetic construct
  source 1..75: mol_type = other DNA
ctgtgtatatcatcggctccgggcaggtgtcaccaatcgccagcgcgagcattgagaaaattctccgctcctaca

SEQ ID NO: 749761 - DNA, 75 bp, synthetic construct
  source 1..75: mol_type = other DNA
agtagggcgcatcaggaaaaacattggcttcaaattgcgcgttatcacgaagtcacctgtcactctgtctggctg

SEQ ID NO: 749762 - DNA, 75 bp, synthetic construct
  source 1..75: mol_type = other DNA
atggtcaactggtcgagtatcgctatgatggtacggttaaaaccgtctcaaactggcctgcagatagcggattca

SEQ ID NO: 749763 - DNA, 75 bp, synthetic construct
  source 1..75: mol_type = other DNA
gaacacctgctgtttactccgttgttcaaagcagataacgccagagttttcgaccttgaagttgaatcttcaact

SEQ ID NO: 749764 - DNA, 75 bp, synthetic construct
  source 1..75: mol_type = other DNA
catgagttgctgattatccaccttccgcgtcacgtcctcgtgtacgacgcatcttcaagcgccaatggtccgcaa

SEQ ID NO: 749765 - DNA, 75 bp, synthetic construct
  source 1..75: mol_type = other DNA
cagcagccagtacgacaagcaacaggaacatctgctgtttactcctctgttcaaagcagataacgccagagtttt

SEQ ID NO: 749766 - DNA, 75 bp, synthetic construct
  source 1..75: mol_type = other DNA
tctccctgactggtgcaaccaccgttggtgctgctttgtatgtcgcacagccatcactgatggtgcaaaaaggca

SEQ ID NO: 749767 - DNA, 75 bp, synthetic construct
  source 1..75: mol_type = other DNA
gaacacttgctgtttactccactgttcaaagcggataatgccagggtgtttgaccttgaggttgaatcgtcaact

SEQ ID NO: 749768 - DNA, 75 bp, synthetic construct
  source 1..75: mol_type = other DNA
gtttgctgattcgtatgcgttcatcagcaatccggcaacaggtgcgccgtctgtatacatcatcggctccggtca

SEQ ID NO: 749769 - DNA, 75 bp, synthetic construct
  source 1..75: mol_type = other DNA
agcctgacggcatcatcggcataggaacatggcgagacttcatcgtctgctttggttcatcgacgattgaatatt

SEQ ID NO: 749770 - DNA, 75 bp, synthetic construct
  source 1..75: mol_type = other DNA
tcgccgggacttactgcaaaacgccattcgctgattcgtatgcgttcatcagcaatccggcaacaggtgcgccgt

SEQ ID NO: 749771 - DNA, 75 bp, synthetic construct
  source 1..75: mol_type = other DNA
tgagcttgatattgagcaaaggcaaattgagatttctgtttcaattattgatgttgatgcaaatgatcttcagca

SEQ ID NO: 749772 - DNA, 75 bp, synthetic construct
  source 1..75: mol_type = other DNA
ctctggtgaaataaaaaatgaaaaaccaatgaaagtactggaaaaactgtccaggctctatcatctcacatggta

SEQ ID NO: 749773 - DNA, 75 bp, synthetic construct
  source 1..75: mol_type = other DNA
tataaaacaaatgaaatatcaagaagtataattacaccaacatatctggatattgactcactgctaaaatatctg

SEQ ID NO: 749774 - DNA, 75 bp, synthetic construct
  source 1..75: mol_type = other DNA
acgtgcggcgataagcttgaatcgatgacagggaaattgcagttcgatatcagcagccagtacgacaagcaacag

SEQ ID NO: 749775 - DNA, 75 bp, synthetic construct
  source 1..75: mol_type = other DNA
ctgctgatgaactggctgatggcgtgatggaatcgctgcgatttgatgcgcatgaactgctgattatccatctta

SEQ ID NO: 749776 - DNA, 75 bp, synthetic construct
  source 1..75: mol_type = other DNA
catgagttgctgattatccaccttccgcgtcatgtcctcgtgtacgacgcatcttcaagcgccaatggcccgcaa

SEQ ID NO: 749777 - DNA, 75 bp, synthetic construct
  source 1..75: mol_type = other DNA
atcttcagcctgccagcattaaacaggggagcgaaattccatatcaggtttccagcggggaaagtggcgcgacgt

SEQ ID NO: 749778 - DNA, 75 bp, synthetic construct
  source 1..75: mol_type = other DNA
agtgggtagcgcaaatggatctgccggtcgggcaggttgagctgtcggcgcatattgtcaccattaatgaaaaaa

SEQ ID NO: 749779 - DNA, 75 bp, synthetic construct
  source 1..75: mol_type = other DNA
agccggacggcatcatcggcataggtacatggcgagacttcatcgtctgctttggttcatcgacgattgaatatt

SEQ ID NO: 749780 - DNA, 75 bp, synthetic construct
  source 1..75: mol_type = other DNA
cggcgtttctgaagaggagttgaatgaaattgtcggtttgggcgtggttgaaccgcgcgagattcaggcgacgtc

SEQ ID NO: 749781 - DNA, 75 bp, synthetic construct
  source 1..75: mol_type = other DNA
ggcgcgggcgcaggcaaatctgccgctggaaaatcgcaatattactctgcaatacgccgacgccggagagctggc

SEQ ID NO: 749782 - DNA, 75 bp, synthetic construct
  source 1..75: mol_type = other DNA
gtgttgcaggcgctggctgaacaggagaagttgaacctggtggtgtcgccagacgtcagcggtacggtgtcgtta

SEQ ID NO: 749783 - DNA, 75 bp, synthetic construct
  source 1..75: mol_type = other DNA
tcacctaaaaaatttggactttatttagataagttatataaaagaagcattgaaaataattgtccgtttcttttc

SEQ ID NO: 749784 - DNA, 75 bp, synthetic construct
  source 1..75: mol_type = other DNA
accagttacatagcaaccagctatgcctctccctatggcgtttttactggttcatattcaggatcgaacaagtat

SEQ ID NO: 749785 - DNA, 75 bp, synthetic construct
  source 1..75: mol_type = other DNA
gcgatttacgcgtaaacaactaaataaaaatatcttaaatatgcaagtgattttggtattctcgatacaagaata

SEQ ID NO: 749786 - DNA, 75 bp, synthetic construct
  source 1..75: mol_type = other DNA
ctatatgattattcccgaaatcgccattaatttgggctgcgtattaccgtatcacggctcttattttgctgcggc

SEQ ID NO: 749787 - DNA, 75 bp, synthetic construct
  source 1..75: mol_type = other DNA
cctcaacgcttcaaaaaattcaaacccgataatcaaaaaaaatgaatcaggtattaattcaacatacctaaatac

SEQ ID NO: 749788 - DNA, 75 bp, synthetic construct
  source 1..75: mol_type = other DNA
gagtggatctcatgttggagagagttatcgaagaatacgagtttcaaagatatacattttgttagtagttataca

SEQ ID NO: 749789 - DNA, 75 bp, synthetic construct
  source 1..75: mol_type = other DNA
atgggcggaacggcttcgcaaagggggcaaccagtgactggacatgcagcaatcctcgacatgtgctgtggcagt

SEQ ID NO: 749790 - DNA, 75 bp, synthetic construct
  source 1..75: mol_type = other DNA
tccgggataactatggcggcacggtaacgataaaaggcgtggtagaacggcacattacttaccgccgtgaaggtt

SEQ ID NO: 749791 - DNA, 75 bp, synthetic construct
  source 1..75: mol_type = other DNA
gtgattatcgaaaccagcggctatgccgacgcgctgcaatcggcgttccgcggtctggcctacggtggcaccatc

SEQ ID NO: 749792 - DNA, 75 bp, synthetic construct
  source 1..75: mol_type = other DNA
caatgatgtcaaatccctgcccctccacctttttggataaaaatagaattattgctgctgagcttaatatcacaa

SEQ ID NO: 749793 - DNA, 75 bp, synthetic construct
  source 1..75: mol_type = other DNA
atcacggctgcctgatcaacacctcttctggccagggacgtcaggggtttatctataccccacactatgcagcca

SEQ ID NO: 749794 - DNA, 75 bp, synthetic construct
  source 1..75: mol_type = other DNA
ctgagtacttatattctgggctttgcgttggggcagttaatctacgggccgatggcagacagcttcgggcgtaag

SEQ ID NO: 749795 - DNA, 75 bp, synthetic construct
  source 1..75: mol_type = other DNA
gaaaacagagctgcgcttacacgatggatgaaatacatcagtcaggtgaaaaaaatggaactaccagcgattaaa

SEQ ID NO: 749796 - DNA, 75 bp, synthetic construct
  source 1..75: mol_type = other DNA
actattgattttatcaggcaattgcattttttcatgaacaagaatagccatctaaaagatgtgaaagtatctgac

SEQ ID NO: 749797 - DNA, 75 bp, synthetic construct
  source 1..75: mol_type = other DNA
attgaagccgatacatctgattcgatcaggtttggctatggaaccatcaagaaaatcatcaactacagactcata

SEQ ID NO: 749798 - DNA, 75 bp, synthetic construct
  source 1..75: mol_type = other DNA
ggcacagacgaagagattgcagagtcgcttaaagctgcattaccgcagtggcgtaaaatcaaaggtatcgaacca

SEQ ID NO: 749799 - DNA, 75 bp, synthetic construct
  source 1..75: mol_type = other DNA
acagggttatattagattagtacaaattagagattttaaatccgataaatatgcgacgtacattccgcaagaaaa

SEQ ID NO: 749800 - DNA, 75 bp, synthetic construct
  source 1..75: mol_type = other DNA
gattgaagaggctaattcattaaatattaggttcaagactccgtggtcattgtctcgtggacatgatataaccaa

SEQ ID NO: 749801 - DNA, 75 bp, synthetic construct
  source 1..75: mol_type = other DNA
atgaacacgcagagaaatttatcagtcttttagtgttgggtgttttatattctattgaaaaaaagcaattgcgta

SEQ ID NO: 749802 - DNA, 75 bp, synthetic construct
  source 1..75: mol_type = other DNA
tcgcacctgcggccgatctcggccatgaggtctccgtccgcaagggggaacgtattctggttctcgggaccgggg

SEQ ID NO: 749803 - DNA, 75 bp, synthetic construct
  source 1..75: mol_type = other DNA
ctcaatcttctcgcctcattacgtgcatcgggtgcactccggaaggtacgacgggttattgctgtcacgctgact

SEQ ID NO: 749804 - DNA, 75 bp, synthetic construct
  source 1..75: mol_type = other DNA
acagggatattttagttgcgattcattaacagccgaagaagtaatgatgttaaaagacctttttgatattcgagt

SEQ ID NO: 749805 - DNA, 75 bp, synthetic construct
  source 1..75: mol_type = other DNA
tttcatcttactcagattggaatttacctactatatttaactgtatgcttcagcattcgatattattgtcctatc

SEQ ID NO: 749806 - DNA, 75 bp, synthetic construct
  source 1..75: mol_type = other DNA
gtgtggcgagatttcacagatgtacgtgcgttaagtcaggcttatgtgaagctacttcaggcaaaacccactgga

SEQ ID NO: 749807 - DNA, 75 bp, synthetic construct
  source 1..75: mol_type = other DNA
cgtcaattacgagatcagataaataaaaatagaaaacgttcagatgccggcattgcaggtgcaatggccatgaca

SEQ ID NO: 749808 - DNA, 75 bp, synthetic construct
  source 1..75: mol_type = other DNA
aaagcagcgcatcagcttacctggcaacaagcgccgaaattatcagaaccattaaacgattccgacctggatcag

SEQ ID NO: 749809 - DNA, 75 bp, synthetic construct
  source 1..75: mol_type = other DNA
ttgacacggatggtgtgggaggtgtaccggttgatggcgggcaggtggtgacaaatcgctggggaacgggcgtgg

SEQ ID NO: 749810 - DNA, 75 bp, synthetic construct
  source 1..75: mol_type = other DNA
ttcttcaagaatgatgaaagagctagagtgcaatatggtgtgcctgaatataaaactggctcaatacatacttaa

SEQ ID NO: 749811 - DNA, 75 bp, synthetic construct
  source 1..75: mol_type = other DNA
tgttttttggcattttaaaaatgagatgcctgtttattttataaactttgaaggtaaacgctcatccaggcgata

SEQ ID NO: 749812 - DNA, 75 bp, synthetic construct
  source 1..75: mol_type = other DNA
ttgtattagtactgatatctttaacaaaaagtgctatttattctaaaaaacactctaatagcagtgctttgccaa

SEQ ID NO: 749813 - DNA, 75 bp, synthetic construct
  source 1..75: mol_type = other DNA
ttgcagtgtcactctgtctctatagttgctcattatggaataaaggttgtaaatgtaaatcatcagtattcctta

SEQ ID NO: 749814 - DNA, 75 bp, synthetic construct
  source 1..75: mol_type = other DNA
cccctaaagggatttattataatttaatgatggctgttattttgcttcatattttattatttgaagcaaacctta

SEQ ID NO: 749815 - DNA, 75 bp, synthetic construct
  source 1..75: mol_type = other DNA
cgatctcggtggtgctcttcatcattattttcgctgtcattctgctgaccaggaaacgggtgaacctcaatggca

SEQ ID NO: 749816 - DNA, 75 bp, synthetic construct
  source 1..75: mol_type = other DNA
tgccggtcctggcgacggtggtgaccctgcgcaccatctggatgttctacatgttcgcggatgtttatttgctga

SEQ ID NO: 749817 - DNA, 75 bp, synthetic construct
  source 1..75: mol_type = other DNA
aaatgagttagaaaacagtgaggacggtgcgggtcaaataggctttcaactctccaatgatggtacgaatgaaat

SEQ ID NO: 749818 - DNA, 75 bp, synthetic construct
  source 1..75: mol_type = other DNA
ttttttacaccaacacttcactatttagaatcgataaatatatttcgccccatcgctcaaaatgctgatgttgtc

SEQ ID NO: 749819 - DNA, 75 bp, synthetic construct
  source 1..75: mol_type = other DNA
ccagatccttgaattgctgccttatgaggatactactcaatgggttgagcagagctacctgagcggtatacggca

SEQ ID NO: 749820 - DNA, 75 bp, synthetic construct
  source 1..75: mol_type = other DNA
cctaatcaccttaccgaacacgcacggcaaatagactcgatcctgaacccatcagtcccaaatttgtcccagtca

SEQ ID NO: 749821 - DNA, 75 bp, synthetic construct
  source 1..75: mol_type = other DNA
tcaaccttttgagcctcaacagctacaagcgttaacaaaagaggcaggtagcgaactgcgggacgtaatcataat

SEQ ID NO: 749822 - DNA, 75 bp, synthetic construct
  source 1..75: mol_type = other DNA
gcgatcagtctcggcgttggcatgactccgacgctctcctcaaaaacaccatcatacactaaatcagtaagttgg

SEQ ID NO: 749823 - DNA, 75 bp, synthetic construct
  source 1..75: mol_type = other DNA
tgtcgcgagtattccgctggggatacgaacgcggatacgtaaaagggaatccatgccagggcgtcagtaaatttt

SEQ ID NO: 749824 - DNA, 75 bp, synthetic construct
  source 1..75: mol_type = other DNA
tacagtgacctcagtccaagaacacaaaaagattatctgcaacatcaaaaaaagttgcttgccgtattcggtaag

SEQ ID NO: 749825 - DNA, 75 bp, synthetic construct
  source 1..75: mol_type = other DNA
aattgctcgcgaaccagagccgaaagcatcaggaccgctaaatgattctgacctggatcagcagattgaagacga

SEQ ID NO: 749826 - DNA, 75 bp, synthetic construct
  source 1..75: mol_type = other DNA
gttggtgaaattaatgttacgcattattttataacaaatattggagctggattgcctgatgcttgtgcagagtaa

SEQ ID NO: 749827 - DNA, 75 bp, synthetic construct
  source 1..75: mol_type = other DNA
gcaaaatgtatatcgcccccaaaaacaaacacactgcatcattctatttcactgcgaaggaattagctcaggtga

SEQ ID NO: 749828 - DNA, 75 bp, synthetic construct
  source 1..75: mol_type = other DNA
cgaagagtgtgttcatcttgaaccagcgctaaaacacattggtcattccctgtgcggtggtatttactcccccgg

SEQ ID NO: 749829 - DNA, 75 bp, synthetic construct
  source 1..75: mol_type = other DNA
gtctatgcccgactcggtgatcggttgcgcatcgccgccatggtcgatattggctatgacggtaatgaactgcgc

SEQ ID NO: 749830 - DNA, 75 bp, synthetic construct
  source 1..75: mol_type = other DNA
cgtacagccaaggggctgggatgaaagaactatctgaatacgtggagctggtaagttatccagaacttgaatcat

SEQ ID NO: 749831 - DNA, 75 bp, synthetic construct
  source 1..75: mol_type = other DNA
gctggctgttttcggtgatgctgaggctaaagccattaagccagaacatgtcagacgctacatggatgccagagg

SEQ ID NO: 749832 - DNA, 75 bp, synthetic construct
  source 1..75: mol_type = other DNA
tggtgggtaaagctgaagccgagcgactgacggagctgaatgatgcggtgacagcggcgaaagctgatgcccagc

SEQ ID NO: 749833 - DNA, 75 bp, synthetic construct
  source 1..75: mol_type = other DNA
ctgatgttatctcaattaccgattctttcggaggattagatagaactcaagcatctcgcttcccggttggtttat

SEQ ID NO: 749834 - DNA, 75 bp, synthetic construct
  source 1..75: mol_type = other DNA
actcccagcaagccttcaccagaatattccacaaaaagtttcagtgttcaccaggactttaccgaaaaaccttca

SEQ ID NO: 749835 - DNA, 75 bp, synthetic construct
  source 1..75: mol_type = other DNA
aaatatataaaagctcatcgaaaatcaacaattgcttgaacagaattaaattaccagagatgaaagaattctcat

SEQ ID NO: 749836 - DNA, 75 bp, synthetic construct
  source 1..75: mol_type = other DNA
gctgattccgctgctgaataccacccaacaaccggcgcttgccgaaatgcgcgatcgtgcgacgcgtgaaaaact

SEQ ID NO: 749837 - DNA, 75 bp, synthetic construct
  source 1..75: mol_type = other DNA
aagcctggatgctccggctcatggatgtggagagcttccagcatatccgggcggtccgtaacctgcgcggcagtc

SEQ ID NO: 749838 - DNA, 75 bp, synthetic construct
  source 1..75: mol_type = other DNA
tcctcaggagaaccactgtgggtaagactgctaaataatatgaacacaataaatcttgtttcgttttcggttcca

SEQ ID NO: 749839 - DNA, 75 bp, synthetic construct
  source 1..75: mol_type = other DNA
agagataaaggaattagatctgttttattaacaggtgactcaaagcttaatacatcattgtattataataaatgg

SEQ ID NO: 749840 - DNA, 75 bp, synthetic construct
  source 1..75: mol_type = other DNA
tcctctacggccgggacgccgcaggccgcctggcagaagtcatcacgccggaaggtaaaacgcagtacctgaagg

SEQ ID NO: 749841 - DNA, 75 bp, synthetic construct
  source 1..75: mol_type = other DNA
tgtatctctttggtgtggtgggcaacatgggcggaggtctgattgaccaggttttaccgcaaaactggatcccga

SEQ ID NO: 749842 - DNA, 75 bp, synthetic construct
  source 1..75: mol_type = other DNA
acctataaatttagggctatttaaaaactgccaagactggtctaatgattctttagaaacatgtaagatgaagtg

SEQ ID NO: 749843 - DNA, 75 bp, synthetic construct
  source 1..75: mol_type = other DNA
aaggcaggcactgtagatggcaactatgtaaactatagtggttttgtctattacaacaacaccaatggtgattga

SEQ ID NO: 749844 - DNA, 75 bp, synthetic construct
  source 1..75: mol_type = other DNA
tttattcaatgaagcggaaatagctcatgccataaaatatgttgagggattgagagaaaaattcatgatgggact

SEQ ID NO: 749845 - DNA, 75 bp, synthetic construct
  source 1..75: mol_type = other DNA
taaagtaataaggaaagcagataaatattttccaccaaatgctagggcagcttttgattatggtcttcgcaatat

SEQ ID NO: 749846 - DNA, 75 bp, synthetic construct
  source 1..75: mol_type = other DNA
ctcggctgcggcctgcgccggtccgaagccgttggcctggatatccgtgacgttgtcacgcaggacagggtcctg

SEQ ID NO: 749847 - DNA, 75 bp, synthetic construct
  source 1..75: mol_type = other DNA
ggtggatgagccgatatgacgaagaacttcgtaagctgggtattgattacgttgcggaagatttaaatcagtcct

SEQ ID NO: 749848 - DNA, 75 bp, synthetic construct
  source 1..75: mol_type = other DNA
gaaatccgcagttaaccagccgtaataaaagctggcaggttcacgttgaaaatccggtattactgatggtgcaag

SEQ ID NO: 749849 - DNA, 75 bp, synthetic construct
  source 1..75: mol_type = other DNA
gattaaaagcccggattgagtggggaattacaccaaatacagtccctctgccaccactctataaggattgggata

SEQ ID NO: 749850 - DNA, 75 bp, synthetic construct
  source 1..75: mol_type = other DNA
aagagatctcgcgcaacggtaacattacgcgctggttttatgactcccccgcagtagcctgcccggcgcggtgga

SEQ ID NO: 749851 - DNA, 75 bp, synthetic construct
  source 1..75: mol_type = other DNA
cctggtctttgtgcgtccgcctgaacatgctgatgctacgctgactacccgttttatcgcgaatgagacctgtgt

SEQ ID NO: 749852 - DNA, 75 bp, synthetic construct
  source 1..75: mol_type = other DNA
cgctactcactcaaccgaattgaaggttggatgagccgatatgacgaagaacttcgtaagttgggcattgattac

SEQ ID NO: 749853 - DNA, 75 bp, synthetic construct
  source 1..75: mol_type = other DNA
gcatggtactgaaaccggatgcgtttttcgccactggctcagtcattcacgctgacggcggattaacattacagc

SEQ ID NO: 749854 - DNA, 75 bp, synthetic construct
  source 1..75: mol_type = other DNA
ccgcgatgctggataacggggaggatttaattaccgtgaaggatgcgatgggccacgcgagcgtcaccaccactc

SEQ ID NO: 749855 - DNA, 75 bp, synthetic construct
  source 1..75: mol_type = other DNA
ctgacctgaacccattgacggagttacattctcctgataatgagtattttccggccctgtcagccaatgacatgc

SEQ ID NO: 749856 - DNA, 75 bp, synthetic construct
  source 1..75: mol_type = other DNA
ttgactgcaaattatagcgtcagcgcggtagtgcaaaacgcttctgctaaacgagctcttacccaaggtgaacaa

SEQ ID NO: 749857 - DNA, 75 bp, synthetic construct
  source 1..75: mol_type = other DNA
gttatcatcattggttgtgcgtcagcttatgccgttgaattcaacaaagatttaatcgaagccgaagatcgtgaa

SEQ ID NO: 749858 - DNA, 75 bp, synthetic construct
  source 1..75: mol_type = other DNA
taaaaatatttattgttcattatccgttatcatcattggttgtgcgtcagcttatgccgttgaattcaacaaaga

SEQ ID NO: 749859 - DNA, 75 bp, synthetic construct
  source 1..75: mol_type = other DNA
gatacaaaagaagctgctggccgttgtgacctcgttgaaaccgataatagttgtgtggagaactgtttaaaaggg

SEQ ID NO: 749860 - DNA, 75 bp, synthetic construct
  source 1..75: mol_type = other DNA
ttactgcaacatggccttgttattttgaggcattgcggcacaaggcatagtgaagtaagcaaagcctattctgga

SEQ ID NO: 749861 - DNA, 75 bp, synthetic construct
  source 1..75: mol_type = other DNA
tggtcgatttggtcaatgaaggtgtcgatctcgatattcgcattggcgatgacatcgcccctaatttaatcgccc

SEQ ID NO: 749862 - DNA, 75 bp, synthetic construct
  source 1..75: mol_type = other DNA
gttacagcggtgaattctgcgaaacccggctggttgcagaatgttcaggctggtaataagttcaacgcagaacag

SEQ ID NO: 749863 - DNA, 75 bp, synthetic construct
  source 1..75: mol_type = other DNA
ggcattatgcctgcagagcaatacctgaaaaagacattaggaatgactaatcctgacgaatattttcaggccggg

SEQ ID NO: 749864 - DNA, 75 bp, synthetic construct
  source 1..75: mol_type = other DNA
ggataactggggggtagtcaactacccgctcatcaatgccgaatacgaaagccagtttggattaagtgatgaatc

SEQ ID NO: 749865 - DNA, 75 bp, synthetic construct
  source 1..75: mol_type = other DNA
tccgcaagaacgcggtgtatgttccgatgtggtgatccgcgcattgcgcagccagaaggtcgatttgcagaaact

SEQ ID NO: 749866 - DNA, 75 bp, synthetic construct
  source 1..75: mol_type = other DNA
ttaacataatgggtattaaaggaaaaataattgcaccgatccaatgtgataccagaaagacatcgctaagaagat

SEQ ID NO: 749867 - DNA, 75 bp, synthetic construct
  source 1..75: mol_type = other DNA
cttgactgccattcttcagatgataaagacgtcattgcaattgatggaaaaacgctccggtactcttatgacaag

SEQ ID NO: 749868 - DNA, 75 bp, synthetic construct
  source 1..75: mol_type = other DNA
ataatgaatgctccgccattgcgatgtactctgaatccattgggatgcctcctgcaggagaacagtctgtagcgg

SEQ ID NO: 749869 - DNA, 75 bp, synthetic construct
  source 1..75: mol_type = other DNA
taaccaggtgaatcatttgataccaacgagggttttagtgaaaggaggtgaaatcacctgtaagatactgaaata

SEQ ID NO: 749870 - DNA, 75 bp, synthetic construct
  source 1..75: mol_type = other DNA
ttaagtaaggctgatgcagaagctatattaatcatggctaataaagctatagatacccttcagcaaatgtatgag

SEQ ID NO: 749871 - DNA, 75 bp, synthetic construct
  source 1..75: mol_type = other DNA
gggtcggacctacaagagtgtctgattatgctcagacgcgtgcgggaacggtcagtgctgatattcgcttttcat

SEQ ID NO: 749872 - DNA, 75 bp, synthetic construct
  source 1..75: mol_type = other DNA
gactaagcagggttttcagcttgagcggataggtgtgctttatcgtgcagcctggatgggaaataaagttgctga

SEQ ID NO: 749873 - DNA, 75 bp, synthetic construct
  source 1..75: mol_type = other DNA
ggctgaaagctttaaagaaagtgtaaagcaaaaagatccattatcaatcatctctgaattcattcatctcactca

SEQ ID NO: 749874 - DNA, 75 bp, synthetic construct
  source 1..75: mol_type = other DNA
atgggaaaaattaaaattgtagtttcagatcagcagccgtttatgattgatgggataattggatttctcggacat

SEQ ID NO: 749875 - DNA, 75 bp, synthetic construct
  source 1..75: mol_type = other DNA
taaatattatgaaaaaacttgatgtgcacagtggcattgagctgataaaaactgcattacgtatgggggtatgca

SEQ ID NO: 749876 - DNA, 75 bp, synthetic construct
  source 1..75: mol_type = other DNA
gcgttcgagctacggcaatcgagtcaacggctcagcgatgcaagaaaaacccaatttattcacctaaaatagtag

SEQ ID NO: 749877 - DNA, 75 bp, synthetic construct
  source 1..75: mol_type = other DNA
taagctaaaggaaatattaaattgtttaaaaataataggtgtcaataaatatactctgactgaggttgaaagaat

SEQ ID NO: 749878 - DNA, 75 bp, synthetic construct
  source 1..75: mol_type = other DNA
aaggtgacaagaaagagtctttcatttacttagggcctttattgtttttaaaagaaaaggtcaatgaaaaagcat

SEQ ID NO: 749879 - DNA, 75 bp, synthetic construct
  source 1..75: mol_type = other DNA
aagttaacggacaacgattttctggtaatgactccaacttactgatagtgttttatgttcagataatgcccgatg

SEQ ID NO: 749880 - DNA, 75 bp, synthetic construct
  source 1..75: mol_type = other DNA
ttgaagctggttccggattagttttcaacaaagatttttttataggctatagcccagagagaatcaatccaggag

SEQ ID NO: 749881 - DNA, 75 bp, synthetic construct
  source 1..75: mol_type = other DNA
caggagggtctggatcggatatacggagacgacaacaccattggtgtatggagtcatttgcattcccctcacaga

SEQ ID NO: 749882 - DNA, 75 bp, synthetic construct
  source 1..75: mol_type = other DNA
aatactcaggcgctgacataattgatgagtatgatatttactcaaaccaggtctcgattgatcttaatggtgacg

SEQ ID NO: 749883 - DNA, 75 bp, synthetic construct
  source 1..75: mol_type = other DNA
actgaccaccacgtatgactctagaactatgatttatcatagaataagaaaattcaggaaaaataatataagtag

SEQ ID NO: 749884 - DNA, 75 bp, synthetic construct
  source 1..75: mol_type = other DNA
gtcggaacagttaacatgattagtgagccaaacgaaaaacaaggccctaaccttgaaatttctattagcccaatc

SEQ ID NO: 749885 - DNA, 75 bp, synthetic construct
  source 1..75: mol_type = other DNA
agaaaatgatgaaattataatactgattaatagaatagatatgaaaaatatcaatgagcattttgataaatacat

SEQ ID NO: 749886 - DNA, 75 bp, synthetic construct
  source 1..75: mol_type = other DNA
gttgcagtctggtaaggaactcactgctatcgtcagcttcggcagttgtgagaaccacgccgatcacctgcctct

SEQ ID NO: 749887 - DNA, 75 bp, synthetic construct
  source 1..75: mol_type = other DNA
gccatgcgtcttatccgacctacagttcagttcaccccgtaggcctgataagccgcgtcagcggcgcatcaggca

SEQ ID NO: 749888 - DNA, 75 bp, synthetic construct
  source 1..75: mol_type = other DNA
gatgactgaaattattggccctgttggtggtaaactccacacgggacgaagtcgtaatgatcaaaccactgttga

SEQ ID NO: 749889 - DNA, 75 bp, synthetic construct
  source 1..75: mol_type = other DNA
ataatcacacaggatgaagccaatacaattattagaggtttgagacaagtaagtaaagaaattgaagacggccaa

SEQ ID NO: 749890 - DNA, 75 bp, synthetic construct
  source 1..75: mol_type = other DNA
attatacttgccaaatgtgacagccttgaatctttggaagaacgccttagtcaggatccattccaaaaattaaac

SEQ ID NO: 749891 - DNA, 75 bp, synthetic construct
  source 1..75: mol_type = other DNA
acctcgttgaaaccgataatagttgtgtggagaactgtttaaaagggaagtttaaagaggtaaggccgcgttatt

SEQ ID NO: 749892 - DNA, 75 bp, synthetic construct
  source 1..75: mol_type = other DNA
aaatgtgattcttacgatacccaaagtaggcttttacatcagtgaaaacataacaataagtaaacaatcttatga

SEQ ID NO: 749893 - DNA, 75 bp, synthetic construct
  source 1..75: mol_type = other DNA
gcggttgacaggaactcaatcattgatagcgttttggagagattttcatttgatctgtcaaacaacacattgaac

SEQ ID NO: 749894 - DNA, 75 bp, synthetic construct
  source 1..75: mol_type = other DNA
cctcgttctcactgatgcaaaccgttgaatattttgagagaggtttgattgccactgagctcgcacgccatgcag

SEQ ID NO: 749895 - DNA, 75 bp, synthetic construct
  source 1..75: mol_type = other DNA
ttggttataataatcggattatttattgggaatcatagtcaatctttaggattatttttaggattaaaaaaaatc

SEQ ID NO: 749896 - DNA, 75 bp, synthetic construct
  source 1..75: mol_type = other DNA
tgagcacaaccgaaagccgctcgggataccggcgtttctggcgattcgggatgccctgatgcgtgcaccagagcc

SEQ ID NO: 749897 - DNA, 75 bp, synthetic construct
  source 1..75: mol_type = other DNA
aagctcaccatattgttggtagtgcagtaaattactgtattaaacataaaaaaatgttagaagagcttactatgg

SEQ ID NO: 749898 - DNA, 75 bp, synthetic construct
  source 1..75: mol_type = other DNA
agccagcaggacaccagtaagtacgacagtaaacagaccagcgtggctgccggcggcagttttacctttggctcc

SEQ ID NO: 749899 - DNA, 75 bp, synthetic construct
  source 1..75: mol_type = other DNA
actggcacagacaggcggttaaagtggggctgacaggcgaattttccccgcactccctgcgttatgcatgggcgc

SEQ ID NO: 749900 - DNA, 75 bp, synthetic construct
  source 1..75: mol_type = other DNA
tggaacgtgactggtaaccactggccgtttgaaatctataagacccgattttcactcaagttccctgatatcgcg

SEQ ID NO: 749901 - DNA, 75 bp, synthetic construct
  source 1..75: mol_type = other DNA
gaccatgaggctaattcggcgaagaaagtaaacaaggggggacgcttccccccttcacagttccagcagcagttg

SEQ ID NO: 749902 - DNA, 75 bp, synthetic construct
  source 1..75: mol_type = other DNA
attaaaggccatttgtgctgcaaggactatatcaacttcagccgcaactgaaacaggtgattttctggtactggg

SEQ ID NO: 749903 - DNA, 75 bp, synthetic construct
  source 1..75: mol_type = other DNA
tgatgttagctttatccggggttatactttaagcggaactatagatgacaatcatatttcagttaatcaagggga

SEQ ID NO: 749904 - DNA, 75 bp, synthetic construct
  source 1..75: mol_type = other DNA
tacattatttcctggcgggtacgccgctctgaaatcgagctaatcaacttcgggaatctgcgtggcgttgaccct

SEQ ID NO: 749905 - DNA, 75 bp, synthetic construct
  source 1..75: mol_type = other DNA
ttctctggaaaaatttggttttattaaacgtatggaaagtaaggaagatcgacgtagtaagaatatttatctgac

SEQ ID NO: 749906 - DNA, 75 bp, synthetic construct
  source 1..75: mol_type = other DNA
gagcttactggccagctttgcgcgaacacccagatggcggccctgcttcagcatccactcgatatctggagcgac

SEQ ID NO: 749907 - DNA, 75 bp, synthetic construct
  source 1..75: mol_type = other DNA
tgaccacaatacagaacgacagaacccgcatccagacgatttatcagccggggagcttcacgccactcatcagag

SEQ ID NO: 749908 - DNA, 75 bp, synthetic construct
  source 1..75: mol_type = other DNA
ggctggcatcgtgcggcctgaccgtggagcagatgcaaaaccagatggacccggtgtacacgccggcgcgaaaaa

SEQ ID NO: 749909 - DNA, 75 bp, synthetic construct
  source 1..75: mol_type = other DNA
tgtttctgagtcaggccgtcctggcaacttgccctgctggaaattcacaacacgaatgcgaggcggtgcgcatac

SEQ ID NO: 749910 - DNA, 75 bp, synthetic construct
  source 1..75: mol_type = other DNA
cttacccgtcttttatatacccggagctggataagcaacgaacgtcctggcctgcttttcgacctggcgacaggg

SEQ ID NO: 749911 - DNA, 75 bp, synthetic construct
  source 1..75: mol_type = other DNA
atgattaacaaagcaattttagagacaaccacttttcatgatcttaagcttctttctgaatgtttcataagcctg

SEQ ID NO: 749912 - DNA, 75 bp, synthetic construct
  source 1..75: mol_type = other DNA
ctttaattctttagcgcaaataccttatgcatacttgcaatctatcggaaagtcaaaaattaccgcatttgtgca

SEQ ID NO: 749913 - DNA, 75 bp, synthetic construct
  source 1..75: mol_type = other DNA
ttatcttatgccatttcaggtctgctttgtgcaagaatattatctataacaataactttttttgcatgtaaaaag

SEQ ID NO: 749914 - DNA, 75 bp, synthetic construct
  source 1..75: mol_type = other DNA
atgagcgaatgccataagactgggttacagtatattattgttcatcaatctgaaattttggcatccattctttcg

SEQ ID NO: 749915 - DNA, 75 bp, synthetic construct
  source 1..75: mol_type = other DNA
gcctcgccaaagcagttcgaggagacggtattagcactcaattggagcgagatcgaccaagcgataggctcggat

SEQ ID NO: 749916 - DNA, 75 bp, synthetic construct
  source 1..75: mol_type = other DNA
cgcagcaggcgctgacgtggttcttgcagctgctgcaattcgacagctggcatcacgtgatgcgcactgttcacg

SEQ ID NO: 749917 - DNA, 75 bp, synthetic construct
  source 1..75: mol_type = other DNA
tagcaactattccttctgatgaagattgggaaaaaggtttgacagcaatgcgacatgctatgttacaagacacac

SEQ ID NO: 749918 - DNA, 75 bp, synthetic construct
  source 1..75: mol_type = other DNA
tgggtggttcacgaaatggtaaagacagtcgagagataaaaattatttccatcaccccaagaattattgatgtta

SEQ ID NO: 749919 - DNA, 75 bp, synthetic construct
  source 1..75: mol_type = other DNA
gtaatgggacaaacatcgacgacttccagtgcgtcaacgtcatctgtaactacgggttttctgatgaacctgtta

SEQ ID NO: 749920 - DNA, 75 bp, synthetic construct
  source 1..75: mol_type = other DNA
ttttaactgtattgctcaaattccatttgcttccatacaggcggcaggaaaatcaaagcttacagcactgttgca

SEQ ID NO: 749921 - DNA, 75 bp, synthetic construct
  source 1..75: mol_type = other DNA
agcatatttgatgccggactaacaagagcagtaatcagagaagtttcttattttaggaataaagattccgaaata

SEQ ID NO: 749922 - DNA, 75 bp, synthetic construct
  source 1..75: mol_type = other DNA
taacctatgctatgtgtaacaatgagattgatgagtgttttgattttacgaagcttttaaatgagctatgtcggt

SEQ ID NO: 749923 - DNA, 75 bp, synthetic construct
  source 1..75: mol_type = other DNA
tgactccagatatgtgaaagatgttcgacttggttcacagcaatattatggagtgaacaactggcaaacatggaa

SEQ ID NO: 749924 - DNA, 75 bp, synthetic construct
  source 1..75: mol_type = other DNA
atgagcagcaaaaacacattacgcgcctggacttttttccgccaggggatccgtattcagggagcgcatgagttc

SEQ ID NO: 749925 - DNA, 75 bp, synthetic construct
  source 1..75: mol_type = other DNA
tgtggaaaccatctgcattattccggaggaatttgtgcgccgtattaacggcgttaatgttctggcggatctgaa

SEQ ID NO: 749926 - DNA, 75 bp, synthetic construct
  source 1..75: mol_type = other DNA
gttattaccgtcaggctgttgacggtgtggaaaccatctgcattattccggaggaatttgtgcgccgtattaacg

SEQ ID NO: 749927 - DNA, 75 bp, synthetic construct
  source 1..75: mol_type = other DNA
tattttgacgaaataaaatcaagccgtttttttattcagtacatacataagtatattgttgagtgcaaacataac

SEQ ID NO: 749928 - DNA, 75 bp, synthetic construct
  source 1..75: mol_type = other DNA
catcgcgtcggtgcgtagcaacagcccgcaagaagaacgctatgagaaaaaacggcaagtaacggcaaattctat

SEQ ID NO: 749929 - DNA, 75 bp, synthetic construct
  source 1..75: mol_type = other DNA
caaattatcggctccagccagatgtacgccaccgcgcaatctcgtgaaaccggaattgcctccgttaaagccaat

SEQ ID NO: 749930 - DNA, 75 bp, synthetic construct
  source 1..75: mol_type = other DNA
gcagtatccagagtaataaagctgtaaacgttacaggacgggtaacaccgtcagactacggaaactttgatgccc

SEQ ID NO: 749931 - DNA, 75 bp, synthetic construct
  source 1..75: mol_type = other DNA
acataatgaaagcgagtccacacaacaataatgtctggggggcgacgtataacacccgtaataatgtcaccaccg

SEQ ID NO: 749932 - DNA, 75 bp, synthetic construct
  source 1..75: mol_type = other DNA
ccattgtaaatggcgaagtcatatcaaaatcagcaaacggcctacgtattgcttatggtaattacggattcttta

SEQ ID NO: 749933 - DNA, 75 bp, synthetic construct
  source 1..75: mol_type = other DNA
agttgaacccaaggccgggcaggttgtaccggctctcgcacacattgggcaagacgaagtggaatcatcccgctc

SEQ ID NO: 749934 - DNA, 75 bp, synthetic construct
  source 1..75: mol_type = other DNA
cattggtggatatgcaaaaggagccattctcgccggagtcgcaacaacagcggtctggctgaataccacagacga

SEQ ID NO: 749935 - DNA, 75 bp, synthetic construct
  source 1..75: mol_type = other DNA
tttcagaatggagtggctattgcttttaagaatattcaggccggaactgccagaaaattcacgttatccagcgcc

SEQ ID NO: 749936 - DNA, 75 bp, synthetic construct
  source 1..75: mol_type = other DNA
cgccttactcgcatcacctggatgcggggcggtttagcgtgaaaacgggcgaggcgggcaatggtcatgctttta

SEQ ID NO: 749937 - DNA, 75 bp, synthetic construct
  source 1..75: mol_type = other DNA
tatcctatgacttctggaaggatcttgactctgagctgaaaatgcttattggcaatgatggtgaatattatgtat

SEQ ID NO: 749938 - DNA, 75 bp, synthetic construct
  source 1..75: mol_type = other DNA
attattaccgttaattgagaaaggattactgaaaccagaagaaattgttacccactatatgccgtttgaagaggc

SEQ ID NO: 749939 - DNA, 75 bp, synthetic construct
  source 1..75: mol_type = other DNA
aggattttgccatatcatcagaaaagagcaataaaaccctattttattcaaatggcaacggatgggagcagaagc

SEQ ID NO: 749940 - DNA, 75 bp, synthetic construct
  source 1..75: mol_type = other DNA
agagagtattgctgttatctgcggtaatcctggtgtgggtaaatctgaagcagccaaagagtatcgccgtaccaa

SEQ ID NO: 749941 - DNA, 75 bp, synthetic construct
  source 1..75: mol_type = other DNA
aactacgcacacttgtagaaagtgaaaaagtcacttttaaacaaattgctattgagagtgatatttctaccggga

SEQ ID NO: 749942 - DNA, 75 bp, synthetic construct
  source 1..75: mol_type = other DNA
agcggcgtacaaggataagcaagcgtcagcagttccgccatcaggtgtgtgcgctgctaatgtcatactcacaga

SEQ ID NO: 749943 - DNA, 75 bp, synthetic construct
  source 1..75: mol_type = other DNA
cattaaacttgatgacagtgaaattgccattggtgaggtgccgttaaccttcatcgttgatgcagatcaatggct

SEQ ID NO: 749944 - DNA, 75 bp, synthetic construct
  source 1..75: mol_type = other DNA
ccgcacggtgaacggcgaaccggcagagcagtggcagtatgatggccacggctggctgacagaaatcagccacct

SEQ ID NO: 749945 - DNA, 75 bp, synthetic construct
  source 1..75: mol_type = other DNA
aatttgatgaggagtattataaagctaagaaaataaaaacaactgtgattgaaaatgcgtatacagcaatggatg

SEQ ID NO: 749946 - DNA, 75 bp, synthetic construct
  source 1..75: mol_type = other DNA
atggcataccattccccggatgtcacactgcattatccgtatctgcgccggatgtcctgggcgcagataacggca

SEQ ID NO: 749947 - DNA, 75 bp, synthetic construct
  source 1..75: mol_type = other DNA
tgcagcggctggtatacgtggtgtcagcggcggacaaggataagtcctcgtcagcagttacgtcagccctgcgac

SEQ ID NO: 749948 - DNA, 75 bp, synthetic construct
  source 1..75: mol_type = other DNA
ctcatgaaactgatgtaagattcttaagaacattacgtactattgcgaaaaaacttgtacttattgtacggaagg

SEQ ID NO: 749949 - DNA, 75 bp, synthetic construct
  source 1..75: mol_type = other DNA
atctatcttcgccgacattatgaaattatggacgacctcggtgatgcctatcaggtgctgtcaaacctttttcat

SEQ ID NO: 749950 - DNA, 75 bp, synthetic construct
  source 1..75: mol_type = other DNA
ataacatcgataaagcaaatataactctggcagtaaaaaaattaaatattaaatttgcgcctaacggcaccggaa

SEQ ID NO: 749951 - DNA, 75 bp, synthetic construct
  source 1..75: mol_type = other DNA
ttataaaacagtatgattatggattaatacggatgtttgaagaagtggagatggtgccgataataggagtaaaac

SEQ ID NO: 749952 - DNA, 75 bp, synthetic construct
  source 1..75: mol_type = other DNA
tgagccaactcagcgcaggctgaaaaggatccagccgaaagtgagccgcctggctgcccgactggcgcagatgga

SEQ ID NO: 749953 - DNA, 75 bp, synthetic construct
  source 1..75: mol_type = other DNA
acttcgggcatcatgcccgtctgctacggcccatgtcaattgagccggcagaagatcttagtcaagcctttgata

SEQ ID NO: 749954 - DNA, 75 bp, synthetic construct
  source 1..75: mol_type = other DNA
acatcctgaaatgtccgcagaaaaagttgccagcggctgccaggcaatcgccgatcgcattcccggctttgacta

SEQ ID NO: 749955 - DNA, 75 bp, synthetic construct
  source 1..75: mol_type = other DNA
gacgttacagattcaaatttgaaaaatattatagacgatctttatcggccaaatgcaaaagtaggaagtggaagc

SEQ ID NO: 749956 - DNA, 75 bp, synthetic construct
  source 1..75: mol_type = other DNA
gaggtgacctggtacgggtgggacggcgacaggctgacgacggtacagaccgacaccacgcgtatccagacggta

SEQ ID NO: 749957 - DNA, 75 bp, synthetic construct
  source 1..75: mol_type = other DNA
gcagtatgatgaggagtcggggctgtactacaaccgtcaccggtactatgacccgctacaggggaggtatatcac

SEQ ID NO: 749958 - DNA, 75 bp, synthetic construct
  source 1..75: mol_type = other DNA
taatcttcgtattgtacctgttgggggggcgtcggaaattaaaaaaatatataactatctctctgcctgctataa

SEQ ID NO: 749959 - DNA, 75 bp, synthetic construct
  source 1..75: mol_type = other DNA
aatgattttactcagtcattattatctagtgcaacaggtgagaaaccatataattggttgatttgtgagggttca

SEQ ID NO: 749960 - DNA, 75 bp, synthetic construct
  source 1..75: mol_type = other DNA
gggtatatctttattgaaggtgggaaaaccgaacacgcccgtcgccaggttccaatacataagactattgaggcg

SEQ ID NO: 749961 - DNA, 75 bp, synthetic construct
  source 1..75: mol_type = other DNA
ataattacagcaaacatcataaaaacacgttaattgacaataaagccctctctcttttcaagatggatgatcatg

SEQ ID NO: 749962 - DNA, 75 bp, synthetic construct
  source 1..75: mol_type = other DNA
taaagggccgctggcgctgctggaactgaaaaacttccgcctgccgggacaggtatttctgaccggcaggagtat

SEQ ID NO: 749963 - DNA, 75 bp, synthetic construct
  source 1..75: mol_type = other DNA
tcatcggacagatcaagacggataagaaatccaatgagatcacagctatccctgaacttcttaacatgctggata

SEQ ID NO: 749964 - DNA, 75 bp, synthetic construct
  source 1..75: mol_type = other DNA
ggaccacaatcgttgccgcaacggcaaccattaacggcaaggatgtggacctgatgaaagcgggggcaattgaac

SEQ ID NO: 749965 - DNA, 75 bp, synthetic construct
  source 1..75: mol_type = other DNA
gctgtactataaccggaaccggtactatgacccgctacaggggaggtatattacacaagaccccattgggctggc

SEQ ID NO: 749966 - DNA, 75 bp, synthetic construct
  source 1..75: mol_type = other DNA
cacaaatagcagatcaacatgatcgggattttcacctgctcttgcttcaggccagtggtaatcgtgttctgcagg

SEQ ID NO: 749967 - DNA, 75 bp, synthetic construct
  source 1..75: mol_type = other DNA
aggggcgagagtgccccatcacagttatcgacgaagccgcattgaaacgagccattcaaaaagcaaagaaaattg

SEQ ID NO: 749968 - DNA, 75 bp, synthetic construct
  source 1..75: mol_type = other DNA
ggcgaaaagcgcctgatgcagggcagcaaaaagaaaggggcattcattgcccccgcctcactgcctgaccgcgcg

SEQ ID NO: 749969 - DNA, 75 bp, synthetic construct
  source 1..75: mol_type = other DNA
atgcaggctaatggcacgatccaggcggtgcaatatcagggcgcagcgacccgttttgaactgacactgagcggc

SEQ ID NO: 749970 - DNA, 75 bp, synthetic construct
  source 1..75: mol_type = other DNA
gaatggcggtgaaaaactgctggtgagtcaggccaatatgacaggcgaagaactgcctgccacgctcacgcccgg

SEQ ID NO: 749971 - DNA, 75 bp, synthetic construct
  source 1..75: mol_type = other DNA
ctattttattaattgcctcacaaggttcactggcaagcgagaaagcgcatgaattgtatgacagcatatacagtg

SEQ ID NO: 749972 - DNA, 75 bp, synthetic construct
  source 1..75: mol_type = other DNA
caataaaatatatttttgtaattctactacctgattttctattcattgtttattttttagtacaaaaaaacaaca

SEQ ID NO: 749973 - DNA, 75 bp, synthetic construct
  source 1..75: mol_type = other DNA
attttttatatttacaattttgctttcccgtttttgtaaaatgctaactcttggctatccggtttcaaaaaatat

SEQ ID NO: 749974 - DNA, 75 bp, synthetic construct
  source 1..75: mol_type = other DNA
tcctgttcctgcctttcggtttaccggtgtcattccgctgttatggccgcgtttatctcattccacgcctgacac

SEQ ID NO: 749975 - DNA, 75 bp, synthetic construct
  source 1..75: mol_type = other DNA
accggtgaacgtatccgcattaaaccgcatgtttatcgcgaactggttaaccgtctccacgatacagcgatcaag

SEQ ID NO: 749976 - DNA, 75 bp, synthetic construct
  source 1..75: mol_type = other DNA
agcgatggcactttatcgtggttagggaacgccttgttctggatgcagctaccagagccgccgcaggaggtgaat

SEQ ID NO: 749977 - DNA, 75 bp, synthetic construct
  source 1..75: mol_type = other DNA
tagttggataagctgtagtgagcgaatgcctgtaattggcgagctaaattggagaactagttttcctttactggt

SEQ ID NO: 749978 - DNA, 75 bp, synthetic construct
  source 1..75: mol_type = other DNA
gatattaaactacatcctattctaaaaaatatattaaatgaatttaatgatgaggatgtcattggcaatataaag

SEQ ID NO: 749979 - DNA, 75 bp, synthetic construct
  source 1..75: mol_type = other DNA
tggatggcatagagcggagcgacgccatgcttcagtccggaaactttcgggaaaacaagaattcgtcaaccaaca

SEQ ID NO: 749980 - DNA, 75 bp, synthetic construct
  source 1..75: mol_type = other DNA
tcaaactaatgaatatggtctgattagcaatgtaacccactggatgccgctgccagaaccgccggagcaggatgg

SEQ ID NO: 749981 - DNA, 75 bp, synthetic construct
  source 1..75: mol_type = other DNA
ggggagagctgggatcgcaccacaaattaactataatggtactgttgcgattaattcatttgagaacggttatgc

SEQ ID NO: 749982 - DNA, 75 bp, synthetic construct
  source 1..75: mol_type = other DNA
gaggtaaaaataggcgatgcagtaaataacctggatgcaactgttgataagtcaggtgtttccgctgttgtttct

SEQ ID NO: 749983 - DNA, 75 bp, synthetic construct
  source 1..75: mol_type = other DNA
tgctgtcgcaaaaaactaacggcagcacccagcagcaaaccgtcagattgacgttacgcgttcatttttctgagc

SEQ ID NO: 749984 - DNA, 75 bp, synthetic construct
  source 1..75: mol_type = other DNA
cggtggagttcactctttcagacggacgaacgtttggtaatggccagggcaatatgctgaccattaccgacgcaa

SEQ ID NO: 749985 - DNA, 75 bp, synthetic construct
  source 1..75: mol_type = other DNA
aacaaatggtgggcagttactgacaatggagaagaaccggcatcgaaagtaacccactggatgccgctaccggaa

SEQ ID NO: 749986 - DNA, 75 bp, synthetic construct
  source 1..75: mol_type = other DNA
tcacccttgacgaacctgcaacatctagtgctatttcctggaaagcatcccttccagttactgtaagttatgcgt

SEQ ID NO: 749987 - DNA, 75 bp, synthetic construct
  source 1..75: mol_type = other DNA
tggtcccggctggaaagcccccttcgatatccgcttacagatacgcgatgaaggcctgatactcaacgacagtgg

SEQ ID NO: 749988 - DNA, 75 bp, synthetic construct
  source 1..75: mol_type = other DNA
tccaccaaaacaaaaaatatccagtctgtattatgttgaaaaagccttaagttctccctggatatatcgtgaacg

SEQ ID NO: 749989 - DNA, 75 bp, synthetic construct
  source 1..75: mol_type = other DNA
cgtattgaagctgatcagaataagatgcgtgatgctttaactaaacttgaaaaccagatccatgatctggatgtg

SEQ ID NO: 749990 - DNA, 75 bp, synthetic construct
  source 1..75: mol_type = other DNA
atcagatcatcgctgtgattaagtcagttgaagtcggacgaaccgttaaagatgtctgccaggaggcctggtatc

SEQ ID NO: 749991 - DNA, 75 bp, synthetic construct
  source 1..75: mol_type = other DNA
acacttttttctctgccaaattctcaaggcacttacattatcagcgtttggggatctggtagtgggacaaactat

SEQ ID NO: 749992 - DNA, 75 bp, synthetic construct
  source 1..75: mol_type = other DNA
atccggatgtgctttccgtgggagaggggccagggatagccaccaatattggcgtagcgttgtttgatgatgaag

SEQ ID NO: 749993 - DNA, 75 bp, synthetic construct
  source 1..75: mol_type = other DNA
ttctcaatgctaaacgtggagagaaaagcaagggggaatggctcagattagcttctcttgataagcttcccatag

SEQ ID NO: 749994 - DNA, 75 bp, synthetic construct
  source 1..75: mol_type = other DNA
agatcaagggctatcagaattaccgcaacgcgacaggtaagccactgagtgacggatggtgcgctcatacctaca

SEQ ID NO: 749995 - DNA, 75 bp, synthetic construct
  source 1..75: mol_type = other DNA
taagaggagtagctggaaataaaatactcattaatacaatttggatgatttctgaaaaatctattaatctcttcg

SEQ ID NO: 749996 - DNA, 75 bp, synthetic construct
  source 1..75: mol_type = other DNA
gtgcgtcagatggagagctggatggtgaccacccgcccccgccggcgggagccgttatggccggtcacggatgag

SEQ ID NO: 749997 - DNA, 75 bp, synthetic construct
  source 1..75: mol_type = other DNA
aatatgcatgatccgattccaccttatatatataagcataagaaggaaggtgaaatccatatttcatttatttcg

SEQ ID NO: 749998 - DNA, 75 bp, synthetic construct
  source 1..75: mol_type = other DNA
aactcaaaattgatgaagcaattaacccaatgcgagtaagcgtaaagccaatgccgtctgtaacacctgctcctt

SEQ ID NO: 749999 - DNA, 75 bp, synthetic construct
  source 1..75: mol_type = other DNA
tgcctaagtctgcaattgagagggaaattggcaccggcaaagcactttctcccatcatttctgaacaagccagaa

SEQ ID NO: 750000 - DNA, 75 bp, synthetic construct
  source 1..75: mol_type = other DNA
ggggatgcattagttacagttaaacaaccgtacactggtgctacttctatttcacagcacattaaaaattcacag

SEQ ID NO: 750001 - DNA, 75 bp, synthetic construct
  source 1..75: mol_type = other DNA
acgccgttcgtcggcgtgccggtgggtatttttgtagggatttatgtcttttccaaagtggttcgtctgatttca

SEQ ID NO: 750002 - DNA, 75 bp, synthetic construct
  source 1..75: mol_type = other DNA
atctcagcgtgaaggattattctaccacggtacgtaatggaaacactctgatatgggtgagcaacagcagcctca

SEQ ID NO: 750003 - DNA, 75 bp, synthetic construct
  source 1..75: mol_type = other DNA
tgacaaagacaaagacaaagtcaatacttcaaccaccgactccaccaccctgttcacaccgtcaggcgttggctc

SEQ ID NO: 750004 - DNA, 75 bp, synthetic construct
  source 1..75: mol_type = other DNA
cggacagtcttgagcaaagaatcgcctatcgcaataaactggttcgttttggtcgggcaattgcgcagggtgaat

SEQ ID NO: 750005 - DNA, 75 bp, synthetic construct
  source 1..75: mol_type = other DNA
tgcctcttgaagaagctattgaatatatcaacgggctgaatgacaacatgcgtgccgcgctcaatgcagtcattg

SEQ ID NO: 750006 - DNA, 75 bp, synthetic construct
  source 1..75: mol_type = other DNA
gagcatcatgatggtcaggtgtttctgcctcttgaagaagctattgaatatatcaacgggctgaatgacaacatg

SEQ ID NO: 750007 - DNA, 75 bp, synthetic construct
  source 1..75: mol_type = other DNA
gggagtgagaacggccacggtgtggtgttcccggctgaactggtgcggctgctggacaggctggaggaagaaatc

SEQ ID NO: 750008 - DNA, 75 bp, synthetic construct
  source 1..75: mol_type = other DNA
acctgaaatccaatctgctggataacgcaacgtttcgccgtgaactggaaaatatcctgaaagacccgacgctca

SEQ ID NO: 750009 - DNA, 75 bp, synthetic construct
  source 1..75: mol_type = other DNA
tttgaacccgaacaggtagcaaaaaatattccgcaacttcgtgtattactcgctatgcgcaatttactacgtgac

SEQ ID NO: 750010 - DNA, 75 bp, synthetic construct
  source 1..75: mol_type = other DNA
ctatgatggtaaagatcctggtatatggtccccatcgggatcaatcgaaaaggtactaactgtaattccaccaaa

SEQ ID NO: 750011 - DNA, 75 bp, synthetic construct
  source 1..75: mol_type = other DNA
ggcattagattttagctggatttatgatcaaaagcagcttgcaacatttgcaaaccgcgaattactcaaaatgaa

SEQ ID NO: 750012 - DNA, 75 bp, synthetic construct
  source 1..75: mol_type = other DNA
taatgattcatataagaaaactatcgaaagtattttacagacttttggcggttttctatatatcaattcgggaaa

SEQ ID NO: 750013 - DNA, 75 bp, synthetic construct
  source 1..75: mol_type = other DNA
atgtttcagttcccccggttcgcctcattaacctatggattcagttaatgatagtgtgtcgaaacacactgggtt

SEQ ID NO: 750014 - DNA, 75 bp, synthetic construct
  source 1..75: mol_type = other DNA
tatctcgtttcaggttgaaattgaaacggcagaaccaaatcacacaagcacaacgatagtcggactggatgcagg

SEQ ID NO: 750015 - DNA, 75 bp, synthetic construct
  source 1..75: mol_type = other DNA
gactttagaggggctcccggaagaaccacgatacaactacgtaggtattacatcacgtaactggttggtaagaat

SEQ ID NO: 750016 - DNA, 75 bp, synthetic construct
  source 1..75: mol_type = other DNA
atgaatagaataagtggaagtgtttatatctggtatccaaaggatagaaatgtggggcactgctcattacaaata

SEQ ID NO: 750017 - DNA, 75 bp, synthetic construct
  source 1..75: mol_type = other DNA
ttcaaacccttgcatcaaaaccgggttccacaatctcaagtatcccatcagaaagacggatattgattaacatta

SEQ ID NO: 750018 - DNA, 75 bp, synthetic construct
  source 1..75: mol_type = other DNA
gatgcaaaaaggtggatcaataaatttcggtatatagcaagagctaaaggaattaatgaattgttcattattggt

SEQ ID NO: 750019 - DNA, 75 bp, synthetic construct
  source 1..75: mol_type = other DNA
tcactattcaggtggtgctttacttgtattatttgccacgttatctggtgttgtgtatggattgtcatggatgtg

SEQ ID NO: 750020 - DNA, 75 bp, synthetic construct
  source 1..75: mol_type = other DNA
cagaacaacaaacgccctgtcattgcgcaggattccgcatctcacagcgaatttgagaaagctttcccgaccgct

SEQ ID NO: 750021 - DNA, 75 bp, synthetic construct
  source 1..75: mol_type = other DNA
agagccagataagatttatcatttatggcgacaccctgatgaactgaagaaagccgctgcaacattcaacaatat

SEQ ID NO: 750022 - DNA, 75 bp, synthetic construct
  source 1..75: mol_type = other DNA
gcgtcaaaaaacagggcgttcgccgaacgtcttgttggcgtgatccgtctggctctcgctacgtcgggagtgaaa

SEQ ID NO: 750023 - DNA, 75 bp, synthetic construct
  source 1..75: mol_type = other DNA
gctatgtggaggtggaaaaaggccagttgaccttccgtaatgccgccgatctttatctctaccccaatacgctga

SEQ ID NO: 750024 - DNA, 75 bp, synthetic construct
  source 1..75: mol_type = other DNA
ccggcggcagataacaactggcgtttagcaccgatagccggcgataagaaactggatatccgtttcgaaacttcc

SEQ ID NO: 750025 - DNA, 75 bp, synthetic construct
  source 1..75: mol_type = other DNA
caaaaatggaagtgattggagtgcatcctccaaaatcaccgggtcagccggtgacaataaaggtcagatacaaaa

SEQ ID NO: 750026 - DNA, 75 bp, synthetic construct
  source 1..75: mol_type = other DNA
gggaaaaatcttcccctgtggtggatggcattatggcggcagttaacaacatgctgattgatatgctggctacta

SEQ ID NO: 750027 - DNA, 75 bp, synthetic construct
  source 1..75: mol_type = other DNA
tcgataaacgcagcgccctgtacaaagccaagcgcaagatcgagaaggccaaggcgcaagtgcgagcgaaggtag

SEQ ID NO: 750028 - DNA, 75 bp, synthetic construct
  source 1..75: mol_type = other DNA
ataggtaacgaagttaatgaaaaaataattgcagttatagtcaagacgttagcatatagagagtctatgttgtgt

SEQ ID NO: 750029 - DNA, 75 bp, synthetic construct
  source 1..75: mol_type = other DNA
atggatgatgtgttatctaaaaggtttaataaaaacaataagttttttaaaaacgataacttaatgtggtggtta

SEQ ID NO: 750030 - DNA, 75 bp, synthetic construct
  source 1..75: mol_type = other DNA
tatcgatgacgagattgttatatgggtggtcgccgtaggtaaacgggaagacgaaaaagcctatgaaacggcccg

SEQ ID NO: 750031 - DNA, 75 bp, synthetic construct
  source 1..75: mol_type = other DNA
ctgcaagtaaaaatagtacgcttgcgcatgaactggtgttcggctttctcctttttcaatcgttactcttctttg

SEQ ID NO: 750032 - DNA, 75 bp, synthetic construct
  source 1..75: mol_type = other DNA
gccgttacggtcagttgctgagcttcaccgactgttccggttatgtaaccgttatgaccatgaccgcttcgggca

SEQ ID NO: 750033 - DNA, 75 bp, synthetic construct
  source 1..75: mol_type = other DNA
gagttcgacaaccccaccacggatatccgtaaggacagatgcagcaagtgcatgcgcgggtgtgagatgcgcggc

SEQ ID NO: 750034 - DNA, 75 bp, synthetic construct
  source 1..75: mol_type = other DNA
tactatactttcttttattgctggttggccctgcttcggctgaggtagatctcaatccattctataatgttagtg

SEQ ID NO: 750035 - DNA, 75 bp, synthetic construct
  source 1..75: mol_type = other DNA
ctcagtgcaggacacaaacccgctaaaataatggaactggctggagtatcacgcgcaactttttaccgcatcaag

SEQ ID NO: 750036 - DNA, 75 bp, synthetic construct
  source 1..75: mol_type = other DNA
atggacgctttttttatgctataacgggtacgcgaaatgaaatccgtgataaaggattactgcaaataacttata

SEQ ID NO: 750037 - DNA, 75 bp, synthetic construct
  source 1..75: mol_type = other DNA
ccctaatgcttttgtcaattagtgcatatagcaatattggggatatagttatagatggttcaatcgctaatgcta

SEQ ID NO: 750038 - DNA, 75 bp, synthetic construct
  source 1..75: mol_type = other DNA
ctttagatgaacattatattgagcttaacacgccacactatcttgcacggttcatttggcagatagacaaaatta

SEQ ID NO: 750039 - DNA, 75 bp, synthetic construct
  source 1..75: mol_type = other DNA
gccttacatgttgatgacaacatttataacactaggaattttaagtagtaataagggttgtgaaaatgagtgtat

SEQ ID NO: 750040 - DNA, 75 bp, synthetic construct
  source 1..75: mol_type = other DNA
ctagctttggctgtattggttgtttttcaaatgatcggtgggattacagatttttacagatcttggcgtggggtt

SEQ ID NO: 750041 - DNA, 75 bp, synthetic construct
  source 1..75: mol_type = other DNA
ctttattatttaacagtgttggttatttttcagatgattggtgggattacagatttctatcgatcatggcgagga

SEQ ID NO: 750042 - DNA, 75 bp, synthetic construct
  source 1..75: mol_type = other DNA
ttgctctaaaaaatggtcgagatgaggcagaaaataatattaagctgattaactcgggcacggattcttgccttg

SEQ ID NO: 750043 - DNA, 75 bp, synthetic construct
  source 1..75: mol_type = other DNA
gacacaccgctggtggagtacacccgcgaccgcctgcaccgggaaacgctgcgccgcttcggccgttatgaactc

SEQ ID NO: 750044 - DNA, 75 bp, synthetic construct
  source 1..75: mol_type = other DNA
ggtggcagtatgacgaacgcggctggctgacagacatcagccatatcagcgaagggcaccgggtggcggtgcact

SEQ ID NO: 750045 - DNA, 75 bp, synthetic construct
  source 1..75: mol_type = other DNA
gtaaaattttcttcacctggtccaattatttttcgtcaaatacgatatggtatggatggtaaacctattaaggtt

SEQ ID NO: 750046 - DNA, 75 bp, synthetic construct
  source 1..75: mol_type = other DNA
tttaaacggttggaggatataattgtatcatctttaattcttatactgatatcgccaattcttctggttattgct

SEQ ID NO: 750047 - DNA, 75 bp, synthetic construct
  source 1..75: mol_type = other DNA
caggaagcccgtgagggggaaattgatcgtatttatattgcgatgagtatgcatgatgagtccaaaataaaggat

SEQ ID NO: 750048 - DNA, 75 bp, synthetic construct
  source 1..75: mol_type = other DNA
atttatgatgatcataactcaaatgattatcaaggtattacctatgcgggtaatgtttcacaattagttcaagat

SEQ ID NO: 750049 - DNA, 75 bp, synthetic construct
  source 1..75: mol_type = other DNA
cttgttttgacagttcttgttatttttcaaatgattggcggcattactgatttttatcgttcatggcgcggagta

SEQ ID NO: 750050 - DNA, 75 bp, synthetic construct
  source 1..75: mol_type = other DNA
agctacaaaaaatgatgtacgagtgacaaaggttggacgtttccttagaagtacctcactagatgagttacctca

SEQ ID NO: 750051 - DNA, 75 bp, synthetic construct
  source 1..75: mol_type = other DNA
aatgtaaatactagtggaaacatcacggtaacagcatttaatgactatggcgttgcaaccagctacactgttcaa

SEQ ID NO: 750052 - DNA, 75 bp, synthetic construct
  source 1..75: mol_type = other DNA
accgctggtgatgcgccagcttgctaccttcgcttttgaggactattcccgcagcgccgccagcgtcaagaggtg

SEQ ID NO: 750053 - DNA, 75 bp, synthetic construct
  source 1..75: mol_type = other DNA
attcctccaacacattcagaagataactacgtaacagtgaaagatgctatttctcatttgccagagatagattca

SEQ ID NO: 750054 - DNA, 75 bp, synthetic construct
  source 1..75: mol_type = other DNA
aaaagtttcctgcccggaatgtaaagggaagggggagatttctactgcctgtaaagactgccgtgggcgcggtat

SEQ ID NO: 750055 - DNA, 75 bp, synthetic construct
  source 1..75: mol_type = other DNA
ggaagataaaaaatggcctcttctttatgagttcgagcgtttaattcgcgaggtatctccagaaattgtaacaat

SEQ ID NO: 750056 - DNA, 75 bp, synthetic construct
  source 1..75: mol_type = other DNA
tttgtggtgctggcggattaactcatggtttgcaactcgcaggtcttgatgtcgttgctggtattgaccttgagg

SEQ ID NO: 750057 - DNA, 75 bp, synthetic construct
  source 1..75: mol_type = other DNA
gttacaacgatcgggagagggcgattgagttgctgtctgagtacgcgttaaccaaatgcgataaggttgccgcgc

SEQ ID NO: 750058 - DNA, 75 bp, synthetic construct
  source 1..75: mol_type = other DNA
tttctgaatgttctttttataatagtagagcagcttttaataccaattatgggtatattttatagaactaagtat

SEQ ID NO: 750059 - DNA, 75 bp, synthetic construct
  source 1..75: mol_type = other DNA
atctaccacgacgcgaaaccgggtggcgtaccgtcggactgggcgggcaactatgaccagcttattgacgatgcg

SEQ ID NO: 750060 - DNA, 75 bp, synthetic construct
  source 1..75: mol_type = other DNA
ttgctggagaaaaccgcacttgcagcagaacagatcgacgaagtgatttttggtcaggtcctgaccgccggaagc

SEQ ID NO: 750061 - DNA, 75 bp, synthetic construct
  source 1..75: mol_type = other DNA
ttggtgaaatactggaatgcaactttggtaactatcctgttagccaaaatggaccgttcagcacgacgtattacg

SEQ ID NO: 750062 - DNA, 75 bp, synthetic construct
  source 1..75: mol_type = other DNA
attgacctatccggtaaaagctgtacggcagagcgtaaagctcgtgatcgtctggccatggaacgtcacctgggt

SEQ ID NO: 750063 - DNA, 75 bp, synthetic construct
  source 1..75: mol_type = other DNA
tcgatgcctgggaaactgatgacctggacgttgtgctgaaactcatcagaaaagctatcaagaaatccccgctct

SEQ ID NO: 750064 - DNA, 75 bp, synthetic construct
  source 1..75: mol_type = other DNA
gcgcgatgagtctaaaataaaggatgtggttaggcaattaacggatacaacttgttctgtattgctaattcctga

SEQ ID NO: 750065 - DNA, 75 bp, synthetic construct
  source 1..75: mol_type = other DNA
tctattccgtcagttcagctttatatctataatctttctggctgtttattccaccaatgttaaaaataaaagtgt

SEQ ID NO: 750066 - DNA, 75 bp, synthetic construct
  source 1..75: mol_type = other DNA
tacgatgaccgtatgacagaaattctgcgaattgcgcaaacctacgaaccctggctggattaccgggaactggtt

SEQ ID NO: 750067 - DNA, 75 bp, synthetic construct
  source 1..75: mol_type = other DNA
cagcgtactggggctttttgtggcacgtaccacacgggatgctgatgtgacaagcctgtttgatgtactggactg

SEQ ID NO: 750068 - DNA, 75 bp, synthetic construct
  source 1..75: mol_type = other DNA
caggtcctgtaaatctctatatacctaccagtttcaaagataagtatcttgaagtagagtcatattttgtcgaca

SEQ ID NO: 750069 - DNA, 75 bp, synthetic construct
  source 1..75: mol_type = other DNA
gaaaaatcagggaaattaaaggtaattaataactctccattttatataagcattggggcattaaaagtcaatgga

SEQ ID NO: 750070 - DNA, 75 bp, synthetic construct
  source 1..75: mol_type = other DNA
tacccgtcatagcggaacagctagcccgtgagcaacctgagaacctgcgcacctatttcatggaacggctacggc

SEQ ID NO: 750071 - DNA, 75 bp, synthetic construct
  source 1..75: mol_type = other DNA
ttgctggtccgcaagcgtaccgctgacgttattaccgaatacgaatcactgtcagccgaaggcgaagtccccaac

SEQ ID NO: 750072 - DNA, 75 bp, synthetic construct
  source 1..75: mol_type = other DNA
ctatcgcaataaactggttcgttttggtcgggcaattgcgcagggagagtttatcgctcgtgatgccatcaacgc

SEQ ID NO: 750073 - DNA, 75 bp, synthetic construct
  source 1..75: mol_type = other DNA
aaaactaccagtctgggcaatacgctgtctgacgaaaatgtgaaaacaatgattattgccgagcataaaaatatg

SEQ ID NO: 750074 - DNA, 75 bp, synthetic construct
  source 1..75: mol_type = other DNA
agccatttcaaagcgatgaaacgttttctacaacagtctttcccggaagccagcgtactggggctttttgtggca

SEQ ID NO: 750075 - DNA, 75 bp, synthetic construct
  source 1..75: mol_type = other DNA
ctggccgaaactatggcgatgggcagaaaataggcggtcgtctttccgcctggcatgatttcaacgataactggc

SEQ ID NO: 750076 - DNA, 75 bp, synthetic construct
  source 1..75: mol_type = other DNA
aacaggctcgggtaaccaagggctgcgcatatcctatgcttctgttcttgaagcccgtggactgccgcatgcggc

SEQ ID NO: 750077 - DNA, 75 bp, synthetic construct
  source 1..75: mol_type = other DNA
atgacacccatgatgcacgagcgggtgcgcaacatgttcggcgatgccgggctaactaccggcttcacggtgcag

SEQ ID NO: 750078 - DNA, 75 bp, synthetic construct
  source 1..75: mol_type = other DNA
aaccaggtataaccgggttagcacaaattaatggatggcgtggagagacagatacccttgaaaaaatggaaaaac

SEQ ID NO: 750079 - DNA, 75 bp, synthetic construct
  source 1..75: mol_type = other DNA
ggccatcagcaggaagaggtgagtgctgccttacagcttgatgatgcgcctcaatttcaacagaacgaatccgtt

SEQ ID NO: 750080 - DNA, 75 bp, synthetic construct
  source 1..75: mol_type = other DNA
cgttaatacgttttacaatacattgttccccattattggctatgcggggtcaattatcaccatgatatggggttg

SEQ ID NO: 750081 - DNA, 75 bp, synthetic construct
  source 1..75: mol_type = other DNA
gctcgaatgcgaatgcttctttgatctcaatggctcaacgcttttccgatgtggtcataatctttttgggattat

SEQ ID NO: 750082 - DNA, 75 bp, synthetic construct
  source 1..75: mol_type = other DNA
agctacaaaaaatgatgttcgtgtaaccaaagttggtaagtttcttcggagaacttctttagatgaactccctca

SEQ ID NO: 750083 - DNA, 75 bp, synthetic construct
  source 1..75: mol_type = other DNA
gtatcaatatgattttcaaaaggctagaggatattattgtttcaagtattatccttgtattaatttcgcctgttt

SEQ ID NO: 750084 - DNA, 75 bp, synthetic construct
  source 1..75: mol_type = other DNA
agtacgacgatacgcatcagtgcctcgttgggggtaagtagcagcgaggaaaccggtgattatgattttgaacaa

SEQ ID NO: 750085 - DNA, 75 bp, synthetic construct
  source 1..75: mol_type = other DNA
ccggatatttatctggctgatgacggcggtgtggcggtggcggtgatcaccggagtgaactacggcagtgcgtcc

SEQ ID NO: 750086 - DNA, 75 bp, synthetic construct
  source 1..75: mol_type = other DNA
cagccatcgtcaccggtggagccacggggcttggccgggaatttgtcctttccctgtctaaagaaggcgtcaata

SEQ ID NO: 750087 - DNA, 75 bp, synthetic construct
  source 1..75: mol_type = other DNA
gctgatgttgcttaccccggcgctgggctatctcggagtaagaaccatggacggctttgcccggtacagcaaatc

SEQ ID NO: 750088 - DNA, 75 bp, synthetic construct
  source 1..75: mol_type = other DNA
ttgaggtggaacggcagaagctggtgctggctgacgagcaggccgcgcatcacgaacagcaggaaaccatccgca

SEQ ID NO: 750089 - DNA, 75 bp, synthetic construct
  source 1..75: mol_type = other DNA
caattctcagcgccttacgtctggcgcaggaactgggcgcggagacggcaacactttctgatccagcggaagaga

SEQ ID NO: 750090 - DNA, 75 bp, synthetic construct
  source 1..75: mol_type = other DNA
gggtggcacaggcgtgggcgggaacggggttcggcaacctggcgataccacgtgtgggtcaggaggtgattgtgg

SEQ ID NO: 750091 - DNA, 75 bp, synthetic construct
  source 1..75: mol_type = other DNA
cagaaaccgcgcggggaatgagccgctcgccggagatatggccgggacggcgaattgtgctgacggggcatccgc

SEQ ID NO: 750092 - DNA, 75 bp, synthetic construct
  source 1..75: mol_type = other DNA
aagcatcctcggcaccatactgcaggaaaacgacgtgacggagtggagcccgctgttcagtgagccgcatccttc

SEQ ID NO: 750093 - DNA, 75 bp, synthetic construct
  source 1..75: mol_type = other DNA
acttcctcaacggcgatccggaccagccgatcattatggggcgcacctaccaccaggaaaaccgcacacccggca

SEQ ID NO: 750094 - DNA, 75 bp, synthetic construct
  source 1..75: mol_type = other DNA
cttccgtatcttccagaatgaggacatcgaaagcatcctcggcacgatattgcaggaaaacggggtgaccgagtg

SEQ ID NO: 750095 - DNA, 75 bp, synthetic construct
  source 1..75: mol_type = other DNA
gcgcacacagacgttccaccgcgaagccgccggtgaattcagcggcgaaatcaccgacgtgacggatggtgccgg

SEQ ID NO: 750096 - DNA, 75 bp, synthetic construct
  source 1..75: mol_type = other DNA
agcgagagcaagtcgggatagcttcttgaaatcattaacattaaccagcttatcaggacaatctaacggcgggta

SEQ ID NO: 750097 - DNA, 75 bp, synthetic construct
  source 1..75: mol_type = other DNA
gtaatgatgataagacagatgctattcagaaaaatttaggtgatgcaccgcctttgagtaatgaagggatgaaac

SEQ ID NO: 750098 - DNA, 75 bp, synthetic construct
  source 1..75: mol_type = other DNA
aatggacgaacattggggctacgtcggtgctaaatcacgtcagcgctggctgggcaacgcgtatggctggaaact

SEQ ID NO: 750099 - DNA, 75 bp, synthetic construct
  source 1..75: mol_type = other DNA
atgggaatacacaacacctggacgtgtcatcgttgattattacgcttaataatggggaaacgattgaaatcacag

SEQ ID NO: 750100 - DNA, 75 bp, synthetic construct
  source 1..75: mol_type = other DNA
gaacagtcacgactggcgatccaaaactgtgtcgacatcatgactgaagccggttatagcctggcggatgtggtt

SEQ ID NO: 750101 - DNA, 75 bp, synthetic construct
  source 1..75: mol_type = other DNA
atttgttgtgtggctgatctggttgtcgattgtaaagtcgaagtcgatgtgacctgttataacgcgacccgctaa

SEQ ID NO: 750102 - DNA, 75 bp, synthetic construct
  source 1..75: mol_type = other DNA
ctcgggaattgttgccagctctgcacgcattgggctttcagggactggcgtaacggtatcattgtccattaacag

SEQ ID NO: 750103 - DNA, 75 bp, synthetic construct
  source 1..75: mol_type = other DNA
gccccgacggtcatcacagggccagacgggacggtggagatcagtgtcaccagccagacggcaggaatcagtgtg

SEQ ID NO: 750104 - DNA, 75 bp, synthetic construct
  source 1..75: mol_type = other DNA
ccttgcttatcgcaacatcatcaaggttcgcaggattgggcaaacacgatacatcgggatcaacacctgtctgga

SEQ ID NO: 750105 - DNA, 75 bp, synthetic construct
  source 1..75: mol_type = other DNA
ggtaagtttgacccgctgacgattcccgttcctgagtggcttgattctgtgtcctggagtgagtgggtggcctac

SEQ ID NO: 750106 - DNA, 75 bp, synthetic construct
  source 1..75: mol_type = other DNA
tcatggagtccatgatgatggtggggatagaatgaataacgtaaacttaaatgaaaatcctatccgcgctggttt

SEQ ID NO: 750107 - DNA, 75 bp, synthetic construct
  source 1..75: mol_type = other DNA
gtctcctgtcaaggaaaagaaaaagcggtgtttattgagcccaatgagtgtgtaaaattacctacggcacaaggc

SEQ ID NO: 750108 - DNA, 75 bp, synthetic construct
  source 1..75: mol_type = other DNA
gggataactcagtggctgacggagcaatggcgaacacgctgcaggtgaaggttaccgatgctaacggtaatacgc

SEQ ID NO: 750109 - DNA, 75 bp, synthetic construct
  source 1..75: mol_type = other DNA
ctaatccgcatcagcggcccgcaggagagccgggagtaccgttacagtgacacgggaaggctgacgggcgtccac

SEQ ID NO: 750110 - DNA, 75 bp, synthetic construct
  source 1..75: mol_type = other DNA
gggctggaggggggatggaacctgtaccaatatccgctgaatccagtgcaacacgttgatccattagggcttagt

SEQ ID NO: 750111 - DNA, 75 bp, synthetic construct
  source 1..75: mol_type = other DNA
gcaccctcgcaccggacctggacatccgcatcccgtatgccacggacccggcgggcaaccggctgccggacccgg

SEQ ID NO: 750112 - DNA, 75 bp, synthetic construct
  source 1..75: mol_type = other DNA
gtgctgaacgctatcgttcgtctgacctatggctggtccaagagttcggaccgcatcgccaatagcctcattgca

SEQ ID NO: 750113 - DNA, 75 bp, synthetic construct
  source 1..75: mol_type = other DNA
tttcaaggtatttagctggattttttcttttgcactcttgacgaaagaaaaatggaagatatttatagcatgtga

SEQ ID NO: 750114 - DNA, 75 bp, synthetic construct
  source 1..75: mol_type = other DNA
cggctgccggggcagcagtatgataaggagtcggggctgtactacaaccggaaccggtactacgatccgttgcag

SEQ ID NO: 750115 - DNA, 75 bp, synthetic construct
  source 1..75: mol_type = other DNA
attaatgaacattcagagttaaaactgataatcaatttaagtaatttaacagaaattgaagtggaggttgttatg

SEQ ID NO: 750116 - DNA, 75 bp, synthetic construct
  source 1..75: mol_type = other DNA
ccagttgccggaaacaacaattgacgttcaggaatcgaacccagaagtggagttccctgcatacttcgaacctgg

SEQ ID NO: 750117 - DNA, 75 bp, synthetic construct
  source 1..75: mol_type = other DNA
ttccggaaggtgcatttaccaccacggcaacgatccgcgcgtttattgatgagtacaacgccagcctgccagcgc

SEQ ID NO: 750118 - DNA, 75 bp, synthetic construct
  source 1..75: mol_type = other DNA
atccagttcctgactgtgtggttcaacactgattacatcgaccgtggcctgctggtcaaggaatggcagaaaggt

SEQ ID NO: 750119 - DNA, 75 bp, synthetic construct
  source 1..75: mol_type = other DNA
accgaggctcgcgccaacctgcagctggatgttgcactggaagatgcaggcatcgaaaccggccgtggtaaggac

SEQ ID NO: 750120 - DNA, 75 bp, synthetic construct
  source 1..75: mol_type = other DNA
gcgccaaactgcaccgggaaatcatcgaccgtgactatcacctgagcgccgccatgtattgcgagaccgcggcac

SEQ ID NO: 750121 - DNA, 75 bp, synthetic construct
  source 1..75: mol_type = other DNA
ttgccagtagctggcgcgcaggaaccaaacagtcaggatcaacctcgagttgagaatcttggcgctggaattttc

SEQ ID NO: 750122 - DNA, 75 bp, synthetic construct
  source 1..75: mol_type = other DNA
accagtatgagcaggaccgcatcaccgtcacggacagcctgaaccggcgtgaggtgctgcatacagaaggcgggc

SEQ ID NO: 750123 - DNA, 75 bp, synthetic construct
  source 1..75: mol_type = other DNA
tttaatacatttggctttactcctaagcgctgggaaccgtttgatgtcgcgatgatatttgtgggcaccatggca

SEQ ID NO: 750124 - DNA, 75 bp, synthetic construct
  source 1..75: mol_type = other DNA
ctatccgggcgcaaattgatgccctttccccagaggatatgtccattctgcaaggctacgctgatggaatgaatg

SEQ ID NO: 750125 - DNA, 75 bp, synthetic construct
  source 1..75: mol_type = other DNA
tggtgatgaagtcggtaccgaagaacaatctcagcagccagatcagccgaacctgatcgtcgtagccaccctgcc

SEQ ID NO: 750126 - DNA, 75 bp, synthetic construct
  source 1..75: mol_type = other DNA
atgctgagtggaaaatgattcgggcggttaaggacattttcacaccagacgaagagcacgaaccaagattgatcg

SEQ ID NO: 750127 - DNA, 75 bp, synthetic construct
  source 1..75: mol_type = other DNA
cgccaccctgccgccgcaggttccgcttggcgctaacctggaagaaacggcacagaactatatggcgctgccagc

SEQ ID NO: 750128 - DNA, 75 bp, synthetic construct
  source 1..75: mol_type = other DNA
tatatgacgctgccagctgagttccagcgtatcgaggcagaccagaagcagaccgctgtcgcgatgaaggcctgc

SEQ ID NO: 750129 - DNA, 75 bp, synthetic construct
  source 1..75: mol_type = other DNA
taccagcaacggatgcgtaatttagcgcgccagttgatcacgtctgcaattccgtccattgacccggagaaataa

SEQ ID NO: 750130 - DNA, 75 bp, synthetic construct
  source 1..75: mol_type = other DNA
agaataaaaaggtaactagctggataaaatgtagcgataatttttatctcgggatagatgcaggaagaaatgtcg

SEQ ID NO: 750131 - DNA, 75 bp, synthetic construct
  source 1..75: mol_type = other DNA
aaaccagaatatcaccgaactctccgggggaaatcagcagaaagtcctgatctccaaatggctgtgctgttgccc

SEQ ID NO: 750132 - DNA, 75 bp, synthetic construct
  source 1..75: mol_type = other DNA
atgtttaaacgctgggaagagaaaaaagagttacctggaatcgatagcctgacctttgcgaatgggactgtcacc

SEQ ID NO: 750133 - DNA, 75 bp, synthetic construct
  source 1..75: mol_type = other DNA
tatgtatcaatacaggaggcctttgatgaaaaggattccatcaggatcatggctgcgctgacctctattgttctg

SEQ ID NO: 750134 - DNA, 75 bp, synthetic construct
  source 1..75: mol_type = other DNA
atttgatgcatggcagagccacactgaactcaccccgattctatatgaaatagctctggaggtctggccctacct

SEQ ID NO: 750135 - DNA, 75 bp, synthetic construct
  source 1..75: mol_type = other DNA
gaacaagaactggttaaaaatgtcggcaacggaatattcgacgttacggctttgctgcagaactcagcaactcat

SEQ ID NO: 750136 - DNA, 75 bp, synthetic construct
  source 1..75: mol_type = other DNA
ctggattttcgtcaacaaagacgagggctatcactggatcgccatcgttgaggccagcgaagaactgattgagct

SEQ ID NO: 750137 - DNA, 75 bp, synthetic construct
  source 1..75: mol_type = other DNA
cacccgaccgccggaaaactgctgctgcaccctgatcgcgctgttgagacgagctatttcggtatcgatgaagag

SEQ ID NO: 750138 - DNA, 75 bp, synthetic construct
  source 1..75: mol_type = other DNA
tacgatccgttgcaggggcggtatatcaccccggacccgattgggttgagaggtggatggaatatgtatcagtat

SEQ ID NO: 750139 - DNA, 75 bp, synthetic construct
  source 1..75: mol_type = other DNA
gtttacatgtttatcatatgcgttctcacatggttcttggctttgcacaaccaaacattgatgggaatatatctt

SEQ ID NO: 750140 - DNA, 75 bp, synthetic construct
  source 1..75: mol_type = other DNA
tcagtagtgtgcagcgtactgattccggaaccaatgccaacggcggttacgtcactgaccgtggacctgatacat

SEQ ID NO: 750141 - DNA, 75 bp, synthetic construct
  source 1..75: mol_type = other DNA
gcagtatttttgattccagaggggcatattgtcgtgctgtttctgacttattaacctttacctcgtatggttgtg

SEQ ID NO: 750142 - DNA, 75 bp, synthetic construct
  source 1..75: mol_type = other DNA
gttgaaattgaccgactatggtcggactgatacctcgaattgtccaggtataaatacgaagaatttttactgtgc

SEQ ID NO: 750143 - DNA, 75 bp, synthetic construct
  source 1..75: mol_type = other DNA
agcatactgtcgtgcagtttcagatttattaacgtttacctcttatggttgcgataatgcaaaggtgacagtcac

SEQ ID NO: 750144 - DNA, 75 bp, synthetic construct
  source 1..75: mol_type = other DNA
tccggtgtggtcctggtcgggttcagcatctttcttggcaatctgccttacaggcttcttaaacctgaaatgcat

SEQ ID NO: 750145 - DNA, 75 bp, synthetic construct
  source 1..75: mol_type = other DNA
ctgatgttctctctatttaagaacggtaaaccggtgaccggtgatgaatataatgctaaaaacgccatcttcacc

SEQ ID NO: 750146 - DNA, 75 bp, synthetic construct
  source 1..75: mol_type = other DNA
ttataaccttcatccggcacacgctaaacgtgtcgaggaaattatcgctgaaaataaaccgcccttttctgtttt

SEQ ID NO: 750147 - DNA, 75 bp, synthetic construct
  source 1..75: mol_type = other DNA
ctgccgcattgctggcatggcgcgagtatggtgacaccagccgacgggatgacatcgtgcagcgtaaccgcctgc

SEQ ID NO: 750148 - DNA, 75 bp, synthetic construct
  source 1..75: mol_type = other DNA
cctggaaagaagcacttaccgatcaggggatcgatgtaattagcgaagtcatggctgaagtgatttttaagctaa

SEQ ID NO: 750149 - DNA, 75 bp, synthetic construct
  source 1..75: mol_type = other DNA
aagatcgttgtcgactcgattaagtcgccacaaggcccgatacgttttaagcgttttaacccaaccaaaggcgag

SEQ ID NO: 750150 - DNA, 75 bp, synthetic construct
  source 1..75: mol_type = other DNA
ttatcaatgatgttctgaaccttgtcagcggtgtacgcgacaccgtgaccgaacctctttggtcaatgcgggttt

SEQ ID NO: 750151 - DNA, 75 bp, synthetic construct
  source 1..75: mol_type = other DNA
gttcagtgactgacggaaagtatggttttgccagcagccttccggacgttgtccctgagctgaccgatgccatgc

SEQ ID NO: 750152 - DNA, 75 bp, synthetic construct
  source 1..75: mol_type = other DNA
gtatggtgacaccagccgacgggatgacatcgtgcagcgtaaccgcctgcgccacccgtcattcatcctgccaac

SEQ ID NO: 750153 - DNA, 75 bp, synthetic construct
  source 1..75: mol_type = other DNA
cgttcttatctgcctgagtccactttatgccagcccgctgtacctgcttgtccttgaaccactcggcgcagccac

SEQ ID NO: 750154 - DNA, 75 bp, synthetic construct
  source 1..75: mol_type = other DNA
ggagataaacttttaaaggatgttacaaaactatctattacagccccttctgtttgtaatagacaacattggcgc

SEQ ID NO: 750155 - DNA, 75 bp, synthetic construct
  source 1..75: mol_type = other DNA
ttacggttgatcgtaatggcagtctggcgctgggtttgtgggcgctcagcggcgcaagaatgaaaccatcaccac

SEQ ID NO: 750156 - DNA, 75 bp, synthetic construct
  source 1..75: mol_type = other DNA
gccctctggcaacccacggatgtgaagtccggcaatcattaacaataagggaggacggacgtgagatccggtgct

SEQ ID NO: 750157 - DNA, 75 bp, synthetic construct
  source 1..75: mol_type = other DNA
atgcgtgaagcctttatatgtgacggaattcgtacaccaattggccgctacggtgggacattatcaggtgttcgg

SEQ ID NO: 750158 - DNA, 75 bp, synthetic construct
  source 1..75: mol_type = other DNA
ctgagatgcatctgggtgaaccttttgacccaaatgctatcttaggaacagttaaccaggcatcgtacgtatctg

SEQ ID NO: 750159 - DNA, 75 bp, synthetic construct
  source 1..75: mol_type = other DNA
aaacggtggcattggtcaaagcgccgggcgcagaaggcctgtccattgaaaacgccaccgggatttctaccgact

SEQ ID NO: 750160 - DNA, 75 bp, synthetic construct
  source 1..75: mol_type = other DNA
gctggggataaacttatgagttcaagtttcgacagtgtgagaatttattatgcgatggacacgataacagggata

SEQ ID NO: 750161 - DNA, 75 bp, synthetic construct
  source 1..75: mol_type = other DNA
aaccggtgctgtagcgagcagtgttttcaatgttacggtgataacgccaaaggaggttgcatatgggaaatatga

SEQ ID NO: 750162 - DNA, 75 bp, synthetic construct
  source 1..75: mol_type = other DNA
aaaaaacccaatggaacaacgggatatctgtcaaaaaaagacgttccattaaagacaaacaacgcagcgccaaca

SEQ ID NO: 750163 - DNA, 75 bp, synthetic construct
  source 1..75: mol_type = other DNA
gagcaaaacgaccacgccagaacgcttacccggaagcgcaacaccatgacgattcaacgcacgaagaaaacagaa

SEQ ID NO: 750164 - DNA, 75 bp, synthetic construct
  source 1..75: mol_type = other DNA
gcagcccctgataatcagagcgctctgctttgcagaaactctggggcggtttggagacaggagatgccatttaac

SEQ ID NO: 750165 - DNA, 75 bp, synthetic construct
  source 1..75: mol_type = other DNA
tacctgatggaaaacggcaaactctgtgacggcagcgtttttgatagtagaggtgcatactgccgtgcggtatca

SEQ ID NO: 750166 - DNA, 75 bp, synthetic construct
  source 1..75: mol_type = other DNA
cattgacggtgcaaaactaatagattgcatttggtttagaaatggaaaattaatgcccgccgtgatggaaattga

SEQ ID NO: 750167 - DNA, 75 bp, synthetic construct
  source 1..75: mol_type = other DNA
agtctcagtgaatcgacaattatccgttacctgttgtgtggagacgaaaaacaggatgtagttttagtccggcaa

SEQ ID NO: 750168 - DNA, 75 bp, synthetic construct
  source 1..75: mol_type = other DNA
gggggggagctggatcgttattgcccttttcggaatgttttcggcgaataagtctcagtgaatcgacaattatcc

SEQ ID NO: 750169 - DNA, 75 bp, synthetic construct
  source 1..75: mol_type = other DNA
gagaagaacgccaaatcccgcatacgccgcgctggggataagtcaccacttcctctctggcagaacgagagggtg

SEQ ID NO: 750170 - DNA, 75 bp, synthetic construct
  source 1..75: mol_type = other DNA
aataggttaccaacagatgctgcttatcaacagaatttaaatgttaatataacaaaacacaaacctacaacctgt

SEQ ID NO: 750171 - DNA, 75 bp, synthetic construct
  source 1..75: mol_type = other DNA
aaatcgcctgacagtaatgcgaatgttcaaacagtatattctaattcattcatcttgaatgctcctgcggttgtc

SEQ ID NO: 750172 - DNA, 75 bp, synthetic construct
  source 1..75: mol_type = other DNA
tcgtcgtttatgaccgcgtgtatcagtactatcagcggcaggcttggtgcgttgtttcatacagacattgcagca

SEQ ID NO: 750173 - DNA, 75 bp, synthetic construct
  source 1..75: mol_type = other DNA
attaagatcggaagaaattaatgtaacagacaaagatcgtgatgctgccttttatgcggtcaccgtttttataga

SEQ ID NO: 750174 - DNA, 75 bp, synthetic construct
  source 1..75: mol_type = other DNA
tgttttcaggaaataagaactaaatgtactttagctattgaacaggcggtattaagatcggaagaaattaatgta

SEQ ID NO: 750175 - DNA, 75 bp, synthetic construct
  source 1..75: mol_type = other DNA
atgactttacttgattgttatatacctgtgtttacattgattactgatattgaagcgaattatacacaatataat

SEQ ID NO: 750176 - DNA, 75 bp, synthetic construct
  source 1..75: mol_type = other DNA
gatacattcacatgtaatgcaacaagcgataaaatgtattatgcaacaccgttaaaagattatattgttgaactt

SEQ ID NO: 750177 - DNA, 75 bp, synthetic construct
  source 1..75: mol_type = other DNA
cggcagaagcctgtattttgagcacctgtttcccggtgaggacggctacagccgcagcgagtcactgtggctggt

SEQ ID NO: 750178 - DNA, 75 bp, synthetic construct
  source 1..75: mol_type = other DNA
tttctgacagcgtttgtttatccacctggaaagcggcgttactcggtagtgaacataaacgcgtacccgacgatt

SEQ ID NO: 750179 - DNA, 75 bp, synthetic construct
  source 1..75: mol_type = other DNA
cctgatgaacaaattaactaaaatggcggccattgagaatcagtacaccttcccgattaccgcgaaatatgtccg

SEQ ID NO: 750180 - DNA, 75 bp, synthetic construct
  source 1..75: mol_type = other DNA
ttggcatcaacctgtttttgcatttataagattaaactcaaaatttgaaccgtcaacaacatattttatcgcatc

SEQ ID NO: 750181 - DNA, 75 bp, synthetic construct
  source 1..75: mol_type = other DNA
tagttttatgtttttactggtaatatcaattgccagttttttatatgcaacaattacaacagtgcataatatgga

SEQ ID NO: 750182 - DNA, 75 bp, synthetic construct
  source 1..75: mol_type = other DNA
ttatttactctgacaactggggtggggaggagtataataacagcgtagagaaattaaaatactgctacgataacg

SEQ ID NO: 750183 - DNA, 75 bp, synthetic construct
  source 1..75: mol_type = other DNA
acgctcagagatgccaaaattgatagcatatctagccaaatgctatggcgtttggctaatgcaattcaagaggat

SEQ ID NO: 750184 - DNA, 75 bp, synthetic construct
  source 1..75: mol_type = other DNA
gttatgttgggggttatgccagctatgagtcaccatggggaacgctggcaggttcaatttctgcaaatagcgata

SEQ ID NO: 750185 - DNA, 75 bp, synthetic construct
  source 1..75: mol_type = other DNA
taacattcattatatcattatttgtgatggtcccatatgacctaaaaaatcttggtcaatcagtagttgcaacta

SEQ ID NO: 750186 - DNA, 75 bp, synthetic construct
  source 1..75: mol_type = other DNA
ggaattgttaacgcattaggtgagcctaacgagaaagaaggacctaaccagtatgtttcaatctatcctattatc

SEQ ID NO: 750187 - DNA, 75 bp, synthetic construct
  source 1..75: mol_type = other DNA
aagaaggtctgacggctgcgtggtgtttagctttccttcatcgggcaggcatctaatttatcgcgtcaatggcat

SEQ ID NO: 750188 - DNA, 75 bp, synthetic construct
  source 1..75: mol_type = other DNA
tcggttttcgtagccaacggccagaaaatgatacaggtaaaggacctgacaatttatgggcaatgggagaaaaca

SEQ ID NO: 750189 - DNA, 75 bp, synthetic construct
  source 1..75: mol_type = other DNA
taatattcattatatcattatttatgatggttccatatgacctaaagaatctaggccaatcagttgttgcaacaa

SEQ ID NO: 750190 - DNA, 75 bp, synthetic construct
  source 1..75: mol_type = other DNA
gacatcccgcaacttaaaaagctataccaacttgttgatgcatgtattgaaggtacagggattactgtagtggat

SEQ ID NO: 750191 - DNA, 75 bp, synthetic construct
  source 1..75: mol_type = other DNA
ttctttactggtcaacagcaaatggtcgcgggagataaagtcatttcggtagcaaatcactatcgagcagacgct

SEQ ID NO: 750192 - DNA, 75 bp, synthetic construct
  source 1..75: mol_type = other DNA
gccagtgcggggactgtggagcttaattccggtgttggtggcttttccgttgattttatgccaacagcccccctg

SEQ ID NO: 750193 - DNA, 75 bp, synthetic construct
  source 1..75: mol_type = other DNA
tgaccggaacgcctacagctcctactgcgacgcagacggcgaacaatacgcagattgcaactactgcttttgtga

SEQ ID NO: 750194 - DNA, 75 bp, synthetic construct
  source 1..75: mol_type = other DNA
acaaccgctggacaatacgctgactcatttgagtggaaaggatgtagctggtcttctcgcataccttggtttggg

SEQ ID NO: 750195 - DNA, 75 bp, synthetic construct
  source 1..75: mol_type = other DNA
tttacggggaatgatgttgccagtctggcaaccctgacagaagtcgggcgggatattcttgcgaaatcgaccgtt

SEQ ID NO: 750196 - DNA, 75 bp, synthetic construct
  source 1..75: mol_type = other DNA
tcgcgcttgatccgaacgctaatgtcacttcacaagctgactgggaagcacttccggctctgctttctggtttta

SEQ ID NO: 750197 - DNA, 75 bp, synthetic construct
  source 1..75: mol_type = other DNA
cttggtttgggagaaggttcggcattacccgttggcgtgcctgttccgtggccttccaccactccgccaacaggc

SEQ ID NO: 750198 - DNA, 75 bp, synthetic construct
  source 1..75: mol_type = other DNA
ggtgatggatggatgaaattacccaacgggaaaatcctgcaatatggtcgaggtgaggctatgccgaaattatcg

SEQ ID NO: 750199 - DNA, 75 bp, synthetic construct
  source 1..75: mol_type = other DNA
tggtgtattttccccgcacgccgtcggtatcgacgacggggagcattgaggtgattagggggaaatcagcaacct

SEQ ID NO: 750200 - DNA, 75 bp, synthetic construct
  source 1..75: mol_type = other DNA
tacctgatctccgcggtgagtttattcgtggctgggatgatgggcgcggcattgatacagggcgtgctttattga

SEQ ID NO: 750201 - DNA, 75 bp, synthetic construct
  source 1..75: mol_type = other DNA
acacccaccaagggcagctcttcagagttagtgattatcgtacaaaagaaataccagcatcagaagttatgggaa

SEQ ID NO: 750202 - DNA, 75 bp, synthetic construct
  source 1..75: mol_type = other DNA
gcgggccacgcaattaactttcatgatggtatcgccggaaatcagccaggattttcacgatttaatttcaccagt

SEQ ID NO: 750203 - DNA, 75 bp, synthetic construct
  source 1..75: mol_type = other DNA
tggagcagataatccctcgaagttactggatttagacagcttcaggtcaatgatgtcaggtaatggctacatcta

SEQ ID NO: 750204 - DNA, 75 bp, synthetic construct
  source 1..75: mol_type = other DNA
caaagcgccaacgccagcggaggggaataacaccacgcagattgcgaccaccgcgtttgttcaggcggcactgac

SEQ ID NO: 750205 - DNA, 75 bp, synthetic construct
  source 1..75: mol_type = other DNA
ggcggcgggcaaattcaggcgattgaaaatgcaggcggcaccgaaacacgcccacgtaacattgcattcaacttt

SEQ ID NO: 750206 - DNA, 75 bp, synthetic construct
  source 1..75: mol_type = other DNA
tcaagttcgaacctgaatggtttacgttgaatgaactaacagggcttcaagggctaccgaaaactgtacagggga

SEQ ID NO: 750207 - DNA, 75 bp, synthetic construct
  source 1..75: mol_type = other DNA
ttgacaccaccctgctcgcccgcgccgctgaagcgctggcagcacggtttggcgcgcaggccacgaccgttaagc

SEQ ID NO: 750208 - DNA, 75 bp, synthetic construct
  source 1..75: mol_type = other DNA
ttgacaccaccctgctcgcccgcgccgccgaagcgctggcagcacggtttggcgcgcaggctacagcgattaagc

SEQ ID NO: 750209 - DNA, 75 bp, synthetic construct
  source 1..75: mol_type = other DNA
aaaacgtcgccgttcgcgatgaactggaggtgatggtcaaatgcccggaactggcattacgcgaagtccaggcac

SEQ ID NO: 750210 - DNA, 75 bp, synthetic construct
  source 1..75: mol_type = other DNA
gaacgcccggagaaaaaggaaaaagaagaactttatttattcgcatctgaacgcgagcgcaatttaaagaaaaac

SEQ ID NO: 750211 - DNA, 75 bp, synthetic construct
  source 1..75: mol_type = other DNA
gtcatggcatgtcacaacacggaataccgctgatttattactccgataacgggggcggtgaaaaaaaccaggtac

SEQ ID NO: 750212 - DNA, 75 bp, synthetic construct
  source 1..75: mol_type = other DNA
gctcacatcgagatatagctctcaaatatggagtcggtctgtcgactctctacaagcgttatccggctcagcaag

SEQ ID NO: 750213 - DNA, 75 bp, synthetic construct
  source 1..75: mol_type = other DNA
tcggatggataactccgatgtaagactcccttggctcgtccaagcatgggttgaagatattaacgagaagcgcac

SEQ ID NO: 750214 - DNA, 75 bp, synthetic construct
  source 1..75: mol_type = other DNA
ccctggcttgtacaggcatggattgaagatgcgtctgaaaagaaaacaaccgcactgacagccacgcccatggtg

SEQ ID NO: 750215 - DNA, 75 bp, synthetic construct
  source 1..75: mol_type = other DNA
acgtcggcacacaaaccttactggtgccgatggtacaaaacgccgacgaagcccgtgaagcggtacgcgccaccc

SEQ ID NO: 750216 - DNA, 75 bp, synthetic construct
  source 1..75: mol_type = other DNA
ctgagcgccgatatgggttatgccggtaatccgcagcacccggaagtgcaggccgcgattgagcaggcgatcgtg

SEQ ID NO: 750217 - DNA, 75 bp, synthetic construct
  source 1..75: mol_type = other DNA
ttgacaccaccctgctcgcccgcgccgccgaagcgctggcagcacggtttggtgctcaggccaccgccgtgaagc

SEQ ID NO: 750218 - DNA, 75 bp, synthetic construct
  source 1..75: mol_type = other DNA
ataatccgacatttaccggagaaccaaaagcgccgacgcctgcagcaggaaataacaccacgcggattgcgacca

SEQ ID NO: 750219 - DNA, 75 bp, synthetic construct
  source 1..75: mol_type = other DNA
gacgatttctcgtgtgtatgtgaggtggtctactttccccgcacgccgtcggtatcgagacggggatcattgagg

SEQ ID NO: 750220 - DNA, 75 bp, synthetic construct
  source 1..75: mol_type = other DNA
atgaaatcttccagtcatttcactgtgttcgaatacgggcatttagtgagtgaggaaggtgatgcccgtataaat

SEQ ID NO: 750221 - DNA, 75 bp, synthetic construct
  source 1..75: mol_type = other DNA
acgatatcgggttaggtgaaaaaggtcagttcacggatttacaggatcaggtaatttccaacctgttcaagctgt

SEQ ID NO: 750222 - DNA, 75 bp, synthetic construct
  source 1..75: mol_type = other DNA
cctggcaccgtctgtttgtggacccgttaagccgcgccatgtacagctctgacggcccggattttgagtttgtgc

SEQ ID NO: 750223 - DNA, 75 bp, synthetic construct
  source 1..75: mol_type = other DNA
gcacttatggccagtatttcaactccgatgagccgtccctgcgggatgacgcaaaaatggtggtgctggagctgg

SEQ ID NO: 750224 - DNA, 75 bp, synthetic construct
  source 1..75: mol_type = other DNA
actaacacgactcagattgctagcacggcatttgtgcaggcggtggtcactgcgctaaataacgcactggcgttg

SEQ ID NO: 750225 - DNA, 75 bp, synthetic construct
  source 1..75: mol_type = other DNA
ccggtcaaatcaccagcggggacttcatcctgccgcagtaccaggatgaggtgaagaaagcgctggcaccggcat

SEQ ID NO: 750226 - DNA, 75 bp, synthetic construct
  source 1..75: mol_type = other DNA
ggccgttccggagctgacagacatgattggtctgctctccactgaagccatccggaccaccttcggcaccgtgca

SEQ ID NO: 750227 - DNA, 75 bp, synthetic construct
  source 1..75: mol_type = other DNA
gagattgtcggtggtgaaccgggcaccgggaaatcggtactggtgaacgccctcagtaacgcaatggtgacctct

SEQ ID NO: 750228 - DNA, 75 bp, synthetic construct
  source 1..75: mol_type = other DNA
cgaatacggtttcaattttcacaccatgtacggcgaaccgtactggtgtgaagatgcttactacaagttgaccct

SEQ ID NO: 750229 - DNA, 75 bp, synthetic construct
  source 1..75: mol_type = other DNA
aagtttgctatccgcacggttctgagtacgcagtatctgagggactacccggaaagcgttcttaagtcagcaaat

SEQ ID NO: 750230 - DNA, 75 bp, synthetic construct
  source 1..75: mol_type = other DNA
ggcatcccggcggggcggcaccggacggcagcggaaccgcctttctcggtgtgttccggacccgacagggcacga

SEQ ID NO: 750231 - DNA, 75 bp, synthetic construct
  source 1..75: mol_type = other DNA
agtggcggataaccccctgacaccggcaggtctgctggcacccacctaccgtaaccagctggcgtttatcgatat

SEQ ID NO: 750232 - DNA, 75 bp, synthetic construct
  source 1..75: mol_type = other DNA
tacatcaaaagataaactcccttattttacaggggaagatcgagctgccttaactgcactgacaagtgttgggcg

SEQ ID NO: 750233 - DNA, 75 bp, synthetic construct
  source 1..75: mol_type = other DNA
gacagctttgcgtatatttgtgaggtggtgtatttcccccgcacgccatcggtgtcgacgacggggattattgat

SEQ ID NO: 750234 - DNA, 75 bp, synthetic construct
  source 1..75: mol_type = other DNA
ggaattactccagcaacatctggaatatgtcaaaaccggtttgccgggcgtggcgtgggtgcgggtgaacgaaga

SEQ ID NO: 750235 - DNA, 75 bp, synthetic construct
  source 1..75: mol_type = other DNA
tgctgttgtgctggcaacccgcaagtatgtggatgacaaggcactggagctgaaggtgtacgtggatgatctgat

SEQ ID NO: 750236 - DNA, 75 bp, synthetic construct
  source 1..75: mol_type = other DNA
tctgcgggtatttgcgactcaggattacactcccggcagtgcaaatgttggctatatagcttgtgccggttataa

SEQ ID NO: 750237 - DNA, 75 bp, synthetic construct
  source 1..75: mol_type = other DNA
actaatttgagtggaaaggatgtagctggtcttctcacataccttggtttgggagaagcggccaaattgcctgcg

SEQ ID NO: 750238 - DNA, 75 bp, synthetic construct
  source 1..75: mol_type = other DNA
gctggttgcggtgatgttctccctgattatctacatcgagaacaggatgtaccgcacgccgcgtactctcaagaa

SEQ ID NO: 750239 - DNA, 75 bp, synthetic construct
  source 1..75: mol_type = other DNA
cgcagcgtgctggactccgggggctttgccgtggtgttcgacatgggggatggctacaagtctttgtgtgagaac

SEQ ID NO: 750240 - DNA, 75 bp, synthetic construct
  source 1..75: mol_type = other DNA
aataacaccaactataacatggcggtctgtggcacctccggggccggtaaaaccgggttgatacagccacttatc

SEQ ID NO: 750241 - DNA, 75 bp, synthetic construct
  source 1..75: mol_type = other DNA
atggataagattaagcgccatctggcgtggtgggttgtcgggttactggcggttgctgccgtcctggcgtggtgg

SEQ ID NO: 750242 - DNA, 75 bp, synthetic construct
  source 1..75: mol_type = other DNA
cttactctcatttacacgttacgcttttttaaagcgggcaaagagatgttccactacaacgaaaaagaccggaac

SEQ ID NO: 750243 - DNA, 75 bp, synthetic construct
  source 1..75: mol_type = other DNA
tggttcagcgcgcagagagctttaatgtggccaacctgatgccgttagtggcggataaccccctgacaccggcag

SEQ ID NO: 750244 - DNA, 75 bp, synthetic construct
  source 1..75: mol_type = other DNA
cctgaagaaaaacgccgcgatgagcagttcgcggcgttttacgattattgcattgaagttactcgcaggaatttt

SEQ ID NO: 750245 - DNA, 75 bp, synthetic construct
  source 1..75: mol_type = other DNA
tgaaatatgtgatcgactcgcgaagatcgcagctttttccgcagcagatatgcctcacaagaaagatattggttt

SEQ ID NO: 750246 - DNA, 75 bp, synthetic construct
  source 1..75: mol_type = other DNA
tgaaatatgtgatcgactcgcgaagatcgcagctttttccgcagccgatacgcctcacaagaaagacattggttt

SEQ ID NO: 750247 - DNA, 75 bp, synthetic construct
  source 1..75: mol_type = other DNA
ggacctatccaggcacacgcgccagcgccacaatgattggcgatgacgagacaaactggggcacaaaatcgctgg

SEQ ID NO: 750248 - DNA, 75 bp, synthetic construct
  source 1..75: mol_type = other DNA
cggtacgctcacgcgttgaaaaaagcgaagccaacgcgcaagcaaccaatgacgtcattcccccggccagaatgc

SEQ ID NO: 750249 - DNA, 75 bp, synthetic construct
  source 1..75: mol_type = other DNA
cttagtgattcgtcacagtatactgctttttacagagcaggcgctggcacacagtatattaaagaacgctcaggt

SEQ ID NO: 750250 - DNA, 75 bp, synthetic construct
  source 1..75: mol_type = other DNA
aaaccattcctcctggcaccgtctgtttgtggacccgttaagccgcgccatgtacagctctgacggcccggattt

SEQ ID NO: 750251 - DNA, 75 bp, synthetic construct
  source 1..75: mol_type = other DNA
ccggggccggtaaaaccgggctgatacagccacttatccgcagcgtgctggactccgggggctttgccgtggtgt

SEQ ID NO: 750252 - DNA, 75 bp, synthetic construct
  source 1..75: mol_type = other DNA
tgcatctgccactgtgaacaatacctggtggcaactgacaggagactcctcacttcgctcgttaaaaaataccgg

SEQ ID NO: 750253 - DNA, 75 bp, synthetic construct
  source 1..75: mol_type = other DNA
gcacttacggccggtattttaactctgatgagccgtccctgcgggatgatgccagaatggtggtgctggagctgg

SEQ ID NO: 750254 - DNA, 75 bp, synthetic construct
  source 1..75: mol_type = other DNA
attctggaaatggaaaacctggtgaaaatcatccgggcgtcgttacagggtgccagtatcaccacacagacggtg

SEQ ID NO: 750255 - DNA, 75 bp, synthetic construct
  source 1..75: mol_type = other DNA
tcatgaggcggtgtggcagctggcgtggaagaaatcagggccggagatggcttcgctggaagcctggctggaaga

SEQ ID NO: 750256 - DNA, 75 bp, synthetic construct
  source 1..75: mol_type = other DNA
ggatgttcgccgacctggaagaggcaactgacgtggaaacccgcgttgctctttacgacaaaatactcaaagctg

SEQ ID NO: 750257 - DNA, 75 bp, synthetic construct
  source 1..75: mol_type = other DNA
tgcgttaagcaaaaagcataatcgcagcaaattgaatatgatccgccatgctatcctcatgcttgcagagtctga

SEQ ID NO: 750258 - DNA, 75 bp, synthetic construct
  source 1..75: mol_type = other DNA
tttgtttggttctgaaagaaaatatatctttagcatcagcgtttcaaacaatagatcatgtttatactataacat

SEQ ID NO: 750259 - DNA, 75 bp, synthetic construct
  source 1..75: mol_type = other DNA
ctgatgaagcgcattggtcgctgcatgggatatctgcagctggcggcagaggttgaagcacttgcctgtggtgct

SEQ ID NO: 750260 - DNA, 75 bp, synthetic construct
  source 1..75: mol_type = other DNA
gaccgtattgaggctgttaaggctgttttgcgtagactggcaggcaactctccggtaactccggatggttggata

SEQ ID NO: 750261 - DNA, 75 bp, synthetic construct
  source 1..75: mol_type = other DNA
acaggtcggtattatggggatcataagttatcacgccagtttattgttaaaacacgatgtggtaaataaagcgcg

SEQ ID NO: 750262 - DNA, 75 bp, synthetic construct
  source 1..75: mol_type = other DNA
tgtcaccatgattggcgatgacacaacaaactggggaaccaaatcgctggcgattctcgatatgccatttaccgc

SEQ ID NO: 750263 - DNA, 75 bp, synthetic construct
  source 1..75: mol_type = other DNA
tgaagaacaataaaaagcaggggctgatgaagtgcattggtcgttgcatgggatatctgcagatagctgctgaga

SEQ ID NO: 750264 - DNA, 75 bp, synthetic construct
  source 1..75: mol_type = other DNA
cagggttataacgccattatcgtttctgcggtttcgcctgatggcttgtgtccggcactgaaacgcgccatgcaa

SEQ ID NO: 750265 - DNA, 75 bp, synthetic construct
  source 1..75: mol_type = other DNA
tactacattaatcagggaacgcccgcccagttgggaggtatgttggtggatatggcggcgcgtcaggtgaataaa

SEQ ID NO: 750266 - DNA, 75 bp, synthetic construct
  source 1..75: mol_type = other DNA
caaggatgcagttgtgcgggaggctcttcttcgtgattttgataatccgccctttaaaaaagtgccggcttactg

SEQ ID NO: 750267 - DNA, 75 bp, synthetic construct
  source 1..75: mol_type = other DNA
ctcattgaatttgccattgattacctgaagaacaataaaaagcaggggctgatgaagtgcattggtcgttgcatg

SEQ ID NO: 750268 - DNA, 75 bp, synthetic construct
  source 1..75: mol_type = other DNA
agatgccgccgtcaacactgcggtcagaaaaagatgatattgaatcacgcattgaaaaactggagtgctgtgtta

SEQ ID NO: 750269 - DNA, 75 bp, synthetic construct
  source 1..75: mol_type = other DNA
ggtaactcctcctacaaaattatcctcaaacagagtgcgaaggagttcgcgaaatacaaccagctgtacgacatc

SEQ ID NO: 750270 - DNA, 75 bp, synthetic construct
  source 1..75: mol_type = other DNA
tttgaaggcacgggcgttgaagagaagggcattgtggtttccgtcaccgggcatgacgcgccgggcgttaaaccg

SEQ ID NO: 750271 - DNA, 75 bp, synthetic construct
  source 1..75: mol_type = other DNA
cggaagagctcgaagtcgaagaaaaagagctgaaacccgagtaccacttcaatgctggtcaaacccagcacgaaa

SEQ ID NO: 750272 - DNA, 75 bp, synthetic construct
  source 1..75: mol_type = other DNA
acgtgagctggtaaaacattctcccggcgactttggctaccagcgttcacgctggagtacagaactgctggcaat

SEQ ID NO: 750273 - DNA, 75 bp, synthetic construct
  source 1..75: mol_type = other DNA
acatgctgcgcaccaaactgccgcgcggggtgccgttctgcatccatctgatgtccagtcagctggttggtgaca

SEQ ID NO: 750274 - DNA, 75 bp, synthetic construct
  source 1..75: mol_type = other DNA
tggtggaagatcaggtgaaaacccacagtgaagccaacctgaagtacatggacctggagaaaaagtcgaagacct

SEQ ID NO: 750275 - DNA, 75 bp, synthetic construct
  source 1..75: mol_type = other DNA
gcactaaggatttggtgaaagcagcggtatcgggatggctgggcactgcgcttgaatttatggatttcaagtttt

SEQ ID NO: 750276 - DNA, 75 bp, synthetic construct
  source 1..75: mol_type = other DNA
gataattgtaaaaacgccaagactgcgttgtacaagaatcagcaacaagatgcgcctgtgcctcaaattaattaa

SEQ ID NO: 750277 - DNA, 75 bp, synthetic construct
  source 1..75: mol_type = other DNA
atcatccggaggaagcgatctcgaaagttgaagagtgtaaaaagtcaggcgacgtatcggataattgtaaaaacg

SEQ ID NO: 750278 - DNA, 75 bp, synthetic construct
  source 1..75: mol_type = other DNA
gacgccgagaccaacggcaaagagcaggggcgatgtcagccagagtgccagacttaatatcatcatcccgaccaa

SEQ ID NO: 750279 - DNA, 75 bp, synthetic construct
  source 1..75: mol_type = other DNA
tggaggaaaagaaagattacggttgcaaattaacgggaccgctgtaccagaaaacgttaatgtaagctctgacga

SEQ ID NO: 750280 - DNA, 75 bp, synthetic construct
  source 1..75: mol_type = other DNA
ggcaattacacttatccatggaaccaggaacaaagagagaacaggaaagctcacgccatgaagagtaatgcgact

SEQ ID NO: 750281 - DNA, 75 bp, synthetic construct
  source 1..75: mol_type = other DNA
ttaagttttataaccatatatctacttattaactcaatagggttacagcgcgaatctaatgaaagcttaaccaat

SEQ ID NO: 750282 - DNA, 75 bp, synthetic construct
  source 1..75: mol_type = other DNA
agaccagtggttcagttccttcctgctgcaggtggagaaaccattcctcctggcaccgtctgtttgtggacccgt

SEQ ID NO: 750283 - DNA, 75 bp, synthetic construct
  source 1..75: mol_type = other DNA
ttccaacgctgaagctctggctgttatcgctgaagctgttaaagctgctggctatgaactgggcaaagacatcac

SEQ ID NO: 750284 - DNA, 75 bp, synthetic construct
  source 1..75: mol_type = other DNA
tatctctcaccgttctggtgaaactgaagatgctaccatcgctgacctggctgttggtactgctgcaggccagat

SEQ ID NO: 750285 - DNA, 75 bp, synthetic construct
  source 1..75: mol_type = other DNA
gtgagatgagcttcccgcagttcagccgtctgctgccgtaccgtgattacaaccaggaatccggtctgttcatga

SEQ ID NO: 750286 - DNA, 75 bp, synthetic construct
  source 1..75: mol_type = other DNA
ctgagtattcatgaggcagtgtggcagctggcgtggaagaagtcagggccggaaatggcttcgctggaagcctag

SEQ ID NO: 750287 - DNA, 75 bp, synthetic construct
  source 1..75: mol_type = other DNA
cagaagctacaggggacacttcctgacgagacttgcactggaattaaatctgcatgtatttttacgttccagtga

SEQ ID NO: 750288 - DNA, 75 bp, synthetic construct
  source 1..75: mol_type = other DNA
tgatgagccgtccctgcgggatgatgccagaatggtggtgctggagctggggggactggaagaccgtccgtccct

SEQ ID NO: 750289 - DNA, 75 bp, synthetic construct
  source 1..75: mol_type = other DNA
cgcagcgtgctggactccgggggctttgccgtggtgttcgacatgggggatggctacaagtccctgtgtgagaac

SEQ ID NO: 750290 - DNA, 75 bp, synthetic construct
  source 1..75: mol_type = other DNA
cgtgcctattatatgatagctgcagcgacacagtttccgctgccggagggtatgaatctgcccctgaccctgcgt

SEQ ID NO: 750291 - DNA, 75 bp, synthetic construct
  source 1..75: mol_type = other DNA
aagcagttcgcactgcgccgtgccgatattatccgggtactgggcattgatattgaaaaatccccagctcctgct

SEQ ID NO: 750292 - DNA, 75 bp, synthetic construct
  source 1..75: mol_type = other DNA
ctgatgctgatggtctgtgcctgttcaccaaacgcctgaaggaaggccagtttatctggcctgcggtacgtgacg

SEQ ID NO: 750293 - DNA, 75 bp, synthetic construct
  source 1..75: mol_type = other DNA
tgtctcgctcttgatgtaaacggacgtcctctggataaaaacattacgctgcatgatctgctgggtggatttgcc

SEQ ID NO: 750294 - DNA, 75 bp, synthetic construct
  source 1..75: mol_type = other DNA
gataccgatataatgaagttcatgttccatagtgaaaccaaccttgcaaatacggattaccgggaaaaccggtcc

SEQ ID NO: 750295 - DNA, 75 bp, synthetic construct
  source 1..75: mol_type = other DNA
atttttcctgaggcaagtcagggacttcgattcccgctggtttaagactatcttccagtgcagcctgttgcgtta

SEQ ID NO: 750296 - DNA, 75 bp, synthetic construct
  source 1..75: mol_type = other DNA
cctgggatgccttcgccgagagcgtcaccgaagcgcagaagcttgcgcagcccgaggacttcgatttcctgcacc

SEQ ID NO: 750297 - DNA, 75 bp, synthetic construct
  source 1..75: mol_type = other DNA
tgctgatttcagtattgagataaaaggtggaatacacgcaaatgaaggcactatcgtaatcaccacacagcatcc

SEQ ID NO: 750298 - DNA, 75 bp, synthetic construct
  source 1..75: mol_type = other DNA
gcagtaaacgtattaggacttcaagcgctacctgttaaaggatgtcgggacgttactattacagcaaatgaaact

SEQ ID NO: 750299 - DNA, 75 bp, synthetic construct
  source 1..75: mol_type = other DNA
gcgagaacttcgccaccctgcgccgttacacgccggccttgctggaggtgctggaactgcgcgccgcgccggccg

SEQ ID NO: 750300 - DNA, 75 bp, synthetic construct
  source 1..75: mol_type = other DNA
atctgacaggtgattatatctggaaaagcaaccggataccggcttctggtaagtttcgtcggctaagaccagcta

SEQ ID NO: 750301 - DNA, 75 bp, synthetic construct
  source 1..75: mol_type = other DNA
gaccaccattctggctgacggcatcaaccttgggctgacaaaaatggcggaatcctgccctggggccacaagatc

SEQ ID NO: 750302 - DNA, 75 bp, synthetic construct
  source 1..75: mol_type = other DNA
taataatgaaacgctcttgcgtcgcaaaatcggtatcttgcctgctgatttcagtattgagataaaaggtggaat

SEQ ID NO: 750303 - DNA, 75 bp, synthetic construct
  source 1..75: mol_type = other DNA
ccagaacggactggccgtggccctgcgcgagctgggccggatcgagcgcacgctgttcatcgataggaatttaaa

SEQ ID NO: 750304 - DNA, 75 bp, synthetic construct
  source 1..75: mol_type = other DNA
tttatcgggcctgcggtgcatgacggtgagagatccgttacccgctcgcagcgggcaatgctcctcgataagctg

SEQ ID NO: 750305 - DNA, 75 bp, synthetic construct
  source 1..75: mol_type = other DNA
agaataagcatcagcagcagttccaggcgtcaggcaaggccatcaacgccaaggtacgtctgtacgggcgcatcg

SEQ ID NO: 750306 - DNA, 75 bp, synthetic construct
  source 1..75: mol_type = other DNA
gcttccgggcgcgggaggcaggtgtggagggggaactgctgtcaccgtcaaaattcgtggtgcccgcgcaggatg

SEQ ID NO: 750307 - DNA, 75 bp, synthetic construct
  source 1..75: mol_type = other DNA
cccgtgacattcaaaaaaggcggcatgaaattctgggtgcgctttgccgagaagtacggctcaccgtgggttatc

SEQ ID NO: 750308 - DNA, 75 bp, synthetic construct
  source 1..75: mol_type = other DNA
atcgcctcgcgcagccgctccatcgacttcttcgggctggggatgtacctgcctaaccctgaccccattctgaaa

SEQ ID NO: 750309 - DNA, 75 bp, synthetic construct
  source 1..75: mol_type = other DNA
accagctgcaggacggcgatattgacgagacaccaccgtcggaacgccagaataacatgctgccgctgtcatttg

SEQ ID NO: 750310 - DNA, 75 bp, synthetic construct
  source 1..75: mol_type = other DNA
cggtcagaatcagaccactgaagcgaacagtaacaaggcctctgcacaggccgggctggaggtgacggctgatat

SEQ ID NO: 750311 - DNA, 75 bp, synthetic construct
  source 1..75: mol_type = other DNA
tgccgtgctctacgggtatcagccctgtgaaatcatgtggggccgttcggtcaggtcgtgggcggtgacggatat

SEQ ID NO: 750312 - DNA, 75 bp, synthetic construct
  source 1..75: mol_type = other DNA
gttcaaggacttcgaggactacctggtgccgcccgcgaaattcgccagcctcaagcaggccagcgaattgccgct

SEQ ID NO: 750313 - DNA, 75 bp, synthetic construct
  source 1..75: mol_type = other DNA
accgaactctcgccacatgctcgaacatattgagcgcctgaaatcctggcaagcacttgatctgcccgcaggcat

SEQ ID NO: 750314 - DNA, 75 bp, synthetic construct
  source 1..75: mol_type = other DNA
ccatcccttcgccgagcactggggcgacggcaccacctcatcgtcggacggccagaacttccgcaccggcagcaa

SEQ ID NO: 750315 - DNA, 75 bp, synthetic construct
  source 1..75: mol_type = other DNA
atggcccgtggactctgggtttcacccagtgagttcgtcaaatttgccgaacctaataaaacactgacggagcag

SEQ ID NO: 750316 - DNA, 75 bp, synthetic construct
  source 1..75: mol_type = other DNA
actggcaatgctcctcgataagctggactggcgtcagccaaaaacattccgccttaacgcactgacaatgttgta

SEQ ID NO: 750317 - DNA, 75 bp, synthetic construct
  source 1..75: mol_type = other DNA
cagtacgcgccatttcacaccaaggtcgtgaacgtcggcgtgcgcgattcgacctacgtgctcgacggcctgctg

SEQ ID NO: 750318 - DNA, 75 bp, synthetic construct
  source 1..75: mol_type = other DNA
ctgatgctgatggtctgtgcctgttcaccaaacgcctggaggaaggccagtttatctggcctgcggtgcgtgacg

SEQ ID NO: 750319 - DNA, 75 bp, synthetic construct
  source 1..75: mol_type = other DNA
tctgcctcctcccccttcccggtgatgcagcagagcggttgttcccgtcgatgcggtttcgtgtcagggaacgca

SEQ ID NO: 750320 - DNA, 75 bp, synthetic construct
  source 1..75: mol_type = other DNA
tcgcagaggcaggtatggcggcaagggaggccggtcatgccgtccgtgagatggagcgatggatggtgccgaaca

SEQ ID NO: 750321 - DNA, 75 bp, synthetic construct
  source 1..75: mol_type = other DNA
aggcgaaatgcgtgcatacccgaagtgcaattacagaaaaaacagcgtctggttcgggtgattgaaaaagggtta

SEQ ID NO: 750322 - DNA, 75 bp, synthetic construct
  source 1..75: mol_type = other DNA
gaaagccataacgtgaagtgtgaagccatccgtgtcgatccatacacgcaaaaacgcttcacgttctttaacgat

SEQ ID NO: 750323 - DNA, 75 bp, synthetic construct
  source 1..75: mol_type = other DNA
atgacatcgatgcggcagtggcgcaccttgaaagccataacgtgaagtgtgaagccatccgtgtcgatccataca

SEQ ID NO: 750324 - DNA, 75 bp, synthetic construct
  source 1..75: mol_type = other DNA
atattgcgattattgcgacggattatgcggtgagcaaagctttctactgcgatattcttggtttcacgctgcaaa

SEQ ID NO: 750325 - DNA, 75 bp, synthetic construct
  source 1..75: mol_type = other DNA
gcgcgatcagtggacgcaacatatcgtgcaggatggagaccagatcctgctttttcaggttattgcagggggttg

SEQ ID NO: 750326 - DNA, 75 bp, synthetic construct
  source 1..75: mol_type = other DNA
tggcgattaatcaacaaatcgtcccgcgcgagcaatgggcgcaacatatcgtgcaggatggcgaccagatcctgc

SEQ ID NO: 750327 - DNA, 75 bp, synthetic construct
  source 1..75: mol_type = other DNA
cggcgaaatgtgtccggtgtggcctggtcagccgatctcggcgcattggggatttgaagacccggccgccgtcga

SEQ ID NO: 750328 - DNA, 75 bp, synthetic construct
  source 1..75: mol_type = other DNA
cggcgagcgtatcgatatcgtcctgtgggatgataaccccgcacagttcgtgattaacgcaatggcaccggcaga

SEQ ID NO: 750329 - DNA, 75 bp, synthetic construct
  source 1..75: mol_type = other DNA
cgcaaaagcggtgattttgacactttccgccgctggctggttgttgatgaagtcacacagccgaccaaagaaatc

SEQ ID NO: 750330 - DNA, 75 bp, synthetic construct
  source 1..75: mol_type = other DNA
gggaacttaacgtaatgaccgttgacgacctgcaggctaagcatcaggcggaagcgcacgcagcgatcgacacct

SEQ ID NO: 750331 - DNA, 75 bp, synthetic construct
  source 1..75: mol_type = other DNA
tccggataatcccaacagtaacacgctgggtttacgtaatgcactggcaattgctggcgcgaaaaatggtatacg

SEQ ID NO: 750332 - DNA, 75 bp, synthetic construct
  source 1..75: mol_type = other DNA
cacaattaacggtacggtttatcagctgtctgtcatctggcgcggagagtattgggttctggatcttgctgacag

SEQ ID NO: 750333 - DNA, 75 bp, synthetic construct
  source 1..75: mol_type = other DNA
tgcgacgacccggcaaatgataatccaacccaaaccgacctcggcattaaaagccatctctacgcagtaacggag

SEQ ID NO: 750334 - DNA, 75 bp, synthetic construct
  source 1..75: mol_type = other DNA
tttaataatgtaaaagggatgacaacatcaggaagtccgcattttgaaggaagtgtttttgagcaactttatagg

SEQ ID NO: 750335 - DNA, 75 bp, synthetic construct
  source 1..75: mol_type = other DNA
atggaaaaaagaaaaattatcctggattgtgatccgggtcatgatgatgctattgcaataatgatgacagcgaaa

SEQ ID NO: 750336 - DNA, 75 bp, synthetic construct
  source 1..75: mol_type = other DNA
gagattaatgttccggtttatgcggggatgccgcagcccattatgcgtcaacaaatcgttgccgataatattcac

SEQ ID NO: 750337 - DNA, 75 bp, synthetic construct
  source 1..75: mol_type = other DNA
acttgccatgctccttgataagctggactggcgccagccaaaaatatcccgccttaactcactgacaatgttgta

SEQ ID NO: 750338 - DNA, 75 bp, synthetic construct
  source 1..75: mol_type = other DNA
tcatggatcaacgcggttatatcatcaccaataaacacgtcatcaacgacgccgatcagatcatcgtcgccttac

SEQ ID NO: 750339 - DNA, 75 bp, synthetic construct
  source 1..75: mol_type = other DNA
ccacgcgcacccgactctgcatgagtctgtgggtctggcggcagaaatattcgaaggtagcatcactgacctgcc

SEQ ID NO: 750340 - DNA, 75 bp, synthetic construct
  source 1..75: mol_type = other DNA
ggtgctaactaatctggtgctatctctgtctgtattggggttggtctatttcatttttcaaattctgggaatgag

SEQ ID NO: 750341 - DNA, 75 bp, synthetic construct
  source 1..75: mol_type = other DNA
gatgctttcatcaatagcaaacatgaattctgctcctgaaagcagtctgatgataacagcctcttctaatgttga

SEQ ID NO: 750342 - DNA, 75 bp, synthetic construct
  source 1..75: mol_type = other DNA
gcattcaacgatgcagcacgccgcatcgaagaaactcagaaagaaaaaatggcgtctgtttcttctggaatgcag

SEQ ID NO: 750343 - DNA, 75 bp, synthetic construct
  source 1..75: mol_type = other DNA
acaaaccggccatctctgctctggagacgatggatcaggtggcagaaattcgccctggttcggtgatcccggttg

SEQ ID NO: 750344 - DNA, 75 bp, synthetic construct
  source 1..75: mol_type = other DNA
cccgtgcggcatggggtaactcctcctacaaaattatcctcaaacagagtgcgaaggagttcgcgaaatataacc

SEQ ID NO: 750345 - DNA, 75 bp, synthetic construct
  source 1..75: mol_type = other DNA
cgcgtattgatgacgtggtggatttcctgaaaaacgcccgggataacgaccagtatgccgagtccccgaccatcc

SEQ ID NO: 750346 - DNA, 75 bp, synthetic construct
  source 1..75: mol_type = other DNA
gaagtgcgcgccgacaagctgctggtcgccaccggccggacaccgaacacgcgcagcctggcattggaagcggcg

SEQ ID NO: 750347 - DNA, 75 bp, synthetic construct
  source 1..75: mol_type = other DNA
cgtctgctggacttcaaaaatcacaaggtcggtgaatttattgagaaaggctaccgtaccgcccgccgtcatacc

SEQ ID NO: 750348 - DNA, 75 bp, synthetic construct
  source 1..75: mol_type = other DNA
taaaaccggactgatacagccacttatccgcagcgtgctggactccgggggctttgccgtggtgttcgacatggg

SEQ ID NO: 750349 - DNA, 75 bp, synthetic construct
  source 1..75: mol_type = other DNA
gtattggaatacacgcaagccagccaggtcgcgcatgtggacggcgaattcgtgctgaccaccgggtacggtgaa

SEQ ID NO: 750350 - DNA, 75 bp, synthetic construct
  source 1..75: mol_type = other DNA
tcatcgccgggctggcgtgcgtggatggcgtatttctggaagagtcgctggagcagaaagcggagtatttgcggg

SEQ ID NO: 750351 - DNA, 75 bp, synthetic construct
  source 1..75: mol_type = other DNA
cctgttcaccaaacgccttgaggaaggtcagtttatctggcctgcggtgcgtgacggtaagatatccattacccg

SEQ ID NO: 750352 - DNA, 75 bp, synthetic construct
  source 1..75: mol_type = other DNA
ccgtaccgcccgtcgtcataccggtgcttatatcaccatcacacagaacatcgtcgactttgactctgacaaggc

SEQ ID NO: 750353 - DNA, 75 bp, synthetic construct
  source 1..75: mol_type = other DNA
gccaagtcgcccatgtggacggcgaattcgtgctgaccactggacagggcgaagtgcgcgccgacaagctgctgg

SEQ ID NO: 750354 - DNA, 75 bp, synthetic construct
  source 1..75: mol_type = other DNA
atcggctcgtcggtggtggcgctggaactggcgcaagccttcgcccggctgggtagccaggtcacgatccttgcg

SEQ ID NO: 750355 - DNA, 75 bp, synthetic construct
  source 1..75: mol_type = other DNA
gcggctttatcaagctggtcatcgaggaaggtagcggacggctcatcggcgtgcaggtcgtcgccccggaagccg

SEQ ID NO: 750356 - DNA, 75 bp, synthetic construct
  source 1..75: mol_type = other DNA
ggatggctacaagtccctgtgtgagaacatggggggcgtatatctggacggtgaaaccctgcgttttaacccgtt

SEQ ID NO: 750357 - DNA, 75 bp, synthetic construct
  source 1..75: mol_type = other DNA
atgatcggtctgttcactaacccgtatgtcgcgattatgctgctgtgtatcggtggttttgctcaccaggccctg

SEQ ID NO: 750358 - DNA, 75 bp, synthetic construct
  source 1..75: mol_type = other DNA
gatgcgacgggcgtcacgctcaccccgcaaggcgcatcgtcatcgaccccggcatgcgtacaagcgtggaacaca

SEQ ID NO: 750359 - DNA, 75 bp, synthetic construct
  source 1..75: mol_type = other DNA
tcatgaggcagtgtggcagctggcgtggaagaagtcagggccggagatggcttcgctggaagcctggctggaaga

SEQ ID NO: 750360 - DNA, 75 bp, synthetic construct
  source 1..75: mol_type = other DNA
gaaatccggaatatgctggccccacagtatgcctccctgcgccggaccggcatgcagatggaggatattcttgac

SEQ ID NO: 750361 - DNA, 75 bp, synthetic construct
  source 1..75: mol_type = other DNA
gaagtccgtgcgcctctctgacgcatttttcacagcacctgacgcccgcgctggcgtcatttttccggaataccg

SEQ ID NO: 750362 - DNA, 75 bp, synthetic construct
  source 1..75: mol_type = other DNA
atgaaaaaacaaaactactcaaccttcacaagttatctttctaaaacgcacaaaaatgtagatctttatagattg

SEQ ID NO: 750363 - DNA, 75 bp, synthetic construct
  source 1..75: mol_type = other DNA
gaatttccatctggcccgtaacccggaaatcgccttcctgtggaacatggccgataactacagcaatctgctgaa

SEQ ID NO: 750364 - DNA, 75 bp, synthetic construct
  source 1..75: mol_type = other DNA
gttagtggcggataaccccctgacaccggcaggtctgctggcacccacctaccgtaaccagctggcgtttatcga

SEQ ID NO: 750365 - DNA, 75 bp, synthetic construct
  source 1..75: mol_type = other DNA
cctattatatgaacgcggcagcgacacagttcccgctgccggaggggatgaatctgcccctgaccctgcgccatt

SEQ ID NO: 750366 - DNA, 75 bp, synthetic construct
  source 1..75: mol_type = other DNA
cagctggacccgtattctgatctgaattatcagtgtgtggaggacagttttgatctgaaagtccgggctgattac

SEQ ID NO: 750367 - DNA, 75 bp, synthetic construct
  source 1..75: mol_type = other DNA
tcactcaggcggttaactccctcgtcacagcactgaaactgcctgacgaatcagcaaaggccaatgaagttctgg

SEQ ID NO: 750368 - DNA, 75 bp, synthetic construct
  source 1..75: mol_type = other DNA
gcacgccgcgtaacctcaagaaactgaacgttattgatgaaggctggcgtctgctggacttcaaaaatcacaagg

SEQ ID NO: 750369 - DNA, 75 bp, synthetic construct
  source 1..75: mol_type = other DNA
ataatcacgttcacccgcataaattacgtcactcgttcgccacgcatatgctggagtcgagcggcgatcttcgtg

SEQ ID NO: 750370 - DNA, 75 bp, synthetic construct
  source 1..75: mol_type = other DNA
tgtggcaccgcgtaaccagtggaattacctcgacactgacgtactgcaatgggtgttggaaaacgactacgaccc

SEQ ID NO: 750371 - DNA, 75 bp, synthetic construct
  source 1..75: mol_type = other DNA
gtattcatgaggcggtgtggcagctggcgtggaagaaatcggggccggagatggcttcgctggaggcctggctgg

SEQ ID NO: 750372 - DNA, 75 bp, synthetic construct
  source 1..75: mol_type = other DNA
atggacctggagaaaaagtcgaagacctcctatgccaaatggtttccgtccgtggagaaagaggcgaaggagtgg

SEQ ID NO: 750373 - DNA, 75 bp, synthetic construct
  source 1..75: mol_type = other DNA
aggttgcccgggaaaacctgctgcaggagcgtctgcagcagatggagcgggatatggttcgtgacctgcagaaag

SEQ ID NO: 750374 - DNA, 75 bp, synthetic construct
  source 1..75: mol_type = other DNA
ccgtaacccggaaatcgcttttttgtggaacatggccgacaactacagcaacctgctgaacccggagttgtccat

SEQ ID NO: 750375 - DNA, 75 bp, synthetic construct
  source 1..75: mol_type = other DNA
tggcagtgaaaccatcgacatggaccctacccgtccgaaagccatttggggctttaacggcactgaacgcccggg

SEQ ID NO: 750376 - DNA, 75 bp, synthetic construct
  source 1..75: mol_type = other DNA
agaccggctaccgtaccgtgcgtcgtcaccgtggcgcgttcatcaccatcagccagaacatcaaggactttgatg

SEQ ID NO: 750377 - DNA, 75 bp, synthetic construct
  source 1..75: mol_type = other DNA
aaataacccggatatgttcatgctgtggatgggcggcgataacctatccaatctgctcagcccggacctggccat

SEQ ID NO: 750378 - DNA, 75 bp, synthetic construct
  source 1..75: mol_type = other DNA
gacattctgatgaacggaggtgtgttaaatggcacgctggaacccgtcctggcacctctgttcaggcgggtcgaa

SEQ ID NO: 750379 - DNA, 75 bp, synthetic construct
  source 1..75: mol_type = other DNA
gctgcttgaccagtacactgccaacggcacttatggccggtattttaactctgatgagccgtccctgcgggatga

SEQ ID NO: 750380 - DNA, 75 bp, synthetic construct
  source 1..75: mol_type = other DNA
gcaagctgccgcgtaagacaccgatttccttccacctggtgtccagtaagctgattggcgagcagctggatcgtg

SEQ ID NO: 750381 - DNA, 75 bp, synthetic construct
  source 1..75: mol_type = other DNA
aaggtggttctcaaacaggatgcgtcggaattcaaacagtacaatcagaaccgccccaaccagttcagcgagctg

SEQ ID NO: 750382 - DNA, 75 bp, synthetic construct
  source 1..75: mol_type = other DNA
agccagaacatcaaggactttgatgccgatgatgcctctggcgcggcaaaagcagcctggggtaactctgccttc

SEQ ID NO: 750383 - DNA, 75 bp, synthetic construct
  source 1..75: mol_type = other DNA
agaccggctaccgtaccgtgcgccgtcaccggggggcgttcatcaccatcagccagaacatcaaggactttgatg

SEQ ID NO: 750384 - DNA, 75 bp, synthetic construct
  source 1..75: mol_type = other DNA
aggctggaaactgctcaactttaaaaatgagaaagtcggtgagtttattgagaccggctaccgtaccgtgcgccg

SEQ ID NO: 750385 - DNA, 75 bp, synthetic construct
  source 1..75: mol_type = other DNA
acccgtttgccaacatctccaatatcaatgagtccggggagcgtatccgcgatcagctggcggtgctggccagcc

SEQ ID NO: 750386 - DNA, 75 bp, synthetic construct
  source 1..75: mol_type = other DNA
acctcgacctggagtccggcgaagtgtgggtgatgggaaaaggcagcaaagagcgccgcctgccgattggtcgca

SEQ ID NO: 750387 - DNA, 75 bp, synthetic construct
  source 1..75: mol_type = other DNA
cgaaactgggcaagcgtatctccgcgcgtaatgtgcagaaacgctttgccgaatggggcataaaacaggggctga

SEQ ID NO: 750388 - DNA, 75 bp, synthetic construct
  source 1..75: mol_type = other DNA
atgaccgatttacataccgatgtggaacgctacctacgttatctcggcgtagagcgtcagcttagcccaattacc

SEQ ID NO: 750389 - DNA, 75 bp, synthetic construct
  source 1..75: mol_type = other DNA
tgcccctttgtcatcacgctgacgctgatggtggaggaccaggtgaagacccagaatgaagccaacatgaaattc

SEQ ID NO: 750390 - DNA, 75 bp, synthetic construct
  source 1..75: mol_type = other DNA
aacctgccggaattgggattcgtgaagaccgagcattaattacccaggacatgtcacggttttatccgcatattt

SEQ ID NO: 750391 - DNA, 75 bp, synthetic construct
  source 1..75: mol_type = other DNA
gcccggactggcgcgaaaaagcccacgaatacggtttcaattttcacaccatgtacggcgaaccgtactggtgtg

SEQ ID NO: 750392 - DNA, 75 bp, synthetic construct
  source 1..75: mol_type = other DNA
cgccggggtgagtattcacgatgccgtgtacgaactggcctgccgtaacttcccggatgaaatggcagacctgga

SEQ ID NO: 750393 - DNA, 75 bp, synthetic construct
  source 1..75: mol_type = other DNA
aacttcgatgcatctgcagagcgtatccgtgaccagctttccgtcatggccagtcccaatgggaatcttgatgaa

SEQ ID NO: 750394 - DNA, 75 bp, synthetic construct
  source 1..75: mol_type = other DNA
agttgagaaagaagttaaggagtggggggatattcgccagcgactgtcttccaattcctcttcactggtgtccta

SEQ ID NO: 750395 - DNA, 75 bp, synthetic construct
  source 1..75: mol_type = other DNA
ggacgatcccggtttcgttcagtacgctggggaacgccctgagccaccgctttatcttcggcccgttgacggaga

SEQ ID NO: 750396 - DNA, 75 bp, synthetic construct
  source 1..75: mol_type = other DNA
ttctgaacaggtcgggcagtggggcgcgccaacgctggacgtttgggtggtgcgcaaagattttgccgagaaaca

SEQ ID NO: 750397 - DNA, 75 bp, synthetic construct
  source 1..75: mol_type = other DNA
atggcaatttcatcgcgtaacacatttcttgccgcactggcattcatcgcttttcaggcgcaggcggtgaacgtc

SEQ ID NO: 750398 - DNA, 75 bp, synthetic construct
  source 1..75: mol_type = other DNA
agggatcgtcttttctgcaggagcattcgtatcggcgattgtcgctgtacgtattggtatatggctctaccatcg

SEQ ID NO: 750399 - DNA, 75 bp, synthetic construct
  source 1..75: mol_type = other DNA
cgtcgcagagttcttttgtccatgcttagtttcctttgtggattgctcttctacaaaccaacttcgtcaatccta

SEQ ID NO: 750400 - DNA, 75 bp, synthetic construct
  source 1..75: mol_type = other DNA
ccatcgatgctcagcaaccgtacattgctaacccagacgcgtggctgaaacagccggaaaacatcagcaaactgg

SEQ ID NO: 750401 - DNA, 75 bp, synthetic construct
  source 1..75: mol_type = other DNA
aaactggcgcgtttgagcggcgtgccggaaggtgacgttccgggactggtgaaggggaacacctatctgacaccg

SEQ ID NO: 750402 - DNA, 75 bp, synthetic construct
  source 1..75: mol_type = other DNA
catcgccgtgttctcctgtcgatgctcagtttcctctgcggccttctattttacaaaccaacagcatccatcctt

SEQ ID NO: 750403 - DNA, 75 bp, synthetic construct
  source 1..75: mol_type = other DNA
cattaaatcagtggcttagcatggggtctcttgctgcagtaattgcaggtgttccgccagaagttgcgcttggtg

SEQ ID NO: 750404 - DNA, 75 bp, synthetic construct
  source 1..75: mol_type = other DNA
aagccttctgtgaaattcatgcgacacctctactcaaagttaaggaaagcttatctctttcaaaaattaaaaaca

SEQ ID NO: 750405 - DNA, 75 bp, synthetic construct
  source 1..75: mol_type = other DNA
gcttagtatgggatctcttgctgcggtaatcgctggggttccgccagaagttgcgcttggtgctctggctggtgc

SEQ ID NO: 750406 - DNA, 75 bp, synthetic construct
  source 1..75: mol_type = other DNA
aggggtagcgtactcagcaggggcgtttgtttcttcaatcgtggctgttggtatcggtacctggctgtatcaccg

SEQ ID NO: 750407 - DNA, 75 bp, synthetic construct
  source 1..75: mol_type = other DNA
ttctcttactgcggtaatcgcaggtgtcccgccagaagtagctctcggttctctggcgggtgcggtaatttttgt

SEQ ID NO: 750408 - DNA, 75 bp, synthetic construct
  source 1..75: mol_type = other DNA
ctttaaatcaatggcttagtgtgagctctcttgctgcagttatcgtaggcgttccgccagaggtggcgctcggtg

SEQ ID NO: 750409 - DNA, 75 bp, synthetic construct
  source 1..75: mol_type = other DNA
tatatccaggggacttcttgttccagcattatttcttgctgaatttctaattcttgttccactgtattttatttt

SEQ ID NO: 750410 - DNA, 75 bp, synthetic construct
  source 1..75: mol_type = other DNA
agcccgactgccggaagcgaaaaacacgccgcgtgatgaactggacgacatgggggacgcggtgcctgcccgccg

SEQ ID NO: 750411 - DNA, 75 bp, synthetic construct
  source 1..75: mol_type = other DNA
ggcaacgccggagcagaaaagcgccctgatgcgggcggtgatggatatcgggcgacgtacaggcgggatcatccc

SEQ ID NO: 750412 - DNA, 75 bp, synthetic construct
  source 1..75: mol_type = other DNA
accaatatgcgtcaggcactccttatgggagctcattattccgtcgagatagaaaatgcagaaataattttagat

SEQ ID NO: 750413 - DNA, 75 bp, synthetic construct
  source 1..75: mol_type = other DNA
tgataccagtgaagcgggtgatattacggcactgtctgacgccattccgaaactggcggcgggaatgcgtattcc

SEQ ID NO: 750414 - DNA, 75 bp, synthetic construct
  source 1..75: mol_type = other DNA
ttgctggcggtcgtggcgcagtgcgcgaagtttgcgacttattactcctggcgcagggcaaactggatgaagcca

SEQ ID NO: 750415 - DNA, 75 bp, synthetic construct
  source 1..75: mol_type = other DNA
tcaccaaccagaccatcaccaatatgctgcgccagtttggcgtgcagctgccgaataaaatcgacccgaaggtga

SEQ ID NO: 750416 - DNA, 75 bp, synthetic construct
  source 1..75: mol_type = other DNA
ctttaaatcagtggcttagcatgagttctctggcggcagttatagcaggagcacctcctgaggttgctttggggt

SEQ ID NO: 750417 - DNA, 75 bp, synthetic construct
  source 1..75: mol_type = other DNA
atgtcagctcaactaaccagtgaaactttaaatcagtggcttagcatgagttctctggcggcggtgatagcagga

SEQ ID NO: 750418 - DNA, 75 bp, synthetic construct
  source 1..75: mol_type = other DNA
aacaacattgcagcggcgattaacgcctcgtttggcggcattgccacggcgcagagttccaccaatgtcaccgtg

SEQ ID NO: 750419 - DNA, 75 bp, synthetic construct
  source 1..75: mol_type = other DNA
aacaatattgcggcggcgattaatgcctcgtttggcggcattgctactgcgcagagctccaccaacgtcagcgtg

SEQ ID NO: 750420 - DNA, 75 bp, synthetic construct
  source 1..75: mol_type = other DNA
gctgcgccagtttggcgtgcagttgccgaataaaatcgacccgaaggtgaaaaacgtcgccgcggtggcggtgag

SEQ ID NO: 750421 - DNA, 75 bp, synthetic construct
  source 1..75: mol_type = other DNA
ccttcagccgaccaatttctaacacaagatgcccttccagcttttagtgatgatatcctgcatttttgttcactt

SEQ ID NO: 750422 - DNA, 75 bp, synthetic construct
  source 1..75: mol_type = other DNA
aatggcgcccacaaacctttgctgacgtcgtcggccaggaacatgtgctgaccgcactggcgaacggcttgtcgt

SEQ ID NO: 750423 - DNA, 75 bp, synthetic construct
  source 1..75: mol_type = other DNA
accgtcgttttttccaggcagaaggaagctattcaccagaaatggacgttatctttgaagaatatgcccttattg

SEQ ID NO: 750424 - DNA, 75 bp, synthetic construct
  source 1..75: mol_type = other DNA
aaaatagccgtggtgagcctgtatgtgttatcagagtgattggcctgcatttactgcgcttttctgatgtcaccg

SEQ ID NO: 750425 - DNA, 75 bp, synthetic construct
  source 1..75: mol_type = other DNA
gtaccgctcccggaaaccaccagccaggtgctggcggcgcgccagcagttgcagcgcgtgcagggagcaaccaaa

SEQ ID NO: 750426 - DNA, 75 bp, synthetic construct
  source 1..75: mol_type = other DNA
gtcgcgctgtctgcaatttcatctcaaggcgctggatgtcgagcaaattcgccatcagcttgagcacatcctcaa

SEQ ID NO: 750427 - DNA, 75 bp, synthetic construct
  source 1..75: mol_type = other DNA
aaaacctctatcgcccgactgctggcgaaggggctaaactgcgaaaccggcattaccgcgacgccgtgcggcgtg

SEQ ID NO: 750428 - DNA, 75 bp, synthetic construct
  source 1..75: mol_type = other DNA
attgtccgtctctctgattttaaatccaacgaatatgctaacctggtcggtggcgaacgttacgagccgcatgaa

SEQ ID NO: 750429 - DNA, 75 bp, synthetic construct
  source 1..75: mol_type = other DNA
aagcatgtgacggtggatgaggtgcgtccggttctgcaggcgatggtggatgacgctgtggggaccattccggta

SEQ ID NO: 750430 - DNA, 75 bp, synthetic construct
  source 1..75: mol_type = other DNA
cgttgccgtaattccctcctgtttatccttctcatgcttggttttatcgctggttatcaggcttatttatataaa

SEQ ID NO: 750431 - DNA, 75 bp, synthetic construct
  source 1..75: mol_type = other DNA
tggttcgctggcgggatgtattgaagacaacgcatttccgatgattggtgagtataagattgtagaaaatagccg

SEQ ID NO: 750432 - DNA, 75 bp, synthetic construct
  source 1..75: mol_type = other DNA
caccattaatggcattaaaatcggaacgcacaaacacccgaccccacacggcatgtctgacacgccggttaatta

SEQ ID NO: 750433 - DNA, 75 bp, synthetic construct
  source 1..75: mol_type = other DNA
tttgaaggcaacatcaaccatgtgggtggtgtgattacctccgttgacgtcaccattaatggcattaaaatcgga

SEQ ID NO: 750434 - DNA, 75 bp, synthetic construct
  source 1..75: mol_type = other DNA
tgtctgcatttgcgctcctctcagcggcatttgaacaaccgcggtgcacagcaaaaactggctgaagcgttgagc

SEQ ID NO: 750435 - DNA, 75 bp, synthetic construct
  source 1..75: mol_type = other DNA
atggcgtttttgatggggtccagcgaggcgcttcgcgatcgttatgattttatgaaattccaggtcttccagtgg

SEQ ID NO: 750436 - DNA, 75 bp, synthetic construct
  source 1..75: mol_type = other DNA
acagatggccatgcaaaaaacttctccgtatttattcaggctggcggcagttatcggctcacaccattttatgac

SEQ ID NO: 750437 - DNA, 75 bp, synthetic construct
  source 1..75: mol_type = other DNA
ttatgctcgatgggggcgcttacacaccgccgaaaaccttcagcggaaaattgatctgccgcgactcactcaaag

SEQ ID NO: 750438 - DNA, 75 bp, synthetic construct
  source 1..75: mol_type = other DNA
ccttcctgatacagccgcactggaaacgttcattaatcattttccattaccgggctatgagatccttggagcaac

SEQ ID NO: 750439 - DNA, 75 bp, synthetic construct
  source 1..75: mol_type = other DNA
tggggcttaacgcatccaaaggcaaaaaaacggcaatcgataaaatttatccgcgacattttctggcgacagcaa

SEQ ID NO: 750440 - DNA, 75 bp, synthetic construct
  source 1..75: mol_type = other DNA
catggacggttagccgagaatacggtagtaagtgagatatggggtttggtcattgttaatgagcatgacaatcat

SEQ ID NO: 750441 - DNA, 75 bp, synthetic construct
  source 1..75: mol_type = other DNA
ttatcggaaatttaacaaaagacacagagttaaaaagtaagcctgagcagacaccactcgcagttttcgatatag

SEQ ID NO: 750442 - DNA, 75 bp, synthetic construct
  source 1..75: mol_type = other DNA
cagctttactaccagacgctattgattggtcgcaaagaattaccgtatgcgccagacagacgcatgggcgttgaa

SEQ ID NO: 750443 - DNA, 75 bp, synthetic construct
  source 1..75: mol_type = other DNA
ccttgaagagccgccggagcacgttaagtttctgctggcgacgaccgatccgcagaaattgccggtgacgatttt

SEQ ID NO: 750444 - DNA, 75 bp, synthetic construct
  source 1..75: mol_type = other DNA
ggagcaggtgtcggtgattggatttgatgatatcgccatggcgccgtacacgatcccggcgctctccagcgtaaa

SEQ ID NO: 750445 - DNA, 75 bp, synthetic construct
  source 1..75: mol_type = other DNA
tgcaccagctccgtcattggtaccgtattgtccccgctggcaggctttagctatgagagatttggcttcgcccaa

SEQ ID NO: 750446 - DNA, 75 bp, synthetic construct
  source 1..75: mol_type = other DNA
agacctgatctcttattctatatcgaggcggcatggcagcgcagagaaatggataagataaaagctaggttagac

SEQ ID NO: 750447 - DNA, 75 bp, synthetic construct
  source 1..75: mol_type = other DNA
aaccataatgaaacaatatctgcaagccagtacagagaacataaatatgataatacccatccaccattacttatc

SEQ ID NO: 750448 - DNA, 75 bp, synthetic construct
  source 1..75: mol_type = other DNA
ctgtgtaaccataagctcaccggaaataaaaagtaaatatcctgctgccatttgcctgattctgggattttttct

SEQ ID NO: 750449 - DNA, 75 bp, synthetic construct
  source 1..75: mol_type = other DNA
atggcaggaaagaaatttttttccgatgacgatattgaagcggcacgtcttgcactctctgaactccctgacctg

SEQ ID NO: 750450 - DNA, 75 bp, synthetic construct
  source 1..75: mol_type = other DNA
aaaaggggatgataagtttatcaccaccgactatttgcaacagtgcctatcacaccaccaactattattccctcg

SEQ ID NO: 750451 - DNA, 75 bp, synthetic construct
  source 1..75: mol_type = other DNA
cgggaaaaatatgaatgtcgatgtgggttccatccggcgcaccgacctgaaaggggtcggcaccaccgccggcgg

SEQ ID NO: 750452 - DNA, 75 bp, synthetic construct
  source 1..75: mol_type = other DNA
accataatggcaggcaagttctcgatgagatacaaacgccttcagcaattaacagtgagctttatacaaaaatga

SEQ ID NO: 750453 - DNA, 75 bp, synthetic construct
  source 1..75: mol_type = other DNA
caataatcaactgacaccactgcgtggtaaaccgcaaattcagtttacgcaaaactggccgcgactcgatggtgc

SEQ ID NO: 750454 - DNA, 75 bp, synthetic construct
  source 1..75: mol_type = other DNA
ggtgggcagaaaaagcgtgcagaggaatcgggcgtcactttgatatacgccccctttgcccgcgaagcatttgtt

SEQ ID NO: 750455 - DNA, 75 bp, synthetic construct
  source 1..75: mol_type = other DNA
atgcgttaagcgttataccggaagattttcacgtcagggaatatctggataactctcgcacgccggaggcgtata

SEQ ID NO: 750456 - DNA, 75 bp, synthetic construct
  source 1..75: mol_type = other DNA
ccttgatcgtccaaaagcgaatgctattgatgcaaaaaccagctttgaaatgggcgaagtatttctaaatttccg

SEQ ID NO: 750457 - DNA, 75 bp, synthetic construct
  source 1..75: mol_type = other DNA
gaattgcggcagaaggggcgttgccttatccacctggcgtgctttgcgtggtacccggggaagtctggggtgggg

SEQ ID NO: 750458 - DNA, 75 bp, synthetic construct
  source 1..75: mol_type = other DNA
aacgtctttatgctaacgctgggggcaataataatatttttctctggacgcgtgtgggcgggcgatagtgcgcca

SEQ ID NO: 750459 - DNA, 75 bp, synthetic construct
  source 1..75: mol_type = other DNA
aaatcagcctcctttgccttcaccactccagcaagtcagatgacccgatggcagaacattacgacttttctgatg

SEQ ID NO: 750460 - DNA, 75 bp, synthetic construct
  source 1..75: mol_type = other DNA
tgctggcggcgctgaaacactggggcattaaacccgggcaagtggagattgtgaacctgcagccgcccgcgatta

SEQ ID NO: 750461 - DNA, 75 bp, synthetic construct
  source 1..75: mol_type = other DNA
tggcagcggggagatattgatggtgcttatgtctgggcaccggcggttaacgccctggaaaaagacggcaaggtg

SEQ ID NO: 750462 - DNA, 75 bp, synthetic construct
  source 1..75: mol_type = other DNA
ccgtggactggcgtaagtttgacagcggagccagcatcgtgcgggcgctggcttcaggcgacgtgcaaatcggca

SEQ ID NO: 750463 - DNA, 75 bp, synthetic construct
  source 1..75: mol_type = other DNA
gattatccattggtttagctctggcggtatttcagttcactaatcctttatatgcggctacagatagccttggac

SEQ ID NO: 750464 - DNA, 75 bp, synthetic construct
  source 1..75: mol_type = other DNA
atgaaatctaaaacattacgttatggactgcccgccggaattattttgacggcatccctattcaccaaccaattg

SEQ ID NO: 750465 - DNA, 75 bp, synthetic construct
  source 1..75: mol_type = other DNA
taccgccaccttcctgaaagagcagggcaaagtgccagcggtggcgacggattacagccagtacgtgaccgatcg

SEQ ID NO: 750466 - DNA, 75 bp, synthetic construct
  source 1..75: mol_type = other DNA
ggttgatgccgacaacgcaaagcaggtcgtgatgcttaccgaagaactgctgccttatccgcataatccggcaag

SEQ ID NO: 750467 - DNA, 75 bp, synthetic construct
  source 1..75: mol_type = other DNA
atgcgtcagaaaaccatcgatgcgattatggcgcatgctgcagctgaatatcctcgtgagtgttgcggcgtggtg

SEQ ID NO: 750468 - DNA, 75 bp, synthetic construct
  source 1..75: mol_type = other DNA
acagcccggacggggctgtaaaaggaataaaacatgatgggactgttaaagggaaagacggtgcatttgatctta

SEQ ID NO: 750469 - DNA, 75 bp, synthetic construct
  source 1..75: mol_type = other DNA
atgtttttattcctgaatactgctcctataacaagacaggggagcagacaatcatggcaatttcatcgcgtaaca

SEQ ID NO: 750470 - DNA, 75 bp, synthetic construct
  source 1..75: mol_type = other DNA
ccgcatttatacctctggtctgcgcggcccactggcggaagaaatctcccgtggtctgctggctgaaccagtaca

SEQ ID NO: 750471 - DNA, 75 bp, synthetic construct
  source 1..75: mol_type = other DNA
cggatgtgattgttaactctggctacttcaaagaaggtttctccatgcagaccggcaccggcggcgcttcgctgg

SEQ ID NO: 750472 - DNA, 75 bp, synthetic construct
  source 1..75: mol_type = other DNA
tcctttaacgggcacgtccgggttacgttgccgtaattctctcttgtttatccttctcatgcttggttttgtcgc

SEQ ID NO: 750473 - DNA, 75 bp, synthetic construct
  source 1..75: mol_type = other DNA
ggaaggggctgagacacaggaagatatgcgcgatagcctggcggggctggggccggaacctggcgaaaacgaagc

SEQ ID NO: 750474 - DNA, 75 bp, synthetic construct
  source 1..75: mol_type = other DNA
tttcactttcatgacgctggaacagacagcagaacaagccggttacgtcacttattacagtcgcggtacagagga

SEQ ID NO: 750475 - DNA, 75 bp, synthetic construct
  source 1..75: mol_type = other DNA
aatgaaggtgctgcaggcagcacagctatcggaaaaacagctggaaacccttcgccgcgctgatcgttacactga

SEQ ID NO: 750476 - DNA, 75 bp, synthetic construct
  source 1..75: mol_type = other DNA
ccgctggaaattttccgtgcagcagctgatgctgaaaaaatccaggggttcgtgttgggccttgaacaacagaga

SEQ ID NO: 750477 - DNA, 75 bp, synthetic construct
  source 1..75: mol_type = other DNA
acgccagagaagaactacgcgcagagattgccagtatgatcattggcgatgaactggggataggtcatgaccctt

SEQ ID NO: 750478 - DNA, 75 bp, synthetic construct
  source 1..75: mol_type = other DNA
ccgacgaagaaaaagcgctcctgcgggcgcaggcagctcagaaacaggccgaaaaagcggcacagcaacaaaaag

SEQ ID NO: 750479 - DNA, 75 bp, synthetic construct
  source 1..75: mol_type = other DNA
cactattatccacaacccagattatgcgcagggtttactaacatcagtaaaggccgcagtacccgcggtgcaaac

SEQ ID NO: 750480 - DNA, 75 bp, synthetic construct
  source 1..75: mol_type = other DNA
tgggtgaacattattccgtcgagatggaaaatgaagaaataattttagatattgatactccggatgactttatta

SEQ ID NO: 750481 - DNA, 75 bp, synthetic construct
  source 1..75: mol_type = other DNA
ttccgtcgaaatagaagatgaagaaataattttagatattgatacccccgaggactttattaatgcacaaaagtg

SEQ ID NO: 750482 - DNA, 75 bp, synthetic construct
  source 1..75: mol_type = other DNA
ggcagacctgcctgccctttatcgtgaaatggatgattcccgcctgatgacgctgctcagtgatgccatgtttgc

SEQ ID NO: 750483 - DNA, 75 bp, synthetic construct
  source 1..75: mol_type = other DNA
aaaagacagaacagacggcgctggccgccagactgccggaagcgaaaagcagcccccgtgatgagctggacgaca

SEQ ID NO: 750484 - DNA, 75 bp, synthetic construct
  source 1..75: mol_type = other DNA
cgtttgaaaccatgatttcgtggggggagcgttccatctccaaagcaatcctcggcggcacgctgaccacggaag

SEQ ID NO: 750485 - DNA, 75 bp, synthetic construct
  source 1..75: mol_type = other DNA
cgtatcaagcgcaacgatgatggtagcattgtgctcgataaagatgataagccggtaaaggaaaccgtccagctg

SEQ ID NO: 750486 - DNA, 75 bp, synthetic construct
  source 1..75: mol_type = other DNA
gcgtcagtcgtgatgtggaaggtgtgattgaaatgctgcgtcgtatggggcttgagcgcttcatccgcacgaaag

SEQ ID NO: 750487 - DNA, 75 bp, synthetic construct
  source 1..75: mol_type = other DNA
gtcgattatcgccgctgaaccgcctaacccgctggtcaacgaattgatcatcatgccggatatcgaaaaacgtct

SEQ ID NO: 750488 - DNA, 75 bp, synthetic construct
  source 1..75: mol_type = other DNA
tcatgccggatattgaaaaacgcctggaagcgttcgtgcgtatcgcccacggcatcattatcttccctggcggtg

SEQ ID NO: 750489 - DNA, 75 bp, synthetic construct
  source 1..75: mol_type = other DNA
atggcgcatggttgagcatttaccggcgctgggttcaccgttaaatgtgttgattacgccctacggcgaagcatt

SEQ ID NO: 750490 - DNA, 75 bp, synthetic construct
  source 1..75: mol_type = other DNA
gcacgcgaactgggtattccggcggtggttggctgcggcgatgcgaccgaacggatgaaagacggtgagaatgtc

SEQ ID NO: 750491 - DNA, 75 bp, synthetic construct
  source 1..75: mol_type = other DNA
atgaccaaccgtctggcgttgtccggcaccgtgtgcaggatgccccttcgaaaggtcagtccatcaggaattcct

SEQ ID NO: 750492 - DNA, 75 bp, synthetic construct
  source 1..75: mol_type = other DNA
accgcccgttatacgccgcagattgaaaaccttaaaaaagaaatcaaagtgctttttaaagggattcaggactgg

SEQ ID NO: 750493 - DNA, 75 bp, synthetic construct
  source 1..75: mol_type = other DNA
ccggtggcgcacctgttgggccgtaaatttgagcacgggaaaacagattgctattcgcttttccgtgatgcctat

SEQ ID NO: 750494 - DNA, 75 bp, synthetic construct
  source 1..75: mol_type = other DNA
ttcctgcttatgatgtccatggtaagcaatggactatgcagtacatcaacgaggacggcacaaaacgttttgcca

SEQ ID NO: 750495 - DNA, 75 bp, synthetic construct
  source 1..75: mol_type = other DNA
tttgctgggaattttgatgaatccggcaaataaagatcaggtcttaccgctgatcctcaccggtccgaaagagag

SEQ ID NO: 750496 - DNA, 75 bp, synthetic construct
  source 1..75: mol_type = other DNA
tggcggctgggaacgccatcatgcagcgtcagccgtgatgtggaaggcgtgattgaaatgctgcgccgtatgggc

SEQ ID NO: 750497 - DNA, 75 bp, synthetic construct
  source 1..75: mol_type = other DNA
caatctgaccaccggaacggtgtcatggcggctgggaacgccatcatgcagcgtcagccgtgatgtggaaggcgt

SEQ ID NO: 750498 - DNA, 75 bp, synthetic construct
  source 1..75: mol_type = other DNA
tataacgattacgacaacgctaacctgtataacgatcacgtggtggcaagcctgattaaagactttaaagcgacc

SEQ ID NO: 750499 - DNA, 75 bp, synthetic construct
  source 1..75: mol_type = other DNA
tccaggaagtgctgaatgaccctgcgccgaagaaactgatcatcgttcatctgctgggtacgcatatcaaataca

SEQ ID NO: 750500 - DNA, 75 bp, synthetic construct
  source 1..75: mol_type = other DNA
tctctgaccacggtgaagaggtttacgacacgccgccgcacaaaactcaggggcgtaacgaagacaacccgacgc

SEQ ID NO: 750501 - DNA, 75 bp, synthetic construct
  source 1..75: mol_type = other DNA
aggatgttaatcgtaaatacagcctggcagaactgatccacacctggtcagatttggctggtttatcttacgacg

SEQ ID NO: 750502 - DNA, 75 bp, synthetic construct
  source 1..75: mol_type = other DNA
gatccgaacggcttcttgctgtacttctccgatcacggggaagaggtatacgatacgccgccgcataaaacgcag

SEQ ID NO: 750503 - DNA, 75 bp, synthetic construct
  source 1..75: mol_type = other DNA
aaaatatagatcatgttcccgcaggcttggatagtgatgaacgggatatctacaacgattacgacagcgcgaatg

SEQ ID NO: 750504 - DNA, 75 bp, synthetic construct
  source 1..75: mol_type = other DNA
tgatgagaaagtcgttttacttgttattgccgttggaagaagggaaagcagcgaagtctatcagatcgcagatat

SEQ ID NO: 750505 - DNA, 75 bp, synthetic construct
  source 1..75: mol_type = other DNA
tgatgagaaagtcgttttactcgttattgcagttggaagaagggaaagcagcgaagtctatcagatcgcagattt

SEQ ID NO: 750506 - DNA, 75 bp, synthetic construct
  source 1..75: mol_type = other DNA
atgaaccaggctgtttctataacatatgatttatggcatattattttcatgaagattttacttattgaagataat

SEQ ID NO: 750507 - DNA, 75 bp, synthetic construct
  source 1..75: mol_type = other DNA
cgcatgagtctgtacggttatccgcgtgaaaccacgccggagctggatgcgctgcataaaaccgatccgaatctg

SEQ ID NO: 750508 - DNA, 75 bp, synthetic construct
  source 1..75: mol_type = other DNA
gtgctgactgccagtctctggtttctgtgtggtgcaattatgaatcagggcgcagcaatggttgttccaatggtt

SEQ ID NO: 750509 - DNA, 75 bp, synthetic construct
  source 1..75: mol_type = other DNA
acaccgtggatatgcgaagtatcttgaggcagataacctcatggatgatgcgtccgacatggtgctgttcgatga

SEQ ID NO: 750510 - DNA, 75 bp, synthetic construct
  source 1..75: mol_type = other DNA
gtaatacagagcatgttccaccgggattaaacgcagaagagctggagtcatataatgattatgacaatgctaacc

SEQ ID NO: 750511 - DNA, 75 bp, synthetic construct
  source 1..75: mol_type = other DNA
aatgcccaatttggctccgcccgtaacgaccgttgaggctgccgtagcatatcgccagcgtatccttgacgccgt

SEQ ID NO: 750512 - DNA, 75 bp, synthetic construct
  source 1..75: mol_type = other DNA
atgactgcaccatcccaggtattaaagatccgccgcccagacgactggcaccttcacctccgcgatggcgacatg

SEQ ID NO: 750513 - DNA, 75 bp, synthetic construct
  source 1..75: mol_type = other DNA
agaaatacgtcgttacaacagacggcagaacataatttgtcgtgagtgccgccagagcgaagtcatgcagcgtgt

SEQ ID NO: 750514 - DNA, 75 bp, synthetic construct
  source 1..75: mol_type = other DNA
aagagatgaatgctctgcagcactttgaagcattctgttctgtaaacggcccgcagttctatgggttgccggtca

SEQ ID NO: 750515 - DNA, 75 bp, synthetic construct
  source 1..75: mol_type = other DNA
agcatcgctctgactgacgacacgttggtgccattcctggccggagaaacagtacgctggacagttaaacaataa

SEQ ID NO: 750516 - DNA, 75 bp, synthetic construct
  source 1..75: mol_type = other DNA
acgtctggctgggctgaaagtggtttttgagcacatcacgacgaaagatgccgctgaatatgttcgtgacggtaa

SEQ ID NO: 750517 - DNA, 75 bp, synthetic construct
  source 1..75: mol_type = other DNA
cctcatttataattaaaatattgatgcctgagaaacataaaaagtgtaatttcattcttgctccgagtcaatttg

SEQ ID NO: 750518 - DNA, 75 bp, synthetic construct
  source 1..75: mol_type = other DNA
gtgctgactgccagattctggtttctttgtggtgcggttatgaatcagtgtgccgtgccagttgtttcaatggca

SEQ ID NO: 750519 - DNA, 75 bp, synthetic construct
  source 1..75: mol_type = other DNA
gcaataccgatcacgtgccgccgggattaagcgcagaagagttggaatcgtataacgattacgacaacgccaact

SEQ ID NO: 750520 - DNA, 75 bp, synthetic construct
  source 1..75: mol_type = other DNA
cagaacataatttgtcgtgagtgccgccagagcgaagttatgcagcgtgtactggcattttatcaaggaaatgtt

SEQ ID NO: 750521 - DNA, 75 bp, synthetic construct
  source 1..75: mol_type = other DNA
cgttcttcctggcccgacgcgaactgttgactccatgaagtattatcgtttaacagaagaactggaagtttcgac

SEQ ID NO: 750522 - DNA, 75 bp, synthetic construct
  source 1..75: mol_type = other DNA
gccgaagaattttaaaggctgcgttatttcgccaccagcgtaaaaccggaagcacctgcatcattattaatatgc

SEQ ID NO: 750523 - DNA, 75 bp, synthetic construct
  source 1..75: mol_type = other DNA
atggtgaggtacttcgggttccttgccaaccgggtgtgtggagagaagctgccgcaggtgtaccgtgctctgtgg

SEQ ID NO: 750524 - DNA, 75 bp, synthetic construct
  source 1..75: mol_type = other DNA
aactgcaaatcgacatactgggatgaaggcattgttcagcaactcattaaccaggtcctggatgaaggggaaaag

SEQ ID NO: 750525 - DNA, 75 bp, synthetic construct
  source 1..75: mol_type = other DNA
ggttcgcagtcttgctgctcgcacacagcaatcgacaacggatattcaaagcatgatcagcgctctacaagagcg

SEQ ID NO: 750526 - DNA, 75 bp, synthetic construct
  source 1..75: mol_type = other DNA
ggaattcatgattcagccggttggcgcgaaaactgtgaaagaagccatccgcatgggttctgaagttttccatca

SEQ ID NO: 750527 - DNA, 75 bp, synthetic construct
  source 1..75: mol_type = other DNA
caaggcaattgtttaatagatgggaagcagatcatcagcaggttatgcaggaacaaatatcattgtttggtatgg

SEQ ID NO: 750528 - DNA, 75 bp, synthetic construct
  source 1..75: mol_type = other DNA
aacaggtgcaccatacaatggccgctactttgcgccagttgacagcaatgctgccaaaagacaaaatttggcggt

SEQ ID NO: 750529 - DNA, 75 bp, synthetic construct
  source 1..75: mol_type = other DNA
atggaattagttgatacgttatttgcaagcctctccggtactgatccattcactggcgtggatattacgattgcc

SEQ ID NO: 750530 - DNA, 75 bp, synthetic construct
  source 1..75: mol_type = other DNA
gaccgtcttctttctgctttgctggagagacagcgccttgcggcaggttggcaaggagcgggaacggcttacggc

SEQ ID NO: 750531 - DNA, 75 bp, synthetic construct
  source 1..75: mol_type = other DNA
gcgacgatgttcggcgcaccagtcccggtcgtcggcactatgacggagcacgccgccgcatggcgggcctgcctg

SEQ ID NO: 750532 - DNA, 75 bp, synthetic construct
  source 1..75: mol_type = other DNA
aggaacggcttacagcggccagcgagggtttgaccattgagcaataccgggcaatgcacccggcttacagagaga

SEQ ID NO: 750533 - DNA, 75 bp, synthetic construct
  source 1..75: mol_type = other DNA
cttcagaaaataatactctgttgaaactagatgaaggaagcaatacggcctccggtttgggtatagaaatactgg

SEQ ID NO: 750534 - DNA, 75 bp, synthetic construct
  source 1..75: mol_type = other DNA
aagcttttttacgtattggggtaacaccggaacaactggaatggaagaaattccatccttcatccccatcggttc

SEQ ID NO: 750535 - DNA, 75 bp, synthetic construct
  source 1..75: mol_type = other DNA
ccctgttttaaccggtttatcaaaaaaccaaacagaaagccttaccactaacaataaaagaggtaggggctgtat

SEQ ID NO: 750536 - DNA, 75 bp, synthetic construct
  source 1..75: mol_type = other DNA
cgcgcgaaagtatgccgcagatggtgcaggacattatgctgaccatgccgacgacacactttgttagcctcgcgc

SEQ ID NO: 750537 - DNA, 75 bp, synthetic construct
  source 1..75: mol_type = other DNA
atattattttcatgaagattttacttattgaagataatcaaaggacccaggaatgggtaacgcaggggctttccg

SEQ ID NO: 750538 - DNA, 75 bp, synthetic construct
  source 1..75: mol_type = other DNA
ggattctgtcgatgacagagtcagagggctggacagtggggcaaatgattatctggtaaaacctttttcattttc

SEQ ID NO: 750539 - DNA, 75 bp, synthetic construct
  source 1..75: mol_type = other DNA
ctgattgccgcctggaccggctgcgacgccaacgatacccgcatgatccttcatacccatgcgttgattggtgag

SEQ ID NO: 750540 - DNA, 75 bp, synthetic construct
  source 1..75: mol_type = other DNA
gtgacacaagccacaacgttgagcgaaatccccacatctacgcccgcctccgacgccctatctaaggcactgaaa

SEQ ID NO: 750541 - DNA, 75 bp, synthetic construct
  source 1..75: mol_type = other DNA
tgggttatcgtggatcaccgtcctcaaaaaacgcgaaaactatcgcgcctgctttcatcagttcgatccggtgaa

SEQ ID NO: 750542 - DNA, 75 bp, synthetic construct
  source 1..75: mol_type = other DNA
ttccgcctctgttggggggtgttctggttgtcctgctgacgcccggagacgatcctctcagggcatttttgatat

SEQ ID NO: 750543 - DNA, 75 bp, synthetic construct
  source 1..75: mol_type = other DNA
ggcaatcaatatgcgacagggggtattttctggtggcattgatgccacggaacaacaggggaaaatgcactggca

SEQ ID NO: 750544 - DNA, 75 bp, synthetic construct
  source 1..75: mol_type = other DNA
aagatccgaaagtgatactgaaacgattaaaagatttggaaaaagagattctggctgatctggatgaactggagg

SEQ ID NO: 750545 - DNA, 75 bp, synthetic construct
  source 1..75: mol_type = other DNA
ggtaagtttcaccctgcgtgaaaaaggcagcgtcccggaaaaacgacaggcccgaaaaggcaacgcgacggccag

SEQ ID NO: 750546 - DNA, 75 bp, synthetic construct
  source 1..75: mol_type = other DNA
ttaatcaggttgctgatcgtctgaatatttccaaacatactgtttatctctatattcgccagttcaaaagtggcg

SEQ ID NO: 750547 - DNA, 75 bp, synthetic construct
  source 1..75: mol_type = other DNA
tattggttcccactgtgaaatcgttttgcactctttgcaggatttaaaatgttcagccattcgtattgccaacgg

SEQ ID NO: 750548 - DNA, 75 bp, synthetic construct
  source 1..75: mol_type = other DNA
tggacggagaagcgatcctgttacgcaatatcactgtcagcgtcagtctgcgcctgccggataaggatatgtcag

SEQ ID NO: 750549 - DNA, 75 bp, synthetic construct
  source 1..75: mol_type = other DNA
ctccctgaagccggtggtttccatgtggctgtccattgccattcgtgggctgctggcaatgggagaaaaccgtaa

SEQ ID NO: 750550 - DNA, 75 bp, synthetic construct
  source 1..75: mol_type = other DNA
ctccctgaagccggtgatctccatgtggctgtccattgccattcgtggtctgctggcaatgggagaaaaccgtaa

SEQ ID NO: 750551 - DNA, 75 bp, synthetic construct
  source 1..75: mol_type = other DNA
gttattcgacgtcttgccaactatgcccgtaaacgtggcgacatggtggtgatttatgaccgttcgtgtgagttt

SEQ ID NO: 750552 - DNA, 75 bp, synthetic construct
  source 1..75: mol_type = other DNA
actctttggtctgttattatgggtaaaaataagctggcagacgtttataaacggctgtatttactggtggtgtac

SEQ ID NO: 750553 - DNA, 75 bp, synthetic construct
  source 1..75: mol_type = other DNA
actcattggtctgatattatgggtaaaaataagctggcagacgtttataaacggctgtatttactggtggtgtac

SEQ ID NO: 750554 - DNA, 75 bp, synthetic construct
  source 1..75: mol_type = other DNA
gaagacgtgactcaggctgaacagccgcaacagccgcaacagccgcaacagccgcaacagccgcaacagccgcaa

SEQ ID NO: 750555 - DNA, 75 bp, synthetic construct
  source 1..75: mol_type = other DNA
atcctgaatccgctggatgcccgctgtgccgcctgggatttatggaaggagtgcctgacacagccggattttgat

SEQ ID NO: 750556 - DNA, 75 bp, synthetic construct
  source 1..75: mol_type = other DNA
tggtgcgcgaacagccgctgaatgggcgggtgaaaagggatatcaggcgctggctccgacaggcgctttggggat

SEQ ID NO: 750557 - DNA, 75 bp, synthetic construct
  source 1..75: mol_type = other DNA
aggtgctgttcagggcgcagccatgatggggctgggtgctgctggtatggctactggtaagtctctgatgcttgg

SEQ ID NO: 750558 - DNA, 75 bp, synthetic construct
  source 1..75: mol_type = other DNA
cagctgacggataacccgaaagaggttgcccggatgctgaaaaaagacggcaaggactccgatatccggattggc

SEQ ID NO: 750559 - DNA, 75 bp, synthetic construct
  source 1..75: mol_type = other DNA
tccagcagcagatgcagcgtcgtgaagaagtgaatatcaacgtgcaccgggagcgcggggaggatgttgagccgg

SEQ ID NO: 750560 - DNA, 75 bp, synthetic construct
  source 1..75: mol_type = other DNA
gtgtttggtatccagtcctatgcccagctggaagatatctacggtgagaaagcggcggccacgctgtttgacgtc

SEQ ID NO: 750561 - DNA, 75 bp, synthetic construct
  source 1..75: mol_type = other DNA
actccttggtctgctattatgggtaaaaataagctggcagacgtttataaacggctgtatttactggtggtgtac

SEQ ID NO: 750562 - DNA, 75 bp, synthetic construct
  source 1..75: mol_type = other DNA
actggattcaagagcaaatatatgcctctcgtggtgagcgatatgaaaatcacggtgatgctgccaacttactga

SEQ ID NO: 750563 - DNA, 75 bp, synthetic construct
  source 1..75: mol_type = other DNA
ttatcgcgtactggtcgaccgcctctggccgcgtggtatcaaaaaaaccgatttagcccttgatgagtgggataa

SEQ ID NO: 750564 - DNA, 75 bp, synthetic construct
  source 1..75: mol_type = other DNA
atatcttgctgaactggcgcaacacgagtcggaagggaaacggctggcggaaatcgctcaaaaacagccgctgac

SEQ ID NO: 750565 - DNA, 75 bp, synthetic construct
  source 1..75: mol_type = other DNA
accaactggcgcacggttggcggtaacgatcaggagatccagacctggcaacgcccggaagactctggcagccag

SEQ ID NO: 750566 - DNA, 75 bp, synthetic construct
  source 1..75: mol_type = other DNA
atgcagtttgatgtagttgcttctaaccctccgttaaatattatcggttggaatcatgatgatttagtacgtaat

SEQ ID NO: 750567 - DNA, 75 bp, synthetic construct
  source 1..75: mol_type = other DNA
taggaaggtatcagaatgctactttgaaagaagtagtgtctgcaatttttcgcatgtggcttcttttgatgaaat

SEQ ID NO: 750568 - DNA, 75 bp, synthetic construct
  source 1..75: mol_type = other DNA
tctctttggtctggtattatgggtaaaaataagctggcagacgtttataaacggctgtatttactggtggtgtac

SEQ ID NO: 750569 - DNA, 75 bp, synthetic construct
  source 1..75: mol_type = other DNA
tctcattggtctgttattatgggtaaaaataagctggcagacgtttataaacggctgtatttactggtggtgtac

SEQ ID NO: 750570 - DNA, 75 bp, synthetic construct
  source 1..75: mol_type = other DNA
actcgttggtctggtattatgggtaaaaataagctggcagacgtttataaacggctgtatttactggtggtgtac

SEQ ID NO: 750571 - DNA, 75 bp, synthetic construct
  source 1..75: mol_type = other DNA
agccgcaacagccgcaacagccgcaacagccgcaacagccgcaacagccgcaacagccgcaacagccggtgtctc

SEQ ID NO: 750572 - DNA, 75 bp, synthetic construct
  source 1..75: mol_type = other DNA
gctcattggtctggtattatgggtaaaaataagctggcagacgtttataaacggctgtatttactggtggtgtac

SEQ ID NO: 750573 - DNA, 75 bp, synthetic construct
  source 1..75: mol_type = other DNA
cctcattggtctgctattatgggtaaaaataagctggcagacgtttataaacggctgtatttactggtggtgtac

SEQ ID NO: 750574 - DNA, 75 bp, synthetic construct
  source 1..75: mol_type = other DNA
tgtttaataactggcttggtatattattttctagtgtatttactgttatttttgctggagttctcgtcaaaattg

SEQ ID NO: 750575 - DNA, 75 bp, synthetic construct
  source 1..75: mol_type = other DNA
gctcgttggcgaacttgttgagcaggcgattgtcgtttcctctgctctgagtgagctgaaatcacgcgcctttgc

SEQ ID NO: 750576 - DNA, 75 bp, synthetic construct
  source 1..75: mol_type = other DNA
agcgagaagaagtgaaggcgcgcattgtggaattcgtgcgcctgagcggacgagaaacttttcgacaactggcag

SEQ ID NO: 750577 - DNA, 75 bp, synthetic construct
  source 1..75: mol_type = other DNA
cttagccgtttgtttggcgaaaacgcgttaacctgcgtggaagcgggtgtaatggcgccgttgatcggcgtaatt

SEQ ID NO: 750578 - DNA, 75 bp, synthetic construct
  source 1..75: mol_type = other DNA
gggcgtcgaaggggtgaaaagctatattaaaactattggcctttataacagcaaagcagaaaatatcattaagcc

SEQ ID NO: 750579 - DNA, 75 bp, synthetic construct
  source 1..75: mol_type = other DNA
attacaacaccgccagaacccgtataaaaatgggcaaaatcgatcatgaaatcgatcataaaaccgatcatgaaa

SEQ ID NO: 750580 - DNA, 75 bp, synthetic construct
  source 1..75: mol_type = other DNA
aatacagaggaaagtgcgcagaaaaatgcgcaaaaaagtgcgcaaattgatgatcaaaaaagcgcacaaaaaaat

SEQ ID NO: 750581 - DNA, 75 bp, synthetic construct
  source 1..75: mol_type = other DNA
ttttgccgcaaaggtgccgctggtttctggcgcggcgattcgtatggaaggtcaaatcaccgtctttacctggca

SEQ ID NO: 750582 - DNA, 75 bp, synthetic construct
  source 1..75: mol_type = other DNA
atcgccagcgtattcttgacgccgtacctgccgggcacgatttcaccccgctgatgacctgttatttaacagatt

SEQ ID NO: 750583 - DNA, 75 bp, synthetic construct
  source 1..75: mol_type = other DNA
agttacacacgccgatatcgacatttttgaccgtgaagcccgctttattgaaacggttatggagccactgcgcca

SEQ ID NO: 750584 - DNA, 75 bp, synthetic construct
  source 1..75: mol_type = other DNA
gttgattgctgaacacgatctggtgctcgactgtacggataacgtagcggtacgtaatcaactgaacgctggctg

SEQ ID NO: 750585 - DNA, 75 bp, synthetic construct
  source 1..75: mol_type = other DNA
acctgccaatgggaaaatcgtgatgtacgatgcgatgacctgtcagtttcgcgaaatgaagctgatgcgcaatcc

SEQ ID NO: 750586 - DNA, 75 bp, synthetic construct
  source 1..75: mol_type = other DNA
ctcgactgtacggataacgttgcggtacgtaatcaactgaacgcaggctgttttgccgcgaaggtgccgctggtt

SEQ ID NO: 750587 - DNA, 75 bp, synthetic construct
  source 1..75: mol_type = other DNA
atacacctgcagcgatgcttgaactgggcgtcgaaggggtgaaaacctatatcaaaaccattgggctttataaca

SEQ ID NO: 750588 - DNA, 75 bp, synthetic construct
  source 1..75: mol_type = other DNA
aaatcggtattaagcaggcgacaatttccaatttcgaaaacaaccctgacaataccacgctcacgacatttttta

SEQ ID NO: 750589 - DNA, 75 bp, synthetic construct
  source 1..75: mol_type = other DNA
tggacgcagagcgagctggcgaaaaaaattggcattaagcaggcgacaatttccaatttcgaaaacaaccctgac

SEQ ID NO: 750590 - DNA, 75 bp, synthetic construct
  source 1..75: mol_type = other DNA
tgtcgatggcaatccgtgccgcgaagaaacagggcaaatacgtcgggatttgcggtcaggggccatctgaccacg

SEQ ID NO: 750591 - DNA, 75 bp, synthetic construct
  source 1..75: mol_type = other DNA
ttcaaatttctgaccgggccagaaaccgtgctggcactactggatgaacgggaaagaaaccagcaatacatcaaa

SEQ ID NO: 750592 - DNA, 75 bp, synthetic construct
  source 1..75: mol_type = other DNA
acaaaggcggaagaggcagagcagctgccgcccggcatcagtgaaagcggtgaagtagtggatatggcggcatgg

SEQ ID NO: 750593 - DNA, 75 bp, synthetic construct
  source 1..75: mol_type = other DNA
agattttacagtcgcttgaactctcaatgacgctatgcgacgcgaaaaatgcctcgccagaatcaacagaacagc

SEQ ID NO: 750594 - DNA, 75 bp, synthetic construct
  source 1..75: mol_type = other DNA
gggaacggcgaaaaaggatgagaagcaggtaaatggggcgttctatcacgttcactggtacaaatacccgctgac

SEQ ID NO: 750595 - DNA, 75 bp, synthetic construct
  source 1..75: mol_type = other DNA
cgacgatataaaattatttaatgatattattgaccttgcaaatttaacacaccacgaagacatcaccgtgcctga

SEQ ID NO: 750596 - DNA, 75 bp, synthetic construct
  source 1..75: mol_type = other DNA
cagatatcccgctaggcatgattagagaagaaaatgactttcgcatctcggttgctggcgcacaggagaagacag

SEQ ID NO: 750597 - DNA, 75 bp, synthetic construct
  source 1..75: mol_type = other DNA
tttaacgcaaaggatatgacccagggcggtcagatcgcgtccatgcgtatccgcatgttcagtcagatcgccaat

SEQ ID NO: 750598 - DNA, 75 bp, synthetic construct
  source 1..75: mol_type = other DNA
agaggggatcgatagcttgtccctgaacccggacactgtggtacaaacctggttaagcctggctgaactgaagaa

SEQ ID NO: 750599 - DNA, 75 bp, synthetic construct
  source 1..75: mol_type = other DNA
tacagcaaactggtggacacactgctttccatcaaaatcgaaaaactgcgtaccttcctgcgtaattcaccggcg

SEQ ID NO: 750600 - DNA, 75 bp, synthetic construct
  source 1..75: mol_type = other DNA
tctggcgtatgcagagaaggggaattgatccgtttaaagtggagaaaaccccttccgccgtagacgaaaggggct

SEQ ID NO: 750601 - DNA, 75 bp, synthetic construct
  source 1..75: mol_type = other DNA
ctaatgaatggcctgaatatcattcgtttctggcgtatgcagagaaggggaattgatccgtttaaagtggagaaa

SEQ ID NO: 750602 - DNA, 75 bp, synthetic construct
  source 1..75: mol_type = other DNA
atgaatggcctgaatatcattcgtttttggcgtatgcagagaaggggaattgatccgtttaaagtggagaaaacc

SEQ ID NO: 750603 - DNA, 75 bp, synthetic construct
  source 1..75: mol_type = other DNA
agtgggggcgttattcctgctgattctgttcttatcaccgctgtcatttttgatccctggttacgccactgcacc

SEQ ID NO: 750604 - DNA, 75 bp, synthetic construct
  source 1..75: mol_type = other DNA
cgtttacctccttcccggtgatgatgagcttgctggggctggcggtcatcttcggtctggagaagtgccgcgtac

SEQ ID NO: 750605 - DNA, 75 bp, synthetic construct
  source 1..75: mol_type = other DNA
tctggcggatgcagaaaaggggaattgatccgtttaaagtagagaaacccccccccgccgtagacgaaaggggtt

SEQ ID NO: 750606 - DNA, 75 bp, synthetic construct
  source 1..75: mol_type = other DNA
acaactatatcggtcgtttgttattgcccgcatcggtagagaaattcccgctggtgggtctgaatagcgccatgc

SEQ ID NO: 750607 - DNA, 75 bp, synthetic construct
  source 1..75: mol_type = other DNA
acccgcatcggtagagaagttcccgctggtgggtctgaatagcgccatgctactggtggctgaagatggcggatt

SEQ ID NO: 750608 - DNA, 75 bp, synthetic construct
  source 1..75: mol_type = other DNA
tatgtgcaggcggggcgcatggacaaccgcacactatttaatgcacaaggcgggaactttacctttaactttctg

SEQ ID NO: 750609 - DNA, 75 bp, synthetic construct
  source 1..75: mol_type = other DNA
cagttggtattatgtcagatgaagccggtattatatttgatggatataccctgtctgagttgccttttattaaca

SEQ ID NO: 750610 - DNA, 75 bp, synthetic construct
  source 1..75: mol_type = other DNA
agtcaccgaccatccgttggtggttgctttgtgccaggcttatggtaaaccgctggtttctaccagtgccaactt

SEQ ID NO: 750611 - DNA, 75 bp, synthetic construct
  source 1..75: mol_type = other DNA
cagcgtccggttgataaggggctgattttaatcgcggcaaattacgagcagcttaaaccctatattgatgacacc

SEQ ID NO: 750612 - DNA, 75 bp, synthetic construct
  source 1..75: mol_type = other DNA
tgccattatcgcggtgacagccgggtgattaatccacaaggcgagattatcgctactgccgacgcgcatcaggca

SEQ ID NO: 750613 - DNA, 75 bp, synthetic construct
  source 1..75: mol_type = other DNA
cggcaaggtaatccagtatcaggaagagtgtgacgatgttctctatgaatactggacgaagggttttgtcgttaa

SEQ ID NO: 750614 - DNA, 75 bp, synthetic construct
  source 1..75: mol_type = other DNA
atgaatcgatcccgagagttacaactagaggtaacgataaacttgataagcaagtttatcgaggggtagtgaaaa

SEQ ID NO: 750615 - DNA, 75 bp, synthetic construct
  source 1..75: mol_type = other DNA
taggactttctacttgctaaacaacaaggacgccttatggtctgatattcagatcgggtattgggctgagaacaa

SEQ ID NO: 750616 - DNA, 75 bp, synthetic construct
  source 1..75: mol_type = other DNA
gatgcaatcctggctaagatcaaattctatgaaaatttcaacaatgaaatgcaggaaagggctaagagattaacc

SEQ ID NO: 750617 - DNA, 75 bp, synthetic construct
  source 1..75: mol_type = other DNA
ccacgcctgaactttatttatgaagacacctcactgaaagcactagtggaaggactcagtgaacatccggaagcc

SEQ ID NO: 750618 - DNA, 75 bp, synthetic construct
  source 1..75: mol_type = other DNA
gccgaatgtttttacggattatataaataaaaatgatgtactggcatggggaagcggatttctttcccgttttct

SEQ ID NO: 750619 - DNA, 75 bp, synthetic construct
  source 1..75: mol_type = other DNA
cttgctggctggcttcagactatcagcccaaataaggttaagctcaaaatccgagacaaggtgatccagtatcag

SEQ ID NO: 750620 - DNA, 75 bp, synthetic construct
  source 1..75: mol_type = other DNA
atgtatcaaaaatccgcacgttgataagtgaggcgaatctgctgattaattttgttctggccgataccggcaaag

SEQ ID NO: 750621 - DNA, 75 bp, synthetic construct
  source 1..75: mol_type = other DNA
agcccttaagactttgtacatcacacgacttgctctgcactcctttcttgaactcagaatagagcttcagccaga

SEQ ID NO: 750622 - DNA, 75 bp, synthetic construct
  source 1..75: mol_type = other DNA
cacaaaggactagccttccaagagttggctgcaatgaaaaatcaggaatatcggtttatttttgaaggaagacta

SEQ ID NO: 750623 - DNA, 75 bp, synthetic construct
  source 1..75: mol_type = other DNA
ggaacacttataggtgattatgggaaaaataggtacgctcctctatggaaggattctagtagtccgatcagtcgt

SEQ ID NO: 750624 - DNA, 75 bp, synthetic construct
  source 1..75: mol_type = other DNA
caaatgacgaattacacatatctggtaataaatgggcattgcatgtgcgtaatttatatagcgctagttggcatg

SEQ ID NO: 750625 - DNA, 75 bp, synthetic construct
  source 1..75: mol_type = other DNA
caggttcaggcacagttaaaacagcctaaattacgtggaaacgttcagacggcgcaaagggaggttgcaccatga

SEQ ID NO: 750626 - DNA, 75 bp, synthetic construct
  source 1..75: mol_type = other DNA
atgaaaaaatttgctttactggcgggtctgtttgttttcgcaccaatgacctgggcgcaggactacaatattaag

SEQ ID NO: 750627 - DNA, 75 bp, synthetic construct
  source 1..75: mol_type = other DNA
atgcggtgatggcggcacaaagcgatctggtggaagttatctacaccctgcgtcaggtggtgtgcgtaaaaggat

SEQ ID NO: 750628 - DNA, 75 bp, synthetic construct
  source 1..75: mol_type = other DNA
gttcgtgacgcatgacggaaaagcgaactacccggtcctggccccgagactgaactcattaaaagagattaaagg

SEQ ID NO: 750629 - DNA, 75 bp, synthetic construct
  source 1..75: mol_type = other DNA
ggaaaaaatccgcccaacacaaagaaaaacttcggctacctgatgtggcgtaaacgtaactgtgtatttctgtaa

SEQ ID NO: 750630 - DNA, 75 bp, synthetic construct
  source 1..75: mol_type = other DNA
gaccgtcctgacgacccaagagctactcgtcttctcatcacaggttaagaacatggatgtatccaatcatccaga

SEQ ID NO: 750631 - DNA, 75 bp, synthetic construct
  source 1..75: mol_type = other DNA
aatgctgttgatcacggcaattgatgacaccatgcgtgctatcggcaaaaataatatttcatatgtaccgcgtcg

SEQ ID NO: 750632 - DNA, 75 bp, synthetic construct
  source 1..75: mol_type = other DNA
tgattatgtcgctggtaggtctggcagtgatcatcggcctggaaaaactgaaagtaccgggcggcattctgctga

SEQ ID NO: 750633 - DNA, 75 bp, synthetic construct
  source 1..75: mol_type = other DNA
tgattatgtcgctggtaggtctggcggtgattatcggcctggaaaaactgaaagtaccaggcggtatcctgttaa

SEQ ID NO: 750634 - DNA, 75 bp, synthetic construct
  source 1..75: mol_type = other DNA
caagcgttctggcgctggtgatgacggcagtatttgatgccaccggaactatccgcgccgtcgccggtcaggcga

SEQ ID NO: 750635 - DNA, 75 bp, synthetic construct
  source 1..75: mol_type = other DNA
cgagaatggcctgcggcatcattcaataatcagtcaggtaaggggcgggccccttacctttattcctcaggacga

SEQ ID NO: 750636 - DNA, 75 bp, synthetic construct
  source 1..75: mol_type = other DNA
gaaaagaagtcagcattggaaaaataaccattcaggagaccccctacggtctgctgttcacaccagcccttcact

SEQ ID NO: 750637 - DNA, 75 bp, synthetic construct
  source 1..75: mol_type = other DNA
gtacgtgactaatgatggaaaagcgaactacccggtacttgcaccgaaactagccgaattaaaagatataaatgg

SEQ ID NO: 750638 - DNA, 75 bp, synthetic construct
  source 1..75: mol_type = other DNA
tggtgcaaatgcagctccacaggggcagggaaaagtaacttttaacggaactgtagtagatgcaccatgtggtat

SEQ ID NO: 750639 - DNA, 75 bp, synthetic construct
  source 1..75: mol_type = other DNA
tggcgtgaccgtcggtggtctgaacaccgataccataaacagcgcggttaacggtcgctgggatggtcaatacgg

SEQ ID NO: 750640 - DNA, 75 bp, synthetic construct
  source 1..75: mol_type = other DNA
gttatctgatacaccaacgatggacagcaataataacagtcactcaaccaatgtttcgactgactatcgctatag

SEQ ID NO: 750641 - DNA, 75 bp, synthetic construct
  source 1..75: mol_type = other DNA
agcacaagatgattaccagtcgttgtctgttcagggtaacggtgcgctgggaataacagaaaatagctatattgg

SEQ ID NO: 750642 - DNA, 75 bp, synthetic construct
  source 1..75: mol_type = other DNA
atgtgtctacggattatcgttatagcgaacaggatggcgaatcaaacgtcatggcagttatcgcataccttttat

SEQ ID NO: 750643 - DNA, 75 bp, synthetic construct
  source 1..75: mol_type = other DNA
ccgagcttgtaccgtttaccaaaaccggcggtctgacagacggaaatgcccagtggttcttgcaggcaggtaaaa

SEQ ID NO: 750644 - DNA, 75 bp, synthetic construct
  source 1..75: mol_type = other DNA
ggaatatgatgttgggttatacccgcacacaaaataacactgatgatagtttgcgttgggataaacagcagagct

SEQ ID NO: 750645 - DNA, 75 bp, synthetic construct
  source 1..75: mol_type = other DNA
cagtgagcggatggcatttaagctccaccgccagggcatgattatggaaaccatcggtaaggacagtgccgtctg

SEQ ID NO: 750646 - DNA, 75 bp, synthetic construct
  source 1..75: mol_type = other DNA
gcggaaagaaaccgatcaattcatcgaagttatgaataaaaaagatgcagatactttcgcagtcaaagccccgat

SEQ ID NO: 750647 - DNA, 75 bp, synthetic construct
  source 1..75: mol_type = other DNA
tatagcgcctgggttaaaaaagcaactggtggtacgctgagcgaaggtgctttcactgccattgctaattttaac

SEQ ID NO: 750648 - DNA, 75 bp, synthetic construct
  source 1..75: mol_type = other DNA
tatgagaacaaccaactcacccgcactgaacttgtcccttttaccaaaacaggggggctgacggacggaaatgcg

SEQ ID NO: 750649 - DNA, 75 bp, synthetic construct
  source 1..75: mol_type = other DNA
cgtttaccaaaaccggcggtctgactgacggaaatgcgcaatggttcttacaggcaggtaaaactacatcacagg

SEQ ID NO: 750650 - DNA, 75 bp, synthetic construct
  source 1..75: mol_type = other DNA
ttcagggggagtggtatccggatgcagaaaattccgctactcgactggttttatgcaataaatcaggatgataat

SEQ ID NO: 750651 - DNA, 75 bp, synthetic construct
  source 1..75: mol_type = other DNA
tgtctgtctgcagaaaaagcgcagctactgccagtttgattcgaagctggcgcagatagtccagcagcaggggcg

SEQ ID NO: 750652 - DNA, 75 bp, synthetic construct
  source 1..75: mol_type = other DNA
cagtcatacagcatgtaccagagctgctgggcataccgggacacgtatgtcacgcagtcagcagacaagggaacc

SEQ ID NO: 750653 - DNA, 75 bp, synthetic construct
  source 1..75: mol_type = other DNA
tggcggttaactattccgggatggtgtgggcttttttcgccgcgctggctgccggttggctggcctcagtgagtg

SEQ ID NO: 750654 - DNA, 75 bp, synthetic construct
  source 1..75: mol_type = other DNA
cagtgcgcaggagattagccggagtgaatacacgaattacacctgtgagcgggatttacaggtggagcagtactg

SEQ ID NO: 750655 - DNA, 75 bp, synthetic construct
  source 1..75: mol_type = other DNA
aaccagaaaatcccggacagtggtgttctgacgcagaaagtgaaagaacagattgctgaccagctgaagctggct

SEQ ID NO: 750656 - DNA, 75 bp, synthetic construct
  source 1..75: mol_type = other DNA
tggtggatttaccgttcgacgtacaggttgcggaaatcgagtttgatcctgacatgtacgaaccgctgccggtct

SEQ ID NO: 750657 - DNA, 75 bp, synthetic construct
  source 1..75: mol_type = other DNA
tttttgccagcgggatgaactggacggtgacgttactgggttttctggcgggtaactgcgtggggataatttcag

SEQ ID NO: 750658 - DNA, 75 bp, synthetic construct
  source 1..75: mol_type = other DNA
cgttactcgggtttctggcgggtaactgcgtggggataatttcacaatatagtgggcaaaaattaagcgaagcga

SEQ ID NO: 750659 - DNA, 75 bp, synthetic construct
  source 1..75: mol_type = other DNA
gactgtccgcgttctgggcgagcgtaattactaccgtacccttctcggcggtggtggtctggcaagggcgtttct

SEQ ID NO: 750660 - DNA, 75 bp, synthetic construct
  source 1..75: mol_type = other DNA
tcaccgtggggatttgcgcaggcctttggcagatggtgtcatcacatatcggagtctctcaaggatgggaattat

SEQ ID NO: 750661 - DNA, 75 bp, synthetic construct
  source 1..75: mol_type = other DNA
ttgcagtttttatgccgcaggcggcggtaaatcggggtttatcaaaagcctggcggttaattattccgggatggt

SEQ ID NO: 750662 - DNA, 75 bp, synthetic construct
  source 1..75: mol_type = other DNA
atgaacggactcacggcaacgggtattactgtcggtatttgcgcaggcgtctggcagatggtgtcatcacatgtc

SEQ ID NO: 750663 - DNA, 75 bp, synthetic construct
  source 1..75: mol_type = other DNA
atttacgccagtacagaagacgctgacagccggtgttgcttttacgtcatcacatcccacccgggtcgggaatac

SEQ ID NO: 750664 - DNA, 75 bp, synthetic construct
  source 1..75: mol_type = other DNA
aatgtaacagtgaagaaaaggcgctgggaaaggcgaaggacaacaaactgacggtgagtgtgggtgagttctgct

SEQ ID NO: 750665 - DNA, 75 bp, synthetic construct
  source 1..75: mol_type = other DNA
cgtgggaaacaccggacagcagtgcagtgcgcaacagataaaccgcagtgaattcaccaactatacctgtgagcg

SEQ ID NO: 750666 - DNA, 75 bp, synthetic construct
  source 1..75: mol_type = other DNA
atatgtcgataatccggcctgtacgctggcctcacgtcagtgcgcgttttattccgatgagggaacctgtctgca

SEQ ID NO: 750667 - DNA, 75 bp, synthetic construct
  source 1..75: mol_type = other DNA
tgcgcgataaaggtcgaaaccatcaaagactgtcaggataaaatcgatgcagaaaatgaaaagcctgcgccaggc

SEQ ID NO: 750668 - DNA, 75 bp, synthetic construct
  source 1..75: mol_type = other DNA
ttgctcgctgctccattttgcaggccgcgcgctctgccggtattcaggcgtttgacaccgtctattccgacgcca

SEQ ID NO: 750669 - DNA, 75 bp, synthetic construct
  source 1..75: mol_type = other DNA
tctgtggtggtgatgtcttctgccttgacggtgaatgcgataaggcgcagagcggaaaaagcagtgattttggtg

SEQ ID NO: 750670 - DNA, 75 bp, synthetic construct
  source 1..75: mol_type = other DNA
atgaaaaaagtattagctctggttgttaccgctgctatgggtctgtcttctgctgcctttgctgcagagactgcg

SEQ ID NO: 750671 - DNA, 75 bp, synthetic construct
  source 1..75: mol_type = other DNA
tggtcaacggcggaagtttcggacattggatgtcaaacggcggtggatggtggcaccaacttgattctgagcagg

SEQ ID NO: 750672 - DNA, 75 bp, synthetic construct
  source 1..75: mol_type = other DNA
taatgtccatatccttttttcagataaggtgagcaccgaacgtattaacgaagccctagcccgtgttccactaag

SEQ ID NO: 750673 - DNA, 75 bp, synthetic construct
  source 1..75: mol_type = other DNA
gcttggttttaagctgttggtggtctgcgatgacaacacacaggattatcccacgaaaactgacctgggcagtcg

SEQ ID NO: 750674 - DNA, 75 bp, synthetic construct
  source 1..75: mol_type = other DNA
tgtgatgacaacacacaggattatcccacgaaaattgacctgggcgggcgcagtcatttactggtattaacggag

SEQ ID NO: 750675 - DNA, 75 bp, synthetic construct
  source 1..75: mol_type = other DNA
ttgccgctgctatgggtctgtcttctaccgcctttgctgcagagactgcgaccacacctgctccgactgcgacga

SEQ ID NO: 750676 - DNA, 75 bp, synthetic construct
  source 1..75: mol_type = other DNA
gatcctctcacccgtgacgaatttattcgttttattgaagcttgccgtcatcaacaaacaaaaaacctgtggatt

SEQ ID NO: 750677 - DNA, 75 bp, synthetic construct
  source 1..75: mol_type = other DNA
atgcgacaaaaagcatgaacattctgcgaaatgttctggccggtgtcagtgatgataaacgtatccaggtgcttc

SEQ ID NO: 750678 - DNA, 75 bp, synthetic construct
  source 1..75: mol_type = other DNA
tcttattgaggtttcaggagatagcgctggtgcactttcatattcccgtggggagttgttccgggcctgctcaat

SEQ ID NO: 750679 - DNA, 75 bp, synthetic construct
  source 1..75: mol_type = other DNA
ttgcagctcgcgctgtttaatatcctgctgccgtttgtgattgtctgcattattggcggtggcctgaaagccatt

SEQ ID NO: 750680 - DNA, 75 bp, synthetic construct
  source 1..75: mol_type = other DNA
ggcgtcatattgaggcggaagaagtgttgcgtatgctgcgcgatacgtcggaaaaagccgagaagaactcaacga

SEQ ID NO: 750681 - DNA, 75 bp, synthetic construct
  source 1..75: mol_type = other DNA
atctggcggatctgtttaagattgataactcccacgccgggcgtttcaaaaccgtgctgttaaccttcctgccac

SEQ ID NO: 750682 - DNA, 75 bp, synthetic construct
  source 1..75: mol_type = other DNA
acattcatagattctttacctgctgaggtaaaaagagatgctcgatatttatcaaagttcgttgctggtgcggct

SEQ ID NO: 750683 - DNA, 75 bp, synthetic construct
  source 1..75: mol_type = other DNA
gataaccagcttaagtcgcaagatacattcaacgatgaaaacacgtccagttcaggcaaagagataattaatggc

SEQ ID NO: 750684 - DNA, 75 bp, synthetic construct
  source 1..75: mol_type = other DNA
cattcggcgaggaaaacacgtccagttctggcaaagagttaataaatggcgaagagtggaactggcgcagcgata

SEQ ID NO: 750685 - DNA, 75 bp, synthetic construct
  source 1..75: mol_type = other DNA
gccgtggcgatggtcagtcgcctgcgcaaagggaaaaccgatcccgagtggcgcattgaggtcagccatacccgc

SEQ ID NO: 750686 - DNA, 75 bp, synthetic construct
  source 1..75: mol_type = other DNA
aggaacactgaagtactgctttgcttatattgttattcttggactgaaagtaggccttgtctaccacctgttcat

SEQ ID NO: 750687 - DNA, 75 bp, synthetic construct
  source 1..75: mol_type = other DNA
cgcaggaagtcttgtcagtctgatcgttatagtctttatggcaaaaaaccgtaaagaaaaaacagaacctgaatt

SEQ ID NO: 750688 - DNA, 75 bp, synthetic construct
  source 1..75: mol_type = other DNA
acgcgcattgatgcggagctgtcgatggcagcattgcgggaatatagagaaaaagtttccggcatggcaggatgc

SEQ ID NO: 750689 - DNA, 75 bp, synthetic construct
  source 1..75: mol_type = other DNA
acacggtaaacagctgcgcggttggcgaatacaaaagcgagttgagcggtgcggatatcatcatcgcttctaccc

SEQ ID NO: 750690 - DNA, 75 bp, synthetic construct
  source 1..75: mol_type = other DNA
gtggcaacggacaaggtagttccatgatcatgaagatgaaagtggatcagtttttaacccagtcgaacatcgacc

SEQ ID NO: 750691 - DNA, 75 bp, synthetic construct
  source 1..75: mol_type = other DNA
ctcttccggagccgccccgcattcatggttttatctgggatgtaaataatgtgcggctgctggcttatgcactcc

SEQ ID NO: 750692 - DNA, 75 bp, synthetic construct
  source 1..75: mol_type = other DNA
actataaccatccgtagaaattatacaaaacttggcgaattcactccaccaaaaaccgatgcaggcaccggaagg

SEQ ID NO: 750693 - DNA, 75 bp, synthetic construct
  source 1..75: mol_type = other DNA
gcaaaaaagtgctgggggtatgtctggagaagaaacgcggttactgcgtatttgactccaaactggcacgcattg

SEQ ID NO: 750694 - DNA, 75 bp, synthetic construct
  source 1..75: mol_type = other DNA
accatggagggaaattacgtatctggtttgtttataaaggcgtaagagtcagggaaaacctgggggttcctgaca

SEQ ID NO: 750695 - DNA, 75 bp, synthetic construct
  source 1..75: mol_type = other DNA
aacagacatttaaagttaaaagaattcaggaccagtggtaatatccattacttacatttttctttgtacaaccct

SEQ ID NO: 750696 - DNA, 75 bp, synthetic construct
  source 1..75: mol_type = other DNA
ttgcgacgacaggaaacccggtgaaacttatgttgcagtggggaacggtggcaacacaaaagggagctgatgctg

SEQ ID NO: 750697 - DNA, 75 bp, synthetic construct
  source 1..75: mol_type = other DNA
tattggtctggtttatcgtcctggctcaccgctgcgtagccgttatgaacagctggcagaggccatccgcgcaaa

SEQ ID NO: 750698 - DNA, 75 bp, synthetic construct
  source 1..75: mol_type = other DNA
ttattgccaccgttacgctggttaacgcctgctcttataccctggcgatgtccacttgccgcgaagtacgcgatg

SEQ ID NO: 750699 - DNA, 75 bp, synthetic construct
  source 1..75: mol_type = other DNA
catgagaaggaacagataagccgtactgttcaggaaatgtttgaagaggctgaattctggttagtgagtgagtaa

SEQ ID NO: 750700 - DNA, 75 bp, synthetic construct
  source 1..75: mol_type = other DNA
agatgttgaaaattttgacaatttacatgccttctttatggttaaggataatcaaattgcttcactccttcaaat

SEQ ID NO: 750701 - DNA, 75 bp, synthetic construct
  source 1..75: mol_type = other DNA
ttcaacgttcgacctgctgaattctggcgcggctgaatattacagctatgcgtttagcccagcacgtaacgacgc

SEQ ID NO: 750702 - DNA, 75 bp, synthetic construct
  source 1..75: mol_type = other DNA
ctgctgtggttgtgttatttcttcactctgctggtggtctacatgttgatcaactggctaccgctgcttttggtg

SEQ ID NO: 750703 - DNA, 75 bp, synthetic construct
  source 1..75: mol_type = other DNA
gccgcgccgccgctgcgtgcgttatttgcgcccgacacggcaaccgcaacgctgctgctgtggttgtgttatttc

SEQ ID NO: 750704 - DNA, 75 bp, synthetic construct
  source 1..75: mol_type = other DNA
ttcggtattatttttctgaccgccgtcgtggtgcatattattttgcactgggtggtactgcggaccttcgaaaaa

SEQ ID NO: 750705 - DNA, 75 bp, synthetic construct
  source 1..75: mol_type = other DNA
cgcgccatcgccagttcacggctatggttgcaaatcattacccagaataaactcttccaccgtttagcttttacc

SEQ ID NO: 750706 - DNA, 75 bp, synthetic construct
  source 1..75: mol_type = other DNA
tgtatgcgctgctttcagtcttctcgttgctggatgttattttaaatctggcgcagaaattcccggcagcaaaac

SEQ ID NO: 750707 - DNA, 75 bp, synthetic construct
  source 1..75: mol_type = other DNA
atggctaaggtaaaagtaaaaacactcatcggctctgttgtcactgtcgccttttttctgacggtcatcgtggca

SEQ ID NO: 750708 - DNA, 75 bp, synthetic construct
  source 1..75: mol_type = other DNA
gttctaccctccccgccttcccgttggcggcggtacgagccttggggccgcattgcgtgagctgaccgtgcaaat

SEQ ID NO: 750709 - DNA, 75 bp, synthetic construct
  source 1..75: mol_type = other DNA
ggcaggttaaactgttgatggccgctctgccgcatgtggcgaaggaatcctgtttcgcgttgaaaggcggcacag

SEQ ID NO: 750710 - DNA, 75 bp, synthetic construct
  source 1..75: mol_type = other DNA
gatatcgtgttctctcagggcgatgcgagtgttcacttcgaactgatggcgcgtccttcacgggatgttgccaga

SEQ ID NO: 750711 - DNA, 75 bp, synthetic construct
  source 1..75: mol_type = other DNA
acgctgaactaccaggggaaaacggggcagaagggtgaggcactggctgattcaatcgtggattcagcgaaaaag

SEQ ID NO: 750712 - DNA, 75 bp, synthetic construct
  source 1..75: mol_type = other DNA
ctcgataagaataaaaatggcaggcagtttattgaacagacacagggccctgaaggtccgctcgatggggtattt

SEQ ID NO: 750713 - DNA, 75 bp, synthetic construct
  source 1..75: mol_type = other DNA
caacaccgtggtgtggctggaatatgaaagcattcaggctgatatattcgatcacatatttgcgattgtcgaaga

SEQ ID NO: 750714 - DNA, 75 bp, synthetic construct
  source 1..75: mol_type = other DNA
ggctgctaaagcagtaacgctgcgccgccagtgggcaccgcatcgcccggtatggattgccaccagtactcatga

SEQ ID NO: 750715 - DNA, 75 bp, synthetic construct
  source 1..75: mol_type = other DNA
gctatgccttatctggttgagcagggattctcacgcggtgatttaggttttgccctttcggggatctcgattgct

SEQ ID NO: 750716 - DNA, 75 bp, synthetic construct
  source 1..75: mol_type = other DNA
cacacaaagcgcgcttacctgccgcggagatcgatccgacttatcgtcgattgcgctggcaaattttcctgggga

SEQ ID NO: 750717 - DNA, 75 bp, synthetic construct
  source 1..75: mol_type = other DNA
aaacccttatcaccgatacgggtgcaaaaaaattagctcaggcagccgcgccagatggtaagcctgtccgcctga

SEQ ID NO: 750718 - DNA, 75 bp, synthetic construct
  source 1..75: mol_type = other DNA
gcggctgcgttgtctgccagtgccgcgtcaacaagtgccgggcaggcctcagccagtgccaccgctgccggaaaa

SEQ ID NO: 750719 - DNA, 75 bp, synthetic construct
  source 1..75: mol_type = other DNA
agccgccacttctgcatccaccgcgaccacgaaagcgtcagaagctgccacctcagcccgggatgcgtcggcttc

SEQ ID NO: 750720 - DNA, 75 bp, synthetic construct
  source 1..75: mol_type = other DNA
aaagaatttgatcagattgctactgacattatcgaaaaagcacaaagccaggcggctgctgtagagcgtattgtt

SEQ ID NO: 750721 - DNA, 75 bp, synthetic construct
  source 1..75: mol_type = other DNA
acaccacgtagcgtatcagcgtacaaaagagagcgtattggctgcttctttgttctctggcaaaacttacacgcc

SEQ ID NO: 750722 - DNA, 75 bp, synthetic construct
  source 1..75: mol_type = other DNA
cagcttgcaccgggagataccgggttgccgattgaaatatatgcgttcaccaataccgtagtctggctggaatat

SEQ ID NO: 750723 - DNA, 75 bp, synthetic construct
  source 1..75: mol_type = other DNA
atgaagaagatggtgcacgttttgtggcgctgggcgcaaaaaataatcaggtgaccgttaccggtagcctgaaat

SEQ ID NO: 750724 - DNA, 75 bp, synthetic construct
  source 1..75: mol_type = other DNA
gaccgctgacgctgtagctattcctaaacttgctaagggggcaggtgtttaccaagctatttttggtgcgccttc

SEQ ID NO: 750725 - DNA, 75 bp, synthetic construct
  source 1..75: mol_type = other DNA
tggaccagccgtaaagaacggtcttctatgttccgcgatcgcccattaaaacgaatgaagtcaaaacgtgacgac

SEQ ID NO: 750726 - DNA, 75 bp, synthetic construct
  source 1..75: mol_type = other DNA
ctggagtcgcttttatcagtaacgatgttgctgccacaagcgctgaaatcgcatcttacggacagggatcgtcag

SEQ ID NO: 750727 - DNA, 75 bp, synthetic construct
  source 1..75: mol_type = other DNA
ccagtcgcgcccgtatgcaggtgacacgtatggcctgcatctgccgctgctggcgggaacggaagtcagcatcgc

SEQ ID NO: 750728 - DNA, 75 bp, synthetic construct
  source 1..75: mol_type = other DNA
cggcgtgacggccagcgcggcgcgtgaccgcagctatgaactgacgtttaccgctattccgtattcagagcgcta

SEQ ID NO: 750729 - DNA, 75 bp, synthetic construct
  source 1..75: mol_type = other DNA
aaagagcatatcaaggtcagtaccgagtacggcggcaagagccagctaaacctcggtcatctggtggacgccggg

SEQ ID NO: 750730 - DNA, 75 bp, synthetic construct
  source 1..75: mol_type = other DNA
cggcgaagaaaaaaatcacgattaatggcggcgggagttatatacggattgatagcggcggcattgagccgggaa

SEQ ID NO: 750731 - DNA, 75 bp, synthetic construct
  source 1..75: mol_type = other DNA
tcccatcctttcagccgtggactcatccgatttttgtcttgaatgcctgctgaatgccatcaaaaacgatgatgc

SEQ ID NO: 750732 - DNA, 75 bp, synthetic construct
  source 1..75: mol_type = other DNA
gcgggtatcaaactgattgccaataaaggcgcagtatcggtacaggcgcagcacgatctgatggagttactggcg

SEQ ID NO: 750733 - DNA, 75 bp, synthetic construct
  source 1..75: mol_type = other DNA
cgcgaaatggctccggcgatggcaatactggatggcgcacagtcacagatgcagtcgctgtccactgatgcgcag

SEQ ID NO: 750734 - DNA, 75 bp, synthetic construct
  source 1..75: mol_type = other DNA
tggatgccggaaaacaacagcgcggggaaggctttgaactgcgtaccgatatgtggggcgcggtgcgggcgaaga

SEQ ID NO: 750735 - DNA, 75 bp, synthetic construct
  source 1..75: mol_type = other DNA
attcgtatctccagtaacagggggttgtattgtattgtattttattgtgccggttcaggtgtgcgtttcccggcg

SEQ ID NO: 750736 - DNA, 75 bp, synthetic construct
  source 1..75: mol_type = other DNA
gtatctggttccgcttcgccaccgatgcccggctgaaaattgaggttatcgagttttacgacgaccagagcggct

SEQ ID NO: 750737 - DNA, 75 bp, synthetic construct
  source 1..75: mol_type = other DNA
cactcaaaaagaaggtattactgatgagaatgggtatacagaaaattttaatactgattccaaacaaacaattga

SEQ ID NO: 750738 - DNA, 75 bp, synthetic construct
  source 1..75: mol_type = other DNA
acgggcgtaaaccaaaggcgaagctgacgccggagctgatggcatttccggtgattaagtctgaggattttaatc

SEQ ID NO: 750739 - DNA, 75 bp, synthetic construct
  source 1..75: mol_type = other DNA
ctcgtcacgggacgaagcccgttacgaagtgcgccttgaaccccgtatggcgctgctggcccgcagccgccagaa

SEQ ID NO: 750740 - DNA, 75 bp, synthetic construct
  source 1..75: mol_type = other DNA
agcaccagagccaaaatccagccggggacgccagtccgcaacaaccaaaaccgaggcagcaaaaacctttgccag

SEQ ID NO: 750741 - DNA, 75 bp, synthetic construct
  source 1..75: mol_type = other DNA
gccgataaacgcgatgcgaaagatggggatatcgggattgtggggtatgaaattccgtttaatcgtcatttttat

SEQ ID NO: 750742 - DNA, 75 bp, synthetic construct
  source 1..75: mol_type = other DNA
ctggaggagattgatgcggatctggatgcgataagtgccgagattatgaaactgttgcaggaggtacattcctga

SEQ ID NO: 750743 - DNA, 75 bp, synthetic construct
  source 1..75: mol_type = other DNA
attcgctggaagcaacgcaatctggcggtgctaaaagataaaaatcctgcgaagtatgtggcggcggtgagtaag

SEQ ID NO: 750744 - DNA, 75 bp, synthetic construct
  source 1..75: mol_type = other DNA
aaatccagaaccgaaacggcgaccatgagaatagctatgttcggttactcgtcagcgattgtgagaaaaatgctt

SEQ ID NO: 750745 - DNA, 75 bp, synthetic construct
  source 1..75: mol_type = other DNA
aagcaaattaaagatctgctcgacagtaaattatggctggcccagcgtgagttaatggaaaaagcgcagcgtatt

SEQ ID NO: 750746 - DNA, 75 bp, synthetic construct
  source 1..75: mol_type = other DNA
ggtgaacccgaatgggcggaatctcatctgagcgcatggtctgaagtgtttcaaaagtttggtgctaaacctaaa

SEQ ID NO: 750747 - DNA, 75 bp, synthetic construct
  source 1..75: mol_type = other DNA
cccctgaaatttatcgtattgctcctggttttcgggctctcagtatctgcgtaaaagctgcgccagtgcttaatc

SEQ ID NO: 750748 - DNA, 75 bp, synthetic construct
  source 1..75: mol_type = other DNA
gggaacggaagtcagtatcgcgtttgaggaaggcaacccggaccgaccttatattgcaggcgtaaaacacgactc

SEQ ID NO: 750749 - DNA, 75 bp, synthetic construct
  source 1..75: mol_type = other DNA
aagcaaattaaagatctgctcgacagcaaattatggctggcccagcgcgggttaatggaaaaagcgcggcgtatt

SEQ ID NO: 750750 - DNA, 75 bp, synthetic construct
  source 1..75: mol_type = other DNA
attcgctaaagcagatttatacccggagcacgtcaccaaccacgatatggggctggtatttgaggagctgatccg

SEQ ID NO: 750751 - DNA, 75 bp, synthetic construct
  source 1..75: mol_type = other DNA
tgacaacctctctggtgtttgcagacgacgatgcagcgttgactaaaccgggactgatccgccgcatctacgatc

SEQ ID NO: 750752 - DNA, 75 bp, synthetic construct
  source 1..75: mol_type = other DNA
aagccggtcccaccggcagaatggcctttatgctttatcagtgctgagagcgatgtaaaagtttacccgatccct

SEQ ID NO: 750753 - DNA, 75 bp, synthetic construct
  source 1..75: mol_type = other DNA
gaaacgggcgggaaactggctgcgcagtcagaccgccgggtgaatgtggtggctacacgcatttatgattttggt

SEQ ID NO: 750754 - DNA, 75 bp, synthetic construct
  source 1..75: mol_type = other DNA
gttgtggatgccttcgaggtcaactttgctttcccaaacggaatttgcgggttccagaacaacgggaataagcgg

SEQ ID NO: 750755 - DNA, 75 bp, synthetic construct
  source 1..75: mol_type = other DNA
ttgctcacggtgatgaaagcacctcacgcgttgtgggcagagtcattgatgaaatcaagctaccaccaggaacga

SEQ ID NO: 750756 - DNA, 75 bp, synthetic construct
  source 1..75: mol_type = other DNA
catggctctcatccacgcgtattgcgggaggcaggtgccgacgacgccgatatgctggttgctgtaaccagttca

SEQ ID NO: 750757 - DNA, 75 bp, synthetic construct
  source 1..75: mol_type = other DNA
cgctgcagcctcggctgtgtatgtgctgatcaccatgtctaacatggataaaggcggctactcatcatcaaatgg

SEQ ID NO: 750758 - DNA, 75 bp, synthetic construct
  source 1..75: mol_type = other DNA
gctgaagagacggtgcagtgcagaacatcagataacccaactccggtaaagattgaggactatacgcttgatggt

SEQ ID NO: 750759 - DNA, 75 bp, synthetic construct
  source 1..75: mol_type = other DNA
gcatttctggtgctctgtatcatataggtaatgagttggggctagcgatggaccgtgaagctattgactcactag

SEQ ID NO: 750760 - DNA, 75 bp, synthetic construct
  source 1..75: mol_type = other DNA
gcatttctggtgctttgtatcatataggtaatgagttgggtctggcgatggaccatgaagctattgactcactag

SEQ ID NO: 750761 - DNA, 75 bp, synthetic construct
  source 1..75: mol_type = other DNA
atacgattctggcactgccttttccggattgccggaaggcactcagcggatttccctggcgcaccgtggcaacga

SEQ ID NO: 750762 - DNA, 75 bp, synthetic construct
  source 1..75: mol_type = other DNA
acgcctctaaatttcatggggtgttgcccatggattactatgaaaaggctattcgttatattgaggatgttcaag

SEQ ID NO: 750763 - DNA, 75 bp, synthetic construct
  source 1..75: mol_type = other DNA
caatctgatggaacatgtcaggtaacggcaaaagagtatcgcgacactttctatcagtacgataacgctacctac

SEQ ID NO: 750764 - DNA, 75 bp, synthetic construct
  source 1..75: mol_type = other DNA
aggtagcctactcacttttcaacacccctaatcgcatcgctcgtatccgctcaccagactacgtgcgcgatgccg

SEQ ID NO: 750765 - DNA, 75 bp, synthetic construct
  source 1..75: mol_type = other DNA
tctgacgtgttcggtcgtaacgaagtggcaacggcaaacggtctgaccgggatgtccgcatggctggcaagtacg

SEQ ID NO: 750766 - DNA, 75 bp, synthetic construct
  source 1..75: mol_type = other DNA
tggttatctggaccgtattgcagaacaaaccggcgattgaggtggcgcaggaaacacataacgatcccgcaccgc

SEQ ID NO: 750767 - DNA, 75 bp, synthetic construct
  source 1..75: mol_type = other DNA
gattggcccgggtatgatcggtctgttcaccaacccgtatgtcgcgattatgctgctgtgtatcggtggttttgc

SEQ ID NO: 750768 - DNA, 75 bp, synthetic construct
  source 1..75: mol_type = other DNA
ttgggacaacatattagcgttccggttgcgctgggcgccgtatttttgatgggcgtgctgtttacggtcatctcg

SEQ ID NO: 750769 - DNA, 75 bp, synthetic construct
  source 1..75: mol_type = other DNA
acctgtaacatcgtaacaggcatcatgatcggcttcgcgactctggtgattggtcgtctggtttccggcgaatgg

SEQ ID NO: 750770 - DNA, 75 bp, synthetic construct
  source 1..75: mol_type = other DNA
ggagctacaaagcgccagcaaaccggttgtgcattaccaatggtcgccagtcgccggcggcaataaaaaactggc

SEQ ID NO: 750771 - DNA, 75 bp, synthetic construct
  source 1..75: mol_type = other DNA
gatcacgtaattatgttcctcacagataaaaagtttattaccgacgtcgaaagactcttccagccaagccctttc

SEQ ID NO: 750772 - DNA, 75 bp, synthetic construct
  source 1..75: mol_type = other DNA
tcgccccattcgtccgcaaggttcgaccattgttgaagctggtgatgaagtgttctttattgccgcttcacagca

SEQ ID NO: 750773 - DNA, 75 bp, synthetic construct
  source 1..75: mol_type = other DNA
aagcctattatggcggcccgctgattggtaatgcactttcgaccatgcgcgaacatatgccacatatcgatactc

SEQ ID NO: 750774 - DNA, 75 bp, synthetic construct
  source 1..75: mol_type = other DNA
ccactatggctgtctcagtcgaaacaggtggaaagcttgccgctcagtctgatcgccgtgtcaacgtagtcgcca

SEQ ID NO: 750775 - DNA, 75 bp, synthetic construct
  source 1..75: mol_type = other DNA
tgattatgttcctgacagataaaaagtttattaccgacgttgaacgcctcttccagccaagtcctttcttcttgt

SEQ ID NO: 750776 - DNA, 75 bp, synthetic construct
  source 1..75: mol_type = other DNA
gtaatggtgttgatccagcgtcgcgcttatgtggatctggttcaaggaagcgtgatcgatattgcgatttcaccg

SEQ ID NO: 750777 - DNA, 75 bp, synthetic construct
  source 1..75: mol_type = other DNA
ggctgcctggcgagccactcgaaactcatgaacatggcgcagtaactatccatcagtggcttgcgaagaacgttc

SEQ ID NO: 750778 - DNA, 75 bp, synthetic construct
  source 1..75: mol_type = other DNA
atcgtcacaggacgaagcccgttacgaagtacggcttgaaccccgtatggcgctgctgacccgcagccgccagaa

SEQ ID NO: 750779 - DNA, 75 bp, synthetic construct
  source 1..75: mol_type = other DNA
ataaagaggcagcggaaagcggcgcgttttatgcccgtatccgccacgaacgctacctgaatgaacaggccattc

SEQ ID NO: 750780 - DNA, 75 bp, synthetic construct
  source 1..75: mol_type = other DNA
gatgacgaaaatatcccatatcgtaatgttaagtatatagccaattttattgatggaacaaaaaaggaaggtgtc

SEQ ID NO: 750781 - DNA, 75 bp, synthetic construct
  source 1..75: mol_type = other DNA
acaaggaggcagcggaaagcggcgcgttttatgcccgtatccgtcacgaacgctacctgaatgaacaggccattc

SEQ ID NO: 750782 - DNA, 75 bp, synthetic construct
  source 1..75: mol_type = other DNA
ggtacgccagtcgcgcccgtatgcgggagacacctacggcctgcatctgccgctgctggcgggaacggaagtcag

SEQ ID NO: 750783 - DNA, 75 bp, synthetic construct
  source 1..75: mol_type = other DNA
ggcaccgccggtacagggaatgccggtgcaggcacccctgcgcaccctgtatggcgtcattaccggctttaaaca

SEQ ID NO: 750784 - DNA, 75 bp, synthetic construct
  source 1..75: mol_type = other DNA
actgattttcaggaaacactcactgatatctatgctgactatgttgctaaacaccacgtagcgtatcagcgtaca

SEQ ID NO: 750785 - DNA, 75 bp, synthetic construct
  source 1..75: mol_type = other DNA
atcagcgtcgtgacctgctgccaggagtgacagcgttcactattccaggaactaacatcgatgttgttaaactgg

SEQ ID NO: 750786 - DNA, 75 bp, synthetic construct
  source 1..75: mol_type = other DNA
gttttagttctgaacacaatgttactaagcgagaacaaggtaaagaatggctgattgaaatcccgtactttttaa

SEQ ID NO: 750787 - DNA, 75 bp, synthetic construct
  source 1..75: mol_type = other DNA
cagaaaattttaatactgattccaaacaaacaattgatgtcagattattaaatcaaaatatagacatgatattgg

SEQ ID NO: 750788 - DNA, 75 bp, synthetic construct
  source 1..75: mol_type = other DNA
cggcggtggcagctacatccggctggatgcctgcgggatagaagcgggaacgccgggagaatataacgttaaggc

SEQ ID NO: 750789 - DNA, 75 bp, synthetic construct
  source 1..75: mol_type = other DNA
gctcctgctgaggtgtacagctacagctatgaatcttctcgtggtgatgctgttaacgttgttacagagaatagc

SEQ ID NO: 750790 - DNA, 75 bp, synthetic construct
  source 1..75: mol_type = other DNA
actctcacacagtaaatattggcgcacacactcatacggtaggaattggcgcacacacacactccgttgcgatag

SEQ ID NO: 750791 - DNA, 75 bp, synthetic construct
  source 1..75: mol_type = other DNA
gatttacttgacggggtcgacaacggcctccggtatctgctggactgtaaagctgaatggaatcaaattctgaac

SEQ ID NO: 750792 - DNA, 75 bp, synthetic construct
  source 1..75: mol_type = other DNA
cggggctgctggccagcgacagcgactggcacaataatgcctgcctgaattacatgccggatcatggtacagctt

SEQ ID NO: 750793 - DNA, 75 bp, synthetic construct
  source 1..75: mol_type = other DNA
ctgcgtatgccaaaacgctgcatccttttttctacacaccacagcctgaaaacaaagttgaggatatataccggt

SEQ ID NO: 750794 - DNA, 75 bp, synthetic construct
  source 1..75: mol_type = other DNA
ccgcgctggagcctgaattgtgggcgatgaacgacgcgtacattgagccgccgcgcttgctgttctgctcatcag

SEQ ID NO: 750795 - DNA, 75 bp, synthetic construct
  source 1..75: mol_type = other DNA
caccgaggagctgcagaccgcgtttaaagccccgtcacaggacgattacgacggtgtggacgtgacgtatatcaa

SEQ ID NO: 750796 - DNA, 75 bp, synthetic construct
  source 1..75: mol_type = other DNA
catgttcctgtgcgtgggtgtcggcgacatggtgattaaccagtccgatatccggatcggcaataccccgatctc

SEQ ID NO: 750797 - DNA, 75 bp, synthetic construct
  source 1..75: mol_type = other DNA
gggcgcagggataacgcaggtttatcgcgtgtacagcagttcccgaagctattcgcggagcaaatattccacgca

SEQ ID NO: 750798 - DNA, 75 bp, synthetic construct
  source 1..75: mol_type = other DNA
tgaacttgttcttcgtgcgggaaatggaaatccaaaaggtcttactggtgcgttatggcgacggacatcggttgg

SEQ ID NO: 750799 - DNA, 75 bp, synthetic construct
  source 1..75: mol_type = other DNA
agcggtggtgctggttggttcaaattagcaacggtaaccatgccgcaggcgagttctgttgtttcaattacgttg

SEQ ID NO: 750800 - DNA, 75 bp, synthetic construct
  source 1..75: mol_type = other DNA
gggttattcgcgaaagatttcagactgtgacctgaatgtttatttgttacttgatgcagcaaggttactgaaccg

SEQ ID NO: 750801 - DNA, 75 bp, synthetic construct
  source 1..75: mol_type = other DNA
gcacccggacatgctttcctctcttatactgacgagaatggcataactcaattctgggaaaccattgaaccagat

SEQ ID NO: 750802 - DNA, 75 bp, synthetic construct
  source 1..75: mol_type = other DNA
taacatcacgttgtcaaataatcagaccagtttcaccagtggttattcggtaacggtgacacctgcggccagtaa

SEQ ID NO: 750803 - DNA, 75 bp, synthetic construct
  source 1..75: mol_type = other DNA
atgaaaacgaagatttccgccgctggtatggcgctgacctgcctgatgctgtgcgccggttgcaccagcgccccg

SEQ ID NO: 750804 - DNA, 75 bp, synthetic construct
  source 1..75: mol_type = other DNA
tggaagaggcggagcagtacaagcgcggtcacggtgacgagatttggcctgcggtgaaaccggtgtacgaaaaaa

SEQ ID NO: 750805 - DNA, 75 bp, synthetic construct
  source 1..75: mol_type = other DNA
cgtctgggatttcttcggcgcggtcaccattgttcgtcgccatctcgacacgctcgagcagcaattcggtcgccg

SEQ ID NO: 750806 - DNA, 75 bp, synthetic construct
  source 1..75: mol_type = other DNA
aacggtggtctgacatagagagggtcaccttctctttcggctacgggctaatggtaacaccgttacagttagcgc

SEQ ID NO: 750807 - DNA, 75 bp, synthetic construct
  source 1..75: mol_type = other DNA
aaattctaaactttgtttctaaatcagccccttcggttatggcaattaaaggagagtggggagttggtaagacat

SEQ ID NO: 750808 - DNA, 75 bp, synthetic construct
  source 1..75: mol_type = other DNA
tggaagaggcggagcattacaagcgcggtcacggcaaagaaatttggcctgcggtgaagccggtatacgaaaaaa

SEQ ID NO: 750809 - DNA, 75 bp, synthetic construct
  source 1..75: mol_type = other DNA
ttttagccatgcggcgacttcatttcctccaggtacggacccgcgtatttccatcaacgtgctggagtctgccgg

SEQ ID NO: 750810 - DNA, 75 bp, synthetic construct
  source 1..75: mol_type = other DNA
aggcgataatagtattgaaaatgtaactgttttatctatatattcttctggaaaatcagggtatgccgcaaaagt

SEQ ID NO: 750811 - DNA, 75 bp, synthetic construct
  source 1..75: mol_type = other DNA
gacggcactcggagaaagaattttaacgttactcgaaggtgagagggaacagcaacaaggtgcgatccaggcgaa

SEQ ID NO: 750812 - DNA, 75 bp, synthetic construct
  source 1..75: mol_type = other DNA
gcacggtggtgaactctatccggtaaaggagtggcgcactcaggacatctggtcttttctgatggcctgtggttc

SEQ ID NO: 750813 - DNA, 75 bp, synthetic construct
  source 1..75: mol_type = other DNA
cccgctgtcgattaccaaagttgatcctccggttcccggtgaacgcgtcttcccggagtccattgtccgcaccgt

SEQ ID NO: 750814 - DNA, 75 bp, synthetic construct
  source 1..75: mol_type = other DNA
gacgtttttgaacccggttctactgttaaaccgatggtggtgatgactgcgttgcagcgtggcgtggtgcgggaa

SEQ ID NO: 750815 - DNA, 75 bp, synthetic construct
  source 1..75: mol_type = other DNA
atgacagtatgcatgtaacagaaatcaatcaaagaaaagttactgtttttttatctaaagaaaataaaactctta

SEQ ID NO: 750816 - DNA, 75 bp, synthetic construct
  source 1..75: mol_type = other DNA
tcgcactatttctgacgggatgtactcacagtcaacaaagtatggttgatacatttcgtgccggtcttttcgata

SEQ ID NO: 750817 - DNA, 75 bp, synthetic construct
  source 1..75: mol_type = other DNA
ctccaagtagaaaggttttactgacccttgatgaggaaactaataaattattacttggagccagagagcgcagtg

SEQ ID NO: 750818 - DNA, 75 bp, synthetic construct
  source 1..75: mol_type = other DNA
ttgccgggggcggggtaatcaatgctgacgcagctgcactgttacaacagtttgctgaactgaccagcgttccgg

SEQ ID NO: 750819 - DNA, 75 bp, synthetic construct
  source 1..75: mol_type = other DNA
atggcaaaaatgagagccgttgacgcggcaatgtatgtgctggagaaagaaggtatcaccaccgcctttggtgtt

SEQ ID NO: 750820 - DNA, 75 bp, synthetic construct
  source 1..75: mol_type = other DNA
aatgtttacggtgaaaccaagttagccggagaaaaagcgttacaggaatattgcgcgaagcatcttattttccgg

SEQ ID NO: 750821 - DNA, 75 bp, synthetic construct
  source 1..75: mol_type = other DNA
aaaaaaattcatcctgacgttattgttaatgctgctgctcataccgcggtagataaggctgagtcagaaccagaa

SEQ ID NO: 750822 - DNA, 75 bp, synthetic construct
  source 1..75: mol_type = other DNA
gcatggcgaaagatttcctttctcatcccggtgggattgcccatttcgaacaattacgtctgttctttgaatcca

SEQ ID NO: 750823 - DNA, 75 bp, synthetic construct
  source 1..75: mol_type = other DNA
actataccttctttgacggtccgctttcaggtctgacgctgggcaccggtggtcgttatactggctccagctatg

SEQ ID NO: 750824 - DNA, 75 bp, synthetic construct
  source 1..75: mol_type = other DNA
tcagctatagcgaatcgtttgaaccttcttcgcaagttgggaaggatggtaatattttcgcaccgtctaaaggta

SEQ ID NO: 750825 - DNA, 75 bp, synthetic construct
  source 1..75: mol_type = other DNA
ttcgatcgtgaatacgtcgccagctgctttaacacttatggctgcttctggggcgcagaacgtcaggtcgttgca

SEQ ID NO: 750826 - DNA, 75 bp, synthetic construct
  source 1..75: mol_type = other DNA
ctgtatcccggacgatcatgaactgatggccgggatggtcggtctgcaaaccgcgcatcgttacggtaacgcaac

SEQ ID NO: 750827 - DNA, 75 bp, synthetic construct
  source 1..75: mol_type = other DNA
tttctggccctcctggtatcggcaacatattgaagtgttatggaccacgctcaatcagttcaataacaccggttt

SEQ ID NO: 750828 - DNA, 75 bp, synthetic construct
  source 1..75: mol_type = other DNA
aagtcggtcaccactataaagcagattccatcagagattcctgggcatctgcattaaggcgagcaggactgcggc

SEQ ID NO: 750829 - DNA, 75 bp, synthetic construct
  source 1..75: mol_type = other DNA
cccgagccctgaaggaatggcgcaagctcggggatgatgtccgtctgcagttcaagaaaaaactcgagcaggttc

SEQ ID NO: 750830 - DNA, 75 bp, synthetic construct
  source 1..75: mol_type = other DNA
ccgccggggacgggtaaatctaccctaaccactttctgggaatatctcacgcaacaagacccggaactacccact

SEQ ID NO: 750831 - DNA, 75 bp, synthetic construct
  source 1..75: mol_type = other DNA
agtacgatcgacaaaagcatgatcctgttgaagatgcgctgcacgttaccgcaccactcgtcatcgtcgaaggaa

SEQ ID NO: 750832 - DNA, 75 bp, synthetic construct
  source 1..75: mol_type = other DNA
ttcgtcaaccttctggggtcttttgccatgaccgcactggcattctggctgttttcggcctcaaccgcacactaa

SEQ ID NO: 750833 - DNA, 75 bp, synthetic construct
  source 1..75: mol_type = other DNA
gaaccttttccccggagttcaggcttgaaactatcgaacaggtggttaaataccagcgtgatgccagagaagtcg

SEQ ID NO: 750834 - DNA, 75 bp, synthetic construct
  source 1..75: mol_type = other DNA
tgaacaacgcgaaattcagcagcttaaagcgcagataaagcgcgttgagatggcaaaagaaatactaaagcaggc

SEQ ID NO: 750835 - DNA, 75 bp, synthetic construct
  source 1..75: mol_type = other DNA
ccctgaacaacgcgaaattcagcagcttaaagcgcagataaagcgcgttgagatggaaaaagaaatactaaagca

SEQ ID NO: 750836 - DNA, 75 bp, synthetic construct
  source 1..75: mol_type = other DNA
cttggtttgggagaaggtgctccagctattggcgttccgttcttctggccgtccgctgcaatgccaaatactgta

SEQ ID NO: 750837 - DNA, 75 bp, synthetic construct
  source 1..75: mol_type = other DNA
aaaattaaactctggcagggcttactggcaggtgctttagcccaactttttgttcatatgatttcattccctctc

SEQ ID NO: 750838 - DNA, 75 bp, synthetic construct
  source 1..75: mol_type = other DNA
aatgttaagagctgtccccagagagacacagcacactcttaccctgtaattaactgggttcaggcaggattattc

SEQ ID NO: 750839 - DNA, 75 bp, synthetic construct
  source 1..75: mol_type = other DNA
tttctaatgtggctgctttcaggaatgccctgcagcttggctcggccgcgctggcgtcaatgggcactggaaagg

SEQ ID NO: 750840 - DNA, 75 bp, synthetic construct
  source 1..75: mol_type = other DNA
cgttggacgtcagtcgctttgattattttgcccctgcagataatatcggtccttatcctgggcagtgggctggtg

SEQ ID NO: 750841 - DNA, 75 bp, synthetic construct
  source 1..75: mol_type = other DNA
ctgggcaaaggccgcgtagcgtccatcattggtcgttactacgcaatggaccgcgacaatcgttgggatcgcgtt

SEQ ID NO: 750842 - DNA, 75 bp, synthetic construct
  source 1..75: mol_type = other DNA
gtaccttttccccggagttcaggcttgaagctatcgaacaggtggttaaataccagcgtgatgtcagagaagtcg

SEQ ID NO: 750843 - DNA, 75 bp, synthetic construct
  source 1..75: mol_type = other DNA
acgtacggtggtttttctttgcgctccgccggggacgggtaaatctaccttaactaccttctgggaatatctcgc

SEQ ID NO: 750844 - DNA, 75 bp, synthetic construct
  source 1..75: mol_type = other DNA
gtgaaaatcgaactgacggtgaatggactaagggtacaggcgcagtactctgatgatgaaattgaaaatgtacat

SEQ ID NO: 750845 - DNA, 75 bp, synthetic construct
  source 1..75: mol_type = other DNA
ccaatgtcgagcgtgtgctgatgaatagtcgtcaggccaatctgatagtagagatgactgaagaaggccggtatc

SEQ ID NO: 750846 - DNA, 75 bp, synthetic construct
  source 1..75: mol_type = other DNA
attcagacgctcccgatggatggttttcaccattacaacatctggctggatgagcatcagcttcgcccttataaa

SEQ ID NO: 750847 - DNA, 75 bp, synthetic construct
  source 1..75: mol_type = other DNA
gcgtacggtggtttttctttgcgctccgccggggacgggtaaatctaccctaaccaccttctgggaatatctcgc

SEQ ID NO: 750848 - DNA, 75 bp, synthetic construct
  source 1..75: mol_type = other DNA
agaagtggtgccagcttgcgcaattttgtgatttctcgatctttatcaaagctcccgcatctgcgttgcgggagc

SEQ ID NO: 750849 - DNA, 75 bp, synthetic construct
  source 1..75: mol_type = other DNA
cgggtacgacgtttaaaggttatgtgatccatgaagatgcgccggtaacggaaattacgctctatatggaaagtc

SEQ ID NO: 750850 - DNA, 75 bp, synthetic construct
  source 1..75: mol_type = other DNA
aagtctgactgctgaagagcgcgagattatcaaggcgggtagtttgattaacttcaataaaaaccgtcagatgta

SEQ ID NO: 750851 - DNA, 75 bp, synthetic construct
  source 1..75: mol_type = other DNA
gcgtggtgctggcaggcggtaaagcccgacgcatgggcggcgtagataaaggattacttgaattaaacggcaaac

SEQ ID NO: 750852 - DNA, 75 bp, synthetic construct
  source 1..75: mol_type = other DNA
cccgcaccgatggccccaatgtcgagcgtgtgctgatgaatagccgtcaggccaatctgatagtagagatgactg

SEQ ID NO: 750853 - DNA, 75 bp, synthetic construct
  source 1..75: mol_type = other DNA
attacgcgcgagtgcgcaccttcaaacagctgttgtcgagttttcagcgtaaccgcgatctggttagcgtcggcg

SEQ ID NO: 750854 - DNA, 75 bp, synthetic construct
  source 1..75: mol_type = other DNA
cgaaacgaacggtctgataagcaaaaacggcaggctttttgcgctggttaagcccgatgacaccctgctggggct

SEQ ID NO: 750855 - DNA, 75 bp, synthetic construct
  source 1..75: mol_type = other DNA
caggcatcttttgccgtccgtcttgccgcgccagacatgccttgcgggaaaatgtctccttctacgcaaatgcca

SEQ ID NO: 750856 - DNA, 75 bp, synthetic construct
  source 1..75: mol_type = other DNA
aacgtttctttctatgccgatgccagcgaggcgcttgccgctggctttcgcccctgcaaacgttgtcagccagac

SEQ ID NO: 750857 - DNA, 75 bp, synthetic construct
  source 1..75: mol_type = other DNA
gtctattcttaacgccggattccccgacagcagcagttactatcgcaaagctgacgaaacgctgggcatgacggc

SEQ ID NO: 750858 - DNA, 75 bp, synthetic construct
  source 1..75: mol_type = other DNA
ggcctactttcagctggagtgcgctgggatgggcaattttttattttggctttttttccactctcctgcaggtca

SEQ ID NO: 750859 - DNA, 75 bp, synthetic construct
  source 1..75: mol_type = other DNA
accagcctgtctgtagacaaaacttctggtgaaaaacacctgcgtcaccacatcactgccgacggttactaccgc

SEQ ID NO: 750860 - DNA, 75 bp, synthetic construct
  source 1..75: mol_type = other DNA
aacgtctccttttatgcggatgccagcgaggcgcttgccgcaggttttcgcccctgcaaacgttgccagccggac

SEQ ID NO: 750861 - DNA, 75 bp, synthetic construct
  source 1..75: mol_type = other DNA
atgaaaaaagccacatgcttaactgacgatcaacgctggcaatctgtcttagcccgcgacccgaatgccgacggc

SEQ ID NO: 750862 - DNA, 75 bp, synthetic construct
  source 1..75: mol_type = other DNA
gcaatgcacaaggcacgcgaaggtgtcggcagttggttaccgactaccgtaaccgcgccgcttaataccattcat

SEQ ID NO: 750863 - DNA, 75 bp, synthetic construct
  source 1..75: mol_type = other DNA
ctggcgggcagtacgctgtctgttgatgcggcagtgcgcaacatggtcgagttgacgggcgtaacgcctgcggaa

SEQ ID NO: 750864 - DNA, 75 bp, synthetic construct
  source 1..75: mol_type = other DNA
aaagccaatgcccagcaacatcgccttgataaaattacccacgcctgccgacttctggaacaggaaacgcctgta

SEQ ID NO: 750865 - DNA, 75 bp, synthetic construct
  source 1..75: mol_type = other DNA
taaagccgacgaaacgttgggcatgacggctaaacagtttcgtcacggaggtgaaaatctggctgtgcgttatgc

SEQ ID NO: 750866 - DNA, 75 bp, synthetic construct
  source 1..75: mol_type = other DNA
tggcgatgagtccgttccatttgcatcgattgtttaaagcgactaccggaatgacgccgaaagcctggcaacagg

SEQ ID NO: 750867 - DNA, 75 bp, synthetic construct
  source 1..75: mol_type = other DNA
gcgggactgacatacgatggttacgatccgacccgttctctggtgaatccgcaattcagggaaaccacccgctgg

SEQ ID NO: 750868 - DNA, 75 bp, synthetic construct
  source 1..75: mol_type = other DNA
ttgattatcggcgtgttgttgttgctggtgctggtggagttgcgacgttttcgccagacgccgccgcaggtgaca

SEQ ID NO: 750869 - DNA, 75 bp, synthetic construct
  source 1..75: mol_type = other DNA
atccggcgctggctgacaactggcagatgtcggcggcgcaaattggctttctctatgcggcaatcccgctcggtg

SEQ ID NO: 750870 - DNA, 75 bp, synthetic construct
  source 1..75: mol_type = other DNA
cccagttgggaggtatgttggtggatatggcggcgcgtcaggtgaataaagacaaagccaaagtcgcatttttct

SEQ ID NO: 750871 - DNA, 75 bp, synthetic construct
  source 1..75: mol_type = other DNA
ccacagtgaattcatcgcgaccatggaaagcctggataaagccaaatggtcaaatattcgggggatccgcgccca

SEQ ID NO: 750872 - DNA, 75 bp, synthetic construct
  source 1..75: mol_type = other DNA
gctgacgacgacaacgcgaaatgcccggcatggtacaccgccgaagataacgcgctgacgcaggactggtctgaa

SEQ ID NO: 750873 - DNA, 75 bp, synthetic construct
  source 1..75: mol_type = other DNA
atcgctacggcgcagacttcagtccggaaaatctttctcagtgttcattaacacatgaaatacccgtcgctctgt

SEQ ID NO: 750874 - DNA, 75 bp, synthetic construct
  source 1..75: mol_type = other DNA
tttcagatcatggtgaagaagtatatgatactccgccatataaaacgcagggacggaatgaagataaccccacac

SEQ ID NO: 750875 - DNA, 75 bp, synthetic construct
  source 1..75: mol_type = other DNA
aaatccgcagttcaaggaaaccatacggtggatcggcaatccatataagaaaaacagcctgattaattatgattc

SEQ ID NO: 750876 - DNA, 75 bp, synthetic construct
  source 1..75: mol_type = other DNA
agagaccacgcacactggtcctggtgattggtgagtcgacacagcgcgaacgcatgagcttatacgggtatctac

SEQ ID NO: 750877 - DNA, 75 bp, synthetic construct
  source 1..75: mol_type = other DNA
gacaagattgccaaagatcatccggggtgggaggtcgtcaccacgcagtttggctataacgacgctactaaatcg

SEQ ID NO: 750878 - DNA, 75 bp, synthetic construct
  source 1..75: mol_type = other DNA
agtatgttgaccgcaaatacagtctggctgaactgatccacacttggtcagatttggcgaggctgacatacgatg

SEQ ID NO: 750879 - DNA, 75 bp, synthetic construct
  source 1..75: mol_type = other DNA
gtgcattttaataccggacagaacaggcctgctttcagctggaacgcgctgggacgggcaattctttattttggc

SEQ ID NO: 750880 - DNA, 75 bp, synthetic construct
  source 1..75: mol_type = other DNA
accggaaaaaacgggcgcgttacaagccattcgtcatcttaaacagcagaacgtgcgggtaatgctgggacatag

SEQ ID NO: 750881 - DNA, 75 bp, synthetic construct
  source 1..75: mol_type = other DNA
cgaacggttcagcctgacgtggtagtcaatgcggcggcccatacagcagtggataaagcggaaagtgaaaaagag

SEQ ID NO: 750882 - DNA, 75 bp, synthetic construct
  source 1..75: mol_type = other DNA
atgaagattttactgattggcaagaatggtcaggttggctgggagctgcagcgttcactgtccacgctcggtgat

SEQ ID NO: 750883 - DNA, 75 bp, synthetic construct
  source 1..75: mol_type = other DNA
gggcgcccaccggcgctgagctgctggcagactgcacagcgacggcaatccgtgaaacactgcgtgatccggcgc

SEQ ID NO: 750884 - DNA, 75 bp, synthetic construct
  source 1..75: mol_type = other DNA
atggccaagtgggctgggagttgcagcgcgcgctgctgccgctgggtcgtattacggcggtagattttgactcta

SEQ ID NO: 750885 - DNA, 75 bp, synthetic construct
  source 1..75: mol_type = other DNA
ctttcggtcattaacgatcagtttggcgcgccgacgggggctgagttgctggcagactgtacggcacatgccatt

SEQ ID NO: 750886 - DNA, 75 bp, synthetic construct
  source 1..75: mol_type = other DNA
gggtatggtgttggttgatggggaacgcctggtgcacttaatgatcgaaaacgaagtaggggtttcttcacgttt

SEQ ID NO: 750887 - DNA, 75 bp, synthetic construct
  source 1..75: mol_type = other DNA
cgtctcgtcaagccggatgtgattgttaacgcagcggcccatactgcagtcgacaaagcggagagtgagcgggaa

SEQ ID NO: 750888 - DNA, 75 bp, synthetic construct
  source 1..75: mol_type = other DNA
caatgaagtcggcgcttgggttattcactactctactgactacgtatttccggggaccggtgaaataccatggct

SEQ ID NO: 750889 - DNA, 75 bp, synthetic construct
  source 1..75: mol_type = other DNA
cactactctactgactacgtatttccgggaaccggtgaaataccgtggcaggagacggatgctacagcacctttg

SEQ ID NO: 750890 - DNA, 75 bp, synthetic construct
  source 1..75: mol_type = other DNA
aacgtctacggtgaaaccaaacgcgccggtgaactggccctggagcagggcaacgcgcgtcacctgattttccgt

SEQ ID NO: 750891 - DNA, 75 bp, synthetic construct
  source 1..75: mol_type = other DNA
gaatgagaagttccagcgcgtatttggcgtgacgctcccggactggcgccagggcgtcgagcgggtgattgtgga

SEQ ID NO: 750892 - DNA, 75 bp, synthetic construct
  source 1..75: mol_type = other DNA
acggcgccggtagccattatcgccgggaagatgaagcaaccggcccgcttaacgtctacggtgaaaccaaacgtg

SEQ ID NO: 750893 - DNA, 75 bp, synthetic construct
  source 1..75: mol_type = other DNA
atggataaagaaaatatgacctgtcagggtatgaactacaaagaacgcgaagcgctcaaggcctttgcgggacag

SEQ ID NO: 750894 - DNA, 75 bp, synthetic construct
  source 1..75: mol_type = other DNA
cgtcaaagcgcgtatcccaccggaattactccagcagcatctggaatatgtcaaaaccggtttaccgggcgtagc

SEQ ID NO: 750895 - DNA, 75 bp, synthetic construct
  source 1..75: mol_type = other DNA
acgtctggcaaaagaacgcgaagagttggctgtaataaacgatcaattcggcgcaccaacgggtgctgaattgct

SEQ ID NO: 750896 - DNA, 75 bp, synthetic construct
  source 1..75: mol_type = other DNA
cgtgtggcactgaataaaccagaagtcgcaggcttgtatcatctggtagccagtggtaccacaacttggcacgat

SEQ ID NO: 750897 - DNA, 75 bp, synthetic construct
  source 1..75: mol_type = other DNA
tcgatgcggcagtgcgcaacatggtcgagttgacgggcgtaacgcctgcggaagccatccctgcatccggcgcgt

SEQ ID NO: 750898 - DNA, 75 bp, synthetic construct
  source 1..75: mol_type = other DNA
atgacacacgttctgcgcgccagaaggctgctgactgaagagggatggctcgatgaccatcagttgcgtattgct

SEQ ID NO: 750899 - DNA, 75 bp, synthetic construct
  source 1..75: mol_type = other DNA
caggcccaggcgaaagcggccgaggcggcgatcacggccgcccaggcacaactggtcggcgcccaggcctccgtc

SEQ ID NO: 750900 - DNA, 75 bp, synthetic construct
  source 1..75: mol_type = other DNA
tgaagccgaacaggatcgccagatgaacatactgacgggggcttctgcacctgcaagacaacaactgagtgttgg

SEQ ID NO: 750901 - DNA, 75 bp, synthetic construct
  source 1..75: mol_type = other DNA
caaagtaccggcattgcacaaatacaaagggatgtctctgtacctgattatcgtcactggtttgttgctttgtgt

SEQ ID NO: 750902 - DNA, 75 bp, synthetic construct
  source 1..75: mol_type = other DNA
gcgtctggcaaaagagcgtgaagaattagccgttattaatgatcagtttggtgcgccaactggcgcagagttgct

SEQ ID NO: 750903 - DNA, 75 bp, synthetic construct
  source 1..75: mol_type = other DNA
tcataccgcggtagataaggctgagtcagaacccaaatttgcacaattactcaatgcgacaagtgttgaagcgat

SEQ ID NO: 750904 - DNA, 75 bp, synthetic construct
  source 1..75: mol_type = other DNA
acgtctggcaaaagagcgtgaagaattagcggttattaatgatcagtttggtgcgccaacaggtgctgaactgct

SEQ ID NO: 750905 - DNA, 75 bp, synthetic construct
  source 1..75: mol_type = other DNA
tcaacgcagccgctcacaccgcagtagacaaagcagaatcagaaccggagtttgcacaattaattaacgcaacaa

SEQ ID NO: 750906 - DNA, 75 bp, synthetic construct
  source 1..75: mol_type = other DNA
cgaatgcctgccctggcgatgactgcgccgactgcccgattatcgaaatctctccgcctgctgtcatcatcgggc

SEQ ID NO: 750907 - DNA, 75 bp, synthetic construct
  source 1..75: mol_type = other DNA
cgccgctcaattttttacgcccgtaatgcctgtttcgacctggcaaaactggtcgggtgtaaatacttcattcag

SEQ ID NO: 750908 - DNA, 75 bp, synthetic construct
  source 1..75: mol_type = other DNA
ccgtgggtggacaactgctgatcaccgctgaccacggtaacgctgaacagatgcgcgatccggcaacgggtcagg

SEQ ID NO: 750909 - DNA, 75 bp, synthetic construct
  source 1..75: mol_type = other DNA
tcggccttgatgacgatgcgctgtcaatggagtggtcgctcggtggcttcccggattcggttatctgggagcttt

SEQ ID NO: 750910 - DNA, 75 bp, synthetic construct
  source 1..75: mol_type = other DNA
ctcggccttgatgacgatgcactgtcaatggagtggtcgctcgggggcttcccggattcggttatctgggagctt

SEQ ID NO: 750911 - DNA, 75 bp, synthetic construct
  source 1..75: mol_type = other DNA
cccggattcggttatctgggagctttacgccgcaaccggtgtggatgccgtaccgattcgttttgccggttctta

SEQ ID NO: 750912 - DNA, 75 bp, synthetic construct
  source 1..75: mol_type = other DNA
aatagccgcgaagcgtacttatcggcgctgaaaggtcgtgatgggttatcttcgcctgccgtactggcgcttacc

SEQ ID NO: 750913 - DNA, 75 bp, synthetic construct
  source 1..75: mol_type = other DNA
gcgcagcgtggctggatgccttacgtgtctatctgaaagacaatctgaggtatatcgccaatacaatgaacgccg

SEQ ID NO: 750914 - DNA, 75 bp, synthetic construct
  source 1..75: mol_type = other DNA
tgcagaaggtcagccagatgcggcaatggaagacggcgatgcactgattttcatgaacttccgtgctgaccgcgc

SEQ ID NO: 750915 - DNA, 75 bp, synthetic construct
  source 1..75: mol_type = other DNA
atgccggggtatacctacggtgaagaaggtcgtggttttgtccgtctcaatgccgggtgcccgcgttcgaaactg

SEQ ID NO: 750916 - DNA, 75 bp, synthetic construct
  source 1..75: mol_type = other DNA
taccccagcttacgacgcattttacaaagccatcgaaggtaatcagcgcaccgtgatgcccgttgctttagagaa

SEQ ID NO: 750917 - DNA, 75 bp, synthetic construct
  source 1..75: mol_type = other DNA
tcgtcagtggtctgaaacaggtgaaggcgtggtgatccacacacccgcctatgacgcattttacaaggccattga

SEQ ID NO: 750918 - DNA, 75 bp, synthetic construct
  source 1..75: mol_type = other DNA
ccgtcgaatggtctgtcggtggcctgcccgatgtgacgctgtgggcgcaatacgctgcgccgggtgctgacgccg

SEQ ID NO: 750919 - DNA, 75 bp, synthetic construct
  source 1..75: mol_type = other DNA
aactggatccataacagtaaagattttgctgtctcaatgaacggtgtgaaagtcgaacaagacggggcgcgtaat

SEQ ID NO: 750920 - DNA, 75 bp, synthetic construct
  source 1..75: mol_type = other DNA
attgtgtgcccgacgtggagctggcgagactgagaacggccatgaaagcccatcaggcgctggcactggttttcg

SEQ ID NO: 750921 - DNA, 75 bp, synthetic construct
  source 1..75: mol_type = other DNA
ccgaaaaacccgctacagccacccgcaatacgcacgcaggttcccggcgtcggggcggtctccggtgccgttcct

SEQ ID NO: 750922 - DNA, 75 bp, synthetic construct
  source 1..75: mol_type = other DNA
agcacaggaaaacccggcaccgctggcagacgttattgtggctgacggtcaggcgaatgaaccacgtccggctga

SEQ ID NO: 750923 - DNA, 75 bp, synthetic construct
  source 1..75: mol_type = other DNA
caatacgcaggcaggttcccggtgccggggccatatctggtgctgttccatcgccttgcggggtggcgcagttcg

SEQ ID NO: 750924 - DNA, 75 bp, synthetic construct
  source 1..75: mol_type = other DNA
cgtctcgctggaagcgggttacggttttgccctgaataaatcctttggtctggaagcggcgaaatatacgtggat

SEQ ID NO: 750925 - DNA, 75 bp, synthetic construct
  source 1..75: mol_type = other DNA
gttgatgtcgattacattttggttcaccaaaacggggggatcaaaggtcgaggaggtgatcgccgtagcaaggac

SEQ ID NO: 750926 - DNA, 75 bp, synthetic construct
  source 1..75: mol_type = other DNA
cttcttcaacggtggcgtagaagagtcgttcaaaggcgaagatcgcattctgatcaactcaccgaaagtggctac

SEQ ID NO: 750927 - DNA, 75 bp, synthetic construct
  source 1..75: mol_type = other DNA
atacggaattttccattggtggtactgaactgctgctgtttaagcagatgggcaaagccacggtggatggtatcc

SEQ ID NO: 750928 - DNA, 75 bp, synthetic construct
  source 1..75: mol_type = other DNA
gggctctggggaaaagtgttccggcgtttaacgcactctctgaatccatgcccgatgccatcagtctggccagaa

SEQ ID NO: 750929 - DNA, 75 bp, synthetic construct
  source 1..75: mol_type = other DNA
acacccgatgagtttattatcaaagcattttgcgttaaaggtacgcaaaacaccacgggacataaaaagaatatc

SEQ ID NO: 750930 - DNA, 75 bp, synthetic construct
  source 1..75: mol_type = other DNA
gaaaaatcattcgtgataactacctttatcatcctaaaatgattgcattgatcattttatctatgctgccttatg

SEQ ID NO: 750931 - DNA, 75 bp, synthetic construct
  source 1..75: mol_type = other DNA
aacggcgacatggtaggtcacaccggggtgatggaagcggcggttaaagcggttgaagcgctggatcactgcgtg

SEQ ID NO: 750932 - DNA, 75 bp, synthetic construct
  source 1..75: mol_type = other DNA
atgctgacgaacgaaccatcatttgcatcgctgctggtaaaacaaagtccggcaatgcactacggtcacggctgg

SEQ ID NO: 750933 - DNA, 75 bp, synthetic construct
  source 1..75: mol_type = other DNA
actgctggctgacctgtccacaaccaaacaggggaaatcatggctattgaaggcgctgcagcgactgtcccatta

SEQ ID NO: 750934 - DNA, 75 bp, synthetic construct
  source 1..75: mol_type = other DNA
ctaccgtaccggtggatacatcaaacgactgccaaaagatccgtggggcaatgattatcagtatctcagcccggg

SEQ ID NO: 750935 - DNA, 75 bp, synthetic construct
  source 1..75: mol_type = other DNA
agcatgtaccagagctgctgggcataccgggacacgtatgtcacacagtcagcagacaagggaacctgtcagacc

SEQ ID NO: 750936 - DNA, 75 bp, synthetic construct
  source 1..75: mol_type = other DNA
tttcgttacagaggggagagttattcagtacctgaagatgatttgctctgttgttatccgtcgttgtcgggcgat

SEQ ID NO: 750937 - DNA, 75 bp, synthetic construct
  source 1..75: mol_type = other DNA
attgctgtctgaattgaccacgaggaaacagagaaagtcaaaatgtatgcagcggaaggtgaagtggtttatcag

SEQ ID NO: 750938 - DNA, 75 bp, synthetic construct
  source 1..75: mol_type = other DNA
ctatcctgataaaatatattgggttgggggaatatggggaattagtctatattacatctatttatcaaatagtgg

SEQ ID NO: 750939 - DNA, 75 bp, synthetic construct
  source 1..75: mol_type = other DNA
agacgggaaaaaatccgcccaacacaaagaaaaacttcggctacctgatgtggcgtaaacgtaactgtgtgtttc

SEQ ID NO: 750940 - DNA, 75 bp, synthetic construct
  source 1..75: mol_type = other DNA
atgccgggcagtgacccggagacgaacggcgatttaagtgccgatatccggcagcttgagaacgcgctggcacgc

SEQ ID NO: 750941 - DNA, 75 bp, synthetic construct
  source 1..75: mol_type = other DNA
cgctggatatgtaccgactggataacgggcgttatccgaccacagaacaggggcttgaggcgctgatccagcaac

SEQ ID NO: 750942 - DNA, 75 bp, synthetic construct
  source 1..75: mol_type = other DNA
tgtcgttactgcaatgaaccgattgaatcaggcatctattgtgacgctgagtgtgcgcaatggcacagggaatag

SEQ ID NO: 750943 - DNA, 75 bp, synthetic construct
  source 1..75: mol_type = other DNA
aatgcattgtggaatttaagaaggcaggaaatgtttttattggcgtaataggtacgattggttacaatggtctaa

SEQ ID NO: 750944 - DNA, 75 bp, synthetic construct
  source 1..75: mol_type = other DNA
agacgcccacggtggacagccaggcactgatcaaacagatccagcagttgctacagcaggaaccgttattcagcg

SEQ ID NO: 750945 - DNA, 75 bp, synthetic construct
  source 1..75: mol_type = other DNA
gaatctgtttaacgatccgcagcgtcacagcgccgacgtcaaacgtcgtacgctggagaaagtagcggagatcga

SEQ ID NO: 750946 - DNA, 75 bp, synthetic construct
  source 1..75: mol_type = other DNA
cccggattcggttatctgggagctttacgccgcaaccggcgtggatgccgtgccgattcgttttgcaggctctta

SEQ ID NO: 750947 - DNA, 75 bp, synthetic construct
  source 1..75: mol_type = other DNA
taccgattcgttttgctggttcttaccagcgcgacgataccggcgaaacggtggccgtcgaagtggtcatgcgtg

SEQ ID NO: 750948 - DNA, 75 bp, synthetic construct
  source 1..75: mol_type = other DNA
tgcctaacctgttgggcaacaaagagaaagcggatcggcaaaaagccatcagcgatatcgtggcgctggagaacg

SEQ ID NO: 750949 - DNA, 75 bp, synthetic construct
  source 1..75: mol_type = other DNA
accttaggggcggatggtcaggaaaacggggaaggcgctggcgcagatatcggtaactggaatttgcaggagttt

SEQ ID NO: 750950 - DNA, 75 bp, synthetic construct
  source 1..75: mol_type = other DNA
atgcgtaaccagttgctggcgctggcgaatgcctgccccggtgatgacagcgccgactgcccgattatcgaaaat

SEQ ID NO: 750951 - DNA, 75 bp, synthetic construct
  source 1..75: mol_type = other DNA
atgtctgataatctgccgtggaaaacctggacgccggacgatctcgcgccaccacaggcagagtttgtgccaata

SEQ ID NO: 750952 - DNA, 75 bp, synthetic construct
  source 1..75: mol_type = other DNA
atgtctgataatctgccgtggaaaacctggacaccggacgatctcgcgccgccgcaggcggagtttgtgcccatg

SEQ ID NO: 750953 - DNA, 75 bp, synthetic construct
  source 1..75: mol_type = other DNA
ggctgtaaagtctccgccgatgaaggcgatctcgacgccagtgtcgccactcgctggcaagaactctgccgtctg

SEQ ID NO: 750954 - DNA, 75 bp, synthetic construct
  source 1..75: mol_type = other DNA
cccggattcggttatctgggagctttacgctgcaaccagtgctgatgccgtaccgattcgttttgctggttctta

SEQ ID NO: 750955 - DNA, 75 bp, synthetic construct
  source 1..75: mol_type = other DNA
gaatactggtgctgcaacgaaaatgttgtgtgaccgcacttgcgcgtgaagcagcaattacccgaaacattcagt

SEQ ID NO: 750956 - DNA, 75 bp, synthetic construct
  source 1..75: mol_type = other DNA
tttcctctgctggctcgtttttttatggctgccacagtggcgaagccaacaacatgcaaatttgagtacctcgcg

SEQ ID NO: 750957 - DNA, 75 bp, synthetic construct
  source 1..75: mol_type = other DNA
gcatacccgaaacgccgctgaccgaagatcagatcattatcttccaggtgccgatccccgaaccgctgcgcttta

SEQ ID NO: 750958 - DNA, 75 bp, synthetic construct
  source 1..75: mol_type = other DNA
agatcagatcattattttccaggtgccgatccccgaaccgctgcgctttatcgagccgcgcgaaacggaaacccg

SEQ ID NO: 750959 - DNA, 75 bp, synthetic construct
  source 1..75: mol_type = other DNA
acgcatgatccgccgcgccatcttaaaagcggtggcgatccccggttatcaggtaccgtttggcgggcgcgagat

SEQ ID NO: 750960 - DNA, 75 bp, synthetic construct
  source 1..75: mol_type = other DNA
agaaacattacattcgtttttctcgcctcagcctggttgattatgtgtctagcccctctatcttacttaatagat

SEQ ID NO: 750961 - DNA, 75 bp, synthetic construct
  source 1..75: mol_type = other DNA
tagtccggttgatatgtttaatgcagcgtgtggtccggaatcattaatcagggctgcaggccaaattgattgctc

SEQ ID NO: 750962 - DNA, 75 bp, synthetic construct
  source 1..75: mol_type = other DNA
cgaaccgtagacgttacggccttgcagcatttatcgggctgattgccggtattgtctcagcatttgttaagtggg

SEQ ID NO: 750963 - DNA, 75 bp, synthetic construct
  source 1..75: mol_type = other DNA
ccgattactgcggtgacttcagcaacccggaaggcgtggccgagaccgtgcgtctgctgaagccggacgtgatcg

SEQ ID NO: 750964 - DNA, 75 bp, synthetic construct
  source 1..75: mol_type = other DNA
cagcaagttccagcgcaccttcgggctgacgctgccggactggaccctcggcgtcgatcgcatgcttgccgaaac

SEQ ID NO: 750965 - DNA, 75 bp, synthetic construct
  source 1..75: mol_type = other DNA
ctaccttgtcggcgctactgcgggattattccgtggtggagggcattcagatagcggaacggcaggtgagaatac

SEQ ID NO: 750966 - DNA, 75 bp, synthetic construct
  source 1..75: mol_type = other DNA
atggctaatctgagcggctacaactttgcgtacctcgacgagcagaccaaacgcatgatccgccgcgccatctta

SEQ ID NO: 750967 - DNA, 75 bp, synthetic construct
  source 1..75: mol_type = other DNA
ccggcctgtaccatttggctgcctccggtactaccacttggtttgactacgcccggttggtgtttgacaaagcca

SEQ ID NO: 750968 - DNA, 75 bp, synthetic construct
  source 1..75: mol_type = other DNA
atgcatattctgctgttcggcaaaaatggccaggtaggctgggagctgcaacgcgcgctgctgccgctgggtcgt

SEQ ID NO: 750969 - DNA, 75 bp, synthetic construct
  source 1..75: mol_type = other DNA
ctacgctatatcgacgtaagggcttgaggggcgatctttttcgccttgcttatcattatgtgtatgaacattcta

SEQ ID NO: 750970 - DNA, 75 bp, synthetic construct
  source 1..75: mol_type = other DNA
acggcggtgatacgccagttccgccagacgatggtggcgataccccggttaaacacaatcctgtcgtctataaaa

SEQ ID NO: 750971 - DNA, 75 bp, synthetic construct
  source 1..75: mol_type = other DNA
ggatctggaataccgatacgggtgtaattagcggcgtgaatcctaatgcaccgttaattgatcttggtcgcggct

SEQ ID NO: 750972 - DNA, 75 bp, synthetic construct
  source 1..75: mol_type = other DNA
ggttcagatagctatggtagcccggatgcaaatgtcacagctattaaccaattaggtggtgtgattagtgtctat

SEQ ID NO: 750973 - DNA, 75 bp, synthetic construct
  source 1..75: mol_type = other DNA
gctggggtcaccagagttgcaataagtaaagccgagcaaggccttacaaaaagtttcaacggtgacacccttttt

SEQ ID NO: 750974 - DNA, 75 bp, synthetic construct
  source 1..75: mol_type = other DNA
tcgacggggagtgaggatcatggaactgggcattatggtgtgcatcgtgttgttactctcactggcagcggtgtg

SEQ ID NO: 750975 - DNA, 75 bp, synthetic construct
  source 1..75: mol_type = other DNA
catctggcaaagaatgatgaaaactccagtgccataagaatcctgcgtcagcgtctgtcttcagaattcttacaa

SEQ ID NO: 750976 - DNA, 75 bp, synthetic construct
  source 1..75: mol_type = other DNA
cggcgagtggatggcgaaaaacgacaaaactcaactgcgtatttccgaaaccgaaaaatatgctcacgtcacttt

SEQ ID NO: 750977 - DNA, 75 bp, synthetic construct
  source 1..75: mol_type = other DNA
acgttcgtgggcgcctcaatcggatttatgggagcggataaagtccgcaacaaagttaccgggtttatcgaaaac

SEQ ID NO: 750978 - DNA, 75 bp, synthetic construct
  source 1..75: mol_type = other DNA
tatgcgtccggtaagcgcttcctctcacgcaacgagacaactttccgggctaaaaattcactctaatttgtatca

SEQ ID NO: 750979 - DNA, 75 bp, synthetic construct
  source 1..75: mol_type = other DNA
ctgcgtaaaggatttagtgatacctccataatcagcgttgatgggaactcatcagtatatttgaatgggacttcg

SEQ ID NO: 750980 - DNA, 75 bp, synthetic construct
  source 1..75: mol_type = other DNA
cattttcaagcatggatattcgtcactccttaaatgagtggtggactttatggcaggcatcgcgagcagctattg

SEQ ID NO: 750981 - DNA, 75 bp, synthetic construct
  source 1..75: mol_type = other DNA
cttctggagcagcagaccgggctgaatccggtagaaattatgacggacacggcaggatccagcgatatcattttt

SEQ ID NO: 750982 - DNA, 75 bp, synthetic construct
  source 1..75: mol_type = other DNA
acactgaataatggcgacacacacagtgcctggctgttttcccgctacagcggctctgaaaaggctgccgactcc

SEQ ID NO: 750983 - DNA, 75 bp, synthetic construct
  source 1..75: mol_type = other DNA
cagggctaccacctgaaaaccgtgagcggacttgatctgacttcggccactgcaaactcactcgttcagcgtcag

SEQ ID NO: 750984 - DNA, 75 bp, synthetic construct
  source 1..75: mol_type = other DNA
tgcaacttgttgaaactggtggagctcatcctctgagtcgagaacctataacagaatcaatgattatgagaaaag

SEQ ID NO: 750985 - DNA, 75 bp, synthetic construct
  source 1..75: mol_type = other DNA
attaatggaaaaaataaattcttgtgtatttagaccggattctaatcacttttcttgcccggagtcatttttgac

SEQ ID NO: 750986 - DNA, 75 bp, synthetic construct
  source 1..75: mol_type = other DNA
actatttgcccgaccggtgccatcgtcgagccatataccgtcgatgctcgccgctgtatctcttatctcaccatc

SEQ ID NO: 750987 - DNA, 75 bp, synthetic construct
  source 1..75: mol_type = other DNA
cttaccagttcgatgccaaagcaggtaagacgtggacgcgattcaccacgctggctggcgcaagtgtattggttc

SEQ ID NO: 750988 - DNA, 75 bp, synthetic construct
  source 1..75: mol_type = other DNA
accgttaccatcagcccgaaaattctgccaccagacaacgcggataaggcgtctattccttaccagaacgttacc

SEQ ID NO: 750989 - DNA, 75 bp, synthetic construct
  source 1..75: mol_type = other DNA
tgatggctctgatgcgtttaaatgatgaaatagtgatgacgccagagatgaatttcagcaagcgcgaaaaagaaa

SEQ ID NO: 750990 - DNA, 75 bp, synthetic construct
  source 1..75: mol_type = other DNA
atgagtgaaaaagcaggaaccaaaagcacgaaaaacacaaagaacagcgcagcacaggaaaacccggcaccgctg

SEQ ID NO: 750991 - DNA, 75 bp, synthetic construct
  source 1..75: mol_type = other DNA
ctgtggccgtttctggtcacatgccggtgaggatgtggcggtgaccgctgcggttgccacccgcctgatggcaga

SEQ ID NO: 750992 - DNA, 75 bp, synthetic construct
  source 1..75: mol_type = other DNA
aacctataacagaatcaatgattatgagaaaagacgaatgtcactttgatacaaaaagagaagctttttgttgta

SEQ ID NO: 750993 - DNA, 75 bp, synthetic construct
  source 1..75: mol_type = other DNA
gctgtggctctggaaaggcaattaaatggaggtgtcgattttttaagtagtgttaataactattttcagagtgtc

SEQ ID NO: 750994 - DNA, 75 bp, synthetic construct
  source 1..75: mol_type = other DNA
ttcatgagaaactcccgaagttctgatatatgtagtttgtatgataaggatgcgttgctgcaacttattaaagca

SEQ ID NO: 750995 - DNA, 75 bp, synthetic construct
  source 1..75: mol_type = other DNA
gccctcatgagttattgcccggtacgctgcgcgtgatcagcgtgcggatgaattaccttcctgctaacgccgcat

SEQ ID NO: 750996 - DNA, 75 bp, synthetic construct
  source 1..75: mol_type = other DNA
atctgttcatgatcaaataaaagaattaattaaagcattggatattgcacatcaaaaatatcattgtaattttat

SEQ ID NO: 750997 - DNA, 75 bp, synthetic construct
  source 1..75: mol_type = other DNA
gcgtcgtgccgtagcgctgcgtcgtcagctggtttccagcgataacatctctaacgatccgatgaatgtcatcga

SEQ ID NO: 750998 - DNA, 75 bp, synthetic construct
  source 1..75: mol_type = other DNA
agcaaagcggaaattgatgccgggtttgcccgtatctggcaagtgatgcacgacggcattgaacgcgggatgaat

SEQ ID NO: 750999 - DNA, 75 bp, synthetic construct
  source 1..75: mol_type = other DNA
tcagggggaacagcgtcccggttttattctctccccgcccgcgtggatggagaatttgctggccgccctcaccgg

SEQ ID NO: 751000 - DNA, 75 bp, synthetic construct
  source 1..75: mol_type = other DNA
cgatgttgtcggcgctgttgcgggattattctgtagcggaaggaattcagatagcggagcaacaggtaaagaagc

SEQ ID NO: 751001 - DNA, 75 bp, synthetic construct
  source 1..75: mol_type = other DNA
atggctgagcaacaagtaaagatgcacccaactaaggctttacatcggcacagcctgtttcagttattgtgcgtg

SEQ ID NO: 751002 - DNA, 75 bp, synthetic construct
  source 1..75: mol_type = other DNA
tctggcagtaagcggaacgacagtaactatctccccgaaaattctgccgcctgacaacgcagatgtcgccagccg

SEQ ID NO: 751003 - DNA, 75 bp, synthetic construct
  source 1..75: mol_type = other DNA
ataaaaaacgagtaattcagctaggtgaaaagcctagtagtgtgtttaatattggttctcttggtgcagaaaatg

SEQ ID NO: 751004 - DNA, 75 bp, synthetic construct
  source 1..75: mol_type = other DNA
gtgctcactgaatccgttctccgaggattttcgccaaagtgcgtcagcggcctagcgaaagcgcagttaagcagt

SEQ ID NO: 751005 - DNA, 75 bp, synthetic construct
  source 1..75: mol_type = other DNA
tataaaatgaatgcctccatttccggtgcggaagtggggtgtcagggggaaattggcgtggcctgttcgatggca

SEQ ID NO: 751006 - DNA, 75 bp, synthetic construct
  source 1..75: mol_type = other DNA
catgggactggcaggaaacagtccgcaggatgttgtcattgatgagatccctgcatttatagagttagtaacgcg

SEQ ID NO: 751007 - DNA, 75 bp, synthetic construct
  source 1..75: mol_type = other DNA
attatgatgaatttatacgacattcaataacgaaaatgagtcgtctacatctagtatcaactgatgaatatcgga

SEQ ID NO: 751008 - DNA, 75 bp, synthetic construct
  source 1..75: mol_type = other DNA
gcagtgccaccattgctcattttttataccgcggtgccagtggcaccatcgattattttttgtaccgtggtggca

SEQ ID NO: 751009 - DNA, 75 bp, synthetic construct
  source 1..75: mol_type = other DNA
ataaccccattataggtttaatcggctacgaagcagctaaaataaactgttcatatagagcagatactgctgctt

SEQ ID NO: 751010 - DNA, 75 bp, synthetic construct
  source 1..75: mol_type = other DNA
ttagagagttttggaaaaatgaaatcatagcatttcttgcgttgacctgcttaaaaggtgttggttattggactc

SEQ ID NO: 751011 - DNA, 75 bp, synthetic construct
  source 1..75: mol_type = other DNA
taaagcactggaagagacggtgttgtttgcggggcagaaacagggcacgcataccgcgcgctttggtgaaattga

SEQ ID NO: 751012 - DNA, 75 bp, synthetic construct
  source 1..75: mol_type = other DNA
gcacattgagactgaccttcaacgggcaatggtcacgttttgataactatgcgggtactaaaatatatgatgatg

SEQ ID NO: 751013 - DNA, 75 bp, synthetic construct
  source 1..75: mol_type = other DNA
ctataaatcacttttccctgagataaacgatgaactataccagtgcatgatcctagtttgtatgggctacacaat

SEQ ID NO: 751014 - DNA, 75 bp, synthetic construct
  source 1..75: mol_type = other DNA
aaatgaaactggaatgactctgtttgccaataatactgtctcaggagaatataataatggcggggcaatatttgc

SEQ ID NO: 751015 - DNA, 75 bp, synthetic construct
  source 1..75: mol_type = other DNA
gacatcgcggccaataaaactctggtcatcggcaacatgagtaacgatggtgagatcgattccattgccggaaac

SEQ ID NO: 751016 - DNA, 75 bp, synthetic construct
  source 1..75: mol_type = other DNA
atgagtgacatgaataatccggccgatgacaacaacggcgcaatggacgatctgtgggctgaagcgttgagcgag

SEQ ID NO: 751017 - DNA, 75 bp, synthetic construct
  source 1..75: mol_type = other DNA
gatattgccgacggaaaaacgctggttattggcaatacagagaatgacggagctgttgactctattgctggtacc

SEQ ID NO: 751018 - DNA, 75 bp, synthetic construct
  source 1..75: mol_type = other DNA
ggcgcgattgattctcttgccggaacgggagtcatcgtgaaagagggagcgggagagttagtcctcaatgccgac

SEQ ID NO: 751019 - DNA, 75 bp, synthetic construct
  source 1..75: mol_type = other DNA
caagcatccatcaggttatacgataataaataacaccgcctttacaaataacactgccgaaggttattgcggggc

SEQ ID NO: 751020 - DNA, 75 bp, synthetic construct
  source 1..75: mol_type = other DNA
agatccgggaacaattttcgcaggcaatgtcagccatgtatcagcaagaggttccacagtacggtacgttgctgg

SEQ ID NO: 751021 - DNA, 75 bp, synthetic construct
  source 1..75: mol_type = other DNA
ggatactcacgttgagcgtatcgaacagttgggtagcgcctcgttgctggcagggttaaccagcgatgtgcgcaa

SEQ ID NO: 751022 - DNA, 75 bp, synthetic construct
  source 1..75: mol_type = other DNA
ggcagtatcgctggccatttatcagcgtgatggcgctaagcctcgccagcgcggcgttaggcattggcttaattg

SEQ ID NO: 751023 - DNA, 75 bp, synthetic construct
  source 1..75: mol_type = other DNA
aatcttgctggatggcaaacctgtcagcggcgaacaaccggaagattatcgcaaactgttttcggcagtgtttac

SEQ ID NO: 751024 - DNA, 75 bp, synthetic construct
  source 1..75: mol_type = other DNA
ttctcttatgttctgcattaaccgttacaacaacggcgcatgcacaaacaccagatacggcaacgaccgcgcctt

SEQ ID NO: 751025 - DNA, 75 bp, synthetic construct
  source 1..75: mol_type = other DNA
gatgctgggcgcaataggcctggtgttctggatggcaaacagtctcggttgggctgataccaacgttgcggcgac

SEQ ID NO: 751026 - DNA, 75 bp, synthetic construct
  source 1..75: mol_type = other DNA
ttaccatctggggcggttttgtgctggtggcgcgggtgtacaaacacatggccactttgcgtgaaactgaagaca

SEQ ID NO: 751027 - DNA, 75 bp, synthetic construct
  source 1..75: mol_type = other DNA
ccaccggtaacgccctcgcccatgccggcgttattggcggtgcagatatgactgtagaagccacgctaaccaaac

SEQ ID NO: 751028 - DNA, 75 bp, synthetic construct
  source 1..75: mol_type = other DNA
caaacgcgagagtttgtgcaggaagcgctggagacatttcgctggcatcagtcggcaacggtggataaagaaacc

SEQ ID NO: 751029 - DNA, 75 bp, synthetic construct
  source 1..75: mol_type = other DNA
ttttgaacaggcgctggggtgtccggtgtttgatgagtttcagctctatcaggaagcggaagaacgcagtaaacg

SEQ ID NO: 751030 - DNA, 75 bp, synthetic construct
  source 1..75: mol_type = other DNA
gcttttgtggtcatggaggcatcttcttcatggctttcagggccaaacagggttcttgcgaaaacgctgaaaaca

SEQ ID NO: 751031 - DNA, 75 bp, synthetic construct
  source 1..75: mol_type = other DNA
gttgcttatgaaaaaaggcaggcttccaaggcaaggagcccgttgtataagcagtcttggttttgtgcatcaatc

SEQ ID NO: 751032 - DNA, 75 bp, synthetic construct
  source 1..75: mol_type = other DNA
aaagcacaggaaatggcgaaacgaggcatccctttttggcaagcggaaaacggggtctggctgacatcaacggtt

SEQ ID NO: 751033 - DNA, 75 bp, synthetic construct
  source 1..75: mol_type = other DNA
atgacaacaacggcgcaatggacgatctgtgggctgaagcgttgagcgaacaaaaatcaacaagcggcaaaagcg

SEQ ID NO: 751034 - DNA, 75 bp, synthetic construct
  source 1..75: mol_type = other DNA
gccaaatgcagcagtgatgaaaaggccctggctaaagcaaaatcaaacaaactgaccgtcagcgtcggggagttc

SEQ ID NO: 751035 - DNA, 75 bp, synthetic construct
  source 1..75: mol_type = other DNA
aaaagagcggcagcgcctgtcttcaggaggaagtcaccttctcctgcgagaaaaaggtgaccggggaagcacagt

SEQ ID NO: 751036 - DNA, 75 bp, synthetic construct
  source 1..75: mol_type = other DNA
atgaaactgcgtctgcaggtgaaagtgaaaacagaaacctggaaacccgtcgtggagtggacggaaagctgcccg

SEQ ID NO: 751037 - DNA, 75 bp, synthetic construct
  source 1..75: mol_type = other DNA
gacacttatcaatatggtttgtcggcgcgtggtcttgcgatcgacacttataccgacagcaaagaagagttcccc

SEQ ID NO: 751038 - DNA, 75 bp, synthetic construct
  source 1..75: mol_type = other DNA
ataccaaacaattagaagggcaaagcgatctcggctttgccggttttcgcgtgtttaaagcccccgaactggcgc

SEQ ID NO: 751039 - DNA, 75 bp, synthetic construct
  source 1..75: mol_type = other DNA
tgttcagaacgctggatgaaaagcgggaactggcggcaaactggttgtcagaatataacagtgaacgccatatca

SEQ ID NO: 751040 - DNA, 75 bp, synthetic construct
  source 1..75: mol_type = other DNA
atgaatccacaattgttacgcgtaacaaatcgaattattgaacgttctcgcgcgactcgttctgcttatctcgcc

SEQ ID NO: 751041 - DNA, 75 bp, synthetic construct
  source 1..75: mol_type = other DNA
taaagtgccgtcagctatccacgtaacaccagaagcctacgatggcgggctgctggcaaaagtgcgcgacgggga

SEQ ID NO: 751042 - DNA, 75 bp, synthetic construct
  source 1..75: mol_type = other DNA
cgcgtgggaacaggacgtgaattattcagcgccttgcgcgaaaaactgtccggtgccgaacagggcgcaacctgt

SEQ ID NO: 751043 - DNA, 75 bp, synthetic construct
  source 1..75: mol_type = other DNA
agaaagtggtggtgaacggtattgttgcgctgctggcaacaggtggctccactaaccacacgatgcatctggtgg

SEQ ID NO: 751044 - DNA, 75 bp, synthetic construct
  source 1..75: mol_type = other DNA
tggctcttcatttgttcatcctgactctccattgcgtgatgcattaactgccgccgccgcgcgccaggtaacgcg

SEQ ID NO: 751045 - DNA, 75 bp, synthetic construct
  source 1..75: mol_type = other DNA
gtgccatcaggtccaatggcaagcgggttgccaaataaagaaaaagtgcgtattcgccagctttatgccgaaggc

SEQ ID NO: 751046 - DNA, 75 bp, synthetic construct
  source 1..75: mol_type = other DNA
ggcttataacagcattcagtatgacgccgaaaaatcactctggcataacgttgagaaccgccaactggacgctca

SEQ ID NO: 751047 - DNA, 75 bp, synthetic construct
  source 1..75: mol_type = other DNA
gcacacaaattaacggtgacgatgcgaccgcgaacaacaacggcaaaaccattgtcgacggcaaagattccaccg

SEQ ID NO: 751048 - DNA, 75 bp, synthetic construct
  source 1..75: mol_type = other DNA
ttgatggtcagggctctacaggtaccgaaatcgcaggtaataacgcggtggtgaatcaggacggtacactggacg

SEQ ID NO: 751049 - DNA, 75 bp, synthetic construct
  source 1..75: mol_type = other DNA
agtggcaatataatcacaacggtgagctcgttattacgggtgataatgccacagtaaacaacactggaaaaacca

SEQ ID NO: 751050 - DNA, 75 bp, synthetic construct
  source 1..75: mol_type = other DNA
ttggcgatggcaataccgttaatatgaatggtggacttgaactgattggagagaaaaacgcgcttgcagatgggt

SEQ ID NO: 751051 - DNA, 75 bp, synthetic construct
  source 1..75: mol_type = other DNA
gacggtgacaatgccatcagcaacggcggcaccggcacgcaggttaacggcgacgaagccaccgtgaacaataac

SEQ ID NO: 751052 - DNA, 75 bp, synthetic construct
  source 1..75: mol_type = other DNA
gtcaacaacgacggtgacaacacgatccttgatggcggcaccggaacccgcattacgggtgatgatgcgacggcc

SEQ ID NO: 751053 - DNA, 75 bp, synthetic construct
  source 1..75: mol_type = other DNA
gccgatcgcatgaatttgactgaggcaggctatgagccaccatcattcttatgtgggttctttatcccccctgtg

SEQ ID NO: 751054 - DNA, 75 bp, synthetic construct
  source 1..75: mol_type = other DNA
tggatctgccgtccgctgaataatccgcagaaattgcagttcaatgcctataccgataacaatccaaaagggttt

SEQ ID NO: 751055 - DNA, 75 bp, synthetic construct
  source 1..75: mol_type = other DNA
ttgatccagcaacacatctggcgcgcgaaatacacttccgtccggaattgtttaaatacaacgatgcgggtgttg

SEQ ID NO: 751056 - DNA, 75 bp, synthetic construct
  source 1..75: mol_type = other DNA
gaatcaggacggcgagctggatgtgagcggcggtggtcacgggattgatatcaccggcgacagcgcaacggtgga

SEQ ID NO: 751057 - DNA, 75 bp, synthetic construct
  source 1..75: mol_type = other DNA
aagaaaaagagggatatgatccggcgttttcagcagcggttaatattgcctctgcccccattggcctgatgatcc

SEQ ID NO: 751058 - DNA, 75 bp, synthetic construct
  source 1..75: mol_type = other DNA
gagaactacgcagacctgagaaatgcagtaaatcgcacttacgcagacatggggctgagcaaattagctgagtag

SEQ ID NO: 751059 - DNA, 75 bp, synthetic construct
  source 1..75: mol_type = other DNA
agcggtggagcatcttcgcgcactggagaaaaaaggcgtcatcacgataaagcgtggcgtggcccggggcatcac

SEQ ID NO: 751060 - DNA, 75 bp, synthetic construct
  source 1..75: mol_type = other DNA
gctcactgcttgccgatgaggaaaacgcaaggctgcgtgcaactcactggttacatgagagaggcctgaaagtat

SEQ ID NO: 751061 - DNA, 75 bp, synthetic construct
  source 1..75: mol_type = other DNA
ctgctgcgtctgccgccagcctcttcctccacaaccagtggagcaagcaacacgtcgtccaccagtcagggcgat

SEQ ID NO: 751062 - DNA, 75 bp, synthetic construct
  source 1..75: mol_type = other DNA
atgccagcgaagcgcagttgcatattgcgttctccgtatatctggcggggatggcagctgcgatgttatttgccg

SEQ ID NO: 751063 - DNA, 75 bp, synthetic construct
  source 1..75: mol_type = other DNA
gctcactgcttgccggtgaggaaaacgccaggctgcgtgcagcccattggttacatgagagaggcctgaaagtat

SEQ ID NO: 751064 - DNA, 75 bp, synthetic construct
  source 1..75: mol_type = other DNA
gacagcgaggcggtcgggattatccgctcactgcttgtcggtgaggaaaacgccaggctgcgtgcagcccactgg

SEQ ID NO: 751065 - DNA, 75 bp, synthetic construct
  source 1..75: mol_type = other DNA
gactcagcgggatatctggcggtttatgaaagtgtattttgccgccccgcttaaagacattctcaagcaggaaca

SEQ ID NO: 751066 - DNA, 75 bp, synthetic construct
  source 1..75: mol_type = other DNA
gcttcgcacgcgcgttccacgtcgttggcgcgataaagatcttattgggctttatttttcttcgatgaatattgg

SEQ ID NO: 751067 - DNA, 75 bp, synthetic construct
  source 1..75: mol_type = other DNA
agcctctaggaaatcggtggatgcttcaatgcagaaagtgaaaccatatagggattgggtaaatacgctatcagc

SEQ ID NO: 751068 - DNA, 75 bp, synthetic construct
  source 1..75: mol_type = other DNA
acggacaagaccgcgacccgtggggaagcagcaaatctggcggcaactctgagggaaatggaaacaaaggcggtc

SEQ ID NO: 751069 - DNA, 75 bp, synthetic construct
  source 1..75: mol_type = other DNA
ttacgtacgagttgattggtatatttatgacaataaaccttattttggtgaattaacctttacacctggtgctgg

SEQ ID NO: 751070 - DNA, 75 bp, synthetic construct
  source 1..75: mol_type = other DNA
tgcgggatgtcggcgttgatactatgtatggggtgggcattggcgtaaaaggcatgaatccgctgaccagaactt

SEQ ID NO: 751071 - DNA, 75 bp, synthetic construct
  source 1..75: mol_type = other DNA
agggattgatatgtacctcgttggtttaccgcgcatcgccgccgatctcaatgccagcgaagcgcagttgcatat

SEQ ID NO: 751072 - DNA, 75 bp, synthetic construct
  source 1..75: mol_type = other DNA
catgcagaagtacagccgccagcaggcgagggaggcagagcagaaagcccgtgcgtaccaggcgctggtcgctca

SEQ ID NO: 751073 - DNA, 75 bp, synthetic construct
  source 1..75: mol_type = other DNA
cacatgcgcgactggtggcagccgacaaaagcaaacttcttcggacacctgaaaaagccgcagattatcgcagcc

SEQ ID NO: 751074 - DNA, 75 bp, synthetic construct
  source 1..75: mol_type = other DNA
aagacaaccgctgggtgcctggctggatgtgtgcaccacgcccacagacggatgccactgaacgtaccgataacc

SEQ ID NO: 751075 - DNA, 75 bp, synthetic construct
  source 1..75: mol_type = other DNA
gttgtgctggtggcgtctcgccaaagaagccggggcgaatgaagagaaacatgccactattgccgaacgctacgg

SEQ ID NO: 751076 - DNA, 75 bp, synthetic construct
  source 1..75: mol_type = other DNA
cgggcaagaatatattccgcagcttattgatgatttttcagaaagtgttttgcacctacaaatagaaaaatgtga

SEQ ID NO: 751077 - DNA, 75 bp, synthetic construct
  source 1..75: mol_type = other DNA
atgtcagttacagagtttaaggcaaaaacggggcgtaaatccagccgtaaaccgtcaaaagaacaggaaaccgcc

SEQ ID NO: 751078 - DNA, 75 bp, synthetic construct
  source 1..75: mol_type = other DNA
tgctgggataccgttcggtgaatgcagcggtggagcatcttcgcgcactggagaaaaaaagcgtcatcacgataa

SEQ ID NO: 751079 - DNA, 75 bp, synthetic construct
  source 1..75: mol_type = other DNA
gagaaaaaaggcgtcattacgataaagcgtggcgtggcccgggggataacgcttcataccgcagtgaaggacgac

SEQ ID NO: 751080 - DNA, 75 bp, synthetic construct
  source 1..75: mol_type = other DNA
ttgctctggttttactttatcccgcaggtattgatatgtatctggtcggcttgccacgcattgccgccgatctca

SEQ ID NO: 751081 - DNA, 75 bp, synthetic construct
  source 1..75: mol_type = other DNA
taataattagtctggcgtcaattttcttaattgattgcacccatcaaaataaaaaagacaggtttgtatatgtta

SEQ ID NO: 751082 - DNA, 75 bp, synthetic construct
  source 1..75: mol_type = other DNA
caggcgatggcgcgcctggggcttcctgatgctgagattatggatgggcagttgcgatcatcattttctcctccg

SEQ ID NO: 751083 - DNA, 75 bp, synthetic construct
  source 1..75: mol_type = other DNA
ctcgttacggtatgcctgagccagatattctttctggtaaagctagatcttcattctctccccctctgaaccgta

SEQ ID NO: 751084 - DNA, 75 bp, synthetic construct
  source 1..75: mol_type = other DNA
caatcttgggatggaggatgccttaactcccggcatgtactccagaaacccttcttaccgcgcgtttgaaaatgc

SEQ ID NO: 751085 - DNA, 75 bp, synthetic construct
  source 1..75: mol_type = other DNA
atatttttacggggtcgcatgttgaagtctccgtttctactatggtcgatagccagccggactttttcgatccta

SEQ ID NO: 751086 - DNA, 75 bp, synthetic construct
  source 1..75: mol_type = other DNA
cctttacgctttcgtatgttctatgttgtgaactctggctatagtgctgctaacacaggttactacgtcattttt

SEQ ID NO: 751087 - DNA, 75 bp, synthetic construct
  source 1..75: mol_type = other DNA
ggtgaggtttttcgtgaactggaaactcgccgcactctgcgctttgaaatggcgggcaaaagctattttctcaaa

SEQ ID NO: 751088 - DNA, 75 bp, synthetic construct
  source 1..75: mol_type = other DNA
tctctccctgcaaaaatacaaatccgatagtaatgccccatctgctactcattgttgcgagtgtggcgatccgat

SEQ ID NO: 751089 - DNA, 75 bp, synthetic construct
  source 1..75: mol_type = other DNA
accaatgagaaaccgacacctagcgaaattggcgcagtggctaagactgaccggatcgatttcggcgaatactaa

SEQ ID NO: 751090 - DNA, 75 bp, synthetic construct
  source 1..75: mol_type = other DNA
gtatattccactaatgagaaaccgacacctagcgaaattggcgcagtagctaagactgaccggatcgacttcggg

SEQ ID NO: 751091 - DNA, 75 bp, synthetic construct
  source 1..75: mol_type = other DNA
gtggtcgatgacgcacgcaagaccttaccgccaggttgcgaaggtgaagaagcctcgcgtggccccaatgtgttt

SEQ ID NO: 751092 - DNA, 75 bp, synthetic construct
  source 1..75: mol_type = other DNA
atctgccactgaacgaatttcgtgccatcgacagcagccccgacaaagccaacctgactcgcgccgccagtaaaa

SEQ ID NO: 751093 - DNA, 75 bp, synthetic construct
  source 1..75: mol_type = other DNA
gctggagcgcggtaccttaaaaatcaaaagcattcaaataacctggctacccatccaggggccagagcaaaaagc

SEQ ID NO: 751094 - DNA, 75 bp, synthetic construct
  source 1..75: mol_type = other DNA
gggatacctggagcgatcatattcgccggacgattatcaaagaaagccgtccttttattctcgattatttgcata

SEQ ID NO: 751095 - DNA, 75 bp, synthetic construct
  source 1..75: mol_type = other DNA
gtgatacctggagcgatcatattcgccggacgattatcaaagaaagtcgtccttttattctcgattatttacata

SEQ ID NO: 751096 - DNA, 75 bp, synthetic construct
  source 1..75: mol_type = other DNA
aaaacacgttgcgcaagcggcggagttctgggtgttctgtgccgactttaaccgccatttacagatttgcccgga

SEQ ID NO: 751097 - DNA, 75 bp, synthetic construct
  source 1..75: mol_type = other DNA
aattaacctttacacctggtgctggaagttcatatgaatttggtaatgaacttgaaaaattaatggccaaatatt

SEQ ID NO: 751098 - DNA, 75 bp, synthetic construct
  source 1..75: mol_type = other DNA
tgaaaacactctggatatcagcggtaaagcgagcggtgtgaaccgccccgggtttcctggagagtgttttatctg

SEQ ID NO: 751099 - DNA, 75 bp, synthetic construct
  source 1..75: mol_type = other DNA
ttacagccgtaacaattaatgcggcagatgaagaccttaatgttgcttttgctggtcatgatattactgctgaat

SEQ ID NO: 751100 - DNA, 75 bp, synthetic construct
  source 1..75: mol_type = other DNA
gtaatggcctgtttattcagccatatgccaaactgtctgcgctgacgctggaaggtgtggattatcaactcaacg

SEQ ID NO: 751101 - DNA, 75 bp, synthetic construct
  source 1..75: mol_type = other DNA
cttagtggaatggcgagggttgcaacgaaagctacagatgtgaatccaataacaggaaacagatctggtttaaat

SEQ ID NO: 751102 - DNA, 75 bp, synthetic construct
  source 1..75: mol_type = other DNA
accgttttatgtatggcgttctcagtggattgatggatgttggtaaaggtgttggcctgtttcaggatatgacac

SEQ ID NO: 751103 - DNA, 75 bp, synthetic construct
  source 1..75: mol_type = other DNA
aaaagggtagcttattgaatagttttaacggtgatgcaaccgacaacattacccttgctggctcaaatattatta

SEQ ID NO: 751104 - DNA, 75 bp, synthetic construct
  source 1..75: mol_type = other DNA
agatgagcggcgacgccaggctgttcgcggatgccgaacttgcgccagttgccagcaggatattgaacttatcaa

SEQ ID NO: 751105 - DNA, 75 bp, synthetic construct
  source 1..75: mol_type = other DNA
gccaggaggagatcgaacttaagaacaaacaatggggactgtgtaagcgtaaaccgaccgccgtatgtagccatt

SEQ ID NO: 751106 - DNA, 75 bp, synthetic construct
  source 1..75: mol_type = other DNA
ataatgtaacgctcaatggcacaaccataaatgctcaaggtaataagagttccagcaacggctctacggcaattt

SEQ ID NO: 751107 - DNA, 75 bp, synthetic construct
  source 1..75: mol_type = other DNA
aacattacccttgctggctcaaatattattaatggtcggattgaaacaatacttattgctcaggagaataagggt

SEQ ID NO: 751108 - DNA, 75 bp, synthetic construct
  source 1..75: mol_type = other DNA
tacagcaataaaaatgcgtcgcctgaactaccagactgtatccgcaactcattgttgtgagtgtggcgatagatg

SEQ ID NO: 751109 - DNA, 75 bp, synthetic construct
  source 1..75: mol_type = other DNA
ctggtgagattcacgaaggcccgcaacatatctatatgctggtgggcatgtgtctgttccagaattgggaagacg

SEQ ID NO: 751110 - DNA, 75 bp, synthetic construct
  source 1..75: mol_type = other DNA
attggtcagttgccgatcgaccattaccgttcttcattagacgaaagtggcgaaaccaactttgagttaaagatg

SEQ ID NO: 751111 - DNA, 75 bp, synthetic construct
  source 1..75: mol_type = other DNA
ttcttatttatcatcacatcagtcgttgtccgagacttgttactctttcaccgaaaatattttgtgaacagataa

SEQ ID NO: 751112 - DNA, 75 bp, synthetic construct
  source 1..75: mol_type = other DNA
ttttgataaacatggaatgccgagaaaattggataaaaacacttgtgcaataactacatccctgcctgaaagtga

SEQ ID NO: 751113 - DNA, 75 bp, synthetic construct
  source 1..75: mol_type = other DNA
cggggcttgtgacactctcacctgaaacattttgtgaacagatgaagtggctcgcagataataactggcggacgg

SEQ ID NO: 751114 - DNA, 75 bp, synthetic construct
  source 1..75: mol_type = other DNA
aagtccgggaaatgggtgattccgggcttgttgaatttcatgtgcacacccattcacataaacgctgggacaggt

SEQ ID NO: 751115 - DNA, 75 bp, synthetic construct
  source 1..75: mol_type = other DNA
aatttttagagtcgttagattcaactgaagtgatacgcaaagcagtaagtctcgctatagattgcattattgata

SEQ ID NO: 751116 - DNA, 75 bp, synthetic construct
  source 1..75: mol_type = other DNA
tgtaaatgatcttaatgatatagaagataaattgctggaggtattacgtcgaggattaattgatatgcataaaat

SEQ ID NO: 751117 - DNA, 75 bp, synthetic construct
  source 1..75: mol_type = other DNA
ccatcgcgagtttaatcactcgcttctacgatatcgatgaaggcgagatcctgatggatggtcacgatctacgcg

SEQ ID NO: 751118 - DNA, 75 bp, synthetic construct
  source 1..75: mol_type = other DNA
atagtaaagtagatgctcatccatattatgatggtttggggaaaggagttaagaaatattttaactttacaccat

SEQ ID NO: 751119 - DNA, 75 bp, synthetic construct
  source 1..75: mol_type = other DNA
actactatcagagctatttttgaatggcgcacacatggagcaacccaacgtacacaacgtttctgagggaaacat

SEQ ID NO: 751120 - DNA, 75 bp, synthetic construct
  source 1..75: mol_type = other DNA
agatattcctacacgtagacaatttgaccatttctacaaacgtgaatatgaacttcctcaaaggatagaagccag

SEQ ID NO: 751121 - DNA, 75 bp, synthetic construct
  source 1..75: mol_type = other DNA
taagttggagaagattactcaacttaagcagtggcatatcggcgaatattatggaagtcctggtcgggatgttcg

SEQ ID NO: 751122 - DNA, 75 bp, synthetic construct
  source 1..75: mol_type = other DNA
tggtgtatgcgccgagtcgctattttgccagcgaacccaaagctgatgtcagcctgattttgcgtaacccgaaag

SEQ ID NO: 751123 - DNA, 75 bp, synthetic construct
  source 1..75: mol_type = other DNA
gaacgccgttacggttccgataaaccggatctgcgtaacccgatggaactgaccgacgttgccgatctgctgaaa

SEQ ID NO: 751124 - DNA, 75 bp, synthetic construct
  source 1..75: mol_type = other DNA
ttcacctcaccgaaagacatgacggcagcagaactgaaagctgcaccggaaaatgcggtggcgaacgcttacgat

SEQ ID NO: 751125 - DNA, 75 bp, synthetic construct
  source 1..75: mol_type = other DNA
cgctgccgcgtaaagttctgcgcgttgagtttcgcatcgataacaattcagcgaagttccgtagtaaaacggatg

SEQ ID NO: 751126 - DNA, 75 bp, synthetic construct
  source 1..75: mol_type = other DNA
ataaaggtctggctaatcgcgatcaggttgtggcggcaatattcagctatctcaatctgttgcgtgaaaaaggta

SEQ ID NO: 751127 - DNA, 75 bp, synthetic construct
  source 1..75: mol_type = other DNA
aaaggaacgtctggcgatgatgacgccgcagaatgcgcgtatctggtatatcagcccgaaagagccgcacaacaa

SEQ ID NO: 751128 - DNA, 75 bp, synthetic construct
  source 1..75: mol_type = other DNA
ctgcattcaggtcacgggcaccgtacgtgcgcgtgacgaaaaaaatattaaccgcgatatggcgaccggcgaaat

SEQ ID NO: 751129 - DNA, 75 bp, synthetic construct
  source 1..75: mol_type = other DNA
gctgccgcgccacccgtcacagttgtacgaactgctgctggaaggtgtggtgctgtttatcatccttaacctcta

SEQ ID NO: 751130 - DNA, 75 bp, synthetic construct
  source 1..75: mol_type = other DNA
gcgtctgggtaactttattaacggtgagttgtggggccgcgtcgatcctaacttcccgttcgcgatgttgtttcc

SEQ ID NO: 751131 - DNA, 75 bp, synthetic construct
  source 1..75: mol_type = other DNA
atgcgtacagaatattgtggacagctccgtttgtcccacgtggggctgcaggtgactctgtgtggttgggtcaac

SEQ ID NO: 751132 - DNA, 75 bp, synthetic construct
  source 1..75: mol_type = other DNA
gaccgacgttgccgacctgctgaaatccgttgagtttgcggtattcgcggggccagcgaacgatccgaaaggtcg

SEQ ID NO: 751133 - DNA, 75 bp, synthetic construct
  source 1..75: mol_type = other DNA
cgaagtgctggcgtcctcgctgactatcatcaaccgcgcagatgttctgccgcttgactctaaccacgtcaacac

SEQ ID NO: 751134 - DNA, 75 bp, synthetic construct
  source 1..75: mol_type = other DNA
tgaaaaggcagacgaaattgtggtcgttgaggatggtgtcattgtggaacgcggcacgcataacgatttgcttga

SEQ ID NO: 751135 - DNA, 75 bp, synthetic construct
  source 1..75: mol_type = other DNA
gcggaaaaacgcgatccactcgtgaccacttcacgcggtactggcgagttaatcctgcaggcgctggagagcggt

SEQ ID NO: 751136 - DNA, 75 bp, synthetic construct
  source 1..75: mol_type = other DNA
gtttcatgtcgggatctgcgctgaagaacatttttacagaagaatgcacgacgctttcagaaaacagtttatcga

SEQ ID NO: 751137 - DNA, 75 bp, synthetic construct
  source 1..75: mol_type = other DNA
tgtctggtgataaaagagatgaaagtgtcaggggtcagttacgataaacttaccatgcaacttcccacttcagga

SEQ ID NO: 751138 - DNA, 75 bp, synthetic construct
  source 1..75: mol_type = other DNA
ggtgaatgactgtcttttatatgtttctcaaaaaataaccaatccatttttgttatcaagaatatatgatgttgt

SEQ ID NO: 751139 - DNA, 75 bp, synthetic construct
  source 1..75: mol_type = other DNA
tgtctgcggcggtggggctgtcccataacatgtttgatggtgctctgtttctcggtgtgtgcgacaagattgtcc

SEQ ID NO: 751140 - DNA, 75 bp, synthetic construct
  source 1..75: mol_type = other DNA
gtgattttcgcgctaacgcaaattcagtaaaaccacagccaattgcagttctttttaaaacaatgggtgcgtggg

SEQ ID NO: 751141 - DNA, 75 bp, synthetic construct
  source 1..75: mol_type = other DNA
atgtccaggattaatgctcagataaaagaggttgatggcaaactcgatgactgcgagcaagctattaaagagtcg

SEQ ID NO: 751142 - DNA, 75 bp, synthetic construct
  source 1..75: mol_type = other DNA
atgcgccagaccgcgttgattgcgctgatggcctatatcggcagctacgtaccggcgcaaaaagtcgagattggc

SEQ ID NO: 751143 - DNA, 75 bp, synthetic construct
  source 1..75: mol_type = other DNA
cgatggaacgcgagcaggacagcatcattatggatgctgcgacgcgccgtaatctggaaatcacccagaatctgg

SEQ ID NO: 751144 - DNA, 75 bp, synthetic construct
  source 1..75: mol_type = other DNA
tgaccaagcgtattcctgatttacacgtaaccgggttttgccctgacaatactgaagagaagcacattgcccttt

SEQ ID NO: 751145 - DNA, 75 bp, synthetic construct
  source 1..75: mol_type = other DNA
ttgctactcactcccgccagcttgctgctacccgcccaagccagcgaagtgatccgcttcttctataagggaccc

SEQ ID NO: 751146 - DNA, 75 bp, synthetic construct
  source 1..75: mol_type = other DNA
ccgtggtgtgtgccatgaatgcgggaaaccttaaacatgtggctatggcgctgcgtgagcggtacagctcacgta

SEQ ID NO: 751147 - DNA, 75 bp, synthetic construct
  source 1..75: mol_type = other DNA
aaaatggtctaccctagaaaatcagaaggaaacatggcgattaaaaatgccattcattctctttatagtattcaa

SEQ ID NO: 751148 - DNA, 75 bp, synthetic construct
  source 1..75: mol_type = other DNA
gtgaagcacaatcgcaagagagtattcaggacaaaatatctcaatgtaagtttcctgttagttcaggaaatttcc

SEQ ID NO: 751149 - DNA, 75 bp, synthetic construct
  source 1..75: mol_type = other DNA
atgatcgtcgtttctgaatgctactggaccgcagcagccaaacacgcagatatcgtattaccgatcaccacatcg

SEQ ID NO: 751150 - DNA, 75 bp, synthetic construct
  source 1..75: mol_type = other DNA
ggcatcactgcgaaacactggatgttgaggggtatacctaccgcacggaaacgcagagcggtgatgtactgatta

SEQ ID NO: 751151 - DNA, 75 bp, synthetic construct
  source 1..75: mol_type = other DNA
aagagattttgacctgggcggcaagggcagggcaggaactcgtcacgattgaaatctgccgggcctggttcagtc

SEQ ID NO: 751152 - DNA, 75 bp, synthetic construct
  source 1..75: mol_type = other DNA
ggaattatatctcatattgtacaaatgtttctactaatgtagtccttaatggtgatgtatatgtcggggagaaaa

SEQ ID NO: 751153 - DNA, 75 bp, synthetic construct
  source 1..75: mol_type = other DNA
ggtgatgtatatgttggagagaaaagttttataggtagttgtactgttgtaaatgggcaaataaaaataggaagc

SEQ ID NO: 751154 - DNA, 75 bp, synthetic construct
  source 1..75: mol_type = other DNA
cagggcaaactgaccgttgcaaaactgaacatcgatcaaaaccctggcactgcgccgaaatatggcatccgtggt

SEQ ID NO: 751155 - DNA, 75 bp, synthetic construct
  source 1..75: mol_type = other DNA
tgagggttatacctaccgcacggaaacgcagaacggtgatgtgctgatcaaggcacacccggctgctgcgatgaa

SEQ ID NO: 751156 - DNA, 75 bp, synthetic construct
  source 1..75: mol_type = other DNA
gtgttttactgacattgcgtgactacgatggccaggttgcagaggcactggctatggagcacgccctgaacaaaa

SEQ ID NO: 751157 - DNA, 75 bp, synthetic construct
  source 1..75: mol_type = other DNA
atgtctggaccaccgaaaaccccgacccatctacgtttggtgaggggtaacccatcaaagcgcccaatcaatgag

SEQ ID NO: 751158 - DNA, 75 bp, synthetic construct
  source 1..75: mol_type = other DNA
cagagcccttgaactgctggttgaggcttataccgaataccggcatcactgcgacacgcttgaagttgagggcta

SEQ ID NO: 751159 - DNA, 75 bp, synthetic construct
  source 1..75: mol_type = other DNA
acggtgaagtggcggcaaccaaagtgggtgcactgtctaaaggtcagttgaaagagttcctcgacgctaacctgg

SEQ ID NO: 751160 - DNA, 75 bp, synthetic construct
  source 1..75: mol_type = other DNA
aaaagattgatgccatggcggctgaaaaaatcagcgccggtcagtcagcagagccaaagtccacgcccctcccgt

SEQ ID NO: 751161 - DNA, 75 bp, synthetic construct
  source 1..75: mol_type = other DNA
tgtttggattgatgttctctgtcagtttgggggcgtcaaaagagctttgggatagccgccccgaagggagcggct

SEQ ID NO: 751162 - DNA, 75 bp, synthetic construct
  source 1..75: mol_type = other DNA
attgacaaaagggccgctgagaaaatcagcgcctgtcagtcagccggaagcaaacccgaagagccgctcatttag

SEQ ID NO: 751163 - DNA, 75 bp, synthetic construct
  source 1..75: mol_type = other DNA
agcgcctaacgccaaaatgcgtaaagtggcagacgatgcaccgctgatggagcgcgtggagtatatgctgcagtc

SEQ ID NO: 751164 - DNA, 75 bp, synthetic construct
  source 1..75: mol_type = other DNA
aaatcaggaagaagggacacaaatccgcgtatttgtgattaaccctggcacgcctaacgctgaatgtggcgtttc

SEQ ID NO: 751165 - DNA, 75 bp, synthetic construct
  source 1..75: mol_type = other DNA
aggtagcgtattgaatggttttaacggtgatgcaacagacaacattacccttgctggctcaaatattattaatgg

SEQ ID NO: 751166 - DNA, 75 bp, synthetic construct
  source 1..75: mol_type = other DNA
cgggcggtgctgtatgtgattgctgaagagttagggatctcccgcgcccagtttgaccagtttctgcgcatgatg

SEQ ID NO: 751167 - DNA, 75 bp, synthetic construct
  source 1..75: mol_type = other DNA
acccgctgcgcgaaaagatgcgtcagtttcgcagtgtctgctttggtcgttttgacttaattcgtatgtttctgg

SEQ ID NO: 751168 - DNA, 75 bp, synthetic construct
  source 1..75: mol_type = other DNA
gatttaggaatcatgcagatcaatactggtgcatggttaccacttatcagtaaaactttttttaataaccaacat

SEQ ID NO: 751169 - DNA, 75 bp, synthetic construct
  source 1..75: mol_type = other DNA
cagctatttttccgcccagtctttaggctggcttggtgccgcgattaacccattagtgagtggcgtagtgctaac

SEQ ID NO: 751170 - DNA, 75 bp, synthetic construct
  source 1..75: mol_type = other DNA
cgtaaaaacgtatgagtcccaggaggaggcctggggcgctcgtttatatgagtggctaaacacttatcagggtga

SEQ ID NO: 751171 - DNA, 75 bp, synthetic construct
  source 1..75: mol_type = other DNA
actggacaaatcgatggaaaaagagcgcgcggaaatggagaaaattctgggaccaatccccacgtcattcaatta

SEQ ID NO: 751172 - DNA, 75 bp, synthetic construct
  source 1..75: mol_type = other DNA
gcgcctgctttcgttacgtagtgtggcggattacgtgcgtcgcgaagaacgggcagaaggtgaggcgctggcaga

SEQ ID NO: 751173 - DNA, 75 bp, synthetic construct
  source 1..75: mol_type = other DNA
gccgaagtttgggcgttgtcaacaaaatatgacgctaacaatgtctatgctgctgtaatgtacggtgaatctcac

SEQ ID NO: 751174 - DNA, 75 bp, synthetic construct
  source 1..75: mol_type = other DNA
agctatgtcccggagccacccctgccggagcctgtcacccgtccgaccgaactctatatcaatggtgagctggtg

SEQ ID NO: 751175 - DNA, 75 bp, synthetic construct
  source 1..75: mol_type = other DNA
aattcaattcatctgaccatggcgggcaacgaagtcttcaaagttgcagtaaccgagttggcgcacatcgttgat

SEQ ID NO: 751176 - DNA, 75 bp, synthetic construct
  source 1..75: mol_type = other DNA
taacatgtttgatggtgctctgttcctcggtgtgtgcgacaagattgtcccgggtctgacgatggcagccctgtc

SEQ ID NO: 751177 - DNA, 75 bp, synthetic construct
  source 1..75: mol_type = other DNA
cggtgaacgtggaagccgtgcgtgaactggctgcttccggtgtgatgctgacgtcggacgaaaacgtggtgcgcg

SEQ ID NO: 751178 - DNA, 75 bp, synthetic construct
  source 1..75: mol_type = other DNA
atgaacgtctgggataccctgcgtctggccgtggattttaatctgttcgtgaagggcgaatttaaaacccgtacg

SEQ ID NO: 751179 - DNA, 75 bp, synthetic construct
  source 1..75: mol_type = other DNA
aggtgctgccggtggtgaacacgcagggccagccttgcggtacgctgcattttcaggatctgctggtggaggcgt

SEQ ID NO: 751180 - DNA, 75 bp, synthetic construct
  source 1..75: mol_type = other DNA
atcacggtgaagtggtgcagcagggcaatccgctgacgatgctgactcgtccggcgaatgattttgtccgccagt

SEQ ID NO: 751181 - DNA, 75 bp, synthetic construct
  source 1..75: mol_type = other DNA
ggatcgacgatcgtatcgacgaattaatggcgctactggggctggagtcaaatttgcgtgagcgttatccgcatc

SEQ ID NO: 751182 - DNA, 75 bp, synthetic construct
  source 1..75: mol_type = other DNA
gcgaacgccacattgccgcgccaaacgaaaccgtttcaaccatgggctttgaagcggcgacacgcgcaattgaga

SEQ ID NO: 751183 - DNA, 75 bp, synthetic construct
  source 1..75: mol_type = other DNA
agagcaaaggtgacactgaaggttacagcttccacgcttacctgagccgccagtataacaacggtatcttcattg

SEQ ID NO: 751184 - DNA, 75 bp, synthetic construct
  source 1..75: mol_type = other DNA
attagcaatacagcaggccaacagattacagccgtaacaattaatgcggcagataaagaccttaatgttactttt

SEQ ID NO: 751185 - DNA, 75 bp, synthetic construct
  source 1..75: mol_type = other DNA
ttgtacgatccgcgtagcctgtgatgtcaccaacccgctggtgggcgatagtggtgcttcgcgtatctttggccc

SEQ ID NO: 751186 - DNA, 75 bp, synthetic construct
  source 1..75: mol_type = other DNA
ataccctgataatccccaatatgggactggataaaatagtcaataaagcgtcacaatctgaggccaacttcaaat

SEQ ID NO: 751187 - DNA, 75 bp, synthetic construct
  source 1..75: mol_type = other DNA
atggataaaatagccaataaaacagcacaatctgaagccaactttaaattggtagccaatggatgcagcagtgga

SEQ ID NO: 751188 - DNA, 75 bp, synthetic construct
  source 1..75: mol_type = other DNA
tcacaatctgaggccaacttcaaattagtcgccagtgggtgtagcagtggaattagctggattgataccacaatg

SEQ ID NO: 751189 - DNA, 75 bp, synthetic construct
  source 1..75: mol_type = other DNA
aatcaataccaggctcagtgggaatgcttccggaactactcccgcattaattgttccactctcttctgacactac

SEQ ID NO: 751190 - DNA, 75 bp, synthetic construct
  source 1..75: mol_type = other DNA
ttatccccctggccagtgatacaacctccactacaagctatatcggaatgggatttaaaaggaaggcgacttcag

SEQ ID NO: 751191 - DNA, 75 bp, synthetic construct
  source 1..75: mol_type = other DNA
aagtttcgcgcactggcaacttttaactcagctatcaataacaaggatgacaatgatgatattaaaaaaattatg

SEQ ID NO: 751192 - DNA, 75 bp, synthetic construct
  source 1..75: mol_type = other DNA
tcgtacctgtgggatcgttacaaggcctttttcccaacggctgaggcgaaactgcgcgcgatgaagccagaagag

SEQ ID NO: 751193 - DNA, 75 bp, synthetic construct
  source 1..75: mol_type = other DNA
aacccggcaatccggtgcagcaggcgctgaaagattttcacgagaaatattactctgccaatctgatgaaggcgg

SEQ ID NO: 751194 - DNA, 75 bp, synthetic construct
  source 1..75: mol_type = other DNA
aacggcttactttgtcgatgcgccgtatcaggtcgataaaattagcgcacaaactttcgccgactggcagaaaaa

SEQ ID NO: 751195 - DNA, 75 bp, synthetic construct
  source 1..75: mol_type = other DNA
tgcaaggtttctaatttaaaaataaaaaatattgtagcgccccgaaaaatatcgctagaacaaatactttctttg

SEQ ID NO: 751196 - DNA, 75 bp, synthetic construct
  source 1..75: mol_type = other DNA
gcttatcgatcaatataacgaaatgattgaggtgctgggcaaaccattcagggagcagtacaactacacgttgac

SEQ ID NO: 751197 - DNA, 75 bp, synthetic construct
  source 1..75: mol_type = other DNA
caatactaccaggattatttttatcatcctctgtacttgcaacagatattaatgttgattttacagcaaccgtaa

SEQ ID NO: 751198 - DNA, 75 bp, synthetic construct
  source 1..75: mol_type = other DNA
gacaaaattgctggagatggtgcagcttgctcatctggcggatcgttatccggcgcagctttccggcgggcagaa

SEQ ID NO: 751199 - DNA, 75 bp, synthetic construct
  source 1..75: mol_type = other DNA
ggatgcgcaggtgcgtaaagagctgcgtcgctggctgcgtcagttacatgaagagctgaaattcaccagcgtgtt

SEQ ID NO: 751200 - DNA, 75 bp, synthetic construct
  source 1..75: mol_type = other DNA
aagaactgaaattcaccagcgtattcgtcacccacgaccaggaagaggcgatggaagtcgccaaccgcgtggtgg

SEQ ID NO: 751201 - DNA, 75 bp, synthetic construct
  source 1..75: mol_type = other DNA
cacgattgttgagctggacaagaatctctctcactatgctgatgtcatcaaaaaatcgctgtatgttgatgtgaa

SEQ ID NO: 751202 - DNA, 75 bp, synthetic construct
  source 1..75: mol_type = other DNA
attgaaattgttaccgcagcgctgaatctggaagagcacattcatgattgtacgttggtgatcaccggagagggg

SEQ ID NO: 751203 - DNA, 75 bp, synthetic construct
  source 1..75: mol_type = other DNA
gcgtgaaacaggtacaggtcaaggcataccaggtaattttcgtgctaaggcaacttttaatttcacctatcaata

SEQ ID NO: 751204 - DNA, 75 bp, synthetic construct
  source 1..75: mol_type = other DNA
cgctgttccgccatatgacggtattcgacaatatcgctttcggcctgacggtgctgccgcgtcgcgagcgcccga

SEQ ID NO: 751205 - DNA, 75 bp, synthetic construct
  source 1..75: mol_type = other DNA
gtgctgccacgtcgcgagcgcccgaatgccgcagccatcaaagcgaaagtgacaaaattgctggagatggtgcag

SEQ ID NO: 751206 - DNA, 75 bp, synthetic construct
  source 1..75: mol_type = other DNA
gacaaaattgctggagatggtgcagctcgcgcatctggcggatcgttatccggcgcagctttccggcggccagaa

SEQ ID NO: 751207 - DNA, 75 bp, synthetic construct
  source 1..75: mol_type = other DNA
acagcgtgtggcgctggcgcgcgcgctggctgtagaaccgcaaattctgctgcttgatgaaccgtttggcgcgct

SEQ ID NO: 751208 - DNA, 75 bp, synthetic construct
  source 1..75: mol_type = other DNA
acccgtacaggtactggaagccagcccgaaaggtcactacacccaattagtggtgcagccgctgggatggtatga

SEQ ID NO: 751209 - DNA, 75 bp, synthetic construct
  source 1..75: mol_type = other DNA
cttgctcatctggcggaccgttatccggcgcagctttccggcggtcagaaacagcgtgtggcgctggcgcgcgcg

SEQ ID NO: 751210 - DNA, 75 bp, synthetic construct
  source 1..75: mol_type = other DNA
ggctggaaatatttattggtcactgggaaatgcgtcatcgcctgactaactatgaagaaggtgaaaaggtgctgc

SEQ ID NO: 751211 - DNA, 75 bp, synthetic construct
  source 1..75: mol_type = other DNA
ggcataccgcaacctgccggagccggaagcggtgctgacggaggcggaagacgaacgcctgaacgaactgatggc

SEQ ID NO: 751212 - DNA, 75 bp, synthetic construct
  source 1..75: mol_type = other DNA
gtgcctgactggatgtgtgcaccacgtccacaggcagagacggaagccacggaataccgtgacaaccaggcagaa

SEQ ID NO: 751213 - DNA, 75 bp, synthetic construct
  source 1..75: mol_type = other DNA
cgctggcggaatatccgtatgcgggggcgtttttccgctgtctgaacggaagccgcaggatttcgctgtctgacc

SEQ ID NO: 751214 - DNA, 75 bp, synthetic construct
  source 1..75: mol_type = other DNA
caggaggtgctgttatccctgctcagtttctgcaccgcatgcagcctttacggtgtccagacccgcaattgtggt

SEQ ID NO: 751215 - DNA, 75 bp, synthetic construct
  source 1..75: mol_type = other DNA
gaagtacagaccattcgtcgtctggtgaccgaaagtgaagtggcggtggcggggaacactaaattccgctttgtg

SEQ ID NO: 751216 - DNA, 75 bp, synthetic construct
  source 1..75: mol_type = other DNA
ggcataccgcagtctgccggagccggaagaggtgctgacggaggcggaagaagaatgcctgaacgaactgatggc

SEQ ID NO: 751217 - DNA, 75 bp, synthetic construct
  source 1..75: mol_type = other DNA
cagaaatgaagctgatgcgctgcatggcgaaggtcagagcgtggacgccggagatgcgtaccggaagcggtgtgg

SEQ ID NO: 751218 - DNA, 75 bp, synthetic construct
  source 1..75: mol_type = other DNA
cgacgaaggtggctatgtggactgcgtggcgctcgatgccgccctgctggaaaaactccaggctgtcgcagagtt

SEQ ID NO: 751219 - DNA, 75 bp, synthetic construct
  source 1..75: mol_type = other DNA
accgccacggtgtcgccgcaggtggtcgccgactggcagcactcaacatgctggcagagcgcaacatccttccgg

SEQ ID NO: 751220 - DNA, 75 bp, synthetic construct
  source 1..75: mol_type = other DNA
atgagcgcacgttcacgggcactggttcccctcagcacagagcaacaggccgcatggcgggcggtggcagagacg

SEQ ID NO: 751221 - DNA, 75 bp, synthetic construct
  source 1..75: mol_type = other DNA
gcacgggacgcggagaagatgaagaaaggcgatgcggctgaacatgcagagcaccatatgaaagacaaccgctgg

SEQ ID NO: 751222 - DNA, 75 bp, synthetic construct
  source 1..75: mol_type = other DNA
ggtgccgcacgggatgcagagaagatgaagaaaggtgatgcggctgaacatgcagagcaccatatgaaagacaac

SEQ ID NO: 751223 - DNA, 75 bp, synthetic construct
  source 1..75: mol_type = other DNA
gcgtacagtaaaccagcacaaatcagcctggaatgtaaacattattcgctgaccagcgatgcgccatcggggaag

SEQ ID NO: 751224 - DNA, 75 bp, synthetic construct
  source 1..75: mol_type = other DNA
gaactgcgcaccgatttgttcagcgatgacggggacggttatgtcgaccgcgtggcgctcgatgctgccctgctg

SEQ ID NO: 751225 - DNA, 75 bp, synthetic construct
  source 1..75: mol_type = other DNA
tcaccgaaagtgaagtggcggtggccgggaacagtaaattccgcttcgtgggggctgatgccttctcgccagaag

SEQ ID NO: 751226 - DNA, 75 bp, synthetic construct
  source 1..75: mol_type = other DNA
tcaccgaaagtgaagtggcggtggcagggaacagtaaattccgcttcgtgggggctgatgccttctcgccagacg

SEQ ID NO: 751227 - DNA, 75 bp, synthetic construct
  source 1..75: mol_type = other DNA
gaaggaaggtgccgcattcatggcgctgatggcagaaaaagcacgtttggtcgccctgttgccggagggatggtc

SEQ ID NO: 751228 - DNA, 75 bp, synthetic construct
  source 1..75: mol_type = other DNA
ccttcgggaagccgagggctggagatggtgtgccggacgcatggaggccgttggtgagtgccgtgaggatgccgg

SEQ ID NO: 751229 - DNA, 75 bp, synthetic construct
  source 1..75: mol_type = other DNA
cgctgggtgcctggctggatgtgtgcaccacatccacagacagataccactgaacgcactgataacctggctgat

SEQ ID NO: 751230 - DNA, 75 bp, synthetic construct
  source 1..75: mol_type = other DNA
aagtaacttatccgtgctgacgccattgggacttgattcgttggtgaagcagacaaccatgagttacccgcctgc

SEQ ID NO: 751231 - DNA, 75 bp, synthetic construct
  source 1..75: mol_type = other DNA
cccgtgcgacgtccagttccagttttttgcagtgcagtagcattattcgcattaccgacaaagcattacgtgaag

SEQ ID NO: 751232 - DNA, 75 bp, synthetic construct
  source 1..75: mol_type = other DNA
gggatacctggagcgatcatatccgccgaacaatcattaaagaaagccgcccatttattctggattatttgcaca

SEQ ID NO: 751233 - DNA, 75 bp, synthetic construct
  source 1..75: mol_type = other DNA
taaccgaaagtgaagtggcggtggccgggaacagtaaattccgcttcgtgggggctgatgccttctcgccagacg

SEQ ID NO: 751234 - DNA, 75 bp, synthetic construct
  source 1..75: mol_type = other DNA
cgcagaagaactgcgcggcaaccgttctcagtggctgtatgccatcgatgtgctgattgaaacacagggcgaggt

SEQ ID NO: 751235 - DNA, 75 bp, synthetic construct
  source 1..75: mol_type = other DNA
aagtaacttatccgtgctgacgccactgggtctcgaatcgttggtgaagcagacaacgatgagttacccgcctgc

SEQ ID NO: 751236 - DNA, 75 bp, synthetic construct
  source 1..75: mol_type = other DNA
aaaagcccgtcttgcagccctgctgccggagggatggtcacgggacatgacgacgttcctgtcactcagccagga

SEQ ID NO: 751237 - DNA, 75 bp, synthetic construct
  source 1..75: mol_type = other DNA
cacgggacatgacgacattcctgtcactcagtcaggaggtgctgttatccctgctcagtttctgcaccgcatgca

SEQ ID NO: 751238 - DNA, 75 bp, synthetic construct
  source 1..75: mol_type = other DNA
ggccgggatggaacgctggcagtggcaggatatgccattctggcaggtcatcgcagaggctggtatggcggcaag

SEQ ID NO: 751239 - DNA, 75 bp, synthetic construct
  source 1..75: mol_type = other DNA
cagtgcggttccgtgtcagggaacgcagtcgccataaatccgcactggtcatgcagaagtacagccgtcagcagg

SEQ ID NO: 751240 - DNA, 75 bp, synthetic construct
  source 1..75: mol_type = other DNA
ccgccacgttcagcgaatgctgaaactggcagaccttgccccagtgatcctagatgcgctggcagaagaccacat

SEQ ID NO: 751241 - DNA, 75 bp, synthetic construct
  source 1..75: mol_type = other DNA
ggcaggtgaatatctgcgcaagggcgcgcaggtctacatcgaggggcaactccgaacccgtagctgggaagataa

SEQ ID NO: 751242 - DNA, 75 bp, synthetic construct
  source 1..75: mol_type = other DNA
acggacagaccctgatgagccagatggcgttctgcacggcctgttcggtggacggtgtccagactcgcgacaacg

SEQ ID NO: 751243 - DNA, 75 bp, synthetic construct
  source 1..75: mol_type = other DNA
tccgaacccgtagctgggaagataacggtattacccgttacgtcactgaaatccttgtgaaaaccacgggcacca

SEQ ID NO: 751244 - DNA, 75 bp, synthetic construct
  source 1..75: mol_type = other DNA
tggtcatgcagaagtacagccgccagcaggcacgggaggcagagcagaaaacccgtgcgtaccaggcgctggttg

SEQ ID NO: 751245 - DNA, 75 bp, synthetic construct
  source 1..75: mol_type = other DNA
tgaacggaagccgcaggatatcgctgtctgacctgcgatttttcatgccgtccctgaccgcagaagaactgcgtg

SEQ ID NO: 751246 - DNA, 75 bp, synthetic construct
  source 1..75: mol_type = other DNA
tgacaaacagacgggggagatacgggagcagacagaatggcatcgcgtggtgctgttcggcaagctcgcggaagt

SEQ ID NO: 751247 - DNA, 75 bp, synthetic construct
  source 1..75: mol_type = other DNA
ggcaggtgaatatctgcgcaagggcgcgcaggtctacatcgaaggtcagcttcgcacccgtagctgggaggataa

SEQ ID NO: 751248 - DNA, 75 bp, synthetic construct
  source 1..75: mol_type = other DNA
gtggacgtaaggctgcgcagccggagcctcagccgcaaccaccggagggggaggattacgggttttcagacgata

SEQ ID NO: 751249 - DNA, 75 bp, synthetic construct
  source 1..75: mol_type = other DNA
ccgccacgttcagcgaatgctgaaactggctgaccttgccccagtgatcctagatgcgctggcagaagacctcat

SEQ ID NO: 751250 - DNA, 75 bp, synthetic construct
  source 1..75: mol_type = other DNA
ctcagccaggagatgctgttatccctgctcagtttctgcaccgcatgcagcctttacggtgtccagacccgcaat

SEQ ID NO: 751251 - DNA, 75 bp, synthetic construct
  source 1..75: mol_type = other DNA
ctgactggtctgtccgcgtgaaaattattccgcaggaactggcgacggcggcatcgatgaccgagaacggtcatc

SEQ ID NO: 751252 - DNA, 75 bp, synthetic construct
  source 1..75: mol_type = other DNA
cctggcgttacggtaatgtgtgtgtccagcgtggtgtgcagttgcgcagtgaggatgacgtggctgacgacgctg

SEQ ID NO: 751253 - DNA, 75 bp, synthetic construct
  source 1..75: mol_type = other DNA
ccggaagtccgttacatccccaacgggggcgcagtggcaaatctgcaggtggccacgtcagaaagctggcgtgac

SEQ ID NO: 751254 - DNA, 75 bp, synthetic construct
  source 1..75: mol_type = other DNA
aactgcgcactgacttgttcagcgacgacgagggtggctatgtggactgtgttgcgctcgatgctgccctgctgg

SEQ ID NO: 751255 - DNA, 75 bp, synthetic construct
  source 1..75: mol_type = other DNA
tggcgctgatggcagaacactctcgttttgctgccctgctgccggaaggatgggaacgggatatgacgacgttcc

SEQ ID NO: 751256 - DNA, 75 bp, synthetic construct
  source 1..75: mol_type = other DNA
ccgccacgttcagcgaatgctgaaactggccgaccttgccccagtgatcctcgatgcgctggcagaagaccacat

SEQ ID NO: 751257 - DNA, 75 bp, synthetic construct
  source 1..75: mol_type = other DNA
ccgccacgttcagcgaatgctgaaactggccgaccttgccccagtgatcctagatgcgctggcagaagaccccat

SEQ ID NO: 751258 - DNA, 75 bp, synthetic construct
  source 1..75: mol_type = other DNA
ccgccacgttcagcgaatgctgaaactggctgaccttgccccagtgatccttgatgcgctggcagaagaccacat

SEQ ID NO: 751259 - DNA, 75 bp, synthetic construct
  source 1..75: mol_type = other DNA
ccgccacgttcagcgaatgctgaaactggcggaccttgccccagtgatcctggatgcgctggcagaagaccacat

SEQ ID NO: 751260 - DNA, 75 bp, synthetic construct
  source 1..75: mol_type = other DNA
ccgccacgttcagcgaatgctgaaactggcggaccttgccccagtgatccttgatgcgctggcagaagacctcat

SEQ ID NO: 751261 - DNA, 75 bp, synthetic construct
  source 1..75: mol_type = other DNA
ccgccacgttcagcgaatgctgaaactggcggaccttgccccagtgatcctagatgcgctggcagaagaccgcat

SEQ ID NO: 751262 - DNA, 75 bp, synthetic construct
  source 1..75: mol_type = other DNA
aaggcaaaagaagacgagcttcttaaaagctgccagcgggcatatcaggcagccacagagagaagtgctgatatc

SEQ ID NO: 751263 - DNA, 75 bp, synthetic construct
  source 1..75: mol_type = other DNA
caaacttcttcggacacctgaaaaagccgcagattatcgcagccctgaatgaggccgggctgtccggtgccgcac

SEQ ID NO: 751264 - DNA, 75 bp, synthetic construct
  source 1..75: mol_type = other DNA
agcgatgacggggacggttatgtcgaccgcgtggcgctcgatgccgccctgctggaaaaactccaggctgtcgca

SEQ ID NO: 751265 - DNA, 75 bp, synthetic construct
  source 1..75: mol_type = other DNA
ccgtcaccaaacgttgctgatgcattcattatggccttcgcgccaatcgatacatcgctggatatctgggaacag

SEQ ID NO: 751266 - DNA, 75 bp, synthetic construct
  source 1..75: mol_type = other DNA
actggaactgacaacacctcatcgcgattttgaccgtaacggacgtgtgatggtcgaaagtaaaaaagacctcgc

SEQ ID NO: 751267 - DNA, 75 bp, synthetic construct
  source 1..75: mol_type = other DNA
catccgtaaagagggctcagagtgctggtttatctttaaccccggactggtgactgatttcgtgtggcgtaactt

SEQ ID NO: 751268 - DNA, 75 bp, synthetic construct
  source 1..75: mol_type = other DNA
gaaggatgggaacgggatatgacgacgttcctgtcactcagccaggaggtgctgttatccctgctcagcttctgt

SEQ ID NO: 751269 - DNA, 75 bp, synthetic construct
  source 1..75: mol_type = other DNA
ctgctggaaaaactccaggctgtcgcagagttccttcgggaagccgagggctggggatggtgcgccggacgcatg

SEQ ID NO: 751270 - DNA, 75 bp, synthetic construct
  source 1..75: mol_type = other DNA
gattccgcaggagctggcgactgcggcatcaatgactgaaaacggtcatcgtcgggatatgcaccctgccgaaca

SEQ ID NO: 751271 - DNA, 75 bp, synthetic construct
  source 1..75: mol_type = other DNA
ccttcgggaagccgaaggctgggaatggtgcgccggacgtatggagcctgttggttcctgccgtgaggatgccgg

SEQ ID NO: 751272 - DNA, 75 bp, synthetic construct
  source 1..75: mol_type = other DNA
ccattcgtcgtctggtgaccgaaagtgaagtggcggtggcagggaacagtaaattccgcttcgtgggggctgatg

SEQ ID NO: 751273 - DNA, 75 bp, synthetic construct
  source 1..75: mol_type = other DNA
ctggcactgctggcatggacgctctgcctgaatgtgtttggcagcggagcgtacagtaaaccagcacaagtcagc

SEQ ID NO: 751274 - DNA, 75 bp, synthetic construct
  source 1..75: mol_type = other DNA
gaagaggcccacgcgctgacggaataccagtggaagatactggagccaaccatccgtaaagagggatcagagtgc

SEQ ID NO: 751275 - DNA, 75 bp, synthetic construct
  source 1..75: mol_type = other DNA
ccgacagcgttaacgtgcaggcgctgaacatggggcgaattgtcgttgacgtcgatggtgttaatctcattgaac

SEQ ID NO: 751276 - DNA, 75 bp, synthetic construct
  source 1..75: mol_type = other DNA
tgcggtccggagctccaactttacgctgtacgaagattattcaaaccggtttcatgaaacgcttgaggggtttgc

SEQ ID NO: 751277 - DNA, 75 bp, synthetic construct
  source 1..75: mol_type = other DNA
caggaaggggcccctccggcggcaccgggtatctgtgaggcggggtgcatggcgcacgtgcgcagaaagttcatg

SEQ ID NO: 751278 - DNA, 75 bp, synthetic construct
  source 1..75: mol_type = other DNA
acttttctcctcaggcagccagaatctggacggactattacaacaatgtggaatcgaagatgtcggttctggggc

SEQ ID NO: 751279 - DNA, 75 bp, synthetic construct
  source 1..75: mol_type = other DNA
ttattcgccggttcactgatggccgggaaccgcgcggcacagataatgagccttctggaaacggcaaaacgtaat

SEQ ID NO: 751280 - DNA, 75 bp, synthetic construct
  source 1..75: mol_type = other DNA
cgatagtgaatgacctgtttgcctggcctgaagagcaggagccgtgctgtccgcccgacggaccactaaacaaag

SEQ ID NO: 751281 - DNA, 75 bp, synthetic construct
  source 1..75: mol_type = other DNA
ctcgctaagacattggctttattaattttttatccacacccccatgtcaaaatgataccccctccccctgtcagg

SEQ ID NO: 751282 - DNA, 75 bp, synthetic construct
  source 1..75: mol_type = other DNA
acttcgataatctgccgcattgcatgacggtaaacgaagctcttaatgcggttttagccaaaaataaagataacg

SEQ ID NO: 751283 - DNA, 75 bp, synthetic construct
  source 1..75: mol_type = other DNA
actccattctgggtctggccgtagaacctgagcagtatcaggcactgaacccgttctggatcatcatcggtagtc

SEQ ID NO: 751284 - DNA, 75 bp, synthetic construct
  source 1..75: mol_type = other DNA
aagcggggtgtctggcgcacgtgcgcagaaagttcatggagctgtacaggatgaacggcagtccgggagcgcgga

SEQ ID NO: 751285 - DNA, 75 bp, synthetic construct
  source 1..75: mol_type = other DNA
tcagcaggattttcggatgaagcaggccacgctgtccccacggtataccactcgctggaacgagctccttgtcgt

SEQ ID NO: 751286 - DNA, 75 bp, synthetic construct
  source 1..75: mol_type = other DNA
attccggcgatggcgtgatctttttcacggatatcgcgggcgcagcgccttatcgcgttgcgtctttattaagcc

SEQ ID NO: 751287 - DNA, 75 bp, synthetic construct
  source 1..75: mol_type = other DNA
gattccgcaggagctggcgacagctgcatcaatgactgaaaacggtcatcgtcgggatatgcaccctgccgaaca

SEQ ID NO: 751288 - DNA, 75 bp, synthetic construct
  source 1..75: mol_type = other DNA
gatgtgcgggttatccgcaacctgattacggaaagtgaagtggcagtgaaggacaacactaaattccgcttcgtg

SEQ ID NO: 751289 - DNA, 75 bp, synthetic construct
  source 1..75: mol_type = other DNA
aagccggtctggcagcaaaggaggccggtcacgctgtccgtgagatggagcggtggatggtgccgaacaaactcc

SEQ ID NO: 751290 - DNA, 75 bp, synthetic construct
  source 1..75: mol_type = other DNA
agtgatgcgtttctgccaggcgctgatgaccgagctttatcgtcatctgggcgcggatactgacgttccggcagg

SEQ ID NO: 751291 - DNA, 75 bp, synthetic construct
  source 1..75: mol_type = other DNA
atggcggacaatatcaacgccttgattgccagcaaaaacagcttattgacggtatcgctcacgaactgcgaacac

SEQ ID NO: 751292 - DNA, 75 bp, synthetic construct
  source 1..75: mol_type = other DNA
cgcacggtgccgtattctgtggagtccgtcagcgaactggcagagtccattaaaggtgtcggcctgctgcagaat

SEQ ID NO: 751293 - DNA, 75 bp, synthetic construct
  source 1..75: mol_type = other DNA
ctttcacatgcgtgactggtggcagccgacaaaagcaaacttcttcggacacctgaaaaagccgcagattatcga

SEQ ID NO: 751294 - DNA, 75 bp, synthetic construct
  source 1..75: mol_type = other DNA
ccgtagctgggaagataacggtatcacccgttacgtcactgaaattcttgttaagaccacgggcaccgtgcagat

SEQ ID NO: 751295 - DNA, 75 bp, synthetic construct
  source 1..75: mol_type = other DNA
gcgggttatccgcaatctgattacggaaagtgaagtggcggtggcggggaacagcaaattccgcttcgtgggggc

SEQ ID NO: 751296 - DNA, 75 bp, synthetic construct
  source 1..75: mol_type = other DNA
cctgcacaaatcggtgatttgctgggctattcgccccgccacgttcagcgaatgctgaaactggcagaccttgcg

SEQ ID NO: 751297 - DNA, 75 bp, synthetic construct
  source 1..75: mol_type = other DNA
aaaagctctccaacaataccgcctgcgtcttcaccggtaagggcctttcatttggcggcagtcttattcgcccgg

SEQ ID NO: 751298 - DNA, 75 bp, synthetic construct
  source 1..75: mol_type = other DNA
gcgtgatccagtttcgcgtggtgtgggttgatgatcgcaatcaggtacaagttaaccgtgcctggcgtgtccagt

SEQ ID NO: 751299 - DNA, 75 bp, synthetic construct
  source 1..75: mol_type = other DNA
tgccctgactaccctgccgatgggcggtggtaaaggcggtagcgattttgacccgaaaggtaaaagcgaaggcga

SEQ ID NO: 751300 - DNA, 75 bp, synthetic construct
  source 1..75: mol_type = other DNA
agccgccagcaggcgagggaggcagagcagaaagcccgtgcgtaccaggagctggtcgctcaggctgaaatcgaa

SEQ ID NO: 751301 - DNA, 75 bp, synthetic construct
  source 1..75: mol_type = other DNA
aaacgcctgcacaaatcggtgatttgctgggctattcaccccgccacgttcagcgaatgctgaaactggcagacc

SEQ ID NO: 751302 - DNA, 75 bp, synthetic construct
  source 1..75: mol_type = other DNA
gctgcactcaacatgctggcagagcgtggcatccttacggctgactggcctgtacgcgtgaaggttattccgcag

SEQ ID NO: 751303 - DNA, 75 bp, synthetic construct
  source 1..75: mol_type = other DNA
gcgctcgatgctgccctgctggaaaaactccaggctgtcgctgaacaccttcgggaagccgaaggctgggaatgg

SEQ ID NO: 751304 - DNA, 75 bp, synthetic construct
  source 1..75: mol_type = other DNA
tattccgcaggagctggcgacagcggcatcaatgactgaaaacggtcatcgtcgggatatgcaccctgccgaaca

SEQ ID NO: 751305 - DNA, 75 bp, synthetic construct
  source 1..75: mol_type = other DNA
atgtcagttacagagtttaagacaaaaacggagcgtaaatccagccgtaaatcggcaaaagaacaggaaaacgcc

SEQ ID NO: 751306 - DNA, 75 bp, synthetic construct
  source 1..75: mol_type = other DNA
ccttcgggaagctgaaggctgggaatggtgcgccggacgcatggagcctgtcggtttctgccgtgaggatgccgg

SEQ ID NO: 751307 - DNA, 75 bp, synthetic construct
  source 1..75: mol_type = other DNA
aaactggtcgtaaatccagccgtaaaccatcaaaagaacaggaaaccgccctgtctgccctgctggcgcagacgg

SEQ ID NO: 751308 - DNA, 75 bp, synthetic construct
  source 1..75: mol_type = other DNA
tgctcagtttctgcactgcatgcagcatccacggcgttcagacccgtgagtgtggtcacacgtcacgcagtccgc

SEQ ID NO: 751309 - DNA, 75 bp, synthetic construct
  source 1..75: mol_type = other DNA
ctgcctccttccccttcccggcgatgcagcagagcatttgttcccgtcagtgtggttccgtgtcagggaacgcag

SEQ ID NO: 751310 - DNA, 75 bp, synthetic construct
  source 1..75: mol_type = other DNA
ccgacctgctggaagcagaaatgaagctgatgcgctgcatggcgaaggtcagagcgtggacgccggagatgcgtg

SEQ ID NO: 751311 - DNA, 75 bp, synthetic construct
  source 1..75: mol_type = other DNA
ggacaacactaaattccgctttgtgggggctgatgccttctcgccagatgaactgcgcaccgatttgttcagcga

SEQ ID NO: 751312 - DNA, 75 bp, synthetic construct
  source 1..75: mol_type = other DNA
gtttgaagcggcctgccagtcaggatggggcggtaaaccggatgtgcgggttatccgcaacctgattacggaaag

SEQ ID NO: 751313 - DNA, 75 bp, synthetic construct
  source 1..75: mol_type = other DNA
ggggcgtcgcctggctgcccttaactatcttgcagaaaatggtacatacagcgccgaccagggtgtggcggtcaa

SEQ ID NO: 751314 - DNA, 75 bp, synthetic construct
  source 1..75: mol_type = other DNA
tgaccgaaagtgaagtggcggtggcggggaacactaaattccgctttgtgggggctgatgccttctcgccagatg

SEQ ID NO: 751315 - DNA, 75 bp, synthetic construct
  source 1..75: mol_type = other DNA
aaaaagatatggtgattggtccggtacgtttgctggcgaagagcggcggcaagtcgggtgactttaaggtggaag

SEQ ID NO: 751316 - DNA, 75 bp, synthetic construct
  source 1..75: mol_type = other DNA
tctgcactttttgaacaggcactggcgggccatattggtattcgtagtgggcgtattgcgcgtgaggcggcaact

SEQ ID NO: 751317 - DNA, 75 bp, synthetic construct
  source 1..75: mol_type = other DNA
aaactggccggactggctcctgcggttctggaggcactggcaaataatgaactgaccaccgaacactgccatgcg

SEQ ID NO: 751318 - DNA, 75 bp, synthetic construct
  source 1..75: mol_type = other DNA
ttgtgtcatggaacaatggcgaagtcgaggttcagcgcggtgttgtgctgaaagcacaggtcactgagaacagtg

SEQ ID NO: 751319 - DNA, 75 bp, synthetic construct
  source 1..75: mol_type = other DNA
cgcagcgaggatgatgcggctgacgacgctgaccgcacggaacaggtgcaggagaaagcggcggtggaggaaatc

SEQ ID NO: 751320 - DNA, 75 bp, synthetic construct
  source 1..75: mol_type = other DNA
attatgtttttagtacctgttgcctttgttgcggctgagctagctacaacatatccacaaaaagggggggcattt

SEQ ID NO: 751321 - DNA, 75 bp, synthetic construct
  source 1..75: mol_type = other DNA
ctggtcgtgcatactctgcctggtgaccgttacggtgtcgccgcaggtggtcgccgactggcagcactcaacatg

SEQ ID NO: 751322 - DNA, 75 bp, synthetic construct
  source 1..75: mol_type = other DNA
cgcagcgaggatgatgcggctgacgacgctgaccgcacggaacaggtgcgggagaaagcggcagtggaggaaatc

SEQ ID NO: 751323 - DNA, 75 bp, synthetic construct
  source 1..75: mol_type = other DNA
cgcagcgaggatgatgcggctgacgacgctgaccgcacggaacaggtgcgggaaaaagcggcggtggaggaaatc

SEQ ID NO: 751324 - DNA, 75 bp, synthetic construct
  source 1..75: mol_type = other DNA
cgcagcgaggatgatgcggctgacgacgctgaccgcacggaacaggtgctggataaagcggcggtggaggaaatc

SEQ ID NO: 751325 - DNA, 75 bp, synthetic construct
  source 1..75: mol_type = other DNA
atgacgctattaaggtttatcgtcagttacttggcgggccatattggtattcgtagtgggcgtattgcgcgtgag

SEQ ID NO: 751326 - DNA, 75 bp, synthetic construct
  source 1..75: mol_type = other DNA
gattgccggattccgcgcaatggcgcaggaaggcaaaacacctgcgcaaatcggtgatttgctgggctattcacc

SEQ ID NO: 751327 - DNA, 75 bp, synthetic construct
  source 1..75: mol_type = other DNA
tggtgtcctggcgttacggtaatgtgtgtgtccagcgtggtgtgcagttgcgcagtgaggatgacgtggctgacg

SEQ ID NO: 751328 - DNA, 75 bp, synthetic construct
  source 1..75: mol_type = other DNA
caccaccgaacactgtcaggcgctggcgctggagaacgataccgcgcgtcaggtacaggtgtttgaagctgcctg

SEQ ID NO: 751329 - DNA, 75 bp, synthetic construct
  source 1..75: mol_type = other DNA
ctgaacgaactgatggttctctacgaggaaccggataccccgcgagaggaatctgacctgctggaagcagaaatg

SEQ ID NO: 751330 - DNA, 75 bp, synthetic construct
  source 1..75: mol_type = other DNA
ggggaacactaaattccgcttcgtgggggctgatgccttctcgccagatgaactgcgcactgatttgttcagcga

SEQ ID NO: 751331 - DNA, 75 bp, synthetic construct
  source 1..75: mol_type = other DNA
aacataccgctgtctgccggagccggaagcggtgctgacggaggcggaagaagaacgcctgaacgaactgatgac

SEQ ID NO: 751332 - DNA, 75 bp, synthetic construct
  source 1..75: mol_type = other DNA
cgaaaatatgaatacggtctacgaacagaagaccgaatgcgcaagttttgacgtgatgaacaaacagggaagcat

SEQ ID NO: 751333 - DNA, 75 bp, synthetic construct
  source 1..75: mol_type = other DNA
cgggccatattggtattcgcagtgggcgtattgcgcgtgaggcggcaactatcctgattgagaaaggaatcgaag

SEQ ID NO: 751334 - DNA, 75 bp, synthetic construct
  source 1..75: mol_type = other DNA
cggtgccggtcatgtagatgaaaccggattcggttctgcgctgttctacacctatatctgcattgataaagatct

SEQ ID NO: 751335 - DNA, 75 bp, synthetic construct
  source 1..75: mol_type = other DNA
cgacgagggtggctatgtggactgcgtggcgctcgatgccgccctgctggaaaaactccgggctgttgcagagtc

SEQ ID NO: 751336 - DNA, 75 bp, synthetic construct
  source 1..75: mol_type = other DNA
agaaaccggattcggttctgcgctgttctacacctatatctgcattgataaagatcggttgatagaaaacctcgg

SEQ ID NO: 751337 - DNA, 75 bp, synthetic construct
  source 1..75: mol_type = other DNA
cgcttaaagtttccccaaccggtaaacaaaatagctttgccagccgtgcctatgcttcctgggcgctggcggaaa

SEQ ID NO: 751338 - DNA, 75 bp, synthetic construct
  source 1..75: mol_type = other DNA
cgtgactgatgacgctgaccgcacggaacaggtgcaggagaaagcgtcagtggaggaaatcagtctgccgttgct

SEQ ID NO: 751339 - DNA, 75 bp, synthetic construct
  source 1..75: mol_type = other DNA
cgatgacggggacggttatgtcgaccgcgtggcgctcgatgccgccctgctggaaaaactccaggctgtcgcgga

SEQ ID NO: 751340 - DNA, 75 bp, synthetic construct
  source 1..75: mol_type = other DNA
cgcgatcggtcaaattgccatccaactggcaaaacgcgctggcgcgtcggtggtaattggcgtcgatcctattac

SEQ ID NO: 751341 - DNA, 75 bp, synthetic construct
  source 1..75: mol_type = other DNA
accacgggcaccatgcagatgctggggagtgcaccacagcagaacgctcaggcgcaaccgcagcctcagcagaat

SEQ ID NO: 751342 - DNA, 75 bp, synthetic construct
  source 1..75: mol_type = other DNA
cgcgatgccaacgtgcgcgtgggtgattttgtggtggtggtagggcttggcgcgattggtcaaattgccattcaa

SEQ ID NO: 751343 - DNA, 75 bp, synthetic construct
  source 1..75: mol_type = other DNA
aacataccgctgtctgccggagccggaagcggtgctgacggaggcagaagaagaacgcctgaacgaactgatggc

SEQ ID NO: 751344 - DNA, 75 bp, synthetic construct
  source 1..75: mol_type = other DNA
cgcacggtgccgtattccgcagagtccgtcagtgaactggctgattccattaagggcgttggcctgttacagaat

SEQ ID NO: 751345 - DNA, 75 bp, synthetic construct
  source 1..75: mol_type = other DNA
aagatattcgtaatctccagtgggatatcatggcgaccgccagcatcttacaacaatgggatttggttcgtgcta

SEQ ID NO: 751346 - DNA, 75 bp, synthetic construct
  source 1..75: mol_type = other DNA
gatccagaaaaagacgtagaggtattccgtcgtgcttacctgaacacgccagatgatgcggaattgctgggcaaa

SEQ ID NO: 751347 - DNA, 75 bp, synthetic construct
  source 1..75: mol_type = other DNA
cagcagcttttgattagccgtgaagaagatattcgcaatctccagtgggatatcatggcgaccgccagcatctta

SEQ ID NO: 751348 - DNA, 75 bp, synthetic construct
  source 1..75: mol_type = other DNA
gggcagccacagagtgctgacgcgacgaaaaaaagtggcgcgaaaacgaaaggccgtggacgtaaggccgcgcag

SEQ ID NO: 751349 - DNA, 75 bp, synthetic construct
  source 1..75: mol_type = other DNA
gcagaagaaggacatgccatcaccgattatcagcagattggcgatgcagcgtggagtatcaccgttcaaaaagcc

SEQ ID NO: 751350 - DNA, 75 bp, synthetic construct
  source 1..75: mol_type = other DNA
aacgggggcgcagtggcaaacctgcaggtggccacgtctgaaagctggcgcgacaaacagacgggggagatgcgg

SEQ ID NO: 751351 - DNA, 75 bp, synthetic construct
  source 1..75: mol_type = other DNA
gcgcaccgaagcatgggacggaagtggtcgatttccgcgctgccagtccgtttatcgatgaagactttaacggtg

SEQ ID NO: 751352 - DNA, 75 bp, synthetic construct
  source 1..75: mol_type = other DNA
ttacgtcactgaaattcttgttaagaccacgggcaccatgcagatgctggggagtgcaccacagcagaacgctca

SEQ ID NO: 751353 - DNA, 75 bp, synthetic construct
  source 1..75: mol_type = other DNA
acgaaaggccgtggacgtaaggctgcgcagccggagcctcagccgcaaccaccggagggggaggattacgggttt

SEQ ID NO: 751354 - DNA, 75 bp, synthetic construct
  source 1..75: mol_type = other DNA
aggatatgccattctggcaggttatcgcggaagccagtctggcagcaaaggaggccggtcatgctgtccgtgaga

SEQ ID NO: 751355 - DNA, 75 bp, synthetic construct
  source 1..75: mol_type = other DNA
ccctgctggaaaaactccaggctgtcgctgaacaccttcgggaagccgaaggctgggaatggtgcgccggacgca

SEQ ID NO: 751356 - DNA, 75 bp, synthetic construct
  source 1..75: mol_type = other DNA
aagtttggctccatcatcgtggtgggtgtggtgttactggttgccgttatctggctgctgggcaagtccgccgac

SEQ ID NO: 751357 - DNA, 75 bp, synthetic construct
  source 1..75: mol_type = other DNA
aacgtcctgtttctctgccgcacacaatgctgttacgcctgtggcaggccgtgttctcactgtgtctgttgctct

SEQ ID NO: 751358 - DNA, 75 bp, synthetic construct
  source 1..75: mol_type = other DNA
aaagacaaccgctgggtgcctggctggatgtgtgcaccacgtccacagacggataccactgaacgcaccgataac

SEQ ID NO: 751359 - DNA, 75 bp, synthetic construct
  source 1..75: mol_type = other DNA
tggtggcagccgacaaaagcaaacttcttcggatacctgaaaaagccgcagattatcgcagctctgaatgatgcc

SEQ ID NO: 751360 - DNA, 75 bp, synthetic construct
  source 1..75: mol_type = other DNA
ctggcgaaacgcgctggcgcttcggtggtgattggcgtcgatcctatcgcccatcgctgtgatattgcccgtcgc

SEQ ID NO: 751361 - DNA, 75 bp, synthetic construct
  source 1..75: mol_type = other DNA
actccgggaggcagcgtgatgcggcaacaatcacacggattgcccgtgaactggctgaacgaccagattattttc

SEQ ID NO: 751362 - DNA, 75 bp, synthetic construct
  source 1..75: mol_type = other DNA
cagaagtacagccgtcagcaggctcgggaggcagagcagaaagcccgtgcgtaccaggcgctggtcgctcaggct

SEQ ID NO: 751363 - DNA, 75 bp, synthetic construct
  source 1..75: mol_type = other DNA
aacgccaaaattgtcttctctcgcgcgtgcagcgaaccgaacccggattatccgcgctggagccgcaagcgtatt

SEQ ID NO: 751364 - DNA, 75 bp, synthetic construct
  source 1..75: mol_type = other DNA
tgacaaacagactggggagatgcgggagcagaccgaatggcaacgcgtggtgctgttcggcaagctcgcggaagt

SEQ ID NO: 751365 - DNA, 75 bp, synthetic construct
  source 1..75: mol_type = other DNA
tgacaaacagactggggagatgcgggagcagacagaatggcaccgcgtggtgctgttcggcaagctcgcggaagt

SEQ ID NO: 751366 - DNA, 75 bp, synthetic construct
  source 1..75: mol_type = other DNA
cttcagtgggtgtatgccatcgatgtgctgattgaaacacagggcgaggtctgcctccttccccttcctggagat

SEQ ID NO: 751367 - DNA, 75 bp, synthetic construct
  source 1..75: mol_type = other DNA
agctcgcggaagtggcaggtgaatatctgcgcaagggcgcgcaggtctacatcgaaggtcagcttcgcacccgta

SEQ ID NO: 751368 - DNA, 75 bp, synthetic construct
  source 1..75: mol_type = other DNA
tgacaaacagacgggggagatgcgggagcagactgaatggcaccgcgtggtgctgttcggcaagctcgcggaagt

SEQ ID NO: 751369 - DNA, 75 bp, synthetic construct
  source 1..75: mol_type = other DNA
tgacaaacagaccggggagatgcgggagcagacggaatggcatcgcgtggtgctgttcggcaagctcgcggaagt

SEQ ID NO: 751370 - DNA, 75 bp, synthetic construct
  source 1..75: mol_type = other DNA
gagcgaataaacttattttatgagtatatttcaagaacgccaatattagggtggaatgagttatttgttttccca

SEQ ID NO: 751371 - DNA, 75 bp, synthetic construct
  source 1..75: mol_type = other DNA
tggaaaaactccaggctgtcgctgaacaccttcgggaagccgaaggctgggaatggtgcgccggacgcatggagc

SEQ ID NO: 751372 - DNA, 75 bp, synthetic construct
  source 1..75: mol_type = other DNA
atgtcagttacagagtctaaggcaaaaaccgggcgtaaatccagccgtaaactctcaaaagagcaggagactgtc

SEQ ID NO: 751373 - DNA, 75 bp, synthetic construct
  source 1..75: mol_type = other DNA
cttcagtggctgtatgccatcgatgtgctgattgaaacacagggcgaggtctgcctccttccgcttcctggagat

SEQ ID NO: 751374 - DNA, 75 bp, synthetic construct
  source 1..75: mol_type = other DNA
cttcagtggttgtatgccatcgatgtgctgattgaaacacagggcgaggtctgcctccttcctcttcctggggat

SEQ ID NO: 751375 - DNA, 75 bp, synthetic construct
  source 1..75: mol_type = other DNA
cttcagtggttgtatgccatcgatgtgctgattgaaacacagggcgaggtctgcctccttccacttcctggtgat

SEQ ID NO: 751376 - DNA, 75 bp, synthetic construct
  source 1..75: mol_type = other DNA
gagcagacagaatggcagcgcgtggtgctgttcggcaagctcgcggaagtggcaggcgaatatctgcgcaagggg

SEQ ID NO: 751377 - DNA, 75 bp, synthetic construct
  source 1..75: mol_type = other DNA
cttcgcacccgtagctgggaagataacggtatcacccgttacgtcactgaaattcttgttaagaccacgggcacc

SEQ ID NO: 751378 - DNA, 75 bp, synthetic construct
  source 1..75: mol_type = other DNA
gcgtgactggtggcagccgacaaaagcaaacttcttcggacacctgaaaaagccgcagattatcgatgccctgaa

SEQ ID NO: 751379 - DNA, 75 bp, synthetic construct
  source 1..75: mol_type = other DNA
gtgggggctgatgccttctcgccagatgaactgcgcactgacttgttcagcgacgacgagggtggctatgtggac

SEQ ID NO: 751380 - DNA, 75 bp, synthetic construct
  source 1..75: mol_type = other DNA
gtacagtaaaccagcacaaatcagcctggaatgtaaacattattcgctgaccagcgatgcgccgtcagggaagga

SEQ ID NO: 751381 - DNA, 75 bp, synthetic construct
  source 1..75: mol_type = other DNA
gaatgaggcaggactgtccggtgccgcacgggacgcggagaagatgaagaaaggtgatgcggctgaacatgcaga

SEQ ID NO: 751382 - DNA, 75 bp, synthetic construct
  source 1..75: mol_type = other DNA
ctgttcggcaagctcgcggaagtggcaggtgaatatctgcgcaagggcgcgcaggtctacatcgaaggtcagctt

SEQ ID NO: 751383 - DNA, 75 bp, synthetic construct
  source 1..75: mol_type = other DNA
gaaatccttgttaaaaccacgggcaccatgcagatgctgggacgtgccgcaggaactcagactcagccggacggc

SEQ ID NO: 751384 - DNA, 75 bp, synthetic construct
  source 1..75: mol_type = other DNA
gagcagacggaatggcaacgcgtggtgctgttcggcaagctcgcggaagtggcaggggaatatctgcgcaagggg

SEQ ID NO: 751385 - DNA, 75 bp, synthetic construct
  source 1..75: mol_type = other DNA
gagcagaccgaatggcagcgcgtggtgctgttcggcaagctcgcggaagtggcaggagaatatctgcgcaagggg

SEQ ID NO: 751386 - DNA, 75 bp, synthetic construct
  source 1..75: mol_type = other DNA
ctgattgaaacacagggcgaggtctgcctccttccccttcccggcgatgcagcagagcagttgttcccgtcagtg

SEQ ID NO: 751387 - DNA, 75 bp, synthetic construct
  source 1..75: mol_type = other DNA
ctggcatgcacgctggagtgaccgggtggcagagcatgacctggaaaccctgttctggcagtggggcgagcgttt

SEQ ID NO: 751388 - DNA, 75 bp, synthetic construct
  source 1..75: mol_type = other DNA
cgcgaaaacgaaaggccgtggacgtaaggccgcgcagccagagcctcagccgcaaccgccggagggggaggatta

SEQ ID NO: 751389 - DNA, 75 bp, synthetic construct
  source 1..75: mol_type = other DNA
cagcgaatgctgaaactggctgaccttgcgcctgtcatcctcgatgcgctggcagaagaccgcatcaccaccgag

SEQ ID NO: 751390 - DNA, 75 bp, synthetic construct
  source 1..75: mol_type = other DNA
tggtgtcctggcgttatggcaacgtatgtgtccagcgtggtgtgcagttgcgcagtgaagatgacgcgactgacg

SEQ ID NO: 751391 - DNA, 75 bp, synthetic construct
  source 1..75: mol_type = other DNA
cagaaatgaagctgatgcgctgcatggcgaaggtcagagcgtggacgccggagatacgtgccggaagcggtgtgg

SEQ ID NO: 751392 - DNA, 75 bp, synthetic construct
  source 1..75: mol_type = other DNA
gtcgggatatgcaccctgccgaacagattgccggattccgcgcaatggcgcaggaaggcaaaacatctgcgcaga

SEQ ID NO: 751393 - DNA, 75 bp, synthetic construct
  source 1..75: mol_type = other DNA
cctggcggataagttcgacaagaaacgctatatgttactggcaattaccgccttcgccagcggttttattgccat

SEQ ID NO: 751394 - DNA, 75 bp, synthetic construct
  source 1..75: mol_type = other DNA
atggcactcactattggcgtcgtttttagccttggctttggcatcctggcggataagttcgacaaaaaacgctat

SEQ ID NO: 751395 - DNA, 75 bp, synthetic construct
  source 1..75: mol_type = other DNA
aaggcgatgcggctgaacatgcagagttccacatgaaagacaaccgctgggtgcctggctggatgtgtgcaccac

SEQ ID NO: 751396 - DNA, 75 bp, synthetic construct
  source 1..75: mol_type = other DNA
ctgcgcaccgatttgttcagcgatgacggggacggttatgtcgaccgcgtggcgctcgatgctgccctgctggaa

SEQ ID NO: 751397 - DNA, 75 bp, synthetic construct
  source 1..75: mol_type = other DNA
cagggaaggaaggtgccgcattcatggcgatgatggcagaaaaagccgtcttgccgccctgctgccggatggatg

SEQ ID NO: 751398 - DNA, 75 bp, synthetic construct
  source 1..75: mol_type = other DNA
gataacgattaccgcacggaacaggtgcaggagaaagcctcagtggaggaaatcagtctgccgctgctgacgaaa

SEQ ID NO: 751399 - DNA, 75 bp, synthetic construct
  source 1..75: mol_type = other DNA
gattgtgcagttgtgtttttgattactgcaatacgactttccacccgttccggatacagacagaagagtatcaca

SEQ ID NO: 751400 - DNA, 75 bp, synthetic construct
  source 1..75: mol_type = other DNA
tgtgaggaatccgacctgctggaagctgaattgaagctgatgcgctgcatgagcaaggtcagtgcgtggacaccg

SEQ ID NO: 751401 - DNA, 75 bp, synthetic construct
  source 1..75: mol_type = other DNA
acgctgaccgcacagaacaggtgcaggagaaagcctccgtggaggaaatcagtctgccactgctgacgaaaatgt

SEQ ID NO: 751402 - DNA, 75 bp, synthetic construct
  source 1..75: mol_type = other DNA
ttaatgacggtgggcaccctctgttttgtcgtcggtctgatcgggtttatcttttccggcaacagcctgctactt

SEQ ID NO: 751403 - DNA, 75 bp, synthetic construct
  source 1..75: mol_type = other DNA
cggcaggtaaagtgcctccggcaaaagtgatggtgattggtgcgggtgttgcgggtctcgcggccattggtgcgg

SEQ ID NO: 751404 - DNA, 75 bp, synthetic construct
  source 1..75: mol_type = other DNA
ggctgggttagcttccttagttttatcgcggtgcttatagccagcattaatattttcggtggcttcactgtgact

SEQ ID NO: 751405 - DNA, 75 bp, synthetic construct
  source 1..75: mol_type = other DNA
aagtgaaaactgaggaaaaatgtgcctgctcaccgtggcgtaaatacgcgttgatggcgctggcaatcattcttt

SEQ ID NO: 751406 - DNA, 75 bp, synthetic construct
  source 1..75: mol_type = other DNA
tggaaacgtatgtgtccagcgtggtgtgcagttacgcagtgaggatgatgcggctgacgacgctgaccgcacgga

SEQ ID NO: 751407 - DNA, 75 bp, synthetic construct
  source 1..75: mol_type = other DNA
atgtaaacattattcgctgaccagcgatgcgccatcggggaaggaaggtgccgcattcatggcgctgatggcaga

SEQ ID NO: 751408 - DNA, 75 bp, synthetic construct
  source 1..75: mol_type = other DNA
gaatgttgcaccgaaagagttcctcggacacttcaccgtgttcgcgctggcgtgcgttgtgggctattacgtggt

SEQ ID NO: 751409 - DNA, 75 bp, synthetic construct
  source 1..75: mol_type = other DNA
atgaacgcacgttcacgggcactggttcccctcagcacagagcaacaggccgcatggcgggcggtggcggagacg

SEQ ID NO: 751410 - DNA, 75 bp, synthetic construct
  source 1..75: mol_type = other DNA
ctggtcgccgaaagttttattacaagataaagcactgttgtggtttacctgctctggttttctggcttcttttgt

SEQ ID NO: 751411 - DNA, 75 bp, synthetic construct
  source 1..75: mol_type = other DNA
ccatgccgccttcctcgctgtttgtcatcttagcgttggtgatcattgcggcgtggatgctgatgttaaaaggta

SEQ ID NO: 751412 - DNA, 75 bp, synthetic construct
  source 1..75: mol_type = other DNA
tgattggttataccgatctaccgggccgcctgccgacgcaatcttcccagctttacggcaccaaccttgtaaatc

SEQ ID NO: 751413 - DNA, 75 bp, synthetic construct
  source 1..75: mol_type = other DNA
tgtgccgcgtatctcacgcgcacaatcgctggacgcactcagttcgatggcgaacatcgctggttatcgcgccat

SEQ ID NO: 751414 - DNA, 75 bp, synthetic construct
  source 1..75: mol_type = other DNA
atgcgaattggcataccaagagaacggttaaccaatgaaacccgtgttgcagcaacgccaaaaacagtggaacag

SEQ ID NO: 751415 - DNA, 75 bp, synthetic construct
  source 1..75: mol_type = other DNA
gtgttaattcgtcgtttacgccataaactcagcgcggatttactggtgactcaacatggcgagggctatttccta

SEQ ID NO: 751416 - DNA, 75 bp, synthetic construct
  source 1..75: mol_type = other DNA
ctgttggatattaatttacctgatgaaaatggcctgatgttaacccgcgcgttgcgggaacgttcgacggtaggc

SEQ ID NO: 751417 - DNA, 75 bp, synthetic construct
  source 1..75: mol_type = other DNA
cctgcgagaacgctcaacggtggggattattctggttaccggacgcagcgatcggattgaccgtattgttgggct

SEQ ID NO: 751418 - DNA, 75 bp, synthetic construct
  source 1..75: mol_type = other DNA
cggttccatgctgggtatcgccggttatcaggtgattgagattgccattcagcgccgctttaaggcagggggaaa

SEQ ID NO: 751419 - DNA, 75 bp, synthetic construct
  source 1..75: mol_type = other DNA
ggagatgggcgcggacgattacgtcaccaagccgctggaactgcgcgaactggtggtgcgggtgaaaaatctgct

SEQ ID NO: 751420 - DNA, 75 bp, synthetic construct
  source 1..75: mol_type = other DNA
ggcgaatcgacctcgcgcgacaagctcaaccgcacactcaggacaactgctatcgctttgccggttattgcctga

SEQ ID NO: 751421 - DNA, 75 bp, synthetic construct
  source 1..75: mol_type = other DNA
gaaatcctggtttactcaattcgccgaacacctatccgatttgtttatcctgaaagaaaaaatccaggctaataa

SEQ ID NO: 751422 - DNA, 75 bp, synthetic construct
  source 1..75: mol_type = other DNA
gtgagtaaagaattgattcaggttaataccaaattaaccgctaataccatacgccgggaaacgtataacgggcgt

SEQ ID NO: 751423 - DNA, 75 bp, synthetic construct
  source 1..75: mol_type = other DNA
ggaagaattacagaccaaccagaaagcaattaaagaagaaattgcagcaaatgcaaataaagaagtagcagaaaa

SEQ ID NO: 751424 - DNA, 75 bp, synthetic construct
  source 1..75: mol_type = other DNA
gtcgattgaccatgacgctatcttgctgcatgagccgccagccgcttcgccggaacagggcgtaggcttaatggt

SEQ ID NO: 751425 - DNA, 75 bp, synthetic construct
  source 1..75: mol_type = other DNA
cagaaatgttgaattacgcggcaatcgtgtttatgtggaaaaatgggtggatgttgaaaccgccagccattcaga

SEQ ID NO: 751426 - DNA, 75 bp, synthetic construct
  source 1..75: mol_type = other DNA
tcgggaatattacccggaagctgaaatcattgctaattatcaatctctggaaggcacgctcgcaccgctgggcca

SEQ ID NO: 751427 - DNA, 75 bp, synthetic construct
  source 1..75: mol_type = other DNA
tgtcactgcctgcggtgtgcggtatcggctccatgctgggtatcgccggttatcaggtgattgagattgccattc

SEQ ID NO: 751428 - DNA, 75 bp, synthetic construct
  source 1..75: mol_type = other DNA
tattcgtggaattgccgtatttgcaccgtggatgaatgcgccagcaatttatcatcaaagtcacggagcatgcct

SEQ ID NO: 751429 - DNA, 75 bp, synthetic construct
  source 1..75: mol_type = other DNA
ccagggatgaacgcgcccggaatttatcatcaaagccacggagcatgtctggatcgacattctaaaaccatcact

SEQ ID NO: 751430 - DNA, 75 bp, synthetic construct
  source 1..75: mol_type = other DNA
ctggagtttgtgagggccgccgccaggcaacaatgtcagctgttagtttttccatcgctttctttactggggtgt

SEQ ID NO: 751431 - DNA, 75 bp, synthetic construct
  source 1..75: mol_type = other DNA
tcgacctttatcccaataggcgctcaacaccgactggaaaaccctggcaaaatcccattggaattgcttgaaatc

SEQ ID NO: 751432 - DNA, 75 bp, synthetic construct
  source 1..75: mol_type = other DNA
aaaaacaggctgaaatggcactgaatcagttgattaatcgttatcagttggaacatgcaggcaaaccggagaggc

SEQ ID NO: 751433 - DNA, 75 bp, synthetic construct
  source 1..75: mol_type = other DNA
cgtacaggaaatggtggataactggcataagagcgtaaggagccgcgcgcttccggaagaagcgatgacgggctg

SEQ ID NO: 751434 - DNA, 75 bp, synthetic construct
  source 1..75: mol_type = other DNA
cgagttgcaggttcagttggatcaaaaaggcgtttctctggaagtgagtcaggaagcacgtaactggctggccga

SEQ ID NO: 751435 - DNA, 75 bp, synthetic construct
  source 1..75: mol_type = other DNA
agcccgtttgaagtgcgccgctggcagcaggaattaaacagtccgaatgagcaaattcgccagctcgccattgat

SEQ ID NO: 751436 - DNA, 75 bp, synthetic construct
  source 1..75: mol_type = other DNA
aagtacgccgctggcagcaggagttgaacaacccaaacgagcaaatccgccagctcgccattgatgaaattggcc

SEQ ID NO: 751437 - DNA, 75 bp, synthetic construct
  source 1..75: mol_type = other DNA
tcaggcgaaagtgaacgtttgttttcaaaagttgcattcgaaaaaacagctgcaatggtaattcaatatagtctt

SEQ ID NO: 751438 - DNA, 75 bp, synthetic construct
  source 1..75: mol_type = other DNA
attctgttgcaggtgatggacaacggtacgctgaccgataacaacggacgcaaagcggacttccgtaacgtggtg

SEQ ID NO: 751439 - DNA, 75 bp, synthetic construct
  source 1..75: mol_type = other DNA
gtacgctgaccgataacaacggacgcaaagcggacttccgtaacgtggtgctggtgatgaccactaatgccgggg

SEQ ID NO: 751440 - DNA, 75 bp, synthetic construct
  source 1..75: mol_type = other DNA
agaaattaacgaaggcttagccgccaatatcgctaatgcagtagcagaggcattaaaaccagtacaggcaagcgt

SEQ ID NO: 751441 - DNA, 75 bp, synthetic construct
  source 1..75: mol_type = other DNA
caccgcgcagccggtactgccagcgcaaaatcaggctctaccgccggaagttcgtgcattccttaatgccgggag

SEQ ID NO: 751442 - DNA, 75 bp, synthetic construct
  source 1..75: mol_type = other DNA
tacccggaccgcgttcgtcaacgacgttcaacgccaatttgggtctatgagcgttatccggctgtcgatggtaaa

SEQ ID NO: 751443 - DNA, 75 bp, synthetic construct
  source 1..75: mol_type = other DNA
atgaccgtgggtactaacctggagacggtgtatttcaaaaaacatgggcaggtgctgggaaatagcgcaccgttt

SEQ ID NO: 751444 - DNA, 75 bp, synthetic construct
  source 1..75: mol_type = other DNA
ccgctgcgtgcagataccagcaaaccgaagctgactcagcaggatgtgaccgatctgatcgcctatctgaacaaa

SEQ ID NO: 751445 - DNA, 75 bp, synthetic construct
  source 1..75: mol_type = other DNA
cggcgatgaggttggcaataacaagttcggcagtaagaactactgtgctgaatctaacggtaacgctgccgacac

SEQ ID NO: 751446 - DNA, 75 bp, synthetic construct
  source 1..75: mol_type = other DNA
cgcgcgataccgcgaccttcaacctgccgtttatttcgctggggcaagtcggcgacggcaaactgatggttatcg

SEQ ID NO: 751447 - DNA, 75 bp, synthetic construct
  source 1..75: mol_type = other DNA
tgagctcgtcggcttacaccacgcttgcgggacttaatctgccgaaaccgcagcaagggccggaaaccattaaca

SEQ ID NO: 751448 - DNA, 75 bp, synthetic construct
  source 1..75: mol_type = other DNA
agtcggcttacaagacgctggcgtcgcttggcctgccgaaaccggaaaaagggccggaaaccattaatacggtta

SEQ ID NO: 751449 - DNA, 75 bp, synthetic construct
  source 1..75: mol_type = other DNA
cgaagaagaaccttgaggccagcaatttcactggtggcgtagcagaattcgctaaagatctggatacctttgcca

SEQ ID NO: 751450 - DNA, 75 bp, synthetic construct
  source 1..75: mol_type = other DNA
tggtgcaggctgcggatttaggcaccaacattcagcgtctgtatcagcatgagctctacttccggaccaatggtc

SEQ ID NO: 751451 - DNA, 75 bp, synthetic construct
  source 1..75: mol_type = other DNA
cagcaattacacgggcggactggagcaattcgctaaagatctggatacctttgccagctcgatgaatgatttcta

SEQ ID NO: 751452 - DNA, 75 bp, synthetic construct
  source 1..75: mol_type = other DNA
tgcgggacttaatctgccgaaaccgcagcaagggccggaaaccattaacaaggttaccgagcacgcgatgtcagc

SEQ ID NO: 751453 - DNA, 75 bp, synthetic construct
  source 1..75: mol_type = other DNA
gcgcgtaatgataaaaactactggctggccttcggcgaaaaacgcgcctgggataaaaatgagctggcgtacatt

SEQ ID NO: 751454 - DNA, 75 bp, synthetic construct
  source 1..75: mol_type = other DNA
cccggataactgaatcgttatccggcgtgggaggagcaattaaaggcgcggttggagcagcaagagagattcaga

SEQ ID NO: 751455 - DNA, 75 bp, synthetic construct
  source 1..75: mol_type = other DNA
gtgcgcgaccagggttattgatgctgctctccacgctgggatcgttcctcgccattggtctgtttggcctgatgc

SEQ ID NO: 751456 - DNA, 75 bp, synthetic construct
  source 1..75: mol_type = other DNA
tacagcgagcgtgaagggatgaaaggctggaacctgttccagttgatgcatcgtaaagcacgcggcgatgaggtt

SEQ ID NO: 751457 - DNA, 75 bp, synthetic construct
  source 1..75: mol_type = other DNA
cgttgaagaattacagaccaatcagaaagcgattaaagaagagatcgcagcaaacgcaaataaagaagaagcaga

SEQ ID NO: 751458 - DNA, 75 bp, synthetic construct
  source 1..75: mol_type = other DNA
aaccgacgcggcgcgtgaattatttcctgatgccgattacgtgtatgttgtggacttcactgataaagaagtgac

SEQ ID NO: 751459 - DNA, 75 bp, synthetic construct
  source 1..75: mol_type = other DNA
taatactgaccaggcgaaaccgttaatggcggtggcaatgaaagaaaacagttaccgtacgcttgagaaacaatt

SEQ ID NO: 751460 - DNA, 75 bp, synthetic construct
  source 1..75: mol_type = other DNA
agggactttgccggaagtgaaacctgatccaacaccaaacccggagccgacgccggacccagaacctacaccgga

SEQ ID NO: 751461 - DNA, 75 bp, synthetic construct
  source 1..75: mol_type = other DNA
agcaattacaagggtggtctgcaacaattcgctaaagatctggatacctttgccagctcgatgaatgacttctat

SEQ ID NO: 751462 - DNA, 75 bp, synthetic construct
  source 1..75: mol_type = other DNA
cgaagaagaacctgaatgccagcaattacactggcggactggagcaattcgctaacgatctggatacctttgcca

SEQ ID NO: 751463 - DNA, 75 bp, synthetic construct
  source 1..75: mol_type = other DNA
cttaacgccgacacggcaaaagcgatggtgcaggctgcggatttaggcaccaacattcagcgtctgtatcagcat

SEQ ID NO: 751464 - DNA, 75 bp, synthetic construct
  source 1..75: mol_type = other DNA
ctcctcggtgatcgagagtaaacgtttcgactcgctgtataagcaaatcgatctggcaccggaagagttcaaaaa

SEQ ID NO: 751465 - DNA, 75 bp, synthetic construct
  source 1..75: mol_type = other DNA
tgacggccagattcagggcgttatcaacaagctgtggggtgtggataaagattacaaatcagtgacgaaattcca

SEQ ID NO: 751466 - DNA, 75 bp, synthetic construct
  source 1..75: mol_type = other DNA
aatcatgcagattacagcagggacagttatagaaggaatagagacaaatttagtttccgtctacgcaaacattta

SEQ ID NO: 751467 - DNA, 75 bp, synthetic construct
  source 1..75: mol_type = other DNA
gctttttgccgactacgaactgctaccaccgttccgtcagcttgaccgtaacagttacgccctgacagaagccga

SEQ ID NO: 751468 - DNA, 75 bp, synthetic construct
  source 1..75: mol_type = other DNA
tctgtatccgggattattgcaggtgaaagatgcctgtaccgccgactcactggctgaatttgcctgggatctgtt

SEQ ID NO: 751469 - DNA, 75 bp, synthetic construct
  source 1..75: mol_type = other DNA
ggcaaaatcgttggcatcgatgcagtagtgctttccacccagcactctgaagatatcgatcagaaatccctgcaa

SEQ ID NO: 751470 - DNA, 75 bp, synthetic construct
  source 1..75: mol_type = other DNA
gtgccgatccgctggaacagggcgcgggtgaccagggtctgatgtttggctacgcaaccaatgaaaccgacgtgc

SEQ ID NO: 751471 - DNA, 75 bp, synthetic construct
  source 1..75: mol_type = other DNA
caccgtcagctttgatgaaaccttaaaaccgtttgtgcgcgatgtttccggcagccgcctgaaagacttacctaa

SEQ ID NO: 751472 - DNA, 75 bp, synthetic construct
  source 1..75: mol_type = other DNA
agtggctgtcggcggaaggggtggcggctcaggcggagcgtctgaagaaaaccgagtacggtgcctacctgaaac

SEQ ID NO: 751473 - DNA, 75 bp, synthetic construct
  source 1..75: mol_type = other DNA
gatggatcggcagagaacaacttttagcgcaggcaaaactgttcagcaaaaatgattatggtaagtatctaaaag

SEQ ID NO: 751474 - DNA, 75 bp, synthetic construct
  source 1..75: mol_type = other DNA
tacgacaaaaacgttgtggaaatggcgaagcaagtcaaaccatctgctcgcggtgaactcgaaattacgacactt

SEQ ID NO: 751475 - DNA, 75 bp, synthetic construct
  source 1..75: mol_type = other DNA
aaccgcatcggttatcgccgtgctgggtgccgcaggtttagctgtaggtttggcgttgcagggttctctgtctaa

SEQ ID NO: 751476 - DNA, 75 bp, synthetic construct
  source 1..75: mol_type = other DNA
aacagcgtcagtcattgctgtactcggtgccgcaggcttagctgttggtctggctttgcaggggtcactttctaa

SEQ ID NO: 751477 - DNA, 75 bp, synthetic construct
  source 1..75: mol_type = other DNA
gctccggcacgcgtttataccccatcacccagggcgtctccaagcagttgctgcctatctacgacaagccgatga

SEQ ID NO: 751478 - DNA, 75 bp, synthetic construct
  source 1..75: mol_type = other DNA
aagtgccttctgaacaactgactctgctggtacgtgagttcttcgacctgcgcccatacggtctgattcagatgc

SEQ ID NO: 751479 - DNA, 75 bp, synthetic construct
  source 1..75: mol_type = other DNA
cagatttatgtaggtaactttaaaggttatgggttgactaatgaaacggcctttgacttttgcaagaacgttacg

SEQ ID NO: 751480 - DNA, 75 bp, synthetic construct
  source 1..75: mol_type = other DNA
aagaaattaactttaagaaaattgaaggtgagaatttaagttttgacattaaaaatggatatgtgtggtatatga

SEQ ID NO: 751481 - DNA, 75 bp, synthetic construct
  source 1..75: mol_type = other DNA
aataattcgcatgtgatgctgattcctaagcggcatatcaactcctttgctgctcttgatcgagatacccggagt

SEQ ID NO: 751482 - DNA, 75 bp, synthetic construct
  source 1..75: mol_type = other DNA
tgccatgggcaacactggtgaccctgaccagtggctatattgggtattttattgcgaatgtgggactgaaggatc

SEQ ID NO: 751483 - DNA, 75 bp, synthetic construct
  source 1..75: mol_type = other DNA
ctggcaatctggcgacatggatccctcgtgaccagattgtcagaatggatatccggaggataagaaccgtacgtt

SEQ ID NO: 751484 - DNA, 75 bp, synthetic construct
  source 1..75: mol_type = other DNA
gattaaagaattatctttctctacattcaatctcaaaagactttctaaagaaatagaattcatctattccactct

SEQ ID NO: 751485 - DNA, 75 bp, synthetic construct
  source 1..75: mol_type = other DNA
ctcactaaaatgggagcggagaaaaaaatccctccaggtttaatgtggaaaactaaaaataacggtctgatcgag

SEQ ID NO: 751486 - DNA, 75 bp, synthetic construct
  source 1..75: mol_type = other DNA
tccccaaaggcttaatgtggcagaccaaaaacctcggacttctcgagctaaccaatgaaatcgcggcgcagtttg

SEQ ID NO: 751487 - DNA, 75 bp, synthetic construct
  source 1..75: mol_type = other DNA
aggcgaccagggtctgatgtttggctacgcaactaatgaaaccgacgtgctgatgccagcacctatcacttatgc

SEQ ID NO: 751488 - DNA, 75 bp, synthetic construct
  source 1..75: mol_type = other DNA
tggagcagttacgcgccattcaggatgcaaccggcgtcgggatggtattgattggcaacccacaccagttagcca

SEQ ID NO: 751489 - DNA, 75 bp, synthetic construct
  source 1..75: mol_type = other DNA
ggtgtgccgggtgttggtaaaaccgttgcagcccgtgaatacagtaaccgtgtatctaatacctggatggtgacc

SEQ ID NO: 751490 - DNA, 75 bp, synthetic construct
  source 1..75: mol_type = other DNA
tatgcgcctgttcgccaatgcccagcaccatatcgcggcggtggaagcactggacgatattcaggcggtgctcga

SEQ ID NO: 751491 - DNA, 75 bp, synthetic construct
  source 1..75: mol_type = other DNA
ccaccgccgttcccggtactgctgtggctgtggaactcggtgaaagtcgcggggatttctgcgattggtattgtg

SEQ ID NO: 751492 - DNA, 75 bp, synthetic construct
  source 1..75: mol_type = other DNA
gctgcgccagctcaataagctgtcgaataacattatacttgagccggtcgggcgcaacaccgcgccggccatcgc

SEQ ID NO: 751493 - DNA, 75 bp, synthetic construct
  source 1..75: mol_type = other DNA
ggctacggttacattcagcgcggcgtggcgctcaccgatagtgcccattccgcgtaccaggtggcccgctttgtg

SEQ ID NO: 751494 - DNA, 75 bp, synthetic construct
  source 1..75: mol_type = other DNA
cagcggtgacgcgtgggtgcacaacagcgaaaactgctacatcaacagcgacgagaagctggtggcggccatcgg

SEQ ID NO: 751495 - DNA, 75 bp, synthetic construct
  source 1..75: mol_type = other DNA
tcgttagttaaacctactggtactgtgactccaggcgcattttcaacttcagcaagttatgttgttgcttataaa

SEQ ID NO: 751496 - DNA, 75 bp, synthetic construct
  source 1..75: mol_type = other DNA
atacctacagttgatttaggtactgtatcaacgacgggaacacctgcttcagttcaatttaagcttgttccttca

SEQ ID NO: 751497 - DNA, 75 bp, synthetic construct
  source 1..75: mol_type = other DNA
ccgactctcgggccttgaaatccatgaaccgatggtcatctgtaacgaagagcatcgcttcctggtggctgaaca

SEQ ID NO: 751498 - DNA, 75 bp, synthetic construct
  source 1..75: mol_type = other DNA
cccgaacgtccggcacgcttcattaaagcactacaaaattattatcacacgccggaacttacggcggaacagttc

SEQ ID NO: 751499 - DNA, 75 bp, synthetic construct
  source 1..75: mol_type = other DNA
atgaacagtacacaccactatgagcagttaattgaaatttttaatagctgctttgccgatgaatttaatacctgt

SEQ ID NO: 751500 - DNA, 75 bp, synthetic construct
  source 1..75: mol_type = other DNA
accgtataaccgaatcgtctttgctcatggcttttatgccagcgcaattcatgagatttcgcactggtgtattgc

SEQ ID NO: 751501 - DNA, 75 bp, synthetic construct
  source 1..75: mol_type = other DNA
tggcggtggtagagcggattagtcatcgtgtggcggtgatgtatctcgggcaaattgttgaaattggtccacggc

SEQ ID NO: 751502 - DNA, 75 bp, synthetic construct
  source 1..75: mol_type = other DNA
gtcatgttctacatatgatgtgcgacctgaccattgcggctgaaaacgctattttcggtcagactggtccgaaag

SEQ ID NO: 751503 - DNA, 75 bp, synthetic construct
  source 1..75: mol_type = other DNA
acaggtgcgcaatgccttccgtcccctgacggtaaaagagatgattcaggcgctggcggatgcgcgttatgacga

SEQ ID NO: 751504 - DNA, 75 bp, synthetic construct
  source 1..75: mol_type = other DNA
tgtttgcattactgactggttgtcagtcagtagaaagtaaaatcgaagaactcccgacagttggttttgacccta

SEQ ID NO: 751505 - DNA, 75 bp, synthetic construct
  source 1..75: mol_type = other DNA
cagcgctttggcaccggtctgcccattttacagatccggcaaagagaagcgttatttacgccgctgcatgccccg

SEQ ID NO: 751506 - DNA, 75 bp, synthetic construct
  source 1..75: mol_type = other DNA
tggtccacacccccgccgctgcgcgtccgctgtggctgcgcctgcgtcgctcgtcgccctttacgctcacagtat

SEQ ID NO: 751507 - DNA, 75 bp, synthetic construct
  source 1..75: mol_type = other DNA
accgcccacccggaggcgggttacgacctgatcgttgccgtcaatgtgctccacgacgccagccatgtcgtccag

SEQ ID NO: 751508 - DNA, 75 bp, synthetic construct
  source 1..75: mol_type = other DNA
ctttcgcccgtatgcgctttccaggcaaagcgacgctgctgaaaggaatgctgattttccagatgttcccggcag

SEQ ID NO: 751509 - DNA, 75 bp, synthetic construct
  source 1..75: mol_type = other DNA
aaaaagcacgtttgtttattactcacctgctactgctactttttatcgcggcgattatgttcccgctgctgatgg

SEQ ID NO: 751510 - DNA, 75 bp, synthetic construct
  source 1..75: mol_type = other DNA
tatgactgcgtgatgcctgtttatcaattccggcgtgattttaagctggtgggccatcgtaaagccgtaaataag

SEQ ID NO: 751511 - DNA, 75 bp, synthetic construct
  source 1..75: mol_type = other DNA
gtattcttattgcagcggccattatgggctgctcaggaatggtatttgcagcaccacaaccggcaccatctgcag

SEQ ID NO: 751512 - DNA, 75 bp, synthetic construct
  source 1..75: mol_type = other DNA
attgagagttcaggcactgatgtctggttactcgccaagaatgggaccaaagaatttattgagttgtctgatctg

SEQ ID NO: 751513 - DNA, 75 bp, synthetic construct
  source 1..75: mol_type = other DNA
gtagttcctacggttggaatgcttggactttgcttcaacaatgaagatcaacttatgtttattaaccgtgctttt

SEQ ID NO: 751514 - DNA, 75 bp, synthetic construct
  source 1..75: mol_type = other DNA
gcggaactggcagcagacaatcaggcttttttactggcaaatcatggcccagtggtttgcggtgaaagcctgcaa

SEQ ID NO: 751515 - DNA, 75 bp, synthetic construct
  source 1..75: mol_type = other DNA
tcatggtagagtcttatttgtccagtacctcaataggtggtgggcttactgctgtgcggaaatgtagagcacatg

SEQ ID NO: 751516 - DNA, 75 bp, synthetic construct
  source 1..75: mol_type = other DNA
atgaaaaaaatgacccgctatgccgccattggtgttatttcggcttcattgattggtgcagttgtgtgtggcttt

SEQ ID NO: 751517 - DNA, 75 bp, synthetic construct
  source 1..75: mol_type = other DNA
tccttaaccaaaaccaggacgccaccaaacatttacactggagccaaccccgccgattgcgctacaatgcccgcc

SEQ ID NO: 751518 - DNA, 75 bp, synthetic construct
  source 1..75: mol_type = other DNA
aagccaatgaggatttagaaggcatctggtattacagttatcaccatttcggcgaaccacaagccgacagatatg

SEQ ID NO: 751519 - DNA, 75 bp, synthetic construct
  source 1..75: mol_type = other DNA
ttgacctctctggggagggttggtgagacaacggcaaaagtagaacaggcggccatcgaaacatttattgcgaga

SEQ ID NO: 751520 - DNA, 75 bp, synthetic construct
  source 1..75: mol_type = other DNA
aactgcttaaacccggcggccgtctgttaatagtgctgcctgatggtattttatgtaactccggcgaccgttatg

SEQ ID NO: 751521 - DNA, 75 bp, synthetic construct
  source 1..75: mol_type = other DNA
aggcggtatgttgttacaggtaatgccagcgcaagatgcccaacaggatgacttcaatcacctggcaacgctgac

SEQ ID NO: 751522 - DNA, 75 bp, synthetic construct
  source 1..75: mol_type = other DNA
attctcagccgtgaacgtctgctacgtatgctttctgcgcgtcgggtggaaaaccctgacctgcgcaccgtcgat

SEQ ID NO: 751523 - DNA, 75 bp, synthetic construct
  source 1..75: mol_type = other DNA
gccagttttgtacctgagtcagggccaggagtcatcaatcagcaccgatttacttgagacgattattgtctcgga

SEQ ID NO: 751524 - DNA, 75 bp, synthetic construct
  source 1..75: mol_type = other DNA
tgaacagccgaaaggaacggttgcagtttatccgaaaaagattggctatgttgaatatgttgatatggtgaaact

SEQ ID NO: 751525 - DNA, 75 bp, synthetic construct
  source 1..75: mol_type = other DNA
actgggaatcatacgtggacaaatgggtgcacagacttagatcttggaggtaatttaaactggggagagtccaca

SEQ ID NO: 751526 - DNA, 75 bp, synthetic construct
  source 1..75: mol_type = other DNA
agtatgagggagattcagataagagtccttaaaggactgtcgatgctgagtaagggttggcctgggatatttgct

SEQ ID NO: 751527 - DNA, 75 bp, synthetic construct
  source 1..75: mol_type = other DNA
gtcgcgcgcgatggtgccagtatgagggagattcagataagagtccttaaaggactgtcgatgctgagtaagggt

SEQ ID NO: 751528 - DNA, 75 bp, synthetic construct
  source 1..75: mol_type = other DNA
ggccctttcccctgcagtgaacgatcctggaaccgccattgatgtcattggcagaggtgttcgtatactttccac

SEQ ID NO: 751529 - DNA, 75 bp, synthetic construct
  source 1..75: mol_type = other DNA
ggtgagttaagacaggatgagactcacgagcgggacgagttgagactgtcgggtgagactgaaaaaatggcctcc

SEQ ID NO: 751530 - DNA, 75 bp, synthetic construct
  source 1..75: mol_type = other DNA
acctgctgattataaaagataatcagattgtgtatcgcaaagcctggggagcggcgaaaaagtacgatggcagcg

SEQ ID NO: 751531 - DNA, 75 bp, synthetic construct
  source 1..75: mol_type = other DNA
ccgcagcaaattgccgcgactgaactgaacggcaatacccgcgatggagtgatccacttcccgaatatccgcact

SEQ ID NO: 751532 - DNA, 75 bp, synthetic construct
  source 1..75: mol_type = other DNA
tgctgcttggatttatcgtcgagtcggtcaccggtcagccgcttgaccgctatgttgaagagtcgatttatcgcc

SEQ ID NO: 751533 - DNA, 75 bp, synthetic construct
  source 1..75: mol_type = other DNA
gatcggattgcgaaatatattccagggtttgccgacagcccgaacgatgcgatcaaaggcaaaaacacgctgcgg

SEQ ID NO: 751534 - DNA, 75 bp, synthetic construct
  source 1..75: mol_type = other DNA
caccaccgggacgctgtatgacctggcttccaataccaagatgtacgccactaacttcgccctgcaaaagctgat

SEQ ID NO: 751535 - DNA, 75 bp, synthetic construct
  source 1..75: mol_type = other DNA
ataccctgttctgacagaaagttcgccagagaaagcagggttcaacgtcgaacggcttaaccagatggatcgctg

SEQ ID NO: 751536 - DNA, 75 bp, synthetic construct
  source 1..75: mol_type = other DNA
ttgatgtgacgctggagcagcaaaacgaagatggcagcgtcgagttgctggaacgttgcccgccaagaatgggaa

SEQ ID NO: 751537 - DNA, 75 bp, synthetic construct
  source 1..75: mol_type = other DNA
atttgctggcgttacggggccgtatggaagcggcccagataagccagacattgaacactccgcagccaatgatta

SEQ ID NO: 751538 - DNA, 75 bp, synthetic construct
  source 1..75: mol_type = other DNA
actggtatgattttttactctatggcatcaccgccgcactggtgtttaatcgcgagtttttcccgcaagtaagcc

SEQ ID NO: 751539 - DNA, 75 bp, synthetic construct
  source 1..75: mol_type = other DNA
atgaaaagtaaccgtaaacgcctggtaagggcgtatgacaaagcgttaaaggcttttgatgatctgcgacacaat

SEQ ID NO: 751540 - DNA, 75 bp, synthetic construct
  source 1..75: mol_type = other DNA
ttctgatgcttttatggaaagtgcgccgctattaacacaagaacaagccgacgaagtagctaacgataacgttta

SEQ ID NO: 751541 - DNA, 75 bp, synthetic construct
  source 1..75: mol_type = other DNA
gagaaaaccgttgccgaagcgcgccgctatccgtccgagccacaagaaaatctgctctattttatggagaaaaat

SEQ ID NO: 751542 - DNA, 75 bp, synthetic construct
  source 1..75: mol_type = other DNA
aagcagaagaagacctggaggttatttgggactacagcttcaggcagttcggtgttgttcaggcggatgcgtata

SEQ ID NO: 751543 - DNA, 75 bp, synthetic construct
  source 1..75: mol_type = other DNA
gtcatcctgctggcaaaggatgtgatatataacgagtacttttttgatctgcggaagtcatttttcgtgagcgtt

SEQ ID NO: 751544 - DNA, 75 bp, synthetic construct
  source 1..75: mol_type = other DNA
atgacaacacgtataactttcaatatgaccagtgatgagacgctgcgaattgtggatgagtactgtcatacccac

SEQ ID NO: 751545 - DNA, 75 bp, synthetic construct
  source 1..75: mol_type = other DNA
aggaaaacgacgcaggagaaattgaccatatcccgatgcttaaaactttcaccgtgtttaacgttcagcaaatcg

SEQ ID NO: 751546 - DNA, 75 bp, synthetic construct
  source 1..75: mol_type = other DNA
gggaaaggcggcacggatttacaatcaattatagataattttacacatgcccaactcagaatcatatcaaacaag

SEQ ID NO: 751547 - DNA, 75 bp, synthetic construct
  source 1..75: mol_type = other DNA
ttcttcatcccgggtactctgggtgttgccctggccgtttgcttcggcttcgtgctgggtagcttcatgctgtaa

SEQ ID NO: 751548 - DNA, 75 bp, synthetic construct
  source 1..75: mol_type = other DNA
gccggagcggttccgcttcgcggacgcggcgaacttctacgccaccggcctgcatgagctggttcactggacggg

SEQ ID NO: 751549 - DNA, 75 bp, synthetic construct
  source 1..75: mol_type = other DNA
tccattgcgctggtgggcccggttgagttcgtgaccgcatcgtggcgccgcgccgtcctgtcgcttgaagaccac

SEQ ID NO: 751550 - DNA, 75 bp, synthetic construct
  source 1..75: mol_type = other DNA
tctatcgcgctggtcagccctgtggagtttggtaccgcgtcatggcgccgcgccgtcctgtcgctggaagaacac

SEQ ID NO: 751551 - DNA, 75 bp, synthetic construct
  source 1..75: mol_type = other DNA
cggagctgggaagtgctttactgatggcggacctggggattgatggagaggtacagcatgaaagctatattgctt

SEQ ID NO: 751552 - DNA, 75 bp, synthetic construct
  source 1..75: mol_type = other DNA
cagcgcatctaagcagggtttcagcgattcacgctggatgacctacaaacaggcacaggtagcaggtggacaggt

SEQ ID NO: 751553 - DNA, 75 bp, synthetic construct
  source 1..75: mol_type = other DNA
aattacgccactggcacggcttacagcggaatgaatatcatgttgctgtggtgcagcgcatctaaacagggtttc

SEQ ID NO: 751554 - DNA, 75 bp, synthetic construct
  source 1..75: mol_type = other DNA
cgagttccttggtaagccattagtccttgattcagaacatataaaagcctcattgcaagttaaacgaacccgaac

SEQ ID NO: 751555 - DNA, 75 bp, synthetic construct
  source 1..75: mol_type = other DNA
aaagcgcagctggaagtgaaaataggcgaaaccaatggtcgtctggaaggcgatcgtgacaaagtgcgttttgta

SEQ ID NO: 751556 - DNA, 75 bp, synthetic construct
  source 1..75: mol_type = other DNA
acggagatcacacgtaaccgtgcacaatattaccttgcctatgatgatcaggtcgtatggggcggggactatacg

SEQ ID NO: 751557 - DNA, 75 bp, synthetic construct
  source 1..75: mol_type = other DNA
aagctgtggcctcgctgttgacagtaaccatgtctgcgctgccgatacattcctacgctaacggtagccaagacc

SEQ ID NO: 751558 - DNA, 75 bp, synthetic construct
  source 1..75: mol_type = other DNA
gacgttgcagattggcggttctgaccagtgggggaacatcacctctggtatcgatctgactcgccgtctgcatca

SEQ ID NO: 751559 - DNA, 75 bp, synthetic construct
  source 1..75: mol_type = other DNA
agcgtctcaaccgtgaagatcaggggatttcgttcactgagttttcctacaacctgttgcagggttatgacttcg

SEQ ID NO: 751560 - DNA, 75 bp, synthetic construct
  source 1..75: mol_type = other DNA
gccggttgcgctggtaggcggcgcgacgggtctgattggcgacccgagcttcaaagctgccgagcgtaagctgaa

SEQ ID NO: 751561 - DNA, 75 bp, synthetic construct
  source 1..75: mol_type = other DNA
tgggcaaataccgccagaaggctcgaccattacgcttaaggtatggtgcaccaacggcgatataaccctggttgc

SEQ ID NO: 751562 - DNA, 75 bp, synthetic construct
  source 1..75: mol_type = other DNA
tcttcgggtaaaacaccgcagaatgtaacacttgaaaaatcagatggcagttacttcgggaaaaagagttatcag

SEQ ID NO: 751563 - DNA, 75 bp, synthetic construct
  source 1..75: mol_type = other DNA
tatatatatgttttagaaatacaattcatatatcggctgctgctggcttatttcttcttgcaaaactagagacgt

SEQ ID NO: 751564 - DNA, 75 bp, synthetic construct
  source 1..75: mol_type = other DNA
cagtttttgacacaagatatgaagtgtaccgatagcgcaaccgaagaggggggggatggaaatattgatcaagga

SEQ ID NO: 751565 - DNA, 75 bp, synthetic construct
  source 1..75: mol_type = other DNA
cagaaagtcagggtatcaaaactccagtgcgactttaatgtggggcaaatggaatgctggactgaccctcaaggg

SEQ ID NO: 751566 - DNA, 75 bp, synthetic construct
  source 1..75: mol_type = other DNA
agagtggattcttggtgggaagtttgcttttcgattcaccaagcaagttgaggaccaatggactccgcagacttg

SEQ ID NO: 751567 - DNA, 75 bp, synthetic construct
  source 1..75: mol_type = other DNA
cgaagtacaggaactgcgcagggaactttatcaggttaaacagtcagttaaggggatgcgtgacgggatgtttag

SEQ ID NO: 751568 - DNA, 75 bp, synthetic construct
  source 1..75: mol_type = other DNA
aagtcaccctttccaaaacacagcgtcgccttaaagtcggctatgtaggcatttcccacaccaaccgtaagacca

SEQ ID NO: 751569 - DNA, 75 bp, synthetic construct
  source 1..75: mol_type = other DNA
tggctgaaagaggccggatttgataccggacggggtgtcacggtgaagatttcggaggggggcctgaccatcatc

SEQ ID NO: 751570 - DNA, 75 bp, synthetic construct
  source 1..75: mol_type = other DNA
tgtataagcacggtcagcaagggctggcctatgaaatcgtcattaactctaacccgtgtatcgcttacttgatgg

SEQ ID NO: 751571 - DNA, 75 bp, synthetic construct
  source 1..75: mol_type = other DNA
ttgatgtgatgctggaacagcaaaacgaagacggcagcgtcgagttgctggaacgttgcccgccaagaatgggaa

SEQ ID NO: 751572 - DNA, 75 bp, synthetic construct
  source 1..75: mol_type = other DNA
atggacccgactggacgttcgacctgctggatgttttatctggcagagatagaccgggtggcgaaactctaccgg

SEQ ID NO: 751573 - DNA, 75 bp, synthetic construct
  source 1..75: mol_type = other DNA
tgcgggaagaactttatcaggttaaacaggcggttaaggggatgcggaacgggatgtttagtgtgctgaacgaga

SEQ ID NO: 751574 - DNA, 75 bp, synthetic construct
  source 1..75: mol_type = other DNA
atggctgaacacgatattacgccagaagtcaccatttccaaaacacagcgccgctataaagtcggctatgtcaga

SEQ ID NO: 751575 - DNA, 75 bp, synthetic construct
  source 1..75: mol_type = other DNA
gaagaccgtcgccagaacgaagatcttgaactgatcccgttcgcttatgtgcaggacgacatcgtcaaacatctt

SEQ ID NO: 751576 - DNA, 75 bp, synthetic construct
  source 1..75: mol_type = other DNA
ttcggaggggggcctgaccatcatcgctgacagtgacgaggtgcaggaactgcgggatgggatgtttagtgtgct

SEQ ID NO: 751577 - DNA, 75 bp, synthetic construct
  source 1..75: mol_type = other DNA
gcggccatccgactctgcccgtcgtgctgccagcacagcatcttcccaaccgcagcgacacgccagtgatcaaaa

SEQ ID NO: 751578 - DNA, 75 bp, synthetic construct
  source 1..75: mol_type = other DNA
agtacaggaactgcgcagggaactttatcaggttaaacagtcagttaaggggatgcgtgacgggatgtttagtgt

SEQ ID NO: 751579 - DNA, 75 bp, synthetic construct
  source 1..75: mol_type = other DNA
cctactccagcgtcggtatgccgattaactatccgcactggtcattcggtaaaaagtttatcgaaaccgaacgtc

SEQ ID NO: 751580 - DNA, 75 bp, synthetic construct
  source 1..75: mol_type = other DNA
gtgttaatagtaaaggtgagtgtacgctcagcggtgattctgatgacatgaagcactttatgcagaacgtcctgc

SEQ ID NO: 751581 - DNA, 75 bp, synthetic construct
  source 1..75: mol_type = other DNA
aactgcgaccttcaacctgccgtttatctcgctggggcaagtcggcaaaggcaagctgatggttatcggtaaccc

SEQ ID NO: 751582 - DNA, 75 bp, synthetic construct
  source 1..75: mol_type = other DNA
gtcgcaccggaatatctggaggagagcaacaaccaggcatgggcacgcggcggtgcgggtgaccgtctgctgatg

SEQ ID NO: 751583 - DNA, 75 bp, synthetic construct
  source 1..75: mol_type = other DNA
tgcaatcccgctgcgtgcagataccagcaaaccgaagctgactcagcaggatgtgaccgatctgatcgcctatct

SEQ ID NO: 751584 - DNA, 75 bp, synthetic construct
  source 1..75: mol_type = other DNA
tcagacgctttcgtctataccacaccgaagaagaaccttgaggccagcaattacaagggcggtctggaacaattc

SEQ ID NO: 751585 - DNA, 75 bp, synthetic construct
  source 1..75: mol_type = other DNA
cttaatctgccgaaaccggaaaaagggccggaaaccattaacaaggttaccgagcataagatgtctgccgagtaa

SEQ ID NO: 751586 - DNA, 75 bp, synthetic construct
  source 1..75: mol_type = other DNA
gtcaacacttgaaggctcacttgttcaagggactaagttaagtactgacattgccaacttaatatttttagaaga

SEQ ID NO: 751587 - DNA, 75 bp, synthetic construct
  source 1..75: mol_type = other DNA
ggaaaattaggtggaaattacacgagatatgtcgatgacataactattagtttcgaatcagaagttaataatgaa

SEQ ID NO: 751588 - DNA, 75 bp, synthetic construct
  source 1..75: mol_type = other DNA
aaccgcagcgacacgccggtgatcaaaatcagcgccaaatggctgagagaagcgggatttgagatcggcacgggc

SEQ ID NO: 751589 - DNA, 75 bp, synthetic construct
  source 1..75: mol_type = other DNA
cacgctggcgtcgctcaagctgccgaaaccggaacagggaccggaaaccattaatcaggttaccgagcataagat

SEQ ID NO: 751590 - DNA, 75 bp, synthetic construct
  source 1..75: mol_type = other DNA
atggtcgcaaaggtgagcgtctgagcagcgtcgatctggaacgtctgtaccagaacatgtcggtctggctgtgga

SEQ ID NO: 751591 - DNA, 75 bp, synthetic construct
  source 1..75: mol_type = other DNA
gggagttattaaaaatacatgagcttattaaacagcgtgttttttcggggatatcactcccggagtatattactg

SEQ ID NO: 751592 - DNA, 75 bp, synthetic construct
  source 1..75: mol_type = other DNA
gagcagaccgttgcgacggctgataccgccctgggccagcgaatcgacaacatcagcgtttctatggacggcatg

SEQ ID NO: 751593 - DNA, 75 bp, synthetic construct
  source 1..75: mol_type = other DNA
cgtgaagtgccgagcaagatgattggcaatctggtgatggaacaattgaaaaaactcgataaagtcgcctatatc

SEQ ID NO: 751594 - DNA, 75 bp, synthetic construct
  source 1..75: mol_type = other DNA
gctatacctgcaacgtgtacattcaggaccggaacgacgcctacacagtcctgcgtgattttgccgctatcttcc

SEQ ID NO: 751595 - DNA, 75 bp, synthetic construct
  source 1..75: mol_type = other DNA
ggaaactgaagcgcgcgcttctgctgtaagccagttgacggctgccactcaggccgcatctgacaaagctgattc

SEQ ID NO: 751596 - DNA, 75 bp, synthetic construct
  source 1..75: mol_type = other DNA
gtacaagcagctctggagtggcggtcagttgcttgctgttccgccagcgtacacaagccagcgttgcgcgtgctg

SEQ ID NO: 751597 - DNA, 75 bp, synthetic construct
  source 1..75: mol_type = other DNA
gtcgggcttgtggatatacagcgaacgccgatgtaaacggcgcttgcaacattttagcggcggggcacgccgtac

SEQ ID NO: 751598 - DNA, 75 bp, synthetic construct
  source 1..75: mol_type = other DNA
tctcgtgggcgagggttcatctgtacgccgccgtcggcagtgtctggtgtgtaatgaacgtttcaccacttttga

SEQ ID NO: 751599 - DNA, 75 bp, synthetic construct
  source 1..75: mol_type = other DNA
agatgatgcgacaatcgactgccaaagagacgcagacgaattagcagatgataacgtttactatatgatgtggtg

SEQ ID NO: 751600 - DNA, 75 bp, synthetic construct
  source 1..75: mol_type = other DNA
cttggatttatcgtcgagtcggttaccggtcagccgcttgaccgctatgttgaagagtcgatttatcgcccgctc

SEQ ID NO: 751601 - DNA, 75 bp, synthetic construct
  source 1..75: mol_type = other DNA
catatctacagcgatgtcggtaatgactccaacttattgatagtgttttatgttcagataatgcccgatgacttt

SEQ ID NO: 751602 - DNA, 75 bp, synthetic construct
  source 1..75: mol_type = other DNA
gatgattcgggccgatcaaattaatgaagcctatgagcgaatgctgcgcgctgatgaatcccctaatgattttta

SEQ ID NO: 751603 - DNA, 75 bp, synthetic construct
  source 1..75: mol_type = other DNA
tgggcggggacggtttatccctgcgtgccgggtcatgaaattgtggggcgcgtggtagccgttggtgatcaggta

SEQ ID NO: 751604 - DNA, 75 bp, synthetic construct
  source 1..75: mol_type = other DNA
gatgattcgggccgatcaaattaatgaagcctatgagcgaatgctgcgtgctgagagatcccctcataatttccc

SEQ ID NO: 751605 - DNA, 75 bp, synthetic construct
  source 1..75: mol_type = other DNA
ccgctatccgcagggcgttaagctcgatcaggaaaacagccgtatttttctgccgaaactgggctggatgcgcta

SEQ ID NO: 751606 - DNA, 75 bp, synthetic construct
  source 1..75: mol_type = other DNA
atgccagatggttcaattgaacagtggggacgaattagttttcctagtgaacacgggcctgtatccgccaatgtt

SEQ ID NO: 751607 - DNA, 75 bp, synthetic construct
  source 1..75: mol_type = other DNA
aagtcccggctccgtttgcaggcgtcgtgaaggaactgaaagtcaacgttggcgataaagtgaaaactggctcgc

SEQ ID NO: 751608 - DNA, 75 bp, synthetic construct
  source 1..75: mol_type = other DNA
taagcagcgtctttttctatcgggaaggggtctataacgctaaccaattgacctcaccggcaagcgacgaatttg

SEQ ID NO: 751609 - DNA, 75 bp, synthetic construct
  source 1..75: mol_type = other DNA
atatacctacaactttaacaggaaacatggataaacactatatccctgttttacaggatttaagaaaagcgatat

SEQ ID NO: 751610 - DNA, 75 bp, synthetic construct
  source 1..75: mol_type = other DNA
atgcgaaaaataaaaacaaaaatctacttgcctacagctttgacaggaaatatggataaacactatatccctgtt

SEQ ID NO: 751611 - DNA, 75 bp, synthetic construct
  source 1..75: mol_type = other DNA
taatgatagtcaggaagttagcggcgatcttcatcgggcattaccaaaagcagttaaattatttaaatattttct

SEQ ID NO: 751612 - DNA, 75 bp, synthetic construct
  source 1..75: mol_type = other DNA
agcccgtattggcgtaagcgcgacctgcgggggtacatccgtgaggttgcactgaacaccgcggattgcatggtc

SEQ ID NO: 751613 - DNA, 75 bp, synthetic construct
  source 1..75: mol_type = other DNA
tgacgttaaaaatgctatgctacaagcaaagaatgacaaccttaggtatctaacccagtactatttggttagtca

SEQ ID NO: 751614 - DNA, 75 bp, synthetic construct
  source 1..75: mol_type = other DNA
atgatccacagtagcgtaaagcgttggggaaattctcctgcagtgcggatcccggctacgttaatgcaggcgctc

SEQ ID NO: 751615 - DNA, 75 bp, synthetic construct
  source 1..75: mol_type = other DNA
caaacttatatttaggacaaattaaagatattgatgcggtcggcatattcaatgcatcttatgttttagctactg

SEQ ID NO: 751616 - DNA, 75 bp, synthetic construct
  source 1..75: mol_type = other DNA
attataccgccgatacagatattgaaaacaatattgtacataatatgtacacttattatgtttttctgtttatat

SEQ ID NO: 751617 - DNA, 75 bp, synthetic construct
  source 1..75: mol_type = other DNA
taaaggtcgctgcgactcaaaatatagcccgtattggcgtaagcgtgacctgcgggggtacatccgtgaggttgc

SEQ ID NO: 751618 - DNA, 75 bp, synthetic construct
  source 1..75: mol_type = other DNA
cagattactgtggaataatgatgtttcatggtctgacgataccagctcagcatggcaggcaatgtttgatcaaac

SEQ ID NO: 751619 - DNA, 75 bp, synthetic construct
  source 1..75: mol_type = other DNA
gatgcgccgtgatggtatagaacttaatggcgtggatatgcgcaacatacgaaccagagttcttgagttgctggc

SEQ ID NO: 751620 - DNA, 75 bp, synthetic construct
  source 1..75: mol_type = other DNA
caggaggccacgcagccggacagcgtgatagccgaaaattacgcgcgtgtggtggctgaggtgatgcgccgtgac

SEQ ID NO: 751621 - DNA, 75 bp, synthetic construct
  source 1..75: mol_type = other DNA
tggtgacgggcttaaccattgatacgggaaataatcagcaagtcctgttcacccgccaacctgatggtaatttca

SEQ ID NO: 751622 - DNA, 75 bp, synthetic construct
  source 1..75: mol_type = other DNA
gtgttttcgatttcagattaccgattattcacgacgcttatgacgaagaaaaaagcacataaacctggttcagcg

SEQ ID NO: 751623 - DNA, 75 bp, synthetic construct
  source 1..75: mol_type = other DNA
atgacagaagccgaaatactgggattaatccgccgcgttgccggaatcagccagcaggttgacgaacaggccacg

SEQ ID NO: 751624 - DNA, 75 bp, synthetic construct
  source 1..75: mol_type = other DNA
gcgtcatcgccgacttcgacgataaacaaatcgagcaagcattggctgatgtcaacgtccctattgttggcgttg

SEQ ID NO: 751625 - DNA, 75 bp, synthetic construct
  source 1..75: mol_type = other DNA
cgccagcagcaccgatgaaattcccgctcgaaaccgtggtgcgttatcaaaatcaggcgctttcgcagctggtgc

SEQ ID NO: 751626 - DNA, 75 bp, synthetic construct
  source 1..75: mol_type = other DNA
caagcgcgcccgtcacgaatactttattgaagaagagttcgaagcgggacttgccctgcaaggctgggaagttaa

SEQ ID NO: 751627 - DNA, 75 bp, synthetic construct
  source 1..75: mol_type = other DNA
aaacaggaattattgccgtcactgacgcccgggcgcggcatattctgcaagtatgcgagcatctgcacatccccg

SEQ ID NO: 751628 - DNA, 75 bp, synthetic construct
  source 1..75: mol_type = other DNA
gatgatacgcccaacgcgccggtagtgacgcgtgaagcgcagctggatattcagtcacaatcacaaccgccaacg

SEQ ID NO: 751629 - DNA, 75 bp, synthetic construct
  source 1..75: mol_type = other DNA
tgagtgccgcctgggatgcacaatcgctcaacgaactgaaagcgaaagcaggcgaagatccagcggcgaatattc

SEQ ID NO: 751630 - DNA, 75 bp, synthetic construct
  source 1..75: mol_type = other DNA
tgacgaccgccgcgagtgcggaacaggggcgcaggccctacaggacgcgggctatgccaccgatcctcactatgc

SEQ ID NO: 751631 - DNA, 75 bp, synthetic construct
  source 1..75: mol_type = other DNA
aacggcgtggatatgcgcaatatacgcaccagagttctggagatgttgtcataccgtcgccgcgtgcagatgtac

SEQ ID NO: 751632 - DNA, 75 bp, synthetic construct
  source 1..75: mol_type = other DNA
atgagcgaaaccgaactactaaaaataatccgtcgcgttaccggaatcagccaggaagcaggcaaacaggaggcc

SEQ ID NO: 751633 - DNA, 75 bp, synthetic construct
  source 1..75: mol_type = other DNA
acgaacaggccacgcagccggacagcgtgacagccgaaaattatgcgcgtgttgttgctgaggtgatgcgccgtg

SEQ ID NO: 751634 - DNA, 75 bp, synthetic construct
  source 1..75: mol_type = other DNA
atgacagaagccgaactactgggattaatccgccgcgtcgccggaatcagccagcagcatgacgaacaggccaca

SEQ ID NO: 751635 - DNA, 75 bp, synthetic construct
  source 1..75: mol_type = other DNA
acgcagccggacagcgttatcgctgagaactatgcgcgtgtagtagctgagatgatgcgccgtgacggtatcgag

SEQ ID NO: 751636 - DNA, 75 bp, synthetic construct
  source 1..75: mol_type = other DNA
ggatccgcgttctggaaatgctggcctacaatcgccgcgttgaactgtatcgggagaaggagaaaatcacgtacc

SEQ ID NO: 751637 - DNA, 75 bp, synthetic construct
  source 1..75: mol_type = other DNA
ggcataccgtcgccgttctcaacaacggagggagagcgcgaaaaatacttaccagtggaggaagccggaacggtt

SEQ ID NO: 751638 - DNA, 75 bp, synthetic construct
  source 1..75: mol_type = other DNA
tcgggataatccgcagtattaccggaatcagccagcaggctggcgaacaggaggccacgcagccggacagcgtga

SEQ ID NO: 751639 - DNA, 75 bp, synthetic construct
  source 1..75: mol_type = other DNA
ctacaatcaccgtgtggaactgtatagggagaaagaaaaaattacgtaccactggaagaagccggagcggttacg

SEQ ID NO: 751640 - DNA, 75 bp, synthetic construct
  source 1..75: mol_type = other DNA
atggctggaacacagcataccccacgactagtgcacacacaaacggcctttgtgtggcgttttctggccctgagt

SEQ ID NO: 751641 - DNA, 75 bp, synthetic construct
  source 1..75: mol_type = other DNA
attatgcgcgtgttgttgctgaggtgatgcgccgtgatggtatccagcttaatgatgtggatatgcgcaacatac

SEQ ID NO: 751642 - DNA, 75 bp, synthetic construct
  source 1..75: mol_type = other DNA
cagccggacagcgtgaccgctgaaaattatgtgcgtgttgttgctgaggtgatgcgccgtgacggtatcgagctt

SEQ ID NO: 751643 - DNA, 75 bp, synthetic construct
  source 1..75: mol_type = other DNA
atgactgaatccgaaatactgcgattaatccgccgcgtctctggaatcagccagcaggctgacgaacagaccacg

SEQ ID NO: 751644 - DNA, 75 bp, synthetic construct
  source 1..75: mol_type = other DNA
tcgtcagccggatgaagtgctggacagggaagcgggaaatcgactgctggcgtcggaaaaagatcgccatgaaca

SEQ ID NO: 751645 - DNA, 75 bp, synthetic construct
  source 1..75: mol_type = other DNA
ggacaattcaggcggttaacggggaatcggtcacagtcaccactgcatacagtgagacgccgcaggccgaagctg

SEQ ID NO: 751646 - DNA, 75 bp, synthetic construct
  source 1..75: mol_type = other DNA
gataccggagccattattgaccagcggccggtgagcgtgatcccgccgggcaatcagtcaccgccagacaacatc

SEQ ID NO: 751647 - DNA, 75 bp, synthetic construct
  source 1..75: mol_type = other DNA
cctcaattaaacacatctggacctatccgtacacaccgaaaatgaatgcgacctgtgagcgatttaaccggacac

SEQ ID NO: 751648 - DNA, 75 bp, synthetic construct
  source 1..75: mol_type = other DNA
aattaatatgcgatgcagtaaaaaaacacacacagattcgtgatgaacgtttttttaaaaccaataactctcaat

SEQ ID NO: 751649 - DNA, 75 bp, synthetic construct
  source 1..75: mol_type = other DNA
tcagcttcggtcgcagggaacagtgcgcagctggatcgtattgatgaggtaatcgttaacgagaaggaggcaacg

SEQ ID NO: 751650 - DNA, 75 bp, synthetic construct
  source 1..75: mol_type = other DNA
cgcaagacacgtctgtgttatagcaaacgttaaaggtaatggtgcaggactaatcaatattaacggcaatgagag

SEQ ID NO: 751651 - DNA, 75 bp, synthetic construct
  source 1..75: mol_type = other DNA
ctcgcactaatgacgcccgtggaatatattttaaaagagaataaaaattgcaatatgtggtggacccatacatga

SEQ ID NO: 751652 - DNA, 75 bp, synthetic construct
  source 1..75: mol_type = other DNA
tgaaggctctgcacttctgggataaacacggtatttctgcagcttctgaagcctttggcgtgtcctgccgcacgc

SEQ ID NO: 751653 - DNA, 75 bp, synthetic construct
  source 1..75: mol_type = other DNA
aagacaccggagaaaacaactgaccagacactgattcgaaagttaccagacggagaaatacgtcgttatgacagg

SEQ ID NO: 751654 - DNA, 75 bp, synthetic construct
  source 1..75: mol_type = other DNA
acctgcccgagtgtttccaccatcggcagaatgattgccaccgcacacgataaaatgcggatggtaccagtacgt

SEQ ID NO: 751655 - DNA, 75 bp, synthetic construct
  source 1..75: mol_type = other DNA
tatctaaaagatctaaacaaactaaagctaaaaaagatagattaaagaaagatctgtatgatttttttgataagt

SEQ ID NO: 751656 - DNA, 75 bp, synthetic construct
  source 1..75: mol_type = other DNA
atgacgcccgtggaatatattttaaaagagaataaaaattgcaatatgtggtggacccatacaggcaatataaat

SEQ ID NO: 751657 - DNA, 75 bp, synthetic construct
  source 1..75: mol_type = other DNA
ccaggcgaataccgacgacacgctgaagacggaaattcagtacagcctgaccggtactgaagacgatgccatgct

SEQ ID NO: 751658 - DNA, 75 bp, synthetic construct
  source 1..75: mol_type = other DNA
gcctccacgcatgtggtgtgcgatcctagccgtacccgcaagttacttctcaaccagcgcgaactggactcattg

SEQ ID NO: 751659 - DNA, 75 bp, synthetic construct
  source 1..75: mol_type = other DNA
ctttatcgctggtaaaggcgtgaaatctgacgttccgcagggcgctgctatcctgggcgcgatctctggtgcgca

SEQ ID NO: 751660 - DNA, 75 bp, synthetic construct
  source 1..75: mol_type = other DNA
gcgggtgaaaaacacttcgcagctaccggtaagccgctgttctcttctcacatgatcgacctgtctgaagaatct

SEQ ID NO: 751661 - DNA, 75 bp, synthetic construct
  source 1..75: mol_type = other DNA
tcgccatgaacatgaactggtgactcaggcgatgaaagaggtactgcgcgaacgcagtagtgagttacacgttcc

SEQ ID NO: 751662 - DNA, 75 bp, synthetic construct
  source 1..75: mol_type = other DNA
ttgcggaaaaatcaggtgcgcctgtttgccggagcggggattgtgcctgcgtcatcaccacttagcgaatggcgc

SEQ ID NO: 751663 - DNA, 75 bp, synthetic construct
  source 1..75: mol_type = other DNA
gtcctcaccgttgggtgagtggcgcgaaacaggcgtcaaactttctaccatgttgaacgtttttggattgcatta

SEQ ID NO: 751664 - DNA, 75 bp, synthetic construct
  source 1..75: mol_type = other DNA
ttcgcaggcacatccgttcgtaatacggaaggcggcatgttgtccacgtctggtacagttatggccacttttaaa

SEQ ID NO: 751665 - DNA, 75 bp, synthetic construct
  source 1..75: mol_type = other DNA
cgcttttatctgagctcatccccgcagtttgatttagtcatgggaatgataaaaatgaaaggtggtgtgattaat

SEQ ID NO: 751666 - DNA, 75 bp, synthetic construct
  source 1..75: mol_type = other DNA
aatggtcttttagtttactggatgatgctgccccggctaattacgagatcgacggcgagaagttttcatttgatc

SEQ ID NO: 751667 - DNA, 75 bp, synthetic construct
  source 1..75: mol_type = other DNA
cctgaaatcgccgcccgctatcgtcgccagctaaaagcccgtatcagtgccgccaacctgtttaaaccgatgtgc

SEQ ID NO: 751668 - DNA, 75 bp, synthetic construct
  source 1..75: mol_type = other DNA
tacatcatcaccgtgaacatggcgaaagaactggcgatggtcgaacgtaccgaacagggccgcgccgttcgccag

SEQ ID NO: 751669 - DNA, 75 bp, synthetic construct
  source 1..75: mol_type = other DNA
cccgctggtttcagtgttcttgcggggcttgaggatgatgaatcccttttgatcgtagatctcggtggtacaact

SEQ ID NO: 751670 - DNA, 75 bp, synthetic construct
  source 1..75: mol_type = other DNA
cctgcctgatgtcgtggggatggagattgccataaatggtgagattatctcgttatcccgcgaagcatggcagcg

SEQ ID NO: 751671 - DNA, 75 bp, synthetic construct
  source 1..75: mol_type = other DNA
gcatttccaggcagcatcgctgctatcagcgagcaaggaaagctaaacgaatttcgaaaacaatggatgcttgcg

SEQ ID NO: 751672 - DNA, 75 bp, synthetic construct
  source 1..75: mol_type = other DNA
agaaccgagacggtgaggctatggccagcttaaccggttcagaccgtcaatatgcaggcagcgacaacgttgtga

SEQ ID NO: 751673 - DNA, 75 bp, synthetic construct
  source 1..75: mol_type = other DNA
gacccgtttgccggaagcggttcgacctgcgtcgctgcataccgtgccggacgccgctatatcggcatcgaaatg

SEQ ID NO: 751674 - DNA, 75 bp, synthetic construct
  source 1..75: mol_type = other DNA
aattgaaaagctgagaatagccattgaacagtcaggtagtgccagtactaatatcatgctggtaattgcatcaaa

SEQ ID NO: 751675 - DNA, 75 bp, synthetic construct
  source 1..75: mol_type = other DNA
tcaaaacaaaagcagatacacaacctctttcagatatctgtgcagatttcgaaagtattgaggctttagtcgact

SEQ ID NO: 751676 - DNA, 75 bp, synthetic construct
  source 1..75: mol_type = other DNA
atgccgggtcatctcacctggtacttcggcgacgaactgaagaaaatgggcatgaatatcattaatgacgacatc

SEQ ID NO: 751677 - DNA, 75 bp, synthetic construct
  source 1..75: mol_type = other DNA
cctaatgcgttcactcacgctactgtctctggtaaagagcagcagggtaagcttcgtcgtcgcaaagcagcatga

SEQ ID NO: 751678 - DNA, 75 bp, synthetic construct
  source 1..75: mol_type = other DNA
cgatctgaaagttacgaaaattttcgtagacgaaggcccaagcatgaagcgcattatgccgcgtgcaaaaggtcg

SEQ ID NO: 751679 - DNA, 75 bp, synthetic construct
  source 1..75: mol_type = other DNA
aacccatgagtacgcctccggacacagggagagacgtttaccatccaccagggcgaagtttcgggtgcatgccta

SEQ ID NO: 751680 - DNA, 75 bp, synthetic construct
  source 1..75: mol_type = other DNA
tgctgcaaaacagcagtggattgctgcgtttgccgaaggtgggatccgaacccgtgaacaggtttctgctggtat

SEQ ID NO: 751681 - DNA, 75 bp, synthetic construct
  source 1..75: mol_type = other DNA
ttgcacctggcattgtagagggcagtcggatcaaaagccatggtgaaacagactataggttagatgcatctctgt

SEQ ID NO: 751682 - DNA, 75 bp, synthetic construct
  source 1..75: mol_type = other DNA
gtcgggcgttttatgcttcccgtggaggcagccttccaggcgctgcggggagaaggtgatccgacggcgcagcat

SEQ ID NO: 751683 - DNA, 75 bp, synthetic construct
  source 1..75: mol_type = other DNA
gtcgaagcactggaaaatctcgatccagattctctgactccgcgtcaggcgctggagtggatttatcggttgaag

SEQ ID NO: 751684 - DNA, 75 bp, synthetic construct
  source 1..75: mol_type = other DNA
tggcacccatcaactacatgcgtcgccagacgctgaaaaacgccgagcgctacattattccagagctaaaagagt

SEQ ID NO: 751685 - DNA, 75 bp, synthetic construct
  source 1..75: mol_type = other DNA
caggagcgtcaggacaacctgctggcggctatctggcaggacagcaaaggtttcggctacgcgacgctggatatc

SEQ ID NO: 751686 - DNA, 75 bp, synthetic construct
  source 1..75: mol_type = other DNA
ctggatatttcgctgactaaacgtggcgcttccgcgggtgagccaatcccgatggcaggtatcccctatcacgcg

SEQ ID NO: 751687 - DNA, 75 bp, synthetic construct
  source 1..75: mol_type = other DNA
tgaaggtcgtcgcggactgcgccgtcgcccgctgtgggagtttgaaatcgacaccgcgcgccagcagttgaatct

SEQ ID NO: 751688 - DNA, 75 bp, synthetic construct
  source 1..75: mol_type = other DNA
tatcagaccatacgccgatgatgcagcagtatctcaagctgaaagcccagcatcccgagatcctgctgttttacc

SEQ ID NO: 751689 - DNA, 75 bp, synthetic construct
  source 1..75: mol_type = other DNA
ttatcagcagtcatatgcgtttgtcgaaaaacaactgttgaccggtagcagcaatgttctggcgctggaacaggc

SEQ ID NO: 751690 - DNA, 75 bp, synthetic construct
  source 1..75: mol_type = other DNA
gtcgattggcgcattcacgccaccggtaggtaccgtgatgctgctggtatgtaacatcacgcaagtttcggtggg

SEQ ID NO: 751691 - DNA, 75 bp, synthetic construct
  source 1..75: mol_type = other DNA
tcccgacgcaaacattgattgtctggacaggcatggcaccaacgagaaggcaaaacgaacttttacaacactggg

SEQ ID NO: 751692 - DNA, 75 bp, synthetic construct
  source 1..75: mol_type = other DNA
catcctgagatcctgctgttctaccggatgggtgacttttacgagctattttatgacgacgcaaaacgagcgtcg

SEQ ID NO: 751693 - DNA, 75 bp, synthetic construct
  source 1..75: mol_type = other DNA
cgggcgctcaacctttatggtggagatgaccgaaaccgccaatattttacataacgccaccgagtacagtctggt

SEQ ID NO: 751694 - DNA, 75 bp, synthetic construct
  source 1..75: mol_type = other DNA
ccgtctcgcgcggctatttgcagttgaatcccgaggtcattatcgaagcgctgaacgacgcgccaccggtttcac

SEQ ID NO: 751695 - DNA, 75 bp, synthetic construct
  source 1..75: mol_type = other DNA
ccctttcattcgtcccgcgttcgatgttcgccaggagcaggcgacggaggttgcgatcaggcgcatgaaccaggc

SEQ ID NO: 751696 - DNA, 75 bp, synthetic construct
  source 1..75: mol_type = other DNA
catcatgacaatcgaagttttttttcaaaagccttcagatggcacttaaaaagtacttttagatatttagccaga

SEQ ID NO: 751697 - DNA, 75 bp, synthetic construct
  source 1..75: mol_type = other DNA
tgaacggcgatctccaggggctgatctccgcaggctgttcatcactggcatctattgggaacaaagcgcagattg

SEQ ID NO: 751698 - DNA, 75 bp, synthetic construct
  source 1..75: mol_type = other DNA
tatgagttaaaaagtaaaagtgacaatttacttagactccctaagcaaatagaacattattcctccattatggat

SEQ ID NO: 751699 - DNA, 75 bp, synthetic construct
  source 1..75: mol_type = other DNA
ggccgatgcacccacggccttcatcaagccgcgctggaagccgctggtgatcaccccggaaggcctcgaccggaa

SEQ ID NO: 751700 - DNA, 75 bp, synthetic construct
  source 1..75: mol_type = other DNA
ccctctgatgcattgttaaagcccatagccaacaggttaaaacttgccgatgggctatggtcctcttatatcaac

SEQ ID NO: 751701 - DNA, 75 bp, synthetic construct
  source 1..75: mol_type = other DNA
tgactatcacgaaaccggtggacaaatcctccccccttctgggcaaggccatttcggagaatgaatgtctgacct

SEQ ID NO: 751702 - DNA, 75 bp, synthetic construct
  source 1..75: mol_type = other DNA
aatttggcgtgaatctttgcaggaagcactcgaccgaatgactatttttcgtgatagttcaccaaatacggttag

SEQ ID NO: 751703 - DNA, 75 bp, synthetic construct
  source 1..75: mol_type = other DNA
atgacagaagccgaactactgggattaatccgccgcgtcgccggaatcagccagcaggctgacgaacagaccgcg

SEQ ID NO: 751704 - DNA, 75 bp, synthetic construct
  source 1..75: mol_type = other DNA
ataccgtcgacgcgtggcgatgtatcaggagagcgcgaaaaacacttatcagtggaagaagccggaacggctgcg

SEQ ID NO: 751705 - DNA, 75 bp, synthetic construct
  source 1..75: mol_type = other DNA
atccaatggaaagtttttattctttattcatttggtttttgccatgaatcgattgcatctattttgtccattaca

SEQ ID NO: 751706 - DNA, 75 bp, synthetic construct
  source 1..75: mol_type = other DNA
acactaatggggattttgttagctacaatacaaatttctctaaggaatttataagaactattgatatcaaagact

SEQ ID NO: 751707 - DNA, 75 bp, synthetic construct
  source 1..75: mol_type = other DNA
ctgatatagctagacctcaacatttagaagcggcttatgacccagtgctggttgatacgatttatttgtttccgc

SEQ ID NO: 751708 - DNA, 75 bp, synthetic construct
  source 1..75: mol_type = other DNA
tcgtgctgtggaacacggtgtacctggaacgcgccacccaggggttggtcgaggccggcaagccggtggacggcg

SEQ ID NO: 751709 - DNA, 75 bp, synthetic construct
  source 1..75: mol_type = other DNA
tcactagagaaaatggaggatatcgtgctgacaaaacgcaggaacaagccacaacctattcaggctgaacgctct

SEQ ID NO: 751710 - DNA, 75 bp, synthetic construct
  source 1..75: mol_type = other DNA
ggcgctgtacagccaggcaaccggttatttcgcgctattcggtatgctgttctttatgattttctacgcgctttc

SEQ ID NO: 751711 - DNA, 75 bp, synthetic construct
  source 1..75: mol_type = other DNA
tggcgctatatgtttgctgcgggtattattccctgcattttgttctgtattttagtctttttaatcccggaatct

SEQ ID NO: 751712 - DNA, 75 bp, synthetic construct
  source 1..75: mol_type = other DNA
agagcagttgcgagtagcgttactgcctcgccgaaaggtctctatttcttcatttggcgttaatttgtggggttt

SEQ ID NO: 751713 - DNA, 75 bp, synthetic construct
  source 1..75: mol_type = other DNA
ctggcctggcggatattgcaagagatctggaacttctcagcagagcagagagtaataaggtgcttcgcgatgcct

SEQ ID NO: 751714 - DNA, 75 bp, synthetic construct
  source 1..75: mol_type = other DNA
acgacagaggaactggcagcacggattgccatacagcgaatgaatcaggctattgatgaggtcttaagtaaatga

SEQ ID NO: 751715 - DNA, 75 bp, synthetic construct
  source 1..75: mol_type = other DNA
cattcaacaggattttcgtatgaaacaggccatgctatcaccgagatatacgacccgctgggatgaattactcgt

SEQ ID NO: 751716 - DNA, 75 bp, synthetic construct
  source 1..75: mol_type = other DNA
agcagggcaccgtcaccgcctcgctgatgctgcgcaagctcggcagctacccgcgccagaacggactggccgtgg

SEQ ID NO: 751717 - DNA, 75 bp, synthetic construct
  source 1..75: mol_type = other DNA
gggctgggagcacatcaacctaaccggcgattacgtctggcggcagagccgcagactggaagacgggaagtttcg

SEQ ID NO: 751718 - DNA, 75 bp, synthetic construct
  source 1..75: mol_type = other DNA
gagatcggctgggcggtttcctgcgttgtggtggggtgcgttattggttcgtttagcgccggatatttatccaaa

SEQ ID NO: 751719 - DNA, 75 bp, synthetic construct
  source 1..75: mol_type = other DNA
actggtgtttatgcagccaacaaaatggaatcccgccttgaaaggccgggtagaaaaaaataatgtggtacaagg

SEQ ID NO: 751720 - DNA, 75 bp, synthetic construct
  source 1..75: mol_type = other DNA
aagaaatgattgcgaaacttcttgaagatgcccgccgccttcaggtagtggagccaaacgcagggacacaatcac

SEQ ID NO: 751721 - DNA, 75 bp, synthetic construct
  source 1..75: mol_type = other DNA
caacaaccatctggcgcagctgctttccggtaagctttactcttcactgcgcgaaggcgggaaaaaagttttctc

SEQ ID NO: 751722 - DNA, 75 bp, synthetic construct
  source 1..75: mol_type = other DNA
ctggctgaccgcttcgccgtcaccacggcagcaggtaacagcgtggctttgccgtttgtgatccagaacgggcag

SEQ ID NO: 751723 - DNA, 75 bp, synthetic construct
  source 1..75: mol_type = other DNA
aagctgtttgggtggttgaatctgacgagctctacgcgcagcagtatcgagttgtcagcgtttccgataacaatg

SEQ ID NO: 751724 - DNA, 75 bp, synthetic construct
  source 1..75: mol_type = other DNA
ttgtgaagccgcttgatgaagcgttaattctggaaatggccgccagccatgaggcgctggtcaccgttgaagaaa

SEQ ID NO: 751725 - DNA, 75 bp, synthetic construct
  source 1..75: mol_type = other DNA
cgaaagacaacaagctgatggcgattactccggcgatgcgtgaaggttctggcatggtcgaattctcacgtaaat

SEQ ID NO: 751726 - DNA, 75 bp, synthetic construct
  source 1..75: mol_type = other DNA
cgaccctggcactggtcgactccacccaggagctacgactgttgccaaaagagagtttaccgaaactctgcgacg

SEQ ID NO: 751727 - DNA, 75 bp, synthetic construct
  source 1..75: mol_type = other DNA
aaatgaacaagaaattttaaaacatagctacaatatcggccaggtcataagcattgaactaacatttactgaagt

SEQ ID NO: 751728 - DNA, 75 bp, synthetic construct
  source 1..75: mol_type = other DNA
atctttcgggaaaagtgagaaagatccactactttgactcagtgccctacgcattactgactgtgtttaaattaa

SEQ ID NO: 751729 - DNA, 75 bp, synthetic construct
  source 1..75: mol_type = other DNA
taggcacagcgagcagttagcattgctgcaagctgacaattctaagtttgcagcaagcattgcacagcagttaaa

SEQ ID NO: 751730 - DNA, 75 bp, synthetic construct
  source 1..75: mol_type = other DNA
aaagagttgctgggcatgaagcccgatgaatggcgtgccgttcgcagtgatattcagatgattttccaggatccg

SEQ ID NO: 751731 - DNA, 75 bp, synthetic construct
  source 1..75: mol_type = other DNA
cgcacacgttgcccgatcgccggcccggaatgtgccaaaacgcgcccggtgctggagggcagtttcagacatgcg

SEQ ID NO: 751732 - DNA, 75 bp, synthetic construct
  source 1..75: mol_type = other DNA
aagttctcctggaaattgctgatctgaaagttcactttgagattaaagatggcaaacagtggttctggcaaccgg

SEQ ID NO: 751733 - DNA, 75 bp, synthetic construct
  source 1..75: mol_type = other DNA
ttgctgccgagaaagaaggcaaaaatcgccgcaccgtctgtgtcattggcgatggcgcgattaccgctggcatgg

SEQ ID NO: 751734 - DNA, 75 bp, synthetic construct
  source 1..75: mol_type = other DNA
aggaatgcctgacggtcactgttgccttcgggatttcaggcgtgcaggtcacgcgtattctggacagcattgcac

SEQ ID NO: 751735 - DNA, 75 bp, synthetic construct
  source 1..75: mol_type = other DNA
cgcagcagatgaagcacctacgataaccagaaaaaaagcctccccggctgccgtgatcgcaaaagccagtgctga

SEQ ID NO: 751736 - DNA, 75 bp, synthetic construct
  source 1..75: mol_type = other DNA
gcctgcctgttgcgggatatcctgtcgcaggatagttatcggagtatgatgtttcattcacaaatagcgctgaat

SEQ ID NO: 751737 - DNA, 75 bp, synthetic construct
  source 1..75: mol_type = other DNA
gtcagagcggctgactctcagaagaaagagctgattgcatatgcaggtgaaattattgccacgctgcaggatgct

SEQ ID NO: 751738 - DNA, 75 bp, synthetic construct
  source 1..75: mol_type = other DNA
catctggcggggaaagaaaacgtcagtctgcctttttcgtataccgttaactatccgaaaaatatgcaggtatct

SEQ ID NO: 751739 - DNA, 75 bp, synthetic construct
  source 1..75: mol_type = other DNA
ccccaatgaaggcgacctcaaacccgacgtggtgaaacgctttgaggaaatggtggcgcaggcgcagcagagcgc

SEQ ID NO: 751740 - DNA, 75 bp, synthetic construct
  source 1..75: mol_type = other DNA
gcgcttacagcgtcagggcgaagaggactttctggcatttagccgcgcggcaaccggtcgcctgcgtgacgaatt

SEQ ID NO: 751741 - DNA, 75 bp, synthetic construct
  source 1..75: mol_type = other DNA
cctgccaagctattcaaaaatctttggcgactggctgtgtgaaacggcagccaaagacgacaaactgatggcgat

SEQ ID NO: 751742 - DNA, 75 bp, synthetic construct
  source 1..75: mol_type = other DNA
tccggcaagctttactcttcactgcgcgagggcgggaaaaaagtattctccggcgttccgcccattaaagagctg

SEQ ID NO: 751743 - DNA, 75 bp, synthetic construct
  source 1..75: mol_type = other DNA
aaacaaatttctctgaatgaatatgagggagtattaaaaaaatctgattttaaaattttactggggcgcctgaca

SEQ ID NO: 751744 - DNA, 75 bp, synthetic construct
  source 1..75: mol_type = other DNA
cttcatgcccgggaaatcattaatgactggcggcaggactataacgagtccagaccgcattcatcgctgaattac

SEQ ID NO: 751745 - DNA, 75 bp, synthetic construct
  source 1..75: mol_type = other DNA
acctgccgcgccctcgaacaatgggcctttgagcatggtgtggagttgcgacttatccagccaggtaagccaacg

SEQ ID NO: 751746 - DNA, 75 bp, synthetic construct
  source 1..75: mol_type = other DNA
ttgtgctcttccctccgggggcgtctggcgatgaactggcgacccgactggcctggcgtttacatggcaccagca

SEQ ID NO: 751747 - DNA, 75 bp, synthetic construct
  source 1..75: mol_type = other DNA
ggtactggttgcggcgttctggtcggaacgcagcaggggcgtgtggtggcctgtcagggcgacccggacgcaccg

SEQ ID NO: 751748 - DNA, 75 bp, synthetic construct
  source 1..75: mol_type = other DNA
ctcaccgtctgcctgcggacatggtggtgactaacgagaaacaccgtgatatctgcgagaagaagtggaatatcc

SEQ ID NO: 751749 - DNA, 75 bp, synthetic construct
  source 1..75: mol_type = other DNA
gcgatgaattttgaacgcgccgctgagcttacctcagtaccggatgatcgcatcctcgaaatctacaatgcgtta

SEQ ID NO: 751750 - DNA, 75 bp, synthetic construct
  source 1..75: mol_type = other DNA
gtggcgttacagcgaaggtaacgacccgtatgtgaaagcgggcgaaggttacaagttctacggcaaaccggatgg

SEQ ID NO: 751751 - DNA, 75 bp, synthetic construct
  source 1..75: mol_type = other DNA
ggagatgcacccgatcctgtggtcgcgcatcactaaccgtcgcctttctaatcaggatgtcactgtggcggtgct

SEQ ID NO: 751752 - DNA, 75 bp, synthetic construct
  source 1..75: mol_type = other DNA
tctggcagttagttcagttctcccgtcgcttcaaaactgaagaagtgtggccggaagagctgctggcgaagaaac

SEQ ID NO: 751753 - DNA, 75 bp, synthetic construct
  source 1..75: mol_type = other DNA
ggctcggcaatgacctatttcgatatccgcattcccgggctcaaaatgtcggttgtggctgcagatggtcagtat

SEQ ID NO: 751754 - DNA, 75 bp, synthetic construct
  source 1..75: mol_type = other DNA
agcgtctctccgaaattaaatgatccgggtattggtcttcgaaataacggaagaaaggttctcacgtacgcggat

SEQ ID NO: 751755 - DNA, 75 bp, synthetic construct
  source 1..75: mol_type = other DNA
ccggaagcgaacgtcaggccaagacgatcaatggtgggctgccggggccgaccctgcgctggaaagagggtgata

SEQ ID NO: 751756 - DNA, 75 bp, synthetic construct
  source 1..75: mol_type = other DNA
cattgcgtattcaggccgcgattgccagagatgctggtcgtgatcgcctggcgatgaattttgaacgcgccgctg

SEQ ID NO: 751757 - DNA, 75 bp, synthetic construct
  source 1..75: mol_type = other DNA
ttaacaacaaaaacaagccatccgatttggtcggcaggaaggagtatcttccagaccttgacgttactgtctttt

SEQ ID NO: 751758 - DNA, 75 bp, synthetic construct
  source 1..75: mol_type = other DNA
gctgtatggctttatcgacgtcaatgccgccaacgccgacgtggtctcccagcttaacgcactgcgcgagcgccc

SEQ ID NO: 751759 - DNA, 75 bp, synthetic construct
  source 1..75: mol_type = other DNA
cccaacgctggcgaactgtcgcactggggatgccacgactctgttcagcgcagcgtctggcgggggcaatggtcg

SEQ ID NO: 751760 - DNA, 75 bp, synthetic construct
  source 1..75: mol_type = other DNA
aagaagggggacgatatgatttacctatcgctattgtgttgctggcggcctcagaacagcttacagccaataagt

SEQ ID NO: 751761 - DNA, 75 bp, synthetic construct
  source 1..75: mol_type = other DNA
accctacatcatgaaaacgaccggacttgactttcaacagtgttcagcatttacagagcatgccgtgtttaatta

SEQ ID NO: 751762 - DNA, 75 bp, synthetic construct
  source 1..75: mol_type = other DNA
gtcatcacggcaaaaggaaaccatacccgtaatttttcaaatctcagggagcttgaatctctggaaggtcattac

SEQ ID NO: 751763 - DNA, 75 bp, synthetic construct
  source 1..75: mol_type = other DNA
gtgatctccacgatggtgaacggttaccgcagccacaagttttttaaagtcaaaagcaacaaggagcgttcatga

SEQ ID NO: 751764 - DNA, 75 bp, synthetic construct
  source 1..75: mol_type = other DNA
ggggggcgacgtatctgttctatatgggctacatcaggttaattcacttcagcgccgggatgatttttaccgtgg

SEQ ID NO: 751765 - DNA, 75 bp, synthetic construct
  source 1..75: mol_type = other DNA
acggtgatctccaccatggtcaacggctaccgtagccacaaatttggcaaaataagtaacaaggagcgttcatga

SEQ ID NO: 751766 - DNA, 75 bp, synthetic construct
  source 1..75: mol_type = other DNA
tcgttaaaagcagaaattaatgagctgaatattgagtataaatacctgcagcaatggcagagtcagaatcttcga

SEQ ID NO: 751767 - DNA, 75 bp, synthetic construct
  source 1..75: mol_type = other DNA
aacagtttttttcaacgtcgatttcgcgttctgaggaagtcttacctgactcaccgtctgcaaatgcgattgatg

SEQ ID NO: 751768 - DNA, 75 bp, synthetic construct
  source 1..75: mol_type = other DNA
gaacatgcccggaataatcgctacttcagcagtacgcgagagttcagggaagcaatatctgtcttttttaaccag

SEQ ID NO: 751769 - DNA, 75 bp, synthetic construct
  source 1..75: mol_type = other DNA
tgataaacgccagcgtgacaataaaaaaacgccgggaaatactgacaaattgaaacccagaaaatcttcaaaaaa

SEQ ID NO: 751770 - DNA, 75 bp, synthetic construct
  source 1..75: mol_type = other DNA
gttcaggctgaacgtgatgaacttaaaaacagtatactgaagaaatgcggcctgccattgctaagattacgtact

SEQ ID NO: 751771 - DNA, 75 bp, synthetic construct
  source 1..75: mol_type = other DNA
gacgggagtgcgatgaaattgtgttttccactgtgctggataagaagcgcagcagccagcacagtcggaacatcg

SEQ ID NO: 751772 - DNA, 75 bp, synthetic construct
  source 1..75: mol_type = other DNA
catcactaaagccagcatcgacacactgacgcgctacgctcatgcctgcggtattaaaaaaccagtcattgccct

SEQ ID NO: 751773 - DNA, 75 bp, synthetic construct
  source 1..75: mol_type = other DNA
tgagtacagcgcggcattcgaggcagaagaagcctcggagctacttcgggaaaccttagcaacatggcgaaaaga

SEQ ID NO: 751774 - DNA, 75 bp, synthetic construct
  source 1..75: mol_type = other DNA
ctgggttgcaccggtggtgaagaagacggtgtggacaacagccacatggacgcttctgcactgtacacccagccg

SEQ ID NO: 751775 - DNA, 75 bp, synthetic construct
  source 1..75: mol_type = other DNA
acaacacgcagctgcttatccagataatccggcagtacgggcgaacatgccgccgctatcagtttgaggtgatca

SEQ ID NO: 751776 - DNA, 75 bp, synthetic construct
  source 1..75: mol_type = other DNA
cgtatatcagataaaaagttctataacctttccgatacttccgggaaaggcagtctcgattatccgttaccggcc

SEQ ID NO: 751777 - DNA, 75 bp, synthetic construct
  source 1..75: mol_type = other DNA
tgcataacgagtggatgaaggacgatgaatatcgtgctgcgtggcaggaggaagaacgcaaggagaaactcagag

SEQ ID NO: 751778 - DNA, 75 bp, synthetic construct
  source 1..75: mol_type = other DNA
gcttccgataatgtggtattcggtatcgagctgagctggggattcccggcgaacaccgacgacacgctgaagacg

SEQ ID NO: 751779 - DNA, 75 bp, synthetic construct
  source 1..75: mol_type = other DNA
ggacagctatggccgggtggtgccgaagaataagcatctgaccggcaaaatattcacccaacgcattgagcgtaa

SEQ ID NO: 751780 - DNA, 75 bp, synthetic construct
  source 1..75: mol_type = other DNA
tatcagcagatgggcctaaaggctgggcaaattttctggtaccgcgcgcagctggtggaccgcagcggaaacgaa

SEQ ID NO: 751781 - DNA, 75 bp, synthetic construct
  source 1..75: mol_type = other DNA
tcatgatgcaatgaactggttggatggaaaaataaaagatgagagtaattcaaagatagagatagtcaacataga

SEQ ID NO: 751782 - DNA, 75 bp, synthetic construct
  source 1..75: mol_type = other DNA
caccgcctcgccgaattgaccatgaataaactgtacgacaagatcccttcctcagtatggaaatttattcgctaa

SEQ ID NO: 751783 - DNA, 75 bp, synthetic construct
  source 1..75: mol_type = other DNA
aaaagctacatacggtgaaagtcctctctgcatgcagctacagccccgatgagtgggaacggcagagtcaatcgg

SEQ ID NO: 751784 - DNA, 75 bp, synthetic construct
  source 1..75: mol_type = other DNA
ccggtctgaaattgccgtcgtggctgaacaaaggcgaccccgccaggctgctgcgggcctgcgtgaagttctggt

SEQ ID NO: 751785 - DNA, 75 bp, synthetic construct
  source 1..75: mol_type = other DNA
acatgttctgtaaacgcatcccgctggtctttcagaaagagctgtatgctggggtttcatttgcctccgccgtac

SEQ ID NO: 751786 - DNA, 75 bp, synthetic construct
  source 1..75: mol_type = other DNA
atatgttctgtaaacgcatcccgctggtctttcagaaagaactgtatgcaggggtttcatttgtttccgccgtgc

SEQ ID NO: 751787 - DNA, 75 bp, synthetic construct
  source 1..75: mol_type = other DNA
atgataaaaactgataccggcattattactatcgcagtggaacatcaccccgccgggcttaccacgggtttccca

SEQ ID NO: 751788 - DNA, 75 bp, synthetic construct
  source 1..75: mol_type = other DNA
gtcactattaccatcagtggtttgcctcttcgaccgttccgacgggcggggatcatgctgattttttaagttggc

SEQ ID NO: 751789 - DNA, 75 bp, synthetic construct
  source 1..75: mol_type = other DNA
ttggggggcatttggcgatgcctgtcgtctgggaagcccgcaagcggtggcgttgttgctgggtgatttgcgcgt

SEQ ID NO: 751790 - DNA, 75 bp, synthetic construct
  source 1..75: mol_type = other DNA
ttttaatgccggacgcaaccaggccaatctggatatcgccgaaattcgccagcagcagtcggtggtgaattatga

SEQ ID NO: 751791 - DNA, 75 bp, synthetic construct
  source 1..75: mol_type = other DNA
aacgccagcagcgggatgtggaattttattcccaaaattgagatccccatttttaatgccgggcgcaaccaggcc

SEQ ID NO: 751792 - DNA, 75 bp, synthetic construct
  source 1..75: mol_type = other DNA
tttgtgtggccctcgcgctaagtggttgctcactggcaccggattatcagcgcccggcaatgcccgtgccgcagc

SEQ ID NO: 751793 - DNA, 75 bp, synthetic construct
  source 1..75: mol_type = other DNA
gactttctggcatttagccgcgcggcaaccggccgcctgcgtgacgaattagcgaaatatccttttgctgacggt

SEQ ID NO: 751794 - DNA, 75 bp, synthetic construct
  source 1..75: mol_type = other DNA
agcaaaataccccttcgctgatggcggattcgtgctgttttgtcattatcgctatctggcagtggaatatctgct

SEQ ID NO: 751795 - DNA, 75 bp, synthetic construct
  source 1..75: mol_type = other DNA
gaatgcaaaggcgcaaaaccgtggcttgctgcaagcggtggatgatttcactgcacaagcgcaactggataaagc

SEQ ID NO: 751796 - DNA, 75 bp, synthetic construct
  source 1..75: mol_type = other DNA
aatgggccaagaacagttaacgttattggtccagcatcttatcagatctcttgcaagggcgctggtgttgataaa

SEQ ID NO: 751797 - DNA, 75 bp, synthetic construct
  source 1..75: mol_type = other DNA
tgttgttctgccttgcttccggtgactttgacctttctgtcgcctccgtaattgcctgtgcgggtgtcaccacgg

SEQ ID NO: 751798 - DNA, 75 bp, synthetic construct
  source 1..75: mol_type = other DNA
ttatctccgcttgcttttattatattatcttccatgccagtattctctttgcgcattagtgagttttttgccatt

SEQ ID NO: 751799 - DNA, 75 bp, synthetic construct
  source 1..75: mol_type = other DNA
atgttgattttcaaacctattcccctcgtcatgttgcttaccgggtgcctgtcctccgcttggggggcgcagtta

SEQ ID NO: 751800 - DNA, 75 bp, synthetic construct
  source 1..75: mol_type = other DNA
atgtcttctgtttctacatcggggtctggcgcgcctaagtcgtcattcagcctcggccgtatctgggatcagtac

SEQ ID NO: 751801 - DNA, 75 bp, synthetic construct
  source 1..75: mol_type = other DNA
ggcggtggttatcaacctgactgaaagcttgtggattggcgtggcggcaggtttattactgggcgtactctgcgg

SEQ ID NO: 751802 - DNA, 75 bp, synthetic construct
  source 1..75: mol_type = other DNA
ctggcgcacctaagtcgtcattcagtatggggcgtatctgggatcaatacggcatgctggtggtctttgcggtac

SEQ ID NO: 751803 - DNA, 75 bp, synthetic construct
  source 1..75: mol_type = other DNA
aaccgacgacagcatcgccatttctatcgataacggagtgacggtgctttcctcacgtatcgcgctaatggaaac

SEQ ID NO: 751804 - DNA, 75 bp, synthetic construct
  source 1..75: mol_type = other DNA
cgtatacaggtttgcctgcaaacagtacagatattgcgccgcctgatataccggctggttatgcagccgttttca

SEQ ID NO: 751805 - DNA, 75 bp, synthetic construct
  source 1..75: mol_type = other DNA
gaaaaaataccgtgtgctactgaatcgcgttcagccggaagatgctccggatatagaatggcctgaaatgccaca

SEQ ID NO: 751806 - DNA, 75 bp, synthetic construct
  source 1..75: mol_type = other DNA
cggtggatatcactctgctcgaccagatcccagtcagtgctaatagtgatattacggtggaaaaaatgcagtatg

SEQ ID NO: 751807 - DNA, 75 bp, synthetic construct
  source 1..75: mol_type = other DNA
tgacgcttatctccaggtgcaaattaaagagtgggaacagttaaatttaatccccggcgaaagtcagatcttctt

SEQ ID NO: 751808 - DNA, 75 bp, synthetic construct
  source 1..75: mol_type = other DNA
tgaaagagaaaaatggtgagttattacaagtcgacaatgagttgacgcagaaacttgctgataaccagcttgaaa

SEQ ID NO: 751809 - DNA, 75 bp, synthetic construct
  source 1..75: mol_type = other DNA
tctggcgacacgctttcaagtatcgcttcacgtctcggcgtaagcaccaaagatttgcagcagtggaacaaactg

SEQ ID NO: 751810 - DNA, 75 bp, synthetic construct
  source 1..75: mol_type = other DNA
tgcaaccggccagcgggagcgggtggccgagttaaccctgatggcccgggagcaggggcgtgacgtccatatcct

SEQ ID NO: 751811 - DNA, 75 bp, synthetic construct
  source 1..75: mol_type = other DNA
ctggtgatcacccatctgaataaggaccggcgggcgctgaacagtctgatccatgacgcacggcgggagaacggg

SEQ ID NO: 751812 - DNA, 75 bp, synthetic construct
  source 1..75: mol_type = other DNA
ggctacggcaatgacctgctgatttcccgtcagacctgggacgccgaaaaaagcatcctgacccacgtgctggaa

SEQ ID NO: 751813 - DNA, 75 bp, synthetic construct
  source 1..75: mol_type = other DNA
aatacggttcttgctgcacgcttaccaacaaaccggccctcaccagaagcgattatggcaaactaccaactgaat

SEQ ID NO: 751814 - DNA, 75 bp, synthetic construct
  source 1..75: mol_type = other DNA
atgaataatactttgcggcagtggcttgaatttgatgagatgattacgccaaagataataaaagttatctactgg

SEQ ID NO: 751815 - DNA, 75 bp, synthetic construct
  source 1..75: mol_type = other DNA
gacgaattatgggcaatgaagacgcccggttcgtggcgctgcagaacagccgcaacggtgaaagcctgctggccg

SEQ ID NO: 751816 - DNA, 75 bp, synthetic construct
  source 1..75: mol_type = other DNA
agcttcgaatcagcgtatgtagcgctctcccgtatgaaacagcatacgcaggtatatacagatgaccggaaagga

SEQ ID NO: 751817 - DNA, 75 bp, synthetic construct
  source 1..75: mol_type = other DNA
cgtcatggctatgctgggtggtgacaaacgccttatcgaggcgcataaccaggcggtcactgaagctattcgtca

SEQ ID NO: 751818 - DNA, 75 bp, synthetic construct
  source 1..75: mol_type = other DNA
cgcaggcatctggcagatcattcctagcacggggcgcaattatggtttgaaacagacccgcaattatgacgcgcg

SEQ ID NO: 751819 - DNA, 75 bp, synthetic construct
  source 1..75: mol_type = other DNA
ggccatggcaacgatctgctgatttcccggcagacctgggatgcagagaaaagtttgctcacgatggtgcttgag

SEQ ID NO: 751820 - DNA, 75 bp, synthetic construct
  source 1..75: mol_type = other DNA
cgcggcagataaccgttccctggagtttctgctgaaagaagaaaaacttgcaggcgaaatcatcactggtaaaag

SEQ ID NO: 751821 - DNA, 75 bp, synthetic construct
  source 1..75: mol_type = other DNA
gttctggctcaggatcgccctgcaatcgggattgtatcgggtcaaggtggggctgcagggcaacgcgaacgagtg

SEQ ID NO: 751822 - DNA, 75 bp, synthetic construct
  source 1..75: mol_type = other DNA
ttcagcctgatgtttaccacaaaggtttttgtacacgaaaaaaagaacttgtgaaaacgtcgggacatcatgcaa

SEQ ID NO: 751823 - DNA, 75 bp, synthetic construct
  source 1..75: mol_type = other DNA
accgcccggttcggcataagccaggtgccggcgcgggtaacggcggcacccagcggaaagcgcctgcaggtggaa

SEQ ID NO: 751824 - DNA, 75 bp, synthetic construct
  source 1..75: mol_type = other DNA
tcatcccttgacgcaaattacaccattgacgctggaatcaatagcgaagtggccgttaatcacttaccgacaggg

SEQ ID NO: 751825 - DNA, 75 bp, synthetic construct
  source 1..75: mol_type = other DNA
aggcgctggaaatgtgctggcaggctatcgatcagggcgcttctggtgtggatatggggcgtaatattttccagt

SEQ ID NO: 751826 - DNA, 75 bp, synthetic construct
  source 1..75: mol_type = other DNA
atcttccagcgacgactttccggtcagtcgttcaggaggcaatcctgagttatctcgtcacattgatttaatgaa

SEQ ID NO: 751827 - DNA, 75 bp, synthetic construct
  source 1..75: mol_type = other DNA
aaaagagctgaagcagaatcacagatatctggatgagagtcttaaacgacttgctgtcgaattaaaaagggccgg

SEQ ID NO: 751828 - DNA, 75 bp, synthetic construct
  source 1..75: mol_type = other DNA
aaaagaactaaaagaaaaccaggaatacctcgatgagagcttaaaacgtctgtcggctgagttgaaacgtcttgg

SEQ ID NO: 751829 - DNA, 75 bp, synthetic construct
  source 1..75: mol_type = other DNA
cgacttatgccgcccaaaaattcggtcgaggtgcggcgctcgctctggctatggcaagcgcaggcctaggtgtaa

SEQ ID NO: 751830 - DNA, 75 bp, synthetic construct
  source 1..75: mol_type = other DNA
aggcaaaacttcactgccgcatcgataacgatgattcctatgaagatgcaatgattcaggcatacatcgaagcgt

SEQ ID NO: 751831 - DNA, 75 bp, synthetic construct
  source 1..75: mol_type = other DNA
tttacccctgcaataaaaattggctgcctgatgtacatctcgcaactgtacgagtaccggacaacgcttggcgat

SEQ ID NO: 751832 - DNA, 75 bp, synthetic construct
  source 1..75: mol_type = other DNA
cggcttatgccgcccgaaaattcggtcgaggcgcggcgctcgctcttgcaatggcaagcgcaggccttggtgtaa

SEQ ID NO: 751833 - DNA, 75 bp, synthetic construct
  source 1..75: mol_type = other DNA
cgcagcaaaacgaacgacagtccgttagcgatgcctccgaacagcaattccgcagccgtgaaaatacacgcggcc

SEQ ID NO: 751834 - DNA, 75 bp, synthetic construct
  source 1..75: mol_type = other DNA
acgcagatccagcagtacgacaacatgattaagcagggcatgtcactgcccagccgcatgttcaacaccatcact

SEQ ID NO: 751835 - DNA, 75 bp, synthetic construct
  source 1..75: mol_type = other DNA
gcatggagtcgcggacgcgcagcccgcatctggtaccacggcgaagacggtaaggagttcgtgcagcctgctgaa

SEQ ID NO: 751836 - DNA, 75 bp, synthetic construct
  source 1..75: mol_type = other DNA
tggtgcgtgaggatctgttcagcgcccaggagggagacggaacggcggacggggtactggttgagcgtctggttc

SEQ ID NO: 751837 - DNA, 75 bp, synthetic construct
  source 1..75: mol_type = other DNA
gaaaacctcatacggcagcacacccgctcacctgctgaagcgggccatcacggatacggaaatcgccgtaaccca

SEQ ID NO: 751838 - DNA, 75 bp, synthetic construct
  source 1..75: mol_type = other DNA
aagctggcaaacctcgccccggaactgattaccctgctggcagaggacaaactcgacgtggagcagtgtcaggcc

SEQ ID NO: 751839 - DNA, 75 bp, synthetic construct
  source 1..75: mol_type = other DNA
gtgcagttgtgttttcgattactgcaacactacccctcacccgtttgtgatgcgtcttgaggtacatcacagcgg

SEQ ID NO: 751840 - DNA, 75 bp, synthetic construct
  source 1..75: mol_type = other DNA
tggtcagcctgtatgacggtgagctttacgtccagcgtggggtgcagaagaagcctcagaacgaggagaccggag

SEQ ID NO: 751841 - DNA, 75 bp, synthetic construct
  source 1..75: mol_type = other DNA
atctgatgcaggagaaagcccgtctggaagccctgctgccggagggctggcagaaagatttcaccaccttcttca

SEQ ID NO: 751842 - DNA, 75 bp, synthetic construct
  source 1..75: mol_type = other DNA
cgtcttctcgggctgcctgaccacgacgcatccgttccgtatcagcctcactgtatctcacggcagcctgacgga

SEQ ID NO: 751843 - DNA, 75 bp, synthetic construct
  source 1..75: mol_type = other DNA
gcagaggggatcagtgttccgctgctcacgaaaatgacctccgaacgtacgctggcagtccaggcggcgctgatg

SEQ ID NO: 751844 - DNA, 75 bp, synthetic construct
  source 1..75: mol_type = other DNA
agcgcgccgccatgcatcccgccgagcagattgcaggtttccgtacgctggcagggcagggcaaaacccccgcgc

SEQ ID NO: 751845 - DNA, 75 bp, synthetic construct
  source 1..75: mol_type = other DNA
aagcaacggttaaaaccagcaaaataacggtgaaacctgccgaagccgccgccctcaaagccgcgcttgaggctg

SEQ ID NO: 751846 - DNA, 75 bp, synthetic construct
  source 1..75: mol_type = other DNA
gtccgcactatcccgtatccggcagagagtgtccgggaaatggctgactccattctcgcgcttggcctgatccag

SEQ ID NO: 751847 - DNA, 75 bp, synthetic construct
  source 1..75: mol_type = other DNA
gcgctggagaacgacaccgcgcgtcaggtgcaggtgtttgaagctgcctgtcagtcgggatggggcggtaaaccg

SEQ ID NO: 751848 - DNA, 75 bp, synthetic construct
  source 1..75: mol_type = other DNA
atgaggctggaaatcggagtgaaaacaatgaatacagtgcagattccaacaggtacgattaagacattcgggctg

SEQ ID NO: 751849 - DNA, 75 bp, synthetic construct
  source 1..75: mol_type = other DNA
ccggggttatttcgcaaccctgggttgacagcgtgaatgattacatcatggcacagggacatcacggccacggcg

SEQ ID NO: 751850 - DNA, 75 bp, synthetic construct
  source 1..75: mol_type = other DNA
cctcagcctggctggcgctacaaaaacactttgaagagatgaaagacgttactatcgcggatcttttcgcgaaag

SEQ ID NO: 751851 - DNA, 75 bp, synthetic construct
  source 1..75: mol_type = other DNA
cctgtcgattgttctctccatcggctttgataacttcgttgaactgctttctggcgcacacgcgatggacaagca

SEQ ID NO: 751852 - DNA, 75 bp, synthetic construct
  source 1..75: mol_type = other DNA
aacaaatgcaattgagcaggtcagagaggctgcggttaatgctctcttcagggagggggtattgtcatacacgca

SEQ ID NO: 751853 - DNA, 75 bp, synthetic construct
  source 1..75: mol_type = other DNA
tttattgttttctcatgcgctcaattattgaactattatcgtacgtcagtaacaaatgcaattgagcaggtcaga

SEQ ID NO: 751854 - DNA, 75 bp, synthetic construct
  source 1..75: mol_type = other DNA
ttatttcgatgaaggttgtgtttaatgtaatggatggttttgataagatttttttacccttggagttttctggtt

SEQ ID NO: 751855 - DNA, 75 bp, synthetic construct
  source 1..75: mol_type = other DNA
gctgccgctggcgtgctgcggttctacaagctgaacgcggcggatgtggtcgtcgtgccagccggaacactggtg

SEQ ID NO: 751856 - DNA, 75 bp, synthetic construct
  source 1..75: mol_type = other DNA
acaaggcttttccggttgtcgattcactgcatttttcactaacggatattgtcagcgaactgtcggtcccgcgcc

SEQ ID NO: 751857 - DNA, 75 bp, synthetic construct
  source 1..75: mol_type = other DNA
gatcgatgtggttctgcgcaatatgtttgttgcgactgccaccggtcccatgctgcgcctgctggcctgggcggt

SEQ ID NO: 751858 - DNA, 75 bp, synthetic construct
  source 1..75: mol_type = other DNA
cgttaattgccctgtatgagcataaaatttttactcagggcgcaatactgaatatttgttcgtttgatcagtggg

SEQ ID NO: 751859 - DNA, 75 bp, synthetic construct
  source 1..75: mol_type = other DNA
gctgctgtccggcgcacacgcgatggataaacacttcgccaccacgcctgcagagaaaaacctgccggttctgct

SEQ ID NO: 751860 - DNA, 75 bp, synthetic construct
  source 1..75: mol_type = other DNA
cagggcaatatggaatccaacggcaaatacgttgaccgtaacggtaacgtagtggattaccagactggcccgatt

SEQ ID NO: 751861 - DNA, 75 bp, synthetic construct
  source 1..75: mol_type = other DNA
aacaagatgttggctgcgcgctgggggtgcacagaggtatgggtgagtaaaatcattaacgatgaaaatagaaag

SEQ ID NO: 751862 - DNA, 75 bp, synthetic construct
  source 1..75: mol_type = other DNA
tcgagtgtgtgcagacgctctcccgcctgaaccgcacctatccgggcaaagcggaatcgggtacttttgtcctcg

SEQ ID NO: 751863 - DNA, 75 bp, synthetic construct
  source 1..75: mol_type = other DNA
tcgcagaaggtgaaggtgattgtggagcacttccgcaaacatgtgatgcatctgcttggcggccaggccaaagcg

SEQ ID NO: 751864 - DNA, 75 bp, synthetic construct
  source 1..75: mol_type = other DNA
ctgccggacaacttattaaaaatcctcgccagttttgtccatttgcatattgaagaaaaagaggagtggaacggg

SEQ ID NO: 751865 - DNA, 75 bp, synthetic construct
  source 1..75: mol_type = other DNA
tcgcttaaagactggattgccaatcttcctgcatgggatggtgttccccgtatagatactttcttctgtcggcac

SEQ ID NO: 751866 - DNA, 75 bp, synthetic construct
  source 1..75: mol_type = other DNA
gggagaacgctgaaacactggctaagtctattcttggggattatgaggtcaaagatgaggtctggatgtcatgcg

SEQ ID NO: 751867 - DNA, 75 bp, synthetic construct
  source 1..75: mol_type = other DNA
ttgttaaaccagaaatttactgaaataaacatgaaccccggcctgaaagggcgggatatgcgcaaagccttcgac

SEQ ID NO: 751868 - DNA, 75 bp, synthetic construct
  source 1..75: mol_type = other DNA
aacgacgcccagcaggagatgatggtgcaatacctctctaatcctgaactggcgaagggctttgcccgcgtggtg

SEQ ID NO: 751869 - DNA, 75 bp, synthetic construct
  source 1..75: mol_type = other DNA
cagccgcaggagtgggagaagtttgccaaaatttaccctaccgataccgaacgtcatttcctcgatgcgctggtg

SEQ ID NO: 751870 - DNA, 75 bp, synthetic construct
  source 1..75: mol_type = other DNA
gcgcactcaagtcagacgggaacgactgctcgacagcttcgcgaagtgctgatggcggaaaaaatagatgaagaa

SEQ ID NO: 751871 - DNA, 75 bp, synthetic construct
  source 1..75: mol_type = other DNA
gcagtacaaaaagacccgcctgccgaaagatcccgccaccaataaaccggaaccgctgctgacctttaagcgcgg

SEQ ID NO: 751872 - DNA, 75 bp, synthetic construct
  source 1..75: mol_type = other DNA
aatacctgattcagcacagcgcaggttccggaaagtcgaactccattgcctggaccgcccaccagctctctcgtc

SEQ ID NO: 751873 - DNA, 75 bp, synthetic construct
  source 1..75: mol_type = other DNA
acagagggcgggtctatctggtttacctccaccgaactagctaaggctctcggctataaaaaaactgatgccatc

SEQ ID NO: 751874 - DNA, 75 bp, synthetic construct
  source 1..75: mol_type = other DNA
tgatcactactccggtaggccgttaactcgactggctgtcgaactcacgttgttggttttcatccgttcaagcga

SEQ ID NO: 751875 - DNA, 75 bp, synthetic construct
  source 1..75: mol_type = other DNA
gtaagcggaacattgctgagttgaagacacgggatttgcttgtacccatcaaagcggtggagtcatccgggcgtc

SEQ ID NO: 751876 - DNA, 75 bp, synthetic construct
  source 1..75: mol_type = other DNA
ctggcgctggggaaataccctgaagtgtcgctggcggatgcccgggcacgccgggatgaggcccgtaaactatta

SEQ ID NO: 751877 - DNA, 75 bp, synthetic construct
  source 1..75: mol_type = other DNA
cacatattgctgttatgggtatggagcgtattgctccgacattccaggaggtggatgttctgattaccatgcttg

SEQ ID NO: 751878 - DNA, 75 bp, synthetic construct
  source 1..75: mol_type = other DNA
gaagtatataaaaatattgctgtttattttgttatttttgggttgaatattattattgcaaattttttattgggt

SEQ ID NO: 751879 - DNA, 75 bp, synthetic construct
  source 1..75: mol_type = other DNA
tacagtacattctgccgaaactatggcttactcgcctggcgggttggggcgcaagcaagcgggcaggatggctga

SEQ ID NO: 751880 - DNA, 75 bp, synthetic construct
  source 1..75: mol_type = other DNA
aacatctggatgagcgcaagctgatgttgcagtggtgggctgattttctggatgccaatcgggagagagcgatta

SEQ ID NO: 751881 - DNA, 75 bp, synthetic construct
  source 1..75: mol_type = other DNA
ccaatcagaaatggtcggaagatcatgctaatcgcgtaaaaaagagcctggaggacaatatcttcccggcaattg

SEQ ID NO: 751882 - DNA, 75 bp, synthetic construct
  source 1..75: mol_type = other DNA
ggtcgaaggatgcggtggaaaggcagatgagccatatggaacgcaattcggtgagggcggcgtatatccataaag

SEQ ID NO: 751883 - DNA, 75 bp, synthetic construct
  source 1..75: mol_type = other DNA
aacacttgggggagcgcaggctaatgctgcagtggtgggcagattatctggatgctaatcgggagaaggtggtta

SEQ ID NO: 751884 - DNA, 75 bp, synthetic construct
  source 1..75: mol_type = other DNA
catactgacagaacttcagacatgggctggtgaaaatggtctgatatttacgggtgcacatgacccgcgtaaacc

SEQ ID NO: 751885 - DNA, 75 bp, synthetic construct
  source 1..75: mol_type = other DNA
gatcctgaagcagataaaacagttctgtggcgaacatgagctgatttttattggcgatcacgatccgcgtaagcc

SEQ ID NO: 751886 - DNA, 75 bp, synthetic construct
  source 1..75: mol_type = other DNA
cacatcggcaggttatggcagagaccaaaataacaccatcaacagaacgccgtataacaggaatattcaattacg

SEQ ID NO: 751887 - DNA, 75 bp, synthetic construct
  source 1..75: mol_type = other DNA
tggtacaaaccccagtttaagaaggaatatcagacgctccactatgagaatgtctggtattacgttcttgctcgc

SEQ ID NO: 751888 - DNA, 75 bp, synthetic construct
  source 1..75: mol_type = other DNA
ggtcaggcaggaggcttatctcagtcaaatttatttcggaagtatcttttattcgtcatcactggattgagttca

SEQ ID NO: 751889 - DNA, 75 bp, synthetic construct
  source 1..75: mol_type = other DNA
atgaaataaacgcgtggcgtaatgcgatggaggcggcgaactacacgtttgaccacaatggccggaaatgggact

SEQ ID NO: 751890 - DNA, 75 bp, synthetic construct
  source 1..75: mol_type = other DNA
ctggacattctctcttattgctggttggtacaagccccagtttaagaaggaatatcagacgctccactatgagaa

SEQ ID NO: 751891 - DNA, 75 bp, synthetic construct
  source 1..75: mol_type = other DNA
aatcgtacaggcacggtagtacgaatttcgttatacttaatagcgcaaatacagataattttgaaattaacattg

SEQ ID NO: 751892 - DNA, 75 bp, synthetic construct
  source 1..75: mol_type = other DNA
actcttcactttttattgcttatatgggctgtcttggatggggaagcgcttatttctatggatggggtacttcct

SEQ ID NO: 751893 - DNA, 75 bp, synthetic construct
  source 1..75: mol_type = other DNA
cgtatgtgtacaaccttacctaaaacacacattgctgtgatgggtatggaacgtattgcaccaacattccaagag

SEQ ID NO: 751894 - DNA, 75 bp, synthetic construct
  source 1..75: mol_type = other DNA
cgaaataacgccatcaacagaacgccgtataaccggaatattcaattacgtaaacagtcatccggcattgtggaa

SEQ ID NO: 751895 - DNA, 75 bp, synthetic construct
  source 1..75: mol_type = other DNA
ttgttaaatccaaatcaatggtgactgaggaaattggcatgaatgccgttcttcagaaagccgggatacccgtga

SEQ ID NO: 751896 - DNA, 75 bp, synthetic construct
  source 1..75: mol_type = other DNA
cttattgcgctgagtgaagcggcagagcaggcgatgttcaccaaagggatggaaatccacgttcgccagcgcacc

SEQ ID NO: 751897 - DNA, 75 bp, synthetic construct
  source 1..75: mol_type = other DNA
aggcgatgttcaccaaagggatggaaatccacgtccggcagcgcaccatgaagaaagagctggaaaagctgacca

SEQ ID NO: 751898 - DNA, 75 bp, synthetic construct
  source 1..75: mol_type = other DNA
gatggaagcggcgaactacacgtttgagcacaatggccggaaatgggactacgggaagtcaacgcagacgcgtct

SEQ ID NO: 751899 - DNA, 75 bp, synthetic construct
  source 1..75: mol_type = other DNA
gagccatatggaacgcaattcggtgagggcggcgtatatccataaagcggaacatcttgatgagcgcaagctgat

SEQ ID NO: 751900 - DNA, 75 bp, synthetic construct
  source 1..75: mol_type = other DNA
tattggttttcatccgttcgagcgagctgcattttgcccgctggtcagaagtagattttgaaacggctatgtgga

SEQ ID NO: 751901 - DNA, 75 bp, synthetic construct
  source 1..75: mol_type = other DNA
ccgggatgaggctcgtaagcttttagctaatggtgtcgatcccagtgaaaacaagaaagctgttaaggtagaaca

SEQ ID NO: 751902 - DNA, 75 bp, synthetic construct
  source 1..75: mol_type = other DNA
tcgctgattgaatcaggattgtggtcgagggatgcagtggaacggcagatgtgtagtggtcaagtaatactggcc

SEQ ID NO: 751903 - DNA, 75 bp, synthetic construct
  source 1..75: mol_type = other DNA
gaggataatctctttgctgctatcggcaaacgcaatattgctgacctgaagacacgagatctgcttgtgcccatt

SEQ ID NO: 751904 - DNA, 75 bp, synthetic construct
  source 1..75: mol_type = other DNA
ttgttcccttgtcgcgacaagctctcgcaattttggaaaagatcaaaagcatgagtggaaaccgtgagctaattt

SEQ ID NO: 751905 - DNA, 75 bp, synthetic construct
  source 1..75: mol_type = other DNA
tagcgctcgtgtattgaaaagcctcgaagataatctctttgctgccattggtaagcggaacattacggagcttaa

SEQ ID NO: 751906 - DNA, 75 bp, synthetic construct
  source 1..75: mol_type = other DNA
gggggaaattcagggataaagaagatgaattatcttcaatgtttaaagataattgttttgaacaatttgtccctg

SEQ ID NO: 751907 - DNA, 75 bp, synthetic construct
  source 1..75: mol_type = other DNA
ggactgacagaaatcgccgttaacagaccaaatgagctgtttttaaaggtcagaggtaaatggcagcagcatgaa

SEQ ID NO: 751908 - DNA, 75 bp, synthetic construct
  source 1..75: mol_type = other DNA
tcatggtcaatagggcgggaaaacccactgcagaactatggtgaagatcgtgaaaattaccttctgcttcctgtg

SEQ ID NO: 751909 - DNA, 75 bp, synthetic construct
  source 1..75: mol_type = other DNA
tcaaaaatgcgtacaacgcatctagtgcctctttcaacgcaagctcttgcaattttaaagcagataaaacagttt

SEQ ID NO: 751910 - DNA, 75 bp, synthetic construct
  source 1..75: mol_type = other DNA
gtaagcggaacattgctgaattgaagacacgggatctgcttgtgcccattaaggctgtggaatcatccggacgac

SEQ ID NO: 751911 - DNA, 75 bp, synthetic construct
  source 1..75: mol_type = other DNA
tgtggggcccatgacttgatatttattggtgatcacgattcgcacaaacccatgagtgagaatacggtaaatagt

SEQ ID NO: 751912 - DNA, 75 bp, synthetic construct
  source 1..75: mol_type = other DNA
acgcggttagctgtggatttgacgttactggttttcatccgttcgagcgagttacgttttgctcgctggacagaa

SEQ ID NO: 751913 - DNA, 75 bp, synthetic construct
  source 1..75: mol_type = other DNA
ccaaccaaaaatggtcggaagatcatgctaatcgtgtaaaaaagagcctggaggacaatatcttcccggcaattg

SEQ ID NO: 751914 - DNA, 75 bp, synthetic construct
  source 1..75: mol_type = other DNA
ggaagaagcacgtactttcgaacaacttgctattgagtggcatgccacaaataaaaagtggtcggaagaacatag

SEQ ID NO: 751915 - DNA, 75 bp, synthetic construct
  source 1..75: mol_type = other DNA
caagagacgctgttgaacgtcagatgagccatcaggaacgaaacaatgtccgtgcggcttacatccatcttgcag

SEQ ID NO: 751916 - DNA, 75 bp, synthetic construct
  source 1..75: mol_type = other DNA
ttggaggagaatatcttcccggcaattggtactcgcaacattgctgaactaggcacccgcgatctgttaattcct

SEQ ID NO: 751917 - DNA, 75 bp, synthetic construct
  source 1..75: mol_type = other DNA
gcccatgagtgaaaacacggtgaacagtgcattgcgggtgatgggctatgacaccaaggttgaggtttgcggcca

SEQ ID NO: 751918 - DNA, 75 bp, synthetic construct
  source 1..75: mol_type = other DNA
aacatctggatgagcgtaagttgatgctgcaatggtgggctgattttctggatgcgaaccgggagaagggaatta

SEQ ID NO: 751919 - DNA, 75 bp, synthetic construct
  source 1..75: mol_type = other DNA
cgagggatgcggtagagcgtcagatgagccatatggaacgtaactccgttcgagcggcttatatccataaggcag

SEQ ID NO: 751920 - DNA, 75 bp, synthetic construct
  source 1..75: mol_type = other DNA
gcggcttacattcacaaggcggagtttctggatgaacgaagactgatgctgcaatggtggggggattttatcgac

SEQ ID NO: 751921 - DNA, 75 bp, synthetic construct
  source 1..75: mol_type = other DNA
gttgcagtggtgggctgattatctggatgcgaatcgggagaggggggttagtccgtttgacttcgggaaacagtt

SEQ ID NO: 751922 - DNA, 75 bp, synthetic construct
  source 1..75: mol_type = other DNA
tcattggcgatcatgatttcagaaaacctatgagcgaaaacacagtcaacaaggcactaaggtcgatgggttatg

SEQ ID NO: 751923 - DNA, 75 bp, synthetic construct
  source 1..75: mol_type = other DNA
atggcccttaccgatatcaaagttaggactactaagccttccgacaaacccttcaaacttacagatgggcagggt

SEQ ID NO: 751924 - DNA, 75 bp, synthetic construct
  source 1..75: mol_type = other DNA
ccgtttcgggggcaaacagaaagttttagcattgggtgtttatccaatggtctctcttggtgaagcccgcaggaa

SEQ ID NO: 751925 - DNA, 75 bp, synthetic construct
  source 1..75: mol_type = other DNA
aaatataggtttcataacatgcggcaaacgttctgacgaggctgtaggttcgcttggatgtacggtatatgggga

SEQ ID NO: 751926 - DNA, 75 bp, synthetic construct
  source 1..75: mol_type = other DNA
ggcggtgacgaagttgaagtgaccgaagtgatggtgaaagtgggcgacaaagttgccgctgaacagtcactgatt

SEQ ID NO: 751927 - DNA, 75 bp, synthetic construct
  source 1..75: mol_type = other DNA
gcaggtggctcgattcctgcaggctgcgtccgtgtttaatggcgttgcggcgttttcagccctggtggggtatct

SEQ ID NO: 751928 - DNA, 75 bp, synthetic construct
  source 1..75: mol_type = other DNA
accgaagcacaggccgacgctgcgacgcgctttttttctcatcttgacgccatgattcgccacagcacaaaggcg

SEQ ID NO: 751929 - DNA, 75 bp, synthetic construct
  source 1..75: mol_type = other DNA
cgcaagccaacaggagcgagacgctgctaacgcatcagccagtgctctcccgatttctgttaagggcagtaagca

SEQ ID NO: 751930 - DNA, 75 bp, synthetic construct
  source 1..75: mol_type = other DNA
gtgaagaagatgatttttgtcgcggcattgttggtgaatatccaacaagtgcatgcttcagcagctattgtagcc

SEQ ID NO: 751931 - DNA, 75 bp, synthetic construct
  source 1..75: mol_type = other DNA
ccttcacggccctggtggggtatataccgttcagttctgccagttacggcatccccggtctgttgatgctggccg

SEQ ID NO: 751932 - DNA, 75 bp, synthetic construct
  source 1..75: mol_type = other DNA
tcgttacattatagaagcaattcttgaattatctaggaagttaaatataaaaactatcgtggaaggagttgaaac

SEQ ID NO: 751933 - DNA, 75 bp, synthetic construct
  source 1..75: mol_type = other DNA
ctgggccttcatcgacaaactagccacgggccgtcgtctggttattactgccgaccatgggtattcaaaccccgc

SEQ ID NO: 751934 - DNA, 75 bp, synthetic construct
  source 1..75: mol_type = other DNA
acgcctgcaggccgggcgctggtttgcaccagcgtatgccctccatctgttgtgtatcggctttattgtcagtgt

SEQ ID NO: 751935 - DNA, 75 bp, synthetic construct
  source 1..75: mol_type = other DNA
accgctcagttctgccagttacggcatccccggtctgctgatgctcgccggggcgctgctggtatgggaagtcag

SEQ ID NO: 751936 - DNA, 75 bp, synthetic construct
  source 1..75: mol_type = other DNA
gccatctggctgttgctggtcgccctgcttaatgcccgacacggtgatgtgatgatgttgtcaggtgtgtttctg

SEQ ID NO: 751937 - DNA, 75 bp, synthetic construct
  source 1..75: mol_type = other DNA
agctggtggagaagtgggaaaaaggaaagatgcgtctgctgtgggataacaaaaagcggcgtaacgaagcgctgg

SEQ ID NO: 751938 - DNA, 75 bp, synthetic construct
  source 1..75: mol_type = other DNA
gcacggatagccatgtctgcactggcagaggaaaccggtcggcgtactgcggatattgataataacctcaatgcg

SEQ ID NO: 751939 - DNA, 75 bp, synthetic construct
  source 1..75: mol_type = other DNA
tgaaccggatgaatgaaacggaagcagcacgacatcagcgtgaaattgcgcgtattaatgccatgcagtacgccg

SEQ ID NO: 751940 - DNA, 75 bp, synthetic construct
  source 1..75: mol_type = other DNA
ggataaacagcgtcagcgataccagacacagttcagtctgcaacaaaaatatcagcagaagctggaacagctgga

SEQ ID NO: 751941 - DNA, 75 bp, synthetic construct
  source 1..75: mol_type = other DNA
cgctattgctcgaggggaaatcaagttaagcgatcccacaacaaaatactggcctgaacttaccgctaaacagtg

SEQ ID NO: 751942 - DNA, 75 bp, synthetic construct
  source 1..75: mol_type = other DNA
acaccaacctcattaaatatagacgctgtttccggtaaatatttgaaatataccttaattgattatggtaaagct

SEQ ID NO: 751943 - DNA, 75 bp, synthetic construct
  source 1..75: mol_type = other DNA
atgatcattaacggtgtgaccaacgaggtcgcattgcagccgcatccggtaacagacaaccaggttcagccgtat

SEQ ID NO: 751944 - DNA, 75 bp, synthetic construct
  source 1..75: mol_type = other DNA
gcccgatattgttttgagtgcacaagattcagatattatcaaaacttacgttgcgctgggattagggatcggcct

SEQ ID NO: 751945 - DNA, 75 bp, synthetic construct
  source 1..75: mol_type = other DNA
cactggactttcaatagaggatattaagcgacaggttatggaaagtaatgaaatagaatttgattaccagatata

SEQ ID NO: 751946 - DNA, 75 bp, synthetic construct
  source 1..75: mol_type = other DNA
tttgcgaggctgcccgtcaggattacaatctgacagaagttgccaatatactctacacttcacagtcaggggtaa

SEQ ID NO: 751947 - DNA, 75 bp, synthetic construct
  source 1..75: mol_type = other DNA
gcagattgcagcactgcaggaaaaaattcagcgagcaaagaaatttccgtggacgaacgcgtccaccacggtgga

SEQ ID NO: 751948 - DNA, 75 bp, synthetic construct
  source 1..75: mol_type = other DNA
gtttcagaattttacggcggatgcggataatgcggcgggaacggcagaacagatgtttacagtggcattcagcag

SEQ ID NO: 751949 - DNA, 75 bp, synthetic construct
  source 1..75: mol_type = other DNA
cgtcagattgacagtgtgaaacaggccggtgcggggctgcaggaattacagcgtattcagcagcagatccgacag

SEQ ID NO: 751950 - DNA, 75 bp, synthetic construct
  source 1..75: mol_type = other DNA
cagtgccggtgcgaccgcctctgagctacccggtgataccacgccgtttgctcgggccatggggtttgggcagcg

SEQ ID NO: 751951 - DNA, 75 bp, synthetic construct
  source 1..75: mol_type = other DNA
tcaccttcctgcaaggctttgttgatatgttcccgctggcctgggcagggatctccatgttctttatgcgcttta

SEQ ID NO: 751952 - DNA, 75 bp, synthetic construct
  source 1..75: mol_type = other DNA
attgaagaattcaaggatcaatatagacgccatctccaaaacttagatagagtcggctttagcgacgaagatatt

SEQ ID NO: 751953 - DNA, 75 bp, synthetic construct
  source 1..75: mol_type = other DNA
aaacaatacaaaacagcatcaccaaatcagagtttaaaaaatacgttgattttatacatgatgattctattccac

SEQ ID NO: 751954 - DNA, 75 bp, synthetic construct
  source 1..75: mol_type = other DNA
agcatgctcatcaggaatcgccacacaaaaactatccgggaactcgcgaatgagctggggcgctcgccatccacg

SEQ ID NO: 751955 - DNA, 75 bp, synthetic construct
  source 1..75: mol_type = other DNA
ttgagcaagccgtatctagaataaagcaacttgaagcatctaacagcgaattacaaagccgagtacaacaagaaa

SEQ ID NO: 751956 - DNA, 75 bp, synthetic construct
  source 1..75: mol_type = other DNA
gctgatgcaaatccccggcggctggctgcttgataagtttggctcgaaaaaagtttacacctatagcctcttttt

SEQ ID NO: 751957 - DNA, 75 bp, synthetic construct
  source 1..75: mol_type = other DNA
ggtggtttatgaccttgggaaaaaagcggcagcggactttatgcaacagcaggcccgtgatggtggtcggttaag

SEQ ID NO: 751958 - DNA, 75 bp, synthetic construct
  source 1..75: mol_type = other DNA
cttcagcaacatgggaaatggcctggcaacttttgtcactaccggcaaactcaatttcaaatccttcacctcttc

SEQ ID NO: 751959 - DNA, 75 bp, synthetic construct
  source 1..75: mol_type = other DNA
ccgaccaggctgtcagggatgcggcgatacaacgtgaaaatgaacgttacgagaaagccctggcatccggtaaga

SEQ ID NO: 751960 - DNA, 75 bp, synthetic construct
  source 1..75: mol_type = other DNA
tcatgatagtttctccatggctgacctggcaaaggctggagcaaaccggttttcttgattccatgattgcggcgt

SEQ ID NO: 751961 - DNA, 75 bp, synthetic construct
  source 1..75: mol_type = other DNA
gttgcagtctcccgtgcgaaggacagttttctggtcttcggcgatatggacctgtttgaggtccagccagcctca

SEQ ID NO: 751962 - DNA, 75 bp, synthetic construct
  source 1..75: mol_type = other DNA
gatggtataacgagcggcgtataaaattatcgctgggtgccgtcagtcccaaaatgtaccaccaacaatgcgggc

SEQ ID NO: 751963 - DNA, 75 bp, synthetic construct
  source 1..75: mol_type = other DNA
actccaccacagaaccagatacagcgatcacctggtggagttggtaactgaactgcgtgatgagaaggggatgac

SEQ ID NO: 751964 - DNA, 75 bp, synthetic construct
  source 1..75: mol_type = other DNA
cgataaaagggattggcagtgtactgggatttgatctcagcagcctttccctgaatgccaatgggggatttatca

SEQ ID NO: 751965 - DNA, 75 bp, synthetic construct
  source 1..75: mol_type = other DNA
cgttactggcaacagcttgaagttgtgcagggtaactggaaaaacggtgccatgcgggcgtttcagaattttacg

SEQ ID NO: 751966 - DNA, 75 bp, synthetic construct
  source 1..75: mol_type = other DNA
acaggtggaagggcagattgcggtggccagacagtcagcaggcaccgccacggacaggatgacagaagcacataa

SEQ ID NO: 751967 - DNA, 75 bp, synthetic construct
  source 1..75: mol_type = other DNA
accagaaagggcttgatgcggcagttgaagatgtacctgaggatcgatacggtttcggtaatatcgcagaaaata

SEQ ID NO: 751968 - DNA, 75 bp, synthetic construct
  source 1..75: mol_type = other DNA
atgtcctggctttatcccgatcggggagactttattgccgtggtcggcagaatgcaggatatcaacgccgttcgt

SEQ ID NO: 751969 - DNA, 75 bp, synthetic construct
  source 1..75: mol_type = other DNA
tgagtgcagccatgaaagaaagtggcctgttgatcgctaaaatttgtgcctgcgtgattgccggagtggtggtta

SEQ ID NO: 751970 - DNA, 75 bp, synthetic construct
  source 1..75: mol_type = other DNA
aaaaaacacgcgaaacccgtaatgatgaggccacccggttattgctgcagtacagtcagcaacaggcacaggtgg

SEQ ID NO: 751971 - DNA, 75 bp, synthetic construct
  source 1..75: mol_type = other DNA
gttcctgatgaagcgctggcatatctccggcgtaactgtctggtgaatatgggcgatatacccgttaccagcaga

SEQ ID NO: 751972 - DNA, 75 bp, synthetic construct
  source 1..75: mol_type = other DNA
attatcaggaacagcagaaacgccggaatgcagaaaatgctgcgctgaaccggatgaatgaaacggaagccacac

SEQ ID NO: 751973 - DNA, 75 bp, synthetic construct
  source 1..75: mol_type = other DNA
gggacctgaagccattctgccactgcgccgtggtgctgacggtaagctgggggttgtggcaaatattggtggttc

SEQ ID NO: 751974 - DNA, 75 bp, synthetic construct
  source 1..75: mol_type = other DNA
tgatctggcaaaaatcatgtcgcagatggtcatgatgcaggcagtgaaggggattggttcggcgtttggctgggg

SEQ ID NO: 751975 - DNA, 75 bp, synthetic construct
  source 1..75: mol_type = other DNA
cttgagaatcagcctggagcagatgtctggataacctgggctgactgggcggccagtaatcctgatattggtgat

SEQ ID NO: 751976 - DNA, 75 bp, synthetic construct
  source 1..75: mol_type = other DNA
agccgtggtcgcggcctgctaccgttcaagactggagcatttcacgcggcaattgcggcgggcgtcccgattatt

SEQ ID NO: 751977 - DNA, 75 bp, synthetic construct
  source 1..75: mol_type = other DNA
gacccgcacagcaaagtcagaagtaaggcgctcaaggctgacggctaatgagtatgtcgcgatttaccatgcagc

SEQ ID NO: 751978 - DNA, 75 bp, synthetic construct
  source 1..75: mol_type = other DNA
tcatgaccgatacccaggccaccaatatggtcggttgctatagcggtaaaccgctgaatacgcaaaatattgata

SEQ ID NO: 751979 - DNA, 75 bp, synthetic construct
  source 1..75: mol_type = other DNA
attgttaatgatggaggaggaaaaagcaatacgtctggaaccggactttgggaggatatagcaggtcgaaaaggg

SEQ ID NO: 751980 - DNA, 75 bp, synthetic construct
  source 1..75: mol_type = other DNA
ccttattgctgcgctgataatatggaccgcaaacctattgaagatgtgatcttcgaaattaataactttatctcg

SEQ ID NO: 751981 - DNA, 75 bp, synthetic construct
  source 1..75: mol_type = other DNA
gggacccaaggacgggtaaagagttcggattaggccgagacaggaggatagcaatcactgaagcaatacaggcca

SEQ ID NO: 751982 - DNA, 75 bp, synthetic construct
  source 1..75: mol_type = other DNA
gccgagcataacagcttgcgggctgcctcgctggcacagattaacaatcctcatgtggcgatgaatattcacatg

SEQ ID NO: 751983 - DNA, 75 bp, synthetic construct
  source 1..75: mol_type = other DNA
gatagcagtttcagaggctattcaggccaatattgagttgctatctgagaacaggcgtgagtcactgatagacag

SEQ ID NO: 751984 - DNA, 75 bp, synthetic construct
  source 1..75: mol_type = other DNA
agtcactgatagacagaattaaaggcgctgacgcaatcactcttcatgcgtggcttgaccgatatgaaacaatcc

SEQ ID NO: 751985 - DNA, 75 bp, synthetic construct
  source 1..75: mol_type = other DNA
agtatgtcgcgatttaccatgcagccgaacctctcccaatctggctgaggctggcaatggatttggctgtcgtta

SEQ ID NO: 751986 - DNA, 75 bp, synthetic construct
  source 1..75: mol_type = other DNA
gtggagtatttagagaaatacgcagatttttattacgatctgggcgagaaagcacaggatgacctggcaaacaaa

SEQ ID NO: 751987 - DNA, 75 bp, synthetic construct
  source 1..75: mol_type = other DNA
gaaaacgctgaagggcggcattgaaaacatgatccgctgtgcctttcgtgaaaatgctgattatgacgtcagaaa

SEQ ID NO: 751988 - DNA, 75 bp, synthetic construct
  source 1..75: mol_type = other DNA
ggtgttaaccgtgctggccaatatgtttgtggccacagccagcgggagcatgttgcgtctgctggcctgggcggt

SEQ ID NO: 751989 - DNA, 75 bp, synthetic construct
  source 1..75: mol_type = other DNA
ctgtggggaggcgcagtatctgaaatttggcgatgaatccacgccttttggccttaaatgggagaaggacagccc

SEQ ID NO: 751990 - DNA, 75 bp, synthetic construct
  source 1..75: mol_type = other DNA
gtgaatacccagggccaccacggacacggtgatgatctgcagtgttatgccatgccggaaaccagtcacaccctg

SEQ ID NO: 751991 - DNA, 75 bp, synthetic construct
  source 1..75: mol_type = other DNA
cagacagagcgcattaacggtcgcgtgtatgagctggccaccagtgaggatgtagtgatcgcttccggtacggcc

SEQ ID NO: 751992 - DNA, 75 bp, synthetic construct
  source 1..75: mol_type = other DNA
tgttgcgtctgctggcgtgggcggtgaacgtcacggcaaaaccggcgagcgcggcacagggtgtgatccgcttct

SEQ ID NO: 751993 - DNA, 75 bp, synthetic construct
  source 1..75: mol_type = other DNA
gtccggcccgtggaccaacaacgtcgcgccaggcaaaaacatttccactatggggcgctactttaaggatgcggg

SEQ ID NO: 751994 - DNA, 75 bp, synthetic construct
  source 1..75: mol_type = other DNA
ccgtggcgcaaagatgcacaaccgcgctggatgggggcgtttcgtccacgcccacaggatggttattctccagtg

SEQ ID NO: 751995 - DNA, 75 bp, synthetic construct
  source 1..75: mol_type = other DNA
ttcgcagcaaaatgcatgacgccttattggattacatggacaaaattcgcgatccgttccgcagttaccaatgga

SEQ ID NO: 751996 - DNA, 75 bp, synthetic construct
  source 1..75: mol_type = other DNA
tattatgcgtaagctgtttgaccgctactatggcgaggttgctgaagaagggacgtttttgtttccacacgttgc

SEQ ID NO: 751997 - DNA, 75 bp, synthetic construct
  source 1..75: mol_type = other DNA
agcgggcattgacctgggcgcgtcaggaacgtgcgacgctgcgtaaaacgatgggcaaaccgcccgttgatgacg

SEQ ID NO: 751998 - DNA, 75 bp, synthetic construct
  source 1..75: mol_type = other DNA
ttgccatcatcgccctgtccgccagcgcactgagctatgccgccagcccgcaaatggtttcccgcagcgaagcag

SEQ ID NO: 751999 - DNA, 75 bp, synthetic construct
  source 1..75: mol_type = other DNA
atttatggcgcaggtaacaaagtttccggtcaggcggagtgcgtgtcacaactccttgaggtcgaacaggtagaa

SEQ ID NO: 752000 - DNA, 75 bp, synthetic construct
  source 1..75: mol_type = other DNA
atgatacaacctatttccggccctcctcctgggcaaccaccaggtcagggagataatctgccgtctggcacgggc

SEQ ID NO: 752001 - DNA, 75 bp, synthetic construct
  source 1..75: mol_type = other DNA
cttaatcagctttatcaacggcgggttaaagggattgatccgcgtgatatgcaaccgctgcttaatccttttcca

SEQ ID NO: 752002 - DNA, 75 bp, synthetic construct
  source 1..75: mol_type = other DNA
gatatttaatccgaaaacgggtaaaaccgtgatgctggcctttgatcatggttattttcaggggccgactaccgg

SEQ ID NO: 752003 - DNA, 75 bp, synthetic construct
  source 1..75: mol_type = other DNA
atctccgaattgaaagcacaacgcaatgactctgttggaataaatgcagaatatgtacttaatcgccttattgaa

SEQ ID NO: 752004 - DNA, 75 bp, synthetic construct
  source 1..75: mol_type = other DNA
gcccattaaagactggcctaaggtgtggcgtacaacgctatcaggaatggatgtcgtcgagatggcatcagcaga

SEQ ID NO: 752005 - DNA, 75 bp, synthetic construct
  source 1..75: mol_type = other DNA
attcaacagcagaacccgctctggttaatgccattgagcaaggccttcgggcagaggaagcttctgataacgaca

SEQ ID NO: 752006 - DNA, 75 bp, synthetic construct
  source 1..75: mol_type = other DNA
atggctgatttagatgacatcaaagatggcaaggatttccataccgatacgccgcagcgcaacaccccgttcacg

SEQ ID NO: 752007 - DNA, 75 bp, synthetic construct
  source 1..75: mol_type = other DNA
taccaccctttcctgtattatggcggggcgtaatggggaggccgtaaggcctgctggtttctttggtgccagtct

SEQ ID NO: 752008 - DNA, 75 bp, synthetic construct
  source 1..75: mol_type = other DNA
ggctatatcaacacgccctgattttatctggcgctttatgcagtgccacggtaaaaatattcgccttcataccgt

SEQ ID NO: 752009 - DNA, 75 bp, synthetic construct
  source 1..75: mol_type = other DNA
agccgtacaggcggtggttcaccataacgaaacggctgatcgggcatatgaactctatctgagtgaaaaacagta

SEQ ID NO: 752010 - DNA, 75 bp, synthetic construct
  source 1..75: mol_type = other DNA
gttaagcaatgaagcggtcgcactttccattgatgatgccgttcgtctcaacagttgcgccgtggcggcgcaggt

SEQ ID NO: 752011 - DNA, 75 bp, synthetic construct
  source 1..75: mol_type = other DNA
cattgaccagggcgcatctggtgtcgatatggggcgtaacatcttccagtccgatcatcctgtagccatgatgaa

SEQ ID NO: 752012 - DNA, 75 bp, synthetic construct
  source 1..75: mol_type = other DNA
ctgggcggttttgtaaccgacctgtatcagaaatggacggccccggataaggaaccgcaggaacaaaaagtgaat

SEQ ID NO: 752013 - DNA, 75 bp, synthetic construct
  source 1..75: mol_type = other DNA
aagatatgcccgtgaatccggttaagaaaatcggtattcgccaacaccgcaaattatttgtagatcgcaagattg

SEQ ID NO: 752014 - DNA, 75 bp, synthetic construct
  source 1..75: mol_type = other DNA
ccgcttgcgtacctgtgcgggatttatcctcattcttcctggtcctccatcggggccaatatcatctttctttcc

SEQ ID NO: 752015 - DNA, 75 bp, synthetic construct
  source 1..75: mol_type = other DNA
cggggccaacattattttcctgtctgtgcttgtcgccgtcagaggcaacgtagcgcggctggttgatcatctgag

SEQ ID NO: 752016 - DNA, 75 bp, synthetic construct
  source 1..75: mol_type = other DNA
attgatggatcgcttcaacaagataccattacaggaaccttcaataaggctctcaaatcgaatggtaagcgcctt

SEQ ID NO: 752017 - DNA, 75 bp, synthetic construct
  source 1..75: mol_type = other DNA
tatcaaggtgtggagtatgacgtagagacgatgaagcccgtagcatactggtttcgtaaaatcaacctactgact

SEQ ID NO: 752018 - DNA, 75 bp, synthetic construct
  source 1..75: mol_type = other DNA
ctgacttctatttctatgggtctgtctagctttaaacaagctcttacaggagatacaagttctattaactactca

SEQ ID NO: 752019 - DNA, 75 bp, synthetic construct
  source 1..75: mol_type = other DNA
gtgcgttgtcacgtctgggtggcccggtaatgggggcactccagcttgcccccgtcctgatggatgagcaggcgt

SEQ ID NO: 752020 - DNA, 75 bp, synthetic construct
  source 1..75: mol_type = other DNA
aactcgctgtatcacggcgataaggtcagagcgcaggccatgatggcctgggcgaagcagaacgcgaaggacacc

SEQ ID NO: 752021 - DNA, 75 bp, synthetic construct
  source 1..75: mol_type = other DNA
cgtggcaaaaccctcatggcaggttgccagttatccgtttaaaaccgggcgtcgtatgtggcgctggatgcgaaa

SEQ ID NO: 752022 - DNA, 75 bp, synthetic construct
  source 1..75: mol_type = other DNA
tgccgccagttttcaggcattcggtgctttcgctgccgataaacgcagcgtctattttgacggtcagcgtaccga

SEQ ID NO: 752023 - DNA, 75 bp, synthetic construct
  source 1..75: mol_type = other DNA
ctggctcaccgatggacgctctgttctttggtctggcaaagtcctgaaaaatccgcccggtgaacctaatgtcga

SEQ ID NO: 752024 - DNA, 75 bp, synthetic construct
  source 1..75: mol_type = other DNA
aagttttcggctatgataatactgaggataatgatgaggcggcatctgattatgcactaaaaataaatgaaaact

SEQ ID NO: 752025 - DNA, 75 bp, synthetic construct
  source 1..75: mol_type = other DNA
tttattatggctttccatggtggatcgtcggggctggcgttgatgatgtggcccgaagtttgttttatgctgtga

SEQ ID NO: 752026 - DNA, 75 bp, synthetic construct
  source 1..75: mol_type = other DNA
ttggcaagacctatcatatgaccggctggaaagtgggttattgcgttgcgcctgcgcccatcagcgccgagatcc

SEQ ID NO: 752027 - DNA, 75 bp, synthetic construct
  source 1..75: mol_type = other DNA
aacctgagcactatcttgcgttaccggacttttatcgccagaagcgcgatattctggtgaatgccttaagtgaga

SEQ ID NO: 752028 - DNA, 75 bp, synthetic construct
  source 1..75: mol_type = other DNA
acggaggcgttatacgcggcgataaccgcattggtgcgcaatggcgacgaagtgatttgttttgatcccagctat

SEQ ID NO: 752029 - DNA, 75 bp, synthetic construct
  source 1..75: mol_type = other DNA
ttctcgggtacagtcaggaagagctgcgcggactcacctttcagcaactgacctggccggaggatctcaataaag

SEQ ID NO: 752030 - DNA, 75 bp, synthetic construct
  source 1..75: mol_type = other DNA
gaaacccgttttcgcaacgctatggagtattccgccatcggcatggctcttgtgggaacggaaggacaatggctg

SEQ ID NO: 752031 - DNA, 75 bp, synthetic construct
  source 1..75: mol_type = other DNA
atgagcaaacaatcacagcatgtattaattgccctgccccacccgctgcttcacctggtcagtttaggtttagtc

SEQ ID NO: 752032 - DNA, 75 bp, synthetic construct
  source 1..75: mol_type = other DNA
ctggaaagtgggttattgtgttgcgccagcgcccatcagcgccgaaattcgcaaggtacatcagtatctgacctt

SEQ ID NO: 752033 - DNA, 75 bp, synthetic construct
  source 1..75: mol_type = other DNA
attgctcagaaaacggaacgtttgtatggctatcaaccagatgccgatagcgatatcaccgtaacggcaggggcg

SEQ ID NO: 752034 - DNA, 75 bp, synthetic construct
  source 1..75: mol_type = other DNA
atgcgagacaaaaataccagcaaaaacagatatggtcacagatgctctcaactagtgacataatgcctcaggagc

SEQ ID NO: 752035 - DNA, 75 bp, synthetic construct
  source 1..75: mol_type = other DNA
ttggcaagacttatcatatgaccggctggaaagtgggttattgcgttgcgcctgtgcccatcagcgccgagatac

SEQ ID NO: 752036 - DNA, 75 bp, synthetic construct
  source 1..75: mol_type = other DNA
agcgatgaagtttacgagcacatcaacttttcacaacagggccatgccagcgtgctggcgcatccgcagctgcgt

SEQ ID NO: 752037 - DNA, 75 bp, synthetic construct
  source 1..75: mol_type = other DNA
ccttcccacataaactgattcgtctctgttttgccaagaaggaatcgacgttgctggcagcagctgaacgcctgc

SEQ ID NO: 752038 - DNA, 75 bp, synthetic construct
  source 1..75: mol_type = other DNA
gtcgcgatctgcaaattttcaacacgctgaaagcgaatatggcagattacctgctacttgacggtgagctatgcg

SEQ ID NO: 752039 - DNA, 75 bp, synthetic construct
  source 1..75: mol_type = other DNA
catttacagtgccgacacgtcgcgttccgctattgaacaagatgtcgttctccactgccgcagcggcggcagcta

SEQ ID NO: 752040 - DNA, 75 bp, synthetic construct
  source 1..75: mol_type = other DNA
cacggtgtcgcttctccgcgaattccggaaacgcgtaatctgtggctgatttcgcttaagctctggagtcgtaac

SEQ ID NO: 752041 - DNA, 75 bp, synthetic construct
  source 1..75: mol_type = other DNA
cgtcaccgaatcacgcaaaatgctgcgccagcttagctacagcgcctcccatgataccctgacacatctcgccaa

SEQ ID NO: 752042 - DNA, 75 bp, synthetic construct
  source 1..75: mol_type = other DNA
gtgaatgcgggcgggaagcgcagtcagggactggttaaccgccgcagcgattttcgcacctggtgtctgcgggat

SEQ ID NO: 752043 - DNA, 75 bp, synthetic construct
  source 1..75: mol_type = other DNA
gtttatcgaccttgatcactttaaagcggtgaatgacagcgccgggcacgcggcaggcgatgccctgctgcgcga

SEQ ID NO: 752044 - DNA, 75 bp, synthetic construct
  source 1..75: mol_type = other DNA
cctttatgaatccagtggcggagaagatgagcggctggacgcaggaagaagcgttaggtgttccgctcctgacgg

SEQ ID NO: 752045 - DNA, 75 bp, synthetic construct
  source 1..75: mol_type = other DNA
cgccgcgaacctacttgatgagtcacgtaccgtggctaccatttttgctgatcctgctgcccgccaacatcatga

SEQ ID NO: 752046 - DNA, 75 bp, synthetic construct
  source 1..75: mol_type = other DNA
tgctgccgtggtataaccccttgcaaaatctggctgactggctgcgtctggcactcggcagcgccattgttccgc

SEQ ID NO: 752047 - DNA, 75 bp, synthetic construct
  source 1..75: mol_type = other DNA
gtacacatcagcgacatgccctggtgtttatcgatcttgatcgctttaaagcggtgaatgacagcgccgggcatg

SEQ ID NO: 752048 - DNA, 75 bp, synthetic construct
  source 1..75: mol_type = other DNA
tttgctgatcctgctgcccgccaacatcatgaccatggtgatgtatgcctttcgtgcggaacgcaaacacatttc

SEQ ID NO: 752049 - DNA, 75 bp, synthetic construct
  source 1..75: mol_type = other DNA
gtcgaacgcctgctcggcattaatatggatatgactgaggttaaacagcttaacgaggcattgtttcaggaaaaa

SEQ ID NO: 752050 - DNA, 75 bp, synthetic construct
  source 1..75: mol_type = other DNA
ttcgcttaagctctggagtagtgaaggtgagactattgatgaactggcatttcgtcgtagtttcagcgatccggc

SEQ ID NO: 752051 - DNA, 75 bp, synthetic construct
  source 1..75: mol_type = other DNA
catttctttactgggcgcagcaggatttctccggtgtgaagccactggttgctcaggtgaaagggcatctctttc

SEQ ID NO: 752052 - DNA, 75 bp, synthetic construct
  source 1..75: mol_type = other DNA
tgggtaaaaaacatcatgagtccggcaaaactcagggaaaaatgggatgaactggttatccgcctggggcgttcg

SEQ ID NO: 752053 - DNA, 75 bp, synthetic construct
  source 1..75: mol_type = other DNA
atgagtccggcaaaactccgggaaaaatgggatgaactggttattcgcctggggcgttcgcccgcgcagcgttgc

SEQ ID NO: 752054 - DNA, 75 bp, synthetic construct
  source 1..75: mol_type = other DNA
caaattttgatggatcaaccgttgataaaaaactgccgattaggggggcgatgattgaccccgatccgtcagtat

SEQ ID NO: 752055 - DNA, 75 bp, synthetic construct
  source 1..75: mol_type = other DNA
aaaacagtctggtgacagaaaaaatcttatttatgcttgaaggcgcaattctcggtattcatgaagctgcgctcc

SEQ ID NO: 752056 - DNA, 75 bp, synthetic construct
  source 1..75: mol_type = other DNA
gaatgtaccgaagcgacagtggggaacccgggaggatttgacgtgtgcacagtggatctggggacgggttgttgc

SEQ ID NO: 752057 - DNA, 75 bp, synthetic construct
  source 1..75: mol_type = other DNA
aatctggcggggatccgtcagtaaaatcaaaacatgatccgtcagataaaaaactgaaccgccccggaaatcctg

SEQ ID NO: 752058 - DNA, 75 bp, synthetic construct
  source 1..75: mol_type = other DNA
aacaatggctggaacagttcccgttctggtcagagtcaacgttaaaacgcgcatttgcaagtctgaaaacgctgg

SEQ ID NO: 752059 - DNA, 75 bp, synthetic construct
  source 1..75: mol_type = other DNA
tgtttggtcgggtacagcgggatccattctgggtaaaaaacgtcatgagcccgtcaaagcttcgcgaaaaatggg

SEQ ID NO: 752060 - DNA, 75 bp, synthetic construct
  source 1..75: mol_type = other DNA
tgattgttaaaggtatggaaggcgcgattaacgcgaagaccgtaacctatgacttcgagcgtctgatggaaggcg

SEQ ID NO: 752061 - DNA, 75 bp, synthetic construct
  source 1..75: mol_type = other DNA
gccaggtgaaacgcggtgagctgggtattatgggcactgagctgaactccgatctggcgaaagcgatgaaagttg

SEQ ID NO: 752062 - DNA, 75 bp, synthetic construct
  source 1..75: mol_type = other DNA
tccgtgaaaaatgggatgaactggttattcgactgtggcgtggtcccgcgcagcgttgtgtgaatcatatttctg

SEQ ID NO: 752063 - DNA, 75 bp, synthetic construct
  source 1..75: mol_type = other DNA
cgtaaggtcggtgggcgtaatgaaagcaatatctaccgccttaatgtggaaaaactcgaagcagcagcagcggcg

SEQ ID NO: 752064 - DNA, 75 bp, synthetic construct
  source 1..75: mol_type = other DNA
cattatgggccgtcccgatgaggaagagacgctgttacgtgtggatgcggcgatcaacaaaaaatactgccatgc

SEQ ID NO: 752065 - DNA, 75 bp, synthetic construct
  source 1..75: mol_type = other DNA
tacggcgattactcctgccgtaccgattacgtcattgccgattgaatatgattattaccttgatcctaactttat

SEQ ID NO: 752066 - DNA, 75 bp, synthetic construct
  source 1..75: mol_type = other DNA
atttaatgattacctggtcatcaactgtggcacattcatttgcagaacttgaaacattgattggaaatgcagaag

SEQ ID NO: 752067 - DNA, 75 bp, synthetic construct
  source 1..75: mol_type = other DNA
ctgtggcgcagcggcgttgtttattgcggcgctgatctgcacagtgcaattgtttaagctgcaagtggtgacttc

SEQ ID NO: 752068 - DNA, 75 bp, synthetic construct
  source 1..75: mol_type = other DNA
agcttcagcgaacccgccaggtaaaccatcatttgcaacggcaatatgatattgaactggcggagaaacttgcgc

SEQ ID NO: 752069 - DNA, 75 bp, synthetic construct
  source 1..75: mol_type = other DNA
catagtgccaatcagatgctttttctgactggcgaattacgtcagataaaaggcataaccgaaaacatctatcag

SEQ ID NO: 752070 - DNA, 75 bp, synthetic construct
  source 1..75: mol_type = other DNA
agtgaagtggcagttacgcgatgcccagcactgttttaatctcaatgcgttagcaaaaatctctgacgacccgct

SEQ ID NO: 752071 - DNA, 75 bp, synthetic construct
  source 1..75: mol_type = other DNA
aactttttaaataaatccattcctagttctgaaggacgagacgaagctaaaaaatttattctagatgtgcatcac

SEQ ID NO: 752072 - DNA, 75 bp, synthetic construct
  source 1..75: mol_type = other DNA
gaggacttaaagcgagacatcatcgattacataaactattataatcgactgaggataaaggaaaaacttggcggt

SEQ ID NO: 752073 - DNA, 75 bp, synthetic construct
  source 1..75: mol_type = other DNA
aaacgccccaacaagaagtgggttacagatgtcactgaatttaaagtgaatggcaagaagctgtatttgtcgccc

SEQ ID NO: 752074 - DNA, 75 bp, synthetic construct
  source 1..75: mol_type = other DNA
cggattattgatcctcgcgatggcatggttgccgacttttgttctggtgttgttgattcgctttctggcgggcgt

SEQ ID NO: 752075 - DNA, 75 bp, synthetic construct
  source 1..75: mol_type = other DNA
aagcggcgtcattatggttacacatcaacccggtgtctggaacctggctgatgatatttgtgacattagcacggt

SEQ ID NO: 752076 - DNA, 75 bp, synthetic construct
  source 1..75: mol_type = other DNA
ctgataataagatcatattagagaacttgaactttcatgtttcgccaggcaaatggctattactgaaaggctact

SEQ ID NO: 752077 - DNA, 75 bp, synthetic construct
  source 1..75: mol_type = other DNA
attgcacttacgcttttaatgccctcgaaaaaacacgccatcgcaccaatgccattggcaaaaacggagcaatag

SEQ ID NO: 752078 - DNA, 75 bp, synthetic construct
  source 1..75: mol_type = other DNA
aagatgggctaaaaatatataaggctggtgttaatgttttttactcttctgctcatagaacaagaaatcatgata

SEQ ID NO: 752079 - DNA, 75 bp, synthetic construct
  source 1..75: mol_type = other DNA
ttaacaacttaccacaattaccttctgatttttcctttggaaaggatattgattctatacataaatttatattca

SEQ ID NO: 752080 - DNA, 75 bp, synthetic construct
  source 1..75: mol_type = other DNA
agcaagcgtttaaagccctatgtacagaactcaatgcacaaggcagtataaacgtcgtcaattattccccacatg

SEQ ID NO: 752081 - DNA, 75 bp, synthetic construct
  source 1..75: mol_type = other DNA
gttaaccgcccatctctggacgttagtcggcttatcaattgtgccaggctgctttggctggctatgggcagcaaa

SEQ ID NO: 752082 - DNA, 75 bp, synthetic construct
  source 1..75: mol_type = other DNA
ctcagttaggaaataacgcagacagtgtaatctttgttaatccgttgcaaggattatggccggttgagcgttatc

SEQ ID NO: 752083 - DNA, 75 bp, synthetic construct
  source 1..75: mol_type = other DNA
acgagttcatacggctatcgttgttcaggaccccaccatgcagcggcgcacgatggcgacgttccgccgtataac

SEQ ID NO: 752084 - DNA, 75 bp, synthetic construct
  source 1..75: mol_type = other DNA
ctcgcggaagattttgccagacattatgaaaaacgcgtagccgaaggtttcaccgtaaaaggcaagaccatgttt

SEQ ID NO: 752085 - DNA, 75 bp, synthetic construct
  source 1..75: mol_type = other DNA
ttgcgctgccgggcattgtcactggtctggcgctattaaccgcttttaaaaccatcaatctggagccgggatttt

SEQ ID NO: 752086 - DNA, 75 bp, synthetic construct
  source 1..75: mol_type = other DNA
agtcatccaggcatggcaaacgctgaaacacgatgcggtgctcatcgaggcgatggaaagtcgctcgttacgtta

SEQ ID NO: 752087 - DNA, 75 bp, synthetic construct
  source 1..75: mol_type = other DNA
tatcgctactcactggcgagctgccgcgtttacgcgatgatagcgatggctacggcccccgcgggcgagatttta

SEQ ID NO: 752088 - DNA, 75 bp, synthetic construct
  source 1..75: mol_type = other DNA
cgttgaaaggtgccgagctggatctgttaatcgtgatgaagcgaacgacggctcgtccgcgtccgccgatgccag

SEQ ID NO: 752089 - DNA, 75 bp, synthetic construct
  source 1..75: mol_type = other DNA
cggcgctgcggcaatggttaccagagtttgctgcgcgttgccatcagtatgacagctttggtttttacgcggcac

SEQ ID NO: 752090 - DNA, 75 bp, synthetic construct
  source 1..75: mol_type = other DNA
tcgcccgctggacagcaactgggcgtttggtctggatgccaactacgttaaacagcgcgactggcgtagtgcgaa

SEQ ID NO: 752091 - DNA, 75 bp, synthetic construct
  source 1..75: mol_type = other DNA
ggcgatacgctgtatgtcaccggcgagcaggtgaaatatcgtgattcgcgtgaagggatcatccgtgctaatcgg

SEQ ID NO: 752092 - DNA, 75 bp, synthetic construct
  source 1..75: mol_type = other DNA
ctgggcgtttggtctggatgccaactacgttaaacagcgcgactggcgtagcgcaaaagatatgatgaaattcac

SEQ ID NO: 752093 - DNA, 75 bp, synthetic construct
  source 1..75: mol_type = other DNA
gatcttttaatcgtgatgaaacggacaacagcccgtccgcgtccgcccatgccagcatcggtctgggttcaggtc

SEQ ID NO: 752094 - DNA, 75 bp, synthetic construct
  source 1..75: mol_type = other DNA
tcgccctggaattgtgaacaccatcacccgtcatgtcagtagttgcggctgtaatattgaagacagtcgcctggc

SEQ ID NO: 752095 - DNA, 75 bp, synthetic construct
  source 1..75: mol_type = other DNA
tgcggattcagcaaatattgaacaagccttcaaagcactatgtacagaactcaatgcgcaaggcagtattagcgt

SEQ ID NO: 752096 - DNA, 75 bp, synthetic construct
  source 1..75: mol_type = other DNA
aaaaggctgttcaagaggcaacaaaggcagttaaggttggggcaagtgatggcgcattagcggcggcggaacgca

SEQ ID NO: 752097 - DNA, 75 bp, synthetic construct
  source 1..75: mol_type = other DNA
cgggggcaatcatcgcgaccggtcatcgcgcccataacccatgggggctggcaattgtgactgcgcccaatgtgg

SEQ ID NO: 752098 - DNA, 75 bp, synthetic construct
  source 1..75: mol_type = other DNA
tcatcattcgctttctggcgggagtcgccagcgccgggatgttgattttcggctcaacgctcatcatgcaacata

SEQ ID NO: 752099 - DNA, 75 bp, synthetic construct
  source 1..75: mol_type = other DNA
tttttatcgaactgctgagtcatctgcatttttctctgggagagtccgggcttagccgccagcgtattgatgcgc

SEQ ID NO: 752100 - DNA, 75 bp, synthetic construct
  source 1..75: mol_type = other DNA
atttgttgcgcgttgccatcagtatgaccgctttggtttttacgcagcactaagccagttgttgcaggtgttggt

SEQ ID NO: 752101 - DNA, 75 bp, synthetic construct
  source 1..75: mol_type = other DNA
ctgcggcgcggcggcgctatttatcgcagcattaatctgcgggatgcaaatattcaaattgcatacgaattattc

SEQ ID NO: 752102 - DNA, 75 bp, synthetic construct
  source 1..75: mol_type = other DNA
ttcacaaacgttgtggcaaggtgccggagcactttctgccattatattgcttgctctggcgctgctcatcccgtc

SEQ ID NO: 752103 - DNA, 75 bp, synthetic construct
  source 1..75: mol_type = other DNA
tatatcatcgtcgcgacttacctgccgctcatggcgaaagatgcaggctcaccattgttaaccgcccatctctgg

SEQ ID NO: 752104 - DNA, 75 bp, synthetic construct
  source 1..75: mol_type = other DNA
tctgaggaaagattattctgatgtattgaaaaaattttcctggaaaaaaactgttaatagcatgcttaaggtgat

SEQ ID NO: 752105 - DNA, 75 bp, synthetic construct
  source 1..75: mol_type = other DNA
ccgttgccgccatcgtggcgctgggtttttcgctggcccccggggaactgagaacctcacaggaggcacaggaaa

SEQ ID NO: 752106 - DNA, 75 bp, synthetic construct
  source 1..75: mol_type = other DNA
atgataaagctgcccgttaaacgttacgccgtagctgccattgtggcgctggggttctccattgctccccacaaa

SEQ ID NO: 752107 - DNA, 75 bp, synthetic construct
  source 1..75: mol_type = other DNA
gcgaactgcatctcattgctccctacaaccaggccgacgccgtgcgcggcctggaagcattcagccatttatgga

SEQ ID NO: 752108 - DNA, 75 bp, synthetic construct
  source 1..75: mol_type = other DNA
ctctactttccgccctaacccgattggtatgtcgctggtagagctgaaggaagttatttgtcataaagatagcgt

SEQ ID NO: 752109 - DNA, 75 bp, synthetic construct
  source 1..75: mol_type = other DNA
tggatgcactgaaagatcccaacggcctgaaaacctttgtgaacaccacgctgggcgagacctgggaagaggccg

SEQ ID NO: 752110 - DNA, 75 bp, synthetic construct
  source 1..75: mol_type = other DNA
acactggttggcttgtcgattgtcccaggttgctttggctggctgtgggcagccaaacggtggggagcattacct

SEQ ID NO: 752111 - DNA, 75 bp, synthetic construct
  source 1..75: mol_type = other DNA
gaagaaaagaattacgcctggggatatcgcgaaggtaaggcagtgcatgtttcgccaggggcgttagatgctgaa

SEQ ID NO: 752112 - DNA, 75 bp, synthetic construct
  source 1..75: mol_type = other DNA
gtcatctgcatttttcactgggagaggggactgttcctgcgcgaagaatcgactgtttgcggcaaaaaacgctaa

SEQ ID NO: 752113 - DNA, 75 bp, synthetic construct
  source 1..75: mol_type = other DNA
gtcatctgcatttttcgctgggagaggggaccgttcctgcgcgaagaatcgacagtttgcggcaaaaaacactga

SEQ ID NO: 752114 - DNA, 75 bp, synthetic construct
  source 1..75: mol_type = other DNA
gcagcagggctacgtgcagctgtagaacttaaacgccgccagcaaaatgtgttaatcgccaccgccgggttatat

SEQ ID NO: 752115 - DNA, 75 bp, synthetic construct
  source 1..75: mol_type = other DNA
accacgcgatgcacgatctgaaaatccacgtacctgcgggtaaatgggttttctacggtctggctgctatcctga

SEQ ID NO: 752116 - DNA, 75 bp, synthetic construct
  source 1..75: mol_type = other DNA
tcaacgacaaaacacttcagcaaggtatccagctggcgcagtcacgctactggcaaactggcgacatgtatcaag

SEQ ID NO: 752117 - DNA, 75 bp, synthetic construct
  source 1..75: mol_type = other DNA
gaaatcgaagagctgaaagaaaaaacaactcactgtcgcaggaagttcaaaatgcccagcatcagcgcgaagagc

SEQ ID NO: 752118 - DNA, 75 bp, synthetic construct
  source 1..75: mol_type = other DNA
gccgccatcccatgctgagtatcgcctggatcgcgttactggtggcggttctggttactacgtttaaaagcctga

SEQ ID NO: 752119 - DNA, 75 bp, synthetic construct
  source 1..75: mol_type = other DNA
ggtatgggtttaggccgctttctctatacgccgatgctgccagtcatgctggcggaaggcgaattttcctttagc

SEQ ID NO: 752120 - DNA, 75 bp, synthetic construct
  source 1..75: mol_type = other DNA
gaacagctattgcagatgctccttgcagaaaaaacacgcctgaatatcaatatcaatcatgttggtaataagcct

SEQ ID NO: 752121 - DNA, 75 bp, synthetic construct
  source 1..75: mol_type = other DNA
taaaagacgttcgtaaagcagagcgaattgttggtagtgaagtgaaggttattcattcgactgagcaccacaaat

SEQ ID NO: 752122 - DNA, 75 bp, synthetic construct
  source 1..75: mol_type = other DNA
agaggtgcagaatgacatccgcagcgaatccactgaaaaatcaaaggaaatgggtcgttcaaggtactcatctat

SEQ ID NO: 752123 - DNA, 75 bp, synthetic construct
  source 1..75: mol_type = other DNA
gcgtatcgcccccacgtttgccgaggttgatgtattgatcaccatgctggcgcgcagtgccgttggtgcgcgttt

SEQ ID NO: 752124 - DNA, 75 bp, synthetic construct
  source 1..75: mol_type = other DNA
ccagcagcggctgaaattaagcctgtccggacggctggcaataaaaattattgcagagccaccggataagcgtcg

SEQ ID NO: 752125 - DNA, 75 bp, synthetic construct
  source 1..75: mol_type = other DNA
agcggcgtaacgaagcgctggactgcctggtgtatgcctacgcggcattacgtgtgtccgtgcaacgctggcagc

SEQ ID NO: 752126 - DNA, 75 bp, synthetic construct
  source 1..75: mol_type = other DNA
agtcgggatgatggctggcgcccacgcggcgagctggtttatcaatggcggtaaaacacccatcaggattggtgc

SEQ ID NO: 752127 - DNA, 75 bp, synthetic construct
  source 1..75: mol_type = other DNA
tctggtgaccaatgaaggcaatgcgaggatgtgtaccacgttgccaaaaacgcacattgcggtgatggggatgga

SEQ ID NO: 752128 - DNA, 75 bp, synthetic construct
  source 1..75: mol_type = other DNA
ttgtgacagcgtgtgtccggtgcgtattccgctgtcaaaactgattttgcgtcatcgtcgggtgatggctgaaaa

SEQ ID NO: 752129 - DNA, 75 bp, synthetic construct
  source 1..75: mol_type = other DNA
ccactcgtcagcaaagaagcaagcttcttcctgttaccgttcgacttgcatttgttaggcctgccgccagcgttc

SEQ ID NO: 752130 - DNA, 75 bp, synthetic construct
  source 1..75: mol_type = other DNA
ccggaatcgagcgcatgaatgaaatgacacaacaggcgcaaaaagcacttcagccatttaacgcttctgttttat

SEQ ID NO: 752131 - DNA, 75 bp, synthetic construct
  source 1..75: mol_type = other DNA
gtgacaatatggatgttgctcgtgaatatcccgattatcgcttccatataacagacagtattatctttacttctg

SEQ ID NO: 752132 - DNA, 75 bp, synthetic construct
  source 1..75: mol_type = other DNA
ggattgggggagatacccccattcctttttcggcctgggctatcctggttgaatatgccggattgggtaaaatct

SEQ ID NO: 752133 - DNA, 75 bp, synthetic construct
  source 1..75: mol_type = other DNA
tgttcgccagcagcgactgaaattaaacctgtccggacggctggcgataaagattattgcagagccaccggataa

SEQ ID NO: 752134 - DNA, 75 bp, synthetic construct
  source 1..75: mol_type = other DNA
ttgaaactgtctgggctggcaccattacgccgccgcgcgaaggcatcatcaaacgctggacctggcctgccgggg

SEQ ID NO: 752135 - DNA, 75 bp, synthetic construct
  source 1..75: mol_type = other DNA
atgctcatagatttggttttaccttacccgccgacggtgaacacctactggcgacgccgtggcagcacatatttt

SEQ ID NO: 752136 - DNA, 75 bp, synthetic construct
  source 1..75: mol_type = other DNA
gcgccgctggatgcgctgacgcatgcggggttgctaatggacgatgagcagtttgatgaaatcaatatcgttcgt

SEQ ID NO: 752137 - DNA, 75 bp, synthetic construct
  source 1..75: mol_type = other DNA
gatcccggtccgttgttcccatggcagcaactggcgcagcaggggattggcgcctggccggatgcttcgcgggtc

SEQ ID NO: 752138 - DNA, 75 bp, synthetic construct
  source 1..75: mol_type = other DNA
cgcacacaccggtagataccgcgtcattgctggagcttttggcgcgctacggttatgacgttaaacctgatatga

SEQ ID NO: 752139 - DNA, 75 bp, synthetic construct
  source 1..75: mol_type = other DNA
tcctggtcatgcctgccgatggcgttattagccagttaggtaaaatcgaagaagataaaatcctgcaagccaaag

SEQ ID NO: 752140 - DNA, 75 bp, synthetic construct
  source 1..75: mol_type = other DNA
ccagcagcggctgaaattaaacctgtccggaaggctggcaataaaaattactgcagagccaccggataagcgccg

SEQ ID NO: 752141 - DNA, 75 bp, synthetic construct
  source 1..75: mol_type = other DNA
tggacccgtgacggtctgacgtttttcagcgctgcgggtaatgaaattccgccgccgcgctccatcacgttccat

SEQ ID NO: 752142 - DNA, 75 bp, synthetic construct
  source 1..75: mol_type = other DNA
gtgcgcggtcagctcgttcctggtgggcgactgggcgtgaagatttacgaaataatgcatgacgggcaggtcaat

SEQ ID NO: 752143 - DNA, 75 bp, synthetic construct
  source 1..75: mol_type = other DNA
catggctgtgtgatccatcagtctgagcttgaccagagtaacgggcggtggatctgtgaaaacacgggcatgtgg

SEQ ID NO: 752144 - DNA, 75 bp, synthetic construct
  source 1..75: mol_type = other DNA
agattattgcagagccaccggataaacgtcgtcgtgacctggacaatatcctgaaagcaccactggatgcgctga

SEQ ID NO: 752145 - DNA, 75 bp, synthetic construct
  source 1..75: mol_type = other DNA
aatgatgacgcaccttagttttgttcacaccaccatgaaacgattcgatgaagatcaggctcgccacgcacggat

SEQ ID NO: 752146 - DNA, 75 bp, synthetic construct
  source 1..75: mol_type = other DNA
taccgttgttattctgcagcgcgatgctcactgcttgcgatgacaaatcaacggaaaacgctgccgccatgacgc

SEQ ID NO: 752147 - DNA, 75 bp, synthetic construct
  source 1..75: mol_type = other DNA
tcggctttgcgactaactgcgacgcggcacatattacccagcctcagcgtgagaccatgcaatattgtatggaaa

SEQ ID NO: 752148 - DNA, 75 bp, synthetic construct
  source 1..75: mol_type = other DNA
gccactccactgattttgaactgcatatggcgagcgagacattgaacttcacggcgtttaagaaggggacgttgt

SEQ ID NO: 752149 - DNA, 75 bp, synthetic construct
  source 1..75: mol_type = other DNA
tggaactgacgccgttaacgccaccgcaaggtgcgctggtgatatctgcgggaatacacggtaatgaaaccgcgc

SEQ ID NO: 752150 - DNA, 75 bp, synthetic construct
  source 1..75: mol_type = other DNA
ttgaaaaatatggtacaacttatttgtcaaatttaatcttagacgaggatacctggatcgatataattgacaatc

SEQ ID NO: 752151 - DNA, 75 bp, synthetic construct
  source 1..75: mol_type = other DNA
agcgcgaaaccatgcagtattgtatggagcaatcgctgaaaatcgccgggttaagcgcacaagatatcggctata

SEQ ID NO: 752152 - DNA, 75 bp, synthetic construct
  source 1..75: mol_type = other DNA
ccacctatgtgcagatgatgccgcacaccaccgccgttaatactggcctctttttcggcctgcgcgggcgggtga

SEQ ID NO: 752153 - DNA, 75 bp, synthetic construct
  source 1..75: mol_type = other DNA
gtggaggaaacattttttaaaatacaaaaaaaacacgggtatcaactttattctgggaattacactccgcccaaa

SEQ ID NO: 752154 - DNA, 75 bp, synthetic construct
  source 1..75: mol_type = other DNA
ttttcttgcgatattgttgctttttgttcctccggctctggagttttcggtaattcatcagcactttgtaccaga

SEQ ID NO: 752155 - DNA, 75 bp, synthetic construct
  source 1..75: mol_type = other DNA
tacttggtattacgttcttgctcgttataataatcgtcttgttttgtcggaaagttttgctccagaagaggcacg

SEQ ID NO: 752156 - DNA, 75 bp, synthetic construct
  source 1..75: mol_type = other DNA
aacagggtaaagagtccgttcgttggcaccttgatttgcataccgcaattcgtggttcataccatccgcgttttg

SEQ ID NO: 752157 - DNA, 75 bp, synthetic construct
  source 1..75: mol_type = other DNA
gatcccgttacgttggcggttgctggtgatcctcgggaatcctcctgcgctgaagcaagggaaacgttattgcca

SEQ ID NO: 752158 - DNA, 75 bp, synthetic construct
  source 1..75: mol_type = other DNA
tttaattgaaaataagaataaatatttgactcatgcttctttttcaggttctgaatctaatatagtaaaggattt

SEQ ID NO: 752159 - DNA, 75 bp, synthetic construct
  source 1..75: mol_type = other DNA
ggatggtttccagttcaaagcaacactacatggtggggataccgctggtgacttccagactgcggcagcttacgc

SEQ ID NO: 752160 - DNA, 75 bp, synthetic construct
  source 1..75: mol_type = other DNA
aactttatcgaaggcgataaagttaaccagggcgactcgctgtatcagattgatcctgcacccttacaggcagag

SEQ ID NO: 752161 - DNA, 75 bp, synthetic construct
  source 1..75: mol_type = other DNA
ctctgacctgaacggcggcttcccgtggggcgtgtggatcgcgtttgacctgctgattggtaccggctttgcctg

SEQ ID NO: 752162 - DNA, 75 bp, synthetic construct
  source 1..75: mol_type = other DNA
tggtggcattcaacccgggcggcggttacgcctacttcccgacctgggaagaactgttgatttctattggttttg

SEQ ID NO: 752163 - DNA, 75 bp, synthetic construct
  source 1..75: mol_type = other DNA
aatcaggcagattcgctggttaccgtacaacgtctggacccgatttatgtcgatctcacgcagtcggtgcaggat

SEQ ID NO: 752164 - DNA, 75 bp, synthetic construct
  source 1..75: mol_type = other DNA
aacggcgctcattctggataaagacgatgttgtgcagctacgcgaaattgaagccagcaaagccatcggcgacca

SEQ ID NO: 752165 - DNA, 75 bp, synthetic construct
  source 1..75: mol_type = other DNA
ttccccaacccaaatggtgacttgctgcctggcatgtacgtcacggcattagtggatgaaggtagccgccagaat

SEQ ID NO: 752166 - DNA, 75 bp, synthetic construct
  source 1..75: mol_type = other DNA
gggaaaaacagcccctgcagcgggtcaagtttctccgcctctctcccctgatgggcaagacaaaataaaatcgcg

SEQ ID NO: 752167 - DNA, 75 bp, synthetic construct
  source 1..75: mol_type = other DNA
gtttactgtctttgatttatgcgcaattgttttgtatttatgcggtaattgcatcaagtgtaaatttcattatcg

SEQ ID NO: 752168 - DNA, 75 bp, synthetic construct
  source 1..75: mol_type = other DNA
acatgctgaaaggttttgaagggtgcaggctggccgcttatcaggattctgtaggcgtctggacgatcggttatg

SEQ ID NO: 752169 - DNA, 75 bp, synthetic construct
  source 1..75: mol_type = other DNA
cggcggtttgtatgaccatctatatcggcgtgatggcactggagtttgctccggcactgtttgaacgtctgggct

SEQ ID NO: 752170 - DNA, 75 bp, synthetic construct
  source 1..75: mol_type = other DNA
atggacagtcaccgtaatgatattttactggttgagcagatagaccgcctgactcgttttagcaacaacgaccgg

SEQ ID NO: 752171 - DNA, 75 bp, synthetic construct
  source 1..75: mol_type = other DNA
taaaaagaaaggtgaacatgcctacgacatgacgttaagttataaaaattttgacaaaggtttttttaattcccg

SEQ ID NO: 752172 - DNA, 75 bp, synthetic construct
  source 1..75: mol_type = other DNA
agaccgttagatgccataaccgtaaaagatgtggtatcagtactggaagagtacaaggccagaggacataacaga

SEQ ID NO: 752173 - DNA, 75 bp, synthetic construct
  source 1..75: mol_type = other DNA
tttttatatccagtgtgtcacttgctatcaatattgctgtaaccaaccagttcgatttttctacaaaaaataata

SEQ ID NO: 752174 - DNA, 75 bp, synthetic construct
  source 1..75: mol_type = other DNA
tttcgatttccttgatcttaacattaagcaatgcatccacagtaaagattgtacatataatcctttaccattcga

SEQ ID NO: 752175 - DNA, 75 bp, synthetic construct
  source 1..75: mol_type = other DNA
ttgccaggcaacaaatggaacaaatgctcactctgcaggagaaaattattcgtgataccggtggttcatcaaccg

SEQ ID NO: 752176 - DNA, 75 bp, synthetic construct
  source 1..75: mol_type = other DNA
gctgctggcactgatgacaggccagcgcctttcagatatttgcaaaatgaaattttcggatatcagggatggtta

SEQ ID NO: 752177 - DNA, 75 bp, synthetic construct
  source 1..75: mol_type = other DNA
tttaaccctgcagaatcggcaaaaaaaccacaggtacggatatcacggcaacgactgacctttgatgagtggatg

SEQ ID NO: 752178 - DNA, 75 bp, synthetic construct
  source 1..75: mol_type = other DNA
agcctgtccggaaggttggcaataaaaattattgcagaaccaccggataagcgccgccgtgacctggacaatatt

SEQ ID NO: 752179 - DNA, 75 bp, synthetic construct
  source 1..75: mol_type = other DNA
gcaccgctggatgcgctgacgcatgcgggagtgttaatggacgatgagcagtttgatgaaatcaatatcgttcgt

SEQ ID NO: 752180 - DNA, 75 bp, synthetic construct
  source 1..75: mol_type = other DNA
aatgcgtgccacacaagccgataaagaaaagattcagctttgctttgaagcaacgctgagtgaagacccggatct

SEQ ID NO: 752181 - DNA, 75 bp, synthetic construct
  source 1..75: mol_type = other DNA
gtttgatgaaatcaatattgtgcgcggtcagctcgttcctggtgggcggctgggcgtgaagatttgcgaaatcag

SEQ ID NO: 752182 - DNA, 75 bp, synthetic construct
  source 1..75: mol_type = other DNA
catacccgccgtcggtgaatacctactggcgaagaaggggaagccaatactacatcagcgataaaggccagaaat

SEQ ID NO: 752183 - DNA, 75 bp, synthetic construct
  source 1..75: mol_type = other DNA
ccgtgacctggacaatattctgaaagcgccgctggatgcgctgacgcatgcggggttgctaatggacgatgagca

SEQ ID NO: 752184 - DNA, 75 bp, synthetic construct
  source 1..75: mol_type = other DNA
tggtgaatatgggactgccactggcgacggaagcgttagatccgaatagcccgcaatacctgggcgatctgttta

SEQ ID NO: 752185 - DNA, 75 bp, synthetic construct
  source 1..75: mol_type = other DNA
gtgattaaatttctctctgcattaattcttctactggttatcacggcggctcaggctgagcgtattcgcgatctc

SEQ ID NO: 752186 - DNA, 75 bp, synthetic construct
  source 1..75: mol_type = other DNA
tgctatcaccgatagcaaacgatgtggatgacagccggttaattacggattctggccgtattatcaacaatgccc

SEQ ID NO: 752187 - DNA, 75 bp, synthetic construct
  source 1..75: mol_type = other DNA
tgccgccaataccgatttggaaggccttttgagcatgtttgagcacgatagaacccactattcaaagatggtggc

SEQ ID NO: 752188 - DNA, 75 bp, synthetic construct
  source 1..75: mol_type = other DNA
tcacgaaatctcactggaagcggggcttgccagcacttaccagtggttccttgagaatcaagaccgctttcgggg

SEQ ID NO: 752189 - DNA, 75 bp, synthetic construct
  source 1..75: mol_type = other DNA
aggaggcggatctgttccctgcccagttgctggggatgcttccgaacctggaatacatagccaagatttcaggcg

SEQ ID NO: 752190 - DNA, 75 bp, synthetic construct
  source 1..75: mol_type = other DNA
ttcgcgtgagaagatcgctttcgcgttgatgaagttctactacgacatcatccaacctgagcacccaaactctga

SEQ ID NO: 752191 - DNA, 75 bp, synthetic construct
  source 1..75: mol_type = other DNA
caccctggatgatgtggtgtcatcctgtcgcgattgcgttcttagtccgtggttattacatcatcatcacgctaa

SEQ ID NO: 752192 - DNA, 75 bp, synthetic construct
  source 1..75: mol_type = other DNA
gagtggatgatgatttataatgcagcggaaaaggatggttactttttacagcgtggtatgctgctggcactgatg

SEQ ID NO: 752193 - DNA, 75 bp, synthetic construct
  source 1..75: mol_type = other DNA
aaaaattcaacaggaaagatatgaaaacggagaaatcaaactcaacacgctgaaacagaaagcggcccctctcag

SEQ ID NO: 752194 - DNA, 75 bp, synthetic construct
  source 1..75: mol_type = other DNA
caacgtcctgatctgaaaacactgagacgattcttggaaggtggcccagaaggcttggtagtaaaagccgtcaca

SEQ ID NO: 752195 - DNA, 75 bp, synthetic construct
  source 1..75: mol_type = other DNA
tggataaaggtgacaaaaaaggtgcaattgaaaaactgcagctggcaggaattaatatatctgaaacacagtggc

SEQ ID NO: 752196 - DNA, 75 bp, synthetic construct
  source 1..75: mol_type = other DNA
cccttgcagcttctcttgctgcttccgttgccgttgctgatacaaaaactcaggatacatcagcggctcatcacc

SEQ ID NO: 752197 - DNA, 75 bp, synthetic construct
  source 1..75: mol_type = other DNA
tatctggctggaaaaactcgaacacaatccggggcaatatattccagcctcactgcgggaagaaaatcacgcgca

SEQ ID NO: 752198 - DNA, 75 bp, synthetic construct
  source 1..75: mol_type = other DNA
cctgccttcagaaacgcaaatcgcccaatcgctggcgcacctgctgccgccagtgctgaaagataaattcatctg

SEQ ID NO: 752199 - DNA, 75 bp, synthetic construct
  source 1..75: mol_type = other DNA
tccggaaggctggcgataaaggtgattgcagagccaccggataagcgccgccgtgacctggataatatcctgaaa

SEQ ID NO: 752200 - DNA, 75 bp, synthetic construct
  source 1..75: mol_type = other DNA
agcgttatcgccgggctgtggcgcttattgttcgccagcagcggctgaaattaagcctgtccggacggctggcaa

SEQ ID NO: 752201 - DNA, 75 bp, synthetic construct
  source 1..75: mol_type = other DNA
tatcgcttccgcgaccgtctgccggaaaaactgcgttatctggccgatgcgccgcagcaggatccggaaggtaat

SEQ ID NO: 752202 - DNA, 75 bp, synthetic construct
  source 1..75: mol_type = other DNA
tccggaaggctggcgataacggttatcgcagagccgccggataaacgccgtcgtgacctggacaatatcctgaaa

SEQ ID NO: 752203 - DNA, 75 bp, synthetic construct
  source 1..75: mol_type = other DNA
attgaccattccatgtggttccatcgcccgtttaatttgaatgaatggctgctgtatagcgtggagagcacctcg

SEQ ID NO: 752204 - DNA, 75 bp, synthetic construct
  source 1..75: mol_type = other DNA
ccgacgttatataacggcgaagcggatgcagaaactcaggcgattgccgaagccctactggagaaatacggccag

SEQ ID NO: 752205 - DNA, 75 bp, synthetic construct
  source 1..75: mol_type = other DNA
ccgccgctctgttactggcagggtgtgccggcgaaaagggcattgtcgagaaagagggatatcagcttgataccc

SEQ ID NO: 752206 - DNA, 75 bp, synthetic construct
  source 1..75: mol_type = other DNA
ctgcggttctgttactggcagggtgcgcaggagaaaaaggaattgttgagaaggagggataccagctcgataccc

SEQ ID NO: 752207 - DNA, 75 bp, synthetic construct
  source 1..75: mol_type = other DNA
gcagcttgatctggctgtactggcaaaatcccgggaagaagagacgacccggccaacccttaaagaactggcagc

SEQ ID NO: 752208 - DNA, 75 bp, synthetic construct
  source 1..75: mol_type = other DNA
tccggaaggctggcgataaaggtgattgcagagccaccggataagcgccgtcgtgacctggacaatatcctgaaa

SEQ ID NO: 752209 - DNA, 75 bp, synthetic construct
  source 1..75: mol_type = other DNA
tatcaactggcacgagaaccgttaaagctggaagccattctggcgcgcgcgcgcaaagagggttacggacagaac

SEQ ID NO: 752210 - DNA, 75 bp, synthetic construct
  source 1..75: mol_type = other DNA
tgccagatgaccccagcgaaatatgactccacgacgctgaccgttggtgcgggcgatttccgcctgaaagcacgc

SEQ ID NO: 752211 - DNA, 75 bp, synthetic construct
  source 1..75: mol_type = other DNA
tgaccgttggtgcgggcgatttccgcctgaaagcacgcggtcgtattttgcgttttgatggctggacaaaagtga

SEQ ID NO: 752212 - DNA, 75 bp, synthetic construct
  source 1..75: mol_type = other DNA
atgatgatggcgcagcgtttgtatgaagcaggctatatcacttacatgcgtaccgactccactaacctgagtcag

SEQ ID NO: 752213 - DNA, 75 bp, synthetic construct
  source 1..75: mol_type = other DNA
caaccgaccttgaccgcgaaggggaagctattgcatggcacctgcgggaagtgattggtggtgatgatgcgcgct

SEQ ID NO: 752214 - DNA, 75 bp, synthetic construct
  source 1..75: mol_type = other DNA
gatgataaaggcaataatttctttagtcagtttgagcagcaacaccgctgcgccagttgccctgcgggacattaa

SEQ ID NO: 752215 - DNA, 75 bp, synthetic construct
  source 1..75: mol_type = other DNA
aaaggcgatgctctgacgctcgttgaacttacaccagcccagcactttaccaagccgccagcccgtttcagtgaa

SEQ ID NO: 752216 - DNA, 75 bp, synthetic construct
  source 1..75: mol_type = other DNA
cgccgggcgtgtgcaatccgtagcggtccgcctggtggtcgagcgtgagcgtgaaattaaagcgttcgtgccgga

SEQ ID NO: 752217 - DNA, 75 bp, synthetic construct
  source 1..75: mol_type = other DNA
atggcggaatcgctgaaggatatggaagcagatgcgcagaaactgtaccagttaatctggcgtcagttcgttgcc

SEQ ID NO: 752218 - DNA, 75 bp, synthetic construct
  source 1..75: mol_type = other DNA
cttctcggatttcacccagcagttagataaagctgaaaagatccggaagagggtggtatgcgcccgaaccagatg

SEQ ID NO: 752219 - DNA, 75 bp, synthetic construct
  source 1..75: mol_type = other DNA
ctgagctgccgtgcgaaaaatcagatgcttatttcgtgctgcgtgacggtgctgccggtgtgttcctggctgcca

SEQ ID NO: 752220 - DNA, 75 bp, synthetic construct
  source 1..75: mol_type = other DNA
gctgaacgtgctggaaggcgaagacgctgaaaccaacgcgctgcgcgcaaaacgtcgttgcccgaaatgcggcac

SEQ ID NO: 752221 - DNA, 75 bp, synthetic construct
  source 1..75: mol_type = other DNA
gctgccggtgtgttcctggcggccaataccttcccgaaatcgcgtgaaacgcgtgcgccgctggtggaagagctg

SEQ ID NO: 752222 - DNA, 75 bp, synthetic construct
  source 1..75: mol_type = other DNA
tggctgttctggctatgcgctgccgccgaaagagcgttgcaaaacaaccattaacctggtgccggaaaacgaagt

SEQ ID NO: 752223 - DNA, 75 bp, synthetic construct
  source 1..75: mol_type = other DNA
aatgtgtggctgccgccatcacccggcgaacaggtggtaattgcctgcattggcggcaacccggaaaccgccatg

SEQ ID NO: 752224 - DNA, 75 bp, synthetic construct
  source 1..75: mol_type = other DNA
gaaggaaatcatcatgacagcaccggacggtgcggtattccgctacgatgcagacgccggtgcactggaggttaa

SEQ ID NO: 752225 - DNA, 75 bp, synthetic construct
  source 1..75: mol_type = other DNA
gtgagcgcagaactcatgcgactactgagcaacatcatccgcaccgggatcatctctgaagttgatgaggaatcc

SEQ ID NO: 752226 - DNA, 75 bp, synthetic construct
  source 1..75: mol_type = other DNA
gcacaattgacgatcctatcctgctggcattgtttcatcaggaagtcattgcacgggccaccagctacagcgccg

SEQ ID NO: 752227 - DNA, 75 bp, synthetic construct
  source 1..75: mol_type = other DNA
aataattccacttattgatttgatgtcatgggaaagcgctaccgacagcaaaatatcccttggcgtactcgcagt

SEQ ID NO: 752228 - DNA, 75 bp, synthetic construct
  source 1..75: mol_type = other DNA
caaaactattaccaaaatggcgtagtgaactttcaattgttgagccagacaaaccaattgcaggaagttgggaga

SEQ ID NO: 752229 - DNA, 75 bp, synthetic construct
  source 1..75: mol_type = other DNA
cgggactcttcgtcaggaaacgatggataaagtcagcggagatgtacataacgcattggtgagaaatcttgacgt

SEQ ID NO: 752230 - DNA, 75 bp, synthetic construct
  source 1..75: mol_type = other DNA
gggctaacgagcagtttggacatgcccgtctcggtgatccgcgtcgtacacgacgccttgtgtcactgacctctt

SEQ ID NO: 752231 - DNA, 75 bp, synthetic construct
  source 1..75: mol_type = other DNA
ttatttgtaatcctggcaccgatgctttcgcagtttgcctatgacgatactgactgggcgatgatgtccagcgcc

SEQ ID NO: 752232 - DNA, 75 bp, synthetic construct
  source 1..75: mol_type = other DNA
gtacgtaaagtggttgatatagtgaagaaaaataatatcccagcggtatttagtgagagtacggtttccgataaa

SEQ ID NO: 752233 - DNA, 75 bp, synthetic construct
  source 1..75: mol_type = other DNA
gacaccaagtctaacgtacctggtggcgcatccactaaagaccacgacaccggcgtttctccggtcttcgctggc

SEQ ID NO: 752234 - DNA, 75 bp, synthetic construct
  source 1..75: mol_type = other DNA
caaaatggttcgcagacggcagtactggttctggaaaccctggcaaccgtcagtaagggaagtcgctggtataaa

SEQ ID NO: 752235 - DNA, 75 bp, synthetic construct
  source 1..75: mol_type = other DNA
atgcctgtgaatatatcagaaagctctttcagctctttaggatgcagttcttttaggcgatcgtctatcctgggt

SEQ ID NO: 752236 - DNA, 75 bp, synthetic construct
  source 1..75: mol_type = other DNA
tgaatttgcggacagtgcctggttacaggagccagccggaatcggcgggtccagccgctgggaaatcataaaaca

SEQ ID NO: 752237 - DNA, 75 bp, synthetic construct
  source 1..75: mol_type = other DNA
tctgaacctgcctacgctggatgaggccgtgaataccctgaagccctggtggccgggattatttgacggtgacac

SEQ ID NO: 752238 - DNA, 75 bp, synthetic construct
  source 1..75: mol_type = other DNA
ccggtatgacacggaagggtatgtgacggagcatatttctcaggaggaggaatcgtatgcggcagagcgtctggc

SEQ ID NO: 752239 - DNA, 75 bp, synthetic construct
  source 1..75: mol_type = other DNA
ctttggccgcaagaggatgattcgtcagaggcagaacacagcatgacagagcagaagcgaccggtactgacactg

SEQ ID NO: 752240 - DNA, 75 bp, synthetic construct
  source 1..75: mol_type = other DNA
gcagagctgacagcaaaaaaagcgcaggccagacaggcgctgtccatttatctgaacctgcccacactggatgaa

SEQ ID NO: 752241 - DNA, 75 bp, synthetic construct
  source 1..75: mol_type = other DNA
gtatgaaagtgaaggaaaatgcttttccctcagtgaccgtatgacaatttgcgaaaaggcgttaagactggggct

SEQ ID NO: 752242 - DNA, 75 bp, synthetic construct
  source 1..75: mol_type = other DNA
gaatattacgggtgctgttcgtcaacgcgtttttactctgatagcggaggactttggaatcaaattagattctaa

SEQ ID NO: 752243 - DNA, 75 bp, synthetic construct
  source 1..75: mol_type = other DNA
agaatttttactatgatggcggaggactttggagtcagattagatcctagtgcagcacaaagctctataaatcac

SEQ ID NO: 752244 - DNA, 75 bp, synthetic construct
  source 1..75: mol_type = other DNA
tctataactcatattataaatggaaacggctggtttggtaaaaaattagcttccctttgtgaggggatggcgaga

SEQ ID NO: 752245 - DNA, 75 bp, synthetic construct
  source 1..75: mol_type = other DNA
gctggccgagaaagcagcccgggaagcagagctggcggcaaaaaaagcgcaggccagacaggcactgtccattta

SEQ ID NO: 752246 - DNA, 75 bp, synthetic construct
  source 1..75: mol_type = other DNA
aagcgtatgcggcagcgcgtctggagaaaatccgtcgccagaaccggataaaggcagaacttcaggctgtgcttg

SEQ ID NO: 752247 - DNA, 75 bp, synthetic construct
  source 1..75: mol_type = other DNA
taaacgtattccagcacaatcttgcacccggtgaccgggcttatgcacagtgtttttgtcaggataacgcagagg

SEQ ID NO: 752248 - DNA, 75 bp, synthetic construct
  source 1..75: mol_type = other DNA
gcgggattcctcgtggtaacgctgttttgtttcaactttatcggcgatggcttgcgtgatgccctcgacccgaaa

SEQ ID NO: 752249 - DNA, 75 bp, synthetic construct
  source 1..75: mol_type = other DNA
catacgttcgttgcagtaccgcacatatcacggaaaaggacaacgcctggctgtactcactgtcacatcagacga

SEQ ID NO: 752250 - DNA, 75 bp, synthetic construct
  source 1..75: mol_type = other DNA
tagttggttgtcaccagatagttttattccgctggcacagcaaacgggcctttctgagccattgacgctactgat

SEQ ID NO: 752251 - DNA, 75 bp, synthetic construct
  source 1..75: mol_type = other DNA
gaagagcatctcatggaaatgcgccgggtttcatacagctatcgctatattcaggaagtggtttatatcgataac

SEQ ID NO: 752252 - DNA, 75 bp, synthetic construct
  source 1..75: mol_type = other DNA
ttaaagggataaataattacccggataagattgctgttactgtggcacttgaaattggcgggcatccgtcgttgt

SEQ ID NO: 752253 - DNA, 75 bp, synthetic construct
  source 1..75: mol_type = other DNA
aacattgatcctgaactggcacacttcatcatttatcttcttaattacctaaccaccacacacaaaagcatataa

SEQ ID NO: 752254 - DNA, 75 bp, synthetic construct
  source 1..75: mol_type = other DNA
atatcgggatatttctgacggcgtggcaaaacaggtcagggatgaagtccgaaatgaggtgcagaagctggacgt

SEQ ID NO: 752255 - DNA, 75 bp, synthetic construct
  source 1..75: mol_type = other DNA
atgaacaggaaatattatcttaataatatgtggtggggatggtttatgggtgggtatactctgtatatgtcatgg

SEQ ID NO: 752256 - DNA, 75 bp, synthetic construct
  source 1..75: mol_type = other DNA
ggtttatacgggtactgttttcatatcatctcttccgttaagtctaatatatattatttctgtaattgtaaaaag

SEQ ID NO: 752257 - DNA, 75 bp, synthetic construct
  source 1..75: mol_type = other DNA
atgatccagaaacaatattaaacgttgaagagcgcaggagaacggaagtctatattcataaccttaatgaagatg

SEQ ID NO: 752258 - DNA, 75 bp, synthetic construct
  source 1..75: mol_type = other DNA
actcactgaacgcgagtttgccgatccgaaaaccagcgccccgataatttctcgctaccgggaggcgggccatga

SEQ ID NO: 752259 - DNA, 75 bp, synthetic construct
  source 1..75: mol_type = other DNA
cgttgcaaaaaggctggcatcggcagggctttatctggttacctgtagggttgttaattggcctgctggcagcca

SEQ ID NO: 752260 - DNA, 75 bp, synthetic construct
  source 1..75: mol_type = other DNA
aaacatcatttattgaagagctgaatacgtattcctcccgcgtcgctattcgggccaataaggtggcgatacaag

SEQ ID NO: 752261 - DNA, 75 bp, synthetic construct
  source 1..75: mol_type = other DNA
atgcaaaaaaacgccgtgatgagcagttcgcggcgttttacgattattgtattgaagttactcgcaggaattttg

SEQ ID NO: 752262 - DNA, 75 bp, synthetic construct
  source 1..75: mol_type = other DNA
atgcgaatatttgtctacggcagtttacgccacaaacaaggcaacagtcactgggtgaccaatgcccagttactg

SEQ ID NO: 752263 - DNA, 75 bp, synthetic construct
  source 1..75: mol_type = other DNA
cggcgtgctggagaccggcatcaccgaggaaatgtattacgaaatggaaaggctgatcgccgatgcaaagccagc

SEQ ID NO: 752264 - DNA, 75 bp, synthetic construct
  source 1..75: mol_type = other DNA
atgagagctggccggaagaaaccaaacgcgaggttatccgcagcgcgtggtttatccatgcgcacaaagggacga

SEQ ID NO: 752265 - DNA, 75 bp, synthetic construct
  source 1..75: mol_type = other DNA
cctgcttgtgcgcgttgcgattggcgggcgtatctcactcatggtcggtgttgctgcggcactggtggctgtggt

SEQ ID NO: 752266 - DNA, 75 bp, synthetic construct
  source 1..75: mol_type = other DNA
atccactgtcataaaggcactgtcggcgcaatccggcgtgtggtggagccgctcggctatctcattaacgtaaag

SEQ ID NO: 752267 - DNA, 75 bp, synthetic construct
  source 1..75: mol_type = other DNA
tacgccacaaacaaggcaacagccactggatgacgaatgcccagttgctgggcgatttcagtatcgataactatc

SEQ ID NO: 752268 - DNA, 75 bp, synthetic construct
  source 1..75: mol_type = other DNA
atgatcgattcgaatgccaaactgcgatcgattcagatgccattttgcagcgaatgttggtttgattcgccgatc

SEQ ID NO: 752269 - DNA, 75 bp, synthetic construct
  source 1..75: mol_type = other DNA
cctgtgccgtcggatatctcaatttccgccgcgttgcgccgggctggtgtgttgaccgcccacacttagtcaaac

SEQ ID NO: 752270 - DNA, 75 bp, synthetic construct
  source 1..75: mol_type = other DNA
gctggtttgattcgccgatcatcgctgaatatattgaattaatgaatgtcgctccggcgatgttgccgcgcgatc

SEQ ID NO: 752271 - DNA, 75 bp, synthetic construct
  source 1..75: mol_type = other DNA
gaaatgtatcaagagcttgagcgcctgattgaagacgccaaaccggcaagtcgccacctgaccgggctggctatc

SEQ ID NO: 752272 - DNA, 75 bp, synthetic construct
  source 1..75: mol_type = other DNA
ccaaagcagcagagctggcaaaagtgaaacagggcatctggaatactacgttgatgaaccgaccttcttcgacaa

SEQ ID NO: 752273 - DNA, 75 bp, synthetic construct
  source 1..75: mol_type = other DNA
gaaatgtatcaggagcttgagcgcctgattgaagacgccaaaccggcaagccgtcatttgacagggctggctatc

SEQ ID NO: 752274 - DNA, 75 bp, synthetic construct
  source 1..75: mol_type = other DNA
ccatcagccagcaaagtgccgccattttgttctgcgttgaaggcgaagcaacactgggtaaaggttctcaacagt

SEQ ID NO: 752275 - DNA, 75 bp, synthetic construct
  source 1..75: mol_type = other DNA
agctggtttttgcgctgacgcctttccttgcgatgaacgcgtttcgtgagttttccgagattgtctccctactcc

SEQ ID NO: 752276 - DNA, 75 bp, synthetic construct
  source 1..75: mol_type = other DNA
aaaactatgcctggggcagcaaaacggcgttgactgaactttatggtatggaaaatccgtccagccagccgatgg

SEQ ID NO: 752277 - DNA, 75 bp, synthetic construct
  source 1..75: mol_type = other DNA
atctacattggtggtatcgaacacgccattatgcacctgctctacttccgcttcttccacaaactgatgcgtgat

SEQ ID NO: 752278 - DNA, 75 bp, synthetic construct
  source 1..75: mol_type = other DNA
gtaataaatatgacgtgtttacatctgaccgatattatccaggctatctccctatgattgatggcgataccccaa

SEQ ID NO: 752279 - DNA, 75 bp, synthetic construct
  source 1..75: mol_type = other DNA
cattgctcactttttacagcagcccaatgccgaacgcttaagcgaactgttcgccagcctgttaaatatgcaagg

SEQ ID NO: 752280 - DNA, 75 bp, synthetic construct
  source 1..75: mol_type = other DNA
gttcttttgggataagttgccatagagaaaattccttttggaactgtttccgggggaagaaaaatgaggtcgtaa

SEQ ID NO: 752281 - DNA, 75 bp, synthetic construct
  source 1..75: mol_type = other DNA
cagccagatgccgacatcactgaacttcttcgccattcgtaacgttgagcactctattctgggtctggcagttga

SEQ ID NO: 752282 - DNA, 75 bp, synthetic construct
  source 1..75: mol_type = other DNA
gcgtattcttgcagattggtgtcgctactgccgttattgcagtactgatgctgctgaccgcgccgaaactgcacc

SEQ ID NO: 752283 - DNA, 75 bp, synthetic construct
  source 1..75: mol_type = other DNA
ttcaatggcggtagcttcggtcgtggcgacagcgacgagtggaccttcggtgcccagatggaaatctggtggtaa

SEQ ID NO: 752284 - DNA, 75 bp, synthetic construct
  source 1..75: mol_type = other DNA
caaacttgctggcggacaagttttaccagaaacatattgattcggatgttgatattgtgaaactacgaaatgaga

SEQ ID NO: 752285 - DNA, 75 bp, synthetic construct
  source 1..75: mol_type = other DNA
aaatgtaaaaatctccactgaagagaggaaaagagtcttttctcttgtgagtcaagaatatgaactggctcttga

SEQ ID NO: 752286 - DNA, 75 bp, synthetic construct
  source 1..75: mol_type = other DNA
aaatatcttgatggcattaccgtgcgtaaagtgatttacgtacccggtaaactcctcaatctggtcgttggctaa

SEQ ID NO: 752287 - DNA, 75 bp, synthetic construct
  source 1..75: mol_type = other DNA
gaaacactggccgggatgcagcgttccctgttcgaagaggacgtggacgtggacgtggacgtggacgtggacgtg

SEQ ID NO: 752288 - DNA, 75 bp, synthetic construct
  source 1..75: mol_type = other DNA
gacaacggtattcccggccgatagtgaatgacctgtttgcctggcctgaagagcaggagccgtgctgtccgcccg

SEQ ID NO: 752289 - DNA, 75 bp, synthetic construct
  source 1..75: mol_type = other DNA
aaaaaattatccagccggacactgaccattgccctgaatgtgacgagccgctgcactatatccgcgatgcggtga

SEQ ID NO: 752290 - DNA, 75 bp, synthetic construct
  source 1..75: mol_type = other DNA
tccgcaatacagttgtccctgttgccagaaggtgttcagcggtgaaatgccggcacatatcctcccgaaaagtgc

SEQ ID NO: 752291 - DNA, 75 bp, synthetic construct
  source 1..75: mol_type = other DNA
aacacgtcctgttcgtaagcctttaccctcacatcttccccggattgaaaaggttatcctgccagctgaagcaca

SEQ ID NO: 752292 - DNA, 75 bp, synthetic construct
  source 1..75: mol_type = other DNA
cgctatatccgcccgcagtacagctgtccctgctgtgagaaagtgttcagcggaaaaatgccggcacatatcctt

SEQ ID NO: 752293 - DNA, 75 bp, synthetic construct
  source 1..75: mol_type = other DNA
ccttgttcgaagaggacgtggacgcggatatcgcagaaatctcagcaaatctggacaaactgcttcctcagaccg

SEQ ID NO: 752294 - DNA, 75 bp, synthetic construct
  source 1..75: mol_type = other DNA
tatctctactcaatcagttgatttgggttgtgcaactgtcagcgcatggctacttaatggtaaacagttggataa

SEQ ID NO: 752295 - DNA, 75 bp, synthetic construct
  source 1..75: mol_type = other DNA
attctgaaagcgcgccatgcggcaaaagtgaccggtttaccggcaattgccgacgactccggtctggcggtagat

SEQ ID NO: 752296 - DNA, 75 bp, synthetic construct
  source 1..75: mol_type = other DNA
acgcaaggcgcggcttcgcaaatctgtacaaggccagcagggagccccgtgcagccatggcgctgagaaaaatcg

SEQ ID NO: 752297 - DNA, 75 bp, synthetic construct
  source 1..75: mol_type = other DNA
atggcaaaggcatgggatatcgaaccgtcaatatttgccgggatgattgaggaagatgtggggctgaaaattcgc

SEQ ID NO: 752298 - DNA, 75 bp, synthetic construct
  source 1..75: mol_type = other DNA
tacatcgctattcagattcttactgctattgatattgctgctccggttgataccgggcgtttcagaaataacaac

SEQ ID NO: 752299 - DNA, 75 bp, synthetic construct
  source 1..75: mol_type = other DNA
atcgttgccttcatcctgatgctcgaagcaatcatcttcttcgtgctgtacagccagatgccaacgtcactgaac

SEQ ID NO: 752300 - DNA, 75 bp, synthetic construct
  source 1..75: mol_type = other DNA
cgcgccgcgtcggggctggataagctgccgtcgcaggtgatggcggcgaagcaacagacaaatagtcttattaac

SEQ ID NO: 752301 - DNA, 75 bp, synthetic construct
  source 1..75: mol_type = other DNA
gacgcgttacgcgcggttcttcgccttgagtcaccgcagtggtggttaaaccgcctgcgccgtatccatgcccgg

SEQ ID NO: 752302 - DNA, 75 bp, synthetic construct
  source 1..75: mol_type = other DNA
cactaatgacgcccgtggaatatattttaaaagagaataaaaattgcaatatgtggtggacccatacacgatctg

SEQ ID NO: 752303 - DNA, 75 bp, synthetic construct
  source 1..75: mol_type = other DNA
aagcgtatgccgcagagcgtctggcgaaaatccgccgccagaatcgtatcagggaagaacttaagtccatactgg

SEQ ID NO: 752304 - DNA, 75 bp, synthetic construct
  source 1..75: mol_type = other DNA
gccggcgcctgccgctatgatacggaaggctatgtgacagaacatatcacacaggaagaagaacagtatgcgcag

SEQ ID NO: 752305 - DNA, 75 bp, synthetic construct
  source 1..75: mol_type = other DNA
agccggaaaaccatcatcaatgtcaccacgccaccaaaatggaaggtgaaaaagcagaagctggcggagaaagcg

SEQ ID NO: 752306 - DNA, 75 bp, synthetic construct
  source 1..75: mol_type = other DNA
atgacagagcagaagcgaccggtactgacactgaagcggaaggcagagggaacagcatctgtccgcagccggaaa

SEQ ID NO: 752307 - DNA, 75 bp, synthetic construct
  source 1..75: mol_type = other DNA
aagcgtatgcggcagcgcgtctggcaaaaattcgccgtcagaaccggataaaggcagaacttcaggccgtgcttg

SEQ ID NO: 752308 - DNA, 75 bp, synthetic construct
  source 1..75: mol_type = other DNA
tccgggacgtgttactggaagacgtggcgcagcggaatatcccgctctcgcataaaaaactgcgcagggcgctga

SEQ ID NO: 752309 - DNA, 75 bp, synthetic construct
  source 1..75: mol_type = other DNA
ttgttgacgaaaaccaagcggtaattgtggagacattgaaaacggcaaatatgatgaaaaaccaccatctggcaa

SEQ ID NO: 752310 - DNA, 75 bp, synthetic construct
  source 1..75: mol_type = other DNA
gacgaaaaccaagcggtaattgtggagacgctgaaaacagccaacatgatgaaaaaccacaatctggcaagagcg

SEQ ID NO: 752311 - DNA, 75 bp, synthetic construct
  source 1..75: mol_type = other DNA
actggccgagaaagcagcccgggaagcagagctggcggcaaaaaaagcgcaggccagacaggcgctgtccattta

SEQ ID NO: 752312 - DNA, 75 bp, synthetic construct
  source 1..75: mol_type = other DNA
gcgaatccccgccatctcatcaatgccagccgtaatctgcgacgcaaacaaaaagcgttatcccgcaagcaaaag

SEQ ID NO: 752313 - DNA, 75 bp, synthetic construct
  source 1..75: mol_type = other DNA
tagcttttctgttcgcaaatttagcggcaatatactggaaacggtgagaaggcagagtactaaagatattgatga

SEQ ID NO: 752314 - DNA, 75 bp, synthetic construct
  source 1..75: mol_type = other DNA
tctcgcgtgatcaaccagggaattgacaaatattgtgctgaaaatagcagaaacatttccagtgaagtacggcaa

SEQ ID NO: 752315 - DNA, 75 bp, synthetic construct
  source 1..75: mol_type = other DNA
ccaaggcactaaccatcaatgctctgatagatgacgtgaagcggcaaatcaacgattcaatgccctacaccgaca

SEQ ID NO: 752316 - DNA, 75 bp, synthetic construct
  source 1..75: mol_type = other DNA
ctggtctgggtctggcaatggttgcacaactcgttccgcagcgtctgatgggcttcattatgggtagctggttcc

SEQ ID NO: 752317 - DNA, 75 bp, synthetic construct
  source 1..75: mol_type = other DNA
cccttagcgtagtaggtctgttaatcactatcgttaacttcaccttctgccaacgctgggttaagcagtacggct

SEQ ID NO: 752318 - DNA, 75 bp, synthetic construct
  source 1..75: mol_type = other DNA
tcaacatcggctctttcttctctatgatcgctaccccgtggctggccgcgaaatacggctggagtgttgcgtttg

SEQ ID NO: 752319 - DNA, 75 bp, synthetic construct
  source 1..75: mol_type = other DNA
ctatcggatatctcgattatcaagaagttaagaaaggtcgcgacatacaatttcagatcttcaaaagaagcccta

SEQ ID NO: 752320 - DNA, 75 bp, synthetic construct
  source 1..75: mol_type = other DNA
aaccgcgaccgaaactttgaagttgatgcctctgatgagctttcgtgtatggaaattgcaagatcggagggttat

SEQ ID NO: 752321 - DNA, 75 bp, synthetic construct
  source 1..75: mol_type = other DNA
tggtgaaactggatcaatggttcgccagttcgaaaacctgccactgctgcggtcacaaaatgtcggagatgccat

SEQ ID NO: 752322 - DNA, 75 bp, synthetic construct
  source 1..75: mol_type = other DNA
catcaaatcggacggcaataaaattgccagtccccgccacctaatcaatgcaagtcgcaacctgcgccggaagca

SEQ ID NO: 752323 - DNA, 75 bp, synthetic construct
  source 1..75: mol_type = other DNA
gctcacgatttcaggaggcgctagcaaacctagcttccgttgtgatttctttccgtgattcaaaaactgaacgtt

SEQ ID NO: 752324 - DNA, 75 bp, synthetic construct
  source 1..75: mol_type = other DNA
atccttttgatgtgaccaacacggagacagggaagacttatcaactgagtccaaactcttcgaaatcggtccaac

SEQ ID NO: 752325 - DNA, 75 bp, synthetic construct
  source 1..75: mol_type = other DNA
tgcagaaaaaaagcaatatccagatgaagcatcgcaaggtgtaggtattgttagtgttagtggttttgaattcct

SEQ ID NO: 752326 - DNA, 75 bp, synthetic construct
  source 1..75: mol_type = other DNA
atgctgaattttttgaaaaaaatttatagctacctggagtttttaggtgctcttatttgggttggtgttgggttg

SEQ ID NO: 752327 - DNA, 75 bp, synthetic construct
  source 1..75: mol_type = other DNA
gcgcgtcgagtcctgaagtcactgacttactcggaagcaatccggtaagaatttatcctttcggaattcaggacg

SEQ ID NO: 752328 - DNA, 75 bp, synthetic construct
  source 1..75: mol_type = other DNA
actgttgtttgatggtgttattgcattgtccttcaattctgacagagaaaggagctgcaatgtttatacgccatc

SEQ ID NO: 752329 - DNA, 75 bp, synthetic construct
  source 1..75: mol_type = other DNA
acgttcatatgatcgacttctactactgggatatttctggtcctggtgccggtctggaaaacatcgatgttggct

SEQ ID NO: 752330 - DNA, 75 bp, synthetic construct
  source 1..75: mol_type = other DNA
tcggcaatcctgtcgagggtgagggggattttgtctacagggggcagtccatggtccttcgccagccctttaccc

SEQ ID NO: 752331 - DNA, 75 bp, synthetic construct
  source 1..75: mol_type = other DNA
agtctttggcaccaacaacaaaaaatccgcctttcgtcctcaaacataatttgtatgagtattaacccacgattc

SEQ ID NO: 752332 - DNA, 75 bp, synthetic construct
  source 1..75: mol_type = other DNA
gctctgcatgaagcggactctggtgagggtgtcatcttcttaaccgatatagccggagcgccgccgtaccgcgtg

SEQ ID NO: 752333 - DNA, 75 bp, synthetic construct
  source 1..75: mol_type = other DNA
ggcctggcggacagtgaagatggtgaaatcaacgatattttcgcccgtatcctgttatgccgcgaaaaagatcac

SEQ ID NO: 752334 - DNA, 75 bp, synthetic construct
  source 1..75: mol_type = other DNA
atgattgctccaatatttgcagtttgcgcagccagccaggcagtcagggatttgttaggctctaatcccgtgcgg

SEQ ID NO: 752335 - DNA, 75 bp, synthetic construct
  source 1..75: mol_type = other DNA
ttgccgatcgcgatgaatacagtgctaccggaatggctgcggcctgtgaatgcgcacatgcaaatctccaggccc

SEQ ID NO: 752336 - DNA, 75 bp, synthetic construct
  source 1..75: mol_type = other DNA
ggaacatggatctgcacctgtggcagcggtgacgggcttaagctggttaccgaaacccagggcaaaccattcaac

SEQ ID NO: 752337 - DNA, 75 bp, synthetic construct
  source 1..75: mol_type = other DNA
aaagatttcggcgaaaccagtatgaatgataacgggctggatactggcgagcaggcaaaagctttcgcattggga

SEQ ID NO: 752338 - DNA, 75 bp, synthetic construct
  source 1..75: mol_type = other DNA
accctctagttttgagtagaataaaagagaggaagaacctttctagcgctcaaaatgagatatatgactggaatg

SEQ ID NO: 752339 - DNA, 75 bp, synthetic construct
  source 1..75: mol_type = other DNA
atcggtaatgtacttaacgttatttcaggggtggcaaaactcaaattcgatgatgcagtcagaggcgttttccct

SEQ ID NO: 752340 - DNA, 75 bp, synthetic construct
  source 1..75: mol_type = other DNA
atgaaggggtttgattacaacaatgatgatgagcacagaatcgtcatgcttcagggggacagacgccatgcggga

SEQ ID NO: 752341 - DNA, 75 bp, synthetic construct
  source 1..75: mol_type = other DNA
ccgaagcgacgactaataatattgctccacgtttactggaaaatattttagcgctactaaacaatcctgacttcg

SEQ ID NO: 752342 - DNA, 75 bp, synthetic construct
  source 1..75: mol_type = other DNA
agaaaatttgttctctcggcttacggattcgtcgcggctgttcattccacggcctggcattaaacgtcaatatgg

SEQ ID NO: 752343 - DNA, 75 bp, synthetic construct
  source 1..75: mol_type = other DNA
tccttgtgggtatgccggaatggaaatggctaaaatatcacaatggaaacccgaagcgacgactaataatattgc

SEQ ID NO: 752344 - DNA, 75 bp, synthetic construct
  source 1..75: mol_type = other DNA
tgaaacggtgccgctgaaattacaaatccacagtcgttacggtattcgacaattgatctggcagggcgatacgca

SEQ ID NO: 752345 - DNA, 75 bp, synthetic construct
  source 1..75: mol_type = other DNA
caacgctgggcgcgcggcaactggctggtgggttataacactttttatgacaacttgctggacgaaaatcttcag

SEQ ID NO: 752346 - DNA, 75 bp, synthetic construct
  source 1..75: mol_type = other DNA
aggttgccgaaagtcagtcattacgtggtagtcgctatgacaatccgcagcgaaataatctaccgactcttgagt

SEQ ID NO: 752347 - DNA, 75 bp, synthetic construct
  source 1..75: mol_type = other DNA
agttgtgtgtgaattactggggcgtaactacaccatcagttatccactggcggtgtttcagtccggaaaaatgtt

SEQ ID NO: 752348 - DNA, 75 bp, synthetic construct
  source 1..75: mol_type = other DNA
tgtatcaccgatacaaccattgcccccgtgtggggcagtggttcaccaccagcaacggacacgttctgcgggttt

SEQ ID NO: 752349 - DNA, 75 bp, synthetic construct
  source 1..75: mol_type = other DNA
atgattcgccgcctcgttaattctctgtatcaccgacacaaccgttgcccccgtgtggggcagtggttcgccacc

SEQ ID NO: 752350 - DNA, 75 bp, synthetic construct
  source 1..75: mol_type = other DNA
gagctgtggcagtcaccatcggtggtgccagtgtgtttggccttctcaccaataccgatttcggggtcgtggtgg

SEQ ID NO: 752351 - DNA, 75 bp, synthetic construct
  source 1..75: mol_type = other DNA
atactgcattcgaagatatcaactggacgctcagctatagcctgacgaaaaacgcctggcaaaaaggacgggatc

SEQ ID NO: 752352 - DNA, 75 bp, synthetic construct
  source 1..75: mol_type = other DNA
gctggggcagccgttaaacgatacggtggtgcttgttaaagcgcctggcgcaaaagatgcaaaagtcgaaaacca

SEQ ID NO: 752353 - DNA, 75 bp, synthetic construct
  source 1..75: mol_type = other DNA
atgtcacacgatctcaacggtcggatgaccaatctggtcggtgtatacggtacgttgctggaagacaacaacctc

SEQ ID NO: 752354 - DNA, 75 bp, synthetic construct
  source 1..75: mol_type = other DNA
tggttcgtggtgcctgaaatgacaagttttggcagtgcattattagcttttgtcctaacgccaggcctttgctct

SEQ ID NO: 752355 - DNA, 75 bp, synthetic construct
  source 1..75: mol_type = other DNA
ccatttgcgacagaatatagagaaaaccgtgttgctcttaacgcgaattcccttgcagataatgttgaactggat

SEQ ID NO: 752356 - DNA, 75 bp, synthetic construct
  source 1..75: mol_type = other DNA
ttggcagcatcaccgaaattcaccgactattacaacctcgcttataacaaacgcgggaaattacagctcaccgtt

SEQ ID NO: 752357 - DNA, 75 bp, synthetic construct
  source 1..75: mol_type = other DNA
actcaaaaaaatacacaggcacctttggctatggtggcaacatccgcattaacagcgatctcaattgcctgtcag

SEQ ID NO: 752358 - DNA, 75 bp, synthetic construct
  source 1..75: mol_type = other DNA
ctttaagacattgtcgggaatatgctgccaaaaatgcagagtatatggcaagactggcaggacttatttaccatt

SEQ ID NO: 752359 - DNA, 75 bp, synthetic construct
  source 1..75: mol_type = other DNA
cgagcggtgaagagggggagatttccccttacactgcagaaatggcgagagaattagcaatatggtacggtaatg

SEQ ID NO: 752360 - DNA, 75 bp, synthetic construct
  source 1..75: mol_type = other DNA
tacgccacgctgaattatcgcggtggttacggcaatgccaacatcggttacagccatagcgatgatattaagcag

SEQ ID NO: 752361 - DNA, 75 bp, synthetic construct
  source 1..75: mol_type = other DNA
cggaaaaaggataaaatcaactggttactggatttactgtatgaacaaaacagagttgtaccggttattgaggga

SEQ ID NO: 752362 - DNA, 75 bp, synthetic construct
  source 1..75: mol_type = other DNA
ggagataattattcatcacagtatcaggagttattgataagaggatcaatgaacttattgatgaaagtctggcta

SEQ ID NO: 752363 - DNA, 75 bp, synthetic construct
  source 1..75: mol_type = other DNA
ggttacgccggtacaggtaaaagttatatgacaatggcagcaaaggagctgctggagtcacaagggcagaaggtc

SEQ ID NO: 752364 - DNA, 75 bp, synthetic construct
  source 1..75: mol_type = other DNA
atgtctgaacccttatccggttctggtacagccgctgcgctcggcggggcgacggtattcggactgtttaccggg

SEQ ID NO: 752365 - DNA, 75 bp, synthetic construct
  source 1..75: mol_type = other DNA
tggcgggttgcggcacattttctggtgtcgttcattgtcggcgtactgggagctcgtgtgctgtcagcctggatt

SEQ ID NO: 752366 - DNA, 75 bp, synthetic construct
  source 1..75: mol_type = other DNA
cgcagaggttctggcatcctggctggtaaagcatacagagtttgacggtgcacctgtcgacgcattgtgtgcagt

SEQ ID NO: 752367 - DNA, 75 bp, synthetic construct
  source 1..75: mol_type = other DNA
tgtcgttcattgttggtgtactgggggcgcgtgtactgtcagcctggattgcatcaaaaacaggttatgacggtg

SEQ ID NO: 752368 - DNA, 75 bp, synthetic construct
  source 1..75: mol_type = other DNA
aacgatgccgcaggcgctttcagcctggcgtgtggcggcgcattttctggtgtcgttcattatcggcgtgctggg

SEQ ID NO: 752369 - DNA, 75 bp, synthetic construct
  source 1..75: mol_type = other DNA
tgtcgtttatcgttggcgtgctgggtgcgcatgtgctgtcagcctggattgcatcaaaaacaggttatgacggta

SEQ ID NO: 752370 - DNA, 75 bp, synthetic construct
  source 1..75: mol_type = other DNA
ttcatcttaagcagaaccctatggatgattccgttggcctgcggcgtcatgaagcacagcaaaatgatgcagaac

SEQ ID NO: 752371 - DNA, 75 bp, synthetic construct
  source 1..75: mol_type = other DNA
atcgctttcagcccgcgtacacacaccaagctgtctgtataccaggcagtcagcgccgaactggcgccgggcgat

SEQ ID NO: 752372 - DNA, 75 bp, synthetic construct
  source 1..75: mol_type = other DNA
tattcgccttgagcgttccattctgactatcgaatcacgcggccgggggcagatgccgcgacagctgaccgcaga

SEQ ID NO: 752373 - DNA, 75 bp, synthetic construct
  source 1..75: mol_type = other DNA
gcaaccggctctggctgcacgtagcgaaaaatgtgtcccgatgactcgcctgcgtaagcgtgtggcagagcgtct

SEQ ID NO: 752374 - DNA, 75 bp, synthetic construct
  source 1..75: mol_type = other DNA
attctgtcattcatccaccagcaggatattgcatcactggtgtccggcctgttctcccgtctgcgtggcggagga

SEQ ID NO: 752375 - DNA, 75 bp, synthetic construct
  source 1..75: mol_type = other DNA
attctctcattcatccaccagcaggatatcgcatcgctggtatccgggctgttctcccgtctgcggggggggagg

SEQ ID NO: 752376 - DNA, 75 bp, synthetic construct
  source 1..75: mol_type = other DNA
tcgcacacgtctgaagcggctgaaagagattaaccaaccgggttacagttactggtacgaatgcacctcacgtca

SEQ ID NO: 752377 - DNA, 75 bp, synthetic construct
  source 1..75: mol_type = other DNA
ttttatgctttgtacctcgcacgccatgatgcgcgatctggccgagcagttccgcgctaccatgacgcttcccgt

SEQ ID NO: 752378 - DNA, 75 bp, synthetic construct
  source 1..75: mol_type = other DNA
tactgctcgatgacaccctggaactttgttatgacgtggcgaaactgtcactggggcgttccgccttgctggatg

SEQ ID NO: 752379 - DNA, 75 bp, synthetic construct
  source 1..75: mol_type = other DNA
cgttcctcgccagcctgccgcctgcgccgcgcacccgtgatatagcccgtgcggttcgtttccttgcgatacctt

SEQ ID NO: 752380 - DNA, 75 bp, synthetic construct
  source 1..75: mol_type = other DNA
gtgacagacgattttgcaccagacggccaactggcaaaagcgataccaggctttaagccgcgtgaaccacagcga

SEQ ID NO: 752381 - DNA, 75 bp, synthetic construct
  source 1..75: mol_type = other DNA
cgtttctcgccagtctgccgcccgcgccacgcacccgtgacattgcccgtgcggttcgtttccttgcgataccat

SEQ ID NO: 752382 - DNA, 75 bp, synthetic construct
  source 1..75: mol_type = other DNA
atttcaactgagattggcgacgggaagcagtacgccagcagccgtgactttgcggcggcaacagggcttgtacct

SEQ ID NO: 752383 - DNA, 75 bp, synthetic construct
  source 1..75: mol_type = other DNA
gctctgttgcaggcagaactgccgctgaaaaaagcggcggcgctggccgcagaaattcacggcgtgaagaaaaat

SEQ ID NO: 752384 - DNA, 75 bp, synthetic construct
  source 1..75: mol_type = other DNA
gccgtgaagcaggtattcgcgtggtgccgctacctggaccgtgtgctgccatcactgcattaagcgccgcgggtt

SEQ ID NO: 752385 - DNA, 75 bp, synthetic construct
  source 1..75: mol_type = other DNA
ttgcgctccgtctggggcgcaccttatccgaactgcggcacagcctgagtgcgagcgaggcgatgatgtggatgg

SEQ ID NO: 752386 - DNA, 75 bp, synthetic construct
  source 1..75: mol_type = other DNA
ccagagtatttatacaaaaactggaacaccagtcaggcaggttggccgactgggtccgggagttactgtgccgga

SEQ ID NO: 752387 - DNA, 75 bp, synthetic construct
  source 1..75: mol_type = other DNA
ttaaaagcaataaaaacgactttgtcgacgccgaagctatttgtgaagcagcatcgcgtccgtctatgcgttttg

SEQ ID NO: 752388 - DNA, 75 bp, synthetic construct
  source 1..75: mol_type = other DNA
ctgttatgacgtagcgaaattgtcgctggggcgttccgccttgctggatgcagcatttgaacgcgccacacttta

SEQ ID NO: 752389 - DNA, 75 bp, synthetic construct
  source 1..75: mol_type = other DNA
acaaagtatctgcaaaacaaatctctgagaattttgcaaaatcatatccagatttactggaaggtgcagttataa

SEQ ID NO: 752390 - DNA, 75 bp, synthetic construct
  source 1..75: mol_type = other DNA
atttaacccgttagggaaagtgccggtgctggtgaccgaagagggcgaatgttggtttgattcgccgatcatcgc

SEQ ID NO: 752391 - DNA, 75 bp, synthetic construct
  source 1..75: mol_type = other DNA
atgcgacttgcgctccgtctggggcgcaccttatccgaactgcgtcatagcctgagtgtgagcgaggcgatgatg

SEQ ID NO: 752392 - DNA, 75 bp, synthetic construct
  source 1..75: mol_type = other DNA
atgctgaccacgttcaacgaaatcaacatgaagccgattatggatctgcgtaagcagtacggtgaagcgtttgaa

SEQ ID NO: 752393 - DNA, 75 bp, synthetic construct
  source 1..75: mol_type = other DNA
gtcagttgtggatacctgaaggatttgcacatgggtttttggtgctgagtgagacggcggagtttttgtataaga

SEQ ID NO: 752394 - DNA, 75 bp, synthetic construct
  source 1..75: mol_type = other DNA
ccaagtttaaaaattgagtggcccttggataatactcctgtactctctgcaagagataaggcacactcgatctta

SEQ ID NO: 752395 - DNA, 75 bp, synthetic construct
  source 1..75: mol_type = other DNA
tttgcaccagacggtcagctggcgaaagcgataccaggctttaagccgcgagaaccacagcgacagatggcggta

SEQ ID NO: 752396 - DNA, 75 bp, synthetic construct
  source 1..75: mol_type = other DNA
agtacaactgccggatgcggtcattactctcaagcagggggtagggcgactgattcgcgacgccgacgatcgcgg

SEQ ID NO: 752397 - DNA, 75 bp, synthetic construct
  source 1..75: mol_type = other DNA
tgattcgcgacgccgacgatcgcggcgtgctggtgatttgcgataatcggctggtgatgcgcccttacggcgcga

SEQ ID NO: 752398 - DNA, 75 bp, synthetic construct
  source 1..75: mol_type = other DNA
tctgtgtgccgcgcaacctgccgcaaaccaatcaaccgggttccgcacggcaactggcggcaatgctgcgaccga

SEQ ID NO: 752399 - DNA, 75 bp, synthetic construct
  source 1..75: mol_type = other DNA
cttttctcgccagtctgccacccgcaccgcgtaccagggatattgcccgtgcagttcgttttctcgcaataccat

SEQ ID NO: 752400 - DNA, 75 bp, synthetic construct
  source 1..75: mol_type = other DNA
cctcgcggcttggtattgaacatgccgagtcgttgctgttgccaagcccgtttgattacagccgtcaggcgttac

SEQ ID NO: 752401 - DNA, 75 bp, synthetic construct
  source 1..75: mol_type = other DNA
ttactgctgcaacattttggtatcaacgcccggttgttcgccttgcatgaccataacgaacagcagaaagctgaa

SEQ ID NO: 752402 - DNA, 75 bp, synthetic construct
  source 1..75: mol_type = other DNA
gaaccgcgcaccattcacgactcgtcattgagtaaagcgatccacggcattgttgccgcgcgttgtggcttgctt

SEQ ID NO: 752403 - DNA, 75 bp, synthetic construct
  source 1..75: mol_type = other DNA
ttgaacggtcagcttatttcagtcgctgaagaatctgttttctgtttaggggattttattttgcccttcaatggg

SEQ ID NO: 752404 - DNA, 75 bp, synthetic construct
  source 1..75: mol_type = other DNA
ccgatatgccctttgcgctgttgcttctcgtgcccagcttattactgctgggcggtctggtggcgtggccgatgg

SEQ ID NO: 752405 - DNA, 75 bp, synthetic construct
  source 1..75: mol_type = other DNA
gcaactttatgtacagccagtggaatggcggcgaaggccagtacggtcaatgcgccatgaaggtcgatttcaaag

SEQ ID NO: 752406 - DNA, 75 bp, synthetic construct
  source 1..75: mol_type = other DNA
gttggcgaagtgaacggcgatcgcggcaattttatgtacagccagtggaatggcggcgaaggccagtacgggcag

SEQ ID NO: 752407 - DNA, 75 bp, synthetic construct
  source 1..75: mol_type = other DNA
cgaaacccaggtgcgggtgtttggtcagcatctgatgcaggggatctacaccacccaggatgggcgcagtgatgt

SEQ ID NO: 752408 - DNA, 75 bp, synthetic construct
  source 1..75: mol_type = other DNA
tcacagtaaatggcggcgatgcgcatgatcagcaggcgttagattatgcactttatcatctgcgcatcatgacgc

SEQ ID NO: 752409 - DNA, 75 bp, synthetic construct
  source 1..75: mol_type = other DNA
gcgccagacgcgagggatgtatctggcggggctgtatcatcgggcgggtaaaggtgaaatcaacgaactggtgaa

SEQ ID NO: 752410 - DNA, 75 bp, synthetic construct
  source 1..75: mol_type = other DNA
ccttcaccagctatatggcgtattacaacgtccagcaggcgctgaatatcgctcgtcagtttggctgtagcgacg

SEQ ID NO: 752411 - DNA, 75 bp, synthetic construct
  source 1..75: mol_type = other DNA
gcgcgcagcagagttacgaccaacttcttgcagcatcaacagaaaactggcgtcagtggtggcagaaacgtcgta

SEQ ID NO: 752412 - DNA, 75 bp, synthetic construct
  source 1..75: mol_type = other DNA
tcaatccggcgttacctgagcagtggcaacagttgtctttccctctgttctggcagggctgcgaattacaggtca

SEQ ID NO: 752413 - DNA, 75 bp, synthetic construct
  source 1..75: mol_type = other DNA
cagctgttgctgtaaggtgagcggtgatgtgcagcaatgctataccgccaaagagcgccgtttgctgcaacatac

SEQ ID NO: 752414 - DNA, 75 bp, synthetic construct
  source 1..75: mol_type = other DNA
acctgacactctcacgccaacaaacgcagctttttaacgcctggaacaagatgtatccggtgaccgactgggagt

SEQ ID NO: 752415 - DNA, 75 bp, synthetic construct
  source 1..75: mol_type = other DNA
tactgaacaatgccttaaaaatcgccgttatgaaaaatggcgatttgtctcttattcaacttggtcttgataaag

SEQ ID NO: 752416 - DNA, 75 bp, synthetic construct
  source 1..75: mol_type = other DNA
aaaaacgcgacatcactgaatctgttatcgcgatttatcagaatgaattaaacctcctgtctgatgtggtcaatt

SEQ ID NO: 752417 - DNA, 75 bp, synthetic construct
  source 1..75: mol_type = other DNA
cttattcaacttggtcttgataaagaaaaacgcgaaataactgaatctgttatcgcgatttatcagaacgaatta

SEQ ID NO: 752418 - DNA, 75 bp, synthetic construct
  source 1..75: mol_type = other DNA
gtgggagaaggagcagacagaaggcacctcagatccatttgccggactggaaaatgcgcttttaaccgtatctca

SEQ ID NO: 752419 - DNA, 75 bp, synthetic construct
  source 1..75: mol_type = other DNA
cgtcgtgctcagtccgttgttgattacctgatctctaaaggtatcccggcagacaaaatctccgcacgtggtatg

SEQ ID NO: 752420 - DNA, 75 bp, synthetic construct
  source 1..75: mol_type = other DNA
acacctgtgacaacgtgaaacagcgtgctgcactgatcgactgcttggctccggatcgtcgcgtagagatcgaag

SEQ ID NO: 752421 - DNA, 75 bp, synthetic construct
  source 1..75: mol_type = other DNA
cttattcaactttgtcttgataaagaaaaacgcgacataactgaatctgttatcgcgatttatcagaatgaatta

SEQ ID NO: 752422 - DNA, 75 bp, synthetic construct
  source 1..75: mol_type = other DNA
cgctggtactgagcgccgcattttccggctcaacgttggccgaaggtatcaatagtttttctcaggcgaaagccg

SEQ ID NO: 752423 - DNA, 75 bp, synthetic construct
  source 1..75: mol_type = other DNA
atccggtctatcgcaagatggaaagcgatatgcataacctgcaaccgtcagtcggtgaagtgaatggcgatcgcg

SEQ ID NO: 752424 - DNA, 75 bp, synthetic construct
  source 1..75: mol_type = other DNA
aactggcagatgccggagtacgtgtaggcgataccttacgtcttagcggtacagggatgtgtaatatccgcactt

SEQ ID NO: 752425 - DNA, 75 bp, synthetic construct
  source 1..75: mol_type = other DNA
ggcgtcgattcgcggggaagagagcgagcaaatagagctgctcaatattcgcaaagaaacgcacgaagagtatgc

SEQ ID NO: 752426 - DNA, 75 bp, synthetic construct
  source 1..75: mol_type = other DNA
gcgtcaggggcgatatctttcgctgcatgatgaagtaaaaaactttccgttacagcactggctgcgcagtacgat

SEQ ID NO: 752427 - DNA, 75 bp, synthetic construct
  source 1..75: mol_type = other DNA
acgccaggcctatgaagaggcgctgcgactggcggtaaatcctgtcgaggaagcagatgatgaagaaaaagatgc

SEQ ID NO: 752428 - DNA, 75 bp, synthetic construct
  source 1..75: mol_type = other DNA
atcgagagttggtagcgagacagaagaagattcaccgttactggatctgtatcgggtagcggaacaggtagtact

SEQ ID NO: 752429 - DNA, 75 bp, synthetic construct
  source 1..75: mol_type = other DNA
tttcctgagtcttcaggagtatcccgtcgcattgcaaaaccagaccatcgagtattacttcgcgctggaacgttg

SEQ ID NO: 752430 - DNA, 75 bp, synthetic construct
  source 1..75: mol_type = other DNA
actatcgtatccggttttgatgataatgataccggagatatcagttcgctcggctctatacaatacggatttggt

SEQ ID NO: 752431 - DNA, 75 bp, synthetic construct
  source 1..75: mol_type = other DNA
gacaattattatcttcacagggggatgcaataagaaatattgagggattcgcagatggcgggatcggtatgtctt

SEQ ID NO: 752432 - DNA, 75 bp, synthetic construct
  source 1..75: mol_type = other DNA
actgcgtttttggcgatggaaggtccgtggttcattcctgatgatgcgaagttgcatcgcaaactgttgcgctgg

SEQ ID NO: 752433 - DNA, 75 bp, synthetic construct
  source 1..75: mol_type = other DNA
ctattcaggctggggattgtttcgattttcttagccttctggaataccccgtcgcgttacaaaaccagactattg

SEQ ID NO: 752434 - DNA, 75 bp, synthetic construct
  source 1..75: mol_type = other DNA
cacgaaagtcgcctgcatattgagagtacggtgggaaaaggtacgcgtttcagttttgttatcccggaacgttta

SEQ ID NO: 752435 - DNA, 75 bp, synthetic construct
  source 1..75: mol_type = other DNA
gctggccggaagataacgggcagaacatccttaacctgctgcgttacccggagtttacgcaatatctgaaaacgc

SEQ ID NO: 752436 - DNA, 75 bp, synthetic construct
  source 1..75: mol_type = other DNA
cctctcatacgaaaccgggaaacaggccacccgcacggaagagcgcgtgctgaaacgggaggcagacgatgtcgc

SEQ ID NO: 752437 - DNA, 75 bp, synthetic construct
  source 1..75: mol_type = other DNA
cccgacaaataaattgcctgatttacgtggtgagtttatgcgtggctgggatgatggaagaggcgttgatagtgg

SEQ ID NO: 752438 - DNA, 75 bp, synthetic construct
  source 1..75: mol_type = other DNA
tcaaatcggacggcacggtgaaaacggctctcgaaaaccttggtttgggagaaggttcggcgttacccgttggtg

SEQ ID NO: 752439 - DNA, 75 bp, synthetic construct
  source 1..75: mol_type = other DNA
ctatacggcttacaccagatgcagctgcgaaataaaaaacgccgccgcgaactgggcaatctgattaaacgcttt

SEQ ID NO: 752440 - DNA, 75 bp, synthetic construct
  source 1..75: mol_type = other DNA
tcagtccgtccggtggtaattgaatcagtgacaaaaatcatggcctgcgggaccacactgatgggctacacgcag

SEQ ID NO: 752441 - DNA, 75 bp, synthetic construct
  source 1..75: mol_type = other DNA
gtcgcgcgaatcactgtacctggcggatgaagtgtttatgtccggtacggcggcagaaatcacgccagtgcgcag

SEQ ID NO: 752442 - DNA, 75 bp, synthetic construct
  source 1..75: mol_type = other DNA
cgccgccacggttatcaggaaggtatcgcgctggatgtgaatggttacatctctgaaggcgcaggcgaaaacctg

SEQ ID NO: 752443 - DNA, 75 bp, synthetic construct
  source 1..75: mol_type = other DNA
atgtcgtgagacgaggtgtggatgagattgatgatgggttatggttgattgccattgacggtatatattctgttc

SEQ ID NO: 752444 - DNA, 75 bp, synthetic construct
  source 1..75: mol_type = other DNA
atgctgcatctgacagctgaaattgcccgacaaatgggcaaaaaaatctgcgttttgtttatcgactgggaagcg

SEQ ID NO: 752445 - DNA, 75 bp, synthetic construct
  source 1..75: mol_type = other DNA
gaacatttagactggcaagaatatgcattattgctgctcaatagcatgccggaaaaaacggctgagcattaccgc

SEQ ID NO: 752446 - DNA, 75 bp, synthetic construct
  source 1..75: mol_type = other DNA
atcatcaaactggcgaaagagctgggaattgaagtgcgtgagcaggtgctgtcgcgcgaatccctgtacctggcg

SEQ ID NO: 752447 - DNA, 75 bp, synthetic construct
  source 1..75: mol_type = other DNA
tgaaggtcctgccgagaggattttagttcctcacttaattagaagacactaccctttcttaaatcaaagctacat

SEQ ID NO: 752448 - DNA, 75 bp, synthetic construct
  source 1..75: mol_type = other DNA
gtaacggcgtttcgcgatatttcaccgcaagcgccaacgcatattctgatcattccaaataccctcatccctacc

SEQ ID NO: 752449 - DNA, 75 bp, synthetic construct
  source 1..75: mol_type = other DNA
ctggctggagaagcagccggaagggtctgtgcgtccggtggtgattgagtcggtgacaaaatcatggcctgcggg

SEQ ID NO: 752450 - DNA, 75 bp, synthetic construct
  source 1..75: mol_type = other DNA
agctacctggctaaacaggatcagaaagaacacggtattattctgatgcgtagcagacttcccgaaaaaagtaac

SEQ ID NO: 752451 - DNA, 75 bp, synthetic construct
  source 1..75: mol_type = other DNA
agtgctgaagtatgggctgctgttaaacatgatcttggtatgaaaagtgatactccgttgctttcacgtcatttt

SEQ ID NO: 752452 - DNA, 75 bp, synthetic construct
  source 1..75: mol_type = other DNA
aacactttcgaagactctttagtctacaataatctagattttttcagtaatcttactggtaatggtttagtgaag

SEQ ID NO: 752453 - DNA, 75 bp, synthetic construct
  source 1..75: mol_type = other DNA
tttccccttttaccggtatgccatgacctttgaggaatttgttccggcattttcttcatggtttgccgctaaccg

SEQ ID NO: 752454 - DNA, 75 bp, synthetic construct
  source 1..75: mol_type = other DNA
cggtgtttggtcatacgctactcaatgcgatgcgtattcgtaccaaagcagcgcgtggcctggcgatggggacgg

SEQ ID NO: 752455 - DNA, 75 bp, synthetic construct
  source 1..75: mol_type = other DNA
ttcatctgcaacttcccctgccgctaaggcgtcgacaaggagctatataccgcagaaaacctatcgtgactctcg

SEQ ID NO: 752456 - DNA, 75 bp, synthetic construct
  source 1..75: mol_type = other DNA
cgaaaaagggcaggcgtgggtcgctaacgcaattactgaagaatatctgcgccagggggggggcggcgaattgcc

SEQ ID NO: 752457 - DNA, 75 bp, synthetic construct
  source 1..75: mol_type = other DNA
cggcaattgatgcgcatgatgatgcagtccaggccgtttaccggaaagcacatttcagcggtggtgggtcgtccg

SEQ ID NO: 752458 - DNA, 75 bp, synthetic construct
  source 1..75: mol_type = other DNA
gcagtccaagccgtttaccggaaagcgcatttcagcggcggcggttctcctagcgattctgtcgtagtgcattga

SEQ ID NO: 752459 - DNA, 75 bp, synthetic construct
  source 1..75: mol_type = other DNA
gggttattactggcaaagcgaggccagaagccgacttcagttctattttttgctggcagtggcgaatgccgtcgt

SEQ ID NO: 752460 - DNA, 75 bp, synthetic construct
  source 1..75: mol_type = other DNA
cctaacccccatgcctggatgtcgccagataatgctctgatttatgtcgataatattcgtgatgcgttgataaaa

SEQ ID NO: 752461 - DNA, 75 bp, synthetic construct
  source 1..75: mol_type = other DNA
cggctggttctatcgcgggcgcgggcttatccagatcaccggcctgaacaactaccgagactgtggcaatgggct

SEQ ID NO: 752462 - DNA, 75 bp, synthetic construct
  source 1..75: mol_type = other DNA
ctcaggaaaaatgacaatgccgttatggattcaggggtactgagcgcagtcgttacggggtatggcgaggccccc

SEQ ID NO: 752463 - DNA, 75 bp, synthetic construct
  source 1..75: mol_type = other DNA
caacatttaccatcatcgcggatatggccaaaaacgtggctggagatgctgcagaagtctcatccataaccaagc

SEQ ID NO: 752464 - DNA, 75 bp, synthetic construct
  source 1..75: mol_type = other DNA
ccagggttgcaggcgtatcaaaatccaccgtatcacgcgtgctgaataagcaaaccaatatctccccggaagcgc

SEQ ID NO: 752465 - DNA, 75 bp, synthetic construct
  source 1..75: mol_type = other DNA
tcgcgaaaaaacggctacagtgctgttgcttctgctgcctaccgttccggctctgtcatacccgatgaccgtacc

SEQ ID NO: 752466 - DNA, 75 bp, synthetic construct
  source 1..75: mol_type = other DNA
gtttatatcaaaccgttccgccgctgattaaacggtttgtcttcggtggcgaatgtgaaacgccagtgcgtaagg

SEQ ID NO: 752467 - DNA, 75 bp, synthetic construct
  source 1..75: mol_type = other DNA
atttgcgacggattatcatcggttgagcggacatgcgctgaaaggtagtgaaattatccgcctggttgaagaaag

SEQ ID NO: 752468 - DNA, 75 bp, synthetic construct
  source 1..75: mol_type = other DNA
gcatatcggcggcaatggcacggcaggcgagtggggacacaatccgctaccgtggatggacgaagacgaactgcg

SEQ ID NO: 752469 - DNA, 75 bp, synthetic construct
  source 1..75: mol_type = other DNA
aaaaatggttgtttcagaaaaagcgctagtccggacataaacacccaaaacaaagcccggttcgcccgggctctg

SEQ ID NO: 752470 - DNA, 75 bp, synthetic construct
  source 1..75: mol_type = other DNA
gctcccgtgcaataaaacccatcatctatcagagccgccgcaaggttgaactggttgcacagaccaaaattgatg

SEQ ID NO: 752471 - DNA, 75 bp, synthetic construct
  source 1..75: mol_type = other DNA
cgcttctggttcattccatcgatcgcctttgccggaatatgtcggatatgtgcgctgtcaccacccggcttcgtg

SEQ ID NO: 752472 - DNA, 75 bp, synthetic construct
  source 1..75: mol_type = other DNA
gtttatatcaaacggttccgcagttgattaaacaatttgtcttcggcggtgaatgtgaaacgccggtgcacaagg

SEQ ID NO: 752473 - DNA, 75 bp, synthetic construct
  source 1..75: mol_type = other DNA
cgtttacggataacgagtttgtgtttggtgcatcagcccgtcgcaatgtggggtacggcttctggcagatggctt

SEQ ID NO: 752474 - DNA, 75 bp, synthetic construct
  source 1..75: mol_type = other DNA
ggggtgatgaactggcggattatccccagagtgttcatgaccaggtgaatgtttatctgtcgccaggtggggccg

SEQ ID NO: 752475 - DNA, 75 bp, synthetic construct
  source 1..75: mol_type = other DNA
tgttattgcggtaaacaaggttgtattgaaacctttatttctggcactggatttgccacggattatcatcgttta

SEQ ID NO: 752476 - DNA, 75 bp, synthetic construct
  source 1..75: mol_type = other DNA
acggtcagccattcgataaagacttaagtgcgcgactgcagcgggaagtccgtctggccaatgacgccaactgcc

SEQ ID NO: 752477 - DNA, 75 bp, synthetic construct
  source 1..75: mol_type = other DNA
tggcggtttcagaagcggtagatggcgcagcagcgggagcgcagacggtatttgccgtgattatcggcacgggat

SEQ ID NO: 752478 - DNA, 75 bp, synthetic construct
  source 1..75: mol_type = other DNA
gtggatgcagataatacggcaggaacagcagaacaggtgttctcgtcagccttcagctacatgggaaatggcctg

SEQ ID NO: 752479 - DNA, 75 bp, synthetic construct
  source 1..75: mol_type = other DNA
tcttcgtatcttgctggtcgctgggaaactctgccatttcagatggcaataatgaactgcatggggaatgaccgg

SEQ ID NO: 752480 - DNA, 75 bp, synthetic construct
  source 1..75: mol_type = other DNA
ggatgcggctatgaacattggtcgggaagattcccttgatgcgcagattgcgtcgctgcaggaaaaaattcagcg

SEQ ID NO: 752481 - DNA, 75 bp, synthetic construct
  source 1..75: mol_type = other DNA
tgtgaacaccacgctgggcgagacctgggaagaggccgtgggcgaaaaactcgatcaccaggtactgatggataa

SEQ ID NO: 752482 - DNA, 75 bp, synthetic construct
  source 1..75: mol_type = other DNA
atcagcggggcgtgtatctgtgtgaagtgggaacggacaccgcaaaagaaattctctatgcccgtatgaaagccg

SEQ ID NO: 752483 - DNA, 75 bp, synthetic construct
  source 1..75: mol_type = other DNA
tgtgctgtcagatatggcgaaaatcctggcgcaggcaaccatgatgaaatcgataaaagggattggcagtgtact

SEQ ID NO: 752484 - DNA, 75 bp, synthetic construct
  source 1..75: mol_type = other DNA
ggcgaaacgcgctggcgtaaacagactctgctcttctcggcaacgcttgaaggcgatgccattcaggattttgcc

SEQ ID NO: 752485 - DNA, 75 bp, synthetic construct
  source 1..75: mol_type = other DNA
cggtcgtaaaggcaccgcgatttcgctggtggaagcccatgaccatttgctgctgggcaaagttggccgttatat

SEQ ID NO: 752486 - DNA, 75 bp, synthetic construct
  source 1..75: mol_type = other DNA
gtactggttgccactgatgttgccgcgcgcggtatcgacattccggatgtcagccatgtctttaacttcgatatg

SEQ ID NO: 752487 - DNA, 75 bp, synthetic construct
  source 1..75: mol_type = other DNA
cgatcgtgactggttgcggaaagtgcgaccctggttccagcatcgcgcacatatgcatgtacgattacgttgtcc

SEQ ID NO: 752488 - DNA, 75 bp, synthetic construct
  source 1..75: mol_type = other DNA
atgaatgaaacggaagctgcacgacatcagcgtgaaattgcgcgtattaatgccatgcagtacgccgatcaggct

SEQ ID NO: 752489 - DNA, 75 bp, synthetic construct
  source 1..75: mol_type = other DNA
ttgctgcagtacagtcagcaacaggcacaggtggaaggacagattgctgctgccagacagtcagcaggcattgcc

SEQ ID NO: 752490 - DNA, 75 bp, synthetic construct
  source 1..75: mol_type = other DNA
cattaagaaaaaaacatctgaaaaccgcaatgatgaagccacccggttgctgttgcagtacagtcagcagcaggc

SEQ ID NO: 752491 - DNA, 75 bp, synthetic construct
  source 1..75: mol_type = other DNA
gtctatggtctgggtaaagcctggtatgacggtcagaaggagggggaagaatttaaccgccagttgtcgctgacg

SEQ ID NO: 752492 - DNA, 75 bp, synthetic construct
  source 1..75: mol_type = other DNA
gaaaagaacgtcggctgccgacctccatgtatttgaaggaaagctcagtaccaaggcaacctggacacgcggtgt

SEQ ID NO: 752493 - DNA, 75 bp, synthetic construct
  source 1..75: mol_type = other DNA
ttcatcgaaggcaggtgtattaggtcgtttggcatctttgggaacccgaaccaaaaaagttttcactgcacatgg

SEQ ID NO: 752494 - DNA, 75 bp, synthetic construct
  source 1..75: mol_type = other DNA
tcatggctcagatagctttaatgaaagcggtaaaaggtattgcttccgcgctgccttttgattttgtagccaatg

SEQ ID NO: 752495 - DNA, 75 bp, synthetic construct
  source 1..75: mol_type = other DNA
gacagtggaacagttgttcacgtctgcgttcagtagcatgagtgactggctggcgacattctgtactacaggcaa

SEQ ID NO: 752496 - DNA, 75 bp, synthetic construct
  source 1..75: mol_type = other DNA
atttaaccgccagttgtcgctgacggggcattatgccggagtcactgccgggcagctgtggacgctcagtcgtgc

SEQ ID NO: 752497 - DNA, 75 bp, synthetic construct
  source 1..75: mol_type = other DNA
atcagtctgctgatttgagtcgctacagtggcacggtggttaaccgtccgacgttttttgcttttgcaaaaggtg

SEQ ID NO: 752498 - DNA, 75 bp, synthetic construct
  source 1..75: mol_type = other DNA
ctttgcaaaaggcgcgggggtgatgggagaagcggggcctgaagccattctgccactgcgtcgtggtgccgacgg

SEQ ID NO: 752499 - DNA, 75 bp, synthetic construct
  source 1..75: mol_type = other DNA
ttcggtgcgcttcgtggctccgggatcaccctggctaaccgtgccggctggattgataaattaatgactccgaaa

SEQ ID NO: 752500 - DNA, 75 bp, synthetic construct
  source 1..75: mol_type = other DNA
aaggcggtttatgacctcgggaaaaaagcggcagcggactttatgcaacagcaggcccgtgatggtggtcggtta

SEQ ID NO: 752501 - DNA, 75 bp, synthetic construct
  source 1..75: mol_type = other DNA
gggggttgtggcggatattgggggttcaggtatggcgatgttttccccgcagtacaacatcgagatcaataacga

SEQ ID NO: 752502 - DNA, 75 bp, synthetic construct
  source 1..75: mol_type = other DNA
aaaaacggagtcctgcgtgcatttcaggattttaccgtggatgcagataatacggcagaaacagcagaacaggtg

SEQ ID NO: 752503 - DNA, 75 bp, synthetic construct
  source 1..75: mol_type = other DNA
ctatggaatgccgccaaagccaaggttgagtatgcctcatttacttttggtccatcatacagattcaatgaattg

SEQ ID NO: 752504 - DNA, 75 bp, synthetic construct
  source 1..75: mol_type = other DNA
aatggttttacaagctgatcagtgaaggtcatttccctaaacccatcaaactggggcgcagcagccgctggtaca

SEQ ID NO: 752505 - DNA, 75 bp, synthetic construct
  source 1..75: mol_type = other DNA
cgaaagtatattattagattttccaatcccgtacctctacatctccgacgtatttaatgaagatcctgagttgga

SEQ ID NO: 752506 - DNA, 75 bp, synthetic construct
  source 1..75: mol_type = other DNA
agaaagtattctattagactttccaataccttacctttacattgctgatgtatttaatgaagaccctgaattaga

SEQ ID NO: 752507 - DNA, 75 bp, synthetic construct
  source 1..75: mol_type = other DNA
atgttgacctcaataacaggccacgacagtatattgctgcgtgccgacgatcccctgatcgacatgaactacatc

SEQ ID NO: 752508 - DNA, 75 bp, synthetic construct
  source 1..75: mol_type = other DNA
tcggcgcatgatatctggtgagatggacgtcgttctggtgccgcaaggtacgctaatcgagcaaattcgctgtgg

SEQ ID NO: 752509 - DNA, 75 bp, synthetic construct
  source 1..75: mol_type = other DNA
gatttgacctcaataacaggccacgacagcgtattgctgcgtgctgacgatcccctgatcgacatgaactacatc

SEQ ID NO: 752510 - DNA, 75 bp, synthetic construct
  source 1..75: mol_type = other DNA
gttgcggggcagaactgcaaagctggtttgaacctccaaaaccgggaacaacaaagcctgagaagaagacaccgc

SEQ ID NO: 752511 - DNA, 75 bp, synthetic construct
  source 1..75: mol_type = other DNA
ccgaaaacacgctggacctccgcgcaacttttgcgcccgcaagcactggacttagtttcccgcgacggtaaacac

SEQ ID NO: 752512 - DNA, 75 bp, synthetic construct
  source 1..75: mol_type = other DNA
acgccggacatgacaaccatttttatggtcatcggaaaatcctcaagcccgaacatttagactggcaggagtatg

SEQ ID NO: 752513 - DNA, 75 bp, synthetic construct
  source 1..75: mol_type = other DNA
gtttgaacctccaaaaccgggaacaacaaagcctgagaagaagacaccgcctccgttgccgccttcccctgccag

SEQ ID NO: 752514 - DNA, 75 bp, synthetic construct
  source 1..75: mol_type = other DNA
ttgccgatacagtccgaacattatcaggtcatgcgtaccgatcagcgtcgctatttcgggcacccggatctggtg

SEQ ID NO: 752515 - DNA, 75 bp, synthetic construct
  source 1..75: mol_type = other DNA
atgaatttcaaaagcggaggacaagcagtcataacacgtatgcttgaagcgtatggattcaagacgcggcaagct

SEQ ID NO: 752516 - DNA, 75 bp, synthetic construct
  source 1..75: mol_type = other DNA
ggtcatttccctaaacccatcaaactggggcgcagcagccgctggtacaaaagtgaagtggagcagtggatgcag

SEQ ID NO: 752517 - DNA, 75 bp, synthetic construct
  source 1..75: mol_type = other DNA
cgtgctcggcgcgtatatgccgcaatggtcgcatatcgtcgggcagatgcagtttgatctgttccacgcctacac

SEQ ID NO: 752518 - DNA, 75 bp, synthetic construct
  source 1..75: mol_type = other DNA
cactcgcgacggtatggcgatggatacctttatcgtgctggaacccgatggcagcccgctgtccgcagatcgcca

SEQ ID NO: 752519 - DNA, 75 bp, synthetic construct
  source 1..75: mol_type = other DNA
attctcggtgctcaggatgtagtgcattttgccgaactccacgggctgaactcacgcgaaacacagctggtcgcc

SEQ ID NO: 752520 - DNA, 75 bp, synthetic construct
  source 1..75: mol_type = other DNA
cgcagatgaaaaaccacgtccgattgacgatgaatttcagctacgtggtacgctgatcgacctacgcgatgaaac

SEQ ID NO: 752521 - DNA, 75 bp, synthetic construct
  source 1..75: mol_type = other DNA
gaagggttatcggatttaaccgtcgccaccaatttaattgaatcacgtctgttgattggcgatgtggcgctattt

SEQ ID NO: 752522 - DNA, 75 bp, synthetic construct
  source 1..75: mol_type = other DNA
ctcgcgcgaaacgcaactggtcgcctggctggttcgccagcacttgctgatgtcggtcaccgcccagcgccgcga

SEQ ID NO: 752523 - DNA, 75 bp, synthetic construct
  source 1..75: mol_type = other DNA
tgagaaatgatgccggagaattgataggtgtggcgacagccggtcgacctgttgcacgacatttggacgatggat

SEQ ID NO: 752524 - DNA, 75 bp, synthetic construct
  source 1..75: mol_type = other DNA
aacgcgatccggtcggaaacggtggtgttccccgtgtgctccgggaaatcaggagaatgagcacaactgtcattc

SEQ ID NO: 752525 - DNA, 75 bp, synthetic construct
  source 1..75: mol_type = other DNA
cctttatatgaacaactgcaccagatccgcgcgcgctggaaatccatcatcactatctgttttatcggtagcgtg

SEQ ID NO: 752526 - DNA, 75 bp, synthetic construct
  source 1..75: mol_type = other DNA
ctcgaactgcaaaaacatattttcagcgaaggattctggccttccgacaagttctacgcggcgaaagttgaagaa

SEQ ID NO: 752527 - DNA, 75 bp, synthetic construct
  source 1..75: mol_type = other DNA
ggaagcaaagtctgttgcgtgagctctattttgctaccgaaaagcagctacgacgcggaatgcaaaatacgccgg

SEQ ID NO: 752528 - DNA, 75 bp, synthetic construct
  source 1..75: mol_type = other DNA
atggccgaaattaactttcaggtactgcgggaggctgaacaattgacaggagtggcgacagccggcagacctgtt

SEQ ID NO: 752529 - DNA, 75 bp, synthetic construct
  source 1..75: mol_type = other DNA
aggcgctttggcttaccctttggagcacgttctgttgagccgtttttggaagccgaaggtcatcaaagcaatggc

SEQ ID NO: 752530 - DNA, 75 bp, synthetic construct
  source 1..75: mol_type = other DNA
atggcggatatggccgaagtcgatgatagcggtaagcgggtcctgaagcctgaattactgaccgaaatcgccggt

SEQ ID NO: 752531 - DNA, 75 bp, synthetic construct
  source 1..75: mol_type = other DNA
atgctcgtgaacgcccggattatgacgtgccagttcacttgcgcaatgcgccgaccaaactgatgaaggaaatgg

SEQ ID NO: 752532 - DNA, 75 bp, synthetic construct
  source 1..75: mol_type = other DNA
gaggtcgggttgctgctggacaccggtcacctgacctttgccggggccgacccgctgacggtggcgcagcgctgg

SEQ ID NO: 752533 - DNA, 75 bp, synthetic construct
  source 1..75: mol_type = other DNA
ttcactgccgttacgtctagaaaaacaatatatgtatatgttgcagaatgatttagaaatggtggggactgggat

SEQ ID NO: 752534 - DNA, 75 bp, synthetic construct
  source 1..75: mol_type = other DNA
tcgcgataggctacatatctttacaacaaattatgaccgtattattgaagtgggtgctgagcttgctggtttaag

SEQ ID NO: 752535 - DNA, 75 bp, synthetic construct
  source 1..75: mol_type = other DNA
ttttacgacaaattacgacagaataattgaaacgggcgctgaaatagcaggtcttcgtttaattgacagatttgt

SEQ ID NO: 752536 - DNA, 75 bp, synthetic construct
  source 1..75: mol_type = other DNA
tttttgatgagtttttcaagtcgaacagcaactagggatcgattacatatttttacgacaaattacgacagaata

SEQ ID NO: 752537 - DNA, 75 bp, synthetic construct
  source 1..75: mol_type = other DNA
gacggcaggaaaacctagaaagtatctttggtcagatgatgaggcaaagggcatacaattaaataaagatatctt

SEQ ID NO: 752538 - DNA, 75 bp, synthetic construct
  source 1..75: mol_type = other DNA
ccggtggagatccgttatatgtcgcgcgtcgctgcctggcgattgcgtctgaagatgtgggtaatgctgacccac

SEQ ID NO: 752539 - DNA, 75 bp, synthetic construct
  source 1..75: mol_type = other DNA
cgcgcgtatgcggccagaaaatttagcacagtatatcggccagcaacatttgctggctgcggggaagccgttgcc

SEQ ID NO: 752540 - DNA, 75 bp, synthetic construct
  source 1..75: mol_type = other DNA
gagcgatgcaggtggcaattgcggcctgggattgctttacccgcgttggcccggcggaaggtgaacgcgccattg

SEQ ID NO: 752541 - DNA, 75 bp, synthetic construct
  source 1..75: mol_type = other DNA
acaattctcgccaatatgatctctattaatttcactatacgattcttaatggaaaatattgcgcagatcggtcac

SEQ ID NO: 752542 - DNA, 75 bp, synthetic construct
  source 1..75: mol_type = other DNA
gtggtcgatctgcacggctttgccaccaacgatttgtactacaaatcgttgctggataagttaaaagtttctacc

SEQ ID NO: 752543 - DNA, 75 bp, synthetic construct
  source 1..75: mol_type = other DNA
acaggaaaactcgctgtttgacatcgttaacaccattcgccaggcaaaagatgaccgtaacatcaccggcatcgt

SEQ ID NO: 752544 - DNA, 75 bp, synthetic construct
  source 1..75: mol_type = other DNA
cagagcagcgggtaaacctgtggttgtgtcgatgggcggtatggcggcatctggtggttactggatttccacgcc

SEQ ID NO: 752545 - DNA, 75 bp, synthetic construct
  source 1..75: mol_type = other DNA
tcgttttgtcagtcctgggaggcgcggccactaacgttatggcgcttgaggttggccgcaattctccttatgact

SEQ ID NO: 752546 - DNA, 75 bp, synthetic construct
  source 1..75: mol_type = other DNA
aatattatctcgccagtttcgccaacaaaatttggctatctccacaaggcgtggtggatctgcacggttttgcta

SEQ ID NO: 752547 - DNA, 75 bp, synthetic construct
  source 1..75: mol_type = other DNA
gacggcattggtgtagtgtttgccaatggtgcaattatggatggcgaggaaactcaggggaatgtaggcggtgat

SEQ ID NO: 752548 - DNA, 75 bp, synthetic construct
  source 1..75: mol_type = other DNA
atgccatcttatcagtttctggctgtagcacgcattcagttcaggcagcgtgatattgtttatttcggaaagcag

SEQ ID NO: 752549 - DNA, 75 bp, synthetic construct
  source 1..75: mol_type = other DNA
aggtaaatatcaaacaaattgtaagcccatactttggttttgctacagatgcatatccatttaatgacggcacat

SEQ ID NO: 752550 - DNA, 75 bp, synthetic construct
  source 1..75: mol_type = other DNA
tggtaaatatacgtaaaatcattagcccttattttggttttgcatctgatgcctatccgtttaatgatggcacat

SEQ ID NO: 752551 - DNA, 75 bp, synthetic construct
  source 1..75: mol_type = other DNA
taaatagcttgcttgtcacaaaagcagagcgtctggaaaggctgaacgccaaatcatgctactggttgcgaaatg

SEQ ID NO: 752552 - DNA, 75 bp, synthetic construct
  source 1..75: mol_type = other DNA
ttattgagaagattttcccgaacattactgaggcgatgaaaaaggaatttgataaagatctcttgaattttcctc

SEQ ID NO: 752553 - DNA, 75 bp, synthetic construct
  source 1..75: mol_type = other DNA
ccgagttttcagctgtctacctcgcagagaaagaactgatgctggacgtactctttcacggcaaagagattggtg

SEQ ID NO: 752554 - DNA, 75 bp, synthetic construct
  source 1..75: mol_type = other DNA
gcaatatccgtttcttccatgagccccagcgattgattcgaatcaaccacatgattgagctgctggcagtcagcc

SEQ ID NO: 752555 - DNA, 75 bp, synthetic construct
  source 1..75: mol_type = other DNA
cctggggctgggtacgcaagagccgttaagtagttggggcgcattgctaagtgatggtgcgaactcgatggaagt

SEQ ID NO: 752556 - DNA, 75 bp, synthetic construct
  source 1..75: mol_type = other DNA
tttcgtggcgattggcatggtttcctggctggatatggctcgtattgtgcgtgggcaaaccctgagtctgaagcg

SEQ ID NO: 752557 - DNA, 75 bp, synthetic construct
  source 1..75: mol_type = other DNA
taaagagtttattgaggcggcacaagttggcggtgtatcgacgtcgggcattgttattcgccacattgtgccgaa

SEQ ID NO: 752558 - DNA, 75 bp, synthetic construct
  source 1..75: mol_type = other DNA
atcgaccacattattgtgcgctatcacgatcgccatcgcgagcagctgccggagctgatcctgcaagcgactaaa

SEQ ID NO: 752559 - DNA, 75 bp, synthetic construct
  source 1..75: mol_type = other DNA
aacagaaagcgaacgacaggcagggaagcatgcaggcgcagccgcccaggcaaaagaagagataaaaaaactggc

SEQ ID NO: 752560 - DNA, 75 bp, synthetic construct
  source 1..75: mol_type = other DNA
cgccagctaacccacgtcgaagtggcagaactgcttcgtgtgactgctgaagcaatccagaacgaagcgcaggag

SEQ ID NO: 752561 - DNA, 75 bp, synthetic construct
  source 1..75: mol_type = other DNA
aacgtgatcaaagcgatcgcggcggcgcgtgagaaggggatgaaagtgatcaccctgaccggtaaagacggcggc

SEQ ID NO: 752562 - DNA, 75 bp, synthetic construct
  source 1..75: mol_type = other DNA
tttccttagccttctggaatatcccgtcgcgttgcagaaccagactgttgagtattacttcgcgctggaacgctg

SEQ ID NO: 752563 - DNA, 75 bp, synthetic construct
  source 1..75: mol_type = other DNA
ccagcattatcaaaatcagtttaacggtgctggtgataggttatgctctcggcaaaatcgcgatgttgtttagtt

SEQ ID NO: 752564 - DNA, 75 bp, synthetic construct
  source 1..75: mol_type = other DNA
actcagtgatgatgcgtttgctggagatcctgaactctttcccgttcatgttcttcgtcattctgctggttacat

SEQ ID NO: 752565 - DNA, 75 bp, synthetic construct
  source 1..75: mol_type = other DNA
ctatgcactttgccgaagagttgaccggtcgctaccgtgaaaaccgtccgggctacccggcgattgctatttctg

SEQ ID NO: 752566 - DNA, 75 bp, synthetic construct
  source 1..75: mol_type = other DNA
ggggcgctaccgtgaaaaccgtccgggctacccggcgattgccatttctgacgttagtcatatttcctgcgtcgg

SEQ ID NO: 752567 - DNA, 75 bp, synthetic construct
  source 1..75: mol_type = other DNA
cggcattaatgaactgattgatgacctgatggatcacatcagcctggaaaataatgtgctgttcccaagggcgct

SEQ ID NO: 752568 - DNA, 75 bp, synthetic construct
  source 1..75: mol_type = other DNA
aagcctacctgaaatatctctactcgccagaaggtcaggaaattgccgcgaaaaactactaccgtccgcgcgacg

SEQ ID NO: 752569 - DNA, 75 bp, synthetic construct
  source 1..75: mol_type = other DNA
cttaaagtggggatacctgacgacctgatacaggatatcgccatcagaaaactggcgtttggcgcaggtacatta

SEQ ID NO: 752570 - DNA, 75 bp, synthetic construct
  source 1..75: mol_type = other DNA
aagctgctgccgaagccgcccgtggcgcgggttctgttagccagctttgactcggtagaaaaagccggacttgcg

SEQ ID NO: 752571 - DNA, 75 bp, synthetic construct
  source 1..75: mol_type = other DNA
tcactcgctggctgaaatgaaagcttcttatgcgatcgtggccgcacgcgatgccatttcagctaccagcggtgt

SEQ ID NO: 752572 - DNA, 75 bp, synthetic construct
  source 1..75: mol_type = other DNA
ctataagctcctttctatttttgaacaatgggcatcagacgatggcatcggggaaaaactggacgctgaaacact

SEQ ID NO: 752573 - DNA, 75 bp, synthetic construct
  source 1..75: mol_type = other DNA
catttttgctggcggcgaccagcgttatggcaaaggatattcagcttcttaacgtttcgtatgatcctacgcgcg

SEQ ID NO: 752574 - DNA, 75 bp, synthetic construct
  source 1..75: mol_type = other DNA
cgccagctaaaccacgtcgaagcagcagaactgctgcgtgtgactgctgaagcaatccagaacgaagcgcaggag

SEQ ID NO: 752575 - DNA, 75 bp, synthetic construct
  source 1..75: mol_type = other DNA
atgcactcaataaaaaaagtaaccatgctcctggggtgcctcgccctcacctgctcgatagcatttcaggcgagt

SEQ ID NO: 752576 - DNA, 75 bp, synthetic construct
  source 1..75: mol_type = other DNA
ctgaacaaccgattgagaaagactggcgtagcgccccactggcggaaatcatcgaccatatcatcgtgcgctacc

SEQ ID NO: 752577 - DNA, 75 bp, synthetic construct
  source 1..75: mol_type = other DNA
tactactgcatggatggcaccatcccgcgtcgcgccctgcctggcgtactggaaggcattgcccgtttatcgcag

SEQ ID NO: 752578 - DNA, 75 bp, synthetic construct
  source 1..75: mol_type = other DNA
cgcgaccgatcaaaagaatctgcaaaaactgttggaaacactgaaagacgtaccggacgaccaacgtcaggcgcg

SEQ ID NO: 752579 - DNA, 75 bp, synthetic construct
  source 1..75: mol_type = other DNA
ctaaaaccggaccggatgatgcagggcttaatattttactgacagaggcccgtctggaagaacgccgggcaaggg

SEQ ID NO: 752580 - DNA, 75 bp, synthetic construct
  source 1..75: mol_type = other DNA
aaagcgccaaaaccaccaggaaaaccggcaacagtcaaaaaaccagtgcaaagaaaaagccatccaccagaaagc

SEQ ID NO: 752581 - DNA, 75 bp, synthetic construct
  source 1..75: mol_type = other DNA
ggacgaagtgcgcgccaaattatgcaaggcgtgcgcctttgcccgtcgtggcctgaccgatgcagacaacatggc

SEQ ID NO: 752582 - DNA, 75 bp, synthetic construct
  source 1..75: mol_type = other DNA
attgccgaaggccgcacgctgaaaggccacaaaatcggcctgacctcgaaagcgatgcaggccagctcacaaatc

SEQ ID NO: 752583 - DNA, 75 bp, synthetic construct
  source 1..75: mol_type = other DNA
tgccagcaaaggatgcatgaagtataccggcgatattgcacgtgtaactctgattatcaatggtggccggaacgg

SEQ ID NO: 752584 - DNA, 75 bp, synthetic construct
  source 1..75: mol_type = other DNA
ggacgaagtgcgcgccaaattatgcaaggcgtgcgcctttgcccgccgtggcctgagtgatgcggacagcatggc

SEQ ID NO: 752585 - DNA, 75 bp, synthetic construct
  source 1..75: mol_type = other DNA
agattatcaacggtggccagaacggtatcgacgaccggcgagcacgttacgccgctgctcgtaaggcactgttat

SEQ ID NO: 752586 - DNA, 75 bp, synthetic construct
  source 1..75: mol_type = other DNA
ttcccgcgccctgaaaaaagccgattccgcagccgcaccagaagacgccagcgcacagcagacgcaggacgaaag

SEQ ID NO: 752587 - DNA, 75 bp, synthetic construct
  source 1..75: mol_type = other DNA
atcgaaccactggacacactttgggaaattatcgccaaccaggacatgccggacgaagtgcgcgccaaattatgc

SEQ ID NO: 752588 - DNA, 75 bp, synthetic construct
  source 1..75: mol_type = other DNA
ttcgcgaacgtgctggccaggaacatctggtagcaaaatatcttgatggcgttactgtacgtaaagtgatttacg

SEQ ID NO: 752589 - DNA, 75 bp, synthetic construct
  source 1..75: mol_type = other DNA
tgatcgcccagcgtctggatcaggcagaaaaacagcgcgaacagatccgcgcgatctcgctggattacccggaga

SEQ ID NO: 752590 - DNA, 75 bp, synthetic construct
  source 1..75: mol_type = other DNA
gcccgcgcttttgcattgtgcaacggcactgcggatgaacaggcgactgcgctggagttgttgcgtcgcgcgctg

SEQ ID NO: 752591 - DNA, 75 bp, synthetic construct
  source 1..75: mol_type = other DNA
tgccgacgcggatttgtccgcctttatcgaaccactggacaccctccggaagattgtcaccgaccaggacatgcc

SEQ ID NO: 752592 - DNA, 75 bp, synthetic construct
  source 1..75: mol_type = other DNA
tgattatcaatggtggcagaaacggtatcgacgaccggcgtgcgcggtacatcactgccagtaaggtgctggcgg

SEQ ID NO: 752593 - DNA, 75 bp, synthetic construct
  source 1..75: mol_type = other DNA
actgccactggaacgccagcgtgcgatcgccaacctggtgtacagcaaacgcatggggaataacgggccgaccga

SEQ ID NO: 752594 - DNA, 75 bp, synthetic construct
  source 1..75: mol_type = other DNA
tgattatcaatggtggcaggaacggcattgatgaccggcgcgcgcgatacatcattgccagtaaggtgctggctg

SEQ ID NO: 752595 - DNA, 75 bp, synthetic construct
  source 1..75: mol_type = other DNA
gcatggggaacaatgcccctggtgatggctggaattaccgagggcgcggacttatccagattaccggtttgaata

SEQ ID NO: 752596 - DNA, 75 bp, synthetic construct
  source 1..75: mol_type = other DNA
tggctggaattaccgtgggcgcgggcttatccagattaccggtttgaataactatcgtgactgtggaaacggtct

SEQ ID NO: 752597 - DNA, 75 bp, synthetic construct
  source 1..75: mol_type = other DNA
actatcgtgactgcggaaacggtctgaaagttgacctgctggagaatcctgaactgctggcacaggacgaatacg

SEQ ID NO: 752598 - DNA, 75 bp, synthetic construct
  source 1..75: mol_type = other DNA
ggctaactttgttcgggctggtcgtctcactcagtggcaggctaatgcactgggtcgccgtgctggtgaaccacc

SEQ ID NO: 752599 - DNA, 75 bp, synthetic construct
  source 1..75: mol_type = other DNA
cagaaggcgctatcaatgctaaatactcccgtgataaagagtccgaagcagatgatttctcctttgatctgttga

SEQ ID NO: 752600 - DNA, 75 bp, synthetic construct
  source 1..75: mol_type = other DNA
agatcatcaatggcggccagaacggtatcgacgaccggcgcgcgcggtacatcaccgccagcaaggtgcttttat

SEQ ID NO: 752601 - DNA, 75 bp, synthetic construct
  source 1..75: mol_type = other DNA
tctgccgctggagcgccagagagcgattgccaatctggtgtacagcaagcgcatgggtaacaacggtcctggcga

SEQ ID NO: 752602 - DNA, 75 bp, synthetic construct
  source 1..75: mol_type = other DNA
atcgcaaatctggtgtacagcaaacgcatgggtaacaatgccccaggcgatggctggaattaccgtgggcgcgga

SEQ ID NO: 752603 - DNA, 75 bp, synthetic construct
  source 1..75: mol_type = other DNA
gagctatgcagcatgttatagtgagttatctgttcagcacaatttggttgttcagggggattttgcacttactca

SEQ ID NO: 752604 - DNA, 75 bp, synthetic construct
  source 1..75: mol_type = other DNA
atgaagaatactaaattactgctggcgattgcgacctctgcagcattgctgacggggtgtcagaatacgcatggt

SEQ ID NO: 752605 - DNA, 75 bp, synthetic construct
  source 1..75: mol_type = other DNA
gtgatgttgcggcgctgaacgttgacgcactgactgaagatcagaaagctctgcgtcgtgatgttcataaaacta

SEQ ID NO: 752606 - DNA, 75 bp, synthetic construct
  source 1..75: mol_type = other DNA
gggatattcaatatcgccgccgttaactggcctgagagcgtcgacaccgatgcgaaaaaatgcgccgcctttgcg

SEQ ID NO: 752607 - DNA, 75 bp, synthetic construct
  source 1..75: mol_type = other DNA
ctactccaagcgttttgatgacgtaaatgcggatatcacctttgcgggttaccgcttttctgaacgcaactacat

SEQ ID NO: 752608 - DNA, 75 bp, synthetic construct
  source 1..75: mol_type = other DNA
tgaatcgcactaccggcagtgggcagggggggacggacagccagtttacctggagtcgcttctatctgtaccggg

SEQ ID NO: 752609 - DNA, 75 bp, synthetic construct
  source 1..75: mol_type = other DNA
ggacatctgactattacacgctgtcggtgaaccgttatttcgatgccttcggattcaggaacgtctccctggggc

SEQ ID NO: 752610 - DNA, 75 bp, synthetic construct
  source 1..75: mol_type = other DNA
tccggcagaagggatgctgtacatcaatatgccgcaggcctggctggagtattccgacgcctcctggctgccgcc

SEQ ID NO: 752611 - DNA, 75 bp, synthetic construct
  source 1..75: mol_type = other DNA
cgggccggctatattatgccaggacagtatcagatggaaataagggtgaatggtcaggatatttcaccatcggca

SEQ ID NO: 752612 - DNA, 75 bp, synthetic construct
  source 1..75: mol_type = other DNA
ccgaaagagattgttggcctctgcggcggcgtctttaacgtctttggcaatgttgcctccatttcactccactgg

SEQ ID NO: 752613 - DNA, 75 bp, synthetic construct
  source 1..75: mol_type = other DNA
tgatcgcaatggcgctggccgggaccacattcaacgcagcggcgcttcaagcgccgaaaagttcaccgtatgact

SEQ ID NO: 752614 - DNA, 75 bp, synthetic construct
  source 1..75: mol_type = other DNA
ggtaaagaacacaccgttaaccagcatccagccggggaatataacaacattgttgtggctgaaacggtagcaaaa

SEQ ID NO: 752615 - DNA, 75 bp, synthetic construct
  source 1..75: mol_type = other DNA
ctacaacatcaacgggacagtaaacaggcagcataaggggagtcagtcacagtcactgagttataacgggacgac

SEQ ID NO: 752616 - DNA, 75 bp, synthetic construct
  source 1..75: mol_type = other DNA
ggggtatatcatgcccggtgaatatcagatggacatcagggttaatgaccaggggatttcaccttctgcgttttt

SEQ ID NO: 752617 - DNA, 75 bp, synthetic construct
  source 1..75: mol_type = other DNA
tataatcaatttagttggaatagactatacctgttccggcctatacctgaatggagagctaattttaccctaggt

SEQ ID NO: 752618 - DNA, 75 bp, synthetic construct
  source 1..75: mol_type = other DNA
ggcgtctgcgtgcggactatcagggtaacctgaatcacaccaccggcagcgggcagggaacggacagtcagttca

SEQ ID NO: 752619 - DNA, 75 bp, synthetic construct
  source 1..75: mol_type = other DNA
tgcgctgactgaagatcagaaagcgctgcgtcgcgatgtgcataaaacgatcgctaaagtgaccgatgatatcgg

SEQ ID NO: 752620 - DNA, 75 bp, synthetic construct
  source 1..75: mol_type = other DNA
ctttatggagtcctcctggtactatgcgcgctacacttgcccgcagtacaaagaaggtatgctggattccgaagc

SEQ ID NO: 752621 - DNA, 75 bp, synthetic construct
  source 1..75: mol_type = other DNA
catgctgggcaaaaacgttcttcagccaatcggctgggacgcatttggtctgcctgcggaaggcgcagcggtgaa

SEQ ID NO: 752622 - DNA, 75 bp, synthetic construct
  source 1..75: mol_type = other DNA
gcgtgactggggtgtttcccgtcaacgttactggggtgcgccaatcccaatggttacgctggaagacggtactgt

SEQ ID NO: 752623 - DNA, 75 bp, synthetic construct
  source 1..75: mol_type = other DNA
cagtcatggccgttccgggtcacgaccagcgcgattacgaatttgcctctaaatatggtctgaacatcaagccgg

SEQ ID NO: 752624 - DNA, 75 bp, synthetic construct
  source 1..75: mol_type = other DNA
caggaagcgctgctggccgttgtccgtatgcttaacccgttcaccccgcacatctgcttcacgctgtggcaggaa

SEQ ID NO: 752625 - DNA, 75 bp, synthetic construct
  source 1..75: mol_type = other DNA
gtacataacctgctgaaaattgaagtgcaaacgctggacggcgaggcactgacgctgggatcggacgcgctggat

SEQ ID NO: 752626 - DNA, 75 bp, synthetic construct
  source 1..75: mol_type = other DNA
aaagggctgagcagttacagcctgaacgccggtgtgagcagtggcggcggtcagccatcgcagagtcagatgagc

SEQ ID NO: 752627 - DNA, 75 bp, synthetic construct
  source 1..75: mol_type = other DNA
cctatgccgtcgactttaatacagatgttctggatgccgaggacagacagaatattgatttttcccggttctccc

SEQ ID NO: 752628 - DNA, 75 bp, synthetic construct
  source 1..75: mol_type = other DNA
cgtttatcgtcactgctgtgctggtggtgctgggcgcttttggcctgggcagcatgcgtggccgggagagggcgg

SEQ ID NO: 752629 - DNA, 75 bp, synthetic construct
  source 1..75: mol_type = other DNA
cgcgactgacgtccgtctggcacaggacgaagcggagcgtgtgcgtttctgggccggtcgcaaaaacgccttccc

SEQ ID NO: 752630 - DNA, 75 bp, synthetic construct
  source 1..75: mol_type = other DNA
ttaacgacatcttgttgaaagcgggcgcgactgacgtccgtctggcgcaggatgaagcggagcgcgtgcgtttct

SEQ ID NO: 752631 - DNA, 75 bp, synthetic construct
  source 1..75: mol_type = other DNA
atggcactgtttttctatcaggcgttacagcgtaatggtcgcaaaaccaaaggcatgattgaggcggattccgcg

SEQ ID NO: 752632 - DNA, 75 bp, synthetic construct
  source 1..75: mol_type = other DNA
gtaaagagcttatccccgtgcacattgaagcccggctgaatgcttcgacagggggaatgttgcagcgtcggcggc

SEQ ID NO: 752633 - DNA, 75 bp, synthetic construct
  source 1..75: mol_type = other DNA
gcaatggaaattggcgaactattcctcgtctatcaaccgatcgttgatattaacacccgcgccattctgggcgcg

SEQ ID NO: 752634 - DNA, 75 bp, synthetic construct
  source 1..75: mol_type = other DNA
aagcaacagatttatgaagatgccagacgacattcttaattatcgtcacccacggcgtgagttcatcgaatcttt

SEQ ID NO: 752635 - DNA, 75 bp, synthetic construct
  source 1..75: mol_type = other DNA
tgcaactatggtttggactatcacacgccgctttttgcgtaatgcctcgcgtattcatggaagctatgcccgctg

SEQ ID NO: 752636 - DNA, 75 bp, synthetic construct
  source 1..75: mol_type = other DNA
aaaacggatgtctgcggagttcacagctgtttcgttactgccaaagacggcaacaaccgctttatgaggatgcca

SEQ ID NO: 752637 - DNA, 75 bp, synthetic construct
  source 1..75: mol_type = other DNA
atggcactgttttactatcaggcgctggagcgtaatggtcgcaaaaccaaaggcatgattgaggcggattccgcg

SEQ ID NO: 752638 - DNA, 75 bp, synthetic construct
  source 1..75: mol_type = other DNA
tatgagcgacgccttacaggccagcggcgtttactggctggcgggattgctggggcttctggctctggggcaacg

SEQ ID NO: 752639 - DNA, 75 bp, synthetic construct
  source 1..75: mol_type = other DNA
gctgctgtgtcggttaattgctatgtcgaacaacaattgctgaaagccgcaagccgcatacgtgaaggcagcagt

SEQ ID NO: 752640 - DNA, 75 bp, synthetic construct
  source 1..75: mol_type = other DNA
cgtcgctgaaggatgatttcttactgcatattaatgtttcgccctggcagttaaacgaaccgcactttcatgagc

SEQ ID NO: 752641 - DNA, 75 bp, synthetic construct
  source 1..75: mol_type = other DNA
gccggacgcagaaatcattaaagcggggaatgtgcgcgcgttagcggtcgaacgttttgacaggcgttggaatgc

SEQ ID NO: 752642 - DNA, 75 bp, synthetic construct
  source 1..75: mol_type = other DNA
cgggctggagatacaaaactacgccgacgcgtcactgtttgctgatgaatcaatacgctggcgaagcagctatga

SEQ ID NO: 752643 - DNA, 75 bp, synthetic construct
  source 1..75: mol_type = other DNA
tagcccgattgtacgtgaccggatcgttaaacgttatcatgctaaatccagacaaccgtttgatttattgtcaga

SEQ ID NO: 752644 - DNA, 75 bp, synthetic construct
  source 1..75: mol_type = other DNA
gggccggcagacattctggagtcagatgagaatggcattatcccggagcaggacagggtaatcacgcaggtggtg

SEQ ID NO: 752645 - DNA, 75 bp, synthetic construct
  source 1..75: mol_type = other DNA
tttcaggcgccagcaaaggtgctgaaattaccggaagtgcagattcatgaaatcgttagtcactttgcgagaatg

SEQ ID NO: 752646 - DNA, 75 bp, synthetic construct
  source 1..75: mol_type = other DNA
tttcaggcgccagcaaaggtgctgaaattaccggaagtgcatattcatgagatcgttagtcactgtgcgagaatg

SEQ ID NO: 752647 - DNA, 75 bp, synthetic construct
  source 1..75: mol_type = other DNA
agcgtctgtgtggttgcggaaagcatgatgactgtgaacacgggcagtcgcttacagcacagctgcgactgggac

SEQ ID NO: 752648 - DNA, 75 bp, synthetic construct
  source 1..75: mol_type = other DNA
acgcaggtggtgatactggatgcggataaaaagcagatacagtgcgtggtaagaccgctgcaaatcctgcgtgct

SEQ ID NO: 752649 - DNA, 75 bp, synthetic construct
  source 1..75: mol_type = other DNA
cggcagacattctggagtcagatgagaatggtattatcccggagcaggccagggtaatcacgcaggtggtgatac

SEQ ID NO: 752650 - DNA, 75 bp, synthetic construct
  source 1..75: mol_type = other DNA
attttcaggcggcagcaaaggtgctgaaattcccggaagtgcaaattcaggaaatcattagtaactgtgcgagaa

SEQ ID NO: 752651 - DNA, 75 bp, synthetic construct
  source 1..75: mol_type = other DNA
attttcaggcggcagcaaaggtgctgaaattcccggaagtgcaaattcaggaaatcataagtaactgtgcgagat

SEQ ID NO: 752652 - DNA, 75 bp, synthetic construct
  source 1..75: mol_type = other DNA
attttcaggcgtcagcaaaggtgctgaaattcccggaagtgcaaattcaggaaatcataagtaactgtgcgagaa

SEQ ID NO: 752653 - DNA, 75 bp, synthetic construct
  source 1..75: mol_type = other DNA
tttcaggcgccagcaaaggtgctgaaattaccggaagtgcatattcatgacatcgttagtcactctgcgagaatg

SEQ ID NO: 752654 - DNA, 75 bp, synthetic construct
  source 1..75: mol_type = other DNA
tttcaggcgccagcaaaggtgctgaaattaccggaagtgcatattcatgaaatcgttagtcactatgcgagaatg

SEQ ID NO: 752655 - DNA, 75 bp, synthetic construct
  source 1..75: mol_type = other DNA
tttcaggcgccagcaaaggtgctgaaattaccggaagtgcaaattcatgagatcgttagtcactttgcgagaatg

SEQ ID NO: 752656 - DNA, 75 bp, synthetic construct
  source 1..75: mol_type = other DNA
aaagtacaacgaaaaagagctggcggatacgagcaagtttttaagttttgtcctccgacacaaaccggaggcgat

SEQ ID NO: 752657 - DNA, 75 bp, synthetic construct
  source 1..75: mol_type = other DNA
aactccgttctgtggtttatgggcgatgatattccacatgtgccgaacaaacgcggcggtggtttgtgcctcggc

SEQ ID NO: 752658 - DNA, 75 bp, synthetic construct
  source 1..75: mol_type = other DNA
tgcccaggtctgcggcgtccagcgattgtgcaactactattccgcgcggctgacgccgcttccggggccagactc

SEQ ID NO: 752659 - DNA, 75 bp, synthetic construct
  source 1..75: mol_type = other DNA
gttattaatctgctggtatggagcgggctttgtggctggataaatcgcttaaaaatcgcgttgggtgagacagat

SEQ ID NO: 752660 - DNA, 75 bp, synthetic construct
  source 1..75: mol_type = other DNA
gcctgtgggtggcaccgccaacccgtatggacgccgcgcagttgaccgaagaaggctactacagcgtcttcggta

SEQ ID NO: 752661 - DNA, 75 bp, synthetic construct
  source 1..75: mol_type = other DNA
gatatcaaagagccaatcctctgtgcaccgaacgacccggacgacgcacgtccgctgtctgcggtacagggcgag

SEQ ID NO: 752662 - DNA, 75 bp, synthetic construct
  source 1..75: mol_type = other DNA
tggcgcagaaaatggtgggtcgtgcctgtggcgtgaaaggcattcgtccgggcgcttactgcgaaccgaaaatga

SEQ ID NO: 752663 - DNA, 75 bp, synthetic construct
  source 1..75: mol_type = other DNA
tgtgtccgacacttgatttttatcagtcataaaatgacgaaaccccgcactgttggagcagtaacggggcttcta

SEQ ID NO: 752664 - DNA, 75 bp, synthetic construct
  source 1..75: mol_type = other DNA
gaggccaccagcgaacaggaagcacgccagcaatctccggctggctgcgtgatggtattcgccgcccgtattcgt

SEQ ID NO: 752665 - DNA, 75 bp, synthetic construct
  source 1..75: mol_type = other DNA
atgacacataaaacaaaggcgaccaagggcggtcgccagtggcataacactaaacttgagcatatccagaatacc

SEQ ID NO: 752666 - DNA, 75 bp, synthetic construct
  source 1..75: mol_type = other DNA
ggttctggtgagccaacggaaaatcaagggccacaccaacacatatcttttgttcctttaatgtcagggtacaga

SEQ ID NO: 752667 - DNA, 75 bp, synthetic construct
  source 1..75: mol_type = other DNA
gctattgaatcggatcctaaacgaccaatgctgattactttatcatcaaacaaagtgtatgttggaataataaat

SEQ ID NO: 752668 - DNA, 75 bp, synthetic construct
  source 1..75: mol_type = other DNA
ttgctagctcttctaattatcccaatcctggttagcggttatattatgataaccgctaaccagtatcattatttc

SEQ ID NO: 752669 - DNA, 75 bp, synthetic construct
  source 1..75: mol_type = other DNA
gcgacctttgaactaaaaaccgacgtactgattgatgaagtgcgggcgggcggtcgtattccgctgattatcggt

SEQ ID NO: 752670 - DNA, 75 bp, synthetic construct
  source 1..75: mol_type = other DNA
atgcctgggcagatggcgaaccgccaactgaaaaatatcttaaaagatcaattcaaaaagcagtatcacggcatt

SEQ ID NO: 752671 - DNA, 75 bp, synthetic construct
  source 1..75: mol_type = other DNA
cgtgaatagcgaagatttcaattatcgctttagtcagcttgaatcagcgttgaatacccagaagaactcgattcc

SEQ ID NO: 752672 - DNA, 75 bp, synthetic construct
  source 1..75: mol_type = other DNA
gggtgattgccattctgcttactgctgttgtgccgaaagtggttgagcagtttattcatatgaaacagacccttc

SEQ ID NO: 752673 - DNA, 75 bp, synthetic construct
  source 1..75: mol_type = other DNA
gccgctttcttgacgagataaaaaaacaagggctgattccaggagagcgtcattacgtgcatctctctgctgatg

SEQ ID NO: 752674 - DNA, 75 bp, synthetic construct
  source 1..75: mol_type = other DNA
gaaagataaacccgtaaaattttcggcgatgttaaccagtaaaggaacacctgcgtctggctggacggtgaactt

SEQ ID NO: 752675 - DNA, 75 bp, synthetic construct
  source 1..75: mol_type = other DNA
cttgataagcaaatggtggcggcgcagaaagcagcggatgcatattggggaaaagatgcaaatggtaagcaaatg

SEQ ID NO: 752676 - DNA, 75 bp, synthetic construct
  source 1..75: mol_type = other DNA
aagcacttggcctgccgcacagcgatgtgttccgtcaggcgaaagatgtcgctgagagcgatcgcggcttctcgc

SEQ ID NO: 752677 - DNA, 75 bp, synthetic construct
  source 1..75: mol_type = other DNA
cgtttcccgattggtatctccttcccggcgggttctggtctggtggcatttgctgccgcaactggcgtcatgcca

SEQ ID NO: 752678 - DNA, 75 bp, synthetic construct
  source 1..75: mol_type = other DNA
ggcagtgatcgacatcgatctggccgatatcaaagagccaatcctctgtgcaccgaacgatccggatgacgcacg

SEQ ID NO: 752679 - DNA, 75 bp, synthetic construct
  source 1..75: mol_type = other DNA
agcgtctgtgcggttgcggaaagcatgatggctgtgaacacgggcagttacttacagcacaactgcgactgggac

SEQ ID NO: 752680 - DNA, 75 bp, synthetic construct
  source 1..75: mol_type = other DNA
gaatggtattattccggaacaggacggggtaatcacgcaggtggtgatactggatgcagataaaaagcagataca

SEQ ID NO: 752681 - DNA, 75 bp, synthetic construct
  source 1..75: mol_type = other DNA
tggctggcgaatcctgagctgctggaagccgatgcagatgcggaatacgcggcagtgattgacatcgatctggcg

SEQ ID NO: 752682 - DNA, 75 bp, synthetic construct
  source 1..75: mol_type = other DNA
ctgcctccacccgaatgctcatcgccatgagcgacacgttacagaccagcggcgtttactggctggcgggattgc

SEQ ID NO: 752683 - DNA, 75 bp, synthetic construct
  source 1..75: mol_type = other DNA
gcctgcctgtgacggggcgtgttgcgcgcgggctgaatacggcgcgtttttcccgcaccttaagcatcctcaccg

SEQ ID NO: 752684 - DNA, 75 bp, synthetic construct
  source 1..75: mol_type = other DNA
ggcgtttactggctggtaggtttgctggggcttctggtgctggggcaacggttactcaaaaatcctgccatgcgc

SEQ ID NO: 752685 - DNA, 75 bp, synthetic construct
  source 1..75: mol_type = other DNA
atgaaattcaaagtcacaggtgaatggaatggagagccattcaacagagttatcgaagcagagaacatcaacgac

SEQ ID NO: 752686 - DNA, 75 bp, synthetic construct
  source 1..75: mol_type = other DNA
ggaatggagagccattcaacagggttatcgaagcagagaacatcaacgactgttataaccactggatgatatggg

SEQ ID NO: 752687 - DNA, 75 bp, synthetic construct
  source 1..75: mol_type = other DNA
ggtggtgccgaaaattatcgaacagtttgatcatctcggactcgcgctgcctgcctccacccgcgctcttatcgc

SEQ ID NO: 752688 - DNA, 75 bp, synthetic construct
  source 1..75: mol_type = other DNA
gaaaacccgctggcacagcaaatactgtctggtgaattggttccgggtaaagttattcgcctggaagttaatgaa

SEQ ID NO: 752689 - DNA, 75 bp, synthetic construct
  source 1..75: mol_type = other DNA
ggtgtctcgtctggttggtgcgcctccgggatatgtcggttatgaagaaggtggctacctgaccgaagcggtgcg

SEQ ID NO: 752690 - DNA, 75 bp, synthetic construct
  source 1..75: mol_type = other DNA
gatccaaatcgcccgattggttcattcctgttcctcggcccaacgggtgtggggaaaactgagctttgtaaggcg

SEQ ID NO: 752691 - DNA, 75 bp, synthetic construct
  source 1..75: mol_type = other DNA
ggtagtaccgaaaatcatcgaacagtttgatcatctcggacacgcgctgcccgtctccacccgcacgcttattgc

SEQ ID NO: 752692 - DNA, 75 bp, synthetic construct
  source 1..75: mol_type = other DNA
gggcgcgctggtggcaggggcaaaatatcgcggtgagtttgaagaacgcttaaaaggcgtgcttaacgatctcgc

SEQ ID NO: 752693 - DNA, 75 bp, synthetic construct
  source 1..75: mol_type = other DNA
tcgtcgccgtattccgtcatcctgctggatgaagtggaaaaagcgcatccggatgtcttcaacattctgttgcag

SEQ ID NO: 752694 - DNA, 75 bp, synthetic construct
  source 1..75: mol_type = other DNA
ttacgttatctactaaaacatttaatatttatgataaattaacgacacttgatgaaaaaattgcttttttgaaaa

SEQ ID NO: 752695 - DNA, 75 bp, synthetic construct
  source 1..75: mol_type = other DNA
tcttgctgtcatatttggtactgatgaggatttttggagcaatctgcagatgttgcaagatcgcccagagcaacg

SEQ ID NO: 752696 - DNA, 75 bp, synthetic construct
  source 1..75: mol_type = other DNA
gcggtggcactggctgaggcctgcccggcacttgttgacgcggcactggcagatgatgcagccgctgtttttgag

SEQ ID NO: 752697 - DNA, 75 bp, synthetic construct
  source 1..75: mol_type = other DNA
acgcagccgctgtttttgagcctgccgcagccgaggcgctctgtcccgctgccgtttcagaagacctggcgttcg

SEQ ID NO: 752698 - DNA, 75 bp, synthetic construct
  source 1..75: mol_type = other DNA
cgcagccgaggcgctctgtcccgctgccgtttcagaagacctggcgtttgtctcagacgttttggccgccttcgc

SEQ ID NO: 752699 - DNA, 75 bp, synthetic construct
  source 1..75: mol_type = other DNA
ggtttccgacgctttcgcgttcgtttcggatgtcttcgctgcggaagcagaactcgctgctgcgctggcctgttc

SEQ ID NO: 752700 - DNA, 75 bp, synthetic construct
  source 1..75: mol_type = other DNA
aaaacatattaacagcgaccttgatataacaaatgacatttcagataagaacatgaaaattgttgctgatatatc

SEQ ID NO: 752701 - DNA, 75 bp, synthetic construct
  source 1..75: mol_type = other DNA
ttctcaaaaaatattatttagaacaatatggtaaattacccgaagaagacgggattgacataattgtagtgaggg

SEQ ID NO: 752702 - DNA, 75 bp, synthetic construct
  source 1..75: mol_type = other DNA
tatcgaggcaaacctctaacaaatgcttctttagcagacataatgaatttagaatcaataaatgactacttgaaa

SEQ ID NO: 752703 - DNA, 75 bp, synthetic construct
  source 1..75: mol_type = other DNA
gaggacttttggagtaaccttcaaaagttgcaagattgcaaggaaaaccaagtaagtagccttcgtccacttcgt

SEQ ID NO: 752704 - DNA, 75 bp, synthetic construct
  source 1..75: mol_type = other DNA
ctgacccgagcacccgatcgctttagcgccgcccagttcagccctttactcgaacacgaaaaatcatcaacgcag

SEQ ID NO: 752705 - DNA, 75 bp, synthetic construct
  source 1..75: mol_type = other DNA
ttccttgactcctggcaaaaagtcggcccggaagaagcacagaagcgtgcaaaacgttatctgacggcaatgccc

SEQ ID NO: 752706 - DNA, 75 bp, synthetic construct
  source 1..75: mol_type = other DNA
tgcgtcgattgcgcagattcagttgaaacgtctgtacaaacgtctggaagaacgtggttatgaaatccacatttc

SEQ ID NO: 752707 - DNA, 75 bp, synthetic construct
  source 1..75: mol_type = other DNA
atgaacatattaaaaaaaattatgcagcgtctgtgcggttgcggaaagcatgatgaccgtgaaaacggggagtta

SEQ ID NO: 752708 - DNA, 75 bp, synthetic construct
  source 1..75: mol_type = other DNA
tgcggaaagcatgatgactgtgaaaacgggcagtcgcttacagcacaactgcgactgggaccggcagacattctg

SEQ ID NO: 752709 - DNA, 75 bp, synthetic construct
  source 1..75: mol_type = other DNA
atgaatattttgagaaagcttatgcagagtctgtgcggttgcggaaagcatgatgactgtgaaaacggacggtca

SEQ ID NO: 752710 - DNA, 75 bp, synthetic construct
  source 1..75: mol_type = other DNA
atgcctaaacttgtcacttggatgaacaaccagcgggtaggcgagttaacgaagttagccaacggcgcgcacacc

SEQ ID NO: 752711 - DNA, 75 bp, synthetic construct
  source 1..75: mol_type = other DNA
atgaacatactaaaaaaacttatgcagcgtctgtgcggttgcggaaagcatgatgaccgtgaacacgggcagtcg

SEQ ID NO: 752712 - DNA, 75 bp, synthetic construct
  source 1..75: mol_type = other DNA
atgaatatactaaaaaaacttatgcagcgtctgtgcggttgcggaaagcatgatgaccgtgaacacggggagtta

SEQ ID NO: 752713 - DNA, 75 bp, synthetic construct
  source 1..75: mol_type = other DNA
gtatgattatctgcgtgatgaattacctgcgctgattcagtcgcaatttaacgtcagcgatcgctgcgccattag

SEQ ID NO: 752714 - DNA, 75 bp, synthetic construct
  source 1..75: mol_type = other DNA
gtgaacacggggagttacttacagcacaactgcgtctggggccggcagacatcctggagtcagatgagaatggca

SEQ ID NO: 752715 - DNA, 75 bp, synthetic construct
  source 1..75: mol_type = other DNA
atgaacatactaaaaaaacttatgcagcgtctgtgcgggtacggaaagcatgatgaccgtgaacacggggagtta

SEQ ID NO: 752716 - DNA, 75 bp, synthetic construct
  source 1..75: mol_type = other DNA
tgcgcgttgatgtacgccagtaatgcgcaggatgcgatcccgacgcttattgatcagggcgatagcgatcagttt

SEQ ID NO: 752717 - DNA, 75 bp, synthetic construct
  source 1..75: mol_type = other DNA
ttatggcgctgaaaaatccgggtaaatacaccagcgtttcggcctttgcaccaattgtgaatccgtgcagcgtcc

SEQ ID NO: 752718 - DNA, 75 bp, synthetic construct
  source 1..75: mol_type = other DNA
gtgaaatatgaatcagatggaggcccaggcatcgcgcggatcatggcgtttttgatggggtccagcgaggcgctt

SEQ ID NO: 752719 - DNA, 75 bp, synthetic construct
  source 1..75: mol_type = other DNA
aaaaagcagatacagtgcgtggtaagaccgctgcaaatcctgcgtgctgacgggacgtgggaaaatattggcggg

SEQ ID NO: 752720 - DNA, 75 bp, synthetic construct
  source 1..75: mol_type = other DNA
aaacttatgcagcgtctgtgtggttgcggaaagcatgatggccgtgaacacgtgcagtcgcttacagcacaactg

SEQ ID NO: 752721 - DNA, 75 bp, synthetic construct
  source 1..75: mol_type = other DNA
agcgtctgtgcggttgcggaaagcatgatggctgtgaacacgggctgtcgcttacagcacaactgcgactggggc

SEQ ID NO: 752722 - DNA, 75 bp, synthetic construct
  source 1..75: mol_type = other DNA
gttcagaagctattgtgctggccgttggcggacggcgtgatggtctggttgccattgcggtggaagacaagcgat

SEQ ID NO: 752723 - DNA, 75 bp, synthetic construct
  source 1..75: mol_type = other DNA
aaacccatcaactgaccgatttactcaaccgcatggaggcgctgctgaacgatgtcgatgcctgcaacgtcaact

SEQ ID NO: 752724 - DNA, 75 bp, synthetic construct
  source 1..75: mol_type = other DNA
gcttacagcacaactgcgactggggccggcagacatcctggagtcagatgagaatggcattattccggagcagga

SEQ ID NO: 752725 - DNA, 75 bp, synthetic construct
  source 1..75: mol_type = other DNA
gccggaattgccgcttccagttccgcaggggccgcggtagcgacacctgtgctgattgcagaaatggtgcctgcg

SEQ ID NO: 752726 - DNA, 75 bp, synthetic construct
  source 1..75: mol_type = other DNA
tagcggtcgaacgttttgacaggcgttggaatgctgagcgaacggttttacttcgcttgccacaggaggatatgt

SEQ ID NO: 752727 - DNA, 75 bp, synthetic construct
  source 1..75: mol_type = other DNA
cgcacatcattaaattaccgattggcgaaatcaggcagcccaatgcgacgctcgatctcagccaaagcgttgata

SEQ ID NO: 752728 - DNA, 75 bp, synthetic construct
  source 1..75: mol_type = other DNA
atacagtgtgtggtaagaccgctgcaaatcctgcgtgctgacgggacgtgggaaaatattgtcgggatgaagtaa

SEQ ID NO: 752729 - DNA, 75 bp, synthetic construct
  source 1..75: mol_type = other DNA
ggttgcggaaagcatgatggccgtgaacacgtgcagtcgcttacagcacaactgcgtctggggccggcagacatc

SEQ ID NO: 752730 - DNA, 75 bp, synthetic construct
  source 1..75: mol_type = other DNA
agcgtctgtgcgggtacggaaagcatgatgaccgtgaacacggggagttacttacagcacaactgcgactgggac

SEQ ID NO: 752731 - DNA, 75 bp, synthetic construct
  source 1..75: mol_type = other DNA
tgccggggacgaagacgcagatgacgatacggtcgaagacctataaaggaagcgggtttaacgagctgcgctttg

SEQ ID NO: 752732 - DNA, 75 bp, synthetic construct
  source 1..75: mol_type = other DNA
cggttatatcgaaactcacgtccaggaacacggtgcctatattctttccggtcaggggtttataacctcgacaat

SEQ ID NO: 752733 - DNA, 75 bp, synthetic construct
  source 1..75: mol_type = other DNA
cactgccgaagctgaagggaaaaaatttgacttaagcgaaggtgggtatctgtattgcccgccaggttccttaat

SEQ ID NO: 752734 - DNA, 75 bp, synthetic construct
  source 1..75: mol_type = other DNA
gcagggagagagcgggacttgttccataaaactggagaaaacaggaaagataataatacgggggacggagtttct

SEQ ID NO: 752735 - DNA, 75 bp, synthetic construct
  source 1..75: mol_type = other DNA
ttgaagacgccacgggcggtgaacaggtctatatccacgcgcagaagaacatggatacggaggtgctgaataatc

SEQ ID NO: 752736 - DNA, 75 bp, synthetic construct
  source 1..75: mol_type = other DNA
ccggataagcctgaaggtgggtggctcgtttgtggtcatccattcagggggcgtggacatcgtcgggccgaaaat

SEQ ID NO: 752737 - DNA, 75 bp, synthetic construct
  source 1..75: mol_type = other DNA
ggagaccagccgcaggcgcttcatggcagccaggggagaggaaccacgctgggaaatcagttagaggtgataccg

SEQ ID NO: 752738 - DNA, 75 bp, synthetic construct
  source 1..75: mol_type = other DNA
ccagccgataatcatggggcggacgtaccatgaggacaaccgttcgccggggagtctgccggggacgaagacgca

SEQ ID NO: 752739 - DNA, 75 bp, synthetic construct
  source 1..75: mol_type = other DNA
cagaagataagggtggtgaaggggcagacggttgaggtcggcaccagaaaagaagggggccacgacctagagtat

SEQ ID NO: 752740 - DNA, 75 bp, synthetic construct
  source 1..75: mol_type = other DNA
tttaccttaagcgaaggtggctatctttattgcccgccgggttccttaatgacgtttgttaatgctcaggccgaa

SEQ ID NO: 752741 - DNA, 75 bp, synthetic construct
  source 1..75: mol_type = other DNA
gagcttccgtaccagactgtacgtgaagtcattagcgaagctgaaaaggcacgtcagattaatagcgatgaacca

SEQ ID NO: 752742 - DNA, 75 bp, synthetic construct
  source 1..75: mol_type = other DNA
cagcaggatatccggacgatatcggccacgttactgaacgagaacggcgtcacagagtggacgccgctgttttat

SEQ ID NO: 752743 - DNA, 75 bp, synthetic construct
  source 1..75: mol_type = other DNA
gacgatatcggccacgttactgaacgagaacggcgtgacggagtggactccgctgttttatgaagaccatccggc

SEQ ID NO: 752744 - DNA, 75 bp, synthetic construct
  source 1..75: mol_type = other DNA
ttcacgctgagttctccccgtggccttacttccccttctctaagaaaagtacctttagaacattcggagattaac

SEQ ID NO: 752745 - DNA, 75 bp, synthetic construct
  source 1..75: mol_type = other DNA
gggacctgccgggaacgaagacgcagatgacgatacggtcgaagacctataaaggaagcggttttaatgagttgc

SEQ ID NO: 752746 - DNA, 75 bp, synthetic construct
  source 1..75: mol_type = other DNA
ccagccgataatcatggggcggacgtaccatgaggacaaccgttcgccggggagtctgcctgtagtggcacagta

SEQ ID NO: 752747 - DNA, 75 bp, synthetic construct
  source 1..75: mol_type = other DNA
gggaaatcgtgctggagagcagcagtcagataagcctgaaggtgggcggttcgtttatcgttattcagccgggcg

SEQ ID NO: 752748 - DNA, 75 bp, synthetic construct
  source 1..75: mol_type = other DNA
cagcgactcttttatgcagacggcggagatgctgctggagaagaaggcgacactgaccatctggcagggcgcagt

SEQ ID NO: 752749 - DNA, 75 bp, synthetic construct
  source 1..75: mol_type = other DNA
tctttagtcatttgggagtcgacctcagagaacccgattcttgatctcagtttgtttaagtcccgtaatttcacc

SEQ ID NO: 752750 - DNA, 75 bp, synthetic construct
  source 1..75: mol_type = other DNA
tcagaaatgaccgctgggtgacggtgaaagggaagctggagcacaggacgacggggaaccatatcagccaggtgg

SEQ ID NO: 752751 - DNA, 75 bp, synthetic construct
  source 1..75: mol_type = other DNA
gaaagcgacctggcgtttctggcgcggctgtgggcggaggaggggattttcttctttgagcggtttgcggcggac

SEQ ID NO: 752752 - DNA, 75 bp, synthetic construct
  source 1..75: mol_type = other DNA
cccgcagcgttatgtcacaggcgtggtggcgggctttggcatgcaggagaacaatggctggcagatgcgttacca

SEQ ID NO: 752753 - DNA, 75 bp, synthetic construct
  source 1..75: mol_type = other DNA
aaaggaagcggatttaacgagctgcggtttgaagacgccaccagtaatggatacccgcaaaaataccagaagaaa

SEQ ID NO: 752754 - DNA, 75 bp, synthetic construct
  source 1..75: mol_type = other DNA
gggaaatcagttagaggtgataccggcggaccggacgtggcgtccacggctgcaaaacaaaccgaaggtggacgg

SEQ ID NO: 752755 - DNA, 75 bp, synthetic construct
  source 1..75: mol_type = other DNA
cggacaaggacgggtatacagaagttttctctagaaccaatgatgcaaatgtagaaattaaactgttaactaatg

SEQ ID NO: 752756 - DNA, 75 bp, synthetic construct
  source 1..75: mol_type = other DNA
ggtgacgaatgaccggacggtgagcgtgagtcacgatgacggcctgtatgtcagaaacgaccgtaaagtgacggt

SEQ ID NO: 752757 - DNA, 75 bp, synthetic construct
  source 1..75: mol_type = other DNA
ttacctgcgacgctttatcccgacacggctgttggcgcacttaccccctcaaacagggtgtataccgggcaacgt

SEQ ID NO: 752758 - DNA, 75 bp, synthetic construct
  source 1..75: mol_type = other DNA
cgtgccggttttgatagcgacagtatcggattggtggaagcgcacggcaccggtacggtgctgggtgatcctatt

SEQ ID NO: 752759 - DNA, 75 bp, synthetic construct
  source 1..75: mol_type = other DNA
aaaatacccgcatctggtggtgacaaacggttatgggccgacggaaaacactatttttaccaccgcatatcgttt

SEQ ID NO: 752760 - DNA, 75 bp, synthetic construct
  source 1..75: mol_type = other DNA
aaatatttgattatccgggaaggtacaaggatgaacagcacggcaaggatttcacgctgtaccggatggagagcc

SEQ ID NO: 752761 - DNA, 75 bp, synthetic construct
  source 1..75: mol_type = other DNA
cctgcagtacagacgaatacgcgcgcgaatcagatagcaaaacgtgctttgcaaattgcgaaaaatactgcgcgc

SEQ ID NO: 752762 - DNA, 75 bp, synthetic construct
  source 1..75: mol_type = other DNA
tggcaccgttgactgtgatggacaactgcagtgttgacgtttttgttgacatttcacctaacgggcaaggagtta

SEQ ID NO: 752763 - DNA, 75 bp, synthetic construct
  source 1..75: mol_type = other DNA
aatgaagtgaacggtatttcccgcgtggtgtatgacatcagtggcaagccgccagctaccattgagtgggaatga

SEQ ID NO: 752764 - DNA, 75 bp, synthetic construct
  source 1..75: mol_type = other DNA
ctggaagacgtgaagtggctggcgcagggcacgatctaccctgacgttatcgaatctgcggcgtctgcaaccggt

SEQ ID NO: 752765 - DNA, 75 bp, synthetic construct
  source 1..75: mol_type = other DNA
gcccggaaagccccaccgaagaaaacagcccgcgtgcgccgcagtatgtctttgaagcaggcgtaccggtattcg

SEQ ID NO: 752766 - DNA, 75 bp, synthetic construct
  source 1..75: mol_type = other DNA
caggaaatttttctgcgtgggtcattgaatcttgccgccgggagctggcagcagacataaaatatgcccgtcagt

SEQ ID NO: 752767 - DNA, 75 bp, synthetic construct
  source 1..75: mol_type = other DNA
ccaaaccagatgattgaacaaattaacatcgctcttgaccagaaaggttcagaaaatttttctgcgtgggtcatt

SEQ ID NO: 752768 - DNA, 75 bp, synthetic construct
  source 1..75: mol_type = other DNA
ggaagggaagcaggagcataagacgacggggaaccatatcagtctggtggagggaaagcacagtctggaggtgaa

SEQ ID NO: 752769 - DNA, 75 bp, synthetic construct
  source 1..75: mol_type = other DNA
atgggcatgggcgagccgctgctcaacctgaacaatgtcgttccggcgatggaaatcatgcttgatgatttcggt

SEQ ID NO: 752770 - DNA, 75 bp, synthetic construct
  source 1..75: mol_type = other DNA
cctgcgggtatcggaaattatcggccaggtgtggcgtgcagcgaaaatcgtcggcgcagcaaaagtcaccggtca

SEQ ID NO: 752771 - DNA, 75 bp, synthetic construct
  source 1..75: mol_type = other DNA
cgggcgatgttatcgaccgtacgaaacgtaccctgcgtaaacggatgcagggtgaagccatcgacattaaagcgg

SEQ ID NO: 752772 - DNA, 75 bp, synthetic construct
  source 1..75: mol_type = other DNA
tgttagcaggtacaggaagatggctgtcgcaggcggggaaaagcttaggagtgccaattccacaacaggtcgcaa

SEQ ID NO: 752773 - DNA, 75 bp, synthetic construct
  source 1..75: mol_type = other DNA
acctgaacaacgtcgttccggcgatggaaatcatgcttgatgatttcggttttggtctgtctaaacgtcgcgtga

SEQ ID NO: 752774 - DNA, 75 bp, synthetic construct
  source 1..75: mol_type = other DNA
cgtatcgaccgcttctcaaaagtgctgatgagctacggtttcaccaccattgtgcgtaaaactcgtggtgatgat

SEQ ID NO: 752775 - DNA, 75 bp, synthetic construct
  source 1..75: mol_type = other DNA
aatcaacctgctggatctcaaccgtcagcagatgcgggagttttttaaagatttaggtgaaaaacccttccgcgc

SEQ ID NO: 752776 - DNA, 75 bp, synthetic construct
  source 1..75: mol_type = other DNA
ccggataacccgatgggtctgtacgcactgtatatcggtcgtctgtacgctatccacggcaccaacgccaacttc

SEQ ID NO: 752777 - DNA, 75 bp, synthetic construct
  source 1..75: mol_type = other DNA
aggtgacgaatgaccggacggtgagcgtgagtaatgatgacggcctgtacgtcagaaatgaccgtaaagtgacgg

SEQ ID NO: 752778 - DNA, 75 bp, synthetic construct
  source 1..75: mol_type = other DNA
ggcgctggataaactgggcgatatgatcgacgttgcactggcaatttccctgcacgcgccgaacgacgaaattcg

SEQ ID NO: 752779 - DNA, 75 bp, synthetic construct
  source 1..75: mol_type = other DNA
cctgcgggtgtcggaaattatcggccaggtgtggcgtgcggcgaaaatcgtcggcgcagcaaaagtcaccggtca

SEQ ID NO: 752780 - DNA, 75 bp, synthetic construct
  source 1..75: mol_type = other DNA
atccaatgcgaaccaggggcgcgtcactatcgagtacgtgatgcttgaccacgttaacgatggcactgaacatgc

SEQ ID NO: 752781 - DNA, 75 bp, synthetic construct
  source 1..75: mol_type = other DNA
gttcaacgtctcgccgattttttgcaggaatacagcaacagcacctacagcaatttcagcgaggcaagccgcgca

SEQ ID NO: 752782 - DNA, 75 bp, synthetic construct
  source 1..75: mol_type = other DNA
gcaatttcagtgaggcaagccgcgcgtttctgaccatgacaatgcgtccttggttggcgaacttcgaacagcaaa

SEQ ID NO: 752783 - DNA, 75 bp, synthetic construct
  source 1..75: mol_type = other DNA
actttgagcagcagataaaaaacgccctgctggtggcctcgcctgtacctggtatccggtatcaggtggagtttg

SEQ ID NO: 752784 - DNA, 75 bp, synthetic construct
  source 1..75: mol_type = other DNA
acttgcgatattatatacaggtgagcatgacattttggtcacaaacttatctgataatactcagatacggtgcaa

SEQ ID NO: 752785 - DNA, 75 bp, synthetic construct
  source 1..75: mol_type = other DNA
tctgctgcaaccacattttgcaacaaagtaacagacctgatagaatcaaacatttcaaagaaatggacgttaaga

SEQ ID NO: 752786 - DNA, 75 bp, synthetic construct
  source 1..75: mol_type = other DNA
tggctggcacatcgaacacgggggcgggtgagtacgtatcatcggggacagcggaatcactgcctgccgtcatga

SEQ ID NO: 752787 - DNA, 75 bp, synthetic construct
  source 1..75: mol_type = other DNA
cctccggtctgggtatgttgctgatggtcaccttatttccgacgctggtgagtctgggagtaagtcgtctctctg

SEQ ID NO: 752788 - DNA, 75 bp, synthetic construct
  source 1..75: mol_type = other DNA
acctacagcaatttcagcgaggcaagccgcgcatttctgaccatgacgatgcgcccgtggctggcgaactttgag

SEQ ID NO: 752789 - DNA, 75 bp, synthetic construct
  source 1..75: mol_type = other DNA
tacagcaattttagtgaggcgagccgcgcatttctcaccatgacgatgcgtccgtggctggcgaacttcgagcaa

SEQ ID NO: 752790 - DNA, 75 bp, synthetic construct
  source 1..75: mol_type = other DNA
gctggcctcccgtcgcttctccattgaagacatcgcccggatgttcaacgtatcgcctatttttcttcaggaata

SEQ ID NO: 752791 - DNA, 75 bp, synthetic construct
  source 1..75: mol_type = other DNA
gtaccaaataccggatccggagaatatgtttctgccgggacggctgaatcattgcctgctgtgatgaacgcggtt

SEQ ID NO: 752792 - DNA, 75 bp, synthetic construct
  source 1..75: mol_type = other DNA
cctaccagtttaagcgaatgatgatccgccactgcctgttaaacggtaatgcttacgcggtgattcagtgggggc

SEQ ID NO: 752793 - DNA, 75 bp, synthetic construct
  source 1..75: mol_type = other DNA
taataagcatcgaagtaaatgacagaatcaaaaactccttttacaatataatttctgaggatagccatcataata

SEQ ID NO: 752794 - DNA, 75 bp, synthetic construct
  source 1..75: mol_type = other DNA
atgacgatgattattctgggcactgccgggattgcctcgtttgaaccgcatgttttcgtcggcgcagtattaccg

SEQ ID NO: 752795 - DNA, 75 bp, synthetic construct
  source 1..75: mol_type = other DNA
ttatgatgatcacaccctgaaatattacaacgaagggaaagcgcggattaagggcgtcgaggcgaccgccaattt

SEQ ID NO: 752796 - DNA, 75 bp, synthetic construct
  source 1..75: mol_type = other DNA
cgcgcctgcactccgccattatctcaatgaactttgctactccggcgattgccatcaactatgaacataaatccg

SEQ ID NO: 752797 - DNA, 75 bp, synthetic construct
  source 1..75: mol_type = other DNA
tactacagcacgccagaaatgcagaatattttgctgcaaaatgtcgttggtcacgctgtccggaaagcaaaaaat

SEQ ID NO: 752798 - DNA, 75 bp, synthetic construct
  source 1..75: mol_type = other DNA
gttgaatacttcaaaactcgacgagaaaaggtttttgagctgccaatttggagtgaaggattaagaacaaatggc

SEQ ID NO: 752799 - DNA, 75 bp, synthetic construct
  source 1..75: mol_type = other DNA
tgccggactttcaacgctggcgctggtggcggcgatggatatgaccaacggcggactttacgcttccatcatgca

SEQ ID NO: 752800 - DNA, 75 bp, synthetic construct
  source 1..75: mol_type = other DNA
cgatggcggcagacaccctgggccaactctccaccctggtgccgcgcctgaacgaggcggtggcgcgggaacgtg

SEQ ID NO: 752801 - DNA, 75 bp, synthetic construct
  source 1..75: mol_type = other DNA
catgaactttggtacgcctgccatcgccattaactacgagcacaaatcagcgggcattatgcagcagctgggtat

SEQ ID NO: 752802 - DNA, 75 bp, synthetic construct
  source 1..75: mol_type = other DNA
acacctgcggcaaccgtggcgatagcgccattctgcgcgggcttttagatgccatcaacacgctctcgcctgagg

SEQ ID NO: 752803 - DNA, 75 bp, synthetic construct
  source 1..75: mol_type = other DNA
gcgtgccgcagtttgaacatgcactttgcactttcatggcgaaaaagccgctgtttatgattggtcacagtgttg

SEQ ID NO: 752804 - DNA, 75 bp, synthetic construct
  source 1..75: mol_type = other DNA
cgcgcctgcactccgccattatctcaatgaactttgccaccccggcgattgccatcaactatgaacataaatccg

SEQ ID NO: 752805 - DNA, 75 bp, synthetic construct
  source 1..75: mol_type = other DNA
acacctgcggcaaccgcggcgacagcgcgattatgcgcggcctgctcgatgcgattcttcgccagcagccggacg

SEQ ID NO: 752806 - DNA, 75 bp, synthetic construct
  source 1..75: mol_type = other DNA
tcatccggtggattttctgctgaacgagcagccgaacgactgccagacaccttaccagtttaaacgcacgatgat

SEQ ID NO: 752807 - DNA, 75 bp, synthetic construct
  source 1..75: mol_type = other DNA
tagctttgaacctgtcacaatatttagcttattaaaatcaataaagaaaagtgtcctgcaatttttctgtatcag

SEQ ID NO: 752808 - DNA, 75 bp, synthetic construct
  source 1..75: mol_type = other DNA
tgattgctttctcaatatacttacaacaacaaacagaagaaattaaagcggtacgtaagctgctactttctcaaa

SEQ ID NO: 752809 - DNA, 75 bp, synthetic construct
  source 1..75: mol_type = other DNA
tctgacagcagaaagataagacttctcaataaacttgaacgaaatcctgaaatgttcttctctgattcaaataaa

SEQ ID NO: 752810 - DNA, 75 bp, synthetic construct
  source 1..75: mol_type = other DNA
catccagctgtcactgctggggatagcggcggaagtggtgacgggtaacacgctcacgatgcagtaccggcgggt

SEQ ID NO: 752811 - DNA, 75 bp, synthetic construct
  source 1..75: mol_type = other DNA
tcggtgataactatcgcgggcagtattttaccccgtattcggttcagtgcctgatggcccggatgctgatgccgg

SEQ ID NO: 752812 - DNA, 75 bp, synthetic construct
  source 1..75: mol_type = other DNA
ccaaagagttagggattaattcccatgtacatgcaatccctaagctaaatgcatatgaaacaggtttaataaaca

SEQ ID NO: 752813 - DNA, 75 bp, synthetic construct
  source 1..75: mol_type = other DNA
agaccatcgggaacgaccagaagataacggtggtgaaggggcagacggttcaggtcgggaccagaaaagaagggg

SEQ ID NO: 752814 - DNA, 75 bp, synthetic construct
  source 1..75: mol_type = other DNA
agacccgcggagaaacggatgaagaggggtatacagagcgtttttttgtatctagcaaacatgaaattaaagtga

SEQ ID NO: 752815 - DNA, 75 bp, synthetic construct
  source 1..75: mol_type = other DNA
tggacttcctgaacggggacccggaccagccgataatcatggggcggacgtaccatgaggacaaccgttcgccgg

SEQ ID NO: 752816 - DNA, 75 bp, synthetic construct
  source 1..75: mol_type = other DNA
ttgtacctgttattgctcgggctaggtttgatgctgaactctattggtctctaggtaagtacttgaaaaatttcg

SEQ ID NO: 752817 - DNA, 75 bp, synthetic construct
  source 1..75: mol_type = other DNA
aaaaaaacgcagctacttacgtttatctgaacggtacgcgcttgactgtggagcttccgtaccagaccgtgcgag

SEQ ID NO: 752818 - DNA, 75 bp, synthetic construct
  source 1..75: mol_type = other DNA
catatcaggagcgcgtggaaggcaataaggtgcgcgaacgtagcccgtcatttggcgaatattattctcatccgc

SEQ ID NO: 752819 - DNA, 75 bp, synthetic construct
  source 1..75: mol_type = other DNA
aatgactttgaaaaacggctggcagacctgcgccggttcagagccatgcgggacttcatgaggggattgtccgac

SEQ ID NO: 752820 - DNA, 75 bp, synthetic construct
  source 1..75: mol_type = other DNA
taaacagcgtcaaaaccaaacgttacggctacacagaagaagaaacactgaaaagactaaaccttccccagccga

SEQ ID NO: 752821 - DNA, 75 bp, synthetic construct
  source 1..75: mol_type = other DNA
tcaacggacggattttcccgcttaacggcaagcgcaactacctcccgctctctccgtatgggagatatgaggtgg

SEQ ID NO: 752822 - DNA, 75 bp, synthetic construct
  source 1..75: mol_type = other DNA
agtgtcagcgaacaaactcgacagcagctgatggctctggccaacgccccgttcaatgaggcccttaccatcccc

SEQ ID NO: 752823 - DNA, 75 bp, synthetic construct
  source 1..75: mol_type = other DNA
tttttattgaaagaatgacagagttactcaatctccagaatacaattcagaacatttctggacgaaaaatgaagc

SEQ ID NO: 752824 - DNA, 75 bp, synthetic construct
  source 1..75: mol_type = other DNA
tggcagagacgagcaagtttttaagttttgtcctccgacataaaccagaggcgattggcatcgtgctggacggtg

SEQ ID NO: 752825 - DNA, 75 bp, synthetic construct
  source 1..75: mol_type = other DNA
gcgctttagttattccagtgatggtacgtgtattcgcgccgttcaggggcattcgacttcgccggtcgccattgc

SEQ ID NO: 752826 - DNA, 75 bp, synthetic construct
  source 1..75: mol_type = other DNA
ccgtattggagaatctgctggagcaggacttcagcgccagcggcccgaaccagaagtgggtgggtgacatcacgt

SEQ ID NO: 752827 - DNA, 75 bp, synthetic construct
  source 1..75: mol_type = other DNA
aacctgtctcctgccactcagaaccggattatgcagaaggagttttcgcgtatacaggttattgccggatacaag

SEQ ID NO: 752828 - DNA, 75 bp, synthetic construct
  source 1..75: mol_type = other DNA
aacgactttgaaaaacgtctgacggacctgaaccgacacagggttatgctggcatttatgcgcggactatcggat

SEQ ID NO: 752829 - DNA, 75 bp, synthetic construct
  source 1..75: mol_type = other DNA
gaggatattcgacagcaataagacagtatgaagaagatatgcccagctttacatcggtttccggggtttacagat

SEQ ID NO: 752830 - DNA, 75 bp, synthetic construct
  source 1..75: mol_type = other DNA
aaatcatccttgaagaagaaatacaggaatcagagttccctgagcggcccgaaatttttacttggcttctttccc

SEQ ID NO: 752831 - DNA, 75 bp, synthetic construct
  source 1..75: mol_type = other DNA
gaacataaagcatctgcggcgctggataatccacgttccagtactttaaccaagcagcttgctgcttccgtgctg

SEQ ID NO: 752832 - DNA, 75 bp, synthetic construct
  source 1..75: mol_type = other DNA
tgtgaccgtgggagaaatgctgacagaggaatttttaaaaccgctgaacaagtctcatgctgaactggcggaatc

SEQ ID NO: 752833 - DNA, 75 bp, synthetic construct
  source 1..75: mol_type = other DNA
attttcacagctggtgtgcctcaatggtaaaacgccacggtattcaggtgacggcagacagaaaagaatatcctg

SEQ ID NO: 752834 - DNA, 75 bp, synthetic construct
  source 1..75: mol_type = other DNA
atgacgtccggggagaggaggggggcttcacgactggagagttttctgaatgatgactgccttgtctggtacgat

SEQ ID NO: 752835 - DNA, 75 bp, synthetic construct
  source 1..75: mol_type = other DNA
ctgacgtcacgggttacggtatctcattttcacagctggtgtgcctcaatgataaaacgccacggtattcaggtg

SEQ ID NO: 752836 - DNA, 75 bp, synthetic construct
  source 1..75: mol_type = other DNA
ccattgaaaaacaagcgggtaaaacggtgaaaggcaaaaaaggagaagccagcgtgaccatcgataaatccatcg

SEQ ID NO: 752837 - DNA, 75 bp, synthetic construct
  source 1..75: mol_type = other DNA
gaatcaagctatttgcaatatcaggccagatacgacaattgctgatatgaagtatctctattacttcttgaagag

SEQ ID NO: 752838 - DNA, 75 bp, synthetic construct
  source 1..75: mol_type = other DNA
tatacatccatctgttcttgcctatctcggtatacaattttatgaaaaatggatagatgagtcgtgtgcaacgtt

SEQ ID NO: 752839 - DNA, 75 bp, synthetic construct
  source 1..75: mol_type = other DNA
tggatgaggggcatgattttgacagtcgctggctggcactgattgcccgtctgtttgataacgtatcccgttcac

SEQ ID NO: 752840 - DNA, 75 bp, synthetic construct
  source 1..75: mol_type = other DNA
cacgctggaaaccgacggtcttctgaaatcagaaataaatccgctggtacaggttcgtcgttatgcctgtgatac

SEQ ID NO: 752841 - DNA, 75 bp, synthetic construct
  source 1..75: mol_type = other DNA
gcggtcatcaataaatggagtacatgcgagctcacttcaaaaccagctcctgacgtaatgccaactaattccatg

SEQ ID NO: 752842 - DNA, 75 bp, synthetic construct
  source 1..75: mol_type = other DNA
atgctgccagtgtttattggcatcgggcttggcgtattgttaggttctattcccgtctttgtgcctgggttcccg

SEQ ID NO: 752843 - DNA, 75 bp, synthetic construct
  source 1..75: mol_type = other DNA
agaaacgccatgccctgtgcggtcactggagtgatatggctgttctgtgtccggcagagttttcagtgaaacaac

SEQ ID NO: 752844 - DNA, 75 bp, synthetic construct
  source 1..75: mol_type = other DNA
aaaacatcagaaccgtgaaataccgctcgttcagccacaggcaggcggtgaagaaggcacagagccggaaatcct

SEQ ID NO: 752845 - DNA, 75 bp, synthetic construct
  source 1..75: mol_type = other DNA
tgccctgctgctaccgggcggtcattcaccagattatctgcgtggcgacaaccgttttgtcaccttcacccgcga

SEQ ID NO: 752846 - DNA, 75 bp, synthetic construct
  source 1..75: mol_type = other DNA
gttcatcaccccgacgccgtttattagcgataagtatgctaactcggttcgtacttccttcttctgggatatggg

SEQ ID NO: 752847 - DNA, 75 bp, synthetic construct
  source 1..75: mol_type = other DNA
agaaaggtctggaagacttctactacagcgtcggtaaatatagcgccagcgtaaaagctgtcgtgaccccgctgc

SEQ ID NO: 752848 - DNA, 75 bp, synthetic construct
  source 1..75: mol_type = other DNA
gaaaaaccatgattcttttgttccgttgcctttacctggctgaaaccacgcccggaaagattctggtgctgtgct

SEQ ID NO: 752849 - DNA, 75 bp, synthetic construct
  source 1..75: mol_type = other DNA
gtttaataatgatctcactcgcgaagttccgccctgttttattgccggggcggagttcgatccgctgctggatga

SEQ ID NO: 752850 - DNA, 75 bp, synthetic construct
  source 1..75: mol_type = other DNA
tgaggacggtttcgatactggttgtgacgttagcattgttgaccagtgccagaaaaccgctgatgtagttcgggc

SEQ ID NO: 752851 - DNA, 75 bp, synthetic construct
  source 1..75: mol_type = other DNA
gatcgcaccaccattgctgatatcgaaaaaggtctggaagacttctactatagcgtcggtaaatatagcgccagc

SEQ ID NO: 752852 - DNA, 75 bp, synthetic construct
  source 1..75: mol_type = other DNA
acataatagacggacaaacacctctgttgttctctacacgcccttttattcctacccaaaaagcgttgcatggta

SEQ ID NO: 752853 - DNA, 75 bp, synthetic construct
  source 1..75: mol_type = other DNA
tgcgatacgtccggagggtgggtaacaagcacaaaaaaatattatgtcaggttcagagtgcaggtatttaaaaaa

SEQ ID NO: 752854 - DNA, 75 bp, synthetic construct
  source 1..75: mol_type = other DNA
ttgtctggaatcacattccctggggggctgaagattttacaggttcaatacctctccaggagcgagtggatttat

SEQ ID NO: 752855 - DNA, 75 bp, synthetic construct
  source 1..75: mol_type = other DNA
agttggtgcgcctcaatgataaagcgccatggaattcaggtgactgctggaggaaaggattacccggagaaatgc

SEQ ID NO: 752856 - DNA, 75 bp, synthetic construct
  source 1..75: mol_type = other DNA
gatactggtgttgtgctacaacattacgctggccagttatctgcgggaatgcattgaggacagagggctgaaatc

SEQ ID NO: 752857 - DNA, 75 bp, synthetic construct
  source 1..75: mol_type = other DNA
ggcgtatggtgtggtgtttacccgcattacccgtcagcaactgaagacactggcagggaatgatgagaatgcggt

SEQ ID NO: 752858 - DNA, 75 bp, synthetic construct
  source 1..75: mol_type = other DNA
cggttgccggcgttccctacgcaacgttgttgacggtattaatgatcctctcctgccttgtccagcttggcccat

SEQ ID NO: 752859 - DNA, 75 bp, synthetic construct
  source 1..75: mol_type = other DNA
tagcatcacaaatccttatttgccgggcagatcttaaagatccggtaaaacccgatggggtattcttacttgcag

SEQ ID NO: 752860 - DNA, 75 bp, synthetic construct
  source 1..75: mol_type = other DNA
cccggatgccattcaggatcttgaagcctcattagccagacatcagggagaacttgctctgctgacacaggaaaa

SEQ ID NO: 752861 - DNA, 75 bp, synthetic construct
  source 1..75: mol_type = other DNA
gattgactccgaagataataaaacaacaaaaaaaataaggatgtcagtaagaaaaaacaacattacattatgtaa

SEQ ID NO: 752862 - DNA, 75 bp, synthetic construct
  source 1..75: mol_type = other DNA
tgactctgaaaataataaaacaacaaaaaaaataagaatgtcagtaagaaaaaacaatattacgttacgtaattc

SEQ ID NO: 752863 - DNA, 75 bp, synthetic construct
  source 1..75: mol_type = other DNA
gtgtcagaggggaatttgaaaatcgcttaaaagcgctcttaaccgaacttaattccttggatggtacagctattt

SEQ ID NO: 752864 - DNA, 75 bp, synthetic construct
  source 1..75: mol_type = other DNA
gtttatggggatgagaataaactcatcacgattaatatgacggaatttcaggaagctcacacggtttccactctg

SEQ ID NO: 752865 - DNA, 75 bp, synthetic construct
  source 1..75: mol_type = other DNA
cagttgcaggaactgatcagtcagttgccacaggcgaagcccgaacagcaggccagactggcgacttacgccagt

SEQ ID NO: 752866 - DNA, 75 bp, synthetic construct
  source 1..75: mol_type = other DNA
aattgattctcaacataagaaagcatcaacaaaaataagaatatcagtaagaaaaaacaatattatattacgtat

SEQ ID NO: 752867 - DNA, 75 bp, synthetic construct
  source 1..75: mol_type = other DNA
actacagcatcattgctcagaaagcagcgccaacagatattcttgaacgctttgacaccctgtttactcagcagt

SEQ ID NO: 752868 - DNA, 75 bp, synthetic construct
  source 1..75: mol_type = other DNA
ggagttcttttttcagatattcgactctggtattatcgaggattctgaaggtaagatgatatctttcagagattg

SEQ ID NO: 752869 - DNA, 75 bp, synthetic construct
  source 1..75: mol_type = other DNA
gtggatttttctttgcttgcagaaacaggtatgttagatcctgtttctggcagagagaaagaaatcaggcaactc

SEQ ID NO: 752870 - DNA, 75 bp, synthetic construct
  source 1..75: mol_type = other DNA
ttggttttggtcaggggggaactcttaccgaaagagtcagtcataatccatatagcgttattcttcttgatgaaa

SEQ ID NO: 752871 - DNA, 75 bp, synthetic construct
  source 1..75: mol_type = other DNA
tcagatagtcaaagtcacagagccaaatcaggatgtcactgcagggatgctacgttctcttttacccatgatgga

SEQ ID NO: 752872 - DNA, 75 bp, synthetic construct
  source 1..75: mol_type = other DNA
tgattgataataacttgttggacgaggagtttaaggaagatctcgctgaatctcttgccctctttacgcgcagag

SEQ ID NO: 752873 - DNA, 75 bp, synthetic construct
  source 1..75: mol_type = other DNA
aggttacgacgccattattcaggtcggcggatcgttttttgtcgatctctacggcgtgccgcagtttgaacatgc

SEQ ID NO: 752874 - DNA, 75 bp, synthetic construct
  source 1..75: mol_type = other DNA
gcccgttccagaatgagcaattcaaccaactggcgaactacgttttcggtcactgcgacgcgttgatcctgcgcg

SEQ ID NO: 752875 - DNA, 75 bp, synthetic construct
  source 1..75: mol_type = other DNA
cgcgtgggtggaagaagtcccgccgccgacagaccaaccggaggaaattctcgaagaacttggcgaaatcgacaa

SEQ ID NO: 752876 - DNA, 75 bp, synthetic construct
  source 1..75: mol_type = other DNA
ccgcccttatattggcaccaccaccacctggttcgttgggcaggcggcgcatatcgggcgctttatggtgcattg

SEQ ID NO: 752877 - DNA, 75 bp, synthetic construct
  source 1..75: mol_type = other DNA
ggtgattggcgcgaagctgtatgcaggctggcacaacttgctggatatgggggggacggcgatcatggcgaaagt

SEQ ID NO: 752878 - DNA, 75 bp, synthetic construct
  source 1..75: mol_type = other DNA
gtaatattagtacaggtaaacttgatgcaaaccaggctgtaaaaggtggtgattatccgttttttacgtgcgcag

SEQ ID NO: 752879 - DNA, 75 bp, synthetic construct
  source 1..75: mol_type = other DNA
gtaatattagaacaggtaaacttgatgcaaatcgggcagtgaaagatggtgattatccattttttacgtgcgctg

SEQ ID NO: 752880 - DNA, 75 bp, synthetic construct
  source 1..75: mol_type = other DNA
tatacctaaagaaggtgtaagtcgtgattttttatactattttttgaagcaagactctgttttccaatatgttga

SEQ ID NO: 752881 - DNA, 75 bp, synthetic construct
  source 1..75: mol_type = other DNA
ctggctccggttatcaaacgtgctcgcgaaaaagtcgaacacgattttaaccagcaggtgattaatcgagaactc

SEQ ID NO: 752882 - DNA, 75 bp, synthetic construct
  source 1..75: mol_type = other DNA
aatattgccatcgcccagggattcaccgacttcgtgcgcctgctgtcaggttacgatgccattatccaggtcggc

SEQ ID NO: 752883 - DNA, 75 bp, synthetic construct
  source 1..75: mol_type = other DNA
ccaactggcgaactacgtttttggtcactgcgatgcgctgatcctgcgcgaatcggtcagccttgatttgatgaa

SEQ ID NO: 752884 - DNA, 75 bp, synthetic construct
  source 1..75: mol_type = other DNA
aattacaggcgaaacatcaacgtaccattgtctttatttctcacgatctcgacgaagctatgcgtattggcgacc

SEQ ID NO: 752885 - DNA, 75 bp, synthetic construct
  source 1..75: mol_type = other DNA
tacgccactggcagcaatccttaacgctgctaaacgcgcatatgaagaatcagcaagcgcagctggctttcgcat

SEQ ID NO: 752886 - DNA, 75 bp, synthetic construct
  source 1..75: mol_type = other DNA
aatcgaaaacggccagcttgttgccgatacgctacgccacttatctgataacgaaatcgactctgattattttgc

SEQ ID NO: 752887 - DNA, 75 bp, synthetic construct
  source 1..75: mol_type = other DNA
tgaggcgctcgaccgcacccacaaaatgttccaacgggaacaatgcagggcagaggccgcagagaagcgtattgc

SEQ ID NO: 752888 - DNA, 75 bp, synthetic construct
  source 1..75: mol_type = other DNA
acagctacccggatgaactttctggcggcatgcgtcagcgcgttggactagcccgtgcattagcgattaatccag

SEQ ID NO: 752889 - DNA, 75 bp, synthetic construct
  source 1..75: mol_type = other DNA
cgtcgatattagccaggtgttcagtgcgaaagatattgctcgtcgtacaccgaacggcttaattcgtaaaacccc

SEQ ID NO: 752890 - DNA, 75 bp, synthetic construct
  source 1..75: mol_type = other DNA
caaccctgaagtagtgcaggcgttgctggatgaacgggaaagaaaccagcaatacataaaacgccgagaccagga

SEQ ID NO: 752891 - DNA, 75 bp, synthetic construct
  source 1..75: mol_type = other DNA
tcacgatgattaccaaacggtaatggcatacaaagtttctgaagtcatcgctgcaatccgcgtcgctggcattcg

SEQ ID NO: 752892 - DNA, 75 bp, synthetic construct
  source 1..75: mol_type = other DNA
agccgggtgatcaccccggtcttcaagccgattggcgtacatgaagataactggcaggcaacggttggcctgttt

SEQ ID NO: 752893 - DNA, 75 bp, synthetic construct
  source 1..75: mol_type = other DNA
atcaaacgccgcgaccaggagaacgaggatgttgcgctaacggtagggaagctgctaatcgaaaacggccggctt

SEQ ID NO: 752894 - DNA, 75 bp, synthetic construct
  source 1..75: mol_type = other DNA
ttacgaaggtgttatctcggatgggagtaagcgtattgctgaactggaagcacgggaaataaaaccagccaaagg

SEQ ID NO: 752895 - DNA, 75 bp, synthetic construct
  source 1..75: mol_type = other DNA
cagcgattgagatgtacaaaccaacagtgcgcatcatggaagttaatgtgccacgcgccgctggcattcgcatca

SEQ ID NO: 752896 - DNA, 75 bp, synthetic construct
  source 1..75: mol_type = other DNA
tgcgtgagctagcgcaccgctttaataatctggctgatagtaccgatgaagatattgatttgttggcacaggaca

SEQ ID NO: 752897 - DNA, 75 bp, synthetic construct
  source 1..75: mol_type = other DNA
agaataagatcaatctccctgcgcgagcggtggtgattacctttgatgatggcctcaagtcggtgagccgctatg

SEQ ID NO: 752898 - DNA, 75 bp, synthetic construct
  source 1..75: mol_type = other DNA
gggcagttccggtggttcatccggcagttccctgagtggtgatgccagcaatacgcagacaaccgcggttgatat

SEQ ID NO: 752899 - DNA, 75 bp, synthetic construct
  source 1..75: mol_type = other DNA
ccgccaatgtgggatcgtccacgtcactgaatgcggcaacaataacgaccggattcaatatgacacttcttccct

SEQ ID NO: 752900 - DNA, 75 bp, synthetic construct
  source 1..75: mol_type = other DNA
gcgcaataaggaaatgagtcgtcaggttgtactgaacgttgaaatccttagcatcaagaaatccagccaggaaca

SEQ ID NO: 752901 - DNA, 75 bp, synthetic construct
  source 1..75: mol_type = other DNA
aacaccacgttacacagtgggattcccgccgtaagcgtagtcgcgaaattatgagccgtcttgaacttgaagatc

SEQ ID NO: 752902 - DNA, 75 bp, synthetic construct
  source 1..75: mol_type = other DNA
ggtgctaatagtaatgcaaccagatggaaaaaaatcaagaagggattggttttcctagatttcagatcggaaata

SEQ ID NO: 752903 - DNA, 75 bp, synthetic construct
  source 1..75: mol_type = other DNA
atgctgatggccgtttagttgaaatactccaagcacgtatcaatgctaccaagaaaacaatcgattattgggaaa

SEQ ID NO: 752904 - DNA, 75 bp, synthetic construct
  source 1..75: mol_type = other DNA
tgcgtgaggcggcagagcgtgcaattccggcaatggaacgcctgttaatgttgccagttgatgatgctctgataa

SEQ ID NO: 752905 - DNA, 75 bp, synthetic construct
  source 1..75: mol_type = other DNA
cccggccgcaggaagtctccatgaacggcagtgacccggtcaccgagtttgcccaggtactggaaaatgccgggc

SEQ ID NO: 752906 - DNA, 75 bp, synthetic construct
  source 1..75: mol_type = other DNA
ttgtcggtctgtttggtctggtcggggcagggcgtagcgaattaatgaaaggcatgtttggcggtacgcaaatca

SEQ ID NO: 752907 - DNA, 75 bp, synthetic construct
  source 1..75: mol_type = other DNA
ggttcggagaccattttaagcaagcatcttcccagttacgctgtggtagaacgcaatgatattttgtttttactt

SEQ ID NO: 752908 - DNA, 75 bp, synthetic construct
  source 1..75: mol_type = other DNA
cgacggcgaaatgggcaccggggcaatgggcgtgatggatgagaaattcggcagcgcggcagcagcatacagcta

SEQ ID NO: 752909 - DNA, 75 bp, synthetic construct
  source 1..75: mol_type = other DNA
aactggaagcacgggaaataaaaccagccaaaggtgaagttcttgtcgttgtttctggttttactggttgcggaa

SEQ ID NO: 752910 - DNA, 75 bp, synthetic construct
  source 1..75: mol_type = other DNA
agttgcgaagcccgggagcgtgatttatttgaatcatgggtaatgcattcaatttgtatttccaaatcgacgctt

SEQ ID NO: 752911 - DNA, 75 bp, synthetic construct
  source 1..75: mol_type = other DNA
tacgtgagatagcaaaactggcaacacagggcgaatgggtcgcattcatttcgccgggcactgatacatatgcgg

SEQ ID NO: 752912 - DNA, 75 bp, synthetic construct
  source 1..75: mol_type = other DNA
tgttgagcttgaggaagcaaaatcaaaactcaacgagcaacgcgagtattacgagggagtaatcgcggatggaag

SEQ ID NO: 752913 - DNA, 75 bp, synthetic construct
  source 1..75: mol_type = other DNA
atgcccaactttctaccccatgcactgacagcatcataaacagcattgcaacaggcattcgcatcaaaggagagt

SEQ ID NO: 752914 - DNA, 75 bp, synthetic construct
  source 1..75: mol_type = other DNA
acaaaccaacagtgcgcatcgtggaagttaatgtgccacgcgtcgctggcatttgcatcaaaggagacgcaggag

SEQ ID NO: 752915 - DNA, 75 bp, synthetic construct
  source 1..75: mol_type = other DNA
cagccgtctgctttaccagacgttagcggcgcatcagcgccctgtgagttcaaactctacccaggtacgctgcat

SEQ ID NO: 752916 - DNA, 75 bp, synthetic construct
  source 1..75: mol_type = other DNA
gcggcacaccagcaaccttgtgagttcaaactctactccggtatgctgcacgcctttttgcattattcacggatg

SEQ ID NO: 752917 - DNA, 75 bp, synthetic construct
  source 1..75: mol_type = other DNA
aggagcgggaaatactgctcccggaacgtagcagcatgcttcatcgaacagattttcacgatgattaccaaacgg

SEQ ID NO: 752918 - DNA, 75 bp, synthetic construct
  source 1..75: mol_type = other DNA
atgacaattgactatcaggcactgcgtgaaaaggcagagaaagcaacgagtggtgtgtggtcgctcgaatatgga

SEQ ID NO: 752919 - DNA, 75 bp, synthetic construct
  source 1..75: mol_type = other DNA
tgcggaaaaagcgccatcgccggggaaatagaaatcgcgatgaaggctattggtgtaccggttcagtggactaat

SEQ ID NO: 752920 - DNA, 75 bp, synthetic construct
  source 1..75: mol_type = other DNA
ttcctttgctggttacgtgtgagatcggcgttatacctgcttattacggctttgtgagcgttaatgggaataagc

SEQ ID NO: 752921 - DNA, 75 bp, synthetic construct
  source 1..75: mol_type = other DNA
tgcaggcgctgggcttgccggggaaatcctttgtgccgctgatcgtcggtttcggttgtaacgtaccgtcggtaa

SEQ ID NO: 752922 - DNA, 75 bp, synthetic construct
  source 1..75: mol_type = other DNA
gcacgtcagcgtgtaggtaactgggctggcgttaccgtcgaacgtaaagaagggcaattctccaccaccgatcat

SEQ ID NO: 752923 - DNA, 75 bp, synthetic construct
  source 1..75: mol_type = other DNA
acagcaattgagatgtacaaaccaactgtgcgtatcgtggaagttaatgtgccacgcgccgctggcattcgcatc

SEQ ID NO: 752924 - DNA, 75 bp, synthetic construct
  source 1..75: mol_type = other DNA
ttgatgcgctggcaacacgtcttggttgcccggtgatcccactggtctccactcgtggtcgaggaattgaagcac

SEQ ID NO: 752925 - DNA, 75 bp, synthetic construct
  source 1..75: mol_type = other DNA
tgctgattaacgtggtggatgcgtctaaccttgagcgtaacctgtacctgacgctacaactgctggaactcggca

SEQ ID NO: 752926 - DNA, 75 bp, synthetic construct
  source 1..75: mol_type = other DNA
atgaaaaaattaaccattggcttaattggtaatccaaattctggcaagacaaccttatttaaccagctcactggc

SEQ ID NO: 752927 - DNA, 75 bp, synthetic construct
  source 1..75: mol_type = other DNA
caaagagcttacgcctgagattatgcgcaaccatttagctgtattcgagcgatatggaatagcaccaaacgatag

SEQ ID NO: 752928 - DNA, 75 bp, synthetic construct
  source 1..75: mol_type = other DNA
ttaccgattacgcactgcaagctgccggaactgtagacgaattggttgcggcgttggaatccgcagagaagcgca

SEQ ID NO: 752929 - DNA, 75 bp, synthetic construct
  source 1..75: mol_type = other DNA
ataggcattatggctttatggagagtcttaaatacggagacgataacggcaaccatcctcaaactaatgaatatg

SEQ ID NO: 752930 - DNA, 75 bp, synthetic construct
  source 1..75: mol_type = other DNA
gctgaatttattgctgcctttaatccaaaggttgctttggcactactgaatgagaacaacgcattagaggaaagg

SEQ ID NO: 752931 - DNA, 75 bp, synthetic construct
  source 1..75: mol_type = other DNA
tatagccggtctgatacacctcggtattcgatatgcagatgttgaggtcatgagaattgctggagatgcccagct

SEQ ID NO: 752932 - DNA, 75 bp, synthetic construct
  source 1..75: mol_type = other DNA
ctaaagaaaatggcagttggctttacctgattgacctggaacacgcattacgcgtcgctgacattcgcattaaag

SEQ ID NO: 752933 - DNA, 75 bp, synthetic construct
  source 1..75: mol_type = other DNA
agcgaaagcggaagcccaggtaatcatcgagcaggcgaacaaacgccgctcgcagattctggacgaagcgaaagc

SEQ ID NO: 752934 - DNA, 75 bp, synthetic construct
  source 1..75: mol_type = other DNA
atcttaaatatttaaatttacgctatgtgaattcacagcgagaccttgctaaatatatatctacagagaaaaaac

SEQ ID NO: 752935 - DNA, 75 bp, synthetic construct
  source 1..75: mol_type = other DNA
gtgaaaccaggttcagtaaagacgcgtgcatcagaaaactgggtatatctgccagcatttaacgaaggcatgcgc

SEQ ID NO: 752936 - DNA, 75 bp, synthetic construct
  source 1..75: mol_type = other DNA
aggtgtctttgcgttacgaaaaaattatatggacctataaagacggcaatattattcactctgactcatggagtg

SEQ ID NO: 752937 - DNA, 75 bp, synthetic construct
  source 1..75: mol_type = other DNA
caaagggtccgtggatgttcaggaccgtgagggcagcattgaggtggtggctcaggagcactgcctctacatccc

SEQ ID NO: 752938 - DNA, 75 bp, synthetic construct
  source 1..75: mol_type = other DNA
tggccgccattaatggcagccatcgaaaaacgtcaaaaagaaattcttgcttccgcagaacgagcacataaggac

SEQ ID NO: 752939 - DNA, 75 bp, synthetic construct
  source 1..75: mol_type = other DNA
gaaaagtacaaccgcccgtgtattgcaggcgctattaagccgttggccggaacatcgtcgtgttgaactgatcac

SEQ ID NO: 752940 - DNA, 75 bp, synthetic construct
  source 1..75: mol_type = other DNA
accgccagcggtacaacgcagtcggcggtacgtgtcgaagaaggcaccctgaaaggcgatgttgcggatatcttc

SEQ ID NO: 752941 - DNA, 75 bp, synthetic construct
  source 1..75: mol_type = other DNA
gtaagcacgttgactaaaagtggcggcggtacgctggagttgactgccagcggcactgcgacgtctgcggtacgt

SEQ ID NO: 752942 - DNA, 75 bp, synthetic construct
  source 1..75: mol_type = other DNA
aaagatatcttcgtggtgccgacctggcacggcgtgtcgttccagaccacgcaagataccgtgttattcagtttt

SEQ ID NO: 752943 - DNA, 75 bp, synthetic construct
  source 1..75: mol_type = other DNA
gccgcgttatgccgccaatatgttgccgctgcgtcatcagacggggaactcctcgccgatctttaactaccgtta

SEQ ID NO: 752944 - DNA, 75 bp, synthetic construct
  source 1..75: mol_type = other DNA
ccggatggagataaaacggttgttcagcctgatattttaattcttgaagggttaaatgtcttacagagcgggatg

SEQ ID NO: 752945 - DNA, 75 bp, synthetic construct
  source 1..75: mol_type = other DNA
cggcggagtttaaattctaccgcatcaacgatgccggtcaggaagtggagtatttcaataccacgctggataacg

SEQ ID NO: 752946 - DNA, 75 bp, synthetic construct
  source 1..75: mol_type = other DNA
aaaaaggcgatgtactaataactactgaggcaccttgtggtttcgtagctcaagttaacagagaaaatattgctt

SEQ ID NO: 752947 - DNA, 75 bp, synthetic construct
  source 1..75: mol_type = other DNA
ttttcaatagaagatcatgaggatggtttttttattgtaaataatttaaatggaagtgatagagataaattattt

SEQ ID NO: 752948 - DNA, 75 bp, synthetic construct
  source 1..75: mol_type = other DNA
ggattagcaattattctcaaaaaaaaatccccattccctgcccggataatccggaaaaatccctcgccatccagt

SEQ ID NO: 752949 - DNA, 75 bp, synthetic construct
  source 1..75: mol_type = other DNA
cacattaacaaaaacggagatctttgcagtgaagcgtcagatatcagagcttcgctcttgtcttacatcttcgaa

SEQ ID NO: 752950 - DNA, 75 bp, synthetic construct
  source 1..75: mol_type = other DNA
agaggccagtataaaaaaggagaatggcttagaatagcatctctgaataaactcccaccggttctgcctgaaatt

SEQ ID NO: 752951 - DNA, 75 bp, synthetic construct
  source 1..75: mol_type = other DNA
atgcgtaaaaaacagtacaactattatcgcgaccagttgttgagttttgatgagagtagtgttgaatggaaaacg

SEQ ID NO: 752952 - DNA, 75 bp, synthetic construct
  source 1..75: mol_type = other DNA
tgcttgagaattttaagttccccataccttgccccaacaacctagagaagtctcttgccatccagtctgaaatcg

SEQ ID NO: 752953 - DNA, 75 bp, synthetic construct
  source 1..75: mol_type = other DNA
gcagttttacgtgactcagaatcacgggacggagccgccattcactggacgtttactgcataacaagcgcggcgg

SEQ ID NO: 752954 - DNA, 75 bp, synthetic construct
  source 1..75: mol_type = other DNA
gacggataacaacaccggtaagctgaccggtacccgtattcacacgccgttcctgtttaccaaggaaattgattc

SEQ ID NO: 752955 - DNA, 75 bp, synthetic construct
  source 1..75: mol_type = other DNA
gccggaaaaacatttattctcggatacacaaatgagatacatggtatttatcaggcatcaaaggcacctgtaata

SEQ ID NO: 752956 - DNA, 75 bp, synthetic construct
  source 1..75: mol_type = other DNA
ggattagtaattattctcaaaaaaaaatcccaatcccctgcccggataatccggaaaaatccctcgccatccagt

SEQ ID NO: 752957 - DNA, 75 bp, synthetic construct
  source 1..75: mol_type = other DNA
agcagcccagccaaagctaaataagaaaaacttagaaagtatccgtattcctaatccatcactaaaagaaaaaga

SEQ ID NO: 752958 - DNA, 75 bp, synthetic construct
  source 1..75: mol_type = other DNA
aatcaggggcatcggtacgactgggcatcatctttcccgttcttttatatgcaggaagaacctgcattctcaagc

SEQ ID NO: 752959 - DNA, 75 bp, synthetic construct
  source 1..75: mol_type = other DNA
gtggcgctacccttcgctgctgacgcctgtctggtcgcctcatcttttgaagcagacgcagatgatgccgatgac

SEQ ID NO: 752960 - DNA, 75 bp, synthetic construct
  source 1..75: mol_type = other DNA
cagtgcctccggacgggcatcatcctccgtcatggcaccgagaaaatcattcagcgtaccgggtcgggaatcttc

SEQ ID NO: 752961 - DNA, 75 bp, synthetic construct
  source 1..75: mol_type = other DNA
acgcagccgctgtttttgagcctgccgcagctgaggcactctgtcccgctgccgtttcagaagccttggcgttcg

SEQ ID NO: 752962 - DNA, 75 bp, synthetic construct
  source 1..75: mol_type = other DNA
ccttcacggaatttcctgccgccgttgccgaggaggctgcactgctggcgcttgtggaggcgttcgtttctgatg

SEQ ID NO: 752963 - DNA, 75 bp, synthetic construct
  source 1..75: mol_type = other DNA
ttctgccgtacttttgctctgtgctgccgctgccgcactgccagcagcctctgtcgccttcgtggatgccgtcgt

SEQ ID NO: 752964 - DNA, 75 bp, synthetic construct
  source 1..75: mol_type = other DNA
cttgcgtgccttagccacaaaacagggctggcaaattcaggagcaggctgcactggtttccgccagcgggccgga

SEQ ID NO: 752965 - DNA, 75 bp, synthetic construct
  source 1..75: mol_type = other DNA
gctcgcgacctcaagctcgccaccattgagcttgaacatagtcatcctctcgggcggttatgggatatcgatgtc

SEQ ID NO: 752966 - DNA, 75 bp, synthetic construct
  source 1..75: mol_type = other DNA
cgggcgtttgtgggatatcgatgtcctgacgcccgaaggcgaaattctctcccgtcgcgattattcgctgcccgc

SEQ ID NO: 752967 - DNA, 75 bp, synthetic construct
  source 1..75: mol_type = other DNA
gcctctgtcgccttcgtggatgccgtcgtggcgctgcccctcgctgctgacgcctgtctggtcgcctcatctttt

SEQ ID NO: 752968 - DNA, 75 bp, synthetic construct
  source 1..75: mol_type = other DNA
cgcctcttttgaagccgacgcatcccgggctgaggtggcagcttctgacgctttcgtggtcgcggtggatgctga

SEQ ID NO: 752969 - DNA, 75 bp, synthetic construct
  source 1..75: mol_type = other DNA
gccgtttcagaagacctggcgttcgtctcggacgtttttgccgccttcgcggaatttgctgccgccgttgccgag

SEQ ID NO: 752970 - DNA, 75 bp, synthetic construct
  source 1..75: mol_type = other DNA
ttcgctgcggaagcagacctcgctgctgcgctggcctgttcagtggcttcgccagccttcgttgtggctgttgaa

SEQ ID NO: 752971 - DNA, 75 bp, synthetic construct
  source 1..75: mol_type = other DNA
tgtttatggcggtgttatcagccgttcgtttcaatccggtacttaaggcgttctttgcccgtcttgttgctgccg

SEQ ID NO: 752972 - DNA, 75 bp, synthetic construct
  source 1..75: mol_type = other DNA
cttgtcctgtgtgagtccaccggggggtatgaaaatttagcggtgacgtattttcagtcgcttggctatgatgtc

SEQ ID NO: 752973 - DNA, 75 bp, synthetic construct
  source 1..75: mol_type = other DNA
cggaagtcgtaatcatcaaacaatgtgcaggcagcatgacagttgaacgtatagggcagcttattggcagaaccg

SEQ ID NO: 752974 - DNA, 75 bp, synthetic construct
  source 1..75: mol_type = other DNA
atgcccggaatcaagatcgggcacggtgcggtgataggcagccgctcgttggtgacaaacagatgtggggcactg

SEQ ID NO: 752975 - DNA, 75 bp, synthetic construct
  source 1..75: mol_type = other DNA
ttctggaccttatttctgctgaaatgaagaccgttgtgaatactcttcagccggatttaccgtcctggcccgcaa

SEQ ID NO: 752976 - DNA, 75 bp, synthetic construct
  source 1..75: mol_type = other DNA
ttgttgaacttaaaaatgcattgacaacagataattggcgacctgtttttgttaaactagaaattattaccgcaa

SEQ ID NO: 752977 - DNA, 75 bp, synthetic construct
  source 1..75: mol_type = other DNA
tttttgccgccttcacggaatttcctgccgccgttgccgaggaggctgcactgctggcgcttgtggaggcgttcg

SEQ ID NO: 752978 - DNA, 75 bp, synthetic construct
  source 1..75: mol_type = other DNA
cgcagctgaggcactctgtcccgctgccgtttcagaagacttaacgttcgtctcggacgtttttgccgccttcgc

SEQ ID NO: 752979 - DNA, 75 bp, synthetic construct
  source 1..75: mol_type = other DNA
gctgcggaagcagacctcgctgctgcgctggcctgttcagtggcttcgccagccttcgttgtggctgttgaagca

SEQ ID NO: 752980 - DNA, 75 bp, synthetic construct
  source 1..75: mol_type = other DNA
ccagccttgccgcctcatcttttgaagctgacgccgatgatgctgatgacgccgccgaactggcggacgatacgg

SEQ ID NO: 752981 - DNA, 75 bp, synthetic construct
  source 1..75: mol_type = other DNA
tcggatgtcttcgctgcggaagcagaactcgctgctgcgctggcctgttcagtggcttcgccagccttcgttgtg

SEQ ID NO: 752982 - DNA, 75 bp, synthetic construct
  source 1..75: mol_type = other DNA
aagctcaaggttaatcaactttccagcactggttacttggggcaatttgacttttgtgccattgccagaatggga

SEQ ID NO: 752983 - DNA, 75 bp, synthetic construct
  source 1..75: mol_type = other DNA
ggaagctgcagccgaagtgaatgctcacctgactgcgccgctttcccgtgaagccagtggtgaagatctgctgcg

SEQ ID NO: 752984 - DNA, 75 bp, synthetic construct
  source 1..75: mol_type = other DNA
cgcagcatccactgcaggtgccgtgctatatcacccataccaacgagaaaactcatgacgtgatccgcagtaacc

SEQ ID NO: 752985 - DNA, 75 bp, synthetic construct
  source 1..75: mol_type = other DNA
ccatcgactttagcgtccttgcacaacagcatggcgataacccgatgccggtgttctcgtttatgggcaatgcgg

SEQ ID NO: 752986 - DNA, 75 bp, synthetic construct
  source 1..75: mol_type = other DNA
agtggatgcctttgtgcacaccgtggaacagtatgttaccaaaccggttgatgccaaaattcaggaccgtttcgc

SEQ ID NO: 752987 - DNA, 75 bp, synthetic construct
  source 1..75: mol_type = other DNA
gagattaaaagcgccatcccgatgggctgtgtgctgacgctgccagcgaccggttcagaatccaacgcaggtgcg

SEQ ID NO: 752988 - DNA, 75 bp, synthetic construct
  source 1..75: mol_type = other DNA
tgagattcaggttaaatacgaaggttatattgcgcgccagcaagatgagatcgaaaagcagctgcgtaacgagaa

SEQ ID NO: 752989 - DNA, 75 bp, synthetic construct
  source 1..75: mol_type = other DNA
cagcggatccgaacgaggcggaaggctggttgcctggtggtgtcctccataccgatttgctggtcctgctgcgcg

SEQ ID NO: 752990 - DNA, 75 bp, synthetic construct
  source 1..75: mol_type = other DNA
aactgggcgcaaaccctgccgccggaacagcgtccgacctttacccaggttgcttcactggccgagacagcgcag

SEQ ID NO: 752991 - DNA, 75 bp, synthetic construct
  source 1..75: mol_type = other DNA
gaacatgaacttggccttgagtgtgaatggtcctggcacgatcaggtcgatattgctcgcggcggcaacagtaaa

SEQ ID NO: 752992 - DNA, 75 bp, synthetic construct
  source 1..75: mol_type = other DNA
acaccgccgcgtattgatgcgcgtaccatcgactttagcgtccttgcacaacagcatggcgataacccgatgccg

SEQ ID NO: 752993 - DNA, 75 bp, synthetic construct
  source 1..75: mol_type = other DNA
ttgacggtaagattcatatcggtctggataattacagcggtggtcgtgctggcgatcctccatccattccgctct

SEQ ID NO: 752994 - DNA, 75 bp, synthetic construct
  source 1..75: mol_type = other DNA
gggttgacctctaacgaaatatatccaaatggtatctccaccagcctgccgttcgatgtgcagatgcaaatcgtc

SEQ ID NO: 752995 - DNA, 75 bp, synthetic construct
  source 1..75: mol_type = other DNA
ttatgtaactcaaacactaactggttattttgcagcactacgcggagtactaagaagtattccggcatctatcta

SEQ ID NO: 752996 - DNA, 75 bp, synthetic construct
  source 1..75: mol_type = other DNA
atgagcgagaaaattgccgttgtctatatcggccccaaacccgtgaaaaaggatacccttaccggcagtcgtaca

SEQ ID NO: 752997 - DNA, 75 bp, synthetic construct
  source 1..75: mol_type = other DNA
atgttgacagcgcgatggcctggcaactgctggggtttccggatgtctgggttcgtcatgaagagcttgatgatg

SEQ ID NO: 752998 - DNA, 75 bp, synthetic construct
  source 1..75: mol_type = other DNA
gatgggtgaaagttataagaaaccaaacctgcatgccctttccagtatgcaaagaatggtgaagatgtattgtca

SEQ ID NO: 752999 - DNA, 75 bp, synthetic construct
  source 1..75: mol_type = other DNA
tgagtttttacctattcattatggttttaaccgagcaattaccgttcgtctgcaggaaaaagaggttcttcaatc

SEQ ID NO: 753000 - DNA, 75 bp, synthetic construct
  source 1..75: mol_type = other DNA
cgatctcgatgatggtatgctggcgcgcgccagggaggccggactgaatgtgcagaaaatggattgtctgcagtt

SEQ ID NO: 753001 - DNA, 75 bp, synthetic construct
  source 1..75: mol_type = other DNA
tgctcaaaaagcaacaacaggatgggcagttgcggcaggcacagcaggaacaggaaagagcgcttgccgcgcggg

SEQ ID NO: 753002 - DNA, 75 bp, synthetic construct
  source 1..75: mol_type = other DNA
atggataatgtaaatgtttatcgttgttcaagtattgttcatatggcgagtacttatatttcttttgagtttata

SEQ ID NO: 753003 - DNA, 75 bp, synthetic construct
  source 1..75: mol_type = other DNA
cgttttctggccctgctcagcgtgatgcgcctgcccacccgcacggctgaaggcgtcacggcactggtggggctg

SEQ ID NO: 753004 - DNA, 75 bp, synthetic construct
  source 1..75: mol_type = other DNA
ggaaagtttcgttataaggtttaccgccagaaattgtttgcacagcttttctcgacaccgctatctttctccttg

SEQ ID NO: 753005 - DNA, 75 bp, synthetic construct
  source 1..75: mol_type = other DNA
gcctgcgaccgaaagagccggcaaccaaagaacgcaaaaagccaggaccaaagcctaaggcggaaagcgatgcag

SEQ ID NO: 753006 - DNA, 75 bp, synthetic construct
  source 1..75: mol_type = other DNA
ccaatcggcgagtcaggcgtggtcaagaaagacatgggtgaagtatctgatggataccacacctttaacgaacta

SEQ ID NO: 753007 - DNA, 75 bp, synthetic construct
  source 1..75: mol_type = other DNA
gatctgcacgctgaacagattcagggtttcttcgacgttccggttgataacgtatttggtagcccgatcctgctg

SEQ ID NO: 753008 - DNA, 75 bp, synthetic construct
  source 1..75: mol_type = other DNA
cctgcaactcattgagatgctgaatgaacaccacattcacggtctgatgtatgtggatgatgcaatggtctatga

SEQ ID NO: 753009 - DNA, 75 bp, synthetic construct
  source 1..75: mol_type = other DNA
atggcatcagataatagatacagtattaacttcacgctatctgttttagaaaaaacagaagcaagcaagctgata

SEQ ID NO: 753010 - DNA, 75 bp, synthetic construct
  source 1..75: mol_type = other DNA
gattatttaatgaaaaaagtaatgaggactagccattcatcagaaatacaagaccaggaactaatgttacgtcta

SEQ ID NO: 753011 - DNA, 75 bp, synthetic construct
  source 1..75: mol_type = other DNA
ggggatatcatatgcgggcagcgctgcctcaacgctaatgaggagctccttcttgcaggcatgtttggaactgat

SEQ ID NO: 753012 - DNA, 75 bp, synthetic construct
  source 1..75: mol_type = other DNA
agaaatttccttttctctcgtttctttcccagtcgtcatcaaactatttgacccattctccctctctgctgtttt

SEQ ID NO: 753013 - DNA, 75 bp, synthetic construct
  source 1..75: mol_type = other DNA
tcaatatctgataataaggagattgctatattggtaagaagcaatgcttgcgcggagctagtttctgataattta

SEQ ID NO: 753014 - DNA, 75 bp, synthetic construct
  source 1..75: mol_type = other DNA
atgcaattgattacgaaggtaatctggttataactgcatgcccaggaagtggtaaaacaacaatactcgtccata

SEQ ID NO: 753015 - DNA, 75 bp, synthetic construct
  source 1..75: mol_type = other DNA
atccggttatcgatctggcacatgcggttgcggcacaagaagcgttaattaacgctggtggtgatgtcacgctgg

SEQ ID NO: 753016 - DNA, 75 bp, synthetic construct
  source 1..75: mol_type = other DNA
tcctatgaagccctgaacgatgcactgcataccgggcgtaaccagattttcctctgctgcagcacagcatctgcg

SEQ ID NO: 753017 - DNA, 75 bp, synthetic construct
  source 1..75: mol_type = other DNA
atacaaatgattttaaaccaatcaacaatcatatccccactgatcaatctttgcgaatacactgtgtcagtgttc

SEQ ID NO: 753018 - DNA, 75 bp, synthetic construct
  source 1..75: mol_type = other DNA
atgcgatcatgccgacgtttattgaaacggtacgctactggcagaaacagagcggagtaggggctaacgccacgg

SEQ ID NO: 753019 - DNA, 75 bp, synthetic construct
  source 1..75: mol_type = other DNA
gtttctcacaaggcgcgattatggcgctggagagcattaaagccgaaccgggtcttgcttcgcgcgtcattgcct

SEQ ID NO: 753020 - DNA, 75 bp, synthetic construct
  source 1..75: mol_type = other DNA
gtttctctcaaggcgcgattatggtgctggagagcattaaagccgaaccgggccttgcttcacgcgtcattgctt

SEQ ID NO: 753021 - DNA, 75 bp, synthetic construct
  source 1..75: mol_type = other DNA
aaatcattttacagcgagcagtattaattcctgtgatttaaagcatcacacatccgatgggaaagttgaatcaaa

SEQ ID NO: 753022 - DNA, 75 bp, synthetic construct
  source 1..75: mol_type = other DNA
cgaaccagagaaagcagacaacaagacgatgaaagactcagagtcaaaatcggttgaagacgaagatattattcg

SEQ ID NO: 753023 - DNA, 75 bp, synthetic construct
  source 1..75: mol_type = other DNA
cgaaccagagaaagcagacaacaagacgatcaaagactgagagtcaaaatcggttgaagacgaagatattattcg

SEQ ID NO: 753024 - DNA, 75 bp, synthetic construct
  source 1..75: mol_type = other DNA
ttctttatctattcctttaccccaatgaccatatttattctattatggctttctttgggttttatgctgaccatt

SEQ ID NO: 753025 - DNA, 75 bp, synthetic construct
  source 1..75: mol_type = other DNA
gcaaaaaccagtcagcaacaggcgacgcgcccgcaggagaacgatccggtggcgatgcaggcgctaatggcgctg

SEQ ID NO: 753026 - DNA, 75 bp, synthetic construct
  source 1..75: mol_type = other DNA
tcggaacgcttgcggaaaccgcttcgttgaaggcggatattttaccgccggtgagcggtgaaaacgcgcccgcgt

SEQ ID NO: 753027 - DNA, 75 bp, synthetic construct
  source 1..75: mol_type = other DNA
cgaaccagagaaagcagacaagaagacgatcaaagactcagagtcaaaatcggttgaagacgaagatattattcg

SEQ ID NO: 753028 - DNA, 75 bp, synthetic construct
  source 1..75: mol_type = other DNA
atggaatttaaagatttaccaatgcaattccaggaaatggcagtgattatagttcgttcccaactggcgactctt

SEQ ID NO: 753029 - DNA, 75 bp, synthetic construct
  source 1..75: mol_type = other DNA
tcagcgatgccatcaccgtctttaaagatgggcgttatgtcaaaacctttaccgatatgcagcaggttgaccacg

SEQ ID NO: 753030 - DNA, 75 bp, synthetic construct
  source 1..75: mol_type = other DNA
tgctctgcccggaagatcgcaaagcagaaggcattattcctgtgcactccgttcgcgacaacatcaacatcagcg

SEQ ID NO: 753031 - DNA, 75 bp, synthetic construct
  source 1..75: mol_type = other DNA
ataaaaacattttggtggaagataaatgtgataaaatgataacaggcccttcacatattgatttgtggtatagga

SEQ ID NO: 753032 - DNA, 75 bp, synthetic construct
  source 1..75: mol_type = other DNA
tgaagcgctaaataagttctctcaacgatatcaggttacgtattggttttggtgtttattaggacgtgaagaatt

SEQ ID NO: 753033 - DNA, 75 bp, synthetic construct
  source 1..75: mol_type = other DNA
gaaatccaacgtattcgtatttacagaacaatattatcaatagatatatacatactgtttctgagtatactggaa

SEQ ID NO: 753034 - DNA, 75 bp, synthetic construct
  source 1..75: mol_type = other DNA
acttgaacgtggcatgattatcaatgatcgaaatcgtgcgatacgtaagctgtcgcaggttggatattatcgatt

SEQ ID NO: 753035 - DNA, 75 bp, synthetic construct
  source 1..75: mol_type = other DNA
gatcgaaatcgtgcgatacgtaagctgtcgcaggttggatattatcgattgtcaggtttttggtacccatcaaga

SEQ ID NO: 753036 - DNA, 75 bp, synthetic construct
  source 1..75: mol_type = other DNA
cgttatgcgcgatgcccttaagctggctgatgaagccactatcacggcgcggataaacgctatcccgcactcaaa

SEQ ID NO: 753037 - DNA, 75 bp, synthetic construct
  source 1..75: mol_type = other DNA
ttgaacagttatgttaataacgaactggtcagtgaaatggatttaagatacggatcagtgatcattaatctggtt

SEQ ID NO: 753038 - DNA, 75 bp, synthetic construct
  source 1..75: mol_type = other DNA
taagattactgttactgtggtactggaaattggtgggtatccgtcactgttgttgccaaatgtggcgattagtct

SEQ ID NO: 753039 - DNA, 75 bp, synthetic construct
  source 1..75: mol_type = other DNA
cggtaacagcagtgataaaacggctaatatcactctggattatcagacgcgtcgtaagcgtcaacggagcaccgt

SEQ ID NO: 753040 - DNA, 75 bp, synthetic construct
  source 1..75: mol_type = other DNA
tggacgatggcgacatcgttacggtgaaagaagcgacggacgccctgctgcattgtgcggaacagcttcgcaaag

SEQ ID NO: 753041 - DNA, 75 bp, synthetic construct
  source 1..75: mol_type = other DNA
cgccttcctggctgaagtgcgggcgcagggtgtggagatggctcgtaacgcgatgattgattttgttgatggtga

SEQ ID NO: 753042 - DNA, 75 bp, synthetic construct
  source 1..75: mol_type = other DNA
gtaagttcggtgaacttgaatcaaaactagaaacagcgttgcgtgagtgtcgttctgctggaatcacgattgata

SEQ ID NO: 753043 - DNA, 75 bp, synthetic construct
  source 1..75: mol_type = other DNA
cgccgtgacggcgcgctgaagtcgtcaattgcaaaatgggtgcttggtatgatgtcggaagggaataaccgccag

SEQ ID NO: 753044 - DNA, 75 bp, synthetic construct
  source 1..75: mol_type = other DNA
cttaatcagctggcagcgatcgaagagaagcgcatcaagacgccagcagagaatatccgctttaagctcaatagc

SEQ ID NO: 753045 - DNA, 75 bp, synthetic construct
  source 1..75: mol_type = other DNA
aacaggaattccttgccacactccccgacggtccagtaaagaacaacgtccttaatcagctggcagcgatcgaag

SEQ ID NO: 753046 - DNA, 75 bp, synthetic construct
  source 1..75: mol_type = other DNA
accctaatcctccgctgccgtgacgcggtgaagcaaggcacaacagcttggcggtttcgcaaatgggtaacgaac

SEQ ID NO: 753047 - DNA, 75 bp, synthetic construct
  source 1..75: mol_type = other DNA
atttctggcgacacatcctgcaccggggacatcagcaggtgctgtttgtggtgacgcaggccgataaaacggagc

SEQ ID NO: 753048 - DNA, 75 bp, synthetic construct
  source 1..75: mol_type = other DNA
tggctgaaccgtcaccgaccgcagatgttgttgatgaaggggaaatgcgcctgattaatggcgtatggcaaaaat

SEQ ID NO: 753049 - DNA, 75 bp, synthetic construct
  source 1..75: mol_type = other DNA
gccatccttgggctggtggaccttaacgaggttacgccggaattgctcagcatgcgcaagaatcatgtggagata

SEQ ID NO: 753050 - DNA, 75 bp, synthetic construct
  source 1..75: mol_type = other DNA
gaagtaattgcacacctggtgaactgggaactgaaacagggcggcactctacgtgaagctgttctgcgcgccatc

SEQ ID NO: 753051 - DNA, 75 bp, synthetic construct
  source 1..75: mol_type = other DNA
ttctacaccgttccgctgcaactactggcttaccacgttgcgctgatcaaaggcaccgacgttgaccagccgcgt

SEQ ID NO: 753052 - DNA, 75 bp, synthetic construct
  source 1..75: mol_type = other DNA
taccttcgtttctgcaaccgacaccgaagtgattgcacatttggtgaactgggagctgaaacaaggcggtactct

SEQ ID NO: 753053 - DNA, 75 bp, synthetic construct
  source 1..75: mol_type = other DNA
gtaaaaccacgaccgcgctggcgcttgaggcgttcaactatgagaacggtcgctccacccgtactgcgtatgtag

SEQ ID NO: 753054 - DNA, 75 bp, synthetic construct
  source 1..75: mol_type = other DNA
aatcgcaatactccctgatagataagggcgagttttattcagttgcaggttccggaagcgttcgagcaggaagtg

SEQ ID NO: 753055 - DNA, 75 bp, synthetic construct
  source 1..75: mol_type = other DNA
tgccgaaagtggacggtaaatacattcaggtatgtaccttcaccgttggcggcaactacggtgggacgtgtttgc

SEQ ID NO: 753056 - DNA, 75 bp, synthetic construct
  source 1..75: mol_type = other DNA
gcgcattatctgcaatgctcttaaccttgaaccttcaaaggtagggatcctgaatgctcagacggttgccgaggc

SEQ ID NO: 753057 - DNA, 75 bp, synthetic construct
  source 1..75: mol_type = other DNA
ggcatgaaaggcgttcttttccgtgcgaaagacgcaatcaaggcgaaattcggcgctcgctggttgccagcgaag

SEQ ID NO: 753058 - DNA, 75 bp, synthetic construct
  source 1..75: mol_type = other DNA
aaacaagaagagttatcatcaatacagggtgatgccaccagcatagctcagtctcttggtctgaattatcacgta

SEQ ID NO: 753059 - DNA, 75 bp, synthetic construct
  source 1..75: mol_type = other DNA
ttaaaacggcggaagacgttaaggataccgtggagatcccggaactggacgagcaccagcaggatgcaccactta

SEQ ID NO: 753060 - DNA, 75 bp, synthetic construct
  source 1..75: mol_type = other DNA
tggcaattacaggaaaattacataatattcaacgttctctggacgatatatcttcaggctctattattcttctgg

SEQ ID NO: 753061 - DNA, 75 bp, synthetic construct
  source 1..75: mol_type = other DNA
tcttttctgtccacgctgaataaaatggcagagaagaagaaaaacaccgggaaagagatgtttgtgggggttacc

SEQ ID NO: 753062 - DNA, 75 bp, synthetic construct
  source 1..75: mol_type = other DNA
atatgatggaagcagataaaaagctcattcattactggcaggatacattaagcagaaaacacaacaacattaaaa

SEQ ID NO: 753063 - DNA, 75 bp, synthetic construct
  source 1..75: mol_type = other DNA
ctgaagattacccgtaccgcgacattgaaaactggcctcatatcaacggcgttttttatgccatggaggatcaag

SEQ ID NO: 753064 - DNA, 75 bp, synthetic construct
  source 1..75: mol_type = other DNA
cattgttgttaaacacaccggacgattacccgtaccgtgacattgaaaactggcctcatatcaacggtgtttttt

SEQ ID NO: 753065 - DNA, 75 bp, synthetic construct
  source 1..75: mol_type = other DNA
ttgagcgagtcaccggctggctgtttttatcggtcattcccgtgggtttgcccgctgcgctacaaattgctgccg

SEQ ID NO: 753066 - DNA, 75 bp, synthetic construct
  source 1..75: mol_type = other DNA
ctccaccgtgtttgaaccggtacgcaaagaagttaaaggctatgtggttgatccattaggcaaacatcacttcga

SEQ ID NO: 753067 - DNA, 75 bp, synthetic construct
  source 1..75: mol_type = other DNA
catataacccgaacgctcgccgcatggcggagatgattcaggctgactgggcgaaagtcggcgtgcaggccaaaa

SEQ ID NO: 753068 - DNA, 75 bp, synthetic construct
  source 1..75: mol_type = other DNA
aatttaaaaatccggagcgtgatttcccccgcgctctgatgattggtctggtgctggcaggtttagtctactggg

SEQ ID NO: 753069 - DNA, 75 bp, synthetic construct
  source 1..75: mol_type = other DNA
tgccctcaatgcggtgctcggctgctgcgtggtgagcacgttggtgattcatgctttagagatcaatctggacgc

SEQ ID NO: 753070 - DNA, 75 bp, synthetic construct
  source 1..75: mol_type = other DNA
ggctggcccagggcatcggcctgttatcgacttcattgttaggcaccggcgtgtttgccgttcctgccttagccg

SEQ ID NO: 753071 - DNA, 75 bp, synthetic construct
  source 1..75: mol_type = other DNA
atgactttcgccacacgtttacaacgatgctgaacgatttaggtgtcgatccgcatatcgtggagcacatcacag

SEQ ID NO: 753072 - DNA, 75 bp, synthetic construct
  source 1..75: mol_type = other DNA
ttgccgccaccgcagcattacgaccaggctgcgcagatagtagaacacaccccgtgcctgagacaccgttaagca

SEQ ID NO: 753073 - DNA, 75 bp, synthetic construct
  source 1..75: mol_type = other DNA
gcggtctgtaccagattgcgacctattacggcaagctcggtgcggttgagccagtgtacaaagaaaccctgtcct

SEQ ID NO: 753074 - DNA, 75 bp, synthetic construct
  source 1..75: mol_type = other DNA
ctcaataatcagggatatggaccgcgtatgtactgacatggacctgtactatcgccggatcacctatcgtttcct

SEQ ID NO: 753075 - DNA, 75 bp, synthetic construct
  source 1..75: mol_type = other DNA
gcgatcagattcgccaggtgccggtgctcgatgagaacggtaaacctgttcttggtactgatggcactccagtta

SEQ ID NO: 753076 - DNA, 75 bp, synthetic construct
  source 1..75: mol_type = other DNA
tccgctttaagctcaatagccgttggttcgaccgttccgtcattctggaatttttgcaggaaaacggctatccgg

SEQ ID NO: 753077 - DNA, 75 bp, synthetic construct
  source 1..75: mol_type = other DNA
ggtgaaacggcagataccctggctggcctgcgtctgtcgaaagagctgggttaccttggttcgctggcaatctgt

SEQ ID NO: 753078 - DNA, 75 bp, synthetic construct
  source 1..75: mol_type = other DNA
aacagccaaacgccatcaaaaacactctcgccggacgtatcagccacggtcaggttgatctaagcgagctgggcc

SEQ ID NO: 753079 - DNA, 75 bp, synthetic construct
  source 1..75: mol_type = other DNA
cggaagaacatcctctgcatggcggtacgggtattgctcatactcgctgggcgacccacggtgaaccttcagaag

SEQ ID NO: 753080 - DNA, 75 bp, synthetic construct
  source 1..75: mol_type = other DNA
tggcttaccacgtcgcgctgatcaaaggcaccgacgttgaccagccgcgtaacctggcaaaatcggttacggttg

SEQ ID NO: 753081 - DNA, 75 bp, synthetic construct
  source 1..75: mol_type = other DNA
gagccctgccatgaatgggatatggcaggtattcagccttctcccgcacaggaacagaacattcgcgaaaaaaca

SEQ ID NO: 753082 - DNA, 75 bp, synthetic construct
  source 1..75: mol_type = other DNA
cgcttccgtctgagtggtcacggtcacagcatgattatcactgacctgcccggggtgggcgagagccgtgacagg

SEQ ID NO: 753083 - DNA, 75 bp, synthetic construct
  source 1..75: mol_type = other DNA
atttctggcgacacatcctgcaccggggacatcagcgggtactgtttgtggtgacgcaggccgataaaacggagc

SEQ ID NO: 753084 - DNA, 75 bp, synthetic construct
  source 1..75: mol_type = other DNA
tctgataccattctgtttgctaaaaatgactacaaactgctcccggaaagtcagcaacagatccagaccatggcc

SEQ ID NO: 753085 - DNA, 75 bp, synthetic construct
  source 1..75: mol_type = other DNA
aaaaataccccatcgccagcaaccagacatctcagggtcgggccgagaaccgccgcgtcgctgtggtgataagtg

SEQ ID NO: 753086 - DNA, 75 bp, synthetic construct
  source 1..75: mol_type = other DNA
atgtttaaacgtttaatgatggtcgctttgctggtgattgcaccgctgagtgcggcaaccgcggcagaccagacc

SEQ ID NO: 753087 - DNA, 75 bp, synthetic construct
  source 1..75: mol_type = other DNA
ggtcagcgcaggctatggcgatcgcattattctcgactcgattaaactgaatctggtccccggctcgcgcattgg

SEQ ID NO: 753088 - DNA, 75 bp, synthetic construct
  source 1..75: mol_type = other DNA
cgctcccgtgccgccagcctgctgcacggcctcggtttcagcaatgaacaactggagcgcccggtaagtgatttc

SEQ ID NO: 753089 - DNA, 75 bp, synthetic construct
  source 1..75: mol_type = other DNA
tggcattatggggaaaagcggggccggtaaatcctcactctgtaatgcactgtttcagggggaggtcaccccggt

SEQ ID NO: 753090 - DNA, 75 bp, synthetic construct
  source 1..75: mol_type = other DNA
tctgttgcacgcacggttctgcgcgccgtccgtgactcggtggtctctgttgcccgcgcggtatggaactggatt

SEQ ID NO: 753091 - DNA, 75 bp, synthetic construct
  source 1..75: mol_type = other DNA
ttcgtcgcggcgtgcgcgtcctgctggataatgccaccgccaccatcaaccccggccagaaagtgggtcttgtgg

SEQ ID NO: 753092 - DNA, 75 bp, synthetic construct
  source 1..75: mol_type = other DNA
tggtttccagggcgataaagtgacggaagaaacgcgccgcttctccggtggggaaaaagcccgcctggtgctggc

SEQ ID NO: 753093 - DNA, 75 bp, synthetic construct
  source 1..75: mol_type = other DNA
tttccagaagtgggatgtgttctgtaatgccgtcaacaacatgatgaataaccctctattacctgcccacggtaa

SEQ ID NO: 753094 - DNA, 75 bp, synthetic construct
  source 1..75: mol_type = other DNA
atgagtgagatagtaatacgccacgcagaaacacgggattacgaggccattcggcagattcacgcccagccagag

SEQ ID NO: 753095 - DNA, 75 bp, synthetic construct
  source 1..75: mol_type = other DNA
ccggcaattaaggtctataaaaaatacggttttgagattgaaggaactggtaaaaagtacgcgttgcgaaatggt

SEQ ID NO: 753096 - DNA, 75 bp, synthetic construct
  source 1..75: mol_type = other DNA
gggccatctcaccattgacgtgcaacagcgcccacgccgcagtcatgttgccgattttggtatctgtgtcgactc

SEQ ID NO: 753097 - DNA, 75 bp, synthetic construct
  source 1..75: mol_type = other DNA
tcacgccggcacccgggaagtacggcgcttccgtctgagtggccatggtcacagcatggttatcactgacctgcc

SEQ ID NO: 753098 - DNA, 75 bp, synthetic construct
  source 1..75: mol_type = other DNA
ccgtgaacagtttaccggtgcggtggacctgtcaacgccacgatttttaaccgttatttgccattttcatgcccg

SEQ ID NO: 753099 - DNA, 75 bp, synthetic construct
  source 1..75: mol_type = other DNA
atgcactgttcagggggaggtcacccggtcagtgatgttcacgccggcacccgggaagtgcagcgcttccgtctg

SEQ ID NO: 753100 - DNA, 75 bp, synthetic construct
  source 1..75: mol_type = other DNA
aacggagccctgccatgaatgggatatggccggcattcagccctctcccgcacaggcacagaacattcgcgaaaa

SEQ ID NO: 753101 - DNA, 75 bp, synthetic construct
  source 1..75: mol_type = other DNA
gtggaccctgtattctctatcggtatctcatcattatgggatgagctgcgacatatgccagcaggcggcatctgg

SEQ ID NO: 753102 - DNA, 75 bp, synthetic construct
  source 1..75: mol_type = other DNA
ccgcgacggtcgtgttctctttgcagcaaaatgggcaaattgaaccgctggcccgcagtattcatacattgcgtc

SEQ ID NO: 753103 - DNA, 75 bp, synthetic construct
  source 1..75: mol_type = other DNA
cgcagtcatgttgccgattttggtatctgtgtcgactcccgttggaagaaccgcggcgtcgccagcgccctgatg

SEQ ID NO: 753104 - DNA, 75 bp, synthetic construct
  source 1..75: mol_type = other DNA
cacagcggagagcgtctgtgttgcctctgttgtccgtacggccctgcgcgctgttcgtgacacggtggtctctgt

SEQ ID NO: 753105 - DNA, 75 bp, synthetic construct
  source 1..75: mol_type = other DNA
agccgggacagggatgcagagtatgaagccctgtaccgtgacattctgcctgaacttgacctggtactgtggctg

SEQ ID NO: 753106 - DNA, 75 bp, synthetic construct
  source 1..75: mol_type = other DNA
ttaaagccgatgaccgtgccctgtctgtggatgagtatttctggcgacacatactgcaccggggacatcagcagg

SEQ ID NO: 753107 - DNA, 75 bp, synthetic construct
  source 1..75: mol_type = other DNA
tgtggctggaggatgcccggcgcagcggcattattccgcgtgatgccgatcagtacaatgccattcaggaacgcc

SEQ ID NO: 753108 - DNA, 75 bp, synthetic construct
  source 1..75: mol_type = other DNA
ggcgggaaactggtgtttccgacgctggattatccattggttcgcgatgtcatcaaaacggtcgcacctgatgtt

SEQ ID NO: 753109 - DNA, 75 bp, synthetic construct
  source 1..75: mol_type = other DNA
ttggtcttgctggcggcgtcagtctcgggccggaacatccgatcatgaccgtcaatatcgcccttgcggttgcga

SEQ ID NO: 753110 - DNA, 75 bp, synthetic construct
  source 1..75: mol_type = other DNA
aacggagccctgccatgaatgggatatggccggtattcagccttctcctgcacaggcacagaatattcgcgaaaa

SEQ ID NO: 753111 - DNA, 75 bp, synthetic construct
  source 1..75: mol_type = other DNA
agtgcgctcatgacagcgcttcccgaccatgccgccagtcccctgatgacccgcctgcaggacgagctgcgcacg

SEQ ID NO: 753112 - DNA, 75 bp, synthetic construct
  source 1..75: mol_type = other DNA
aaaaaggcgttgcacaacatctaaaacccggtacggcagtaatggtttcttccactatcgccagtgctgatgcgc

SEQ ID NO: 753113 - DNA, 75 bp, synthetic construct
  source 1..75: mol_type = other DNA
taaccggatggaatggactattttagcctcagccggaactatcggtgcgctatttggcacacctgttgcggcggc

SEQ ID NO: 753114 - DNA, 75 bp, synthetic construct
  source 1..75: mol_type = other DNA
gaacatccgatcatgaccgtcaatatcgcccttgccgtcgccattggcgctcgtctgttaccgcgcgtcaaccga

SEQ ID NO: 753115 - DNA, 75 bp, synthetic construct
  source 1..75: mol_type = other DNA
ttgccgctctcgtggttgctgccgccagcggctttcgcggtgggcgaatcttcccggcagtgtttgtcggcgtgg

SEQ ID NO: 753116 - DNA, 75 bp, synthetic construct
  source 1..75: mol_type = other DNA
gtgcttaccacggttgcacgcgatgatgcatcaaatgaaaaatccggtgctcgtgctgggtattggcggatttat

SEQ ID NO: 753117 - DNA, 75 bp, synthetic construct
  source 1..75: mol_type = other DNA
gcctcagccggaactatcggtgcgctatttggcacacctgttgcggcggcgttgatattttcgcaaaccttaaat

SEQ ID NO: 753118 - DNA, 75 bp, synthetic construct
  source 1..75: mol_type = other DNA
gatgcagataacagacattctcagcggcgcaattgtcgcggccatcgccattgcggcggggatgattgctgtctg

SEQ ID NO: 753119 - DNA, 75 bp, synthetic construct
  source 1..75: mol_type = other DNA
cctggagccacagtttctgggcgacaaacacatcataccgaatgagcgaaccatcaataatctggtgatcgtcga

SEQ ID NO: 753120 - DNA, 75 bp, synthetic construct
  source 1..75: mol_type = other DNA
tgccctgtctgtggatgagtatttctggcgacacatcctgcaccggggacatcagcaggtgctgtttgtggtgac

SEQ ID NO: 753121 - DNA, 75 bp, synthetic construct
  source 1..75: mol_type = other DNA
gcgctcaggcccgtgaacagtttaccggtgcggtggaccggatatttgacacggcggagagcgtctgtgttgcct

SEQ ID NO: 753122 - DNA, 75 bp, synthetic construct
  source 1..75: mol_type = other DNA
ttgtccgtacggccctgcgcgctgttcgtgacaccgtggtctctgttgcccgcgcggtatggaactggattttct

SEQ ID NO: 753123 - DNA, 75 bp, synthetic construct
  source 1..75: mol_type = other DNA
caccctcagcagtaatctgagctataacttcggcatctataacaaccagttgcgtaacggcgggagcaacacatc

SEQ ID NO: 753124 - DNA, 75 bp, synthetic construct
  source 1..75: mol_type = other DNA
attttgctggtcaccgatttgccggtggaatgctcgacacctggaacttgcagtccttagggccgatgaccgcca

SEQ ID NO: 753125 - DNA, 75 bp, synthetic construct
  source 1..75: mol_type = other DNA
cgtacggttctgcgtgccgtccgtgacacggtgttctctgttgcccgcgctgtatggaactggattttcttctga

SEQ ID NO: 753126 - DNA, 75 bp, synthetic construct
  source 1..75: mol_type = other DNA
gaccgacggtaaccgggcgtattgcaacctcaacgaaggtatcggcaaagtgatgcgtttcggtgcctatggcga

SEQ ID NO: 753127 - DNA, 75 bp, synthetic construct
  source 1..75: mol_type = other DNA
cctctgttgtccgtacggccctgcgcgctgttcgtgacacggtggtctctgttgcccgtgcggtatggaactgga

SEQ ID NO: 753128 - DNA, 75 bp, synthetic construct
  source 1..75: mol_type = other DNA
gggacatcagcaggtgctgtttgtggtgacgcaggccgacaaaacagagccctgccatgaatgggatatggcagg

SEQ ID NO: 753129 - DNA, 75 bp, synthetic construct
  source 1..75: mol_type = other DNA
tgtggctcgtacagttctgcgtgccgtccgtgacaccgtggtctctgttgcccgcgcggtatggaactggatttt

SEQ ID NO: 753130 - DNA, 75 bp, synthetic construct
  source 1..75: mol_type = other DNA
agtcccctgatgacccgcctgcaggacgagctgcgcacggaatctgtccgggatcaggcccgtgaacagtttacc

SEQ ID NO: 753131 - DNA, 75 bp, synthetic construct
  source 1..75: mol_type = other DNA
agcgcctggcgtaacgcgctttgtcggtgcgggtggcatggaagcggccagagcggtatctgaagagatggcgga

SEQ ID NO: 753132 - DNA, 75 bp, synthetic construct
  source 1..75: mol_type = other DNA
gggagaacgtctgaagggctggttgccagtgacctgtattaatccggaaagaaggggacaggcctcacgtattgc

SEQ ID NO: 753133 - DNA, 75 bp, synthetic construct
  source 1..75: mol_type = other DNA
aggatgaagttctcaggttgaaacagattagcgggctgacggagctgtttcaggaagaggatttcagcccggcat

SEQ ID NO: 753134 - DNA, 75 bp, synthetic construct
  source 1..75: mol_type = other DNA
gatactctcgtcgttactgctaaccgttttgaacagccgcgcagcactgtgcttgcaccaaccaccgttgtgacg

SEQ ID NO: 753135 - DNA, 75 bp, synthetic construct
  source 1..75: mol_type = other DNA
aagcgatgatgaaactgggcgcaatggcaaccatcaaccaggttatcgatcaggaaaccgcacagctggttgctg

SEQ ID NO: 753136 - DNA, 75 bp, synthetic construct
  source 1..75: mol_type = other DNA
gaaacgcgatccgcaagaggctgagcgccttgcagcggaagagcaagcgcagcgtgaagcggaagagcaagcccg

SEQ ID NO: 753137 - DNA, 75 bp, synthetic construct
  source 1..75: mol_type = other DNA
aactacaacgacgtccgcactggcgatgtgatcgaagtattcgaaatcatcgagattcagcgtacgattgcctaa

SEQ ID NO: 753138 - DNA, 75 bp, synthetic construct
  source 1..75: mol_type = other DNA
gaaaaagagactatacaggctctgaatcatctgcgcagggtacttcatgaagtcagcccttttgcacaggagcct

SEQ ID NO: 753139 - DNA, 75 bp, synthetic construct
  source 1..75: mol_type = other DNA
atggctattccaaaattacaggcttacgcactgccggagtctcacgatattccgcaaaataaagtcgactgggca

SEQ ID NO: 753140 - DNA, 75 bp, synthetic construct
  source 1..75: mol_type = other DNA
tagacgctgctggcgtattcctggtcggcgaacttgaacgcctcgaccagacgctcaacctgccgctggttagct

SEQ ID NO: 753141 - DNA, 75 bp, synthetic construct
  source 1..75: mol_type = other DNA
cttcaatgtctgaaattgtcagggacctctcacggctgggctggacagatgatcgaattggaacagaggctgggc

SEQ ID NO: 753142 - DNA, 75 bp, synthetic construct
  source 1..75: mol_type = other DNA
cttcaatgtctgaaattgtcagggacctttcacggctgggctggacagatgaccgaattggaacagaggctgggc

SEQ ID NO: 753143 - DNA, 75 bp, synthetic construct
  source 1..75: mol_type = other DNA
cagatgaggtggtggccaacgattataaccccaatgtcatggcgccgggtgagaagaaactgctgaagcagtcac

SEQ ID NO: 753144 - DNA, 75 bp, synthetic construct
  source 1..75: mol_type = other DNA
cacccttaacattcctggtaccggtggaaaaagcaaatcggtacaaatcgaagtccgcaagaaacgcccctttgt

SEQ ID NO: 753145 - DNA, 75 bp, synthetic construct
  source 1..75: mol_type = other DNA
tgctgggcagggaagcaggtacgggaaaacgtttgaagggctggctgccggtggtctgtattaatccggagagaa

SEQ ID NO: 753146 - DNA, 75 bp, synthetic construct
  source 1..75: mol_type = other DNA
ggcatggaccaggatgaagtgctgaggctgaaacagattagcgggctgacagagctgtttcaggaagagaatttc

SEQ ID NO: 753147 - DNA, 75 bp, synthetic construct
  source 1..75: mol_type = other DNA
cattatctggtcgtggatggttttcatcgtcagttactgggcagggaagcaggtacgggagaacgtctgaagggc

SEQ ID NO: 753148 - DNA, 75 bp, synthetic construct
  source 1..75: mol_type = other DNA
attggtacagagctgggtatggatcaggatgaggtcctgagactgaagcagattagcggtctgacagaattattc

SEQ ID NO: 753149 - DNA, 75 bp, synthetic construct
  source 1..75: mol_type = other DNA
attggcactgagctgggtatggaccgggatgaagtgctgaggttgaaacaaattagcggattgacagagttgtat

SEQ ID NO: 753150 - DNA, 75 bp, synthetic construct
  source 1..75: mol_type = other DNA
tacttggcaacatgattcgtcagtatttcagtcaagtgcgaactgattccgaaaccatacaggctctgaatcatc

SEQ ID NO: 753151 - DNA, 75 bp, synthetic construct
  source 1..75: mol_type = other DNA
ggcgatcgcagcaagcagcggatgaacgaaacgctttttgcaccgttgtttcgtctgctaccgggtaactggaaa

SEQ ID NO: 753152 - DNA, 75 bp, synthetic construct
  source 1..75: mol_type = other DNA
caagggcgatatcgttctgtgtggcttcgaatacggtcgtgttcgtgcgatgcgtaacgaactgggccaggaagt

SEQ ID NO: 753153 - DNA, 75 bp, synthetic construct
  source 1..75: mol_type = other DNA
ctactccgtcatctataacctgattgacgaagtgaaagcggcgatgagcggtatgctgtctccggaactgaaaca

SEQ ID NO: 753154 - DNA, 75 bp, synthetic construct
  source 1..75: mol_type = other DNA
cggatgaggtggtggctaacgattataaccccaatgtcatggcgccgggtgagaagaaactgctgaaacattcac

SEQ ID NO: 753155 - DNA, 75 bp, synthetic construct
  source 1..75: mol_type = other DNA
cattgcgcgtccgtcgatgttgctgggcgatcgtagcaaacagcggatgaacgaaacgctttttgcgccgctgtt

SEQ ID NO: 753156 - DNA, 75 bp, synthetic construct
  source 1..75: mol_type = other DNA
gcagaggcgatgcggcctgagcatgaaggcgtgacgattttaagctcttcagaattacgcaaaagagctgaataa

SEQ ID NO: 753157 - DNA, 75 bp, synthetic construct
  source 1..75: mol_type = other DNA
ctggtcgtggatggttttcatcgtcaattactgggcagggaagcaggtacgggaaaacgtctgaagggctggttg

SEQ ID NO: 753158 - DNA, 75 bp, synthetic construct
  source 1..75: mol_type = other DNA
gaaaccgcttcgctcatcatcaccggtaacggtgacgtagtgcagccagaaaacgatcttattgctatcggctcc

SEQ ID NO: 753159 - DNA, 75 bp, synthetic construct
  source 1..75: mol_type = other DNA
attattagaaacgacgacattacatatcaactcagaaatacagatacaggcgaagaaataaacgctacacttcag

SEQ ID NO: 753160 - DNA, 75 bp, synthetic construct
  source 1..75: mol_type = other DNA
cgttatgaatgtcctactaaaagggatgacaatattcctgccacgtgagttcaatactatatatacaataaaaag

SEQ ID NO: 753161 - DNA, 75 bp, synthetic construct
  source 1..75: mol_type = other DNA
agcggatattccccccgtcactctgctcgaaacccaaatctacgatcttgaagtctacaagttaggccatacgcg

SEQ ID NO: 753162 - DNA, 75 bp, synthetic construct
  source 1..75: mol_type = other DNA
ttactttatcttgatgcggatgttgtttgtaagggtgatattagccaattacttcatctggatttaaacggagcg

SEQ ID NO: 753163 - DNA, 75 bp, synthetic construct
  source 1..75: mol_type = other DNA
ataaaatagctttagaaagatcccctggaaagatgactcaccacgagatgcaaaatcaattattgaattcaaaaa

SEQ ID NO: 753164 - DNA, 75 bp, synthetic construct
  source 1..75: mol_type = other DNA
gccaacaatcaggcctgatgagttgccggaatttatgcaaaaactggcaacggctcgcgcagaacttcaaacgcg

SEQ ID NO: 753165 - DNA, 75 bp, synthetic construct
  source 1..75: mol_type = other DNA
cgctggagaaatatgtattcccgttcatcggtgacacgccagtagacaccctcaccgcccgcaggttcgtggaga

SEQ ID NO: 753166 - DNA, 75 bp, synthetic construct
  source 1..75: mol_type = other DNA
gcgacgaaaacgcgaagcagaggaacggagacagggcaacacgttcgaaaatgtagcagcggcatggtaccaggt

SEQ ID NO: 753167 - DNA, 75 bp, synthetic construct
  source 1..75: mol_type = other DNA
gcaacttcatcgaagcattaaaaccattagccgcccaggggaaattagataccgtcagaaggacagcgcagcgaa

SEQ ID NO: 753168 - DNA, 75 bp, synthetic construct
  source 1..75: mol_type = other DNA
ctattacggagatcaaaaacgcacgaccaggggaaaaggaatataccctgcaggatggcggaggattatttcttc

SEQ ID NO: 753169 - DNA, 75 bp, synthetic construct
  source 1..75: mol_type = other DNA
atggctattccaaaattacaggcttacgcactgccggagtctcacgatattccgcacaataaagtcgactgggcc

SEQ ID NO: 753170 - DNA, 75 bp, synthetic construct
  source 1..75: mol_type = other DNA
ccaaaggtggagaaggcaaatccacctttgctgcttaccttgccggttttcttgccgatgcatgcctgaaaaccc

SEQ ID NO: 753171 - DNA, 75 bp, synthetic construct
  source 1..75: mol_type = other DNA
tgttggagaaaacattaaagatgatttattttctttccctggcaataggccaccagaagtagaagtatttcaaca

SEQ ID NO: 753172 - DNA, 75 bp, synthetic construct
  source 1..75: mol_type = other DNA
ctggagcatctggccgggtcgtttgaactggggctgatgctgcccggtgagcgcatcccctcagccctgcggacc

SEQ ID NO: 753173 - DNA, 75 bp, synthetic construct
  source 1..75: mol_type = other DNA
aaaaacataaataatgtcaaccagtacattaatgtgaaatcagccacgattaaagggctggaatggacgggaaat

SEQ ID NO: 753174 - DNA, 75 bp, synthetic construct
  source 1..75: mol_type = other DNA
gcgacctactacggcaagctgggtgcagtcgagccagtgtacaaagaaaccatttcgtacgttgatggcatttaa

SEQ ID NO: 753175 - DNA, 75 bp, synthetic construct
  source 1..75: mol_type = other DNA
cggggagctggagcgactcgaccagacgctgaacctgcctctggtggggtacacctggacccgagatattcaact

SEQ ID NO: 753176 - DNA, 75 bp, synthetic construct
  source 1..75: mol_type = other DNA
tgtgtgctgtgggtgaaagcagatgaggtggtggctaacgattataaccccaatgtcatggcgccgggtgagaag

SEQ ID NO: 753177 - DNA, 75 bp, synthetic construct
  source 1..75: mol_type = other DNA
gtcggtcacggtgatgttggagctggtatcgactggcaaaaacaatccactactcctggaactggatatttgcca

SEQ ID NO: 753178 - DNA, 75 bp, synthetic construct
  source 1..75: mol_type = other DNA
gaaattgaaagaatacagcatcaagtttcgtccaaataagccagcctcacctcatcttaatggcaaagttgaacg

SEQ ID NO: 753179 - DNA, 75 bp, synthetic construct
  source 1..75: mol_type = other DNA
ccctaccgtgaacttgggatacccctgcctaaagtacgcacgctggttaactgtatggactataccgcgctggcc

SEQ ID NO: 753180 - DNA, 75 bp, synthetic construct
  source 1..75: mol_type = other DNA
cgcttgggcacaggataccagcccggatactctcgtcgttactgctaaccgttttcagcagccagtaaatactgt

SEQ ID NO: 753181 - DNA, 75 bp, synthetic construct
  source 1..75: mol_type = other DNA
cagaagaatctaagcaatgggaggcaggattagaaggcttgacaggtcctgttgactggcgattgtcgacctatc

SEQ ID NO: 753182 - DNA, 75 bp, synthetic construct
  source 1..75: mol_type = other DNA
aattggtggtgttgtcaacatcatcactatgacgaataaagagcgttcgcaaattaactccagtatcggttcgaa

SEQ ID NO: 753183 - DNA, 75 bp, synthetic construct
  source 1..75: mol_type = other DNA
cttaaaaaggctggagtacgctatcgcaatccgtaccagacacgccacacgttcgccactcggcacattagccaa

SEQ ID NO: 753184 - DNA, 75 bp, synthetic construct
  source 1..75: mol_type = other DNA
tctcgaactggcagatacggtgagtgagttacgcccggtcaaacatgcgtttgatgcgggtgtaaaggcgcagat

SEQ ID NO: 753185 - DNA, 75 bp, synthetic construct
  source 1..75: mol_type = other DNA
ttcaggtgatggcaacgggctttacctgggatacacaaaatcgcgaatctgataccgcggcctgccgtgaagtct

SEQ ID NO: 753186 - DNA, 75 bp, synthetic construct
  source 1..75: mol_type = other DNA
gggtaaccagtcactgctgacctatctggccgtgaacactatcgctttccaccagaacggcgttccgctggaaat

SEQ ID NO: 753187 - DNA, 75 bp, synthetic construct
  source 1..75: mol_type = other DNA
cctggtattaacgaaattaatattggcaaagctttagcccgcaagttaatagcggagttgattacccccagagaa

SEQ ID NO: 753188 - DNA, 75 bp, synthetic construct
  source 1..75: mol_type = other DNA
tcttgaaggtttacgtcgtcttgaataccgcggatatgactctgccggtctggccgttgttgatgcagaaggtca

SEQ ID NO: 753189 - DNA, 75 bp, synthetic construct
  source 1..75: mol_type = other DNA
catcgtacagcttgcccataaagcagcaaagactaaattaactgaagtttttggtgcggtcggccggaatgaaca

SEQ ID NO: 753190 - DNA, 75 bp, synthetic construct
  source 1..75: mol_type = other DNA
tggcacaggaagtccgcccccaactcccagatgaagaacataaacgcatctttgactacaaccatgccattgcac

SEQ ID NO: 753191 - DNA, 75 bp, synthetic construct
  source 1..75: mol_type = other DNA
catcaggcgtttaattctcattcgcagagacattcatagccagttacacagcgtgggaatcgatattaatgatgg

SEQ ID NO: 753192 - DNA, 75 bp, synthetic construct
  source 1..75: mol_type = other DNA
tccataataagatcgaaaggggaacattcatttatgcggaatattttccccgttctgctcgtttgaaaatttttg

SEQ ID NO: 753193 - DNA, 75 bp, synthetic construct
  source 1..75: mol_type = other DNA
tgccgtagtgcgttagcctcacttcacatttgccctgcaagtgaattaacaccagcaaccctgaaagcgtggatt

SEQ ID NO: 753194 - DNA, 75 bp, synthetic construct
  source 1..75: mol_type = other DNA
tatctctcccaagaggagtaaccatccgccagcataaaactggcgacactctggttatcactttcacatacaaag

SEQ ID NO: 753195 - DNA, 75 bp, synthetic construct
  source 1..75: mol_type = other DNA
acgcatgccattatgatatttatgagggcgcgttttttgaacgtgtagcagctgtgcagacacaatggtttaaaa

SEQ ID NO: 753196 - DNA, 75 bp, synthetic construct
  source 1..75: mol_type = other DNA
tgatcgcctacaccaacgacaagaaatacgtgcgctatccgctggtgccgttgcagagcgttcctatccagtatc

SEQ ID NO: 753197 - DNA, 75 bp, synthetic construct
  source 1..75: mol_type = other DNA
atggtggtgatgattcacaccactacctggtatgtgaccaatgctcatagtgttagccccgtcacctgggatatc

SEQ ID NO: 753198 - DNA, 75 bp, synthetic construct
  source 1..75: mol_type = other DNA
tggcctgctgccgcagatattcccgtggcgagcgataacccagtgcactatgcggatgccattcgttataatgct

SEQ ID NO: 753199 - DNA, 75 bp, synthetic construct
  source 1..75: mol_type = other DNA
gtggggctataacgacgacgttcaggattacacctacgatcctgaaaaagcgaaagccttgctgaaagaagcggg

SEQ ID NO: 753200 - DNA, 75 bp, synthetic construct
  source 1..75: mol_type = other DNA
tataaaaattcctttccttacggttatggaaacgttgcaatataaaccggcagagagtgcagccagcgtccagtg

SEQ ID NO: 753201 - DNA, 75 bp, synthetic construct
  source 1..75: mol_type = other DNA
cagagaagaagaaaaacaccgggaaagagatgtttgtgggggttacacgggtactaagtgatgatgaatcgaagg

SEQ ID NO: 753202 - DNA, 75 bp, synthetic construct
  source 1..75: mol_type = other DNA
atacctggtatctttactgtgggccgatagtttttatttgcgcaattgcgttactgactctggtaaaaaatacac

SEQ ID NO: 753203 - DNA, 75 bp, synthetic construct
  source 1..75: mol_type = other DNA
tattcttcgagaaaatcaaagcccggcatcccgaaatggatataaaaatacctttccttacggtcatggaaacgt

SEQ ID NO: 753204 - DNA, 75 bp, synthetic construct
  source 1..75: mol_type = other DNA
tgcgcaggatcaacgcgtacaatgtattgtcagccagctagcttttgctgacggtgatgttctggttaccggaga

SEQ ID NO: 753205 - DNA, 75 bp, synthetic construct
  source 1..75: mol_type = other DNA
atcaatggcgatactttttactacatcctgtatggcatgttggggcgcgccattggcatgatggacacacagcat

SEQ ID NO: 753206 - DNA, 75 bp, synthetic construct
  source 1..75: mol_type = other DNA
tattgagcttaaaaactggccaatactggatattatttggatcttttgcgcgacgctggcagcaagcttgttgct

SEQ ID NO: 753207 - DNA, 75 bp, synthetic construct
  source 1..75: mol_type = other DNA
attggcattatcgctaacccaaacacagtgccgcagaaaattgacggttttgaatggctgccaattaacttatat

SEQ ID NO: 753208 - DNA, 75 bp, synthetic construct
  source 1..75: mol_type = other DNA
cagcgaagaggaaaagctgtttgttaagcgcttgaagttaatcaaagcggatatacacgcccagctgcgggcctg

SEQ ID NO: 753209 - DNA, 75 bp, synthetic construct
  source 1..75: mol_type = other DNA
gcgaaagcggaaggcaaatctgaatttgctgaaaacgacgcttacgttcacgcgactccgctgatccgccgtctg

SEQ ID NO: 753210 - DNA, 75 bp, synthetic construct
  source 1..75: mol_type = other DNA
cggataacatgccgttactgcatcgggcgctggtgctggcgtgggcgcaggagatgaatctgccgtgcaaaacgt

SEQ ID NO: 753211 - DNA, 75 bp, synthetic construct
  source 1..75: mol_type = other DNA
gttttttattgctggaatgtgaggaattgtgcacagagcggcgacggggtgaatgccatgaatcagacagcattt

SEQ ID NO: 753212 - DNA, 75 bp, synthetic construct
  source 1..75: mol_type = other DNA
gtgaaagtgggcgacaaagttgccgctgaacagtcactgatcaccgtagaaggcgacaaagcttctatggaagtt

SEQ ID NO: 753213 - DNA, 75 bp, synthetic construct
  source 1..75: mol_type = other DNA
agtgtctaccggctcactgattatggtcttcgaagttgcgggggcagccagcgcggcagctccggctccggcggc

SEQ ID NO: 753214 - DNA, 75 bp, synthetic construct
  source 1..75: mol_type = other DNA
ggaagcagcagcgccggctccggcagcaaaagctgaagccccggcagcagcaccggctgcgaaagcggaaggcaa

SEQ ID NO: 753215 - DNA, 75 bp, synthetic construct
  source 1..75: mol_type = other DNA
tatcctggggaacggctggcgcgtgaacaaacttgatgattgtccgtctcgtataaaactgacgtcaccgcagtt

SEQ ID NO: 753216 - DNA, 75 bp, synthetic construct
  source 1..75: mol_type = other DNA
atccccaggtctatggcgcccgcgtcaatctggagcacattttaggctggtcgccgacaagcgatttccgcgcgt

SEQ ID NO: 753217 - DNA, 75 bp, synthetic construct
  source 1..75: mol_type = other DNA
atcaccgaaatggccgaacagtacgatccccaggtctatggcgcccgcgtcaatctggagcacattttaggctgg

SEQ ID NO: 753218 - DNA, 75 bp, synthetic construct
  source 1..75: mol_type = other DNA
gtatccggagtcgtttgatgtctgggcaaaggtggctcagccaggcgctgccgcttatcagggctcagtgcagac

SEQ ID NO: 753219 - DNA, 75 bp, synthetic construct
  source 1..75: mol_type = other DNA
aactggctggcgaaatatatggcgacaatgcctccggttgtgttgcctgcgcctgcgggcgcatgggctaaacat

SEQ ID NO: 753220 - DNA, 75 bp, synthetic construct
  source 1..75: mol_type = other DNA
atgaaaaaacagaaaaatttctttgaacggtatcaacctgtgtttgaaatcgtttgtcgaatcctggggaacggc

SEQ ID NO: 753221 - DNA, 75 bp, synthetic construct
  source 1..75: mol_type = other DNA
ggcggtggtatccctggcatgctgccgtggccgaaggtggacttcagcaagtttggcgaaatcgaagaagtggaa

SEQ ID NO: 753222 - DNA, 75 bp, synthetic construct
  source 1..75: mol_type = other DNA
cgcattgtgcctgatttcgctgccgctggtgccagcatcattacctttcatccagaagcctccgagcatgttgac

SEQ ID NO: 753223 - DNA, 75 bp, synthetic construct
  source 1..75: mol_type = other DNA
ctggcagctggcgctgatgtcgtgcattttgacgtcatggataaccactatgttcccaatctgacgattgggcca

SEQ ID NO: 753224 - DNA, 75 bp, synthetic construct
  source 1..75: mol_type = other DNA
gtagacgttaaccagatgtataacattacagaatgggcgtatagaaacggcgttgactctatgatgggtgatcaa

SEQ ID NO: 753225 - DNA, 75 bp, synthetic construct
  source 1..75: mol_type = other DNA
gaatggctaaacaaatcgcgatccgttgctcctacatccgccacgaatgtccgtcgtattgcattgcacaaaaac

SEQ ID NO: 753226 - DNA, 75 bp, synthetic construct
  source 1..75: mol_type = other DNA
catattgcattgcgcagaaacgcgtggcactgagggagttttccgaattagttttggggaccctttccctgcttc

SEQ ID NO: 753227 - DNA, 75 bp, synthetic construct
  source 1..75: mol_type = other DNA
atgtgatcctgctgatgtccgtcaaccctggtttcggcggtcagtctttcattcctcaaacactggataaactgc

SEQ ID NO: 753228 - DNA, 75 bp, synthetic construct
  source 1..75: mol_type = other DNA
gcgggtatcgttaaagagatcaaagtctctgtgggcgataaaacccagaccggcgcactgattatgattttcgat

SEQ ID NO: 753229 - DNA, 75 bp, synthetic construct
  source 1..75: mol_type = other DNA
aagacgttaacgttccggatatcggcagcgacgaagttgaagtgaccgaaatcctggtgaaagttggcgataaag

SEQ ID NO: 753230 - DNA, 75 bp, synthetic construct
  source 1..75: mol_type = other DNA
gtgacggtaagctgactgcgggcgaaatgcagggtggttgcttcaccatctccagtatcggcggcctgggtacta

SEQ ID NO: 753231 - DNA, 75 bp, synthetic construct
  source 1..75: mol_type = other DNA
tatttggaggcgctacggctgctgctggcgtgatggctgttagtaaagcgcaggagtttgttagtagcagtttcg

SEQ ID NO: 753232 - DNA, 75 bp, synthetic construct
  source 1..75: mol_type = other DNA
gaaacacagcaagactctattgttaaattcagagaactaaacagacagctttcgcagctttctgatgcaagacaa

SEQ ID NO: 753233 - DNA, 75 bp, synthetic construct
  source 1..75: mol_type = other DNA
aactagccattcgtagtcgcataaaatttttctttcgtcctgctcacctgaagttaacaccaaatgatgcttatc

SEQ ID NO: 753234 - DNA, 75 bp, synthetic construct
  source 1..75: mol_type = other DNA
ggggattcacggagataatatctgcctgaaattatttggaatgcaggtatatgtggctgatttgtatcagctaat

SEQ ID NO: 753235 - DNA, 75 bp, synthetic construct
  source 1..75: mol_type = other DNA
tttttggtgatggtgaactgattgtgactgaagaagtttggctacttttgcaatgtgacaagttatggcagagct

SEQ ID NO: 753236 - DNA, 75 bp, synthetic construct
  source 1..75: mol_type = other DNA
caggctggcatgaccttggctcgtgtagttgggatttttgtttttccagtcggttcggtacttggttatttctga

SEQ ID NO: 753237 - DNA, 75 bp, synthetic construct
  source 1..75: mol_type = other DNA
ggggatgaatctggagcgcatcgtggcgctgaagcccgatctggtgattgcctggcgcgggggcaatgccgagcg

SEQ ID NO: 753238 - DNA, 75 bp, synthetic construct
  source 1..75: mol_type = other DNA
tcacactcacccggcgttatggcgtcagtctcattcatctggacgccagcgcagaatgtctgccggggttcccca

SEQ ID NO: 753239 - DNA, 75 bp, synthetic construct
  source 1..75: mol_type = other DNA
actctggctaacggttcacgtagtgcaaccgaacgcgaccacatggtcagcagccggacacatcagcgcctggca

SEQ ID NO: 753240 - DNA, 75 bp, synthetic construct
  source 1..75: mol_type = other DNA
tcagtgtgacgctccccgccgcgtcccacgccatcccgcatctgaccaccagcgaaatggatttttgcatcgagc

SEQ ID NO: 753241 - DNA, 75 bp, synthetic construct
  source 1..75: mol_type = other DNA
gtctggttttcacactaagcccacgttatggcgtcagtctcattcatctggatgccagcgctgaatgcctgccgg

SEQ ID NO: 753242 - DNA, 75 bp, synthetic construct
  source 1..75: mol_type = other DNA
gtctggttttcacactaacccgacgttatggcgtcagtctcattcatctggatgccagcgctgaatgcctgccgg

SEQ ID NO: 753243 - DNA, 75 bp, synthetic construct
  source 1..75: mol_type = other DNA
gtctggttatcacactaaccctacgttatggcgtcagtctcattcatctggatgccagcgctgaatgcctgccgg

SEQ ID NO: 753244 - DNA, 75 bp, synthetic construct
  source 1..75: mol_type = other DNA
agattgagcaggtttcaacctggcaggggatgaatctcgaacgcattgtggcccttaaacccgatctggtgattg

SEQ ID NO: 753245 - DNA, 75 bp, synthetic construct
  source 1..75: mol_type = other DNA
atggactggctggctaaatattggtggattctggtgattgtctttttggtaggcgtcctgctgaacgtgattaaa

SEQ ID NO: 753246 - DNA, 75 bp, synthetic construct
  source 1..75: mol_type = other DNA
gtctggttgtcacactaatccaacgttatggcgtcagtctcattcatctggatgccagcgctgaatgcctgccgg

SEQ ID NO: 753247 - DNA, 75 bp, synthetic construct
  source 1..75: mol_type = other DNA
gatacatcaggtactggtgcaaccgttgcccctacgacagccctatacaaaaatagtgcagggcaattgactgca

SEQ ID NO: 753248 - DNA, 75 bp, synthetic construct
  source 1..75: mol_type = other DNA
tgacgtcgatggtgttaatctcactgaactgattaacaaagtccctgaaaacggttattcactccgggtggtaga

SEQ ID NO: 753249 - DNA, 75 bp, synthetic construct
  source 1..75: mol_type = other DNA
tgacgtcgatggtgttaatctcactgaactgattaacaaagtcactgaaaacggttattcactccgggtggtcga

SEQ ID NO: 753250 - DNA, 75 bp, synthetic construct
  source 1..75: mol_type = other DNA
tgacgtcgatggtgttaatctcattgaactgattaacaaagtcgctgaaaacggttattcactccgggtggttga

SEQ ID NO: 753251 - DNA, 75 bp, synthetic construct
  source 1..75: mol_type = other DNA
caacccttccctgcatacggtgcagtaccgcacatatcacggaaacggacaacgcctggttgtactcgctgtcac

SEQ ID NO: 753252 - DNA, 75 bp, synthetic construct
  source 1..75: mol_type = other DNA
caaccctttccagcatacgatgcagtaccgcacatatcacggaaacggacaacgcctggttgtactcgctgtcac

SEQ ID NO: 753253 - DNA, 75 bp, synthetic construct
  source 1..75: mol_type = other DNA
tgacgtcgatggtgttaatctcagtgaactgattaacaaagtctctgaaaacggttattcactccgggtggttga

SEQ ID NO: 753254 - DNA, 75 bp, synthetic construct
  source 1..75: mol_type = other DNA
gaacatggggcgaatcgtcgttgacgtcgatggtattgagctcgctgaactgattaacaaagtcgctgaaaacgg

SEQ ID NO: 753255 - DNA, 75 bp, synthetic construct
  source 1..75: mol_type = other DNA
tgtactcgctgtcacatcagacgaatgacaccggcgaatcagaatggattcatttcacaggtagcggatatctgt

SEQ ID NO: 753256 - DNA, 75 bp, synthetic construct
  source 1..75: mol_type = other DNA
gcatgccaccatttgctgccctgaacggcatacgctgcagtaccgcacatattacggcaaaggacaacgcctggc

SEQ ID NO: 753257 - DNA, 75 bp, synthetic construct
  source 1..75: mol_type = other DNA
tgacgtcgatggtgttaatctcaatgaactgattaacaaagtccctgaaaacggttattcactccgggtggtcga

SEQ ID NO: 753258 - DNA, 75 bp, synthetic construct
  source 1..75: mol_type = other DNA
acgtaatattaatagcgataaaccctatatcgaaattatctgcatggattcagaagctgaaattcagaaagcaga

SEQ ID NO: 753259 - DNA, 75 bp, synthetic construct
  source 1..75: mol_type = other DNA
aagccgacagcgttaacgtacaggcactgaatatggggcaaattgtcgttgatattgatggtgttaatatcactg

SEQ ID NO: 753260 - DNA, 75 bp, synthetic construct
  source 1..75: mol_type = other DNA
tctgcggcttaaacgcctggggctgtcaaaaacgttccgtcgtctggttgtcacactcaacctacgttatggcgt

SEQ ID NO: 753261 - DNA, 75 bp, synthetic construct
  source 1..75: mol_type = other DNA
aacgctggaaggcggcgggccattaccaggccgaagcagcgttgttgcagtgcacggcagatacgcttgccgacg

SEQ ID NO: 753262 - DNA, 75 bp, synthetic construct
  source 1..75: mol_type = other DNA
tccgaaccatccgctgtggtacacgctgtgcgaccgctacggcctgtatgtggtggatgaagccaatattgaaac

SEQ ID NO: 753263 - DNA, 75 bp, synthetic construct
  source 1..75: mol_type = other DNA
tacctcaacctgagagcgccgggcaactgtggctaacagtacgcgtggtgcaaccgaacgcgaccgcgtggtcgc

SEQ ID NO: 753264 - DNA, 75 bp, synthetic construct
  source 1..75: mol_type = other DNA
cgacggcacgctgattgaagcagaagcctgcgatgtcggcttccgccaggtgaggattgaaaatggcttgctgtt

SEQ ID NO: 753265 - DNA, 75 bp, synthetic construct
  source 1..75: mol_type = other DNA
ttgtggtgcaacgggcgctgggtcggttacggccaggacagccgtttgccgtctgactttgacctgagcgctttt

SEQ ID NO: 753266 - DNA, 75 bp, synthetic construct
  source 1..75: mol_type = other DNA
tggttggatgagcaggatccgctacaaaatgcctacgtgcaggcgaacggtcaggtaatcaatcaggacccgtat

SEQ ID NO: 753267 - DNA, 75 bp, synthetic construct
  source 1..75: mol_type = other DNA
atccgcgaagtgagcgaccgtgaatttgccgcagtgccgatccgtaccgggcatccacaaaatgaagttcgtctg

SEQ ID NO: 753268 - DNA, 75 bp, synthetic construct
  source 1..75: mol_type = other DNA
accctgaaagacaccttcgatgacaccactattctgggctggatgatccagacggaagataccgaatacagcttg

SEQ ID NO: 753269 - DNA, 75 bp, synthetic construct
  source 1..75: mol_type = other DNA
tttaccagccggaaaacctaccggattgatggacacggtgagatggccatcatcgtggatgttgaagtagcaggt

SEQ ID NO: 753270 - DNA, 75 bp, synthetic construct
  source 1..75: mol_type = other DNA
taaaccgaccacgcaaatcagcgatttccaagttaccactctctttaatgatgatttcagccgcgcggtactgga

SEQ ID NO: 753271 - DNA, 75 bp, synthetic construct
  source 1..75: mol_type = other DNA
gaatccgacaggttgttactcgctcacatttaatattgatgaaagctggctacaggaaggccagacgcgaattat

SEQ ID NO: 753272 - DNA, 75 bp, synthetic construct
  source 1..75: mol_type = other DNA
tgttagctcgcagaaacggtgttgggatctggcgctggttgaggattagtaacagacgagtgaggttggcggggt

SEQ ID NO: 753273 - DNA, 75 bp, synthetic construct
  source 1..75: mol_type = other DNA
agtcaacctgcacaccaccaccgtttacaatccttgccggcatacgctgcagtaccgcacatatcacggaaacag

SEQ ID NO: 753274 - DNA, 75 bp, synthetic construct
  source 1..75: mol_type = other DNA
ccgtgagctgaaacgtctggtgcatccgaatgctgtttatagcattaagctagggaaccgcgcattgccggaacg

SEQ ID NO: 753275 - DNA, 75 bp, synthetic construct
  source 1..75: mol_type = other DNA
atgtttggtgatcgcttcggcctgaacatcattcacgttccggcagaagagcgtttcctggctgcgctggcgggt

SEQ ID NO: 753276 - DNA, 75 bp, synthetic construct
  source 1..75: mol_type = other DNA
tctgcggcttaaacgcctggggctgtcaaaaacgttccgtcgtctggttctcacactgaacctacgttatggcgt

SEQ ID NO: 753277 - DNA, 75 bp, synthetic construct
  source 1..75: mol_type = other DNA
tctgcggcttaaacgcctggggctgtcaaaaacgttccgtcgtctggttttcacactaaaccaacgttatggcgt

SEQ ID NO: 753278 - DNA, 75 bp, synthetic construct
  source 1..75: mol_type = other DNA
tctgcggcttaaacgcctggggctgtcaaaaacgttccgtcgtctggttatcacacttaaccaacgttatggcgt

SEQ ID NO: 753279 - DNA, 75 bp, synthetic construct
  source 1..75: mol_type = other DNA
ttgaaaaattggttatttctggctacggccattatttttgaggtcattgcaacctctgcgctcaagtctagtgag

SEQ ID NO: 753280 - DNA, 75 bp, synthetic construct
  source 1..75: mol_type = other DNA
gctagagttaaaactgcgacaagcaggtttgagcacagaatttttacatggcgaatatgcaggtaagcttctgaa

SEQ ID NO: 753281 - DNA, 75 bp, synthetic construct
  source 1..75: mol_type = other DNA
atgatgattctcacgtgccaccggaattacgtgcggggtatcgcttgctgaagaatgccggttgcttaccgccag

SEQ ID NO: 753282 - DNA, 75 bp, synthetic construct
  source 1..75: mol_type = other DNA
ggtaaagttgaaggtcaatacagccatgtttattccgtcgataccgataattatggcgacagtattgcgctgacc

SEQ ID NO: 753283 - DNA, 75 bp, synthetic construct
  source 1..75: mol_type = other DNA
tttatcgtgcggcggcagagaaaaacattgctattccgcagcagttagcggtggtgggttatagtaatgaaacgc

SEQ ID NO: 753284 - DNA, 75 bp, synthetic construct
  source 1..75: mol_type = other DNA
cgttactgaagcgcgtctgctaacccgttacaccgtctgggctggcctgatggcgggcgttggtttaactctgct

SEQ ID NO: 753285 - DNA, 75 bp, synthetic construct
  source 1..75: mol_type = other DNA
tcgtctggttgtcacgcttagccggcgttatggcgtccgtctcattcatctggttgccagcgccgtatttctgcc

SEQ ID NO: 753286 - DNA, 75 bp, synthetic construct
  source 1..75: mol_type = other DNA
tcgtctggttgtcacgcttagccggtgttatggcgtccgtctcattcatctggttgccagcgccgcatttctgcc

SEQ ID NO: 753287 - DNA, 75 bp, synthetic construct
  source 1..75: mol_type = other DNA
ttatctgttacgtactgatgcgtggtcgtatccggttctgcggcttaaacgtcttggcctgtcaaaaacgttccg

SEQ ID NO: 753288 - DNA, 75 bp, synthetic construct
  source 1..75: mol_type = other DNA
gaacatgggacgtattgtcgctgacgtcgatggtgttaatctcgctgaactgattaacgtggtctgcgataacgg

SEQ ID NO: 753289 - DNA, 75 bp, synthetic construct
  source 1..75: mol_type = other DNA
catacgttgcagtaccgcatatatcacggaaacggacaacgcctggctgtactcgctgtcacaccagactaatga

SEQ ID NO: 753290 - DNA, 75 bp, synthetic construct
  source 1..75: mol_type = other DNA
ccgatgcatggtcgtacccggttctgcggcttaaacgcctgggcctgtcaagaacgttccgtcgtctggtcgtca

SEQ ID NO: 753291 - DNA, 75 bp, synthetic construct
  source 1..75: mol_type = other DNA
gcaccgcacatatcacggaaacagacaacgcctggttgtactcgctgtcacaccagaccagtgacttcggcgaat

SEQ ID NO: 753292 - DNA, 75 bp, synthetic construct
  source 1..75: mol_type = other DNA
gcaccgaaagctgcccgtttgccattatggctaacgaagaaaaacgcttctatggtgtacagttccatccggaag

SEQ ID NO: 753293 - DNA, 75 bp, synthetic construct
  source 1..75: mol_type = other DNA
tacggcgtacagttccatccggaagtgactcacactcgccagggtatgcgcatgctcgagcgttttgtgcgtgat

SEQ ID NO: 753294 - DNA, 75 bp, synthetic construct
  source 1..75: mol_type = other DNA
cgatgcgtggccatacccggttctgcggcttaaacgcctggggctgtcaaaaacgttccgtcgtctggttgtcac

SEQ ID NO: 753295 - DNA, 75 bp, synthetic construct
  source 1..75: mol_type = other DNA
atgaaactggtcctgacgctggaagccgacagcattaacgtgcaggcactgaacatggggcgcattgtcgttgac

SEQ ID NO: 753296 - DNA, 75 bp, synthetic construct
  source 1..75: mol_type = other DNA
gttgatgaatctgaccgggcatcagcagagcgcacgccaccatctgcggcccttaccggcatacgctgcagtacc

SEQ ID NO: 753297 - DNA, 75 bp, synthetic construct
  source 1..75: mol_type = other DNA
tatttatccgttttattgattttcgcggtgaactgttattacgcgcatcagcaattgacggagttgttccatccg

SEQ ID NO: 753298 - DNA, 75 bp, synthetic construct
  source 1..75: mol_type = other DNA
aacatcgctcttgatctgaaaggttcaggaaacttttcagcgtgggttattgaagcctgcaggagaaggctggca

SEQ ID NO: 753299 - DNA, 75 bp, synthetic construct
  source 1..75: mol_type = other DNA
cagcctgcctcacgtagcggaactggcgctgggcggtacggctgtgggcacaggactaaatactcatccagaata

SEQ ID NO: 753300 - DNA, 75 bp, synthetic construct
  source 1..75: mol_type = other DNA
attcgatgggagcgatcgatgtcccggcagataaactgtggggggcacaaacccaacgctcactggagcattttc

SEQ ID NO: 753301 - DNA, 75 bp, synthetic construct
  source 1..75: mol_type = other DNA
cctgccgtacgacatgctgtaccgtcacccgttcccgggaccaggccttggcgttcgtgtgctgggtgaagtgaa

SEQ ID NO: 753302 - DNA, 75 bp, synthetic construct
  source 1..75: mol_type = other DNA
gcgaactgtgggcgtgggatgtgatagaagcacaaattcgtgacttcaatccaagcggcattattctttccggcg

SEQ ID NO: 753303 - DNA, 75 bp, synthetic construct
  source 1..75: mol_type = other DNA
ttgagcataaagggtccggtaacttttcagcgtgggttattgaagcctgcaggagaaggctggcaacagatgcaa

SEQ ID NO: 753304 - DNA, 75 bp, synthetic construct
  source 1..75: mol_type = other DNA
tacgcagaaccgagaatatatggagcttaaccggctatggctgcatgactgtatgccgagaaactccgaatcaag

SEQ ID NO: 753305 - DNA, 75 bp, synthetic construct
  source 1..75: mol_type = other DNA
aaatttaatcagtatcgctacatcagattcctgaacaagcgagcaaggaagcggctaaacaccaagctattcagg

SEQ ID NO: 753306 - DNA, 75 bp, synthetic construct
  source 1..75: mol_type = other DNA
caatggggttatgcccttaatccaaacagtggtgcacgcgtcgtaacgggcacgcggaaccgtgaatatatggag

SEQ ID NO: 753307 - DNA, 75 bp, synthetic construct
  source 1..75: mol_type = other DNA
tgaacaaaagccaaagttcaaatgatgtctttccgacagcaatgcacgttgcggcgctgctggcgctacgcaagc

SEQ ID NO: 753308 - DNA, 75 bp, synthetic construct
  source 1..75: mol_type = other DNA
ccatgctttgctgtcaggtgatggggaacgacgtggctatcaacatgggtggcgcttccggaaactttgaactga

SEQ ID NO: 753309 - DNA, 75 bp, synthetic construct
  source 1..75: mol_type = other DNA
tgggtactggactaaatacccatccggagtatgcgcgtcgcgtagcagatgaactggcagtcattacctgtgcac

SEQ ID NO: 753310 - DNA, 75 bp, synthetic construct
  source 1..75: mol_type = other DNA
tgcgtaagattggtctggagctgggcctaccgtatgacatgttgtaccgtcacccgttcccgggaccaggccttg

SEQ ID NO: 753311 - DNA, 75 bp, synthetic construct
  source 1..75: mol_type = other DNA
actgaacatggggcgcattgtcgttgacattgatggtgttaatctcgctgaactgattaacgtggtctgcgataa

SEQ ID NO: 753312 - DNA, 75 bp, synthetic construct
  source 1..75: mol_type = other DNA
gacgtcgatggtgttaatctcactgaactgattaacaaggtcgctgaaaacggttattcactccgcgtagtggat

SEQ ID NO: 753313 - DNA, 75 bp, synthetic construct
  source 1..75: mol_type = other DNA
catacgctgcagtaccgcacatatcacggagaaggacaacgcctggttgtactcgctgtcacaccagaccaatga

SEQ ID NO: 753314 - DNA, 75 bp, synthetic construct
  source 1..75: mol_type = other DNA
ctccgccatttgcaacccttgccggcatacgctgcagtaccgcacatatcacggaaacggacaacgcctggttgt

SEQ ID NO: 753315 - DNA, 75 bp, synthetic construct
  source 1..75: mol_type = other DNA
cgccaccatttgttgcccttaccggcatacgctgcagtaccgcacatatcacggaaacggacaacgcctggctgt

SEQ ID NO: 753316 - DNA, 75 bp, synthetic construct
  source 1..75: mol_type = other DNA
tctgaccggacctcaacagactgcatgccaccatttgctgccctgaccggcatacgctgcagtaccgcacatatc

SEQ ID NO: 753317 - DNA, 75 bp, synthetic construct
  source 1..75: mol_type = other DNA
caacccttgcccgcatacgttgcagtaccgcacatatcacggaaacggacaacgcctggttgtactcgctgtcac

SEQ ID NO: 753318 - DNA, 75 bp, synthetic construct
  source 1..75: mol_type = other DNA
caacccttgcctgcatacgctgcagtaccgcacatatcacggaaacggacaacgcctggttgtactcgctgtcac

SEQ ID NO: 753319 - DNA, 75 bp, synthetic construct
  source 1..75: mol_type = other DNA
caacccttcccggcatacgttgcagtaccgcacatatcacggaaacggacaacgcctggttgtactcgctgtcac

SEQ ID NO: 753320 - DNA, 75 bp, synthetic construct
  source 1..75: mol_type = other DNA
atgaaactggccctgacactggaagccgacagcgttaacgtacaggcactgaatatggggcgaattgtcgttgac

SEQ ID NO: 753321 - DNA, 75 bp, synthetic construct
  source 1..75: mol_type = other DNA
ttcgtgttgttgatgaatctgaccggacctcagcagactgcacgccaccatttgttgcccttaccggcatacgct

SEQ ID NO: 753322 - DNA, 75 bp, synthetic construct
  source 1..75: mol_type = other DNA
gtaccgatgcgtggtcatatccggttctgcggcttaaacgcctggggctgtcaaaaacgttccgtcgtctggtta

SEQ ID NO: 753323 - DNA, 75 bp, synthetic construct
  source 1..75: mol_type = other DNA
aacagtgctggatattctgattacatggctgcaggacaatatcgactgcgaatcaggaattatcttcgacaacga

SEQ ID NO: 753324 - DNA, 75 bp, synthetic construct
  source 1..75: mol_type = other DNA
ttgtcacactcatccgacgttatggcgtcagtctcattcatctggatgccagtgccggatgtctgccgggtttcc

SEQ ID NO: 753325 - DNA, 75 bp, synthetic construct
  source 1..75: mol_type = other DNA
cgttatggcgtcagtctcattcatctggatgccagcgctgaatgcctgcctgacctgcccactttcgactggtaa

SEQ ID NO: 753326 - DNA, 75 bp, synthetic construct
  source 1..75: mol_type = other DNA
atgaaactttccctgacgccggaagccgacagcattaacatgcaggcgctgaacatggggcgcattgtcgttgac

SEQ ID NO: 753327 - DNA, 75 bp, synthetic construct
  source 1..75: mol_type = other DNA
tttaccggcagcggatatctgttacgtatcggtgcgtggtcgtacccggttctgcgaattaaacggctgggcctg

SEQ ID NO: 753328 - DNA, 75 bp, synthetic construct
  source 1..75: mol_type = other DNA
cacgcgaaccacagacgcatttctggaaacggagtgcgtggaaaatgtcgccacaaccgaaatcattaaagcaac

SEQ ID NO: 753329 - DNA, 75 bp, synthetic construct
  source 1..75: mol_type = other DNA
acggaaacggacaacgcctggctgtactcgctgtcacaccagactaatgacgacggcgaatcagaatggattcat

SEQ ID NO: 753330 - DNA, 75 bp, synthetic construct
  source 1..75: mol_type = other DNA
tgattaacgtggtctgcgataatggctactcccttcgtattgttgatgaatctgaccggacctcaacagacagca

SEQ ID NO: 753331 - DNA, 75 bp, synthetic construct
  source 1..75: mol_type = other DNA
tcacactcatccggcgttatggcgtcagtcttattcatctggatgccagcgccgggtgtctgccggatttaccca

SEQ ID NO: 753332 - DNA, 75 bp, synthetic construct
  source 1..75: mol_type = other DNA
ccggcatacgctgcagcaccgcacatatcacggaaacagacaacgcctggttgtactcgctgtcacaccagacca

SEQ ID NO: 753333 - DNA, 75 bp, synthetic construct
  source 1..75: mol_type = other DNA
caccaccgttaacaacccttaccggcatacgctgcagcaccgcacatatcacggaaacagacaacgcctggctgt

SEQ ID NO: 753334 - DNA, 75 bp, synthetic construct
  source 1..75: mol_type = other DNA
actcgctgtcacatcagacgaatgacaccggcgaatcagaatggattcattttacaggtagcggatatctgttac

SEQ ID NO: 753335 - DNA, 75 bp, synthetic construct
  source 1..75: mol_type = other DNA
acgtcagattaatagcgatgaaccatacatcgaaattatctgcatggattcaaaagcagaaatccagaaggcaga

SEQ ID NO: 753336 - DNA, 75 bp, synthetic construct
  source 1..75: mol_type = other DNA
ctacttacagggcggcggctaccggaacggagaaaagccggtacctgccggaacggtcggatatgcgcaacaaaa

SEQ ID NO: 753337 - DNA, 75 bp, synthetic construct
  source 1..75: mol_type = other DNA
ttatttgcagggtggtggctaccggaacggggaaacgccgttaccggccgggacagtcggatatgcgcaacaaaa

SEQ ID NO: 753338 - DNA, 75 bp, synthetic construct
  source 1..75: mol_type = other DNA
ctatttgcagggcggcggataccggaacggggaaacgccggtaccagccggaacagtgggttacgcgcaacaaaa

SEQ ID NO: 753339 - DNA, 75 bp, synthetic construct
  source 1..75: mol_type = other DNA
caggcggccccggacggtacgccgtgggagccgcgcaagcgtggcaaagggaagatgttaaaagggctgcccaag

SEQ ID NO: 753340 - DNA, 75 bp, synthetic construct
  source 1..75: mol_type = other DNA
gcggggttgcttatccggaagttaagcggcaaggccgtcaaaacaagctggactatcgatcttccttcccgcgta

SEQ ID NO: 753341 - DNA, 75 bp, synthetic construct
  source 1..75: mol_type = other DNA
ggaaaaagcccacactgggcgaaatcaccaaaacgatgccgtacagccaggcggggctgctgattcgaaaactca

SEQ ID NO: 753342 - DNA, 75 bp, synthetic construct
  source 1..75: mol_type = other DNA
atgaccacatcgcattctgctattacccaggaaaaagccttccacatactcgaacgattagaggcgcttgctacg

SEQ ID NO: 753343 - DNA, 75 bp, synthetic construct
  source 1..75: mol_type = other DNA
taactttgccaacgaaggcaaactggtgatcgccgttgaacgcaacgcagcagagcaagtgctggcggcgttaca

SEQ ID NO: 753344 - DNA, 75 bp, synthetic construct
  source 1..75: mol_type = other DNA
ggggcgcacagacgctaaccgcaggcgatgtattactggttagcggcacgctcggggaccacggggcgactatcc

SEQ ID NO: 753345 - DNA, 75 bp, synthetic construct
  source 1..75: mol_type = other DNA
tcacaggggcggcatgtgccgcagtacacgaccacgacgacgttgcgtatcgacggtcgcgtactggcgtatgcc

SEQ ID NO: 753346 - DNA, 75 bp, synthetic construct
  source 1..75: mol_type = other DNA
aaaagaagactgctgcgccgtttgtcttcattggctatgcaagtcgtaatacaaggtgggacaaaactgagacac

SEQ ID NO: 753347 - DNA, 75 bp, synthetic construct
  source 1..75: mol_type = other DNA
atgctgctgagtggggaaagtgtgaaagaaaagaagacagctgctttgtttgtcgtcacgtttatcttcattggc

SEQ ID NO: 753348 - DNA, 75 bp, synthetic construct
  source 1..75: mol_type = other DNA
tcggtgcggtccagcaggacggcgcacggatccagatgaaagccagtaacgccccgcgcaagccgcaggctgaca

SEQ ID NO: 753349 - DNA, 75 bp, synthetic construct
  source 1..75: mol_type = other DNA
atgattattgacgaaacagagttatgttacggagttaggttagatcttgatgaggatggtcggctatggataacc

SEQ ID NO: 753350 - DNA, 75 bp, synthetic construct
  source 1..75: mol_type = other DNA
accttccgcctgattaatgccgaagggaaggcaacgttcgtacgtttccactggaaaccactggcaggtaaagcc

SEQ ID NO: 753351 - DNA, 75 bp, synthetic construct
  source 1..75: mol_type = other DNA
gacactaacccggcgaattacgaaccgaactcgatcaacgataactggccgcgcgaaacaccgccggggccaaaa

SEQ ID NO: 753352 - DNA, 75 bp, synthetic construct
  source 1..75: mol_type = other DNA
acatatgcggggcaaacgggcgtacagaaaaccacttatgaactgtttggattgtctgacactgcaagctatgac

SEQ ID NO: 753353 - DNA, 75 bp, synthetic construct
  source 1..75: mol_type = other DNA
caaacttcacagtaccagtacatggacatatgcggggcaaacgggcgtacagaaaaccacttatgaactgtttgg

SEQ ID NO: 753354 - DNA, 75 bp, synthetic construct
  source 1..75: mol_type = other DNA
accgctgaccttaccgggaattatcgtcggtacggtactggcattcgctcgttcgcttggtgagtttggggcaac

SEQ ID NO: 753355 - DNA, 75 bp, synthetic construct
  source 1..75: mol_type = other DNA
gcagatacggtgcgtgatatccgtggtttcgccaccaagttctataccgaagaaggcatttttgatcttgtgggt

SEQ ID NO: 753356 - DNA, 75 bp, synthetic construct
  source 1..75: mol_type = other DNA
ccggcactgctcagtcgcccggtgatatccggttcgcttccggcgcgggttgagagtcacgagaagaacgatatc

SEQ ID NO: 753357 - DNA, 75 bp, synthetic construct
  source 1..75: mol_type = other DNA
gacgtggttgtcacctgctcctctgcggatattgcctgtgatgcgttactgctgaagccggcgtcatttactttc

SEQ ID NO: 753358 - DNA, 75 bp, synthetic construct
  source 1..75: mol_type = other DNA
ttctgcgcgagaaaatcactcactttgaccatgagcgcatcccggaacgtattgttcatgcacgcggatcagccg

SEQ ID NO: 753359 - DNA, 75 bp, synthetic construct
  source 1..75: mol_type = other DNA
cataccaggagcgcgtggaaggcaataaagtgcgggagcgcagcccatcatttggcgaatactattcgcatccgc

SEQ ID NO: 753360 - DNA, 75 bp, synthetic construct
  source 1..75: mol_type = other DNA
aaaggcgttcatgccaaactgctctactcccgaatgggggaagtgactgcggatgacggtacggtgttgcctata

SEQ ID NO: 753361 - DNA, 75 bp, synthetic construct
  source 1..75: mol_type = other DNA
gaccgtctggcgttctccaccgacagttacgtcattgacccgctgttctttcctggcggtaatatcggcaagctg

SEQ ID NO: 753362 - DNA, 75 bp, synthetic construct
  source 1..75: mol_type = other DNA
ctgagtacaggcaatggcatctggccatccgtctgtgaccggaacggttacgcgtacgactgtccggaatttcag

SEQ ID NO: 753363 - DNA, 75 bp, synthetic construct
  source 1..75: mol_type = other DNA
agatgtcctgactcgccatcgctggatgcgcgatgtgttaatgccagtattaagcgcggcgctggggcgcatgga

SEQ ID NO: 753364 - DNA, 75 bp, synthetic construct
  source 1..75: mol_type = other DNA
ggccgacaaaacggagccctgccatgaatgggatatggccggcattcagccttctcccgcacaggcacagaacat

SEQ ID NO: 753365 - DNA, 75 bp, synthetic construct
  source 1..75: mol_type = other DNA
gctgaccacttcaattgaaaagtatacaggtcaaaataatcagtggggtgtttgtctaagaattgctcgccatgg

SEQ ID NO: 753366 - DNA, 75 bp, synthetic construct
  source 1..75: mol_type = other DNA
gcttctggttatatgacgggaatgattatcggaaagtaagggaaatttatatttatcctgatgcatccggggatt

SEQ ID NO: 753367 - DNA, 75 bp, synthetic construct
  source 1..75: mol_type = other DNA
ctcaggcgcgatttctttctatgcctcataaatttaaagcctatgttgctggttttggttgcctgaggggaagta

SEQ ID NO: 753368 - DNA, 75 bp, synthetic construct
  source 1..75: mol_type = other DNA
tatgccagtggtcatattacacttgccgaattagctatggcattgttaacgtcttatacaggtaggaggccaata

SEQ ID NO: 753369 - DNA, 75 bp, synthetic construct
  source 1..75: mol_type = other DNA
taatgacaagagatttgtcaaagtatgtaggtgcttttaaaggtgagttagttaatgctgacacaggtgaaataa

SEQ ID NO: 753370 - DNA, 75 bp, synthetic construct
  source 1..75: mol_type = other DNA
acctctgtttaatcatggtaaaggtggcactgttgaatttgttatcagtgttcctgaaaaagatggtaacgataa

SEQ ID NO: 753371 - DNA, 75 bp, synthetic construct
  source 1..75: mol_type = other DNA
cccagaaaaggcagcctataacgggatcaaggagtttgcagacgtattaagcaagcccgatttcacgaaagtatt

SEQ ID NO: 753372 - DNA, 75 bp, synthetic construct
  source 1..75: mol_type = other DNA
gctgaaacttgcccattaatcactcgcccgtatggttactacagtcaaacaagaaatgacaataaaccaatgata

SEQ ID NO: 753373 - DNA, 75 bp, synthetic construct
  source 1..75: mol_type = other DNA
gttttaataacagagtgagtgtaagggaagttcgcgtcagtgcagatatttttgtttcttctcttatgacagaaa

SEQ ID NO: 753374 - DNA, 75 bp, synthetic construct
  source 1..75: mol_type = other DNA
ctgctgaagtggatgatcgcggaaggttacggcgatcatcgtaccctggaacgccgtattcagggcatggaaaaa

SEQ ID NO: 753375 - DNA, 75 bp, synthetic construct
  source 1..75: mol_type = other DNA
gagccgatttatattgggatggattttaacgttggaaagatgggcgggaatcgtccatgtgctgcgtttggggct

SEQ ID NO: 753376 - DNA, 75 bp, synthetic construct
  source 1..75: mol_type = other DNA
ttaacgttggaaagatggcgggaatcgtccatgtgctgcgtttggggcttccatgtgcggtaactgaaatcatca

SEQ ID NO: 753377 - DNA, 75 bp, synthetic construct
  source 1..75: mol_type = other DNA
tcaagtaacgcaagtacgacggatatagcccagcttaagcaggctggttttaacgttgtggtgaacagctcgaac

SEQ ID NO: 753378 - DNA, 75 bp, synthetic construct
  source 1..75: mol_type = other DNA
atttcaataaattagttaaagatggcggcaagaaattatttgctgggcgtgataatggtcgcaaggcatatagtt

SEQ ID NO: 753379 - DNA, 75 bp, synthetic construct
  source 1..75: mol_type = other DNA
aaaaacggcaacgccaaacattacgtgatccaggcatttaagcatctgaaagcgatagggttacaaggtaaagcg

SEQ ID NO: 753380 - DNA, 75 bp, synthetic construct
  source 1..75: mol_type = other DNA
tgggtagaataacttccctgcaaggtaatgaaatagaggtcaatggtaccatcgaaggcaacccatctgtgatgg

SEQ ID NO: 753381 - DNA, 75 bp, synthetic construct
  source 1..75: mol_type = other DNA
tgtggacaatccctgaaagccgcatgaaaatgcgacgtaaacatgtcgtaccactgtcacgacagaccactgaca

SEQ ID NO: 753382 - DNA, 75 bp, synthetic construct
  source 1..75: mol_type = other DNA
gaccgacggcaaccgggcgtactgcaacctgaatgaaggcatcgggaaagtgatgcgttttggcgcttacggcga

SEQ ID NO: 753383 - DNA, 75 bp, synthetic construct
  source 1..75: mol_type = other DNA
cggtggtttccacctctacccgtaactttccgaaccgtttgggtactggcgcgaatgtcttcctggcttctgcgg

SEQ ID NO: 753384 - DNA, 75 bp, synthetic construct
  source 1..75: mol_type = other DNA
gcgtatgcgttataagattgatggacttcgcaacggtattgacgttacaaccacgccggaaggattcaaatttgt

SEQ ID NO: 753385 - DNA, 75 bp, synthetic construct
  source 1..75: mol_type = other DNA
gatttgggagcatccaggtataaatcagggatattttgcgccaacgtatccccaaattcgcgatattttttaccc

SEQ ID NO: 753386 - DNA, 75 bp, synthetic construct
  source 1..75: mol_type = other DNA
agagcaaccggtcatggttttcgccacaccatgagtaccattctgcacgaacagggctttaattccgcctggatt

SEQ ID NO: 753387 - DNA, 75 bp, synthetic construct
  source 1..75: mol_type = other DNA
aacctgaatgcgggcagtcgcaccatcgctttccaacaaagtttgtttctcaacgcctttgccctgattgaattt

SEQ ID NO: 753388 - DNA, 75 bp, synthetic construct
  source 1..75: mol_type = other DNA
caatcaggcactgaaagatgcggtagcggaattgatggaaaacgaagaaattcgcgggctggttattggtgaacc

SEQ ID NO: 753389 - DNA, 75 bp, synthetic construct
  source 1..75: mol_type = other DNA
ggcggtgattatcagtaccatcaccatcatgattgtgttgtcggaaatcggcgtcaatatcgcgccattgctggc

SEQ ID NO: 753390 - DNA, 75 bp, synthetic construct
  source 1..75: mol_type = other DNA
gcgacagcctcaacgccggtagcaaaaccattgcttttcaacaaagcctgtttctcaatgctttcgctctgattg

SEQ ID NO: 753391 - DNA, 75 bp, synthetic construct
  source 1..75: mol_type = other DNA
gcgctgaaaacggcacgtattctgacagtgtgcgtagcggtgatgctactattcagcgcctggggactgttcgat

SEQ ID NO: 753392 - DNA, 75 bp, synthetic construct
  source 1..75: mol_type = other DNA
ttcaccacgctgccactcaaacagtggacggtccgctttgccctcgacagccaggtgaaaaaacatttcgacctg

SEQ ID NO: 753393 - DNA, 75 bp, synthetic construct
  source 1..75: mol_type = other DNA
catgtaccgggtgaaatttgatgccgaccgtgatgataaaaatccgggacaggaaagcatgccggtacgtctggc

SEQ ID NO: 753394 - DNA, 75 bp, synthetic construct
  source 1..75: mol_type = other DNA
gccagtcaacacctccattccgtcagtagtaaaagttgagtttgggaaggtaaaaattcatggagaaacagaatg

SEQ ID NO: 753395 - DNA, 75 bp, synthetic construct
  source 1..75: mol_type = other DNA
tacctcttccgtaccggaatttcccggtggatacagtgaatattttgttgcgcacgacgaaaaaacaggacagct

SEQ ID NO: 753396 - DNA, 75 bp, synthetic construct
  source 1..75: mol_type = other DNA
gtctgtgctatttatccgctggcgggagcgtagcatatggcgttctgctgagcctgacgacggtcactattcaaa

SEQ ID NO: 753397 - DNA, 75 bp, synthetic construct
  source 1..75: mol_type = other DNA
catttaaagcaactggcgatcagcaaaaagacgctattacccaaattgaagttatgctggaacaagcagtaaaag

SEQ ID NO: 753398 - DNA, 75 bp, synthetic construct
  source 1..75: mol_type = other DNA
gcaccaggtgaagaagcattaagcattgacgaatacgcggagtgtttggggttcaagggaggcaaagaaggataa

SEQ ID NO: 753399 - DNA, 75 bp, synthetic construct
  source 1..75: mol_type = other DNA
atatatccctttgcggagcggattacggaatgctggcggtctattacgcataacagcggttcggcacaccgctgt

SEQ ID NO: 753400 - DNA, 75 bp, synthetic construct
  source 1..75: mol_type = other DNA
caacgagctgcacctgatgtatcttcacgcaaccgacaaggtgctgaaagatgacaacctgctggcgctgttcga

SEQ ID NO: 753401 - DNA, 75 bp, synthetic construct
  source 1..75: mol_type = other DNA
gtatatcattaactttgttaaacattttagcctcagtattattttcaattttcctcacacatactttaacgaaca

SEQ ID NO: 753402 - DNA, 75 bp, synthetic construct
  source 1..75: mol_type = other DNA
atgaaaaaccgtaaagcaaagattctgttagttcgtagaaacgctcctggcgtctggcagtgggtgagactcagc

SEQ ID NO: 753403 - DNA, 75 bp, synthetic construct
  source 1..75: mol_type = other DNA
ggcaccatatgatcactggtcgcatggatttctgtatggatgagcgtggcctgaaggtctacgaatacaatgccg

SEQ ID NO: 753404 - DNA, 75 bp, synthetic construct
  source 1..75: mol_type = other DNA
ggatttctgcatggatgagcgcggcctgaaagtctacgaatacaacgccgattccgcttcctgtcataccgaagc

SEQ ID NO: 753405 - DNA, 75 bp, synthetic construct
  source 1..75: mol_type = other DNA
attccgcctcctgtcataccgaagcgggcttgatcctcgaacgttgggcggagcagggctataaaggcaacggct

SEQ ID NO: 753406 - DNA, 75 bp, synthetic construct
  source 1..75: mol_type = other DNA
aagatgataaaataaaaactataatagaacgtttatctgtcttgacaagaatatcagacgtacagttcgaagtgt

SEQ ID NO: 753407 - DNA, 75 bp, synthetic construct
  source 1..75: mol_type = other DNA
cggattttgtgctgaacttcccacaatatcagggcgcttccattttgctggcgcgggaaaacttcggctgcggct

SEQ ID NO: 753408 - DNA, 75 bp, synthetic construct
  source 1..75: mol_type = other DNA
cgatcctgaaagcatcgataatattcgcggtgccctgcattatctggcaaaagaagaacaaaaagacgggctgtg

SEQ ID NO: 753409 - DNA, 75 bp, synthetic construct
  source 1..75: mol_type = other DNA
gtatttcagttaccataggaaattttgtggcttcctttcttttctccaaatatcttacgaatagtttgacaaata

SEQ ID NO: 753410 - DNA, 75 bp, synthetic construct
  source 1..75: mol_type = other DNA
cccgatccggaatggggagatcgctggcgttacttctggcgtgtgacgttaccagtggatgctggcgcgcagtgg

SEQ ID NO: 753411 - DNA, 75 bp, synthetic construct
  source 1..75: mol_type = other DNA
gatattagtgatggggaatatcaagtactctttttatactctctgcttgatatttttgatagtcctaatacttta

SEQ ID NO: 753412 - DNA, 75 bp, synthetic construct
  source 1..75: mol_type = other DNA
atcatcaatttttacatcaatgccctctcagataaagattgaatacccgcgtaatgtatcagagaacaaggaaga

SEQ ID NO: 753413 - DNA, 75 bp, synthetic construct
  source 1..75: mol_type = other DNA
accaggaacagcctccttcagggcttgaaggatatcaatgttcgcttcctgttaactgccggacaagtgcaacca

SEQ ID NO: 753414 - DNA, 75 bp, synthetic construct
  source 1..75: mol_type = other DNA
gtaaacctactattggcattattgctcagggattcaacaatggtacttattcacaggaagtacgaattaccgttg

SEQ ID NO: 753415 - DNA, 75 bp, synthetic construct
  source 1..75: mol_type = other DNA
acaattgaaaatgcagttaatgaaagtaatgaatacaccaatacgcaaatcgctacactgaaaaatacggtagac

SEQ ID NO: 753416 - DNA, 75 bp, synthetic construct
  source 1..75: mol_type = other DNA
taccgaatctgaaacaaaaccaacaacgccagctgaccgaatataaaacgcatcgggcgggttataccgctaacg

SEQ ID NO: 753417 - DNA, 75 bp, synthetic construct
  source 1..75: mol_type = other DNA
gcgttcattgcagaactcactggcgcggcgcacagccatgacggcgggcaagcggcgggaacttcatgcgctgga

SEQ ID NO: 753418 - DNA, 75 bp, synthetic construct
  source 1..75: mol_type = other DNA
tgaaggatatcaatgttcgcttcctgttaactgccggacaagtgcaaccagttcgcttacctgattttccagagt

SEQ ID NO: 753419 - DNA, 75 bp, synthetic construct
  source 1..75: mol_type = other DNA
cagattaataaagctggtactttctatattaatggatctggcggtactggtcgcatggtaatcagtaatactatg

SEQ ID NO: 753420 - DNA, 75 bp, synthetic construct
  source 1..75: mol_type = other DNA
aattactcatttgcaattaatgaaactaagattcgtaaacctacaattggtgtaattgctcaaggctttaccagt

SEQ ID NO: 753421 - DNA, 75 bp, synthetic construct
  source 1..75: mol_type = other DNA
tattggtgatgttaaaattacttcaagtggttctaacgattactgtaataccatcgatgcaaaatatacggcagt

SEQ ID NO: 753422 - DNA, 75 bp, synthetic construct
  source 1..75: mol_type = other DNA
acaaaaacattagcaaaacaatatgctgggccgaaatggactgataaattcttagggaaaggtgtagtatctatt

SEQ ID NO: 753423 - DNA, 75 bp, synthetic construct
  source 1..75: mol_type = other DNA
tggacgatgaacccattttagcagtaccgataactacagatggcgtagtaccgaaagctagtatcgtgtctaaat

SEQ ID NO: 753424 - DNA, 75 bp, synthetic construct
  source 1..75: mol_type = other DNA
tggtacggcaactgctactgtaggtggtgcagcaccatttaccgtaattggtggtattacttatctaaaaactgc

SEQ ID NO: 753425 - DNA, 75 bp, synthetic construct
  source 1..75: mol_type = other DNA
gccgatgactctccgctttgccatgaaatcctggcgaaaaaattattacctgttgttcgttattacagctatatc

SEQ ID NO: 753426 - DNA, 75 bp, synthetic construct
  source 1..75: mol_type = other DNA
ttaatcgcaaccttaagggtctgaacaatgtgcatctgatcgagccgcaggattatctgccgtttgtctatctga

SEQ ID NO: 753427 - DNA, 75 bp, synthetic construct
  source 1..75: mol_type = other DNA
ttaggtaaaccggttttggttatgcgtgatactactgaacgccctgaggcggttgaggctggtactgttgtatta

SEQ ID NO: 753428 - DNA, 75 bp, synthetic construct
  source 1..75: mol_type = other DNA
aatcactaggggctgaactggcagcatggggtgtaccgcataattacgctgtagcgtttgcagcgaaaaacgcca

SEQ ID NO: 753429 - DNA, 75 bp, synthetic construct
  source 1..75: mol_type = other DNA
tgttagcagcaaaagggcgggtaaatattcaggctcaaagtgacgatttgtcaatgagttcccaacagaatcttg

SEQ ID NO: 753430 - DNA, 75 bp, synthetic construct
  source 1..75: mol_type = other DNA
tgaaacctctcctgaccatgccttattttaccgatcaaaactggcattttagaaaagtgggcgttgctggcagcg

SEQ ID NO: 753431 - DNA, 75 bp, synthetic construct
  source 1..75: mol_type = other DNA
aaatgatccttgtcaccttacatcgtagagaaaatcatggagaaggaattgaacgaatttgcaatgctttagcta

SEQ ID NO: 753432 - DNA, 75 bp, synthetic construct
  source 1..75: mol_type = other DNA
tgaacagcgaaatcgtcgtaggtgacaccaccactgaaaacatcgatgtggcagaggaaaacaccgtggataacg

SEQ ID NO: 753433 - DNA, 75 bp, synthetic construct
  source 1..75: mol_type = other DNA
aaagatatcagcaccgatcaagagaacgttggctatgtaaccatcacggcagtagaagcacctgatgcaatgtat

SEQ ID NO: 753434 - DNA, 75 bp, synthetic construct
  source 1..75: mol_type = other DNA
agagaatttggccatcatcagcaacagtgaacctgcgcaactgctggaagaggaacgtctgcgcaaagaaattgc

SEQ ID NO: 753435 - DNA, 75 bp, synthetic construct
  source 1..75: mol_type = other DNA
gactatggagcccctggggatagtggttctcctttgtttgcttatgataaacaacaaaaaaatgggttattgttg

SEQ ID NO: 753436 - DNA, 75 bp, synthetic construct
  source 1..75: mol_type = other DNA
gcatggccagctctgtcagcaacggtcagtgcagagatcccttatcagatattccgcgactttgccgagaataaa

SEQ ID NO: 753437 - DNA, 75 bp, synthetic construct
  source 1..75: mol_type = other DNA
gctggatccctgcgtggtctgtcgctgtctgatgtgctgaatctgaaagcggataccatgttcacgctgttgcct

SEQ ID NO: 753438 - DNA, 75 bp, synthetic construct
  source 1..75: mol_type = other DNA
gcggatgctggcgactggcagcaatacacccaattgcagggtggggcgttggttgcccgttgtgatctgccactg

SEQ ID NO: 753439 - DNA, 75 bp, synthetic construct
  source 1..75: mol_type = other DNA
ctgtctgggggcccgagcccaaggtagcgcacggtctgattgctgctgtatcggtcctgattattgcctgtccct

SEQ ID NO: 753440 - DNA, 75 bp, synthetic construct
  source 1..75: mol_type = other DNA
gatgatactgaacagggcccgtcatctgtcagagatcaccatgaaaaatatccgacagaatctgttttttgcatt

SEQ ID NO: 753441 - DNA, 75 bp, synthetic construct
  source 1..75: mol_type = other DNA
agagtattccggtcgacggtatcgtgatcgaaggcaaaacaaccgtggatgaatcgatggtgaccggggagtcta

SEQ ID NO: 753442 - DNA, 75 bp, synthetic construct
  source 1..75: mol_type = other DNA
tgccgaagccatccagcgttttgcggtggttacgttccaccaatcttacggctatgaagaatttattgaaggtat

SEQ ID NO: 753443 - DNA, 75 bp, synthetic construct
  source 1..75: mol_type = other DNA
gattgatgccctggtgaaagataaaaattacacagcttccaagtgggagcagcgataccgggaatttacgacctt

SEQ ID NO: 753444 - DNA, 75 bp, synthetic construct
  source 1..75: mol_type = other DNA
cttctggaagaattacaaaaaactatctcaggaagatgttttttcgttgcccctgtggcagacatatcgttcgaa

SEQ ID NO: 753445 - DNA, 75 bp, synthetic construct
  source 1..75: mol_type = other DNA
caaagcgttcccggcgaaagccttatggctgacgggggcgatggtggcagtgtcaggcgtgattgtcggcgggct

SEQ ID NO: 753446 - DNA, 75 bp, synthetic construct
  source 1..75: mol_type = other DNA
ttgttgatgacgctcccggcggtgagtttgccgtcactgattatgctgcgtaaagcgttcccggcgaaagcctta

SEQ ID NO: 753447 - DNA, 75 bp, synthetic construct
  source 1..75: mol_type = other DNA
tgttgctgattgcgacgctggtgcaaaaatgggtacgtgaaacaccgctaacgcaggcaccggtcgaaattgaca

SEQ ID NO: 753448 - DNA, 75 bp, synthetic construct
  source 1..75: mol_type = other DNA
tatcagtctcaatccgggtggggaagcatctcttttacgtgtagcggccgcagtggaaaaaggctcgcagcatcc

SEQ ID NO: 753449 - DNA, 75 bp, synthetic construct
  source 1..75: mol_type = other DNA
ctcaccggggataaccagcttaccgctgaagcagtcgcacggaaactgggaatagatgaggttgaagccgggatt

SEQ ID NO: 753450 - DNA, 75 bp, synthetic construct
  source 1..75: mol_type = other DNA
ccgcagtcactcatttcgatgcgccgtcgggtaaaggtgtcacaggcgatgtcgaaggtcaacggattgttattg

SEQ ID NO: 753451 - DNA, 75 bp, synthetic construct
  source 1..75: mol_type = other DNA
actcattgaagtagacaagcgtgcaggcatgcccaatgcaatgagcctacaactggcttatagcggtgatcactt

SEQ ID NO: 753452 - DNA, 75 bp, synthetic construct
  source 1..75: mol_type = other DNA
gttgataatgtcattaagcatgatgccggtgggcatggtcagcggcctgcaacaacttttcaccctgatttgtct

SEQ ID NO: 753453 - DNA, 75 bp, synthetic construct
  source 1..75: mol_type = other DNA
cgtgcgcacaccggtccgtgaagggatggcgtgcgtaatgcgcgataaacgttttgttacctatgtcctgacgct

SEQ ID NO: 753454 - DNA, 75 bp, synthetic construct
  source 1..75: mol_type = other DNA
agcaagggttgggtatttttggcggcgcaattgctgaccgctttggcgctaaaccaatgattgtcaccggtatgc

SEQ ID NO: 753455 - DNA, 75 bp, synthetic construct
  source 1..75: mol_type = other DNA
gcaccagccagagcttccgtggatgatgctgggcattattggcatcttcactttccttgcgctgggttggcagtt

SEQ ID NO: 753456 - DNA, 75 bp, synthetic construct
  source 1..75: mol_type = other DNA
ctgcaacaacttttcaccctgatttgtctgttttatatcgggtcgatcattgccgagcctgcgcgtgaaacctta

SEQ ID NO: 753457 - DNA, 75 bp, synthetic construct
  source 1..75: mol_type = other DNA
tgttaccggcatggaaactctccaccgtacacacgcccgttcgcgaaggcatgacccgcgtgatgcgtgacaagc

SEQ ID NO: 753458 - DNA, 75 bp, synthetic construct
  source 1..75: mol_type = other DNA
atgtattggagtttgagaaatcgcgtctttgccgcgttctcgccagaaaactacaccagtactgtggatgagaat

SEQ ID NO: 753459 - DNA, 75 bp, synthetic construct
  source 1..75: mol_type = other DNA
tttatgcgcctttgccaacgtgcgaatgccgatccaggacatcgctacgccattttcattgatgagatcaatcgc

SEQ ID NO: 753460 - DNA, 75 bp, synthetic construct
  source 1..75: mol_type = other DNA
gataacagcgaatggtttctagttgattcacagctcgagcaagtggaggatttgttagcgctctacgccgaactt

SEQ ID NO: 753461 - DNA, 75 bp, synthetic construct
  source 1..75: mol_type = other DNA
aaggtggtgaagaatttaagccgtcgctttgaagcggaacaatacgatccacagcgggtacgcgcagcggcttat

SEQ ID NO: 753462 - DNA, 75 bp, synthetic construct
  source 1..75: mol_type = other DNA
ttcacgacggtggggtcgccagcggctgggcgatgcaggcgcaaccgggcgataaacttacggtggcaggtccgc

SEQ ID NO: 753463 - DNA, 75 bp, synthetic construct
  source 1..75: mol_type = other DNA
aaagtcgttaagaatttaagccgccgctttgaaacggaacagtatgacccacagcgggtacgtgcggcggcttac

SEQ ID NO: 753464 - DNA, 75 bp, synthetic construct
  source 1..75: mol_type = other DNA
gagcttatgcggctattgtctgaagcccagtccggcgatctgttgctagtggaagctatagatcgtctgagtcgc

SEQ ID NO: 753465 - DNA, 75 bp, synthetic construct
  source 1..75: mol_type = other DNA
gtgtttctgctttggtcaacggtgccgctggcatggctacaagtgcgttaaagggggctgtgagtggagtgatca

SEQ ID NO: 753466 - DNA, 75 bp, synthetic construct
  source 1..75: mol_type = other DNA
gaatatctgatgaaaatccgtgtctaccgggtaactcaggacggcggaaaagaactggaagaagaaatgcgcgta

SEQ ID NO: 753467 - DNA, 75 bp, synthetic construct
  source 1..75: mol_type = other DNA
ttccggcgcacgtacccagtttacgggcgacaccgcctcgctgctggtagaaaatggtcgtggtaatactttgtg

SEQ ID NO: 753468 - DNA, 75 bp, synthetic construct
  source 1..75: mol_type = other DNA
acgaaatggtgacgcaggcgaaatcacgcggcattcgtatcattctcgatatggtgtttaatcatacttctaccc

SEQ ID NO: 753469 - DNA, 75 bp, synthetic construct
  source 1..75: mol_type = other DNA
ttttatatctggcgcgatggcgaaccagaaacgccaccgaacaactggcgttcaaaatttggcggtagtgcgtgg

SEQ ID NO: 753470 - DNA, 75 bp, synthetic construct
  source 1..75: mol_type = other DNA
ctcttgatccggttcgcacggctcaaaaacgccttgattaccagggtatttatactccggatcaggttgagcgtg

SEQ ID NO: 753471 - DNA, 75 bp, synthetic construct
  source 1..75: mol_type = other DNA
tgcagcgccttttggccgttgagcatgacaaagacactgaaatcgtcattcatgtcaataagttaaaagagggat

SEQ ID NO: 753472 - DNA, 75 bp, synthetic construct
  source 1..75: mol_type = other DNA
tgacaaagacaccgaaatcgtcattcatgtcaacaagttaaaagagggatgggacgttacaaatctgtacactat

SEQ ID NO: 753473 - DNA, 75 bp, synthetic construct
  source 1..75: mol_type = other DNA
tcattacgcatcttatgcgatgtgctcgaacagttcggtctcagtaaagatcccgaccttaatcgttggattgaa

SEQ ID NO: 753474 - DNA, 75 bp, synthetic construct
  source 1..75: mol_type = other DNA
ggcgataccgcttcattgctggtggaaaatggtcgtggcaatactctgtggccgcaggtggttagcgtgctgcag

SEQ ID NO: 753475 - DNA, 75 bp, synthetic construct
  source 1..75: mol_type = other DNA
atggcttactctgttcaaaagtcgcgcctggcaaaggttgcgggtgtttcgcttgttttattactcgctgcctgt

SEQ ID NO: 753476 - DNA, 75 bp, synthetic construct
  source 1..75: mol_type = other DNA
aatactggagaacgatgcttcagtggtgcgctggatgaagcctcgccctggacaattccgtattgaatatactaa

SEQ ID NO: 753477 - DNA, 75 bp, synthetic construct
  source 1..75: mol_type = other DNA
tggaatttttttacaatatatttttataaatatgtctctgtagatttggcagggaagtatggggcatctaatact

SEQ ID NO: 753478 - DNA, 75 bp, synthetic construct
  source 1..75: mol_type = other DNA
gtttatgcagatttttgccgacgtgttcaaccttccggcacgccgaaacgccattaacggttgtgcaagtctggg

SEQ ID NO: 753479 - DNA, 75 bp, synthetic construct
  source 1..75: mol_type = other DNA
gaaccgtacaaacgcgggattatgatcggctttgattccagcatggattacgcatggatatatcgttcgatactg

SEQ ID NO: 753480 - DNA, 75 bp, synthetic construct
  source 1..75: mol_type = other DNA
ggtaggtctggggttgtatccggattacgcaacggctgttgataagatggttcgcgtgaaagatatctttatacc

SEQ ID NO: 753481 - DNA, 75 bp, synthetic construct
  source 1..75: mol_type = other DNA
gttgctgtcgtgcgttattgaaagccgatggcacgcccgctgcgccattgattagctggcaggatgcacgtgtaa

SEQ ID NO: 753482 - DNA, 75 bp, synthetic construct
  source 1..75: mol_type = other DNA
ggtaggtctggggctatacccggattacgcaacggctgtcgacaaaatggttcgcgtgaaagatatctttatgcc

SEQ ID NO: 753483 - DNA, 75 bp, synthetic construct
  source 1..75: mol_type = other DNA
tgaataaaggcattttcaaagacctaaccaaacatactgatgtgatcctgaaaaaatcgtatgaagtgatgcatg

SEQ ID NO: 753484 - DNA, 75 bp, synthetic construct
  source 1..75: mol_type = other DNA
atcgtgattgcgtctacagctctttgtgctgcttttgtagcaaataattggttcgttcagaataaaaaattaaaa

SEQ ID NO: 753485 - DNA, 75 bp, synthetic construct
  source 1..75: mol_type = other DNA
taactttttgtttttttttaatattgcattcataaatgtccgacatgaaagtgtccgaaaatgcctttttctggc

SEQ ID NO: 753486 - DNA, 75 bp, synthetic construct
  source 1..75: mol_type = other DNA
acctatggtgtggaagtccgccatccgcagtttttcaccaaaggcgaggaagaacaaacgcttaatcgcggtttg

SEQ ID NO: 753487 - DNA, 75 bp, synthetic construct
  source 1..75: mol_type = other DNA
gtctgcaagatatagtgcagattcaaaataaattacctatcattgaaaatgaagacgttctcaacacatccttac

SEQ ID NO: 753488 - DNA, 75 bp, synthetic construct
  source 1..75: mol_type = other DNA
cgaggccgcttcgcgtcggtgaaaagacggccgggctgtggatcgcgccctatatcgatacgcaggacgtttatc

SEQ ID NO: 753489 - DNA, 75 bp, synthetic construct
  source 1..75: mol_type = other DNA
gaggaggccagcgcggtaaagccgggtgcgacatcgctgccgcgcctggctgagggtaatttccggacccggtcc

SEQ ID NO: 753490 - DNA, 75 bp, synthetic construct
  source 1..75: mol_type = other DNA
cgcagtacggaagatcagttttttatgtatttacgggtaaacaccctaaataaactggtaccctacgcggcacaa

SEQ ID NO: 753491 - DNA, 75 bp, synthetic construct
  source 1..75: mol_type = other DNA
gaatatttaccgttgagcagctttatcatcatttgcacgaggcgtggggccagcatgagaaaggttcgctctttt

SEQ ID NO: 753492 - DNA, 75 bp, synthetic construct
  source 1..75: mol_type = other DNA
gctggcgacacatttcccggctgggctgccggttgtttgtaccaccagtgataaaccggttgaagcactgggagc

SEQ ID NO: 753493 - DNA, 75 bp, synthetic construct
  source 1..75: mol_type = other DNA
cgcattactgaagttttggctctacctgcggattgcgaggtatttgaaactgatcgcgaaggtatagaacgttat

SEQ ID NO: 753494 - DNA, 75 bp, synthetic construct
  source 1..75: mol_type = other DNA
ttcgaacagctccgggaggtgatcgccactgagacggaagcgcgcgtcacggatgttactcgccttgaggcaaaa

SEQ ID NO: 753495 - DNA, 75 bp, synthetic construct
  source 1..75: mol_type = other DNA
gaactgaccggaccttttgaaagcattgttgagatgtcatgcctgatgcacgatatcggcaatccgccgtttggt

SEQ ID NO: 753496 - DNA, 75 bp, synthetic construct
  source 1..75: mol_type = other DNA
tggctgcgcgacatgttgggcgagtcgttaattcagaatgctaaagcactggatctttcgccggaagatttgctc

SEQ ID NO: 753497 - DNA, 75 bp, synthetic construct
  source 1..75: mol_type = other DNA
gattttgaaaaaatcgtataaagtgatgcatggtgagctggggagtgcggattcgatccagagctggtcgaatgc

SEQ ID NO: 753498 - DNA, 75 bp, synthetic construct
  source 1..75: mol_type = other DNA
taaagaatgcgtccttaattataatggtacttacaaaacgccaaaagatgttggaaaggcagataggtctatttg

SEQ ID NO: 753499 - DNA, 75 bp, synthetic construct
  source 1..75: mol_type = other DNA
gatcctgaaaaaatcgtatgaagtgatgcatggagaattgggcaatgtggacgctattcaaagctggtctaatgc

SEQ ID NO: 753500 - DNA, 75 bp, synthetic construct
  source 1..75: mol_type = other DNA
gtttatgcagatttttgccgacgtgttcaaccttccggcacgacgtaacgccattaacggttgtgcaagcctggg

SEQ ID NO: 753501 - DNA, 75 bp, synthetic construct
  source 1..75: mol_type = other DNA
tggctacgcgacatgttaggcgagtcgttaattcaggatgccaaagcacaggatctttcaccggaagatttgctc

SEQ ID NO: 753502 - DNA, 75 bp, synthetic construct
  source 1..75: mol_type = other DNA
ttctgtgctggatgaagcagctgaattggcaaggcagcattactccaatgggtcagcatatcattgcggccgtga

SEQ ID NO: 753503 - DNA, 75 bp, synthetic construct
  source 1..75: mol_type = other DNA
gcaggcgcttcatggcagccaggggagaggaaccacgctgggcaatcagttagaggtgataccggcggaccggac

SEQ ID NO: 753504 - DNA, 75 bp, synthetic construct
  source 1..75: mol_type = other DNA
tcatgaccagaaagtgacagtggcgaatgaccagaccattacggtacaaaacgatcagcggctggatgttaccca

SEQ ID NO: 753505 - DNA, 75 bp, synthetic construct
  source 1..75: mol_type = other DNA
gataaccgctccccgggtgacctgccgggaacgaagacgcagatgaccatccggtcaaaaacctataaaggaagc

SEQ ID NO: 753506 - DNA, 75 bp, synthetic construct
  source 1..75: mol_type = other DNA
cggatttaacgagctgcggtttgaagacgccaccagtaatgagcaggtgtatatccatgcgcagaagaacatgga

SEQ ID NO: 753507 - DNA, 75 bp, synthetic construct
  source 1..75: mol_type = other DNA
tcacaggcgtgggcggggccgggtttcggcaatctggcgataccgcgggtgggccaggaggtgattgttgatttc

SEQ ID NO: 753508 - DNA, 75 bp, synthetic construct
  source 1..75: mol_type = other DNA
tatcattctcaatggtaaaagtatccagattgaaggaaaagataaaataaatattttcggcgcagatattgatct

SEQ ID NO: 753509 - DNA, 75 bp, synthetic construct
  source 1..75: mol_type = other DNA
tggcgattagctggtgcattaaccgcctgattttgcatccgttacgcaatattgctcgtgaacttaacgccatcc

SEQ ID NO: 753510 - DNA, 75 bp, synthetic construct
  source 1..75: mol_type = other DNA
taccggaagatagcagcatgattgccgcaatcatcatgctggccaaaagcctgaatctgcaaattattgctgaag

SEQ ID NO: 753511 - DNA, 75 bp, synthetic construct
  source 1..75: mol_type = other DNA
taattatcagacccttattgctaattacaattacgatcgcgattccgaagaagagtcggtgattaacctgctctc

SEQ ID NO: 753512 - DNA, 75 bp, synthetic construct
  source 1..75: mol_type = other DNA
atgcgtaaaaattccctgctcactcttgtcctgttgctgttttccgtgccgttaccggcgcgtgaggtgccgccg

SEQ ID NO: 753513 - DNA, 75 bp, synthetic construct
  source 1..75: mol_type = other DNA
tggtggcggatatgctggaactgttaacccgctatcgcattcagccgggaacactgattctggaagtgacagaaa

SEQ ID NO: 753514 - DNA, 75 bp, synthetic construct
  source 1..75: mol_type = other DNA
gctgcagcgccattatgaagaacagaacgaaaatgcgatgcgcttcccggtgtcggatttgccgaacaaagcctt

SEQ ID NO: 753515 - DNA, 75 bp, synthetic construct
  source 1..75: mol_type = other DNA
gcgcacggagtcaccgttcagggaaataataatattgccagtaatattctaatgactgggtgtgatgggaaaaat

SEQ ID NO: 753516 - DNA, 75 bp, synthetic construct
  source 1..75: mol_type = other DNA
aaagtcgcgattattggtgctggtcctgccggattacaagccagcgtgacgctgaccaatctgggctacgacgtc

SEQ ID NO: 753517 - DNA, 75 bp, synthetic construct
  source 1..75: mol_type = other DNA
cagccggattacaagccagcgtgacgctgaccaatctgggttacgacgtcacaatttatgaaaaaggagcacaac

SEQ ID NO: 753518 - DNA, 75 bp, synthetic construct
  source 1..75: mol_type = other DNA
gcgataaaactgtggtttacgccgtgaagaccgggaaagaagccgccgaggcgattcatcattatttagagggag

SEQ ID NO: 753519 - DNA, 75 bp, synthetic construct
  source 1..75: mol_type = other DNA
ggtgaaaaatggacgctggctaaacctgactttgtggcgttgaaaacattgttccgccactggcaacaaggaatg

SEQ ID NO: 753520 - DNA, 75 bp, synthetic construct
  source 1..75: mol_type = other DNA
atcccggcggtgaaaaatggacgctggctaaacctgactttgtggcgttaaaaacattgttccgccactggcaac

SEQ ID NO: 753521 - DNA, 75 bp, synthetic construct
  source 1..75: mol_type = other DNA
accagaagttaatcacgttgcgtaaacaagaacccattctgacatggggcaattaccaggatctcctgccaaaca

SEQ ID NO: 753522 - DNA, 75 bp, synthetic construct
  source 1..75: mol_type = other DNA
tgcattgtcgatgcctcgattagcaatatgaaacagacaaagcctgttaagcttgtgaaagctgatggtgtatgg

SEQ ID NO: 753523 - DNA, 75 bp, synthetic construct
  source 1..75: mol_type = other DNA
tgtatagtagatgcttctattagcaatatgaaacaaacaaaaccagttaaattagtgaaatctgatggtgtctgg

SEQ ID NO: 753524 - DNA, 75 bp, synthetic construct
  source 1..75: mol_type = other DNA
agaagaagcaaacaatgtttacaactgcattgtcgatgcttctatcagcaacatgaaacaaacaaagcctgttaa

SEQ ID NO: 753525 - DNA, 75 bp, synthetic construct
  source 1..75: mol_type = other DNA
ggaaggcaataaagtcacctttaagcatgttcgtttaccaggtgaactaacgatagcggcggacaaaattattct

SEQ ID NO: 753526 - DNA, 75 bp, synthetic construct
  source 1..75: mol_type = other DNA
ctcaccctggagcagctgaaagcggaaaaccgcgcggtactggtcaccgtggggttatcgagcggttcggggcta

SEQ ID NO: 753527 - DNA, 75 bp, synthetic construct
  source 1..75: mol_type = other DNA
tcggcggcggcgatgttgccatggacgttgccagcacgctgaaagttctcggctgtcagacagtcacttgcgtgg

SEQ ID NO: 753528 - DNA, 75 bp, synthetic construct
  source 1..75: mol_type = other DNA
cgaatggcaggggcaaaccttattggtgattgccaaccttagccgcgacatacaaccctggcagccagggcaaat

SEQ ID NO: 753529 - DNA, 75 bp, synthetic construct
  source 1..75: mol_type = other DNA
gttggcttgctgtagatccatttaatggtgggatgtataccttgaagcctaaagaggcaaatgcatcccttatac

SEQ ID NO: 753530 - DNA, 75 bp, synthetic construct
  source 1..75: mol_type = other DNA
aaatactgtcaggaatgcgataagtgatcttcccgcaccactaatgaaatcaaaaaacaatgatataactgattt

SEQ ID NO: 753531 - DNA, 75 bp, synthetic construct
  source 1..75: mol_type = other DNA
ttcagggatttccagattggtttgttttccatcatactaaatggcacagctttagaatgattgggaacagtgtat

SEQ ID NO: 753532 - DNA, 75 bp, synthetic construct
  source 1..75: mol_type = other DNA
tggttggcgcgacgccagacggtcgttttgccggagaacagctggcagacggcggcttgtcacctatgctgggcc

SEQ ID NO: 753533 - DNA, 75 bp, synthetic construct
  source 1..75: mol_type = other DNA
gaacgccgacacgttgcgggaagcgcaacagcgcccacaagattatgccgggctggtggtgcgcgttgccggata

SEQ ID NO: 753534 - DNA, 75 bp, synthetic construct
  source 1..75: mol_type = other DNA
tggcggaaacgatggcggcaagctgcactgatggccagcgtcgcgaagaactgctgactattgcggagatctccc

SEQ ID NO: 753535 - DNA, 75 bp, synthetic construct
  source 1..75: mol_type = other DNA
atctattactgagcggcgataatgctttgcaaagttataatgagccaaagaccatgcgcaaagatttaatcgccg

SEQ ID NO: 753536 - DNA, 75 bp, synthetic construct
  source 1..75: mol_type = other DNA
gttgacagtgctcggcctcgaccgctggatgagctggaaaactgcgccttatatctacgatgaattgcaggatct

SEQ ID NO: 753537 - DNA, 75 bp, synthetic construct
  source 1..75: mol_type = other DNA
gttacagagctataacgaaccgatgaccatgcgcaaagatttaattgctgctggcgtcgatccggccgatattgt

SEQ ID NO: 753538 - DNA, 75 bp, synthetic construct
  source 1..75: mol_type = other DNA
gtctacaccgaactgcaggaaaagaatgtcaccggatgccagctctggaactttctggaacagagcatttttgca

SEQ ID NO: 753539 - DNA, 75 bp, synthetic construct
  source 1..75: mol_type = other DNA
cctctgtttttctaaagcagtggggaaagcgccgcaaacaggaaaaacgccagaaagcgttggaggcgttctatg

SEQ ID NO: 753540 - DNA, 75 bp, synthetic construct
  source 1..75: mol_type = other DNA
gtgaatatcgacaccacgataacgatcgatatggccctaaataccggtctggcacttctcggttggttttacatc

SEQ ID NO: 753541 - DNA, 75 bp, synthetic construct
  source 1..75: mol_type = other DNA
gaacaggcgcggcgctttcttgaaatccgctggttaagcgcaccggcgtcgctggcgaatctggtattacttggt

SEQ ID NO: 753542 - DNA, 75 bp, synthetic construct
  source 1..75: mol_type = other DNA
atgatgctgttttttagaaagtatgggtttttgtttatccctccagtctactggctcatctatctgggagccagg

SEQ ID NO: 753543 - DNA, 75 bp, synthetic construct
  source 1..75: mol_type = other DNA
tcattcaaaggccttacatttcaaaaactctgcttaccaggcgcatttcgcccaggggatcaccataataaaatg

SEQ ID NO: 753544 - DNA, 75 bp, synthetic construct
  source 1..75: mol_type = other DNA
ggctctgcgcgggctttctctggcggctatctggcggcgtcactggcgcaatggaacctggtttgctgaaacgtg

SEQ ID NO: 753545 - DNA, 75 bp, synthetic construct
  source 1..75: mol_type = other DNA
cggcaatattctcaacattgtgctggatgtctggctggtgatggggctgcatatgaacgtgcagggcgcggcgct

SEQ ID NO: 753546 - DNA, 75 bp, synthetic construct
  source 1..75: mol_type = other DNA
gaccgctatcttatctggcaggtgattttgccgttggtcggcgtctggtgttatctgctggacggcatgtttata

SEQ ID NO: 753547 - DNA, 75 bp, synthetic construct
  source 1..75: mol_type = other DNA
atctggaggaacggatcgcgatgatgcagtggtgggcgaattatctggatgcgaatctcggcgggtatatttccc

SEQ ID NO: 753548 - DNA, 75 bp, synthetic construct
  source 1..75: mol_type = other DNA
catgagcgacaacaccgtcaacaaggcgctgcgcgtgatgggttacgacaccaaaaaggatatctgcgggcatgg

SEQ ID NO: 753549 - DNA, 75 bp, synthetic construct
  source 1..75: mol_type = other DNA
tcgctactgcggcaggctgctgacgaaatacgcgctcaagctgtcgctgctgtttttcgtgcgctccagcgaact

SEQ ID NO: 753550 - DNA, 75 bp, synthetic construct
  source 1..75: mol_type = other DNA
gtgaaaaagaagttactcaagtcgaacccggcgctgtatctggatgatgagtttgccgcgccagagactaatcat

SEQ ID NO: 753551 - DNA, 75 bp, synthetic construct
  source 1..75: mol_type = other DNA
ccgcatcgacgggaaagagaaaaaactggcctttggcccctacccggagatctcgctgttgcaggcccgccgctt

SEQ ID NO: 753552 - DNA, 75 bp, synthetic construct
  source 1..75: mol_type = other DNA
gcaagatcaaaccctccgacaaacctttcaaaatgacagacagttccggactgtacctgttgatcaaacccaatg

SEQ ID NO: 753553 - DNA, 75 bp, synthetic construct
  source 1..75: mol_type = other DNA
atggcattcctcacttcatctgataaagctctctggcatctcgccttacctatgattttctccaatatcaccgtt

SEQ ID NO: 753554 - DNA, 75 bp, synthetic construct
  source 1..75: mol_type = other DNA
gacagacttaataagttgtgccaaatcggtgttaaagaagccgaagacggagaacgcgttctgccggggcatgct

SEQ ID NO: 753555 - DNA, 75 bp, synthetic construct
  source 1..75: mol_type = other DNA
gatgaactgttaacgctgatggcagcacaccgcatgtggtcacgcattcctaagattgacaaaattccggcgtaa

SEQ ID NO: 753556 - DNA, 75 bp, synthetic construct
  source 1..75: mol_type = other DNA
atgcgcctgaaagacagcgttccgtgcgcagttattgaaggcgaccagcaaaccgtgaacgatgccgcacgcatt

SEQ ID NO: 753557 - DNA, 75 bp, synthetic construct
  source 1..75: mol_type = other DNA
tccacgctggtacaaacgagctgatggagccggttgtttggcaaggcgtgtcctacgaaccgtggccaatcaaag

SEQ ID NO: 753558 - DNA, 75 bp, synthetic construct
  source 1..75: mol_type = other DNA
gcttatctccctctgcactcattgagttgttcgtactggatatgtcgaacacaacttcaggggggaagttattct

SEQ ID NO: 753559 - DNA, 75 bp, synthetic construct
  source 1..75: mol_type = other DNA
ttaccaaatcaaaattcacgatggcccggcggttaaccgtcatcggccttcggtagatgtgttgttccattctgt

SEQ ID NO: 753560 - DNA, 75 bp, synthetic construct
  source 1..75: mol_type = other DNA
ctgccgtggctgggtaatcatggtttgtggctggcgttaaccgtctttctggcgttgcgcgggctttctctggcg

SEQ ID NO: 753561 - DNA, 75 bp, synthetic construct
  source 1..75: mol_type = other DNA
ttatctactggacggcatgtttataggtgcaacgcgcgccgccgaaatgcgaaacagtatggcggtggcagcagc

SEQ ID NO: 753562 - DNA, 75 bp, synthetic construct
  source 1..75: mol_type = other DNA
gtcggggatcgtagcgttgctgttttctgtgagttatttgctggcaggggaacacatcattgcgttgctgacgtc

SEQ ID NO: 753563 - DNA, 75 bp, synthetic construct
  source 1..75: mol_type = other DNA
ccgcatatgtttgccgccgcctcgctgatgctgctcaacaaagttgacttgctgccgtatctcaatttcgacgtt

SEQ ID NO: 753564 - DNA, 75 bp, synthetic construct
  source 1..75: mol_type = other DNA
acaaggcatccatcaacagcctgaatcagacgctctccgactatcagcaggccaccgccacgcagatagacagca

SEQ ID NO: 753565 - DNA, 75 bp, synthetic construct
  source 1..75: mol_type = other DNA
acattaaacgtctgcggcaaaaaattggcctgacacagaaagaatgtgccgaaatattcagcatgagtccgcgta

SEQ ID NO: 753566 - DNA, 75 bp, synthetic construct
  source 1..75: mol_type = other DNA
ctggcctttggcccctacccggatgtttctttgtttaaggcgcgccagctacgtgatgccgcacgcgctaaagtt

SEQ ID NO: 753567 - DNA, 75 bp, synthetic construct
  source 1..75: mol_type = other DNA
gttgcttgccgctgcgttgtgcctgggcttggggatcttcattaacgaaaccaccggcgaatttccgcaaaaaga

SEQ ID NO: 753568 - DNA, 75 bp, synthetic construct
  source 1..75: mol_type = other DNA
aaacagggaagctcctgccatcaggcaaacgtgagttactggcgctatatgaaatctcggatatgccagtcaaaa

SEQ ID NO: 753569 - DNA, 75 bp, synthetic construct
  source 1..75: mol_type = other DNA
agaaggggttacaaacctcttccgctacggcgtatatatatcccgaaatctaacggcaaaaagcgaccattgggg

SEQ ID NO: 753570 - DNA, 75 bp, synthetic construct
  source 1..75: mol_type = other DNA
ggacgctgaatgattttctcggtgccatgacggaagaggatgtcatgccggaggcattacgccgttttgaggcta

SEQ ID NO: 753571 - DNA, 75 bp, synthetic construct
  source 1..75: mol_type = other DNA
gcaaggacattagtcttggttattgctcatgccatactattgcctttgctgcaatccaaatagcatattcactga

SEQ ID NO: 753572 - DNA, 75 bp, synthetic construct
  source 1..75: mol_type = other DNA
tttattcaaaattttaccatttttccgttttatgcgtgaaaatatagaagatatcaatatttataatttatccga

SEQ ID NO: 753573 - DNA, 75 bp, synthetic construct
  source 1..75: mol_type = other DNA
aaaaaaaataccatccttacgtgataatggcaaggactacaatgttgaagttgcagatctttataaaaatggaga

SEQ ID NO: 753574 - DNA, 75 bp, synthetic construct
  source 1..75: mol_type = other DNA
atgcgtatagctaatgatgaaaatattttgctcaagaaaagtagattcttttgtgggggaaagagtcaggaggca

SEQ ID NO: 753575 - DNA, 75 bp, synthetic construct
  source 1..75: mol_type = other DNA
cgggcctgaactgctggtggtgctgccggaagcgaaagcggtgggatcagtagcgatgtcgatgttgggaagtga

SEQ ID NO: 753576 - DNA, 75 bp, synthetic construct
  source 1..75: mol_type = other DNA
gatgcaccggaaaagaaacaggattatggccggtggtcaacagacatgatgaaatcactggtcgcaggaaaaacg

SEQ ID NO: 753577 - DNA, 75 bp, synthetic construct
  source 1..75: mol_type = other DNA
atgagaaaaatcagtggaatgttgaatctggagaaggccaggatgcagttgcgtgttttgttatctggacctgtt

SEQ ID NO: 753578 - DNA, 75 bp, synthetic construct
  source 1..75: mol_type = other DNA
atggccttcctgcaacaggatgcgttgcacttaagcgatctgttccgtcattccgcgcagcaaatgggcgttacg

SEQ ID NO: 753579 - DNA, 75 bp, synthetic construct
  source 1..75: mol_type = other DNA
ccaccggcgaatttccgcaaaaagaacaggaactgtttgaaggcattgtggcggtgatcgccgtggtgatcctta

SEQ ID NO: 753580 - DNA, 75 bp, synthetic construct
  source 1..75: mol_type = other DNA
ttccaggtcgccccagacgtttcgctcctgagcaggcagtctctgcggcaaaagtgctttttcaccaaaaaggtt

SEQ ID NO: 753581 - DNA, 75 bp, synthetic construct
  source 1..75: mol_type = other DNA
ttctgcgaaggcacgggaggggcactccatcgaacaactctgtgcaacagctgccctggcgggggaagcgataaa

SEQ ID NO: 753582 - DNA, 75 bp, synthetic construct
  source 1..75: mol_type = other DNA
ttctgcgaaggcacgggaggggcactctatagaacaactctgtgcaacagcagcaatggcgggggaagcgataaa

SEQ ID NO: 753583 - DNA, 75 bp, synthetic construct
  source 1..75: mol_type = other DNA
gcaagatcaaacccaccgataaatcctacaagcttacagacagttcaggactgtacctgctgatcaaacccaacg

SEQ ID NO: 753584 - DNA, 75 bp, synthetic construct
  source 1..75: mol_type = other DNA
gcagtggtggtcagattatcttgatgtgaatagtgacgggtatatttcagcttaccagtatgcccaccaccagag

SEQ ID NO: 753585 - DNA, 75 bp, synthetic construct
  source 1..75: mol_type = other DNA
tggctgtatggttcttgaaggtattcatagtcatgatccacaagcgcgtgatattgccgttcaatattatcacgc

SEQ ID NO: 753586 - DNA, 75 bp, synthetic construct
  source 1..75: mol_type = other DNA
tggcgcggatgttagccaaaatgaattacctgaccatgtgcgggatgctggctggctccatgaccgatcctccgg

SEQ ID NO: 753587 - DNA, 75 bp, synthetic construct
  source 1..75: mol_type = other DNA
tgttatctcgcgcctgaaccgtgccggggtcgaactggttgccagtggcgatatcagcctgcagttcggcgatat

SEQ ID NO: 753588 - DNA, 75 bp, synthetic construct
  source 1..75: mol_type = other DNA
gtcagccgttcgcctgcgcctcaagtggccatcgctttttaaacaggaggatgatggcgatctggttggctattc

SEQ ID NO: 753589 - DNA, 75 bp, synthetic construct
  source 1..75: mol_type = other DNA
caaagcgcacaatgtgtgactgattttatgagtaccgtgatgtcagggctttctgcgaaggcacgagaggggcac

SEQ ID NO: 753590 - DNA, 75 bp, synthetic construct
  source 1..75: mol_type = other DNA
aaaacccctctcaacagatctcaactctgcacgatatctacaggagattgctccaaaaggcagtatcgtgtcttt

SEQ ID NO: 753591 - DNA, 75 bp, synthetic construct
  source 1..75: mol_type = other DNA
ctctgaagccaaaagagatgaatacttgttgaatctgttggagaaagagttgagtaaaatttcaaatgcgcagga

SEQ ID NO: 753592 - DNA, 75 bp, synthetic construct
  source 1..75: mol_type = other DNA
atacgttggggcttcacgcctgaaagagttgaccaagcgcaccacatttatccgtgtgctggaacaagaaaaccg

SEQ ID NO: 753593 - DNA, 75 bp, synthetic construct
  source 1..75: mol_type = other DNA
cacgccccactacaaaacctgtgtcaagaaactggaatctttaatgaccgggccgcgtaaaaaacgtgtgttcaa

SEQ ID NO: 753594 - DNA, 75 bp, synthetic construct
  source 1..75: mol_type = other DNA
tgcgagaggagtccagttatccacgccagatctcttaaaaaactatttgttttcgatagtaactaaggatgagaa

SEQ ID NO: 753595 - DNA, 75 bp, synthetic construct
  source 1..75: mol_type = other DNA
ccattgagaacgccaaaatcggcaactatatccagtccaacaactatgcagctggttctgctggctggaagttga

SEQ ID NO: 753596 - DNA, 75 bp, synthetic construct
  source 1..75: mol_type = other DNA
cagtgatggcggttgcaccatgccgggcgatgtggctaaagcctttggcggcggcgccgatttcgtgatgctggg

SEQ ID NO: 753597 - DNA, 75 bp, synthetic construct
  source 1..75: mol_type = other DNA
accaaaaccatttgtgctggtaatgtagtaactggcgaaatgtgtgaagagttgattctttccggtgccgatatc

SEQ ID NO: 753598 - DNA, 75 bp, synthetic construct
  source 1..75: mol_type = other DNA
ttttgttgtgacctggctatgggcaccagaaaccaaagcactcccgctggtggcggcgggaaatgcaggaggtgc

SEQ ID NO: 753599 - DNA, 75 bp, synthetic construct
  source 1..75: mol_type = other DNA
taaagaggcggcaaggcagggcgctaaaacgttggtcgtcatccgcactgtgccgtcgcaaatgtactacacgcc

SEQ ID NO: 753600 - DNA, 75 bp, synthetic construct
  source 1..75: mol_type = other DNA
tgactatgcgccgaattactttttaccaaccaaacaaaactggctggatgtgattcgcgcctccagtgcgatacc

SEQ ID NO: 753601 - DNA, 75 bp, synthetic construct
  source 1..75: mol_type = other DNA
ccgaagcaatataccagccgcccggagaacgccacgaatacaggatgaatgacggtagcgcggtggttgagttcc

SEQ ID NO: 753602 - DNA, 75 bp, synthetic construct
  source 1..75: mol_type = other DNA
atgagtgatatagcattaacagtcagtattctggctttggtggcggtcgtcggtttgtttatcggcaacgtcaag

SEQ ID NO: 753603 - DNA, 75 bp, synthetic construct
  source 1..75: mol_type = other DNA
gctatgcgatggcgtatccattcggcatttgcgggattttgttcaccatgtggatactgcgggttatttttcgcg

SEQ ID NO: 753604 - DNA, 75 bp, synthetic construct
  source 1..75: mol_type = other DNA
tttatctactccaaaattacaccgcacaatgaatggcaattaatcaaaaacaataataccgcagcgtcactggcg

SEQ ID NO: 753605 - DNA, 75 bp, synthetic construct
  source 1..75: mol_type = other DNA
ttgttttcctgtttgtgatgaccatttttaacagtcgctttgttcgccgcattggcgcgctgaatatgttccgct

SEQ ID NO: 753606 - DNA, 75 bp, synthetic construct
  source 1..75: mol_type = other DNA
tatgtcaatcagtggacaggtagataagaacaatagttctgggttaattaaatatgataatttctactatgaatg

SEQ ID NO: 753607 - DNA, 75 bp, synthetic construct
  source 1..75: mol_type = other DNA
cgaaaagccattggttcatttatcgaaaacacatgtactactgactggagtcattaccagggcctcttttgctgt

SEQ ID NO: 753608 - DNA, 75 bp, synthetic construct
  source 1..75: mol_type = other DNA
ccgtgctgccaactactctgaagagcagttggaaaaaattaagctggaagacggaatccaccatcatgaatacgt

SEQ ID NO: 753609 - DNA, 75 bp, synthetic construct
  source 1..75: mol_type = other DNA
tgacatttggccggaggagcgtctggaaattcttatagataaatttaaggccttgcagcgtaatgattttgttcc

SEQ ID NO: 753610 - DNA, 75 bp, synthetic construct
  source 1..75: mol_type = other DNA
caacctacaatggtgctaattttattcggcaacagattgaatctatccagaaacaaacttatagaaattggcgtc

SEQ ID NO: 753611 - DNA, 75 bp, synthetic construct
  source 1..75: mol_type = other DNA
cttttagcgcctatttttttattggcgtggctatggtgattatctttctgtttatctattccaaaattactccgc

SEQ ID NO: 753612 - DNA, 75 bp, synthetic construct
  source 1..75: mol_type = other DNA
cgtggctatggtgattatttttctgtttatctactccaaaattacaccgcacaacgaatggcagttaattaaaaa

SEQ ID NO: 753613 - DNA, 75 bp, synthetic construct
  source 1..75: mol_type = other DNA
accgcagcaggaatgtttatgggaaccgccgcgctggctggcggtatttttaacgcagcttgtatgacatggtaa

SEQ ID NO: 753614 - DNA, 75 bp, synthetic construct
  source 1..75: mol_type = other DNA
gtacattgttaggttacgttatcccattatccagtgcggcaatcaatgcggtgagtattccagactatttcgcct

SEQ ID NO: 753615 - DNA, 75 bp, synthetic construct
  source 1..75: mol_type = other DNA
atagcttttactgaattcttccgcctgagtgaatgcgacaagaaaaaggctagaactatacttggcattcctgaa

SEQ ID NO: 753616 - DNA, 75 bp, synthetic construct
  source 1..75: mol_type = other DNA
tttgaaagtggatcggttactcaacttaaagatgctattttaaggatgagagtgatagaaaaaagacatgaaatg

SEQ ID NO: 753617 - DNA, 75 bp, synthetic construct
  source 1..75: mol_type = other DNA
attccgcctgcacccgtcgccaacgatacgctggttaccgaggtgatagacgctccacaggcgaacgacccgaca

SEQ ID NO: 753618 - DNA, 75 bp, synthetic construct
  source 1..75: mol_type = other DNA
cagatgatattgacgtcattaaccgcctctatttccagctactggatgccgagggtcgttactcgaatggcaata

SEQ ID NO: 753619 - DNA, 75 bp, synthetic construct
  source 1..75: mol_type = other DNA
gttggcgtttaaatacctgtaatggcctactgtggccacgtggccataccattcgtgatagctggctaacttggt

SEQ ID NO: 753620 - DNA, 75 bp, synthetic construct
  source 1..75: mol_type = other DNA
atgacgagttcgcagcccgccggatggacggaggccgagttggcgcaggcggcggcgcgcggacagcttgacctg

SEQ ID NO: 753621 - DNA, 75 bp, synthetic construct
  source 1..75: mol_type = other DNA
tctgattttatttattatttaatgaaaaaacacaacaaatatcccgtgtatgtattacatataccatcaaacaat

SEQ ID NO: 753622 - DNA, 75 bp, synthetic construct
  source 1..75: mol_type = other DNA
gggttatctatgctcttattgttatctcattcttaaaatcaataataaccgacacaataaaaggaaaaaataaaa

SEQ ID NO: 753623 - DNA, 75 bp, synthetic construct
  source 1..75: mol_type = other DNA
tgcagtcattgctgtggcaacccccacgcgcgattatgaccgcgtttcttcctacggtacttagaagactgcgtt

SEQ ID NO: 753624 - DNA, 75 bp, synthetic construct
  source 1..75: mol_type = other DNA
cacttttataggtgttacttcggcaactgtaactgcaaaaattgtatttaagcagggcgctactaaaagatggct

SEQ ID NO: 753625 - DNA, 75 bp, synthetic construct
  source 1..75: mol_type = other DNA
tactgataaatatttcaccggactatatgatacataagaacattccatcaattgtcatgctctctgtttttatat

SEQ ID NO: 753626 - DNA, 75 bp, synthetic construct
  source 1..75: mol_type = other DNA
tgaaccgccccgggtttcctggagagtattttatctgtgaactcaggctgccagatcatcgtttccgatggaagc

SEQ ID NO: 753627 - DNA, 75 bp, synthetic construct
  source 1..75: mol_type = other DNA
gcgatcaccggatcgctggcgcggaagcgttgatgcgctggcggcatccgaggcttggcctgttgccgcccggcc

SEQ ID NO: 753628 - DNA, 75 bp, synthetic construct
  source 1..75: mol_type = other DNA
gctgcgtgacgcggttttgaatcgattacatgcacttccgcagggcagtgcagagctgcgattacaggcgattgt

SEQ ID NO: 753629 - DNA, 75 bp, synthetic construct
  source 1..75: mol_type = other DNA
cgtcgcgaattgccgcgcgaacaggcacaggaagcgggctacggcctggccgcgctgattgatggattatggctg

SEQ ID NO: 753630 - DNA, 75 bp, synthetic construct
  source 1..75: mol_type = other DNA
atgtcaggttttaatgtttataatgcgtatgggaaactcactgtagattctgataatagagctactctaatttct

SEQ ID NO: 753631 - DNA, 75 bp, synthetic construct
  source 1..75: mol_type = other DNA
cttccccggcattgaaaacgaacttcaggtttcatacgagctgaaacaggctgtgccgtacgtgcgcgcggtatc

SEQ ID NO: 753632 - DNA, 75 bp, synthetic construct
  source 1..75: mol_type = other DNA
gtgtgaagtgcttagcctgctacaagcgggataccagcgcgtgttgatggtcgattttgatggctttctacctga

SEQ ID NO: 753633 - DNA, 75 bp, synthetic construct
  source 1..75: mol_type = other DNA
atgaatgaacacatgatatatgtgcttaatgtcgatacctgtattcttcaggccaacaataaaagaataacagat

SEQ ID NO: 753634 - DNA, 75 bp, synthetic construct
  source 1..75: mol_type = other DNA
tcgctaagtaaatttgcttcagcattggtgcagagcgcattttatggaggttattttttaattgcaataccagca

SEQ ID NO: 753635 - DNA, 75 bp, synthetic construct
  source 1..75: mol_type = other DNA
atgaaatttacattaaatattaccgactggcaggcactggcgcctggacttagcgaagcgcagcaatggcaagca

SEQ ID NO: 753636 - DNA, 75 bp, synthetic construct
  source 1..75: mol_type = other DNA
tgcctggctgaagctggttgttgaccaggaagatgccgatggccgctttgccacgcaggaagcgaaagccgcgaa

SEQ ID NO: 753637 - DNA, 75 bp, synthetic construct
  source 1..75: mol_type = other DNA
aaatcatgctggggtaaaagatgcaaatcccgtggcagttaatcaggaaacacctaagctctctatagcgcttaa

SEQ ID NO: 753638 - DNA, 75 bp, synthetic construct
  source 1..75: mol_type = other DNA
ctattttttagagctaacaccaattttggctatccttttggcaatacatatttatttttccttaaaaaaagaatc

SEQ ID NO: 753639 - DNA, 75 bp, synthetic construct
  source 1..75: mol_type = other DNA
ttgatgtcggtgctttcaatattccatctgcttttggtaatggctctacactaggttatattgggcttaatttct

SEQ ID NO: 753640 - DNA, 75 bp, synthetic construct
  source 1..75: mol_type = other DNA
attcatatgaggcagggaaactggcggaatcaatcttgatattcaatgatatcattgtcatgagcggtaatgaaa

SEQ ID NO: 753641 - DNA, 75 bp, synthetic construct
  source 1..75: mol_type = other DNA
gacgtccattttgctgttcagtgatgttcttgccatgaaaggcgtggatgaggtatttggctattttttgggtaa

SEQ ID NO: 753642 - DNA, 75 bp, synthetic construct
  source 1..75: mol_type = other DNA
aatggcaaataaaagttgatgcgatgacacgataccatgaggaagatgaagtgatggagttctttagctctatac

SEQ ID NO: 753643 - DNA, 75 bp, synthetic construct
  source 1..75: mol_type = other DNA
gtaccgcccgggagacatgatttttgttgatcccgaagtccctgcctgccacggtgacgacgttattgcattgat

SEQ ID NO: 753644 - DNA, 75 bp, synthetic construct
  source 1..75: mol_type = other DNA
cctacaaaactatgcaaattcaatacattgcaggagtcgaataggcctgacaggcgtagcacgtcagacggtgta

SEQ ID NO: 753645 - DNA, 75 bp, synthetic construct
  source 1..75: mol_type = other DNA
gtggcaatgaaaaagcacgtgagcggatgaaagcacaatacagcattgcaggcatgacccacggcgtcgtggtgg

SEQ ID NO: 753646 - DNA, 75 bp, synthetic construct
  source 1..75: mol_type = other DNA
ctccaatatggtcctaataaattcaggaatcgtagtaaagcaaatgaattactcagtacattattctctcaaaat

SEQ ID NO: 753647 - DNA, 75 bp, synthetic construct
  source 1..75: mol_type = other DNA
ccggtaaccgctacaggctaccagcacgctaccaccgtcagaacatgccacggcatcgcatggcggtttgtggct

SEQ ID NO: 753648 - DNA, 75 bp, synthetic construct
  source 1..75: mol_type = other DNA
cacgcacacctcaacaatggtgggctgtatggaacttccttcgggaaggctggtttcctctaacaccagtaaggc

SEQ ID NO: 753649 - DNA, 75 bp, synthetic construct
  source 1..75: mol_type = other DNA
taccggattcttcactaaatatggtgacggcggtacggacattaatccgctgtatcgtctcaacaaacgtcaggg

SEQ ID NO: 753650 - DNA, 75 bp, synthetic construct
  source 1..75: mol_type = other DNA
aatctgcgtcccatcgcaaacaaaataaaatactcatcgacagcggatgaacttgaattccataatttcgaacgc

SEQ ID NO: 753651 - DNA, 75 bp, synthetic construct
  source 1..75: mol_type = other DNA
acttggtatcagccagtcgagcgtcagcgcgcgtgtgaaagcgctggaggataaccttggtgtcctgctatttga

SEQ ID NO: 753652 - DNA, 75 bp, synthetic construct
  source 1..75: mol_type = other DNA
cgcttaaggtcacggttaacggccagtctgcagatattgtccagaacagccaggtatcagccgacatcaataaca

SEQ ID NO: 753653 - DNA, 75 bp, synthetic construct
  source 1..75: mol_type = other DNA
gtagcccagtatcacttttcttgctgacacttgcagaatctggtgaacggaaaagtacggttgataaaatgctga

SEQ ID NO: 753654 - DNA, 75 bp, synthetic construct
  source 1..75: mol_type = other DNA
ttaaagaagttttaagctccagcaatgttgacacatataaaaaatacattgatagtttaaacgaagggcgtcaat

SEQ ID NO: 753655 - DNA, 75 bp, synthetic construct
  source 1..75: mol_type = other DNA
cgttcttagtttcaataaatttatgcaactcgaaaccaatcgggaaattattagcaccgcaaaaagtaaatgtga

SEQ ID NO: 753656 - DNA, 75 bp, synthetic construct
  source 1..75: mol_type = other DNA
ctgccactgaacgcgaagcacgcgcccagctgccgcacgcacatctgatttttgtcgcccgtattcgtcaggggg

SEQ ID NO: 753657 - DNA, 75 bp, synthetic construct
  source 1..75: mol_type = other DNA
actgacgatcgctgcagcgtggcagcactacgtttacgggacggggaagaaccgcttaacgagctgcggcgcaaa

SEQ ID NO: 753658 - DNA, 75 bp, synthetic construct
  source 1..75: mol_type = other DNA
gggggatgccgaaagtcagccgctgaccgatgatcgctgtcgtgtggcaacgttgcgattaagggaaggagagga

SEQ ID NO: 753659 - DNA, 75 bp, synthetic construct
  source 1..75: mol_type = other DNA
caggattatatcagcggtatgaccgacctctatgcgtgggatgaataccgacgtctgatggccgtagaacaataa

SEQ ID NO: 753660 - DNA, 75 bp, synthetic construct
  source 1..75: mol_type = other DNA
gatcaatattgatcagataaacgatgcttttgctcgccttgcaaaaggggatatggcacatcgttttgttattga

SEQ ID NO: 753661 - DNA, 75 bp, synthetic construct
  source 1..75: mol_type = other DNA
tgttccgtacgctgatccaggcggtagcgaaagtgaccggcgcgaccgatctgagcaacaaatcgctgcgcgtaa

SEQ ID NO: 753662 - DNA, 75 bp, synthetic construct
  source 1..75: mol_type = other DNA
tcatcatctccacgaggcatggggtcagcatgagaaaggttcgctgtttgcacaggtagtagaaaatgcctggga

SEQ ID NO: 753663 - DNA, 75 bp, synthetic construct
  source 1..75: mol_type = other DNA
aaataaactggcatcgtcgttaccgttcaccacagggcgttaaaaccgaacatgagatcctgcgaatctttgaga

SEQ ID NO: 753664 - DNA, 75 bp, synthetic construct
  source 1..75: mol_type = other DNA
tggcagatgaggaaggtattacccaggcgcagatgcttgaaaaactgattgaatcagagctgaaacgcagagcaa

SEQ ID NO: 753665 - DNA, 75 bp, synthetic construct
  source 1..75: mol_type = other DNA
tgagaggagagggattaagcaaagactctcgcttctggcgtgctttttcacgctggcgctcaattatggataatg

SEQ ID NO: 753666 - DNA, 75 bp, synthetic construct
  source 1..75: mol_type = other DNA
gctattatctttctgaagaagcctatattgcccgtttgcgtaaagaacttaatttggcgctttacagtcgttttc

SEQ ID NO: 753667 - DNA, 75 bp, synthetic construct
  source 1..75: mol_type = other DNA
tacccactcgatggaagtccagcaggtggggcgttatatcgctaaagagattttaagccgcctgaaagagcttaa

SEQ ID NO: 753668 - DNA, 75 bp, synthetic construct
  source 1..75: mol_type = other DNA
actgacgatcgctgcagcgtggcggcactacgtttacgggacggggaagaaccgcttaacgagctgcggcgcaag

SEQ ID NO: 753669 - DNA, 75 bp, synthetic construct
  source 1..75: mol_type = other DNA
gcacgtccgatggctcgcgtcatccaggacaacctgaagaaaccgctcgctaacgaactgctgtttggctcgctg

SEQ ID NO: 753670 - DNA, 75 bp, synthetic construct
  source 1..75: mol_type = other DNA
gttcgaacccttaaagtaaaagcagaaaaggctggcgcctcttacttccgcattacttcacttggcggagataat

SEQ ID NO: 753671 - DNA, 75 bp, synthetic construct
  source 1..75: mol_type = other DNA
cgtgtacatgcagaattgtcaccgggatgggaaaatccaaagcatgtcaggcagtggttgtcgacgcttgaaaat

SEQ ID NO: 753672 - DNA, 75 bp, synthetic construct
  source 1..75: mol_type = other DNA
atggaaagtagccttgccggtatcgtgaacgtctggctgtgtctcgccattgtgctggggttgtttgtgtatcgc

SEQ ID NO: 753673 - DNA, 75 bp, synthetic construct
  source 1..75: mol_type = other DNA
tacagcaaaaatatataaaaatgataatatctcaattaatgagggggagttcaacgctactgcacttataaatgt

SEQ ID NO: 753674 - DNA, 75 bp, synthetic construct
  source 1..75: mol_type = other DNA
ttccacctgaaagagctggcacacgccggcatggtcacgtcgcggcaagaaggccgatttgtgatctacgaggcg

SEQ ID NO: 753675 - DNA, 75 bp, synthetic construct
  source 1..75: mol_type = other DNA
tcaccctcggcggctactggctgacgcggttacagtcccgtacggaaaccccggccatgcagcaattcgcccgct

SEQ ID NO: 753676 - DNA, 75 bp, synthetic construct
  source 1..75: mol_type = other DNA
aggaagatggatatacccctattgaaaaagggtatcagcctaaaaatgacttggctaataatggttttcaacctt

SEQ ID NO: 753677 - DNA, 75 bp, synthetic construct
  source 1..75: mol_type = other DNA
agtaccctttgcgcatcccattagaggttaagttagcaatcgagaagtcagcgaaagaaaatggtcgctcaataa

SEQ ID NO: 753678 - DNA, 75 bp, synthetic construct
  source 1..75: mol_type = other DNA
acccgaacgttcatgccgtattgatcgcctccgcgaccgacacccacgcggatctgattgaaatggccgcccgtt

SEQ ID NO: 753679 - DNA, 75 bp, synthetic construct
  source 1..75: mol_type = other DNA
ctaaaggacgcggaaagtgggtgctacgctacgtcagccctgtcactcagaaacgacgtaatgccggtcttggct

SEQ ID NO: 753680 - DNA, 75 bp, synthetic construct
  source 1..75: mol_type = other DNA
gacggcaacattccgcagccgggctacatcatcgccgtggcagacgagctgctttccggaaaggttatgggcggc

SEQ ID NO: 753681 - DNA, 75 bp, synthetic construct
  source 1..75: mol_type = other DNA
acggcttcaatcagctggaaatgacagccatcggctgcaccaggcagtcagaggcgaaccgaaaggggcgctggg

SEQ ID NO: 753682 - DNA, 75 bp, synthetic construct
  source 1..75: mol_type = other DNA
caattgtttatattatcagggagatgcctatgtaaaaattacaggccagactatggatggtaaagataatgtcct

SEQ ID NO: 753683 - DNA, 75 bp, synthetic construct
  source 1..75: mol_type = other DNA
ttcagcaaggaaatagggctggcgttctggcgatacattctgaccaacaccaccgttcagtgcgtcacatcattt

SEQ ID NO: 753684 - DNA, 75 bp, synthetic construct
  source 1..75: mol_type = other DNA
ctgaggatgatcgccacggtcttgatgcaggtaaaattctgggggcaatccagatcctctggtatgaaatgagtc

SEQ ID NO: 753685 - DNA, 75 bp, synthetic construct
  source 1..75: mol_type = other DNA
tacaaccgcgctgtgcgggatgaagctgaacgcaggttcccctataacgtagagtgtaaaacgtcacatcagctg

SEQ ID NO: 753686 - DNA, 75 bp, synthetic construct
  source 1..75: mol_type = other DNA
tggccttatccaccaggataacagcaccgatgcgatggaagagatcaagaagatctttacgccggaattccgtaa

SEQ ID NO: 753687 - DNA, 75 bp, synthetic construct
  source 1..75: mol_type = other DNA
atcgaagaaactgttcaaatcatcaacggcctgaaaccgaagtatgaagcgcaccacgacgtgcgttataccgcg

SEQ ID NO: 753688 - DNA, 75 bp, synthetic construct
  source 1..75: mol_type = other DNA
agtatctcaaaaatagcatcaaaagcattcaggactacccaaaacccggcattcttttccgcgatgtcaccagct

SEQ ID NO: 753689 - DNA, 75 bp, synthetic construct
  source 1..75: mol_type = other DNA
gagaaaaatgctggaaacagggcggtcgccacgcactgaagacgagcatatgattgcgggaaatgcccggctgat

SEQ ID NO: 753690 - DNA, 75 bp, synthetic construct
  source 1..75: mol_type = other DNA
ccagctggtaagtgaacaaagccagaaggctgctgatacatccccgtcagaagacggggagaacgatgccgtata

SEQ ID NO: 753691 - DNA, 75 bp, synthetic construct
  source 1..75: mol_type = other DNA
gggtgatatgcacggcgctgatggccagtctgagcggcaggaaggtgtactgggtggggggtattgaaggctacc

SEQ ID NO: 753692 - DNA, 75 bp, synthetic construct
  source 1..75: mol_type = other DNA
ggcgtgatcggcagtgccctgacggcgagccttatggagaaaaaggtcttctgggtcggggggattgaaggctac

SEQ ID NO: 753693 - DNA, 75 bp, synthetic construct
  source 1..75: mol_type = other DNA
tggaatcaatgacgcaaaatatcgtccgggcgaatttcgtgaaacagatgatgtagtgatcgccgactatgacgg

SEQ ID NO: 753694 - DNA, 75 bp, synthetic construct
  source 1..75: mol_type = other DNA
gtccgtgcctgcattctgcattttatgctggcccatgaacatccgtttcgcgatggcaacgggcgcaccagtcgg

SEQ ID NO: 753695 - DNA, 75 bp, synthetic construct
  source 1..75: mol_type = other DNA
ctatcggacacagtatgagcgaagaaatcatttatgacgccgaaggacacccgttaacacgtgatttacgtagct

SEQ ID NO: 753696 - DNA, 75 bp, synthetic construct
  source 1..75: mol_type = other DNA
tacgcaacagtgatgatggctttgggtttgccggttctgacgcaattatctttaacggtaatatcgttaacgcgt

SEQ ID NO: 753697 - DNA, 75 bp, synthetic construct
  source 1..75: mol_type = other DNA
caaatctacggtgccaccctgcgtgctatcggccacagtatgagcgaagagatcatttatgacgccgaaggtcac

SEQ ID NO: 753698 - DNA, 75 bp, synthetic construct
  source 1..75: mol_type = other DNA
ttcatgtcattaaagaacgcgtcggtgggggctttggttccaaacaggacattttgctggaagaagtgtgcgcat

SEQ ID NO: 753699 - DNA, 75 bp, synthetic construct
  source 1..75: mol_type = other DNA
gtctggttcaacaagcaatggttgatgtcggcgtggtgcagtccggttataacgatccggctgcggctctgatta

SEQ ID NO: 753700 - DNA, 75 bp, synthetic construct
  source 1..75: mol_type = other DNA
ttcatgtcattaaagaacgtgtaggcggcggttttggttctaaacaggacatcctgctggaagaagtgtgcgcct

SEQ ID NO: 753701 - DNA, 75 bp, synthetic construct
  source 1..75: mol_type = other DNA
tctctgggcaaatggaacgagttaagtctggttcaacaggccatggttgatgttggcgtggtgcagtctggttat

SEQ ID NO: 753702 - DNA, 75 bp, synthetic construct
  source 1..75: mol_type = other DNA
tgacattccgcgtgatttccgcgctgtgctggtgccgagcgacgataaagtcggcccgttcggggcgaaatcgat

SEQ ID NO: 753703 - DNA, 75 bp, synthetic construct
  source 1..75: mol_type = other DNA
accaactggaaattatcgaacgtaaccgggtacacgaagggcaagagctgaaaattctcggtgcaatcggtgaag

SEQ ID NO: 753704 - DNA, 75 bp, synthetic construct
  source 1..75: mol_type = other DNA
ccggcaacgcggcgcgtatggcggcagaaaacctccgagagaaaatcctgttccacggcgcacaaatgctggggg

SEQ ID NO: 753705 - DNA, 75 bp, synthetic construct
  source 1..75: mol_type = other DNA
aacgatccagctgcggctctgattatcaccgatcttctcgatcgcatcgccgcacctacccgcgaagagatcgac

SEQ ID NO: 753706 - DNA, 75 bp, synthetic construct
  source 1..75: mol_type = other DNA
cggcggttttgggtctaaacaggacatcctgctggaagaagtgtgcgcctgggcaacctgcgtgaccgggcgtcc

SEQ ID NO: 753707 - DNA, 75 bp, synthetic construct
  source 1..75: mol_type = other DNA
tgactggcacgtagggcgtggtgtcgccattatcatgcagaaatcagggatcccggatatcgatcaagctaactg

SEQ ID NO: 753708 - DNA, 75 bp, synthetic construct
  source 1..75: mol_type = other DNA
tgcaatgaaacacatttttcatcggctggatagtgaagctttattgttagtggagagaacgcgttcaaaacaaaa

SEQ ID NO: 753709 - DNA, 75 bp, synthetic construct
  source 1..75: mol_type = other DNA
gcggtcatgtttgtccggtggggtgtattgatctcggggaagtgaagtttaagaaaggagaaaaagaacacccgg

SEQ ID NO: 753710 - DNA, 75 bp, synthetic construct
  source 1..75: mol_type = other DNA
gtggtcatgtttgcccggttggttgtattgatctcggggaagtgaagtttaagaagggagagaaagaacacccgg

SEQ ID NO: 753711 - DNA, 75 bp, synthetic construct
  source 1..75: mol_type = other DNA
cttgatagcgaagctttattgcttctaacgagaacacgttcaaaacaaaaggcgacatttttacagcaaaatatt

SEQ ID NO: 753712 - DNA, 75 bp, synthetic construct
  source 1..75: mol_type = other DNA
tcagaaagcgtggttgctgtggagttacagtgaaaacatcagctttgaataccaggtggcgatcacccagtgggc

SEQ ID NO: 753713 - DNA, 75 bp, synthetic construct
  source 1..75: mol_type = other DNA
tcaattgccctggtcagtcctgttgagtttgcaacatcatcgtggcggcgtgcccttctggaactggaagaacat

SEQ ID NO: 753714 - DNA, 75 bp, synthetic construct
  source 1..75: mol_type = other DNA
agataccggttttatcggcttcaaaaatatggagcagattgctgaacatccgttggaagagaatctggccgccct

SEQ ID NO: 753715 - DNA, 75 bp, synthetic construct
  source 1..75: mol_type = other DNA
ggtgaaatccgcctggacaaattctacgccctgctggattgcggtacgccggtcaatccggagttagcgttggga

SEQ ID NO: 753716 - DNA, 75 bp, synthetic construct
  source 1..75: mol_type = other DNA
tatgcctcgtccggtacttgtttctcaggcaacgctgcgcgcatggccgcagaaaatctgcgtgagaaaattctc

SEQ ID NO: 753717 - DNA, 75 bp, synthetic construct
  source 1..75: mol_type = other DNA
gacaaagtgctgatcgcctcgatcatgggggaaaatgagcaacaatgggaagatctggcgcgtctggtgcaagaa

SEQ ID NO: 753718 - DNA, 75 bp, synthetic construct
  source 1..75: mol_type = other DNA
atgttaacgaaagatctttcgattaccttttgtggtgtgaagtttcccaacccgttctgcctctcttcttcgcct

SEQ ID NO: 753719 - DNA, 75 bp, synthetic construct
  source 1..75: mol_type = other DNA
cccgttctgcctctcttcttcgccggtcggcaactgctatgagatgtgcgccaaagcctacgacacaggctgggg

SEQ ID NO: 753720 - DNA, 75 bp, synthetic construct
  source 1..75: mol_type = other DNA
atgatcatccactttactttaaatggcgcgcctcaggagctaaccgttaatccaggcgaaaacgtgcaaaagctg

SEQ ID NO: 753721 - DNA, 75 bp, synthetic construct
  source 1..75: mol_type = other DNA
tgcggatctcagtgggtcgacaaaaggccagctggaagcctggcaggagaatgtcctgttcgatacagggcgtta

SEQ ID NO: 753722 - DNA, 75 bp, synthetic construct
  source 1..75: mol_type = other DNA
aagggatggatttagatatcaggcgggggaggttgcagctccttttatggcatctcttacaactgaatattcatg

SEQ ID NO: 753723 - DNA, 75 bp, synthetic construct
  source 1..75: mol_type = other DNA
cagtgatgggttcaactatcttgctggggagctcgctgcaccttttatctcttctcttacgactgaatattcatg

SEQ ID NO: 753724 - DNA, 75 bp, synthetic construct
  source 1..75: mol_type = other DNA
aagctgcgccgctattaggtgaacataccgctgctgtattgcaggagctgggttatagcgacgatgaaattgctg

SEQ ID NO: 753725 - DNA, 75 bp, synthetic construct
  source 1..75: mol_type = other DNA
catttggtgatgcagttccccgcggtggtaatgcaggtggtggcggtcagcctggctggatcctgaaatgtaaag

SEQ ID NO: 753726 - DNA, 75 bp, synthetic construct
  source 1..75: mol_type = other DNA
ggcagttctgtctcttgaagaacatcataaagcctggctgctgtggtgttacagcggtagcatttgctgggagca

SEQ ID NO: 753727 - DNA, 75 bp, synthetic construct
  source 1..75: mol_type = other DNA
acctgaatgctggctacagcgcgttttctccggagtgttgctgatgattgccacgctgattctggtgacgctatg

SEQ ID NO: 753728 - DNA, 75 bp, synthetic construct
  source 1..75: mol_type = other DNA
tatgcggctgtggtatggcaaccagtttgctctcggcgctatttggcgtcgggggcagtatcctgctcgtgccgg

SEQ ID NO: 753729 - DNA, 75 bp, synthetic construct
  source 1..75: mol_type = other DNA
aaaaaatatcaggtaggtgatcatgttgccgttggctgtatggtcgatagctgtatgcactgcgaccagtgtgag

SEQ ID NO: 753730 - DNA, 75 bp, synthetic construct
  source 1..75: mol_type = other DNA
tgggcgcgatgatgacaccggttgcttccgcaagcgcgagcggttttggtttgttgattatcggcgtgttgttgt

SEQ ID NO: 753731 - DNA, 75 bp, synthetic construct
  source 1..75: mol_type = other DNA
tgtatccggcgctggctgacaactggcagatgtcggcggcacagattggttttctctatgcggcgatcccgctcg

SEQ ID NO: 753732 - DNA, 75 bp, synthetic construct
  source 1..75: mol_type = other DNA
ttgttgattatcggcgtgttgttgttgctggtgctggtggagttgcgacgttttcgccagacgccgccgcaggtg

SEQ ID NO: 753733 - DNA, 75 bp, synthetic construct
  source 1..75: mol_type = other DNA
tgaatgtaaaagcctatgaaaacgttgctcaggcagcgggtggcgcggcatccactacgggtttttgggacggtc

SEQ ID NO: 753734 - DNA, 75 bp, synthetic construct
  source 1..75: mol_type = other DNA
cagaactttttggtggggaaggttatgaatatcaggagctggcattactggcgggagtgacaactaaaaactggt

SEQ ID NO: 753735 - DNA, 75 bp, synthetic construct
  source 1..75: mol_type = other DNA
cctcgcatgtgctgggaacacttccccgtgaacaggtcagcgaatttctctctggtttgttgattggcgcagagg

SEQ ID NO: 753736 - DNA, 75 bp, synthetic construct
  source 1..75: mol_type = other DNA
gcgccgtatttatccgttcctgcccgtttttcgtctattggcgaacaattaacgtcggttggcgacaatatctgg

SEQ ID NO: 753737 - DNA, 75 bp, synthetic construct
  source 1..75: mol_type = other DNA
ttcgcgagcagctcatggtggccaccgccgatctgagtggtgcgacgaaagggcagttggtggcctggcaggagc

SEQ ID NO: 753738 - DNA, 75 bp, synthetic construct
  source 1..75: mol_type = other DNA
gagctggtggcgtttctggcagcaaaaggcaaatttattccttctgaagacggtttttcgaccgatcagagtaag

SEQ ID NO: 753739 - DNA, 75 bp, synthetic construct
  source 1..75: mol_type = other DNA
ctggcagcaaaaggcaaatttataccttcagaagaaggtttttcgaccgatcagagtaagatttgccgtcactga

SEQ ID NO: 753740 - DNA, 75 bp, synthetic construct
  source 1..75: mol_type = other DNA
acgcaaagccagcggcaatattgtcaccttttataccgggctggcattgtataattccgctaacggacatctgca

SEQ ID NO: 753741 - DNA, 75 bp, synthetic construct
  source 1..75: mol_type = other DNA
atgaataaccagtatttacagtttgtgcgtgaacagctcattatcgccaccgccgatttgagtggagcaacaaaa

SEQ ID NO: 753742 - DNA, 75 bp, synthetic construct
  source 1..75: mol_type = other DNA
gcatggaagccgcgggctggctgcgtaccctgcgcgccccgaacctgcagctggccgtcgagctgacgcaggacg

SEQ ID NO: 753743 - DNA, 75 bp, synthetic construct
  source 1..75: mol_type = other DNA
cgcggttctgtctctcgaagaacaccagaaagcgtggttgctgtggagttacagcgaaagtgttcgctgggagca

SEQ ID NO: 753744 - DNA, 75 bp, synthetic construct
  source 1..75: mol_type = other DNA
cctcgccctggcgccgcgctctacttgaaaaactgcaaattgcttttgaatgtgcagcgccggaagtcgatgaaa

SEQ ID NO: 753745 - DNA, 75 bp, synthetic construct
  source 1..75: mol_type = other DNA
cgtttagaaggacgtgaccctaatacgctggttggtttaccgctcatcgcgctctgtcagatgttacgtcgggaa

SEQ ID NO: 753746 - DNA, 75 bp, synthetic construct
  source 1..75: mol_type = other DNA
gcggcgctggtgatggggtgcgttggggttactgaaggggcgattcctttcgccgctgccgatccgctgcgtgtc

SEQ ID NO: 753747 - DNA, 75 bp, synthetic construct
  source 1..75: mol_type = other DNA
tatgccttcatgctgatttgcgttgctcagggtgtttataccgtggtggccattgctgccgtgggtatttgtatc

SEQ ID NO: 753748 - DNA, 75 bp, synthetic construct
  source 1..75: mol_type = other DNA
gcattacctgaagaaaattccggtgcataaagttctgcgctcggtgatgcccatcttcattattcctatcatcgg

SEQ ID NO: 753749 - DNA, 75 bp, synthetic construct
  source 1..75: mol_type = other DNA
gcggcgctggtgatggggtgcgttggggttactgaaggggcgattcctttcgccgcagccgatccgttacgtgta

SEQ ID NO: 753750 - DNA, 75 bp, synthetic construct
  source 1..75: mol_type = other DNA
gatggtgcctttcctcgccgcttacatcggttattccattgcagagcgttctgcgctggctccgtgcgctatcgg

SEQ ID NO: 753751 - DNA, 75 bp, synthetic construct
  source 1..75: mol_type = other DNA
caccttaattaccgctggcgtcatgatgtgggggctgggcgagcctgtgggcgcattgactaacagtctgaccca

SEQ ID NO: 753752 - DNA, 75 bp, synthetic construct
  source 1..75: mol_type = other DNA
gcctatggcgaaaaagagggtttacagttcaccctcttccgcccgtttaactggatggggccacgactggataac

SEQ ID NO: 753753 - DNA, 75 bp, synthetic construct
  source 1..75: mol_type = other DNA
tttaatctgcatggttcgctgttaccaaaatatcgtggtcgcgcgccgctgaactgggtgctggtgaacggtgaa

SEQ ID NO: 753754 - DNA, 75 bp, synthetic construct
  source 1..75: mol_type = other DNA
tgatttctgttgcgccactgctgattgcctgtggcgatggcgcgctggaaatcgtcaccggacaggcgggcgacg

SEQ ID NO: 753755 - DNA, 75 bp, synthetic construct
  source 1..75: mol_type = other DNA
tgaaaagtctggcgcgtaacaatgggtcttcgactgacgaaaaagaagacgacctggaactggattttgaaatta

SEQ ID NO: 753756 - DNA, 75 bp, synthetic construct
  source 1..75: mol_type = other DNA
ggttaacaaagtggcctatgccttcatgctgatttgcgttgctcagggtgtttataccgtggtggccattgctgc

SEQ ID NO: 753757 - DNA, 75 bp, synthetic construct
  source 1..75: mol_type = other DNA
gaatggtgaaacgtgccgatgccggggccattgtggcgcaactgcgcgttgccattgcgccagacgatatcgcta

SEQ ID NO: 753758 - DNA, 75 bp, synthetic construct
  source 1..75: mol_type = other DNA
cataaagttctgcgttccgtcatgccaatcttcatcatcccgatcgtcggcacactgattaccgctggcgtcatg

SEQ ID NO: 753759 - DNA, 75 bp, synthetic construct
  source 1..75: mol_type = other DNA
cttcagcaccaccatttcggcagtcagtaatctggtgggcattttgcctgcggaaagttttcctactgacattcg

SEQ ID NO: 753760 - DNA, 75 bp, synthetic construct
  source 1..75: mol_type = other DNA
ccttggcagcctggttcttgggtggatctccgaccatattggtcggcaaaaaatcttcaccttcagctttttgct

SEQ ID NO: 753761 - DNA, 75 bp, synthetic construct
  source 1..75: mol_type = other DNA
tggtggacagaggctgccgcctgactatcgttccggcgcaaacgtctgctgaagacgtgctgaaaatgaatccgg

SEQ ID NO: 753762 - DNA, 75 bp, synthetic construct
  source 1..75: mol_type = other DNA
taagtactggcctgctgccgtgggtgctggcgcagtggggaatgcaagtcaccttattgctcctggcggcagtgt

SEQ ID NO: 753763 - DNA, 75 bp, synthetic construct
  source 1..75: mol_type = other DNA
gtattgccggacatcactttatttccgaaaacccggaggcctggcgctggctgctggcatcggcagctctgcccg

SEQ ID NO: 753764 - DNA, 75 bp, synthetic construct
  source 1..75: mol_type = other DNA
tcgctctctgggcgtcggttttgccaccgccatgagccggttgggcgcggcggtaagtaccggcctgctgccgtg

SEQ ID NO: 753765 - DNA, 75 bp, synthetic construct
  source 1..75: mol_type = other DNA
ctgtatggggaaaacaataacagctctcattactctagaaaatctcgcattagctttaaccggaaagtcagacct

SEQ ID NO: 753766 - DNA, 75 bp, synthetic construct
  source 1..75: mol_type = other DNA
aagagcacacattgtgtgatggacgacgcctgattatcagtcctgacctgatagctgattttcgtgcactaccat

SEQ ID NO: 753767 - DNA, 75 bp, synthetic construct
  source 1..75: mol_type = other DNA
agcgtagtgatgctggcggtgatcatgggattgatgctggcctttgatatgggcggcccggttaacaaagtggcc

SEQ ID NO: 753768 - DNA, 75 bp, synthetic construct
  source 1..75: mol_type = other DNA
cgcaaatatcagcagatgggccttaaggctgggcagattttctggtatcgcgcgcagctggtggaccgcagcggc

SEQ ID NO: 753769 - DNA, 75 bp, synthetic construct
  source 1..75: mol_type = other DNA
agagagtcggcgatttgtgcaaaatgaaatggtcagacataaacgacaaccatcttcacattgaacagggtaaaa

SEQ ID NO: 753770 - DNA, 75 bp, synthetic construct
  source 1..75: mol_type = other DNA
atgaagtcttgttttgatactgacaaagcttttcatatgtcttttgatgaagtcactttcaacgctgacagaatt

SEQ ID NO: 753771 - DNA, 75 bp, synthetic construct
  source 1..75: mol_type = other DNA
ctctttacgagcgtcgctatgagccgggaaacggcgagcgtattgatcaggcactacacgctattgaagaagcca

SEQ ID NO: 753772 - DNA, 75 bp, synthetic construct
  source 1..75: mol_type = other DNA
atggaagaaatggttttactgtcatcaatatggcatcggttcggaactgaaaaaggatactcacctgcttgctgg

SEQ ID NO: 753773 - DNA, 75 bp, synthetic construct
  source 1..75: mol_type = other DNA
catggaaagaagttggctattctgaggttgatttgagcacagcagaaacgtatccctgccctgtaccctgtggcg

SEQ ID NO: 753774 - DNA, 75 bp, synthetic construct
  source 1..75: mol_type = other DNA
gagacatgatttttgtagatcctgaagtccctgcctgccacggtgacgacgttattgcattgatgcacgatacag

SEQ ID NO: 753775 - DNA, 75 bp, synthetic construct
  source 1..75: mol_type = other DNA
ataagtttggtcgtttccgtcggggtgtgccaccgaaaaccaaaggcgattacgcctttattcttcatatgatcg

SEQ ID NO: 753776 - DNA, 75 bp, synthetic construct
  source 1..75: mol_type = other DNA
caacccgccgtttagcctggataagtggggccatgatgaggccgagcacgacaagtttggtcgcttccgtcgcgg

SEQ ID NO: 753777 - DNA, 75 bp, synthetic construct
  source 1..75: mol_type = other DNA
ctggcgaaaatgaacatgttcctgcacggcgaagacaaccataaaatcgagtggggcgataccattcgtaacccg

SEQ ID NO: 753778 - DNA, 75 bp, synthetic construct
  source 1..75: mol_type = other DNA
tattcctggtgtggtgccgcacttcttcgtaggtgcagctgcaggggtattcggtaatgcaacgggtggacgtcg

SEQ ID NO: 753779 - DNA, 75 bp, synthetic construct
  source 1..75: mol_type = other DNA
gcagatgtggtgaaagagcttagcggtggtaaaaactggttcatgttctccatcatgcaatccattaccttcgca

SEQ ID NO: 753780 - DNA, 75 bp, synthetic construct
  source 1..75: mol_type = other DNA
gtttcgacctgcctgtcggatggctcgatcaagaacaccagacaacgaacatcacaaaaaaacctgatgtttcaa

SEQ ID NO: 753781 - DNA, 75 bp, synthetic construct
  source 1..75: mol_type = other DNA
caccgaatggtcaaaaaattacgttgtttcttgaagaagcaagactggactatcgcttaatcaacgtcgacctcg

SEQ ID NO: 753782 - DNA, 75 bp, synthetic construct
  source 1..75: mol_type = other DNA
aaaattccggcaattgttgatcattctccagccgatggcggcgaaccgctaagcctctttgagtctggtgccatt

SEQ ID NO: 753783 - DNA, 75 bp, synthetic construct
  source 1..75: mol_type = other DNA
cagcgcattgacctcgcaatgtatcctgcagttaagaactggcatgagcggatccgttcgcgccctgccaccggg

SEQ ID NO: 753784 - DNA, 75 bp, synthetic construct
  source 1..75: mol_type = other DNA
aaaaacagaaaaacaccatccttcgtcagctactggaagacttcgccggtgaagatctcaacctgaagccgagtc

SEQ ID NO: 753785 - DNA, 75 bp, synthetic construct
  source 1..75: mol_type = other DNA
ctggcagtgcgagcagagcgtgagcaactgaaggtggaactggcgaagctggaaacggagatggtggggtatttg

SEQ ID NO: 753786 - DNA, 75 bp, synthetic construct
  source 1..75: mol_type = other DNA
cgcctatcttgccagcctgaaggaaattcaggacaacgattacaacctcaatattccgcgctatgtcgatacctt

SEQ ID NO: 753787 - DNA, 75 bp, synthetic construct
  source 1..75: mol_type = other DNA
gtgatggcgataacgtcgagaaatacgcctatcttgccagcctgaaagagattcaggacaacgattacaacctca

SEQ ID NO: 753788 - DNA, 75 bp, synthetic construct
  source 1..75: mol_type = other DNA
aagccggggaattctataccccgccggaagtctcggacttgattgctgaactacttgatccacaaccaggtgata

SEQ ID NO: 753789 - DNA, 75 bp, synthetic construct
  source 1..75: mol_type = other DNA
aggcaacggtgaacgtatcgatcaggcattgcatgcgattgaagaagccaatggcaccaaactgaaagacgccgg

SEQ ID NO: 753790 - DNA, 75 bp, synthetic construct
  source 1..75: mol_type = other DNA
atggcaccaaactgaaagacgccgggaaaagcgtgttccaggatatttcgtttaacaccgatcgcctgggtgaag

SEQ ID NO: 753791 - DNA, 75 bp, synthetic construct
  source 1..75: mol_type = other DNA
gatgatggccaacgagcgttttgtactgccaaaaagtgccagcttttatgcgctgtacgaacgccgccatgagcc

SEQ ID NO: 753792 - DNA, 75 bp, synthetic construct
  source 1..75: mol_type = other DNA
atccgatatcaccgatgcgatcctggaggagattaaagattccgaggtatttaaggatctgattgaaagtgctgt

SEQ ID NO: 753793 - DNA, 75 bp, synthetic construct
  source 1..75: mol_type = other DNA
gtgatggcgataacgtcgagaaatacgcctatcttgccagcctgaaggaaattcaggacaacgattacaacctca

SEQ ID NO: 753794 - DNA, 75 bp, synthetic construct
  source 1..75: mol_type = other DNA
cgtgccgtacatgccgaacgtgagcaattgaaagtggaactggcgaagctggaaacggagatggcaggttacctg

SEQ ID NO: 753795 - DNA, 75 bp, synthetic construct
  source 1..75: mol_type = other DNA
tacgacgaatataaagtgcaatatggcgatgcgccggaactgattgaagcgatgatggcgaacgagcgcttcgtg

SEQ ID NO: 753796 - DNA, 75 bp, synthetic construct
  source 1..75: mol_type = other DNA
tggggtcatgacgaggccgagaatgataagtttggtcgtttccgtcgcggtgtaccgccgaagactaaaggagat

SEQ ID NO: 753797 - DNA, 75 bp, synthetic construct
  source 1..75: mol_type = other DNA
aacctaagtaaacaaggattattgcagtatacaaaaactcatatgaaagcattcagaatcgactctgtagcttaa

SEQ ID NO: 753798 - DNA, 75 bp, synthetic construct
  source 1..75: mol_type = other DNA
cgaaagctctggaatcaggccgctgtgatactctggcctcggatcaatcacaactgtatgccctacgcatcaaat

SEQ ID NO: 753799 - DNA, 75 bp, synthetic construct
  source 1..75: mol_type = other DNA
aacgcctgatatggcacatctgctgggtaaagaaggcgattacggcaaggatctgaagctggataataaatgggc

SEQ ID NO: 753800 - DNA, 75 bp, synthetic construct
  source 1..75: mol_type = other DNA
acaactgagtatagacccaggcactgttgaaatacttgataagaattactattcattcatattccagatcaaaac

SEQ ID NO: 753801 - DNA, 75 bp, synthetic construct
  source 1..75: mol_type = other DNA
ttcacatcatgcagcaatggttgtatatcaatcagtcagagacgggttagagtataaaagagaagctgttattaa

SEQ ID NO: 753802 - DNA, 75 bp, synthetic construct
  source 1..75: mol_type = other DNA
gttaaatattattcttggtttgaccgatatgtagcttcaaacagtggtggttcacatcatgcagcaatggttgta

SEQ ID NO: 753803 - DNA, 75 bp, synthetic construct
  source 1..75: mol_type = other DNA
atggaaaaactgcgggtaggtatcgtttttggtggaaaatcagcggaacatgaagtgtctttgcaatcggcaaaa

SEQ ID NO: 753804 - DNA, 75 bp, synthetic construct
  source 1..75: mol_type = other DNA
ccagcggtctgggttacaccgatctgatcacacgtttgattgaactggcgctggagcgtcacgctgcggataacg

SEQ ID NO: 753805 - DNA, 75 bp, synthetic construct
  source 1..75: mol_type = other DNA
taaatgcagacgatcctgcccatattgcgttgcgtccttcggcgaccagccttgcgcaggtgccaggtaaacatg

SEQ ID NO: 753806 - DNA, 75 bp, synthetic construct
  source 1..75: mol_type = other DNA
cgttgcaaatcaggcgcatgctggcgcgacgcttgatgccgttcagaaaaaaggttttgtgcaatgcgggatcag

SEQ ID NO: 753807 - DNA, 75 bp, synthetic construct
  source 1..75: mol_type = other DNA
cagctaattaaaaagccgcccgtcgcccccggcgagagtgcctgcttccgtctggcggaaaacgccatccatttt

SEQ ID NO: 753808 - DNA, 75 bp, synthetic construct
  source 1..75: mol_type = other DNA
ttccgctgtgcgttttagcgttcatggtattaatcgctcagatatccacctttacctcagatttttttcattaaa

SEQ ID NO: 753809 - DNA, 75 bp, synthetic construct
  source 1..75: mol_type = other DNA
attcattcatattccagatcaaaacccttaataaagaaactagaatttatacatctgaatacgagtttacagatg

SEQ ID NO: 753810 - DNA, 75 bp, synthetic construct
  source 1..75: mol_type = other DNA
gatctggatattgaagacacgagttggcacagcgagctgtgtggattgcagctcgacaaagtattgaatgcgaac

SEQ ID NO: 753811 - DNA, 75 bp, synthetic construct
  source 1..75: mol_type = other DNA
tgcaagcccggcacgaactggacgagttgaggatgacgggacatgaactggtcgctaagcaggtcaatgaggcac

SEQ ID NO: 753812 - DNA, 75 bp, synthetic construct
  source 1..75: mol_type = other DNA
tccgcaaacgcatcgaagaagagttggccaaggatccagacgcccgagccagtcaggaatacttacggcagttgg

SEQ ID NO: 753813 - DNA, 75 bp, synthetic construct
  source 1..75: mol_type = other DNA
tgcagcggcgatgatggtgaacgtgcgctgtacctcgcggataaagcgctggagtcgctgcgtagccagcgcgag

SEQ ID NO: 753814 - DNA, 75 bp, synthetic construct
  source 1..75: mol_type = other DNA
cgcgctgccggaacacttcttcctgcaacgctacaaatccgcttacgcagcggaatgggagcactttgttgcggt

SEQ ID NO: 753815 - DNA, 75 bp, synthetic construct
  source 1..75: mol_type = other DNA
gaggcggcgtgatttggtaaccgttgataaagaacgccatgccctgtgggcggcttctctggctgctaagccaca

SEQ ID NO: 753816 - DNA, 75 bp, synthetic construct
  source 1..75: mol_type = other DNA
gccaaatcaggtattgctcattttacctatcatgttggcgaggactttccgcatctgatcagtggtattcgctcc

SEQ ID NO: 753817 - DNA, 75 bp, synthetic construct
  source 1..75: mol_type = other DNA
gatgttcctatgtctatttgccttggctctgatgatccggggatcttcgctgcggacttgaaatccgagttctat

SEQ ID NO: 753818 - DNA, 75 bp, synthetic construct
  source 1..75: mol_type = other DNA
ttgccagctgcatttgaatcactaaaaaaagataaagtaaacaaacttgaacgcagcctgattatcgatcttgga

SEQ ID NO: 753819 - DNA, 75 bp, synthetic construct
  source 1..75: mol_type = other DNA
gaattatgtgaagcagggttgatccagaaggatgaaacaccagtagcagcccaataccgactggaattaacctta

SEQ ID NO: 753820 - DNA, 75 bp, synthetic construct
  source 1..75: mol_type = other DNA
acaccatgacggagttgagggaggaaacagagaaatcttatttgtctcgttttaaacatgctcatggtgcaggag

SEQ ID NO: 753821 - DNA, 75 bp, synthetic construct
  source 1..75: mol_type = other DNA
atggcggtttaatgcgccagaagggttagaacgattgctttggatttacctgctgattcaaaatcagtacttgac

SEQ ID NO: 753822 - DNA, 75 bp, synthetic construct
  source 1..75: mol_type = other DNA
cacctgtggcgagatcgtactcaccagcgatttctatgcctacgacaccaagtacattgacgaagatggcgcgaa

SEQ ID NO: 753823 - DNA, 75 bp, synthetic construct
  source 1..75: mol_type = other DNA
tccggctgcggtgttagcagaagtgacgaccgactggcgtgaagagaatatgccagtggtaatggcaggaatggt

SEQ ID NO: 753824 - DNA, 75 bp, synthetic construct
  source 1..75: mol_type = other DNA
aacgtttcgtttgatggaacatcagatattaacctgacgccgaaaaatattggtgcatttgcttcaggaaaaaca

SEQ ID NO: 753825 - DNA, 75 bp, synthetic construct
  source 1..75: mol_type = other DNA
acggcaattttgatggccgatacgtgagggatgtccgacttggcacacgtgttgttcagaccatgcaaaaaggcg

SEQ ID NO: 753826 - DNA, 75 bp, synthetic construct
  source 1..75: mol_type = other DNA
agtgatttctcatatggatatgatgaagatattaaggagtttatcagagataaaacttatccttacggtaactgg

SEQ ID NO: 753827 - DNA, 75 bp, synthetic construct
  source 1..75: mol_type = other DNA
aattcttcttgatgcccagccgctggaaagctggagcagcaaagcgttcgcccgcaaagtggcttatttgccgca

SEQ ID NO: 753828 - DNA, 75 bp, synthetic construct
  source 1..75: mol_type = other DNA
ttgcgacgtggcggtggtggcgggcgacaaggcatttcaggctggtataaggagcatcgctcatgcagtggcaaa

SEQ ID NO: 753829 - DNA, 75 bp, synthetic construct
  source 1..75: mol_type = other DNA
ttgctgattacgctgctacgttggggcacgccggaatcgccacgctggctactgcgccaggggcgttttgcagaa

SEQ ID NO: 753830 - DNA, 75 bp, synthetic construct
  source 1..75: mol_type = other DNA
aagctcacgctattgtgcatcgctatttggggccacatgttttactgggcgatgaagtggcagcggcgacccata

SEQ ID NO: 753831 - DNA, 75 bp, synthetic construct
  source 1..75: mol_type = other DNA
gcaaatttttactggggagctttttgctgctggcggccacgctgatggtgatggcctgtttgccttccggcagtt

SEQ ID NO: 753832 - DNA, 75 bp, synthetic construct
  source 1..75: mol_type = other DNA
tgggcatcggtggcgcagtggcaaaactatccagtctggactggcagacctacgattttgtgccgggcagtctga

SEQ ID NO: 753833 - DNA, 75 bp, synthetic construct
  source 1..75: mol_type = other DNA
tggtaactggttctgcgcgaatcattcctgtcgtgcaaactttttctcaattcgaaacaaatccagtggagggta

SEQ ID NO: 753834 - DNA, 75 bp, synthetic construct
  source 1..75: mol_type = other DNA
cccgtgcatacgaacaacagaccggaaagccctggagcccggatgcaccggacagccccatgagacgctttctgc

SEQ ID NO: 753835 - DNA, 75 bp, synthetic construct
  source 1..75: mol_type = other DNA
gtggtacctcagttggatgctaaaattactacagtatcgggtgataaaatgaagatgtgtaagggggttactaaa

SEQ ID NO: 753836 - DNA, 75 bp, synthetic construct
  source 1..75: mol_type = other DNA
tgtttgcgctggcaatggctatcgccatcatcatcccgattgtactcacctcgtttatctatcagcggaaatacc

SEQ ID NO: 753837 - DNA, 75 bp, synthetic construct
  source 1..75: mol_type = other DNA
gccgctgattgccctttcgaatattgctcaggcgtcggcagtggtaggaattattatcgccagccgtaaacagaa

SEQ ID NO: 753838 - DNA, 75 bp, synthetic construct
  source 1..75: mol_type = other DNA
cccatttcgcagagatcttcttcccgttactgcccgcgctgattagcggcggtttgatcctcggttttcgtaatg

SEQ ID NO: 753839 - DNA, 75 bp, synthetic construct
  source 1..75: mol_type = other DNA
cacgctgccaggcttcactaatatcagcatgtatccgaaattgtggcaagccagcggcttgagttacaccgacct

SEQ ID NO: 753840 - DNA, 75 bp, synthetic construct
  source 1..75: mol_type = other DNA
tgcaaagaattataataaaagacaagggatagctttaggtgatggtttttttgttgctagttatggtgcctttta

SEQ ID NO: 753841 - DNA, 75 bp, synthetic construct
  source 1..75: mol_type = other DNA
actatttacagtatgtatatttatagtgatagataccatcataaaacctccagaagtgaagggatcattattcta

SEQ ID NO: 753842 - DNA, 75 bp, synthetic construct
  source 1..75: mol_type = other DNA
cggcattgttagccgggctggcgctgggcgtgatagaaactcgccttaagcgtatcgtgccggattacctctatc

SEQ ID NO: 753843 - DNA, 75 bp, synthetic construct
  source 1..75: mol_type = other DNA
gcggcacgccgatccttggtatcgtgcttggcgtaacgctggtttctccacagctgatgaacgcttatctgctcg

SEQ ID NO: 753844 - DNA, 75 bp, synthetic construct
  source 1..75: mol_type = other DNA
aaatcgatggccgacggcgtgaaactgattaacgccgtgcaggacgtttatctcgatagcaaaattactatcgcc

SEQ ID NO: 753845 - DNA, 75 bp, synthetic construct
  source 1..75: mol_type = other DNA
tcccgctctgcgcgcgctatgcgtgggcaaagcgataaagtggtcgccatcattgttacccgcctggattcgttg

SEQ ID NO: 753846 - DNA, 75 bp, synthetic construct
  source 1..75: mol_type = other DNA
acatcgcacgcttaagcggcgtggggaaatctacagtttcccgggtgctgaataacgaaagcggcgtgagccagc

SEQ ID NO: 753847 - DNA, 75 bp, synthetic construct
  source 1..75: mol_type = other DNA
tcacctgatgaccggcagctttgctccgattggcgcggcattgtttggcttcctgtacgccccgctggtgatcac

SEQ ID NO: 753848 - DNA, 75 bp, synthetic construct
  source 1..75: mol_type = other DNA
cagcggggtactgcttcctcctgaaaaacaacagcgcaggacactttctgaagagcagatgggggctttcatgca

SEQ ID NO: 753849 - DNA, 75 bp, synthetic construct
  source 1..75: mol_type = other DNA
aaaacgtcatgcgtggcacctataaccacgcccagtatctggatggtcgccgtgaaatgatgcagtggtatgctg

SEQ ID NO: 753850 - DNA, 75 bp, synthetic construct
  source 1..75: mol_type = other DNA
ccatgatttcagctcggcctggattgaactccagcttgcccacgttgataaaaacgtcatgcgtggcacctataa

SEQ ID NO: 753851 - DNA, 75 bp, synthetic construct
  source 1..75: mol_type = other DNA
gatatcctctttagcgctacgggcgtgacgggcggcgagttggtgaacggtatccaacagacggcgaatggggtg

SEQ ID NO: 753852 - DNA, 75 bp, synthetic construct
  source 1..75: mol_type = other DNA
catcgccctttaatgtctcttccggtgatgcccggcagcccacactggcggtgcacagccaggcatttcataccg

SEQ ID NO: 753853 - DNA, 75 bp, synthetic construct
  source 1..75: mol_type = other DNA
cacttctcgattcagatggcacccggtgcaataagcgaatcgacgccgcacgaaaagggggtaattgagcatgtt

SEQ ID NO: 753854 - DNA, 75 bp, synthetic construct
  source 1..75: mol_type = other DNA
tggcagcgccactgacactcacaccgacaagctgtcggaggatggcgcgtacacctggacactgtggcggcccta

SEQ ID NO: 753855 - DNA, 75 bp, synthetic construct
  source 1..75: mol_type = other DNA
ccgctgacggcttcatcccgcgccggatactggccaccctccccggttatcgagggcgacagcagtaaccaccag

SEQ ID NO: 753856 - DNA, 75 bp, synthetic construct
  source 1..75: mol_type = other DNA
atgcgagcccaatacatccttctgctgctgtgcgctgctttaccgctcagggcgattaccacgccggagatcgca

SEQ ID NO: 753857 - DNA, 75 bp, synthetic construct
  source 1..75: mol_type = other DNA
ttattattggtcttgctatcgtggcaagtgctgcccgatcctcaagcgatgaatccagagcacaaaaacttggat

SEQ ID NO: 753858 - DNA, 75 bp, synthetic construct
  source 1..75: mol_type = other DNA
gcatggcgaatggcggcggcccggcgtgcctgcggttgcgggtggtattgacagaagaagaacgccgggcggtga

SEQ ID NO: 753859 - DNA, 75 bp, synthetic construct
  source 1..75: mol_type = other DNA
tggcagtgccactgacacctacgccaacaaactggcggaggatggcgcgtacgcctggacgctgtggcggcccta

SEQ ID NO: 753860 - DNA, 75 bp, synthetic construct
  source 1..75: mol_type = other DNA
tgtctttgcccctgacggataacttgcgcaatgtggcaaaagcattgggcaaaccattggatcgattacgcatgg

SEQ ID NO: 753861 - DNA, 75 bp, synthetic construct
  source 1..75: mol_type = other DNA
tctgctggatgtgatgccggaaagaacggcagaacattaccgcaacaagatagctgtctatctgcgctggtatca

SEQ ID NO: 753862 - DNA, 75 bp, synthetic construct
  source 1..75: mol_type = other DNA
ccttcagtccgaacaaaccccggcactatgaacgttacctgcagcgtatgaaggaaaggaggaaggaatggggga

SEQ ID NO: 753863 - DNA, 75 bp, synthetic construct
  source 1..75: mol_type = other DNA
gtatgccatgacgtttgaagaatttgttccggcattttcttcctggtttgcagacaataaatgtggtgtggcagt

SEQ ID NO: 753864 - DNA, 75 bp, synthetic construct
  source 1..75: mol_type = other DNA
atgatctggcagcctgagttcacagataaaacactctccaggaaacccggggcggttcagagtgatacgctttta

SEQ ID NO: 753865 - DNA, 75 bp, synthetic construct
  source 1..75: mol_type = other DNA
ccttcagcccgaacaaaccccggcactatgaacgttatctgcagcgtatgaaagaaaggaggaaggaatggggga

SEQ ID NO: 753866 - DNA, 75 bp, synthetic construct
  source 1..75: mol_type = other DNA
tctgtttgtctttttccggaggaaaagactctactgtgctgctccatcttacggccgatgtggctcgcaggaaga

SEQ ID NO: 753867 - DNA, 75 bp, synthetic construct
  source 1..75: mol_type = other DNA
gaaacctgggccaggatgtgtgagcgggtgtcaggggctgccagcggggcgctttatgccaatgaaagcggtgcc

SEQ ID NO: 753868 - DNA, 75 bp, synthetic construct
  source 1..75: mol_type = other DNA
gagattttttccctttttatagctatgcgatgacctttgaggaatttattccggcgttttcgtcctggttgagca

SEQ ID NO: 753869 - DNA, 75 bp, synthetic construct
  source 1..75: mol_type = other DNA
ctgtgcagtcaaagcgttaggtggagatatgcaggcagagcttattgatttttgtcaggccaaaggtgattacac

SEQ ID NO: 753870 - DNA, 75 bp, synthetic construct
  source 1..75: mol_type = other DNA
cggctatccggaagatattcctgatgagcaggataatgatctgggaagtcgtgacatcccctcctggcgtcgtat

SEQ ID NO: 753871 - DNA, 75 bp, synthetic construct
  source 1..75: mol_type = other DNA
tcgaatattgtaagaaaaacccgcagaaaaatttgtattccttcaaagataatttggccaatgttctgccaaatt

SEQ ID NO: 753872 - DNA, 75 bp, synthetic construct
  source 1..75: mol_type = other DNA
caaactgagatatgccgatgataaaccctggactacggcatcgcctgaagggttttactacaccatgtatccgtt

SEQ ID NO: 753873 - DNA, 75 bp, synthetic construct
  source 1..75: mol_type = other DNA
tggcagcgccaccgacacttacaccgacaagctggcggaggatggcgcgtacgcctggacgctgtggcgacctta

SEQ ID NO: 753874 - DNA, 75 bp, synthetic construct
  source 1..75: mol_type = other DNA
gacggggattcgtgatgactgcagaaggtccaacactaaccggttttaattccgcttacagaactgcatcaacca

SEQ ID NO: 753875 - DNA, 75 bp, synthetic construct
  source 1..75: mol_type = other DNA
gatgtggggacaggggaaaatcagataccggacatggcctcttttgccagtggtgatggatggatgaaattaccc

SEQ ID NO: 753876 - DNA, 75 bp, synthetic construct
  source 1..75: mol_type = other DNA
caaagaattatttgagagccgtcagcgtctactacgtaaggccaatttgctgaattctttaagtcatagctggat

SEQ ID NO: 753877 - DNA, 75 bp, synthetic construct
  source 1..75: mol_type = other DNA
tggcccagcgtatgggcaaacgcgcgtttttgattgacgatgcgaaagatatccaggaagagtgggtgaaagagg

SEQ ID NO: 753878 - DNA, 75 bp, synthetic construct
  source 1..75: mol_type = other DNA
gcttcccgaaaattgtcggtccgcgcaaagatgacatctgctacgccacgactaaccgtcaggaagcggtacgcg

SEQ ID NO: 753879 - DNA, 75 bp, synthetic construct
  source 1..75: mol_type = other DNA
aaaggatgtagctggtcttctcgcataccttggtttgggagaagcggcaaaacgggatgtggggacaggggaaaa

SEQ ID NO: 753880 - DNA, 75 bp, synthetic construct
  source 1..75: mol_type = other DNA
tgatgatggcggtctggcgacgtaaacccgacggcgaggtcatcgtgcactcagaccagggaagccagtacggca

SEQ ID NO: 753881 - DNA, 75 bp, synthetic construct
  source 1..75: mol_type = other DNA
tcacgcgaactggcgctggatgcactgatgatggcggtctggcgacgtaaacccgacggcgaggtcatcgtgcac

SEQ ID NO: 753882 - DNA, 75 bp, synthetic construct
  source 1..75: mol_type = other DNA
ctgtatctggcggtggttatcgatctcttcgcccgtaacgtggtgggctggtcgatgaagcccactctctcacgc

SEQ ID NO: 753883 - DNA, 75 bp, synthetic construct
  source 1..75: mol_type = other DNA
ggtttccgctgggcaccaaaacaggcgctgtttgtcgcgccagcctggacaccgggccgggaagacgtgctcctc

SEQ ID NO: 753884 - DNA, 75 bp, synthetic construct
  source 1..75: mol_type = other DNA
gcgcaccaactatcgctaatgttcatcctgatgaagttgacaactggaaggctatgggctggaaaactcaggagt

SEQ ID NO: 753885 - DNA, 75 bp, synthetic construct
  source 1..75: mol_type = other DNA
cgtattacctgggaaggttcgcagaaccaggatgcggatgtcagcagcgacggtaaatttatggtaatggtcagc

SEQ ID NO: 753886 - DNA, 75 bp, synthetic construct
  source 1..75: mol_type = other DNA
tctggtcgaatcgccagacgatgtgtggaaactgacggtcaaaaacgaagagaagctctcctttatgacccaaac

SEQ ID NO: 753887 - DNA, 75 bp, synthetic construct
  source 1..75: mol_type = other DNA
ggggcctgcgtggccgggagcaattagctggttaacgggggataaccagagtacggagcatggacgagaactgac

SEQ ID NO: 753888 - DNA, 75 bp, synthetic construct
  source 1..75: mol_type = other DNA
gtgaattatggggacaaagtgcgtcttcaccagtagtgacacttaaaggaacgtccggaaaaaccttctcgggtc

SEQ ID NO: 753889 - DNA, 75 bp, synthetic construct
  source 1..75: mol_type = other DNA
attcaggcacttaaaattatcgagccgatggtgagttccttaagcccggatcatgctgaagcgatgcaaatactc

SEQ ID NO: 753890 - DNA, 75 bp, synthetic construct
  source 1..75: mol_type = other DNA
agggtgattttattgatttgagctttaagcctataaatcaaatcgtccttgagtgcgggaaattccaggtggatg

SEQ ID NO: 753891 - DNA, 75 bp, synthetic construct
  source 1..75: mol_type = other DNA
cgtggtccggcgtttttttcgccgggggattcactggctgcgtctgctgatgatcctctttaatgcggcattcag

SEQ ID NO: 753892 - DNA, 75 bp, synthetic construct
  source 1..75: mol_type = other DNA
gcaattcgaccctgcttacgtcagtttgagtcgggttatcagctggatattaaacaacaagctgaattttacagt

SEQ ID NO: 753893 - DNA, 75 bp, synthetic construct
  source 1..75: mol_type = other DNA
aaaatttcctaagcggatcaagattggttccactgctgttgcatatcgtctttcagaagtgcaggcatggattag

SEQ ID NO: 753894 - DNA, 75 bp, synthetic construct
  source 1..75: mol_type = other DNA
atgaaacgtgccgtgatgctctttgaacgtgcggaatactgggaagaacgggcgcggtcggcactgcttcacgcg

SEQ ID NO: 753895 - DNA, 75 bp, synthetic construct
  source 1..75: mol_type = other DNA
gacgtataaaaaagtgcatgatgccggtttccgctgggcacccaaacaggcgctgtttgtggcaccggcctggac

SEQ ID NO: 753896 - DNA, 75 bp, synthetic construct
  source 1..75: mol_type = other DNA
ggaaaaacgtcgcgcaataaaagccactcaggctgaccctaatgaagggggagaaagcttttctcgtcgtattga

SEQ ID NO: 753897 - DNA, 75 bp, synthetic construct
  source 1..75: mol_type = other DNA
gcaaaacccgtctggctttttgatgaagtggaggatgcagacctggtactgagagatcccctcataatttcccca

SEQ ID NO: 753898 - DNA, 75 bp, synthetic construct
  source 1..75: mol_type = other DNA
tccacctgaaccgccacaggttgaatgggaaaaacggcctgaagttatgaatacacaaataatgaactggacacc

SEQ ID NO: 753899 - DNA, 75 bp, synthetic construct
  source 1..75: mol_type = other DNA
aacgccaactgcgcgacagggaacgaataatacccaaatcgcaagcacggctttcgttatggctgcgattgccgc

SEQ ID NO: 753900 - DNA, 75 bp, synthetic construct
  source 1..75: mol_type = other DNA
cacaggacgcgaccacagcgcgaaaaggtcttgtccagctcagtagcgccaccaacagcgattctgaaacgcttg

SEQ ID NO: 753901 - DNA, 75 bp, synthetic construct
  source 1..75: mol_type = other DNA
caactttgtggcgctggtcgggcataccggcagtggcaaaagcactttggcaagtttgctgatgggctattaccc

SEQ ID NO: 753902 - DNA, 75 bp, synthetic construct
  source 1..75: mol_type = other DNA
cactgcgcggaaagggatagttcagctcagtagcgccaccaacagcacgtctgaaacgcaggctgcaacgccgaa

SEQ ID NO: 753903 - DNA, 75 bp, synthetic construct
  source 1..75: mol_type = other DNA
gctcaggacgccacgacgacacaaaaagggatagtccagctcagtagtgccaccaacagcacgtctgaaacactg

SEQ ID NO: 753904 - DNA, 75 bp, synthetic construct
  source 1..75: mol_type = other DNA
gctggctgcaacgccgaaagcggttaaggccgcgtatgacctggctaacggaaaatataccgctcaggacgccac

SEQ ID NO: 753905 - DNA, 75 bp, synthetic construct
  source 1..75: mol_type = other DNA
atgcgtagttttagccaactctggccgactctcaaacgcctgttagcgtatggttcgccgtggcgcaaaccactg

SEQ ID NO: 753906 - DNA, 75 bp, synthetic construct
  source 1..75: mol_type = other DNA
tacccaacccgtcgggcaggtgatttcccgcgtcactaatgacactgaagtgatccgcgacctctacgttaccgt

SEQ ID NO: 753907 - DNA, 75 bp, synthetic construct
  source 1..75: mol_type = other DNA
gtactggcggataccttcctcgccaacgtgacgctgggacgtgatatctccgaagaacgcgtctggcaggcgctg

SEQ ID NO: 753908 - DNA, 75 bp, synthetic construct
  source 1..75: mol_type = other DNA
ctaaccactcaacaggcgatgttgcaacaggccgtggtggcaggtgaacgcgtgttcgaattgatggacggtccg

SEQ ID NO: 753909 - DNA, 75 bp, synthetic construct
  source 1..75: mol_type = other DNA
gcttatcaactattgttgatgccgacaccattctggtgcttcatcgtgggcaagccgtggagcagggcactcacc

SEQ ID NO: 753910 - DNA, 75 bp, synthetic construct
  source 1..75: mol_type = other DNA
gcgaatggcgctggtggcgataatgattttcccggtggtgctggtggtaatggtgatatatcagcgttacagcac

SEQ ID NO: 753911 - DNA, 75 bp, synthetic construct
  source 1..75: mol_type = other DNA
ttaaacagtcctgcgctgaccggaacgccaacaacaccaactgcgcgacagggaacgaataatacccaaatcgca

SEQ ID NO: 753912 - DNA, 75 bp, synthetic construct
  source 1..75: mol_type = other DNA
gcgcaggtctacatcgagggacaactccgtacccgtagctgggacgacaacggcatcacccgctacatcactgaa

SEQ ID NO: 753913 - DNA, 75 bp, synthetic construct
  source 1..75: mol_type = other DNA
tcgcggcgttgagatgacttacaccagggatttgctggttgaagtttatctgaacggtctggggaatggcctcag

SEQ ID NO: 753914 - DNA, 75 bp, synthetic construct
  source 1..75: mol_type = other DNA
ggcattattgataaagaattcttcaataaaatcggtgagaatttcgaccctaagaagttcaacaaaaaattctga

SEQ ID NO: 753915 - DNA, 75 bp, synthetic construct
  source 1..75: mol_type = other DNA
aaggctatcaacacttctttgctctgctgggtgccgccagtgccgtcactaccggtcacccggaagcacgcaagc

SEQ ID NO: 753916 - DNA, 75 bp, synthetic construct
  source 1..75: mol_type = other DNA
ttcctgaacttatgccgatctatgccattgatgcacctgctgatgcgccagatggttcaagccgccctacgctgt

SEQ ID NO: 753917 - DNA, 75 bp, synthetic construct
  source 1..75: mol_type = other DNA
cgctgagtgcactgctgaaacagtatggtatccgccttacggctaatcaggcatatcaccagatggtgaagctgg

SEQ ID NO: 753918 - DNA, 75 bp, synthetic construct
  source 1..75: mol_type = other DNA
cgtatcgagtcgatggttgctaaccgtcctgactggtgtatctctcgtcagcgtacctggggcgtgccgatgtca

SEQ ID NO: 753919 - DNA, 75 bp, synthetic construct
  source 1..75: mol_type = other DNA
tatacgcgggcagaatgtaactcaaggtttattacaggtattcgccttggcggtctgtcatctgttcagacatgg

SEQ ID NO: 753920 - DNA, 75 bp, synthetic construct
  source 1..75: mol_type = other DNA
tatccagcacagccaccgtagcgcttaccgtggataacaccatggtgatggccacagtggattacgtggatgaca

SEQ ID NO: 753921 - DNA, 75 bp, synthetic construct
  source 1..75: mol_type = other DNA
tgggcgcaactatatacaaccgctcacaaaccatcagcaggagatattggtgcatataccaaagcagaatgtaat

SEQ ID NO: 753922 - DNA, 75 bp, synthetic construct
  source 1..75: mol_type = other DNA
tattaatacgttagtatctcgtaaccgtgttacagcattaggtgggagcgcaaagggtacgcctggtatccaaat

SEQ ID NO: 753923 - DNA, 75 bp, synthetic construct
  source 1..75: mol_type = other DNA
ctatgtgatcggtcagaaatacggcctggaaaccgctaacccggttggcccggacggcacttatctgccgggtac

SEQ ID NO: 753924 - DNA, 75 bp, synthetic construct
  source 1..75: mol_type = other DNA
gcgacttaacgaacccttaatcgaactgaccacgcagcaggcgatgctgcaacaggctgttgttgctggtgagcg

SEQ ID NO: 753925 - DNA, 75 bp, synthetic construct
  source 1..75: mol_type = other DNA
acggaagtgacgtcgctgatgatttttgtgcgcttacaggagtttgattacccggcggcgagcgcgattgcttcg

SEQ ID NO: 753926 - DNA, 75 bp, synthetic construct
  source 1..75: mol_type = other DNA
ccggatgaacaggagaatgacctggggagccgggatattccgtcctggcggcgtatctgtaagacacttataaag

SEQ ID NO: 753927 - DNA, 75 bp, synthetic construct
  source 1..75: mol_type = other DNA
cgaaggtgggcagcgacaacttactgatgatcaatgcgcacattgcgcacgattgtacggtaggtaaccgctgca

SEQ ID NO: 753928 - DNA, 75 bp, synthetic construct
  source 1..75: mol_type = other DNA
gccggaatatgaagaagcggcagaaacgctcggtgcaacgcgctggcagagcttctgcaaagtggtgctgccaga

SEQ ID NO: 753929 - DNA, 75 bp, synthetic construct
  source 1..75: mol_type = other DNA
ttgttcgcttacaggagtttgattacccggcggcgagcgcaattgcttcggtgatcctcgcggcatccctgctgc

SEQ ID NO: 753930 - DNA, 75 bp, synthetic construct
  source 1..75: mol_type = other DNA
cctacaaagtgacgctgctgtcggcgtttgtggcgtcgatttttaacggcgttttcggcctgctgatggcgtgga

SEQ ID NO: 753931 - DNA, 75 bp, synthetic construct
  source 1..75: mol_type = other DNA
cgatgataagccctggaccacggcatcgcctgaagggttttactacaccatgtatccgctgtatgactggaaaac

SEQ ID NO: 753932 - DNA, 75 bp, synthetic construct
  source 1..75: mol_type = other DNA
aatcctctgtatgacctgatgtaccgtgccggcgtgccgttacgcaacatgcgtgtctgtgaaccttttggtcct

SEQ ID NO: 753933 - DNA, 75 bp, synthetic construct
  source 1..75: mol_type = other DNA
agtttcaaccggagtggatatgctgggagccaggagtgacctgggttcgccagccaccggaagaggccattacgg

SEQ ID NO: 753934 - DNA, 75 bp, synthetic construct
  source 1..75: mol_type = other DNA
caaaaccagcccatcatacctggcgcagctatgcgatgttcctgctggatgtgatgccggaaagaacagcagaac

SEQ ID NO: 753935 - DNA, 75 bp, synthetic construct
  source 1..75: mol_type = other DNA
gtgtggagtggcagtgctgaccggtgtccgagcagatgaatccctcaaccgctttatgggactggtgtcccagcg

SEQ ID NO: 753936 - DNA, 75 bp, synthetic construct
  source 1..75: mol_type = other DNA
ttggtgaacggtatccaacagacggcgaatggggtgcggacgcagacattactgatcggcggcgcggaccaaacg

SEQ ID NO: 753937 - DNA, 75 bp, synthetic construct
  source 1..75: mol_type = other DNA
gtgatcctcgcggcatccctgatgctgctgttctcaattaacactctgcaaagtcgctttggtcggcgtgtggta

SEQ ID NO: 753938 - DNA, 75 bp, synthetic construct
  source 1..75: mol_type = other DNA
cgaactggatgatcgctctcatctgcgcccggaacgtcagcgccgggatgcgttatttaatctggttgtcattca

SEQ ID NO: 753939 - DNA, 75 bp, synthetic construct
  source 1..75: mol_type = other DNA
cggtacactggtgcgttgactgccgttctgcgctggcggaagcggaagttgagtattacgacaaaacttctccgt

SEQ ID NO: 753940 - DNA, 75 bp, synthetic construct
  source 1..75: mol_type = other DNA
aatacggtaagccgggtgagaaattcaccgccgctgagttccgcgccaagtgccgcgaatacgctgcgacccagg

SEQ ID NO: 753941 - DNA, 75 bp, synthetic construct
  source 1..75: mol_type = other DNA
cgatgctgcaacaggctgttgttgctggtgagcgcgtgtttgaactgatggacggaccgcgccagcaatatggca

SEQ ID NO: 753942 - DNA, 75 bp, synthetic construct
  source 1..75: mol_type = other DNA
ctgctgcgtccgctgctgagtctgttttcatcgctcattctttgtggattgttgatgctgtttggcttctccgcc

SEQ ID NO: 753943 - DNA, 75 bp, synthetic construct
  source 1..75: mol_type = other DNA
ctattacccgctaacggaaggtgagattcgccttgatggtcgtccattaagttcgctaagtcacagcgcgctgcg

SEQ ID NO: 753944 - DNA, 75 bp, synthetic construct
  source 1..75: mol_type = other DNA
gacgactgcatcacaggacggtttttactacacgatgtaccctctgtatgactggaaaacccgggatatatggat

SEQ ID NO: 753945 - DNA, 75 bp, synthetic construct
  source 1..75: mol_type = other DNA
gtggctcgcaggaagaaacgtcgtttctctgtattattcattgactgggaagctcagtaccagtgcacaattgca

SEQ ID NO: 753946 - DNA, 75 bp, synthetic construct
  source 1..75: mol_type = other DNA
gggttttactatacgatgtacccgctgtatgactggaaagcccgggatatctggatatacaacgccagaacccgg

SEQ ID NO: 753947 - DNA, 75 bp, synthetic construct
  source 1..75: mol_type = other DNA
cgcgctgggcaaaatcatcggcaatggtcacctacacaaaggcgcgaagccggtgcactggtgcgtagactgccg

SEQ ID NO: 753948 - DNA, 75 bp, synthetic construct
  source 1..75: mol_type = other DNA
gttccggcattttcttcctggtttgctggcaaccggtgtggagtggcagtgctgaccggtgtccgggcggatgaa

SEQ ID NO: 753949 - DNA, 75 bp, synthetic construct
  source 1..75: mol_type = other DNA
gcaggagtccattatctaccgaaagtcattactcgagaaaagccctgatgaactcgtcgctctgctcataaaaca

SEQ ID NO: 753950 - DNA, 75 bp, synthetic construct
  source 1..75: mol_type = other DNA
gggcgtggggcatcgaagggatttccacgagcacaagagttaagatgtactgaaacatttgcctttctttggcga

SEQ ID NO: 753951 - DNA, 75 bp, synthetic construct
  source 1..75: mol_type = other DNA
gaattcggcatttctgaccagcaggctaagtttgcgatgcttgttgctcaagggaaaaagccgacagaggcatac

SEQ ID NO: 753952 - DNA, 75 bp, synthetic construct
  source 1..75: mol_type = other DNA
atgcctttgaggagctcatcgccgaaatgggcagtgcgtttttgtgtgctcaactcggggtgttcggtgaggttc

SEQ ID NO: 753953 - DNA, 75 bp, synthetic construct
  source 1..75: mol_type = other DNA
gacggcggcgctgtggccaacattgcgctggccacctccgaaacctggcgggataaaacgaccggcgagatgaga

SEQ ID NO: 753954 - DNA, 75 bp, synthetic construct
  source 1..75: mol_type = other DNA
tgctgttcggcaaactggcggaagtggccagtgaatacctgcgcaaaggggctcaggtgtacatcgagggtcagt

SEQ ID NO: 753955 - DNA, 75 bp, synthetic construct
  source 1..75: mol_type = other DNA
tagtaaacagggatggaatttagctcttgttacaattcctgaagtcccttctgtggagagtatttcatggctaaa

SEQ ID NO: 753956 - DNA, 75 bp, synthetic construct
  source 1..75: mol_type = other DNA
tctcggcgctggcgctggactggtttgtgttcggtaacgcattccttgagcttcggagcaatatgctcggcgaac

SEQ ID NO: 753957 - DNA, 75 bp, synthetic construct
  source 1..75: mol_type = other DNA
ccatcagcaagaaaaacttccgtcacgtattgcgatggcgctggagtcgctaaaactgtgcggcgtagtcgtaat

SEQ ID NO: 753958 - DNA, 75 bp, synthetic construct
  source 1..75: mol_type = other DNA
cgtattgcgatggcgctggagtccctcaagctctgcggtgtggtggtgattggctttgctattggccttagcgga

SEQ ID NO: 753959 - DNA, 75 bp, synthetic construct
  source 1..75: mol_type = other DNA
gttttttacggaggtggactactggtccacgctgttgcatgagctggtacatagtaccggtcatgcgaagcgact

SEQ ID NO: 753960 - DNA, 75 bp, synthetic construct
  source 1..75: mol_type = other DNA
ccggtcatgaaaagcgcctgcggcgggtggggataagtacctttaccggtcgcaacagcccggaatatgcgtttg

SEQ ID NO: 753961 - DNA, 75 bp, synthetic construct
  source 1..75: mol_type = other DNA
tgacacgcagcgcttaccgtgggatcaatgtgttgctgttgtggctcgccgcagaagaagccggttacagcagta

SEQ ID NO: 753962 - DNA, 75 bp, synthetic construct
  source 1..75: mol_type = other DNA
ggcacccccgcaacacctaaggagctgagcgatcatagtagtattctgctaggaacatcccgctcagcacccata

SEQ ID NO: 753963 - DNA, 75 bp, synthetic construct
  source 1..75: mol_type = other DNA
tgaccgcgccttagactggtattcagaagaagatcaagtaaaggtattagatactgttacctcaaataccaaatc

SEQ ID NO: 753964 - DNA, 75 bp, synthetic construct
  source 1..75: mol_type = other DNA
atgcaacagatgagcataacagtaacgtgtccgacccatcatgcagcaacggtagggcagcagatcactatgtcc

SEQ ID NO: 753965 - DNA, 75 bp, synthetic construct
  source 1..75: mol_type = other DNA
ggcacaggcctccagagatggtaaacccgagccggaatatggaggcctcggctttgttgataacgccatacccaa

SEQ ID NO: 753966 - DNA, 75 bp, synthetic construct
  source 1..75: mol_type = other DNA
atatttttgataaaacggttgaaatgtatgctgctactcacgagtcctgtaatcccctgaataaaccagagggga

SEQ ID NO: 753967 - DNA, 75 bp, synthetic construct
  source 1..75: mol_type = other DNA
tctgaaccatgttcgaacagccatagcgcgtggtgaggaagtacagccacggcatataggggctgttatcccgcg

SEQ ID NO: 753968 - DNA, 75 bp, synthetic construct
  source 1..75: mol_type = other DNA
gttcgtaatggatgatgtaaaactttactcgtctgcaatttataattctcttgatgatatagaacgggcgcgaga

SEQ ID NO: 753969 - DNA, 75 bp, synthetic construct
  source 1..75: mol_type = other DNA
catgtttttctattcctggatatattattcttcagtatcaatgttcgcacttatctttttccatatgtcactgaa

SEQ ID NO: 753970 - DNA, 75 bp, synthetic construct
  source 1..75: mol_type = other DNA
acagtatctgcgtaaatacagctggttttattatatcaatgtaacgacatttcatcttgccgtcatcatgatgat

SEQ ID NO: 753971 - DNA, 75 bp, synthetic construct
  source 1..75: mol_type = other DNA
gttattgctcagcaaaaggctccatgtcattccggcaggtagccaaattgcttaacgcaaaagaaactgagtttc

SEQ ID NO: 753972 - DNA, 75 bp, synthetic construct
  source 1..75: mol_type = other DNA
gactgcgcaaaagcggaacggaaaatctcagaaaaaaaagccagtatccgatgcgtgcctgaatgagggcgacgc

SEQ ID NO: 753973 - DNA, 75 bp, synthetic construct
  source 1..75: mol_type = other DNA
gaattcggcatttctgaccagcaggctaagtttgcgatgcttgttgctcaggggaaaaagccgacagaggcgtac

SEQ ID NO: 753974 - DNA, 75 bp, synthetic construct
  source 1..75: mol_type = other DNA
taaccatgtccagcagcgatattgctgagctggtggaatcaagacatgaccatgttaaacggtccattgaacgcc

SEQ ID NO: 753975 - DNA, 75 bp, synthetic construct
  source 1..75: mol_type = other DNA
tccggtttcggctggtattctctttccggtattttattgaccgaatcttttggtccggtaatcgggagcgcggcg

SEQ ID NO: 753976 - DNA, 75 bp, synthetic construct
  source 1..75: mol_type = other DNA
atgggcgacgtcagcattgcggtgatgtttgtactgttgttcctctgcggttggttccaggggatggggtggccg

SEQ ID NO: 753977 - DNA, 75 bp, synthetic construct
  source 1..75: mol_type = other DNA
aatccgcaacatgaacacgccggatgagttccgcaatctctacatgtgcgagtttgtcagcgacggcgaatccgc

SEQ ID NO: 753978 - DNA, 75 bp, synthetic construct
  source 1..75: mol_type = other DNA
cacaatacttgtattgttgggagtccttctcgcgctcatttacccggcttttgcagtagtcttttttcgtgaaaa

SEQ ID NO: 753979 - DNA, 75 bp, synthetic construct
  source 1..75: mol_type = other DNA
ctggcggttatcctgttgatagttgtgatgattggcgaaaaacgtcgccatcaggaattacagcaaaaacgcaat

SEQ ID NO: 753980 - DNA, 75 bp, synthetic construct
  source 1..75: mol_type = other DNA
gattctcgcgtggcgatttaggttttgcgctttcagggatctcaatcgcctatggattttcgaaattcatcatgg

SEQ ID NO: 753981 - DNA, 75 bp, synthetic construct
  source 1..75: mol_type = other DNA
cacataaagcgcgcttacctgctgcggagatcgacccgacctatcgtcgattgcgctggcaaattttcctgggga

SEQ ID NO: 753982 - DNA, 75 bp, synthetic construct
  source 1..75: mol_type = other DNA
ggggaactgccacgggctatatcgtcaaatacgtctcaaaaaatatcgacggttacgcgctggataatgagcgcg

SEQ ID NO: 753983 - DNA, 75 bp, synthetic construct
  source 1..75: mol_type = other DNA
taaaaaccccggtaatgcggtgcccggctgtccgattatcattaacacccggcagagcatcacccttcagcaggt

SEQ ID NO: 753984 - DNA, 75 bp, synthetic construct
  source 1..75: mol_type = other DNA
tgcagggcagtttttcaccatgacagcaccttccaaatatcatgcctataccgtcttcggtcatcgtaatggcaa

SEQ ID NO: 753985 - DNA, 75 bp, synthetic construct
  source 1..75: mol_type = other DNA
tcactggttctgtatgtttggcttttgccaaatatgatctcatctgacagcacaatacttgtattgttgggagtc

SEQ ID NO: 753986 - DNA, 75 bp, synthetic construct
  source 1..75: mol_type = other DNA
gataacagcgctgaccggaagaccgccgatttgtggcagcatatgaagctaagtcataatgttgacagcagagat

SEQ ID NO: 753987 - DNA, 75 bp, synthetic construct
  source 1..75: mol_type = other DNA
tcggtcttcgcgttgctgaatcccatcatgacggtactccgcactggcatggcctgctgtttacagacccagagc

SEQ ID NO: 753988 - DNA, 75 bp, synthetic construct
  source 1..75: mol_type = other DNA
ttatcttggtggttctgtggccgcaagtgcgattgtcggctataccgttgactacttcggctgggatggcggctt

SEQ ID NO: 753989 - DNA, 75 bp, synthetic construct
  source 1..75: mol_type = other DNA
cgcaaccagatatttttgtccgcgtcccgtcgtcaggcgtatcagttcaaacactttattcaacaggctgctcag

SEQ ID NO: 753990 - DNA, 75 bp, synthetic construct
  source 1..75: mol_type = other DNA
ccggacaccttaaatttgatgaatttttctgggtcagtaactttgtggaactcaggaaggttgctggggcaatgg

SEQ ID NO: 753991 - DNA, 75 bp, synthetic construct
  source 1..75: mol_type = other DNA
atgcatgaggcgtatcagttctggacaggggaccgctggaacagcgagcggccgcgctcaaaacgcaatgagttt

SEQ ID NO: 753992 - DNA, 75 bp, synthetic construct
  source 1..75: mol_type = other DNA
ttaacgcctttattcttgatctccccatcaataccgcgctggcaatggcctccggtttcggctggtattctcttt

SEQ ID NO: 753993 - DNA, 75 bp, synthetic construct
  source 1..75: mol_type = other DNA
cgaaaatacagaaagtgaatttcgtaatctgtacatgtgcgaatttgtccgtgatggtgaggcagccttcagcct

SEQ ID NO: 753994 - DNA, 75 bp, synthetic construct
  source 1..75: mol_type = other DNA
ccggtcatctgaaattcgacgaatttttctgggtcagtaactttgtggaactcaggagggttgccggggcaatgg

SEQ ID NO: 753995 - DNA, 75 bp, synthetic construct
  source 1..75: mol_type = other DNA
cgaaaatacagaaagtgaatttcgcaatctgtacatgtgcgaatttgtccgtgatggtgaggcagccttcagtct

SEQ ID NO: 753996 - DNA, 75 bp, synthetic construct
  source 1..75: mol_type = other DNA
gcgaggcgctccttgatgcactgcgtgatgacgtctccgccgggtatcagcgcaaccagatatttttgtccgcct

SEQ ID NO: 753997 - DNA, 75 bp, synthetic construct
  source 1..75: mol_type = other DNA
atccgcgcgttttcctgcccgcaggtttgattctggcggcggcagtgatgttgtttatgggctttgtgccatggg

SEQ ID NO: 753998 - DNA, 75 bp, synthetic construct
  source 1..75: mol_type = other DNA
attgcattttctcggcacgtctgccgctaccgcgcagagctacaccggcaacctgttttttgatgagtttttctg

SEQ ID NO: 753999 - DNA, 75 bp, synthetic construct
  source 1..75: mol_type = other DNA
gctctgcggaattaatggaagatgtcatcgaaggaaaactcgattacaccattgctgattctgtcgccatcagcc

SEQ ID NO: 754000 - DNA, 75 bp, synthetic construct
  source 1..75: mol_type = other DNA
acagcaggccgcactgattgaggaatacacccaaaaatataacgtgaaacatatcggcattgatgtgaccggcgg

SEQ ID NO: 754001 - DNA, 75 bp, synthetic construct
  source 1..75: mol_type = other DNA
tcaggcaactacagtgaaagcaaagtcgatatggctgaacaactcaaccgaaaactgaaaggctgggccatgttc

SEQ ID NO: 754002 - DNA, 75 bp, synthetic construct
  source 1..75: mol_type = other DNA
tcactggctgacccgaaaatatcgtaaaggtattgcctacatgatgaggtggtggtgtaaatcaccgaaaccagg

SEQ ID NO: 754003 - DNA, 75 bp, synthetic construct
  source 1..75: mol_type = other DNA
aaggccaaagtattcagttatatcgacagagtggtgttctggaagctggctcactggctgacccgaaaatatcgt

SEQ ID NO: 754004 - DNA, 75 bp, synthetic construct
  source 1..75: mol_type = other DNA
gcggacgaaatactgtaccggttggtggggcaaggcaagagctgtccgctggcggctacccgaaggtaatcccta

SEQ ID NO: 754005 - DNA, 75 bp, synthetic construct
  source 1..75: mol_type = other DNA
acggctttatctttctggggcacaggatcattcgcaaacgcagtcgttatggcgagatgcgagtggtctcaacga

SEQ ID NO: 754006 - DNA, 75 bp, synthetic construct
  source 1..75: mol_type = other DNA
gacatatcgatgtcggtctctttcgggcggccagtgaaggtgtgccacagggcggtgttatatcgccgctattat

SEQ ID NO: 754007 - DNA, 75 bp, synthetic construct
  source 1..75: mol_type = other DNA
gtcaattaacgaacgcgagcacctgcacggcacgccgcgtgaactggcaccgccggaacagttccgtgtgccgat

SEQ ID NO: 754008 - DNA, 75 bp, synthetic construct
  source 1..75: mol_type = other DNA
cgaagaaattcacttaccaggcaccgcaaaacgttgatgacacttatgtcgtgtttatcattggtgaaaccacgc

SEQ ID NO: 754009 - DNA, 75 bp, synthetic construct
  source 1..75: mol_type = other DNA
gcggcgaaatactgtactggttggtggggcaaggcaagaagctgttccgctggcggctacccgaaggtaatccct

SEQ ID NO: 754010 - DNA, 75 bp, synthetic construct
  source 1..75: mol_type = other DNA
tcagagcaaaacgagggttttatttggtaaaaccaatcacggcaagctcagcggcgaaatactgtaccggttggt

SEQ ID NO: 754011 - DNA, 75 bp, synthetic construct
  source 1..75: mol_type = other DNA
gcctcgctatctggtgctttgcgatgatcgccgccatcctgccatatattatgctcaaccttggggttctgggcc

SEQ ID NO: 754012 - DNA, 75 bp, synthetic construct
  source 1..75: mol_type = other DNA
gccgctacaaagtctttatgggtgatgcgggcagtacgctgattggttttaccgttatctggatcctgctggaaa

SEQ ID NO: 754013 - DNA, 75 bp, synthetic construct
  source 1..75: mol_type = other DNA
agaccgttaatcgcggtgcggtcatgccagaaatgctggtcaaacgcaaagatggtacctggactgcatcagcta

SEQ ID NO: 754014 - DNA, 75 bp, synthetic construct
  source 1..75: mol_type = other DNA
actttcatacatttttgatggtatttctggtatcgttagttcttattagtgcaaaaataaagtcgaatggcctgt

SEQ ID NO: 754015 - DNA, 75 bp, synthetic construct
  source 1..75: mol_type = other DNA
ttctgtatttcttgttcctgtatatgaagagattgtatttcgagggtgtctttttaactcttttaaagtctggtt

SEQ ID NO: 754016 - DNA, 75 bp, synthetic construct
  source 1..75: mol_type = other DNA
gctggcatgtgcatggaacagcaatagtacattatgtgttgatttttactctgacagatttggaaaggataaagc

SEQ ID NO: 754017 - DNA, 75 bp, synthetic construct
  source 1..75: mol_type = other DNA
actttcgtacatttttgatgctgtttctggtatcgttagttcttattagtgcaaaaataaagtcgaatggcctgt

SEQ ID NO: 754018 - DNA, 75 bp, synthetic construct
  source 1..75: mol_type = other DNA
actttcctacatttttgatgttttttctggtatcgttagttcttattagtgcaaaaataaagtcgaatggcctgt

SEQ ID NO: 754019 - DNA, 75 bp, synthetic construct
  source 1..75: mol_type = other DNA
actttcttacatttttgatgttctttctggtatcgttagttcttattagtgcaaaaataaagtcgaatggcctgt

SEQ ID NO: 754020 - DNA, 75 bp, synthetic construct
  source 1..75: mol_type = other DNA
cgttaccgccgcacaatggacaacaatttccgtctggtgaatgtgtatatcaccgacatgaaaatcacggaaatc

SEQ ID NO: 754021 - DNA, 75 bp, synthetic construct
  source 1..75: mol_type = other DNA
tgacgatgtggcgggctgaatcgctggatctgaatatggcaaaactcatcagcagtcatgaccatatcagcgcct

SEQ ID NO: 754022 - DNA, 75 bp, synthetic construct
  source 1..75: mol_type = other DNA
ccagcctggacaccgggccgggaagacgtgctcctctcacttgccggagagattgaggatgaagacagcacgctc

SEQ ID NO: 754023 - DNA, 75 bp, synthetic construct
  source 1..75: mol_type = other DNA
aaatgcctgagcttcctgtacgtcactggcgtttgtctggtggtggagaaatcgcccgagaagaacgtctggagt

SEQ ID NO: 754024 - DNA, 75 bp, synthetic construct
  source 1..75: mol_type = other DNA
gtttccgggaaatgacaaaggcacagtgggccgccctgccccgggactgtaaggccgtgcgcagtgtggcagaga

SEQ ID NO: 754025 - DNA, 75 bp, synthetic construct
  source 1..75: mol_type = other DNA
gagtggctgaccatcatccgcgtgaacaaaagcaacggggcggtgagttcagtcacaacgccaaattacagtttt

SEQ ID NO: 754026 - DNA, 75 bp, synthetic construct
  source 1..75: mol_type = other DNA
tgaaaacaccgggcggctttatcacttacgaaacggaccgagcgagggggatcagccacggcgaccttgcgtggg

SEQ ID NO: 754027 - DNA, 75 bp, synthetic construct
  source 1..75: mol_type = other DNA
aagctatgataggattaggaatactatacgatgatgggttaggcgttaaacgcaatgatgcagaagcagttaagt

SEQ ID NO: 754028 - DNA, 75 bp, synthetic construct
  source 1..75: mol_type = other DNA
ctaattgctgcagcgggtggtgtcgcgctgttaacgacaaaaggtaaagctaccgttgcttttgcccgtgaagcg

SEQ ID NO: 754029 - DNA, 75 bp, synthetic construct
  source 1..75: mol_type = other DNA
gaagtgggtcgttgtggttgcgttgctcctggtggcaattgtaggcaactacctttatcgcgacattatgttgcc

SEQ ID NO: 754030 - DNA, 75 bp, synthetic construct
  source 1..75: mol_type = other DNA
ctacgttcagcttacgtttgtaatttgtcgccggagttccagcctccaaagcaccatacgcacaagctgccgctg

SEQ ID NO: 754031 - DNA, 75 bp, synthetic construct
  source 1..75: mol_type = other DNA
tgctgacgtatgagctgggtaaagagggtgaaaccggaagccttgccctgcgcttaaccgccaatggcgaaggag

SEQ ID NO: 754032 - DNA, 75 bp, synthetic construct
  source 1..75: mol_type = other DNA
gcttgatgcgattcacgccattctggaacagcagccagacagctttccgtcccgtgtatttcgcccactgtttgg

SEQ ID NO: 754033 - DNA, 75 bp, synthetic construct
  source 1..75: mol_type = other DNA
aaaccggagaagtgattgatcagggaacgctggatcacctgaccggacaattgaccgcatttagcgagtttattc

SEQ ID NO: 754034 - DNA, 75 bp, synthetic construct
  source 1..75: mol_type = other DNA
cgcgttaagaatggacgaatcagatggcttacagaggaggaatcgaagcacctgtttgcagaaattgctcctcat

SEQ ID NO: 754035 - DNA, 75 bp, synthetic construct
  source 1..75: mol_type = other DNA
tgctttatggatcaggaaaaaactatttgttcttcagtcatggtactgttctgatgtacctgctgtgtgttttcg

SEQ ID NO: 754036 - DNA, 75 bp, synthetic construct
  source 1..75: mol_type = other DNA
ccatcagcagcaagatctaaagcaaaatcctccactcagcgacttattgctaaatccattgataaaggcgttaac

SEQ ID NO: 754037 - DNA, 75 bp, synthetic construct
  source 1..75: mol_type = other DNA
tggctgttgaatggggatggcttgacagggcgcccaaaatatcaacaccacgcgttaagaatggacgaatcagat

SEQ ID NO: 754038 - DNA, 75 bp, synthetic construct
  source 1..75: mol_type = other DNA
acgcgagcaaaatcgatgcgattataagtcgcaatggcacaaatacggcacaagatgagaacgtggtttacttaa

SEQ ID NO: 754039 - DNA, 75 bp, synthetic construct
  source 1..75: mol_type = other DNA
agtgggaactgaatcctacgaattaggtttttcgaaaggattaattgatccgggtgaaagcgtctacgaagccgc

SEQ ID NO: 754040 - DNA, 75 bp, synthetic construct
  source 1..75: mol_type = other DNA
agcttttacatcgtacagcctggggaaatcctgtctggaatgcactccagagtctcaatatctatggcttttgcc

SEQ ID NO: 754041 - DNA, 75 bp, synthetic construct
  source 1..75: mol_type = other DNA
ggaacagatccgtcaggctgacggtgtggtgatcgtcacgccggaatataactactcggtaccgggtgggctgaa

SEQ ID NO: 754042 - DNA, 75 bp, synthetic construct
  source 1..75: mol_type = other DNA
aaatctgcgcataacgacaacatcaaaatcattggttttgatggtatgaaagaagcgcgagatgccgttgatagt

SEQ ID NO: 754043 - DNA, 75 bp, synthetic construct
  source 1..75: mol_type = other DNA
atatgtgtgagtttgtccgcgaaggggaatcggcatttaacctgaatatcctgattggctgcggtgttgacggat

SEQ ID NO: 754044 - DNA, 75 bp, synthetic construct
  source 1..75: mol_type = other DNA
cgcgcctcatccagcttactgaaaaacagaataaaacaggtggtgacttcaaggaaatagacctgctgacccggc

SEQ ID NO: 754045 - DNA, 75 bp, synthetic construct
  source 1..75: mol_type = other DNA
ttgcgggatcgtattgttcagcgggccatgctgatggcgatggagccgatatgggagagtgattttcatacgctc

SEQ ID NO: 754046 - DNA, 75 bp, synthetic construct
  source 1..75: mol_type = other DNA
agcgtggatctggagttcagcaatggcgtgcggcgtgtttatgaacgaatgcgtccaaccaaccgggaagcggtg

SEQ ID NO: 754047 - DNA, 75 bp, synthetic construct
  source 1..75: mol_type = other DNA
ttttgaagaagctcagcatggcaccgtcttacttttccagcaaaatgaatatcgtggtagcgcaagatctctacc

SEQ ID NO: 754048 - DNA, 75 bp, synthetic construct
  source 1..75: mol_type = other DNA
ccattctgaatgttgaaactgtagcccgttcccgactgtttaccgtcgaaagcgtggatctggagttcagcaatg

SEQ ID NO: 754049 - DNA, 75 bp, synthetic construct
  source 1..75: mol_type = other DNA
ttatgcaggccaacgccaacctgaatggtctgtttggctttggtgatgatgcggcgttggcagcggttatcgcag

SEQ ID NO: 754050 - DNA, 75 bp, synthetic construct
  source 1..75: mol_type = other DNA
tatatcacactgaatcgtccggaagaggaacactctggtcctgaagatataccttcagtgaaggcgattctgaat

SEQ ID NO: 754051 - DNA, 75 bp, synthetic construct
  source 1..75: mol_type = other DNA
cagctcacagactgtggtgaaacccggggacgctgggtgattgaaggcgacctgtccagttacttcgacaccgta

SEQ ID NO: 754052 - DNA, 75 bp, synthetic construct
  source 1..75: mol_type = other DNA
atgtgcctggagtcctgggacgaagccttcagcaaaaccgaagagtaccgcggcggcaatgccaatatgcacgca

SEQ ID NO: 754053 - DNA, 75 bp, synthetic construct
  source 1..75: mol_type = other DNA
ggacagcaatgaaaaaattgctggcatggctgacgaaatcaaaaaccatgccgacgagctggagcagcaggcgaa

SEQ ID NO: 754054 - DNA, 75 bp, synthetic construct
  source 1..75: mol_type = other DNA
gcgtgcccgtagccagtcaatggtggacggtaacgcctacgagctgctgctggatctgttcgaaaccaaaatcga

SEQ ID NO: 754055 - DNA, 75 bp, synthetic construct
  source 1..75: mol_type = other DNA
tgcccgcttttcgcctttaccgtatgcgtgcccgtagccagtcaatggtggacggtaacgcctacgagctgctgc

SEQ ID NO: 754056 - DNA, 75 bp, synthetic construct
  source 1..75: mol_type = other DNA
gcagtatggattgatcttgtcgaaccggatgacgacgagcgactgcgcgtacaatctgaacttggtcagagcctg

SEQ ID NO: 754057 - DNA, 75 bp, synthetic construct
  source 1..75: mol_type = other DNA
tttgataaaaagagcagatgatcttttgagatggggagcacaggaggaatatgatttcagtaagatctttggtgt

SEQ ID NO: 754058 - DNA, 75 bp, synthetic construct
  source 1..75: mol_type = other DNA
tctatagcgacctggagcagttgagccgggtgattatggaagggcatcagggcgatgagtacgacgaggcgctct

SEQ ID NO: 754059 - DNA, 75 bp, synthetic construct
  source 1..75: mol_type = other DNA
tctcggtggtatccgtcgtgttcctgccgccaacgctggttgcctccagctacgggatgaactttgagtttatgc

SEQ ID NO: 754060 - DNA, 75 bp, synthetic construct
  source 1..75: mol_type = other DNA
ggatctgttcgaaaccaaaatcgaacagttggcagatgaaattgaaaatatctatagcgacctggagcagttgag

SEQ ID NO: 754061 - DNA, 75 bp, synthetic construct
  source 1..75: mol_type = other DNA
ttctgccgcagagaaaatcaatttcggcgtatcagcgacctatcctcccttcgaatctataggtgctaataatga

SEQ ID NO: 754062 - DNA, 75 bp, synthetic construct
  source 1..75: mol_type = other DNA
gcgtgcccgtagccagtcgatggtggacggtaatgcctacgagctgctgctggatctgttcgaaactaaaatcga

SEQ ID NO: 754063 - DNA, 75 bp, synthetic construct
  source 1..75: mol_type = other DNA
atctatagcgacctggagcagttgagccgggtgattatggaagggcatcagggcgatgagtatgacgaagcgctc

SEQ ID NO: 754064 - DNA, 75 bp, synthetic construct
  source 1..75: mol_type = other DNA
tacagcgtcaacttcctgccaaaagtaaaaattgatgtggcgattgctgatgaccaactcgatgaagtgatcgat

SEQ ID NO: 754065 - DNA, 75 bp, synthetic construct
  source 1..75: mol_type = other DNA
ccagcgccgaacaggccgcagccttgctgaaagcgatgagtcaccccaaacggctgctgattctatgcatgcttt

SEQ ID NO: 754066 - DNA, 75 bp, synthetic construct
  source 1..75: mol_type = other DNA
tcttggcgaagacgaagtttttgatggcttttcggcaatgaaattgcgtaattattatttgctcaatccttatga

SEQ ID NO: 754067 - DNA, 75 bp, synthetic construct
  source 1..75: mol_type = other DNA
tttatcgcgccatcttggcgaagacgaagtttttgatggcttttcagcaatgaaattgcgtaattattatttgct

SEQ ID NO: 754068 - DNA, 75 bp, synthetic construct
  source 1..75: mol_type = other DNA
gttcgcgatctctataacttccgcagtcgcagctactggttacgacgactggaaaacaataaacgcagagagcgc

SEQ ID NO: 754069 - DNA, 75 bp, synthetic construct
  source 1..75: mol_type = other DNA
agagtttacgattgaacatattatgccgcagaacgaaaatttgtcggctaaatggcgcgaagagctgggaagtga

SEQ ID NO: 754070 - DNA, 75 bp, synthetic construct
  source 1..75: mol_type = other DNA
ctacgcggagtattactgtgcaatggcattgggaaaagaaagtgacaaatcgcttgctacggcttttcaggattt

SEQ ID NO: 754071 - DNA, 75 bp, synthetic construct
  source 1..75: mol_type = other DNA
tggaagtcgcttttggtcagcaaggttacagcgaatattttgacagttttatgcgtcattatctgacggtaaaaa

SEQ ID NO: 754072 - DNA, 75 bp, synthetic construct
  source 1..75: mol_type = other DNA
atgttacctgttttgatgtactcccgaaaggtacaaatggttttcactggactgattcacttattgatattgatc

SEQ ID NO: 754073 - DNA, 75 bp, synthetic construct
  source 1..75: mol_type = other DNA
tattatccaggtgatgcgtttatgtcactactaggacaggtaaaccaagcaaaccaagaatggaagatgaaataa

SEQ ID NO: 754074 - DNA, 75 bp, synthetic construct
  source 1..75: mol_type = other DNA
agctaaaattaatatctatatggtaatccttgatccctatactactacaccactctatcaaatgttgatgttctc

SEQ ID NO: 754075 - DNA, 75 bp, synthetic construct
  source 1..75: mol_type = other DNA
gatccccggcgcaacctctctctattactgggaaggtaagctggaacaagaatacgaagtgcagatgatatttaa

SEQ ID NO: 754076 - DNA, 75 bp, synthetic construct
  source 1..75: mol_type = other DNA
taacttcaaaattagtaatgtgaacacgagtgtaagagcacttgctttagggggattccttaaagatgcacagat

SEQ ID NO: 754077 - DNA, 75 bp, synthetic construct
  source 1..75: mol_type = other DNA
ggttcattgccttctttcagcgaacagaaggggatcaataacgatgcgattaacttcaaaattagtaatgtgaac

SEQ ID NO: 754078 - DNA, 75 bp, synthetic construct
  source 1..75: mol_type = other DNA
atgaaaaagttagttcttgccgctttactttcatcctgtgcattcggcgcttctgccgcagagaaaatcaatttc

SEQ ID NO: 754079 - DNA, 75 bp, synthetic construct
  source 1..75: mol_type = other DNA
ttcccggcggcaatggccgttttccgtgagcagagcgagttcaacgagctgcgccgccagtggctgatggcgttt

SEQ ID NO: 754080 - DNA, 75 bp, synthetic construct
  source 1..75: mol_type = other DNA
atggaccgctgccgggcgggtgaaacatggcctccggacctggctgagtttgtggcgctgatttcggagagcggg

SEQ ID NO: 754081 - DNA, 75 bp, synthetic construct
  source 1..75: mol_type = other DNA
tttagttatggttttgctgtggttttacctgatcgtaccgggttttctgcaaaacgtgctgggattatcacccaa

SEQ ID NO: 754082 - DNA, 75 bp, synthetic construct
  source 1..75: mol_type = other DNA
aacgcagagcacttgagatctgggaagaccgggttaataactatcaacagcaaacaggcaataatgttgtcaatc

SEQ ID NO: 754083 - DNA, 75 bp, synthetic construct
  source 1..75: mol_type = other DNA
ccaccggataagcgtcgtcgcgacctggacaatattctgaaagcaccgctggatgcgctgacgcatgcgggagtg

SEQ ID NO: 754084 - DNA, 75 bp, synthetic construct
  source 1..75: mol_type = other DNA
cgccgtgacctggacaatattctgaaagcgccgctggatgcgctgacgcatgcggggttgctaatggacgatgag

SEQ ID NO: 754085 - DNA, 75 bp, synthetic construct
  source 1..75: mol_type = other DNA
tcctgtttacctctttctcaggaagtttagtctccaggattcccggggcggttcaaactgtattaaatcgggtga

SEQ ID NO: 754086 - DNA, 75 bp, synthetic construct
  source 1..75: mol_type = other DNA
gtaaccatgaccgcgagcagatgagccgcatggcccataacctgccagatcagtaccaggagcgggcgccagtag

SEQ ID NO: 754087 - DNA, 75 bp, synthetic construct
  source 1..75: mol_type = other DNA
tgcccgccgccaggagcgcccattcctgccgtcgccgggccagttcgtcgcctggtgcaaacagagtggcggggc

SEQ ID NO: 754088 - DNA, 75 bp, synthetic construct
  source 1..75: mol_type = other DNA
cgaatcgacaacatcagcgtttctatggacggcatgacgggcggggtgaagaactctgcaattgcgataatccag

SEQ ID NO: 754089 - DNA, 75 bp, synthetic construct
  source 1..75: mol_type = other DNA
aagaagcatcgaaagggaaaaatgttgactggtcaccagagaagctggtgcttgagggtatagatagatccggta

SEQ ID NO: 754090 - DNA, 75 bp, synthetic construct
  source 1..75: mol_type = other DNA
ttacacaataaaatgatgctaaataattatttaccagttagtgatgatgagttacaaataatgactttacataaa

SEQ ID NO: 754091 - DNA, 75 bp, synthetic construct
  source 1..75: mol_type = other DNA
atgaacacaagtgtagggattagttttgggctggaggccaatcctgtatcagtgataccgaaacagtcatctgca

SEQ ID NO: 754092 - DNA, 75 bp, synthetic construct
  source 1..75: mol_type = other DNA
ggtctgtttggttttctcctgcatcatttatgcaggcgcgagccagttcgtcattaccgcgatgctggcagccgg

SEQ ID NO: 754093 - DNA, 75 bp, synthetic construct
  source 1..75: mol_type = other DNA
cgccgcctgattgtcttcatgaccttactggcagccggaggcatgttgctcaccgccagcagtcagtcgctggca

SEQ ID NO: 754094 - DNA, 75 bp, synthetic construct
  source 1..75: mol_type = other DNA
tacgtccggataacaaagctctgctggagaaactgaataacgcgctggcggcaattaaagctgacggtacatatc

SEQ ID NO: 754095 - DNA, 75 bp, synthetic construct
  source 1..75: mol_type = other DNA
cagaaattcattatggataagcacccggaaatcactaccgttccgtatgacagctaccagaacgcaaaactggat

SEQ ID NO: 754096 - DNA, 75 bp, synthetic construct
  source 1..75: mol_type = other DNA
tactgggaaggtaagctggagcaagaatacgaagtgcagatgattttaaaaactaccgtatctcaccagcaggcg

SEQ ID NO: 754097 - DNA, 75 bp, synthetic construct
  source 1..75: mol_type = other DNA
ggtctgtttggacttgcgggagctgccggagcgttgggcgctcgtccggcgggcggttttgccgataagggcaaa

SEQ ID NO: 754098 - DNA, 75 bp, synthetic construct
  source 1..75: mol_type = other DNA
agtgcctctgcgacatcacagcatctcgctcgtatgcgggacgaagggcttatcgacagccaacgggatgcccaa

SEQ ID NO: 754099 - DNA, 75 bp, synthetic construct
  source 1..75: mol_type = other DNA
aaatacacatctatatatattgatgagtatcaagatgctggatgtgttcagcatcttctttttctttatcttttc

SEQ ID NO: 754100 - DNA, 75 bp, synthetic construct
  source 1..75: mol_type = other DNA
atgatgatcctcggtacgacattaacgggtttattctcggtcgtggcacaaattctggttccgctggcggcaaca

SEQ ID NO: 754101 - DNA, 75 bp, synthetic construct
  source 1..75: mol_type = other DNA
tactgccagcagtcagtcgctggcgatgatgatcctcggtacggcattaaccggtttattctctgtcgtggcaca

SEQ ID NO: 754102 - DNA, 75 bp, synthetic construct
  source 1..75: mol_type = other DNA
ccggagcgttgggcgctcgtccggcgggcggttttgccgataagggtaaatcgcaccacaccacaactttcggtc

SEQ ID NO: 754103 - DNA, 75 bp, synthetic construct
  source 1..75: mol_type = other DNA
tggttaagtaaaagcggttttagtgccggagaaattggctggtcgtatgcctgtaccgccattgcggcgatcctg

SEQ ID NO: 754104 - DNA, 75 bp, synthetic construct
  source 1..75: mol_type = other DNA
actatcatctattactcgccgcgttaaaagcaaaagacaaagagggatgcagacattgtcttgctgaaattatgc

SEQ ID NO: 754105 - DNA, 75 bp, synthetic construct
  source 1..75: mol_type = other DNA
gaaagtaaaagacaaagagcgatgcagacattgtcttgctgaaattatgcaacaaaatgttgctatgttatacca

SEQ ID NO: 754106 - DNA, 75 bp, synthetic construct
  source 1..75: mol_type = other DNA
taaaaattaccctgggagcttatcctgcaatgacgctggcccaggctcgtgaagcacatgctgaagccattgagt

SEQ ID NO: 754107 - DNA, 75 bp, synthetic construct
  source 1..75: mol_type = other DNA
aaaatgcgctgggatcaaatcaacggcgatcgctggacaataccggaaacaaagaatggtaaaagtcatgtagta

SEQ ID NO: 754108 - DNA, 75 bp, synthetic construct
  source 1..75: mol_type = other DNA
ctgttggaggaggctccattgcatctggtggctatggaatttcctctagtgtggtattatctcattctgtcgcaa

SEQ ID NO: 754109 - DNA, 75 bp, synthetic construct
  source 1..75: mol_type = other DNA
gtctcctatgacagttatcagaatgcctttatcgatctgaaaaatggtcgtattgatggggtatttggtgacacc

SEQ ID NO: 754110 - DNA, 75 bp, synthetic construct
  source 1..75: mol_type = other DNA
tacgtccggataacaaagctctgctggaaaaactgaataacgcgctggcagcaattaaagctgacggtacatatc

SEQ ID NO: 754111 - DNA, 75 bp, synthetic construct
  source 1..75: mol_type = other DNA
tttgaatcttcatggtggcgtatgcagggctacgcgcttgagatcccggcattgtacgccgcgatcgatgaaacc

SEQ ID NO: 754112 - DNA, 75 bp, synthetic construct
  source 1..75: mol_type = other DNA
cccatcctgtgtgagatgattgagcaactgtgggtcaggatgggacctggtttacattatctctatgaagcgatt

SEQ ID NO: 754113 - DNA, 75 bp, synthetic construct
  source 1..75: mol_type = other DNA
aaaagcaaaagacaaagagggatgcagacattgtcttgctgaaattatgcaacaaaatattgctattttatacca

SEQ ID NO: 754114 - DNA, 75 bp, synthetic construct
  source 1..75: mol_type = other DNA
cgctttcgacagcctgatcccgtcactgaaattcaggaaatatgacgccgttatctccggtatggatatcacgcc

SEQ ID NO: 754115 - DNA, 75 bp, synthetic construct
  source 1..75: mol_type = other DNA
ccggagcgcctgattgagcgattgttaaaccacattcctaaagaccgcctgatcagaacctatcaggtcgggcag

SEQ ID NO: 754116 - DNA, 75 bp, synthetic construct
  source 1..75: mol_type = other DNA
cgctggggtgccctttagtcagaagactagcgggcattaaagaaatgaaagtcaaaactattacgatgggcaaac

SEQ ID NO: 754117 - DNA, 75 bp, synthetic construct
  source 1..75: mol_type = other DNA
cgatcaggatgcgctgaaagcgaaatttggcgtcagcaacgttaacggcccaatctcgctggtgatctggaccac

SEQ ID NO: 754118 - DNA, 75 bp, synthetic construct
  source 1..75: mol_type = other DNA
tacagttcgataaaaggaaacatcgatgctgcggctaagtttaaagaatatgcactctctgggcgagaattaact

SEQ ID NO: 754119 - DNA, 75 bp, synthetic construct
  source 1..75: mol_type = other DNA
agtgccgcatccggtacgtggcaccgtttcgctcgtcgaatggcatatggctcgcgcgcgtaaccatattcatgt

SEQ ID NO: 754120 - DNA, 75 bp, synthetic construct
  source 1..75: mol_type = other DNA
tgctgatttgggtgtcgtgctcgtgatgccagtcactatcaacaagggcagggaacgcagttacttcatgaaatt

SEQ ID NO: 754121 - DNA, 75 bp, synthetic construct
  source 1..75: mol_type = other DNA
ttcaccgctgggcgcgcgatctcggtctggcaggtgcgagtctgcgcctgtttccggatcgctggcgcttaggtg

SEQ ID NO: 754122 - DNA, 75 bp, synthetic construct
  source 1..75: mol_type = other DNA
atgcaaaataccgattttgaaatccgtacatctgaactgaccgccagcgataaaaaactggtgggttatgccgtt

SEQ ID NO: 754123 - DNA, 75 bp, synthetic construct
  source 1..75: mol_type = other DNA
tgctggtggcggaactgtacgaaattaccgttacatccgtaccggcttaccccgattccggcgtggagctggccc

SEQ ID NO: 754124 - DNA, 75 bp, synthetic construct
  source 1..75: mol_type = other DNA
gtgcttacgctggtggagcgtggcgacattacaggaatgagctttggttttcgcgcattatgcgaggagtggagt

SEQ ID NO: 754125 - DNA, 75 bp, synthetic construct
  source 1..75: mol_type = other DNA
tacagaaagataaaagaaatttcaccacgattgtataatacagatgaaggagtctcagaggggagtggacgtgcg

SEQ ID NO: 754126 - DNA, 75 bp, synthetic construct
  source 1..75: mol_type = other DNA
tacagaaagataaaagagatttcaccacgattgtataatacagatgaaggagtctcagaggagagtggacgtgcg

SEQ ID NO: 754127 - DNA, 75 bp, synthetic construct
  source 1..75: mol_type = other DNA
gaagcatgcccacaaactgagttattaagttgtggaagaacagttttgtcccgcctgcatctctcctttcaaaaa

SEQ ID NO: 754128 - DNA, 75 bp, synthetic construct
  source 1..75: mol_type = other DNA
taatgacccgcgtctggtggttcttgtcggcgctgaccttgtggcagctgaatctttccgcctgtaccagaaagc

SEQ ID NO: 754129 - DNA, 75 bp, synthetic construct
  source 1..75: mol_type = other DNA
tgccgaattcaaaaacatgaacattgatgatgctattaaaaaccttttggtttcaatgggagatgttcagcctaa

SEQ ID NO: 754130 - DNA, 75 bp, synthetic construct
  source 1..75: mol_type = other DNA
taactcagtactaccaatctccgtagataaaaatgctgctaaataccttatatttcaaacaataatcaataattc

SEQ ID NO: 754131 - DNA, 75 bp, synthetic construct
  source 1..75: mol_type = other DNA
agaccctattgttgtcggtcggttaaagaaatctgactttgttaagctttatggcaattatgttgttgggaagaa

SEQ ID NO: 754132 - DNA, 75 bp, synthetic construct
  source 1..75: mol_type = other DNA
gcgtcagcgccgacatgcctccgctgagctgttccgtcatccccgtcacaccgtggacttacggactgggacgat

SEQ ID NO: 754133 - DNA, 75 bp, synthetic construct
  source 1..75: mol_type = other DNA
aatctttttttcaactaccacataaacctcgtcagctcagacgaacgatttggagcaataatagaaatactactg

SEQ ID NO: 754134 - DNA, 75 bp, synthetic construct
  source 1..75: mol_type = other DNA
atgcgtcttcttcataccatgctgcgcgttggcgatctgcaacgctccatcgatttttataccaacgtgctgggc

SEQ ID NO: 754135 - DNA, 75 bp, synthetic construct
  source 1..75: mol_type = other DNA
ctgacgcctcctaccgcagaactgcaataccgtattccggaccagccttcgcttgacggtaataccgtcgatatg

SEQ ID NO: 754136 - DNA, 75 bp, synthetic construct
  source 1..75: mol_type = other DNA
gtattttatggggcaccatgctggcggtgatgcgcctgtccagctttgcgcccgtggcgtggtttgccaaagcct

SEQ ID NO: 754137 - DNA, 75 bp, synthetic construct
  source 1..75: mol_type = other DNA
cctgagtgattatccttttcttgctgatggttcgcatagccgggtgttattcgatcatcttcgcgatgaaattat

SEQ ID NO: 754138 - DNA, 75 bp, synthetic construct
  source 1..75: mol_type = other DNA
atgacgtcgattggctatgagctgattgtgatctccgcctgcgttttaggtggtgtttctctgaaaggcggcatc

SEQ ID NO: 754139 - DNA, 75 bp, synthetic construct
  source 1..75: mol_type = other DNA
atgctcgataagctcgacgccgccttacgttttcaacaagaggcgctcaatctgcgcgcctatcgtcaggaagtg

SEQ ID NO: 754140 - DNA, 75 bp, synthetic construct
  source 1..75: mol_type = other DNA
ataacagcctgcaataccagatgagccttagcgcgttgagcgggcaaatcaaaggcatgatgaacgttttacaga

SEQ ID NO: 754141 - DNA, 75 bp, synthetic construct
  source 1..75: mol_type = other DNA
cgcactcctggcggcagactcattaaccgaactggggaaaatgatccatgagccagaccgcactgctcgcccttg

SEQ ID NO: 754142 - DNA, 75 bp, synthetic construct
  source 1..75: mol_type = other DNA
gggatctgctttctgtctgggcaaacgccggtaaggacgaaaacgagttttacaacctggtacaggcattcacca

SEQ ID NO: 754143 - DNA, 75 bp, synthetic construct
  source 1..75: mol_type = other DNA
acagacagctgcgccgcgttgcgctgggatctgctttcggtctgggcaaatgcgggtaaggatgaaaacgagttt

SEQ ID NO: 754144 - DNA, 75 bp, synthetic construct
  source 1..75: mol_type = other DNA
tacaacctggtacaggcattcaccacgcaggcttttgcgctggacatgttgcgcattggtttcaatggtaaaagt

SEQ ID NO: 754145 - DNA, 75 bp, synthetic construct
  source 1..75: mol_type = other DNA
aaacagttcgaaaacagctatctgcgtaatgaaggttacgcgattgaagtgccggagctgtacgcggcgattgat

SEQ ID NO: 754146 - DNA, 75 bp, synthetic construct
  source 1..75: mol_type = other DNA
cccaggcgtttgccatggatatgctgcgtatcggctttaacggtacacaccgcgccaaaaccacagacccgattg

SEQ ID NO: 754147 - DNA, 75 bp, synthetic construct
  source 1..75: mol_type = other DNA
cgggcgaaaaccactgatccggtagcaaacccgaacggtgaagatgtgaacatcggctggcatgagcgtatgaaa

SEQ ID NO: 754148 - DNA, 75 bp, synthetic construct
  source 1..75: mol_type = other DNA
gttcgatctgcgcgactggcccgatcccgatgccatgattgccgaactaaaagagatgggcattgaactgatggt

SEQ ID NO: 754149 - DNA, 75 bp, synthetic construct
  source 1..75: mol_type = other DNA
tttttatcaaaactgccgaacgtgctggatgttgaacaggtgacaggccaggtggtcaccaccggcacgccgggc

SEQ ID NO: 754150 - DNA, 75 bp, synthetic construct
  source 1..75: mol_type = other DNA
aatgcagagatccccgtaaatgtcggttttatgccgaatatctgaatcacaaataccctaatgaattccctcact

SEQ ID NO: 754151 - DNA, 75 bp, synthetic construct
  source 1..75: mol_type = other DNA
aagaattgttagaagtcgcacgcggctacaagcaacgcaatcttccgatctcggtgattgtcatcgatttcttcc

SEQ ID NO: 754152 - DNA, 75 bp, synthetic construct
  source 1..75: mol_type = other DNA
gttcccttcctgctatcaaatcagggttatggttttctgtggaataacccagcaattggccgcgtcaccttcgcg

SEQ ID NO: 754153 - DNA, 75 bp, synthetic construct
  source 1..75: mol_type = other DNA
gggcaaaagcttcatcattgcgcgccgctgcaccagataccggtattcattcgtgagaaagggaaatatcgccag

SEQ ID NO: 754154 - DNA, 75 bp, synthetic construct
  source 1..75: mol_type = other DNA
gttcgtaaagctaaactgtacttcctgcgtgagcgtactggtaaggctgctcgtatcaaagagcgtcttaactaa

SEQ ID NO: 754155 - DNA, 75 bp, synthetic construct
  source 1..75: mol_type = other DNA
ctggcgcgccggggagcaggagcagacaccacctgaaggctttgagtcctccggggcggaaaccgcactgggcgt

SEQ ID NO: 754156 - DNA, 75 bp, synthetic construct
  source 1..75: mol_type = other DNA
ggcgcacataaaaaatccggaaacgagtgagcgtttccggattcttacacagccactggatcggtcaactgatcc

SEQ ID NO: 754157 - DNA, 75 bp, synthetic construct
  source 1..75: mol_type = other DNA
agcggtgggcagtatgaacggtagtgcgggcctggtgtattccccggtctaccatatcgccattcagaatgacgg

SEQ ID NO: 754158 - DNA, 75 bp, synthetic construct
  source 1..75: mol_type = other DNA
cagtctggcgtggtggtgaacaaaacgaagaccagcttttgcaggatgcctatctcaatagcctacgactggtgg

SEQ ID NO: 754159 - DNA, 75 bp, synthetic construct
  source 1..75: mol_type = other DNA
agatgcccagaaaacggctttcaccaaagaagatggtgaaaaagtcgttaatgatgcagttaaaagactgaaata

SEQ ID NO: 754160 - DNA, 75 bp, synthetic construct
  source 1..75: mol_type = other DNA
tgagctggtcaaactcattgcagatatgggcatttccgttcgggctttgctacgtaagaacgtcgacccgtatga

SEQ ID NO: 754161 - DNA, 75 bp, synthetic construct
  source 1..75: mol_type = other DNA
acaccaccggaaggctttgagtcctccggtgctgaaaccggactgggcgtggaagtgacgaaggcaaaaccggtg

SEQ ID NO: 754162 - DNA, 75 bp, synthetic construct
  source 1..75: mol_type = other DNA
ataaatatcttgagttagggttgaaaaatttattgagcaggcattctattactattggtgctgattttcttatac

SEQ ID NO: 754163 - DNA, 75 bp, synthetic construct
  source 1..75: mol_type = other DNA
acgacgtgcaaatcaccgacaccctgacgaccttcgataaccatccgttgcatcaccctttatcggtctatgaca

SEQ ID NO: 754164 - DNA, 75 bp, synthetic construct
  source 1..75: mol_type = other DNA
cacgcctcgtctgtgtcgtcccttccgtccacaaaccaaagggaaagtggaacgaatggtgcaatacgcccggaa

SEQ ID NO: 754165 - DNA, 75 bp, synthetic construct
  source 1..75: mol_type = other DNA
atgggaattacggtgcgtgcattactgcgtaagaatgttgagccttatgaacatctgggtcttggtgaagagaaa

SEQ ID NO: 754166 - DNA, 75 bp, synthetic construct
  source 1..75: mol_type = other DNA
ccgtggcatcgaacgtacctacaccaaagatttgctggttgaggtttatctaaacggtttaggacatggccttag

SEQ ID NO: 754167 - DNA, 75 bp, synthetic construct
  source 1..75: mol_type = other DNA
ggttaacaacgccggtggcggtgggcctaagccatttgatatgccaatggcggattttcgccgcgcttatgaact

SEQ ID NO: 754168 - DNA, 75 bp, synthetic construct
  source 1..75: mol_type = other DNA
tctgggccaaccgcaagatattgctaacgcagcgctgttcctttgctcgcctgctgcgagctgggtaagcggaca

SEQ ID NO: 754169 - DNA, 75 bp, synthetic construct
  source 1..75: mol_type = other DNA
accattgtctgacctatatcgctaaagataaacgtaacgtgacatttaaaccagattatctggatgggctggtaa

SEQ ID NO: 754170 - DNA, 75 bp, synthetic construct
  source 1..75: mol_type = other DNA
tcatcattttactggcgctcgctgcaattgccggactgggtactcatgccgcctggagtagcaatggtttgccac

SEQ ID NO: 754171 - DNA, 75 bp, synthetic construct
  source 1..75: mol_type = other DNA
agaccgttaatcgaggtgcgatcatgccaggaatgctggtcaaacacaaagatggtacctggactgcatcaggta

SEQ ID NO: 754172 - DNA, 75 bp, synthetic construct
  source 1..75: mol_type = other DNA
atcgccagtatgaaacctggtatcagacatggtgggactactgcattaagtatctgatggactatgaaaatggtt

SEQ ID NO: 754173 - DNA, 75 bp, synthetic construct
  source 1..75: mol_type = other DNA
acccagcgcaccgcttccgcgcattcggaggcacgccgggccactggatcgaatggggccgtttaatgctgcata

SEQ ID NO: 754174 - DNA, 75 bp, synthetic construct
  source 1..75: mol_type = other DNA
gaatggggccgtttaatgctgcacattcacgcggccctggaagcccccgttgcgaacaaccgccagcatggctgc

SEQ ID NO: 754175 - DNA, 75 bp, synthetic construct
  source 1..75: mol_type = other DNA
aatgcggcgttgttcttgtgttcacccgccgccagctggataagcggacaaattctcactgtctccggcggtggg

SEQ ID NO: 754176 - DNA, 75 bp, synthetic construct
  source 1..75: mol_type = other DNA
aaaccgccagagtggtgtttaatgaattaagtgccaccgaaccggcgacagtcggggagattgcgcagaatactt

SEQ ID NO: 754177 - DNA, 75 bp, synthetic construct
  source 1..75: mol_type = other DNA
cagctggacttcgtaaaagaaggcctgaatgaagggtttaaattcaccaacccgaacgttaaagatgagtgtggt

SEQ ID NO: 754178 - DNA, 75 bp, synthetic construct
  source 1..75: mol_type = other DNA
gatttttaatattacaccaactgctaattatcgccagaaatgtcgctcaattttacggtaattgtctggttgcgc

SEQ ID NO: 754179 - DNA, 75 bp, synthetic construct
  source 1..75: mol_type = other DNA
tgagctggtcaaactcattgcggatatgggcatttccgtccgggcgttgctgcgtaagaacgtcgagccgtatga

SEQ ID NO: 754180 - DNA, 75 bp, synthetic construct
  source 1..75: mol_type = other DNA
taagctggtcaaactcattgcggatatgggcatttccgtccgggcgttactgcgtaagaacgtcgagccgtatga

SEQ ID NO: 754181 - DNA, 75 bp, synthetic construct
  source 1..75: mol_type = other DNA
tatactgacccagcttgttatggcggctctcgcagattatcagttcggttgttatagatgccttacgcagagaag

SEQ ID NO: 754182 - DNA, 75 bp, synthetic construct
  source 1..75: mol_type = other DNA
tgagctgattaaacttatttcagatatgggaattacggtgcgtgcattgctgcgtaagaatgttgagccttatga

SEQ ID NO: 754183 - DNA, 75 bp, synthetic construct
  source 1..75: mol_type = other DNA
atgggcatcggcgtgcgcgacctgctgcgcaaaaataccgaaccgtacgaacagctcggcctggcagaagaccgc

SEQ ID NO: 754184 - DNA, 75 bp, synthetic construct
  source 1..75: mol_type = other DNA
cgatcgttattctttaccttgaggctccaccctcacgagatgagctggtcaaactcattgcagatatgggaattt

SEQ ID NO: 754185 - DNA, 75 bp, synthetic construct
  source 1..75: mol_type = other DNA
ttaatcctgacccagcttgttatggcgggtctggcagattatcagttcggttgttacagacgccttccgcagtga

SEQ ID NO: 754186 - DNA, 75 bp, synthetic construct
  source 1..75: mol_type = other DNA
tcgacggacgcggtactccgttacgaagcgaggctgggtatttcccggcctttctgttatccgaaagatgcgcat

SEQ ID NO: 754187 - DNA, 75 bp, synthetic construct
  source 1..75: mol_type = other DNA
cgcttttagtgctgatatccctgatttcgatctctattccagtaataccgtccggactattcagtcggcgacctg

SEQ ID NO: 754188 - DNA, 75 bp, synthetic construct
  source 1..75: mol_type = other DNA
agaaaccgctacgtcagcaaaaccgcccgattattagctatgttccgcgcacagaacccgcgccgccagaacatg

SEQ ID NO: 754189 - DNA, 75 bp, synthetic construct
  source 1..75: mol_type = other DNA
atgctgaaacagcaggatatgaccgaaaccgccagagtggtgtttaatgaattaagtgccaccgaaccggcgaca

SEQ ID NO: 754190 - DNA, 75 bp, synthetic construct
  source 1..75: mol_type = other DNA
atgctgaaacagcaggatatgacagaaaccgccagagttgtgtttgatgaattaagcgttaccgacccggcgaca

SEQ ID NO: 754191 - DNA, 75 bp, synthetic construct
  source 1..75: mol_type = other DNA
acgaacacaactatctcagtaaaagatggtaatggcgtgttacgcgtccaggttgggcgaattaccggatcatgg

SEQ ID NO: 754192 - DNA, 75 bp, synthetic construct
  source 1..75: mol_type = other DNA
tttgctggacaatatcgccgggatgttccgtggcatcgcgttatgggacgggcaacgtcttaccgtaatgattga

SEQ ID NO: 754193 - DNA, 75 bp, synthetic construct
  source 1..75: mol_type = other DNA
ttatcctcacactgctgtagcaggcgcggtaattgatcacgatcagtatactgacacacctacacgcacttatca

SEQ ID NO: 754194 - DNA, 75 bp, synthetic construct
  source 1..75: mol_type = other DNA
attcgtaacgggaccgtattcgccgtatcaactgaatccgcgaaacctgtcctgtgtcgaatcaccagcgtagcg

SEQ ID NO: 754195 - DNA, 75 bp, synthetic construct
  source 1..75: mol_type = other DNA
acggcggtacatcagtctcaggcgttagcgtggcgtggcgtaatggtacggctgaccagtcaccaatcaacggct

SEQ ID NO: 754196 - DNA, 75 bp, synthetic construct
  source 1..75: mol_type = other DNA
tttaaagggtcgctagaggctacaagttttgtaggcgatgtcgcgtcaactaactttatacctcaagcatcattc

SEQ ID NO: 754197 - DNA, 75 bp, synthetic construct
  source 1..75: mol_type = other DNA
ctaacggtgcttgctacatccgtgatgcgtggatcagagacgcatcaatcactaccgcgaagattgcacagcaaa

SEQ ID NO: 754198 - DNA, 75 bp, synthetic construct
  source 1..75: mol_type = other DNA
cttactggacaatatcgccgggatgttcaggggtatcgcattatgggacgggcaacgccttaccgtgatgattga

SEQ ID NO: 754199 - DNA, 75 bp, synthetic construct
  source 1..75: mol_type = other DNA
gttgacgacggcgcattatatacgctttctcaatactgtgaccagttggttgatgatggctacggtggccttgag

SEQ ID NO: 754200 - DNA, 75 bp, synthetic construct
  source 1..75: mol_type = other DNA
caagtgctgaaaaatttgttcaaatatcggcatctttcgacgatgtaaactcaagcatcacggaatggtcgcagg

SEQ ID NO: 754201 - DNA, 75 bp, synthetic construct
  source 1..75: mol_type = other DNA
cgccgaccttaaaacagcaaccgccgaccttaaaacagctacagatggccttaaagctgatacagatacacttaa

SEQ ID NO: 754202 - DNA, 75 bp, synthetic construct
  source 1..75: mol_type = other DNA
agtttaccgggcgcgggtatcagtggacgtttggcggcatgaatacaggccatacttattacgtttatgtgcgca

SEQ ID NO: 754203 - DNA, 75 bp, synthetic construct
  source 1..75: mol_type = other DNA
gatgacggcgcattatatacgctttcccaatactgcgaccagttagtcaatgatggttacggcggccttgagccg

SEQ ID NO: 754204 - DNA, 75 bp, synthetic construct
  source 1..75: mol_type = other DNA
ggttgggtcgtcatgtgggatggctggttcagacttcaggatatggttgagggttacctggtgatgaagtctctt

SEQ ID NO: 754205 - DNA, 75 bp, synthetic construct
  source 1..75: mol_type = other DNA
atacattaaaaatagtcaagataaaatcgtcgaacatatagagttctgcactcataaacttgtcaatataagtcg

SEQ ID NO: 754206 - DNA, 75 bp, synthetic construct
  source 1..75: mol_type = other DNA
atgagtattgctaattgcgttatcggcccactttacgatgagcaaataaaaaaaacactcatgtatgctgaccat

SEQ ID NO: 754207 - DNA, 75 bp, synthetic construct
  source 1..75: mol_type = other DNA
aacgagcagtacaccagaacagcaagggagagcgccgcgcacattacagccggcgcgcttctcagcggtgtattt

SEQ ID NO: 754208 - DNA, 75 bp, synthetic construct
  source 1..75: mol_type = other DNA
tttcgtcagaataacctgctggctggaatgttccgctcggccaaacaattcgaaccggcggacgggtataaccct

SEQ ID NO: 754209 - DNA, 75 bp, synthetic construct
  source 1..75: mol_type = other DNA
ggtataacgatgcgactagagccgatgaaaggagaagaatcgggttcactcaagcaagggaaaagcggcaattgg

SEQ ID NO: 754210 - DNA, 75 bp, synthetic construct
  source 1..75: mol_type = other DNA
acagaaaacttcgatgaaatcagcgattatgtcactaaagacgtgctgaattcagaccagttcaaggaaatggta

SEQ ID NO: 754211 - DNA, 75 bp, synthetic construct
  source 1..75: mol_type = other DNA
tcagcgtagaattgacggagcaagaaaacgagctaatgcagacccgcgccagcctgcaaaacgcagccattgcgc

SEQ ID NO: 754212 - DNA, 75 bp, synthetic construct
  source 1..75: mol_type = other DNA
gatggttacaacgaaaccacgttagaggcgttcgggtgcacatcacgcgggcaagcgtaccgcgcgggcaagtgg

SEQ ID NO: 754213 - DNA, 75 bp, synthetic construct
  source 1..75: mol_type = other DNA
ctgcaattaataatataagtaacgccataattttaagcattgtatactctgtacttcaacatcttcaatccggaa

SEQ ID NO: 754214 - DNA, 75 bp, synthetic construct
  source 1..75: mol_type = other DNA
cgcacctcatgttttctacctggcgaaacgcgaaaaatcctctcaatataaatacattgaaaaagaatatcttct

SEQ ID NO: 754215 - DNA, 75 bp, synthetic construct
  source 1..75: mol_type = other DNA
gcatccggttgcccatacgggtgtacgcaaaatggcggataaaaacgcattaagtctgtggatgcgcgaacgtag

SEQ ID NO: 754216 - DNA, 75 bp, synthetic construct
  source 1..75: mol_type = other DNA
ggccataaaagctgatacggacacactgaaaaaagaaacggaagatctttataaaaaggttgaggaaaacgccga

SEQ ID NO: 754217 - DNA, 75 bp, synthetic construct
  source 1..75: mol_type = other DNA
tcacccctgaattcaggctggaatgtgcacagttgattgttgataagggctactcatatcgacaagccagtgaaa

SEQ ID NO: 754218 - DNA, 75 bp, synthetic construct
  source 1..75: mol_type = other DNA
atgtggaccaaccgcgagtcgatgcaccatgcgcagttgactgagtcggtaaacccgttcaacccgaatgcccag

SEQ ID NO: 754219 - DNA, 75 bp, synthetic construct
  source 1..75: mol_type = other DNA
gctttggtggcgtggacatggtgatcagcggcaacgtgccgcagggtgccgggttaagttcttccgcttcgctgg

SEQ ID NO: 754220 - DNA, 75 bp, synthetic construct
  source 1..75: mol_type = other DNA
acccgagaaaaagtgaaaatgaatcgatgcgtatcattattgactgcgatccggggaacggcattcccggcgcta

SEQ ID NO: 754221 - DNA, 75 bp, synthetic construct
  source 1..75: mol_type = other DNA
tcgctgcggtaataattcccgcaaggatcggtgctgccaggtcgtgccagaaaatcacggcaaactgcgcgagcg

SEQ ID NO: 754222 - DNA, 75 bp, synthetic construct
  source 1..75: mol_type = other DNA
aacaacgtcgtgcggcgtatcgtcagcaagggttatggggcgatgcttcactggcagattactggcagcagaccg

SEQ ID NO: 754223 - DNA, 75 bp, synthetic construct
  source 1..75: mol_type = other DNA
agatacgcaaaaaggcgcgttcaccaaggaagatggcgagaaagtggttgatgaggcgggtaaccgcctgaaata

SEQ ID NO: 754224 - DNA, 75 bp, synthetic construct
  source 1..75: mol_type = other DNA
atgggtatttcagtacgagccctgcttcgtaaaaacgttgagccttatgaagaattgggactcgccgaagataaa

SEQ ID NO: 754225 - DNA, 75 bp, synthetic construct
  source 1..75: mol_type = other DNA
aggaagcagaaaaccagtttgttggctgtaactgcgggatcatggatcaacttatttccgcgctcggcaaaaaag

SEQ ID NO: 754226 - DNA, 75 bp, synthetic construct
  source 1..75: mol_type = other DNA
ggatgcacagaaacacgcgttcaccaaagaagatggtgaaaaagtcgttgatgatgcaggtaaacgactgaaata

SEQ ID NO: 754227 - DNA, 75 bp, synthetic construct
  source 1..75: mol_type = other DNA
tttactgacgatcggttaatcgactttatgctgcaatatcccatcctgattaaccgcccgattgtggtgacaccg

SEQ ID NO: 754228 - DNA, 75 bp, synthetic construct
  source 1..75: mol_type = other DNA
taataactcaatggcgcaaagcaagatgagcactgttattgaggcgaaatacaggaaaggacaaacaaaaacaaa

SEQ ID NO: 754229 - DNA, 75 bp, synthetic construct
  source 1..75: mol_type = other DNA
agatctttataaaaaagttaaggaaaacgccgatgatattggacagcatgagtcgagaatcgactcgctggaggt

SEQ ID NO: 754230 - DNA, 75 bp, synthetic construct
  source 1..75: mol_type = other DNA
ggcccgtgacgcgattcattttacgccaggtgatattatcgagatactcgacaataaccgcgcaggcgctcgttt

SEQ ID NO: 754231 - DNA, 75 bp, synthetic construct
  source 1..75: mol_type = other DNA
gcactgatcttatcgaaagcgctacgaatgaccttaaaactgctactgacaacctcaaaactgcaactgataatc

SEQ ID NO: 754232 - DNA, 75 bp, synthetic construct
  source 1..75: mol_type = other DNA
atcaagctattgcagacgaaacgaacgcccgcacacaggcagtcagtgacgttaacgcgagtatctcatcgctcg

SEQ ID NO: 754233 - DNA, 75 bp, synthetic construct
  source 1..75: mol_type = other DNA
ttggcctgactggtagcggtactaacgttcaatcgcagtgtattttccttgttgaccgcttcgtgttaatgactg

SEQ ID NO: 754234 - DNA, 75 bp, synthetic construct
  source 1..75: mol_type = other DNA
ttgattctgaatgtatcgcccctggtgacaccatcagcttacttggtagcgatggtaaatttaaaaaacaccaga

SEQ ID NO: 754235 - DNA, 75 bp, synthetic construct
  source 1..75: mol_type = other DNA
attcgtaacggcactgtttttgctgtatcaaccaacgcagcaaaacccgttttatgtcgaatcaccagtgtagca

SEQ ID NO: 754236 - DNA, 75 bp, synthetic construct
  source 1..75: mol_type = other DNA
ttcactggtgagattcaggccacaagcgggaagtttaaaggtacagtagaggcaaagtcatttgtcggtgacgtt

SEQ ID NO: 754237 - DNA, 75 bp, synthetic construct
  source 1..75: mol_type = other DNA
gacacggacacacttaaaaaagaaacggaagatctttataaaaaagttaaggaaaacgccgatgatattgggcag

SEQ ID NO: 754238 - DNA, 75 bp, synthetic construct
  source 1..75: mol_type = other DNA
ggcccgtgacgcaattcacttcacccctggggatattatcgagatactcgacaataaccgcgcaggcgctcgttt

SEQ ID NO: 754239 - DNA, 75 bp, synthetic construct
  source 1..75: mol_type = other DNA
ctttgtggaagcgtcaggtaagccaacagaaaactttgatgaaattaccgattacgtcaccaaagacgtaatgaa

SEQ ID NO: 754240 - DNA, 75 bp, synthetic construct
  source 1..75: mol_type = other DNA
tttactggacaatatcgccgggatgttccgaggcatcgcgttatgggacgggcaacgccttaccgtgatgattga

SEQ ID NO: 754241 - DNA, 75 bp, synthetic construct
  source 1..75: mol_type = other DNA
tcgtgattcgcgcgaagggatcatccgtgctaatcggatcgtgatgaacgatctgccggatgggatcaaaacgat

SEQ ID NO: 754242 - DNA, 75 bp, synthetic construct
  source 1..75: mol_type = other DNA
gaaggaacggcaaataccactgtggtttatgccggcggcgaccagactgtacatggtcacgcactggataccacg

SEQ ID NO: 754243 - DNA, 75 bp, synthetic construct
  source 1..75: mol_type = other DNA
aatttatttggtgaatggtgcattgctgatactgatctggcgctaatgattaaccgcctggtactacatggcgat

SEQ ID NO: 754244 - DNA, 75 bp, synthetic construct
  source 1..75: mol_type = other DNA
cccagaaagccgtcaacctgaatgaaggtaagcgtaaactgaccgccgtatgtagccatcagacgagaattggta

SEQ ID NO: 754245 - DNA, 75 bp, synthetic construct
  source 1..75: mol_type = other DNA
tctgggcagccacaacgatatgacctttggcgaaggcacctcatcccgtgacactctgcgcgacagtacaaaaca

SEQ ID NO: 754246 - DNA, 75 bp, synthetic construct
  source 1..75: mol_type = other DNA
acagccgccgccggcagtaacatgacgttctcaccgtcccggaatggcacgtcactggacctgcaggccggactg

SEQ ID NO: 754247 - DNA, 75 bp, synthetic construct
  source 1..75: mol_type = other DNA
ctggcaggctcccgcagccatcagaccggtgtaaacggtgaaaataacagcgtccgtctcagcattcagggcggt

SEQ ID NO: 754248 - DNA, 75 bp, synthetic construct
  source 1..75: mol_type = other DNA
cctccggtgccacctggaatatccccgataacgccacggtgcagtcggtggtggatgacctcagccatgccggac

SEQ ID NO: 754249 - DNA, 75 bp, synthetic construct
  source 1..75: mol_type = other DNA
cttactgtcagcaacaccacactcacccagaaaaccgtcaacctgaatgaaggcacgctgacgctgaacgacagt

SEQ ID NO: 754250 - DNA, 75 bp, synthetic construct
  source 1..75: mol_type = other DNA
atgtgcacagggacggacttgcgctgaacacggtaatgaacgaggggggctggcaggttgttaaggcaggtggcg

SEQ ID NO: 754251 - DNA, 75 bp, synthetic construct
  source 1..75: mol_type = other DNA
ccctcatttacgccggcggtgaccagacggtacacggagaggcacataacacccggctggagggaggaaaccagt

SEQ ID NO: 754252 - DNA, 75 bp, synthetic construct
  source 1..75: mol_type = other DNA
accattaaacatggcggactggtaaccggaaccatcgtcaacaccggtgcagaaggtggtccggagtctgaaaat

SEQ ID NO: 754253 - DNA, 75 bp, synthetic construct
  source 1..75: mol_type = other DNA
ggccgctgtcagtggtacccggagcgacggaacggcattccgtatcgggggcggtcaggcggatgccctgatgct

SEQ ID NO: 754254 - DNA, 75 bp, synthetic construct
  source 1..75: mol_type = other DNA
gaggcgggagcctggcttgccactgtcccgggggcattacagaatcttgccggagcagtctggcatcagcatcct

SEQ ID NO: 754255 - DNA, 75 bp, synthetic construct
  source 1..75: mol_type = other DNA
caggccggttatgcccacagcgtcagcggcagcagcgctgaagggtataacggtcaggccacactgaatgtgacc

SEQ ID NO: 754256 - DNA, 69 bp, synthetic construct
  source 1..69: mol_type = other DNA
gcccacagcgtcagcggcagcagcgctgaaggctataacggtcaggctacgctgaatatgactttctga

SEQ ID NO: 754257 - DNA, 75 bp, synthetic construct
  source 1..75: mol_type = other DNA
tttatgtccgggaaaaaccactttatctgaccatgctgttttgtacctgccggtatccacatttgtgggtaccgg

SEQ ID NO: 754258 - DNA, 75 bp, synthetic construct
  source 1..75: mol_type = other DNA
tgtggccctgggaacccgccacagcatgaaagcgtcatcggacaataacgacttccgcgcccggggctggggctg

SEQ ID NO: 754259 - DNA, 75 bp, synthetic construct
  source 1..75: mol_type = other DNA
cagtgaaaatgcttatcgtgctgaagtccccctgtatacatccatgttgacacaggcaatggactatgaccggat

SEQ ID NO: 754260 - DNA, 75 bp, synthetic construct
  source 1..75: mol_type = other DNA
ccgccaacaatactactgtcaccggtggtggtcttcagagagtgaatgccggaggaagtgtttcagacacggtta

SEQ ID NO: 754261 - DNA, 75 bp, synthetic construct
  source 1..75: mol_type = other DNA
cctttggcgaaggcacctcatcccgtgacaccctgcgcgacagtgcaaaacaccgtgtgcgtgaactgccggtga

SEQ ID NO: 754262 - DNA, 75 bp, synthetic construct
  source 1..75: mol_type = other DNA
tcactggatctgcaggccggactggaagcccgtgtccgggaaaatatcaccctgggcgttcaggccggttatgcc

SEQ ID NO: 754263 - DNA, 75 bp, synthetic construct
  source 1..75: mol_type = other DNA
gacaccctgcgcgacagtacaaaacacggtgtgagtgaactgcctgtgaactggtgggtacagccttctgttatc

SEQ ID NO: 754264 - DNA, 75 bp, synthetic construct
  source 1..75: mol_type = other DNA
gtacagccttctgttatccgcaccttcagctcccggggtgacatgagcatgggtacagccgcagccggcagtaac

SEQ ID NO: 754265 - DNA, 75 bp, synthetic construct
  source 1..75: mol_type = other DNA
gccgtcaaatccggcgcagtggcaaccgacacggttgtgaataccggcgcggaagggggaccggatgcggaaaat

SEQ ID NO: 754266 - DNA, 75 bp, synthetic construct
  source 1..75: mol_type = other DNA
aaccgtgacagcgatgaagactggtacctgcgcagtgaaaatgcgtatcgttctgaagtccccctgtatgcctcc

SEQ ID NO: 754267 - DNA, 75 bp, synthetic construct
  source 1..75: mol_type = other DNA
aaccgtgacagcgatgaagactggtacctgcgcagtgaaaatgcttatcgttctgaagtcccccggtatgcctcc

SEQ ID NO: 754268 - DNA, 75 bp, synthetic construct
  source 1..75: mol_type = other DNA
cagcctggaaaacactggtggatgacggcggtaccctggcagtgtctgccggtggtaaggcaacaggtgtcacca

SEQ ID NO: 754269 - DNA, 75 bp, synthetic construct
  source 1..75: mol_type = other DNA
tacacaacggtggtacagcgtctgacactgttgtgaacagtgacggctggcagattgtcaaaaacgggggcgtgg

SEQ ID NO: 754270 - DNA, 75 bp, synthetic construct
  source 1..75: mol_type = other DNA
aaccgtgacagcgatgaagactggtacctgcgcagtgaagatgcttatcgttctgaagtcccccagtatgcctcc

SEQ ID NO: 754271 - DNA, 75 bp, synthetic construct
  source 1..75: mol_type = other DNA
aaccgtgacagcgatgaagactggtacctgcgcagtgaagatgcatatcgttctgaagtccccctgtatgcctcc

SEQ ID NO: 754272 - DNA, 75 bp, synthetic construct
  source 1..75: mol_type = other DNA
atcagggaggggcactggttaccagtactgcagcaacggttcttggcagcaaccgtcagggcaatttcgcggtgg

SEQ ID NO: 754273 - DNA, 75 bp, synthetic construct
  source 1..75: mol_type = other DNA
tatgctgcaggccggggcctttaactacaccctcaaccgggacagtgatgagagctggtatctgcgcagtgaaga

SEQ ID NO: 754274 - DNA, 75 bp, synthetic construct
  source 1..75: mol_type = other DNA
tggaaaaaatattaccgtactggatttaacgattctttgctggatattcgttatagcctttctgatcgtatccgt

SEQ ID NO: 754275 - DNA, 75 bp, synthetic construct
  source 1..75: mol_type = other DNA
gtactggaaggccattcagcgcagaaaacacgggtggatgacggcggtaccctggcagtgtctgccggtggtaag

SEQ ID NO: 754276 - DNA, 75 bp, synthetic construct
  source 1..75: mol_type = other DNA
gcacaaatgcgagcaacaacccatcttatgggaagacagcattcatctcttttgctgtccctgctggcgcaactt

SEQ ID NO: 754277 - DNA, 75 bp, synthetic construct
  source 1..75: mol_type = other DNA
gctggaaaatggcggcagctttacggttaatgtcgggggacaggccagcaacaccactgtcggacatcgtggaac

SEQ ID NO: 754278 - DNA, 75 bp, synthetic construct
  source 1..75: mol_type = other DNA
ataatcagacgacacaggataccgtgctgagccgtgctgagccgtgctgttgcaaaaggcgactccccggtaacg

SEQ ID NO: 754279 - DNA, 75 bp, synthetic construct
  source 1..75: mol_type = other DNA
ccggattacgagccggatgactgggaatcggtattcagcgaattccacgacgccgatgcgcagaactctcacagc

SEQ ID NO: 754280 - DNA, 75 bp, synthetic construct
  source 1..75: mol_type = other DNA
tttaaacgcaacactttaaataaacccgtgattatggggcgccatacctgggaatccattggtcgcccgctgcct

SEQ ID NO: 754281 - DNA, 75 bp, synthetic construct
  source 1..75: mol_type = other DNA
gcgtgaactgccggtgaactggtgggtacagccttctgttatccgcaccttcagctcccggggggacatgagcat

SEQ ID NO: 754282 - DNA, 75 bp, synthetic construct
  source 1..75: mol_type = other DNA
ccccggtaacgttccataaactgacaaccagtaacctcaccggtcagggtggcaccatcaatatgcgtgttcgcc

SEQ ID NO: 754283 - DNA, 75 bp, synthetic construct
  source 1..75: mol_type = other DNA
gccgtcaaatccggcgcaatggcaaccgacacggttgtgaataccggcgcggaaggaggaccggatgcggaaaat

SEQ ID NO: 754284 - DNA, 75 bp, synthetic construct
  source 1..75: mol_type = other DNA
gtattcagcgaattccacgacgctgatgcgcagaactctcacagctattgctttgagattctggagcggcggtaa

SEQ ID NO: 754285 - DNA, 75 bp, synthetic construct
  source 1..75: mol_type = other DNA
caacgatatgacctttggtgaaggcacctcatcccgtgcccccctgcgtgacagtgcaaaacacagtgtgcgtga

SEQ ID NO: 754286 - DNA, 75 bp, synthetic construct
  source 1..75: mol_type = other DNA
caccgtatccatggggaatggcggtgtactgctggccgattccggtgccgctgtcagtggtacccggagcgacgg

SEQ ID NO: 754287 - DNA, 75 bp, synthetic construct
  source 1..75: mol_type = other DNA
aaatatcaccctgggcgttcaggccggttatgcccacagcgtcagcggcagcagcgctgaagggtataacggtca

SEQ ID NO: 754288 - DNA, 75 bp, synthetic construct
  source 1..75: mol_type = other DNA
tcccgggggcattacagaatcttgccggagcagtctggcatcagcatcctgaaatggcgctgatacgtacagtat

SEQ ID NO: 754289 - DNA, 75 bp, synthetic construct
  source 1..75: mol_type = other DNA
ttccgtctgggcagccacaacgatatgagctttggtgaaggcacctcatcccatgacaccctgcgcgacagtgca

SEQ ID NO: 754290 - DNA, 75 bp, synthetic construct
  source 1..75: mol_type = other DNA
cgcagaaggcggccctgattctgacaactcgtatacgggtcagaaggtccagggaacagcagaatccaccaccat

SEQ ID NO: 754291 - DNA, 75 bp, synthetic construct
  source 1..75: mol_type = other DNA
ttgtcaaacaacaggtagaaaatctcggcggcagcatcgccgtggaatcggaacccgggattttcacacaatttt

SEQ ID NO: 754292 - DNA, 75 bp, synthetic construct
  source 1..75: mol_type = other DNA
tggcgcgaacccttgccgactcgccagaaattcgtcagggcttgcagaaaaaaccgcaggagagcggtatccagg

SEQ ID NO: 754293 - DNA, 75 bp, synthetic construct
  source 1..75: mol_type = other DNA
tctgcgcgacagtacaaaacaccgtgtgagtgaactgccggtgaactggtgggtacagccttctgttatccgcac

SEQ ID NO: 754294 - DNA, 75 bp, synthetic construct
  source 1..75: mol_type = other DNA
ccgacacggttgtgaataccggcgcagaagggggaccggatgcagaaaatggtgataccgggcagtttgttcgcg

SEQ ID NO: 754295 - DNA, 75 bp, synthetic construct
  source 1..75: mol_type = other DNA
gtactggagggccattcagcctggaaaacacgggtggatgacggcggaaccctggcagtgtctgccggtggtaag

SEQ ID NO: 754296 - DNA, 75 bp, synthetic construct
  source 1..75: mol_type = other DNA
gggtaccctggtggtggcctccgaactggcccgctcacggggaaaacgcgccggtgtggcgattgcgctgtctct

SEQ ID NO: 754297 - DNA, 75 bp, synthetic construct
  source 1..75: mol_type = other DNA
cgtaccactatcaataaaaatggtcgtcagattgtggctgctgaaggaacagcaaataccactgtggtttatgcc

SEQ ID NO: 754298 - DNA, 75 bp, synthetic construct
  source 1..75: mol_type = other DNA
acacgggcggtgcactggttaccagtacagctgcaaccgtcaccggcacaaaccgcctgggagcattctccgttg

SEQ ID NO: 754299 - DNA, 75 bp, synthetic construct
  source 1..75: mol_type = other DNA
taacgctggaagcgaaattgattggccagggcgacgatccgtggggcggtaaacgtgcgggttttgaggctgaag

SEQ ID NO: 754300 - DNA, 75 bp, synthetic construct
  source 1..75: mol_type = other DNA
ggactagccaacaaggcgctggctgtggcgcgaacccttgctgactcgccggaaatccgccggggcttacaaaaa

SEQ ID NO: 754301 - DNA, 75 bp, synthetic construct
  source 1..75: mol_type = other DNA
cctgggcgttcagggcggttatgcccacagcgtcagcggcagcagcgctgaaggttataacggtcaggccacgct

SEQ ID NO: 754302 - DNA, 75 bp, synthetic construct
  source 1..75: mol_type = other DNA
ccgtatccatgggaaatggcggagtactgctggccgattccggcgccgctgtcagtggtacccggagcgacggaa

SEQ ID NO: 754303 - DNA, 75 bp, synthetic construct
  source 1..75: mol_type = other DNA
caccctgaacctggtgaacgccggcaacagtgcgtcggggctggcgaccaccggtaagggcattcaggtggtgga

SEQ ID NO: 754304 - DNA, 75 bp, synthetic construct
  source 1..75: mol_type = other DNA
aaatcattgaaggtgcaacaaaggcaaatgcttcgatggctagtaattatgctgggttgctggcagataagctcg

SEQ ID NO: 754305 - DNA, 75 bp, synthetic construct
  source 1..75: mol_type = other DNA
gttgagaagttgggacgaaaaaaagttttcactgagagtattatctaaactatataacctatctgttcgcgggat

SEQ ID NO: 754306 - DNA, 75 bp, synthetic construct
  source 1..75: mol_type = other DNA
gtactggagggccattcagcctggaaaacactggtggatgacggcggtaccctggcagtgtctgccggtggtaag

SEQ ID NO: 754307 - DNA, 75 bp, synthetic construct
  source 1..75: mol_type = other DNA
aactcgtacacggtcagaaggtccagggaacagcagaatccaccaccatcaacaaaaatggacggcagattatct

SEQ ID NO: 754308 - DNA, 75 bp, synthetic construct
  source 1..75: mol_type = other DNA
gcagtaatggcattatcatcggagccatctctaccttcagagacaaaacagaagttcgtaagctgatgcaacggt

SEQ ID NO: 754309 - DNA, 75 bp, synthetic construct
  source 1..75: mol_type = other DNA
attttcacacaattttttgtccagatacctgggacggggagaggtcgaacagatgatcaatgtattaattatcga

SEQ ID NO: 754310 - DNA, 75 bp, synthetic construct
  source 1..75: mol_type = other DNA
gctggatgtccgcaacggtggtgccgccaccaccgtatccatgggaaatggcggtgtactgctggccgattccgg

SEQ ID NO: 754311 - DNA, 75 bp, synthetic construct
  source 1..75: mol_type = other DNA
aatatctccctgggcgttcaggccggttatgcccacagcgtcagcggcagcagcgctgaaggttataacggtcag

SEQ ID NO: 754312 - DNA, 75 bp, synthetic construct
  source 1..75: mol_type = other DNA
aaaccgcctggggcatttcttcgtgggaaatggcatggcagataacgtcgttctggaaaatggcggtcgcctgga

SEQ ID NO: 754313 - DNA, 75 bp, synthetic construct
  source 1..75: mol_type = other DNA
caatggactatgaccggattctggcaggctcccgcagccatcagaccggtgtaaacggtgaaaataacagcgtcc

SEQ ID NO: 754314 - DNA, 75 bp, synthetic construct
  source 1..75: mol_type = other DNA
taaaaacggtcgccagattgtgagaactgaaggaacggcaaataccactgtggtttatgccggcggcgaccagac

SEQ ID NO: 754315 - DNA, 75 bp, synthetic construct
  source 1..75: mol_type = other DNA
acaacgatatgacctttggtgaaggcacctcatcccgtgcccccctgcgtgacagtgcaaaacacagtgtgcgtg

SEQ ID NO: 754316 - DNA, 75 bp, synthetic construct
  source 1..75: mol_type = other DNA
gtgccacgtttacccttgccgggaagacggtgaacaacgataccctgaccatccgtgaaggtgatgcactcctgc

SEQ ID NO: 754317 - DNA, 75 bp, synthetic construct
  source 1..75: mol_type = other DNA
gtcccagaatggcacgtcactggacctgcaggccggactggaagcccgtgtccgggaaaatatcaccttgggcgt

SEQ ID NO: 754318 - DNA, 75 bp, synthetic construct
  source 1..75: mol_type = other DNA
tcagtatcggaggcggtcaggcggatgccctgatgctggaaaaaggcagttcattcacgctgaacgccggtgata

SEQ ID NO: 754319 - DNA, 75 bp, synthetic construct
  source 1..75: mol_type = other DNA
agtgaagaaaacaccggtgggcaatggatacagaatggcgggatagccggaaacaccactgttaccacaaatggt

SEQ ID NO: 754320 - DNA, 75 bp, synthetic construct
  source 1..75: mol_type = other DNA
atgaaagcgtcatcgggcaataacgacttccgcgcacggggctggggctggctgggctcactggaaaccggtctg

SEQ ID NO: 754321 - DNA, 75 bp, synthetic construct
  source 1..75: mol_type = other DNA
tcaccctgggcgttcaggccggttatgcccacagcatcaacggcagcagcgctgaaagttataacagtcaggcca

SEQ ID NO: 754322 - DNA, 75 bp, synthetic construct
  source 1..75: mol_type = other DNA
agattcgctttgataatcagacgacaccggatgccgcgctgagccgtgctgttgcaaaaggcgactccccggtaa

SEQ ID NO: 754323 - DNA, 75 bp, synthetic construct
  source 1..75: mol_type = other DNA
tgcttatcgtgctgaagtccccctgtatacatccatgctgacacaggcaatggactatgaccggattctggcagg

SEQ ID NO: 754324 - DNA, 75 bp, synthetic construct
  source 1..75: mol_type = other DNA
gatgcacagaatggcgccaccacagaagaaggtgcgtttgccctgagtcgcccgcttcaggccggcgcctttaac

SEQ ID NO: 754325 - DNA, 75 bp, synthetic construct
  source 1..75: mol_type = other DNA
caccggtggttttggtgacctgaccctgcagttcacgacgtatgctgtccggctggccagaggcagaatgtttcc

SEQ ID NO: 754326 - DNA, 75 bp, synthetic construct
  source 1..75: mol_type = other DNA
tggtttatgccggcggcgaccagacggtacacgggcatgcgctggataccacgttgaatggggggtaccagtatg

SEQ ID NO: 754327 - DNA, 75 bp, synthetic construct
  source 1..75: mol_type = other DNA
caacaaaaatggacggcagattatcttatctgtaaccggctcatttaaaccgtctggtctgtttcctccggctct

SEQ ID NO: 754328 - DNA, 75 bp, synthetic construct
  source 1..75: mol_type = other DNA
ctgacacaggcaatggactatgaccggattctggcaggctcccgcagccatcagagcggtgtaagcggtgaaaat

SEQ ID NO: 754329 - DNA, 75 bp, synthetic construct
  source 1..75: mol_type = other DNA
tgcgtgccggtttccgtctgggcagccacaacgatatgacctttggtgaaggcacctcatcccgtgacaccctgc

SEQ ID NO: 754330 - DNA, 75 bp, synthetic construct
  source 1..75: mol_type = other DNA
taccggcgcggaagggggaccggatgcagaaaatggtgataccgggcagtttgttcgcggaaatgccgtacgtac

SEQ ID NO: 754331 - DNA, 75 bp, synthetic construct
  source 1..75: mol_type = other DNA
ttcatgagggcggggttgccaccggtacaattatcaaccgcgacggttaccagagcgttaaaagtggcgggctgg

SEQ ID NO: 754332 - DNA, 75 bp, synthetic construct
  source 1..75: mol_type = other DNA
atgctgacacaggcaatggattatgaccggattctggcaggctcccgcagccatcagaccggtgtaaatggtgaa

SEQ ID NO: 754333 - DNA, 75 bp, synthetic construct
  source 1..75: mol_type = other DNA
aaggcaacagatgtcaccatgacatccggtggtgccctgattgcagacagtggtgccactgttgaggggaccaat

SEQ ID NO: 754334 - DNA, 75 bp, synthetic construct
  source 1..75: mol_type = other DNA
aatgtggtggacagagtcattgaaggggcttacgaggtggtgggcgtgtttgaccggatagaggagaagcgtgat

SEQ ID NO: 754335 - DNA, 75 bp, synthetic construct
  source 1..75: mol_type = other DNA
atgacggccaggataacgccggttatgtgaagttcgggcatggcagtgcacaacatgtgcgtgccggtttccgtc

SEQ ID NO: 754336 - DNA, 75 bp, synthetic construct
  source 1..75: mol_type = other DNA
gtctgggcagccacaacgatatgacctttggtgaaggcacctcatcccgtgacaccctgcgcgacagtgcaaaac

SEQ ID NO: 754337 - DNA, 75 bp, synthetic construct
  source 1..75: mol_type = other DNA
tcactgacgacaggagtgtatggtgctgcaggccattcttccgttgatgttaaggatgatgacggctcccgcgcc

SEQ ID NO: 754338 - DNA, 75 bp, synthetic construct
  source 1..75: mol_type = other DNA
acagtcaggtacgtgcattatgggcttatgatgaaaacgagcagaaaaaggatatacaggataaagagagaacgc

SEQ ID NO: 754339 - DNA, 75 bp, synthetic construct
  source 1..75: mol_type = other DNA
ggaggggctgtatcaccttgtctggcgcgagcctgaggagcgtattacttctttctataacatcagcacagagca

SEQ ID NO: 754340 - DNA, 75 bp, synthetic construct
  source 1..75: mol_type = other DNA
gtgcgccttttcttcacatctcgaagcatacgttgcctaccggacgatttcttttgcagctctattcgccttatg

SEQ ID NO: 754341 - DNA, 75 bp, synthetic construct
  source 1..75: mol_type = other DNA
ttaaccattctccgggttaaccggagtaagggggaggtgagttcagtcgaaacgcccggttatcgctttctgggc

SEQ ID NO: 754342 - DNA, 75 bp, synthetic construct
  source 1..75: mol_type = other DNA
atttgccgttgatgttcttatcccagaagaataccggcagcaacttagtcgctatggtgtccggcattggaaaga

SEQ ID NO: 754343 - DNA, 75 bp, synthetic construct
  source 1..75: mol_type = other DNA
cctttccggaggccaacaccaatacaagttcagaaacattgagtaatgctaaaaaattatttggtaattcaaatt

SEQ ID NO: 754344 - DNA, 75 bp, synthetic construct
  source 1..75: mol_type = other DNA
gtgccggagccgctgccgccgctggaagattacacctttgaaggttaccgcaacgccgacggcagcgtgggcacc

SEQ ID NO: 754345 - DNA, 75 bp, synthetic construct
  source 1..75: mol_type = other DNA
ggatggaggggtttatgattataagcgcagcaatcgcgagccctgtagttttaaaccaacactgacggtatcgct

SEQ ID NO: 754346 - DNA, 75 bp, synthetic construct
  source 1..75: mol_type = other DNA
gaacttatccaatggatccgttataaattcgcatctaataatggtttgccgttcaaaaagaatgacgtcattaaa

SEQ ID NO: 754347 - DNA, 75 bp, synthetic construct
  source 1..75: mol_type = other DNA
aaaccagaaaacagtgatgtaaccattgaccgtggtaaaaaggcggcgctgtatgcgacccctctgttcctgtgt

SEQ ID NO: 754348 - DNA, 75 bp, synthetic construct
  source 1..75: mol_type = other DNA
tcgattatggctgcacagtctcatcggattcgcttaattttaccgtagatctccaaaaaaacagtgccagacaat

SEQ ID NO: 754349 - DNA, 75 bp, synthetic construct
  source 1..75: mol_type = other DNA
aaaaacctgttgggtattaccaccagcgtgcactgcatggcagacgttgtgaactacgtggttaaaattatcgaa

SEQ ID NO: 754350 - DNA, 75 bp, synthetic construct
  source 1..75: mol_type = other DNA
gacatggtccgtaaaagcagataaagccaagctgaccaatgaccggatgctctatttatatggacacgttgaagt

SEQ ID NO: 754351 - DNA, 75 bp, synthetic construct
  source 1..75: mol_type = other DNA
atgccgataactttaatgtaaaagagtttaaagacgatatagcctcgatgctttgtgaacagccccccatgcgaa

SEQ ID NO: 754352 - DNA, 75 bp, synthetic construct
  source 1..75: mol_type = other DNA
ctttgtgaacagccgcccctgcgtacacaccagatttcttcatccggatacgtatctgccgataaactgcccgat

SEQ ID NO: 754353 - DNA, 75 bp, synthetic construct
  source 1..75: mol_type = other DNA
agcaataaacaggatctgcgtgaaacttccagcctgcttaaagggctggttgctgacttcggcggtaacgctcaa

SEQ ID NO: 754354 - DNA, 75 bp, synthetic construct
  source 1..75: mol_type = other DNA
tcacggctggatttacaccgacgcccagctgttacgcgatgatattcaaacacttttcacggcagaacgatattg

SEQ ID NO: 754355 - DNA, 75 bp, synthetic construct
  source 1..75: mol_type = other DNA
taaccattaacagtactgtgggattttctgcactattgcatcatgttccaacaatatgtttgggacgagccctat

SEQ ID NO: 754356 - DNA, 75 bp, synthetic construct
  source 1..75: mol_type = other DNA
ctgatatcaatgagcttgctaaatggattgatgaaaatcttgaggtagaactctcaataaatattgaggaaaaaa

SEQ ID NO: 754357 - DNA, 75 bp, synthetic construct
  source 1..75: mol_type = other DNA
cacctcagctattaccttcttcagagagcccccagctacttcctgtgactctcgatgcagctgccgaacagccag

SEQ ID NO: 754358 - DNA, 75 bp, synthetic construct
  source 1..75: mol_type = other DNA
attccgggataagtcggaatatgctccaagagcttaccagcattgcagaagaagagcttaacatgctgaagtact

SEQ ID NO: 754359 - DNA, 75 bp, synthetic construct
  source 1..75: mol_type = other DNA
aagcctgggaagaagccgaacaaaaacgtaaagcggcgctggcggcagaacgcaagcgcgaagaacaggaacaaa

SEQ ID NO: 754360 - DNA, 75 bp, synthetic construct
  source 1..75: mol_type = other DNA
aatggcatgtacggcaaagctattggtgcttatgacgcgacgcttagtttgttcatcatgaatgaactccgtaat

SEQ ID NO: 754361 - DNA, 75 bp, synthetic construct
  source 1..75: mol_type = other DNA
ttctggcgtcgaaatcccgtcgagcagaaaacggtgaagaaccgattaaagagcacctgctattaacgcgctata

SEQ ID NO: 754362 - DNA, 75 bp, synthetic construct
  source 1..75: mol_type = other DNA
cacgaacccggaagtctcatcagttcgtgactcagaccgtattttaggtattctggcgtcgaaatcccgtcgagc

SEQ ID NO: 754363 - DNA, 75 bp, synthetic construct
  source 1..75: mol_type = other DNA
acggtattagctgccgtctcaaactgctgccagtcactgattgaagttttcaataataatcacggctcatcagag

SEQ ID NO: 754364 - DNA, 75 bp, synthetic construct
  source 1..75: mol_type = other DNA
ccttgaagcccttaacgatctgggttacgaaaaaccgtctccaattcaggcagagtgtattccacatctgctgaa

SEQ ID NO: 754365 - DNA, 75 bp, synthetic construct
  source 1..75: mol_type = other DNA
tggacgttgagcgtatcagcctggtggttaactacgatatcccgatggattctgagtcttacgttcaccgtatcg

SEQ ID NO: 754366 - DNA, 75 bp, synthetic construct
  source 1..75: mol_type = other DNA
tggaagtggcagaagctcttgagcgtaacggctacaacagcgccgcgctgaacggtgacatgaaccaggcgctgc

SEQ ID NO: 754367 - DNA, 75 bp, synthetic construct
  source 1..75: mol_type = other DNA
gcgatatgcagttgtaccgcattgaggtgggtcgtgatgatggcgttgaagttcgtcatatcgttggcgcaattg

SEQ ID NO: 754368 - DNA, 75 bp, synthetic construct
  source 1..75: mol_type = other DNA
tggtcgtgcactgctgttcgttgagaaccgtgagcgtcgtctgctgcgtaacattgaacgcaccatgaagctgac

SEQ ID NO: 754369 - DNA, 75 bp, synthetic construct
  source 1..75: mol_type = other DNA
gcagaactgctgggcaaacgccgtctggaaaaatttgctgctaaagtacagcagcaactggaaagcagcgatctg

SEQ ID NO: 754370 - DNA, 75 bp, synthetic construct
  source 1..75: mol_type = other DNA
ctgcgctggttgattcgtcaccggaagttctggacaccctgaacgaactggctgcggcgctgggcaatgacccga

SEQ ID NO: 754371 - DNA, 75 bp, synthetic construct
  source 1..75: mol_type = other DNA
caaatttaaaaccctgatgtgctacaaccagtattatcagggtgaacactgtattcactatatgcagtaccggta

SEQ ID NO: 754372 - DNA, 75 bp, synthetic construct
  source 1..75: mol_type = other DNA
accaaaggagggtgatttacgccctgaggtaatgaagcgttttgaggaaatgataaataccgttgttcgcttgtc

SEQ ID NO: 754373 - DNA, 75 bp, synthetic construct
  source 1..75: mol_type = other DNA
gactcgattattgaacttggtgttttaggggagcaagaagaacctagtaattctatttcatttgatgatggcagc

SEQ ID NO: 754374 - DNA, 75 bp, synthetic construct
  source 1..75: mol_type = other DNA
atgattaaagctccgcaatctcttgatgagttatttggtcgctttgaggtttcaataaaagatactattgagaat

SEQ ID NO: 754375 - DNA, 75 bp, synthetic construct
  source 1..75: mol_type = other DNA
agcagcgaacgcagcgtttgtgcgcaaactgcttgctgcgctggttggctcatcgccggaagttctggacaccct

SEQ ID NO: 754376 - DNA, 75 bp, synthetic construct
  source 1..75: mol_type = other DNA
gatcaataccgtgcactgctgagcaaaattcagccgactgccgaaggcgaagagctggatctcgaaactctggcc

SEQ ID NO: 754377 - DNA, 75 bp, synthetic construct
  source 1..75: mol_type = other DNA
atgagctatttaccgttgatgcctggattccagcatcaaaccattcctgtcccaaccatccctgtatgggcgttt

SEQ ID NO: 754378 - DNA, 75 bp, synthetic construct
  source 1..75: mol_type = other DNA
cgatgcgtatcggcaatatttactgccgctggcgcaggggattacgccaaatatctttgagctggaaatcctgac

SEQ ID NO: 754379 - DNA, 75 bp, synthetic construct
  source 1..75: mol_type = other DNA
cggcctgaatgtctttgccgtgccgacggtattgctgagcaatacgccgcattatgacactttctacggtggtgc

SEQ ID NO: 754380 - DNA, 75 bp, synthetic construct
  source 1..75: mol_type = other DNA
tctcgcagctggtaagccagtcagaggaatcgtcctttccaatcactgccttcccgcaagccttacaagatgtta

SEQ ID NO: 754381 - DNA, 75 bp, synthetic construct
  source 1..75: mol_type = other DNA
gcgctcatcgctggcctgaatgagtatccgtgcgcaggtctgatttctgatgaagccagcaacttctttgacgct

SEQ ID NO: 754382 - DNA, 75 bp, synthetic construct
  source 1..75: mol_type = other DNA
gcagtatcattggcctgccattcgcatatcaatgtactcaatccttacacggacatagaggagcattgttcactc

SEQ ID NO: 754383 - DNA, 75 bp, synthetic construct
  source 1..75: mol_type = other DNA
ggtcggactgatcggcacctgcattctggttaacgtactgaaaaaaatccttttcggcctggaaccctacgaaat

SEQ ID NO: 754384 - DNA, 75 bp, synthetic construct
  source 1..75: mol_type = other DNA
aaataagcgggccggcaggccgttattcaaagaaattcgcgccaggtaaggtattcactgtatatcaggtgataa

SEQ ID NO: 754385 - DNA, 75 bp, synthetic construct
  source 1..75: mol_type = other DNA
ataatcgtgcgtataccttgaagcgattatacgagtcgttaatttgtcaaacgactaaatcctttgaatgggttg

SEQ ID NO: 754386 - DNA, 75 bp, synthetic construct
  source 1..75: mol_type = other DNA
catcgcaacaatgcaccagctacgccagaaaaccggattatcagcggaatatgacgaggccggatgcttaccgga

SEQ ID NO: 754387 - DNA, 75 bp, synthetic construct
  source 1..75: mol_type = other DNA
gctgaacgtcgtgagcgtgttgcgtcgttatttggtgactacagcgttaaaaaacgtatgcgcgacattagcgct

SEQ ID NO: 754388 - DNA, 75 bp, synthetic construct
  source 1..75: mol_type = other DNA
gactttgacagccgcctgaacgaataccggaaaaataacggcctgctaccggataaaccagtatttgagattgaa

SEQ ID NO: 754389 - DNA, 75 bp, synthetic construct
  source 1..75: mol_type = other DNA
tccggtgccacctggaatatccccgataacgccacggtgcagtcggtggtggatgacctcagccatgccggacag

SEQ ID NO: 754390 - DNA, 75 bp, synthetic construct
  source 1..75: mol_type = other DNA
cactgtcagcaacaccacactcacccagaaagccgtcaacctgaatgaaggcacgctgacgctgaacgacagtac

SEQ ID NO: 754391 - DNA, 75 bp, synthetic construct
  source 1..75: mol_type = other DNA
cagattgtcaaggaaggtggtctggcggatttcaccatcgttaaccagaaaggcaaactgcaggtgaacgccggt

SEQ ID NO: 754392 - DNA, 75 bp, synthetic construct
  source 1..75: mol_type = other DNA
tggcggatggctgaaagggcatcatagtggtatgccatactgggcacaggggagtaccacagaaatgcgtcccaa

SEQ ID NO: 754393 - DNA, 75 bp, synthetic construct
  source 1..75: mol_type = other DNA
cagaaaatggtgataccgggcagtttgttcgcggaaatgccgtacgtaccactatcaataaaaatggtcgtcaga

SEQ ID NO: 754394 - DNA, 75 bp, synthetic construct
  source 1..75: mol_type = other DNA
tactgggcacaggggagtaccacagaaatgcgtcccaaaaacattgcattcaactacattgttaaagccagctag

SEQ ID NO: 754395 - DNA, 75 bp, synthetic construct
  source 1..75: mol_type = other DNA
ttgaaagcatatctggctacgacaagatcgttgtcaaatataataactggatcactaaggataatggcgagtttg

SEQ ID NO: 754396 - DNA, 75 bp, synthetic construct
  source 1..75: mol_type = other DNA
aaccgtctggggaatttcacggtggaaaacggtaaggctgacggtgttgttctggaatccggcggtcgtctggat

SEQ ID NO: 754397 - DNA, 75 bp, synthetic construct
  source 1..75: mol_type = other DNA
gcccgtggggccacgccggaaagcagcggcagctatggcttcgtccgtctggagggtgacctgctcagaacagag

SEQ ID NO: 754398 - DNA, 75 bp, synthetic construct
  source 1..75: mol_type = other DNA
ccacggtaaatggcggactgttcactgccagagggggctcgctggcgggcaccaccacgctgaataacggtgcca

SEQ ID NO: 754399 - DNA, 75 bp, synthetic construct
  source 1..75: mol_type = other DNA
gtctccaccggtcagatggtcggggggacggctgaatccaccaccatcaacaaaaatggccggcaggttatctgg

SEQ ID NO: 754400 - DNA, 75 bp, synthetic construct
  source 1..75: mol_type = other DNA
tccggtctgacggtcgcctttccacaggtgagtatttacagctggataaaacagccgtagcaaatacaaagtgtt

SEQ ID NO: 754401 - DNA, 75 bp, synthetic construct
  source 1..75: mol_type = other DNA
gccgtcaaatccggcgcagtggcaaccgacacggttgtgaataccggcgcggaagggggaccagatgcagaaaat

SEQ ID NO: 754402 - DNA, 75 bp, synthetic construct
  source 1..75: mol_type = other DNA
gtacaaaacacggtgtgagtgaactgcctgtgaactggtgggtacagccttctgttatccgcaccttcagctcac

SEQ ID NO: 754403 - DNA, 75 bp, synthetic construct
  source 1..75: mol_type = other DNA
tccggggaattatcagcaataccgcatcagctgattatggataaaatttatgatgttttgcgcgcctatcgctac

SEQ ID NO: 754404 - DNA, 75 bp, synthetic construct
  source 1..75: mol_type = other DNA
ccaaacaatttgaacgcatacagtccggggaattatcggcaataccgtatcagttgattatggataaaatttatg

SEQ ID NO: 754405 - DNA, 75 bp, synthetic construct
  source 1..75: mol_type = other DNA
tcaggcaaccggcaaaacctggcttgcgtttacaaatgtcggaaacagcaacctcggggtggcaaccaccggaca

SEQ ID NO: 754406 - DNA, 75 bp, synthetic construct
  source 1..75: mol_type = other DNA
aaccgtctgggcaatttcacagtggaaaacggtaatgctgacggtgttgttctggagtccggcggtcgcctggat

SEQ ID NO: 754407 - DNA, 75 bp, synthetic construct
  source 1..75: mol_type = other DNA
aactgaccaccagtaacctcaccggtcaggggggcaccatcaatatgcgtgttcgccttgatggcagcaatgcct

SEQ ID NO: 754408 - DNA, 75 bp, synthetic construct
  source 1..75: mol_type = other DNA
gatatctgaagggtcttaaccgctcgccctttgggcagagttataccaccggcatccgtcgtaacacgagtaccg

SEQ ID NO: 754409 - DNA, 75 bp, synthetic construct
  source 1..75: mol_type = other DNA
ctgtctcttgctgctgtcacgtcagtcccggcactggctgctgacagtattgtacaggcaggtgaaaccgtgaac

SEQ ID NO: 754410 - DNA, 75 bp, synthetic construct
  source 1..75: mol_type = other DNA
ggctgggttcactggaaaccggtctgcccttcagtatcactgacaatctgatgctggagccacaactgcagtaca

SEQ ID NO: 754411 - DNA, 75 bp, synthetic construct
  source 1..75: mol_type = other DNA
tgcagccttccgttatccgcaccttcagctcccggggtgatatgcgtgtggggacctccaccgcaggcagcggga

SEQ ID NO: 754412 - DNA, 75 bp, synthetic construct
  source 1..75: mol_type = other DNA
gagatgccgtacgtaccaccatcaataaaaatggtcgtcagattgtggtagccaccggagtggcaaacaccacgg

SEQ ID NO: 754413 - DNA, 75 bp, synthetic construct
  source 1..75: mol_type = other DNA
gcaaaaacagacagaaaaactcacctggaatcttaaaaaaggttcgacgctgcgggatggcctcacagaatgggc

SEQ ID NO: 754414 - DNA, 75 bp, synthetic construct
  source 1..75: mol_type = other DNA
ttttggtgaacatgaaatttacaaactttacagagaacttcccagagtttctgtcttacatccaatgagttggga

SEQ ID NO: 754415 - DNA, 75 bp, synthetic construct
  source 1..75: mol_type = other DNA
cttgaacctcagagaatgataaaagtggtttatcatggaactagctctcaccgcgaagaaaaactatggctctat

SEQ ID NO: 754416 - DNA, 75 bp, synthetic construct
  source 1..75: mol_type = other DNA
aggaagtgaaaagcaggcagaggaaggtgagtttgaaaccgtgatgctgtctccccgttcagagcagacagtaaa

SEQ ID NO: 754417 - DNA, 75 bp, synthetic construct
  source 1..75: mol_type = other DNA
atcaacacctgaaaagcaaatttactttgttcgccatgatggtaaaggctcgctgcaaaaagcagtaaaagaaat

SEQ ID NO: 754418 - DNA, 75 bp, synthetic construct
  source 1..75: mol_type = other DNA
cagcagcccgtgtcacagccaaacagcactgttcaatacagcaatgataattatctcaaaaaggaagccataaac

SEQ ID NO: 754419 - DNA, 75 bp, synthetic construct
  source 1..75: mol_type = other DNA
tatctataaacagtcagggagaaggaagtgttcgtgtaatatcgaaaacgaatgaagtccaatatataaaggcaa

SEQ ID NO: 754420 - DNA, 75 bp, synthetic construct
  source 1..75: mol_type = other DNA
tttaccagccggtagtagcaaaaccgtacgttttgttgcgatggaaccagagcaaaaagagaaaaattatcgcgt

SEQ ID NO: 754421 - DNA, 75 bp, synthetic construct
  source 1..75: mol_type = other DNA
cagtgcagatttcctcaatatgaagtggtcaacaaaaactggccaccgagttagagttttttccagtatcgattt

SEQ ID NO: 754422 - DNA, 75 bp, synthetic construct
  source 1..75: mol_type = other DNA
atctgcgccaacgcagacaaccgcaatgagagttcttgattatgctgttgcaggaaactctattgccttcagccc

SEQ ID NO: 754423 - DNA, 75 bp, synthetic construct
  source 1..75: mol_type = other DNA
tagtgtttttatcattttacgctcaagcagatttaactgattttcgcgttgcgacctggaatcttcaaggtgcat

SEQ ID NO: 754424 - DNA, 75 bp, synthetic construct
  source 1..75: mol_type = other DNA
cctttggtggaagggtcaatcttgctctggttagcaatcggcaggccgatgaagtgtttgttcttcgcccggtaa

SEQ ID NO: 754425 - DNA, 75 bp, synthetic construct
  source 1..75: mol_type = other DNA
ttaaccacctattctgctttatccgcagatagcgttattaaaattagcgggcgcgtcctcgattatggctgcaca

SEQ ID NO: 754426 - DNA, 75 bp, synthetic construct
  source 1..75: mol_type = other DNA
tgaccaccagtaacctcaccggtcagggtggcaccatcaatatgcgtgttcgccttgatggcagcaatacctctg

SEQ ID NO: 754427 - DNA, 75 bp, synthetic construct
  source 1..75: mol_type = other DNA
acaggctggtatggaatcacattacaggcaccctggtggtggcttccgaactggcgcgctcacggggaaaacgca

SEQ ID NO: 754428 - DNA, 75 bp, synthetic construct
  source 1..75: mol_type = other DNA
tcatcaccggctttaaacatctctcatcgtcacaggacgaagcccgttacgaagtacggcttgaaccccgtatgg

SEQ ID NO: 754429 - DNA, 75 bp, synthetic construct
  source 1..75: mol_type = other DNA
ggttaatcaccaaaaatgataaaggctggaagaacatcacctatggtggcggttttacgatgacagacagtcagt

SEQ ID NO: 754430 - DNA, 75 bp, synthetic construct
  source 1..75: mol_type = other DNA
tgtctgacgtgctgggtcgtatgaaagacctgtcaactcaggcagcgaacggcacctacagcgacgacgacctgc

SEQ ID NO: 754431 - DNA, 75 bp, synthetic construct
  source 1..75: mol_type = other DNA
ggcgtttctggcggtactgagctgactgcgtctggctcggctaaccagatgatcaccagcatttctaccgcgatg

SEQ ID NO: 754432 - DNA, 75 bp, synthetic construct
  source 1..75: mol_type = other DNA
cggcgctgttcgctggcgataccaccgcaatcatgggcggtacgttactgactggcatctgctttgtgttgataa

SEQ ID NO: 754433 - DNA, 75 bp, synthetic construct
  source 1..75: mol_type = other DNA
agcaatcatggggggaacattgctgattggcgtctgctttgtgttgataaataacctcaccgacctgctggtccg

SEQ ID NO: 754434 - DNA, 75 bp, synthetic construct
  source 1..75: mol_type = other DNA
cttttcagattacgttaagtgaatgcagcaaagggacaacgggggttcgggttgcatttaacggtattgaggatg

SEQ ID NO: 754435 - DNA, 75 bp, synthetic construct
  source 1..75: mol_type = other DNA
atgatttcctctgctctgatattcgaccattcacaccacaaactcaaaattcgcggcctgcaaagcccggtggat

SEQ ID NO: 754436 - DNA, 75 bp, synthetic construct
  source 1..75: mol_type = other DNA
ctgtcagaggtgggtatctggttccgctttgccaccgacgcccggttgaaaatcgaagttatcgaattttacgac

SEQ ID NO: 754437 - DNA, 75 bp, synthetic construct
  source 1..75: mol_type = other DNA
tcattaccggctttaaacacctctcctcgtcacaggacgaagcccgttacgaagtgcgccttgaaccccgtatgg

SEQ ID NO: 754438 - DNA, 75 bp, synthetic construct
  source 1..75: mol_type = other DNA
gaatatggatgcggcatcagaggatacggtaattattgcctcaactaaccatgagcaacttctggatcctgcaat

SEQ ID NO: 754439 - DNA, 75 bp, synthetic construct
  source 1..75: mol_type = other DNA
atgggcggctggcatttgggctcgcgactcagcaacaggattatattgagcatcttagttcgttgattcacaaag

SEQ ID NO: 754440 - DNA, 75 bp, synthetic construct
  source 1..75: mol_type = other DNA
tgtgggtatgttattggtaataaaatgaaatatgtttcttttcttcgtgctggtgtgtctctcgcggatatcggg

SEQ ID NO: 754441 - DNA, 75 bp, synthetic construct
  source 1..75: mol_type = other DNA
ttaataatgggagaaggagaaaaaaaaattgatgaaatccttatgatatgcatgttggtaaaagattcatgtggg

SEQ ID NO: 754442 - DNA, 75 bp, synthetic construct
  source 1..75: mol_type = other DNA
aaatgtgctcatgtaaatcatgtagaagcgttatgcgacgcagaggacgtactggtgtggtctgttgcggcgacc

SEQ ID NO: 754443 - DNA, 75 bp, synthetic construct
  source 1..75: mol_type = other DNA
gtgccagttcctgtaaagttgagttccgccacggtaacatgacgctggaaaatccttcaccagagctgctcacgg

SEQ ID NO: 754444 - DNA, 75 bp, synthetic construct
  source 1..75: mol_type = other DNA
gagctttatcgcacacagttatctgagattgaacaacagttagaacaagcggctgctaatattgcccgcgctcct

SEQ ID NO: 754445 - DNA, 75 bp, synthetic construct
  source 1..75: mol_type = other DNA
ctggcttttatcgcattcacctggtttatgctgcattctgttgaaaatcattttgccgagcaggatgtcagcgat

SEQ ID NO: 754446 - DNA, 75 bp, synthetic construct
  source 1..75: mol_type = other DNA
ctttctcactcgctctgcggctgaccttttttatcagcctgtccacaatactggcgtttatcgccttcacctggt

SEQ ID NO: 754447 - DNA, 75 bp, synthetic construct
  source 1..75: mol_type = other DNA
tgcgttccgttccagcagtgaaagcagtacgagagccattgctaccgaagcgattaccaataatttggaagcata

SEQ ID NO: 754448 - DNA, 75 bp, synthetic construct
  source 1..75: mol_type = other DNA
gggtggatccgtccagacaacgaaaaggagaaggcagcggtatcggacttgcgattgtgaagtcaatcgtggaag

SEQ ID NO: 754449 - DNA, 75 bp, synthetic construct
  source 1..75: mol_type = other DNA
gtcctctactccagtcttgaggaatataaccggatgaccaagatggtcagcgatatgcttttcctggcgcaggcg

SEQ ID NO: 754450 - DNA, 75 bp, synthetic construct
  source 1..75: mol_type = other DNA
cgcgcgggtttcatagcccacacgcgcccgataaccacaccttttccagcaatgaatcgctatggatcagtaaac

SEQ ID NO: 754451 - DNA, 75 bp, synthetic construct
  source 1..75: mol_type = other DNA
accgtactgcactgatcaccctaccagcggatcaaaaagcggctggcgtgctgccagacggcatggacgatcgcg

SEQ ID NO: 754452 - DNA, 75 bp, synthetic construct
  source 1..75: mol_type = other DNA
cgatcacaacgatcatatcgacgttaacgtcgctgctgccgtgatgcagaactgtgctgatgacgtaccattcat

SEQ ID NO: 754453 - DNA, 75 bp, synthetic construct
  source 1..75: mol_type = other DNA
gatccctctcgcggtcagggcgacggcatcatggaaacgttgcagaactacggctatgacattgtgatcctgatg

SEQ ID NO: 754454 - DNA, 75 bp, synthetic construct
  source 1..75: mol_type = other DNA
gaactggctgatgagttcaccggtctgattaccgagctggagaaagacaaaagcctcgccatgcttggcgcatgc

SEQ ID NO: 754455 - DNA, 75 bp, synthetic construct
  source 1..75: mol_type = other DNA
cgaagcacggtaacgagcatcagatcgacgtggcattaggttcatacggtgaaaacccacgtggtatcaccgaca

SEQ ID NO: 754456 - DNA, 75 bp, synthetic construct
  source 1..75: mol_type = other DNA
gataaagacaacttcgagtaccactatccacgtggttttgacgattgcttcaccattgaaccggatctgccgttc

SEQ ID NO: 754457 - DNA, 75 bp, synthetic construct
  source 1..75: mol_type = other DNA
ccgcacacaggcaccgctgattgactccttgctcaatgaaattggcgtttcaggcggctcactggcggcattgac

SEQ ID NO: 754458 - DNA, 75 bp, synthetic construct
  source 1..75: mol_type = other DNA
tgccgtatgcattctgtttattattggaattattttcgccaggctctatcgtcgcgcttcggcagagcaagcatt

SEQ ID NO: 754459 - DNA, 75 bp, synthetic construct
  source 1..75: mol_type = other DNA
ctttggggtttgacccggaagtatgactggttccagtttctgctattgcagggacaatggaaaccaaacgaaaac

SEQ ID NO: 754460 - DNA, 75 bp, synthetic construct
  source 1..75: mol_type = other DNA
gccgagcgtcgtcgggaagcagagcagacgcgaattctggctgaacgacagattcaggaaacagaaatcgaccgc

SEQ ID NO: 754461 - DNA, 75 bp, synthetic construct
  source 1..75: mol_type = other DNA
gtagtcgctttctttgtgcgggtaaaaccttcagtagaagggattgccaccgctgcccagacgctggggcaacgc

SEQ ID NO: 754462 - DNA, 75 bp, synthetic construct
  source 1..75: mol_type = other DNA
ggtctggaactggaaagcgtttcacttaccaactttaaccagacgtcgaaagaacatttcaatcctaacaacgcc

SEQ ID NO: 754463 - DNA, 75 bp, synthetic construct
  source 1..75: mol_type = other DNA
tttaacgatcagttcgccgatgcagatattcgtaattatgcgggcaacgtctggtatcagcgcgaagtctttata

SEQ ID NO: 754464 - DNA, 75 bp, synthetic construct
  source 1..75: mol_type = other DNA
tttacggcaatttaattagccgctcttgtacgctggtggttgaaagcggaaatctggcagaagtccattttccaa

SEQ ID NO: 754465 - DNA, 75 bp, synthetic construct
  source 1..75: mol_type = other DNA
ctgcattttaccggtaatttgcttggtaaatcctgtactcctgtaatcaatggcaacttacttgcagaaattcat

SEQ ID NO: 754466 - DNA, 75 bp, synthetic construct
  source 1..75: mol_type = other DNA
gacctcttctgacactggcgttgaattattacctgtagaaataacgccgggtgagcagaaagaacctgtggcggc

SEQ ID NO: 754467 - DNA, 75 bp, synthetic construct
  source 1..75: mol_type = other DNA
tgaaacagcggcaggtataccagtgccagtcaacaatacaacaggcgtcacgctcccgctgactcagggaaataa

SEQ ID NO: 754468 - DNA, 75 bp, synthetic construct
  source 1..75: mol_type = other DNA
tagcgatggcagtaatgacattaatttcagggcctggttacaggcgaaaagcggtcgggaagtgacgatgggcga

SEQ ID NO: 754469 - DNA, 75 bp, synthetic construct
  source 1..75: mol_type = other DNA
gacggtgtacgggtggcgattaacgacccaaccggggcgaaattcacgcttagcgatggcagtaatgacattaat

SEQ ID NO: 754470 - DNA, 75 bp, synthetic construct
  source 1..75: mol_type = other DNA
gctgaacgtcggcgtgaagcagagcaaacgcgtattcttgctgaacgtcagattcaggaaaccgaaatcgaccgc

SEQ ID NO: 754471 - DNA, 75 bp, synthetic construct
  source 1..75: mol_type = other DNA
atcaagattattcaggtcgatggtctgaatcgtggcagcgctgcgggtgatgcaaacacgggtaatgtggggggc

SEQ ID NO: 754472 - DNA, 75 bp, synthetic construct
  source 1..75: mol_type = other DNA
atggtcagtcaggagcaactggagtcgtcaccattatgtcagcaaagtgatgatgaaccagaaacgaaacgggaa

SEQ ID NO: 754473 - DNA, 75 bp, synthetic construct
  source 1..75: mol_type = other DNA
tgcgacatcaggctgcgttggtgggggtaatctggcagaacaggcgttatcagccgccctttcttaccgcacaca

SEQ ID NO: 754474 - DNA, 75 bp, synthetic construct
  source 1..75: mol_type = other DNA
aatgaaatcggtgtttcaggcggttcgctggcggcactgacttcaccattggcttcatcgattcccgtcgcagat

SEQ ID NO: 754475 - DNA, 75 bp, synthetic construct
  source 1..75: mol_type = other DNA
agaacattttaatccgaacaacgcctttgacgccgaaggtttaaccaagctgacgcaggaaacagaacgccgtcg

SEQ ID NO: 754476 - DNA, 75 bp, synthetic construct
  source 1..75: mol_type = other DNA
tgaaaccgatttaccggtgttaacggctgtgccagtaaaaaagagtggtgtcgttctgccagaggcggactttga

SEQ ID NO: 754477 - DNA, 75 bp, synthetic construct
  source 1..75: mol_type = other DNA
gcgcggctgcgctggccgcggtgctgctgacgccgaatgttcaggcggcagacaacctgcatttctacggcaatt

SEQ ID NO: 754478 - DNA, 75 bp, synthetic construct
  source 1..75: mol_type = other DNA
atgaataccgtttgtacccattgtcaggccatcaatcgcattcccgacgatcggatcgaagatgcggcaaaatgc

SEQ ID NO: 754479 - DNA, 75 bp, synthetic construct
  source 1..75: mol_type = other DNA
atgaaaacagcacgcacttattcgcccggttacgcgctgctggcgggcctgctgctgagcgccagtacaggagca

SEQ ID NO: 754480 - DNA, 75 bp, synthetic construct
  source 1..75: mol_type = other DNA
cctccggggcgcagggcgtggggattgggatggaaaaaaccgacggaacggcggtgccgatcaacaacaccagcg

SEQ ID NO: 754481 - DNA, 75 bp, synthetic construct
  source 1..75: mol_type = other DNA
cggaacggaagacagcgagcagcccggttttctggcgctggatgccgcttcgacagcacaaggtgtggggattgg

SEQ ID NO: 754482 - DNA, 75 bp, synthetic construct
  source 1..75: mol_type = other DNA
ctccaggcgaaaagcgggcgggaagtgacgatgggtgagtttaccgcttccttaaccgcgacatttgagtacatt

SEQ ID NO: 754483 - DNA, 75 bp, synthetic construct
  source 1..75: mol_type = other DNA
ttatcagcagtctgctgttactgtgcagcagtactgctccggcggtcgacaacctgcacttcaccggcaatctgc

SEQ ID NO: 754484 - DNA, 75 bp, synthetic construct
  source 1..75: mol_type = other DNA
agtcagtattggcatggaaaagacggacggaacgtgggttgctattaacaacactgccggaacgacgttcacgct

SEQ ID NO: 754485 - DNA, 75 bp, synthetic construct
  source 1..75: mol_type = other DNA
ggaggattactggcagaagttcgctttccgacgattagctcaagagatctgagtacacaaatgcagtcaggtaaa

SEQ ID NO: 754486 - DNA, 75 bp, synthetic construct
  source 1..75: mol_type = other DNA
atgaaaacagcacacatttattcacccggttatgcgctgttagcaggcctgctgctgaccgccagcacaggagca

SEQ ID NO: 754487 - DNA, 75 bp, synthetic construct
  source 1..75: mol_type = other DNA
ttcagggcctggatccaggcgaaaagcggtcgcgatgtgacgatcggtgaatttaccgccagcctgaccgcaacc

SEQ ID NO: 754488 - DNA, 75 bp, synthetic construct
  source 1..75: mol_type = other DNA
agcggtcagccgggttttctggcagtcgatgacacctccaccgcgcagggcgtggggatagggatggaaacgctc

SEQ ID NO: 754489 - DNA, 75 bp, synthetic construct
  source 1..75: mol_type = other DNA
gatcgtcgcgtgcgtaaatggtttgatgttgaaggtctggataacctgcaacgcgcacaaatgcaaaatcgcggc

SEQ ID NO: 754490 - DNA, 75 bp, synthetic construct
  source 1..75: mol_type = other DNA
tttcttaaacgtcgtgaatccatcgcgcgcaaaaaccttgagctttgcttcccacaatattcagttgaacaacgc

SEQ ID NO: 754491 - DNA, 75 bp, synthetic construct
  source 1..75: mol_type = other DNA
cgaaatacgtgagctgaggaaaaagctacaacgcattgaaatggagaatgaaatattaaaaaggctaccgcgctc

SEQ ID NO: 754492 - DNA, 75 bp, synthetic construct
  source 1..75: mol_type = other DNA
attgatgttatcaatgaagatggaaataaaataatgtttgtcgttagcaacaatgaaaaaatacaaaagccaaaa

SEQ ID NO: 754493 - DNA, 75 bp, synthetic construct
  source 1..75: mol_type = other DNA
gcgagtttctccatcctcgctactggttcacgtggtttggtttgggtgtactctggctttgggtacagcttcctt

SEQ ID NO: 754494 - DNA, 75 bp, synthetic construct
  source 1..75: mol_type = other DNA
accctgttctctgttttctcggcacgcgtatcggcacgatggcgcgaccattcctgaaacgtcgtgaatctatcg

SEQ ID NO: 754495 - DNA, 75 bp, synthetic construct
  source 1..75: mol_type = other DNA
aataagctttttctgcttctgccggaggaatatggcccagcctttccagcaatcgtcgattgttataccagtcca

SEQ ID NO: 754496 - DNA, 75 bp, synthetic construct
  source 1..75: mol_type = other DNA
caatgataatgttattttcaaattgaaccgccccgggtttcctggagagtattttatctgtgaactcaggctgcc

SEQ ID NO: 754497 - DNA, 75 bp, synthetic construct
  source 1..75: mol_type = other DNA
gcgttgaattattacctgtagaaataacgccggatgagcagaaaaaacctgtggcggccattgcgccgtctttat

SEQ ID NO: 754498 - DNA, 75 bp, synthetic construct
  source 1..75: mol_type = other DNA
ttatccacccagactactgtcagtgccagctcctgcaaggtggagttccgtcacggtaacatgacgctggaaaat

SEQ ID NO: 754499 - DNA, 75 bp, synthetic construct
  source 1..75: mol_type = other DNA
ttatccactccttcacaaagcacagtcagtgccagttcctgtaaagttgagttccgccacggtaacatgacgctg

SEQ ID NO: 754500 - DNA, 75 bp, synthetic construct
  source 1..75: mol_type = other DNA
caattgcgccgtctttatccacttccactcagaccagagtcagtgccagttcctgcaaggtggaattccgtcacg

SEQ ID NO: 754501 - DNA, 75 bp, synthetic construct
  source 1..75: mol_type = other DNA
gcttgcgaatgaagagggtgtaacaattcaggtaggaaatagtaataaaggtatcatttatcaggttgatgatac

SEQ ID NO: 754502 - DNA, 75 bp, synthetic construct
  source 1..75: mol_type = other DNA
aacctatgataagttggatttaaacggccgcattctgctcggttttgacggtatccgtaaaatggaaaacggcta

SEQ ID NO: 754503 - DNA, 75 bp, synthetic construct
  source 1..75: mol_type = other DNA
gactggtcaaatttccaatttgaatttgcaagattcatcgccattgaaaggaaagtcactttatgacgagatttt

SEQ ID NO: 754504 - DNA, 75 bp, synthetic construct
  source 1..75: mol_type = other DNA
tatcaaataagtctgctgagtttgaatgtaatctctctgatatcacaccatcaggtgcagttatctttaccttgg

SEQ ID NO: 754505 - DNA, 75 bp, synthetic construct
  source 1..75: mol_type = other DNA
ttccgagccgtatcaactgtaatgcacctcagttgttttatttttggtataaaaacgctgagcaaaatatagttt

SEQ ID NO: 754506 - DNA, 75 bp, synthetic construct
  source 1..75: mol_type = other DNA
caaactgctactggatggtttgtagctgcaatcgaagaggatgcacactaccgctacaacaggaaatccagatga

SEQ ID NO: 754507 - DNA, 75 bp, synthetic construct
  source 1..75: mol_type = other DNA
aaccaaaaagtgaggaacagcaacaccatgacgcatctcaacaagtttgccccttatctcgcgaagctcttctac

SEQ ID NO: 754508 - DNA, 75 bp, synthetic construct
  source 1..75: mol_type = other DNA
agagccaataagaatcacaaagcggataacacctggcgcgatgcagttgtgattaccgaacgctcagatgacata

SEQ ID NO: 754509 - DNA, 75 bp, synthetic construct
  source 1..75: mol_type = other DNA
attacgaaaaacaactcgtaaaactcattcagcaagaacggcgcaaggctggcaattactcaccaattacaccga

SEQ ID NO: 754510 - DNA, 75 bp, synthetic construct
  source 1..75: mol_type = other DNA
ccaaaaaagaatatctgcgggaaactatcgccttaatcgagcaagttattttcgcccgtttatctggggacgaag

SEQ ID NO: 754511 - DNA, 75 bp, synthetic construct
  source 1..75: mol_type = other DNA
agagctttatgacgagattatgacgaatggtggtaaaaccgttttgcgtaggattcttgatgcgtatggctttac

SEQ ID NO: 754512 - DNA, 75 bp, synthetic construct
  source 1..75: mol_type = other DNA
ttaaagatgccagtattggtggtcgaatcccggagcgtgtgacgctaaacattggtcgccggatcaacatcattg

SEQ ID NO: 754513 - DNA, 75 bp, synthetic construct
  source 1..75: mol_type = other DNA
attgatggtctaggtattgagggtgtcacaggagatcattgcttagattttacagatatagttcagcaggatgct

SEQ ID NO: 754514 - DNA, 75 bp, synthetic construct
  source 1..75: mol_type = other DNA
cctgcagggtggagttccgtaacggtaaaatgacgctggaaaatccttcaccagagctgctcacggtgttgatcc

SEQ ID NO: 754515 - DNA, 75 bp, synthetic construct
  source 1..75: mol_type = other DNA
gtcagaagagttacttgaagagaaactgaaggagcttggtaatggcaggcgctccaatcagcttgaatcgaaacg

SEQ ID NO: 754516 - DNA, 75 bp, synthetic construct
  source 1..75: mol_type = other DNA
gtcatggacggactagccgtcagcgttcatccacacatgctgcgccatgcctgtggttttgctctcgctgaacgc

SEQ ID NO: 754517 - DNA, 75 bp, synthetic construct
  source 1..75: mol_type = other DNA
tgcggaaaacccgtggtttttcccttcatacaacaacacacacatcacccgtcagcgcttctggcagattattcg

SEQ ID NO: 754518 - DNA, 75 bp, synthetic construct
  source 1..75: mol_type = other DNA
tggcgagcattattaccatgtggttctcgcgtcaccgtgaatttcacgctgatgccggttcagccaaattggttg

SEQ ID NO: 754519 - DNA, 75 bp, synthetic construct
  source 1..75: mol_type = other DNA
taagcccattaaagactggcctaaggtatggcgcacaacgctatcaggaatggatgtcgtcgagatggcatcagc

SEQ ID NO: 754520 - DNA, 75 bp, synthetic construct
  source 1..75: mol_type = other DNA
tctcacgagctaaccggtaaagacggcggcgcaatacagattgaaacatcaccgatgagcactctattcggaaaa

SEQ ID NO: 754521 - DNA, 75 bp, synthetic construct
  source 1..75: mol_type = other DNA
ggccagcgtcgggataaagttttcagtgagcagtacagctatggtgcggataccgtgcgtgacggtgtctccttc

SEQ ID NO: 754522 - DNA, 75 bp, synthetic construct
  source 1..75: mol_type = other DNA
attttgacagcgcagccagtacgctgatcccgatggggacaaaagaagatccgttctggcagagttctgcccgca

SEQ ID NO: 754523 - DNA, 75 bp, synthetic construct
  source 1..75: mol_type = other DNA
gagcaggagccggtcctgtccgtaaccggcatgaatcgcccggtcataacaggggttgatatggcgctgttaaga

SEQ ID NO: 754524 - DNA, 75 bp, synthetic construct
  source 1..75: mol_type = other DNA
tgctttatcttgccaccttcggttcgtttatcggtttttctgcgggttttgccatgctggcaaaaacccagttcc

SEQ ID NO: 754525 - DNA, 75 bp, synthetic construct
  source 1..75: mol_type = other DNA
ggtgccattactggcgattgccacgatcgccgcctggtcagggatgaatgatatcgccagttcacgcgcctcaat

SEQ ID NO: 754526 - DNA, 75 bp, synthetic construct
  source 1..75: mol_type = other DNA
aaatctgcaccgcagagtctggtttatctacgatgagctgccttcactgaacaaactgccggaactgccgggcgt

SEQ ID NO: 754527 - DNA, 75 bp, synthetic construct
  source 1..75: mol_type = other DNA
cacatcgccaatggtgatatggtcaccatgacgctgattcagggcgtggtgaacaccttcgttatctttatttcc

SEQ ID NO: 754528 - DNA, 75 bp, synthetic construct
  source 1..75: mol_type = other DNA
aacctcgtaaaaagtattcgaatgaattcaaacttcgtatggttgaactggcatcacaaccaggagcttgtgttg

SEQ ID NO: 754529 - DNA, 75 bp, synthetic construct
  source 1..75: mol_type = other DNA
ggtttctgaaatgtggctggtttggccaaagcatcgtgaacaaagcccggcagcgcgaaactttcgtattcagct

SEQ ID NO: 754530 - DNA, 75 bp, synthetic construct
  source 1..75: mol_type = other DNA
ggtttctgaaatgtggctggtctggcctaagcatcatgagcaaagcccggcggcaagtcactttcgtattcagtt

SEQ ID NO: 754531 - DNA, 75 bp, synthetic construct
  source 1..75: mol_type = other DNA
ctcagactttggcaaaacgaagggcgtatatcgcggcgtcttccggtaacaacctcttctgatactggcgttgaa

SEQ ID NO: 754532 - DNA, 75 bp, synthetic construct
  source 1..75: mol_type = other DNA
tcttcccctgctttatccactccttcacagagcacagccagtgccagttcctgtaaagtggaattccactacggt

SEQ ID NO: 754533 - DNA, 75 bp, synthetic construct
  source 1..75: mol_type = other DNA
aacgattgaacgctggcagtctcagggactcccttgtgtctccggaggtggtaagggcgttgaatctgtatttga

SEQ ID NO: 754534 - DNA, 75 bp, synthetic construct
  source 1..75: mol_type = other DNA
aggcgttgttgcagggaattcgtgacgacgacgcactgtacgattccctgcgtgaacttctccagcgtcagcgga

SEQ ID NO: 754535 - DNA, 75 bp, synthetic construct
  source 1..75: mol_type = other DNA
tgttctgtcgcgagtacctcatcgatttaaacgccacgcaagcggctattcgggcggggtacagcgcaaaaacag

SEQ ID NO: 754536 - DNA, 75 bp, synthetic construct
  source 1..75: mol_type = other DNA
gccggtttctgagtggccgaaggtctggaggacgacgctatccgggcttgatgtcgttgagatatcagccgaagg

SEQ ID NO: 754537 - DNA, 75 bp, synthetic construct
  source 1..75: mol_type = other DNA
ttaggtgttgcctgtatttatgatgttttcgaccagcagtttattaatttcttcacccgtttctttgaccatcag

SEQ ID NO: 754538 - DNA, 75 bp, synthetic construct
  source 1..75: mol_type = other DNA
ggaattactggcggtgaatgatgagataatgcatcactacgatcagttaaacagccacagccaacaacgccacag

SEQ ID NO: 754539 - DNA, 75 bp, synthetic construct
  source 1..75: mol_type = other DNA
cctgtgatgcacgactggcatcagtgttgtcttcggggcggcaggtggatatttatctggttgacagtcagggca

SEQ ID NO: 754540 - DNA, 75 bp, synthetic construct
  source 1..75: mol_type = other DNA
tgatttttatatgcattattgtgacattagggctgtgggtaggtaaggtaaggatgttttttgataagtttccgc

SEQ ID NO: 754541 - DNA, 75 bp, synthetic construct
  source 1..75: mol_type = other DNA
aaatcagatgaatattctaaaaaatgcagcaatcctgataatgggtggagtttttatgtggattgtttctggtat

SEQ ID NO: 754542 - DNA, 75 bp, synthetic construct
  source 1..75: mol_type = other DNA
aagagaaataaaacaccccaggccatagctattcatatgtggtccatatcaatcagaaatggtgattcgctaacc

SEQ ID NO: 754543 - DNA, 75 bp, synthetic construct
  source 1..75: mol_type = other DNA
ttatttctcccaagttttttaattatgaaaaagaaatagtcaaagaattagaattaactaatgacgttatctatt

SEQ ID NO: 754544 - DNA, 75 bp, synthetic construct
  source 1..75: mol_type = other DNA
atgttcaagggcgatattgatctgttcaatcatgtgattggggaaacggatattgcggattgtggttctgcgggt

SEQ ID NO: 754545 - DNA, 75 bp, synthetic construct
  source 1..75: mol_type = other DNA
gatgacatactgcataaattatcagtacaatggcaggatgacagtgttgagtttatacacaagcagatgtctata

SEQ ID NO: 754546 - DNA, 75 bp, synthetic construct
  source 1..75: mol_type = other DNA
ggaaaatgaactcctcaaagaagccgttgaatatggacgggcaaaagagtggatagcgcacgcgcccttattgcc

SEQ ID NO: 754547 - DNA, 75 bp, synthetic construct
  source 1..75: mol_type = other DNA
atctggtgcttacctgtaccgacaaccagtcgcgtaaccgccgttttggcatgatgctcggtcagggcatggatg

SEQ ID NO: 754548 - DNA, 75 bp, synthetic construct
  source 1..75: mol_type = other DNA
cttacctgtaccgacaaccagtcgcgtaaccgccgttttggcatgatgctcggtcagggcatggatgtacaaagc

SEQ ID NO: 754549 - DNA, 75 bp, synthetic construct
  source 1..75: mol_type = other DNA
taaatcacaataaaaacaaatccggaaaaatcatcagtacggattacggaataatgcagattaattcatcgcata

SEQ ID NO: 754550 - DNA, 75 bp, synthetic construct
  source 1..75: mol_type = other DNA
ccggtgcctggatactggcccgccattttcaacgctgcggcgttaactgggaatgccttggcagttacaacgcag

SEQ ID NO: 754551 - DNA, 75 bp, synthetic construct
  source 1..75: mol_type = other DNA
ctgctgctacgacccggatcgggatgcccacgaagctctgttgcgttccgggttcggcggacgtgtacaggtcgt

SEQ ID NO: 754552 - DNA, 75 bp, synthetic construct
  source 1..75: mol_type = other DNA
tttattaacgcaccgaatgttaattacaaaaatagagaacaatattctttacagcaatgggtgaaaaaaataatc

SEQ ID NO: 754553 - DNA, 75 bp, synthetic construct
  source 1..75: mol_type = other DNA
caggagtcatgctggctgatttcactccatcgggtatagcgcagccgggattatttgatgaaatccagccccgta

SEQ ID NO: 754554 - DNA, 75 bp, synthetic construct
  source 1..75: mol_type = other DNA
gtggcggtaaaagcggttccgcagcaaaatcagggggcggcgctggcaacttacaccgtatttatggatttatcg

SEQ ID NO: 754555 - DNA, 75 bp, synthetic construct
  source 1..75: mol_type = other DNA
atgtgtgtgcgtcatcataaaagggaaacagcctgtttcctggaaacagactcacagggaagcatcaaggatttc

SEQ ID NO: 754556 - DNA, 75 bp, synthetic construct
  source 1..75: mol_type = other DNA
agtcaccaaagacggcttcgtgtttttaacaatgggatttaccggaaaaaaagcggctgcattcaaagaggcata

SEQ ID NO: 754557 - DNA, 75 bp, synthetic construct
  source 1..75: mol_type = other DNA
atgacggttctggcgctggttccgcctgaatctctggatatgccggaaatgaaagcgaagacgaagaaatcagca

SEQ ID NO: 754558 - DNA, 75 bp, synthetic construct
  source 1..75: mol_type = other DNA
acggcaaactgtgggaaggctggacggaaatgtccgtcagtcgttccctgaaggcgattgccggtgagtttgatc

SEQ ID NO: 754559 - DNA, 75 bp, synthetic construct
  source 1..75: mol_type = other DNA
gccataaaggcggcattggcaaaagcaccgtgctttgctccttatgtgtgtgtgtcatcaaaaaagggaaaacag

SEQ ID NO: 754560 - DNA, 75 bp, synthetic construct
  source 1..75: mol_type = other DNA
atggcgaaaaattgcaggcgaaggccagcgatttagtctcccgcaaaaatgtggagtatctggtcgtcgaggccg

SEQ ID NO: 754561 - DNA, 75 bp, synthetic construct
  source 1..75: mol_type = other DNA
caatagaatgcatcgggttaaataaaaaaattattaccacgaatgaagacataaaaaagtacgatttttatgacc

SEQ ID NO: 754562 - DNA, 75 bp, synthetic construct
  source 1..75: mol_type = other DNA
gggaagtatcaaggatttcatcgaggatcgtaaaaccaacgccagactgtcagaaataccgtatttcgagtgcta

SEQ ID NO: 754563 - DNA, 75 bp, synthetic construct
  source 1..75: mol_type = other DNA
gggaagtatcaaggatttcatcgaggatcgtaaaaccaacaccagactgtcagaaataccgtatttcgaatgcta

SEQ ID NO: 754564 - DNA, 75 bp, synthetic construct
  source 1..75: mol_type = other DNA
aactgcgccgacaactcaatgatgatccggactggcttccggttccccgccagcgtatctatatgcgtactgcac

SEQ ID NO: 754565 - DNA, 75 bp, synthetic construct
  source 1..75: mol_type = other DNA
caccgctcttgccataaccctggcaagaaatggccacgaggttgtcctctggggccatgaccctgaacatatcgc

SEQ ID NO: 754566 - DNA, 75 bp, synthetic construct
  source 1..75: mol_type = other DNA
tcaccctgggcgttcaggctggttatgcccacagcgtcagcggcagcagcgctgaaggatataacggtcaggcca

SEQ ID NO: 754567 - DNA, 75 bp, synthetic construct
  source 1..75: mol_type = other DNA
atgttactcaccgatctccttcacggtaatacgcacctgcagggaggcgctcttaccggtaacggcaggggggaa

SEQ ID NO: 754568 - DNA, 75 bp, synthetic construct
  source 1..75: mol_type = other DNA
acagggcgtgttaacccctcggattacggtaactttgattcccgttatgtgaaagatagttcgacttggttcaca

SEQ ID NO: 754569 - DNA, 75 bp, synthetic construct
  source 1..75: mol_type = other DNA
tcaccctgggcgttcaggcgggttatgcccacagcgtcagcggcagcagcgctgaaggttataacggtcaggcca

SEQ ID NO: 754570 - DNA, 75 bp, synthetic construct
  source 1..75: mol_type = other DNA
tcaccctgggcgttcaggccggttatggccacagcgtcagcggcagcagcgctgaaggttataacggtcaggcca

SEQ ID NO: 754571 - DNA, 75 bp, synthetic construct
  source 1..75: mol_type = other DNA
tcaccctgggcgttcaggccggttatgtccacagcgtcagcggcagcagcgctgaaggatataacggtcaggcca

SEQ ID NO: 754572 - DNA, 75 bp, synthetic construct
  source 1..75: mol_type = other DNA
ccggcgcaatggcaaccgacacggttgtgaataccggcgcggaagggggaccggatgcagaaaatggtgataccg

SEQ ID NO: 754573 - DNA, 75 bp, synthetic construct
  source 1..75: mol_type = other DNA
ggcggcagcgaaacggggttacatgctgacgactgcggaagaagaacgtgccgatggtgaatgtgctgacctgat

SEQ ID NO: 754574 - DNA, 75 bp, synthetic construct
  source 1..75: mol_type = other DNA
gcaatgtccactcccgtaatccgtttgatgtcattcgcgcggacgtggtgctgatgcgcatggagaaagaggcag

SEQ ID NO: 754575 - DNA, 75 bp, synthetic construct
  source 1..75: mol_type = other DNA
acggtccgggatgatgccggcagccttggcggatacctgaatctgacacatacatcctccggcctgtgggctgac

SEQ ID NO: 754576 - DNA, 75 bp, synthetic construct
  source 1..75: mol_type = other DNA
aatggtcgtcagattgtggctgctgaaggaacagcaaataccactgtggtttatgccggcggcgaccagactgta

SEQ ID NO: 754577 - DNA, 75 bp, synthetic construct
  source 1..75: mol_type = other DNA
agggaacagcagaatccaccaccatcaacaaaaatggacggcagattatcttatcttccgggatagcccgtgaca

SEQ ID NO: 754578 - DNA, 75 bp, synthetic construct
  source 1..75: mol_type = other DNA
atggcggtgtactgctggccgattccggggccgctgtcagtggtacccggagcgacggaacggcattccgtatcg

SEQ ID NO: 754579 - DNA, 75 bp, synthetic construct
  source 1..75: mol_type = other DNA
ttgtcgttgttgcgtgggctggtgggcaaagtgcctgaagacacgcttagaactgtttacaagggtattgaaacc

SEQ ID NO: 754580 - DNA, 75 bp, synthetic construct
  source 1..75: mol_type = other DNA
aaggagtttgacgacatattaaggaaagccggaaatcacgaacgtagtcgcgttttaacgctgttacgcaacgat

SEQ ID NO: 754581 - DNA, 75 bp, synthetic construct
  source 1..75: mol_type = other DNA
atgaccatccactttcacggcagcccaatatggggggatgagcatgcccctacagatatgctgattaaagccctt

SEQ ID NO: 754582 - DNA, 75 bp, synthetic construct
  source 1..75: mol_type = other DNA
tggcggttatctctggcccaacgtttgcgaaagaactggcggcaggtttaccgacggccatttcgctggcctcta

SEQ ID NO: 754583 - DNA, 75 bp, synthetic construct
  source 1..75: mol_type = other DNA
gcgccagattaaaccgctgatgcgacctgatgcgcgtctggtgtgggcgaccaaagggctggaagcggaaaccgg

SEQ ID NO: 754584 - DNA, 75 bp, synthetic construct
  source 1..75: mol_type = other DNA
tggatggtgcatatcacattcctgaaagggatttggtaaaataccgactcgacaaagcgggaatgctttgtatat

SEQ ID NO: 754585 - DNA, 75 bp, synthetic construct
  source 1..75: mol_type = other DNA
cgtgaactgccggtgaacgggtgggtacagccttctgttatcagcaccttcagctcccggggagacatgagcacg

SEQ ID NO: 754586 - DNA, 75 bp, synthetic construct
  source 1..75: mol_type = other DNA
tgtgcgtgccggcttccgtctgggcagccacaacgatatgacctttggtaaaggcacctcatcccgtgacaccct

SEQ ID NO: 754587 - DNA, 75 bp, synthetic construct
  source 1..75: mol_type = other DNA
ttcgccctggaatgtatccgatacatcgcaacgcggtcgctgaatgacgctaaaaatattcttgttgctgattgt

SEQ ID NO: 754588 - DNA, 75 bp, synthetic construct
  source 1..75: mol_type = other DNA
gtcattactctttcacgtagcggttcgctgccggaagtgatcgaaaccagccatgactacgccaaagtgatggac

SEQ ID NO: 754589 - DNA, 75 bp, synthetic construct
  source 1..75: mol_type = other DNA
ttgggcggcggatatattggcgttgagttcgcctctatgttcgctaattttggcagcaaggtaaccattttagaa

SEQ ID NO: 754590 - DNA, 75 bp, synthetic construct
  source 1..75: mol_type = other DNA
tccctgactgaagaagacaccaacgcgattattcatccgtgcctggccgtagtatcacgtaagcacatggacgga

SEQ ID NO: 754591 - DNA, 75 bp, synthetic construct
  source 1..75: mol_type = other DNA
ttattacctgtggagataacgccggatgagccgaaagaaccggtggctgctcttactccgtctttatccacccag

SEQ ID NO: 754592 - DNA, 75 bp, synthetic construct
  source 1..75: mol_type = other DNA
cgatactgtttcactacactaatctggctgaagggatgtcagagcagcggctggaaacggatgtctatgtgccgt

SEQ ID NO: 754593 - DNA, 75 bp, synthetic construct
  source 1..75: mol_type = other DNA
atggcgtttgacgatatcgacctgcttaccatgctgcaactggtggcgcggggggtcgccgactcgctgggaaat

SEQ ID NO: 754594 - DNA, 75 bp, synthetic construct
  source 1..75: mol_type = other DNA
tgatgtcagatttcgggagcattcgctccctgttgcctgctgatggcaaaatcgacaccgtgaaattcgatcagt

SEQ ID NO: 754595 - DNA, 75 bp, synthetic construct
  source 1..75: mol_type = other DNA
tgggttccggtatttacccagggcgaactgatgtttgatgatattgacttgctggtcatgctgcatctggtggcg

SEQ ID NO: 754596 - DNA, 75 bp, synthetic construct
  source 1..75: mol_type = other DNA
tggctgggcaaaaaagatggagtctggcgaacgcgttgtgattaaaaatcctgaatatttttcgacatatatgca

SEQ ID NO: 754597 - DNA, 75 bp, synthetic construct
  source 1..75: mol_type = other DNA
tggattttattggtgccatggatgtatcagcatcaacaccaagttctatgaatgaaagtacggcgaagggaatat

SEQ ID NO: 754598 - DNA, 75 bp, synthetic construct
  source 1..75: mol_type = other DNA
ggtgaacgcactgtaattaaaaatcctgaatacttttcaacatatatgcaggaagaactaaaagcactggtctga

SEQ ID NO: 754599 - DNA, 75 bp, synthetic construct
  source 1..75: mol_type = other DNA
tgaacttaccggtggacgttatgccgtggcccgccacgttggcgagctggacgatatttcacacacgatatgggg

SEQ ID NO: 754600 - DNA, 75 bp, synthetic construct
  source 1..75: mol_type = other DNA
acgatatttcacacacgatatggggcattattcgccactggctgcctgcaagcggcgagaaaatgcgtaaagcac

SEQ ID NO: 754601 - DNA, 75 bp, synthetic construct
  source 1..75: mol_type = other DNA
agagacggggctttctcctgttaaccaaagccagacttttggcgtcgcctgggatgaccctgccaccaccgcacc

SEQ ID NO: 754602 - DNA, 75 bp, synthetic construct
  source 1..75: mol_type = other DNA
attatcgaaccgccaaactcgacgtattccagcaactgaaggtaagccgtaagctgctgccggtgctggctgggc

SEQ ID NO: 754603 - DNA, 75 bp, synthetic construct
  source 1..75: mol_type = other DNA
aatgccaaacgtcgatgtggtaggcgagatggttaataccatgtcggcgtcgcgcagctatcaggctaacgttga

SEQ ID NO: 754604 - DNA, 75 bp, synthetic construct
  source 1..75: mol_type = other DNA
ttgccgggtcggcgttaaccgcccagtctcagcgtctgaacgtggcggccagtaatctggcgaatgccgatagcg

SEQ ID NO: 754605 - DNA, 75 bp, synthetic construct
  source 1..75: mol_type = other DNA
gtcccagcgcctgaacgtggcggccagtaatctggcaaatgctgatagcgtgaccggtcccgatggacagccata

SEQ ID NO: 754606 - DNA, 75 bp, synthetic construct
  source 1..75: mol_type = other DNA
gctaaccttgcactcgcagaagcagtaagcgcccaacaaaacgtagaaaccactcgccagactgccgaagccgat

SEQ ID NO: 754607 - DNA, 75 bp, synthetic construct
  source 1..75: mol_type = other DNA
gccgaacgtcgtcgggaagcagagcagacgcgaattctggctgaacgacagattcaggaaacggaaatcgaccgc

SEQ ID NO: 754608 - DNA, 75 bp, synthetic construct
  source 1..75: mol_type = other DNA
gacgctggggcaacgcaccctgtcgcctgaagacttacgtatgttggttgaagataaatttgtcgatgccctccg

SEQ ID NO: 754609 - DNA, 75 bp, synthetic construct
  source 1..75: mol_type = other DNA
accggatgttgcagaacaaccttgatcccgacgttgccgaaaatccacagcatctggtggtgtatggtggtattg

SEQ ID NO: 754610 - DNA, 75 bp, synthetic construct
  source 1..75: mol_type = other DNA
tagcactcatgctaagcggctgttccatgttaagcagatcccctgtcgaatccgttcaaagcactgcaccccagc

SEQ ID NO: 754611 - DNA, 75 bp, synthetic construct
  source 1..75: mol_type = other DNA
atgcggtattactgcatagctgcgaagtcaccagcggtacgccaggctgctatcgtcaggctgtatgtatcggct

SEQ ID NO: 754612 - DNA, 75 bp, synthetic construct
  source 1..75: mol_type = other DNA
aaaatcctgacgttcctgaataatcaggatgtcggctcgctggtggcgctgataacgcgccggggaggttcaggt

SEQ ID NO: 754613 - DNA, 75 bp, synthetic construct
  source 1..75: mol_type = other DNA
ggcgggatcttatctaccgtcaatgctacgcgggcggccagcgaaacacaactgtttgaactggcggcgcagcga

SEQ ID NO: 754614 - DNA, 75 bp, synthetic construct
  source 1..75: mol_type = other DNA
gcaggtggagcgggtctttcagaaggcccgggaactagggctgccagtgaagctccatgctgaacagctaacgct

SEQ ID NO: 754615 - DNA, 75 bp, synthetic construct
  source 1..75: mol_type = other DNA
gaaagtgtgtcgctgacaagtttcaaccagaccgcacgagaacattttaatcctgacaatgcctttgacgcagag

SEQ ID NO: 754616 - DNA, 75 bp, synthetic construct
  source 1..75: mol_type = other DNA
ccgatggatggatgagccgtaatgaggcccgcgcattcgaggatatgaatccggttgaagggctggatgagatgc

SEQ ID NO: 754617 - DNA, 75 bp, synthetic construct
  source 1..75: mol_type = other DNA
ggtattttcaatattcctgcgcacatgattaatgacctggaaaaagccacattttcgaatattacacagcaggcg

SEQ ID NO: 754618 - DNA, 75 bp, synthetic construct
  source 1..75: mol_type = other DNA
ggagcttaaccgtcgcttgtttacccgcgctgagttagccgccgggtattacgttaggttcaatctgacggggct

SEQ ID NO: 754619 - DNA, 75 bp, synthetic construct
  source 1..75: mol_type = other DNA
accctggggctgatttttttgctggctatcatggaaaccatttacgtggtcaccggcaaaacaatctaccgcgat

SEQ ID NO: 754620 - DNA, 75 bp, synthetic construct
  source 1..75: mol_type = other DNA
gtgcaattactgaccgaaaatgtacaggccgcagaattattggtgacgtggcatacggttgacagtcatgcggag

SEQ ID NO: 754621 - DNA, 75 bp, synthetic construct
  source 1..75: mol_type = other DNA
tggtcagcgtaaatgcagcaaatccgttgaatgattttaaagatacgaaaggcaaagaggaaaagaacgatgaat

SEQ ID NO: 754622 - DNA, 75 bp, synthetic construct
  source 1..75: mol_type = other DNA
gatattgtgattgaacgctcgcaatcccgttactggcgtaccggtgcctgggtggatgattccggtacggaaagc

SEQ ID NO: 754623 - DNA, 75 bp, synthetic construct
  source 1..75: mol_type = other DNA
tcccggcccgtaaaggggaattactggatttacgggacattgaacaggggctggaaaaccttcagcgccttccca

SEQ ID NO: 754624 - DNA, 75 bp, synthetic construct
  source 1..75: mol_type = other DNA
atgaaacgtccgaatatgctcgtacaggggcagggcttcgttcagcccgaagaactgagccaacagtatttcgcc

SEQ ID NO: 754625 - DNA, 75 bp, synthetic construct
  source 1..75: mol_type = other DNA
tggtgagcgttaacgccgcgaaccccgcagacgattttaaggcacctaaaaccgacgaggaaaagcccaatgaat

SEQ ID NO: 754626 - DNA, 75 bp, synthetic construct
  source 1..75: mol_type = other DNA
atcgtcaaagccgttttctggcgtccagaggtttactcgcagaactgatgttcatgctgtatggcattggcgaat

SEQ ID NO: 754627 - DNA, 75 bp, synthetic construct
  source 1..75: mol_type = other DNA
gtctgtatcgggatcttcaaatacaacctgagcgccgatgctgccttccagcagtatgtgctgatgaccatcggc

SEQ ID NO: 754628 - DNA, 75 bp, synthetic construct
  source 1..75: mol_type = other DNA
cgttcggttccaatatctccgcattgtggattttgaatgccaatggctggatgcagttcccgaccggcgctcatt

SEQ ID NO: 754629 - DNA, 75 bp, synthetic construct
  source 1..75: mol_type = other DNA
tggctcaggctctggcagaacgaagggcgtgtttcgcggcgtcttccggtaacgacctcttctgacactggcgtt

SEQ ID NO: 754630 - DNA, 75 bp, synthetic construct
  source 1..75: mol_type = other DNA
ccatatccatgctagtcgatttcctgccgacactgtcggatattgaatttcgtgcagggaaagcgagtaaagacc

SEQ ID NO: 754631 - DNA, 75 bp, synthetic construct
  source 1..75: mol_type = other DNA
cagggcgggtctgtatgctggatcatgatggggtagtggcaacgggcgcgctttcactgccggactggcggggtt

SEQ ID NO: 754632 - DNA, 75 bp, synthetic construct
  source 1..75: mol_type = other DNA
gaaagtgtgtcgctgacaagtttcaaccagactgcacgggtacattttaatcctgacaatgcctttgatgctgaa

SEQ ID NO: 754633 - DNA, 75 bp, synthetic construct
  source 1..75: mol_type = other DNA
ccggtgaaggacttacagccctgacacgtccactggtcatgcctgccccggaaaaggttccggatgtcagcgaac

SEQ ID NO: 754634 - DNA, 75 bp, synthetic construct
  source 1..75: mol_type = other DNA
tctcgaagatcgtggtaatgacagcattatccgtgaagtacagtgtctggctaccagtcatgatggtattcactt

SEQ ID NO: 754635 - DNA, 75 bp, synthetic construct
  source 1..75: mol_type = other DNA
atgacgcgcttctggggtaagctcttcggtatcaactttgctcttggcgtggctaccggcctgacgatggagttt

SEQ ID NO: 754636 - DNA, 75 bp, synthetic construct
  source 1..75: mol_type = other DNA
ctggcaacggttgaacaaataccagcacctgctggtgacgtggttggtggcattcggttccaatatctccgcact

SEQ ID NO: 754637 - DNA, 75 bp, synthetic construct
  source 1..75: mol_type = other DNA
tatgaccgagtttggccgtcagccgtgggcgattcaggacattttgccaacatactccgcgcactctgccttaac

SEQ ID NO: 754638 - DNA, 75 bp, synthetic construct
  source 1..75: mol_type = other DNA
actcatacatacgattttcgagcaagaaacaagaacaaggggactcagtaagacgacagactgaacttgctgaaa

SEQ ID NO: 754639 - DNA, 75 bp, synthetic construct
  source 1..75: mol_type = other DNA
ctctcagagctttatttgggatggtagtaatattactttcgtttctgatacgaaaaaattactagaactagtaaa

SEQ ID NO: 754640 - DNA, 75 bp, synthetic construct
  source 1..75: mol_type = other DNA
ggattgcaattgaggcggggtggtttatgaccgagtttggtcgccagccgtgggcgattcaggacatcttgccga

SEQ ID NO: 754641 - DNA, 75 bp, synthetic construct
  source 1..75: mol_type = other DNA
cctatatgttaagcgttaatggtgcatgtcatgccaccgcatttaaccagcattccgaccgggatctgaaagaca

SEQ ID NO: 754642 - DNA, 75 bp, synthetic construct
  source 1..75: mol_type = other DNA
aggtgaagaaggtgaacgttattacacagtagattattctggtgttactggcttgcttgttcaggtagccagaga

SEQ ID NO: 754643 - DNA, 75 bp, synthetic construct
  source 1..75: mol_type = other DNA
gtatgccctatgctggtgtcattgcacaggaagctctggaagcaatcccagaagttgtaggttccgcaatgaaat

SEQ ID NO: 754644 - DNA, 75 bp, synthetic construct
  source 1..75: mol_type = other DNA
ccagttttctatggcgcatcaggacgttcgctattacttaaatggtatgctgtttgaaaccgaaggtgaagaact

SEQ ID NO: 754645 - DNA, 75 bp, synthetic construct
  source 1..75: mol_type = other DNA
ccaaactggtggatggtcgcttcccggattaccgtcgcgttctgccgaagaacccggacaaacatctggaagctg

SEQ ID NO: 754646 - DNA, 75 bp, synthetic construct
  source 1..75: mol_type = other DNA
ggtgatcgtgccgcgtaaaggcgtgattgaactaatgcgtatgctcgacggcggcgacaatccgctgcgcgtgca

SEQ ID NO: 754647 - DNA, 75 bp, synthetic construct
  source 1..75: mol_type = other DNA
atgtacttcgacacgccggtcaaaatcaatgaagttactgcaacggcagtaaaaagaatcaaatacagtccggat

SEQ ID NO: 754648 - DNA, 75 bp, synthetic construct
  source 1..75: mol_type = other DNA
gtgactccgaaaggggagtggggcaaaggcagcgttgagctggtggaaattccaaccaacgatgaaaccaacgat

SEQ ID NO: 754649 - DNA, 75 bp, synthetic construct
  source 1..75: mol_type = other DNA
ggacgccggatcagctgccggagccgggtaaagagatgaactttaaatacaccatcaccttcagccgtgatgaag

SEQ ID NO: 754650 - DNA, 75 bp, synthetic construct
  source 1..75: mol_type = other DNA
atgggtcaaccatgacattaaacacacagggaaccgcttatgctggtgttactgctcaattgtggggcaacacca

SEQ ID NO: 754651 - DNA, 75 bp, synthetic construct
  source 1..75: mol_type = other DNA
aaatgcgttggttgagtgctgcagtaatgttaaccctgtatacatcttcaagctgggcattcagcattgacgatg

SEQ ID NO: 754652 - DNA, 75 bp, synthetic construct
  source 1..75: mol_type = other DNA
aacatctggcgatcagcagtttctcgatggagaaccctcaaggtttcggtctactgcaacgcggccgcgatttct

SEQ ID NO: 754653 - DNA, 75 bp, synthetic construct
  source 1..75: mol_type = other DNA
atgacatcaaaacgctaaaatccgacgttagcaaattaaaaaaagatcaaggaagctacgcaacaaaatcatatg

SEQ ID NO: 754654 - DNA, 75 bp, synthetic construct
  source 1..75: mol_type = other DNA
cattccgaccgggatctgaaagacaacattcaggtgatcgataatgcaaccgaccgcatccgtaaaatgaacggc

SEQ ID NO: 754655 - DNA, 75 bp, synthetic construct
  source 1..75: mol_type = other DNA
acaagaaaccctggaagccatccccgaagccgtaggggctatgatgaaatatccagacggcgggagtggattaga

SEQ ID NO: 754656 - DNA, 75 bp, synthetic construct
  source 1..75: mol_type = other DNA
atattcaggtgattgataatgcaaccaatcgcatccgtaagatgaatggttatacatacacgcttaaagaaaacg

SEQ ID NO: 754657 - DNA, 75 bp, synthetic construct
  source 1..75: mol_type = other DNA
gacgcgcatgacgctacgccataacgcccacgatgcgacccgcaacgcgctgcgtactcgctacgttctgggcga

SEQ ID NO: 754658 - DNA, 75 bp, synthetic construct
  source 1..75: mol_type = other DNA
caagcgaagccgcgctgttgcactatgactggccgggtaatattcgtgaactgcgtaatatgatggagcggctgg

SEQ ID NO: 754659 - DNA, 75 bp, synthetic construct
  source 1..75: mol_type = other DNA
atggcaaactacaatttaacaccgcgcgtaaaagtgctggctgaacgtttactggctcaccccagtaccctgtgc

SEQ ID NO: 754660 - DNA, 75 bp, synthetic construct
  source 1..75: mol_type = other DNA
gttgatggtggcgcttatatgttctacggtcagaaacaaaccgataatacctatgcgttcgctgttaatggtgca

SEQ ID NO: 754661 - DNA, 75 bp, synthetic construct
  source 1..75: mol_type = other DNA
gatggtggcgcttatatgttctatgcgcagaaaaataccgataacacctatatgttaagcgttaatggtgcatgt

SEQ ID NO: 754662 - DNA, 75 bp, synthetic construct
  source 1..75: mol_type = other DNA
ggaagctacgcaacaaaatcttatgtagacaataaaacaacatggaatagttattgcaatgtaatctataatcaa

SEQ ID NO: 754663 - DNA, 75 bp, synthetic construct
  source 1..75: mol_type = other DNA
acactacagatcaaatatgctaatcatggttcgaccatgacactaaacacacagggaaccgctcacgctggcgtt

SEQ ID NO: 754664 - DNA, 75 bp, synthetic construct
  source 1..75: mol_type = other DNA
gccgtccggttgtttatgaagttggtgtagatggtgctctgtatatgttttatgcacagaaaactaccagcaata

SEQ ID NO: 754665 - DNA, 75 bp, synthetic construct
  source 1..75: mol_type = other DNA
tcttattaaatttgattacaccgactccttacagataaaatatgctaatcatgggtcgaccatgacattaaacac

SEQ ID NO: 754666 - DNA, 75 bp, synthetic construct
  source 1..75: mol_type = other DNA
acgcgcctgataacgcctgggtgcagcagacgcgtcgttcaacgggggatgtgaagcagtcgaacctgattcgac

SEQ ID NO: 754667 - DNA, 75 bp, synthetic construct
  source 1..75: mol_type = other DNA
ggtgcatgagaagtttgagtgcaatgaggtcaacaccaaagtctttgccctcgatgtggtggccagccagcaact

SEQ ID NO: 754668 - DNA, 75 bp, synthetic construct
  source 1..75: mol_type = other DNA
atgcgtcagttttatcagcactattttaccgcgacagcgaagttgtgctggttgcgttggttaagcgtcccacaa

SEQ ID NO: 754669 - DNA, 75 bp, synthetic construct
  source 1..75: mol_type = other DNA
ttggccttgttgagtttacgaccgaagactgcgtgcgatcagaactatgcaaaatcgcactggaagcctatcagt

SEQ ID NO: 754670 - DNA, 75 bp, synthetic construct
  source 1..75: mol_type = other DNA
accacgctggagaactttagcgcgcgtagccgcaaagcttacagcggacaacagatgctggaggaatatgtctcg

SEQ ID NO: 754671 - DNA, 75 bp, synthetic construct
  source 1..75: mol_type = other DNA
tgacggcccggtggtactgcattttcacgtcatgcacagctactggctgaatctggcggatgtggtgaacttctg

SEQ ID NO: 754672 - DNA, 75 bp, synthetic construct
  source 1..75: mol_type = other DNA
ggcgggtataccggcgggcgaagtgggtaaagtgatgatcgccgggatgggcggtgtacttggttccgtcactat

SEQ ID NO: 754673 - DNA, 75 bp, synthetic construct
  source 1..75: mol_type = other DNA
cacctaaagtcgaattcgccgaacgcgttgctaccgccagcggggttctaatcggcaactatgccaaagtgctcg

SEQ ID NO: 754674 - DNA, 75 bp, synthetic construct
  source 1..75: mol_type = other DNA
tgaatatatcaaaccttcatcaaaatgtcgatccttcaaccactctgcccgttatttgtggtgttgaaattacga

SEQ ID NO: 754675 - DNA, 75 bp, synthetic construct
  source 1..75: mol_type = other DNA
catcggggctaatatgaaaaaacgtgttaacactgaaaaatcaagtagtgaaggtgaagacactattactcctgc

SEQ ID NO: 754676 - DNA, 75 bp, synthetic construct
  source 1..75: mol_type = other DNA
ttaaagccagaggtggccaaagtagaaattgctcccttcgcttatatgcgtgggcgcacgttcgagaacgcagta

SEQ ID NO: 754677 - DNA, 75 bp, synthetic construct
  source 1..75: mol_type = other DNA
atacacaacacaacatagcaataaaaccactattaacaagatggcagttattaaaatttcaaaactctattgata

SEQ ID NO: 754678 - DNA, 75 bp, synthetic construct
  source 1..75: mol_type = other DNA
cacgctacaatgggcaaatgtccatccaagaagttaactatcaatgggctgttgctttgcttaccgcccaacata

SEQ ID NO: 754679 - DNA, 75 bp, synthetic construct
  source 1..75: mol_type = other DNA
atcgcacggttacccgcacctgcggcccgctggtactgcatttccatgtgttgcacagctactggttgaacctgg

SEQ ID NO: 754680 - DNA, 75 bp, synthetic construct
  source 1..75: mol_type = other DNA
tgttctggaagcgaatagcggtgaaactattcttgatgctgcgttgcgtaacggtatcgagattgaacacgcctg

SEQ ID NO: 754681 - DNA, 75 bp, synthetic construct
  source 1..75: mol_type = other DNA
attttgtctacggttacggcaaaggcggcaaagagagcgtcagccatcaaaactatccgcaggtcatcaaacata

SEQ ID NO: 754682 - DNA, 75 bp, synthetic construct
  source 1..75: mol_type = other DNA
cggtgttttttatcgcgtaggaaatgatgatgctctgaatcgacgagaattgggtgaacaatcgctggtgctggt

SEQ ID NO: 754683 - DNA, 75 bp, synthetic construct
  source 1..75: mol_type = other DNA
cgcttcaaagagttctggatcgagcgtccaaaaccgactgataaacgtttaaccatttatgcattgcttgactcg

SEQ ID NO: 754684 - DNA, 75 bp, synthetic construct
  source 1..75: mol_type = other DNA
gctcgaggtctggcaattgataccgcgttgccatctggtgaagaatttccacgttttaaagagttctggattgag

SEQ ID NO: 754685 - DNA, 75 bp, synthetic construct
  source 1..75: mol_type = other DNA
gtcacagcgcaaaccagcattggtgataatggtgagatagttgaaagcacggtgcgctataacccggttaccaaa

SEQ ID NO: 754686 - DNA, 75 bp, synthetic construct
  source 1..75: mol_type = other DNA
tgggtgaacaatcgctggtgctggtggcttcaccgcaaattgcagatgtcgattttactgagccgggaagacata

SEQ ID NO: 754687 - DNA, 75 bp, synthetic construct
  source 1..75: mol_type = other DNA
gatacgcttcgtgaggctgccaaaaaggagtcagatccggacggggaactacgcgttgtttcgggcgaaacgttg

SEQ ID NO: 754688 - DNA, 75 bp, synthetic construct
  source 1..75: mol_type = other DNA
ggatcacggtggaaaataccattgagcttataagtatcgaaagcataaagcgttgtgtcgcggcgaatatcggag

SEQ ID NO: 754689 - DNA, 75 bp, synthetic construct
  source 1..75: mol_type = other DNA
cgctcaccatgccggaaaagcggttagtccgccgatgcacatttttattcagtgtattgaagagtgctttttgcc

SEQ ID NO: 754690 - DNA, 75 bp, synthetic construct
  source 1..75: mol_type = other DNA
ggatcacggtggaaaataccattgagcttataagcattgaaagcatcaagcgttgtgtcgcggcgaatatcgggg

SEQ ID NO: 754691 - DNA, 75 bp, synthetic construct
  source 1..75: mol_type = other DNA
ctgaactgttacgtgatccgtgatgcactactgaatgatgaggccgatgttggcgtcttttatcgcgtaggaaat

SEQ ID NO: 754692 - DNA, 75 bp, synthetic construct
  source 1..75: mol_type = other DNA
aatacgaaaccaacggaagaagaaattgatcagtttgctcatgatgctggtttaaaaaacaagaaagaaaaatcg

SEQ ID NO: 754693 - DNA, 75 bp, synthetic construct
  source 1..75: mol_type = other DNA
atggaatttaaagatttacctacttcaatccaggagattgcagcacacacacttcgtcatcgtctgaacgaactt

SEQ ID NO: 754694 - DNA, 75 bp, synthetic construct
  source 1..75: mol_type = other DNA
gaaagaaaaatcgccatatgcggggaacatgtttgtttatgacaaccttatccgaattcgtggcgaaattccgac

SEQ ID NO: 754695 - DNA, 75 bp, synthetic construct
  source 1..75: mol_type = other DNA
aacatgtttgtttatgacaaacttatccgaattcgtggcgaaattccgactgaatacctggcaaaaattcaccag

SEQ ID NO: 754696 - DNA, 75 bp, synthetic construct
  source 1..75: mol_type = other DNA
caatccaggagattgcagcacacacacttcgtcatcgtctgaacgaacttgcattggaatcggtaacgaaaaaag

SEQ ID NO: 754697 - DNA, 75 bp, synthetic construct
  source 1..75: mol_type = other DNA
acattgataatatggctcgtaatgtgcgcgatgcgtttaccggattgtatttctgtgcgtctgtaaataaacacg

SEQ ID NO: 754698 - DNA, 75 bp, synthetic construct
  source 1..75: mol_type = other DNA
tttaaaaaacaagaaagaaaaatcgccatacgcgggaaatatgtttgtttatgacaatctcatcagaatccgtgg

SEQ ID NO: 754699 - DNA, 75 bp, synthetic construct
  source 1..75: mol_type = other DNA
gcagggagacgtgatggaacaaaactgccgactggtgctgttcaaggccgaaatgattttggctatgctgggttt

SEQ ID NO: 754700 - DNA, 75 bp, synthetic construct
  source 1..75: mol_type = other DNA
tgcgcgacaaaacgagccagaaacgaaactgcttgaaccagtagcgcaacaggaaccggaaaaagtctgcaccgc

SEQ ID NO: 754701 - DNA, 75 bp, synthetic construct
  source 1..75: mol_type = other DNA
caatacaggaaatggccgctgatgtgattcgctcgcaactggcgcggaacccaatgatattagtagataaagtgt

SEQ ID NO: 754702 - DNA, 75 bp, synthetic construct
  source 1..75: mol_type = other DNA
ggtggcgcatgtcctcctaaaggagataaaccacatcattaccagtttaaagtatgggctctaaaaactgaaaag

SEQ ID NO: 754703 - DNA, 75 bp, synthetic construct
  source 1..75: mol_type = other DNA
ggtggagcatgtcctcccaaaggagataaaccccatcattaccagtttaaagtatgggctctaaaaactgataag

SEQ ID NO: 754704 - DNA, 75 bp, synthetic construct
  source 1..75: mol_type = other DNA
cggaaaagcgcgatatcacccgggaagtggttaaatcgctgaaattcgtcttaccggcagtggcggcggcgagtt

SEQ ID NO: 754705 - DNA, 75 bp, synthetic construct
  source 1..75: mol_type = other DNA
atcttaagagcgtggtgcgcttttgcgaaaaggtgaaaaaccataaaccggacgtcactctggtctggacgctgc

SEQ ID NO: 754706 - DNA, 75 bp, synthetic construct
  source 1..75: mol_type = other DNA
aaaacagctacggcaggcacaaagtgtgcaccggacggacttgtaggccgcaccagtacaggggccatactttcg

SEQ ID NO: 754707 - DNA, 75 bp, synthetic construct
  source 1..75: mol_type = other DNA
gtcagttgccggggctgggtggatttatcagcaaaaacggaacggcaacaggcgcattcggagcctggacagata

SEQ ID NO: 754708 - DNA, 75 bp, synthetic construct
  source 1..75: mol_type = other DNA
ggcgggcaggcggagtcctcagtggcggtgcagatagacgtttatgccgggactgtgacgcaggcgcgtcagata

SEQ ID NO: 754709 - DNA, 75 bp, synthetic construct
  source 1..75: mol_type = other DNA
tcgtctttccacaggtgagtatttacagcttgaaaaaacagcaacggctggcgcttcctgctcccctaacgggct

SEQ ID NO: 754710 - DNA, 75 bp, synthetic construct
  source 1..75: mol_type = other DNA
gcagatggtctgaaaacctggacagtgttaacgaccatcctcggttttaccggattcttaatcacctggtgcgtg

SEQ ID NO: 754711 - DNA, 75 bp, synthetic construct
  source 1..75: mol_type = other DNA
gtggggatctggcaaggcgtaagtagtatttccgacgcctacctgcaattcattaccgcctcttttagcgtgtat

SEQ ID NO: 754712 - DNA, 75 bp, synthetic construct
  source 1..75: mol_type = other DNA
cagcgatggtgcttggtttctccacgctgatggcgctgatttttgtgctggcagccgctccgatcagccagggat

SEQ ID NO: 754713 - DNA, 75 bp, synthetic construct
  source 1..75: mol_type = other DNA
gcgttcttgcgtactacgtcagttaccgtttgggcggttatgaaggggcgttgctgggtctggcgctgattcccg

SEQ ID NO: 754714 - DNA, 75 bp, synthetic construct
  source 1..75: mol_type = other DNA
atgttatctctccctgccggttcgcgtatctggctggttgccggtatcaccgacatgcgaaatggttttaacggc

SEQ ID NO: 754715 - DNA, 75 bp, synthetic construct
  source 1..75: mol_type = other DNA
cgtttacagaatgaagtgaatacattgcggagtaacagagaaagcgaagtaaaaaacgcagttcttgaagctctt

SEQ ID NO: 754716 - DNA, 75 bp, synthetic construct
  source 1..75: mol_type = other DNA
gccgcgtggtcggcacttcatcagcgatggtacttggcttctctacgctaatggcgctggtttttgtgctggcag

SEQ ID NO: 754717 - DNA, 75 bp, synthetic construct
  source 1..75: mol_type = other DNA
aaatggaaggcgcggaacatccgaacaatgagaatgctggtaacgatcagcatcacaccagcgatagtgaaactg

SEQ ID NO: 754718 - DNA, 75 bp, synthetic construct
  source 1..75: mol_type = other DNA
ccggcattgaatctgaagtgaaatacaccctgcagttctggctgctgagtaacggaaaggtcatgacggaaaaag

SEQ ID NO: 754719 - DNA, 75 bp, synthetic construct
  source 1..75: mol_type = other DNA
ggtgcaattcaggcaattaaagaagcgggcctgaaaccaggcaaagatatcctgacaggctctatcgacggcgta

SEQ ID NO: 754720 - DNA, 75 bp, synthetic construct
  source 1..75: mol_type = other DNA
ctgcggtctcggcagccatgtcgtctatggccctcgctgctcccttaaccgtaggattttcgcaggttggatcgg

SEQ ID NO: 754721 - DNA, 75 bp, synthetic construct
  source 1..75: mol_type = other DNA
aagatgaaatggttgggatcgtccggttcggtaaagaggattgcgtacgttcggcactttgccaacgtacgctgc

SEQ ID NO: 754722 - DNA, 75 bp, synthetic construct
  source 1..75: mol_type = other DNA
tctgcagacgaactgatgaatgtcaacaggcggtatggccctgagcgaactgcctggctgcagggttttatccgc

SEQ ID NO: 754723 - DNA, 75 bp, synthetic construct
  source 1..75: mol_type = other DNA
atagggaaggtggaaattgcgccgttcgcctatatgcgtggacgtacctttgaaaatgcagtcgtcattcttgac

SEQ ID NO: 754724 - DNA, 75 bp, synthetic construct
  source 1..75: mol_type = other DNA
ggcggcgctctccgctccgttttctgctgcgttacgcgaggggttaaatacctgccaggtggttttattgcacta

SEQ ID NO: 754725 - DNA, 75 bp, synthetic construct
  source 1..75: mol_type = other DNA
tctggaagaaaaagaggtcactcgcgtcggcggacatcaaccgattccggtggatgtgcgggtcatcagcgccac

SEQ ID NO: 754726 - DNA, 75 bp, synthetic construct
  source 1..75: mol_type = other DNA
cgctatttttaagcgtggaaccgatgccagatttaacgctgcaatttctgcagcgattattgccagaactggcca

SEQ ID NO: 754727 - DNA, 75 bp, synthetic construct
  source 1..75: mol_type = other DNA
cgcccataacgatgacatggtgattggcgcaattcaggcaattaaagaagcgggcctgaaaccgggcaaagatat

SEQ ID NO: 754728 - DNA, 75 bp, synthetic construct
  source 1..75: mol_type = other DNA
aagagattgcgattaccattttaagaccaaattttgttcatggcgaatcatttggcacgaacgaaaaattgagaa

SEQ ID NO: 754729 - DNA, 75 bp, synthetic construct
  source 1..75: mol_type = other DNA
gccggatttaacaccgcagtttttgcaacagctactgccggaattagtccacgagtcggcgaaaattaccgcctc

SEQ ID NO: 754730 - DNA, 75 bp, synthetic construct
  source 1..75: mol_type = other DNA
ctgctgatgcagtgaagtctgcgctgcgcactgaagaagttcgcggtacgctgaaagaatctatccgtaaaacgt

SEQ ID NO: 754731 - DNA, 75 bp, synthetic construct
  source 1..75: mol_type = other DNA
atgatggcggcttgccaggggctggcggggctttgtggggttattgtcgaaggcgggcatccggggctgcaaaat

SEQ ID NO: 754732 - DNA, 75 bp, synthetic construct
  source 1..75: mol_type = other DNA
ggcggttcggcggaaattagcgtcgatggttttgatgatgtcaccgacttactgcgtaaaacccttgttagttac

SEQ ID NO: 754733 - DNA, 75 bp, synthetic construct
  source 1..75: mol_type = other DNA
tgaacggcgtgtttgccaaaacgttcgatgacatcagcctggtgccaacctttgtgttaacgccactcacgtatt

SEQ ID NO: 754734 - DNA, 75 bp, synthetic construct
  source 1..75: mol_type = other DNA
ataagccacaccattatcagtttaaagtctgggcgcttaaaacggataaaattcctgttgattctcattccagtg

SEQ ID NO: 754735 - DNA, 75 bp, synthetic construct
  source 1..75: mol_type = other DNA
gtaattcctcgcgccggacataacgcgcaccgggaaaaccccgctggcgtcatcgcatgtctggcgcagattttg

SEQ ID NO: 754736 - DNA, 75 bp, synthetic construct
  source 1..75: mol_type = other DNA
gcggggctttgtgggattgttgtggaaggcggtcatccggggctgcaaaatgctgaacaacgagcagaacgtcag

SEQ ID NO: 754737 - DNA, 75 bp, synthetic construct
  source 1..75: mol_type = other DNA
ggtgaagattgatcgcgcgcaccagctggtggcgggcaaacggcagttatttcgcgagatgctggcgctgggctg

SEQ ID NO: 754738 - DNA, 75 bp, synthetic construct
  source 1..75: mol_type = other DNA
cagaagtggatgccattctggatgagctgcttggtgtacaggcagagccaccgactgaagcgggagataccaccg

SEQ ID NO: 754739 - DNA, 75 bp, synthetic construct
  source 1..75: mol_type = other DNA
agcgaacaaccggagacacaacccgggggtgaggaacaaccggctgatgttctgcagccggagccagcaaccatg

SEQ ID NO: 754740 - DNA, 75 bp, synthetic construct
  source 1..75: mol_type = other DNA
atgtcagaaattacatccctggtcactgctgaggcagtgaaggaagtcctgcgctctgaagaagtcctgagtgca

SEQ ID NO: 754741 - DNA, 75 bp, synthetic construct
  source 1..75: mol_type = other DNA
caccggggctggatgcgctgcttgcgggtgaaaaaccgactcagcgggtgcaatcatggttgattcctacaaccg

SEQ ID NO: 754742 - DNA, 75 bp, synthetic construct
  source 1..75: mol_type = other DNA
ggcgcaccggcagctccggagccggaaggcatcgcgggtgaggggagtgcttcagatggcggtgaacccacacct

SEQ ID NO: 754743 - DNA, 75 bp, synthetic construct
  source 1..75: mol_type = other DNA
cggcctgtattacaaccgccaccgctattatgacccgctgcaggggaggtatatcactcaggatccgattgggct

SEQ ID NO: 754744 - DNA, 75 bp, synthetic construct
  source 1..75: mol_type = other DNA
tacagcccggatgtggtgacgggactcatcacgcgcatcaccacgccggatggcagggcatcggcgttttactat

SEQ ID NO: 754745 - DNA, 75 bp, synthetic construct
  source 1..75: mol_type = other DNA
agccgttacggtcagttgctgagcttcaccgactgttccggttatgtaacccgttatgaccatgaccgcttcggg

SEQ ID NO: 754746 - DNA, 75 bp, synthetic construct
  source 1..75: mol_type = other DNA
cacaacggcgatatcacccgctaccgttatgataatccacacagtgacttaccctgcgcaacggacgatgccacc

SEQ ID NO: 754747 - DNA, 75 bp, synthetic construct
  source 1..75: mol_type = other DNA
ctgctctggcagcatgagaccagacatgcgtacaacgcgcaggggctggcgaaccgctgtataccggacagcctg

SEQ ID NO: 754748 - DNA, 75 bp, synthetic construct
  source 1..75: mol_type = other DNA
agaactgtttaaaagggaagtttaaagaggtaaggccgcgttattctgtattgcctgatatattcacacctataa

SEQ ID NO: 754749 - DNA, 75 bp, synthetic construct
  source 1..75: mol_type = other DNA
cagaatatctgactctataaaaattgaagggaaagaagcgttgcgatcactggttagccagactctaggaatagg

SEQ ID NO: 754750 - DNA, 75 bp, synthetic construct
  source 1..75: mol_type = other DNA
tatgctgcatgaggtcgggttgaatatcaaccatagtggtctgcatcgacattctgcatatattttacaaaacag

SEQ ID NO: 754751 - DNA, 75 bp, synthetic construct
  source 1..75: mol_type = other DNA
gctggaacgtggcaatgggcgcttccggcaccattaaagccgcccatgaagtgttgatggaaatgggcgagaaag

SEQ ID NO: 754752 - DNA, 75 bp, synthetic construct
  source 1..75: mol_type = other DNA
tcgaaagtcgctatctttacgacccgctgggccgcagggtggcaaaacgggtatggcgacgtgaacgggacctga

SEQ ID NO: 754753 - DNA, 75 bp, synthetic construct
  source 1..75: mol_type = other DNA
tctcagcgaaggccaccgggtgacggtgcattacgggtatgatgagaaaggccgcctgaccggtgagcgccagac

SEQ ID NO: 754754 - DNA, 75 bp, synthetic construct
  source 1..75: mol_type = other DNA
tcggccccggctggaaaatgcctgcggatatccgcttacagctgcgcgataacacactgatactcagtgataacg

SEQ ID NO: 754755 - DNA, 75 bp, synthetic construct
  source 1..75: mol_type = other DNA
ctggtgcgctatggctggacgccgcgcggcgaactggcggcagtgtatgaccgcagcaatacacaggtgcgcagc

SEQ ID NO: 754756 - DNA, 75 bp, synthetic construct
  source 1..75: mol_type = other DNA
gcgaatggaatctaactaaagcagctgaagtattaaaaattggtcgtacaacattatggcgcaaacttaaaatct

SEQ ID NO: 754757 - DNA, 75 bp, synthetic construct
  source 1..75: mol_type = other DNA
atgggggaggaaaagaagaagagtgaaattgcggaaagcgtctcgcaaaacaggctgcgacccgaacatggcagt

SEQ ID NO: 754758 - DNA, 75 bp, synthetic construct
  source 1..75: mol_type = other DNA
gcttgctatttattttaaaataaaatttattgaatattggtcgccttatttattgctttctgtattgctctattt

SEQ ID NO: 754759 - DNA, 75 bp, synthetic construct
  source 1..75: mol_type = other DNA
acgtctggcggaagatctgcgtttgctttacgtggcgctgacgcgttcggtttggcattgcagtctcggcgttgc

SEQ ID NO: 754760 - DNA, 75 bp, synthetic construct
  source 1..75: mol_type = other DNA
tgctggtggtcacctttaccgaggctgccacggcagaattgcgtggtcgtatccgtagcaatatccacgagttgc

SEQ ID NO: 754761 - DNA, 75 bp, synthetic construct
  source 1..75: mol_type = other DNA
gtttgactcgctatccgctggctgcccgccgctggagttcatgcaggtacgcggcatgttaaaaggctttattga

SEQ ID NO: 754762 - DNA, 75 bp, synthetic construct
  source 1..75: mol_type = other DNA
agaatcaactgttgaaatttcatacctagaggttgtagaaaatgggcacatttcaacagggcaattgataaatat

SEQ ID NO: 754763 - DNA, 75 bp, synthetic construct
  source 1..75: mol_type = other DNA
agggtatcggttcttccggtggcgtaaaacagattatcgctaataccgttgatttcggtgcctctgacgcgccgc

SEQ ID NO: 754764 - DNA, 75 bp, synthetic construct
  source 1..75: mol_type = other DNA
gggctaaacaggcgaacgacctggattacgccagcctgccggatagcgtagttgaacaggttcgcgctgcgtgga

SEQ ID NO: 754765 - DNA, 75 bp, synthetic construct
  source 1..75: mol_type = other DNA
atgttgacccgcaaaagtatcgatacagttctgctctctgttggtgctgagaagctctcacaacgagaatgggac

SEQ ID NO: 754766 - DNA, 75 bp, synthetic construct
  source 1..75: mol_type = other DNA
ttcagaaaattcaagatcgcggcattatcatctattcaaagtttagagcagcagaatttgatcaggatgacgttt

SEQ ID NO: 754767 - DNA, 75 bp, synthetic construct
  source 1..75: mol_type = other DNA
gaaaatcaggactacatagctatttcccaaaaacgggaaataggtcacggacgagggaaaaaggactaccacctc

SEQ ID NO: 754768 - DNA, 75 bp, synthetic construct
  source 1..75: mol_type = other DNA
ctactgcgatgggccgccatgctgcatgaggtcgggttgaatatcaaccacagcggtttgcatcgccactccgct

SEQ ID NO: 754769 - DNA, 75 bp, synthetic construct
  source 1..75: mol_type = other DNA
acgccagaaagagggcatagagctggctaaacggaaaggccggtatcagggccgaactgcagaccttctacttca

SEQ ID NO: 754770 - DNA, 75 bp, synthetic construct
  source 1..75: mol_type = other DNA
tgcagccagatgaggtagttattgcagaacatatagatcgtatcagccgtctaccgctcgatagtgcgctggcgt

SEQ ID NO: 754771 - DNA, 75 bp, synthetic construct
  source 1..75: mol_type = other DNA
atgaaaatggcgcggatatatttgcgggttagtacagacgaacaggatttgacccggcaaaatgatattattgac

SEQ ID NO: 754772 - DNA, 75 bp, synthetic construct
  source 1..75: mol_type = other DNA
gatcaacggcgaacaactggatgccgacccggacaccttttccgtcgtgcgctggatgcccggctcactcttgac

SEQ ID NO: 754773 - DNA, 75 bp, synthetic construct
  source 1..75: mol_type = other DNA
attatctttacgcaaatggtcagcgccttgatgatcctgacacctttacggtactggcacaaaaatcatgggatc

SEQ ID NO: 754774 - DNA, 75 bp, synthetic construct
  source 1..75: mol_type = other DNA
ggggtgattttgccgcagataaacacagtctctatttcgaaggcaagcgcaccgataacaatggcgggggaaatc

SEQ ID NO: 754775 - DNA, 75 bp, synthetic construct
  source 1..75: mol_type = other DNA
acgacaaaccggttatctggacagtatctgttacacgtctgttcgagctgtttcgtgatatcagccttgagtttg

SEQ ID NO: 754776 - DNA, 75 bp, synthetic construct
  source 1..75: mol_type = other DNA
gcgagtcggcgaagactcccattccaggcttgctgacagcacaacaggcactggagaaatttaatggcgataaga

SEQ ID NO: 754777 - DNA, 75 bp, synthetic construct
  source 1..75: mol_type = other DNA
ggcaaagagctggcggcccaggcgattcatcgggaatattttgcccgccacgatgcgcgacagggcaaaaagtcg

SEQ ID NO: 754778 - DNA, 75 bp, synthetic construct
  source 1..75: mol_type = other DNA
atgatgtttttacgtcaggaagactttgccacggtagtgcgctccactccgcttgtctctctcgactttattgtc

SEQ ID NO: 754779 - DNA, 75 bp, synthetic construct
  source 1..75: mol_type = other DNA
gagggggggaatgaaacgataccttcctttactgatgctggcggcatctttctgcctggtacagccgcttgttgc

SEQ ID NO: 754780 - DNA, 75 bp, synthetic construct
  source 1..75: mol_type = other DNA
tcattaaagtactacagaatattcttgagagctggcaggcacttgttgcggcctgcctgtccgacgcgttatctt

SEQ ID NO: 754781 - DNA, 75 bp, synthetic construct
  source 1..75: mol_type = other DNA
atgcactatcgcaatgtggtttgtttgttgtcttgttcgttgtttttatcgtcggcatggggatgtcggctttcc

SEQ ID NO: 754782 - DNA, 75 bp, synthetic construct
  source 1..75: mol_type = other DNA
gtccgcaggagtttgctgcggtcgatcttggttcaaacagttttcacatggtcatagcccgtgtggtagatggtg

SEQ ID NO: 754783 - DNA, 75 bp, synthetic construct
  source 1..75: mol_type = other DNA
cagaacaacctggcgtacaccaaactgatctccgctgatggtaaaccggttagtccgaccgaagaaaacttcgcc

SEQ ID NO: 754784 - DNA, 75 bp, synthetic construct
  source 1..75: mol_type = other DNA
aagtaagcagtcgcttacaacatcgcttgacggagatgggcgtccatctgctgttgaaatctcagttactggcgc

SEQ ID NO: 754785 - DNA, 75 bp, synthetic construct
  source 1..75: mol_type = other DNA
gtactgtatgaaatggaaggacgtttccgtcatcaggatgtgcgtagtcgcaccgccagcagcctcgccaaccag

SEQ ID NO: 754786 - DNA, 75 bp, synthetic construct
  source 1..75: mol_type = other DNA
cggtaatgaagaagcccgtctgatttttatgggcgtggaacatacccaaccggagaaaggtcgcaaactggttat

SEQ ID NO: 754787 - DNA, 75 bp, synthetic construct
  source 1..75: mol_type = other DNA
gtttacctggtctttccgaagagcggagaaccgtatttgtcccggggctggcaattttatgcggtgtgtttgatg

SEQ ID NO: 754788 - DNA, 75 bp, synthetic construct
  source 1..75: mol_type = other DNA
aagccaaagcgcagatgatcggcgtacgcgaagagacgctggcgcagcatggcgcggtgagtgaacccgtcgtgg

SEQ ID NO: 754789 - DNA, 75 bp, synthetic construct
  source 1..75: mol_type = other DNA
tattgtcttgttcgttgttcttatcatcggcatggggatgtcggcttgatgagccggaacataatatttaccaga

SEQ ID NO: 754790 - DNA, 75 bp, synthetic construct
  source 1..75: mol_type = other DNA
atgcactatcgcaatgtggtttgtttgttgtcttgttcgttattcttatccccggcatggggatgtcggctttcc

SEQ ID NO: 754791 - DNA, 75 bp, synthetic construct
  source 1..75: mol_type = other DNA
gccgggagtgcttcagcggcgaccgtgatgcggtgcgtcgtcaggcgacggcgtatgcattacagacgctgcgac

SEQ ID NO: 754792 - DNA, 75 bp, synthetic construct
  source 1..75: mol_type = other DNA
gccgggaatgcttcagtggcgaccgcgaagccgtgcgtcgtcaggcgacggcgtatgccttgcagacgctgtggc

SEQ ID NO: 754793 - DNA, 75 bp, synthetic construct
  source 1..75: mol_type = other DNA
tgccggcagttccgcctggtttgaacgcggatttgtcacctacagtaacgaagcgaaagcgcaaatgatcggtgt

SEQ ID NO: 754794 - DNA, 75 bp, synthetic construct
  source 1..75: mol_type = other DNA
ttgatgccctcaaagagaacgatgtttacatcactacgggcagctctctgcgctatgcgttgtggggcggactga

SEQ ID NO: 754795 - DNA, 75 bp, synthetic construct
  source 1..75: mol_type = other DNA
attgataagaactgccccaactggtcagctggatacattcgcaacgtcagatctgcattcaggcacgttcctgtc

SEQ ID NO: 754796 - DNA, 75 bp, synthetic construct
  source 1..75: mol_type = other DNA
aatgcagcaaaaggcgcagactggagcaaaaccttcgctcaggatctgaccaaccagaaaggcgaagatgcatgg

SEQ ID NO: 754797 - DNA, 75 bp, synthetic construct
  source 1..75: mol_type = other DNA
gtgacctttttctcacggaccaagcagcgcctgtggaccaaaggagaaacctccggtcacttcctgaatgtggtg

SEQ ID NO: 754798 - DNA, 75 bp, synthetic construct
  source 1..75: mol_type = other DNA
ctggagcgcaaacgctcaccgctcgagtccggtagtgcgatcgcttgtcagcgcgcgcattgcgcaaatgtgcct

SEQ ID NO: 754799 - DNA, 75 bp, synthetic construct
  source 1..75: mol_type = other DNA
gagactttgatatcctgatcaagctatcaggaatacatagcgagaaggcaattcttgctttgaaaaaatactatg

SEQ ID NO: 754800 - DNA, 75 bp, synthetic construct
  source 1..75: mol_type = other DNA
attatattaatctcagtgcgcaggaatttttgtcattttatgcccgtggaacgtcacaggaaaaagaaaatgtgc

SEQ ID NO: 754801 - DNA, 75 bp, synthetic construct
  source 1..75: mol_type = other DNA
attgaacgaccaggagcgaaaaaaagcagacgtgaatgacgctgatatatttttaatgttaaaagcgtttgtaga

SEQ ID NO: 754802 - DNA, 75 bp, synthetic construct
  source 1..75: mol_type = other DNA
atggcgtttgcgagggttcagccctagcccttcgcatgtatcaggacatggtgattgcggatccggggtgcggat

SEQ ID NO: 754803 - DNA, 75 bp, synthetic construct
  source 1..75: mol_type = other DNA
ccgatcacctctaccacgttcatactgatccacaaagatcagaagaaacctgagcagggcactgaagtgctgaag

SEQ ID NO: 754804 - DNA, 75 bp, synthetic construct
  source 1..75: mol_type = other DNA
agaaaaaaaacgtcagataaactgaatgaacgggctgcaaatattattattgaggcactaagtaaacactcctgt

SEQ ID NO: 754805 - DNA, 75 bp, synthetic construct
  source 1..75: mol_type = other DNA
ctgtttcacacctgacctctggcgcgttcgatctgaacggagatgattttttccgcttctggcagtcagataaca

SEQ ID NO: 754806 - DNA, 75 bp, synthetic construct
  source 1..75: mol_type = other DNA
ctgctggtattgttgcaggatcaggatctggatttaacaacggtgattgagaacctgcgtaaacgtcatcagtga

SEQ ID NO: 754807 - DNA, 75 bp, synthetic construct
  source 1..75: mol_type = other DNA
ggtaatgcctctgaaattatggcattagctggtatcgccaatggtggtcgcggtgtggattccaccgacgccgca

SEQ ID NO: 754808 - DNA, 75 bp, synthetic construct
  source 1..75: mol_type = other DNA
cctgttgtgcgttaccaggcgatatgctggaaaatgtcgcatctgcctgtcactggatgaaacaagccggagaac

SEQ ID NO: 754809 - DNA, 75 bp, synthetic construct
  source 1..75: mol_type = other DNA
atgcaagtcgacctgctgagttccgcgcaatctgcgcacgcgttacacctttttcaccaacattcccctcttgtg

SEQ ID NO: 754810 - DNA, 75 bp, synthetic construct
  source 1..75: mol_type = other DNA
ctatcaaaacacagccatctaagaacatcggggctaatatgaaaaaacgtgttaacactgaaaaatcaagtagtg

SEQ ID NO: 754811 - DNA, 75 bp, synthetic construct
  source 1..75: mol_type = other DNA
gtgcggccgccagaagcgaagggccgggcagttttatcccccatttccttgatgcgctctggcaactgacgcagg

SEQ ID NO: 754812 - DNA, 75 bp, synthetic construct
  source 1..75: mol_type = other DNA
tcaaacaccctggacgcttgatccggttgcggttggtgcactcgactatcgccgccgtttttgtctggaacttct

SEQ ID NO: 754813 - DNA, 75 bp, synthetic construct
  source 1..75: mol_type = other DNA
tcacgtaccaaaaaacgtttgtggaccaaaggcgaaacctccggccatttcctgaacgtggtgagcattacgccc

SEQ ID NO: 754814 - DNA, 75 bp, synthetic construct
  source 1..75: mol_type = other DNA
agcgactgtggaccaaaggcgaaacgtcgggcaatttcctcaacgtggtgagtattgccccggactgcgacaacg

SEQ ID NO: 754815 - DNA, 75 bp, synthetic construct
  source 1..75: mol_type = other DNA
actggaacaactgctcgccgaacgtaaatctgccgacccggaaacctcctacaccgccaaactgtatgccagcgg

SEQ ID NO: 754816 - DNA, 75 bp, synthetic construct
  source 1..75: mol_type = other DNA
gcgcagtcgccagaagcgaggggccaggcagttttgttccacatttccttgatgcgctctggcaattgacgcagg

SEQ ID NO: 754817 - DNA, 75 bp, synthetic construct
  source 1..75: mol_type = other DNA
atgttaacagaacaacaacgtcgcgaactggattgggaaaaaaccggcgggctgataccggtgattgtgcaacac

SEQ ID NO: 754818 - DNA, 75 bp, synthetic construct
  source 1..75: mol_type = other DNA
agacaaaaccctcgaaagcggcaaagtcactttcttctcgcgcactaaacagcgactgtggaccaaaggcgaaac

SEQ ID NO: 754819 - DNA, 75 bp, synthetic construct
  source 1..75: mol_type = other DNA
acaaatttactgctctgcgggcggtggaattgtcgccgatagccaggaagaagcggaatatcaggaaacttttga

SEQ ID NO: 754820 - DNA, 75 bp, synthetic construct
  source 1..75: mol_type = other DNA
ccaggaatggtgaacagtgtgaacacgctttttagccagactgatgacgcttttatgtttcgcgaaataccgttt

SEQ ID NO: 754821 - DNA, 75 bp, synthetic construct
  source 1..75: mol_type = other DNA
ccgcaacaggggatttacacaactcgccccaacgccgggttgattaccctgatggatgagatgtttgccggtatg

SEQ ID NO: 754822 - DNA, 75 bp, synthetic construct
  source 1..75: mol_type = other DNA
ctggcgtcgccactgctatcctctgccgcgtgaaattgctcaggtggtctttgaaacatggaaagggccgcaggc

SEQ ID NO: 754823 - DNA, 75 bp, synthetic construct
  source 1..75: mol_type = other DNA
tttgatgacatgctaagtcggctcgattccgcgctgcgtagcgaaagcggagaggcgctggcaacggcgatccgt

SEQ ID NO: 754824 - DNA, 75 bp, synthetic construct
  source 1..75: mol_type = other DNA
agcagtggcgtgacgcagtaggtgaactggatgcgctgattgaatcttccggtattgatcgccgcaagtttaacc

SEQ ID NO: 754825 - DNA, 75 bp, synthetic construct
  source 1..75: mol_type = other DNA
acaacccgacccaacgccgggttgattgacctgatggatgagatgtttgccggtatgaccctggaggaggcgtaa

SEQ ID NO: 754826 - DNA, 75 bp, synthetic construct
  source 1..75: mol_type = other DNA
ccggggacattcttgcacagtttgtttgaagacctcgattttacccagccggttgacccgaactgggtacaggaa

SEQ ID NO: 754827 - DNA, 75 bp, synthetic construct
  source 1..75: mol_type = other DNA
gctacaacgattgcccggcgataactggcgtgtcaccagctactccggcttgcagcagcgtggtcacggtatcgc

SEQ ID NO: 754828 - DNA, 75 bp, synthetic construct
  source 1..75: mol_type = other DNA
gcgatgcaggcacaccgctatgatttgcaatatcagctttataccctggcgctacaccgttatctgcgccatcgc

SEQ ID NO: 754829 - DNA, 75 bp, synthetic construct
  source 1..75: mol_type = other DNA
gggacgttcttgcacagtttgtttgaagacctggattttacccagccggttgacccgaactgggtgcgggaaaaa

SEQ ID NO: 754830 - DNA, 75 bp, synthetic construct
  source 1..75: mol_type = other DNA
cgttgtgcgatgaggatattgcctggcaaacggcacaaacgggtgataaccagccctggcagtttaatgatgttt

SEQ ID NO: 754831 - DNA, 75 bp, synthetic construct
  source 1..75: mol_type = other DNA
gctacaagaagccggaacgcagctggaaagtgaacatgcgctggtacgctggttatcgcaacatatcctcgagcc

SEQ ID NO: 754832 - DNA, 75 bp, synthetic construct
  source 1..75: mol_type = other DNA
tgttacacgctatcgtaacgaggctttcaagaaagggtatggtgatacaagggaattgttcgttgaactcgctaa

SEQ ID NO: 754833 - DNA, 75 bp, synthetic construct
  source 1..75: mol_type = other DNA
gttatcaggtcaatctcgcccaacgttttcaggctacctattctggcgatgaatggcaggcgttcgtaaaactca

SEQ ID NO: 754834 - DNA, 75 bp, synthetic construct
  source 1..75: mol_type = other DNA
tgtttggctacgatctgggccgccgttttgagtcactgccagaaattgcggaacaagatatcgttctgccggata

SEQ ID NO: 754835 - DNA, 75 bp, synthetic construct
  source 1..75: mol_type = other DNA
ctttcggtaatgaaaccgtagtgtgtgaaggagaaaccagctcaacaactaccgacgatccgctacaggtgctcc

SEQ ID NO: 754836 - DNA, 75 bp, synthetic construct
  source 1..75: mol_type = other DNA
ggtattgtcgccgatagccaggaagaggcggaatatcaggaaacttttgataaagttaatcgtattctgaagcaa

SEQ ID NO: 754837 - DNA, 75 bp, synthetic construct
  source 1..75: mol_type = other DNA
tggcagtgggtatctacgactgggcgctggttgtcgaccaccagcgtcaaacagtttctttgctgagtcataatg

SEQ ID NO: 754838 - DNA, 75 bp, synthetic construct
  source 1..75: mol_type = other DNA
agcaggcgctggagcgtgcaaacattcacccgtcgcataacgatgatttgccatttcagggtggcgcgctgggtt

SEQ ID NO: 754839 - DNA, 75 bp, synthetic construct
  source 1..75: mol_type = other DNA
ataaagaaacagctgaaatattttttgaaaaaatagacggagagaaaagattagcaagtgagagagatgctacag

SEQ ID NO: 754840 - DNA, 75 bp, synthetic construct
  source 1..75: mol_type = other DNA
ttgtaccggtcatgaatatcgtttaccagttaagcacaagcatttaaaaacagatataaccacttctggctttag

SEQ ID NO: 754841 - DNA, 75 bp, synthetic construct
  source 1..75: mol_type = other DNA
ttgcagtggaagccgatccgagaagtgttgaaacagacaagggatagtatggctgtcacaatgccacgtaacata

SEQ ID NO: 754842 - DNA, 75 bp, synthetic construct
  source 1..75: mol_type = other DNA
gcataatcgctttgatattgtggtggcagatcccgtttgtaccttaaccactcatggtgatgaaaccgtcgtttg

SEQ ID NO: 754843 - DNA, 75 bp, synthetic construct
  source 1..75: mol_type = other DNA
aaatggacagcctttcgaccaggaacgacacagggaaataataaaaatgcttgaatatgcagcaaaatcgtttga

SEQ ID NO: 754844 - DNA, 75 bp, synthetic construct
  source 1..75: mol_type = other DNA
ttagcaagtgagagagatgctacagaaacagtctataacctcttcgggcaaccaacatggaaaaacttttatctt

SEQ ID NO: 754845 - DNA, 75 bp, synthetic construct
  source 1..75: mol_type = other DNA
atctggcgcatcttgcgggagggcaggcgtatccgtatgtggttcccctgcaggatggcagaccctctgtatcgt

SEQ ID NO: 754846 - DNA, 75 bp, synthetic construct
  source 1..75: mol_type = other DNA
ctaacagtcagcacatcaagcacatcattaatcaacatcccaatacgttatttatcgtttttatggcaattgcca

SEQ ID NO: 754847 - DNA, 75 bp, synthetic construct
  source 1..75: mol_type = other DNA
atgccatcacgaatcccacgcgcctgtcgtaagcgtggatgtgcagatacaaccacagacagttctggttactgt

SEQ ID NO: 754848 - DNA, 75 bp, synthetic construct
  source 1..75: mol_type = other DNA
tgatgccgacagtaatttgcagagtctgtgctggccgtgtcataaggcgaagacggcccgtgaacggttgaagta

SEQ ID NO: 754849 - DNA, 75 bp, synthetic construct
  source 1..75: mol_type = other DNA
atgccgccacgaatcccaaaagcctgccgtgttcgcggttgccgccataccaccacagctccttccggctattgc

SEQ ID NO: 754850 - DNA, 75 bp, synthetic construct
  source 1..75: mol_type = other DNA
gatgccgacagcaatctgcagagcctgtgctggccgtgccataaggcgaagacggcccgtgaacggctaaagtga

SEQ ID NO: 754851 - DNA, 75 bp, synthetic construct
  source 1..75: mol_type = other DNA
gccgtgttcgcggctgccaccatacgacgactgacccgtcaggctattgcgaaagccacaaaagcgaaggctgga

SEQ ID NO: 754852 - DNA, 75 bp, synthetic construct
  source 1..75: mol_type = other DNA
tcaagcgtgacaaaggcctgtgtcagttgtgtttgcgtgccggtgtggtgcgcgaggcgaaaaccgttgaccaca

SEQ ID NO: 754853 - DNA, 75 bp, synthetic construct
  source 1..75: mol_type = other DNA
tcatcaacgcggttatggttcgaagtgggacgttatccgcgcgcgcgtgctgaagcgtgacaaaggtttatgtca

SEQ ID NO: 754854 - DNA, 75 bp, synthetic construct
  source 1..75: mol_type = other DNA
gtcgtaagcgaggctgcgcaggcacaacaacagacagctctggctactgtggtaaacatcgtggtgaaggctggg

SEQ ID NO: 754855 - DNA, 75 bp, synthetic construct
  source 1..75: mol_type = other DNA
tcatcagcgcggttatggttcgaagtgggacagtatccgcgcgggtgtcctgaagcgtgacaaaggcctgtgtca

SEQ ID NO: 754856 - DNA, 75 bp, synthetic construct
  source 1..75: mol_type = other DNA
tcatccctaaagcgcatggcggctctgatgccgaccgtaatctgcagagtctgtgctggccgtgtcataaggcga

SEQ ID NO: 754857 - DNA, 75 bp, synthetic construct
  source 1..75: mol_type = other DNA
gttatgtctgcgtgtcggtgtggtgcgtgaggcgaaaaccgttgaccacatcatccctaaagcacatggcggcac

SEQ ID NO: 754858 - DNA, 75 bp, synthetic construct
  source 1..75: mol_type = other DNA
tcatcagcgcggttatggttctaagtgggatgttatccgcgcgcgtgtcctgaagcgtgacaaaggtctgtgtca

SEQ ID NO: 754859 - DNA, 75 bp, synthetic construct
  source 1..75: mol_type = other DNA
accgtctgatgtcgttaattattttgaggaaaaggtgataaaagttggaattgcggatgcatgggctgcattagg

SEQ ID NO: 754860 - DNA, 75 bp, synthetic construct
  source 1..75: mol_type = other DNA
actctcactggcagttaacgccgacagtctggcaacctggttgcttccggcgctggcccctgtgctggcagactc

SEQ ID NO: 754861 - DNA, 75 bp, synthetic construct
  source 1..75: mol_type = other DNA
gctttcactggcggtcaacgcagacagtctggcaacctggctgctaccggcgctggctccggtgctggctgattc

SEQ ID NO: 754862 - DNA, 75 bp, synthetic construct
  source 1..75: mol_type = other DNA
cgatatgagaaatggcttcaacggcccggctgcgaaagtacaaacggcgctgaaagacgatcccatgtccggcca

SEQ ID NO: 754863 - DNA, 75 bp, synthetic construct
  source 1..75: mol_type = other DNA
ggccgcagcggcagtcaggttaaactgctgtggtccaccggtgacgggctgtgcctcctgaccaaacggctggag

SEQ ID NO: 754864 - DNA, 75 bp, synthetic construct
  source 1..75: mol_type = other DNA
ccaccagcgtggctatggctcaaaatggacggtgattcgagcccgtattctgaagcgcgataaaggtctgtgtca

SEQ ID NO: 754865 - DNA, 75 bp, synthetic construct
  source 1..75: mol_type = other DNA
gatgccgacagtaatctgcagagtctgtgctggccgtgtcataaggcgaagacggcccgtgaacggttaaagtga

SEQ ID NO: 754866 - DNA, 75 bp, synthetic construct
  source 1..75: mol_type = other DNA
tgggacagtatccgcgcgcgtgtcctgaagcgtgacaaaggcctgtgtcagttatgtctgcgttctggtgtggtg

SEQ ID NO: 754867 - DNA, 75 bp, synthetic construct
  source 1..75: mol_type = other DNA
aggcggcaatgtgccgtcagacccggcgctggcggcctgtatcgccattcctatcgccgttaaggccaatatgga

SEQ ID NO: 754868 - DNA, 75 bp, synthetic construct
  source 1..75: mol_type = other DNA
gaatgacaccgccaacaacctgaccagcatgcaggacaacaccgaagtggctatcggcaacatcatggataccga

SEQ ID NO: 754869 - DNA, 75 bp, synthetic construct
  source 1..75: mol_type = other DNA
tgggactgtatccgcgcgcgtgtcctgaagcgtgacaaaggcctgtgtcagttatgtctgcgtgctggtgtggtg

SEQ ID NO: 754870 - DNA, 75 bp, synthetic construct
  source 1..75: mol_type = other DNA
tgatgctgactgcaatctgcagagtttgtgctggccgtgtcataaggcgaagacggcccgtgaacggctaaagtg

SEQ ID NO: 754871 - DNA, 75 bp, synthetic construct
  source 1..75: mol_type = other DNA
ttgccgtttttttccttatcccgatattttgtttccgcgaagcatggaaaggctggcgcgcaggcgcgattgata

SEQ ID NO: 754872 - DNA, 75 bp, synthetic construct
  source 1..75: mol_type = other DNA
cgcgtttgaccatcttgacgatatgcaccaggcctttttgcagcaaatttcgatctgcctcctggcagcgtaccc

SEQ ID NO: 754873 - DNA, 75 bp, synthetic construct
  source 1..75: mol_type = other DNA
gcggttaatacaatgttgggtaacacaaaaaatactttaactggtctgctggataaagcaagagcgaagtatcct

SEQ ID NO: 754874 - DNA, 75 bp, synthetic construct
  source 1..75: mol_type = other DNA
gccattgctggacaggatattgaccttgttgccaatgtaaaaaacagcacctgcaaaagcggaatcagtaaccag

SEQ ID NO: 754875 - DNA, 75 bp, synthetic construct
  source 1..75: mol_type = other DNA
tagcacccgaatgcaaaaaatcgatcctgcattgagtgttacatctggtcaacttatgagccatgtgttagtgga

SEQ ID NO: 754876 - DNA, 75 bp, synthetic construct
  source 1..75: mol_type = other DNA
cccgctctcttctttgcttatatagtggcgtatagcggcttcggtattttatccatcggtatgattatttatctt

SEQ ID NO: 754877 - DNA, 75 bp, synthetic construct
  source 1..75: mol_type = other DNA
acccgccacaaaatggttaagctgaaaccgtttatggattacatcgacatgcgcctggcagagaatgtctggaat

SEQ ID NO: 754878 - DNA, 75 bp, synthetic construct
  source 1..75: mol_type = other DNA
ggttaatgaaaagcagttgaaaacacggaatatcagatacgaaaaaatctacgttcatgcaacagatcatgcaac

SEQ ID NO: 754879 - DNA, 75 bp, synthetic construct
  source 1..75: mol_type = other DNA
cgctgcttagtggagataacgcgacctggcttgaagagtactaccagacctggttgcgtacgccggaacaactcc

SEQ ID NO: 754880 - DNA, 75 bp, synthetic construct
  source 1..75: mol_type = other DNA
gttctctggttcaaatgtaactggtggtcaatctgatgaactagggacttctggtgaaactggtacagctatcaa

SEQ ID NO: 754881 - DNA, 75 bp, synthetic construct
  source 1..75: mol_type = other DNA
actatcgactttggccagatttccaaaacgcatttgactaatgacggtacatcccagcacaaaaatgtagatatc

SEQ ID NO: 754882 - DNA, 75 bp, synthetic construct
  source 1..75: mol_type = other DNA
tatttccctaacggcgtaacgcgttcggcattactgaaagcgccagtggtcgcgtttgaccatcttgacgatatg

SEQ ID NO: 754883 - DNA, 75 bp, synthetic construct
  source 1..75: mol_type = other DNA
ctattcaggacccggcaaataccttcaacgttctcggcgccactggtagctcacgttccgtttatccggtcatgt

SEQ ID NO: 754884 - DNA, 75 bp, synthetic construct
  source 1..75: mol_type = other DNA
gccgtgttcgcggctgccactctacaaccacagacccgtcaggctattgcgaaagccacaaaggcgaaggctgga

SEQ ID NO: 754885 - DNA, 75 bp, synthetic construct
  source 1..75: mol_type = other DNA
gttgtgcctgcgtgccggtgtggtgcgtgaagcgaaaaccgttgatcacatcatccctaaagcgcatggcggctc

SEQ ID NO: 754886 - DNA, 75 bp, synthetic construct
  source 1..75: mol_type = other DNA
tgccaatgaagacaacgctggggctaaaaatgttggggtagttatattctccattcaggacccggcaaatacctt

SEQ ID NO: 754887 - DNA, 75 bp, synthetic construct
  source 1..75: mol_type = other DNA
atgccaccacgaaccccaaaagcctgccgcgttcgcggctgccgccaaaccaccactgacccgtcaggctactgc

SEQ ID NO: 754888 - DNA, 75 bp, synthetic construct
  source 1..75: mol_type = other DNA
gccgtgttcgcggctgtcgttctaccactacagatccgtcaggctactgcgaaaatcataaaggtgagggctgga

SEQ ID NO: 754889 - DNA, 75 bp, synthetic construct
  source 1..75: mol_type = other DNA
tcaggcagacaccacggggaccgcaggtgtttctggtggtactgaactgaccgcatctggctcggctaaccagat

SEQ ID NO: 754890 - DNA, 75 bp, synthetic construct
  source 1..75: mol_type = other DNA
gtatgtcgctggcgctgttcaccgaaatgacgccgccgcccaatacggaaggcggtggtctggcgaacgccctgg

SEQ ID NO: 754891 - DNA, 75 bp, synthetic construct
  source 1..75: mol_type = other DNA
gaatgtgttaaatcagttacatattgattttcgcgcacttagtggcgtaatggcgacaggttccagtcaaatatt

SEQ ID NO: 754892 - DNA, 75 bp, synthetic construct
  source 1..75: mol_type = other DNA
tggcgacaggttccagtcaaatattcgctaatgaagacaacgccggggctaaaaatgttggggtagttatatttt

SEQ ID NO: 754893 - DNA, 75 bp, synthetic construct
  source 1..75: mol_type = other DNA
atgcatcccactcaacgtaagctgatgaagagaataattctgtttctgtcactacagtttcccattacctatcca

SEQ ID NO: 754894 - DNA, 75 bp, synthetic construct
  source 1..75: mol_type = other DNA
gcccttgatcaccatgcacgataagaacacctttaaagtgcgtgatgacttcactctggaatggagtggcccgaa

SEQ ID NO: 754895 - DNA, 75 bp, synthetic construct
  source 1..75: mol_type = other DNA
cagccgctcggtaacaactctggaaagtagtggtccgggctggaagttattgatggaacatcatctggatcgggg

SEQ ID NO: 754896 - DNA, 75 bp, synthetic construct
  source 1..75: mol_type = other DNA
tttgaagcacaaaaaggcaaatacaccgtacacatcaaacaaaagaacggccctaagtgctgtgtgggtgatatt

SEQ ID NO: 754897 - DNA, 75 bp, synthetic construct
  source 1..75: mol_type = other DNA
gatgctgaggaaggaactcctgaatgggatgcggcagcgcaggaatacagctggtttcaggactggatggaagag

SEQ ID NO: 754898 - DNA, 75 bp, synthetic construct
  source 1..75: mol_type = other DNA
ggtgaaaggcgatctggcacagaaaataagcggcgcgctgggtatcagcgtacagggcgatattgttttacagag

SEQ ID NO: 754899 - DNA, 75 bp, synthetic construct
  source 1..75: mol_type = other DNA
cgatacatggcgctgtcagggcaaaatgcaaccaccacactcggtcagtatggttatgcgtgtctgtttgtgcgc

SEQ ID NO: 754900 - DNA, 75 bp, synthetic construct
  source 1..75: mol_type = other DNA
ggcaggtaaacaaccgctgaacgacgtgctgatggcaatcagtgagctgacgcaacgggcagataaccttctgtg

SEQ ID NO: 754901 - DNA, 75 bp, synthetic construct
  source 1..75: mol_type = other DNA
gtggtcaccctctgataacaatggttcagactcagcgcgtaaattcaaaacgctgctgtactacaaccagtatta

SEQ ID NO: 754902 - DNA, 75 bp, synthetic construct
  source 1..75: mol_type = other DNA
agaataagctgcactggcatctggacgtggtaatgaataaagacgacttcaaaataataagaggaaatgcagcat

SEQ ID NO: 754903 - DNA, 75 bp, synthetic construct
  source 1..75: mol_type = other DNA
atggagaataagctgcactggcgtctggacgtggtaatgaatgaagacgacagcaaaataagaagaggaaacgca

SEQ ID NO: 754904 - DNA, 75 bp, synthetic construct
  source 1..75: mol_type = other DNA
aaggtatccagggcagggttaagacgtaagatgcgaaaagcagccatggacagaaactacctgacgtcagtcctt

SEQ ID NO: 754905 - DNA, 75 bp, synthetic construct
  source 1..75: mol_type = other DNA
ggcgataccgcgggtgggccaggaggtgattgttgattttctgaacggggacccggaccagccgctggtcatggg

SEQ ID NO: 754906 - DNA, 75 bp, synthetic construct
  source 1..75: mol_type = other DNA
caaagcaaaccgaaggtggacgggccacagagcgccattgtcaccggtcccgcaggagaggaaatcttctgcgac

SEQ ID NO: 754907 - DNA, 75 bp, synthetic construct
  source 1..75: mol_type = other DNA
agccgataatcatggggcggacgtaccatgaggacaaccgttcgccggggagtctgccggggacgaagacgcaga

SEQ ID NO: 754908 - DNA, 75 bp, synthetic construct
  source 1..75: mol_type = other DNA
gcgcgaaacagcacagggacgaggcgcaacggatagttgatgacctgaagggaaccaacgccagcacgacgcaaa

SEQ ID NO: 754909 - DNA, 75 bp, synthetic construct
  source 1..75: mol_type = other DNA
gaacgcggcatttgtccgcaaactgctcgccgcactggttgactcgtcaccggaaaccctggacacactgaacga

SEQ ID NO: 754910 - DNA, 75 bp, synthetic construct
  source 1..75: mol_type = other DNA
tgctggttggcacaacgaaatttaacggcatcattgatgtaatgtggtcgccctttgataacgatgagtcggaca

SEQ ID NO: 754911 - DNA, 75 bp, synthetic construct
  source 1..75: mol_type = other DNA
catgaacgcgctggcgggtaaacaaccactcagcgacgtgttaaccgcaatcagtaatctggaagaacgggcaga

SEQ ID NO: 754912 - DNA, 75 bp, synthetic construct
  source 1..75: mol_type = other DNA
gcagccggaagcgccagccagtataaggaagcagcatcttcggctgcgaccagtgcagaaaatgcggcaaatgtt

SEQ ID NO: 754913 - DNA, 75 bp, synthetic construct
  source 1..75: mol_type = other DNA
accgatatccgtgaccgcacacccggcaggctgtcgctaccgggcgcttttggctttggtaaggcattcagtaac

SEQ ID NO: 754914 - DNA, 75 bp, synthetic construct
  source 1..75: mol_type = other DNA
gtgataactttaaagcaaaagcaattccatgcagcaacaaggctcgctcattactggcacgaaacacgcctgaat

SEQ ID NO: 754915 - DNA, 75 bp, synthetic construct
  source 1..75: mol_type = other DNA
acgccacaactgggcaatgcagcacaaaaggatgcgcaggagaatatttacgaccgcaccgaaggccgtctggcg

SEQ ID NO: 754916 - DNA, 75 bp, synthetic construct
  source 1..75: mol_type = other DNA
tcagtaatctggaagagcgagccgataaccttctgtgctttaatcaggacgggaatgcttcactgtctccgctgt

SEQ ID NO: 754917 - DNA, 75 bp, synthetic construct
  source 1..75: mol_type = other DNA
gcgctgcctggtgcatttggttacggaatgacggacgccggagcaagttcaattattgcccgcgatatggcgacc

SEQ ID NO: 754918 - DNA, 75 bp, synthetic construct
  source 1..75: mol_type = other DNA
cgaccgcaccgaaggccgtctggcgattcccggcatgtttggattcgggaaagtattttccagcggcgacaggac

SEQ ID NO: 754919 - DNA, 75 bp, synthetic construct
  source 1..75: mol_type = other DNA
aacaacttccggggataaagaaatcaaaattggcctgggtgatgtggtgcaggggtcacaactgggcggagttaa

SEQ ID NO: 754920 - DNA, 75 bp, synthetic construct
  source 1..75: mol_type = other DNA
gcattcactatatgcagtaccggtacaacgacagcgataacagctggaacatgtcatcgcgggtagttgtctacg

SEQ ID NO: 754921 - DNA, 75 bp, synthetic construct
  source 1..75: mol_type = other DNA
ctcgttgccagtccgttcaggtttaccgtcacgagaagaccccaaaaggacatgagcgattccgctgccgtgatt

SEQ ID NO: 754922 - DNA, 75 bp, synthetic construct
  source 1..75: mol_type = other DNA
acgcaggcgcagctggcgatgctgctggaaggtatcgactggcgacagcccaagcggctgctgacctccctgacc

SEQ ID NO: 754923 - DNA, 75 bp, synthetic construct
  source 1..75: mol_type = other DNA
ccggctgtaggacaaggtgcggtgggcattgaatgccgccttaatgatacgcgcacccgcgagcttcttgccgcg

SEQ ID NO: 754924 - DNA, 75 bp, synthetic construct
  source 1..75: mol_type = other DNA
atgttttaagaattgccacacgccaaagcccacttgcactctggcaggcacactatgtcaaagacaagttgatgg

SEQ ID NO: 754925 - DNA, 75 bp, synthetic construct
  source 1..75: mol_type = other DNA
ccgggatcgaaattgcgccagaggccattgcctgtgcaaagcagtcagccgctgaactgggcttaacgcgtttgc

SEQ ID NO: 754926 - DNA, 75 bp, synthetic construct
  source 1..75: mol_type = other DNA
ttaaacatatgtgggatctgttctgcggtgtggggggctttggtttacactgcgcgacgcctgacatgcagttaa

SEQ ID NO: 754927 - DNA, 75 bp, synthetic construct
  source 1..75: mol_type = other DNA
gtcgctgtcgttcctgtcagtggataacgcagccgattccagagcaactctccgctaaaaccgccgatcttaaaa

SEQ ID NO: 754928 - DNA, 75 bp, synthetic construct
  source 1..75: mol_type = other DNA
ggccatgttttcattttccggggccgcagcggcagtcaggttaaactgctgtggtccaccggtgacggactgtgc

SEQ ID NO: 754929 - DNA, 75 bp, synthetic construct
  source 1..75: mol_type = other DNA
aagtgttccttacgcaggcgcaactggcgatgctgctggagggtatagtctggatgcaaccgggaaggtcgaaaa

SEQ ID NO: 754930 - DNA, 75 bp, synthetic construct
  source 1..75: mol_type = other DNA
aaatttggctggttgccggtatcaccgatatgagaaatggcttcaacggcccggctgcgaaagtacaaacggcgc

SEQ ID NO: 754931 - DNA, 75 bp, synthetic construct
  source 1..75: mol_type = other DNA
gtgaacgccgcggtgcgccgcaagatgccgaacaaatggggatttcgctggcagaagagctactgaataacggcg

SEQ ID NO: 754932 - DNA, 75 bp, synthetic construct
  source 1..75: mol_type = other DNA
cgtccagcttacgccgccagtgccagttggctgaacgccgcccggatctgattattcgttcattgcgcggcaacg

SEQ ID NO: 754933 - DNA, 75 bp, synthetic construct
  source 1..75: mol_type = other DNA
cgcggcgatgtgattcttgatacgccgctggcgaaagtaggcggaaaaggcttatttgtgaaagagctggaagtc

SEQ ID NO: 754934 - DNA, 75 bp, synthetic construct
  source 1..75: mol_type = other DNA
cgcgtcgcggcattggaaagccactgtgtgactatctctcaacgatggcaccgcgttttattatttactccagtt

SEQ ID NO: 754935 - DNA, 75 bp, synthetic construct
  source 1..75: mol_type = other DNA
gttaaagagcagatcaccgtaatggctttcaacggagccggaattcttgataccgccagaacactgaaggtcggc

SEQ ID NO: 754936 - DNA, 75 bp, synthetic construct
  source 1..75: mol_type = other DNA
ttaatggtgccggggttcgcgataccgccaggacactgaaaattggtagtaacaccgtcatccggactttaaaaa

SEQ ID NO: 754937 - DNA, 75 bp, synthetic construct
  source 1..75: mol_type = other DNA
cgtgacagacttcgctgccgtgacagacttcgctgccgtgacagacttcgctgccgtgacagacttcgctgccgt

SEQ ID NO: 754938 - DNA, 75 bp, synthetic construct
  source 1..75: mol_type = other DNA
gataccgcaaggacactcaaaattggaataaataccgtcatccgcactttaaaaaactcgcgccaaagagaataa

SEQ ID NO: 754939 - DNA, 75 bp, synthetic construct
  source 1..75: mol_type = other DNA
cccgttgtcagtctgctcaggtttaccgccatggtcagaaccctaaaggccgtgcccggtttcgctgccgtgact

SEQ ID NO: 754940 - DNA, 75 bp, synthetic construct
  source 1..75: mol_type = other DNA
ctttcaacggagccggaattcttgataccgccagaacactgaaggtcggcgtcaacaccgttatccggactttaa

SEQ ID NO: 754941 - DNA, 75 bp, synthetic construct
  source 1..75: mol_type = other DNA
gaacgggtacagctttttgatatgttcccgcacaccgcgcactatgaagtgctgacgctgctggtaaaaatgtaa

SEQ ID NO: 754942 - DNA, 75 bp, synthetic construct
  source 1..75: mol_type = other DNA
gtcgctgtcgttcctgtcagtggataacccggtcgattccagaacaactttccgctaaaaccgccgatcttaaaa

SEQ ID NO: 754943 - DNA, 75 bp, synthetic construct
  source 1..75: mol_type = other DNA
atcgaacgggtacagctttttgatatgttcccgcataccgcgcattacgaagtgctgacactgctggtgaagcaa

SEQ ID NO: 754944 - DNA, 75 bp, synthetic construct
  source 1..75: mol_type = other DNA
gttaaggagcagatcgttgaaatggcacataacggcgcagggggccgtgataccgccaggacactgaaaatcggc

SEQ ID NO: 754945 - DNA, 75 bp, synthetic construct
  source 1..75: mol_type = other DNA
atggccagcgttaatattcattgtccccgttgtcagtcagctcaggtttaccgccacggtcagaaccctaaaggc

SEQ ID NO: 754946 - DNA, 75 bp, synthetic construct
  source 1..75: mol_type = other DNA
ggggccgcagcggcagtcaggttaaactgctgtggtccaccggtgacgggctgtgcctcctgaccaaacggctgg

SEQ ID NO: 754947 - DNA, 75 bp, synthetic construct
  source 1..75: mol_type = other DNA
gcgcattgcagattgcagagcgaagcattgccaacgccgggaggatgtcggttagcgtgctgcgaaatcctgcat

SEQ ID NO: 754948 - DNA, 75 bp, synthetic construct
  source 1..75: mol_type = other DNA
tcgttgatttctacaagctctatatttcctgatggctctccgagatttgaggggaaaaccatatttattgatgtt

SEQ ID NO: 754949 - DNA, 75 bp, synthetic construct
  source 1..75: mol_type = other DNA
agaagcgaccaaacaaacgcccgacaaacgcagatttgcgtgattcaggaagcattgaacaggacgcagactcaa

SEQ ID NO: 754950 - DNA, 75 bp, synthetic construct
  source 1..75: mol_type = other DNA
ccaaaaacatctgaactggtttctgctgaacccgattttgaggcgctgaacaatgggaagaccaagaaaaaataa

SEQ ID NO: 754951 - DNA, 75 bp, synthetic construct
  source 1..75: mol_type = other DNA
ttatcggtggcctgctgattggtggattaacaccaaccgccagtgacgttctggcaacgctggagccggaagcgt

SEQ ID NO: 754952 - DNA, 75 bp, synthetic construct
  source 1..75: mol_type = other DNA
ccatcagaaagccccgtgacgaggttaaacctgtacggttaggggaaatcatcactgactacactgacacgcttg

SEQ ID NO: 754953 - DNA, 75 bp, synthetic construct
  source 1..75: mol_type = other DNA
ctggcatcaaaagttcagaacgtcctgaaggatgacccgttctccggacacctgtccatcttccgcggacgccgg

SEQ ID NO: 754954 - DNA, 75 bp, synthetic construct
  source 1..75: mol_type = other DNA
gcaaggtgcaccttactccggcccagttatccatgcttcttgagggcatcgactggaaatacccgaaacgaacgg

SEQ ID NO: 754955 - DNA, 75 bp, synthetic construct
  source 1..75: mol_type = other DNA
ttcgtctggccggtcacccgcgatggaaaggttcaccttactccggctcagttgtccatgcttcttgagggcatc

SEQ ID NO: 754956 - DNA, 75 bp, synthetic construct
  source 1..75: mol_type = other DNA
cccaggtgtccggcggtgctgccggctgggtgggtgagggtaaggcaaaacccctgacgaagtttgattttgaat

SEQ ID NO: 754957 - DNA, 75 bp, synthetic construct
  source 1..75: mol_type = other DNA
gtgaaatcagtgaggcctcttccagtgtttcatcagcacaaacaatggaggttctcgaccttgtgactgacaaca

SEQ ID NO: 754958 - DNA, 75 bp, synthetic construct
  source 1..75: mol_type = other DNA
taaccacgcaaacaggcgaaaccttcacgggcaagatgtcacgacgtcagcctgaactggtaaacggctttgtgc

SEQ ID NO: 754959 - DNA, 75 bp, synthetic construct
  source 1..75: mol_type = other DNA
gtcggaagagtgggggttgtttcaggcaaacagatttcaaacgagaaatttgattttggattccatttgggaagt

SEQ ID NO: 754960 - DNA, 75 bp, synthetic construct
  source 1..75: mol_type = other DNA
taaccttaaggattcggtttctcagggggcgggttccctgacgttccgtgataattacacagtaacaacctctaa

SEQ ID NO: 754961 - DNA, 75 bp, synthetic construct
  source 1..75: mol_type = other DNA
taaggcaacggggggacataacacactggacctgtcctccctgtttgaccagactgtcacactgaaaaatgacct

SEQ ID NO: 754962 - DNA, 75 bp, synthetic construct
  source 1..75: mol_type = other DNA
tgccacgctgaacaccatgcttgaggcaacagattcgacggttacactgggcgacaggcgggtttttattgacaa

SEQ ID NO: 754963 - DNA, 75 bp, synthetic construct
  source 1..75: mol_type = other DNA
caacagcgatgcagacggtggtgtatgggccatgacagggtacagtcatggtggatatgacgacttcagcctaaa

SEQ ID NO: 754964 - DNA, 75 bp, synthetic construct
  source 1..75: mol_type = other DNA
atgggtgtcagcactgccgacaacacgggcgaccggattgatattctgaataaggcaactggcggacataacaca

SEQ ID NO: 754965 - DNA, 75 bp, synthetic construct
  source 1..75: mol_type = other DNA
ggtaacagtctgacgtttcatcagttgaaggcggcagattatggtgccgtgctggcgaataatgctgataaacgg

SEQ ID NO: 754966 - DNA, 75 bp, synthetic construct
  source 1..75: mol_type = other DNA
aaaagccatatcctgacagcgggtatccgtggcgggtggaagatgcatgcagccccccttgatatgtcgataaca

SEQ ID NO: 754967 - DNA, 75 bp, synthetic construct
  source 1..75: mol_type = other DNA
attatcgccactgctgctttccggtccggcaggtgcctccatagtaagtgcagaaattgattatcagatatttcg

SEQ ID NO: 754968 - DNA, 75 bp, synthetic construct
  source 1..75: mol_type = other DNA
ggcattttactgttgactcacctgaccatcattcatggaagggggcaggaataattgttgacaaagaatctgatg

SEQ ID NO: 754969 - DNA, 75 bp, synthetic construct
  source 1..75: mol_type = other DNA
aggtgcaggcgttcagcagtgtcaatattgccagtggccggccgaccgtggtactgactgatgagcggcaggtaa

SEQ ID NO: 754970 - DNA, 75 bp, synthetic construct
  source 1..75: mol_type = other DNA
tatcgtggaccggaataatgcaccgtcactggattttcatgctcccaggctggataagctggtaacggaggttgc

SEQ ID NO: 754971 - DNA, 75 bp, synthetic construct
  source 1..75: mol_type = other DNA
tccgtggcgggtggaagatgcatgcagccccccttgatatgtcgataacaccgactgtttcactgaacggtgcgc

SEQ ID NO: 754972 - DNA, 75 bp, synthetic construct
  source 1..75: mol_type = other DNA
attcaacaattacaacagcgcctgcgtgattgcgatattaagcatctgaccgatgtgctggaaatagataaagat

SEQ ID NO: 754973 - DNA, 75 bp, synthetic construct
  source 1..75: mol_type = other DNA
aatcagcatcacgccagcgataatgaaactggcgaagcaacagatcccttaattaaggtgaacggttatcacaat

SEQ ID NO: 754974 - DNA, 75 bp, synthetic construct
  source 1..75: mol_type = other DNA
ggagaaccctggcggcaatcagcatcacgccagcgataataaaactggcgagacggcagatcactcaattaaggt

SEQ ID NO: 754975 - DNA, 75 bp, synthetic construct
  source 1..75: mol_type = other DNA
acttcgacaacgtaattttacgccgttcatatgaacggcaggggatcccctgcccgtggctttactacaacgatc

SEQ ID NO: 754976 - DNA, 75 bp, synthetic construct
  source 1..75: mol_type = other DNA
ctggatggcaggccgtcggtggcgcttccgtgggtggttttcagcctgatttcatcggtgtcagcggacgtgatg

SEQ ID NO: 754977 - DNA, 75 bp, synthetic construct
  source 1..75: mol_type = other DNA
cagtagcgcaacaggaagcggaaaaagtctgcaccgcctgcggtcagaccagcggcggcaactgcccagattgtg

SEQ ID NO: 754978 - DNA, 75 bp, synthetic construct
  source 1..75: mol_type = other DNA
tccgaagcgcccaccctgagttttatcactacccggggcgccttcaggggtatatcaatgccaacctgacagaaa

SEQ ID NO: 754979 - DNA, 75 bp, synthetic construct
  source 1..75: mol_type = other DNA
cctttcgcggtttcgggagttcatcaacgaatactcagatgaaaaattagttcaggtatggggtaatggtgcaac

SEQ ID NO: 754980 - DNA, 75 bp, synthetic construct
  source 1..75: mol_type = other DNA
caaaacgagccagaaacgaaacagcctgaaccagtggcgcaacaggaagtggaaaaagtttgcaatgcctgcggt

SEQ ID NO: 754981 - DNA, 75 bp, synthetic construct
  source 1..75: mol_type = other DNA
ggcgtgtttgataccgaattctgcaaccgatacgaaaaaggcggagaagatggtatcacaatggtacttatcgcg

SEQ ID NO: 754982 - DNA, 75 bp, synthetic construct
  source 1..75: mol_type = other DNA
tcgtgtttcacgcatcacccgcacggcttccggtgctaatgctggcggtgggaacaaaaccgatcgcagtccgaa

SEQ ID NO: 754983 - DNA, 75 bp, synthetic construct
  source 1..75: mol_type = other DNA
cagcctgaaccagaagagcaacaagaaccggaaaaagtctgcaccgcctgcggtcagaccggcggcgacaactgt

SEQ ID NO: 754984 - DNA, 75 bp, synthetic construct
  source 1..75: mol_type = other DNA
tacctcacaatgcactcgatgatgcacgccaccaggcaaaacaagtttcagcaatctggcaaaaactgatcccga

SEQ ID NO: 754985 - DNA, 75 bp, synthetic construct
  source 1..75: mol_type = other DNA
ccactgaccgctttggttgacttagatagccatgttatttctgacgtcaaagttaccgtccatgggaagggcgaa

SEQ ID NO: 754986 - DNA, 75 bp, synthetic construct
  source 1..75: mol_type = other DNA
gcaacggacgagcagagcacgcgtttaggcgttgtgcgtgagactttttcgcgctggttgaatcagcccgactgg

SEQ ID NO: 754987 - DNA, 75 bp, synthetic construct
  source 1..75: mol_type = other DNA
gttgcaacgagcattaagcgcagaagtcgatctttattgccaacaaatggctaaagttctggcagagcaggtcga

SEQ ID NO: 754988 - DNA, 75 bp, synthetic construct
  source 1..75: mol_type = other DNA
aaagggcatcatagtggtatgccatactgggcacaggggagtaccacagaaatgcgtcccaaaaatattgcattc

SEQ ID NO: 754989 - DNA, 75 bp, synthetic construct
  source 1..75: mol_type = other DNA
tgacgtcagccaccgactttctgtgtcagcagcaaaatgaggtgaatgcccagttagctgcgctgtttcaacatg

SEQ ID NO: 754990 - DNA, 75 bp, synthetic construct
  source 1..75: mol_type = other DNA
gtatgtactggtcaataagttcgatcagcaggatcggaacagtgacgatgccgaacaggtgagggcgctgatttc

SEQ ID NO: 754991 - DNA, 75 bp, synthetic construct
  source 1..75: mol_type = other DNA
caaccggttcaggcattactccatgctgcctacgccaacgcgtcgttatatgctctgcgatctgcctcgcataag

SEQ ID NO: 754992 - DNA, 75 bp, synthetic construct
  source 1..75: mol_type = other DNA
acatgatggggcaggtgctcgaagatcacaaactaccgcgcggatttgctgacgccactcatgagtccattgaga

SEQ ID NO: 754993 - DNA, 75 bp, synthetic construct
  source 1..75: mol_type = other DNA
gcgccctttactttcatcgtcgataccgaaggtgaataccgctggtggctggatcaagacactttctacgatggt

SEQ ID NO: 754994 - DNA, 75 bp, synthetic construct
  source 1..75: mol_type = other DNA
tctatctggttaatacccacacctttaccgcccaaggttccgatctccactggcatggtgagaaagataaaaatg

SEQ ID NO: 754995 - DNA, 75 bp, synthetic construct
  source 1..75: mol_type = other DNA
aactggcgcactcccttttgatatcgcgccattcacctttatcgtcgataccgaaggcgaataccgctggtggtt

SEQ ID NO: 754996 - DNA, 75 bp, synthetic construct
  source 1..75: mol_type = other DNA
tggcacggcgaaaaagataaaaatgccggtatcctcgatgcaggcccggcaaccggtgcactgccttttgatatc

SEQ ID NO: 754997 - DNA, 75 bp, synthetic construct
  source 1..75: mol_type = other DNA
gctggatgcgggcgccgtttgcgttaacgttgaccttgctcatgccggacaacaagcaaaactggaaccggatac

SEQ ID NO: 754998 - DNA, 75 bp, synthetic construct
  source 1..75: mol_type = other DNA
gttgttgatatcccgcaagatacctggatcgaacagccgtgggatatgggcgtcgtattcgtcccgccaatctcc

SEQ ID NO: 754999 - DNA, 75 bp, synthetic construct
  source 1..75: mol_type = other DNA
atgtccgtattccctgaacgttttgcatcctctccgcgtgatgcatccccttttttcagtgacctactgagttgc

SEQ ID NO: 755000 - DNA, 75 bp, synthetic construct
  source 1..75: mol_type = other DNA
tgccctccaaccccgccttcaagccgatacctgttaacccggacactcttgaaatctggggcgttgtcacctttg

SEQ ID NO: 755001 - DNA, 75 bp, synthetic construct
  source 1..75: mol_type = other DNA
tcgtctggcgcgtggttatagctactcggatcgcgtgcgctattactggccggacagccagattgatgacgcttt

SEQ ID NO: 755002 - DNA, 75 bp, synthetic construct
  source 1..75: mol_type = other DNA
gtatttccagctacgatcacgacaaccagcgtgaactgaaagtactgaaacgcgcagaaggcgatggtgaaggct

SEQ ID NO: 755003 - DNA, 75 bp, synthetic construct
  source 1..75: mol_type = other DNA
ttgtgactatcttcgcaaaaccggctggtcgtccgctggttgatgattatgttgttgatatcccgcaaaatacct

SEQ ID NO: 755004 - DNA, 75 bp, synthetic construct
  source 1..75: mol_type = other DNA
cattgacgacttccgccaggtggttgtgctggaaaccctgctgggacaggcaaatgccgtggcctcgatgacgtt

SEQ ID NO: 755005 - DNA, 75 bp, synthetic construct
  source 1..75: mol_type = other DNA
cggtttacacgacattacgcaaccagtgggccggagaacgcgcccgacaggttgccaccggcgcactgccggaag

SEQ ID NO: 755006 - DNA, 75 bp, synthetic construct
  source 1..75: mol_type = other DNA
ggtatctggggatgggtggctgtttccctgggcttactaagctgggcgggcttcctgggctgtacggcctacttt

SEQ ID NO: 755007 - DNA, 75 bp, synthetic construct
  source 1..75: mol_type = other DNA
ccggataatgagagcgttgaaatctggggagtggttacgcattcccttatcgagcatccggtatgtttgcgctga

SEQ ID NO: 755008 - DNA, 75 bp, synthetic construct
  source 1..75: mol_type = other DNA
aaacttctccattacctgccggggctattgacgctctggcaggtgaactttcccgccgtattcagtatgcgtttc

SEQ ID NO: 755009 - DNA, 75 bp, synthetic construct
  source 1..75: mol_type = other DNA
cgataatgaatttacggtcaagcagctgcagctccgcccttacccctgcctgatgccgctgaatccggctgttat

SEQ ID NO: 755010 - DNA, 75 bp, synthetic construct
  source 1..75: mol_type = other DNA
gtgccggtacctggcggcgcgcatgaaaccttaagcgagctggcggtcaccacgccggatgccgcccgcgccacg

SEQ ID NO: 755011 - DNA, 75 bp, synthetic construct
  source 1..75: mol_type = other DNA
tctggtgaatctgttgaataaagacccggcacagctttttgctgagtttgaaggcaagcagacgatcggcagtgg

SEQ ID NO: 755012 - DNA, 75 bp, synthetic construct
  source 1..75: mol_type = other DNA
tggcggcagagacgttagagcgttatctgcatacccgttatgttgggcagaaacggttttctctggaagggggcg

SEQ ID NO: 755013 - DNA, 75 bp, synthetic construct
  source 1..75: mol_type = other DNA
cacctttggcgcacacaccacgcaaatgccacttaagcaactgcttaacctgctggagcaagcctgggcgggtag

SEQ ID NO: 755014 - DNA, 75 bp, synthetic construct
  source 1..75: mol_type = other DNA
gccgaactgctgcgaatggatttggttgcaggaagagccagaaaaccagggcgcgtggcggcagattcgtcatga

SEQ ID NO: 755015 - DNA, 75 bp, synthetic construct
  source 1..75: mol_type = other DNA
cggcagcggcagctccggcgacagggtatgggcgtgtacataaacaacaaatcgacgaatttcttgctgctgcgt

SEQ ID NO: 755016 - DNA, 75 bp, synthetic construct
  source 1..75: mol_type = other DNA
ttcacctgaactgaccgctcaaagtgcatctggtgatagcaacgttagcagcgcgacgttaaaaaaacaggctgc

SEQ ID NO: 755017 - DNA, 75 bp, synthetic construct
  source 1..75: mol_type = other DNA
ttttacccattcagttattaagctctcaggtataagtgacttcaaaatacatagctacattattaaaacaagtga

SEQ ID NO: 755018 - DNA, 75 bp, synthetic construct
  source 1..75: mol_type = other DNA
aaacgtttgagagttgagcaatttatctttctgacagaagaagataaatgttggtataaaacaagatacaatatt

SEQ ID NO: 755019 - DNA, 75 bp, synthetic construct
  source 1..75: mol_type = other DNA
attgaaattagtgcgagaatacactgtgttattcatgatgtggcaactgatttctttaaagaaatgtttgtatct

SEQ ID NO: 755020 - DNA, 75 bp, synthetic construct
  source 1..75: mol_type = other DNA
gcagctccggcgacgggttatggtcgcgtgcataaacaacaaatcgatgaattccttgctgctgcatttgcagat

SEQ ID NO: 755021 - DNA, 75 bp, synthetic construct
  source 1..75: mol_type = other DNA
tagctgaactggctttcatgtcatattttatttttattctgacaatacttcccggcctcatttatctaaaaatga

SEQ ID NO: 755022 - DNA, 75 bp, synthetic construct
  source 1..75: mol_type = other DNA
tgctgctttcatttgttccggggacgtttataggcgcatgcgcgacgtttgccgggcagggtgactggaaactgg

SEQ ID NO: 755023 - DNA, 75 bp, synthetic construct
  source 1..75: mol_type = other DNA
atctcttgtactgatgaaaaccccggtcaggagagcgtggtggtcaataacatgatttcccgccaggttgacggt

SEQ ID NO: 755024 - DNA, 75 bp, synthetic construct
  source 1..75: mol_type = other DNA
tcaggaggactgggagaaccgcagttttacctttgacagactgtcactgaagaacaccgattttggccttggtcg

SEQ ID NO: 755025 - DNA, 75 bp, synthetic construct
  source 1..75: mol_type = other DNA
caggaaaacgggcgtctgacgctgcaggggcatccggttatccatgcatacaatactcagtctgtggctgacaaa

SEQ ID NO: 755026 - DNA, 75 bp, synthetic construct
  source 1..75: mol_type = other DNA
ccggatgaaaacattgccattagtgtaatgcctgagttggctgatcattataccaatcagggtgttgattattct

SEQ ID NO: 755027 - DNA, 75 bp, synthetic construct
  source 1..75: mol_type = other DNA
cacccgagctcaggctatgagatgttcgccgcactctgcgcgcgacttgggcggccgcctaaggcgctgttcact

SEQ ID NO: 755028 - DNA, 75 bp, synthetic construct
  source 1..75: mol_type = other DNA
ccaacaactgccagtagtgctgtttgaccgttgtcctaatgaaagcctgctgccgctggtgatgactgattcgat

SEQ ID NO: 755029 - DNA, 75 bp, synthetic construct
  source 1..75: mol_type = other DNA
attatcgccactgctgctttccggtccggcaggtgcctccatagtgagtgcggaaattgattatcagatatttcg

SEQ ID NO: 755030 - DNA, 75 bp, synthetic construct
  source 1..75: mol_type = other DNA
tgcagacggcggagcatgggccatgacagggtacagtcatggtggatatgacgacttcagcctcaatcagagcgg

SEQ ID NO: 755031 - DNA, 75 bp, synthetic construct
  source 1..75: mol_type = other DNA
ggggtcagcactgccgacaacacgggcgaccggattgatatcctgaataaggcaacgggtggacataacacactg

SEQ ID NO: 755032 - DNA, 75 bp, synthetic construct
  source 1..75: mol_type = other DNA
gaaggtcggtgacggtaaggttatactgaaccagcaggcggacaataaaggacaggtgcaggcgttcagcagtgt

SEQ ID NO: 755033 - DNA, 75 bp, synthetic construct
  source 1..75: mol_type = other DNA
taccagcataaatggagcatatgcatatctgaccgggggactgttaccctccgtcagtgcagtaccatccataac

SEQ ID NO: 755034 - DNA, 75 bp, synthetic construct
  source 1..75: mol_type = other DNA
atgatgcacctgtcatgtttgatgcactggcggggaattctctgttatggacatatgataataccactggtacag

SEQ ID NO: 755035 - DNA, 75 bp, synthetic construct
  source 1..75: mol_type = other DNA
ttggtgatggtgaaaaccgttacaatatcgtggaccggaatgatgcgccgtcactggattttcatgccccccggc

SEQ ID NO: 755036 - DNA, 75 bp, synthetic construct
  source 1..75: mol_type = other DNA
ggggacaaccccgtttgtcaccgactcgcgatcgactggaaggatttacacaaggcttgcagcaagccggagtaa

SEQ ID NO: 755037 - DNA, 75 bp, synthetic construct
  source 1..75: mol_type = other DNA
gggttaatcgtcgcatccagtatgctgcatgataatgactatcaaaaacttagcgagcaattacctgttgtgttg

SEQ ID NO: 755038 - DNA, 75 bp, synthetic construct
  source 1..75: mol_type = other DNA
ttatttcgcaactgattgaaggtgaaacgccatccccattacagcgttatcttcctgccagtctacaaaaacgct

SEQ ID NO: 755039 - DNA, 75 bp, synthetic construct
  source 1..75: mol_type = other DNA
aacggtgggttgacgccgaaagaatcagagaacagatactgtttttactgtaaaaccgtggccaatattacttga

SEQ ID NO: 755040 - DNA, 75 bp, synthetic construct
  source 1..75: mol_type = other DNA
atggaaaggcattattgccgtaagccgtggcggtctggtaccggggcgttactggcgcgtgaactgggtattcgt

SEQ ID NO: 755041 - DNA, 75 bp, synthetic construct
  source 1..75: mol_type = other DNA
gttgttgatatcccgcaagatacctggatcgagcaaccgtgggatatgggcgtcgtattcgtcccgccaatctcc

SEQ ID NO: 755042 - DNA, 75 bp, synthetic construct
  source 1..75: mol_type = other DNA
aggtgacaatctgcataaaatcggtgagggtacgctgacggtacagggtacaggtatcaatgagggaggtctgaa

SEQ ID NO: 755043 - DNA, 75 bp, synthetic construct
  source 1..75: mol_type = other DNA
cgaaaacgctgacggtaaacacactgcatgccagcagtatgaatatcgctatgggtgtcagcactgccgacaaca

SEQ ID NO: 755044 - DNA, 75 bp, synthetic construct
  source 1..75: mol_type = other DNA
tgccatgcacgggcagcagggaaatgacctgaatgctggtaagaacctgatatttcagggggcgaatggtcagat

SEQ ID NO: 755045 - DNA, 75 bp, synthetic construct
  source 1..75: mol_type = other DNA
acaaggaatttctccacaaattgattatgcaggccatgtggatttacgttcaggttcttgggagaatatgaattt

SEQ ID NO: 755046 - DNA, 75 bp, synthetic construct
  source 1..75: mol_type = other DNA
atcgtatcagtacagtgctttctatggttccggcattgaaaaaggcaaaaacatcacaatcacccttgatcaagc

SEQ ID NO: 755047 - DNA, 75 bp, synthetic construct
  source 1..75: mol_type = other DNA
ggatatctccggtacattcacccaggaaaacgggcgtctgacgctgcaggggcatccggttatccatgcatacaa

SEQ ID NO: 755048 - DNA, 75 bp, synthetic construct
  source 1..75: mol_type = other DNA
tttgttactgccggatgtggcgctcgtggcgtcattctgtgctctgatatatgccatcacgacagggaaatatgc

SEQ ID NO: 755049 - DNA, 75 bp, synthetic construct
  source 1..75: mol_type = other DNA
cggccacgaggtcaacttcatctgcgccgacgatgcccacggtacaccgatcatgctgaaagctcagcagcttgg

SEQ ID NO: 755050 - DNA, 75 bp, synthetic construct
  source 1..75: mol_type = other DNA
atggtagtgtccgctattgccagtacacctcagatgattgatgtcttagggccggagaaacgcagacggcgtacc

SEQ ID NO: 755051 - DNA, 75 bp, synthetic construct
  source 1..75: mol_type = other DNA
aacgctggtggtggaaggcgatctggcggcgtgtcgtgcggcgctggacgcaggttgtgctgccgcgatgcgtac

SEQ ID NO: 755052 - DNA, 75 bp, synthetic construct
  source 1..75: mol_type = other DNA
gctgacccgcagttgtacaaaaccttcactgatgccgctgaagtgattggtgaagcgtgggaaagccgcgaattt

SEQ ID NO: 755053 - DNA, 75 bp, synthetic construct
  source 1..75: mol_type = other DNA
gcgcgaaatcatggcgctggctgatctggctaaccgctatgtcgatgaacaggctccgtgggtggtggcaaaaca

SEQ ID NO: 755054 - DNA, 75 bp, synthetic construct
  source 1..75: mol_type = other DNA
attgatgatatcgatctcaacctggaggatttcgttcagcgcgtgaatgccgatatcgtgaacaaagtggttaac

SEQ ID NO: 755055 - DNA, 75 bp, synthetic construct
  source 1..75: mol_type = other DNA
ttcctgcctctgaacttgctgccgccatgaagcagattaaagaactccagcgcctgctcggcaagaaaacgatgg

SEQ ID NO: 755056 - DNA, 75 bp, synthetic construct
  source 1..75: mol_type = other DNA
tgttcctgcctctgaacttgctgccgccatgaagcagattaaagaactccagcgcctggctcggcaagaaaacga

SEQ ID NO: 755057 - DNA, 75 bp, synthetic construct
  source 1..75: mol_type = other DNA
aagcaataccaggaaggaagtcttactgctgtggccgccggagaacaggttgttcctgcctctgaacttgctgcc

SEQ ID NO: 755058 - DNA, 75 bp, synthetic construct
  source 1..75: mol_type = other DNA
aggagagcaggtcgttcctgcctctgaacttgctgctgccatgaagcagattaaagaactccagcgcctgagcgg

SEQ ID NO: 755059 - DNA, 75 bp, synthetic construct
  source 1..75: mol_type = other DNA
atgattgatgtcttaggaccggagaaacgaagacggcgtactacacaggaaaagatcgctattgttcagcagagc

SEQ ID NO: 755060 - DNA, 75 bp, synthetic construct
  source 1..75: mol_type = other DNA
aagcaataccaggagggaagtcttactgctgtggctgccggagaacaggtcgttcctgcctctcgagtaggcagc

SEQ ID NO: 755061 - DNA, 75 bp, synthetic construct
  source 1..75: mol_type = other DNA
cagaactgacctgggatggtatccagcaaccgctgctgggccataaagtgaatccgttcaaggcgctgtataacc

SEQ ID NO: 755062 - DNA, 75 bp, synthetic construct
  source 1..75: mol_type = other DNA
tgatccttgaagagaatgcgctcggcgaccatagccgggtggaaaggatagccacggaaaagctgcaaatgcagc

SEQ ID NO: 755063 - DNA, 75 bp, synthetic construct
  source 1..75: mol_type = other DNA
agacaaaaccatctggcttatcgctttcaacgtcttcttcgtttacgcggtttactgtggcctgacattcttcat

SEQ ID NO: 755064 - DNA, 75 bp, synthetic construct
  source 1..75: mol_type = other DNA
gctgggctttggcgcgatagtctttacacagcgagccgtattttttgcacctatcggcgaagcaaaaattgctga

SEQ ID NO: 755065 - DNA, 75 bp, synthetic construct
  source 1..75: mol_type = other DNA
aacgcagacggcgtaccatacaggaaaatatcgctattgttcagcagagctttgaaccgagaatgacggtctccc

SEQ ID NO: 755066 - DNA, 75 bp, synthetic construct
  source 1..75: mol_type = other DNA
ggaaggaagtcttactgctgtggccgccggagaacaggttgttcctgcctctgaacttgctgccgccatgaagca

SEQ ID NO: 755067 - DNA, 75 bp, synthetic construct
  source 1..75: mol_type = other DNA
attaaagaactccagcgcctgctcggcaagaaaacgatggaaaatgaactcctcaaagaagccgttgaatatgga

SEQ ID NO: 755068 - DNA, 75 bp, synthetic construct
  source 1..75: mol_type = other DNA
aatccgttcaaggcgctgtataaccgcatcgatatgaagcaggttgaagcactggtggaagcctctaaagaagaa

SEQ ID NO: 755069 - DNA, 75 bp, synthetic construct
  source 1..75: mol_type = other DNA
cccgactgaactgatcgagccgaaatcggtggtttctggtgctacgccggtaatgcgtgattctgaacacttctt

SEQ ID NO: 755070 - DNA, 75 bp, synthetic construct
  source 1..75: mol_type = other DNA
aaagccgtgaatttggtaaagcagtgcgcgaaatcatggcactggctgacctggctaaccgctatgtcgacgagc

SEQ ID NO: 755071 - DNA, 75 bp, synthetic construct
  source 1..75: mol_type = other DNA
gatcggtgggcctattggcggcatgatttcagataagatcctgaaatcaccgagtaaatatctgtgctacacctt

SEQ ID NO: 755072 - DNA, 75 bp, synthetic construct
  source 1..75: mol_type = other DNA
tggtcaaattggtaatgctatgtcggtaaactcatttgtcacgacagtgggtttttttctgtctatttattttgc

SEQ ID NO: 755073 - DNA, 75 bp, synthetic construct
  source 1..75: mol_type = other DNA
tgccggatcgttttgtaaaaggcacctgcccgaaatgtaaagcacctgatcaatatggcgataactgtgaagtct

SEQ ID NO: 755074 - DNA, 75 bp, synthetic construct
  source 1..75: mol_type = other DNA
cagccgcaccatgggcgtgtcgcgtgcgcagctgtcactgcggattaaccgttctgccgactggcaggacaagcg

SEQ ID NO: 755075 - DNA, 75 bp, synthetic construct
  source 1..75: mol_type = other DNA
atgatgctgtcgtcctgggaaaggcactgggcatatctcctcctgagctcctctttggggaaaaagactcttctg

SEQ ID NO: 755076 - DNA, 75 bp, synthetic construct
  source 1..75: mol_type = other DNA
gtggattcgattggctacggcgtgctaccggatgacggcggcctggtgctgggcggcctgccgaaagtgtcacgg

SEQ ID NO: 755077 - DNA, 75 bp, synthetic construct
  source 1..75: mol_type = other DNA
gcttccgggaaagtcactaaaacagccatcaacgaagcattacgccggatgaagaagtctggcatctcgaagcct

SEQ ID NO: 755078 - DNA, 75 bp, synthetic construct
  source 1..75: mol_type = other DNA
ggggcagtatccgtttattttccctggtcgaatacagcacagtaaaccgatgagtgaaatggcgatgaacgtgct

SEQ ID NO: 755079 - DNA, 75 bp, synthetic construct
  source 1..75: mol_type = other DNA
gcacatcatataaggaactgagcggcgttacggtcgaggacttcagcacacggatacgagaaatattccagggga

SEQ ID NO: 755080 - DNA, 75 bp, synthetic construct
  source 1..75: mol_type = other DNA
cggggccagtttttcacgccctggagtgtggccagaatgatggcacagatgcagctggggaatgtgacgacgctg

SEQ ID NO: 755081 - DNA, 75 bp, synthetic construct
  source 1..75: mol_type = other DNA
aagccttcatttcgctgtttaatcagaccgcccgttatcacaaacgccataaggtgtttgaagactttgtcagct

SEQ ID NO: 755082 - DNA, 75 bp, synthetic construct
  source 1..75: mol_type = other DNA
cggcgccgggtgctgctgacgcccggacattacctgggtaactggtcatatcgtctacgtcattctcagaaacag

SEQ ID NO: 755083 - DNA, 75 bp, synthetic construct
  source 1..75: mol_type = other DNA
agttgcaaatggccaatgagcttcatattaaacatcctgactgggcgctcattacctgtcgccgccgagttgaca

SEQ ID NO: 755084 - DNA, 75 bp, synthetic construct
  source 1..75: mol_type = other DNA
gtatccagcaaaattaccaaaactgcaatcaacgatgcgctgcgccgtatgaaaaagtcaggcattacgaaacca

SEQ ID NO: 755085 - DNA, 75 bp, synthetic construct
  source 1..75: mol_type = other DNA
acatgcgaaaagcgaattgctaattggttagctgttgctgaatatgcgctatacatccctatgcgagaatcgttt

SEQ ID NO: 755086 - DNA, 75 bp, synthetic construct
  source 1..75: mol_type = other DNA
ggtcgaatacagcacagtaaaccgatgagtgaaatggcgatgaacgtgcttattcgtcgtattggctatgctggg

SEQ ID NO: 755087 - DNA, 75 bp, synthetic construct
  source 1..75: mol_type = other DNA
taaaggccgaatatcggtgaaggaaagcgaccagcgctggtgttccgatggctttgagttcggttgtgatgatgg

SEQ ID NO: 755088 - DNA, 75 bp, synthetic construct
  source 1..75: mol_type = other DNA
atatcggtcatcgtccaatagattcgattacgcctatggagctgatggcagttttgacctgccttgagaaacgag

SEQ ID NO: 755089 - DNA, 75 bp, synthetic construct
  source 1..75: mol_type = other DNA
tgtctatctcatcgccagcggtcgcatgtgtgtcgccgggcttaacgcgcaaaatgtgcatcgcgtggcaaaggc

SEQ ID NO: 755090 - DNA, 75 bp, synthetic construct
  source 1..75: mol_type = other DNA
tgggctgcaagcacgggaggttacgataaagcgccagtgcaggatgtgatgttaggagcgatagaaacgctttgg

SEQ ID NO: 755091 - DNA, 75 bp, synthetic construct
  source 1..75: mol_type = other DNA
atacgggtatcgccgtgtctgggcgatactcaggcggcagtcccgaaatgaaggactaccgttcgtgaatgcaaa

SEQ ID NO: 755092 - DNA, 75 bp, synthetic construct
  source 1..75: mol_type = other DNA
gctgttcgccagagagttgagtctggagccctgcacgacggcagtcattagccctcagagtaatgaaatggcaga

SEQ ID NO: 755093 - DNA, 75 bp, synthetic construct
  source 1..75: mol_type = other DNA
gcagcaaattaaaaaaatggtctgctggttatgcttcagacatcctcgaagccttcaacaaagatgtgttccctt

SEQ ID NO: 755094 - DNA, 75 bp, synthetic construct
  source 1..75: mol_type = other DNA
ggacgtattcccgtatatcggcagcaaaccgatagcagaaataaaaccgatggaattgctcgcggttctctctcg

SEQ ID NO: 755095 - DNA, 75 bp, synthetic construct
  source 1..75: mol_type = other DNA
tgtctctgtctgatgccagagcggcaagggatgaggctaaaaggcttcttgctggtggtataaatccaagtgagg

SEQ ID NO: 755096 - DNA, 75 bp, synthetic construct
  source 1..75: mol_type = other DNA
tgtgggagatacctgccgagcgtatgaagatgaaacggcctcaccttgtccccctctctacccaagcgctggaaa

SEQ ID NO: 755097 - DNA, 75 bp, synthetic construct
  source 1..75: mol_type = other DNA
cggcgtcgggtgcatgtggcgcaggaggagtttcctgaacaaagcgtgccggaaggtaagcgtgccggatatgtt

SEQ ID NO: 755098 - DNA, 75 bp, synthetic construct
  source 1..75: mol_type = other DNA
ttgtggctggcgtcagttactaccagaccggcaattatcagcaggtaaaagcctggcagcaggccatggtgcagg

SEQ ID NO: 755099 - DNA, 75 bp, synthetic construct
  source 1..75: mol_type = other DNA
gtgtggtgcggtgatgtgacctatagtgtgcccggagttcagggtgagcagggatgctcaaatgaaccacgagtc

SEQ ID NO: 755100 - DNA, 75 bp, synthetic construct
  source 1..75: mol_type = other DNA
tgtcgttctcgccggacagcaggctcaccatgaaagcgcgggaaatggcatgggaaacccgtggtaagcccggcg

SEQ ID NO: 755101 - DNA, 75 bp, synthetic construct
  source 1..75: mol_type = other DNA
cagcgcactaagaccgcacgaatataacggtggattacccccaaacgaatcggaaaatcgatactggaaaaactc

SEQ ID NO: 755102 - DNA, 75 bp, synthetic construct
  source 1..75: mol_type = other DNA
gccagcaattagcggtcttggtagttctgcgggttttgatatggagttgcaggaccacgctggagcgggtcacga

SEQ ID NO: 755103 - DNA, 75 bp, synthetic construct
  source 1..75: mol_type = other DNA
cgggctggaaaacgacgtttacttccaggtgggcctgttaacggtcattggtttatcggcgaaaaacgccatcct

SEQ ID NO: 755104 - DNA, 75 bp, synthetic construct
  source 1..75: mol_type = other DNA
gcgacagcggagctggtgctcaatcgtctcgacgagctggcgcagtacttcccacacggactggaatacaaggtg

SEQ ID NO: 755105 - DNA, 75 bp, synthetic construct
  source 1..75: mol_type = other DNA
agcgggcgtgatgctgggggatttcttcagtcagggagtcgcgcagctcaatttattcgatgacaacgcaccgcg

SEQ ID NO: 755106 - DNA, 75 bp, synthetic construct
  source 1..75: mol_type = other DNA
gtttgcaactggaagagtttgcaccgacgaagcaggaaattatctgttcccgctcgtttggtgaacgcatcacgg

SEQ ID NO: 755107 - DNA, 75 bp, synthetic construct
  source 1..75: mol_type = other DNA
tcatctgcatgacgcaaaaaatcggtgccgcaaatgctggaagatttcaaacaacatccggccgttgcaccgctg

SEQ ID NO: 755108 - DNA, 75 bp, synthetic construct
  source 1..75: mol_type = other DNA
gaaaaacttcgcagcgagcatcaatattgtcggtttatctccacgtttattaagacgtcaccatttgcgctcaat

SEQ ID NO: 755109 - DNA, 75 bp, synthetic construct
  source 1..75: mol_type = other DNA
taagacgtcgccattcgcgctcaatgaaccttattacggcaatagtgcgtcggtaaaactactgacgcccactca

SEQ ID NO: 755110 - DNA, 75 bp, synthetic construct
  source 1..75: mol_type = other DNA
ttcagtcagggagtcgcgcagctcaatttattcgatgacaacgcaccgcgccccgggagtgagcaattgatgacg

SEQ ID NO: 755111 - DNA, 75 bp, synthetic construct
  source 1..75: mol_type = other DNA
cgtctctaccgatggttcgatggataaacaggatattgccgattacgttgccagtaatattcaggacccgttaag

SEQ ID NO: 755112 - DNA, 75 bp, synthetic construct
  source 1..75: mol_type = other DNA
gagaatataataacggcgggggcatattttctaaagaaaaatcaacgctgaatcttactgatgttattttttctg

SEQ ID NO: 755113 - DNA, 75 bp, synthetic construct
  source 1..75: mol_type = other DNA
aatcagaagcagggggtctggctggatagctggctgcaatatgcgtggtttaacaatgatgtttctgaacaagac

SEQ ID NO: 755114 - DNA, 75 bp, synthetic construct
  source 1..75: mol_type = other DNA
tttgcgtttaaccgggcaggatacgtctgtggcgctcgacgcctcattatttaacggtggcggtacgctggtgaa

SEQ ID NO: 755115 - DNA, 75 bp, synthetic construct
  source 1..75: mol_type = other DNA
gcggtgctttcgctggaaggcgacgcggcagatctcgccgctctccaggacgatccgcagtcgatcgtgttaaac

SEQ ID NO: 755116 - DNA, 75 bp, synthetic construct
  source 1..75: mol_type = other DNA
agtttcgctgcgtggtagcatggcgtggcagaaagggagtgatgattttgcccagactacagggtttttgacgat

SEQ ID NO: 755117 - DNA, 75 bp, synthetic construct
  source 1..75: mol_type = other DNA
ggtcagacgctgcatttgcgcattatcggcggacgttatcattacacggctgcggggcaactggctcagcatgaa

SEQ ID NO: 755118 - DNA, 75 bp, synthetic construct
  source 1..75: mol_type = other DNA
tgaccacttcaagagaaaagaaccgatgaaggtggccagtacattttgtgtggtgacgtcttcaacaactaaacg

SEQ ID NO: 755119 - DNA, 75 bp, synthetic construct
  source 1..75: mol_type = other DNA
gtgggtgaggccgcgccgggcgttagtacgggtacggcgatggatattatggaatcgttagtgaagcagctacct

SEQ ID NO: 755120 - DNA, 75 bp, synthetic construct
  source 1..75: mol_type = other DNA
gataaacaggcactgaacgccaccattaacgcccagtcgctattgcaaacacctgaacagtttcgcgatatcact

SEQ ID NO: 755121 - DNA, 75 bp, synthetic construct
  source 1..75: mol_type = other DNA
gcagtcaattgtgttaaacgctggcgtattagatctctccgatttcaccacctggcagagcggtacgtcagagaa

SEQ ID NO: 755122 - DNA, 75 bp, synthetic construct
  source 1..75: mol_type = other DNA
ctggcggggaatcaggccgatttacgggcaatgcagagcgatccgcaatcgatcgtgctaaatggcggagtattg

SEQ ID NO: 755123 - DNA, 75 bp, synthetic construct
  source 1..75: mol_type = other DNA
gcttctgcgaggccgctcacgccataacggtctatatcgttggatattacagcgcactaagaccgcacgaatata

SEQ ID NO: 755124 - DNA, 75 bp, synthetic construct
  source 1..75: mol_type = other DNA
tcgtacagcgcgatggcaaagttgtcggtgtagaagccgatggcgatgtgattgaagcgaaaacggtgatccttg

SEQ ID NO: 755125 - DNA, 75 bp, synthetic construct
  source 1..75: mol_type = other DNA
aaagaagcggtggagtatggtcagtcgcgaaaatggatagcgcatgcgcccttgttgccaacggacaaggaataa

SEQ ID NO: 755126 - DNA, 75 bp, synthetic construct
  source 1..75: mol_type = other DNA
ctgtacggcgaacgtgtcggcggtctttcggtagtgtgtgaagatgccgaagccgcaggccgcgtgctggggcaa

SEQ ID NO: 755127 - DNA, 75 bp, synthetic construct
  source 1..75: mol_type = other DNA
gtgctgctgcatccgtgctgccataacccaactggtgcggatctttctcacgaacagtgggatgccgtcattgaa

SEQ ID NO: 755128 - DNA, 75 bp, synthetic construct
  source 1..75: mol_type = other DNA
ggaaaatgaactccttaaagaagccgttgaatacgggcgtgcaaaaaagtggatatcgcacgcgcccttattgcc

SEQ ID NO: 755129 - DNA, 75 bp, synthetic construct
  source 1..75: mol_type = other DNA
ctgccgccatgaagcagattaaagaactccagcgcctgctcggcaagaaaacgatggaaaatgaactcctcaaag

SEQ ID NO: 755130 - DNA, 75 bp, synthetic construct
  source 1..75: mol_type = other DNA
tggtttttagcgatcttgatggcaccctgctggacagtcatagttatgactggcaaccggctgccccctggctca

SEQ ID NO: 755131 - DNA, 75 bp, synthetic construct
  source 1..75: mol_type = other DNA
cgcagtgatccagcttgctgaacaatggcaggatatagacggttttccacgcatcatctcaggtattagccatgg

SEQ ID NO: 755132 - DNA, 75 bp, synthetic construct
  source 1..75: mol_type = other DNA
gacgagtttgttgcgttgcctcttcttaacgtttcgctttcagctggaagcggtagctgcgagctagaggaatca

SEQ ID NO: 755133 - DNA, 75 bp, synthetic construct
  source 1..75: mol_type = other DNA
gaagcggaagcgcgtctgaatgcgcaacctcatggcgcttcgctttacttgccaatggaagggcttaacagctat

SEQ ID NO: 755134 - DNA, 75 bp, synthetic construct
  source 1..75: mol_type = other DNA
gcaggtggtggcaacggtgctgaatgatgaggcgttgaaagccaactggctggcagaagtagaagaaatgcgtac

SEQ ID NO: 755135 - DNA, 75 bp, synthetic construct
  source 1..75: mol_type = other DNA
tggcaaccggcagccccctggctcagccgtttacacgaagccaatgttcccgtcattctctgtagcagtaaaact

SEQ ID NO: 755136 - DNA, 75 bp, synthetic construct
  source 1..75: mol_type = other DNA
gaaatcgctggtgctatctggcggtcgtcatggatctttttgcccgcagggttatcggctggagcctgtcagcga

SEQ ID NO: 755137 - DNA, 75 bp, synthetic construct
  source 1..75: mol_type = other DNA
gccccggcttcaacatcagggttcaacaacggttttaccgttacctatgataaagtcccacaggatgcctgtatc

SEQ ID NO: 755138 - DNA, 75 bp, synthetic construct
  source 1..75: mol_type = other DNA
gcaagaaagccagtgggctgggcaatgtcgttctcgccggacagcagactcaccatgaaagcgctggaaatggca

SEQ ID NO: 755139 - DNA, 75 bp, synthetic construct
  source 1..75: mol_type = other DNA
gggtgatgttccaagcgatcaaggcagtcattatacgagcaggcagttccggcagttactgtggagataccggat

SEQ ID NO: 755140 - DNA, 75 bp, synthetic construct
  source 1..75: mol_type = other DNA
cggcgtagaagccgatggcgatgtgattgaagcgaaaacggtgatccttgctgatggagtgaactccatccttgc

SEQ ID NO: 755141 - DNA, 75 bp, synthetic construct
  source 1..75: mol_type = other DNA
atcctccgccacggcaagaaagtgggcttcatcaatctaatcaaggatggcatgaaaggagtgaccgttttatga

SEQ ID NO: 755142 - DNA, 75 bp, synthetic construct
  source 1..75: mol_type = other DNA
gatattacagcgcactaagaccgcacgaatataacggtgggttacccccaaacgaatcggaaaatcgatactgga

SEQ ID NO: 755143 - DNA, 75 bp, synthetic construct
  source 1..75: mol_type = other DNA
cctcgccgttgttctcaacctgttcgcaagaaaaccagtgggctgggccatgtcgttctcgccggacagcaggct

SEQ ID NO: 755144 - DNA, 75 bp, synthetic construct
  source 1..75: mol_type = other DNA
cgaatataacggtgggttacccccaaacgaatcggaaaatcgatactggaaaaactctaacgcggtggccagttt

SEQ ID NO: 755145 - DNA, 75 bp, synthetic construct
  source 1..75: mol_type = other DNA
tacagccagctcagacctcatcaatataacggtggtttgacgccgaatgaatcagaacgattgttctggaaaaac

SEQ ID NO: 755146 - DNA, 75 bp, synthetic construct
  source 1..75: mol_type = other DNA
gcactatagctctcagagcaagcgctttacttcaggtcatgagccgggatattgaagcccagagaaaagaattta

SEQ ID NO: 755147 - DNA, 75 bp, synthetic construct
  source 1..75: mol_type = other DNA
cgatatcgcgatgtatcaggagaaaaaacataaacagaaaacaccttttgtcacgcattcagcgctacattcctg

SEQ ID NO: 755148 - DNA, 75 bp, synthetic construct
  source 1..75: mol_type = other DNA
ataataatattacctgcaatatcaataatgtcttttttcttatcaaaaggccatgagcttgatggattaataaac

SEQ ID NO: 755149 - DNA, 75 bp, synthetic construct
  source 1..75: mol_type = other DNA
ggtaacgccatgctcgacaaaatcgccagctggcgcggcgagctacaactggggcgcgatgtgctgtttgcgcca

SEQ ID NO: 755150 - DNA, 75 bp, synthetic construct
  source 1..75: mol_type = other DNA
tgaccttaattcgcctggcagaaaacgcaggcaaaggcgcggcggtgatgcgtggcttacaggcagcggcagacg

SEQ ID NO: 755151 - DNA, 75 bp, synthetic construct
  source 1..75: mol_type = other DNA
ggtaatgccatgctcgacaaaatcgccagctggcgcggcgagctacaactggggcgtgatgtgctgtttgcgcca

SEQ ID NO: 755152 - DNA, 75 bp, synthetic construct
  source 1..75: mol_type = other DNA
ctgtcgccttactggttcattgcccagacaccagaccagtgctggaaatgtggcagggaaacggtaatgacgtct

SEQ ID NO: 755153 - DNA, 75 bp, synthetic construct
  source 1..75: mol_type = other DNA
tacaggatggaacaggaattcagtgcatcatgcagcggaacatcgctatcccatattcactttcgttgtggctct

SEQ ID NO: 755154 - DNA, 75 bp, synthetic construct
  source 1..75: mol_type = other DNA
gatctccggccagccaatttacgatgactccatcccccgctcacggctttacgggcgctgggtcacccacgtttg

SEQ ID NO: 755155 - DNA, 75 bp, synthetic construct
  source 1..75: mol_type = other DNA
atcatgaccgccaacgactggattcttccttggtttatactggtgcgcataatgtatattatgttaaatcatgtc

SEQ ID NO: 755156 - DNA, 75 bp, synthetic construct
  source 1..75: mol_type = other DNA
tcgtctgctaaaaatgcgatcggagccgtaatcaatagtttgtcttccatgcccgctattccgctctccacccgg

SEQ ID NO: 755157 - DNA, 75 bp, synthetic construct
  source 1..75: mol_type = other DNA
tggcttatgccggtgaccaggggtcatttgaaatcccggatcaggtcaagtggatgcagtccctggccccaatga

SEQ ID NO: 755158 - DNA, 75 bp, synthetic construct
  source 1..75: mol_type = other DNA
gactggctcgcccgtgtacgacagcatcaaccacaggcggcaaaactcaacagctatcagcactttctacgtttc

SEQ ID NO: 755159 - DNA, 75 bp, synthetic construct
  source 1..75: mol_type = other DNA
caaaaccattaacgcgctggtgtttagcgaaaacgcccaacgctttaaacagataatgcaggagatggccccgca

SEQ ID NO: 755160 - DNA, 75 bp, synthetic construct
  source 1..75: mol_type = other DNA
agtctgcttgccgaacagcctggcgtgaccttaattcgcctggcagaaaacgcaggcaaaggcgcggcggtgatg

SEQ ID NO: 755161 - DNA, 75 bp, synthetic construct
  source 1..75: mol_type = other DNA
cgagcaaagcatacagtatgctcaaaatgcggctgataaagctgaacaaaatgcgaataactacactgataaccg

SEQ ID NO: 755162 - DNA, 75 bp, synthetic construct
  source 1..75: mol_type = other DNA
tgttgcaaaatgcggttgagcgcaactggctcacggaacaacaggctaacgatatctggcggcaatatgtgccgc

SEQ ID NO: 755163 - DNA, 75 bp, synthetic construct
  source 1..75: mol_type = other DNA
actgcatggcaaagatgttccggtgcgtgaagctctcgccggacaggtgcctagcgcaggcgtcggcacctgctt

SEQ ID NO: 755164 - DNA, 75 bp, synthetic construct
  source 1..75: mol_type = other DNA
aagcggcgtatgccgttacccgattgcctgcgccaacaacttccgcggtgatgcagaatgccgcagtggggcagg

SEQ ID NO: 755165 - DNA, 75 bp, synthetic construct
  source 1..75: mol_type = other DNA
gggacaaattgtcacggggttacgtcactggtatgcacgccgacgcggtcacgatccgcgggcaatgttgtacaa

SEQ ID NO: 755166 - DNA, 75 bp, synthetic construct
  source 1..75: mol_type = other DNA
cgcaggcactggcggagcaaaacggtgtggcgtgggaatcgatcgatgcctggcagatcccttcctcgctgattg

SEQ ID NO: 755167 - DNA, 75 bp, synthetic construct
  source 1..75: mol_type = other DNA
gccaactggcgcgcgctaaaacaggtacttcaacacggcgatccacgtcgcgtcgcgtcgcgtgggataaaacaa

SEQ ID NO: 755168 - DNA, 75 bp, synthetic construct
  source 1..75: mol_type = other DNA
atgctgaatgaacattacgatgtcaccactgttggtatgattgtcgtttctgtgttggcgatgtcgtctgctgcg

SEQ ID NO: 755169 - DNA, 75 bp, synthetic construct
  source 1..75: mol_type = other DNA
acagcaaaatcagtgacacgaagacagaactgaatgccaatattgataaggcgaagaatgacgcgatcagttcat

SEQ ID NO: 755170 - DNA, 75 bp, synthetic construct
  source 1..75: mol_type = other DNA
cggatgaggttttacccgcgctggtgctggcggcgacctggtttgataacgcggcgcgtgacgcggacattatcc

SEQ ID NO: 755171 - DNA, 75 bp, synthetic construct
  source 1..75: mol_type = other DNA
cggcgtctggaaaacggacagtaaaaccaccgccacggcgacgcagcagcgtaacgtggttgccagcacccttcg

SEQ ID NO: 755172 - DNA, 75 bp, synthetic construct
  source 1..75: mol_type = other DNA
atgcataatgaaatcgtcatgttatttagcgacataaaatgtttttgcaaatactctcttcaacaagtgcacaat

SEQ ID NO: 755173 - DNA, 75 bp, synthetic construct
  source 1..75: mol_type = other DNA
cggaattatgctcgccggacgtgctgttctctggattggacgtgcgctgatgatgaatcccatcggtctcgttat

SEQ ID NO: 755174 - DNA, 75 bp, synthetic construct
  source 1..75: mol_type = other DNA
cctttgtcaatgtctggaaaaatctcgttttactccgggcaaactggttacgtctgacactggcattcggtgagg

SEQ ID NO: 755175 - DNA, 75 bp, synthetic construct
  source 1..75: mol_type = other DNA
caatccccgctcgaagccaccaaagcactgatgatcaatagtcgtgatcttgccatcacattgggagatcaactt

SEQ ID NO: 755176 - DNA, 75 bp, synthetic construct
  source 1..75: mol_type = other DNA
ttgtcatcggcggcatcgttggcagcacgttccgttccgcgatgagtggtacccgccgtgcccttgactccctgg

SEQ ID NO: 755177 - DNA, 75 bp, synthetic construct
  source 1..75: mol_type = other DNA
gtctggccactgaaatgacaccggatgttcctcgtatcccgtcgccggaaatcatggcggcgggatattcaggtc

SEQ ID NO: 755178 - DNA, 75 bp, synthetic construct
  source 1..75: mol_type = other DNA
gggctgggataaatacctttccagtaagcaggaaatgaatactccggctgcaatgtctaccctggataaggatgc

SEQ ID NO: 755179 - DNA, 75 bp, synthetic construct
  source 1..75: mol_type = other DNA
gaacttgaacaggcgtttggtattgcggcaacaggagccaaacttgggtcatttgagctgaaggatatggcaaaa

SEQ ID NO: 755180 - DNA, 75 bp, synthetic construct
  source 1..75: mol_type = other DNA
tgatgctggcgaaacaaaatatgccgttcttgactctaaaagcggtaaatataacgaggctagtattgaaataac

SEQ ID NO: 755181 - DNA, 75 bp, synthetic construct
  source 1..75: mol_type = other DNA
gtgtgaatgtgttgtcaggagccaaaccatcgattgatgttcaggttggcgctaatgatggtcaaataattacta

SEQ ID NO: 755182 - DNA, 75 bp, synthetic construct
  source 1..75: mol_type = other DNA
aacaacaccaccaccaacctgtctgaagcgcagtcccgtattcaggacgccgactatgcgaccgaagtgtcgaac

SEQ ID NO: 755183 - DNA, 75 bp, synthetic construct
  source 1..75: mol_type = other DNA
actgaacgttacggtcagttaggctcttcccggatgctgcgcctcaacagcgacctgttacggctcagccgaact

SEQ ID NO: 755184 - DNA, 75 bp, synthetic construct
  source 1..75: mol_type = other DNA
ggtttaaacagcgttgggctgacattaaagaggcgtttaacggcggtgtcgtggggattggtaagctgctgatta

SEQ ID NO: 755185 - DNA, 75 bp, synthetic construct
  source 1..75: mol_type = other DNA
tcggtgtgcaaatgctcgatgatgcctcgctcactgagtatcgtcgccagattgggcttgtcgatcaggatgtag

SEQ ID NO: 755186 - DNA, 75 bp, synthetic construct
  source 1..75: mol_type = other DNA
tcattattggcggcattgtcgggagcagcttccgctcagccgtcagtggcacccgacgcgccctagattccctgg

SEQ ID NO: 755187 - DNA, 75 bp, synthetic construct
  source 1..75: mol_type = other DNA
tatttatcacgagagcgctctactattatttgtcagtatctgaatgcatttgattcttatttatcgaaaaacaag

SEQ ID NO: 755188 - DNA, 75 bp, synthetic construct
  source 1..75: mol_type = other DNA
gaaagtcagggacatattattgcgcggccgcagtcgggttattacgttgcgccacagacaataaaaatgcagaaa

SEQ ID NO: 755189 - DNA, 75 bp, synthetic construct
  source 1..75: mol_type = other DNA
gatacgatgctcatcttcgtcgcctgcgtcgccagcttgcggaacgtaaacaacgcgcctggcaggctttgctgc

SEQ ID NO: 755190 - DNA, 75 bp, synthetic construct
  source 1..75: mol_type = other DNA
cagataaaagtgatgggttacttcttttgacaaagaataacgagccaaaagaatcgggtgcaggagtgagttttc

SEQ ID NO: 755191 - DNA, 75 bp, synthetic construct
  source 1..75: mol_type = other DNA
gggcgcttaaatacaatcagtatcaggatgagctgcaggaggcggtgggttcactcatcagcgacaatattgata

SEQ ID NO: 755192 - DNA, 75 bp, synthetic construct
  source 1..75: mol_type = other DNA
gcgggaactggtaagctgctgattaactggtcgccggcaggcctgctctataaagcctttgcggctgcgctgaaa

SEQ ID NO: 755193 - DNA, 75 bp, synthetic construct
  source 1..75: mol_type = other DNA
tctatattgatggcaagaacaagtcaccagcaccggatgtagcgaatgcgcttaagctgtccattcctgagattg

SEQ ID NO: 755194 - DNA, 75 bp, synthetic construct
  source 1..75: mol_type = other DNA
agccgggggcgcatacctgatttaccgcaactggggcgcaataagccgctggttctcgcagcggtgggaggaagt

SEQ ID NO: 755195 - DNA, 75 bp, synthetic construct
  source 1..75: mol_type = other DNA
atggcgctctatggccagggagcagagacttatggtatcgcccgaacgctgggcgcaccggtcatggcctctgtc

SEQ ID NO: 755196 - DNA, 75 bp, synthetic construct
  source 1..75: mol_type = other DNA
cgcagaaaaaagcgcgactggtggcgttgctcaatcagtacaacgtgatgttgattgaagatgacgtttacagcg

SEQ ID NO: 755197 - DNA, 75 bp, synthetic construct
  source 1..75: mol_type = other DNA
ctgattgaagatgatgtctacagcgagttgtactttgggcgggaaaaaccgctgcctgcaaaagcctgggatcaa

SEQ ID NO: 755198 - DNA, 75 bp, synthetic construct
  source 1..75: mol_type = other DNA
gaaagtcagggatatattattgcgcggccacagtcaggttattacgtagcgtcgcgtacggtaaaatcaccattg

SEQ ID NO: 755199 - DNA, 75 bp, synthetic construct
  source 1..75: mol_type = other DNA
gaaaatcagcctttacaactaggaacaggttatcccttagtcaaagctcttctgggtctgaatcagtatcgtcaa

SEQ ID NO: 755200 - DNA, 75 bp, synthetic construct
  source 1..75: mol_type = other DNA
atgcctttagatttaagtaacaccttagttattggcatcagcgcaaccgcgcttttcgacatgagtgaatccgat

SEQ ID NO: 755201 - DNA, 75 bp, synthetic construct
  source 1..75: mol_type = other DNA
gcgaactggtgctcaatgcggataacaataattttaccggcgagatgcggatcgaaaacggtgaagtgacgctcg

SEQ ID NO: 755202 - DNA, 75 bp, synthetic construct
  source 1..75: mol_type = other DNA
caacaaggaaagagtggtggagccagaacaattatcttttttaaatcagcaaatcatgtgtttttttatgatggt

SEQ ID NO: 755203 - DNA, 75 bp, synthetic construct
  source 1..75: mol_type = other DNA
aattgcaggacaagagattgcagaatcagcaagctatggagcaggcaaagcgagataaggccgatgcgtacaact

SEQ ID NO: 755204 - DNA, 75 bp, synthetic construct
  source 1..75: mol_type = other DNA
agacgcagccgcgaaacgccagcaactgttagaccagaacgcagaaaacatctataaaatgatgctgggtgctga

SEQ ID NO: 755205 - DNA, 75 bp, synthetic construct
  source 1..75: mol_type = other DNA
gtttctcagaacatggggaacatcgcaaacatcaagtctactaacgttagcggtatggctcatgatggtattgat

SEQ ID NO: 755206 - DNA, 75 bp, synthetic construct
  source 1..75: mol_type = other DNA
atcgataaagagaaatcggatgctgaacaagattataagaccgataaactcaagattgatgggatcaccgatccg

SEQ ID NO: 755207 - DNA, 75 bp, synthetic construct
  source 1..75: mol_type = other DNA
gaaaaccaacctttacagcccggaacaggctaccctttagtcaaagcgttgctgggtctgaaccagtaccgtcaa

SEQ ID NO: 755208 - DNA, 75 bp, synthetic construct
  source 1..75: mol_type = other DNA
taacccgtttgctaaatttaatgcaatcgataaagagaaatcggaagccgaacaagattataaaaccgataaact

SEQ ID NO: 755209 - DNA, 75 bp, synthetic construct
  source 1..75: mol_type = other DNA
gaagaatatatgcgtcgtgtgaatgataccgagcaaaactattctcagattgatagtcatttacagggaatggat

SEQ ID NO: 755210 - DNA, 75 bp, synthetic construct
  source 1..75: mol_type = other DNA
tcaggcattacgcaggactggagtatcgctgatgggcaatggctggttttttcggatatgaccaataacgccagc

SEQ ID NO: 755211 - DNA, 75 bp, synthetic construct
  source 1..75: mol_type = other DNA
gagcaaaccaagcgagtcacttcaacctgccttgttcaccacgagggcaatcgctacagcgttcctgccagttac

SEQ ID NO: 755212 - DNA, 75 bp, synthetic construct
  source 1..75: mol_type = other DNA
gagtgtgtgcctttgcccgacagtggaaagattccgaacagttcaaggcgcaaacctcgggcaagggttgtttca

SEQ ID NO: 755213 - DNA, 75 bp, synthetic construct
  source 1..75: mol_type = other DNA
cgctgggtaacgccagtatcgccaccgatgcatacgccactgcgtatcgcctcgatccgaagaacagcgatgctg

SEQ ID NO: 755214 - DNA, 75 bp, synthetic construct
  source 1..75: mol_type = other DNA
aaggtgtttgaagactttgtcagctgcagtgtgattgccctggagaaccggcttcagttcagtgaggcacgggag

SEQ ID NO: 755215 - DNA, 75 bp, synthetic construct
  source 1..75: mol_type = other DNA
gcagatggggaatgtgaaggcgttgtttgagagtaaaccctttatcacgctcagtgaacctgcctgtggtgccgg

SEQ ID NO: 755216 - DNA, 75 bp, synthetic construct
  source 1..75: mol_type = other DNA
gaatgaaggcctggtggtaaaaagtcagggacgtcctgttttttttctacatcgtcacgcactagatagactggc

SEQ ID NO: 755217 - DNA, 75 bp, synthetic construct
  source 1..75: mol_type = other DNA
gagggcctgtcgaacaggaacgccattgaagagcttaagtctggcgctttcgttcagaacgttcagatgctcaga

SEQ ID NO: 755218 - DNA, 75 bp, synthetic construct
  source 1..75: mol_type = other DNA
ttactgttaatcagggcagttttgctggcaccatcgaaggtgctggtcagctcaccattgcgcaaaacggcagct

SEQ ID NO: 755219 - DNA, 75 bp, synthetic construct
  source 1..75: mol_type = other DNA
caagctggtttcagcgcggtagccaaaaacagggggcctggctggatagctggctgcaatacgcgtggtttagca

SEQ ID NO: 755220 - DNA, 75 bp, synthetic construct
  source 1..75: mol_type = other DNA
tgctgaatttaatgcgatggttcaagccatgcctggcggtgttgctgtgattcgtaccctgatggatcaatacgg

SEQ ID NO: 755221 - DNA, 75 bp, synthetic construct
  source 1..75: mol_type = other DNA
tcaggacatggacaccctggcgttaaactctcaaatcgcctctacgggagttgaccctttaaccggcaagccagc

SEQ ID NO: 755222 - DNA, 75 bp, synthetic construct
  source 1..75: mol_type = other DNA
ctaatcgatcagaatactgaaaacgtatacaaaatggtcttaggtgctgatccggttgatgctctgaatgcttta

SEQ ID NO: 755223 - DNA, 75 bp, synthetic construct
  source 1..75: mol_type = other DNA
ggcatcgttcaccattgccggatgcggcgttaacgccttatccggcctacgttcagcacgttactcccaggccgg

SEQ ID NO: 755224 - DNA, 75 bp, synthetic construct
  source 1..75: mol_type = other DNA
cagcgagttttggtctgtgatgcgacgaaatatggtcaggtggcgacatggctggcgttaccattaagcgagttt

SEQ ID NO: 755225 - DNA, 75 bp, synthetic construct
  source 1..75: mol_type = other DNA
gatcagatcattactgacggcggtctgccggaaagcgccagccgcacgctggcgaagcttgatctctctttgctg

SEQ ID NO: 755226 - DNA, 75 bp, synthetic construct
  source 1..75: mol_type = other DNA
tgcccgtgaggcattaagtaacgccctcaaacattcgcaagcgagtgaggtcgtggtgacggtggcgcaaaacga

SEQ ID NO: 755227 - DNA, 75 bp, synthetic construct
  source 1..75: mol_type = other DNA
agccagatgggaatggcgattgcgccgtttgataagccgcatccggtaatgcgtattcagccgattgccattagt

SEQ ID NO: 755228 - DNA, 75 bp, synthetic construct
  source 1..75: mol_type = other DNA
ctggggctataacggcaatctgctggggccggcggtgaaattacagcgcggcaaagcggtaacggttgatatcta

SEQ ID NO: 755229 - DNA, 75 bp, synthetic construct
  source 1..75: mol_type = other DNA
atacatggagatgtaaaaggccaggtcgctggaggttatgtcgcaggagggtatctggaaggtgtactgtcagag

SEQ ID NO: 755230 - DNA, 75 bp, synthetic construct
  source 1..75: mol_type = other DNA
atgcggacagagaagctggtggtctcaacactggctgcgattgccgccggtctggtggatggctcaggtgcttca

SEQ ID NO: 755231 - DNA, 75 bp, synthetic construct
  source 1..75: mol_type = other DNA
acaagtttcgatgcaatcattattactcaaagcaggtttaaccacagaacaggttgcggagctggagtccgaaaa

SEQ ID NO: 755232 - DNA, 75 bp, synthetic construct
  source 1..75: mol_type = other DNA
agctggcggcaagtcttgttcagccgggaagttgtatctatctggatgcgggaacgaccacgttagcgatagcac

SEQ ID NO: 755233 - DNA, 75 bp, synthetic construct
  source 1..75: mol_type = other DNA
tgacggcctgatgggcggcggattcctctataccaacaaggattccgtatcgttggggctggtttgtggattggg

SEQ ID NO: 755234 - DNA, 75 bp, synthetic construct
  source 1..75: mol_type = other DNA
taatggcggggtcacgaaggtattaggctggcgtgcagatgtgtctgccgggttgacttttgggccttacccgat

SEQ ID NO: 755235 - DNA, 75 bp, synthetic construct
  source 1..75: mol_type = other DNA
gcgcggcgtattacccgttggtgatcgcggcacaaccctgaagtggcggctggctgactctcatacgcagtacgg

SEQ ID NO: 755236 - DNA, 75 bp, synthetic construct
  source 1..75: mol_type = other DNA
agttgatcagcgtactaacggtgatttgaaagacttccttgctgctcaaaaatcaggtggtggtaactctcagcc

SEQ ID NO: 755237 - DNA, 75 bp, synthetic construct
  source 1..75: mol_type = other DNA
gctgtttctcagaacatggggagcatcgcaaacatcaagtctactaacgttagcggtatggctcatgatggtatt

SEQ ID NO: 755238 - DNA, 75 bp, synthetic construct
  source 1..75: mol_type = other DNA
tttgcgattacgggggttgtggtagcgctgtttgtattgctggtcgcctggaatatttttgccaaaaataaagtc

SEQ ID NO: 755239 - DNA, 75 bp, synthetic construct
  source 1..75: mol_type = other DNA
taacgtcaccgaagaaaacgctaaaaaatatgataaattttctcaaaatatcaataagctggaaaataacctgaa

SEQ ID NO: 755240 - DNA, 75 bp, synthetic construct
  source 1..75: mol_type = other DNA
gtgaacatctgacacgcaaggcagatcctaacactgatttaactctaccaaataaaccagtaagaccagaatcat

SEQ ID NO: 755241 - DNA, 75 bp, synthetic construct
  source 1..75: mol_type = other DNA
tggttatttgactggtttaatattgattgggaaaagagttctctattcagggcattagaccgactgaataaagaa

SEQ ID NO: 755242 - DNA, 75 bp, synthetic construct
  source 1..75: mol_type = other DNA
cgtattcatatgtataaaattgcaacattaggaagcggaaatccgcgtaattttacgtggaatattatttcaaat

SEQ ID NO: 755243 - DNA, 75 bp, synthetic construct
  source 1..75: mol_type = other DNA
cgtttgacaagccgcacccggtaatgcgtattcagccgattgccattagtgcctctggtgctttgccggatacct

SEQ ID NO: 755244 - DNA, 75 bp, synthetic construct
  source 1..75: mol_type = other DNA
aagtgcacgtcaagcacatgctgaagaaaatgaagctcaagtctcgcgtggaagcagcggtatgggtgcatcagg

SEQ ID NO: 755245 - DNA, 75 bp, synthetic construct
  source 1..75: mol_type = other DNA
gactggtgatggcatttttcccggcgttggcccaacgctatatgaggcgtattaccgggaatgatgaaatcgctt

SEQ ID NO: 755246 - DNA, 75 bp, synthetic construct
  source 1..75: mol_type = other DNA
ttaccgttaaaactctatattaccccagtcggagcggccggtggagttgtcataaaagcaggggaagttattgcc

SEQ ID NO: 755247 - DNA, 75 bp, synthetic construct
  source 1..75: mol_type = other DNA
gtatgttaatctcgatcctgtcattcaaccaggtcagaatctggttgtagatttgtctcagcatataagttgctg

SEQ ID NO: 755248 - DNA, 75 bp, synthetic construct
  source 1..75: mol_type = other DNA
atattagccagcgagtttccctgcgcggcagcgtcgcatggcagaagggaagtgatgattttgcccagacggcag

SEQ ID NO: 755249 - DNA, 75 bp, synthetic construct
  source 1..75: mol_type = other DNA
ggatgatacgcgccgatgaagagctgtctgatatgttccagattcaggaccatatccgcaccatcacacaccgag

SEQ ID NO: 755250 - DNA, 75 bp, synthetic construct
  source 1..75: mol_type = other DNA
catttacaaaaataaacatcaataataaaaaaataattttaatcattgaaaaaatagcacctctgacatacggaa

SEQ ID NO: 755251 - DNA, 75 bp, synthetic construct
  source 1..75: mol_type = other DNA
tctggtcataacatcgttggcgtgttcacccagccagaccgaccggcaggacgcggtaaaaaactgatgcccagc

SEQ ID NO: 755252 - DNA, 75 bp, synthetic construct
  source 1..75: mol_type = other DNA
ggccgccaagttaggggttgaagtgtccgaactggcacctgcaccagagaacgaggccaatacccggttcaaagc

SEQ ID NO: 755253 - DNA, 75 bp, synthetic construct
  source 1..75: mol_type = other DNA
agttactggaccatatcggtattgacccgtcaggggtggggcagattctggattcactggcggaagccgggatcc

SEQ ID NO: 755254 - DNA, 75 bp, synthetic construct
  source 1..75: mol_type = other DNA
tgttcattctgatacccaaaaaaaactcgaagtccacgctggctgcggggatcatgatgactgcactgttactga

SEQ ID NO: 755255 - DNA, 75 bp, synthetic construct
  source 1..75: mol_type = other DNA
aacccggcaacagcgcaatgatgtggcgggaaaaatgaaaattattgaggcgcggttaaatgcgctgactaacag

SEQ ID NO: 755256 - DNA, 75 bp, synthetic construct
  source 1..75: mol_type = other DNA
tggctggcagcgtagcccgcctgtactgggagtggcaaacccaggcggcgttaaacacggtcttacagcaaatcg

SEQ ID NO: 755257 - DNA, 75 bp, synthetic construct
  source 1..75: mol_type = other DNA
ttacttcttcagttgaaggtgtggaaaccgatattaatgccagcaaaacccggcagcagctcaacgatgtcgcgg

SEQ ID NO: 755258 - DNA, 75 bp, synthetic construct
  source 1..75: mol_type = other DNA
ggtacacctgactttgcagcgcgtcatctcgacgcgctgttgtcttctggtcataacgtcgttggcgtgttcacc

SEQ ID NO: 755259 - DNA, 75 bp, synthetic construct
  source 1..75: mol_type = other DNA
ttaccacagaagatactagtggtacgttgtatgacaaactggcagggcttggtccacaagggcttatcgccacgc

SEQ ID NO: 755260 - DNA, 75 bp, synthetic construct
  source 1..75: mol_type = other DNA
tatgcaaatggatgttggtttagacaccggtgacatgctctataagctctcctgcccgattactgcagaagatac

SEQ ID NO: 755261 - DNA, 75 bp, synthetic construct
  source 1..75: mol_type = other DNA
aggccgcagacaaactctccaatgatgagtggaagctcatcctcgccaagaaaaaaggtaaagggaaacccttca

SEQ ID NO: 755262 - DNA, 75 bp, synthetic construct
  source 1..75: mol_type = other DNA
gggaaacccgcgaatggctgggctggggccatgcctgggtgcatgaaaccgcggtggtccgacggaagagcgagg

SEQ ID NO: 755263 - DNA, 75 bp, synthetic construct
  source 1..75: mol_type = other DNA
cgcagccgatcttggcacctggggagatttgtggccggtaaaggagccggacatgctgacggtgattatgcagcg

SEQ ID NO: 755264 - DNA, 75 bp, synthetic construct
  source 1..75: mol_type = other DNA
gagaaatggagctggaaggccgtggtattgtcagccatcttgaatggcggattgatgaatcagcgttaagcgaaa

SEQ ID NO: 755265 - DNA, 75 bp, synthetic construct
  source 1..75: mol_type = other DNA
aatgcccgggtggagcctaaaggtaacgccattcttatcaccaaacaggccagcggacggggaaaaattgacccg

SEQ ID NO: 755266 - DNA, 75 bp, synthetic construct
  source 1..75: mol_type = other DNA
ggtggcagccgatccgaatacggtgtccggtatcaagtccgtgggtacgctgattgatgagttatggctgtttgg

SEQ ID NO: 755267 - DNA, 75 bp, synthetic construct
  source 1..75: mol_type = other DNA
accggtgtccgccatatcaaggaagtgttcattctgatacccaaaaaaaacagcaagtccacactggccgccggg

SEQ ID NO: 755268 - DNA, 75 bp, synthetic construct
  source 1..75: mol_type = other DNA
ttaaggagcgggtgatccgcaacagtctgcggccccctgccgtgcccggtatcggacgcacagagaaatacggga

SEQ ID NO: 755269 - DNA, 75 bp, synthetic construct
  source 1..75: mol_type = other DNA
ttaaggagcgggtgatccgaaacagtctgcggccccctgccgtgcccggtatcggacgcaccgagaaatacggca

SEQ ID NO: 755270 - DNA, 75 bp, synthetic construct
  source 1..75: mol_type = other DNA
tcgaaacaaaatacaaagtatggccttaagaaatgctaatgattattctgttgaaaaaataagtcggcagtggtt

SEQ ID NO: 755271 - DNA, 75 bp, synthetic construct
  source 1..75: mol_type = other DNA
aggcagaggtgacacgacaggctgatgtgacgcgcatactgccgctgattaacgagctggaggcgctgccagaac

SEQ ID NO: 755272 - DNA, 75 bp, synthetic construct
  source 1..75: mol_type = other DNA
ttaaggagcgggtgatccgcaacagtctgcggccccctgccgtgcccggtatcggacgcacggagaaatacggaa

SEQ ID NO: 755273 - DNA, 75 bp, synthetic construct
  source 1..75: mol_type = other DNA
ttaaggagcgggtgatccgcaacagtctgcggccccctgccgtgcccggtatcggacgcactgagaaatacggta

SEQ ID NO: 755274 - DNA, 75 bp, synthetic construct
  source 1..75: mol_type = other DNA
aacccggcagcagcgcaacgatgcggcgggaaaaatgaaaattattgaggcgcggttaagtgcgctgactaacag

SEQ ID NO: 755275 - DNA, 75 bp, synthetic construct
  source 1..75: mol_type = other DNA
gaaaaagggctgaacactgccaccggcgctgccggggaagggggtaacgaaaaagcagccttcattactccaggg

SEQ ID NO: 755276 - DNA, 75 bp, synthetic construct
  source 1..75: mol_type = other DNA
tggaagtcaggggggactggccgggagccgctgaggcatggctacgggctgcgcagtctgctccccggacagact

SEQ ID NO: 755277 - DNA, 75 bp, synthetic construct
  source 1..75: mol_type = other DNA
cgctcaggtctggcgctggcagcgtgccggaggccgggctgttattctggaagtcagggggctctggatggaagc

SEQ ID NO: 755278 - DNA, 75 bp, synthetic construct
  source 1..75: mol_type = other DNA
gtccctatccaaacgtaccgcgcaggtgatgatgcaagcatccctcaaatatttgtctcccaagcttgaaccaaa

SEQ ID NO: 755279 - DNA, 75 bp, synthetic construct
  source 1..75: mol_type = other DNA
acactgaactgaacgccgaggtccccctgtcggatgatctcaatgtcagtctgaacgccatgacacaacacagca

SEQ ID NO: 755280 - DNA, 75 bp, synthetic construct
  source 1..75: mol_type = other DNA
ggtgatgaagaagcactgtcgaaaggcgtctataacacctatatcgaagataacctgcgctattcacagaacgcg

SEQ ID NO: 755281 - DNA, 75 bp, synthetic construct
  source 1..75: mol_type = other DNA
gtcaccagtttgacccggtgctgaaacagctggcacaacagtacggtttttccgtttttccctacaccctggatg

SEQ ID NO: 755282 - DNA, 75 bp, synthetic construct
  source 1..75: mol_type = other DNA
gccgcgtttgtggtgttgaaatcgccgtcggttccttcggtgctggtggaaacctcgtttatcaccaacccggaa

SEQ ID NO: 755283 - DNA, 75 bp, synthetic construct
  source 1..75: mol_type = other DNA
tacggattttccgtatttccctataccctggatggtcagggtgatacggccttcccgcaggcgttacctgcacca

SEQ ID NO: 755284 - DNA, 75 bp, synthetic construct
  source 1..75: mol_type = other DNA
atcagtgaactgctaaaaaacgtatcacaggatactcccaaagttgatatgaaacaggctcaacagtatttgtct

SEQ ID NO: 755285 - DNA, 75 bp, synthetic construct
  source 1..75: mol_type = other DNA
tagttacatctattccggtactcttattaattttagtcgcgctgatattcgttaaatctgccgtcaaaatcgtgc

SEQ ID NO: 755286 - DNA, 75 bp, synthetic construct
  source 1..75: mol_type = other DNA
ttaccgcttttacagggggcaacggatgccgccggttttatggcgcagatggataccgttctgcagatgtacgga

SEQ ID NO: 755287 - DNA, 75 bp, synthetic construct
  source 1..75: mol_type = other DNA
agtttataaagattcttgaaagtgagttggggctggcataccggacatctgtgagaatgatgcaggcatcgacaa

SEQ ID NO: 755288 - DNA, 75 bp, synthetic construct
  source 1..75: mol_type = other DNA
gctcatgacatccgcgtgattcgcctgccacgtcacggcgcatcctgcccggtcggtatgggcgtctcctgttct

SEQ ID NO: 755289 - DNA, 75 bp, synthetic construct
  source 1..75: mol_type = other DNA
cagccattttttagctacccacgtgttttaggtcatgaaatatgtggggagattattgatgcagggaaaaatatt

SEQ ID NO: 755290 - DNA, 75 bp, synthetic construct
  source 1..75: mol_type = other DNA
tttaaaggtgagttgcagttctccgatccggaattccataaaaaagaaacgacgatgatgggcagccgcaacgcc

SEQ ID NO: 755291 - DNA, 75 bp, synthetic construct
  source 1..75: mol_type = other DNA
gaacgggctaacggcctgcttttgcaagggcaatggctggatgcttccatccagctcaccaatgcgttgggtggc

SEQ ID NO: 755292 - DNA, 75 bp, synthetic construct
  source 1..75: mol_type = other DNA
taatgccaatcttgatattgcgaaagcagaaagtaacttatcgattgccagctacaacaaagcggtggtcgacgc

SEQ ID NO: 755293 - DNA, 75 bp, synthetic construct
  source 1..75: mol_type = other DNA
tgaaagtcgaccttaaccgcccgatgaaagagatccttgcccagctttcgcaatacccggtatccacccgcttgt

SEQ ID NO: 755294 - DNA, 75 bp, synthetic construct
  source 1..75: mol_type = other DNA
ggcagcctgcgcatccttccagaagaacttccccctgaaaagcatgaccatgtggatttggtgatgagcaacggc

SEQ ID NO: 755295 - DNA, 75 bp, synthetic construct
  source 1..75: mol_type = other DNA
gaaagattttctacaaagtgaaggtaaaccgggttatttcgctcaggaattgcaggtttacgggcgtaaaggcga

SEQ ID NO: 755296 - DNA, 75 bp, synthetic construct
  source 1..75: mol_type = other DNA
tgtggatttggtgatgagcaacggtaaagtgctgcgctacaccgatccgcgccgctttggtgcctggctgtggac

SEQ ID NO: 755297 - DNA, 75 bp, synthetic construct
  source 1..75: mol_type = other DNA
atgcctggggtggaaatcaaccatttttttagttatccacgtgttttaggccatgaaatatgtggggagattgtt

SEQ ID NO: 755298 - DNA, 75 bp, synthetic construct
  source 1..75: mol_type = other DNA
ttgatggcgcacatgtggtggtggtggataccagtccggcgcggcgtgagcatgtgataaggcgtctggagctgc

SEQ ID NO: 755299 - DNA, 75 bp, synthetic construct
  source 1..75: mol_type = other DNA
attcgccacggcggcacggtggtatttgtcggcctgtttaaaggcgagttgcaattctctgacccggagttccat

SEQ ID NO: 755300 - DNA, 75 bp, synthetic construct
  source 1..75: mol_type = other DNA
gccgccaccgctggtggcccgaatgcgtagtcacagttcggagtatcaccgggagattgtcgagcgacgggatcg

SEQ ID NO: 755301 - DNA, 75 bp, synthetic construct
  source 1..75: mol_type = other DNA
ggcgatcgaaaaggcgatgccgcctttgctggtggcccgtatgcgcagccacagttctgaatattaccgtgagat

SEQ ID NO: 755302 - DNA, 75 bp, synthetic construct
  source 1..75: mol_type = other DNA
attacggcacaaatcgtcagcattattcgtgagctggcggaaacaaacattacccaggtgatcgtcacccacgaa

SEQ ID NO: 755303 - DNA, 75 bp, synthetic construct
  source 1..75: mol_type = other DNA
tccgctgggtggagaaagatactcctgatgcggttaaaaaaattcaggcgttgttaccggctatcgaaaaagcaa

SEQ ID NO: 755304 - DNA, 75 bp, synthetic construct
  source 1..75: mol_type = other DNA
gcgaaaattaccaaagcgtatttcgaactgggaatgacgttcccggaactgtacgacgacagccatccggaagcc

SEQ ID NO: 755305 - DNA, 75 bp, synthetic construct
  source 1..75: mol_type = other DNA
cctccggtaagaatgcagaactgtgggcaacaggtataaaatatgatgccaacaacatttactttgcagctaatt

SEQ ID NO: 755306 - DNA, 75 bp, synthetic construct
  source 1..75: mol_type = other DNA
aagtagtattatcatattagcccaacctattgcacaagcatttcagccaaagatgacctcagcttttactcacgg

SEQ ID NO: 755307 - DNA, 75 bp, synthetic construct
  source 1..75: mol_type = other DNA
ctcctgaaatggtggaaagcggggctcacctgctgatggaaaacctcgccatggtcaatccgaatctcggctatt

SEQ ID NO: 755308 - DNA, 75 bp, synthetic construct
  source 1..75: mol_type = other DNA
ggccagcggacgggggaaaattgacccgctgatggcgctcttcaatgcggtatccctgatgtccctgaatccgga

SEQ ID NO: 755309 - DNA, 75 bp, synthetic construct
  source 1..75: mol_type = other DNA
tttctggtggtcagcagcagcgtgttgctattgcccgtgcgttgatgatggaaccgcaggtactgctgttcgatg

SEQ ID NO: 755310 - DNA, 75 bp, synthetic construct
  source 1..75: mol_type = other DNA
gtgtactgggggttgagcaaagatcaggcgctggcccgtgcagaaaaactgctggaacgtctgcgtctcaaacct

SEQ ID NO: 755311 - DNA, 75 bp, synthetic construct
  source 1..75: mol_type = other DNA
tttatctcatttatcctatcgttgttattctgtgtttatatccaaatcaaattatatttgtttggacaggagata

SEQ ID NO: 755312 - DNA, 75 bp, synthetic construct
  source 1..75: mol_type = other DNA
cgtgagatcgtcgaacggagggatcggctggggaaggatgtcgatgattttgttgcgtcagcggttgttttgtat

SEQ ID NO: 755313 - DNA, 75 bp, synthetic construct
  source 1..75: mol_type = other DNA
atttgaagagtgtaaaaagtacggtatcgaaccgctggtcacgttgtgccacttcgatgtgccgatgcatctggt

SEQ ID NO: 755314 - DNA, 75 bp, synthetic construct
  source 1..75: mol_type = other DNA
agatcctgaaaaacaccgtcgattttgtctctttcagctattacgcctcgcgctgcgcctcggcggagatgaacg

SEQ ID NO: 755315 - DNA, 75 bp, synthetic construct
  source 1..75: mol_type = other DNA
ttttttatcgatgtgcaggcgcggggcgcgtatccggcttactctgcccgcgtattccgcgaaaaaggggtaacc

SEQ ID NO: 755316 - DNA, 75 bp, synthetic construct
  source 1..75: mol_type = other DNA
tgataatccggtgctgattatgggtgatatgaatatcagccctacagacctggatatcggcattggcgaagagaa

SEQ ID NO: 755317 - DNA, 75 bp, synthetic construct
  source 1..75: mol_type = other DNA
tgaaaccggcatcgactatgaaattcgcagtatggaaaaaccgtccgatcacgcaccggtgtgggcaactttccg

SEQ ID NO: 755318 - DNA, 75 bp, synthetic construct
  source 1..75: mol_type = other DNA
tggatattggcattggcgaagagaaccgtaagcgctggctgcgtaccggaaaatgctctttccttccggaagaac

SEQ ID NO: 755319 - DNA, 75 bp, synthetic construct
  source 1..75: mol_type = other DNA
cgcgcaatgggcgaagcgattgcagatggcattccgctgatgggctacaccacatggggctgtattgatttagtt

SEQ ID NO: 755320 - DNA, 75 bp, synthetic construct
  source 1..75: mol_type = other DNA
tcattgttgatgaaggcattcctgcggatagtctggaaggcctgcgaaaggctggggttgaagtgattctggtcg

SEQ ID NO: 755321 - DNA, 75 bp, synthetic construct
  source 1..75: mol_type = other DNA
atgctgtttcttggtgtagatgcgatcgatctggagtgcggcatcagcacgcataatgaagatgaagcccgttta

SEQ ID NO: 755322 - DNA, 75 bp, synthetic construct
  source 1..75: mol_type = other DNA
gattcaaagtgttccgtacctcaattgcctggagccgcctcttcccgcagggcgatgaactgacgcccaaccagc

SEQ ID NO: 755323 - DNA, 75 bp, synthetic construct
  source 1..75: mol_type = other DNA
aacgctacggttttgtctacgtagaccgtgacgacgcaggcaacggcacgctgacgcgcacgcgtaagaaatcgt

SEQ ID NO: 755324 - DNA, 75 bp, synthetic construct
  source 1..75: mol_type = other DNA
agtgcggcgaacgtggtgaaatcgctgcgtaacccgtatctacaagtgagcgactggggctggggaattgatcca

SEQ ID NO: 755325 - DNA, 75 bp, synthetic construct
  source 1..75: mol_type = other DNA
ggccgtgacagggaaacccgcgaatggctgggctggggccatgcctgggcgcatgaaaccgcggtggtcagacgg

SEQ ID NO: 755326 - DNA, 75 bp, synthetic construct
  source 1..75: mol_type = other DNA
agctgctgaatacgccaatgtctaacggcgtggaatatttgctgatgctgggcttcttcatcgcgtttgcggtga

SEQ ID NO: 755327 - DNA, 75 bp, synthetic construct
  source 1..75: mol_type = other DNA
tttattcgctggcgatgctgcatcgcgcttacttcggtaaagcgaaaagccagattgccagccaggaactgccag

SEQ ID NO: 755328 - DNA, 75 bp, synthetic construct
  source 1..75: mol_type = other DNA
ctggcagaccgaacgctttggcgtaaaggtgccgcgctggatcgcgctaatcaccatgggattgacgctggcgct

SEQ ID NO: 755329 - DNA, 75 bp, synthetic construct
  source 1..75: mol_type = other DNA
agattgaatggatgaagcgccagacgcctcccacactggagagcaaaattatcctggtgcagggcagtatcccgg

SEQ ID NO: 755330 - DNA, 75 bp, synthetic construct
  source 1..75: mol_type = other DNA
gcggtcagctttatgaacgtatccacacccgcgacatgcgcatgatgggcggtctgtggagcaagatgaaatggc

SEQ ID NO: 755331 - DNA, 75 bp, synthetic construct
  source 1..75: mol_type = other DNA
ctggctgccggatgcgcactctcaggcaccgactgccggttccgttgacctcgcggggatcttgctgaaaaccgc

SEQ ID NO: 755332 - DNA, 75 bp, synthetic construct
  source 1..75: mol_type = other DNA
ccagggctggaagctgggcggggccataaaaaccaccgagcgcaaactggctgaggggtactggtgcatggtggt

SEQ ID NO: 755333 - DNA, 75 bp, synthetic construct
  source 1..75: mol_type = other DNA
ccctgcgttctgaccgctgggcgggcgcggatttctgggagcagcagggcaggcgcgtcagcctggacgatatcc

SEQ ID NO: 755334 - DNA, 75 bp, synthetic construct
  source 1..75: mol_type = other DNA
ggccagcggacggggaaaaattgacccgctgatggcgctcttcaatgcggtgtccctgatgtccctgaatccgga

SEQ ID NO: 755335 - DNA, 75 bp, synthetic construct
  source 1..75: mol_type = other DNA
gcaccgaccgccggttccgttgacctcgcggggatcttgctgaaaactgccgcttacggtctgctgcgtttctcc

SEQ ID NO: 755336 - DNA, 75 bp, synthetic construct
  source 1..75: mol_type = other DNA
ctggcagaccgaacgctttggcgtcaaggtgccgcgctggatcgcgctggtaaccatgggattgacgctggcgct

SEQ ID NO: 755337 - DNA, 75 bp, synthetic construct
  source 1..75: mol_type = other DNA
gatctgtggccggtaaaggagccggacatgctgacggtgatcatgcagcgcctgacggcgctggagcagtccggt

SEQ ID NO: 755338 - DNA, 75 bp, synthetic construct
  source 1..75: mol_type = other DNA
ttaccatggtgcagatggaatacatataggcgtagataaagataataaaaaattatgtttatactggggcgagtc

SEQ ID NO: 755339 - DNA, 75 bp, synthetic construct
  source 1..75: mol_type = other DNA
ttgaagctttatacgaacaagccggaaaatctgcacgcttgcgcgctcatctcttattgcacaattcgcaccgag

SEQ ID NO: 755340 - DNA, 75 bp, synthetic construct
  source 1..75: mol_type = other DNA
agtgggaaatgtttgtcgtcatgcaagggcaattagaagtttgtttgtatgagcaaaatggtgagatccaaaaac

SEQ ID NO: 755341 - DNA, 75 bp, synthetic construct
  source 1..75: mol_type = other DNA
cctttcagaaagaaaaagagcacattatttattacacacatcacatcaagataaagttcaaagattaataataac

SEQ ID NO: 755342 - DNA, 75 bp, synthetic construct
  source 1..75: mol_type = other DNA
atcatgatgacggcgctgttactgaactggcggcaggcggcgggctacaccattctggccccgactgtggaggtg

SEQ ID NO: 755343 - DNA, 75 bp, synthetic construct
  source 1..75: mol_type = other DNA
acatgacgattgtccgtcgggtcggggatgacacggcggaagtggcggagtatgtgcgtcgtattcatgaggctg

SEQ ID NO: 755344 - DNA, 75 bp, synthetic construct
  source 1..75: mol_type = other DNA
atgcactggcgatttttaaacaactgcggattgtggatgcaccgggcagcccgacgttcggggagtcctgtgcac

SEQ ID NO: 755345 - DNA, 75 bp, synthetic construct
  source 1..75: mol_type = other DNA
ccccattttcatgaattgccacatcagtgggaaatgtttattgttatggaaggccagataaaggtttgtctctac

SEQ ID NO: 755346 - DNA, 75 bp, synthetic construct
  source 1..75: mol_type = other DNA
agtgggaaatgttcattgttatggaggggcaacttcaggtttgtttgtatggtagaaatggtgaggttataaagc

SEQ ID NO: 755347 - DNA, 75 bp, synthetic construct
  source 1..75: mol_type = other DNA
aaatgcattaaagaaatttttggatcccgatgagcctgagtttaataaactagagtatcgtggtatttgtttggt

SEQ ID NO: 755348 - DNA, 75 bp, synthetic construct
  source 1..75: mol_type = other DNA
aggttccggcacgggtgagtgctgttcccggcgatcgcttcctgaaggtggaatttattccggcaggggagggca

SEQ ID NO: 755349 - DNA, 75 bp, synthetic construct
  source 1..75: mol_type = other DNA
ctctgccagcgcctcggcatcgatcaggttccggcacgggtgagtgctgttcccggcgatcgcttcctgaaggtg

SEQ ID NO: 755350 - DNA, 75 bp, synthetic construct
  source 1..75: mol_type = other DNA
ctctgccagcgcctcggcatcggacaggtaccggcacgggtgagtgcagtccccggcgatcgcttcctgaaggtg

SEQ ID NO: 755351 - DNA, 75 bp, synthetic construct
  source 1..75: mol_type = other DNA
atgcaaaagcaagctgagttgtatcgtggtaaagcgaaaaccgtatacagcacggaaaacccggatctgttggtg

SEQ ID NO: 755352 - DNA, 75 bp, synthetic construct
  source 1..75: mol_type = other DNA
actcaacccaaatatgcaaaaagcgggcggtatttttgtccgtgaagaccgaactgacgcccattaccggttgtg

SEQ ID NO: 755353 - DNA, 75 bp, synthetic construct
  source 1..75: mol_type = other DNA
caggttgcggtctgtacaaatgcgccgacggctacatcgtaatggaactggtgggtattactcagattgcagaat

SEQ ID NO: 755354 - DNA, 75 bp, synthetic construct
  source 1..75: mol_type = other DNA
aatcttactgcgaaacctttggctgggtaagcaaagagaacctggcgcgtatgaaagagttgacctacaaagcga

SEQ ID NO: 755355 - DNA, 75 bp, synthetic construct
  source 1..75: mol_type = other DNA
aatcttactgcgaaacctttggctgggtgagcaaagagaacctggcgcgaatgaaagagctgacctacaaagcga

SEQ ID NO: 755356 - DNA, 75 bp, synthetic construct
  source 1..75: mol_type = other DNA
gccatgcatgacccgatggttaacgaatcttattgcgaaacctttggctgggtaagcaaagagaacctggcgcgt

SEQ ID NO: 755357 - DNA, 75 bp, synthetic construct
  source 1..75: mol_type = other DNA
ttgtgggcaaaaaaaaagcccgagtgggttcgggcaacagcatgagatatacatttttataatcgaatggatttt

SEQ ID NO: 755358 - DNA, 75 bp, synthetic construct
  source 1..75: mol_type = other DNA
cgtggcgaaatatgaacaggccggatgggaacttgctgatattgtcgaagtgacatatgacacttacctggaatt

SEQ ID NO: 755359 - DNA, 75 bp, synthetic construct
  source 1..75: mol_type = other DNA
ttgtttcactgaacaacgagaatgcggatattcgtctctgcgagaacgtattcagcagcaaatatgcggagaata

SEQ ID NO: 755360 - DNA, 75 bp, synthetic construct
  source 1..75: mol_type = other DNA
ccggaaggcactcagcttatccaccgtatcgaatgcccttacggcccactggttgaagagaaactcgatgcctgg

SEQ ID NO: 755361 - DNA, 75 bp, synthetic construct
  source 1..75: mol_type = other DNA
cgcagctctcccgccgcaatttgcacgcgctgtcgttaaatattttcaaagatgaaggccgcgaagcgtttctga

SEQ ID NO: 755362 - DNA, 75 bp, synthetic construct
  source 1..75: mol_type = other DNA
accgcacgagccatagcggagagctaccgtctggcggcaaatcctttaccgtcaatttcgataaacctggcaact

SEQ ID NO: 755363 - DNA, 75 bp, synthetic construct
  source 1..75: mol_type = other DNA
gaagccgttgcccgccgcctgggtgtacagctggactgttttttctattcatcatcttgccgtgctgctggcacg

SEQ ID NO: 755364 - DNA, 75 bp, synthetic construct
  source 1..75: mol_type = other DNA
cagagccagagccagagccagagccagagccagagccagagccagagccaccgaaaacaaaacgtgggaagacca

SEQ ID NO: 755365 - DNA, 75 bp, synthetic construct
  source 1..75: mol_type = other DNA
agacctacgtattctggccatcgatttcgatccgcaggcatctctgacaatgttcctgagccatgaaaattcagt

SEQ ID NO: 755366 - DNA, 75 bp, synthetic construct
  source 1..75: mol_type = other DNA
gtgaaattgccactgcagcagggattgtttctgataagagaacacctgttgcacgggtatctgataaggctaaaa

SEQ ID NO: 755367 - DNA, 75 bp, synthetic construct
  source 1..75: mol_type = other DNA
ttctccgaacgttgtcggagatgatgaccagctctggtaaccagcaagccgagctgaaaggacgggaattaccct

SEQ ID NO: 755368 - DNA, 75 bp, synthetic construct
  source 1..75: mol_type = other DNA
gaccagttctggtaaccagcaagccgagcttaaaggccgcgaattgccctgccatgttgttgatatctgcgggca

SEQ ID NO: 755369 - DNA, 75 bp, synthetic construct
  source 1..75: mol_type = other DNA
aaatcactattacgccactggacgccgacgcgtcagtgctgatttcaacaggcattgacgccacgcaaaccaacc

SEQ ID NO: 755370 - DNA, 75 bp, synthetic construct
  source 1..75: mol_type = other DNA
atgaatcagcaacgcgggtttaccctgctggagatgatgctggtgctggtcgctatcacggcaagtgtggtgctc

SEQ ID NO: 755371 - DNA, 75 bp, synthetic construct
  source 1..75: mol_type = other DNA
tattctggaacgtgactgcggcctgcagcctgccgctgtgagccgtgttcagtccattattgatgatctgcgcga

SEQ ID NO: 755372 - DNA, 75 bp, synthetic construct
  source 1..75: mol_type = other DNA
atggatcgagagttaaaaaatctgacgctgaatatcagtcaactggcggcactgtcaggtgtacatcgccagact

SEQ ID NO: 755373 - DNA, 75 bp, synthetic construct
  source 1..75: mol_type = other DNA
aaatatcgcgatgttcataaagaaccttacgtaatttttgtcgtcaacttgaaaggtggggtttcaaaaaccgtc

SEQ ID NO: 755374 - DNA, 75 bp, synthetic construct
  source 1..75: mol_type = other DNA
tgacagcagccaaccgcaggtggtgattctggccgatgggcaaatcaccccattctccatattgattgctaacca

SEQ ID NO: 755375 - DNA, 75 bp, synthetic construct
  source 1..75: mol_type = other DNA
gctggtcgctatcacggcaagcgtggtgctcttcacatatggccgggaggatgtcgccagcactcgtgcgcgcga

SEQ ID NO: 755376 - DNA, 75 bp, synthetic construct
  source 1..75: mol_type = other DNA
atcacttaggtgatgttgatttgtattatcccggtgccagtcttggcatagtagaagtcgatcctgaaacgaccg

SEQ ID NO: 755377 - DNA, 75 bp, synthetic construct
  source 1..75: mol_type = other DNA
tcaggcagagtataagccggcgcggaaactgctgggataacagcccaatggaacgcttcttcaggagtctgaaga

SEQ ID NO: 755378 - DNA, 75 bp, synthetic construct
  source 1..75: mol_type = other DNA
catgaacttcagcgatgctgcccatgaaataacggactatatcgttgggtattacaacgcgctcaggccgcacgt

SEQ ID NO: 755379 - DNA, 75 bp, synthetic construct
  source 1..75: mol_type = other DNA
tcatgaaagagctggggctggtcagttgtcagcagccgacttaccggtataagcgtggtggtcatgagcatgttg

SEQ ID NO: 755380 - DNA, 75 bp, synthetic construct
  source 1..75: mol_type = other DNA
cttgttgaaggttcgttcagtggtaaatgtacgcaattacactcccggacctttcaggtgaatgccacgaatgaa

SEQ ID NO: 755381 - DNA, 75 bp, synthetic construct
  source 1..75: mol_type = other DNA
gggtaatgttccacagcgatcagggcagccactatacaagcaggcagttccggcagttactgtggcgttaccaga

SEQ ID NO: 755382 - DNA, 75 bp, synthetic construct
  source 1..75: mol_type = other DNA
tctacgtggtggtcgatgcgggtgacgggcaggtcagtctgtcaaacaataatagttatctgggcacaacgcaaa

SEQ ID NO: 755383 - DNA, 75 bp, synthetic construct
  source 1..75: mol_type = other DNA
ggctccacccaacaaacctttgtgcacgcattgacgggctttcagaatggcactttaaatatcgatgctggtggc

SEQ ID NO: 755384 - DNA, 75 bp, synthetic construct
  source 1..75: mol_type = other DNA
ttgtcacgccagcaggcaaagcctttcaggcattacgcaggactggagcatcgccgatgggcaatggctggtttt

SEQ ID NO: 755385 - DNA, 75 bp, synthetic construct
  source 1..75: mol_type = other DNA
aaaacagaatgggtgccgacggatggttacgtaggcaaggacgaggcccggcaacaaattagcggttatatcctg

SEQ ID NO: 755386 - DNA, 75 bp, synthetic construct
  source 1..75: mol_type = other DNA
tgtcgttctctccggacagcagactgaccatcaaagcgctgaaaatggcctgggaaatccgcagtaaaccagccg

SEQ ID NO: 755387 - DNA, 75 bp, synthetic construct
  source 1..75: mol_type = other DNA
tcaggaaaggatatctgttaattttcctggctgtcgttgcttgcgtgtttacgcgtgcaaacgcggcgtcgcaga

SEQ ID NO: 755388 - DNA, 75 bp, synthetic construct
  source 1..75: mol_type = other DNA
cagctcaacgcagcttgttcagtcagcattattcctgccccacttcgtgcctcgtcctcagagattgcccggaca

SEQ ID NO: 755389 - DNA, 75 bp, synthetic construct
  source 1..75: mol_type = other DNA
agtggaatgcaggcagatcgcctggctgacctggaaagaatgttgcatctgctcagcggtaaaccgatccgtaac

SEQ ID NO: 755390 - DNA, 75 bp, synthetic construct
  source 1..75: mol_type = other DNA
atggaaagctgcacagtaaatctgacaatcgctacccctgacgctaagatgaaccgggcagggatgcaagaaaac

SEQ ID NO: 755391 - DNA, 75 bp, synthetic construct
  source 1..75: mol_type = other DNA
cacagattcttgcgtcgacattgttcctgcatcatctgccgtcctttgcacaatcagtcaaattctgggcctcac

SEQ ID NO: 755392 - DNA, 75 bp, synthetic construct
  source 1..75: mol_type = other DNA
gcacaatatattcaaaaagaggcgctggtagaacagctgcgcgaagccaatgctgcgctgattgcgcaatcgtat

SEQ ID NO: 755393 - DNA, 75 bp, synthetic construct
  source 1..75: mol_type = other DNA
ttctctggaaagtctggttcggcaacttctggagatgctggaaatggtcaccgacatggaatcgacctatttgac

SEQ ID NO: 755394 - DNA, 75 bp, synthetic construct
  source 1..75: mol_type = other DNA
ttccggataattgtaagcgtgcagcaagaaccgtattgacggggatgtgttattcagtcggcagtgctacgcgcc

SEQ ID NO: 755395 - DNA, 75 bp, synthetic construct
  source 1..75: mol_type = other DNA
tttgtaaactggtacaactttgaacataaacacagtgggatcaaatacgttacgccagccgagcgtcatcaagga

SEQ ID NO: 755396 - DNA, 75 bp, synthetic construct
  source 1..75: mol_type = other DNA
gaaaatggtagctggctttatcttgctgatttagaacatgcactacgtgttgcagggattcgtattaaaggagac

SEQ ID NO: 755397 - DNA, 75 bp, synthetic construct
  source 1..75: mol_type = other DNA
gaaaatggcagctggatttatctggctgatttagagcgcgcactacgtgttgctggcattcgcatcaaaggagag

SEQ ID NO: 755398 - DNA, 75 bp, synthetic construct
  source 1..75: mol_type = other DNA
aaatgtacgcgcttggagtattaagttcttattttcgtccccgggttagcaatgataacccttattccgaatcgc

SEQ ID NO: 755399 - DNA, 75 bp, synthetic construct
  source 1..75: mol_type = other DNA
cacgcgaacagcatcctgagcgttggggcaagcatctacgtaactgggactacatatcagaagtctacctgaatc

SEQ ID NO: 755400 - DNA, 75 bp, synthetic construct
  source 1..75: mol_type = other DNA
gggttggtgaaactttagataccgcttcctcaattctttcagccattgcaactgaggggcgcctaaaacccagag

SEQ ID NO: 755401 - DNA, 75 bp, synthetic construct
  source 1..75: mol_type = other DNA
gatggctgcttaaaaaaagaacaaatggttgtgtccgctattgccagtacacctcaaactgagttctcatggttc

SEQ ID NO: 755402 - DNA, 75 bp, synthetic construct
  source 1..75: mol_type = other DNA
atcatcatgaccggcgtttgtataaacgccggtcattcgctaacagcttcaccgttccttcccccatccaggttc

SEQ ID NO: 755403 - DNA, 75 bp, synthetic construct
  source 1..75: mol_type = other DNA
taaaaatatgactttacgactgcgcctgcaggatcagcaggaagaaacatccgtgacattatttcagggaaaaat

SEQ ID NO: 755404 - DNA, 75 bp, synthetic construct
  source 1..75: mol_type = other DNA
taatttcagttattacggctacatttaattctcagcgttttattctggatacttacaaaagtctccaggcgcaga

SEQ ID NO: 755405 - DNA, 75 bp, synthetic construct
  source 1..75: mol_type = other DNA
ttaatcaaacacaagctattagctacgaagatatgctaaagaaaaaagcaacgttgggttgctcaactgttatgc

SEQ ID NO: 755406 - DNA, 75 bp, synthetic construct
  source 1..75: mol_type = other DNA
cactgacaccataacagaggccaccctgtacgaaaacgggctgtatacgcgccacatcagactcagtcgcccagt

SEQ ID NO: 755407 - DNA, 75 bp, synthetic construct
  source 1..75: mol_type = other DNA
ttaggtggtatcgtctttggccattttggcgataaaattgggcgaaaaataacacttatctggacactggctatt

SEQ ID NO: 755408 - DNA, 75 bp, synthetic construct
  source 1..75: mol_type = other DNA
agccaattagcattatcgcgagatattcccctgacgggtatgttgattgcctcggcgatcggtattttcagttgt

SEQ ID NO: 755409 - DNA, 75 bp, synthetic construct
  source 1..75: mol_type = other DNA
caaaaaacatccacgaaatattttattggcactgggtgcgaggctggcggaaagtgtctcctctaatattattaa

SEQ ID NO: 755410 - DNA, 75 bp, synthetic construct
  source 1..75: mol_type = other DNA
tttcccgacaagaaatccgcaaaatgattcgccagcgtcgccgtgcgttaacgccacagcaacagcttgatatgg

SEQ ID NO: 755411 - DNA, 75 bp, synthetic construct
  source 1..75: mol_type = other DNA
ccgttatccatcgcagccataaaaattaaaagagcaaaaggacgtggcttctttcgtcactcgctataccagtta

SEQ ID NO: 755412 - DNA, 75 bp, synthetic construct
  source 1..75: mol_type = other DNA
atgacaatccataagaaaggtcaggcacactgggaaggcgatatcaaacgcgggaagggaacagtatctactgag

SEQ ID NO: 755413 - DNA, 75 bp, synthetic construct
  source 1..75: mol_type = other DNA
agatgaaatgcagcgttgcgaacaactggggctttctttgctcaacttccaccctggcagccatctgatgcagat

SEQ ID NO: 755414 - DNA, 75 bp, synthetic construct
  source 1..75: mol_type = other DNA
acagaacaggccgtgagacggtcatgttcagtacatttttacgtgctcagatctcgcttgcctgggttatcgggc

SEQ ID NO: 755415 - DNA, 75 bp, synthetic construct
  source 1..75: mol_type = other DNA
tttttattgcaatattttcaatttctggctgttctacatccggcaaccaaaaaatcaaaaatgaaacggcacaga

SEQ ID NO: 755416 - DNA, 75 bp, synthetic construct
  source 1..75: mol_type = other DNA
atggtcaggcaaaagtgtagcggtattaggcgcagctatttagttgctcaacttggtgagcctgataccagaacg

SEQ ID NO: 755417 - DNA, 75 bp, synthetic construct
  source 1..75: mol_type = other DNA
tctgacatctttgagcgagagtatccgccagcaaaaagaggaattgaagcttaccgagttctatcaggaatacag

SEQ ID NO: 755418 - DNA, 75 bp, synthetic construct
  source 1..75: mol_type = other DNA
aactcaactctcaaatgaaccgcgagttttacgcatccaatctctaccttcacctgagtaactggtgttctgaac

SEQ ID NO: 755419 - DNA, 75 bp, synthetic construct
  source 1..75: mol_type = other DNA
ggagaaagcagcaacccgctggttccgcctcagcaacggaacacaggtcaatcttgctgactggaaagtggtgct

SEQ ID NO: 755420 - DNA, 75 bp, synthetic construct
  source 1..75: mol_type = other DNA
gtatatcgtcaatgtgaaaaacttggcttttttaagtcattaatgtgtttctcaagttacgctgtacgtgcagta

SEQ ID NO: 755421 - DNA, 75 bp, synthetic construct
  source 1..75: mol_type = other DNA
tagcgatgatatatggtatccaaataaattaaaaaaacaaatggaatttatgcttgaaaatgacgtggagttttc

SEQ ID NO: 755422 - DNA, 75 bp, synthetic construct
  source 1..75: mol_type = other DNA
ctttataaaattagggaggccgatgatagggttaaagtacacattaatgataagaatttaggtgcagcatggagt

SEQ ID NO: 755423 - DNA, 75 bp, synthetic construct
  source 1..75: mol_type = other DNA
acatcgattgataccactgccgatgtatcactggataaagtggatgctggttttgcgattactaaaattgcactg

SEQ ID NO: 755424 - DNA, 75 bp, synthetic construct
  source 1..75: mol_type = other DNA
acatcgattgataccaccgccgatgtgtcgctggataaagtggatgccggttttgcgattacgaaaatcgcactg

SEQ ID NO: 755425 - DNA, 75 bp, synthetic construct
  source 1..75: mol_type = other DNA
tgatttgtggttccctgataaactatctaaacaaatacaattcatgaatgaaaataatatcgacttttcatttac

SEQ ID NO: 755426 - DNA, 75 bp, synthetic construct
  source 1..75: mol_type = other DNA
gaccgtaagagcggtactcttaaatggaaagcttcctctgtagatttaatattcagttcaaatcctgaattacgg

SEQ ID NO: 755427 - DNA, 75 bp, synthetic construct
  source 1..75: mol_type = other DNA
ctgggcgcggcggcaatcgctaaagctgatggcgcacaggtggtggtggcggataccagtccggcgcgccgtgaa

SEQ ID NO: 755428 - DNA, 75 bp, synthetic construct
  source 1..75: mol_type = other DNA
ttgtcggcctgtttaaaggcgagttgcaattctctgacccggagttccataaaaaagaaaccacaatgatgggta

SEQ ID NO: 755429 - DNA, 75 bp, synthetic construct
  source 1..75: mol_type = other DNA
actaaatcagtaagttggcagcatcacccacgcgttttaggccatgaaatatgtggggagattattgaatcagga

SEQ ID NO: 755430 - DNA, 75 bp, synthetic construct
  source 1..75: mol_type = other DNA
gttacagcccgaaattaactgggaagttaatgagcctgaaaaactgaagaaagtactggcatccctgacctcatt

SEQ ID NO: 755431 - DNA, 75 bp, synthetic construct
  source 1..75: mol_type = other DNA
tctggatgttaactggggtgatgaaaaagcctggctgactcaccgtcatccggaagcgctggcgaaagcaccgct

SEQ ID NO: 755432 - DNA, 75 bp, synthetic construct
  source 1..75: mol_type = other DNA
gatgctcacgagaagtttgttaaagacttcgtggcggcatgggtgaaagtgatgaacctcgaccgtttcgacctg

SEQ ID NO: 755433 - DNA, 75 bp, synthetic construct
  source 1..75: mol_type = other DNA
acaggatgtttatatccatactattattgttggtggtcaggcacaagcggacacaatagaaggttttgaaaatat

SEQ ID NO: 755434 - DNA, 75 bp, synthetic construct
  source 1..75: mol_type = other DNA
ttgaaaatgttgttgttgcggatacagacccggtaaacacaactacagcaaaagtaaaacgccttaatgctgaaa

SEQ ID NO: 755435 - DNA, 75 bp, synthetic construct
  source 1..75: mol_type = other DNA
aagttcgctaattgccatagtcgctttcatccttggtgttggcttgacgttaatccttaccctacttaagtccgc

SEQ ID NO: 755436 - DNA, 75 bp, synthetic construct
  source 1..75: mol_type = other DNA
gtggtcgtgttgtttatgcaggggcattgcccttactgtcaccagtttgacccggtactgaaacagctggcacag

SEQ ID NO: 755437 - DNA, 75 bp, synthetic construct
  source 1..75: mol_type = other DNA
cgtgcggaaatcgagcgactctggcatccggagggaatggctgcacggacaactcagccggcagcagatggccag

SEQ ID NO: 755438 - DNA, 75 bp, synthetic construct
  source 1..75: mol_type = other DNA
agtccccagagcaaggaaccactcctaagggcgatttagatcctgatatccttataaggcgagatagacgggatg

SEQ ID NO: 755439 - DNA, 75 bp, synthetic construct
  source 1..75: mol_type = other DNA
accagcgcgtgacgctgtttcgcgtctgccaggaagggctgaacaacattgtgaaacatgccgatgccagcgcgg

SEQ ID NO: 755440 - DNA, 75 bp, synthetic construct
  source 1..75: mol_type = other DNA
gaaataatggtgcccgcatcaggttacagcccgaaattaactgggaagttaatgagccggaaaaactgaagaaag

SEQ ID NO: 755441 - DNA, 75 bp, synthetic construct
  source 1..75: mol_type = other DNA
attcttcgttgggagtgtttaccgatacccctggtgttctggataacaagttttttgttaatctgctggatatgt

SEQ ID NO: 755442 - DNA, 75 bp, synthetic construct
  source 1..75: mol_type = other DNA
acaggaaacggcaaatataccatcaccagtggcctggaaggagcctggtcgacatcgccaacccagttcacaatg

SEQ ID NO: 755443 - DNA, 75 bp, synthetic construct
  source 1..75: mol_type = other DNA
ctaatctggataaagctcgcagattgttgtggccggtcaaaaaaaaatacggcgctagtatttcttggggagatt

SEQ ID NO: 755444 - DNA, 75 bp, synthetic construct
  source 1..75: mol_type = other DNA
gcattcgcaagagcatggtttaaactgacccaccgggatatgggaccggcagcccgatatcttggtaatgaagtt

SEQ ID NO: 755445 - DNA, 75 bp, synthetic construct
  source 1..75: mol_type = other DNA
gacatcgccaacccagttcacaatgcagtatctgaagaatttatataaatatgaatgggagctgcacaagagtcc

SEQ ID NO: 755446 - DNA, 75 bp, synthetic construct
  source 1..75: mol_type = other DNA
tgttggtgcaaagtctgacagggttgttactgggcgcaggcatccagcggttgcgtgaacttaaccagtcgctgc

SEQ ID NO: 755447 - DNA, 75 bp, synthetic construct
  source 1..75: mol_type = other DNA
gtttgttatcagtctctggctccagttgggattgccggatgaactgtcgcgcttcactcccttctgcctggcgct

SEQ ID NO: 755448 - DNA, 75 bp, synthetic construct
  source 1..75: mol_type = other DNA
tgcgcgagcgcgtaacggcgctgggcggcacattacacatttcctgtctgcacggcacgcgtgtcagcgtttctc

SEQ ID NO: 755449 - DNA, 75 bp, synthetic construct
  source 1..75: mol_type = other DNA
aaagccggggtggaacttgagattccctttactccgggaagaactgacgcctctcaggagcagacggatgttgcc

SEQ ID NO: 755450 - DNA, 75 bp, synthetic construct
  source 1..75: mol_type = other DNA
gcgctgggcggcacattacacatttcctgcttgcatggcacgcgtgtcagcgtttctctacctcaacgctatgtc

SEQ ID NO: 755451 - DNA, 75 bp, synthetic construct
  source 1..75: mol_type = other DNA
gagcgggcagctcatcgaacagttatccctgggcgtttacgacgcggtgcgccgcttgttagggcggttacgtcc

SEQ ID NO: 755452 - DNA, 75 bp, synthetic construct
  source 1..75: mol_type = other DNA
gagctgggaactgccatcgaatggggcggcgactggaaaacactgaaagacggacctcattttcagttgaaacgc

SEQ ID NO: 755453 - DNA, 75 bp, synthetic construct
  source 1..75: mol_type = other DNA
actggccgttatacgaaaaaatcgcccgtgcctttaaacaggctgccgcagagctgggtgtcgccatcgaatggg

SEQ ID NO: 755454 - DNA, 75 bp, synthetic construct
  source 1..75: mol_type = other DNA
atgtcgggaaaattccgtttcagtcaacgtagcgagaaaaatctggctgacgtaaagccacaactggtggcagtt

SEQ ID NO: 755455 - DNA, 75 bp, synthetic construct
  source 1..75: mol_type = other DNA
aacgtagcgagaaaaatctggctgacgtaaagccacaactggtggcagttgtacgccgtgcgctggcgttgtcgg

SEQ ID NO: 755456 - DNA, 75 bp, synthetic construct
  source 1..75: mol_type = other DNA
gagctgaatacacctgttgaatggggtggtgattgggataccctgaaagatggacctcatttccagttaaagcgc

SEQ ID NO: 755457 - DNA, 75 bp, synthetic construct
  source 1..75: mol_type = other DNA
caactggttgctgaaggtaaaagccagacaatgaacagtcgtcacctgacaggcgatgctgtggatgttgttgcc

SEQ ID NO: 755458 - DNA, 75 bp, synthetic construct
  source 1..75: mol_type = other DNA
tacattggcagccaggtgtcatgggactggcctctgtacgagaaaatcgcacaggcatttaagcaggctgccgca

SEQ ID NO: 755459 - DNA, 75 bp, synthetic construct
  source 1..75: mol_type = other DNA
atgcccggtaaattcagattcagtcgccgaagtgagaaaaatctggagggcgtcaaaccacagttggttgctgta

SEQ ID NO: 755460 - DNA, 75 bp, synthetic construct
  source 1..75: mol_type = other DNA
cagctggttgcagaaggtaagagccagaccatgaacagccgccacctgaccggtgatgcggtggatgttgtggcc

SEQ ID NO: 755461 - DNA, 75 bp, synthetic construct
  source 1..75: mol_type = other DNA
atgtcgggtaaattcagattcagccgtcgcagtgaaaaaaatctggagggcgtcaaaccacagctggttgctgtc

SEQ ID NO: 755462 - DNA, 75 bp, synthetic construct
  source 1..75: mol_type = other DNA
agaccatgaacagccgccaccttacaggtgatgcggtggatgttgttgcctgggttggcagccaggtgtcatggg

SEQ ID NO: 755463 - DNA, 75 bp, synthetic construct
  source 1..75: mol_type = other DNA
cctgcgcagtaagtatcgccagaaacagctggttgcggaagggaaaagccagaccatgaacagccgacacctgac

SEQ ID NO: 755464 - DNA, 75 bp, synthetic construct
  source 1..75: mol_type = other DNA
ccggagcggcaatggcgctctcatcgattaccgtagtgagtaacgccaaccggttgctgcggtttaaaccgaaag

SEQ ID NO: 755465 - DNA, 75 bp, synthetic construct
  source 1..75: mol_type = other DNA
agttttttgaatgtggtgatctggcgttaccctatcatgcttcgccaacaaatggcggagtttcacggtgaaacg

SEQ ID NO: 755466 - DNA, 75 bp, synthetic construct
  source 1..75: mol_type = other DNA
agagggaaagccgcgtttatttgtgttggcagacacccgtagacacccgtaggccggataaggcgctcgcgccgc

SEQ ID NO: 755467 - DNA, 75 bp, synthetic construct
  source 1..75: mol_type = other DNA
atgctttttgatgtttttcagcaataccccacggcgatgcccgtcctggcaaccgtcggaggattgatcatcggc

SEQ ID NO: 755468 - DNA, 75 bp, synthetic construct
  source 1..75: mol_type = other DNA
aacatgattccaaatatggggggcgttcctcttgtatggggcgtttccttacttggttcatcaatgctgcttgct

SEQ ID NO: 755469 - DNA, 75 bp, synthetic construct
  source 1..75: mol_type = other DNA
gatactgatattactgaagtggcgaaaaataacacgctgactgatgatgatttttctgcgggaaagtcttcgacg

SEQ ID NO: 755470 - DNA, 75 bp, synthetic construct
  source 1..75: mol_type = other DNA
aaaaagaggatcaaccccgctgccttttggaccgtgtttaagtctgggcggtatagcaacactttatctacaggc

SEQ ID NO: 755471 - DNA, 75 bp, synthetic construct
  source 1..75: mol_type = other DNA
tatggtcattgatgattctgtttctaatacacttcaggccgtgccgccgcgtgatttaggtagttacccggttat

SEQ ID NO: 755472 - DNA, 75 bp, synthetic construct
  source 1..75: mol_type = other DNA
agtacgcgatatccgagacccatatttacgatatcattcggcggcttagaaagaagcacgccaataaaatcacgc

SEQ ID NO: 755473 - DNA, 75 bp, synthetic construct
  source 1..75: mol_type = other DNA
aaaccaggtgatgcatggtgtgattcgcttgctgatatcgtgtcgcattcagtggcagaacttacccgtaatggc

SEQ ID NO: 755474 - DNA, 75 bp, synthetic construct
  source 1..75: mol_type = other DNA
gatgtttttactcagggcgtattgtggaccgggctgattgcggcatgggcgcaacagagtccgttaacgctacaa

SEQ ID NO: 755475 - DNA, 75 bp, synthetic construct
  source 1..75: mol_type = other DNA
agggaataagggatggcgaattgattatcttggtgaagaacattcagtaagcctagatgacaatgttttcctttc

SEQ ID NO: 755476 - DNA, 75 bp, synthetic construct
  source 1..75: mol_type = other DNA
tacgttcgctcaatccgctgtatccgccaatccctatgaatccagaatcaaaaattataggcgtggtggttgatg

SEQ ID NO: 755477 - DNA, 75 bp, synthetic construct
  source 1..75: mol_type = other DNA
gagctggggatcgctatcgaatggggtggggactggaaaacgctgaaagacggacctcactttcagctgaagcga

SEQ ID NO: 755478 - DNA, 75 bp, synthetic construct
  source 1..75: mol_type = other DNA
tcaactcctatcaacatgagcggcgcggcaattggtagtagtattaaaggcgaggatccgacaaattcagttatt

SEQ ID NO: 755479 - DNA, 75 bp, synthetic construct
  source 1..75: mol_type = other DNA
gagagcaggttagctataaagatgggaaagaagtaccttacggtacgaaaggaagtacccgacctgattggtgta

SEQ ID NO: 755480 - DNA, 75 bp, synthetic construct
  source 1..75: mol_type = other DNA
gctgacacactgagtaaccgtaacagtggtgaccggggcggggttatcagtcagggcccgatgacgctgaatgcc

SEQ ID NO: 755481 - DNA, 75 bp, synthetic construct
  source 1..75: mol_type = other DNA
aagctggaaggaaagaacacatccagtggtggcagcgtgggtgtcggtgttggtgtgggctccggaggctggggt

SEQ ID NO: 755482 - DNA, 75 bp, synthetic construct
  source 1..75: mol_type = other DNA
gcatggtggccgggaacccgtggctggcgaagggagaggcccgaatcattcttaatgaagtgaacagtcgcaatc

SEQ ID NO: 755483 - DNA, 75 bp, synthetic construct
  source 1..75: mol_type = other DNA
gctgaacaatcagtccggtcttattcaggggaaaggtatcagcattaataccgcaggccagacgctggataacag

SEQ ID NO: 755484 - DNA, 75 bp, synthetic construct
  source 1..75: mol_type = other DNA
gtgattgcgaacccggccggcatcagttgcgacgggtgcggttttattaatgcgaaccgggccacgctgaccacg

SEQ ID NO: 755485 - DNA, 75 bp, synthetic construct
  source 1..75: mol_type = other DNA
tgaaggtaaagatgttaaagttaatatccagccatcttatacaggtaacagcgtaaggccggataaattctatgt

SEQ ID NO: 755486 - DNA, 75 bp, synthetic construct
  source 1..75: mol_type = other DNA
atgaggctcacggttacgatattgcccttatcggtgatatagccacagcaatgattaatgccgatcgagctggcg

SEQ ID NO: 755487 - DNA, 75 bp, synthetic construct
  source 1..75: mol_type = other DNA
tacgaaccagaagacgtggctgggcagtgattacatgcagaaggcgttttctcagaacggggataacatgctcaa

SEQ ID NO: 755488 - DNA, 75 bp, synthetic construct
  source 1..75: mol_type = other DNA
cgggcaacctgactgtcagtaccaccggcgaactggcggcacacggacaggttctgtccggtggggacatgcaac

SEQ ID NO: 755489 - DNA, 75 bp, synthetic construct
  source 1..75: mol_type = other DNA
gtatcagtgcgaaaacggatgtgcatctggcgacaacccgggagctgcataacagtggttctgtttatgcggggc

SEQ ID NO: 755490 - DNA, 75 bp, synthetic construct
  source 1..75: mol_type = other DNA
gcatttggtaagcaatacaacctgaaaccgggtgtggcgctgactgctgagcagatggcgttactgaccggtgat

SEQ ID NO: 755491 - DNA, 75 bp, synthetic construct
  source 1..75: mol_type = other DNA
tcttccggcgcgacattgtctgtcagtggccgtcagctgacgttttcgaaccgtgacggcgtggttaaggccggg

SEQ ID NO: 755492 - DNA, 75 bp, synthetic construct
  source 1..75: mol_type = other DNA
acagatccggttaccggtgaggtgaataaggctgcaaatgtggctgctcatgccgtggtgaatgccgcactggct

SEQ ID NO: 755493 - DNA, 75 bp, synthetic construct
  source 1..75: mol_type = other DNA
ctgaccctttcctcgacggatatcatcaacgatgccagcggcctgatacagagcggtgcatcgctgaatctccgt

SEQ ID NO: 755494 - DNA, 75 bp, synthetic construct
  source 1..75: mol_type = other DNA
gccggcctggccggtggtctggtgggagactcagggggggcagcggtagccggcgcacagtcaggtaagacaacg

SEQ ID NO: 755495 - DNA, 75 bp, synthetic construct
  source 1..75: mol_type = other DNA
gcgcactgtcaggtaagacgactgttgagaataactatctgagcagtaagcagatagatgcttggtccgctgaaa

SEQ ID NO: 755496 - DNA, 75 bp, synthetic construct
  source 1..75: mol_type = other DNA
ccgggagagctcaccagccacggacaggttcagggcagccaggtcacgctttctcccctgaagccacagggaacg

SEQ ID NO: 755497 - DNA, 75 bp, synthetic construct
  source 1..75: mol_type = other DNA
acaccagagcgtgggtatcagcactggcggcagcatcggtggccagttcgcgggaaatatggccaacaatctgct

SEQ ID NO: 755498 - DNA, 75 bp, synthetic construct
  source 1..75: mol_type = other DNA
caggttcttccactgttcctcattctgaaaaaatagagatgagcggtgatacaacaaaggaaatataccactatg

SEQ ID NO: 755499 - DNA, 75 bp, synthetic construct
  source 1..75: mol_type = other DNA
ctggttcagtaggtctgtccgttgggcaagatgggtttggtttttccttctctattgggccgagtattggtttta

SEQ ID NO: 755500 - DNA, 75 bp, synthetic construct
  source 1..75: mol_type = other DNA
tcagcctgacggcccggacggatattaacagtaccggcgggctgctgcaggccacggacagcctgctggcgatgg

SEQ ID NO: 755501 - DNA, 75 bp, synthetic construct
  source 1..75: mol_type = other DNA
gcgtttcaattgcgctagctattagccctgtggctgtgacgtttgcagaaaaaaacaacaatcatattgaggtag

SEQ ID NO: 755502 - DNA, 75 bp, synthetic construct
  source 1..75: mol_type = other DNA
ccactgtaaattttgataagagtgtagcaattggttctggctcagttgataagttggctacagaagtaactgagg

SEQ ID NO: 755503 - DNA, 75 bp, synthetic construct
  source 1..75: mol_type = other DNA
ctgaaagcaggcgatgcggaaatgaaaaatgccgccagtgtggcagacctgaaaacggcaattgatggtgtgtcc

SEQ ID NO: 755504 - DNA, 75 bp, synthetic construct
  source 1..75: mol_type = other DNA
ctatggtgactttgctggctctaagcccataggtgttgtgtctgttggaaatgacactggagtgcgtcagattgt

SEQ ID NO: 755505 - DNA, 75 bp, synthetic construct
  source 1..75: mol_type = other DNA
ctgaccatcaaaggtggagctggtgataatgaggatgtgacagacagtaacattcgtattgatgcaaatgaaaag

SEQ ID NO: 755506 - DNA, 75 bp, synthetic construct
  source 1..75: mol_type = other DNA
tatgacggatcctaaagcaggggaagctatagctatcggtgcaaaatcagaagcaacaaaagaacagtctatcgc

SEQ ID NO: 755507 - DNA, 75 bp, synthetic construct
  source 1..75: mol_type = other DNA
gcctgtaatggcttggcgtgatgttaccattacttatacggatgcggacggtgtcgagaatagctacattaagaa

SEQ ID NO: 755508 - DNA, 75 bp, synthetic construct
  source 1..75: mol_type = other DNA
gcgctgatggtgaagtcgcagttgatgcgggggtctacacgcaatggggggcgttgatggccgacagtagtgggc

SEQ ID NO: 755509 - DNA, 75 bp, synthetic construct
  source 1..75: mol_type = other DNA
ttccgctgtttgaaggcgtacagaaaacccagaccattcgttcagcatctgatatccgcgatgtatttatcaacg

SEQ ID NO: 755510 - DNA, 75 bp, synthetic construct
  source 1..75: mol_type = other DNA
attgaaataggtactactaaattcacggcaaaagatgatgcagcagggatttttttcgaccataaatcaccggag

SEQ ID NO: 755511 - DNA, 75 bp, synthetic construct
  source 1..75: mol_type = other DNA
tggtaacgggaagattacagtaaacaatggtgatggcgataaacttgttactgcgaaaaacattgctgatgccat

SEQ ID NO: 755512 - DNA, 75 bp, synthetic construct
  source 1..75: mol_type = other DNA
ccctgaaggagaagacatcgttcacgaatactttgaagaatacgatactggtgacacggaactggttgtacatgc

SEQ ID NO: 755513 - DNA, 75 bp, synthetic construct
  source 1..75: mol_type = other DNA
ttgccataggtactagtgcagaggctggcggagagatacaggacgaaaaaggttttaaaacgggagagtccattg

SEQ ID NO: 755514 - DNA, 75 bp, synthetic construct
  source 1..75: mol_type = other DNA
ttggggctgtggttactgatattaataattccataaaatcagttggttggaatgatgttgctaaaggtcaaatat

SEQ ID NO: 755515 - DNA, 75 bp, synthetic construct
  source 1..75: mol_type = other DNA
tcataatagtcttgatgataataaaaagggaatcaggtccataccagagctttacatgctgaagaaaatgccttt

SEQ ID NO: 755516 - DNA, 75 bp, synthetic construct
  source 1..75: mol_type = other DNA
aaataaggacggatatattaaaagcacttattgatcatagtcaagaattagatctcgataatctagatgtatcta

SEQ ID NO: 755517 - DNA, 75 bp, synthetic construct
  source 1..75: mol_type = other DNA
agcctgtacgaacgaagtaatacaaaatttaggagtaaagttaaagaaaatttaataaaaataagggcgagtgat

SEQ ID NO: 755518 - DNA, 75 bp, synthetic construct
  source 1..75: mol_type = other DNA
ttgtatacaactgccagtccctgtgagttgtgtgcgaaaaaagcttatcagttaggtatatctgaaattgtattt

SEQ ID NO: 755519 - DNA, 75 bp, synthetic construct
  source 1..75: mol_type = other DNA
gaacttgatagtatacaacaagggctttatatctctacgtatcaagccgcagggaattccataagacggttgggg

SEQ ID NO: 755520 - DNA, 75 bp, synthetic construct
  source 1..75: mol_type = other DNA
atgtcgaaatcgctggcaaaggcccaataaaaacccgggtggctggagataaactggagatttcggctgagacag

SEQ ID NO: 755521 - DNA, 75 bp, synthetic construct
  source 1..75: mol_type = other DNA
ttggcgatgatatcgaaatcacaggtaaaggccctgtaaaaactagagttaacggaggtggactggagatttcgg

SEQ ID NO: 755522 - DNA, 75 bp, synthetic construct
  source 1..75: mol_type = other DNA
agcaaatgctgaaaacagtatttctttaggggcgtatgctcatattgacaatataaatgctgtcaattctatagt

SEQ ID NO: 755523 - DNA, 75 bp, synthetic construct
  source 1..75: mol_type = other DNA
gaaaaaaggtaatcaagttcatacacgtgcattacatgctgaggaaaacgcatttttacaacttgcaaaatatgg

SEQ ID NO: 755524 - DNA, 75 bp, synthetic construct
  source 1..75: mol_type = other DNA
tgctggcgctcatcctcccggcgctgtcactgagcggctgcaacagcacatcgcacacgttgaaaaccagactcg

SEQ ID NO: 755525 - DNA, 75 bp, synthetic construct
  source 1..75: mol_type = other DNA
tgttgctgtttcctcccagacagttgaagtccgtcacggacagaatacccgggtttcagccatcagtaaggatga

SEQ ID NO: 755526 - DNA, 75 bp, synthetic construct
  source 1..75: mol_type = other DNA
atctgatccgtgccattcgtgatgctcgtctgccgggagatctgcacggcttccctttgcctagcatgagcagtc

SEQ ID NO: 755527 - DNA, 75 bp, synthetic construct
  source 1..75: mol_type = other DNA
aggcaggctaacataaaaagaatgttgcctaatattaacatcggtgtaggccaatacatacaaaataatcaatgg

SEQ ID NO: 755528 - DNA, 75 bp, synthetic construct
  source 1..75: mol_type = other DNA
ccgcactacatcccagagatttaccagactttttcactcgattgggcagctttaaaggtaatcctcttacccgcc

SEQ ID NO: 755529 - DNA, 75 bp, synthetic construct
  source 1..75: mol_type = other DNA
ttccggcgtcgggcgggcggctgagtttggcgtgctggtacgggacgccgacgcgctgcaacgcgccagtacgct

SEQ ID NO: 755530 - DNA, 75 bp, synthetic construct
  source 1..75: mol_type = other DNA
cgttatcacttatttgtctagtgtagagaatttacatgaaacagaaaatgaatttcagaaaattggatatgagat

SEQ ID NO: 755531 - DNA, 75 bp, synthetic construct
  source 1..75: mol_type = other DNA
tataatatattacaaaaaatcaggtttgatattaatgtccttgaggaggaagaaagtttactgtcagataaaatt

SEQ ID NO: 755532 - DNA, 75 bp, synthetic construct
  source 1..75: mol_type = other DNA
taaggtaatgagtgaaaacacagtaaacagcgcattacgtgcgatgggatatgacacgaaaaccgaggtctgcgg

SEQ ID NO: 755533 - DNA, 75 bp, synthetic construct
  source 1..75: mol_type = other DNA
cacacagcattcgatgatgttttatttcagatcgcactggtttctcatatctatatgaatttaaataaaaaataa

SEQ ID NO: 755534 - DNA, 75 bp, synthetic construct
  source 1..75: mol_type = other DNA
gtccggcaccaaattcatatcaacggacctccacggaggtccgtttttcgtttcagaacaccatgatttaagtgt

SEQ ID NO: 755535 - DNA, 75 bp, synthetic construct
  source 1..75: mol_type = other DNA
atgacacggcttgccgttgaattaacgctactcacatttattcgttcaagtgagatgcgttttgctcgctggagt

SEQ ID NO: 755536 - DNA, 75 bp, synthetic construct
  source 1..75: mol_type = other DNA
ggtgcactaagtgagtcgaaactatggaatgatgacgctattgaaagacagttaagccacgttgaacgaaaaaac

SEQ ID NO: 755537 - DNA, 75 bp, synthetic construct
  source 1..75: mol_type = other DNA
tattcccggcgtaaaacactctgagcgtgggatgaagatgaaaactgaacatattgttccgcttagcaaacaagc

SEQ ID NO: 755538 - DNA, 75 bp, synthetic construct
  source 1..75: mol_type = other DNA
gcggcaatggcgctctcgtcgatcaccgtagtgagtaacgccaaccgattgctgcggtttaaaccgaaggaataa

SEQ ID NO: 755539 - DNA, 75 bp, synthetic construct
  source 1..75: mol_type = other DNA
gtattcccgtggaatataccgacagcaaaggcaacccgctggtgaatattggcggcaagttttatacccggactg

SEQ ID NO: 755540 - DNA, 75 bp, synthetic construct
  source 1..75: mol_type = other DNA
tcagttatatgcgatagcgaagacgctgaaagatgaccttgatgccattaatccgacgtggacgctaaaggatga

SEQ ID NO: 755541 - DNA, 75 bp, synthetic construct
  source 1..75: mol_type = other DNA
cagcctctgccgcggaggggaacgtggccatcggtgctgattcagtggacaaggcagcaactccggtttccggcg

SEQ ID NO: 755542 - DNA, 75 bp, synthetic construct
  source 1..75: mol_type = other DNA
gcggcgctggaaatcgccagccgcgtctataacggcaacgccacgccgcgtcatttcttgtggtgggccaacccg

SEQ ID NO: 755543 - DNA, 75 bp, synthetic construct
  source 1..75: mol_type = other DNA
gggataaagtgaaacagcgcgattttgtttatcacaatgaagtcattaaacctgcgctggtggggctgctggggc

SEQ ID NO: 755544 - DNA, 75 bp, synthetic construct
  source 1..75: mol_type = other DNA
agggacaaaatatttcaaggcatcctcatccggaccggcggcaaaagcagaaggcaggaacagcgtggccatagg

SEQ ID NO: 755545 - DNA, 75 bp, synthetic construct
  source 1..75: mol_type = other DNA
ttttaatgcgctggctaatgccggtaatgctctggccgttggtagtaagtcctctgcaaataaaaacgatgctct

SEQ ID NO: 755546 - DNA, 75 bp, synthetic construct
  source 1..75: mol_type = other DNA
atgctgaaaactatccgaaaacacggcattacgttagcgctatttgcagcgggttcaacagggttaactgcggcc

SEQ ID NO: 755547 - DNA, 75 bp, synthetic construct
  source 1..75: mol_type = other DNA
tatagtaccttacaaaagattaaggctgatattgaatctcttgaagaggaaaagttttttttaatagaaaaaata

SEQ ID NO: 755548 - DNA, 75 bp, synthetic construct
  source 1..75: mol_type = other DNA
gatgataatgaaactgaatgcaggtcagaacacccggggtaatttctccgtcggtgccggtgtgggctggcagtg

SEQ ID NO: 755549 - DNA, 75 bp, synthetic construct
  source 1..75: mol_type = other DNA
cgaccgggaaactgacaatgacgccggctgagccggcccgtgtcagaataagcagtgagcagcctcttgttctga

SEQ ID NO: 755550 - DNA, 75 bp, synthetic construct
  source 1..75: mol_type = other DNA
gctgcgggcggtggtcaggggaatacggtttcccttaccggctccggcctgaataacggtggaaatcagataacc

SEQ ID NO: 755551 - DNA, 75 bp, synthetic construct
  source 1..75: mol_type = other DNA
tgaccctgaacgccggaacgcttgataaccgtcagggcgtgctggggagtcaggcgtcattacagatatcgtcag

SEQ ID NO: 755552 - DNA, 75 bp, synthetic construct
  source 1..75: mol_type = other DNA
ccggtcgcgccggtacatcactgtcctcccgcacaggatatccacacaggcaacgtatctgccgtgtcacgccgc

SEQ ID NO: 755553 - DNA, 75 bp, synthetic construct
  source 1..75: mol_type = other DNA
gttctgtccggtggggacatgcaactgaaggggcaggggctggatttaggcaacagccggatacagggacaacat

SEQ ID NO: 755554 - DNA, 75 bp, synthetic construct
  source 1..75: mol_type = other DNA
tagtaaacctgctgaatatcaccagtgttgatgcacaaaatcaacaacaggtgaaggatgcgatggtgaactatg

SEQ ID NO: 755555 - DNA, 75 bp, synthetic construct
  source 1..75: mol_type = other DNA
atgaacagaaattgttaccgcattatttttaacaaagcccggggaatgctgatggtggtggcagatattgcccat

SEQ ID NO: 755556 - DNA, 75 bp, synthetic construct
  source 1..75: mol_type = other DNA
ctgaacggggatacggtcagtatcagtgccggacataatctgaacgtcacgggcagcagtgtggccggggataac

SEQ ID NO: 755557 - DNA, 75 bp, synthetic construct
  source 1..75: mol_type = other DNA
ggctgcaacggtggtgaatcagggtaaggacagcctgacgcaactcagtgcgggcagggatatgacgctttccac

SEQ ID NO: 755558 - DNA, 75 bp, synthetic construct
  source 1..75: mol_type = other DNA
taccgcatcaggaaaaaaggaaaggataagcagggggagaaaacctctcagtacactccgcccactgtaattcag

SEQ ID NO: 755559 - DNA, 75 bp, synthetic construct
  source 1..75: mol_type = other DNA
agaatctgccagcgggaatgcaacagagaattattattgatgtgcgtggtcaaatagttaccccaaatcaagaac

SEQ ID NO: 755560 - DNA, 75 bp, synthetic construct
  source 1..75: mol_type = other DNA
aaagactccgacccgggaaaaattctgtccggtgccggcatgacgattgtggcagacaaactgcttaatgataag

SEQ ID NO: 755561 - DNA, 75 bp, synthetic construct
  source 1..75: mol_type = other DNA
aataccagcaggcgatacaggccgcaacggcagcggtacagggactggccggcggtaatctgagtgcagccctgg

SEQ ID NO: 755562 - DNA, 75 bp, synthetic construct
  source 1..75: mol_type = other DNA
gcagataacggcacaaagcctgtcaaatcgtaaaggcagtctgattcagacgggaacaggggatttttcgctgag

SEQ ID NO: 755563 - DNA, 75 bp, synthetic construct
  source 1..75: mol_type = other DNA
ttcagctgctgccggaacgggcaggataaaaacacagcaggctgtcagcaatactgagggacgaatggagtccgc

SEQ ID NO: 755564 - DNA, 75 bp, synthetic construct
  source 1..75: mol_type = other DNA
gcactgccggatggcagcacgcagacggttcaggtgcctcaggtgtatgcccgcgtaaaacctggtgacgtgaac

SEQ ID NO: 755565 - DNA, 75 bp, synthetic construct
  source 1..75: mol_type = other DNA
tcaactcccatcaatatgggcggtgctgcaatcggtagtagtatcaagggagaagatccaactaactcagttatt

SEQ ID NO: 755566 - DNA, 75 bp, synthetic construct
  source 1..75: mol_type = other DNA
ttttgatatctccctgacaggattcagcccaacagaaattgacgaactgttgatggaagttttgccaggtaccgg

SEQ ID NO: 755567 - DNA, 75 bp, synthetic construct
  source 1..75: mol_type = other DNA
aaagcggcgattcgcgctaactactctaacccaccagcacacggcgcttctgttgttgccaccatcctgagcaac

SEQ ID NO: 755568 - DNA, 75 bp, synthetic construct
  source 1..75: mol_type = other DNA
agcggtctgactaaagaacaggtactgcgtctgcgtgaagagtttggcgtgtatgctgtggcttccggtcgtgtg

SEQ ID NO: 755569 - DNA, 75 bp, synthetic construct
  source 1..75: mol_type = other DNA
tctgtccacacagaatgcgcaactgagcgccggtacctttgctgcccggactgccgggcagttcagcaataatgg

SEQ ID NO: 755570 - DNA, 75 bp, synthetic construct
  source 1..75: mol_type = other DNA
cggacagaaccattttgaacgcaccagcatcgacagtgtggcgggcgtgtatgtacagaatgaccagggaagact

SEQ ID NO: 755571 - DNA, 75 bp, synthetic construct
  source 1..75: mol_type = other DNA
atggcggtgcctcactgggattatcctttggtccatattttccggggttaataaatacaaacaataacgattatt

SEQ ID NO: 755572 - DNA, 75 bp, synthetic construct
  source 1..75: mol_type = other DNA
gtgccactattgaagctgccggttccctgacactgagtgccgggcaaatcaataacgtgaatgaccatttcacca

SEQ ID NO: 755573 - DNA, 75 bp, synthetic construct
  source 1..75: mol_type = other DNA
ggtcggtgcaaatcatgaaggccatgcggacagtaccacgcagtcggcagtgtctgcagggaatatcaccatccg

SEQ ID NO: 755574 - DNA, 75 bp, synthetic construct
  source 1..75: mol_type = other DNA
cggcttggccggtggcctggtgggcgactcagggggggctgctgtagccggcgcacagtcaggtaagacgactgt

SEQ ID NO: 755575 - DNA, 75 bp, synthetic construct
  source 1..75: mol_type = other DNA
gcctgctgcgtcagcaggtaaagttcttggtggcgggcttcttggactggcggccaatagtggttatcaggtcta

SEQ ID NO: 755576 - DNA, 75 bp, synthetic construct
  source 1..75: mol_type = other DNA
gcatgtagatcatattgtggtgctgccgctttatccgcaatactcctgttcaacggtcggtgcggtatgggatga

SEQ ID NO: 755577 - DNA, 75 bp, synthetic construct
  source 1..75: mol_type = other DNA
gggttcaaaattgggtatgcaaaggtaattaaatgggaatttaacatcgcacactggagttcatcccatgaggaa

SEQ ID NO: 755578 - DNA, 75 bp, synthetic construct
  source 1..75: mol_type = other DNA
tgtccaaattatgcaaggtctttcctgaaataagtagtcaaaaaatagagattttaacattttttgtttacggaa

SEQ ID NO: 755579 - DNA, 75 bp, synthetic construct
  source 1..75: mol_type = other DNA
gggctttgctgcggattgtctggagacgctggaagagattgccgagcaaaaccgtgaagtcttcctcggtgcggg

SEQ ID NO: 755580 - DNA, 75 bp, synthetic construct
  source 1..75: mol_type = other DNA
cgttacctgaaacaatttttaagcgacaaacgcgtagttgatacctcacggctgttgtggtggccattgctgcgc

SEQ ID NO: 755581 - DNA, 75 bp, synthetic construct
  source 1..75: mol_type = other DNA
caacggtcggtgcggtatgggatgaactggcacgcattctggcgcgcaaacgtagcattccggggatatcgttta

SEQ ID NO: 755582 - DNA, 75 bp, synthetic construct
  source 1..75: mol_type = other DNA
aatggcggagtttcagggggaaacgcagaacgtacagccgaaaatgagcctggcgttgccgcgctcgcactgccc

SEQ ID NO: 755583 - DNA, 75 bp, synthetic construct
  source 1..75: mol_type = other DNA
gattgttctcaacctttgggatacggtgccggttcgccgcctgcgcgccagtttttcgcgtaaaggagcggtgtg

SEQ ID NO: 755584 - DNA, 75 bp, synthetic construct
  source 1..75: mol_type = other DNA
agtgaaattacggtaatgcatgcctgcggcctgagcaaagcggttctggtgaaagcggcaatgatccttgcggta

SEQ ID NO: 755585 - DNA, 75 bp, synthetic construct
  source 1..75: mol_type = other DNA
gtgttggtggcacaacccatcctctttttgctattgcccatcgtgctttttatccgtatgacgctcaatgcgctg

SEQ ID NO: 755586 - DNA, 75 bp, synthetic construct
  source 1..75: mol_type = other DNA
ggtcgataaactggaatcaatgcaacagcagttgcaacaaaaaaccaccacgaagaaatcaccggatggccttga

SEQ ID NO: 755587 - DNA, 75 bp, synthetic construct
  source 1..75: mol_type = other DNA
cttcgtttccggctgcaacaatcgacagccagatgctgttgaaaatggtcaatgaggcacggaaattatgtagtg

SEQ ID NO: 755588 - DNA, 75 bp, synthetic construct
  source 1..75: mol_type = other DNA
tagacgtccagggtaagaagcttcggggggagttggaggctgactctgcccgtcatgcccgccagttgttacgtg

SEQ ID NO: 755589 - DNA, 75 bp, synthetic construct
  source 1..75: mol_type = other DNA
gaacctgttagtgcatgcgcccggcgtctatgagcgtttaatgcaggtccaggaaacaggtcgcccacgggtgga

SEQ ID NO: 755590 - DNA, 75 bp, synthetic construct
  source 1..75: mol_type = other DNA
cgctggacgaatgccttgatgtcatcatcgagtccgcccactcacgtttcccggtgattagcgaagacaaagatc

SEQ ID NO: 755591 - DNA, 75 bp, synthetic construct
  source 1..75: mol_type = other DNA
gacgaagatacgcgcgatatgctcgaaggggtgatggacatcgcagaccaacgcgtccgcgacatcatgatcccc

SEQ ID NO: 755592 - DNA, 75 bp, synthetic construct
  source 1..75: mol_type = other DNA
agtcagtatccgtgacagccgggcagcttggtggtgacgggaaactgctttcgccgggcgatataacgctgaaaa

SEQ ID NO: 755593 - DNA, 75 bp, synthetic construct
  source 1..75: mol_type = other DNA
cagcattaccgccgccacagaccagcatgtacagacacatacggtggagcagaaaacctccggtctgacgcttgc

SEQ ID NO: 755594 - DNA, 75 bp, synthetic construct
  source 1..75: mol_type = other DNA
cgccagttagagaaaggggacagcttctcttttgaggagacggcgctgtacaagaaagtttatcaacttgccgaa

SEQ ID NO: 755595 - DNA, 75 bp, synthetic construct
  source 1..75: mol_type = other DNA
tttactgttttaaccatgacatatgcgattttactgatgccattacttgtcattaaatattttaaagggaggcag

SEQ ID NO: 755596 - DNA, 75 bp, synthetic construct
  source 1..75: mol_type = other DNA
agaaagcaaacgaaatattatatgcattttccataattggggttattccattaatagctatattaacacttcgaa

SEQ ID NO: 755597 - DNA, 75 bp, synthetic construct
  source 1..75: mol_type = other DNA
gtcaaactacaacaagacagcgccagttatgggtattctcgtttttctttgcacatataagacaagagaaatcat

SEQ ID NO: 755598 - DNA, 75 bp, synthetic construct
  source 1..75: mol_type = other DNA
cggctccttcatcggcttctccgcgggctttgcgatgctgtcaaaaacgcagttcccggatgttcagattctgca

SEQ ID NO: 755599 - DNA, 75 bp, synthetic construct
  source 1..75: mol_type = other DNA
tcctgacggcggggctgggtagtggttccaccttccagatgatttccgtgatcttccgtaaactgacgatggatc

SEQ ID NO: 755600 - DNA, 75 bp, synthetic construct
  source 1..75: mol_type = other DNA
tttctcccttctattacatcattgcatgatcccgtcatgacaacacttatgtcaaactacaacaagacagcacca

SEQ ID NO: 755601 - DNA, 75 bp, synthetic construct
  source 1..75: mol_type = other DNA
cttatcagttcgctaatgtgatggatatggagaactttaatatttacctcgggacgtattactccattctggata

SEQ ID NO: 755602 - DNA, 75 bp, synthetic construct
  source 1..75: mol_type = other DNA
gattgatgaattcagcggtgtagtttgtgataacgactgctggattgatgatgaagggacgtacaccattcacac

SEQ ID NO: 755603 - DNA, 75 bp, synthetic construct
  source 1..75: mol_type = other DNA
aatcttaataccgcctatttagatgctaataatgaaaaagatttcactgccgggattaacgcgctgtggaaacgt

SEQ ID NO: 755604 - DNA, 75 bp, synthetic construct
  source 1..75: mol_type = other DNA
attaccgccgtgggcgatttacaactggtgaaaacggtcgcctggtacgataacgaatatggcttcgtcacacag

SEQ ID NO: 755605 - DNA, 75 bp, synthetic construct
  source 1..75: mol_type = other DNA
gcgtggtaaagatttacgtgcttcacgcgcagcggcagaaaatatcattccccacactacgggggcggcaaaagc

SEQ ID NO: 755606 - DNA, 75 bp, synthetic construct
  source 1..75: mol_type = other DNA
ttgttgaacattccggtaatactgcgaacgatctttatgacgatggcagcggttatatctatatgatgaaagagg

SEQ ID NO: 755607 - DNA, 75 bp, synthetic construct
  source 1..75: mol_type = other DNA
taaggaatatctttctgtttatcaggatggcagtaatttaagcttgggtaacgacaacaatattgacactgccac

SEQ ID NO: 755608 - DNA, 75 bp, synthetic construct
  source 1..75: mol_type = other DNA
aaaattggccttcatggtgatactggaaaagtaacctatgatggtgcaacaaccgtaacaattgttattcctgcc

SEQ ID NO: 755609 - DNA, 75 bp, synthetic construct
  source 1..75: mol_type = other DNA
taaagcgaccattccggcagataacgtgaaggataacagtgaagttaccggggttgccaaagatccgagcggtaa

SEQ ID NO: 755610 - DNA, 75 bp, synthetic construct
  source 1..75: mol_type = other DNA
cgaaaactggataatggttatttcgccgggttctccgcacaaccgctgggggatatgcacggttcagtaaatatc

SEQ ID NO: 755611 - DNA, 75 bp, synthetic construct
  source 1..75: mol_type = other DNA
gtcgccgacggatgaattaaccgtttccgcagcgatggaagcgaacgtggtgaataatgcttacggttataccga

SEQ ID NO: 755612 - DNA, 75 bp, synthetic construct
  source 1..75: mol_type = other DNA
ccaataaaggcgataccgtggatgtcacctttgaagatgaaaaaggtggtaagcacaccgtgacgctggagaaag

SEQ ID NO: 755613 - DNA, 75 bp, synthetic construct
  source 1..75: mol_type = other DNA
ttgggccgttggtggagatataagtggatcacttttcatccgtcgttgacagcaaaagccattggtctggtgatc

SEQ ID NO: 755614 - DNA, 75 bp, synthetic construct
  source 1..75: mol_type = other DNA
gtgcgctggtgatcgccttagggttaggtaagctgtttggctgggatattggcctgacggccggtatgttagctg

SEQ ID NO: 755615 - DNA, 75 bp, synthetic construct
  source 1..75: mol_type = other DNA
gagattcttcagcgtgtggaagcaaaagataaaggggtggcagctgttgttaaactgtcacgttacctcggtttg

SEQ ID NO: 755616 - DNA, 75 bp, synthetic construct
  source 1..75: mol_type = other DNA
aagataaaggggtggcagctgttgttaaactgtcacgttatctcggtctgagaaatgaagaagctgtccagtcgg

SEQ ID NO: 755617 - DNA, 75 bp, synthetic construct
  source 1..75: mol_type = other DNA
cttggtgtcgcagcgatgagcgagacaagagaagaatacgaaaaaggaatagaaaaggtttttggaagaataaaa

SEQ ID NO: 755618 - DNA, 75 bp, synthetic construct
  source 1..75: mol_type = other DNA
gcaacctgctgctggttaaaggtgctgttccgggtgcaaccggtagcgacctgatcgttaaaccagctgtgaagg

SEQ ID NO: 755619 - DNA, 75 bp, synthetic construct
  source 1..75: mol_type = other DNA
ggtctggacactgatgccaaccgtaaggtttatttaccggtgatccgcgcctaccgcgtcggcccggagctggtg

SEQ ID NO: 755620 - DNA, 75 bp, synthetic construct
  source 1..75: mol_type = other DNA
cccgttagaaatgacagcagaaatgcgcagtgaatttgcacagctttttgccgattacgaaattatgccgccttt

SEQ ID NO: 755621 - DNA, 75 bp, synthetic construct
  source 1..75: mol_type = other DNA
gcctgtgtccatattacgtgggtaggatcaccaaccctgggccttgatgatccgcaggcgttgatttttgatttt

SEQ ID NO: 755622 - DNA, 75 bp, synthetic construct
  source 1..75: mol_type = other DNA
ggctgggccttaagttttcacccggttttaaccactacaatgttgatagcaaagcgctaatgagcttccgttctc

SEQ ID NO: 755623 - DNA, 75 bp, synthetic construct
  source 1..75: mol_type = other DNA
taatgatatggcgctgatacagctgcatcatatatcgcaacgggctaaatcccgccccttacgtgataacgcggc

SEQ ID NO: 755624 - DNA, 75 bp, synthetic construct
  source 1..75: mol_type = other DNA
tacccggcacgcattccaaaagcccctgatttctggcatccggcaatgtggtccaggccgcgacttatcactaat

SEQ ID NO: 755625 - DNA, 75 bp, synthetic construct
  source 1..75: mol_type = other DNA
gccacaattgcaccagacactgttaaagataacagtgaagtcacagcagttgctaaagatccgagtggtaatgaa

SEQ ID NO: 755626 - DNA, 75 bp, synthetic construct
  source 1..75: mol_type = other DNA
gagtaatggtttttcgtgatgatttacgtgttatgccatacggacgtgaagataatgacttttttgaaatcgaaa

SEQ ID NO: 755627 - DNA, 75 bp, synthetic construct
  source 1..75: mol_type = other DNA
cgtaacgtacgggttatgcctgaatccattccggctggctttaaggcactggctgacatgagtccgtttgaatcc

SEQ ID NO: 755628 - DNA, 75 bp, synthetic construct
  source 1..75: mol_type = other DNA
ataccattatcgaacatcgccacgatgaagcctggctgcgccatcacatccacaatgacgcgcattacgacagcc

SEQ ID NO: 755629 - DNA, 75 bp, synthetic construct
  source 1..75: mol_type = other DNA
ctcaaagaaaacatcgacgtattggatggtaccctaaaaaacctatctttaggttcagtaccaagaaatttaggg

SEQ ID NO: 755630 - DNA, 75 bp, synthetic construct
  source 1..75: mol_type = other DNA
gaagaatcaaaacatcgattcaaagagatcgtatttctttagaacatttaagaaatgaattttatgaaatatcac

SEQ ID NO: 755631 - DNA, 75 bp, synthetic construct
  source 1..75: mol_type = other DNA
tttggtggtgtatgtataacgaaagaacataaccccaacctacgagataaagcaggtagagaaggtataattgac

SEQ ID NO: 755632 - DNA, 75 bp, synthetic construct
  source 1..75: mol_type = other DNA
ggcgtgcgctatggctttgatccggtcagcgatcgttttgtccagacgaccgacacgcaataccagtacagcgat

SEQ ID NO: 755633 - DNA, 75 bp, synthetic construct
  source 1..75: mol_type = other DNA
ccgcgaagcctgcggagttaatgcgactttcatcgcggacggggtgccacagtttgctctggttaatgggctgta

SEQ ID NO: 755634 - DNA, 75 bp, synthetic construct
  source 1..75: mol_type = other DNA
gatcgctttgtccagacgaccgacacgcaataccagtacagcgatgtgaatataattgccattcatcacgcgctg

SEQ ID NO: 755635 - DNA, 75 bp, synthetic construct
  source 1..75: mol_type = other DNA
gaagcattgaacgtttctccagagtggctactttcaggcaaaacaagcgataccaaagaaatacattctaatgca

SEQ ID NO: 755636 - DNA, 75 bp, synthetic construct
  source 1..75: mol_type = other DNA
tcggtgatggccactaacggtatgcgcaccagtcaccacatcgccaataccattatcgaacatcgccatgatgaa

SEQ ID NO: 755637 - DNA, 75 bp, synthetic construct
  source 1..75: mol_type = other DNA
aagtcggaatggtctgcgccgttcggtggcacgcagcccgcgaactacatgcttgatggcgtgcgctatggtttt

SEQ ID NO: 755638 - DNA, 75 bp, synthetic construct
  source 1..75: mol_type = other DNA
aactgaaaacccgcaccctgttcaacgtgctggggccactgattaacccggcgcatccgccgctggcgttaattg

SEQ ID NO: 755639 - DNA, 75 bp, synthetic construct
  source 1..75: mol_type = other DNA
cggtatcgacctggcggaagaacgttccggcaacatgcctacccgcgaatggaaacagaaacgctttaaaaaacc

SEQ ID NO: 755640 - DNA, 75 bp, synthetic construct
  source 1..75: mol_type = other DNA
tacctgacgctggatctcaaactccagcaatatattgaaacgctgctggcgggtagccgcgcagctgtggtagtc

SEQ ID NO: 755641 - DNA, 75 bp, synthetic construct
  source 1..75: mol_type = other DNA
aaaatctggcaacagcagacacccggatcagcactctggaaaatcaggtaagcgaactggttgcacttgtccggc

SEQ ID NO: 755642 - DNA, 75 bp, synthetic construct
  source 1..75: mol_type = other DNA
tgaaagtgacccgtcaaccgtaacctcaaaaactgatgtgttaccaacagtgagtattagcgttgagacaacatc

SEQ ID NO: 755643 - DNA, 75 bp, synthetic construct
  source 1..75: mol_type = other DNA
ggtacgctgatgcgccagatcctcgaccacattatgctgggtgataacaacaccgatctgcctgcggaaaatcca

SEQ ID NO: 755644 - DNA, 75 bp, synthetic construct
  source 1..75: mol_type = other DNA
ataatgcgcacaaaattgctgagcgtctgcgtgaccacaaattgatgaccgcctttgcgccgtataacaatccac

SEQ ID NO: 755645 - DNA, 75 bp, synthetic construct
  source 1..75: mol_type = other DNA
actcaatgcgctggatggcatgatggcgcgtgagtgcaatcagcaaacacgtcttggggcgattttgaatgaaac

SEQ ID NO: 755646 - DNA, 75 bp, synthetic construct
  source 1..75: mol_type = other DNA
tggagcattgcttcaattctgcttatctggactgcgattaatcgttgtcggagtgtgctttttatgagtgctgaa

SEQ ID NO: 755647 - DNA, 75 bp, synthetic construct
  source 1..75: mol_type = other DNA
tgccggtccatttggcaaaagcgatcgcgcgttaatatttggtctgtggggtctggccattgccatttatccaca

SEQ ID NO: 755648 - DNA, 75 bp, synthetic construct
  source 1..75: mol_type = other DNA
tgatcccggacagcactggcgataaagcgaccattccggcagataatgtgaaggataacagtgaagttaccgggg

SEQ ID NO: 755649 - DNA, 75 bp, synthetic construct
  source 1..75: mol_type = other DNA
ggcagacttcgcagtggatacagtggcgccgtcggcaccggtattaaaagcagaggatgatggttctgtttctgt

SEQ ID NO: 755650 - DNA, 75 bp, synthetic construct
  source 1..75: mol_type = other DNA
actcatgttattttgcaccatattgaccgagttttgcggtttactcgcgcagacgattaacggtattcgtagtta

SEQ ID NO: 755651 - DNA, 75 bp, synthetic construct
  source 1..75: mol_type = other DNA
tatatactacagctagcccttgtgaactttgtgctaaaaaagcttatcagttaggtatgacagagattattttta

SEQ ID NO: 755652 - DNA, 75 bp, synthetic construct
  source 1..75: mol_type = other DNA
cggttatcggtaccagcccggatgctatcgaccgtgcagaagaccgtgaacgcttccagcatgcggttgaccgtc

SEQ ID NO: 755653 - DNA, 75 bp, synthetic construct
  source 1..75: mol_type = other DNA
cccggaagcgctgaccaaaattcgccgcgagctgaaagacgcaggcgcagagcgtatctggtatatcgccgatgc

SEQ ID NO: 755654 - DNA, 75 bp, synthetic construct
  source 1..75: mol_type = other DNA
gtctgaaactgaaacaaccggcgaacgccaccgttaccgctattgaaatggcggttgagaaggcgaaagagattg

SEQ ID NO: 755655 - DNA, 75 bp, synthetic construct
  source 1..75: mol_type = other DNA
cccggaagcgctgactaaaatccgccgcgaactgaaagatgcaggcgcagagcgtatctggtacatcgccgatgc

SEQ ID NO: 755656 - DNA, 75 bp, synthetic construct
  source 1..75: mol_type = other DNA
ccatactggtgattccatcactgtagcgccagcgcaaacgctgaccgacaaagaataccaaatcatgcgtaacgc

SEQ ID NO: 755657 - DNA, 75 bp, synthetic construct
  source 1..75: mol_type = other DNA
gtatcctgattctgggtgcgggcccgattgttatcggccaggcgtgtgagtttgactactctggcgcgcaagcat

SEQ ID NO: 755658 - DNA, 75 bp, synthetic construct
  source 1..75: mol_type = other DNA
ggcgacaaagagcgtgtagtggacctggcagcaaaactgctgaagcagggcttcgagctggatgcaacccacggt

SEQ ID NO: 755659 - DNA, 75 bp, synthetic construct
  source 1..75: mol_type = other DNA
tagaagtcgatgtggatgctatctgcgacggcgaaatggtgctgattggcggcattatggaacatattgagcagg

SEQ ID NO: 755660 - DNA, 75 bp, synthetic construct
  source 1..75: mol_type = other DNA
agagaaagtcgcagaagtgggcatcactggcctgaacgctgaattcctgcgccagctgaaacgcaaaggctttgc

SEQ ID NO: 755661 - DNA, 75 bp, synthetic construct
  source 1..75: mol_type = other DNA
accatggaagaagcgctggcagttgccgctgaagtgggcttcccgtgcattattcgcccatcctttaccatgggt

SEQ ID NO: 755662 - DNA, 75 bp, synthetic construct
  source 1..75: mol_type = other DNA
cccggaagcgttaaccaaaatccgtcgcgaactgaaagacgcaggcgcagagcgtatctggtacatcgccgatgc

SEQ ID NO: 755663 - DNA, 75 bp, synthetic construct
  source 1..75: mol_type = other DNA
cagagtttgccaccgacaccgcttacatgtactccacttatgaagaagagtgcgaagcgaatccgtctaccgacc

SEQ ID NO: 755664 - DNA, 75 bp, synthetic construct
  source 1..75: mol_type = other DNA
ggcgattgtgctgggcgaagcgggtatcaatccgcgtctggtgaacaaggtgcatgaaggccgtccgcacattca

SEQ ID NO: 755665 - DNA, 75 bp, synthetic construct
  source 1..75: mol_type = other DNA
caggtcagttcggtgagtaccgccataaaagttgtattcgtcatagaagccgcatttcacaattcgattggcatc

SEQ ID NO: 755666 - DNA, 75 bp, synthetic construct
  source 1..75: mol_type = other DNA
ttacgacattggcttccgcctgaaagaaaaaggtatgacggaaatttttgtccgttttccggtggtggacgaagc

SEQ ID NO: 755667 - DNA, 75 bp, synthetic construct
  source 1..75: mol_type = other DNA
tctggataactgtggccgggtgacggaagagcatgactggggcggcgtggtctggcgttaccgctatgacgccga

SEQ ID NO: 755668 - DNA, 75 bp, synthetic construct
  source 1..75: mol_type = other DNA
ttctacgtctggctggacgcgccgattggttacatgggttccttcaagaatctgtgcgacaagcgcggcgatacc

SEQ ID NO: 755669 - DNA, 75 bp, synthetic construct
  source 1..75: mol_type = other DNA
gcatggacccgcagcggtgcgttgcaggagcaggtggcaaacaaaatgcaggagtggtttgaatctggcctgcaa

SEQ ID NO: 755670 - DNA, 75 bp, synthetic construct
  source 1..75: mol_type = other DNA
cgtcacaccattatggtggctaacctggctccgcgtaaaatgcgcttcggtatctccgaaggcatggtgatggct

SEQ ID NO: 755671 - DNA, 75 bp, synthetic construct
  source 1..75: mol_type = other DNA
cacaggcgctagcagagcaaaacggcgtggcgtgggagtccatcgatgcctggcagatcccttcttcgctgattg

SEQ ID NO: 755672 - DNA, 75 bp, synthetic construct
  source 1..75: mol_type = other DNA
acttcgagaaattcgccggggcgaacgaccgtctgaccactcagatgaaatcggttggcgaagtgatggcgattg

SEQ ID NO: 755673 - DNA, 75 bp, synthetic construct
  source 1..75: mol_type = other DNA
aagagttcggcgtcaccatgattggtgccactgccgatgcgattgataaagcagaagaccgccgccgtttcgacg

SEQ ID NO: 755674 - DNA, 75 bp, synthetic construct
  source 1..75: mol_type = other DNA
ccggcatggaatgaaacgggcgtcatcggcaatatggccgagctggcggcgaccacgctcgactacgaaaactat

SEQ ID NO: 755675 - DNA, 75 bp, synthetic construct
  source 1..75: mol_type = other DNA
gccgcgccattcgcacgacatcaccgcgcctgcgcatcatcagcgggcaacgcctgctgaccattctcgccgggc

SEQ ID NO: 755676 - DNA, 75 bp, synthetic construct
  source 1..75: mol_type = other DNA
gcagattgattatcaactggatgtgatgaccgccgccgtgggctggtttggcgatacgttgctgaccaacggtgc

SEQ ID NO: 755677 - DNA, 75 bp, synthetic construct
  source 1..75: mol_type = other DNA
tgatgacgcggtagaagttgacgtggatgccatctgcgacggcgaaatggtgcttattggcggcatcatggagca

SEQ ID NO: 755678 - DNA, 75 bp, synthetic construct
  source 1..75: mol_type = other DNA
tcttccgcacgccagcttatcaacaccgttcacgtggatatgctgattgttccactgcgtgacgaagaagaataa

SEQ ID NO: 755679 - DNA, 75 bp, synthetic construct
  source 1..75: mol_type = other DNA
attgatgtgaatctgggtgatatgcagaaacgcatctctgaagagacacatcatgcgctgaccgagctttccact

SEQ ID NO: 755680 - DNA, 75 bp, synthetic construct
  source 1..75: mol_type = other DNA
caatttaatgatcctttatttatccgttctggaaaaggtattgcgccaacaacaacaggtttaaatctacattac

SEQ ID NO: 755681 - DNA, 75 bp, synthetic construct
  source 1..75: mol_type = other DNA
gtggatccgtacacctcatatggtgccgggttcgttcaggcccactgtgagctggtggagtttaacggaggtacg

SEQ ID NO: 755682 - DNA, 75 bp, synthetic construct
  source 1..75: mol_type = other DNA
cggtaccgcgtgacctttgtcgatccgtacacccgatacggtgccgggttcgttcaggcgcattgcgagcttctg

SEQ ID NO: 755683 - DNA, 75 bp, synthetic construct
  source 1..75: mol_type = other DNA
gtgcagacagtggacgaagataattttccgaccaataccgcgcaggctattccattctctggcgttgtaaccgtc

SEQ ID NO: 755684 - DNA, 75 bp, synthetic construct
  source 1..75: mol_type = other DNA
gaccgtgtaggctttagattcgaagacggtaaaaaagtccgtttcttcaagtctaacagcgaaactatcaagtaa

SEQ ID NO: 755685 - DNA, 75 bp, synthetic construct
  source 1..75: mol_type = other DNA
gatgggaaagtgtatagccgcgaatcggttaatgctaatcccatcgatttactattgagtgtcatgttgtttgcg

SEQ ID NO: 755686 - DNA, 75 bp, synthetic construct
  source 1..75: mol_type = other DNA
atgcgtcagaatgatggttcgagttatgaacgacaaatcaggatggcgagagaggttgcggcaaagtatgacctt

SEQ ID NO: 755687 - DNA, 75 bp, synthetic construct
  source 1..75: mol_type = other DNA
tctatgctattaacgatagcagaaacaataataaagaaggagatgccagtctttatacactaaaaatacaggtat

SEQ ID NO: 755688 - DNA, 75 bp, synthetic construct
  source 1..75: mol_type = other DNA
cagggagacatacagcgggatgcgcggggtggttccggacacgttcacggaccggcagtacagctacagcggcga

SEQ ID NO: 755689 - DNA, 75 bp, synthetic construct
  source 1..75: mol_type = other DNA
gaccgtgtaggctttagattcgaagacggtaaaaaagtccgtttcttcaaatctaacggcgaaactatcaagtaa

SEQ ID NO: 755690 - DNA, 75 bp, synthetic construct
  source 1..75: mol_type = other DNA
aaaccggagaccatgcttgatggtgtgaagcggtatgccgcctgggtacgtgctacaggaaataccggcacacag

SEQ ID NO: 755691 - DNA, 75 bp, synthetic construct
  source 1..75: mol_type = other DNA
ggtaccaacggcgtggtggcagcaacgttttcactgcgcctgaaaggcaaaccgatgttctatgtggtaccgctg

SEQ ID NO: 755692 - DNA, 75 bp, synthetic construct
  source 1..75: mol_type = other DNA
tcagtcgttacaacgtttacgcgcgcaatttaatgacccgttattcatccgctcagggaaaggtatcgcgccgac

SEQ ID NO: 755693 - DNA, 75 bp, synthetic construct
  source 1..75: mol_type = other DNA
tatcagggaaggtgtgacacccgaaaccatgcttgatggcgtgaaacgctatgccgcctgggtacgtgctacagg

SEQ ID NO: 755694 - DNA, 75 bp, synthetic construct
  source 1..75: mol_type = other DNA
agagattggctacccgctggtggtacgtccgtcttacgttctcggcggtcgggcgatggaaatcgtctatgacga

SEQ ID NO: 755695 - DNA, 75 bp, synthetic construct
  source 1..75: mol_type = other DNA
tacggcctgacgcaggggctgctttccgtcctgcgtcttttctggggcaacctgattaacttcatggccaactga

SEQ ID NO: 755696 - DNA, 75 bp, synthetic construct
  source 1..75: mol_type = other DNA
aatgtgcataaggtagtctgcgcgcgtcctggccccaccagcaaagccgactgtctgaacaacgtgctggacgcc

SEQ ID NO: 755697 - DNA, 75 bp, synthetic construct
  source 1..75: mol_type = other DNA
aatgacctgacatttcataagctgaatgccgccgattatggcgcaactctcggtaacagcagtgataaaacggct

SEQ ID NO: 755698 - DNA, 75 bp, synthetic construct
  source 1..75: mol_type = other DNA
ctgaacgcaggtaaaaatctgacattcctgggacataatggtcagattgacctggaaaactctgtcacgcagggt

SEQ ID NO: 755699 - DNA, 75 bp, synthetic construct
  source 1..75: mol_type = other DNA
attctggcaacagccagccgctcccggaggtgggcgacagcgacaggtcgatgtcctgtctggccttggtgccat

SEQ ID NO: 755700 - DNA, 75 bp, synthetic construct
  source 1..75: mol_type = other DNA
cattactcccttccgttgcgattgcgtcaatagccagaggagatattccttatcagacctaccgtgacttcgcag

SEQ ID NO: 755701 - DNA, 75 bp, synthetic construct
  source 1..75: mol_type = other DNA
cagtgaatatttctgatgccaccctgagtctgaacagccgtcctgatgaggtatctcacacacttttacctgtat

SEQ ID NO: 755702 - DNA, 75 bp, synthetic construct
  source 1..75: mol_type = other DNA
gttatggatggttccgcagacatcagaggctctttcacccaggaaaacggtcgtctgaccattcaggggcatccg

SEQ ID NO: 755703 - DNA, 75 bp, synthetic construct
  source 1..75: mol_type = other DNA
gcgttcagcccgcgtggaacgggtgcttagcgaaccgcatcatccttctggcgaattaacggattttcgtatccg

SEQ ID NO: 755704 - DNA, 75 bp, synthetic construct
  source 1..75: mol_type = other DNA
gcgatctggcggtggtgaatacccctgccggggaagcgagctggtatgttaatgctatcgagtacgtgaaaccgt

SEQ ID NO: 755705 - DNA, 75 bp, synthetic construct
  source 1..75: mol_type = other DNA
cagtgggtgttggcattgcccagaccaagacgctggccaagctggccaaccacgcggccaaacaatggcagcggc

SEQ ID NO: 755706 - DNA, 75 bp, synthetic construct
  source 1..75: mol_type = other DNA
gtctgtgtaggcattgcaccgactaaaacactcgccaaactggcaaaccatgccgccaaaaagtatccagccact

SEQ ID NO: 755707 - DNA, 75 bp, synthetic construct
  source 1..75: mol_type = other DNA
tggcgcgcgctaaccctgtatttatcaggaaaaacttcaatgtggttctggagagaacggtccgggaactcaccg

SEQ ID NO: 755708 - DNA, 75 bp, synthetic construct
  source 1..75: mol_type = other DNA
gcgttctgcgcgtgtggaacgggtgctcagcgagccgcatccctcgggggaattaaccgattttcgtatccgtta

SEQ ID NO: 755709 - DNA, 75 bp, synthetic construct
  source 1..75: mol_type = other DNA
cgcccctgaatggcaaatgaaacgggaaatgttgagtcagtgttatacaactaaatggcgagatattcccctggc

SEQ ID NO: 755710 - DNA, 75 bp, synthetic construct
  source 1..75: mol_type = other DNA
gtacagaactgaaccgggatattcaggcccgtctggttcagacggaggaaaccgcagagcgaacgccagcggagg

SEQ ID NO: 755711 - DNA, 75 bp, synthetic construct
  source 1..75: mol_type = other DNA
atggccctgaagtgtcctgaatgtgggacggtcgctcacgccagaaccagcgcctatgaagctccatcggttaaa

SEQ ID NO: 755712 - DNA, 75 bp, synthetic construct
  source 1..75: mol_type = other DNA
agccggggtgatgttgggtgatttcttcagtcagggcgtggcccagctcaacttgttcgatgataacgcgccgcg

SEQ ID NO: 755713 - DNA, 75 bp, synthetic construct
  source 1..75: mol_type = other DNA
atggcactggtaccggtagaggatgtctggggtgttggccggcgcatcagcaagaagctgaacgctatgggcatc

SEQ ID NO: 755714 - DNA, 75 bp, synthetic construct
  source 1..75: mol_type = other DNA
gagccgtattacggaaacagcgcatcggtaaggctgctcacgccaacgcaggacagcagagacatcatcaacgcc

SEQ ID NO: 755715 - DNA, 75 bp, synthetic construct
  source 1..75: mol_type = other DNA
ttggggtcggtattgcacagacaaagaccttggctaaattggcaaatcatgctgcaaaacgatggcagcggcaga

SEQ ID NO: 755716 - DNA, 75 bp, synthetic construct
  source 1..75: mol_type = other DNA
gataatattgatcgtggggcggagagtcttaacgtactacgcctgttaaaccatccctggtttacctctgttaaa

SEQ ID NO: 755717 - DNA, 75 bp, synthetic construct
  source 1..75: mol_type = other DNA
gagcggctgtcatcttcccccggataataccgcaccggccaggaagtacggtgcagcttctgaagtcgctgtcac

SEQ ID NO: 755718 - DNA, 75 bp, synthetic construct
  source 1..75: mol_type = other DNA
atgaaacccgataatacacctgaaaatgtaaaaaaattacgtttaaaagcaggattaacacaaaaggaatgcagt

SEQ ID NO: 755719 - DNA, 75 bp, synthetic construct
  source 1..75: mol_type = other DNA
taaccggattgatcgtgacggagataattatcccaaagatgatcttagcggacttcactcttcctgccttaccag

SEQ ID NO: 755720 - DNA, 75 bp, synthetic construct
  source 1..75: mol_type = other DNA
tagatctgttgctgaaattccatcaccttccacatattattgaaatcactaacgacaacataaaatatgtcatcg

SEQ ID NO: 755721 - DNA, 75 bp, synthetic construct
  source 1..75: mol_type = other DNA
taacattcagacgttcgctaaccagatttatattgataccggatcgccgaaaagcgggcggctgtcattttataa

SEQ ID NO: 755722 - DNA, 75 bp, synthetic construct
  source 1..75: mol_type = other DNA
gatttgcgctggtatggctggcaggagagaaggcgctgaaatatggccttttacctttcgaaagcgatgcggtgg

SEQ ID NO: 755723 - DNA, 75 bp, synthetic construct
  source 1..75: mol_type = other DNA
gcgatggagcgccttctcgctgactattccggtctggtcgcctgcgtcgatgaactgggtgcgagtaatcataag

SEQ ID NO: 755724 - DNA, 75 bp, synthetic construct
  source 1..75: mol_type = other DNA
ttcacggcgtatccaccaccggtaaaacgcttctcctgatgctggctgcatcggtccatggtgatggcagcgagc

SEQ ID NO: 755725 - DNA, 75 bp, synthetic construct
  source 1..75: mol_type = other DNA
gaacgccgccgtataaatacgcctggaagaaggatggtcagccggttgacgggcagacgacagacaccttcagta

SEQ ID NO: 755726 - DNA, 75 bp, synthetic construct
  source 1..75: mol_type = other DNA
atgtctgctttgtatgaacgttcacaactgacgcaggtgatgatttcatctgctccggccacggctgaaaccatg

SEQ ID NO: 755727 - DNA, 75 bp, synthetic construct
  source 1..75: mol_type = other DNA
aggatggtcagccggtagagggacagactactgacactttcagtaaagccaatacgcagtcaggtgataaggggg

SEQ ID NO: 755728 - DNA, 75 bp, synthetic construct
  source 1..75: mol_type = other DNA
aatcagatgaaccggaagagcctgaaaagcaaaagaaaacgctcaatcgctatggctctgcatcaaagttatcaa

SEQ ID NO: 755729 - DNA, 75 bp, synthetic construct
  source 1..75: mol_type = other DNA
caaccttaagggatatcacacaatagtttttaacatgggaaaacagattaatcacaatggattggataatgtgtc

SEQ ID NO: 755730 - DNA, 75 bp, synthetic construct
  source 1..75: mol_type = other DNA
ttaaacattagacaatactgtatatataataacagaatgcatgaaggaaaattcgaaaataatattgtgtggggg

SEQ ID NO: 755731 - DNA, 75 bp, synthetic construct
  source 1..75: mol_type = other DNA
ttaatgtggcaattgataagcaacaaggactttcatgcacaatcaccttcggtaaagagattgatgaaagtagaa

SEQ ID NO: 755732 - DNA, 75 bp, synthetic construct
  source 1..75: mol_type = other DNA
agaactgcaccagcgtctgaatgactggcgcaaagcccagaccgacgaagtgctggaaaacccggacccgcgagg

SEQ ID NO: 755733 - DNA, 75 bp, synthetic construct
  source 1..75: mol_type = other DNA
aagcgactgggctaccatgcagttcgccgccgaaatcttcgaaatcctgaatgtcccgtaccacgttgaagtggt

SEQ ID NO: 755734 - DNA, 75 bp, synthetic construct
  source 1..75: mol_type = other DNA
ggaagaaaaacaaaaaattagttatatttaacccttatggctctcagaatagcagaaccttatctgatgaacaga

SEQ ID NO: 755735 - DNA, 75 bp, synthetic construct
  source 1..75: mol_type = other DNA
cttcatcggtaaagatatcgtttacttccacagcctgttctggccagcaatgctggaaggcagcaacttccgcaa

SEQ ID NO: 755736 - DNA, 75 bp, synthetic construct
  source 1..75: mol_type = other DNA
caacctgtttgttcacggctatgtgacggtgaacggcgcgaagatgtccaagtctcgcggcacctttattaaagc

SEQ ID NO: 755737 - DNA, 75 bp, synthetic construct
  source 1..75: mol_type = other DNA
gcgcttcggtatctctgaaggcatggtgatggctgctggccctggcgggaaagatatcttcctgttaagcccgga

SEQ ID NO: 755738 - DNA, 75 bp, synthetic construct
  source 1..75: mol_type = other DNA
tataatgcaaccttcactcaaaacatatagagcgttatcaagactagtaaactcaatcaaagatccttctagatt

SEQ ID NO: 755739 - DNA, 75 bp, synthetic construct
  source 1..75: mol_type = other DNA
atgccatagttttcatagacttgggctacatcagagggaatgtatctgctataacagctgcagcaataaattcga

SEQ ID NO: 755740 - DNA, 75 bp, synthetic construct
  source 1..75: mol_type = other DNA
gcgccagatcaatacggcgataactgtgaagtctgcggcgcaacatatagcccgactgaattgatcgagccgaaa

SEQ ID NO: 755741 - DNA, 75 bp, synthetic construct
  source 1..75: mol_type = other DNA
taaagtaatgacccgcctgaccctggttggtgcgctgtacattacttttatctgcctgatcccggagttcatgcg

SEQ ID NO: 755742 - DNA, 75 bp, synthetic construct
  source 1..75: mol_type = other DNA
acgtgattatctgaaacgcctgaaagaacagccgaaagtagttgaagcagagttacgacgcttcgtaaccgaatg

SEQ ID NO: 755743 - DNA, 75 bp, synthetic construct
  source 1..75: mol_type = other DNA
ttacgtagaaaacggtctggaaaagttcctcgaacagatccgcgaaagcgttaacgaagttcctgacctgagcac

SEQ ID NO: 755744 - DNA, 75 bp, synthetic construct
  source 1..75: mol_type = other DNA
taacgagatggagcgtcggtataaactgatgtctgcgctgggtgtgcgtaatctggcgggttataacgaaaaaat

SEQ ID NO: 755745 - DNA, 75 bp, synthetic construct
  source 1..75: mol_type = other DNA
atggcacttaaatgtcccgaatgcggcactacggcacacgccagaacctccgcctatgaagcaccatcggttaaa

SEQ ID NO: 755746 - DNA, 75 bp, synthetic construct
  source 1..75: mol_type = other DNA
tacatttgttacaacaagacttctctaaacaacctggcattctcacgattcattgacagattgaatgataattct

SEQ ID NO: 755747 - DNA, 75 bp, synthetic construct
  source 1..75: mol_type = other DNA
ttactgacaatagcacttatgaacaaattatggcagaagagttcacccaattaatatccaaatcagcaggggttg

SEQ ID NO: 755748 - DNA, 75 bp, synthetic construct
  source 1..75: mol_type = other DNA
gctgacctgggacggtcaactgctggcgcttgagctgccgcagaccgttgatctggaaatcgttgaaaccgcacc

SEQ ID NO: 755749 - DNA, 75 bp, synthetic construct
  source 1..75: mol_type = other DNA
cgtatatttcggcgtcgatcattatccagttactgacggtggttcatccaacgttggcagaaattaagaaagaag

SEQ ID NO: 755750 - DNA, 75 bp, synthetic construct
  source 1..75: mol_type = other DNA
gtattgctaccggtctgccgaatatgcttggtatgcaaggcttggtgattaacccgggctttgcattctacttca

SEQ ID NO: 755751 - DNA, 75 bp, synthetic construct
  source 1..75: mol_type = other DNA
gcgttctgcgcgtgtggaacgggtgcttagcgagccgcatcatccctcgggggaattagccgattttcgtatcca

SEQ ID NO: 755752 - DNA, 75 bp, synthetic construct
  source 1..75: mol_type = other DNA
caatgacgcgttgtatgcgtttaaggtgctgtttccgtccggtaagggctttaaattcctggcggaagtgcgtca

SEQ ID NO: 755753 - DNA, 75 bp, synthetic construct
  source 1..75: mol_type = other DNA
aaggtatggtactgaattacaacggcaaactgctgctggttaaggatattgatattcagtcgcccactgcccgcg

SEQ ID NO: 755754 - DNA, 75 bp, synthetic construct
  source 1..75: mol_type = other DNA
gctgggttggcgtggaaacacaggggaaatatacccagggtatgacggttgttgattattattatctgactggca

SEQ ID NO: 755755 - DNA, 75 bp, synthetic construct
  source 1..75: mol_type = other DNA
gttgattattattatctgactggcggtagtgactccaacttactgatagtgttttatgttcagataatgcccgat

SEQ ID NO: 755756 - DNA, 75 bp, synthetic construct
  source 1..75: mol_type = other DNA
aaaacagaggtaattactcctatgtaatcagaacgatggatgaagatggggatacggtttttcacgtcttaaaat

SEQ ID NO: 755757 - DNA, 75 bp, synthetic construct
  source 1..75: mol_type = other DNA
taaacagaacttccgcagccattcactgtatgcaggtgcagaagtcggataccgttatcatctgacagatacgac

SEQ ID NO: 755758 - DNA, 75 bp, synthetic construct
  source 1..75: mol_type = other DNA
tatgttttatgataatctttatgatatatgccagaagaatttttttgtgttgcctaatacaatgcccgatgtaaa

SEQ ID NO: 755759 - DNA, 75 bp, synthetic construct
  source 1..75: mol_type = other DNA
atgcaccatcgcctggctgctgaaacctgaactgttcaccaccgttgaacgctgggttggcgtcgaaacgcaagg

SEQ ID NO: 755760 - DNA, 75 bp, synthetic construct
  source 1..75: mol_type = other DNA
aacattgccgccgataaaacgctggtaataggcaataccagcaacgatggcgcgattgattctcttgccggaacg

SEQ ID NO: 755761 - DNA, 75 bp, synthetic construct
  source 1..75: mol_type = other DNA
gactaaaagtggcggagggacgctggagttgactgccagcggcaccgcgacgtctgcggtacgtgtggaggacgg

SEQ ID NO: 755762 - DNA, 75 bp, synthetic construct
  source 1..75: mol_type = other DNA
ggcggtacgctactgctcgacagcgaattaaacggcgatgactcggcaagtgaccaactggtattgaacggtaat

SEQ ID NO: 755763 - DNA, 75 bp, synthetic construct
  source 1..75: mol_type = other DNA
gatccgaaactgtattccagctcctaccaggcgcacagtgaagcagtgaagtgggccaaagaaaccggggtcatt

SEQ ID NO: 755764 - DNA, 75 bp, synthetic construct
  source 1..75: mol_type = other DNA
acggggtgaaataaaagtgggaataacgggcaatatcagtcagcgagtttcgctgcgtggtagcgtggcgtggca

SEQ ID NO: 755765 - DNA, 75 bp, synthetic construct
  source 1..75: mol_type = other DNA
cagcgagtttccctgcgcggtagcgtggcgtggcagaaaggaagcgacgatttttcccagacggcagggttttta

SEQ ID NO: 755766 - DNA, 75 bp, synthetic construct
  source 1..75: mol_type = other DNA
agcgggagcctgaatgcaccggatgccaccgtcagcatgacagacacccagtggtcgatgaacggaaactccacg

SEQ ID NO: 755767 - DNA, 75 bp, synthetic construct
  source 1..75: mol_type = other DNA
actaatcatctgcggttgcgtcaccgcagcgggagcactggcgtacatcttcctggttcgtcagccgatcaacga

SEQ ID NO: 755768 - DNA, 75 bp, synthetic construct
  source 1..75: mol_type = other DNA
gtggaaaaagaaaatattaccctcgatccgcaatcttcctttcgctcaacgtcgtcggtagatatccccgtgcca

SEQ ID NO: 755769 - DNA, 75 bp, synthetic construct
  source 1..75: mol_type = other DNA
ggggatttttctcgccatcggctggtatatgctctatcgcaaccgcgagcacgtagaactgactgccgttgaaca

SEQ ID NO: 755770 - DNA, 75 bp, synthetic construct
  source 1..75: mol_type = other DNA
ggggccgggcggtcaacatgtcaataaaaccgactcggcggtacgcgccacgcatttggctaccggaattagcgt

SEQ ID NO: 755771 - DNA, 75 bp, synthetic construct
  source 1..75: mol_type = other DNA
ctgattaaagaagctacccgacaagacgtcgcggtaacggtgctggaaacagaaacgggccgctactctgacacg

SEQ ID NO: 755772 - DNA, 75 bp, synthetic construct
  source 1..75: mol_type = other DNA
ttgattaaagaagctacccgacaagacgtcgcggtaacggtgctggaaacagaaacgggtcgctactctgacaca

SEQ ID NO: 755773 - DNA, 75 bp, synthetic construct
  source 1..75: mol_type = other DNA
gtcggtgttcttactgcggggaatggagcggggggcaggggaaataactgggctgttattccactggattttatc

SEQ ID NO: 755774 - DNA, 75 bp, synthetic construct
  source 1..75: mol_type = other DNA
ctgacacagggaagcaccacatatgccatgcacgggcagcagggaaatgacctgaatgctggtaagaacctgata

SEQ ID NO: 755775 - DNA, 75 bp, synthetic construct
  source 1..75: mol_type = other DNA
aagtcggcaacaggtcatgacaacagcatctgggttaacttcctgaaaaaaccctctgacaaggacacgcttgat

SEQ ID NO: 755776 - DNA, 75 bp, synthetic construct
  source 1..75: mol_type = other DNA
ttacggtgtggggttaaatgcccggtttggcgacaatacgcgtctggggctggaagttgaacgctctgcatttgg

SEQ ID NO: 755777 - DNA, 75 bp, synthetic construct
  source 1..75: mol_type = other DNA
cgctgaccagtaccgccctgaatctgaacaagggagcaaatgttctggccagtcagagttttgtttctgacggtc

SEQ ID NO: 755778 - DNA, 75 bp, synthetic construct
  source 1..75: mol_type = other DNA
attcatgcacatcagctataacaacttcatcactgaagttaacaacctgaacaaacgcatgggcgatttgaggga

SEQ ID NO: 755779 - DNA, 75 bp, synthetic construct
  source 1..75: mol_type = other DNA
tctatttaagtgatgatgcttttaataataaccaggcatatacatcaacaagttatagtgatggggatggcggcg

SEQ ID NO: 755780 - DNA, 75 bp, synthetic construct
  source 1..75: mol_type = other DNA
gcagctaaagacgctgaggagaaagcaaaggctgattccgaagcggaagaacagcgtaaggctgacgaggaggca

SEQ ID NO: 755781 - DNA, 75 bp, synthetic construct
  source 1..75: mol_type = other DNA
ctacagctcgcaggtggcaaccccggataatatggagctgatgtatcaactctacgctctggccagtcggaaacc

SEQ ID NO: 755782 - DNA, 75 bp, synthetic construct
  source 1..75: mol_type = other DNA
atgtacgcggcaaaaggcacccaggcctatgcacaaattggcgtcgaaagcgccgtaatgagcgccagccagcag

SEQ ID NO: 755783 - DNA, 75 bp, synthetic construct
  source 1..75: mol_type = other DNA
gcattaatcagaaaatcgatggtgtcgttacgcgcatggactcactggaacagcgggacaaagcgcgggcggatg

SEQ ID NO: 755784 - DNA, 75 bp, synthetic construct
  source 1..75: mol_type = other DNA
ggggttgtgagcgatgccctgcaaggcattaatcagaaaatcgatggtgtcgttacgcgcatggactcactggaa

SEQ ID NO: 755785 - DNA, 75 bp, synthetic construct
  source 1..75: mol_type = other DNA
aatatcagggtgatccgaacgtctggttgggtgccttcaaaattccggggcgtcgtctggcaaaaattaacactc

SEQ ID NO: 755786 - DNA, 75 bp, synthetic construct
  source 1..75: mol_type = other DNA
gtggccgatatcgcctgggcggttattcaatactggcagaccacgggggatgaaagtttcattgcgcatgaaggc

SEQ ID NO: 755787 - DNA, 75 bp, synthetic construct
  source 1..75: mol_type = other DNA
gttcaacaggcgctgaatattgcccgccagttcggctgtagcgacgatgcgtttatccatcgcgccgaaatgttc

SEQ ID NO: 755788 - DNA, 75 bp, synthetic construct
  source 1..75: mol_type = other DNA
cggtcagcttatatccgtggctgaagaatctgttttctgtttgggtgattttattttgcccttcaatgggaccgc

SEQ ID NO: 755789 - DNA, 75 bp, synthetic construct
  source 1..75: mol_type = other DNA
gcattaatgcgcaatattgccgatgcctggaaagagtctttactctccccttctttgattcaggacccagtctga

SEQ ID NO: 755790 - DNA, 75 bp, synthetic construct
  source 1..75: mol_type = other DNA
cctggcgctctgtacgttgcaccatgacgcgtttgatatgggggcgttcgggctggatgagagtatgaccatcca

SEQ ID NO: 755791 - DNA, 75 bp, synthetic construct
  source 1..75: mol_type = other DNA
tctgggagatcgctcacgcagaaggttgcaaaccgcgcaagggcaatactcagccgacaaagaaagaactgattg

SEQ ID NO: 755792 - DNA, 75 bp, synthetic construct
  source 1..75: mol_type = other DNA
gacatcaatacctctatttttgagatgttacaggccagccgtgatgcctcggtcatgccgttcgcctcggcgttt

SEQ ID NO: 755793 - DNA, 75 bp, synthetic construct
  source 1..75: mol_type = other DNA
cgcagcctgattcgttttctggaagatggcgataaggccaaaatcacactgcgtttccgtggtcgtgagatggcc

SEQ ID NO: 755794 - DNA, 75 bp, synthetic construct
  source 1..75: mol_type = other DNA
gtgagtctgagagaagctctggagaaagcagaagaagccggagtagacttagtcgagatcagccctaacgccgag

SEQ ID NO: 755795 - DNA, 75 bp, synthetic construct
  source 1..75: mol_type = other DNA
gcggcgaccttgccgaaacattcaaatctgaacgggaaacaacaaagaatcagatccgtgtcgccttgcctggca

SEQ ID NO: 755796 - DNA, 75 bp, synthetic construct
  source 1..75: mol_type = other DNA
ggatggctcaatcgttgataagcatacgcatggcggtgtggaaagcggcggcagcaatacaaaacctctgggagg

SEQ ID NO: 755797 - DNA, 75 bp, synthetic construct
  source 1..75: mol_type = other DNA
atgccaattcctactcaatcacagatcggcggcgagcagcagaccgcgcaggccattgccgattcggtgtctact

SEQ ID NO: 755798 - DNA, 75 bp, synthetic construct
  source 1..75: mol_type = other DNA
gcggcgaccttgctgaaacattcaaatctgaacgggaaacaacaaagaaccagatccgtgtcgccttgcctggca

SEQ ID NO: 755799 - DNA, 75 bp, synthetic construct
  source 1..75: mol_type = other DNA
gtggaagacgggcgaaagcaacaccaccaaagtgaccagtaccaacagctacgcgaagctgactatcaatggtga

SEQ ID NO: 755800 - DNA, 75 bp, synthetic construct
  source 1..75: mol_type = other DNA
ggcaaatccacggtggatggcatccagttgcgctttaccggctctatccagcgtgacgataccggggaagtgcag

SEQ ID NO: 755801 - DNA, 75 bp, synthetic construct
  source 1..75: mol_type = other DNA
acagttacttaataatgtaaaatatgtttatattcctgcaattaaggataaagggtatattgcaaaattaaggag

SEQ ID NO: 755802 - DNA, 75 bp, synthetic construct
  source 1..75: mol_type = other DNA
atggtgggggctgttgtttctggcgtggcttcaaaaatcactggtgctgttgagttcttggggagcgttaaggct

SEQ ID NO: 755803 - DNA, 75 bp, synthetic construct
  source 1..75: mol_type = other DNA
ctcaaaatcctgcctgacggtcacttgcagctggtggacggttctatcgtggataagcatacccatggcggcgtt

SEQ ID NO: 755804 - DNA, 75 bp, synthetic construct
  source 1..75: mol_type = other DNA
atggctttaccacgtaaattaaaacacctgaacctgtttaacgacgggaataattggcaggggatcgttgagtcg

SEQ ID NO: 755805 - DNA, 75 bp, synthetic construct
  source 1..75: mol_type = other DNA
ttgaatttgctgcttgtgatagcaaatggtcagttgatggacatcttcgaagagatgttattgaaaaaaaagcaa

SEQ ID NO: 755806 - DNA, 75 bp, synthetic construct
  source 1..75: mol_type = other DNA
gtatgggaagtaatcgagcgtcaccgcattctggccccagtcccttatcgccttggttggagccggtcttcgtgt

SEQ ID NO: 755807 - DNA, 75 bp, synthetic construct
  source 1..75: mol_type = other DNA
cgattacacgctcccgatttttgtgcctgaggggcaaaagtggtttcttcctggtggtgcatttggccgtgaggc

SEQ ID NO: 755808 - DNA, 75 bp, synthetic construct
  source 1..75: mol_type = other DNA
acgatggatacgctggtggcgctgggtactggcgtggcgtggctctattcgatgagcgtcaacctgtggccgcag

SEQ ID NO: 755809 - DNA, 75 bp, synthetic construct
  source 1..75: mol_type = other DNA
tccgccaggtggcaagcgctcggtgacgttgaacgttgatcaacctgccgctacctgctggttccatccacatca

SEQ ID NO: 755810 - DNA, 75 bp, synthetic construct
  source 1..75: mol_type = other DNA
ctatgcagctgaaagtcataactccagagcagtacgctagcttaatgagtctctacatggatgtagaagacttca

SEQ ID NO: 755811 - DNA, 75 bp, synthetic construct
  source 1..75: mol_type = other DNA
caacgaaggatcagaatcttgagcgtcagttggcagtactggaacctctttgtgacaaaatcgttacagagaaag

SEQ ID NO: 755812 - DNA, 75 bp, synthetic construct
  source 1..75: mol_type = other DNA
gggtatgatcgcatcacgccgcaacgaggggatagcccttgccaaagaggctaagaagtacaagggcaaacaaaa

SEQ ID NO: 755813 - DNA, 75 bp, synthetic construct
  source 1..75: mol_type = other DNA
atggcaatttatacccgaacaggtgattcaggaagtacgtctttatttaccggacagcgcgtcagcaaaactcat

SEQ ID NO: 755814 - DNA, 75 bp, synthetic construct
  source 1..75: mol_type = other DNA
cttacagccacccccatcgcgtagaaactcctgaggggctcctggtgctgcctagagaccataagcgttctaagc

SEQ ID NO: 755815 - DNA, 75 bp, synthetic construct
  source 1..75: mol_type = other DNA
accatgatgttgatggtcaggaaggcagttcgttgatggattgggccttcatgcgtgattactgtcgtcagctcg

SEQ ID NO: 755816 - DNA, 75 bp, synthetic construct
  source 1..75: mol_type = other DNA
atttgttcgatgaccaggtggtgttgccatcactggagtcggttcttaccggcatatcttccagtcagcgttgtg

SEQ ID NO: 755817 - DNA, 75 bp, synthetic construct
  source 1..75: mol_type = other DNA
atgagcaacaggttggtaccaaagctatcgaagcggagattactgctcaggcatcgcaaggggcaacgcctgtgc

SEQ ID NO: 755818 - DNA, 75 bp, synthetic construct
  source 1..75: mol_type = other DNA
ccggcaatgcgtaagtacagcggtcacatcagcaacgtattcgttgtcgtgatgggtctgattgcaatctccgca

SEQ ID NO: 755819 - DNA, 75 bp, synthetic construct
  source 1..75: mol_type = other DNA
cgtcttcagctgcgtactgagcctgactccggcagacctggctgcggctaaagagcagaacatctcgattctgtc

SEQ ID NO: 755820 - DNA, 75 bp, synthetic construct
  source 1..75: mol_type = other DNA
ggcaatggagatcatcagtgatacagctcgcagtaacatcccggcgctgggctatgcgggcacctacgcaatcgc

SEQ ID NO: 755821 - DNA, 75 bp, synthetic construct
  source 1..75: mol_type = other DNA
actgattaagattaagtcgcatcaagaaaatccccagaatccggcagtggcaatcgaggaagttgggaagaatat

SEQ ID NO: 755822 - DNA, 75 bp, synthetic construct
  source 1..75: mol_type = other DNA
gcattcaaaggagctaacagtaaaacaggtgcattatctcgttttctggatgagattggtcgatccgttccggtt

SEQ ID NO: 755823 - DNA, 75 bp, synthetic construct
  source 1..75: mol_type = other DNA
ccgatcatctcctctttcgccgttgcgaaacgtgaagaatacggtcagggtgctgagaagaagtgctccaaaatc

SEQ ID NO: 755824 - DNA, 75 bp, synthetic construct
  source 1..75: mol_type = other DNA
tggcggagcgcactgcgctggtgatgggcagtgcctccgcacaagatttagtgcaggcggtggaaaaagcaggct

SEQ ID NO: 755825 - DNA, 75 bp, synthetic construct
  source 1..75: mol_type = other DNA
gcttccgctggcaggcaattgtcgcactggcggtgggtatcccggtaatggtctgggggatgatcggcgataaca

SEQ ID NO: 755826 - DNA, 75 bp, synthetic construct
  source 1..75: mol_type = other DNA
cgttaaacgcgtgaaagaaagtctcgaacagcgcccggacgttgagcaggcagatgtgtcaattactgaagcgca

SEQ ID NO: 755827 - DNA, 75 bp, synthetic construct
  source 1..75: mol_type = other DNA
aaaggtgacgttttgcaggtgagcggcgatgcccgccgtgtgaagaccatcgctgaccgtatcggctttatttcg

SEQ ID NO: 755828 - DNA, 75 bp, synthetic construct
  source 1..75: mol_type = other DNA
tcaaaaaccataacgccgtcggtaaacgtctggcgcaattgaagttgaccgatcacggttgcttccttaaccgcg

SEQ ID NO: 755829 - DNA, 75 bp, synthetic construct
  source 1..75: mol_type = other DNA
catcggcctgacggctggtatgttggctggctcaatgacatcaacaccggttttggttggtgcgggcgatacctt

SEQ ID NO: 755830 - DNA, 75 bp, synthetic construct
  source 1..75: mol_type = other DNA
gcctgtatgccctcgcccgcgtggaagacaacgttgctcatcagaacctgatgattcaggaaattacaaaacgtt

SEQ ID NO: 755831 - DNA, 75 bp, synthetic construct
  source 1..75: mol_type = other DNA
ttgtttgtcctggcgttgattgcggtcaacctgttgctgttgctcgcatcagcctggattctgttgtatgccggt

SEQ ID NO: 755832 - DNA, 75 bp, synthetic construct
  source 1..75: mol_type = other DNA
atccatgtgcgggagtgttgccgctgacagtccggtcagccggagacccgaaataccgggatgcgtactccacgc

SEQ ID NO: 755833 - DNA, 75 bp, synthetic construct
  source 1..75: mol_type = other DNA
ggcaccagagttaggtaaaggtgagcatcgggtttacatcgctaaacaggatgacaagccggtagccgccgttct

SEQ ID NO: 755834 - DNA, 75 bp, synthetic construct
  source 1..75: mol_type = other DNA
agaaacggggcgctattcagacacgctgcgttcggcactggtttctctcgatggcgataacgcactggcattaag

SEQ ID NO: 755835 - DNA, 75 bp, synthetic construct
  source 1..75: mol_type = other DNA
actctgacacgctgcgttcggcgctgatttctctggatggcgacagcgcatgggcattaagcgaaagctggtgcg

SEQ ID NO: 755836 - DNA, 75 bp, synthetic construct
  source 1..75: mol_type = other DNA
aaaaactggtttctgggcattgggcgttttaccgctgatgagcaggaacaatcggatgcaatccgttatgagacg

SEQ ID NO: 755837 - DNA, 75 bp, synthetic construct
  source 1..75: mol_type = other DNA
tattttccttaaaatatcaggaatcatggacttgactcctcatgtttatggaataccgaccacctcatatcctgc

SEQ ID NO: 755838 - DNA, 75 bp, synthetic construct
  source 1..75: mol_type = other DNA
attttataaaactatgtgcttggtttttaacaatccttacaccgatcgcgtcaacttctattgtagcattgttta

SEQ ID NO: 755839 - DNA, 75 bp, synthetic construct
  source 1..75: mol_type = other DNA
atgcagcttcccaatgccgtcgggtaaaggggcaggaactactgacacttgaaaaattaccaccgttggaaacta

SEQ ID NO: 755840 - DNA, 75 bp, synthetic construct
  source 1..75: mol_type = other DNA
atcaaccagatgaccaaaacgacgattgctgaacaggccagtctgcaacaaaaggcgttatttgatcaggtgctg

SEQ ID NO: 755841 - DNA, 75 bp, synthetic construct
  source 1..75: mol_type = other DNA
ttaatgcggtaaaacgcgccggattgtacgctcagacgttaccggcacaactttctcaacttcctgcctgtggag

SEQ ID NO: 755842 - DNA, 75 bp, synthetic construct
  source 1..75: mol_type = other DNA
ggtggcgcttccgggttagcagaatttccagaattatgtggggcagaaggtgatatggttaagcgttgtattaat

SEQ ID NO: 755843 - DNA, 75 bp, synthetic construct
  source 1..75: mol_type = other DNA
attatcagcgaagtcgtgaagcgttatctggcatccgcaaattcgcctgttgtgaaaggaaccttgatgactctc

SEQ ID NO: 755844 - DNA, 75 bp, synthetic construct
  source 1..75: mol_type = other DNA
cgtcagagcgtaatctggcgttaatcaaacgttactataagcgtttcggcgaggcgattgagttgctggagcagg

SEQ ID NO: 755845 - DNA, 75 bp, synthetic construct
  source 1..75: mol_type = other DNA
agatgggacgcctgttcgagaagatgctgacactatcgggttatcaggtgcggattctggagcaacatgactggg

SEQ ID NO: 755846 - DNA, 75 bp, synthetic construct
  source 1..75: mol_type = other DNA
gccagatctgattgaggatgttttgcgtcggatgatgcgtgaatcttactccagtgaaaacgacaaaggatttaa

SEQ ID NO: 755847 - DNA, 75 bp, synthetic construct
  source 1..75: mol_type = other DNA
atgaacgctgtccctccagttcacagcttcatactgcctggtcgttgtgaagccgcgagccgtatgcatgtcgcc

SEQ ID NO: 755848 - DNA, 75 bp, synthetic construct
  source 1..75: mol_type = other DNA
ggtcagtgatggccgtttcaattctggccttcagcgtacagtcagcatttgcctatacggtcaacgttaacagca

SEQ ID NO: 755849 - DNA, 75 bp, synthetic construct
  source 1..75: mol_type = other DNA
ctacttttgcttatgggctgcatctggcagaagaaaatgttcagcttgagcaacttctggcgctctcttcgccga

SEQ ID NO: 755850 - DNA, 75 bp, synthetic construct
  source 1..75: mol_type = other DNA
caggcggcagcagactcacaaactgcatcggcaaactccgcgacagcagccaaaaaatcagaaaccaacgcgaaa

SEQ ID NO: 755851 - DNA, 75 bp, synthetic construct
  source 1..75: mol_type = other DNA
gtgagtaaccgttattgggtgatatccttccataaaaatacgcacaatctgacggttcgctctgttccaaaaaca

SEQ ID NO: 755852 - DNA, 75 bp, synthetic construct
  source 1..75: mol_type = other DNA
ttatgagacgctgcgttcgtcggggccgggcggtcaacatgtcaataaaaccgactcggcggtacgcgccacgca

SEQ ID NO: 755853 - DNA, 75 bp, synthetic construct
  source 1..75: mol_type = other DNA
atcggggtttttgcttttctggctcctgtacatccacatcagaaccagttccctgccaccttatggcgtggccag

SEQ ID NO: 755854 - DNA, 75 bp, synthetic construct
  source 1..75: mol_type = other DNA
gcttcaaacagaacatttgtttctcaaagattacaatccgaaggaggtccggttgtcgatcaaactgaactaagg

SEQ ID NO: 755855 - DNA, 75 bp, synthetic construct
  source 1..75: mol_type = other DNA
ctgttgatttaactcttacaaaacaaacagggactggcaatcgttttgttttacagaacttaggtaatacagaac

SEQ ID NO: 755856 - DNA, 75 bp, synthetic construct
  source 1..75: mol_type = other DNA
atgttgatttcgcttcgttgcgtcatcagcacatcggcgcgcgggtgccggtcgcctggctggaatctaacgaaa

SEQ ID NO: 755857 - DNA, 75 bp, synthetic construct
  source 1..75: mol_type = other DNA
cgagccgaccgccagttgggtgagcaatacgctggatgtgccggtcatcgacaattactggcagaccgaatccgg

SEQ ID NO: 755858 - DNA, 75 bp, synthetic construct
  source 1..75: mol_type = other DNA
cagccagattggcaactttggccgcccggcgcacgtctggtttgtctcgcaattgccgaaaacgcgatccggaaa

SEQ ID NO: 755859 - DNA, 75 bp, synthetic construct
  source 1..75: mol_type = other DNA
catttttggcggcaaagcgggcggcgtgttcttttgcgcgtcggatatcggctgggtggtggggcattcgtatat

SEQ ID NO: 755860 - DNA, 75 bp, synthetic construct
  source 1..75: mol_type = other DNA
ttgtgaagacgtactggtcgctgttttcccgtccggtgtacgccacttttgactggggtatccgcgatgctgacg

SEQ ID NO: 755861 - DNA, 75 bp, synthetic construct
  source 1..75: mol_type = other DNA
tttgctggtggatcgcgggctggcgaaaatggcgcgcgtcagcgggcgggatgtcgatttcgcgtcgttgcgcca

SEQ ID NO: 755862 - DNA, 75 bp, synthetic construct
  source 1..75: mol_type = other DNA
ttaagtcatcggcgctctttactgccggcgtatttctgtccggtgtagtaggtaatacggttggtggcgtaatca

SEQ ID NO: 755863 - DNA, 75 bp, synthetic construct
  source 1..75: mol_type = other DNA
gctatgtacccattaccggttaacggcttctggagagatgcagactggctttactgtagagatgaaaaatatcgt

SEQ ID NO: 755864 - DNA, 75 bp, synthetic construct
  source 1..75: mol_type = other DNA
gtgcgaactacacctctgcaggtaccgatatttgcgctgcgggcttcggttctccgcacatcaggcagcgattgt

SEQ ID NO: 755865 - DNA, 75 bp, synthetic construct
  source 1..75: mol_type = other DNA
gctgggtagtggggcattcgtatatcgtctacgcgccgctgctggcggggatggcgactatcgtttacgaaggat

SEQ ID NO: 755866 - DNA, 75 bp, synthetic construct
  source 1..75: mol_type = other DNA
aaaatggcgcgcgttagcgggcgtgatgtcgattttgctttgttgcgccatcagcacgttggcgcacgagtgccg

SEQ ID NO: 755867 - DNA, 75 bp, synthetic construct
  source 1..75: mol_type = other DNA
ttcactcggtggtgtttggtggatttgcctcgcacagcgtggcggcgcgaattgatgatgctaaaccggtgctga

SEQ ID NO: 755868 - DNA, 75 bp, synthetic construct
  source 1..75: mol_type = other DNA
cctgctgccgccagaacggtgcagtccctgacacaggcaccggtcattctgttaactcatccacgtatgggagaa

SEQ ID NO: 755869 - DNA, 75 bp, synthetic construct
  source 1..75: mol_type = other DNA
cccgtgagcgtccgccaaccacctggaatctggcagcgcctgacgaatacggtttttacgccaacgttaatccgc

SEQ ID NO: 755870 - DNA, 75 bp, synthetic construct
  source 1..75: mol_type = other DNA
tggcggcggcctgaaatatccttatatagaaggattacgtctcgacgaagcgatgcatccgctcacactgatgac

SEQ ID NO: 755871 - DNA, 75 bp, synthetic construct
  source 1..75: mol_type = other DNA
cgttgaaaatcagcggcgaagtcgctaaaccgttaaccctcgatcatgatgcactgaccagtcgtttcccgctgg

SEQ ID NO: 755872 - DNA, 75 bp, synthetic construct
  source 1..75: mol_type = other DNA
ttatgacgcatcttatcaaggtgaaagtggcggcgagccgcgtcagttagaaaacccatacattcgtactgaaga

SEQ ID NO: 755873 - DNA, 75 bp, synthetic construct
  source 1..75: mol_type = other DNA
gtgattgattacctgacaacgctttcttatgtcgacaatacccgaattggtgcgatgggaatttgtgccggtgca

SEQ ID NO: 755874 - DNA, 75 bp, synthetic construct
  source 1..75: mol_type = other DNA
atggtgataaaaggacttgatcaggcgattgacaatctgagccgggttcgtaaaaacgccattcctgctgcttca

SEQ ID NO: 755875 - DNA, 75 bp, synthetic construct
  source 1..75: mol_type = other DNA
aatggcaggaagcgtttcttccctgaacgtttctgtggcgacagggatttgcttatttgaagcggtgcgacagcg

SEQ ID NO: 755876 - DNA, 75 bp, synthetic construct
  source 1..75: mol_type = other DNA
aaccgcggtgatctccctgtgattaagctggggatcagaatgctggggcgtcgtccgaacagcatactcaaagcc

SEQ ID NO: 755877 - DNA, 75 bp, synthetic construct
  source 1..75: mol_type = other DNA
tcagggcattatcgcccgtgtgaagccaggacgtcagtatcaggaaaacgatctgccggatctgatcgcttcgct

SEQ ID NO: 755878 - DNA, 75 bp, synthetic construct
  source 1..75: mol_type = other DNA
atggcggccccactgaaacaggcgtttgatgagaatgttgaccgtatccggtgtgaacgcctgcccggagaactg

SEQ ID NO: 755879 - DNA, 75 bp, synthetic construct
  source 1..75: mol_type = other DNA
atggcgataaaagggcttgatcaggcgattgaaaatctgagccggattcgtaaaagcgccattccggctgcttca

SEQ ID NO: 755880 - DNA, 75 bp, synthetic construct
  source 1..75: mol_type = other DNA
ccaggacggcagtatcaggaaaacgatctgccggatctgatcgcttcgctcgatcaaccgttcctgctgatcctc

SEQ ID NO: 755881 - DNA, 75 bp, synthetic construct
  source 1..75: mol_type = other DNA
atgataacgctgccgaccggtaccaaaacctggagcatcgctggcatcacagatatgcgttgtggcttcaacggc

SEQ ID NO: 755882 - DNA, 75 bp, synthetic construct
  source 1..75: mol_type = other DNA
tcaaaactctcagatattaaaaatggaaacatatcaaaagtggtatctgtaccagtttcctgtccctatcattca

SEQ ID NO: 755883 - DNA, 75 bp, synthetic construct
  source 1..75: mol_type = other DNA
aatcttgtcaacggtacgaaaaactatcctgggtaacaaacatgtggggtgttgaatacgaagaaatacctgaaa

SEQ ID NO: 755884 - DNA, 75 bp, synthetic construct
  source 1..75: mol_type = other DNA
gtgtacataatcccgtatctgttttttgcactgttgatagcgcaaggcgctgacaacgatgcccgcgattttttc

SEQ ID NO: 755885 - DNA, 75 bp, synthetic construct
  source 1..75: mol_type = other DNA
ggaaaaatgcgcagtatgacgcgttgctaaatcaggcggcgcagaccactgacgcgacaaagcgtaatgcgttgt

SEQ ID NO: 755886 - DNA, 75 bp, synthetic construct
  source 1..75: mol_type = other DNA
tcgtcgcgtttgatgttgtcgcacaagataacaaaccaggatgggttgtggttaacagactaattctgactcgca

SEQ ID NO: 755887 - DNA, 75 bp, synthetic construct
  source 1..75: mol_type = other DNA
ggatgaaacaacaagcaccgcgactacagattcaaaaagacagcgttcaacaggatgaatcgttgagtttatctg

SEQ ID NO: 755888 - DNA, 75 bp, synthetic construct
  source 1..75: mol_type = other DNA
atgggcaggcacttccagcaaaagaaaacgagggatgcatcgtgtccgtgaattcaggtaaacgttactgtttgc

SEQ ID NO: 755889 - DNA, 75 bp, synthetic construct
  source 1..75: mol_type = other DNA
cgtatgaacacaccattgacaggtttgagcagattactgcttctgtcagggatctcagtgaaaacaaaatggctg

SEQ ID NO: 755890 - DNA, 75 bp, synthetic construct
  source 1..75: mol_type = other DNA
tgggtacggagcatctatcttccacaaggtgctgaactggaaggcaagatggtacgccttatttccaatgctggc

SEQ ID NO: 755891 - DNA, 75 bp, synthetic construct
  source 1..75: mol_type = other DNA
tctcgtaaaaaaatatgctgacgttccggcggaatcaactattagaaaatggttaacccctgtttatggaaatga

SEQ ID NO: 755892 - DNA, 75 bp, synthetic construct
  source 1..75: mol_type = other DNA
tcttactctgtaaaagataaagcgcgggagagaccgcttaaaaaaccttcaaagaaggctggttttcatgaagag

SEQ ID NO: 755893 - DNA, 75 bp, synthetic construct
  source 1..75: mol_type = other DNA
tttgcgcagagccagattttacccgcccatcctaaagaaggggaaagtcaaccgcatctaaccagcctgcggaaa

SEQ ID NO: 755894 - DNA, 75 bp, synthetic construct
  source 1..75: mol_type = other DNA
gtcaccggctataaccgctatcgtgcgggagaggtcgatcttacctgggttccggcgcagcaaattcccgctatc

SEQ ID NO: 755895 - DNA, 75 bp, synthetic construct
  source 1..75: mol_type = other DNA
gatatcgacggcgcgctggttggtggtgcttctctgaaagctgacgccttcgcagtaatcgttaaagctgcagaa

SEQ ID NO: 755896 - DNA, 75 bp, synthetic construct
  source 1..75: mol_type = other DNA
gcgacctgcctaaagccaaagttatccacgggcgagcaagatggttatatcgtgaccattgtgaattcaaaaata

SEQ ID NO: 755897 - DNA, 75 bp, synthetic construct
  source 1..75: mol_type = other DNA
ccctggttgatttgaaattcatcatggccgatactggctttggtaaaaccttcatctacgaccggattaagtccg

SEQ ID NO: 755898 - DNA, 75 bp, synthetic construct
  source 1..75: mol_type = other DNA
acctgcgtgaagcgacagaagcgttccagcgtgaaactattcgtcaggcactggcacaaaatcatcacaactggg

SEQ ID NO: 755899 - DNA, 75 bp, synthetic construct
  source 1..75: mol_type = other DNA
ggcaaaatggtaaaaatactggggccgatcgtgatggcttatgcctcttcgccaaacgcctggagcggggacgct

SEQ ID NO: 755900 - DNA, 75 bp, synthetic construct
  source 1..75: mol_type = other DNA
atgcaacacgaactacagcctgattcactggttgatttgaaattcatcatggccgatactggctttggtaaaacc

SEQ ID NO: 755901 - DNA, 75 bp, synthetic construct
  source 1..75: mol_type = other DNA
cgggcgaaccattaccgggtgggatgaggataaaaacaatatccgcacgttttatcgggatgacatcgaccgttt

SEQ ID NO: 755902 - DNA, 75 bp, synthetic construct
  source 1..75: mol_type = other DNA
gtgaaggccaggtgcagcccgctcaggctgaacgctggtgacgacggcaagcgctatattttccatctgcgtagc

SEQ ID NO: 755903 - DNA, 75 bp, synthetic construct
  source 1..75: mol_type = other DNA
ggaaaaacgcgcagtatgacgccttactaaaccaggcggcacaaacggctgatgcaacaaagcgtaatgcgctgt

SEQ ID NO: 755904 - DNA, 75 bp, synthetic construct
  source 1..75: mol_type = other DNA
atgtccattgcggtaaccaccaccgatccgacaaataccggcgtcagtaccaccagcagtagttcgctcacgggc

SEQ ID NO: 755905 - DNA, 75 bp, synthetic construct
  source 1..75: mol_type = other DNA
attacccggtacgtgagctgttgggtatcagccaggcagatgagcgcctgatttataacacggtgctgggccgga

SEQ ID NO: 755906 - DNA, 75 bp, synthetic construct
  source 1..75: mol_type = other DNA
atcttgaatttattcttgataaaataaacagttgggaaggggatataacttggattggcatttgtggctcgcttg

SEQ ID NO: 755907 - DNA, 75 bp, synthetic construct
  source 1..75: mol_type = other DNA
aaccgcggtgatctccctgttattaagctggggatcaggatgcttggtcatcgcccgaacagcatactcaaagcc

SEQ ID NO: 755908 - DNA, 75 bp, synthetic construct
  source 1..75: mol_type = other DNA
agacggaaactggttaaggaacggtccagactgaaacgggcgacggtcagaaatccgaatgccagaattatcgtt

SEQ ID NO: 755909 - DNA, 75 bp, synthetic construct
  source 1..75: mol_type = other DNA
ggtcagcatcggtatcagcgggcatttatccagcgattaaaaaacggtcgctggcatgtcatgcagcgtgtggcc

SEQ ID NO: 755910 - DNA, 75 bp, synthetic construct
  source 1..75: mol_type = other DNA
gcggcttcagcaatggccattaaccgcgtggccacaacggcgattaatcagtcttcatcacaggttgcccgggag

SEQ ID NO: 755911 - DNA, 75 bp, synthetic construct
  source 1..75: mol_type = other DNA
gtactttgaggctgaacttccggcgcttacgcgtgctatagatactatcgatttcgaacgattattcgctgctct

SEQ ID NO: 755912 - DNA, 75 bp, synthetic construct
  source 1..75: mol_type = other DNA
atgagggacgtggcttatgtctccatatctggctatgaaccggacgcgatccgcgctcaatgtgaattgctgaaa

SEQ ID NO: 755913 - DNA, 75 bp, synthetic construct
  source 1..75: mol_type = other DNA
actggttaaggaacggtccagactgaaacgggccacggtcagaaatccgaatgccagaattatcgttaaccgcgg

SEQ ID NO: 755914 - DNA, 75 bp, synthetic construct
  source 1..75: mol_type = other DNA
tatccgtcgtgaacgcctgcccaaagaactggcatatgcgctgaaacaacaactgaggatcgcgataaaacgatg

SEQ ID NO: 755915 - DNA, 75 bp, synthetic construct
  source 1..75: mol_type = other DNA
cccgcgtttgaaaaagcctatggctttaagctcggtcaggatcagttgctgtcactggctggtggcgatacggca

SEQ ID NO: 755916 - DNA, 75 bp, synthetic construct
  source 1..75: mol_type = other DNA
cccgcgtttgaaaaagcctatggctttaagctcggtcaggatcagttgctgtcactggccggtggcgacacggcg

SEQ ID NO: 755917 - DNA, 75 bp, synthetic construct
  source 1..75: mol_type = other DNA
gagcctgccgctacaggcggcttcccccgttaaagtcggttcaaaaatcgataccgaaggcgcgctgctcggcaa

SEQ ID NO: 755918 - DNA, 75 bp, synthetic construct
  source 1..75: mol_type = other DNA
gatgaaaaaacattgcagcagctgaatgccagcattgcagtggaaggactggatgccaaaaaagtggcagccgac

SEQ ID NO: 755919 - DNA, 75 bp, synthetic construct
  source 1..75: mol_type = other DNA
tgcaactgggaacgactcctgtggtgcgcggggcgatcacttccggtgaactggatatctatccggaatataccg

SEQ ID NO: 755920 - DNA, 75 bp, synthetic construct
  source 1..75: mol_type = other DNA
gcgatccgcaaggcgtgcaacctatctacgcgcctgcaccagtggtgcgtgaatcggtgttgaaggagtatccgc

SEQ ID NO: 755921 - DNA, 75 bp, synthetic construct
  source 1..75: mol_type = other DNA
gccgagcattattttgatcgttgggatgatgccgtttgctgtggcattacagaaaacgggaggtgtcgcgctggc

SEQ ID NO: 755922 - DNA, 75 bp, synthetic construct
  source 1..75: mol_type = other DNA
tcgtgctggtgctgggtattttgtatatgttagtgatgcgtttcatgctgaaaggggatacccagaccccgcagc

SEQ ID NO: 755923 - DNA, 75 bp, synthetic construct
  source 1..75: mol_type = other DNA
tggcagcagcagtatgacattctttatactttatccccgtgcctgaaaacatgtgctaaggaaacgggaatggca

SEQ ID NO: 755924 - DNA, 75 bp, synthetic construct
  source 1..75: mol_type = other DNA
ttttgtagtgaacaattgctggagccgatggttttgcgcggcgagtatttttccgatcaggctcttgatgtcggt

SEQ ID NO: 755925 - DNA, 75 bp, synthetic construct
  source 1..75: mol_type = other DNA
tcattggtgttgaacgctggcgccgttttcgtcgcgtcattgtgaatgttaatggggtttctgaattccgtgcgc

SEQ ID NO: 755926 - DNA, 75 bp, synthetic construct
  source 1..75: mol_type = other DNA
gcgtccagtagatgctgcttgctctttcgaaaaagagctggatgttacttctatcgtgactttcaaagatgacgc

SEQ ID NO: 755927 - DNA, 75 bp, synthetic construct
  source 1..75: mol_type = other DNA
acctggctaattgaaaaagctggaatcgtggttcacagatgcccacgcaatccgtttaccggaaaccgcattttt

SEQ ID NO: 755928 - DNA, 75 bp, synthetic construct
  source 1..75: mol_type = other DNA
gttaactcatccacgtatgggggaacagttatttcagtttgaacccagggaagtcagacggatttttgctggcga

SEQ ID NO: 755929 - DNA, 75 bp, synthetic construct
  source 1..75: mol_type = other DNA
agaaagctggaattgtggtccacaaatgcccacgcaatccgtttaccggaaaccgcatttttgcattgagctgtg

SEQ ID NO: 755930 - DNA, 75 bp, synthetic construct
  source 1..75: mol_type = other DNA
gtaccggaacagaacgccacgctaaccatttcgctaccaacgcatcacgcagcaacatccgctacagcccgagcg

SEQ ID NO: 755931 - DNA, 75 bp, synthetic construct
  source 1..75: mol_type = other DNA
caattactttgaaaatgggcgttatgccggggaagtaaacaggtacggagtttttgacatgaagcaacagcgcaa

SEQ ID NO: 755932 - DNA, 75 bp, synthetic construct
  source 1..75: mol_type = other DNA
atgaaggaacagcgcaattctttacaacagcgcttccgcaacggggcggaacgccatgccaaccgtttcgctacc

SEQ ID NO: 755933 - DNA, 75 bp, synthetic construct
  source 1..75: mol_type = other DNA
tatccgtcgtgaacgcctgcccaaagaactggcatacgcgctgaaacaacaactgaggattgcgataaaacgatg

SEQ ID NO: 755934 - DNA, 75 bp, synthetic construct
  source 1..75: mol_type = other DNA
attagcagcggagaatatgccattatgccactggcaccaatgaaggagtccgatgcgccgaacgaagaactgcgt

SEQ ID NO: 755935 - DNA, 75 bp, synthetic construct
  source 1..75: mol_type = other DNA
catctcctccgacgaagccagcgaaaaatatctctttgcgatggcaaacttgctgcgctggcatcctaaagatgc

SEQ ID NO: 755936 - DNA, 75 bp, synthetic construct
  source 1..75: mol_type = other DNA
gtctgctttttcagcccacggattctgccgctgaagattttatgaagtctcacgtggaggcgacgattagggacg

SEQ ID NO: 755937 - DNA, 75 bp, synthetic construct
  source 1..75: mol_type = other DNA
actggtgatgggcgcagaaggtgaaggcatgcgtcgcctgacccgtgaacattgcgatgagttgatcagcatccc

SEQ ID NO: 755938 - DNA, 75 bp, synthetic construct
  source 1..75: mol_type = other DNA
agtctgctttttcagcccacggattctgccgctgaagattttatgaagtctcacgtggaggcgacgattcggaac

SEQ ID NO: 755939 - DNA, 75 bp, synthetic construct
  source 1..75: mol_type = other DNA
aatacctggcaatcgattgtcggtgcatccgccttattatggattgttcactttttgatcctgcgcggcgtgcag

SEQ ID NO: 755940 - DNA, 75 bp, synthetic construct
  source 1..75: mol_type = other DNA
tcctcacgcgcattcgtcccgaacttgacggcggtatctttacctatgcccgcgaagggtttggcgagctaatcg

SEQ ID NO: 755941 - DNA, 75 bp, synthetic construct
  source 1..75: mol_type = other DNA
ggtgacagcctgaaatcgttcggggtggatgatttctacaaagcgcctaaggctacggtcgacgcggtgtttact

SEQ ID NO: 755942 - DNA, 75 bp, synthetic construct
  source 1..75: mol_type = other DNA
cttctccactgaaaaagacggtattggcgtcgaagtggcgttgcagtggaacgatggcttccaggaaaacatcta

SEQ ID NO: 755943 - DNA, 75 bp, synthetic construct
  source 1..75: mol_type = other DNA
caggccccgctggcggttaccggcgagactgaaaaaaccggcaccatggtgcgtttctggcccagcctcgaaacc

SEQ ID NO: 755944 - DNA, 75 bp, synthetic construct
  source 1..75: mol_type = other DNA
ttcttgctgaaaatcgcaacccgtccactgcataaagcggtaggtgtcggtgcctgcatttatggcttatggtta

SEQ ID NO: 755945 - DNA, 75 bp, synthetic construct
  source 1..75: mol_type = other DNA
ttcgcaatggcgcagaacgccatgctaaccgtttcgctaccagcgcatcacgtagcagctctcgctacagcctga

SEQ ID NO: 755946 - DNA, 75 bp, synthetic construct
  source 1..75: mol_type = other DNA
ggtaaacacacctggctgattaatgatgccggaattgtcatacacagaggcgcacgcaacccgattaccggaaac

SEQ ID NO: 755947 - DNA, 75 bp, synthetic construct
  source 1..75: mol_type = other DNA
ttggacaggatttcacattgtacgaagcacttcgcacggttgatcgtctgcttcgcgggcaaagttttattaaac

SEQ ID NO: 755948 - DNA, 75 bp, synthetic construct
  source 1..75: mol_type = other DNA
atcggcgaacacgcctggctgattgagaaagctggaatcgtggtccacaaatgcccgcgtaatccgtttaccgga

SEQ ID NO: 755949 - DNA, 75 bp, synthetic construct
  source 1..75: mol_type = other DNA
acattatacgaagcacttcgcacggttgatcgtctgcttcgcgggcaaagttttattaaacaggctgatttataa

SEQ ID NO: 755950 - DNA, 75 bp, synthetic construct
  source 1..75: mol_type = other DNA
acttcggacaggacttcacattttttgaagccttaagaacggccgacagattaatcagcggcctgcgttttcaat

SEQ ID NO: 755951 - DNA, 75 bp, synthetic construct
  source 1..75: mol_type = other DNA
gacgactcaaaattgctggcagccgactatgaccagatagccagtacgccgctaccggatgtgctgggtaaaaac

SEQ ID NO: 755952 - DNA, 75 bp, synthetic construct
  source 1..75: mol_type = other DNA
gtcttcgtattcagatgaccttccaaggtgtagagtttcgttcaatcgtaggacaaactgatatctcggctgcga

SEQ ID NO: 755953 - DNA, 75 bp, synthetic construct
  source 1..75: mol_type = other DNA
acagcctcagctaatgagcaagcttcaaaggtgcttaagtcgggtaatgctttacggaagtttagtgtgaatcct

SEQ ID NO: 755954 - DNA, 75 bp, synthetic construct
  source 1..75: mol_type = other DNA
gaccatggtacggaaatgaccgcgacccgtgatggtgttcgaggaaaagaaaaactggatgtccccatcaagttt

SEQ ID NO: 755955 - DNA, 75 bp, synthetic construct
  source 1..75: mol_type = other DNA
gtcgaaatccctcttcccgagcctgacgcatcttggcctggtgaacagcgaagagcaaaacgaaatcgtccgccg

SEQ ID NO: 755956 - DNA, 75 bp, synthetic construct
  source 1..75: mol_type = other DNA
atgaccgggcgcttctttcgcgtctgcatgatggtggtgctgttcagcctcaccctgacaggctgcgaaacggtg

SEQ ID NO: 755957 - DNA, 75 bp, synthetic construct
  source 1..75: mol_type = other DNA
ggaaattaactttaaagctattgtgggtcagactgatatctcggctgctactggcaagaccgctaccacgaatga

SEQ ID NO: 755958 - DNA, 75 bp, synthetic construct
  source 1..75: mol_type = other DNA
ctggaaagactgctaccacgaatgatggtggtgctaccagtaagaagaacactggcaacactacaacaagcttgg

SEQ ID NO: 755959 - DNA, 75 bp, synthetic construct
  source 1..75: mol_type = other DNA
tctaaagatgttggtattgccaattgtcaacgacggatgaaaagtgatccacttatatctccaccaacggcccaa

SEQ ID NO: 755960 - DNA, 75 bp, synthetic construct
  source 1..75: mol_type = other DNA
tcagatgccgctaatgcgcaagcttcaaaggtgtttaataatgctggtacaggtagtactttgaagaagtattct

SEQ ID NO: 755961 - DNA, 75 bp, synthetic construct
  source 1..75: mol_type = other DNA
gtcttcgtattcagatgaccttccaaggtgtagagtttcgttcaatcgtaggtcagactgatatttcggctgcaa

SEQ ID NO: 755962 - DNA, 75 bp, synthetic construct
  source 1..75: mol_type = other DNA
ataatgcacctatgctgatgtgtcaggaactgtacagctactcagcgtctgagctatctgatgaagcgctaaggg

SEQ ID NO: 755963 - DNA, 75 bp, synthetic construct
  source 1..75: mol_type = other DNA
atgctttccgttctcaccggtaacgtcggcataaacggcggcaactcaggtgtacgcgaaggtagctgggatctg

SEQ ID NO: 755964 - DNA, 75 bp, synthetic construct
  source 1..75: mol_type = other DNA
atacccggcggcgaaggttgagcaggttaaaggcggcttattgctgtattgttctcctccccctattccgtacaa

SEQ ID NO: 755965 - DNA, 75 bp, synthetic construct
  source 1..75: mol_type = other DNA
ccgcagggcgaatttcctgatgtgaaataccgtttcttccgtaagtcgtgtcagcactgcgaccatgcgccgtgc

SEQ ID NO: 755966 - DNA, 75 bp, synthetic construct
  source 1..75: mol_type = other DNA
atgagtttgtcacgtcgccagtttctcaccggcgtcggcgtgttggcggcagccagcggcactgcagggcgtgtg

SEQ ID NO: 755967 - DNA, 75 bp, synthetic construct
  source 1..75: mol_type = other DNA
cctggtgaatatgtctggcttaatccgccatattcgaatccggggccattcgtagataaggcagcgatggaacat

SEQ ID NO: 755968 - DNA, 75 bp, synthetic construct
  source 1..75: mol_type = other DNA
tatcaaggagaatggacgcccgatcatatgagatcaagagctgctgaactaagtattttatcgtataattcagta

SEQ ID NO: 755969 - DNA, 75 bp, synthetic construct
  source 1..75: mol_type = other DNA
tacaggtactggtcgtcgacacgcactgcaaacgcaggctgttttcaacgaaaacacagacagatcccgatgagc

SEQ ID NO: 755970 - DNA, 75 bp, synthetic construct
  source 1..75: mol_type = other DNA
cgccgtttatggatctgccgcccggcaatgcccgtcatgaggacggcgatgaattttctgccatggcgcagtacc

SEQ ID NO: 755971 - DNA, 75 bp, synthetic construct
  source 1..75: mol_type = other DNA
gctgagtgaagtcgccaaacgcttaggaccggacgtttatcaaacctttactgaaggtcgcagtcagcatgaatg

SEQ ID NO: 755972 - DNA, 75 bp, synthetic construct
  source 1..75: mol_type = other DNA
ggggtagaatggttcccgatgcttgagaatcctgttaaaacgcagatttccgtctttacatggacagatgccatc

SEQ ID NO: 755973 - DNA, 75 bp, synthetic construct
  source 1..75: mol_type = other DNA
tgcgcgaagttctgaccgtatacccacaggcgaaggtagaaaaagttaccgggggaatattactttacccttccc

SEQ ID NO: 755974 - DNA, 75 bp, synthetic construct
  source 1..75: mol_type = other DNA
atgtctgcctggagcccggagcacataacgttacgacgaacagaaaacggcaatgtgattgcccaggaattcatt

SEQ ID NO: 755975 - DNA, 75 bp, synthetic construct
  source 1..75: mol_type = other DNA
tttgaaatgctgttcaatgaagtttatgcccaggtctatgaccgggtgctgcgcgaaaaacagcgggagccggaa

SEQ ID NO: 755976 - DNA, 75 bp, synthetic construct
  source 1..75: mol_type = other DNA
tattcagacttaacagaagctgaaaaaaccaacgtcaccaatgctaacagtaacgctggtcgagtagcttcaaag

SEQ ID NO: 755977 - DNA, 75 bp, synthetic construct
  source 1..75: mol_type = other DNA
aaaagtttggtggtgtactcaaacttaccggctctgaagatttcaaaaaaatgtgcgctgaagttgccgcagagc

SEQ ID NO: 755978 - DNA, 75 bp, synthetic construct
  source 1..75: mol_type = other DNA
ggctacagaacaggcgcaggctacagaacaggcacaggccacagaacaggcgcaggctacagagcaggcgcaggc

SEQ ID NO: 755979 - DNA, 75 bp, synthetic construct
  source 1..75: mol_type = other DNA
aggcggaaattaccaggggggaaggtggtctttatcaccttgctgttgctggtaagtatggcttagagcgtggtg

SEQ ID NO: 755980 - DNA, 75 bp, synthetic construct
  source 1..75: mol_type = other DNA
acgaggcgatctgacaaatcttaaaactcagacccaacttgattctgttcaggaatatcttaacaacaaatataa

SEQ ID NO: 755981 - DNA, 75 bp, synthetic construct
  source 1..75: mol_type = other DNA
cgtttgataggccatttgaagtaattgccaattcatatgaagaataccgtactccagtgtatgcggtttctttct

SEQ ID NO: 755982 - DNA, 75 bp, synthetic construct
  source 1..75: mol_type = other DNA
agcaattatttaaatggtgatggttttgatactgttgtgcttatgtctaaaactgtctcaaccgatgaattatcc

SEQ ID NO: 755983 - DNA, 75 bp, synthetic construct
  source 1..75: mol_type = other DNA
ttattaccagggcaaacaccctggattcacagatgcttagtaaaggcacaaatggtgaatttggctatttgaaat

SEQ ID NO: 755984 - DNA, 75 bp, synthetic construct
  source 1..75: mol_type = other DNA
tatcttaatcgcactatgccggtaggcttgccgggtctggcagctgcctgttttattctcggcgtactgctgtac

SEQ ID NO: 755985 - DNA, 75 bp, synthetic construct
  source 1..75: mol_type = other DNA
ttgcactggtcagctctgcgctggctctttcaggatgtggagccatgggcacagcgatcaaaaaacgaaatctgg

SEQ ID NO: 755986 - DNA, 75 bp, synthetic construct
  source 1..75: mol_type = other DNA
aagccatttgaagtaattgccaattcatatgaagaataccatactccagtgtatgcggtgtctttctcgaaggat

SEQ ID NO: 755987 - DNA, 75 bp, synthetic construct
  source 1..75: mol_type = other DNA
gctcgtgttccggtaattacagggatccatttcagtacaagggctattgaaaatgtgaataaactggaacaacag

SEQ ID NO: 755988 - DNA, 75 bp, synthetic construct
  source 1..75: mol_type = other DNA
gttaaagaccgttctcagttcagttcctgcaatggggatatcgttgtggaggcggaaattaccaggggggaaggt

SEQ ID NO: 755989 - DNA, 75 bp, synthetic construct
  source 1..75: mol_type = other DNA
tgatattgccgtgggtgtgattgtttacaaaaaactaaccacacttgagcgtctttctgaactcgacacagaggg

SEQ ID NO: 755990 - DNA, 75 bp, synthetic construct
  source 1..75: mol_type = other DNA
atgagttacgtagtggcagagcaaagggggacagaagcgtttgatgtccgtactggtgcgggactggcatttacg

SEQ ID NO: 755991 - DNA, 75 bp, synthetic construct
  source 1..75: mol_type = other DNA
tgctttgagctgggaattgttgatggcgatgctgaaattagcgcgttgaaagcggaaattgcaagctaccgttag

SEQ ID NO: 755992 - DNA, 75 bp, synthetic construct
  source 1..75: mol_type = other DNA
acagtggcaaagatggcgtttacttccacttaagagataatgtagatgccttcttaaccttatcagcaactgaaa

SEQ ID NO: 755993 - DNA, 75 bp, synthetic construct
  source 1..75: mol_type = other DNA
atgatttactctaatcaacttcgttacagtggcaaagatggcgtttactttcatctacaaggccaaccagataat

SEQ ID NO: 755994 - DNA, 75 bp, synthetic construct
  source 1..75: mol_type = other DNA
gcaggtaacgtgaccactgaacgcaataacgcgcctatgctatcgtgcaaagagttaatgaatattagcgatgta

SEQ ID NO: 755995 - DNA, 75 bp, synthetic construct
  source 1..75: mol_type = other DNA
ccatctacaaggccaaccagataatttcttgtcactatcagcaactgagaacatggaatttgacagccctatgat

SEQ ID NO: 755996 - DNA, 75 bp, synthetic construct
  source 1..75: mol_type = other DNA
aaagaattctgcaaaattgttaatgagttaggtattgacagaacacaggctttgattcatgagcagctttcttct

SEQ ID NO: 755997 - DNA, 75 bp, synthetic construct
  source 1..75: mol_type = other DNA
cgaacaggcacaggccacagagcaggcacaggccacagagcaggcacaggccacagagcaggcacaggtcgcaga

SEQ ID NO: 755998 - DNA, 75 bp, synthetic construct
  source 1..75: mol_type = other DNA
caagagaagaaatcgcctttaaaggaattaaggacgctgttaatgacgctaatatggcagtgatggaacaggcgg

SEQ ID NO: 755999 - DNA, 75 bp, synthetic construct
  source 1..75: mol_type = other DNA
tgacactctcgaaagctggcgtgaccagaagcaaattatttcggtcatctgtaaagacggtatcaagattgatga

SEQ ID NO: 756000 - DNA, 75 bp, synthetic construct
  source 1..75: mol_type = other DNA
gtgaccagaagcagattatttctgtcatctgtaaagacggtattaagattgatgattccattattacgagtttta

SEQ ID NO: 756001 - DNA, 75 bp, synthetic construct
  source 1..75: mol_type = other DNA
ctatcgtcactaaccgtgatcgtctggcggactcattgctgacaacggacggccagcctgcatatccaggtatgc

SEQ ID NO: 756002 - DNA, 75 bp, synthetic construct
  source 1..75: mol_type = other DNA
ccacactggcatggggcggacatgccgttatgcatgatggcgtacattactatctccacttgttcagcgacctga

SEQ ID NO: 756003 - DNA, 75 bp, synthetic construct
  source 1..75: mol_type = other DNA
acactcggatctatttccggacagattgataacagccagtcgttacaggccagtaacctgatcggtcacggcgtg

SEQ ID NO: 756004 - DNA, 75 bp, synthetic construct
  source 1..75: mol_type = other DNA
cggcgggactgaataaccagttgtcgacttacagcgtgacgatacgtgttcgtaaatgtgaacacccatctttaa

SEQ ID NO: 756005 - DNA, 75 bp, synthetic construct
  source 1..75: mol_type = other DNA
gcagaaatggcgcaacgccaccttgcggtcacccccttactgcgcggtcttggcggctcgcttaccatgagcaat

SEQ ID NO: 756006 - DNA, 75 bp, synthetic construct
  source 1..75: mol_type = other DNA
ctatctgtatattgctgaaggtaacttaacccccttgttcaacagtgcctgggggggcatattgcttgctaaaac

SEQ ID NO: 756007 - DNA, 75 bp, synthetic construct
  source 1..75: mol_type = other DNA
acgatgagtgggggcgtggcgctggctacacttgcctggggaggacacgccgtcatgcatgacggtctgcattac

SEQ ID NO: 756008 - DNA, 75 bp, synthetic construct
  source 1..75: mol_type = other DNA
aagcattcaatgaagcgttaccgctgaccggtgtggtactgactaaagtcgacggcgatgcccgtggcggtgcgg

SEQ ID NO: 756009 - DNA, 75 bp, synthetic construct
  source 1..75: mol_type = other DNA
cgttccatccggaccgcatcgcgtcgcgtattctcggcatgggagacgtactgtcgctgatcgaagatatcgaaa

SEQ ID NO: 756010 - DNA, 75 bp, synthetic construct
  source 1..75: mol_type = other DNA
ggcgatggcttcgatctcaacgatttccttgagcagttgcgccagatgaaaaatatgggcggcatggccagcctg

SEQ ID NO: 756011 - DNA, 75 bp, synthetic construct
  source 1..75: mol_type = other DNA
ggcaacaacggtaatacgctggatctcggcacttacggcaccaccaccctcgacgaagtacggcagataatttaa

SEQ ID NO: 756012 - DNA, 75 bp, synthetic construct
  source 1..75: mol_type = other DNA
tggtttgtcgtaaatggtcggcaagcgttggtgcgttatgggtaactgtaacggcagattttgagcaggtggtaa

SEQ ID NO: 756013 - DNA, 75 bp, synthetic construct
  source 1..75: mol_type = other DNA
gtcctgatatgacagttgcatcggaaccgaaggtgttgacggtaaagctgggggatggctatgaacagcggcgac

SEQ ID NO: 756014 - DNA, 75 bp, synthetic construct
  source 1..75: mol_type = other DNA
cggctgatggtgagggttcatctgaaccggggagatattccccattacgatgaggaaatggccactcccgaaacc

SEQ ID NO: 756015 - DNA, 75 bp, synthetic construct
  source 1..75: mol_type = other DNA
tgcaacgattacttttgattatcgtggattcggtgagagtgaaggggaacgaggtcgtctggttccggcaatgca

SEQ ID NO: 756016 - DNA, 75 bp, synthetic construct
  source 1..75: mol_type = other DNA
gttgaacagtggcgtgaaaagcattccgctgatgaaatcaccgttcgtgacctggctgccaatccgatcccggtg

SEQ ID NO: 756017 - DNA, 75 bp, synthetic construct
  source 1..75: mol_type = other DNA
gcgaacagggaaagtgagcaggcaatacaggattccagcctgtttgatgtcgctgtggcgtgtttcttgagaggt

SEQ ID NO: 756018 - DNA, 75 bp, synthetic construct
  source 1..75: mol_type = other DNA
aaaacgcaaagtaaaccttttcgcaatattcctgaaaaccatcaggagcgcagagaaatacgtgcagatgacaaa

SEQ ID NO: 756019 - DNA, 75 bp, synthetic construct
  source 1..75: mol_type = other DNA
tatatggcccgaatacacgggaatcacgtccccttcacgtcacaaatatgaacttaacaccaaaaaggctgatgg

SEQ ID NO: 756020 - DNA, 75 bp, synthetic construct
  source 1..75: mol_type = other DNA
cattatcccgctgctgatcgtgctctgttatatgatgcagagcggcagtccggaaggcgccgaattatacgcagt

SEQ ID NO: 756021 - DNA, 75 bp, synthetic construct
  source 1..75: mol_type = other DNA
cagcaacagcagtacgtgcaacgccagatattgcctatgccgcaggtacaaatattgcgttcggtatggcacagc

SEQ ID NO: 756022 - DNA, 75 bp, synthetic construct
  source 1..75: mol_type = other DNA
ctccgatcgccagcaggggtttgagatgctgtttaacgaggtctatgaccgggtgcttcgtgaaaaacagcggga

SEQ ID NO: 756023 - DNA, 75 bp, synthetic construct
  source 1..75: mol_type = other DNA
cagataccctgctgtcaaccgagggcgcgccacactatccgggaatgacttaccggcaccagcttgcagacaccg

SEQ ID NO: 756024 - DNA, 75 bp, synthetic construct
  source 1..75: mol_type = other DNA
tggataaaatcgtatccccgattgctcagtttgttaacgaaaacacctcgctcaatgatacttcagtttcataca

SEQ ID NO: 756025 - DNA, 75 bp, synthetic construct
  source 1..75: mol_type = other DNA
cggcaggagatattgatctgcgtatagctgaagactcgctgcttgaatctccggacatgataatcaccgtgctgg

SEQ ID NO: 756026 - DNA, 75 bp, synthetic construct
  source 1..75: mol_type = other DNA
aactggcacggcgacagcaggcagaaagtgaacttaatgctcaggctgtttcattctataaaacagcagaggtca

SEQ ID NO: 756027 - DNA, 75 bp, synthetic construct
  source 1..75: mol_type = other DNA
aattatcaaaggttcgcgtaaacgccgtatcgctgcgggttgcgggatgcaggtgcaggacgttaaccgtcttct

SEQ ID NO: 756028 - DNA, 75 bp, synthetic construct
  source 1..75: mol_type = other DNA
agtgatgccagcaaaagtgatcgggaaaagctgaaccgtatgctggaggaaatgtttgatgaatctgacatgtgg

SEQ ID NO: 756029 - DNA, 75 bp, synthetic construct
  source 1..75: mol_type = other DNA
agcgatgccagcaagagtgatcaggaaaaactgaatcgcatgttggaagatatgtttgaagaggccgatatgagg

SEQ ID NO: 756030 - DNA, 75 bp, synthetic construct
  source 1..75: mol_type = other DNA
catgagaaggaacagataagccgtactgttcaggagatgtttgaagaggctgaattctggttagtgagtgaataa

SEQ ID NO: 756031 - DNA, 75 bp, synthetic construct
  source 1..75: mol_type = other DNA
tcttgtcgatcgctacagcgaacgaaaggagtcggcagaagaactttcccggcgggtaaatcagagcaaaatttg

SEQ ID NO: 756032 - DNA, 75 bp, synthetic construct
  source 1..75: mol_type = other DNA
gtagttcagcttatctcgtcgatcgctacagcgaacgtaaagagtctgcagaagaactttccaggcgggttaatc

SEQ ID NO: 756033 - DNA, 75 bp, synthetic construct
  source 1..75: mol_type = other DNA
agcgactgcaccaaaattgagaaagaacggctgaaccgcatgctggaagaaatgtttgaagaatctgatatgtgg

SEQ ID NO: 756034 - DNA, 75 bp, synthetic construct
  source 1..75: mol_type = other DNA
ggtagcttgttcttgatctggcatccacggtgcagacatgaatgtattttcacgcagataacacgtaaagagcta

SEQ ID NO: 756035 - DNA, 75 bp, synthetic construct
  source 1..75: mol_type = other DNA
acactcctaaggaaattaaagatctatggcagacgcctaaaccagttttcagaggaatggaccgcgagtttgaat

SEQ ID NO: 756036 - DNA, 75 bp, synthetic construct
  source 1..75: mol_type = other DNA
ttgatctggcatccacggtgcagacatgaatgtattttcacgcagataacacgtaaagagctatatgcaagaggt

SEQ ID NO: 756037 - DNA, 75 bp, synthetic construct
  source 1..75: mol_type = other DNA
gcaaaagccgctaaatgtaagtccggttatccaaaccgtatgcctgttggtagcggtaaccagttggcgaagtgg

SEQ ID NO: 756038 - DNA, 75 bp, synthetic construct
  source 1..75: mol_type = other DNA
gctacatttttgctgatgcagatgtcgctccagatccgggcgatgagcacggtttatcaaataacgctatcaatg

SEQ ID NO: 756039 - DNA, 75 bp, synthetic construct
  source 1..75: mol_type = other DNA
atgaaaaatgattttggaggcagcagtacgccgaaggaaattaaagacctgtggcagacacctaaaccagttttt

SEQ ID NO: 756040 - DNA, 75 bp, synthetic construct
  source 1..75: mol_type = other DNA
ctgctcaggggacaaaccagctaccttgcagatcgctacagcgaacgaaaagagagtcatcaggaactttcgtac

SEQ ID NO: 756041 - DNA, 75 bp, synthetic construct
  source 1..75: mol_type = other DNA
aaatcgcgcatctgcgccgtgaatacaccaaaggcgggttacgccgccgcgatcttcccgccgatccattaaccc

SEQ ID NO: 756042 - DNA, 75 bp, synthetic construct
  source 1..75: mol_type = other DNA
gccttgaacagattgagttctggcagggcggtgagcatcgcctgcatgaccgctttttgtaccagcgtgaaaatg

SEQ ID NO: 756043 - DNA, 75 bp, synthetic construct
  source 1..75: mol_type = other DNA
atccgcctgtacacagtaaatgaatttaagctgttggaatctttttgtaacccgtatcgggatgaatttgattat

SEQ ID NO: 756044 - DNA, 75 bp, synthetic construct
  source 1..75: mol_type = other DNA
gccatgaccggtcaggatgcggccaatacggcaaaagcattcaatgaagcgttaccgcttaccggcgtagtgttg

SEQ ID NO: 756045 - DNA, 75 bp, synthetic construct
  source 1..75: mol_type = other DNA
tctcaacgattttcttgagcaactgcgccagatgaaaaatatgggcggcatggctagcctgatgggcaagctgcc

SEQ ID NO: 756046 - DNA, 75 bp, synthetic construct
  source 1..75: mol_type = other DNA
gaaaaaggcatggtgttttacaccaatcttggcagccgtaaagcacaccaaatcgaaaataacccgcgtgttagc

SEQ ID NO: 756047 - DNA, 75 bp, synthetic construct
  source 1..75: mol_type = other DNA
acgactaattagttggtgccaaacagcagaactaattaattgggtgaaagccacggatatagcttatggtaatgc

SEQ ID NO: 756048 - DNA, 75 bp, synthetic construct
  source 1..75: mol_type = other DNA
tgcttggtcgttggatgagaatgatcaccattccgaaccaatcctcggtagcaaaagcctggcaggagtttgatg

SEQ ID NO: 756049 - DNA, 75 bp, synthetic construct
  source 1..75: mol_type = other DNA
ttcccagtcattcaacacagtcaaccagatgcgcgtgcttggtcgttggatgagaatgatcactattccgaacca

SEQ ID NO: 756050 - DNA, 75 bp, synthetic construct
  source 1..75: mol_type = other DNA
cgctacgggcaacttaaggagaacgaaaccattactatccaagcgaaacgattcactgccaccatcacaagaaca

SEQ ID NO: 756051 - DNA, 75 bp, synthetic construct
  source 1..75: mol_type = other DNA
cgcttatgcagcgacaagatatctacgaggttttacctgttgagtactgctatggtgctattcaggtaaaatcaa

SEQ ID NO: 756052 - DNA, 75 bp, synthetic construct
  source 1..75: mol_type = other DNA
tatagataataagcttttgccgcttagttatgcaatctcaaaatcgagcgtccgtgttgcatcaacaacaggaca

SEQ ID NO: 756053 - DNA, 75 bp, synthetic construct
  source 1..75: mol_type = other DNA
gaacgcgccgatgcgttacccgcgtttgaaaaagcctatggctttaagctcggtcaggatcagttgctgtcactg

SEQ ID NO: 756054 - DNA, 75 bp, synthetic construct
  source 1..75: mol_type = other DNA
ctggtcgctgaagagcgttttatctccgctctgccacatttccctttcatccataaacttatcaacacctttaac

SEQ ID NO: 756055 - DNA, 75 bp, synthetic construct
  source 1..75: mol_type = other DNA
gaagaagcattcaccgtaaataaagatagctcgggtaattttgattatccgtttgttatcttatcatcaggacgt

SEQ ID NO: 756056 - DNA, 75 bp, synthetic construct
  source 1..75: mol_type = other DNA
tttttttgattatgcggattcttttaatcaacaatttatgaaggttgttggcagagttcaaacagtttcacacgt

SEQ ID NO: 756057 - DNA, 75 bp, synthetic construct
  source 1..75: mol_type = other DNA
acgacagagcagcccgggtgcgatccctgaaatgctttcttttatacagaataccgggatcgcacggatacttcc

SEQ ID NO: 756058 - DNA, 75 bp, synthetic construct
  source 1..75: mol_type = other DNA
gtctttcctctggcagatatcaaatcagtcagcctgacatcagaacggtttgaacggagaggccacatccacagt

SEQ ID NO: 756059 - DNA, 75 bp, synthetic construct
  source 1..75: mol_type = other DNA
ctgatcaaaattattatctgccgaaagaatcgtcatacggtgagggggaatggaaaacgctgccgttccaggtcg

SEQ ID NO: 756060 - DNA, 75 bp, synthetic construct
  source 1..75: mol_type = other DNA
ctcacgagtgcgtggaaaaaataaagattctgtttcctcatcttcgtgctgaaggcggtggatttattcccctga

SEQ ID NO: 756061 - DNA, 75 bp, synthetic construct
  source 1..75: mol_type = other DNA
gcaggcccgtttacaggctaaccctgcgatattgctgtctgaattgaccacgaggaaacggagaaagtccaaatg

SEQ ID NO: 756062 - DNA, 75 bp, synthetic construct
  source 1..75: mol_type = other DNA
ttaatgaggtggcaaaagagaaactaccgcattacgtcatgagtgcaactgcagagatagggcgtgtcgcggctg

SEQ ID NO: 756063 - DNA, 75 bp, synthetic construct
  source 1..75: mol_type = other DNA
cagcgcgcgtttcgtgatgtagcgcctgaaatgccatcatctgcacgaaccgccgccattgcgccgcaggccacg

SEQ ID NO: 756064 - DNA, 75 bp, synthetic construct
  source 1..75: mol_type = other DNA
ctccaggatgctggcacaatatacagaacactactggacatgcgccgcaccgcagaacatggcccacaaaaaacg

SEQ ID NO: 756065 - DNA, 75 bp, synthetic construct
  source 1..75: mol_type = other DNA
tcatctgccgtcgaaaaacatatccccgaagcgccagccaggaagaagaaaaagaaaagacaccgttttccacgt

SEQ ID NO: 756066 - DNA, 75 bp, synthetic construct
  source 1..75: mol_type = other DNA
aatatggcgcgtgagagtggtttgtataccttgcttgagtttattggcaaccctattactgccatgtttatcgcc

SEQ ID NO: 756067 - DNA, 75 bp, synthetic construct
  source 1..75: mol_type = other DNA
ccggcgaggtggtgggaatgatggccacacagatgtacggtaagccggtgagtgaactgagtgagacagagaaac

SEQ ID NO: 756068 - DNA, 75 bp, synthetic construct
  source 1..75: mol_type = other DNA
ttgccggtgctgcaggtgcagccaccggcgaggtggtgggaatgatagccacacagatgtacggtaaaccggtga

SEQ ID NO: 756069 - DNA, 75 bp, synthetic construct
  source 1..75: mol_type = other DNA
aggccgtgcaggccggacgactggcagacgcgcagggagccgatgccggaaataataacacggtgggcatcagcc

SEQ ID NO: 756070 - DNA, 75 bp, synthetic construct
  source 1..75: mol_type = other DNA
cgctaaatggtgtcttgatagattgccaagtgattgtcagattgttggtgaagatggcaattattatctggttag

SEQ ID NO: 756071 - DNA, 75 bp, synthetic construct
  source 1..75: mol_type = other DNA
tttaaacaagtacagcgcatcaaaccccagattcatccagaaacaacacatagtcatatagttactattgaggac

SEQ ID NO: 756072 - DNA, 75 bp, synthetic construct
  source 1..75: mol_type = other DNA
tagtaatactcctggcacggtttgcgccgtgatgactgccgattgcctgccagtgctgttttgcaatcgcgcggg

SEQ ID NO: 756073 - DNA, 75 bp, synthetic construct
  source 1..75: mol_type = other DNA
tgcggttatcggccttggcacgatactgggaaaaatgatggaagtatccggtgccgcagaaagaattggtctgac

SEQ ID NO: 756074 - DNA, 75 bp, synthetic construct
  source 1..75: mol_type = other DNA
ataatatgatggtcgccgtcgcaaccgcattacagccactgataagggcactgccggtgacgccggttgagtggg

SEQ ID NO: 756075 - DNA, 75 bp, synthetic construct
  source 1..75: mol_type = other DNA
ctccctgccttatctggctaccggcgccggatatcactgcaacgctccccgagtgtttctcgcaactcatcctgg

SEQ ID NO: 756076 - DNA, 75 bp, synthetic construct
  source 1..75: mol_type = other DNA
ttctgggaacattggttcttctgttggttctgaaggagttggtgttattcttcaggagcaaattaaagaccaact

SEQ ID NO: 756077 - DNA, 75 bp, synthetic construct
  source 1..75: mol_type = other DNA
gatattgaattggttaattgtgatatcacttcatttaagggggggggggggaggagtctcggcagcaaaaaaagg

SEQ ID NO: 756078 - DNA, 75 bp, synthetic construct
  source 1..75: mol_type = other DNA
ctccacatccggctgctttatatgttgccaataagctgggcgcagatatcggttcggtgatcgtctacggtttgc

SEQ ID NO: 756079 - DNA, 75 bp, synthetic construct
  source 1..75: mol_type = other DNA
ttaatgaggtggcaaaagagaaattgccacattacgtcatgagtgcaactgcagagatagggcgtgtcgcggcag

SEQ ID NO: 756080 - DNA, 75 bp, synthetic construct
  source 1..75: mol_type = other DNA
gccttcagccatgtggacctgctgacagaggcaaagtcgtttgctgcagaaggaaccagttttactgaactgggg

SEQ ID NO: 756081 - DNA, 75 bp, synthetic construct
  source 1..75: mol_type = other DNA
caaccgaatatcttgttgtgggtgtcggtattccggcgtattcctgtttagatgctcctggtatatataaggctg

SEQ ID NO: 756082 - DNA, 75 bp, synthetic construct
  source 1..75: mol_type = other DNA
cggcattccggcatgttcctgtttagatgcccctggcacacataaggctggttatgcaatctgccgttctgcaga

SEQ ID NO: 756083 - DNA, 75 bp, synthetic construct
  source 1..75: mol_type = other DNA
ttccggtgacagtgtcacgctttctgacggactgcagacccgggggattcgccccggtcaggagcaggcagaaca

SEQ ID NO: 756084 - DNA, 75 bp, synthetic construct
  source 1..75: mol_type = other DNA
cgtctctccacctgggagaataacccggatgcccttgccctggtggataatgtgtatcaccggattgccggtatc

SEQ ID NO: 756085 - DNA, 75 bp, synthetic construct
  source 1..75: mol_type = other DNA
gagtgaccgggagcgcggttatgtggccaacagcgtctggacggtgacagcggtttccggtgacagtgtcacgct

SEQ ID NO: 756086 - DNA, 75 bp, synthetic construct
  source 1..75: mol_type = other DNA
tgaaaaatgggtgacagatactgaggcacaacacggtgccgcagtagaagcggcagaagcacagcgccagtcact

SEQ ID NO: 756087 - DNA, 75 bp, synthetic construct
  source 1..75: mol_type = other DNA
gattacattgacgcggtgacggcaacaaataccagcacagcgccggatgtcatctggcctgaattgccggaggcg

SEQ ID NO: 756088 - DNA, 75 bp, synthetic construct
  source 1..75: mol_type = other DNA
ggctggctacagtgccgggcgatatgcgttgtttttattataatgcagtaacgtatgaatatactggctggtctg

SEQ ID NO: 756089 - DNA, 75 bp, synthetic construct
  source 1..75: mol_type = other DNA
gcacagcatagcgccgcagtagacgcggcagaagcacagcgtcagtcactgattgatgctgcaatggcttccatc

SEQ ID NO: 756090 - DNA, 75 bp, synthetic construct
  source 1..75: mol_type = other DNA
ggaggaatcaaccagttccagtgcgtccagataatccagccacaaattatattgcgccagttcatcatctttcag

SEQ ID NO: 756091 - DNA, 75 bp, synthetic construct
  source 1..75: mol_type = other DNA
agcttattaccacgaaggcggggaatattaccgtctataactatgatggtgagacgcgggaatatatttcagctt

SEQ ID NO: 756092 - DNA, 75 bp, synthetic construct
  source 1..75: mol_type = other DNA
gagtggatgcagacgctgaaggaaaccggttttgatatccgggcataccgtgaagcggcggaccggcgggcggag

SEQ ID NO: 756093 - DNA, 75 bp, synthetic construct
  source 1..75: mol_type = other DNA
tgttgtctttgtcggcactggcgctgcatgcacgtttgcagaccaatccagcaatgacgagtgttgtcgatacca

SEQ ID NO: 756094 - DNA, 75 bp, synthetic construct
  source 1..75: mol_type = other DNA
atcaagctgcgcagacgtgttttgatgaacaaggactagaagccgccctgcgatatctggacacattgccagcag

SEQ ID NO: 756095 - DNA, 75 bp, synthetic construct
  source 1..75: mol_type = other DNA
accaaccggaagtctattttctccatgagcaaggaggatctggagaccaggacaaatgaacttggccagtttttt

SEQ ID NO: 756096 - DNA, 75 bp, synthetic construct
  source 1..75: mol_type = other DNA
atccgcattttgatgaagcctgtagagcttttgcacttcgtcacaatatggcgaagctggcagaacgtgcaggaa

SEQ ID NO: 756097 - DNA, 75 bp, synthetic construct
  source 1..75: mol_type = other DNA
gccacattacgtcatgagtgcaaccgcagagatcgggcgtgttgctgcaggtgcggtatctgatgaaagtgcgtg

SEQ ID NO: 756098 - DNA, 75 bp, synthetic construct
  source 1..75: mol_type = other DNA
ctcaccccacctgagttatggctactgacagacctgaccgaagactcagccttagttgatggttttttggctcag

SEQ ID NO: 756099 - DNA, 75 bp, synthetic construct
  source 1..75: mol_type = other DNA
cggtgtgggtaagaccacacagttccgggcggtgatgtcagccgtgaacatgctgccggagagtgagcgtccccg

SEQ ID NO: 756100 - DNA, 75 bp, synthetic construct
  source 1..75: mol_type = other DNA
gcgcagagtcacagtctgaccctgcgggatgctctgggtgaaacgcaggtggtgcgtatttcttccctggacagc

SEQ ID NO: 756101 - DNA, 75 bp, synthetic construct
  source 1..75: mol_type = other DNA
ctggccgggggagacagtccggcacggtttattgcaccggggcgcaaatatccgcagccgtatgtggcactgccg

SEQ ID NO: 756102 - DNA, 75 bp, synthetic construct
  source 1..75: mol_type = other DNA
cttgaccagagcaacgggcggtggatctgtgaaaacacgggcatgtggacccgtgacggtctgatgtttttcagc

SEQ ID NO: 756103 - DNA, 75 bp, synthetic construct
  source 1..75: mol_type = other DNA
atgagcaaggaggatctggagaccaggacaaatgaacttggccagttctttactatcagaacgtcgaactcatct

SEQ ID NO: 756104 - DNA, 75 bp, synthetic construct
  source 1..75: mol_type = other DNA
gcacagcatagtgccgcagtagatgcagcagaaacacagcgccagtcgctgattgatactgcaatggcctccgtc

SEQ ID NO: 756105 - DNA, 75 bp, synthetic construct
  source 1..75: mol_type = other DNA
tgaacagaaatattgctgccagaaccgctgcccagaatgagctgaacagtacaacggcggtgggctcacgtctga

SEQ ID NO: 756106 - DNA, 75 bp, synthetic construct
  source 1..75: mol_type = other DNA
tgaacagaaatattgctgccagaatcgccgcccagaatgagctgaacagtacaacggcggtgggctcacgtctga

SEQ ID NO: 756107 - DNA, 75 bp, synthetic construct
  source 1..75: mol_type = other DNA
tgaacagaaatattgctgccagaatcgcagcccagaatgcgctgaacagtacaacggcggtgggctcacgtctga

SEQ ID NO: 756108 - DNA, 75 bp, synthetic construct
  source 1..75: mol_type = other DNA
cagagcgtgagctggccctgtccggactgaagggggacgaaaaagagcggggccgcctggggtatgcggcggatg

SEQ ID NO: 756109 - DNA, 75 bp, synthetic construct
  source 1..75: mol_type = other DNA
cagagcgtgagctggccctgtccggactgaacggggacgaaaaagagcggggccggctggggtatgcggcggatg

SEQ ID NO: 756110 - DNA, 75 bp, synthetic construct
  source 1..75: mol_type = other DNA
cagagcgtgagctggccctgtcccgactgaagggggacgaaaaagagcggggccggctggggtatgcggcggatg

SEQ ID NO: 756111 - DNA, 75 bp, synthetic construct
  source 1..75: mol_type = other DNA
ccgcttactacgctttcgccatatgctcacctgccgacaacacggattaattgtcttaaccgatcgttatccgca

SEQ ID NO: 756112 - DNA, 75 bp, synthetic construct
  source 1..75: mol_type = other DNA
tctggtcatcaaactcaatgttgaccttgaagttgcctgcgcgcgtaaacccgaccataaacgggaatcgctggc

SEQ ID NO: 756113 - DNA, 75 bp, synthetic construct
  source 1..75: mol_type = other DNA
aaaggaagatagccataacgccgcagttaacctttggcggtgcacaactggttgatatcgatgccaatcagccgc

SEQ ID NO: 756114 - DNA, 75 bp, synthetic construct
  source 1..75: mol_type = other DNA
tgaacagaaatattgctgccagaaacgctgcccagaatgcgctgaacagtacaacggcggtgggctcacgtctga

SEQ ID NO: 756115 - DNA, 75 bp, synthetic construct
  source 1..75: mol_type = other DNA
cacgcagattgccacggcgcgggcaagtgcagccgtgtaccgtgcgcagcaggcagtggcggcagcccgcgggac

SEQ ID NO: 756116 - DNA, 75 bp, synthetic construct
  source 1..75: mol_type = other DNA
tacgcagattgccacggcgcgggcaagggcagccgtgtaccgtgcccagcaggcagtggcggcagcccgcgggac

SEQ ID NO: 756117 - DNA, 75 bp, synthetic construct
  source 1..75: mol_type = other DNA
actgaacggggaggaaaaagagcgggcccggctggggtatgcggcggatgacctgggttttgtgggggatccgta

SEQ ID NO: 756118 - DNA, 75 bp, synthetic construct
  source 1..75: mol_type = other DNA
tctgagtgcttacagtaacactattgtggatacaccgacgtattttgcttttgcgaagggggccgggttgatggg

SEQ ID NO: 756119 - DNA, 75 bp, synthetic construct
  source 1..75: mol_type = other DNA
cgtcatcacagaaagtgctgatggatatcagccagcggacaggcaccgcattttcggataatgcggccctgtttg

SEQ ID NO: 756120 - DNA, 75 bp, synthetic construct
  source 1..75: mol_type = other DNA
caacagagcagtttgctgttgagcagtcccgtctggcacagatgcaggaaaaagcgcagtccattcaggatgtgc

SEQ ID NO: 756121 - DNA, 75 bp, synthetic construct
  source 1..75: mol_type = other DNA
ggagatgcagaagcaggaactgctgcgtaacgcggccctgattgaccagcaaaaaatccgggaacagttgcgatc

SEQ ID NO: 756122 - DNA, 75 bp, synthetic construct
  source 1..75: mol_type = other DNA
agtcttgtgcagctgattgaccagcgggtgcaggcggtgatgctgtccatgcgacgtgacggaggaatgctgagt

SEQ ID NO: 756123 - DNA, 75 bp, synthetic construct
  source 1..75: mol_type = other DNA
ctttccgggcattgcggtttgcgtagaaccggaatcggtcgaggcgctggtggcggggatccgtcaggcgctcct

SEQ ID NO: 756124 - DNA, 75 bp, synthetic construct
  source 1..75: mol_type = other DNA
agataatgaaggacgaacacgggcggcgctgacagagcagaaccggctgattgatgaacaggccagtcgggtgaa

SEQ ID NO: 756125 - DNA, 75 bp, synthetic construct
  source 1..75: mol_type = other DNA
actgaagggggaggaaaaagagcgggcccggctggggtatgcggcggatgacctcggttttgtgggggatccgta

SEQ ID NO: 756126 - DNA, 75 bp, synthetic construct
  source 1..75: mol_type = other DNA
actgaagggggaggaaaaagagcgggcccgcctggggtatgcggcggatgacctgggttttgtgggggatccgta

SEQ ID NO: 756127 - DNA, 75 bp, synthetic construct
  source 1..75: mol_type = other DNA
cggtggcaaatgcaaaaggcggcgtttatacctcggcaaacctgagtgcatacagtaacagtattgtggacacgc

SEQ ID NO: 756128 - DNA, 75 bp, synthetic construct
  source 1..75: mol_type = other DNA
ggagctgccgcatggtacacgctgtaccagaatcaggagcaggccagggagtctgcgcgccagtatgcactgacg

SEQ ID NO: 756129 - DNA, 75 bp, synthetic construct
  source 1..75: mol_type = other DNA
gcagtctcagtatcagacaggggatatcagtgaggatttttacagacaggcgctggcgcagaatgcgcagtatct

SEQ ID NO: 756130 - DNA, 75 bp, synthetic construct
  source 1..75: mol_type = other DNA
tgctgccgaaagagttcatttaggaaaacaggccggaaatgtcggtcgtgcagtgacaaaattaccgttgatggg

SEQ ID NO: 756131 - DNA, 75 bp, synthetic construct
  source 1..75: mol_type = other DNA
gggttgcaaatgatggtggccgactgggagccatcgttacttgaacagcttgaacaaaaattcacggcagaacaa

SEQ ID NO: 756132 - DNA, 75 bp, synthetic construct
  source 1..75: mol_type = other DNA
tttctgaaaaaacgaagcaatggcttgcaaatcagccaggtaaccagtccgcgccagtcatacaggtgagtaatg

SEQ ID NO: 756133 - DNA, 75 bp, synthetic construct
  source 1..75: mol_type = other DNA
tggcggccattttatgcgagcgccaaccggaatcgccgcagggctatcgcctgcgtcgccatgccctgtggctaa

SEQ ID NO: 756134 - DNA, 75 bp, synthetic construct
  source 1..75: mol_type = other DNA
aaacactggcgcgactggatcacgaaagtgtgccgcagcttattgataatttgctgtcggtgcgtaccaatattt

SEQ ID NO: 756135 - DNA, 75 bp, synthetic construct
  source 1..75: mol_type = other DNA
ctgcacagacggcgctgcgtctgggttacaaacaggtggcagacgccatccgcgatgaggtcatccgcttccttg

SEQ ID NO: 756136 - DNA, 75 bp, synthetic construct
  source 1..75: mol_type = other DNA
gccttacggtatctaaacactttgcccgatggtgaccctcgcaaccagtttcatcgccagtattttagtgcgcag

SEQ ID NO: 756137 - DNA, 75 bp, synthetic construct
  source 1..75: mol_type = other DNA
aggctggcctgaagctgattgtcgggctgaacgccgatccggaattttttatgcaccagaaacagtcgtccgcag

SEQ ID NO: 756138 - DNA, 75 bp, synthetic construct
  source 1..75: mol_type = other DNA
cgcgagccaacggcgcggaaattgatgacggtaccattaacggcatcaaagtcggtctgatgggaccattggcag

SEQ ID NO: 756139 - DNA, 75 bp, synthetic construct
  source 1..75: mol_type = other DNA
aaacgaatcaaatcatccacctctaagcaaaagaatagaatcagaagaatcgctaaatggtgtcttgataaatta

SEQ ID NO: 756140 - DNA, 75 bp, synthetic construct
  source 1..75: mol_type = other DNA
actgggagtatatcgacggcgaaatcgtcaagctggggtctctggcccacgctcagcttgatattcccgaactac

SEQ ID NO: 756141 - DNA, 75 bp, synthetic construct
  source 1..75: mol_type = other DNA
acggaagaggcggggctggtacagcttgcgcagcagcagtaccggatgttgttcaggatgggattgcagatgatg

SEQ ID NO: 756142 - DNA, 75 bp, synthetic construct
  source 1..75: mol_type = other DNA
agcgccgggggctggtcattctggcttcggagagtaaggattttcgtctgctggcgcatctgctgagaaccctgc

SEQ ID NO: 756143 - DNA, 75 bp, synthetic construct
  source 1..75: mol_type = other DNA
acgaaacggtgcgtcgctatgggcatgagagtggcgagatttggcaccggatgcagaagaacttgccaggtgatt

SEQ ID NO: 756144 - DNA, 75 bp, synthetic construct
  source 1..75: mol_type = other DNA
atgatctcggctttgtgggagaggcgtatcagacagccagacagaattatatcaataactcactggatgtctggc

SEQ ID NO: 756145 - DNA, 75 bp, synthetic construct
  source 1..75: mol_type = other DNA
ggcaaagcgcaatccattcaggatgtgcttgccgggctggaggagcgacgggtggcgttgatccgtcaacaggcg

SEQ ID NO: 756146 - DNA, 75 bp, synthetic construct
  source 1..75: mol_type = other DNA
cttcacgaggaactggcgcgtattcgatgccagggctggagctatgacaacggtgaagattacgccgatgttcgt

SEQ ID NO: 756147 - DNA, 75 bp, synthetic construct
  source 1..75: mol_type = other DNA
atgccgggtccggttccggccctggtgatcaccgctttcgtcgcccgccgactgttacgctttcgtcatatgctc

SEQ ID NO: 756148 - DNA, 75 bp, synthetic construct
  source 1..75: mol_type = other DNA
ccaaattcctggcgcttacgatggtacggtgttcccacctaacgttgaaggtggtcgttttgtctcatggctggc

SEQ ID NO: 756149 - DNA, 75 bp, synthetic construct
  source 1..75: mol_type = other DNA
ctcattaccgttgtcgaaaaatatggtgctgccgaaagagttcatttaggaaaacaggccggaaatgtcggtcgt

SEQ ID NO: 756150 - DNA, 75 bp, synthetic construct
  source 1..75: mol_type = other DNA
ttatcggttgttagttttcatgccactaaagtatttaatacatttgaaggtggcgtgattatttgcccaaatgca

SEQ ID NO: 756151 - DNA, 75 bp, synthetic construct
  source 1..75: mol_type = other DNA
acctggccgtggcttccgcccatattcaggaagagttcggcattacgaaagcggaaatgggctatgtattttcgg

SEQ ID NO: 756152 - DNA, 75 bp, synthetic construct
  source 1..75: mol_type = other DNA
gaagtgctggcaacggctaatgaagtggccgatcacgcagacgcctttgctgatctggattacaacatttttcgc

SEQ ID NO: 756153 - DNA, 75 bp, synthetic construct
  source 1..75: mol_type = other DNA
cagaaaccgcatttaaatcctcagaggcttcatccaaagccgcttggttcgttgactttcccggtgtcgaaatct

SEQ ID NO: 756154 - DNA, 75 bp, synthetic construct
  source 1..75: mol_type = other DNA
taaagcaaaagagaatggcgatcctctaatgagcgataataccgttcgtaagtatatgagggttatattcgaagc

SEQ ID NO: 756155 - DNA, 75 bp, synthetic construct
  source 1..75: mol_type = other DNA
ttgaaaaagttgaccgtgacttcctccgtaagtatgagagcttactaaggtcgatacctgcaaggcgcgatctgg

SEQ ID NO: 756156 - DNA, 75 bp, synthetic construct
  source 1..75: mol_type = other DNA
cccttgatggtcgcgtaaaactgaaagtgccaggcgaaacgcagaccggtaagttgttccgtatgcgcggtaaag

SEQ ID NO: 756157 - DNA, 75 bp, synthetic construct
  source 1..75: mol_type = other DNA
tgggcgttcagtgatttcgcccgcgatcgccgtggagtgtgcgatccggaagcccgttgcctcgccggtaatccc

SEQ ID NO: 756158 - DNA, 75 bp, synthetic construct
  source 1..75: mol_type = other DNA
atgaatgctatcccttatttcgactatagcctggcccccttctggccatcttatcagaacaaaatcatcggcgtt

SEQ ID NO: 756159 - DNA, 75 bp, synthetic construct
  source 1..75: mol_type = other DNA
cgtggtgtgtgcgatccggaagcccgttgcctcgccggtaatcccggctatcccggatctgcaggaccgttctga

SEQ ID NO: 756160 - DNA, 75 bp, synthetic construct
  source 1..75: mol_type = other DNA
tgacacgtcatcctgaaaaaccggaataccacgtggtgctgtgcgtcagacaggaatatttcgacggccctgagc

SEQ ID NO: 756161 - DNA, 75 bp, synthetic construct
  source 1..75: mol_type = other DNA
agacctgtccgacctgtcatggttctggtcaagtgcagatgcgccaggggttctttgccgtacagcagacctgtc

SEQ ID NO: 756162 - DNA, 75 bp, synthetic construct
  source 1..75: mol_type = other DNA
tggatcggttgatactggatgcctggagtaacgtgctgggtttcgcgtcaccaggtgaagcaaagccgtaccaga

SEQ ID NO: 756163 - DNA, 75 bp, synthetic construct
  source 1..75: mol_type = other DNA
tggaccggctgattctggatgcctggagcaacgtactgggtttcgcgtcaccaggtgaagcaaagccgtaccaga

SEQ ID NO: 756164 - DNA, 75 bp, synthetic construct
  source 1..75: mol_type = other DNA
ggtttggtatggactttattgaaacggtcagcgcgctgatgaatgcaacacccgggcgtgacctctgctggctcc

SEQ ID NO: 756165 - DNA, 75 bp, synthetic construct
  source 1..75: mol_type = other DNA
cccgggcgcgacctctgctggctcctgacccgtcatccggaaaagccggaataccacgtggtgctgtgcgtcaga

SEQ ID NO: 756166 - DNA, 75 bp, synthetic construct
  source 1..75: mol_type = other DNA
gcttcgtctgccgtgggaacatgacaacgcattcaacagcagacagacctggttcggtatggactttatcgaaac

SEQ ID NO: 756167 - DNA, 75 bp, synthetic construct
  source 1..75: mol_type = other DNA
gccctgtttaaggaccttatctgggcgttcagtgatttcgcccgcgatcgccgtggagtgtgcgatccggaagcg

SEQ ID NO: 756168 - DNA, 75 bp, synthetic construct
  source 1..75: mol_type = other DNA
gagtaacgtactgggcttcgcgtcaccgggtgaagcaaagcagtaccagaagcagatcacccggaatgtggtgct

SEQ ID NO: 756169 - DNA, 75 bp, synthetic construct
  source 1..75: mol_type = other DNA
ccacgctgggggagccttatgaagaggctgtggcagaaaaactgagctttgagttattgctggaaaaagtctgcc

SEQ ID NO: 756170 - DNA, 75 bp, synthetic construct
  source 1..75: mol_type = other DNA
tgaatgcatggagaaatgctgtttctatatgggaccctgtttgcagagaaatttttgatgatctaataaaacctc

SEQ ID NO: 756171 - DNA, 75 bp, synthetic construct
  source 1..75: mol_type = other DNA
acaaataagaaatacatggggatcaatggtattacgtcaggttgtacgcgttaccgatgaagtaggtaaaggcca

SEQ ID NO: 756172 - DNA, 75 bp, synthetic construct
  source 1..75: mol_type = other DNA
gatcaaagatccgtgcaacaaatgtcatggtcatggtcgtgttgagcgcagcaaaacgctgtccgttaaaatccc

SEQ ID NO: 756173 - DNA, 75 bp, synthetic construct
  source 1..75: mol_type = other DNA
ctgactaaatatagtctcactacagggaatcaatcacgatggatggaagaacaaataagaaatacatggggatca

SEQ ID NO: 756174 - DNA, 75 bp, synthetic construct
  source 1..75: mol_type = other DNA
tttaatgatgacagtccggaagcgaggaaaatcacccgacgctggagaataggtgaagcagcggatttagttgga

SEQ ID NO: 756175 - DNA, 75 bp, synthetic construct
  source 1..75: mol_type = other DNA
tgacccgtcatcctgaaaaaccggaataccacgtggtgttatgcgtcagacaggagtatttcgatggccctgaac

SEQ ID NO: 756176 - DNA, 75 bp, synthetic construct
  source 1..75: mol_type = other DNA
caggagtatttcgatggccctgaactggaccggttgattctggatgcctggagcaacgtactgggcttcgcgtca

SEQ ID NO: 756177 - DNA, 75 bp, synthetic construct
  source 1..75: mol_type = other DNA
gtatggactttatcgaaaccgtcagtgcgctgatgaatgcgaaacccggacgcgacctttgctggctcctgaccc

SEQ ID NO: 756178 - DNA, 75 bp, synthetic construct
  source 1..75: mol_type = other DNA
ggaccggtttattggcggcggcctgaaatatccttatatagaaggattacgtctcgacgaagcgatgcatccgct

SEQ ID NO: 756179 - DNA, 75 bp, synthetic construct
  source 1..75: mol_type = other DNA
acgctgctgtttaacggatacgccgatcaagtggcgtcgctttatcgtggcctggatttacgggagaatttttaa

SEQ ID NO: 756180 - DNA, 75 bp, synthetic construct
  source 1..75: mol_type = other DNA
attcgggctggataaagccgatcccgcggccaatgccggcagcttgaaaaccgatccgtggacgctgaaaattag

SEQ ID NO: 756181 - DNA, 75 bp, synthetic construct
  source 1..75: mol_type = other DNA
tttggtgatgatgcgacgccgtttggcctgaaatgggagaagggtaaaccggaaacggtgtattacctgtgtgaa

SEQ ID NO: 756182 - DNA, 75 bp, synthetic construct
  source 1..75: mol_type = other DNA
taaaatacaattacattgtataactaaagatggggaattgtcgcctcctgttttaattagaaaagaagatgcggt

SEQ ID NO: 756183 - DNA, 75 bp, synthetic construct
  source 1..75: mol_type = other DNA
cacaacgagatagtctcggaagatactatacaaaagaatccataagtgcattattggtttctcagatgaaagctg

SEQ ID NO: 756184 - DNA, 75 bp, synthetic construct
  source 1..75: mol_type = other DNA
catgaagccccgacgaaggacgcacggatgaacgggctgcgcatccgtctccagcagtgggcgcagggcggggag

SEQ ID NO: 756185 - DNA, 75 bp, synthetic construct
  source 1..75: mol_type = other DNA
ttcggcagaatccggacagattaaccacgccagcggtacgcagtatttccgggggctggagatcaaggagttctc

SEQ ID NO: 756186 - DNA, 75 bp, synthetic construct
  source 1..75: mol_type = other DNA
gaggccacgtaaaggggagctgagtagccagaactttgtggagctggccgcgctccataatttctatccgggcaa

SEQ ID NO: 756187 - DNA, 75 bp, synthetic construct
  source 1..75: mol_type = other DNA
tcgataccgcgctttcacgctatggtgcacggcctctcggtacgtttaccgaaagaaacgcggtgttctcgtcgc

SEQ ID NO: 756188 - DNA, 75 bp, synthetic construct
  source 1..75: mol_type = other DNA
tgttggcctaaatcgggggttaacaccaacgatgccaatgtatgtttctcttaggttaaaggatggttcaccttt

SEQ ID NO: 756189 - DNA, 75 bp, synthetic construct
  source 1..75: mol_type = other DNA
agtgatatttctcgctttcttcgatgctacggtagtgcagatcaagcgagccattaaggagcgcaaaaatgggaa

SEQ ID NO: 756190 - DNA, 75 bp, synthetic construct
  source 1..75: mol_type = other DNA
tgtgtttatcgctttcttcgatgcaacgctagtgcagattaagcgagccattaaggagcgtaaaaatgggaaata

SEQ ID NO: 756191 - DNA, 75 bp, synthetic construct
  source 1..75: mol_type = other DNA
atttcagcggcgattatcgagcagtgtggtactcaaatatttatggcgaatccgaaagcaagtcgtgaagattat

SEQ ID NO: 756192 - DNA, 75 bp, synthetic construct
  source 1..75: mol_type = other DNA
gtcacccgttcgccgttctatgacgtgttgggtagcgcggatttatttttctctacagacaccggtcagtacaac

SEQ ID NO: 756193 - DNA, 75 bp, synthetic construct
  source 1..75: mol_type = other DNA
tcatccctttttggcctatagcggtgtttatcgctctcgtcgatgccacgcgcacgcagatcaaaagagccatta

SEQ ID NO: 756194 - DNA, 75 bp, synthetic construct
  source 1..75: mol_type = other DNA
atagcgatgaattatgcaattatgcgtttgagaagaacgaatccacatttagcggaagaaatgaatgaagtgata

SEQ ID NO: 756195 - DNA, 75 bp, synthetic construct
  source 1..75: mol_type = other DNA
acgttggttagtggacaattgacctggagcacgccgtggggaagtgtatttggtagtggtggttatctgcgtcat

SEQ ID NO: 756196 - DNA, 75 bp, synthetic construct
  source 1..75: mol_type = other DNA
gcgttggttagtggacaattgacctggaatgcgccgtggggaagcgtatttggcagtggtggataccgacattgg

SEQ ID NO: 756197 - DNA, 75 bp, synthetic construct
  source 1..75: mol_type = other DNA
tctgatattaaaaagataaagggggttgaggacgagaactggcgtctcaaacagatgtttgctgacatcagcctt

SEQ ID NO: 756198 - DNA, 75 bp, synthetic construct
  source 1..75: mol_type = other DNA
tgcggcgatcaacaaaaaataccgccatgcagacggaaccgaaatgaccatttcccgtgtctgctgggacatcgg

SEQ ID NO: 756199 - DNA, 75 bp, synthetic construct
  source 1..75: mol_type = other DNA
gctgccgataaagggcgggaaaagcgcgatggcagtacgctgggcgatcgcctgaattactgggatgtgaaaatg

SEQ ID NO: 756200 - DNA, 75 bp, synthetic construct
  source 1..75: mol_type = other DNA
gaatcagactgaaaaatgaattgcgccgggctgacaagcccagtgctggcgcgggaagagatatttacgcatggg

SEQ ID NO: 756201 - DNA, 75 bp, synthetic construct
  source 1..75: mol_type = other DNA
agtattaccggcagggtgggaatgcctgatggagaggcgctggctggcgtcattgcaggcggcatggccgaacgg

SEQ ID NO: 756202 - DNA, 75 bp, synthetic construct
  source 1..75: mol_type = other DNA
gggtgatgatcacttctggagtgaatccagattaaacatctcattgctgatgcttgatattgagcatctggcgcg

SEQ ID NO: 756203 - DNA, 75 bp, synthetic construct
  source 1..75: mol_type = other DNA
cagcaattcgcattaaagaatgccagcctgtccacgcctgtagcagaaaaagggatacaactgatacctgctctg

SEQ ID NO: 756204 - DNA, 75 bp, synthetic construct
  source 1..75: mol_type = other DNA
cactggtgctcccgggataagctcacatgcctcaccacccggtaccggcacatcaccacaaccacgtctgcagga

SEQ ID NO: 756205 - DNA, 75 bp, synthetic construct
  source 1..75: mol_type = other DNA
gggaaaaacggcgtgaggcattacagaaactgcttgcccgtatcaatacacagcatcaggatgcccggccaccgg

SEQ ID NO: 756206 - DNA, 75 bp, synthetic construct
  source 1..75: mol_type = other DNA
catggccatggtcgtgttgagcgcagtaaaacgctgtccgttaaaatcccggcaggggtggatacaggtgaccgc

SEQ ID NO: 756207 - DNA, 75 bp, synthetic construct
  source 1..75: mol_type = other DNA
tccgttttcctgatgatccggagattttttcgcagacagaggcgcagcaactggtcgcggaagagcttgtggaga

SEQ ID NO: 756208 - DNA, 75 bp, synthetic construct
  source 1..75: mol_type = other DNA
atggataacgctgtattaaatagcgagattattgccacgaaggcagggaatattaccgtctataactatgatggt

SEQ ID NO: 756209 - DNA, 75 bp, synthetic construct
  source 1..75: mol_type = other DNA
gatgcacctggcacacataaagctggttatgctatctgccgttcgatggatttaaactcatgggagtatgtgcca

SEQ ID NO: 756210 - DNA, 75 bp, synthetic construct
  source 1..75: mol_type = other DNA
tggaagctgccagagcgcatcgtcagcaacttgaggaacaggcaatggcatctgttgagcttattaatctcaaac

SEQ ID NO: 756211 - DNA, 75 bp, synthetic construct
  source 1..75: mol_type = other DNA
gaccatcgcggtgaaatcgtctataacaccgaaacgggagaatcaaaacaaatcacagcaccgggtgattacccc

SEQ ID NO: 756212 - DNA, 75 bp, synthetic construct
  source 1..75: mol_type = other DNA
taacgccatatgataaatgggatggtgagaaatgggtgaccgacactgaggcacaacactgtgccgcagtagaag

SEQ ID NO: 756213 - DNA, 75 bp, synthetic construct
  source 1..75: mol_type = other DNA
ggcgtaacgaagcgctggacctgcctggtgtatgcctacgcggcattacgtgtgtccgtgcaacgctggcagctt

SEQ ID NO: 756214 - DNA, 75 bp, synthetic construct
  source 1..75: mol_type = other DNA
acactgacacgggaaacaccgaagaaatcacgacgctgggtgactacccgaaaaatacaaccactatcgccccgt

SEQ ID NO: 756215 - DNA, 75 bp, synthetic construct
  source 1..75: mol_type = other DNA
aacaacccgacttaacgccgtgctggattacattgacgcggtgacggtaacagataccagcaccgcgccgaatgt

SEQ ID NO: 756216 - DNA, 75 bp, synthetic construct
  source 1..75: mol_type = other DNA
tcatgttgagccaacgataagggatgttcctgcgttgctggagctggctccatggttcggaagaaaacaccgcga

SEQ ID NO: 756217 - DNA, 75 bp, synthetic construct
  source 1..75: mol_type = other DNA
gattatattgacgcggtgacggcaacagataccagcaccgcgccgaatgtcatctggcctgaactgccggaggcg

SEQ ID NO: 756218 - DNA, 75 bp, synthetic construct
  source 1..75: mol_type = other DNA
tatgcctacgcggcattacgtgtgtccgtgcaacgctggcagcttgatttaaccgcactggcaaaatcccgcaca

SEQ ID NO: 756219 - DNA, 75 bp, synthetic construct
  source 1..75: mol_type = other DNA
caaatgaatatctttccgttggtgtcggcattccggcatgttcctgtttagatgcccctggcacacataaggctg

SEQ ID NO: 756220 - DNA, 75 bp, synthetic construct
  source 1..75: mol_type = other DNA
gaaaatacaaccactatcgccccgttaacgccatacgataaatgggatggtgagaaatgggtgaccgatattgag

SEQ ID NO: 756221 - DNA, 75 bp, synthetic construct
  source 1..75: mol_type = other DNA
taaagcgccagtcgctgattgatgccgcaatggcttccatcagtctgattcagctgaaattacaggccgggcgga

SEQ ID NO: 756222 - DNA, 75 bp, synthetic construct
  source 1..75: mol_type = other DNA
gaaacacgggaatatattttcacatcaactgaatatcttgctgtgggtgtcggcattccggcatgttcctgttta

SEQ ID NO: 756223 - DNA, 75 bp, synthetic construct
  source 1..75: mol_type = other DNA
gatcatcgcggtgaaatcgtctatagcaccgaaacaggagaatcgaaagaaatcacagctccgggtgattatcct

SEQ ID NO: 756224 - DNA, 75 bp, synthetic construct
  source 1..75: mol_type = other DNA
caactgaatatctcgctgtcggcgtcggtatcccggcatgttcctgtctggatgcaccaggtacacataaagctg

SEQ ID NO: 756225 - DNA, 75 bp, synthetic construct
  source 1..75: mol_type = other DNA
aacaaccaggcttaacgctgtgctggattacattgacgcggtgacggcaacagataccagcaccgcgccggatgt

SEQ ID NO: 756226 - DNA, 75 bp, synthetic construct
  source 1..75: mol_type = other DNA
gttatgcaatctgccgttctgcagattttaactcatgggaatatgtgccagaccatcgcggtgaaatcgttttta

SEQ ID NO: 756227 - DNA, 75 bp, synthetic construct
  source 1..75: mol_type = other DNA
gcctgaaatgggagaagggtaaaccggaaacggtgtattacctgtgtgaacataatggctgtgtgatccggcagt

SEQ ID NO: 756228 - DNA, 75 bp, synthetic construct
  source 1..75: mol_type = other DNA
actgattgatgctgctatggcttccattagtctgattcagctgaaattgcaggccgggcggaagctgacgcaggc

SEQ ID NO: 756229 - DNA, 75 bp, synthetic construct
  source 1..75: mol_type = other DNA
gattgatgctgctatggcttccatcagtctgattcagctgaaattacaggccgggcggcagctgacgcaagcaga

SEQ ID NO: 756230 - DNA, 75 bp, synthetic construct
  source 1..75: mol_type = other DNA
ctggattacattgacgcggtgacggcaacagataccagcacagcgccggatgtcatctggcctgaactgccggag

SEQ ID NO: 756231 - DNA, 75 bp, synthetic construct
  source 1..75: mol_type = other DNA
aatcacagctccgggtgattaccctgaaaatacaaccactatcgtcccgttaacgacatatgataaatgggatgg

SEQ ID NO: 756232 - DNA, 75 bp, synthetic construct
  source 1..75: mol_type = other DNA
gatgctcctggcacacataaggctggttatgcaatctgccgttcggcagattttaactcatgggaatatgtgcca

SEQ ID NO: 756233 - DNA, 75 bp, synthetic construct
  source 1..75: mol_type = other DNA
gcacagcatagcgccgcagtagacgcggcagaagcacagcgtcagtcactgattgatgctgcaatggtttccatt

SEQ ID NO: 756234 - DNA, 75 bp, synthetic construct
  source 1..75: mol_type = other DNA
gaggcacctggcatatacaaggctggttatgcaatttgtcgctctgtggatttaaattcatgggaatatgtgcca

SEQ ID NO: 756235 - DNA, 75 bp, synthetic construct
  source 1..75: mol_type = other DNA
cgctgatcgcggtaaaggcaggggatattaccgtttataactatgataatgggacacaggaatatatctcaacat

SEQ ID NO: 756236 - DNA, 75 bp, synthetic construct
  source 1..75: mol_type = other DNA
gaaattcgcatgatgcaaattattggcgggggtgtcgttggaatgtccgttgtgcctgaagttatttcagcacgc

SEQ ID NO: 756237 - DNA, 75 bp, synthetic construct
  source 1..75: mol_type = other DNA
catgcccaaacgctggcggctgcggagctctctaagcataacttcatcaaccttatttgcggctttctgcgcaaa

SEQ ID NO: 756238 - DNA, 75 bp, synthetic construct
  source 1..75: mol_type = other DNA
atggctgcgtgatccatcagtctgagcttgaccagagcaacgggcggtggatctgtgaaaacacgggcatgtgga

SEQ ID NO: 756239 - DNA, 75 bp, synthetic construct
  source 1..75: mol_type = other DNA
aaaattacagagatactggaagaagtggacagctggacggggtttacgcgtcacttcgcgcacctcaaaaataat

SEQ ID NO: 756240 - DNA, 75 bp, synthetic construct
  source 1..75: mol_type = other DNA
tcaaactgaaagtgcctggcgaaacccagaccggtaagctattccgtatgcgcggtaaaggcgtcaagtctgtcc

SEQ ID NO: 756241 - DNA, 75 bp, synthetic construct
  source 1..75: mol_type = other DNA
tatgctatcacttttgtttattgtctttatgttgtcggtgctgagtgtatgacaaccggaaagattgagaatatt

SEQ ID NO: 756242 - DNA, 75 bp, synthetic construct
  source 1..75: mol_type = other DNA
atgcgagataaatcagaagtattaaccagagaacagaaaaacagatttggtctgattctttatattatactatta

SEQ ID NO: 756243 - DNA, 75 bp, synthetic construct
  source 1..75: mol_type = other DNA
atgctacaaaaagaaaaaagaccaaaatttagtatagttctttttattattcttttgtctgttgttcatatattt

SEQ ID NO: 756244 - DNA, 75 bp, synthetic construct
  source 1..75: mol_type = other DNA
aggcctgagtgacgtgaagctctcgcatacccaaacgctggcagcagcggagctttctaagcagaactttatcaa

SEQ ID NO: 756245 - DNA, 75 bp, synthetic construct
  source 1..75: mol_type = other DNA
aatgcataaacgcaggtcatgaaatgacgaaagctatcgccattgcacagtttaatgatgacagtccagaagcga

SEQ ID NO: 756246 - DNA, 75 bp, synthetic construct
  source 1..75: mol_type = other DNA
gatccgtatgagaacggtttttgaacaggccattgatcagcgctcttctactggcgcatggcgaaatgccctttc

SEQ ID NO: 756247 - DNA, 75 bp, synthetic construct
  source 1..75: mol_type = other DNA
ctggttatgcaatttgccgttctgcagattttaactcatgggaatatgtgccagaccatcgcggtgaaacggtct

SEQ ID NO: 756248 - DNA, 75 bp, synthetic construct
  source 1..75: mol_type = other DNA
cgtattcggtacccgactgcggcgtgcagaagatgctttccctccggtgatcggggttgccgctcataaaggggg

SEQ ID NO: 756249 - DNA, 75 bp, synthetic construct
  source 1..75: mol_type = other DNA
agtgcatcgccgctggccatgagatgacaaaagcaatagcagtcgctcagtttaacgatgacagccctgaagcgc

SEQ ID NO: 756250 - DNA, 75 bp, synthetic construct
  source 1..75: mol_type = other DNA
ccgagaaagccggtcggctgccacatccggatatggaaacacggggacgggttgaacagcgtattggttatacaa

SEQ ID NO: 756251 - DNA, 75 bp, synthetic construct
  source 1..75: mol_type = other DNA
atgaaacctgtttttgatgaaaatggactggctacagtgccgggtgatatgcgttgtttttattatgatgaagta

SEQ ID NO: 756252 - DNA, 75 bp, synthetic construct
  source 1..75: mol_type = other DNA
gatgcccccggcatacataaggctggttatgcaatctgccgttctttggatttaaattcatgggaatatgtgcca

SEQ ID NO: 756253 - DNA, 75 bp, synthetic construct
  source 1..75: mol_type = other DNA
aggtctgagtgacgtgaagctctcgcatacccaaacgttggcggcagcggatctctctaagcagaactttatcaa

SEQ ID NO: 756254 - DNA, 75 bp, synthetic construct
  source 1..75: mol_type = other DNA
gttatgcaatttgccgttctgtagaattaaattcatgggaatatgtgccagatcatcgcggcgaaactgtttata

SEQ ID NO: 756255 - DNA, 75 bp, synthetic construct
  source 1..75: mol_type = other DNA
acagtccgttcaccacctgggtacagatagtctatgactggctggatgcactgaaagatcccaacggcctgaaaa

SEQ ID NO: 756256 - DNA, 75 bp, synthetic construct
  source 1..75: mol_type = other DNA
tattaccgtctataactatgatggtgaaatacgggaatatatttccacttcaaatgaatatcttgccgttggtgt

SEQ ID NO: 756257 - DNA, 75 bp, synthetic construct
  source 1..75: mol_type = other DNA
ctacatgttcctcgcgcttggcgtgcaggcttgggatgcggcgattttccacttgatgacccacgcgttctttaa

SEQ ID NO: 756258 - DNA, 75 bp, synthetic construct
  source 1..75: mol_type = other DNA
ttttgccattgattggcttcgtcctgctggcgttctcccgtgggcgctggtctgaaaatgtctcggcgatcgtgg

SEQ ID NO: 756259 - DNA, 75 bp, synthetic construct
  source 1..75: mol_type = other DNA
tctggtgacctccatcgccaacagtgcgccgggccgcctgctgggcacctggtggtacaacgcctggggctttga

SEQ ID NO: 756260 - DNA, 75 bp, synthetic construct
  source 1..75: mol_type = other DNA
aacgagcttgtcggcaaggacggcggcgcaatccagattgaaacatcaccgatgagcactctattcggaaaatga

SEQ ID NO: 756261 - DNA, 75 bp, synthetic construct
  source 1..75: mol_type = other DNA
agtacgcgaaggcaactgaggcacgagctgattctattttcgaagagatattcgaaattgctgacaatgcgattc

SEQ ID NO: 756262 - DNA, 75 bp, synthetic construct
  source 1..75: mol_type = other DNA
aggtctggtcggtgcgtttatgacctcgctctacaccttccgtatgattttcatcgtcttccacggaaaagaaca

SEQ ID NO: 756263 - DNA, 75 bp, synthetic construct
  source 1..75: mol_type = other DNA
cgccgcactttctgaccgaatttcccggctggtagactggccccctgaatctccagacaaccaatatcacttaaa

SEQ ID NO: 756264 - DNA, 75 bp, synthetic construct
  source 1..75: mol_type = other DNA
cgccattcataccgcagggtgggtcagcttatttacactccacattatctggccgttcctgtggatctgggccac

SEQ ID NO: 756265 - DNA, 75 bp, synthetic construct
  source 1..75: mol_type = other DNA
tgccgcgctttctgatcgcatttcccggctggagcaccagcttgccgctgagaaaaaaactgactattccacgtt

SEQ ID NO: 756266 - DNA, 75 bp, synthetic construct
  source 1..75: mol_type = other DNA
ggcaagacttcgcgttgatacccgcaaatgggcgctggcccgaatgaatccccgtaagtatggcgacaaggtaac

SEQ ID NO: 756267 - DNA, 75 bp, synthetic construct
  source 1..75: mol_type = other DNA
cggtgatttacctggtgatcaccctgctcagtcagtacattctcaaacgcattgacctgcgcgcgacacgttttg

SEQ ID NO: 756268 - DNA, 75 bp, synthetic construct
  source 1..75: mol_type = other DNA
cgccattcatacggcgggttgggtaagtctgtttaccctgcatgtaatctggccgttcttgtggatctgggcaac

SEQ ID NO: 756269 - DNA, 75 bp, synthetic construct
  source 1..75: mol_type = other DNA
tacagaacaaaaaagctcactgctggcgacgctggattacctcgagcagttacgtcggcaaataccggatgccgc

SEQ ID NO: 756270 - DNA, 75 bp, synthetic construct
  source 1..75: mol_type = other DNA
gaggcttatcgccagaccgacccgtttggtgagctgtatgtgattgccgttcctgaatccacgggcgcggcggca

SEQ ID NO: 756271 - DNA, 75 bp, synthetic construct
  source 1..75: mol_type = other DNA
cgtaccagcaaaagtgatcttctgcgactatgccggattctcaacgcttgattcggtggtgcgtgccaaaaaggt

SEQ ID NO: 756272 - DNA, 75 bp, synthetic construct
  source 1..75: mol_type = other DNA
atgctgcgcgcctttgcccgccttcttctccgtatttgtttttctcgccggactcttaagattggctgtttattg

SEQ ID NO: 756273 - DNA, 75 bp, synthetic construct
  source 1..75: mol_type = other DNA
gcgcggatgggcggcaccggcgaacgcttttttgccggcgacgccacgctcacccgcgccgccgtacgcctgact

SEQ ID NO: 756274 - DNA, 75 bp, synthetic construct
  source 1..75: mol_type = other DNA
atgatgttgaggccgtggcatcgagcattaaagatgcaatcaatgctgatccgacattgccggttatcgcttcgt

SEQ ID NO: 756275 - DNA, 75 bp, synthetic construct
  source 1..75: mol_type = other DNA
atggtttggcgaaacgttaattgccgatgatgccttgcgggcgtcgttaaatggtcatctggaacaagccgcaca

SEQ ID NO: 756276 - DNA, 75 bp, synthetic construct
  source 1..75: mol_type = other DNA
aaagccgatgcgccgttgattcagtgggatgccacctccgcaacgctgaaagctctcggctgtcacagtatcgac

SEQ ID NO: 756277 - DNA, 75 bp, synthetic construct
  source 1..75: mol_type = other DNA
gggtcaatggtttggcgaaacgttaattgccgatgatgccttgcgggcgtcgttaaatggtcatcttgaacaagc

SEQ ID NO: 756278 - DNA, 75 bp, synthetic construct
  source 1..75: mol_type = other DNA
gcgctggcggactggtttgcggtggtggcgctatttcgccgcgtgccgattccgatcatttctcgtcatacggcg

SEQ ID NO: 756279 - DNA, 75 bp, synthetic construct
  source 1..75: mol_type = other DNA
aaaaattacgatgaagcgccaggaatgcagcaagccttgatcgctaaaggcgtaccggcaaaagccatcttctgc

SEQ ID NO: 756280 - DNA, 75 bp, synthetic construct
  source 1..75: mol_type = other DNA
attatgcccgtcagatttgtggggccgggagccagctggcgcgtatggttgacgtctaccgtcagacagatcctt

SEQ ID NO: 756281 - DNA, 75 bp, synthetic construct
  source 1..75: mol_type = other DNA
gtggtgaatggcgatgatgccactgcggttgccaccgcgattaaggaagcggtaaacggggttatcaccctgccg

SEQ ID NO: 756282 - DNA, 75 bp, synthetic construct
  source 1..75: mol_type = other DNA
cgcgattcataccgcagggtgggtcagtctgtttacgctacatattatctggccgtttctgtggatctgggccac

SEQ ID NO: 756283 - DNA, 75 bp, synthetic construct
  source 1..75: mol_type = other DNA
cgaatctcagttcggcgttactggcaggaggaatgctggcgtttgccttgtcgttcgatgaaatcatcgtgacga

SEQ ID NO: 756284 - DNA, 75 bp, synthetic construct
  source 1..75: mol_type = other DNA
tggtttagcgtggcagcacagcgtagtgacattcttgatgccgtgacactgtcacttaaggtggcgacgctggcg

SEQ ID NO: 756285 - DNA, 75 bp, synthetic construct
  source 1..75: mol_type = other DNA
tcactatcgtggttggtcatgcgactttttgcgtggtggtcgtcttcaacaatgtcatcgcccgttttcgccgta

SEQ ID NO: 756286 - DNA, 75 bp, synthetic construct
  source 1..75: mol_type = other DNA
ctgtgcggctctgagacccagatgacagcggaaatccgcgagcggtatgaggacaccgttcgttacctggaaaaa

SEQ ID NO: 756287 - DNA, 75 bp, synthetic construct
  source 1..75: mol_type = other DNA
gtactggcagatccttgcagaagcagccagcatcgcccagggtaaagagcagcagaagcaggatacgataaaaaa

SEQ ID NO: 756288 - DNA, 75 bp, synthetic construct
  source 1..75: mol_type = other DNA
cgggggagaaaagggtgaaaaggcaaggtggaaacgagaaaagctcaggttgccgccgctcccggagccagaaat

SEQ ID NO: 756289 - DNA, 75 bp, synthetic construct
  source 1..75: mol_type = other DNA
atgagtgaaatatactgcattgcaagtgcagtcattatcgttggttacttttatctaataatcagtgtaattact

SEQ ID NO: 756290 - DNA, 75 bp, synthetic construct
  source 1..75: mol_type = other DNA
taaggatctggaggggcaagtcgagcttgatgcggctttcaccttctcatgtcaggccgagatgattatttttga

SEQ ID NO: 756291 - DNA, 75 bp, synthetic construct
  source 1..75: mol_type = other DNA
cccactggtgcggttgtttggacagtccccgaagggattttctaccggcgatgcagaccttgccaactattacga

SEQ ID NO: 756292 - DNA, 75 bp, synthetic construct
  source 1..75: mol_type = other DNA
ctgctggttatgttggtaacaaccttgccgatcctgggggcctggtggctaacccgcgaaggcgacaatggtcaa

SEQ ID NO: 756293 - DNA, 75 bp, synthetic construct
  source 1..75: mol_type = other DNA
acactgaagatgcggcgtttagttttccaccgcaaggcctgacgctgcgctggtttagcgtggcagcacagcgta

SEQ ID NO: 756294 - DNA, 75 bp, synthetic construct
  source 1..75: mol_type = other DNA
ccggatggtcgctatacgttatgtggtgaagaagtgcagatgcacggtggcgttgtccgtaccgcgtctggtggg

SEQ ID NO: 756295 - DNA, 75 bp, synthetic construct
  source 1..75: mol_type = other DNA
tcagggcgtttggtgagcgtgagtgcgtgtcgctcaccgaccgcagctataccgggcagattgacgatgatgtgc

SEQ ID NO: 756296 - DNA, 75 bp, synthetic construct
  source 1..75: mol_type = other DNA
aaatcattccagcgtcaccaattagcttggagtttccagatgttacctcacctataggttttgtaggaagtgctt

SEQ ID NO: 756297 - DNA, 75 bp, synthetic construct
  source 1..75: mol_type = other DNA
ccaataccactaacgtcgatatcgagatcccggcaacgaacaaggaagcggcagcgaagtttagtgcccaggtaa

SEQ ID NO: 756298 - DNA, 75 bp, synthetic construct
  source 1..75: mol_type = other DNA
gtgtctttatcgccaaacaagataaagaaaaggggaccgttacgctctccagtacgttgcctggcaccttccgtt

SEQ ID NO: 756299 - DNA, 75 bp, synthetic construct
  source 1..75: mol_type = other DNA
ggaaatctcgccaggttcggctctatattccggacgttgatatttctcagcccctcgggctggtcgtgctgcccg

SEQ ID NO: 756300 - DNA, 75 bp, synthetic construct
  source 1..75: mol_type = other DNA
ggctgagacgattgcactgtccggaggccgttttgccaccctcgccggaaaggccgatccgctaaacaaaatgcc

SEQ ID NO: 756301 - DNA, 75 bp, synthetic construct
  source 1..75: mol_type = other DNA
ataattcaattaatatatttacagcgaaatacgtctccttttgcatttgtttttcaaccatttgtcactatggcc

SEQ ID NO: 756302 - DNA, 75 bp, synthetic construct
  source 1..75: mol_type = other DNA
atggtagctccatcgattattttgttccctggtatgataatcaaacgaccgtttatttcagtcaattttctgcgc

SEQ ID NO: 756303 - DNA, 75 bp, synthetic construct
  source 1..75: mol_type = other DNA
ttttgcggctccagagataaatgttgagcataaagaatcgttacctgatttaggtagtcaggccgcacaacagga

SEQ ID NO: 756304 - DNA, 75 bp, synthetic construct
  source 1..75: mol_type = other DNA
tcgtcttccagcagccacaacgggctggcacgccgcaaattaccattctcggccgcctgaattcgctggggcatc

SEQ ID NO: 756305 - DNA, 75 bp, synthetic construct
  source 1..75: mol_type = other DNA
ctttggcgacaacactgaccgcaacggtaatgtcttgccgcaggataatctcaacccgcagctgtttgatgccaa

SEQ ID NO: 756306 - DNA, 75 bp, synthetic construct
  source 1..75: mol_type = other DNA
agtgagcgcggctcactcgctcatgggcagccgtcacgactttgttgaacgtaacaactttattgttctggaata

SEQ ID NO: 756307 - DNA, 75 bp, synthetic construct
  source 1..75: mol_type = other DNA
tcttcgagcaatattacggtgatgaagtcgccctttttggtacggataatttagagaaagatccctatgcggtga

SEQ ID NO: 756308 - DNA, 75 bp, synthetic construct
  source 1..75: mol_type = other DNA
ccacgctgggcgagacctgggaagaggctgtgggcgaaaaactcgatcaccaggtgctgatggataaggttgtgc

SEQ ID NO: 756309 - DNA, 75 bp, synthetic construct
  source 1..75: mol_type = other DNA
tgccatccgttttcctgatgatccggatattttttcgcagacagaggcgcagcaactggtcgcggaagagcttgt

SEQ ID NO: 756310 - DNA, 75 bp, synthetic construct
  source 1..75: mol_type = other DNA
aaatctgcccgtgttggctatacaaagatgttgctgggggtggtcgggtattttattgagcataaatcccgtaac

SEQ ID NO: 756311 - DNA, 75 bp, synthetic construct
  source 1..75: mol_type = other DNA
cacaaggccaataatgcccccaaagtcattagtaaatcatttattgctgaggtaagtatgtctgatgttttacgc

SEQ ID NO: 756312 - DNA, 75 bp, synthetic construct
  source 1..75: mol_type = other DNA
gcacacaaaacggtgcttttttgcatactaaaagacttgcacaaggccaataatgcacccaaagtcattagtaaa

SEQ ID NO: 756313 - DNA, 75 bp, synthetic construct
  source 1..75: mol_type = other DNA
aggcgctgggctatgaaacggaagtggtgggtaagcacggtatgtgggaaatgccgggcgtaccggtggaggcct

SEQ ID NO: 756314 - DNA, 75 bp, synthetic construct
  source 1..75: mol_type = other DNA
gcccggatgcaggtgcagcgcagaacaatctagggttttcatttaatggaacaataaattcatttgtttcaaaag

SEQ ID NO: 756315 - DNA, 75 bp, synthetic construct
  source 1..75: mol_type = other DNA
atagcagaaaatctaatagcaaaaattcaaagtgaaacagatatgccaatagtgatcgttcatggaccaaaaggg

SEQ ID NO: 756316 - DNA, 75 bp, synthetic construct
  source 1..75: mol_type = other DNA
agtgatcgttcatggaccaaaaggggaagataaagccagggcattagtggattgttataataatgtctaccgttt

SEQ ID NO: 756317 - DNA, 75 bp, synthetic construct
  source 1..75: mol_type = other DNA
gacggacaccgcaaaagaaattctctatgcccgtatgaaagccgagcccacgcctgcggatgaagccacgtcgta

SEQ ID NO: 756318 - DNA, 75 bp, synthetic construct
  source 1..75: mol_type = other DNA
tacggcgcgggagctgcgggacgtggcggcaggccgtgccgttctccgtcaggcggggctggccgggggagacag

SEQ ID NO: 756319 - DNA, 75 bp, synthetic construct
  source 1..75: mol_type = other DNA
cactgaaagccggtgataaatacgccacgatacgtacgatgctgacagatatctttaacagtaattaccagtgtt

SEQ ID NO: 756320 - DNA, 75 bp, synthetic construct
  source 1..75: mol_type = other DNA
caaaataaacggctggagagcggatatctgtatctcggtagccccgtcaaacagatccgcccgttaagtgatgaa

SEQ ID NO: 756321 - DNA, 75 bp, synthetic construct
  source 1..75: mol_type = other DNA
gccccggtcaggagcgggcagagcaacatattgacctggcctatgccatcaccgcccacggtgcgcagggggcaa

SEQ ID NO: 756322 - DNA, 75 bp, synthetic construct
  source 1..75: mol_type = other DNA
gaagttcatctggttggcgcttatccggtaacgccaattaatatcgcgattgaactgccggaatttgatccgagc

SEQ ID NO: 756323 - DNA, 75 bp, synthetic construct
  source 1..75: mol_type = other DNA
gcataaccgtcccttcgaagccatcattcaggaagtgatcagcggcgggcacgatttggtgctaaaaatgacgca

SEQ ID NO: 756324 - DNA, 75 bp, synthetic construct
  source 1..75: mol_type = other DNA
ggccagtggtgacacggaccagctgcaggccatcgcgcccggtcagcctttccgtctccagcagacgcgcagtgc

SEQ ID NO: 756325 - DNA, 75 bp, synthetic construct
  source 1..75: mol_type = other DNA
cgcccgggaatggtgatggagcagtggaacccggagacacgcagtcatgaccgctatgtgatagaccgggtgacg

SEQ ID NO: 756326 - DNA, 75 bp, synthetic construct
  source 1..75: mol_type = other DNA
ccggaaaatggtgtgattgaacgggcacgcgccggtatcgatgaggccatcagtcgtgagcagcttatccccctc

SEQ ID NO: 756327 - DNA, 75 bp, synthetic construct
  source 1..75: mol_type = other DNA
agtcatgcttcatggatgcaccattgggaatcgtgtactggttgggatgggctcaattttacttgatggcgctgt

SEQ ID NO: 756328 - DNA, 75 bp, synthetic construct
  source 1..75: mol_type = other DNA
ctacaaggcaatccgttgatcgtcggcgaagacgttacggttggacataaagtgatgctccacggctgcaccatt

SEQ ID NO: 756329 - DNA, 75 bp, synthetic construct
  source 1..75: mol_type = other DNA
ggggatgcgcagttcgtggccctgcagggcagccgtaacggagaaagcctgctggctgataatatgcaggatggc

SEQ ID NO: 756330 - DNA, 75 bp, synthetic construct
  source 1..75: mol_type = other DNA
cgggacgtggcggcagggcgtgccgttctccgtcaggcgggacttgccgggggagacagtcctgcacggtttatt

SEQ ID NO: 756331 - DNA, 75 bp, synthetic construct
  source 1..75: mol_type = other DNA
gaccgtaacggcaagtccgccggtatctggctgaacccgctgaccacggatgacggaaacgggctgcggggattc

SEQ ID NO: 756332 - DNA, 75 bp, synthetic construct
  source 1..75: mol_type = other DNA
ttgtgcaagaacgcgtcccggatggatcagaatctccgggctcctgtacccatgacatgggcatttatgatgcgt

SEQ ID NO: 756333 - DNA, 75 bp, synthetic construct
  source 1..75: mol_type = other DNA
atgacgacaagctttaacaccattccgtcgaatacgctggttccgttgttttatgcggaaatggataactcggcg

SEQ ID NO: 756334 - DNA, 75 bp, synthetic construct
  source 1..75: mol_type = other DNA
gcgaatactgcacaggacagcggggcatcgctgctgattggtcatgccaataacggtgcagagattgttgccaac

SEQ ID NO: 756335 - DNA, 75 bp, synthetic construct
  source 1..75: mol_type = other DNA
taacggtgcagagattgttgccaacagtctggtactgatgccgtcggcagactatgcacgccagatttgtggtgc

SEQ ID NO: 756336 - DNA, 75 bp, synthetic construct
  source 1..75: mol_type = other DNA
atcgcgttatggtcaacgccagcaagcagctgacctggagcgatgtcaacgccgttccggcgcgtaacgtgggtt

SEQ ID NO: 756337 - DNA, 75 bp, synthetic construct
  source 1..75: mol_type = other DNA
ggctggcaaaacagtacggcatcgacgctatcggttttaacgcgcctgacctcaatatgaagcacggtttttata

SEQ ID NO: 756338 - DNA, 75 bp, synthetic construct
  source 1..75: mol_type = other DNA
tatggagtttttcagtgccattgcctgtgttgttattgcatatttttacggaattgagaaggaaggactatggat

SEQ ID NO: 756339 - DNA, 75 bp, synthetic construct
  source 1..75: mol_type = other DNA
actatgcacgccagatttgtggtgcgggaagtcagctggcgcgtatggtcgaggcttatcgccagaccgatccgt

SEQ ID NO: 756340 - DNA, 75 bp, synthetic construct
  source 1..75: mol_type = other DNA
cgcctgaacgcgctgaacatcaccgccgactatgaagtgatccgcactgccgaaactggcctggtgcagattcag

SEQ ID NO: 756341 - DNA, 75 bp, synthetic construct
  source 1..75: mol_type = other DNA
tgaaactggcctggtgcagattcaggcgcgaatgggcggcaccggcgaacgcttttttgctggcgacgccacgct

SEQ ID NO: 756342 - DNA, 75 bp, synthetic construct
  source 1..75: mol_type = other DNA
tggagctatgcgcgtcagctgtatggtcatgtgtatacggcaaagatcggcacgctgtcagaactggtgaccgca

SEQ ID NO: 756343 - DNA, 75 bp, synthetic construct
  source 1..75: mol_type = other DNA
tcctgaatccacgggcgcggcggcaacggttacgctgacggtgaccggggcggcaaccgaaaccggcacggttaa

SEQ ID NO: 756344 - DNA, 75 bp, synthetic construct
  source 1..75: mol_type = other DNA
gaggcttatcgccagaccgacccgtttggtgagctgtatgtgattgccgttccggaagccacaggcgcggcggca

SEQ ID NO: 756345 - DNA, 75 bp, synthetic construct
  source 1..75: mol_type = other DNA
gcagctgacctggagcgatgtcaacgccgttccggcgcgtaacgtgggtttattgctgggggcgaggccgggtaa

SEQ ID NO: 756346 - DNA, 75 bp, synthetic construct
  source 1..75: mol_type = other DNA
ctggcgattattattttccaggacccaacatttttaagtctgttgaacttaagtaatattctcacccagtcatcg

SEQ ID NO: 756347 - DNA, 75 bp, synthetic construct
  source 1..75: mol_type = other DNA
ctgatatcaaacattacattcttattctgaagcgggagaacggggtgacctggctggataatttcggggaaacag

SEQ ID NO: 756348 - DNA, 75 bp, synthetic construct
  source 1..75: mol_type = other DNA
ggccatcacctttatatttatgtcggtgcttattgtcctcagcctcgccgttaacgtcattcaggggataaataa

SEQ ID NO: 756349 - DNA, 75 bp, synthetic construct
  source 1..75: mol_type = other DNA
aaaatactattgctgacattctcacataccttcaattgggagaagcggcgaaacggaatgttggctcaggggagg

SEQ ID NO: 756350 - DNA, 75 bp, synthetic construct
  source 1..75: mol_type = other DNA
atgagtgcattaaataagaaaagttttcttacttacctgaaagagggcggtatttacgtcgttcttttagttttg

SEQ ID NO: 756351 - DNA, 75 bp, synthetic construct
  source 1..75: mol_type = other DNA
tggaacaaaacccgcttcggcaagaacatttttgctatcggcggtaacccggaagcggcgaaagtttctggtgtc

SEQ ID NO: 756352 - DNA, 75 bp, synthetic construct
  source 1..75: mol_type = other DNA
tcaggtccgcactgttaatctgattaaatctgcccgtgttggctatacaaagatgttgctgggggtggtcgggta

SEQ ID NO: 756353 - DNA, 75 bp, synthetic construct
  source 1..75: mol_type = other DNA
cgccaatctggttacaggttaacggcgaagatcatcagcgcagcgatattcgtcatctcatctggtcggtgaatg

SEQ ID NO: 756354 - DNA, 75 bp, synthetic construct
  source 1..75: mol_type = other DNA
gatgaagcgtcaggaatgcagcaagccttgatcgctaaaggcgtaccggcaaaagtgatcttctgcgactatgcc

SEQ ID NO: 756355 - DNA, 75 bp, synthetic construct
  source 1..75: mol_type = other DNA
ccaatgggatttaatgtgccctttgccgtgtcacagaacagtgccgatgcctcttatttgcagcagatggcgctg

SEQ ID NO: 756356 - DNA, 75 bp, synthetic construct
  source 1..75: mol_type = other DNA
acatcaggcgcttctgcaatatatccgcccgggcgcacagaaccagatgaaagttattctggctgaagaagctaa

SEQ ID NO: 756357 - DNA, 75 bp, synthetic construct
  source 1..75: mol_type = other DNA
gctcatcaaaaaagataatgtgaattctgcttttttccagaccagtgttcgtgtctggccacaatatggtcgtgt

SEQ ID NO: 756358 - DNA, 75 bp, synthetic construct
  source 1..75: mol_type = other DNA
gcgtacagccgaagatggtgacgtcaggcattctcatcgggaaatggaaggtaaatttgtcgaatggggcaaacc

SEQ ID NO: 756359 - DNA, 75 bp, synthetic construct
  source 1..75: mol_type = other DNA
ttgttaccggtgggagagcggaacattttgctaaagaaatagccgcatcgggtgatatagcaaagtccagagctg

SEQ ID NO: 756360 - DNA, 75 bp, synthetic construct
  source 1..75: mol_type = other DNA
cacacagatgtacggtaagccggtgaatgaactgagcgagacagagaagcagactgtttcgacaaaattcaatcc

SEQ ID NO: 756361 - DNA, 75 bp, synthetic construct
  source 1..75: mol_type = other DNA
tctcacggtttgttaccgggcgtggtgcaggtgccgcataacgggcagcccattgtgttgatgaacgacgcacag

SEQ ID NO: 756362 - DNA, 75 bp, synthetic construct
  source 1..75: mol_type = other DNA
ttatggaagcgcagggcgttaaacagctgctgtggggcaaccgcattcgcgccttgccggggccggaatatcatg

SEQ ID NO: 756363 - DNA, 75 bp, synthetic construct
  source 1..75: mol_type = other DNA
agcccgcaaagcaaccggatgggctatcgcttgcaagggcaaatcttaaaacgcaccaccgatcgtgaactgtta

SEQ ID NO: 756364 - DNA, 75 bp, synthetic construct
  source 1..75: mol_type = other DNA
aaaatatcgtcatataatatatttaataatctttttccaggtgctctttttatttatcttcttgagagaatgacg

SEQ ID NO: 756365 - DNA, 75 bp, synthetic construct
  source 1..75: mol_type = other DNA
ctgcggctgaagatttcatgaaagcgcacgtggaagcaacgttacgggatgtcccctgtctcagggcattatccc

SEQ ID NO: 756366 - DNA, 75 bp, synthetic construct
  source 1..75: mol_type = other DNA
cgaagaagcctttctgattgacaagcaaattatcatggggcgaccggaagacgaggacacccttaaacgtgttga

SEQ ID NO: 756367 - DNA, 75 bp, synthetic construct
  source 1..75: mol_type = other DNA
gaatgcagccctgtctctggcacagggtaagaatgctctagctggtgccgcaggcgcagccaccggcgaggtggt

SEQ ID NO: 756368 - DNA, 75 bp, synthetic construct
  source 1..75: mol_type = other DNA
atggcgactttgttacagcttcactttgcatttaatagcccctttggcgatgaaatggccgaacagcttaaatcg

SEQ ID NO: 756369 - DNA, 75 bp, synthetic construct
  source 1..75: mol_type = other DNA
agaaagtgaaaagaaccacgaagccggtgggatctaccttttcactgatgaaaaaagcgcccttgcctatctgga

SEQ ID NO: 756370 - DNA, 75 bp, synthetic construct
  source 1..75: mol_type = other DNA
tgtacaccactgttcaggatggcggtcgtcacggctttcgccagtcgggtatcagccactgtggagcgctggatt

SEQ ID NO: 756371 - DNA, 75 bp, synthetic construct
  source 1..75: mol_type = other DNA
atcgatgcggcatgtaagattgcccgcgatcagcaaattcctttactgattagtggtggtatcggtcactcgaca

SEQ ID NO: 756372 - DNA, 75 bp, synthetic construct
  source 1..75: mol_type = other DNA
tcgttcacgttgattttccggcagaagtcatccatgcatggcaaacgctgaaacatgatgcggtgctcatcgagg

SEQ ID NO: 756373 - DNA, 75 bp, synthetic construct
  source 1..75: mol_type = other DNA
gcgtttacgcgatgatagcgatggctacggtcccgcgggcgagattttatcgttcacgttgattttccggcagaa

SEQ ID NO: 756374 - DNA, 75 bp, synthetic construct
  source 1..75: mol_type = other DNA
tcatatgtttatcaggaacaagaaaaagcgctggcggagcgtcaaggtgataaatttagtgggtatactatcacc

SEQ ID NO: 756375 - DNA, 75 bp, synthetic construct
  source 1..75: mol_type = other DNA
cagcccgtcacgcagaaaagcggcactggagtgatggaagcattcgaactcgacatttatgcatcagaatataat

SEQ ID NO: 756376 - DNA, 75 bp, synthetic construct
  source 1..75: mol_type = other DNA
ttgcgcttctgaaccaggccacggagcgaattcataccgccatcatcattcaggacccaacaatgcagcgccgaa

SEQ ID NO: 756377 - DNA, 75 bp, synthetic construct
  source 1..75: mol_type = other DNA
gccgggtcttcctctaatatgggttctggtgcaaccgctggctccatttccgctccaggtaaaggatctgttggt

SEQ ID NO: 756378 - DNA, 75 bp, synthetic construct
  source 1..75: mol_type = other DNA
gggagaaaaaaataacttaattaggttggcaaaaaaattaaaagtttacaatagagttgattttgttgggtttgt

SEQ ID NO: 756379 - DNA, 75 bp, synthetic construct
  source 1..75: mol_type = other DNA
aatggaatcagtggaaatcggtatcagaggaaatcggcgctggcctgcgcgatgtggtgggtaatacccccgtcg

SEQ ID NO: 756380 - DNA, 75 bp, synthetic construct
  source 1..75: mol_type = other DNA
gcaccacgctggttaagttatcccggattcgttcctcagttaggaaataacgcagacagtgtaatctttgttaat

SEQ ID NO: 756381 - DNA, 75 bp, synthetic construct
  source 1..75: mol_type = other DNA
tgtaatctttgttaatcagttgcaaggattatggccggttgagcgttatctctcactactcactggcgagctgcc

SEQ ID NO: 756382 - DNA, 75 bp, synthetic construct
  source 1..75: mol_type = other DNA
tttcgccggcaaccatagatgccataaatgttatcggacagtggctggcgcaggatgatttctccggtgaggtgc

SEQ ID NO: 756383 - DNA, 75 bp, synthetic construct
  source 1..75: mol_type = other DNA
gttccactgacgacagttcagtgggctgatcaacattattatctgccgaaagaatcttcatatacccccgggcaa

SEQ ID NO: 756384 - DNA, 75 bp, synthetic construct
  source 1..75: mol_type = other DNA
agcacgaaagcagtcagcccgcgccgtttgccaacgaaatggcagagttgctgttcgggcagttggtgatgcttt

SEQ ID NO: 756385 - DNA, 75 bp, synthetic construct
  source 1..75: mol_type = other DNA
caatattcgcaaggttcttttattaccgaagtaaagtctttacgtatgcaaccgtgtattaacggtatttacttt

SEQ ID NO: 756386 - DNA, 75 bp, synthetic construct
  source 1..75: mol_type = other DNA
aaatccaggcacgaatgtctgactacgctgggtttatttgccatggcgataaagtccggcgcgccactcgcgatg

SEQ ID NO: 756387 - DNA, 75 bp, synthetic construct
  source 1..75: mol_type = other DNA
ttactggaggaagtgcagcgtcttgccattccactactgaccagtgcaacggtgattaagctcctgcatcagtgc

SEQ ID NO: 756388 - DNA, 75 bp, synthetic construct
  source 1..75: mol_type = other DNA
ggaaaacaacggcgcgctggcaccatcgcccatcgaacgcctgcaacgaatgaatccgctgtctatctcgctgta

SEQ ID NO: 756389 - DNA, 75 bp, synthetic construct
  source 1..75: mol_type = other DNA
gcggtggcaaaagagcagcaatcaggccgcctggtgtttatggatttcaatcgcaatcctgaagcggtgcctggt

SEQ ID NO: 756390 - DNA, 75 bp, synthetic construct
  source 1..75: mol_type = other DNA
gcggctggattacgtgcagcggttgagctgaaacgtcgccagcaaaatgtgctgcttgctaccgccgggttatac

SEQ ID NO: 756391 - DNA, 75 bp, synthetic construct
  source 1..75: mol_type = other DNA
gtgcggcaggttatcgggcagcttgagcacgaaagcaatcagcccgcgccgtttgccaacgaaatggcggagtta

SEQ ID NO: 756392 - DNA, 75 bp, synthetic construct
  source 1..75: mol_type = other DNA
cgtgctgcgtctgccgaagatcctgccgcctgctatcgtcaatgaaatggtgatgaccggcagacgaatgggcgc

SEQ ID NO: 756393 - DNA, 75 bp, synthetic construct
  source 1..75: mol_type = other DNA
cctctgaagtgcacaacgtcatcgccaagccaagatcgggaaagaagtggacagacatgaaaatgtcctacttcc

SEQ ID NO: 756394 - DNA, 75 bp, synthetic construct
  source 1..75: mol_type = other DNA
aaggcgctggcctggggcaagcagtacgaagaagacgcccgcaccctcttcgagttcaccactgacgtgaaagtc

SEQ ID NO: 756395 - DNA, 75 bp, synthetic construct
  source 1..75: mol_type = other DNA
acaccctgctggctgaggtctgcacgggtgtggtcccggaagttaacgccaaagccctggcatggggaaaacagt

SEQ ID NO: 756396 - DNA, 75 bp, synthetic construct
  source 1..75: mol_type = other DNA
atacacatgatttttgtgaactggtgatcgtctggcgcggtaacggtttgcacgtgctcaacgatcgtcctcatc

SEQ ID NO: 756397 - DNA, 75 bp, synthetic construct
  source 1..75: mol_type = other DNA
cagggggcgattccgggatttaacgccagcgcaggacaatcacactggcgtttaggtagcgtaggcatggcacag

SEQ ID NO: 756398 - DNA, 75 bp, synthetic construct
  source 1..75: mol_type = other DNA
gtttatgttgattttattctaaaaggttggtcggatggcattaaaaaaaattatgggaagtatgttggaataaag

SEQ ID NO: 756399 - DNA, 75 bp, synthetic construct
  source 1..75: mol_type = other DNA
atgaagcagcgcatcactgtcaccatagacagtgacagttatcagttactgaaatccgcagacgtcaatatctcc

SEQ ID NO: 756400 - DNA, 75 bp, synthetic construct
  source 1..75: mol_type = other DNA
aagttcggttaggcgaagcgacccatcgtgaagacctggtgcaacagtcgttgtatcggctggaacttattgatc

SEQ ID NO: 756401 - DNA, 75 bp, synthetic construct
  source 1..75: mol_type = other DNA
cgcttaaagaaggatatctggggcctattgatacactgaatctgaatctcctcatcgagatccttcaaggaaaag

SEQ ID NO: 756402 - DNA, 75 bp, synthetic construct
  source 1..75: mol_type = other DNA
acaaatcgctgatatgaatattgagcttgctttttcaatggctgagcacgattgtttagtcggtaaagattttgc

SEQ ID NO: 756403 - DNA, 75 bp, synthetic construct
  source 1..75: mol_type = other DNA
cagttattagcgcgcggctaactaaatacctcaaagatggagtgaggattgatgactttagctttagaaggatgt

SEQ ID NO: 756404 - DNA, 75 bp, synthetic construct
  source 1..75: mol_type = other DNA
gggtgaattgtcaccacgtgaccaggcgctggtaaccgatatgtgggaacacctgtttcagcaggcctcacagca

SEQ ID NO: 756405 - DNA, 75 bp, synthetic construct
  source 1..75: mol_type = other DNA
tgaccatgccagtgatgatgagttgtttgccagtgggtatttgcgtggccacctgacattagccatcgcagaact

SEQ ID NO: 756406 - DNA, 75 bp, synthetic construct
  source 1..75: mol_type = other DNA
tccaataacgatggcatttatcagcagtcagaaaaactgactgaagaagaaaaaacgcgttacgactatgagtgg

SEQ ID NO: 756407 - DNA, 75 bp, synthetic construct
  source 1..75: mol_type = other DNA
tcctccggtgtggggttctggtgcctgggcggtgccgcagctaaaaactaccgtgaaaaatctgtggatgtggtc

SEQ ID NO: 756408 - DNA, 75 bp, synthetic construct
  source 1..75: mol_type = other DNA
tcgacagtgacagctatcagttgctcaaggcatatgatgtcaatatctccgggctggtaagcaccaccatgcaga

SEQ ID NO: 756409 - DNA, 75 bp, synthetic construct
  source 1..75: mol_type = other DNA
ttttaacgcttatctctggcgctgcgtgtgcggcaccagagataagcgttgggcaaaatgaatctttattacctg

SEQ ID NO: 756410 - DNA, 75 bp, synthetic construct
  source 1..75: mol_type = other DNA
gaaaattaatcgttatatgtagccagaagggcggaatcgtaaaatcgcagtcatccagcgaaatagcatatgatc

SEQ ID NO: 756411 - DNA, 75 bp, synthetic construct
  source 1..75: mol_type = other DNA
gagacgctgaaatggtcccggctgtatggcggggcggtggcgctgattctgattgaaggtcaggcaccgctgacg

SEQ ID NO: 756412 - DNA, 75 bp, synthetic construct
  source 1..75: mol_type = other DNA
gcggcacgctggaagatggtctgatgaagcacatggacatgatccgtgagttccagaccatagaaggcatgacca

SEQ ID NO: 756413 - DNA, 75 bp, synthetic construct
  source 1..75: mol_type = other DNA
aaggtggtgaccaaccagcaggggatccccccgtggaagattcaccacagccgcattatccgcatggaaggtgac

SEQ ID NO: 756414 - DNA, 75 bp, synthetic construct
  source 1..75: mol_type = other DNA
atcacaactggatgagttgcaaatctgggatgcgctgaatgacgtgctgaaatggtcgcgcctctatggcggcgc

SEQ ID NO: 756415 - DNA, 75 bp, synthetic construct
  source 1..75: mol_type = other DNA
cctgatccgctttgatggcgtcacgctgccattccagcagaagatgaccgaaaacgaatggggaatgtcggttgt

SEQ ID NO: 756416 - DNA, 75 bp, synthetic construct
  source 1..75: mol_type = other DNA
cgcgccaacgtctccattgcagtccctggcttccagaatagattccagacgctgcacctcgacgcttactgtaac

SEQ ID NO: 756417 - DNA, 75 bp, synthetic construct
  source 1..75: mol_type = other DNA
gctgctgaaattaaatacagtaaggctggccactcctatcagatggtacactccggattactggataagaaaaca

SEQ ID NO: 756418 - DNA, 75 bp, synthetic construct
  source 1..75: mol_type = other DNA
cgcttaaagaagggtatttgggacctattgatacactgaatctgaatctactcattgagatccttcagggaaaag

SEQ ID NO: 756419 - DNA, 75 bp, synthetic construct
  source 1..75: mol_type = other DNA
tatcctttgatgaatatgaccctaaatgtcttcctgcaatccagtataaagaacttacacagaaaattattaagc

SEQ ID NO: 756420 - DNA, 75 bp, synthetic construct
  source 1..75: mol_type = other DNA
ctgtccgacatcatcggcatcggcggctctatcaccgacaaggatattgaagatgccaaagcagaatgggaggag

SEQ ID NO: 756421 - DNA, 75 bp, synthetic construct
  source 1..75: mol_type = other DNA
tcggagatccagtatcgaaaaagcctgttggcgatagcaaaccagatagggcagatcgtcgatggtacctacgat

SEQ ID NO: 756422 - DNA, 75 bp, synthetic construct
  source 1..75: mol_type = other DNA
gcgcacaaaagcccgttgcgacagctgacgggtacaacaatttcacggccaaacttggcagcgacaccagaaaca

SEQ ID NO: 756423 - DNA, 75 bp, synthetic construct
  source 1..75: mol_type = other DNA
atgttaaccgcacgttagtcatgcctgttgtgaaagtgaatgcactgacggaaggtaataacaaccgctggaacc

SEQ ID NO: 756424 - DNA, 75 bp, synthetic construct
  source 1..75: mol_type = other DNA
agaagcagcaggttgcttcggtcgacagtaacacctggcgcggatgcgcggtatttttgttcctgcgccaggcgc

SEQ ID NO: 756425 - DNA, 75 bp, synthetic construct
  source 1..75: mol_type = other DNA
atgcttttaattcaacctggatttggccttagcatcaaaaaatggcacatgtttggcgagaaagagtctcaacga

SEQ ID NO: 756426 - DNA, 75 bp, synthetic construct
  source 1..75: mol_type = other DNA
ctgactggtttgtgaaaaaccaccacgcagttcgtcaggcaaagagaaaggccaatacgacatacatgaaggcgt

SEQ ID NO: 756427 - DNA, 75 bp, synthetic construct
  source 1..75: mol_type = other DNA
tattttgcatatgacaagtgcttataatgttcctgtcatcgccgtgtatgccgattataaaacacgctggcctgc

SEQ ID NO: 756428 - DNA, 75 bp, synthetic construct
  source 1..75: mol_type = other DNA
gcgcaaagtataagagatcaatacggtacaccggatctctgcattgaagctatgcgcaagaaaaacctgaagaca

SEQ ID NO: 756429 - DNA, 75 bp, synthetic construct
  source 1..75: mol_type = other DNA
aatactgaatttgtggttattcacatccccgaccaaattggtgatgcaatggccatttaccccataattagatcg

SEQ ID NO: 756430 - DNA, 75 bp, synthetic construct
  source 1..75: mol_type = other DNA
atcttccgtaaaggctatcagtggccgtttcacgccacacgagtgatggattttggctccagcttgttagatatg

SEQ ID NO: 756431 - DNA, 75 bp, synthetic construct
  source 1..75: mol_type = other DNA
tacttctcgcctaatggtgaaagtattgctggaggaagtgcagcgtcttgccataccactactgaccagtgcaac

SEQ ID NO: 756432 - DNA, 75 bp, synthetic construct
  source 1..75: mol_type = other DNA
tcctattatccgaggtatttggtttgaaaaaactggcctggttttcttaatgggacaatttaccagccacaggat

SEQ ID NO: 756433 - DNA, 75 bp, synthetic construct
  source 1..75: mol_type = other DNA
atgaatatatccagactacagctgaataatatgatggctgccgtttcagttgcgttgcaacctctggtcagggtt

SEQ ID NO: 756434 - DNA, 75 bp, synthetic construct
  source 1..75: mol_type = other DNA
gcgcaaactcgatgcattgatgatctcaatggacaccctctggttatctagcgtgcttagcaacaagcaacgtgt

SEQ ID NO: 756435 - DNA, 75 bp, synthetic construct
  source 1..75: mol_type = other DNA
atggcgctggtaacggtgaaagaaaaaatccaggcgcgaatgtctgattacgccggatttatttgtcatgccgat

SEQ ID NO: 756436 - DNA, 75 bp, synthetic construct
  source 1..75: mol_type = other DNA
gaaaccaccaaaggcggtagcaaactggcgattttactggggccaggcagaccgaaaagtcggttaccgggatga

SEQ ID NO: 756437 - DNA, 75 bp, synthetic construct
  source 1..75: mol_type = other DNA
tattgtcatccctgccactaacgaagaagccgtgcagaaatttggtgcccaaaaacaagatggcgtgcaagggta

SEQ ID NO: 756438 - DNA, 75 bp, synthetic construct
  source 1..75: mol_type = other DNA
taacagtgatcttagtattaacgctactgttaactatcagttcggtgtaccacttaaagatcaactgaatagcga

SEQ ID NO: 756439 - DNA, 75 bp, synthetic construct
  source 1..75: mol_type = other DNA
aacggcaatacactgccagaagataacctttccccgcagctttacgatgcgcaggataaaaaagtcacgctcacc

SEQ ID NO: 756440 - DNA, 75 bp, synthetic construct
  source 1..75: mol_type = other DNA
gttcggtgcaaagctggtttacgaacaatattacggtgatgaagttgcgctattcggcaccgataacctggaaaa

SEQ ID NO: 756441 - DNA, 75 bp, synthetic construct
  source 1..75: mol_type = other DNA
gatttcacccgcggacatcgccgtttaggcttaggaacagaagcctggacggattatttaaaattttctggtaac

SEQ ID NO: 756442 - DNA, 75 bp, synthetic construct
  source 1..75: mol_type = other DNA
aacggtgatccgcttccagacaatggtctgagtccacaactttatgatacacaagacaaaaaagtcacgctcgcc

SEQ ID NO: 756443 - DNA, 75 bp, synthetic construct
  source 1..75: mol_type = other DNA
cgatgcgttgctcttgttgagaagattccagaaatcagagattcattcgacaaggttgcaaagcgcgttccggca

SEQ ID NO: 756444 - DNA, 75 bp, synthetic construct
  source 1..75: mol_type = other DNA
tcaatcgcatgtggactgaaaaagaatatctatggtcatcacttcggcgctccccatgacgcagcagacttccga

SEQ ID NO: 756445 - DNA, 75 bp, synthetic construct
  source 1..75: mol_type = other DNA
catggtggtgtttctttcattgttagtctggggatggctgctcggcccgattggcatgctactttcagtaccact

SEQ ID NO: 756446 - DNA, 75 bp, synthetic construct
  source 1..75: mol_type = other DNA
cgactaccagtgggaatttaccggacacagcgtcaatggctacaccggtgcgcaatcgaataccagtaatgaaga

SEQ ID NO: 756447 - DNA, 75 bp, synthetic construct
  source 1..75: mol_type = other DNA
gctggaaagcaaaggccgcaccgtatgacgatagtaactatgtcgatgtgactttcctcggcgcggggggcaatg

SEQ ID NO: 756448 - DNA, 75 bp, synthetic construct
  source 1..75: mol_type = other DNA
aagcaaagtgactcttcattaccggatttgggaagcgaagctgccttacaagaagaacaaaataataaaggtaaa

SEQ ID NO: 756449 - DNA, 75 bp, synthetic construct
  source 1..75: mol_type = other DNA
ttgtccgcgactataccggcaggacaccggaagcacgggagcagacgctgattgtcacgcacctgaatgaggacc

SEQ ID NO: 756450 - DNA, 75 bp, synthetic construct
  source 1..75: mol_type = other DNA
attatcgaagcaaagacctcacaccgaaaaaatcaagactgctggcagacaccatttcagcggtttatcttgatg

SEQ ID NO: 756451 - DNA, 75 bp, synthetic construct
  source 1..75: mol_type = other DNA
acaggaaaatcacggagtgatgtgcagcaacgcattcagcagtttcacagtcaggaatttttaaactcactccgg

SEQ ID NO: 756452 - DNA, 75 bp, synthetic construct
  source 1..75: mol_type = other DNA
ttctgggtgttctgtgccgactttaaccgccatttacagatctgtccggatgctcagctcggcctggcggaacaa

SEQ ID NO: 756453 - DNA, 75 bp, synthetic construct
  source 1..75: mol_type = other DNA
cgctggccagatcgcttgagtatgaccatcgcggtgtcggggatctcctttccggcatttgccctggggatgctt

SEQ ID NO: 756454 - DNA, 75 bp, synthetic construct
  source 1..75: mol_type = other DNA
gtcgtccggttgccgatgagattgccagccgctttatgccaacgctgtggctgaccataaccagtatggtctggg

SEQ ID NO: 756455 - DNA, 75 bp, synthetic construct
  source 1..75: mol_type = other DNA
gctgatgcggatctactgggcttttgttggcaatcgatactcccgcgagctgtttatcgtgccggtatggcgtaa

SEQ ID NO: 756456 - DNA, 75 bp, synthetic construct
  source 1..75: mol_type = other DNA
cgcagaaaacgcgctgcgttcagaatactggaagagggtcatggccctgaccgatgtactgtctgtgatgtctga

SEQ ID NO: 756457 - DNA, 75 bp, synthetic construct
  source 1..75: mol_type = other DNA
cttatcaggttagtccgaatgacgttgtaagcattcgtgagaaagcgaagaagcaatctcgcgtgaaagccgctc

SEQ ID NO: 756458 - DNA, 75 bp, synthetic construct
  source 1..75: mol_type = other DNA
agctcaatgtttgacgaccatcctgcatccgccgaacgcgcccagcatattcgcgatcgtatgagcgcggatgga

SEQ ID NO: 756459 - DNA, 75 bp, synthetic construct
  source 1..75: mol_type = other DNA
tttgcagtgcagtagcattattcgcattaccgacaaagcgttacgtgaagaactggtgacgctgaccggcgggca

SEQ ID NO: 756460 - DNA, 75 bp, synthetic construct
  source 1..75: mol_type = other DNA
actggctttaacaacctctcatagcctggtggttagctcttctgaaacatttcttccagatatgcgcaaagagct

SEQ ID NO: 756461 - DNA, 75 bp, synthetic construct
  source 1..75: mol_type = other DNA
ttcggagttgcgggtgatctgttcttatttccggggcgaaacagttaaaccggtctatgacacgaaaaaaatggt

SEQ ID NO: 756462 - DNA, 75 bp, synthetic construct
  source 1..75: mol_type = other DNA
tgccgaaaatattcagatagagctgagggatgaccaggatgcgacgttaaaaaatggcgatagcaaaacggttat

SEQ ID NO: 756463 - DNA, 75 bp, synthetic construct
  source 1..75: mol_type = other DNA
gcgacgtgacgatgtttctcgcgaacatgtcgaacaaattcttgctgcccaggctacgcgcgaagcccgtcttgc

SEQ ID NO: 756464 - DNA, 75 bp, synthetic construct
  source 1..75: mol_type = other DNA
ccggggtgctgtgcctgctctggtcgtggctggtggcgcgatatctcgaccgcacacagtcgtctgtcggcggag

SEQ ID NO: 756465 - DNA, 75 bp, synthetic construct
  source 1..75: mol_type = other DNA
atgacacaatatgacgcaaaactatatagaaaaatggcaacgatgacagttaatgaaatatttatcaagaataaa

SEQ ID NO: 756466 - DNA, 75 bp, synthetic construct
  source 1..75: mol_type = other DNA
atgtttctgataattctcacgccactggtgggcgtgctgggggcgcttttgctgtcgtatggcgcatggctgatt

SEQ ID NO: 756467 - DNA, 75 bp, synthetic construct
  source 1..75: mol_type = other DNA
gattgaccaatgtggcatcgttggtgcagcagctggtagtctttttgtatttaaaggtaagtatagagctgtgtt

SEQ ID NO: 756468 - DNA, 75 bp, synthetic construct
  source 1..75: mol_type = other DNA
gtaaaggtcttttttcaaagggttatgagctttcgactaggaataacacgcgaacgtataaaatcgatcctatct

SEQ ID NO: 756469 - DNA, 75 bp, synthetic construct
  source 1..75: mol_type = other DNA
taaacaggtgattgaatccgacataatcgaagcggtgattggtttgggaccaaatctgttttacaactcgccgat

SEQ ID NO: 756470 - DNA, 75 bp, synthetic construct
  source 1..75: mol_type = other DNA
gtgcatttaatgacgcgcattatgggcttaaaaccgggtgaaacagcctatgatccaacgtgtggcactggaggg

SEQ ID NO: 756471 - DNA, 75 bp, synthetic construct
  source 1..75: mol_type = other DNA
agtaatgtcgaaacgcatgacattcagcatgctatcgaggcatggaaagtcagccgtgtacaattaaaaaaacag

SEQ ID NO: 756472 - DNA, 75 bp, synthetic construct
  source 1..75: mol_type = other DNA
tcgccggtattgatgaaattcttgaagggaaaaaaccgattaccgatctcggcgtgaaagctattgatgatcaca

SEQ ID NO: 756473 - DNA, 75 bp, synthetic construct
  source 1..75: mol_type = other DNA
aagctatatgtctcgttctcatatcgctgatccttactggggcttggctgataaagtcgagacaaaaagatcgcc

SEQ ID NO: 756474 - DNA, 75 bp, synthetic construct
  source 1..75: mol_type = other DNA
gtggctaacgcccagcgcattattatctgcaatgacgaagtttataacgatgaagttcgccggacattattgcgt

SEQ ID NO: 756475 - DNA, 75 bp, synthetic construct
  source 1..75: mol_type = other DNA
cgattgcgacctctgcagcattactgacagggtgtcaaaatacccacggtattgataccaatatggctatcagct

SEQ ID NO: 756476 - DNA, 75 bp, synthetic construct
  source 1..75: mol_type = other DNA
attcgtgtgtcgggcttgtggatatacagcgaacgccgatgtaaacggcgctcgcaacattttagcggcggggca

SEQ ID NO: 756477 - DNA, 75 bp, synthetic construct
  source 1..75: mol_type = other DNA
tgcgccgccagcttgagtacaagcagctctggcgtggcggtcaggtgcttgctgttccgccagcgtacacaagcc

SEQ ID NO: 756478 - DNA, 75 bp, synthetic construct
  source 1..75: mol_type = other DNA
cttgagtacaagcagctctggcgtggcggtcaggtgcttgctgttccgccagcgtatacaagccagcgttgcgcg

SEQ ID NO: 756479 - DNA, 75 bp, synthetic construct
  source 1..75: mol_type = other DNA
gcatcgcgcattttgctggaaattaccgacgtgcgtgtggaacggctgcgtgatatgagcgaggcagatgctaaa

SEQ ID NO: 756480 - DNA, 75 bp, synthetic construct
  source 1..75: mol_type = other DNA
tggtgtctctctggcttctgaactgtgtgattacaaggctgattactcagatagtagcaagccagctgagggttg

SEQ ID NO: 756481 - DNA, 75 bp, synthetic construct
  source 1..75: mol_type = other DNA
gtaacattttagcggcggggcacgccgttcttgcctgtggagagatggtgcagtcaggccgctcgttgaagcagg

SEQ ID NO: 756482 - DNA, 75 bp, synthetic construct
  source 1..75: mol_type = other DNA
aacgctggacgatacggggcttaagccgcaaaccgaacgcggcggcgatgaaggttaacgcgcaggtgctggaca

SEQ ID NO: 756483 - DNA, 75 bp, synthetic construct
  source 1..75: mol_type = other DNA
cgtggtgaacccgttcgcctcacagctcacgttcatgagcgacaaaacccgcacccggcgcgaccacatgaaata

SEQ ID NO: 756484 - DNA, 75 bp, synthetic construct
  source 1..75: mol_type = other DNA
tggcctgcccgcacacctgtatcttcccggcgctcacggcggcgtgtggaatgaacaggcgctgatcgggtcatc

SEQ ID NO: 756485 - DNA, 75 bp, synthetic construct
  source 1..75: mol_type = other DNA
aggtgcttgctgttccgccagcgtatacaagccagcgttgcgcgtactgtggtcatacagcgaaagagaaccgcc

SEQ ID NO: 756486 - DNA, 75 bp, synthetic construct
  source 1..75: mol_type = other DNA
tcgccggggtccgtaacgtcacggcggcttacggggtgaacggctttactgatgagatgcgggccgcactgctgg

SEQ ID NO: 756487 - DNA, 75 bp, synthetic construct
  source 1..75: mol_type = other DNA
gaatacctgctggtccaccgtcgcgggctgacgttctgctatgaactgctgttcgacggggacggcagcgcagac

SEQ ID NO: 756488 - DNA, 75 bp, synthetic construct
  source 1..75: mol_type = other DNA
ggccatcctcgaaggaaggaagacgcagactcgccgacctgtaaaaaatgtcagggccgataactgcctggttat

SEQ ID NO: 756489 - DNA, 75 bp, synthetic construct
  source 1..75: mol_type = other DNA
tggtgatatctggcgcggtatttatgggcaagataactggctgtctaatccgtgggtatgggtaattgagtttaa

SEQ ID NO: 756490 - DNA, 75 bp, synthetic construct
  source 1..75: mol_type = other DNA
gcaggtggtgcccatctatccacatgccgcgctgggcgtcgcgcattctgttgggaataaccgacgtgcgtgtgg

SEQ ID NO: 756491 - DNA, 75 bp, synthetic construct
  source 1..75: mol_type = other DNA
tgtagtgggggcaccgtcttatttcgctacaaaccctgcgcctggaacgcctcacgaactacaaaatcatcgctg

SEQ ID NO: 756492 - DNA, 75 bp, synthetic construct
  source 1..75: mol_type = other DNA
gcgttggcccgcatggttagcgttgaccgttcgacatggttgcgtgtctattcagggcactgggctgggttaaag

SEQ ID NO: 756493 - DNA, 75 bp, synthetic construct
  source 1..75: mol_type = other DNA
cgccgcaggccaatgccgccgataaaagatgcggaatttgagtccgcgccgtggcgtagggcagtgtccgcgctt

SEQ ID NO: 756494 - DNA, 75 bp, synthetic construct
  source 1..75: mol_type = other DNA
gttttgttaactcgctttccgcgccactgtatgtgctggaaacacgcagccgccgcaggccaatgccgccgataa

SEQ ID NO: 756495 - DNA, 75 bp, synthetic construct
  source 1..75: mol_type = other DNA
tgtcgatattgttgaaggccgttttgatgccgggatacgtctgggtgaaactgtggataatgatatgattgcagt

SEQ ID NO: 756496 - DNA, 75 bp, synthetic construct
  source 1..75: mol_type = other DNA
tgtcgatattgttgaaggtcgttttgatgccgggatacgtctgggtgaaactgtagataaggatatgattgcagt

SEQ ID NO: 756497 - DNA, 75 bp, synthetic construct
  source 1..75: mol_type = other DNA
tgtcgatattgttgaaggacgttttgatgccgggatacgtctgggtgaaactgttgataaggatatgattgcagt

SEQ ID NO: 756498 - DNA, 75 bp, synthetic construct
  source 1..75: mol_type = other DNA
atgctcaaagaaaacttcaacgaactgcaaatctttcttgtggtggcaagggagcgaagttttaccaaagcagcg

SEQ ID NO: 756499 - DNA, 75 bp, synthetic construct
  source 1..75: mol_type = other DNA
tatcaatatgcgcctgccgactgccggtggtctttaccactgggagtttgagaagaatgggaggcactgttgcaa

SEQ ID NO: 756500 - DNA, 75 bp, synthetic construct
  source 1..75: mol_type = other DNA
tgtcgatattgttgaagggcgttttgatgccgggatacgtctgggtgaaactgtcgataatgatatgattgcagt

SEQ ID NO: 756501 - DNA, 75 bp, synthetic construct
  source 1..75: mol_type = other DNA
cttatcgatcgcaataccgacggctttactatcactccactcaacgacatgttggggttacgcggcaatatgttg

SEQ ID NO: 756502 - DNA, 75 bp, synthetic construct
  source 1..75: mol_type = other DNA
attctcgctcttcgtcgagaaattctttccgcggtggtggcggttcttcaggaggcggcggttcatccgaccgtt

SEQ ID NO: 756503 - DNA, 75 bp, synthetic construct
  source 1..75: mol_type = other DNA
caattattgggttaattgatcattttatcggcccaataaccattgctggcatcgttctgctggaacacgccaacc

SEQ ID NO: 756504 - DNA, 75 bp, synthetic construct
  source 1..75: mol_type = other DNA
cagacctttatctgcagcaactcaaactggctcaccgcacagaaaaaacgcccgatcactgggatcaacgggcgg

SEQ ID NO: 756505 - DNA, 75 bp, synthetic construct
  source 1..75: mol_type = other DNA
aagcctgccagacaaaaagcccctaaacgcgacatgggtcttaccgtggcggcgctgatgaaagagagccacacg

SEQ ID NO: 756506 - DNA, 75 bp, synthetic construct
  source 1..75: mol_type = other DNA
tgggccacgtccagctactacggttcgccgttcagggagtggctgaaagccctgaccgctgaccttaacgggctg

SEQ ID NO: 756507 - DNA, 75 bp, synthetic construct
  source 1..75: mol_type = other DNA
tctcgttggcggaaatatcaggtatttactgaacgaacggtctacccgcctgttcaactaccagttgtacatggc

SEQ ID NO: 756508 - DNA, 75 bp, synthetic construct
  source 1..75: mol_type = other DNA
ttttgagcagaacgtcagctggagtctgggcgcgcttaacgacgatgagcgtgagcggttatatcgctggtatca

SEQ ID NO: 756509 - DNA, 75 bp, synthetic construct
  source 1..75: mol_type = other DNA
tgactcgtgggatcaccttaggcctgaaggatattctcaatgcccgcgaagttttgttactggtgactggcgaag

SEQ ID NO: 756510 - DNA, 75 bp, synthetic construct
  source 1..75: mol_type = other DNA
tatcgcggtaatttttcatatgtatcgcgtatttcctatgatgctggccccaaaaaataaaaacgctaaagtgaa

SEQ ID NO: 756511 - DNA, 75 bp, synthetic construct
  source 1..75: mol_type = other DNA
gggatggtgcctggttttcgccagtaataaagatatggcattgatatcaacaattatcgggctgactgattattt

SEQ ID NO: 756512 - DNA, 75 bp, synthetic construct
  source 1..75: mol_type = other DNA
agaagcgatatggcgaaggaatcttaattctcgtcctctggccggaagggctggcgtcaatgaagattggacatg

SEQ ID NO: 756513 - DNA, 75 bp, synthetic construct
  source 1..75: mol_type = other DNA
ccacactggtagccgatatgcgccaggcaatgaccaaactcaataatcaggctcgactgcgcgtctacaccactc

SEQ ID NO: 756514 - DNA, 75 bp, synthetic construct
  source 1..75: mol_type = other DNA
tgcctcgcacagcgtggcggcgcgaattgatgacgctaaaccggtgctgattgtctcggctgatgccggggcgcg

SEQ ID NO: 756515 - DNA, 75 bp, synthetic construct
  source 1..75: mol_type = other DNA
gaagccccggcgtgccgatgtatggctataacgtgcagttgctcaatgaagtcaccggcgaaccgtgtggcgtca

SEQ ID NO: 756516 - DNA, 75 bp, synthetic construct
  source 1..75: mol_type = other DNA
ggcgctggcattgattgccgtctcttcggaaacagaggaagagcgtacctttaccttccgccaactgcatgacga

SEQ ID NO: 756517 - DNA, 75 bp, synthetic construct
  source 1..75: mol_type = other DNA
atgtttaccgagggtaaaacggtagcggtggaacatgccgagccggtttatttacgtaacaacgtcgcctggaag

SEQ ID NO: 756518 - DNA, 75 bp, synthetic construct
  source 1..75: mol_type = other DNA
gcccggattgcggcgtgattctaatcgctcacggggcgaccaccgcaacgagccaggcgcaatatgtgaaccggg

SEQ ID NO: 756519 - DNA, 75 bp, synthetic construct
  source 1..75: mol_type = other DNA
tgtctgatttagcgaaggagaaagcatttactgctgaggcgattggttttaaccttgggctggcacgcaactcgg

SEQ ID NO: 756520 - DNA, 75 bp, synthetic construct
  source 1..75: mol_type = other DNA
tggttagagaaagttgggggataggtgaattatccatctctaacatggtccatcttcttgaagctaatggggtcc

SEQ ID NO: 756521 - DNA, 75 bp, synthetic construct
  source 1..75: mol_type = other DNA
gcgaacggttatatcgctggtatcaacaacaggatgctcgcgccctcgcccctgccagccgcgactgggcactca

SEQ ID NO: 756522 - DNA, 75 bp, synthetic construct
  source 1..75: mol_type = other DNA
cagacctttatcttcagcaattaaagctggctcaccgaacagaaaaaacgccagatcactgggatcaacgggcgg

SEQ ID NO: 756523 - DNA, 75 bp, synthetic construct
  source 1..75: mol_type = other DNA
agcgcgctacctgaaacacgttggtatttacgcttatcgtcgcgatgtgctgcaaaactacagtcaattgccaaa

SEQ ID NO: 756524 - DNA, 75 bp, synthetic construct
  source 1..75: mol_type = other DNA
tgaccccgcgttgccagtggcaacgctatgccacgcgatttctgccgaagaagcgaccgagccaagcacggtaaa

SEQ ID NO: 756525 - DNA, 75 bp, synthetic construct
  source 1..75: mol_type = other DNA
agccatcatgacgcgtaccgatcatgaatccggcaccgatcggctggtcgaagtgatgcataaagtcgaggcaga

SEQ ID NO: 756526 - DNA, 75 bp, synthetic construct
  source 1..75: mol_type = other DNA
gcccgtccgccatcagccgcctggaaagcaatcctttaggggcaagtatgaaaactttatcaaaatatgcccagg

SEQ ID NO: 756527 - DNA, 75 bp, synthetic construct
  source 1..75: mol_type = other DNA
ccggggcgctgtgcctgttctggtcgtggctggtggcgcgatatctcgatcgtacacagctgtctgtcggcggag

SEQ ID NO: 756528 - DNA, 75 bp, synthetic construct
  source 1..75: mol_type = other DNA
ccggggcgctgtgcctgttctggtcgtggctggttgcacgatatcttgaccgtacacggcagtctgtcggcggag

SEQ ID NO: 756529 - DNA, 75 bp, synthetic construct
  source 1..75: mol_type = other DNA
ccgggccttgcgcgagcggatcttcgccaacccggaagagaaaaactggcttaacgacctgctgcatccgctgat

SEQ ID NO: 756530 - DNA, 75 bp, synthetic construct
  source 1..75: mol_type = other DNA
attaactctcgtcaacttagggttacattagccacaaggcttgcacttaaaggttatggattaggaacgatagca

SEQ ID NO: 756531 - DNA, 75 bp, synthetic construct
  source 1..75: mol_type = other DNA
atgaaactgaagctgaacaatgttcgtctggccttcccgtctctgtttgaagctaaaactgtaaacggcgaaggc

SEQ ID NO: 756532 - DNA, 75 bp, synthetic construct
  source 1..75: mol_type = other DNA
atccgacaaatactggtgtcagtactaccagcagtagttcgctcactggcagtaacgctgcagatttacaaagca

SEQ ID NO: 756533 - DNA, 75 bp, synthetic construct
  source 1..75: mol_type = other DNA
gcgaagatgaacggaaacgccagcaggaaataacggataaagcacaacttctttgtgatgaaatggctcaggctg

SEQ ID NO: 756534 - DNA, 75 bp, synthetic construct
  source 1..75: mol_type = other DNA
ggaatgagatggcgcgaaagacggtcgtaaagcgtgcaagcaagtattggcctaaggcatcacgtcttgatagtg

SEQ ID NO: 756535 - DNA, 75 bp, synthetic construct
  source 1..75: mol_type = other DNA
tcaacgttgcggcgatcggcatcaccttaaaccctgcaagcaaactggcttatctagttccgcgcgatggcatgg

SEQ ID NO: 756536 - DNA, 75 bp, synthetic construct
  source 1..75: mol_type = other DNA
actggaatgagatggcgcgaaagacggtcgtaaagcgtgcaagcaagtattggcctaaggcatcacgtcttgata

SEQ ID NO: 756537 - DNA, 75 bp, synthetic construct
  source 1..75: mol_type = other DNA
gataagggcccgtgggttaatcactggaatgagatggcgcgaaagacagtggtcaagcgagcaagcaagtattgg

SEQ ID NO: 756538 - DNA, 75 bp, synthetic construct
  source 1..75: mol_type = other DNA
cttaaacccggctagcaaactggcttatctggttccgcgcgacggcatggtgtgccttgatatcagttatatggg

SEQ ID NO: 756539 - DNA, 75 bp, synthetic construct
  source 1..75: mol_type = other DNA
gaaattctaacggacttttcctcaatcttagaatgtaaaataaataaaatagttgaattgctcaactgggagagt

SEQ ID NO: 756540 - DNA, 75 bp, synthetic construct
  source 1..75: mol_type = other DNA
aaaatatcggcgcgcttctgttgaatggtgaattaccggaagacaggggggattattacagtatcaatcccccta

SEQ ID NO: 756541 - DNA, 75 bp, synthetic construct
  source 1..75: mol_type = other DNA
agaaaaagcggggttaacaaagtctgcgctggccgaacgaatgggattacgcccgtcagccatcagccggctgga

SEQ ID NO: 756542 - DNA, 75 bp, synthetic construct
  source 1..75: mol_type = other DNA
tttattgctgtactgctattcatcgtcggtttactgtgtatcagtttcccgtttgtttctggtgatattctaagc

SEQ ID NO: 756543 - DNA, 75 bp, synthetic construct
  source 1..75: mol_type = other DNA
atggggaatcgtaatgctcattctcgctcttcgtcgaaaaactctttccgcggtggcggcggttcttctggcggt

SEQ ID NO: 756544 - DNA, 75 bp, synthetic construct
  source 1..75: mol_type = other DNA
ccaaaaataaaaacactaaagtgaaaaaacaaaagaagactccgcaggttcgtgaatcaggacgaaattcattgt

SEQ ID NO: 756545 - DNA, 75 bp, synthetic construct
  source 1..75: mol_type = other DNA
ctggcgtcaatgaagattggacatggactggaacagatgttgccgccggaacaagctgcacaaattgttcgttac

SEQ ID NO: 756546 - DNA, 75 bp, synthetic construct
  source 1..75: mol_type = other DNA
cggttgccagaatatggactccaacggactgctctcatcaggagcggaagcttttcaggcttacagtttgagtga

SEQ ID NO: 756547 - DNA, 75 bp, synthetic construct
  source 1..75: mol_type = other DNA
agctcaatgtttgacgaccatccggcctccgccgaacgcgcccagcatattcgcgatcgcatgagcgcggatgga

SEQ ID NO: 756548 - DNA, 75 bp, synthetic construct
  source 1..75: mol_type = other DNA
attgagcgtaaagagtcgttaagaccattatcagagtatgaattgaagaatctgatcgggtgtatgacaaaggaa

SEQ ID NO: 756549 - DNA, 75 bp, synthetic construct
  source 1..75: mol_type = other DNA
ctggtgggaattgaactgatatttagcgccgccagtctgttcagcttcgccagtttgttcgttaagcagcaataa

SEQ ID NO: 756550 - DNA, 75 bp, synthetic construct
  source 1..75: mol_type = other DNA
gagctgggcatttttgccattgcggcatttattgccggtttgttctgtgttgcaggggttattcgcctgatgagt

SEQ ID NO: 756551 - DNA, 75 bp, synthetic construct
  source 1..75: mol_type = other DNA
gtttcgtcccggcgcggaactgatgcacctctttatgcgcggtcgcgttctgcttgagcctgaaccagaagaaat

SEQ ID NO: 756552 - DNA, 75 bp, synthetic construct
  source 1..75: mol_type = other DNA
aatggcgagttgttctatggacggcgcggaacgttaacccatttctccttacaacaagcgatgtgtgaactggaa

SEQ ID NO: 756553 - DNA, 75 bp, synthetic construct
  source 1..75: mol_type = other DNA
gtcatgcgctgcctggtctcggtaaccagtggctggtgctgctgaaagataccgcgctggtcagtttgattagtg

SEQ ID NO: 756554 - DNA, 75 bp, synthetic construct
  source 1..75: mol_type = other DNA
ttgagaacttcgacgttagcccgttcctttgtggtgtcatcgctctgtcactgctgtatgccgcctatgcctcgc

SEQ ID NO: 756555 - DNA, 75 bp, synthetic construct
  source 1..75: mol_type = other DNA
aacagggcgatcatgtgttgatgaccaataccgcctacgaaccgagtcaggatttctgtagcaaaatcctcagta

SEQ ID NO: 756556 - DNA, 75 bp, synthetic construct
  source 1..75: mol_type = other DNA
gcggaacgttaacccacttctcgttacaagaagcaatgtgcgaactggaaggtggcgccggctgtgcactgtttc

SEQ ID NO: 756557 - DNA, 75 bp, synthetic construct
  source 1..75: mol_type = other DNA
ggcgatcatgtgttgatgaccaacaccgcctatgaaccgagtcaggatttctgtagcaaaatcctcagcaaactg

SEQ ID NO: 756558 - DNA, 75 bp, synthetic construct
  source 1..75: mol_type = other DNA
ttcccggatgtccccatgacactgtatgaagccattgtccgcgactataccggcaggacaccggaagcacgggag

SEQ ID NO: 756559 - DNA, 75 bp, synthetic construct
  source 1..75: mol_type = other DNA
cgatgtgtttgaaccgaaaccggaccgggaggtcatgaatgcagagcggctgttcagtacggcgcgggagctgcg

SEQ ID NO: 756560 - DNA, 75 bp, synthetic construct
  source 1..75: mol_type = other DNA
gatcaggaaccacagttacacacgcatgcggtggtggctaatgtcacgcagcataacggcgaatggaagacactt

SEQ ID NO: 756561 - DNA, 75 bp, synthetic construct
  source 1..75: mol_type = other DNA
aaatctggctggtcgccggtgccacggatatgcgtaaatccttaagcggactgggcgaacagatacaacacgttc

SEQ ID NO: 756562 - DNA, 75 bp, synthetic construct
  source 1..75: mol_type = other DNA
ggcgatctttattctttcagtctgatgtctgccggggcggcatcagcctggcatgatgttgcgcttgagttgact

SEQ ID NO: 756563 - DNA, 75 bp, synthetic construct
  source 1..75: mol_type = other DNA
tgttcagtacggcgcgggaactgcgggacgtggcggcaggccgagccgttcttcgtcaggcggggctgtccgggg

SEQ ID NO: 756564 - DNA, 75 bp, synthetic construct
  source 1..75: mol_type = other DNA
gttaagcatctacagccaaataccaaagtggtttttctggaatcaccaggctccatcaccatggaagtccacgac

SEQ ID NO: 756565 - DNA, 75 bp, synthetic construct
  source 1..75: mol_type = other DNA
ggataatgtgtatcaccggattgccggtatcagcaaggatgacgggctgataaccctgcaggatgcggaaggtaa

SEQ ID NO: 756566 - DNA, 75 bp, synthetic construct
  source 1..75: mol_type = other DNA
gctgttcctgctcgatgagagctcaatggtgggcaataccgacatggcacgggcatacgccctgattgcggccgg

SEQ ID NO: 756567 - DNA, 75 bp, synthetic construct
  source 1..75: mol_type = other DNA
gcgcgagcgccctatcccactgggcgtttccagtcgccatatacatctttcaacagcggattatttgcgtctttt

SEQ ID NO: 756568 - DNA, 75 bp, synthetic construct
  source 1..75: mol_type = other DNA
gttgcccgggaaaatctgctgcaggagcgtctgcagcagatggagcgggatatggtccgtgacctgcagaaagag

SEQ ID NO: 756569 - DNA, 75 bp, synthetic construct
  source 1..75: mol_type = other DNA
cacgcgccggtatcgatgaggccatcagtcgtgagcagcttatccccctcgaccgtgagaaggggctgttcacat

SEQ ID NO: 756570 - DNA, 75 bp, synthetic construct
  source 1..75: mol_type = other DNA
gccggtgagctggggaaagagcaggtcatggtgcctgtcctgaatacagcgaatatacgcgacggggaactgcgt

SEQ ID NO: 756571 - DNA, 75 bp, synthetic construct
  source 1..75: mol_type = other DNA
atggcctatgaacgtgagagccttatcgaaaagcacctcgtcgctgaagtgaaaaaggctggcggtgtggccttt

SEQ ID NO: 756572 - DNA, 75 bp, synthetic construct
  source 1..75: mol_type = other DNA
tcgaaaagcacctcgtcgctgaagtaaaaaaggctggcggggttgcctttaagttcgtatcccccggtcgccgct

SEQ ID NO: 756573 - DNA, 75 bp, synthetic construct
  source 1..75: mol_type = other DNA
gaatgtaaatcccccggcaaaccaccacgacctgaccagttgcgcacacatgaacgtctgcgaaagctgggcttt

SEQ ID NO: 756574 - DNA, 75 bp, synthetic construct
  source 1..75: mol_type = other DNA
ctggaaatcgcttctggcgtaattgtcgcgcaacggcatatccatatgtctccgcttgatgccctgatttatggc

SEQ ID NO: 756575 - DNA, 75 bp, synthetic construct
  source 1..75: mol_type = other DNA
cacgacctgatcagttgcgcgaacatgaacgactgcgcgcactgggctttagcgtggtggtactagatagcaaaa

SEQ ID NO: 756576 - DNA, 75 bp, synthetic construct
  source 1..75: mol_type = other DNA
agtgaaaaaagctggcggggttgcctttaagttcgtatctcccggtcgccgctcggtaccggatcgcattgttct

SEQ ID NO: 756577 - DNA, 75 bp, synthetic construct
  source 1..75: mol_type = other DNA
ctgtgagcgattcaccattcacggcactgaagctggagaacggctgggtggaaacgcccgggcattccgtcagcg

SEQ ID NO: 756578 - DNA, 75 bp, synthetic construct
  source 1..75: mol_type = other DNA
taccgacaaggataattactatgtactgggcagcatgggagaacgctgggccggcaagggggctgaacagcttgg

SEQ ID NO: 756579 - DNA, 75 bp, synthetic construct
  source 1..75: mol_type = other DNA
tcagcgcccggggtgatgaaattccgccgccgcgctccatcacgttccatatctggacggcgtacagtccgttta

SEQ ID NO: 756580 - DNA, 75 bp, synthetic construct
  source 1..75: mol_type = other DNA
tcatggtgcctgtcctgaacacagcgaatatacgtgacggagaactgcgtcgtctctccacctgggagaaaaacc

SEQ ID NO: 756581 - DNA, 75 bp, synthetic construct
  source 1..75: mol_type = other DNA
gaatcccggagccatcactggtggccgtgtgtggggggatatcccggataacagcgtccagccgggggccggaaa

SEQ ID NO: 756582 - DNA, 75 bp, synthetic construct
  source 1..75: mol_type = other DNA
accgctatcagtctgcagaaagcctggcttcacacgccggcacagcaggctattcatctggcgcttcctgtggtg

SEQ ID NO: 756583 - DNA, 75 bp, synthetic construct
  source 1..75: mol_type = other DNA
ggcttcacacgccggcacagcaggccattcatctggcccttcctgtgctggaaagtaaaaacctggccttcagca

SEQ ID NO: 756584 - DNA, 75 bp, synthetic construct
  source 1..75: mol_type = other DNA
ccgcatgcaggatggcagtaataagcatcgtcccggctacgacctgaccttctccgcccccaaaagtgtctccgt

SEQ ID NO: 756585 - DNA, 75 bp, synthetic construct
  source 1..75: mol_type = other DNA
ccggaaatggcgaaccggtcacggcagaggtgctggcacagcggcaggctgaagaggccatccgccgtgaaacgg

SEQ ID NO: 756586 - DNA, 75 bp, synthetic construct
  source 1..75: mol_type = other DNA
ctggggaaagagcaggtcatggtgcctgtcctgaacacagcgaatatacgtgacggggagctgcgtcgtctctcc

SEQ ID NO: 756587 - DNA, 75 bp, synthetic construct
  source 1..75: mol_type = other DNA
gggatgcgcagggtgaaacgcaggtggtgcgtatttcctccctggacagcagctggtcgctgttccggccggaaa

SEQ ID NO: 756588 - DNA, 75 bp, synthetic construct
  source 1..75: mol_type = other DNA
taatgtgtatcaccggattgccggtatcagcaaggatgacgggctgataaccctgcaggatgcggaaggtaacac

SEQ ID NO: 756589 - DNA, 75 bp, synthetic construct
  source 1..75: mol_type = other DNA
cagcggcaggctgaagaggccatccgccgtgaaacggaacgccgcgcagatgaaattgtccgtaaaatggcagag

SEQ ID NO: 756590 - DNA, 75 bp, synthetic construct
  source 1..75: mol_type = other DNA
gactggccgggggcgacagtccggcacggtttattgcaccggggcgcaaatatccgcagccgtatgtggccctgc

SEQ ID NO: 756591 - DNA, 75 bp, synthetic construct
  source 1..75: mol_type = other DNA
ctggcacagcggcaggctgaagaggccatccgccgtgaaacggaacgccgtgcggatgaaattgtccgtaaaatg

SEQ ID NO: 756592 - DNA, 75 bp, synthetic construct
  source 1..75: mol_type = other DNA
tctgctgcaggagcgtctgcagcagatggagcgggatatggttcgtgacctgcagaaagagaaaaccctgggcgg

SEQ ID NO: 756593 - DNA, 75 bp, synthetic construct
  source 1..75: mol_type = other DNA
accggaagcacgggagcagacgctgattgtcacacacctgaatgaggaccggcgcgtactgaacagcatgattca

SEQ ID NO: 756594 - DNA, 75 bp, synthetic construct
  source 1..75: mol_type = other DNA
ggggatatcccggacaacagcgtccagccgggagccggaaatggcgaaccggtcacggcagaggtactggcacag

SEQ ID NO: 756595 - DNA, 75 bp, synthetic construct
  source 1..75: mol_type = other DNA
cgggaaaaactgaaagagcaggttgaggcgctgggctatgaaactgaagtggtcggtaagcacggtatgtgggaa

SEQ ID NO: 756596 - DNA, 75 bp, synthetic construct
  source 1..75: mol_type = other DNA
cacacagatggcaatggacaacgccaccctgaacggtctggcccgcagtggtcgtgatgtccggctgtattcctc

SEQ ID NO: 756597 - DNA, 75 bp, synthetic construct
  source 1..75: mol_type = other DNA
aagtatgccggggtgaacacgtatcgctggcagggcggagaacagcgaccggcaaccatcatcagtgaaccggac

SEQ ID NO: 756598 - DNA, 75 bp, synthetic construct
  source 1..75: mol_type = other DNA
ggattgccggtatcagtaaggatgacgggctgataaccctggaggatgcggaaggtaacacgcggctgatttcgc

SEQ ID NO: 756599 - DNA, 75 bp, synthetic construct
  source 1..75: mol_type = other DNA
ggaagcggtccgggaggttgcccgggaaaatctgctgcaggagcgactgcagcagatggagcgggatatggtccg

SEQ ID NO: 756600 - DNA, 75 bp, synthetic construct
  source 1..75: mol_type = other DNA
agatgaaattgtccgtaaaatggcagagaacaaacctgacctgccggatggcaaaacagagcaggctgtcaggga

SEQ ID NO: 756601 - DNA, 75 bp, synthetic construct
  source 1..75: mol_type = other DNA
atggcgaaccggtcacggcagaggtactggcacagcggcaggctgaagaggccatccgccgtgaaacggaacgcc

SEQ ID NO: 756602 - DNA, 75 bp, synthetic construct
  source 1..75: mol_type = other DNA
gtgtggggggatatcccggataacagcgtccagccgggggccggaaatggtgaaccggttacagctgaagtgctg

SEQ ID NO: 756603 - DNA, 75 bp, synthetic construct
  source 1..75: mol_type = other DNA
gagcgcaactaaaacctgatggcaagctatttgaatttagtcattctgcaccgttttatgtgtccagggcgatta

SEQ ID NO: 756604 - DNA, 75 bp, synthetic construct
  source 1..75: mol_type = other DNA
gagcgcaactaaaacctgatggcaagctatttgaatttagtaactctgcaccgtttaatgtgtccagagcgatta

SEQ ID NO: 756605 - DNA, 75 bp, synthetic construct
  source 1..75: mol_type = other DNA
atggtgtcgggcagatttacggcatgtatgtcctgactgaaacgaatacgacccgctccgagtttgatcgctacg

SEQ ID NO: 756606 - DNA, 75 bp, synthetic construct
  source 1..75: mol_type = other DNA
aaaacatgatttgcaatggactgtttgaaatggcttcgttgttacgcgatggcaaaagtttcagtcacagcgaag

SEQ ID NO: 756607 - DNA, 75 bp, synthetic construct
  source 1..75: mol_type = other DNA
gatattgataatgctactttttattccgtgttattcggattaaaaatactttgtgctgaaacattcccaggtttc

SEQ ID NO: 756608 - DNA, 75 bp, synthetic construct
  source 1..75: mol_type = other DNA
tccgtgattgcccgttgccgttttcatcgagtaggcagcctggcggctgcggcttgtcatggcctggaattaccg

SEQ ID NO: 756609 - DNA, 75 bp, synthetic construct
  source 1..75: mol_type = other DNA
actgactcttgaacgctgtgatgaggatttgcgggagcgcctgcaatcctcatcgttcagcgatatgttgtccgg

SEQ ID NO: 756610 - DNA, 75 bp, synthetic construct
  source 1..75: mol_type = other DNA
gatctgcgtgaacgtcttcagtcctcgtcgcttggtgatcttgcgaataacgttaaaggtgccctgaataatctg

SEQ ID NO: 756611 - DNA, 75 bp, synthetic construct
  source 1..75: mol_type = other DNA
agttccctctgcgactggtagaagggatgcgtctgagcgactacctcaagcaattgcgtgaggccccgtatatca

SEQ ID NO: 756612 - DNA, 75 bp, synthetic construct
  source 1..75: mol_type = other DNA
gtcgttgttgaccacgcaggcatatacaggacgtccttggcctttgattgatggcgtcgggcagatttacggcat

SEQ ID NO: 756613 - DNA, 75 bp, synthetic construct
  source 1..75: mol_type = other DNA
tcagcagttacagcaaaacaaaagctggcggcatgtaaaaaatgaacgcgttaaccgttcagcaagctggcagta

SEQ ID NO: 756614 - DNA, 75 bp, synthetic construct
  source 1..75: mol_type = other DNA
tttttgagctgcgcacactgccgcatcagcagttacagcaaaataaaagctggcggcatgtgaaaaatgaacgcg

SEQ ID NO: 756615 - DNA, 75 bp, synthetic construct
  source 1..75: mol_type = other DNA
ctaaagcactcggttctaaccctgtgtggcaaaacatggtggctatgatgcttactgggaaactagttccttcaa

SEQ ID NO: 756616 - DNA, 75 bp, synthetic construct
  source 1..75: mol_type = other DNA
gcacatgaaatactcgggcgcaccctggacgagatgccgccgcagaccagaaagctgttgctgctgatccagaca

SEQ ID NO: 756617 - DNA, 75 bp, synthetic construct
  source 1..75: mol_type = other DNA
cgccatgaccgggcagagcctgttctacctcggtgaaaccaacctgcaacacaagatcctcgccatcgcggaaga

SEQ ID NO: 756618 - DNA, 75 bp, synthetic construct
  source 1..75: mol_type = other DNA
cacgcagcttaagatccacctggcgcggctggtcgaaatggaatacctgctggtccaccgtcgcgggctgacgtt

SEQ ID NO: 756619 - DNA, 75 bp, synthetic construct
  source 1..75: mol_type = other DNA
cgcctacgacaacgatccggcgggcaatgaggcagcggtgaaactggcttcttccttagccgctgacgggatcgc

SEQ ID NO: 756620 - DNA, 75 bp, synthetic construct
  source 1..75: mol_type = other DNA
gagaacaccgccccggagatgagcgacacggatcgggaggcggcgcttgagttgttgcgcgatgagtgtcttgcc

SEQ ID NO: 756621 - DNA, 75 bp, synthetic construct
  source 1..75: mol_type = other DNA
agcactgcaaacccggcgaggtacgcttcacgcgccgggagatccgcgacttcacacagtggagcgacaaccagt

SEQ ID NO: 756622 - DNA, 75 bp, synthetic construct
  source 1..75: mol_type = other DNA
caccaccgccatcgacgttgacgaagagttactcaaccgttgcctggtgctgacggtgaacgagtcgcgggagca

SEQ ID NO: 756623 - DNA, 75 bp, synthetic construct
  source 1..75: mol_type = other DNA
tcaagctgttgcagtcggacggagaactgaccatcgccagtacgggcaaggacgatgccagcggcaacctggtga

SEQ ID NO: 756624 - DNA, 75 bp, synthetic construct
  source 1..75: mol_type = other DNA
ggcggtgctgatccagtcatcgagcgcggcgggtaagtcctcgctgatggatgcggtgctgaacctgatcccacc

SEQ ID NO: 756625 - DNA, 75 bp, synthetic construct
  source 1..75: mol_type = other DNA
acctggcgcggctggttgaaatggaatacctgctggtccaccgtcgcgggctgacgttctgctatgaactgctgt

SEQ ID NO: 756626 - DNA, 75 bp, synthetic construct
  source 1..75: mol_type = other DNA
gtggaatgaacaggcgctgatcgggtcatccgtggttgtcctgtgcgaatcgctgatcgatgccatgtcgttctg

SEQ ID NO: 756627 - DNA, 75 bp, synthetic construct
  source 1..75: mol_type = other DNA
tgacggcggcgtatctggcggcggtatcgcgcaaactggacaggccgctggcggtgctgatccagtcatcgagcg

SEQ ID NO: 756628 - DNA, 75 bp, synthetic construct
  source 1..75: mol_type = other DNA
gaaggctgctgcgcatccggcaaaaacgccgtatctctattttgtggccgatggtaaaggtggtcacacgtttaa

SEQ ID NO: 756629 - DNA, 75 bp, synthetic construct
  source 1..75: mol_type = other DNA
aaatggcttcctggctggttgagtggaaaaaggccactgaaacgcaatggcttaaagattcacccagtcacagcc

SEQ ID NO: 756630 - DNA, 75 bp, synthetic construct
  source 1..75: mol_type = other DNA
gtgctgtactccagcgcctctggtaatgtgaatacgccaaccctgcaaatgcaactgatgctggtccagactggc

SEQ ID NO: 756631 - DNA, 75 bp, synthetic construct
  source 1..75: mol_type = other DNA
cgtggcagatgacgtcattgataataacggcgcaccggatgctatcgcatcggatgttgcccgcctgcacgcaca

SEQ ID NO: 756632 - DNA, 75 bp, synthetic construct
  source 1..75: mol_type = other DNA
acagcgtctggacggtgatggcggtttccggtgacagtgtcacgctttctgacggacagcagacccgggtgattc

SEQ ID NO: 756633 - DNA, 75 bp, synthetic construct
  source 1..75: mol_type = other DNA
cgctgacggatgtagggcaatcaatgcttgatgagctggggccttatattgatgggattcagggaacattgcagc

SEQ ID NO: 756634 - DNA, 75 bp, synthetic construct
  source 1..75: mol_type = other DNA
gttgtgaaaaatgtcactgtcagccagtcctgcggtaagtggtacatcagtattcagacagaaagtgaagtatcc

SEQ ID NO: 756635 - DNA, 75 bp, synthetic construct
  source 1..75: mol_type = other DNA
actgtttaaccacgacaccagtcgcgatcaggaaccacagttacacacgcatgcggtggtggccaatgtcacgca

SEQ ID NO: 756636 - DNA, 75 bp, synthetic construct
  source 1..75: mol_type = other DNA
gtgaaggtcgtccgtggaatcccggtaccatcaccggtggtcgcgtgtggggggatatcccggacaacagcgttc

SEQ ID NO: 756637 - DNA, 75 bp, synthetic construct
  source 1..75: mol_type = other DNA
gagtggatgcagacgctgaaggaaaccgggttcgacatccgggcgtatcgtgacgcggcggaccaacgggcggag

SEQ ID NO: 756638 - DNA, 75 bp, synthetic construct
  source 1..75: mol_type = other DNA
ccgggccttacgcgagcggatcttcgccaacccggaagagaaaaactggcttaatgccctgctacatccgttgat

SEQ ID NO: 756639 - DNA, 75 bp, synthetic construct
  source 1..75: mol_type = other DNA
tgccgaaactgggctggatgcgctaccggaacagccgtcaggtcacgggtgttgtgaaaaatgtcactgtcagcc

SEQ ID NO: 756640 - DNA, 75 bp, synthetic construct
  source 1..75: mol_type = other DNA
gcacaggtcagcggggtacgggaacaggccatactgacacaggccattcgcagtgagctgaaaacgcagggcgtg

SEQ ID NO: 756641 - DNA, 75 bp, synthetic construct
  source 1..75: mol_type = other DNA
gtggccagcggtgacacggaccagctgcaggccatcgcgcccggtcagcctttccgtctccagcagacgcgcagt

SEQ ID NO: 756642 - DNA, 75 bp, synthetic construct
  source 1..75: mol_type = other DNA
gctgaacctgaaacgggtaagcgaggacatacgggaaaagctggccgaaactaccaccgacgatctcttctctct

SEQ ID NO: 756643 - DNA, 75 bp, synthetic construct
  source 1..75: mol_type = other DNA
atggcgtcgggcagatttacggcatgtatgtcctgaccgaaacgaatacgacccgctccgagtttgatcgctacg

SEQ ID NO: 756644 - DNA, 75 bp, synthetic construct
  source 1..75: mol_type = other DNA
ccagccagagaacgcccgccgtgtcggccagcatctgttgcagatcatgagcggttttatcgaactgaccgatga

SEQ ID NO: 756645 - DNA, 75 bp, synthetic construct
  source 1..75: mol_type = other DNA
ccgataagatcatcaatcgcccacgggtatttcaatggctgctgcgtatcgagccggatctttctcatttcaaag

SEQ ID NO: 756646 - DNA, 75 bp, synthetic construct
  source 1..75: mol_type = other DNA
gatgcgtctgagcgattacctcaaacaattgcgtgaggcaccgtatgtcaagcacacgctgagcgacgataaata

SEQ ID NO: 756647 - DNA, 75 bp, synthetic construct
  source 1..75: mol_type = other DNA
atggtgtcgggcagatttacggcatgtatgtcctgaccggaacgaatacgacccgttccgagtttgatcgctacg

SEQ ID NO: 756648 - DNA, 75 bp, synthetic construct
  source 1..75: mol_type = other DNA
cgatgtgctggagccgaaagctgaccgggaggttatgaatgcagagcggctgttcagtacggcacgggaactgcg

SEQ ID NO: 756649 - DNA, 75 bp, synthetic construct
  source 1..75: mol_type = other DNA
cacttcacacgccggcacagcaggccattcatctggcccttcctgtgctggaaagtaaaaacctggccttcagcc

SEQ ID NO: 756650 - DNA, 75 bp, synthetic construct
  source 1..75: mol_type = other DNA
agtaaaaacctggccttcagcatggtggacctgctgacagaggcgaagtcgtttgctgcagaaggaaccggtttt

SEQ ID NO: 756651 - DNA, 75 bp, synthetic construct
  source 1..75: mol_type = other DNA
cgcgatcgtgcgcatcagatccgtcatgcgtttgatcgcgccacttttgccctgatcgacaagttgaaaaacgat

SEQ ID NO: 756652 - DNA, 75 bp, synthetic construct
  source 1..75: mol_type = other DNA
gccggtgtgggtaagaccacacagttccgggcggtgatgtcagccgtgaacatgctgccggcgagtgagcgtccc

SEQ ID NO: 756653 - DNA, 75 bp, synthetic construct
  source 1..75: mol_type = other DNA
cggagagtgtactgcgtgaaccacaacgggagcgggaagctgtccgggaagttgcccgggaaaatctgctgcagg

SEQ ID NO: 756654 - DNA, 75 bp, synthetic construct
  source 1..75: mol_type = other DNA
actctccaggaaacccggggcggttcaagcggacgggcacggcattttcagataatgcggccctgtttgcccgct

SEQ ID NO: 756655 - DNA, 75 bp, synthetic construct
  source 1..75: mol_type = other DNA
ttttaccgctggcaatcggtaaatttaatgagctgtatcccaatattaaagtgcggattctggaacaaggcacga

SEQ ID NO: 756656 - DNA, 75 bp, synthetic construct
  source 1..75: mol_type = other DNA
gtttcgttttcaatcgtgctctggcgcttcagaatgagaaccatgaggcagggaacaaatatattccttacccaa

SEQ ID NO: 756657 - DNA, 75 bp, synthetic construct
  source 1..75: mol_type = other DNA
ctttcgacgtcattaggactggtggaggcgggactggggatttcggcgcttcctggcctggcaatgcctcatgcg

SEQ ID NO: 756658 - DNA, 75 bp, synthetic construct
  source 1..75: mol_type = other DNA
tgtgaaaaatgtcactgtcagccagtcctgcggtaagtggtacatcagtattcagactgaaaatgaagtatcaac

SEQ ID NO: 756659 - DNA, 75 bp, synthetic construct
  source 1..75: mol_type = other DNA
cgttgcgcgtgctgtggtcatacagcgaaagaaaatcgcctgtcacaaagtcaattcagatgccaggtatgtgga

SEQ ID NO: 756660 - DNA, 75 bp, synthetic construct
  source 1..75: mol_type = other DNA
actgcattcctgtatcgcaaatatccgcagggactaccttcacaaagtcacaacggccgtcagcaaaaaccacgc

SEQ ID NO: 756661 - DNA, 75 bp, synthetic construct
  source 1..75: mol_type = other DNA
ttgagtacaagcagctctggcgtggcggtcaggtgcttgctgttccgccagcgtacacaagccagcgttgcgcgt

SEQ ID NO: 756662 - DNA, 75 bp, synthetic construct
  source 1..75: mol_type = other DNA
attgtgaaaaatgtcactgtcagccagtcctgcggtaaatggtacatcagtattcagacagaaagtgaagtatcc

SEQ ID NO: 756663 - DNA, 75 bp, synthetic construct
  source 1..75: mol_type = other DNA
gaaaaatgccactgaaacccaatggcttaaagatgccccatcacagccattgcagcagtcactgaaagaccttga

SEQ ID NO: 756664 - DNA, 75 bp, synthetic construct
  source 1..75: mol_type = other DNA
ttccccgcgtgatctctatatgcgcccgcgcacgccgtttgttgccgggttcgtcgggacatcgaatgtttttga

SEQ ID NO: 756665 - DNA, 75 bp, synthetic construct
  source 1..75: mol_type = other DNA
agtcctgcggtaagtggcacatcagtattcagacagaaagtgaagtatcaactccggttcacccttcagcatcaa

SEQ ID NO: 756666 - DNA, 75 bp, synthetic construct
  source 1..75: mol_type = other DNA
tctgttcagcccacgcgtgcgtgcaaccactaccggagcggatatcctgatcctgtcgctgctcgttatccagtg

SEQ ID NO: 756667 - DNA, 75 bp, synthetic construct
  source 1..75: mol_type = other DNA
ccccaaaaagattaaaaaaacaccacaaaacggatgtttcttcaacaccacttttgctccatatgaacggaaccg

SEQ ID NO: 756668 - DNA, 75 bp, synthetic construct
  source 1..75: mol_type = other DNA
tcagatcgcggaaaagtaaatctgaacaaaaataattttgacgcagtcctctccgaatattccccaaaagttaat

SEQ ID NO: 756669 - DNA, 75 bp, synthetic construct
  source 1..75: mol_type = other DNA
cagatgccagatatgtggatatacagcgaacgccgatgtaaatggcgctcgtaacattttagcggcggggcacgc

SEQ ID NO: 756670 - DNA, 75 bp, synthetic construct
  source 1..75: mol_type = other DNA
ctggcagaagcagaaacgcaaaatacagcgactgcattcctgtatcgcaaatatccgcagggactaccttcacaa

SEQ ID NO: 756671 - DNA, 75 bp, synthetic construct
  source 1..75: mol_type = other DNA
caaaatccttcaggatgtcatcgatcgcaatatccgtcctggacaggctgccgaaatgctgggcatcacgccacg

SEQ ID NO: 756672 - DNA, 75 bp, synthetic construct
  source 1..75: mol_type = other DNA
atgctgaattattaccttacatatttccatatttcttttggtatcctgtcatataactttccggtgattagttct

SEQ ID NO: 756673 - DNA, 75 bp, synthetic construct
  source 1..75: mol_type = other DNA
ggctgatatctcgccgtcagtacgcctgaatgtggagaacatacttgccggtgatggtactgaagagagcatcag

SEQ ID NO: 756674 - DNA, 75 bp, synthetic construct
  source 1..75: mol_type = other DNA
gtgttgtgaaaaatgtcacggtcagccagtcctgcggtaagtggtacatcagtattcagacagaaagtgaagtat

SEQ ID NO: 756675 - DNA, 75 bp, synthetic construct
  source 1..75: mol_type = other DNA
tctgcactcacacattgccaatatccggcgcgactaccttcacaaagtcaccagtgaaatcagcaaaaaccacgc

SEQ ID NO: 756676 - DNA, 75 bp, synthetic construct
  source 1..75: mol_type = other DNA
accgtataccagccagtcaatagctttaaagcaaaccagcgtaagctggctatgcttcaacggcagttaagccgc

SEQ ID NO: 756677 - DNA, 75 bp, synthetic construct
  source 1..75: mol_type = other DNA
gaagtatcaactccggttcacccttcagcatcaatggtcggactggatgctggcgtggctaaactcgccacgctg

SEQ ID NO: 756678 - DNA, 75 bp, synthetic construct
  source 1..75: mol_type = other DNA
ctgtcagccagtcctgcggtaagtggtacatcagtattcagacagaaagtgaagtatcaactccggttcaccctt

SEQ ID NO: 756679 - DNA, 75 bp, synthetic construct
  source 1..75: mol_type = other DNA
tgtggtcatacagcgaaagaaaatcgtctgtcacaaagtaaattcagatgccaggtatgtggatatacagcgaac

SEQ ID NO: 756680 - DNA, 75 bp, synthetic construct
  source 1..75: mol_type = other DNA
cagcaacaactggcagaagcagaaacgcaaaatacagcgactgcattcctgtatcgcaaatatccgcagggacta

SEQ ID NO: 756681 - DNA, 75 bp, synthetic construct
  source 1..75: mol_type = other DNA
agtgatggcatactggatgtctgccatggcggtgtgctccgtgacaccaccaccctgttggataaaagtatactg

SEQ ID NO: 756682 - DNA, 75 bp, synthetic construct
  source 1..75: mol_type = other DNA
gcagaatcaaaggatatcagtctggataatggtatgaaggcgaaagcaggaacaaccaaatcacttcagggtgaa

SEQ ID NO: 756683 - DNA, 75 bp, synthetic construct
  source 1..75: mol_type = other DNA
tccagcggcggtgttgctacgagcaccctcgttaacagcggagggagccaatatgtctacagcggcggcaatgcg

SEQ ID NO: 756684 - DNA, 75 bp, synthetic construct
  source 1..75: mol_type = other DNA
aacaccgccaaagaggtgagcttgtcaatgcagcgtctggaacaggcaggcgtcaatattaaaggcgcaatcctc

SEQ ID NO: 756685 - DNA, 75 bp, synthetic construct
  source 1..75: mol_type = other DNA
ctgttaagcactccagtttatcaggcagatactctggtccaggttgagcagaaacagggcaacgtcattctcagt

SEQ ID NO: 756686 - DNA, 75 bp, synthetic construct
  source 1..75: mol_type = other DNA
atgatggagacggagaataacattctaatgatcaccggtgcgacgccagacagtggtaaacgtttgtcagttcaa

SEQ ID NO: 756687 - DNA, 75 bp, synthetic construct
  source 1..75: mol_type = other DNA
accagcttatcaattgttggcgagatgacgctgaccatcgaccattgtctgctggtttccggtacgactgattta

SEQ ID NO: 756688 - DNA, 75 bp, synthetic construct
  source 1..75: mol_type = other DNA
cgctgcgtgaaaaaatcagtgcgctggatgaaaaattactgacgttactggcagagcgacgtgagttggccgttg

SEQ ID NO: 756689 - DNA, 75 bp, synthetic construct
  source 1..75: mol_type = other DNA
gcgcattgaggcaaatcagcgacaaaacttcacccgatttgtcgtgctggcgcgtaaagccattaacgtttcaga

SEQ ID NO: 756690 - DNA, 75 bp, synthetic construct
  source 1..75: mol_type = other DNA
acggaggaaacagcaaggttggcagcacggggggggggctgtatgcaacatggtttgataatgacggttattacg

SEQ ID NO: 756691 - DNA, 75 bp, synthetic construct
  source 1..75: mol_type = other DNA
gttggagaacggtggtagtctgactgtccttccaggacattctgttaaagataccatggtaggcagtggtggtca

SEQ ID NO: 756692 - DNA, 75 bp, synthetic construct
  source 1..75: mol_type = other DNA
tggaggcagtgctacagacacattaattagtggcggagaccagcatgtctatagtggaggcagtgctacagacac

SEQ ID NO: 756693 - DNA, 75 bp, synthetic construct
  source 1..75: mol_type = other DNA
aagtctgaagccagatttccaggcggtttctctgtcgcttgggagtctgtcaggtagcgggacctttcggatgaa

SEQ ID NO: 756694 - DNA, 72 bp, synthetic construct
  source 1..72: mol_type = other DNA
atgaaacgacatctgaatacctgctacaggctggtatggaatcacatgacgggcgctttcgtggttgcctcc

SEQ ID NO: 756695 - DNA, 75 bp, synthetic construct
  source 1..75: mol_type = other DNA
ttccggccggtttcactggtgtctgaaagtctttcaggtaacgggacattccggatgaacacggatatcgcatct

SEQ ID NO: 756696 - DNA, 75 bp, synthetic construct
  source 1..75: mol_type = other DNA
caccaaatatgtgttgctgaatccgtatatctggttgctttcgttctgctacgtgctggtctacgtggttcgcgc

SEQ ID NO: 756697 - DNA, 75 bp, synthetic construct
  source 1..75: mol_type = other DNA
ccttcttcaaatcagttttgtgagagggttttctaataaaatccataaaaaatacagtttgcataggttaaagga

SEQ ID NO: 756698 - DNA, 75 bp, synthetic construct
  source 1..75: mol_type = other DNA
acaaagatttgtaaggcattttataattatgagttaaatcgagatttttctttattaattgatagggttgttttt

SEQ ID NO: 756699 - DNA, 75 bp, synthetic construct
  source 1..75: mol_type = other DNA
ctatcaaaggctctgagattaacaaatgagcaaaaaaaaatcttattaggaataagttttgaaagaggctttaat

SEQ ID NO: 756700 - DNA, 75 bp, synthetic construct
  source 1..75: mol_type = other DNA
atactatctgaacaaggaaaatactgactggtacctgaaagctgacagtagtcagccgggaacagataatccggt

SEQ ID NO: 756701 - DNA, 75 bp, synthetic construct
  source 1..75: mol_type = other DNA
atacctggattcagccttatatccgtagtacagcattcatggcagaggcacaggatatcagtctggataacggta

SEQ ID NO: 756702 - DNA, 75 bp, synthetic construct
  source 1..75: mol_type = other DNA
cggtggtggacatcagagtgtttacatctctggaagcgttgcagaaacgaacattaacagcggtggcatgctgca

SEQ ID NO: 756703 - DNA, 75 bp, synthetic construct
  source 1..75: mol_type = other DNA
atcgccattgccgccgggatttccgcactgctgttactgccctttttgaacgcccagacaccgcgcgaagcgtga

SEQ ID NO: 756704 - DNA, 75 bp, synthetic construct
  source 1..75: mol_type = other DNA
ccgacgcgccgctgataagcgataaacgtgaaattgatgcccgctatcgttactggcgtcggcatattttgctga

SEQ ID NO: 756705 - DNA, 75 bp, synthetic construct
  source 1..75: mol_type = other DNA
aggtgggcaagtatttttctctgaatgagaatacctggttacttccttatgtccgaacaacagctcttgctgtga

SEQ ID NO: 756706 - DNA, 75 bp, synthetic construct
  source 1..75: mol_type = other DNA
aagtcgtgtggaacgtattgcctttgtttgtgatgcgggaatgggctccagcgcaatgggggcaaccaccttccg

SEQ ID NO: 756707 - DNA, 75 bp, synthetic construct
  source 1..75: mol_type = other DNA
ttccgtaaacgcctggaaaaagcggggctggcaatagaagtaaaacattacgcgatagaaaacgtgcctgcggat

SEQ ID NO: 756708 - DNA, 75 bp, synthetic construct
  source 1..75: mol_type = other DNA
cagtcagccaatgcggttatccaacagacggcgaatggggtgcggacgcagacattactgatcggcggcgcggac

SEQ ID NO: 756709 - DNA, 75 bp, synthetic construct
  source 1..75: mol_type = other DNA
gctggatatggctgccacgctggcagtgcctttcacaggtgacgggtgcgatgctgcagagatcctgcgtacact

SEQ ID NO: 756710 - DNA, 75 bp, synthetic construct
  source 1..75: mol_type = other DNA
gctggatatggctgccacgctggcagtgcctttcactggtgacgggcgggatgctgcagagatcctgcgtacact

SEQ ID NO: 756711 - DNA, 75 bp, synthetic construct
  source 1..75: mol_type = other DNA
tggaggtttataccagagtgtttgcactggatatggctgccacgctggcagtgcctttcacaggtgacgggcggg

SEQ ID NO: 756712 - DNA, 75 bp, synthetic construct
  source 1..75: mol_type = other DNA
ggcagaaagcgtgctgacggaacaatccttctcccagtttgcgttatccaaccaggccaatgtctttaactctgc

SEQ ID NO: 756713 - DNA, 75 bp, synthetic construct
  source 1..75: mol_type = other DNA
gcccgtggaagaagatgcctataacactaaagtcattaccctttcacgtagcggttcgctgccggaagtgatcga

SEQ ID NO: 756714 - DNA, 75 bp, synthetic construct
  source 1..75: mol_type = other DNA
aaccgagaaaaactctgcggtctacggcatgttgacctcgctgaccattaccgccgggcaaaagaccgaagagac

SEQ ID NO: 756715 - DNA, 75 bp, synthetic construct
  source 1..75: mol_type = other DNA
taacggcgttatttattcccaccggctggctgccgaatgaacatttcgccaaaattgtcggcccgatgattacct

SEQ ID NO: 756716 - DNA, 75 bp, synthetic construct
  source 1..75: mol_type = other DNA
acgcggggcggtcatgggcggaataggtactattggtgtgatcgttggcgcagagatcccgatgttccttggctc

SEQ ID NO: 756717 - DNA, 75 bp, synthetic construct
  source 1..75: mol_type = other DNA
gtcattaccctttcacgtagtggttcgctgccggaagtgatcgaaaccagccatgactacgccaaagtgatggac

SEQ ID NO: 756718 - DNA, 75 bp, synthetic construct
  source 1..75: mol_type = other DNA
tcttccggaagcgggctgcttttccccgattcaaaaagcggggacagaatgatgcattccgctacccgcagggcg

SEQ ID NO: 756719 - DNA, 75 bp, synthetic construct
  source 1..75: mol_type = other DNA
tggccacttccacaggggccacaccggcctacctgctggccccggaagtgagtgcccttcttttctatatgccgg

SEQ ID NO: 756720 - DNA, 75 bp, synthetic construct
  source 1..75: mol_type = other DNA
aatatctaagattccatgaggaagaaggtgttcccagtgactcacgcatagatggttatacatgggcgaaaacga

SEQ ID NO: 756721 - DNA, 75 bp, synthetic construct
  source 1..75: mol_type = other DNA
cgagacttcagcgacagttaagccgcaaggtcaaattcagcaacaactggcagaagcagaaacgcaaaatacagc

SEQ ID NO: 756722 - DNA, 75 bp, synthetic construct
  source 1..75: mol_type = other DNA
acatctggtagttaatagagaaaatgatataaatgcactgcgacagacacgcgtttatacaacccgtgcaccgtg

SEQ ID NO: 756723 - DNA, 75 bp, synthetic construct
  source 1..75: mol_type = other DNA
gtgaccacccgcccccgccggcgggagccgttatggccggtcacggatgagacaatgcgcaactggctgaaacag

SEQ ID NO: 756724 - DNA, 75 bp, synthetic construct
  source 1..75: mol_type = other DNA
ggttccgctgacggatataagctatgtcaggcagatggaaagctggatgatcaccacccggccccgtcgtcgtga

SEQ ID NO: 756725 - DNA, 75 bp, synthetic construct
  source 1..75: mol_type = other DNA
caggtgcttgctgttccgccagcgtacacaagccagcgttgcgcgttctgtggtcatacagcgaaagataatcgc

SEQ ID NO: 756726 - DNA, 75 bp, synthetic construct
  source 1..75: mol_type = other DNA
caggtgcttgctgttccgccagcgtatacaagccagcgttgcgcgtcctgtggtcatacagcgaaagataatcgc

SEQ ID NO: 756727 - DNA, 75 bp, synthetic construct
  source 1..75: mol_type = other DNA
caggtgcttgctgttccgccagcgtaaacaagccagcgttgcgcgtactgtggtcatacagcgaaagagaatcgc

SEQ ID NO: 756728 - DNA, 75 bp, synthetic construct
  source 1..75: mol_type = other DNA
ctgggctggatgcgctaccgcaatagccgtcaggtcacgggtgttgtgaaaaatgtcactgtcagccagtcctgc

SEQ ID NO: 756729 - DNA, 75 bp, synthetic construct
  source 1..75: mol_type = other DNA
gtacaagcagctctggcgtggcggtcaggtactggcagtgccgccagcgtacacaagccagcgttgcgcgtgctg

SEQ ID NO: 756730 - DNA, 75 bp, synthetic construct
  source 1..75: mol_type = other DNA
caggtgcttgctgttccgccagcgtagacaagccagcgttgcgcgtgctgtggtcatacagcgaaagacaatcgc

SEQ ID NO: 756731 - DNA, 75 bp, synthetic construct
  source 1..75: mol_type = other DNA
atggtgcataacgtcaccgtggggaaagccgatctctcaaccacgctgcaagcgagccagaaaaagctggatgaa

SEQ ID NO: 756732 - DNA, 75 bp, synthetic construct
  source 1..75: mol_type = other DNA
cccggaggcgcgggaattaataaaaaaattcgatgaaacgctttttaatattcgtgacatgaatgcttatcatcg

SEQ ID NO: 756733 - DNA, 75 bp, synthetic construct
  source 1..75: mol_type = other DNA
gaaatttgctggcgatctgttccatactcgtccgctggaagaagaagcagacaccagtaactatgcgctgatccc

SEQ ID NO: 756734 - DNA, 75 bp, synthetic construct
  source 1..75: mol_type = other DNA
agatgaccgcccatactccatgtttccgttctgaagcgggctcttacggtcgtgacacccgtggtttgatccgta

SEQ ID NO: 756735 - DNA, 75 bp, synthetic construct
  source 1..75: mol_type = other DNA
gccggggtgtggatacgcagttccgccatatcaacattgcggaagctgatcacttcaaacagtttttgagtcaga

SEQ ID NO: 756736 - DNA, 75 bp, synthetic construct
  source 1..75: mol_type = other DNA
gccttcagttatagctacgcgctcagccggggtgtggataagcagttccgccatatcaacattgcggaagccgat

SEQ ID NO: 756737 - DNA, 75 bp, synthetic construct
  source 1..75: mol_type = other DNA
acaccgcgtcgtacacgcttcttgttgccgggagggaaaaaaacaccggggaagagtgggacgtcctggaattca

SEQ ID NO: 756738 - DNA, 75 bp, synthetic construct
  source 1..75: mol_type = other DNA
atgagccagacgcagtcgctgaaaaactggcacgccgaggctttaagctggatgtagataagctgggcgctcttg

SEQ ID NO: 756739 - DNA, 75 bp, synthetic construct
  source 1..75: mol_type = other DNA
atcagccccgttaccgacgtccctgtaccggcgagctgatccagattgatggctgcgaccatcactggtttgaaa

SEQ ID NO: 756740 - DNA, 75 bp, synthetic construct
  source 1..75: mol_type = other DNA
accgacgctggcacgggaaaagctcgaggaagttcatggtctgatccttggcaaggaaaccatcagacgcctcat

SEQ ID NO: 756741 - DNA, 75 bp, synthetic construct
  source 1..75: mol_type = other DNA
actgttgggtctgccgtaccgtaaaatcatcctttgcaccggcgacatgggctttggcgcttgcaaaacgtacga

SEQ ID NO: 756742 - DNA, 75 bp, synthetic construct
  source 1..75: mol_type = other DNA
cctggaagtatggatcccggcacagaacacctaccgcgagatctcttcctgctccaacgtttgggatttccaggc

SEQ ID NO: 756743 - DNA, 75 bp, synthetic construct
  source 1..75: mol_type = other DNA
tctatggcggcgctggaagagatgaccggtcatgcagaaaaagtcctgcaactgctgggtctgccgtaccgtaaa

SEQ ID NO: 756744 - DNA, 75 bp, synthetic construct
  source 1..75: mol_type = other DNA
acaccgcgtcgtacacgcttcttgttgccgaaaagaaaaaaaacacccgagaagagtgggacctcctggagttca

SEQ ID NO: 756745 - DNA, 75 bp, synthetic construct
  source 1..75: mol_type = other DNA
atgaatgatgaaaactttttcaaaaaagcggcggcgcacggggaggaacctcctttaactcctcaaaacgaacat

SEQ ID NO: 756746 - DNA, 75 bp, synthetic construct
  source 1..75: mol_type = other DNA
cgatatcgaccatttcaagagcatcaacgatacctggggccatgatgtgggcgatgaagcgattgtggcgcttac

SEQ ID NO: 756747 - DNA, 75 bp, synthetic construct
  source 1..75: mol_type = other DNA
cgggaatgtgggtaggcgtgatgggcgtaaacgtgctgccttcgatcgcgatgttgatgattatgtgtctgaatt

SEQ ID NO: 756748 - DNA, 75 bp, synthetic construct
  source 1..75: mol_type = other DNA
aggcgctgggagacttgccgaatcagttgattagcgaactgccaaacattcaggtctttggtgcggtaggggaca

SEQ ID NO: 756749 - DNA, 75 bp, synthetic construct
  source 1..75: mol_type = other DNA
cgactgggtgatgatgtcgccaggtgctgcgctgccggtgaataaagcggttgtcactaccgccacctggaaaga

SEQ ID NO: 756750 - DNA, 75 bp, synthetic construct
  source 1..75: mol_type = other DNA
ggattagtgtgggggttgcgccgctgaacccacaaatgagtcactatcgtgagtggttgaaatcggcagatttgg

SEQ ID NO: 756751 - DNA, 75 bp, synthetic construct
  source 1..75: mol_type = other DNA
aacggcggcagcattgcgtcagcagcaggcgttgctgacacggctggctgaacaggctgcagattccagcgccga

SEQ ID NO: 756752 - DNA, 75 bp, synthetic construct
  source 1..75: mol_type = other DNA
ccatcttaacattgcggaagccgatcacttcaaacagttcctgcgtcagattaagtgtaccggcctcgatatccg

SEQ ID NO: 756753 - DNA, 75 bp, synthetic construct
  source 1..75: mol_type = other DNA
cggaaagcgatgccattgacgcggtgtatattgccagcccgaattccctgcacttttcccagacacaacttttcc

SEQ ID NO: 756754 - DNA, 75 bp, synthetic construct
  source 1..75: mol_type = other DNA
gggcttatcagtcgtcctggcaagcagccattcactccaggtcgcgacgtagcgagctatctctcagggaagagc

SEQ ID NO: 756755 - DNA, 75 bp, synthetic construct
  source 1..75: mol_type = other DNA
gtattcagcaatggcagcagtgaggccaaaacgctgacgggcgcagagcatttaatcgatctggtaggccaaccg

SEQ ID NO: 756756 - DNA, 75 bp, synthetic construct
  source 1..75: mol_type = other DNA
atgattaaacaaactattgtcgcgttgcttttgagcgtgggagcgtcatcggtctttgcggcaggcaccgtcaag

SEQ ID NO: 756757 - DNA, 75 bp, synthetic construct
  source 1..75: mol_type = other DNA
attcaaaaaatgggtacccaaccccaggctggttccgttgctcaaaggcaatgtcggtgaatatctttttgataa

SEQ ID NO: 756758 - DNA, 75 bp, synthetic construct
  source 1..75: mol_type = other DNA
gaaacgcttgagaaaagcaacaacaagattcgcgagatccgtaatatcaccagccaaaaggcggatacagagggg

SEQ ID NO: 756759 - DNA, 75 bp, synthetic construct
  source 1..75: mol_type = other DNA
attttcagtaaaaaaaattatatatggagttttaatgactcagtcgtgcaaaactcatgatacgcctgatgaagg

SEQ ID NO: 756760 - DNA, 75 bp, synthetic construct
  source 1..75: mol_type = other DNA
tcgtcatagtatccgcaatacgattgagtcggcctgtaaattactatttgggccagacagtgaaaaagcttccat

SEQ ID NO: 756761 - DNA, 75 bp, synthetic construct
  source 1..75: mol_type = other DNA
cctgcaacccaaaaccgtattcacgatgacgccgatagctgaactcaattacgtgaacaggggagccgagcgcac

SEQ ID NO: 756762 - DNA, 75 bp, synthetic construct
  source 1..75: mol_type = other DNA
accgacattttaagcgctgggtaaagaatggcggtcaggataactccagcagccagaatacccctttgggccagt

SEQ ID NO: 756763 - DNA, 75 bp, synthetic construct
  source 1..75: mol_type = other DNA
gatgcagcacggacatatcgctcagcgtggagatcacgatacgctggcacagcaaagcggctggtatcgcgatat

SEQ ID NO: 756764 - DNA, 75 bp, synthetic construct
  source 1..75: mol_type = other DNA
atctcctgcgttacgtctggcgcgtattgctgtttggtgcgtcttatcaactggctgttgaactgcgtgaagatt

SEQ ID NO: 756765 - DNA, 75 bp, synthetic construct
  source 1..75: mol_type = other DNA
tccgcagactgaccatcctgcgctggaaaacgtcaatttcgccctgaaacccggtcagatgctgggtatttgcgg

SEQ ID NO: 756766 - DNA, 75 bp, synthetic construct
  source 1..75: mol_type = other DNA
ttctggaaattaataaaacggttgagcaaatgctgacacaaggacaatggcaggatgcgcttgatttttggatta

SEQ ID NO: 756767 - DNA, 75 bp, synthetic construct
  source 1..75: mol_type = other DNA
ggaatattaatgaatcaatcgtgtaaatgttatgatacacctgtcgaagggattgtttttctttttcagcattgg

SEQ ID NO: 756768 - DNA, 75 bp, synthetic construct
  source 1..75: mol_type = other DNA
acacttcagattattgatgctgattcggataagattatagcaaaattacctgttggagcattgcctcaggctctt

SEQ ID NO: 756769 - DNA, 75 bp, synthetic construct
  source 1..75: mol_type = other DNA
aaccccaggctagttccgttgctcaaaggcaatgtcggtgaatatctcttcgataaagtgctaaaaagttatggt

SEQ ID NO: 756770 - DNA, 75 bp, synthetic construct
  source 1..75: mol_type = other DNA
gccacccgaacgccaccagcggtgaaatcgcaagggcgatgggtaaaaagacgccagccgtagccagcgcactat

SEQ ID NO: 756771 - DNA, 75 bp, synthetic construct
  source 1..75: mol_type = other DNA
ctcatgaccgcccagctcgacggtgtggtcgaacgctgcaatcagcagtggctgaccggggaagggaatgtatga

SEQ ID NO: 756772 - DNA, 75 bp, synthetic construct
  source 1..75: mol_type = other DNA
cgcgaacaggtgaatggcaaacctcacgcacaggaaaattccagaccacgggctttgaaagcgtggataacgcgt

SEQ ID NO: 756773 - DNA, 75 bp, synthetic construct
  source 1..75: mol_type = other DNA
caggacacgctgtacggtacgggtcagctgccgaaatttgctggcgatctgttccatactcgtccgctggaagaa

SEQ ID NO: 756774 - DNA, 75 bp, synthetic construct
  source 1..75: mol_type = other DNA
tattgagcctttacgtctggaagtgaacaaactgggcgaagagctggatgcagcaaaagccgagctggatgcttt

SEQ ID NO: 756775 - DNA, 75 bp, synthetic construct
  source 1..75: mol_type = other DNA
tcattataaccctgaggctaaacccaaatatgccattgttattgcctatccgtatgaggaccgaaaattaaaagt

SEQ ID NO: 756776 - DNA, 75 bp, synthetic construct
  source 1..75: mol_type = other DNA
gcacgatctgttccagttggtctccgtcatcctcgccgcctgttctgatatcaccaaccgacactttaagcgctg

SEQ ID NO: 756777 - DNA, 75 bp, synthetic construct
  source 1..75: mol_type = other DNA
catttactggcagaaaagtgcgaactatcacccggcacaacgctgggatcgatactggagatgtttcgcgaccag

SEQ ID NO: 756778 - DNA, 75 bp, synthetic construct
  source 1..75: mol_type = other DNA
tctcgactttatggactgggcctctggcctgaaaaaccgcgaccgctatattcagtggtacgaaggtgcaaaagg

SEQ ID NO: 756779 - DNA, 75 bp, synthetic construct
  source 1..75: mol_type = other DNA
atggtatacggaaaagaatatctggaaattaccttacaggcggcggcggaatcgaatagcggtaaccataaaggt

SEQ ID NO: 756780 - DNA, 75 bp, synthetic construct
  source 1..75: mol_type = other DNA
gtttaataaaaacctggctgcaggcgaaaaacttattggttctgaatattggatgaccattaagggttacgaaca

SEQ ID NO: 756781 - DNA, 75 bp, synthetic construct
  source 1..75: mol_type = other DNA
taaaaacagcctgattttgtcactttcagggacatttaagcgggcctttatcagcgcctggcgcactcatcaatc

SEQ ID NO: 756782 - DNA, 75 bp, synthetic construct
  source 1..75: mol_type = other DNA
gatgcagcacggacatatcgcccagcgtggcaatcatgatgcgctggcgcaacaaagcggctggtatcgcgatat

SEQ ID NO: 756783 - DNA, 75 bp, synthetic construct
  source 1..75: mol_type = other DNA
tggtctgccattatttttattttttaactaaagatggattttatcatattgaactggattcagatgaggggcttt

SEQ ID NO: 756784 - DNA, 75 bp, synthetic construct
  source 1..75: mol_type = other DNA
gagactaattgaacctcaatacctgtcaactttttttaatgagttttctattatcatcccaagatttctatggga

SEQ ID NO: 756785 - DNA, 75 bp, synthetic construct
  source 1..75: mol_type = other DNA
caagcataaggaattcattggattgaatcttaatgatatcaacaacgctattatgcttgacttcgtaaactccgc

SEQ ID NO: 756786 - DNA, 75 bp, synthetic construct
  source 1..75: mol_type = other DNA
ctggaagaagcgcgacgagtggggcaagtatggcccgctggatcagatgcagctcaccaccgccgcgcgttactg

SEQ ID NO: 756787 - DNA, 75 bp, synthetic construct
  source 1..75: mol_type = other DNA
cggcaaccgccctacctacgaagcgagccgcagcgaagaagccagccacgcagatttggcctgggcaacgatgca

SEQ ID NO: 756788 - DNA, 75 bp, synthetic construct
  source 1..75: mol_type = other DNA
agaaactggaagaaatcttccattcctctatgttcaactaccagcgtcactggtgggaagccggaaaaaccaacc

SEQ ID NO: 756789 - DNA, 75 bp, synthetic construct
  source 1..75: mol_type = other DNA
tttgttctgtcagtcatccggctggcaggtaatgagaacgcaggaacagaaggaggaaaacaccggaaagcgtca

SEQ ID NO: 756790 - DNA, 75 bp, synthetic construct
  source 1..75: mol_type = other DNA
gtcaaaaccgcggctcccgaaactcaacgggtgatgttctttaaaaatcaggatttatttcagactccggcaata

SEQ ID NO: 756791 - DNA, 75 bp, synthetic construct
  source 1..75: mol_type = other DNA
cgttgtagcgttccaactgatcgttatgtattaaataacggtggaatggcaagagctatggcttacagggagtac

SEQ ID NO: 756792 - DNA, 75 bp, synthetic construct
  source 1..75: mol_type = other DNA
cgaaccggacctgaaatacattgagagcgcctcccgtgccctggccccaatgctggaaaaaggcaatctggtggt

SEQ ID NO: 756793 - DNA, 75 bp, synthetic construct
  source 1..75: mol_type = other DNA
agcaggaacttcatattcagttgttggcaatgcaatcgcgcggttagttggtgctacagtatacgatgggactca

SEQ ID NO: 756794 - DNA, 75 bp, synthetic construct
  source 1..75: mol_type = other DNA
aaaatgttgatggacagagcataggtatggctaaaagcgtcggttacattaacaaccgcgatggctcttgctctg

SEQ ID NO: 756795 - DNA, 75 bp, synthetic construct
  source 1..75: mol_type = other DNA
actttgccaaagaggtggatgtggagctgaaaggcgacccgatgacgctcagcaacggcgcgtgtctgtacttcc

SEQ ID NO: 756796 - DNA, 75 bp, synthetic construct
  source 1..75: mol_type = other DNA
cagtaacgccactggcacgccaattgataaaattaatgatggtgatttgtataaaccattagataatttatcatc

SEQ ID NO: 756797 - DNA, 75 bp, synthetic construct
  source 1..75: mol_type = other DNA
atgaaaatggtgagtgtggtctttgctttcgtttgccttcaaattttgcaatgaagggaattaatttggttaaaa

SEQ ID NO: 756798 - DNA, 75 bp, synthetic construct
  source 1..75: mol_type = other DNA
aactctcttaccccgttgccaacagcgactggcacagggcgacactatcttgattttccccgaaggcacgcggac

SEQ ID NO: 756799 - DNA, 75 bp, synthetic construct
  source 1..75: mol_type = other DNA
atcagtgcccatcgcctttctgcactgacggaagccagtgaaaatgtaatgaacgcatcccacacaattaaacac

SEQ ID NO: 756800 - DNA, 75 bp, synthetic construct
  source 1..75: mol_type = other DNA
gaacccgtgccggaagggcgtggcgaactggatgtaaatattcaccagttcacgtatccgcagactgaccatcct

SEQ ID NO: 756801 - DNA, 75 bp, synthetic construct
  source 1..75: mol_type = other DNA
tcactattgggctatcaacaaatctatacgcatgtctcttttgtgtctggctagccatattaacaataattctcc

SEQ ID NO: 756802 - DNA, 75 bp, synthetic construct
  source 1..75: mol_type = other DNA
gacgggcagtaccgccagatagtcacagtggaagatgcggtgcgcggtggctgtaacctgttcgacctcgaccag

SEQ ID NO: 756803 - DNA, 75 bp, synthetic construct
  source 1..75: mol_type = other DNA
cctggcccccggcctgctctgcccggacggacagtatcgccagatcgtcaccgtggaagatgcggtgcgcggcgg

SEQ ID NO: 756804 - DNA, 75 bp, synthetic construct
  source 1..75: mol_type = other DNA
atctcgatccccgtcggcaggccatgctgctgtactttcagggataccgtgtagcccgcattgctgaaatgctgg

SEQ ID NO: 756805 - DNA, 75 bp, synthetic construct
  source 1..75: mol_type = other DNA
taacatattgttagttttggtgtgggatacttcccgccgccgtcgtttggcgcgtcgcagcattgccgccagttt

SEQ ID NO: 756806 - DNA, 75 bp, synthetic construct
  source 1..75: mol_type = other DNA
aaagagatccttagcgagatgggatatacccacgttgagaacgccggtggcctgaaagacatcgcaatgccgtag

SEQ ID NO: 756807 - DNA, 75 bp, synthetic construct
  source 1..75: mol_type = other DNA
gatgaatatttctggatcccgaaattccaggagctgcgcaaagtggcttccggtatggctattcacaagaaatgg

SEQ ID NO: 756808 - DNA, 75 bp, synthetic construct
  source 1..75: mol_type = other DNA
ggattgacgcttacttgcactggcgagaaaggcggtaacttctacgtgatcgcagtattcgacaatgagttagga

SEQ ID NO: 756809 - DNA, 75 bp, synthetic construct
  source 1..75: mol_type = other DNA
acagagaaaacggaagtcagaactctttccgataaagagcaggcggttgggttagctcttgttgatgaaattggt

SEQ ID NO: 756810 - DNA, 75 bp, synthetic construct
  source 1..75: mol_type = other DNA
cttacatggtgggccgcatctttgacgcattcttcccgatcctggctgagtctaatgaagcacagttggcagcta

SEQ ID NO: 756811 - DNA, 75 bp, synthetic construct
  source 1..75: mol_type = other DNA
aaggaagaagaaaaaaccgcgaagaaaggcaaacgtaagccgaaagcaaaagaagcgcttgtgccgcgcgttatg

SEQ ID NO: 756812 - DNA, 75 bp, synthetic construct
  source 1..75: mol_type = other DNA
gaaaaaaccagctaagaaaggcaaacgtaagcctaaagcaaaagatgcgtatgtgccgcgtgtgatgagctttaa

SEQ ID NO: 756813 - DNA, 75 bp, synthetic construct
  source 1..75: mol_type = other DNA
tatccgccggaggtcacagcggacatgcggaaggaacgactcaggccgcagtggcagatggcacaatcaccatcc

SEQ ID NO: 756814 - DNA, 75 bp, synthetic construct
  source 1..75: mol_type = other DNA
atataaagtacacccggtagttcaggctggcggtgatgttagctttatccggggttatactttaagcggaactat

SEQ ID NO: 756815 - DNA, 75 bp, synthetic construct
  source 1..75: mol_type = other DNA
aaggagaaagagcagaggcgtctgcagacagtggggcttatcagtgacataggcagtcaggtggcggatattgcg

SEQ ID NO: 756816 - DNA, 75 bp, synthetic construct
  source 1..75: mol_type = other DNA
cgggatgtgtcactggcggcgggtaaccatgttgatgttcttgctgccaccagtacagatacgtcctggcgcttt

SEQ ID NO: 756817 - DNA, 75 bp, synthetic construct
  source 1..75: mol_type = other DNA
ctatcactatctggaaacgaagaaaaaaagcggaggttttctcagtaagaaaaccacccgcaccatcagtgagga

SEQ ID NO: 756818 - DNA, 75 bp, synthetic construct
  source 1..75: mol_type = other DNA
ggtcacagcggacatgcggaaggaacgactcaggccgcagtggcagaaggcactatcaccatccgggacagggac

SEQ ID NO: 756819 - DNA, 75 bp, synthetic construct
  source 1..75: mol_type = other DNA
atgaataaggtttataacactgtctggaacgaatccaccggtatgtgggtcgttacctcagaactgacccgtaaa

SEQ ID NO: 756820 - DNA, 75 bp, synthetic construct
  source 1..75: mol_type = other DNA
gcaccggtgccggtgatatggcggttaaaggtgcctctgtctggcatctcgatggtgactccactgtaggcgcat

SEQ ID NO: 756821 - DNA, 75 bp, synthetic construct
  source 1..75: mol_type = other DNA
ggaatgaatccacaggaacgtgggtcgtaacttcagaactgatccgtaaagggggtctacgcccacgacaaatca

SEQ ID NO: 756822 - DNA, 75 bp, synthetic construct
  source 1..75: mol_type = other DNA
tctccagcggcggcagtaccactaacactacaattaattccggtggggggcagtatctctacgccggaaatgcca

SEQ ID NO: 756823 - DNA, 75 bp, synthetic construct
  source 1..75: mol_type = other DNA
cgtgaacgcgatttactggaaaaactgattacactcggtaaaacgcaccatctggatgcgcactacattacccgt

SEQ ID NO: 756824 - DNA, 75 bp, synthetic construct
  source 1..75: mol_type = other DNA
taattacgctcggtaaagcgcaccatctggacgcccattacattactcgcctgttccagctcatcattgaagatt

SEQ ID NO: 756825 - DNA, 75 bp, synthetic construct
  source 1..75: mol_type = other DNA
aacgttgacagctctggtggtggtctgtacgcgacctggtttgataatgacggctactacgtggacggtgtgctg

SEQ ID NO: 756826 - DNA, 75 bp, synthetic construct
  source 1..75: mol_type = other DNA
gtcactggcaccatcgttaataacggtggccgcgagaatatcaattcaggcggcagtgccacgagcactaccctt

SEQ ID NO: 756827 - DNA, 75 bp, synthetic construct
  source 1..75: mol_type = other DNA
caaccgttaatagtggtggacgccagcatgtttacgtcgacggtaatatcaccaaaacaactattacaagcggtg

SEQ ID NO: 756828 - DNA, 75 bp, synthetic construct
  source 1..75: mol_type = other DNA
cccaaatgctggcgtctgggctgaagctcgttatgaaaacggtaagcagaccgagtcaccaataactggtagcgt

SEQ ID NO: 756829 - DNA, 75 bp, synthetic construct
  source 1..75: mol_type = other DNA
ggcaggctgcaggtggaagccggtggctcagcctctaaggttactcagaacagtggcggtgctgtcgttactaat

SEQ ID NO: 756830 - DNA, 75 bp, synthetic construct
  source 1..75: mol_type = other DNA
tgagtgacagcagtttagcggtaggtactttcttctcttacagcgacaacagcattaaacatgcccgtggaggaa

SEQ ID NO: 756831 - DNA, 75 bp, synthetic construct
  source 1..75: mol_type = other DNA
ccagcggcggtgttgctacgagcaccctcgttaacagcggagggagccaatatgtctacagcggcggcaatgcgt

SEQ ID NO: 756832 - DNA, 75 bp, synthetic construct
  source 1..75: mol_type = other DNA
ctgacaccggagcaggttcaagaagggatgaatcgtatagctattggtgaagggccttcttgggggacaacatat

SEQ ID NO: 756833 - DNA, 75 bp, synthetic construct
  source 1..75: mol_type = other DNA
gaatgactgcctgcaaggctccgccgaaaatattggttttatcctcggggggacgccagaatttcttttcgatcc

SEQ ID NO: 756834 - DNA, 75 bp, synthetic construct
  source 1..75: mol_type = other DNA
tggcgattgaagaagacaagcccagcgatatgggtgatgccattgtggaggaaagtgatgacgatgatggcctgg

SEQ ID NO: 756835 - DNA, 75 bp, synthetic construct
  source 1..75: mol_type = other DNA
aaacaaaccagatggcaatgcattacttagcgttgtggaaaggtttgttactgaggcaaggaaggaagctgatgc

SEQ ID NO: 756836 - DNA, 75 bp, synthetic construct
  source 1..75: mol_type = other DNA
tgatattttttagagtcgttcagggattaatggcggggccgttaattccactgtcacagagtttattattaagga

SEQ ID NO: 756837 - DNA, 75 bp, synthetic construct
  source 1..75: mol_type = other DNA
gacggtggtgcaagcttcagacttatcatcggtgaatatggttctggtaaaacgttctttctgagtgttgtgcgc

SEQ ID NO: 756838 - DNA, 75 bp, synthetic construct
  source 1..75: mol_type = other DNA
cagatatggtgggtggatatgactttgcgaaggtcattgacgcattctggcgcgggcatgagcaggataacgaaa

SEQ ID NO: 756839 - DNA, 75 bp, synthetic construct
  source 1..75: mol_type = other DNA
gaagagatactgacgctggcgaactggtgcctgttgaactattccgggctgaaaacgccagtcgggagtgcatca

SEQ ID NO: 756840 - DNA, 75 bp, synthetic construct
  source 1..75: mol_type = other DNA
tttgctgcgcctgtcattcaacgttgatttttctcaccgccagggctgggcaagagccatgctggatggtcagga

SEQ ID NO: 756841 - DNA, 75 bp, synthetic construct
  source 1..75: mol_type = other DNA
gccaactgccatatccggctgcatcagcaggcgctgccggatggcgcgcatattttgattaatgacttccgtatc

SEQ ID NO: 756842 - DNA, 75 bp, synthetic construct
  source 1..75: mol_type = other DNA
aacattctttttaagtgttgtacggtctattgcgttagagaagaagctggtcacggtcagtgcagacctttctcc

SEQ ID NO: 756843 - DNA, 75 bp, synthetic construct
  source 1..75: mol_type = other DNA
actacgaacagattttgcggatcctgaatgactgcctgcaaggctcagccgagaacattggttttatcctcgggg

SEQ ID NO: 756844 - DNA, 75 bp, synthetic construct
  source 1..75: mol_type = other DNA
atggccgttctgggattgcaggggatgcggggtggcgtggggacgacaacgattaccgccgcgttaggctggtca

SEQ ID NO: 756845 - DNA, 75 bp, synthetic construct
  source 1..75: mol_type = other DNA
aaaaagttctgcaggaagaggccgcacagataaaggccagtgatgtgaattccacattctacaccacggaaatca

SEQ ID NO: 756846 - DNA, 75 bp, synthetic construct
  source 1..75: mol_type = other DNA
tgacagtgcctgcggcattgcaggcactgaattctaattcgcaactcactcttcttttagtcggcaatcccgacg

SEQ ID NO: 756847 - DNA, 75 bp, synthetic construct
  source 1..75: mol_type = other DNA
gcagaagcagacgataagtacgctggcaactgtgtcagcagggctggcctgcggtcttaccggaaacagcaccgc

SEQ ID NO: 756848 - DNA, 75 bp, synthetic construct
  source 1..75: mol_type = other DNA
caacatcaccccaaaaccggccagtaaggcccgtggcgtgatctggtttgccaaaaccagagcaaatgatgatgt

SEQ ID NO: 756849 - DNA, 75 bp, synthetic construct
  source 1..75: mol_type = other DNA
cccgaccagtataacggcgcctgtctgttaggattgcgcggcacagtgataaaaagtcatggtgcagccaatcag

SEQ ID NO: 756850 - DNA, 75 bp, synthetic construct
  source 1..75: mol_type = other DNA
agttcctcagcgaattgccgctcgcctgaaatctgtatacccagctggttttgaactgctggacggtggcaaaag

SEQ ID NO: 756851 - DNA, 75 bp, synthetic construct
  source 1..75: mol_type = other DNA
gcttaaaacaatcccttctatcaattatatcggctatcttgaagccaatgagttgttaactggcaagacagatgt

SEQ ID NO: 756852 - DNA, 75 bp, synthetic construct
  source 1..75: mol_type = other DNA
cccgtcgcagtggcaggagttgcggaagtgacgaccggcgatgactggctgacgaagccaggcgctgatcgtgag

SEQ ID NO: 756853 - DNA, 75 bp, synthetic construct
  source 1..75: mol_type = other DNA
tgatttatacgctgatcgttgtcagggataccgttattccggcaggaacactcagcatgaacatcgatgtttctg

SEQ ID NO: 756854 - DNA, 75 bp, synthetic construct
  source 1..75: mol_type = other DNA
atgaaacacaccaccattaccgcccgtgacctcgaatgccttgagcacatgcgcaacatcggccagctcgtcaat

SEQ ID NO: 756855 - DNA, 75 bp, synthetic construct
  source 1..75: mol_type = other DNA
gacctggccatattcgcggttttcgttctcccagctggggcgcgaaatccataaaaattttgcactggctgaatc

SEQ ID NO: 756856 - DNA, 75 bp, synthetic construct
  source 1..75: mol_type = other DNA
actgcatttttcactgacggatattgtcagcgaactgtcggtcccgcgcctgtcagggttaacggtggagattga

SEQ ID NO: 756857 - DNA, 75 bp, synthetic construct
  source 1..75: mol_type = other DNA
ctgatttcgaagattgtcaccacgccggtgttatggctgcgggcggcgatgatcgatgtggttctacgcaatatg

SEQ ID NO: 756858 - DNA, 75 bp, synthetic construct
  source 1..75: mol_type = other DNA
gcgcgaacttataaagcattctcccggcgattttggctaccagcgttcacgctggagtacagagcttctggcgat

SEQ ID NO: 756859 - DNA, 75 bp, synthetic construct
  source 1..75: mol_type = other DNA
ggctacgccgtgcgcttcaacgcactgacccgtgaacagcaacaggatgttatttcacgtacttttacccaggcg

SEQ ID NO: 756860 - DNA, 75 bp, synthetic construct
  source 1..75: mol_type = other DNA
ctaaaaacgatcgcttcgcttatgacgatcgcaatgtttatacatggaccgatacagaggtaaggattacgccct

SEQ ID NO: 756861 - DNA, 75 bp, synthetic construct
  source 1..75: mol_type = other DNA
tatagcctctattttgacggacagcgcaccgaaagtaatagcggcgcgtcacgtgttgatctggcgacactaaaa

SEQ ID NO: 756862 - DNA, 75 bp, synthetic construct
  source 1..75: mol_type = other DNA
atcaccaccgccctgcagctgtcgctgacgaaccctacatttatccggaaaaacttcaacgtagtgctggagcgc

SEQ ID NO: 756863 - DNA, 75 bp, synthetic construct
  source 1..75: mol_type = other DNA
tttaatctctcagggcgagatgtatcttactgacaatattattatggctaacgcgcttgtctattctcatggcga

SEQ ID NO: 756864 - DNA, 75 bp, synthetic construct
  source 1..75: mol_type = other DNA
atgcagttcagcgatatttacctgacaacgcgaggtttttttacccttcgcaccagaggcagacttctgggtcgg

SEQ ID NO: 756865 - DNA, 75 bp, synthetic construct
  source 1..75: mol_type = other DNA
ccgggctgtgatctctgcgtaacctgccaggaaattgcagagctgaaaggcaagcattacgtagggggtgcggta

SEQ ID NO: 756866 - DNA, 75 bp, synthetic construct
  source 1..75: mol_type = other DNA
ccgggtgtgcagtgctgcgttacctgtcaggaaattgcagagctgaaaggtaagcactacacccgaggtgctttg

SEQ ID NO: 756867 - DNA, 75 bp, synthetic construct
  source 1..75: mol_type = other DNA
atgagtaaacaacgcatttttatcgctggccatcgcgggatggtcggttctgccatcaagcggcagctcgaacag

SEQ ID NO: 756868 - DNA, 75 bp, synthetic construct
  source 1..75: mol_type = other DNA
ccgggagtgcagctttgcattacctgccaggaaatcgtagagctgaaaggcaaacattacaacggaggtgctgta

SEQ ID NO: 756869 - DNA, 75 bp, synthetic construct
  source 1..75: mol_type = other DNA
cccggaagctcgccgcattgcgattccgggcgtggccttttgcgtgacctgccagcaaatcgcagaactcaaatc

SEQ ID NO: 756870 - DNA, 75 bp, synthetic construct
  source 1..75: mol_type = other DNA
cccgccagcacgccgccgtgctattccgggtgtgcagtgctgtgtcacttgtcaggaaatcgcagagctgaaagg

SEQ ID NO: 756871 - DNA, 75 bp, synthetic construct
  source 1..75: mol_type = other DNA
cagagcacacagtgataagctgatgaaggtgctcgacggcatcaaccattccggcctggggaaagtctggtttgc

SEQ ID NO: 756872 - DNA, 75 bp, synthetic construct
  source 1..75: mol_type = other DNA
gggcaacagaagataatacgacggttttcgctggaatgactgaggctgaaaatatccagcaggcgattaataaag

SEQ ID NO: 756873 - DNA, 75 bp, synthetic construct
  source 1..75: mol_type = other DNA
ctccgcttattaccgccatgttatttaattccttaccttcatttgcgagcgacacgagttctgcatttactcccg

SEQ ID NO: 756874 - DNA, 75 bp, synthetic construct
  source 1..75: mol_type = other DNA
cggacgggggattgcccccgagtggcagatgaaaagggaactactttcgccagcttatacgactcgctgggcaga

SEQ ID NO: 756875 - DNA, 75 bp, synthetic construct
  source 1..75: mol_type = other DNA
cgtggatggtacccggcacggacgaaatcggccaggcaactgcacaagagatgcaaaaacattcgctggtgttgt

SEQ ID NO: 756876 - DNA, 75 bp, synthetic construct
  source 1..75: mol_type = other DNA
ccatgccaccaacctgatcgcccttacctacgtactggaaaacgacaccgcggtcttcactcgccagctttggga

SEQ ID NO: 756877 - DNA, 75 bp, synthetic construct
  source 1..75: mol_type = other DNA
ctttatgactaatcgagaacgctttttctttaatttactgcacagtgaatttcatcaagatttttttatattttc

SEQ ID NO: 756878 - DNA, 75 bp, synthetic construct
  source 1..75: mol_type = other DNA
ttcacaccaaccggggtatcacagctgaatttgtttgatgaagtacagccgcgggaacggagcgagcagctgatg

SEQ ID NO: 756879 - DNA, 75 bp, synthetic construct
  source 1..75: mol_type = other DNA
aaattttaacgttgtgctggagagaaccgtccgtgaactcaacggagaaagctgtatttcgctggaagaagcgcc

SEQ ID NO: 756880 - DNA, 75 bp, synthetic construct
  source 1..75: mol_type = other DNA
ctgctctcactgcagccggtggaagaaatctggggtgtgggccggagaatttcgaagacgctggggacaatgggt

SEQ ID NO: 756881 - DNA, 75 bp, synthetic construct
  source 1..75: mol_type = other DNA
tatgcctcgatgttggcgcgcgtgatgaacagcctggaggaactggcccccagagtggaacagtattcaattgat

SEQ ID NO: 756882 - DNA, 75 bp, synthetic construct
  source 1..75: mol_type = other DNA
aactgttcgacgaacgcccgccacgccctcacagtgctgagctgatgagggttctggacgggatcaacaactcag

SEQ ID NO: 756883 - DNA, 75 bp, synthetic construct
  source 1..75: mol_type = other DNA
atgtttgccctggccgatgtgaacagcttttatgccagctgcgaacgtgttttccgcccggatttgaaaggaaag

SEQ ID NO: 756884 - DNA, 75 bp, synthetic construct
  source 1..75: mol_type = other DNA
catgagctgtgcaaaattacggaagatctgatcttcacagagccctattacaacgctgaacggaataactggact

SEQ ID NO: 756885 - DNA, 75 bp, synthetic construct
  source 1..75: mol_type = other DNA
tatttaaatcaatagttgaacatactccactaatctcgatagaccttattataagaaacgaagatggtaaggcgc

SEQ ID NO: 756886 - DNA, 75 bp, synthetic construct
  source 1..75: mol_type = other DNA
ttggggtgtatgaacatttttacaatgataatttttctgaagcagaattttctacacactatgtagtgcatggat

SEQ ID NO: 756887 - DNA, 75 bp, synthetic construct
  source 1..75: mol_type = other DNA
ggagggcgaatttttaaggacgagtcattcgaggatgcttttaaaaggatcacatttgaagagttaggcgttcaa

SEQ ID NO: 756888 - DNA, 75 bp, synthetic construct
  source 1..75: mol_type = other DNA
ccgaaggtggctactacctgaacaccagccataagctggaagttacaaaccctgatttagctgctgacctcaagg

SEQ ID NO: 756889 - DNA, 75 bp, synthetic construct
  source 1..75: mol_type = other DNA
ggaaggggagagcgtatatgaagaaatcacctcaattcagaaattgttgccctggcaggtcgatttacaaccgct

SEQ ID NO: 756890 - DNA, 75 bp, synthetic construct
  source 1..75: mol_type = other DNA
gcttcaacgctggcgatgcaaaaaccgggctgtgaagtgatcaccggcacaaatttgcaactgctactggaaatg

SEQ ID NO: 756891 - DNA, 75 bp, synthetic construct
  source 1..75: mol_type = other DNA
tgactttgaagtaaccggcctggatgtagtctgttcgggtacgatgctgacgatctatggattaccaattgacat

SEQ ID NO: 756892 - DNA, 75 bp, synthetic construct
  source 1..75: mol_type = other DNA
ggttcgcgcctgtgcccttcctctcgatgacgacgaaacacaggttctgcttaatgttctgaatggctccgttgt

SEQ ID NO: 756893 - DNA, 75 bp, synthetic construct
  source 1..75: mol_type = other DNA
ccacggtgtttgactggtttacccggttactcacgcctgttcaggccagcaacgaatctcttgaacggtgtacgt

SEQ ID NO: 756894 - DNA, 75 bp, synthetic construct
  source 1..75: mol_type = other DNA
catgaaaatgatttgagcgttgacaccacagtcgaagtatttattaccgtaacccgcgatgaaaagcttatcgcg

SEQ ID NO: 756895 - DNA, 75 bp, synthetic construct
  source 1..75: mol_type = other DNA
tcaatcctaaaacaggcaagccgccagtggattgcaacggtaaacctatcgggccttttgataccagtaaaaccc

SEQ ID NO: 756896 - DNA, 75 bp, synthetic construct
  source 1..75: mol_type = other DNA
gtagtcaggtctggcacgatgctgacgatctacggattaccaatcgagatgttgaagcaaagtgtgaatttgcag

SEQ ID NO: 756897 - DNA, 75 bp, synthetic construct
  source 1..75: mol_type = other DNA
cgtgatgaaaaacatttacgctcagttctggcgttcgtggctcaggacatgaagccgcagatagctcggtgcttc

SEQ ID NO: 756898 - DNA, 75 bp, synthetic construct
  source 1..75: mol_type = other DNA
caggtacaggcaactacaaagcaaatggcgatggccatggtttatctgtaacttacactattgacggtttctcat

SEQ ID NO: 756899 - DNA, 75 bp, synthetic construct
  source 1..75: mol_type = other DNA
aaaaagagaacttgaaataatagaatacaatgttaataaatttaattgtcagattagtgaattaaaactgaaaaa

SEQ ID NO: 756900 - DNA, 75 bp, synthetic construct
  source 1..75: mol_type = other DNA
tctttgtgcttccagagcactgattgttacataccgcctctggcagttgcatgacgaaaagtcagcgaacccgag

SEQ ID NO: 756901 - DNA, 75 bp, synthetic construct
  source 1..75: mol_type = other DNA
ggagtgcggacaccgtgggctgaccagtctggtggacgagttaggccgctgccataaagaatgtccggtcgagga

SEQ ID NO: 756902 - DNA, 75 bp, synthetic construct
  source 1..75: mol_type = other DNA
gccatcgcccaactggattgtgaagacggcattgtttttctgacggatttgctgggcggcacgccgtttcgcgta

SEQ ID NO: 756903 - DNA, 75 bp, synthetic construct
  source 1..75: mol_type = other DNA
atcatttgcaacaacagcgggagcgtctgcaggcgcagctggattatgccttggatagaagcatgcaggacggct

SEQ ID NO: 756904 - DNA, 75 bp, synthetic construct
  source 1..75: mol_type = other DNA
aaaatttcgctaatgcccgtcaactttccatcgatgttgattactgcaacgatcatcaaaaatcattcatctgga

SEQ ID NO: 756905 - DNA, 75 bp, synthetic construct
  source 1..75: mol_type = other DNA
caggcgttgatgacgcaaaaaggccgttatgtgctggaaacggttagcccggaaggggagagcgtatatgaagaa

SEQ ID NO: 756906 - DNA, 75 bp, synthetic construct
  source 1..75: mol_type = other DNA
atatcggtttaggttctttccaccgcgcacaccaggcgtggtatctgcatcgcctgttggtggcgggggatactc

SEQ ID NO: 756907 - DNA, 75 bp, synthetic construct
  source 1..75: mol_type = other DNA
attttaaatataagggccctaatctcgatcatggccctatggggtggggagtttatgatggtaatggcgttagaa

SEQ ID NO: 756908 - DNA, 75 bp, synthetic construct
  source 1..75: mol_type = other DNA
caacaaaaacgcaggctggacagatttcgtcaggtaaataataaaaaggcgcaactccacctcacgtgggaagaa

SEQ ID NO: 756909 - DNA, 75 bp, synthetic construct
  source 1..75: mol_type = other DNA
tactcaatacggtcgctttattggccccttccaaggaagttactctccctatgaaaatgataaagattttatata

SEQ ID NO: 756910 - DNA, 75 bp, synthetic construct
  source 1..75: mol_type = other DNA
gataaagcggacgtggcggcaacccaggccattcttaccgatcttgatgcgaaatccagtgaccgctgggaaaac

SEQ ID NO: 756911 - DNA, 75 bp, synthetic construct
  source 1..75: mol_type = other DNA
aagttgggcgtcgcacatatgcatgtaacgctggcagatgaacgccactacgcttgtgccacggtaatcattgaa

SEQ ID NO: 756912 - DNA, 75 bp, synthetic construct
  source 1..75: mol_type = other DNA
ctgaaccaacgaattaacgccgggaaagaccatggctactttatgcgctcttcccggttacgcgacgatattcaa

SEQ ID NO: 756913 - DNA, 75 bp, synthetic construct
  source 1..75: mol_type = other DNA
agcgaggaaagttttctaccgcgtttaatccctgtgtggctaacccatttggcccctgggataccctggctcgta

SEQ ID NO: 756914 - DNA, 75 bp, synthetic construct
  source 1..75: mol_type = other DNA
gcgggcgaacgctgggccagccgtaagttgaggctgtttgataataataatctgcaatttgccattaaccgcgta

SEQ ID NO: 756915 - DNA, 75 bp, synthetic construct
  source 1..75: mol_type = other DNA
tcatgtatggcgatgacttacataaaccggctccttcatttaaccgaccttcaactgaggctggtgcattgggac

SEQ ID NO: 756916 - DNA, 75 bp, synthetic construct
  source 1..75: mol_type = other DNA
agtttccgtgtgctggcgcaaaagtcctgggatcggcgaggaaagttttccgccgagtttaacccctgcgttgcc

SEQ ID NO: 756917 - DNA, 75 bp, synthetic construct
  source 1..75: mol_type = other DNA
tgggcatcgcctcgctgaccccgagagtttccgtgtgctggcgcaaaagtcctgggatcggcgaggaaagttttc

SEQ ID NO: 756918 - DNA, 75 bp, synthetic construct
  source 1..75: mol_type = other DNA
tggcgcaaagggccagaatgtcagcaagaagtcctacccggcctcgatccagaacaatttcaccctcttagtaat

SEQ ID NO: 756919 - DNA, 75 bp, synthetic construct
  source 1..75: mol_type = other DNA
ctggcgagataaaagcggcctgcaccggaaggtgctgaatcagggaaatctggacaaagatagggcaaatagctg

SEQ ID NO: 756920 - DNA, 75 bp, synthetic construct
  source 1..75: mol_type = other DNA
atggctcacagctttggcgctacccaactcccaataccaaagccgtgcgggtgaaatggaaaaccaaagattcag

SEQ ID NO: 756921 - DNA, 75 bp, synthetic construct
  source 1..75: mol_type = other DNA
ctgaaggtgctgaatcagggaaacctggacaaagatagggcaaatagctgcgcagcgttcaatttacaggaacac

SEQ ID NO: 756922 - DNA, 75 bp, synthetic construct
  source 1..75: mol_type = other DNA
agagtcaggtgaccgcaagttggagatcgtgaaacttgatgatcccaatcttattatcaacaaacgtttcaacgc

SEQ ID NO: 756923 - DNA, 75 bp, synthetic construct
  source 1..75: mol_type = other DNA
tgttgcttgatacgaataacagccaacttttctcttatgatgagtggcgcgaagagcacggtgatagcattgaac

SEQ ID NO: 756924 - DNA, 75 bp, synthetic construct
  source 1..75: mol_type = other DNA
ccgatactctatctggcagaacgatatggcttcgagtcccaacaaactctgacccgaaccttcaaaaattacttt

SEQ ID NO: 756925 - DNA, 75 bp, synthetic construct
  source 1..75: mol_type = other DNA
ttctcaacgggcagaccaaagcccgttacggtaaatcccatgaaatcgccgtgaaactgggactgaaatcaacgg

SEQ ID NO: 756926 - DNA, 75 bp, synthetic construct
  source 1..75: mol_type = other DNA
ccagcttggctttgaaaaagcggtgacctacatccgcaagaaactggcaagcgaacgctgtgacgccatcatcgc

SEQ ID NO: 756927 - DNA, 75 bp, synthetic construct
  source 1..75: mol_type = other DNA
agctgggcgaaatcgaaagcgcgctcagccagctggcgggggtgaaacaagcaaccgttctggcgatcggcgaaa

SEQ ID NO: 756928 - DNA, 75 bp, synthetic construct
  source 1..75: mol_type = other DNA
ccaataacagccagctcttctcctacgatgagtggcgcgaagagcacggcgatagcatcgaactggttactgatg

SEQ ID NO: 756929 - DNA, 75 bp, synthetic construct
  source 1..75: mol_type = other DNA
atcacagaaggtcacaccgccacggcagtggaaaatggaaaaagggaccacgctgaaggacggactggcccgctg

SEQ ID NO: 756930 - DNA, 75 bp, synthetic construct
  source 1..75: mol_type = other DNA
ggcaggcccgacacaggtgacacctgccgtcagcgcttcccggcctcagaccaccaccgggacatccggaacacc

SEQ ID NO: 756931 - DNA, 75 bp, synthetic construct
  source 1..75: mol_type = other DNA
cggtaaaagccagatgcctgccctcctttccgcgaagattgtggcggataagcgaaccaactctcttatcatcag

SEQ ID NO: 756932 - DNA, 75 bp, synthetic construct
  source 1..75: mol_type = other DNA
gcaacagaacgctgccataccggcactgaacaaacgcctccccgtctggtccgttaatgaccagtggcaccgggc

SEQ ID NO: 756933 - DNA, 75 bp, synthetic construct
  source 1..75: mol_type = other DNA
atgcaaaaaaaatcacttacactccttctgccgtcattactcagcggctgtacggcatttaatgccacgcctgtt

SEQ ID NO: 756934 - DNA, 75 bp, synthetic construct
  source 1..75: mol_type = other DNA
ggccacacagctgcccgcactggttatgaccggtaaacccggtcagtcatccgtcgtttatttacgtgaggcaca

SEQ ID NO: 756935 - DNA, 75 bp, synthetic construct
  source 1..75: mol_type = other DNA
acgaaaggtcaggagaaatcttggcctatttagatcttttaaaatttattgagcatgctggtgcggaattaatat

SEQ ID NO: 756936 - DNA, 75 bp, synthetic construct
  source 1..75: mol_type = other DNA
tagaagtgaaaccagaagttcgcgttgaaggtggtcaacacctgaacgtaaacgttctgcgtcgtgaaactctgg

SEQ ID NO: 756937 - DNA, 75 bp, synthetic construct
  source 1..75: mol_type = other DNA
atgattacaggtatccagattactaaagctgctaatgacgatctgctgaactctttctggctgctggacagcgaa

SEQ ID NO: 756938 - DNA, 75 bp, synthetic construct
  source 1..75: mol_type = other DNA
tttcaggcaatctgccgtcgaaagatggcaaatacagcctctactgtgcggttatcgttaagaaagttgacgcga

SEQ ID NO: 756939 - DNA, 75 bp, synthetic construct
  source 1..75: mol_type = other DNA
tattattctgggttcttccagtttgtcagtcagtgagttatggcacgcattagtgcatccatttagctctgatac

SEQ ID NO: 756940 - DNA, 75 bp, synthetic construct
  source 1..75: mol_type = other DNA
ggcagagatgcaaactattctgaataactccctcgccagcccgtttacgcttggcgtttcgtcggcggcggcctt

SEQ ID NO: 756941 - DNA, 75 bp, synthetic construct
  source 1..75: mol_type = other DNA
ttatggacgttacccggctcaaaaacttgggctggcaatatcgctataatttacatgaaggcttatcattaacat

SEQ ID NO: 756942 - DNA, 75 bp, synthetic construct
  source 1..75: mol_type = other DNA
gtgagaagtccagtgtatgcccctgaaagtttagagtgtgatgaaggggcattccatgcagatacttcaagctgg

SEQ ID NO: 756943 - DNA, 75 bp, synthetic construct
  source 1..75: mol_type = other DNA
gtgccagatctggaaaatcaggtcaaaaccctgaccgataaactcaccaatatcgataacacctggaatcagcgc

SEQ ID NO: 756944 - DNA, 75 bp, synthetic construct
  source 1..75: mol_type = other DNA
tgtaaggcaggagggaaaattgaacgttggaaaagggctgtggataagctggagtcagatccagtatttgctgac

SEQ ID NO: 756945 - DNA, 75 bp, synthetic construct
  source 1..75: mol_type = other DNA
cagattggtaaaaacgtgcacctgtctggcggtgtaggtatcggtggtgtgctggagccgctgcaggctaacccg

SEQ ID NO: 756946 - DNA, 75 bp, synthetic construct
  source 1..75: mol_type = other DNA
aggcgtcatcgtagaagaaggttcggtgatctcaatgggtgtttacattgggcaaagcaccaagatctatgatcg

SEQ ID NO: 756947 - DNA, 75 bp, synthetic construct
  source 1..75: mol_type = other DNA
gctggagccgctgcaggctaacccgaccattattgaagataactgcttcatcggcgcacgctctgaagtggttga

SEQ ID NO: 756948 - DNA, 75 bp, synthetic construct
  source 1..75: mol_type = other DNA
acctattcaaaaaataaaaaagcaattgatgtacaatataataaatttaattttcttgatgataaacaaaaaaat

SEQ ID NO: 756949 - DNA, 75 bp, synthetic construct
  source 1..75: mol_type = other DNA
cggcggaagtgttggtgaaagtgtattcgatgggcggtatgaaacagactatcagccgtgaagagttgatagccc

SEQ ID NO: 756950 - DNA, 75 bp, synthetic construct
  source 1..75: mol_type = other DNA
acttccggctcacttcctttcccactgcgagcgcattaaagccaccaacggtaaagatcgggtgatcatgcactg

SEQ ID NO: 756951 - DNA, 75 bp, synthetic construct
  source 1..75: mol_type = other DNA
gagaacagggaaatgcaggatgctgtacctgattttttctataccggactccgaatgtatcggtttcatcccgga

SEQ ID NO: 756952 - DNA, 75 bp, synthetic construct
  source 1..75: mol_type = other DNA
ctatttagatcttttgaaatttattgagtatgccggtgcagaactgatatcatctgatgataaagaacataagtt

SEQ ID NO: 756953 - DNA, 75 bp, synthetic construct
  source 1..75: mol_type = other DNA
aggcagcaccgagtgcctggtggtattcccggatggcgttggcattctgccgtggatggtgcccggcacggacga

SEQ ID NO: 756954 - DNA, 75 bp, synthetic construct
  source 1..75: mol_type = other DNA
caccgatgcctggctgaaaggctgggacgagcgcaatggtggtaacctgacgctgcgcctggatgacgccgatat

SEQ ID NO: 756955 - DNA, 75 bp, synthetic construct
  source 1..75: mol_type = other DNA
gacagtcgggattattttagtagtgagccacaagcgcaattatcctgcctcaaccgcgcggcggaattcgttctg

SEQ ID NO: 756956 - DNA, 75 bp, synthetic construct
  source 1..75: mol_type = other DNA
ggctgcgatcaacaagagaatgcggcggcaaaagtggaatacgacggactttcgaacagccaaccgctgcgtgtc

SEQ ID NO: 756957 - DNA, 75 bp, synthetic construct
  source 1..75: mol_type = other DNA
gccataaacaatgcaggcactgcaaccagacattagacggaaacataggagggtatcgcccggcactgattcgaa

SEQ ID NO: 756958 - DNA, 75 bp, synthetic construct
  source 1..75: mol_type = other DNA
gtgttcagtgccggattgatgatgacaatgaacaggagaatgcacttcttatgatgtatctggcagcagccagag

SEQ ID NO: 756959 - DNA, 75 bp, synthetic construct
  source 1..75: mol_type = other DNA
aaaattactggaaaaagcgatcagcgacttcaagaaagtgaaccagttgcaagggattaacttcacccgccgctt

SEQ ID NO: 756960 - DNA, 75 bp, synthetic construct
  source 1..75: mol_type = other DNA
cgcgtagccgaaggttccaccgtaaaaggcaaagccatgtttgtttgtgccagccgtgaaattgcctgggatttc

SEQ ID NO: 756961 - DNA, 75 bp, synthetic construct
  source 1..75: mol_type = other DNA
ggttgctatcgccagagcattagtaaatgaaccgcgcgtattattgctggatgaaccactcggcgcgctggatct

SEQ ID NO: 756962 - DNA, 75 bp, synthetic construct
  source 1..75: mol_type = other DNA
cgggatgttaataccgttttccaggactatgcgctgtttccccatatgtcgattctcgataacgtggcctacggg

SEQ ID NO: 756963 - DNA, 75 bp, synthetic construct
  source 1..75: mol_type = other DNA
gcgcgcagtagatggcgtcagtattgcgataaaagatggtgagttcttctctatgctggggccgtccggctccgg

SEQ ID NO: 756964 - DNA, 75 bp, synthetic construct
  source 1..75: mol_type = other DNA
gcgttcacaccaccgcagcgaacctggatatccgcatcccgtatgccacggacccggcgggcaaccgcctgcccg

SEQ ID NO: 756965 - DNA, 75 bp, synthetic construct
  source 1..75: mol_type = other DNA
gccgctgattgcggagaaactttgcggcatgatggggagctttgcattgcgcccggaacatatccgcctcaatac

SEQ ID NO: 756966 - DNA, 75 bp, synthetic construct
  source 1..75: mol_type = other DNA
actacgcgctttttccgcatatgtcgattcttgacaacgtggcctatgggctgatggtcaaaggggtggataaaa

SEQ ID NO: 756967 - DNA, 75 bp, synthetic construct
  source 1..75: mol_type = other DNA
gcgtatcgttaatgaggacggcagcgatgacgtggcgctgatgactggtgaagtggttgaccgtcagacagggca

SEQ ID NO: 756968 - DNA, 75 bp, synthetic construct
  source 1..75: mol_type = other DNA
gcagagcttgtcctgaaaagtcaggcgcagggacatgcacaacgaatggacatcagcagcatcctgcaaaaatca

SEQ ID NO: 756969 - DNA, 75 bp, synthetic construct
  source 1..75: mol_type = other DNA
cacgcacgcactatcaaaccgttactgcgctgctgttttcagctatctcgccgaagatctggcagaactgcaaag

SEQ ID NO: 756970 - DNA, 75 bp, synthetic construct
  source 1..75: mol_type = other DNA
atgacgtacgcagtggagtttgacaacgtctcgcggttgtacggtgacgtgcgcgcagtagatggcgtcagtatt

SEQ ID NO: 756971 - DNA, 75 bp, synthetic construct
  source 1..75: mol_type = other DNA
gcgtctggaaagccatctacaaaaactcctgaccgatgccgtgaaaatgcgtgggctgattgcgcccgccagcaa

SEQ ID NO: 756972 - DNA, 75 bp, synthetic construct
  source 1..75: mol_type = other DNA
gtctggagttatcaagccgagaacgccagaagaacagcagatggttgagcaggcgaaacaacaacaggccagtca

SEQ ID NO: 756973 - DNA, 75 bp, synthetic construct
  source 1..75: mol_type = other DNA
atccagaagccgacaaattaacagatgaacataagtcaggtgtaaatcctggtaatgctgccaacttactgattt

SEQ ID NO: 756974 - DNA, 75 bp, synthetic construct
  source 1..75: mol_type = other DNA
taatgaaggtgaaacacataggtcatatccattcaatagcccttgtccttccgacactattatggttggtcaata

SEQ ID NO: 756975 - DNA, 75 bp, synthetic construct
  source 1..75: mol_type = other DNA
aatccacctgtaccactgcgactatcgcggcctgccgctggcgcttatcagcacggaaggggcaacagaatggta

SEQ ID NO: 756976 - DNA, 75 bp, synthetic construct
  source 1..75: mol_type = other DNA
atccgcagacggaaacattgctctggcagcatgaaaccagacacgcttacaacgctcaaggactggcgaatcagc

SEQ ID NO: 756977 - DNA, 75 bp, synthetic construct
  source 1..75: mol_type = other DNA
ttcgcctggatggaccgcttctgtgatgagtacagcggtggtatctggtccttttacacgctcagcaatggcggc

SEQ ID NO: 756978 - DNA, 75 bp, synthetic construct
  source 1..75: mol_type = other DNA
ctggcgtgcgctgattggcttttcaattggcggatcgctgggattaattctggggctgattagcgggctgtcacg

SEQ ID NO: 756979 - DNA, 75 bp, synthetic construct
  source 1..75: mol_type = other DNA
caagagatcttgaaatatcaaagggacatatatcatacctgggggacccagaaggtactttgcataaaaaagatt

SEQ ID NO: 756980 - DNA, 75 bp, synthetic construct
  source 1..75: mol_type = other DNA
ccaaagtgaaagccgtcagtgcggcgctgggggaaccggtgagcagtgcgcaaatcaaagcggcgctggctgagg

SEQ ID NO: 756981 - DNA, 75 bp, synthetic construct
  source 1..75: mol_type = other DNA
aaaccttcatcctgcaccagcaaaacggcgtgcgcctgcccgtcctcaaccgcgcctcgctcaccgtcaacgcgg

SEQ ID NO: 756982 - DNA, 75 bp, synthetic construct
  source 1..75: mol_type = other DNA
tctaatgattctttagaaacatgtaagatgaagtgctccggaaataacattggacgtcttattagatttgtattc

SEQ ID NO: 756983 - DNA, 75 bp, synthetic construct
  source 1..75: mol_type = other DNA
gacagaacagcttaacccggcaggcttaagctacacgtatcagtatgagaaagaccacatcaccatcaccgacag

SEQ ID NO: 756984 - DNA, 75 bp, synthetic construct
  source 1..75: mol_type = other DNA
attggcggatcgctggggttgattctgggactgataagcggactgtcgcgctggggagaaaggctgctggatacc

SEQ ID NO: 756985 - DNA, 75 bp, synthetic construct
  source 1..75: mol_type = other DNA
gtcgccattattctttacgccctgctcggcaaacttgctgacgtcagcgcgcagctgttagagcgcctctggttg

SEQ ID NO: 756986 - DNA, 75 bp, synthetic construct
  source 1..75: mol_type = other DNA
ttgctgccgacccacgttaaccgcaacgttccgttgtttgagcaggcgctggagttcgcgcgcaaaggcggcacc

SEQ ID NO: 756987 - DNA, 75 bp, synthetic construct
  source 1..75: mol_type = other DNA
gaatacccggagaatttaccagccgcgccgctggtacgctatggctggacgccgcgcggcgaactggcggcggtg

SEQ ID NO: 756988 - DNA, 75 bp, synthetic construct
  source 1..75: mol_type = other DNA
gccgggacaacggtatccgtctgtctgccgtgtggctgacacacgaccctgaatacccggagaatttacctgccg

SEQ ID NO: 756989 - DNA, 75 bp, synthetic construct
  source 1..75: mol_type = other DNA
atatcacccgctaccgttatgataatccacacagtgacttcccctgcgcaacggaagatgccaccggcagccgga

SEQ ID NO: 756990 - DNA, 75 bp, synthetic construct
  source 1..75: mol_type = other DNA
gctggacatggctgccaccctggccgttccctttaccggtgatgggcgagatgccgcgcagatcctgcggacact

SEQ ID NO: 756991 - DNA, 75 bp, synthetic construct
  source 1..75: mol_type = other DNA
acaggtggagccggaatacacaccggcgcgaaaagctcatctttatcactgcgaccaccggggactgccgctggc

SEQ ID NO: 756992 - DNA, 75 bp, synthetic construct
  source 1..75: mol_type = other DNA
aaaccggaagtgacctggtacggctgggacggcgaccggctgaccacgatacagaacgacagaacccgcatccag

SEQ ID NO: 756993 - DNA, 75 bp, synthetic construct
  source 1..75: mol_type = other DNA
atccatgggtcggcaaaaccccctacggctgggtggtcgacccggtagggctacgtctgacgctgcgtaaagtgt

SEQ ID NO: 756994 - DNA, 75 bp, synthetic construct
  source 1..75: mol_type = other DNA
gacgtgatttctaaggtctatcttcacctcgtccagcattgggacgttcaggagtttcttgaggtattcgcgtaa

SEQ ID NO: 756995 - DNA, 75 bp, synthetic construct
  source 1..75: mol_type = other DNA
tgaaaattctacgtgcgctggagcgtggcgaaggccagccgggcgatatcgaaacacttgagcaactgtgtcgat

SEQ ID NO: 756996 - DNA, 75 bp, synthetic construct
  source 1..75: mol_type = other DNA
gccaccggtgagctggcgaaaacgcagcgccgcagcctggcggatgcgcttcagcagtccggcggtgaagacggt

SEQ ID NO: 756997 - DNA, 75 bp, synthetic construct
  source 1..75: mol_type = other DNA
gatgaggtgctgcccgcgccgctgccgccgtaccgggtactgaccgggctggtggaccgcttcgggcgcacacag

SEQ ID NO: 756998 - DNA, 75 bp, synthetic construct
  source 1..75: mol_type = other DNA
gtattacgaagttcgtaaagagtctgttgacgtcatcagttatcgacatccaatcactggagagattgcaacata

SEQ ID NO: 756999 - DNA, 75 bp, synthetic construct
  source 1..75: mol_type = other DNA
acgcgcagtatggaatacgatgctgccggacgggtcatccgcctgaccagtgaaaacggcagccacaccaccttc

SEQ ID NO: 757000 - DNA, 75 bp, synthetic construct
  source 1..75: mol_type = other DNA
cacgcacgcgctgtcaaaccgttactgcgctgctgttttcagctatctcgccgaagatctggcagaactgcaaag

SEQ ID NO: 757001 - DNA, 75 bp, synthetic construct
  source 1..75: mol_type = other DNA
aagcatttgtcacgctggcagagtccagttcatttaacaatgctgctaaattacttaatattacgcaacctgcat

SEQ ID NO: 757002 - DNA, 75 bp, synthetic construct
  source 1..75: mol_type = other DNA
gtccattaacacaagattgctcaaatagatgtattgattatattaatccagagcataaaaaaacgataaaggctt

SEQ ID NO: 757003 - DNA, 75 bp, synthetic construct
  source 1..75: mol_type = other DNA
ggtaaagttgctgcggcactgggtgcaactctgctgttggaacactgcaagccagatgtgattattaacaccggt

SEQ ID NO: 757004 - DNA, 75 bp, synthetic construct
  source 1..75: mol_type = other DNA
caacagtctcatctcagcttcgacgaatttctggccgttgcagccaaacagtccagcctgatggttgagtcactg

SEQ ID NO: 757005 - DNA, 75 bp, synthetic construct
  source 1..75: mol_type = other DNA
acgcgccatctccgacgtggccgatcaacagtctcatcttagcttcgatgagttcctggctgttgccgctaaaca

SEQ ID NO: 757006 - DNA, 75 bp, synthetic construct
  source 1..75: mol_type = other DNA
gtctaccgccacgatgaatacggcaggctggcggagaagacggaccgtatcccggaaggggggatgcggatgcac

SEQ ID NO: 757007 - DNA, 75 bp, synthetic construct
  source 1..75: mol_type = other DNA
tcaccgcgaggaaggtatcagcctttaccgccactatgacaaccgtggccggttaacctcggtgaaagacgcaca

SEQ ID NO: 757008 - DNA, 75 bp, synthetic construct
  source 1..75: mol_type = other DNA
gttaagcccgcatctttacctggcgaccaacagcgcacaggggctgtggtggatactggggtggtcagagcgggt

SEQ ID NO: 757009 - DNA, 75 bp, synthetic construct
  source 1..75: mol_type = other DNA
aacgagcaggggctggcaaaccgcgtcacgccggacagcctgccgccggtggagtggctgacgtatggcagcggt

SEQ ID NO: 757010 - DNA, 75 bp, synthetic construct
  source 1..75: mol_type = other DNA
gcacagggccgtgaaacgcggtatgaatacaacgccgcaggcgacctgactgccgtcattaccccggacggcaac

SEQ ID NO: 757011 - DNA, 75 bp, synthetic construct
  source 1..75: mol_type = other DNA
ccgctatctttatgagcaggaccgcatcaccgtcaccgacagcctgaaccggcgtgaggtgctgcatacagaagg

SEQ ID NO: 757012 - DNA, 75 bp, synthetic construct
  source 1..75: mol_type = other DNA
aggatcatctcggcacgttttggtgccccccgaatccaggtcaggacatgggttgccctctatgaaaaacatgga

SEQ ID NO: 757013 - DNA, 75 bp, synthetic construct
  source 1..75: mol_type = other DNA
gaaaataaagcaaaggatgatttcagagtcaagaaagaagaagcggtagcccgggctgaagctgaaaaagcaaaa

SEQ ID NO: 757014 - DNA, 75 bp, synthetic construct
  source 1..75: mol_type = other DNA
gattacagcccacagggtatcgcacttgtacaaagtgttctttttccgggaattattcgccggattattctggat

SEQ ID NO: 757015 - DNA, 75 bp, synthetic construct
  source 1..75: mol_type = other DNA
aaagaccgacgcattgaggatcttgaaaggcaagttcgatttcttgaaacgcggcttgtgtatctaaaaaagctg

SEQ ID NO: 757016 - DNA, 75 bp, synthetic construct
  source 1..75: mol_type = other DNA
ccaggtggctgaaggtttatgaagagcgcggagaagctggtttacgcgcgctcaagattggcaccaaaagaaaca

SEQ ID NO: 757017 - DNA, 75 bp, synthetic construct
  source 1..75: mol_type = other DNA
tggtgcggcatctgttgggaagtggatgaaggtgttcagcgaacatggagagcaagggcttcgttctcttcgtgt

SEQ ID NO: 757018 - DNA, 75 bp, synthetic construct
  source 1..75: mol_type = other DNA
gacagcctggaccgccgtgaagtgctgcacacgcagggcgaagccgggctgaagcgggtggtgaaaaaggaacac

SEQ ID NO: 757019 - DNA, 75 bp, synthetic construct
  source 1..75: mol_type = other DNA
gcagatgcaaaaccagatggacccggtgtacacgccggcgcgaaaaatccacctgtaccactgcgaccatcgcgg

SEQ ID NO: 757020 - DNA, 75 bp, synthetic construct
  source 1..75: mol_type = other DNA
tgaccacgatacagaacgacagaacccgcatccagacgatttatcagccggggagcttcacgccactcatcaggg

SEQ ID NO: 757021 - DNA, 75 bp, synthetic construct
  source 1..75: mol_type = other DNA
cgagcaatcccggaacctggactgatgagagtaaacatccgaatacccgtctaaattttgctaatgaattcgacc

SEQ ID NO: 757022 - DNA, 75 bp, synthetic construct
  source 1..75: mol_type = other DNA
tattgcgcgttgccccctggtttttaccggtgggcatcgtggcggtttggcaactggcctcttcggttggctggt

SEQ ID NO: 757023 - DNA, 75 bp, synthetic construct
  source 1..75: mol_type = other DNA
gatgacgaagggtatccggaaatagcccgctgtacggagcgggagtttgcgaccattcttgccggtatcagcgcc

SEQ ID NO: 757024 - DNA, 75 bp, synthetic construct
  source 1..75: mol_type = other DNA
aaaggcaagttcgatttcttgaaacgcggcttgtgtatctaaaaaagctgaaagccttagctcattccacgaaaa

SEQ ID NO: 757025 - DNA, 75 bp, synthetic construct
  source 1..75: mol_type = other DNA
accaaacgcgtcgcctggcgattgcctgggcaaaaagagattattgttcctgatatggaaacgaaaatcgccgcc

SEQ ID NO: 757026 - DNA, 75 bp, synthetic construct
  source 1..75: mol_type = other DNA
gcgctttccggcggtcaatattgaagacagcgcccgcaccttaacaaagcgagtcgcctggcgattgccggggca

SEQ ID NO: 757027 - DNA, 75 bp, synthetic construct
  source 1..75: mol_type = other DNA
ccgactggcgggcagtactggtgtttcaggagcccgtattgaagagcaccagaacattaaggttgccagtccacc

SEQ ID NO: 757028 - DNA, 75 bp, synthetic construct
  source 1..75: mol_type = other DNA
cagaacgggccaatgcggcgatagcgctgttcggcacacccattgaagatctggctgttgaccagatcccggatt

SEQ ID NO: 757029 - DNA, 75 bp, synthetic construct
  source 1..75: mol_type = other DNA
tccggctctgaaaccatgacgctgcttgtcagtatggcgcagcaggggaaattcgccctggataaaaccggcgat

SEQ ID NO: 757030 - DNA, 75 bp, synthetic construct
  source 1..75: mol_type = other DNA
ttttgccaaaatcgctttgccagtcaatgatcgataatcaacaactagttagccgggtaatcccaacgatgcgcc

SEQ ID NO: 757031 - DNA, 75 bp, synthetic construct
  source 1..75: mol_type = other DNA
ggagttcgcgcgcaaaggcggcaccatcgacatcaccagtagcattgacgaaccggtcgcccctgccgaaggtat

SEQ ID NO: 757032 - DNA, 75 bp, synthetic construct
  source 1..75: mol_type = other DNA
ccggtgcttatcatgtaccttcccgcaccattacgggttctgtggaaaaggatgtggcgattatcgatcgcgtga

SEQ ID NO: 757033 - DNA, 75 bp, synthetic construct
  source 1..75: mol_type = other DNA
tcttgaaaggcaagttcgatttcttgaaacgcggcttatgtatctaaaaaagctgaaagccttagctcatcccac

SEQ ID NO: 757034 - DNA, 75 bp, synthetic construct
  source 1..75: mol_type = other DNA
cgccagcgcctttcagggggagatacatgtgcatcttcacggggtgagttcgcataatccccgggaactggcgcg

SEQ ID NO: 757035 - DNA, 75 bp, synthetic construct
  source 1..75: mol_type = other DNA
aacaacagtggcttggtaatgaagaatcaaaacaaaaagagttgaattccattagggaaagattaatgaatacgt

SEQ ID NO: 757036 - DNA, 75 bp, synthetic construct
  source 1..75: mol_type = other DNA
tgatttcacttgcactggtaaaggtatgatttctgctgtagaaaactcaagcataattattggcgatgactgcat

SEQ ID NO: 757037 - DNA, 75 bp, synthetic construct
  source 1..75: mol_type = other DNA
atggcggtagcattgtccagggttcagccggggtgcgcattggtgccccccaccggcgtggcctgttcggtgtgc

SEQ ID NO: 757038 - DNA, 75 bp, synthetic construct
  source 1..75: mol_type = other DNA
agcgaaaaggcgcaggtttacgcgctgaataccagcgatggtactgtggcatggcaaactaaagtcgcgggtgaa

SEQ ID NO: 757039 - DNA, 75 bp, synthetic construct
  source 1..75: mol_type = other DNA
gacggcgcttgatctgcgcagtggtcagattatgtggaaacgtgagttgggttcggtgaatgatttcatcgttga

SEQ ID NO: 757040 - DNA, 75 bp, synthetic construct
  source 1..75: mol_type = other DNA
caaacttccccgctatgttgtaaaacttcatccggatgatttttttgacgaagaagacgcagaagttctgcgctt

SEQ ID NO: 757041 - DNA, 75 bp, synthetic construct
  source 1..75: mol_type = other DNA
tctattccaatcttcatccggcactggcggacaacgttgtctatgcagcggaccgcgctggtttagtaaaagcgc

SEQ ID NO: 757042 - DNA, 75 bp, synthetic construct
  source 1..75: mol_type = other DNA
ggtgcgcgtagtgcatgggaagcaggcgtgaaaagcgatgttactccggcactgagcgaaatgatgcagatgaaa

SEQ ID NO: 757043 - DNA, 75 bp, synthetic construct
  source 1..75: mol_type = other DNA
gaagctgacggcgctgtcaaatggacagttaacctcgatatgccttcgctctctttgcgtggcgagtctgcgccg

SEQ ID NO: 757044 - DNA, 75 bp, synthetic construct
  source 1..75: mol_type = other DNA
tgatgtccgctaatgaacctcaatttgacctcactgcaacaccagtacctgacgagcagcgtctcgatttctggc

SEQ ID NO: 757045 - DNA, 75 bp, synthetic construct
  source 1..75: mol_type = other DNA
gccatgacggagcactattaccgcctgcgggattacgccctgcagcaccctgaatcccacgccatttttcgcatt

SEQ ID NO: 757046 - DNA, 75 bp, synthetic construct
  source 1..75: mol_type = other DNA
gcaatgaacgcacactattatcgcctgcgggactatgccctgcagcatcctgaagcttacgccattctgcgcatc

SEQ ID NO: 757047 - DNA, 75 bp, synthetic construct
  source 1..75: mol_type = other DNA
cgtgtcgatgacgaagggtatccggaaatagcccgctgtacggaacgagagtttgcgaccattcttgccggtatc

SEQ ID NO: 757048 - DNA, 75 bp, synthetic construct
  source 1..75: mol_type = other DNA
gaacattcttgccggtatcagcgccggcggtatgtactgtccggaatgcggcatggttcactggccggacggagt

SEQ ID NO: 757049 - DNA, 75 bp, synthetic construct
  source 1..75: mol_type = other DNA
tctgggactcgctattgtacgaaggtttttcactggctatcggcgtcacgggaaccgaggcgctggcaaatacct

SEQ ID NO: 757050 - DNA, 75 bp, synthetic construct
  source 1..75: mol_type = other DNA
gatgacgaagggtatccggaaattgcccgctgcacggagcgggagtttgcaaccattcttgccggtatcagcgcc

SEQ ID NO: 757051 - DNA, 75 bp, synthetic construct
  source 1..75: mol_type = other DNA
ggggagcttcacgccactcatcagggttgaaaccgccaccggtgagctggcgaaaacgcagcgccgcagcctggc

SEQ ID NO: 757052 - DNA, 75 bp, synthetic construct
  source 1..75: mol_type = other DNA
aacgtaaacccgcctctcaaagaagcaaacttccccgctatgttgtgaaacttcatccggatgatttttttgacg

SEQ ID NO: 757053 - DNA, 75 bp, synthetic construct
  source 1..75: mol_type = other DNA
atttgcaaccattcttgccggtatcagcgccggcggcatgtactgtccggagtgcggcacggttcactggccgga

SEQ ID NO: 757054 - DNA, 75 bp, synthetic construct
  source 1..75: mol_type = other DNA
ccatgacgtggagccgttacggtcagttgctgagcttcactgactgttccggttatgtaacccgctatgaccatg

SEQ ID NO: 757055 - DNA, 75 bp, synthetic construct
  source 1..75: mol_type = other DNA
accatcgcggcctgccgctggcgcttatcagcacggaagggacaacagcgtggtacgcagaatacgatgaatggg

SEQ ID NO: 757056 - DNA, 75 bp, synthetic construct
  source 1..75: mol_type = other DNA
ccatatcctattgaccaggccagtagtgcgcctaatgttttcaaaacattcttcagagcattaagcccttacgac

SEQ ID NO: 757057 - DNA, 75 bp, synthetic construct
  source 1..75: mol_type = other DNA
tgccaccggcagccggaaaaccatgacgtggagccgttacggtcagttgctgagcttcactgactgttccggtta

SEQ ID NO: 757058 - DNA, 75 bp, synthetic construct
  source 1..75: mol_type = other DNA
aggaacacgcggacggcagcgtcacgcagagtcagtttgacgcggtgggcaggcttaaggcacagacggatgccg

SEQ ID NO: 757059 - DNA, 75 bp, synthetic construct
  source 1..75: mol_type = other DNA
gggcctcatcacgcgcatcaccacgccggatggcagggcatcggcgttttactataaccaccacagccagttaac

SEQ ID NO: 757060 - DNA, 75 bp, synthetic construct
  source 1..75: mol_type = other DNA
ccggcgcgaaaaatccacctgtaccactgcgaccatcgcggcctgccgctagcgctcatcagcacggaaggggca

SEQ ID NO: 757061 - DNA, 75 bp, synthetic construct
  source 1..75: mol_type = other DNA
cgggcgggtgacagaacagctaaacccggcaggcttaagctacacgtatcagtatgagaaagaccgcatcaccat

SEQ ID NO: 757062 - DNA, 75 bp, synthetic construct
  source 1..75: mol_type = other DNA
cagcagctcatccgcctgccggggcagcagtatgatgaggagtccggcctgtattacaaccgccaccgctattat

SEQ ID NO: 757063 - DNA, 75 bp, synthetic construct
  source 1..75: mol_type = other DNA
gggggaggccggacctgaagccattatgcccctgacccgggcggcggatggctcgctgggtgtgcgcgcggtggg

SEQ ID NO: 757064 - DNA, 75 bp, synthetic construct
  source 1..75: mol_type = other DNA
agatctgaaggcgatggcggacgatggtcaactgacggcggataaagtcgttcctgcgttaatcagccagctgga

SEQ ID NO: 757065 - DNA, 75 bp, synthetic construct
  source 1..75: mol_type = other DNA
gggcggcggatggctcgctgggtgtacgcgcggtgggcagtatgaacggcagtgccggtctggtgtattccccgg

SEQ ID NO: 757066 - DNA, 75 bp, synthetic construct
  source 1..75: mol_type = other DNA
atatggttacagtgccggtgatgtactgaaggtgacggaggccatttcgacagggctgaaaatctccggtgccag

SEQ ID NO: 757067 - DNA, 75 bp, synthetic construct
  source 1..75: mol_type = other DNA
ttttcggataatgcggccctgtttgcccgttcggctgcctcgatgcgtgaatatggttacagtgctggtgatgtg

SEQ ID NO: 757068 - DNA, 75 bp, synthetic construct
  source 1..75: mol_type = other DNA
gagtgccctgacaaaaacagagcgtgagctggccctgtccagactgaaaggggaagaaaaagagcgtgcccggct

SEQ ID NO: 757069 - DNA, 75 bp, synthetic construct
  source 1..75: mol_type = other DNA
ctggcggacggcaaagccaaacaaacgtataaagttacggtgactgatgccaataacaacctgttgaaagatagc

SEQ ID NO: 757070 - DNA, 75 bp, synthetic construct
  source 1..75: mol_type = other DNA
ttgcttacgatacgctgtttctgggggccatcaacactaccacagtgcatccgcatgaaatcgttaaggcgggct

SEQ ID NO: 757071 - DNA, 75 bp, synthetic construct
  source 1..75: mol_type = other DNA
attgctacctcaaggcaaacgctatgcttgcgagtgttactggaaacctaagtaattgttcccctaacatcatac

SEQ ID NO: 757072 - DNA, 75 bp, synthetic construct
  source 1..75: mol_type = other DNA
ccggggcgaaaaatctgagacggaaaaagcggaagacagtttttcccgtctgctgaagcagcagaaggaacaact

SEQ ID NO: 757073 - DNA, 75 bp, synthetic construct
  source 1..75: mol_type = other DNA
ggcctccggagcggtgtctgccacggcaggacttgtgacggctgcacgtaatgaagttgcactggcggaagcaca

SEQ ID NO: 757074 - DNA, 75 bp, synthetic construct
  source 1..75: mol_type = other DNA
cggataaagtcgttcctgcgttaatcagccagctgggggtattgcgtgatgaatatgccgccatgccagaaacgg

SEQ ID NO: 757075 - DNA, 75 bp, synthetic construct
  source 1..75: mol_type = other DNA
ggacgcctggcgattgcccgattgcaggtcgataacaatagcgaaagtgaatatgcgattattccggcaagcgtt

SEQ ID NO: 757076 - DNA, 75 bp, synthetic construct
  source 1..75: mol_type = other DNA
ctggcctggtccgcggttcgccagcaagagtctacgctggcgattcgtgccgttcatcaaggcacaacgatgcca

SEQ ID NO: 757077 - DNA, 75 bp, synthetic construct
  source 1..75: mol_type = other DNA
agaaagcggcaggacttgccggaggcgtccggttcggtggggacggagggggcgatattttatcgtctgcggatg

SEQ ID NO: 757078 - DNA, 75 bp, synthetic construct
  source 1..75: mol_type = other DNA
gcgctgaagagcctgaaccctgaacctctaacgagtaccttaaaagtccaatgcaatccgacactgtgctaccct

SEQ ID NO: 757079 - DNA, 75 bp, synthetic construct
  source 1..75: mol_type = other DNA
ggctatatcattgcgcagcaggacgataataatcaggccatgcaatggctgacccggctgcgggataactcccat

SEQ ID NO: 757080 - DNA, 75 bp, synthetic construct
  source 1..75: mol_type = other DNA
atgcaaatacctcgcatgtcgcttcgccagctagtctggttcggcgctgctttattgctggtcggcacgctgttg

SEQ ID NO: 757081 - DNA, 75 bp, synthetic construct
  source 1..75: mol_type = other DNA
aagtatcacccccaaaaacgacactctgttaattacatttgactccagcgaccagagcgccgccgcaaaagcggt

SEQ ID NO: 757082 - DNA, 75 bp, synthetic construct
  source 1..75: mol_type = other DNA
ttgcggtattattgccgatggcctgcacgttgattacgctaacatccgcaacgccaaacgtctgaaaggcgacaa

SEQ ID NO: 757083 - DNA, 75 bp, synthetic construct
  source 1..75: mol_type = other DNA
atatgccgactggcgacatttttaccgcacgcattattttcacgatacccagctggatatgcattttttcgggct

SEQ ID NO: 757084 - DNA, 75 bp, synthetic construct
  source 1..75: mol_type = other DNA
cttcaccgacggcaatctgattaagaaaatttttgtcgataagctcacgcaaacgcagttgattaatggccgtct

SEQ ID NO: 757085 - DNA, 75 bp, synthetic construct
  source 1..75: mol_type = other DNA
cgcacgcattattttcacgatacccaactggatatgcatttttccgggctgacgtacgccgtactcagcctgttt

SEQ ID NO: 757086 - DNA, 75 bp, synthetic construct
  source 1..75: mol_type = other DNA
atgtatgcattaacccagggccggatttttaccggccatgaatttcttgatgaccatgcggttgttatcgctgat

SEQ ID NO: 757087 - DNA, 75 bp, synthetic construct
  source 1..75: mol_type = other DNA
taggtctgcatctggaaggtccgtggctgaatctggtaaaaaaaggcacccataatccgaattttgtgcgtaagc

SEQ ID NO: 757088 - DNA, 75 bp, synthetic construct
  source 1..75: mol_type = other DNA
agggcggcagcctgaccatcatcgccacggcgctcatcgatacgggttcaaaaatggacgaagttatctacgaag

SEQ ID NO: 757089 - DNA, 75 bp, synthetic construct
  source 1..75: mol_type = other DNA
ttattctggcaatcgtaggattgcgtattatttgtgaacgtgatgacaaagcgtttcgtcgttttcgttttcaat

SEQ ID NO: 757090 - DNA, 75 bp, synthetic construct
  source 1..75: mol_type = other DNA
aatatagcggcagcgtttgatataccgcaagcgtataccatgccattatccgaagcgcgtagagaggcagtgaac

SEQ ID NO: 757091 - DNA, 75 bp, synthetic construct
  source 1..75: mol_type = other DNA
atgtgaaaatcggaagtaatgttaaaatcggggcaatgtcttttattatggaagatgtacctgataactgtactt

SEQ ID NO: 757092 - DNA, 75 bp, synthetic construct
  source 1..75: mol_type = other DNA
agagtagcggtgcggattacctgatcgctattggtggtggttctccacaggacacgtgtaaagcgattggcatca

SEQ ID NO: 757093 - DNA, 75 bp, synthetic construct
  source 1..75: mol_type = other DNA
attgacgctgacatgatggatggtatgcctccagcgctgaaagccgcgacgggtgtcgatgcgctcactcatgct

SEQ ID NO: 757094 - DNA, 75 bp, synthetic construct
  source 1..75: mol_type = other DNA
tttaaccggggacgcatcagcgcgagtgagcgcgtcgacatcgatatcagtcacaaggcgctcgccggtggggtg

SEQ ID NO: 757095 - DNA, 75 bp, synthetic construct
  source 1..75: mol_type = other DNA
ggactcgttacggcgatgcattcacccagccagaacagcgcgcgttattgtttaagcgtgccgcagctgcgcaac

SEQ ID NO: 757096 - DNA, 75 bp, synthetic construct
  source 1..75: mol_type = other DNA
aaaggcaaaacctttacagcgaaaccgaaaccggacgcagagatcgcctcgctgttagcgaaacgttcctcttgc

SEQ ID NO: 757097 - DNA, 75 bp, synthetic construct
  source 1..75: mol_type = other DNA
ggaataccacgctgcccggcggaaatatgcaatttcagggcgtcattattgcggaaacttgccggattgaagctg

SEQ ID NO: 757098 - DNA, 75 bp, synthetic construct
  source 1..75: mol_type = other DNA
ttaaaaaactaacgcagcagtacaacgtgacctatatcggcatcgactcgaccggcgtcggtcacggtgtctacg

SEQ ID NO: 757099 - DNA, 75 bp, synthetic construct
  source 1..75: mol_type = other DNA
tgcagcgctgcatggtcgatgcgatggaagaatgggaagactttgcaccgttctctgaccgtccgtttaactggc

SEQ ID NO: 757100 - DNA, 75 bp, synthetic construct
  source 1..75: mol_type = other DNA
cagcagagaaagacatgctggaagcgctgataaggcttttaccacaggttctacaggaaaaaccccgtgactttc

SEQ ID NO: 757101 - DNA, 75 bp, synthetic construct
  source 1..75: mol_type = other DNA
tacctcagatttttttcctttatatgttgcaaaacaatatatgctagatgaacctataattgttacagaaggctt

SEQ ID NO: 757102 - DNA, 75 bp, synthetic construct
  source 1..75: mol_type = other DNA
aactcaacgggttatatagcgaagaagggatatatctcagtagcacctggagtttccagggggatcaccgttatt

SEQ ID NO: 757103 - DNA, 75 bp, synthetic construct
  source 1..75: mol_type = other DNA
cgccctgcatcgtccgaaacgcttcttcggtgcggcgcgtaacgtagaagagggcggcagcctgaccatcatcgc

SEQ ID NO: 757104 - DNA, 75 bp, synthetic construct
  source 1..75: mol_type = other DNA
aataaaagcaggcatataaagaaaaaacttgaggtgcttaatatgtgggttaattaccttaatacgatagcagga

SEQ ID NO: 757105 - DNA, 75 bp, synthetic construct
  source 1..75: mol_type = other DNA
cagtatatggacagaaaaaaagaagctatgaactggtggtacgactatctgaataagcaaattagtggtgacggt

SEQ ID NO: 757106 - DNA, 75 bp, synthetic construct
  source 1..75: mol_type = other DNA
gattcagctcatcgccaagccgcaaaagacagggggggatttcaaagagattgacctgctcggacggcagattga

SEQ ID NO: 757107 - DNA, 75 bp, synthetic construct
  source 1..75: mol_type = other DNA
taaaccccaacgtcgccaaccgcaacaagggtgagcgcaaaaaaccgaaaaagaattttttcagtgacgaggcta

SEQ ID NO: 757108 - DNA, 75 bp, synthetic construct
  source 1..75: mol_type = other DNA
cactggtatcgcgcagggcttgagcaccgcatccgcgatatcctgaaatcccgccagattggcgcgacgttttat

SEQ ID NO: 757109 - DNA, 75 bp, synthetic construct
  source 1..75: mol_type = other DNA
gaaatgaaaaccgcaatggtgctcaaggcaaaagacaccattcgccgtggctgtctggagtacgacgcaggggca

SEQ ID NO: 757110 - DNA, 75 bp, synthetic construct
  source 1..75: mol_type = other DNA
ttgacctgctcgggcgacaaattgagcgactggcgcgcgttaaccgctacagccagaccggcaacgaggtcgacc

SEQ ID NO: 757111 - DNA, 75 bp, synthetic construct
  source 1..75: mol_type = other DNA
gattcagctcatcgccaagccgcaaaagtcaggcggcgacttcaaagagattgacctgctcgggcggcagattga

SEQ ID NO: 757112 - DNA, 75 bp, synthetic construct
  source 1..75: mol_type = other DNA
atgcggcaattcataatctctgaaaataccatgcaaaatacttcttttagaaatcaccaggttaagcgattcagc

SEQ ID NO: 757113 - DNA, 75 bp, synthetic construct
  source 1..75: mol_type = other DNA
tgcgtgagccgaaatatggcgctgcggcggacaaagttcctgccgatcaactgcgtaaaggcgatatcgtactgg

SEQ ID NO: 757114 - DNA, 75 bp, synthetic construct
  source 1..75: mol_type = other DNA
tattgcgctgaaagatatcgtcaaaggcggtattaaagagcgcttcgcccagctgcgccaaatgggcataaaaac

SEQ ID NO: 757115 - DNA, 75 bp, synthetic construct
  source 1..75: mol_type = other DNA
gccctaccctgcccgcaggcgcggagctggttgaagaacccgcgtggttatggcccgcggaatccaccaattcgt

SEQ ID NO: 757116 - DNA, 75 bp, synthetic construct
  source 1..75: mol_type = other DNA
gtggaaccgcatgagaagacagcaattaacgacgaactgtatctttcaatttcgaagctccaggagcatgcagca

SEQ ID NO: 757117 - DNA, 75 bp, synthetic construct
  source 1..75: mol_type = other DNA
ggatgtggacaatgccgatattaaccagcgtttactggaagtcattgaacagatcggcagttattcaaaacagat

SEQ ID NO: 757118 - DNA, 75 bp, synthetic construct
  source 1..75: mol_type = other DNA
ctgggttacaccgatatgctgccagaatttggtggtgatactgcatacagcgatgacttcttcgttggtcgtgtt

SEQ ID NO: 757119 - DNA, 75 bp, synthetic construct
  source 1..75: mol_type = other DNA
ttggcaacggtaaaaaagctgaacagtgggctactggtctgaagtacgacgcgaacaacatctacctggcagcga

SEQ ID NO: 757120 - DNA, 75 bp, synthetic construct
  source 1..75: mol_type = other DNA
ctacgccgatcactggtggctttgccaacaaaacgcaagatatcctgttagttgcgcaataccagttcgacttcg

SEQ ID NO: 757121 - DNA, 75 bp, synthetic construct
  source 1..75: mol_type = other DNA
gttttaacctgcgcgagcgcgatgtgcagtcgcttcacgccacttttgtaccgtttactgcgcaaagtcgaatga

SEQ ID NO: 757122 - DNA, 75 bp, synthetic construct
  source 1..75: mol_type = other DNA
cgtctttagtcctacgctggtacgtcgccattcagtttcaacaccgtcgctggatgcaagtcataacgcagccag

SEQ ID NO: 757123 - DNA, 75 bp, synthetic construct
  source 1..75: mol_type = other DNA
tgtctttagtcctacactggtacgccgccattcagtttcaacgccgtcgctggaggcaacgcataacaccgccag

SEQ ID NO: 757124 - DNA, 75 bp, synthetic construct
  source 1..75: mol_type = other DNA
ccgcccatgttggtttccccacgctgcgactgattcgctatgcgatgggagattactctttggataatcttgcca

SEQ ID NO: 757125 - DNA, 75 bp, synthetic construct
  source 1..75: mol_type = other DNA
gaagaacgatctcaaaacaccggcgcaggcggcggcagaggcaaagggcgagcgggatcgtatttttgcccattg

SEQ ID NO: 757126 - DNA, 75 bp, synthetic construct
  source 1..75: mol_type = other DNA
tctccgtttgatgtggttcacctggatatcacgggcatcgcaggcactgatcgtacctacggggcggttgcacaa

SEQ ID NO: 757127 - DNA, 75 bp, synthetic construct
  source 1..75: mol_type = other DNA
ggttaccgccagaatctggccagcaacaacggcagtgcattcactgccgggattgggctctcaccgtttgatgtg

SEQ ID NO: 757128 - DNA, 75 bp, synthetic construct
  source 1..75: mol_type = other DNA
catacaccgacctcgatgacaactggacgctgggtctggttgcgcagaacctcattccgcgcagcatcgacacga

SEQ ID NO: 757129 - DNA, 75 bp, synthetic construct
  source 1..75: mol_type = other DNA
atcacggatgtggacaaaaacgcgctcacctcccgcgcgtatggtcgtgccgcagtggtcactgatgtgggtatt

SEQ ID NO: 757130 - DNA, 75 bp, synthetic construct
  source 1..75: mol_type = other DNA
tcacacggcaccgtcagtatcgacggtaaagtctctgatgctgacctcacttacctggaagaggtggcaaacagc

SEQ ID NO: 757131 - DNA, 75 bp, synthetic construct
  source 1..75: mol_type = other DNA
accgatggtgatcagatcttcccgctcggttgggcgatggtgcttcagcgtgctggtggttcaaaccacatagcg

SEQ ID NO: 757132 - DNA, 75 bp, synthetic construct
  source 1..75: mol_type = other DNA
gttactcaaagcagattcgttcggcaatcgaagatggggtagtggagccacacgagcagacagcaattaatgatg

SEQ ID NO: 757133 - DNA, 75 bp, synthetic construct
  source 1..75: mol_type = other DNA
gctgaagatcaccttatatgaaggacgtaatcgccaggtgcgccgcatgaccgcccatgttggtttccccacgct

SEQ ID NO: 757134 - DNA, 75 bp, synthetic construct
  source 1..75: mol_type = other DNA
ccccacgctgcgactgattcgctatgcgatgggagattactctttggataatcttgccaatggcgaatggcgaga

SEQ ID NO: 757135 - DNA, 75 bp, synthetic construct
  source 1..75: mol_type = other DNA
ctgacgccgcacaactggcttcgctggctgatgaaacgccggaaggccgcagtattgtgatcctcgccaagcagc

SEQ ID NO: 757136 - DNA, 75 bp, synthetic construct
  source 1..75: mol_type = other DNA
gcgagcagttgaagcagcgggtgatgttgacgttctgctgctggataaaaccggcaccatcaccctcggtaaccg

SEQ ID NO: 757137 - DNA, 75 bp, synthetic construct
  source 1..75: mol_type = other DNA
aacgtgctggtattcctgagcgttccaacggcgacggcgtcggtggctctatcagctacgaattcgaaggctttg

SEQ ID NO: 757138 - DNA, 75 bp, synthetic construct
  source 1..75: mol_type = other DNA
gttccgcaccacgaatatgatttatttgaagagctgatattgacgccctatttcgatatcaacctgaaagatttt

SEQ ID NO: 757139 - DNA, 75 bp, synthetic construct
  source 1..75: mol_type = other DNA
ggttgcaggctgatattctgattaacaccgactccgaagaagaaggtgaaatctacatgggttgtgcgggggtat

SEQ ID NO: 757140 - DNA, 75 bp, synthetic construct
  source 1..75: mol_type = other DNA
aaatttgcttaaggatttactaaataatagtacggtagccagtctcgttggtgctggtgcgtccgccttgttaac

SEQ ID NO: 757141 - DNA, 75 bp, synthetic construct
  source 1..75: mol_type = other DNA
tcagaaatagcggacgcagttgaattttttagcgacaacaaagatgtgatttcagcctcaaaattagcatcacaa

SEQ ID NO: 757142 - DNA, 75 bp, synthetic construct
  source 1..75: mol_type = other DNA
ggcagggactgaattcaacgccgcattatctctgatcagagtgggttgcactcttattgccattagcgatccggt

SEQ ID NO: 757143 - DNA, 75 bp, synthetic construct
  source 1..75: mol_type = other DNA
aaaagcgcaacaagtttatcagtaacacctgcggcaagtccgaatattcctgctggaactaaatttagtatcctg

SEQ ID NO: 757144 - DNA, 75 bp, synthetic construct
  source 1..75: mol_type = other DNA
tgcttgccgggatgacatccaccgaatatgccgactggcaccgtttttaccgcacgcattattttcacgatactc

SEQ ID NO: 757145 - DNA, 75 bp, synthetic construct
  source 1..75: mol_type = other DNA
ggatgtggtggatgtcagcgaggatgatgttgcattaatgatggcttcagcggggatttccggaggtgtgagata

SEQ ID NO: 757146 - DNA, 75 bp, synthetic construct
  source 1..75: mol_type = other DNA
tgttttttggcgatccggatatgcatccggcggatttcagtctgcttgctccagcgtgtgaggaagagcagacgg

SEQ ID NO: 757147 - DNA, 75 bp, synthetic construct
  source 1..75: mol_type = other DNA
ggtaaaaacgagataaatctaaaaattatagatatgaagttgcttcccaatggaaccctcagacagggaaccaac

SEQ ID NO: 757148 - DNA, 75 bp, synthetic construct
  source 1..75: mol_type = other DNA
acgtgcagcaggtcgggcacccggagtatctgtacgccaacccggccaacctgttcgtcgctgggtttatcggtt

SEQ ID NO: 757149 - DNA, 75 bp, synthetic construct
  source 1..75: mol_type = other DNA
tctgcaacgagaactgatgggagccgattatctgctccacgtcagccccccgatcggcaccctgcgctttagccg

SEQ ID NO: 757150 - DNA, 75 bp, synthetic construct
  source 1..75: mol_type = other DNA
actgcgttactaccagggcaaagaatcagaaatagctgacgctgtggagtttttcagcgacaacaaagatgtgat

SEQ ID NO: 757151 - DNA, 75 bp, synthetic construct
  source 1..75: mol_type = other DNA
ttcgttggtcgtgttggcggcgttgcaacttaccgtaactccaacttctttggtctggttgacggcctgaatttc

SEQ ID NO: 757152 - DNA, 75 bp, synthetic construct
  source 1..75: mol_type = other DNA
aggtactgcaaacgctgcagaaatctataacaaagatggcaacaaagtagatctgtacggtaaagctgttggtct

SEQ ID NO: 757153 - DNA, 75 bp, synthetic construct
  source 1..75: mol_type = other DNA
agccattatttggcggataaaatggcactgcaaacttctttatatagcgttaaggaaatagcaagagagttggct

SEQ ID NO: 757154 - DNA, 75 bp, synthetic construct
  source 1..75: mol_type = other DNA
aacaaaactcgtctggcattcgcaggtttgaaattcgctgatgcgggttctatcgactacggtcgtaactacggt

SEQ ID NO: 757155 - DNA, 75 bp, synthetic construct
  source 1..75: mol_type = other DNA
ctacttcaacaaaaatatgtccacctacgttgactacgcaattaaccaaatcgattctgacaacaaactgggtgt

SEQ ID NO: 757156 - DNA, 75 bp, synthetic construct
  source 1..75: mol_type = other DNA
gttgcacaataccagttcgactttggtctgcgcccatccatcgcttataccaaatctaaagcgaaagatgtagaa

SEQ ID NO: 757157 - DNA, 75 bp, synthetic construct
  source 1..75: mol_type = other DNA
aatccggcagtccatacggcagcttttgccttaccccagtatctgcaagatgctctggcttcacagccgtcctaa

SEQ ID NO: 757158 - DNA, 75 bp, synthetic construct
  source 1..75: mol_type = other DNA
ctcgactccaacccgaccaagttgatcgaggtggtgcacattggcaaacagatgctgatgacccgtggctcgctg

SEQ ID NO: 757159 - DNA, 75 bp, synthetic construct
  source 1..75: mol_type = other DNA
ggcggacaaagttcccgccgatcaactgcgtaaaggtgacatcgtgctggtagaggcaggcgatattatcccctg

SEQ ID NO: 757160 - DNA, 75 bp, synthetic construct
  source 1..75: mol_type = other DNA
attcgttcatatctattgaaagagggatataatattattttcaacggagaaggtaactcatatctcgcatttaat

SEQ ID NO: 757161 - DNA, 75 bp, synthetic construct
  source 1..75: mol_type = other DNA
actgcatgctatgctgaaacgcgctgcagaaatccaggtaaaaaagggcgcattgaggtttgctttcacaacaat

SEQ ID NO: 757162 - DNA, 75 bp, synthetic construct
  source 1..75: mol_type = other DNA
atgtccgaaaataatatatggaatgaatcattacacgaccagtttgggcagtactttgctgtagataacgttctg

SEQ ID NO: 757163 - DNA, 75 bp, synthetic construct
  source 1..75: mol_type = other DNA
gtgccatatggaaaaaatgggctggacgctctacaccctggagctgttgcgtaaaatcccggggcttgagttaac

SEQ ID NO: 757164 - DNA, 75 bp, synthetic construct
  source 1..75: mol_type = other DNA
acaggcaatcacaaatgtagagtcgatccgcgaagctgtgggagtaaaaggcattccggtgattgccacctcctc

SEQ ID NO: 757165 - DNA, 75 bp, synthetic construct
  source 1..75: mol_type = other DNA
cgactgcgaaacctgtaaatggcagattgagatgtccacaagtcttcgctgcgaacatccgattacgctgctggc

SEQ ID NO: 757166 - DNA, 75 bp, synthetic construct
  source 1..75: mol_type = other DNA
acacaaatgcagggcaaagcgcaatccattcaggatgtgcttgccgggctggaggagcgacgggtggcgttgatc

SEQ ID NO: 757167 - DNA, 75 bp, synthetic construct
  source 1..75: mol_type = other DNA
tattatgcaaaggccgatgctttacgtaataactggaatgccggactccaggagggactgaccaactgggcagac

SEQ ID NO: 757168 - DNA, 75 bp, synthetic construct
  source 1..75: mol_type = other DNA
ttatttctctcgccgatgagtggaattcagtaaatgcccgtctgaagcaggcctcacagtccagtgatgattttc

SEQ ID NO: 757169 - DNA, 75 bp, synthetic construct
  source 1..75: mol_type = other DNA
gccgcacgctaccgaaatactccttcggtacgttccgtcgctggtatcgcagcgtggcggctcagcaagcgcagt

SEQ ID NO: 757170 - DNA, 75 bp, synthetic construct
  source 1..75: mol_type = other DNA
cagtcgcatcaggatggaggcctgaccgacatcaacgcctgctttgacaacgtgctggcaggcatctcccaacgc

SEQ ID NO: 757171 - DNA, 75 bp, synthetic construct
  source 1..75: mol_type = other DNA
ccagctacggcgaactgcgccagcttctgttattaggcaatgaactgagcgatatggcaggccagccgcgcagca

SEQ ID NO: 757172 - DNA, 75 bp, synthetic construct
  source 1..75: mol_type = other DNA
gtgcaccgtctgcaccaccgcctgcccggtgagccgggtgaatccgggatatccgggccaaaacaagccgggccg

SEQ ID NO: 757173 - DNA, 75 bp, synthetic construct
  source 1..75: mol_type = other DNA
acaggcaatcacgaatgtagagtcgatccgcgaagctgtgggggtaaaaggcattccggtgattgccacctcctc

SEQ ID NO: 757174 - DNA, 75 bp, synthetic construct
  source 1..75: mol_type = other DNA
gattcccagtgctgcggtattgcgggtacttacggtttcaaaaaagagaactaccccacctcacaagccatcggt

SEQ ID NO: 757175 - DNA, 75 bp, synthetic construct
  source 1..75: mol_type = other DNA
ataaccaggcaaataaacccaaagcgcataaaaagaccgaagcggaaaaaacagaagatatttataaacggctga

SEQ ID NO: 757176 - DNA, 75 bp, synthetic construct
  source 1..75: mol_type = other DNA
gtatggatcgttccgacctgtttaacgttaacgctggcatcgtgaaaaacctggtacagcaagttgcgaaaacct

SEQ ID NO: 757177 - DNA, 75 bp, synthetic construct
  source 1..75: mol_type = other DNA
ctggtacagcaagttgcgaaaacctgcccgaaagcgtgcattggtattatcactaacccggttaacaccacagtt

SEQ ID NO: 757178 - DNA, 75 bp, synthetic construct
  source 1..75: mol_type = other DNA
gtagcaagagcaatgttacgatttgttactgtgacagctgaagctttgcgttttcgccaaatccagaggggattt

SEQ ID NO: 757179 - DNA, 75 bp, synthetic construct
  source 1..75: mol_type = other DNA
acgatagacttttcgactcaacaaagttatgtatcttcgttaaatagtatacggacagagatatcgacccctctt

SEQ ID NO: 757180 - DNA, 75 bp, synthetic construct
  source 1..75: mol_type = other DNA
cagaacgcgctggaaggtatgctggatacgctgaagaaagatatcgccctgggcgaagagttcgttaataagtaa

SEQ ID NO: 757181 - DNA, 75 bp, synthetic construct
  source 1..75: mol_type = other DNA
cgaagttgaagtgccggttattggcggtcactctggtgttaccattctgccgctgctgtcacaggttcctggcgt

SEQ ID NO: 757182 - DNA, 75 bp, synthetic construct
  source 1..75: mol_type = other DNA
gcaagcgcgaactggctctgtcccgccttaagggggaagcgcgtgagcgtgcccgactgggctatgctgcggatg

SEQ ID NO: 757183 - DNA, 75 bp, synthetic construct
  source 1..75: mol_type = other DNA
aggctcacggatgcgtgaacgactccaggaaatgtggagtatccggcaggcgtttgagcagaaaaataacgagct

SEQ ID NO: 757184 - DNA, 75 bp, synthetic construct
  source 1..75: mol_type = other DNA
tcagccagggggctggtggatctgatcgacagcagggttgtgtcaattatgcagtcatcacgtcgggatggagga

SEQ ID NO: 757185 - DNA, 75 bp, synthetic construct
  source 1..75: mol_type = other DNA
ttatattgaattgtcatcatcagggggcacgttctgttcgctccgttaatgaatataaacagccggaatgtcaga

SEQ ID NO: 757186 - DNA, 75 bp, synthetic construct
  source 1..75: mol_type = other DNA
tactgtgcctgttactgggcttttcttcggtatcctattcccgggagtttacgatagacttttcgactcaacaaa

SEQ ID NO: 757187 - DNA, 75 bp, synthetic construct
  source 1..75: mol_type = other DNA
agagcatgatcctcgcccgtgacctcggtcaccgggttaacgggacggacgaggaagcactggaagtcaaaaagt

SEQ ID NO: 757188 - DNA, 75 bp, synthetic construct
  source 1..75: mol_type = other DNA
atgctgaactgctggggtacgggcagggggagcgagccagagaacgcatgcgggagttgcagcagatccgcgaca

SEQ ID NO: 757189 - DNA, 75 bp, synthetic construct
  source 1..75: mol_type = other DNA
gcggcgatagctggccgtttttatcggagcgggcaaaggctgcgtttggtcaggcggtacgggaaaaaacgctgg

SEQ ID NO: 757190 - DNA, 75 bp, synthetic construct
  source 1..75: mol_type = other DNA
tggcccggatgcgcttatcatctcaacaatgggcggagctcaggattatctggcgcacagaacagtgattgatga

SEQ ID NO: 757191 - DNA, 75 bp, synthetic construct
  source 1..75: mol_type = other DNA
gcttgactacgccattctccgccctggcggactgcttgacggcgcagcaacaggcaaagcacaacggatacaaaa

SEQ ID NO: 757192 - DNA, 75 bp, synthetic construct
  source 1..75: mol_type = other DNA
gctacgcaatccagtgatgattttcaggcatcacaacgtgaattaatggcaatcagccagagaacggggacggct

SEQ ID NO: 757193 - DNA, 75 bp, synthetic construct
  source 1..75: mol_type = other DNA
ctggctaagatgaaataccaggtcagccagggcgaattatcaaccttatcagaagcgcagaaacaaaccctttta

SEQ ID NO: 757194 - DNA, 75 bp, synthetic construct
  source 1..75: mol_type = other DNA
acaaccaggcgaataagccaaaggtacgtggtggaaaatcggaagcagaaaaaacggaagatgcttataacagac

SEQ ID NO: 757195 - DNA, 75 bp, synthetic construct
  source 1..75: mol_type = other DNA
agtaatgccctggaagcctggcgcaataacgaggcgaataaacccaaatcccggggtggaaaatcagagacggaa

SEQ ID NO: 757196 - DNA, 75 bp, synthetic construct
  source 1..75: mol_type = other DNA
agggtgtgttacggggtgaggaatttaattcggtcaatgaaagcggagaccggatcatacgtgcactggctgcgg

SEQ ID NO: 757197 - DNA, 75 bp, synthetic construct
  source 1..75: mol_type = other DNA
gcggataaagtcgttcctgcgttaatcagccagctgggggtattgcgtgatgaatatgccgccatgccggaaacg

SEQ ID NO: 757198 - DNA, 75 bp, synthetic construct
  source 1..75: mol_type = other DNA
attgacagtcgtaaccgtcagcttgtggtggctatcagaaaggaaatggcagcccaggtcatctctcccaccaat

SEQ ID NO: 757199 - DNA, 75 bp, synthetic construct
  source 1..75: mol_type = other DNA
gaaaaaatggcataaacagcagctcgacatgcagaagcaacttcttgatgaaaaactgattaatgagcagatata

SEQ ID NO: 757200 - DNA, 75 bp, synthetic construct
  source 1..75: mol_type = other DNA
ggcactggtggggcagaatacagagctggcgaagctgaaataccagactgcgcagggcgaactgaaaaccctgac

SEQ ID NO: 757201 - DNA, 75 bp, synthetic construct
  source 1..75: mol_type = other DNA
aatgccggcattctgcgtatttatcttttgcaattttctgccattgtggggtataaaacgcggcgcgcggcttaa

SEQ ID NO: 757202 - DNA, 75 bp, synthetic construct
  source 1..75: mol_type = other DNA
ggctgccgcagtcgcccgggagcagcgacgcgccctggctgagctgaacagccagttgacggaaattcgcggttc

SEQ ID NO: 757203 - DNA, 75 bp, synthetic construct
  source 1..75: mol_type = other DNA
gaaggcgatggcagacgatggtcaactgacggcggataaagtcgttcccgcgttaatcagccagctggggatatt

SEQ ID NO: 757204 - DNA, 75 bp, synthetic construct
  source 1..75: mol_type = other DNA
gccgggctgatgggggaagccggacctgaagccattatgcccctgacccgggcggcggatggctcgctgggcgta

SEQ ID NO: 757205 - DNA, 75 bp, synthetic construct
  source 1..75: mol_type = other DNA
aaagcggaagacagtttttcccggctgctgaagcagcagaaagagcaactggcactggtggggcagaatacagag

SEQ ID NO: 757206 - DNA, 75 bp, synthetic construct
  source 1..75: mol_type = other DNA
aaagcggaagacagtttttcccgtctgctgaagcagcagaaggaacaactggcactggcagggaagaatacagaa

SEQ ID NO: 757207 - DNA, 75 bp, synthetic construct
  source 1..75: mol_type = other DNA
gcattggtgactggctgggcggtgcggtggccaatgcaaaaggcggcgtgtatacctcggcaaacctgagtgcgt

SEQ ID NO: 757208 - DNA, 75 bp, synthetic construct
  source 1..75: mol_type = other DNA
tgctgaagcagcagaaagagcaactggcactggcgggtcagaatacagagctggcgaagctgaaataccagacag

SEQ ID NO: 757209 - DNA, 75 bp, synthetic construct
  source 1..75: mol_type = other DNA
tgcctcgatgcgtgaatatggttacagtgctgatgatgtgctgaaggtgacggaggccatttccacggggctgaa

SEQ ID NO: 757210 - DNA, 75 bp, synthetic construct
  source 1..75: mol_type = other DNA
cgctctccggcgtgctgaacggtgttgccggtaatattgataatgtggcaacagcagcgggggcgctggttgccg

SEQ ID NO: 757211 - DNA, 75 bp, synthetic construct
  source 1..75: mol_type = other DNA
gccgggctgatgggggaggccggacctgaagccattatgcctctgacgcgggcggcggatggctcgctgggtgtg

SEQ ID NO: 757212 - DNA, 75 bp, synthetic construct
  source 1..75: mol_type = other DNA
tgatttcactggctgatgagtggagttccgtgaatgcccgtctgaaacaggcgtcgcagtcatctgatgaatttt

SEQ ID NO: 757213 - DNA, 75 bp, synthetic construct
  source 1..75: mol_type = other DNA
gaaggcaatggcggatgacggaaaactgacagcggataaagtggtccccgcgttaatcagccaactggggatatt

SEQ ID NO: 757214 - DNA, 75 bp, synthetic construct
  source 1..75: mol_type = other DNA
atgtggctctacgtcttttctcacagcagggggtatcatcccacctcgctgggtgagattgcaaaagcagctggc

SEQ ID NO: 757215 - DNA, 75 bp, synthetic construct
  source 1..75: mol_type = other DNA
accgacattgcgcaatcatttatggcaatccgtcgcgccaccaccgccagcggcaaccgcccaacctatgaagcc

SEQ ID NO: 757216 - DNA, 75 bp, synthetic construct
  source 1..75: mol_type = other DNA
tcaaaaaattgaccgaacagtacaacgtgacctatatcggcatcgactcgacaggtgtaggtcacggggtttatg

SEQ ID NO: 757217 - DNA, 75 bp, synthetic construct
  source 1..75: mol_type = other DNA
cgaattttcaggtactgcgtaaggtggcatcaggtatggcctcacagagccacctgcgctcgacctatttctcca

SEQ ID NO: 757218 - DNA, 75 bp, synthetic construct
  source 1..75: mol_type = other DNA
cacgtctttaagcagtacatcatcgatttcgccaaagaagtcgaggtggagctgaaaggtgatccgatggtgctt

SEQ ID NO: 757219 - DNA, 75 bp, synthetic construct
  source 1..75: mol_type = other DNA
ttgacctgctcggacgccagattgaacgactggcacgggtcaaccgttacagtcagaccggcaacgaggcagacc

SEQ ID NO: 757220 - DNA, 75 bp, synthetic construct
  source 1..75: mol_type = other DNA
accgacgtcacacagtcgtttatgtccatccgcaaaaccatgaccagcagcgggcgcagcgccacctatgaggcc

SEQ ID NO: 757221 - DNA, 75 bp, synthetic construct
  source 1..75: mol_type = other DNA
caccttccacgctggcgcacggcgcttaccccttctggtctggcgagctgttcaacaaggggcgcagccggattg

SEQ ID NO: 757222 - DNA, 75 bp, synthetic construct
  source 1..75: mol_type = other DNA
ccccgtccacgctggcgcacgacgcctacccgttctggtcaggtgaactgttcaaccggggacgcgccagcgccg

SEQ ID NO: 757223 - DNA, 75 bp, synthetic construct
  source 1..75: mol_type = other DNA
cgtggacgtaacaaagccgacaaggtggacatcgacctgtcccacagcaatctggcccccggcctgctgtgcgca

SEQ ID NO: 757224 - DNA, 75 bp, synthetic construct
  source 1..75: mol_type = other DNA
cgccaaaggatgcaccctgttcaacatcgatacgctgaagcgcgagaacagtgtcgatgagttccgcaacctgtt

SEQ ID NO: 757225 - DNA, 75 bp, synthetic construct
  source 1..75: mol_type = other DNA
tgtgcggtactggctccaccactggttcccggtggcaagttccgcatccttgagcgtcaccagtggaaagggatg

SEQ ID NO: 757226 - DNA, 75 bp, synthetic construct
  source 1..75: mol_type = other DNA
tcacgtggaggcgacgattcggaacgtgccatgcctgaaagacctttccccatggctggggcgtaaacatcgtga

SEQ ID NO: 757227 - DNA, 75 bp, synthetic construct
  source 1..75: mol_type = other DNA
tttgcgcgagaggcgctgttacaggcgctgaagaccggccacaaccagatatttttatcggccagtaagacacag

SEQ ID NO: 757228 - DNA, 75 bp, synthetic construct
  source 1..75: mol_type = other DNA
atcctaacgtcgccaaccgcaacaaaggcccgcgccgtcagccggaaaaaaatgtcttcaccgatgaacagattg

SEQ ID NO: 757229 - DNA, 75 bp, synthetic construct
  source 1..75: mol_type = other DNA
cagaacggcgacagtgccggatgcgtggtggtggctccgccagccgtgccgggtggtaagttccgcattcttgag

SEQ ID NO: 757230 - DNA, 75 bp, synthetic construct
  source 1..75: mol_type = other DNA
tatgaactttttgtcgccggcaaaggcaaaacctttacagcgaaaccgaaaccggacgcagaaattgcctcgctg

SEQ ID NO: 757231 - DNA, 75 bp, synthetic construct
  source 1..75: mol_type = other DNA
acgctggcctgaagctgattgttggcctgaatgccgatccggaattttttatgcatcagaagcaatcatctgcgg

SEQ ID NO: 757232 - DNA, 75 bp, synthetic construct
  source 1..75: mol_type = other DNA
ccaacttccagaagctgaagcgcgttgccggtggcatgtcttcacaggagcatttgcgcacgacctatttttcga

SEQ ID NO: 757233 - DNA, 75 bp, synthetic construct
  source 1..75: mol_type = other DNA
ctggcgcgaagtatggatcggttatgacccggcgaaaggtacgcagaacggcgacagtgccggatgcgtggtggt

SEQ ID NO: 757234 - DNA, 75 bp, synthetic construct
  source 1..75: mol_type = other DNA
gagttgttactggaaaaggtctgccactatggtgcgcaagttcccctgcgggtggtttacctgaccgccgggatc

SEQ ID NO: 757235 - DNA, 75 bp, synthetic construct
  source 1..75: mol_type = other DNA
aatgtttttaccgatgaacagattgagaaactggaagaaatcttccattcctctatgttcaactaccagcgccac

SEQ ID NO: 757236 - DNA, 75 bp, synthetic construct
  source 1..75: mol_type = other DNA
gactttcgcgcccaggctgatgccatcaaaaaactgactgaacagtacaacgtgacatacatcggtatcgactcg

SEQ ID NO: 757237 - DNA, 75 bp, synthetic construct
  source 1..75: mol_type = other DNA
ccgcctggagtttgacgcagggcacaccgacatagcgcagtcctttatggcaatccgtcgcgccaccactgccag

SEQ ID NO: 757238 - DNA, 75 bp, synthetic construct
  source 1..75: mol_type = other DNA
ctggctggatgcactgaaagatcccaacggtctgaaaacctttgtgaacaccacgctgggcgagacctgggaaga

SEQ ID NO: 757239 - DNA, 75 bp, synthetic construct
  source 1..75: mol_type = other DNA
gccgtcttgttccccgtactactcaacgtcgaataccgtcaccggaaaatgtcagtgccatcattggcgtcctga

SEQ ID NO: 757240 - DNA, 75 bp, synthetic construct
  source 1..75: mol_type = other DNA
gaaatgaaaaccgcgatggtgctcaaggcaaaagacaccattcgccgtggctgtctggaatacgacgccggggcg

SEQ ID NO: 757241 - DNA, 75 bp, synthetic construct
  source 1..75: mol_type = other DNA
aaaagagggctcgccaaccctgctgggggataaacgtattgagggctctgtatggccaaaatccattcgcggctc

SEQ ID NO: 757242 - DNA, 75 bp, synthetic construct
  source 1..75: mol_type = other DNA
gccgtctcgtccccaggacagtgcagcgcaggctccccacaccggagcatgtcagcagcattatcggtgtgctga

SEQ ID NO: 757243 - DNA, 75 bp, synthetic construct
  source 1..75: mol_type = other DNA
aagccaaagacaccattcgccggggttgcctcgagtacgacgtcagcacgaccgatatcacgcagtcgtttatgt

SEQ ID NO: 757244 - DNA, 75 bp, synthetic construct
  source 1..75: mol_type = other DNA
cgagcttaccggcgacccgattgtgctcggcaacaatggcgcggagctgatgtttctcggtaccaatgccaacac

SEQ ID NO: 757245 - DNA, 75 bp, synthetic construct
  source 1..75: mol_type = other DNA
tactgtgcctgttactgggtttttcttcggtatcctattcccgggagtttacgatagacttttcgacccaacaaa

SEQ ID NO: 757246 - DNA, 75 bp, synthetic construct
  source 1..75: mol_type = other DNA
cagtggtaatacaatgaccagagatgcatccagagcagttctgcgttttgtcactgttacagcagaagccttacg

SEQ ID NO: 757247 - DNA, 75 bp, synthetic construct
  source 1..75: mol_type = other DNA
ttatactgaattgtcatcatcagggggcgcgttctgttcgcgccgtgaatgaagagagtcaaccagaatgtcaga

SEQ ID NO: 757248 - DNA, 75 bp, synthetic construct
  source 1..75: mol_type = other DNA
gcttacgtgttccgcgagtacatcatccagtttgcgcgtctggtcgacgtcgacctgaccggcgacccgattgtc

SEQ ID NO: 757249 - DNA, 75 bp, synthetic construct
  source 1..75: mol_type = other DNA
gacttccgcgcccaggctgacgccatcaaaaaacttaccgaacagtacaacgtgacttatatcggtatcgactca

SEQ ID NO: 757250 - DNA, 75 bp, synthetic construct
  source 1..75: mol_type = other DNA
ggctgaatctggtaaaaaaaggcacccataatccgaattttgtgcgtaagcctgatgccgcgctggtcgatttcc

SEQ ID NO: 757251 - DNA, 75 bp, synthetic construct
  source 1..75: mol_type = other DNA
cccataccacgtcggcactcggtcgtatgttcgtcacccagcagagcatgatcctcgcccgtgacctgggctacc

SEQ ID NO: 757252 - DNA, 75 bp, synthetic construct
  source 1..75: mol_type = other DNA
aacgtcaaaaacgccctggtgctcaaggcatacgacattatcagccaccggcgtctggagtttgacgcgggacac

SEQ ID NO: 757253 - DNA, 75 bp, synthetic construct
  source 1..75: mol_type = other DNA
accggcgtcggtcacggtgtctacgagaacgtgaaagcgttctttcctgctgtgcgggagtttgtctacaacccc

SEQ ID NO: 757254 - DNA, 75 bp, synthetic construct
  source 1..75: mol_type = other DNA
ccgtctggagtttgacgccggacataccgacattgcgcagtcatttatggcaatccgtcgcgccaccacagccag

SEQ ID NO: 757255 - DNA, 75 bp, synthetic construct
  source 1..75: mol_type = other DNA
cgtgacatacatcggtatcgactcaaccggcgttggtcacggggtttacgagaacgtgaaagcgttctttcctgc

SEQ ID NO: 757256 - DNA, 75 bp, synthetic construct
  source 1..75: mol_type = other DNA
aatggcggcaacgaagccgacttaaaccctaacgtcgccaaccgcaacaaaggcccgcgtcgtcagccggaaaag

SEQ ID NO: 757257 - DNA, 75 bp, synthetic construct
  source 1..75: mol_type = other DNA
cggaaaccgccctacatacgaagccagccgcagtgaagaagccagccacgcagacttggcctgggcaacgatgca

SEQ ID NO: 757258 - DNA, 75 bp, synthetic construct
  source 1..75: mol_type = other DNA
tttggtgatgaatccacgccgtttggcctgaaatgggagaagggtaaaccggaaacggtgtattacctgtgtgag

SEQ ID NO: 757259 - DNA, 75 bp, synthetic construct
  source 1..75: mol_type = other DNA
tacctgtaccggatctaactgcatccccgccccataaaaaaaatgtcgctcagacaccatcaggtggaaaacaag

SEQ ID NO: 757260 - DNA, 75 bp, synthetic construct
  source 1..75: mol_type = other DNA
cgtatgttcgtcacccagcagagcatgatcctcgcccgtgacctgggctaccgcctggaaggcacagatgcacag

SEQ ID NO: 757261 - DNA, 75 bp, synthetic construct
  source 1..75: mol_type = other DNA
atgaatatatcagagcaacaactgaataatatgatgagcgctgtcacaacagcattacagcccctgataagggca

SEQ ID NO: 757262 - DNA, 75 bp, synthetic construct
  source 1..75: mol_type = other DNA
aggcccgcgccgtcaaccggaaaaaaatgtcttcaccgatgaacagcttgagaagctggaagaaattttccattc

SEQ ID NO: 757263 - DNA, 75 bp, synthetic construct
  source 1..75: mol_type = other DNA
aggcccgcgccgtcagcctgaaaagaatgttttcaccgatgaacagattgagaagctggaagaaattttccattc

SEQ ID NO: 757264 - DNA, 75 bp, synthetic construct
  source 1..75: mol_type = other DNA
gcgtgatcccaaccaaaggagcgattattccggcggcggtgggggtagatatcggttgtggaatgaacgcactgc

SEQ ID NO: 757265 - DNA, 75 bp, synthetic construct
  source 1..75: mol_type = other DNA
tatcagtcagatggagcaccacgctaacatcgttccctggcaaatgctttgtgcgcgcgttggtgcagagttgcg

SEQ ID NO: 757266 - DNA, 75 bp, synthetic construct
  source 1..75: mol_type = other DNA
ctggctggcggtaaaacgtgaacatatgatctggcgctgcgacaacgatctggatattcagcagttgttgactgc

SEQ ID NO: 757267 - DNA, 75 bp, synthetic construct
  source 1..75: mol_type = other DNA
tgctggcagcagtgttgagtgattacatgaacaaacatccacaaatgtcagagcgttttgcgcttttctcactct

SEQ ID NO: 757268 - DNA, 75 bp, synthetic construct
  source 1..75: mol_type = other DNA
gctatgtgtcgggcgtcgctggctatgtataacactcatgaagaagtggatcgcctggtgaccggattgcaacgt

SEQ ID NO: 757269 - DNA, 75 bp, synthetic construct
  source 1..75: mol_type = other DNA
acgttgcagctggagatactgcctaatctgttcgatgagaaaactcgcctgctggcaattacccatgtctccaac

SEQ ID NO: 757270 - DNA, 75 bp, synthetic construct
  source 1..75: mol_type = other DNA
gtcgccaatagctggggcaacagcaacgtgcgggcgggcgataacatcatcatcagtcagatggagcaccacgct

SEQ ID NO: 757271 - DNA, 75 bp, synthetic construct
  source 1..75: mol_type = other DNA
gcttgctgaaggttttacaggcagcggattttgtctatcaggacagtcagttaggctggtggcatataggattag

SEQ ID NO: 757272 - DNA, 75 bp, synthetic construct
  source 1..75: mol_type = other DNA
tcagggcgttgtgtatattgatagcagaagctggcagttagaagtggctagagaaatgaaagcagcaggctataa

SEQ ID NO: 757273 - DNA, 75 bp, synthetic construct
  source 1..75: mol_type = other DNA
gagagattgagtcaaagtgatgatatggaaataaaaattgctgcgattaaagcacttggtcgaatttatcggtaa

SEQ ID NO: 757274 - DNA, 75 bp, synthetic construct
  source 1..75: mol_type = other DNA
ggcctgatctggatggcggcagccgcatgctgccgaattaccttgaggatctgcaaaatccgctgtggctggtaa

SEQ ID NO: 757275 - DNA, 75 bp, synthetic construct
  source 1..75: mol_type = other DNA
aagctgtcgaattcgttaccggcccctgcctggtgctggcgggcgcgggttccggtaaaactcgtgtgatcacca

SEQ ID NO: 757276 - DNA, 75 bp, synthetic construct
  source 1..75: mol_type = other DNA
tccacacgctggggctggatatcatcaagcgtgagtatgcggcgctggggatgaaggcgaacttttcgctgtttg

SEQ ID NO: 757277 - DNA, 75 bp, synthetic construct
  source 1..75: mol_type = other DNA
gacattgcgattcgcgtttggtggctcattctctacgacattagatgttgcccctgcagagtatggaaagttttc

SEQ ID NO: 757278 - DNA, 75 bp, synthetic construct
  source 1..75: mol_type = other DNA
gttcagaattcacctgccttcgccgcacaaggctggtttctttcacgcccggcgccgatagaaacactggatacg

SEQ ID NO: 757279 - DNA, 75 bp, synthetic construct
  source 1..75: mol_type = other DNA
ggaaggccgcacactcttttctcagcttttacatctaatgaatcgctattgtcgcggggtgattgtcgagggcgt

SEQ ID NO: 757280 - DNA, 75 bp, synthetic construct
  source 1..75: mol_type = other DNA
gtgatcctgatgctgacggtacagaaccgtatgtgctgaaagttacgcaggcggaattcgataaatgggaagtag

SEQ ID NO: 757281 - DNA, 75 bp, synthetic construct
  source 1..75: mol_type = other DNA
caaggttcgcgcagggatccgttctgtcatgattgatggctcccatttgccatttgaagacaacattgcgcgagt

SEQ ID NO: 757282 - DNA, 75 bp, synthetic construct
  source 1..75: mol_type = other DNA
tgctgaaaaaagcccagtcagaggaatatgccgtccccgctttcaatattcataaccttgaaacattacaggttg

SEQ ID NO: 757283 - DNA, 75 bp, synthetic construct
  source 1..75: mol_type = other DNA
gtgcaaaattctcccgcattcgccgcacaaggctggtttctttcacgtccggcaccaatcgaaacgctggactcg

SEQ ID NO: 757284 - DNA, 75 bp, synthetic construct
  source 1..75: mol_type = other DNA
aaaaaaacaccattatggcttgccagtttaataagaaaggagacgttattcctccataatatcctctgtggtgca

SEQ ID NO: 757285 - DNA, 75 bp, synthetic construct
  source 1..75: mol_type = other DNA
caccccaaattatctgcataaagaaccagtaattaaagcagcaaagaataagaagcatgttttttgtgaaaaacc

SEQ ID NO: 757286 - DNA, 75 bp, synthetic construct
  source 1..75: mol_type = other DNA
atctacctgaagataggttggatgaactcgattctttaatgaagaagtgcggcataagtactaaaaaagagttgt

SEQ ID NO: 757287 - DNA, 75 bp, synthetic construct
  source 1..75: mol_type = other DNA
gaccaaacttttagatcgctttgtcgcctccggcgctctggtggctcctcgtgatcctgatgctgacggtacaga

SEQ ID NO: 757288 - DNA, 75 bp, synthetic construct
  source 1..75: mol_type = other DNA
aactatctgcacttccagcacgtcccatccctgatgaacgcaatcagccgtttctttgtccagttagcccgacag

SEQ ID NO: 757289 - DNA, 75 bp, synthetic construct
  source 1..75: mol_type = other DNA
tgttagcccgatcaatgccgatgcgacgttatctaccggtgttgcattaaatagcagcttgtgggctggtattgg

SEQ ID NO: 757290 - DNA, 75 bp, synthetic construct
  source 1..75: mol_type = other DNA
aggaagatatcgaaaccgcacagatgatgctcgatgatcctgaaatgcgtgagatggcgcaggatgaactgcgcg

SEQ ID NO: 757291 - DNA, 75 bp, synthetic construct
  source 1..75: mol_type = other DNA
caaaacctggggaatggcggagattttcctcgcgggtgtgctggtcagtttcgttaaactgatggcctacggcag

SEQ ID NO: 757292 - DNA, 75 bp, synthetic construct
  source 1..75: mol_type = other DNA
gccccgatgccagaactgcgccagccgctaaaaccaggcgtcacggggatacgtcaggggctgcgttcgtgctcc

SEQ ID NO: 757293 - DNA, 75 bp, synthetic construct
  source 1..75: mol_type = other DNA
tgccatcctgccctgggatcgcgccgcagtagacgccaccacgaaggttaaagtggcactgcggctggccgggac

SEQ ID NO: 757294 - DNA, 75 bp, synthetic construct
  source 1..75: mol_type = other DNA
cttaaaaatgatcgccatcgcgtggctctgctgggatgccaaagggcatggcaagcgcgacagtgaaagaatgca

SEQ ID NO: 757295 - DNA, 75 bp, synthetic construct
  source 1..75: mol_type = other DNA
gttcccttttgtaaatatgaacgttgcgggggtaaccagtgaaattacgttactggaaatcccgagcgtactgtt

SEQ ID NO: 757296 - DNA, 75 bp, synthetic construct
  source 1..75: mol_type = other DNA
gccccgatgccagcactgcgccagccgctaaaacctggcgtcacggggatacgtcaggggttacgttcgtgctcc

SEQ ID NO: 757297 - DNA, 75 bp, synthetic construct
  source 1..75: mol_type = other DNA
atgaagtcgaacttctcactgtttgatgataccgatcaggtggcgctgctgaaggagttgactgacgggcttatc

SEQ ID NO: 757298 - DNA, 75 bp, synthetic construct
  source 1..75: mol_type = other DNA
atgaaccagccgtacacgccaaagtttcaggaagaatacagcgccaaaatcccggcactgacgttactgaccagc

SEQ ID NO: 757299 - DNA, 75 bp, synthetic construct
  source 1..75: mol_type = other DNA
tgctgaataagcatgttactggtgtcgcggttcgtgaaccggatggcgtatatgaagtgggcaagatgggtaaaa

SEQ ID NO: 757300 - DNA, 75 bp, synthetic construct
  source 1..75: mol_type = other DNA
gccgatcggcccgaacgacacggcgattgccgggcacgccatcgccgccggggcgatactggtgaccaataatac

SEQ ID NO: 757301 - DNA, 75 bp, synthetic construct
  source 1..75: mol_type = other DNA
caggtgcaactgatgactctgcacgcgtcgaaagggctggagtttccttatgtctacatggtcggtatggaagaa

SEQ ID NO: 757302 - DNA, 75 bp, synthetic construct
  source 1..75: mol_type = other DNA
cgatgaccagtcgatctactcctggcgcggcgcacgtccgcaaaacctggtgttgttgagtcaggatttcccggc

SEQ ID NO: 757303 - DNA, 75 bp, synthetic construct
  source 1..75: mol_type = other DNA
cggggccattctggtgacgaataatgtgagagagtttgagagggtgcctgacctggtgctggaagactgggtgaa

SEQ ID NO: 757304 - DNA, 75 bp, synthetic construct
  source 1..75: mol_type = other DNA
gggttaaattccgcaatcttagcgatggcgaagtgcgtgtgcgcacgctggtgtatccggcaaaaatgaccgata

SEQ ID NO: 757305 - DNA, 75 bp, synthetic construct
  source 1..75: mol_type = other DNA
gatgtgccgagtggatacaaagtggttgtggttcctgattcagtcagcgttccacaagcggtcagcgtcgcgact

SEQ ID NO: 757306 - DNA, 75 bp, synthetic construct
  source 1..75: mol_type = other DNA
cacaggatggttattctccagtggtacgcgactatgacaccggtttaccgacacaaggggtgaaggtggaagaga

SEQ ID NO: 757307 - DNA, 75 bp, synthetic construct
  source 1..75: mol_type = other DNA
aaactggccggtctggcgggggtggcgggtcttgaattcaacctgatgcaacgtaccttgaccgtgcgacacgaa

SEQ ID NO: 757308 - DNA, 75 bp, synthetic construct
  source 1..75: mol_type = other DNA
cagagcgtaacggcgctgaaggcgttggtctgtatcgtactgagttcctgttcatggaccgcgacgcgctgccca

SEQ ID NO: 757309 - DNA, 75 bp, synthetic construct
  source 1..75: mol_type = other DNA
ccgttcctcggctggcgcgctatccgtatcgcgatggatcgtaaagagatcctgcgcgatcagctccgcgctatc

SEQ ID NO: 757310 - DNA, 75 bp, synthetic construct
  source 1..75: mol_type = other DNA
cgggctgaatctcaggtttttgtgactcctgccccggtctgtgatcgcctggtgacgctggcggagatcagcaac

SEQ ID NO: 757311 - DNA, 75 bp, synthetic construct
  source 1..75: mol_type = other DNA
atctacgcaacgttaattcctgatgatcatgtaattttatctatcgaggcattcattgaatacctggaaaggctc

SEQ ID NO: 757312 - DNA, 75 bp, synthetic construct
  source 1..75: mol_type = other DNA
accaaaaagaaagatggctcaggtagagagattattcaacagaaagtaaaaatgacctttaatgaaggacgtgta

SEQ ID NO: 757313 - DNA, 75 bp, synthetic construct
  source 1..75: mol_type = other DNA
atgcgtttaaatcacgttatggtcggtgctacagggtctggtaagactaccttcatgaaatctatagcagacctt

SEQ ID NO: 757314 - DNA, 75 bp, synthetic construct
  source 1..75: mol_type = other DNA
atgataaccctgctgctgtatatagccgactttcatcacttatcaaagaatctaaggtgggtacaacgcttgatt

SEQ ID NO: 757315 - DNA, 75 bp, synthetic construct
  source 1..75: mol_type = other DNA
tttccagctaacaggcgctatataacgattgaagatacacatgaacttgatttgcctaaccatcctaatcatgtt

SEQ ID NO: 757316 - DNA, 75 bp, synthetic construct
  source 1..75: mol_type = other DNA
tggcactggtgttttcactgcccgttttcgccgctgaacactggatcgatgttcgtgttccagagcagtatcagc

SEQ ID NO: 757317 - DNA, 75 bp, synthetic construct
  source 1..75: mol_type = other DNA
gtgtcctttgctatcacttcgctgatactgaagatggaaaaaacggtggaaacgaagagcgaagatgagtttgct

SEQ ID NO: 757318 - DNA, 75 bp, synthetic construct
  source 1..75: mol_type = other DNA
cgcagagattccgatgttccttggctcaatgatcatgggaccgttaggtgggctggtcataaaatatgtcgataa

SEQ ID NO: 757319 - DNA, 75 bp, synthetic construct
  source 1..75: mol_type = other DNA
acaggtgtcggtcacggggtttacgagaacgtgaaagcgttttttccagccgtccgggagtttgtctacaacccc

SEQ ID NO: 757320 - DNA, 75 bp, synthetic construct
  source 1..75: mol_type = other DNA
gaccgactttcatgctctggccctgcgcccatttggctggcgcgaagtgtggatcggttatgacccggcaaaagg

SEQ ID NO: 757321 - DNA, 75 bp, synthetic construct
  source 1..75: mol_type = other DNA
cgggatggctattcacaaaaaatggcgacaaacctatttttccacgccatccagcctgacccacagtgcttatcc

SEQ ID NO: 757322 - DNA, 75 bp, synthetic construct
  source 1..75: mol_type = other DNA
atgaatacctgaaaaggttaggtgccagccgtattttgccgcgcgatgagtttgctgaatcccgtccactggaaa

SEQ ID NO: 757323 - DNA, 75 bp, synthetic construct
  source 1..75: mol_type = other DNA
atgcaggcgttacttttagaacagcaggacggcaaaactctcgcatcggtacagacacttgacgaaagtcgcctg

SEQ ID NO: 757324 - DNA, 75 bp, synthetic construct
  source 1..75: mol_type = other DNA
tgtatcatttgaattcaatatcaaatcattccctgtcgcattacgtgctgaaattctgttgcaacaagggagaat

SEQ ID NO: 757325 - DNA, 75 bp, synthetic construct
  source 1..75: mol_type = other DNA
aagatgcgtgaatgcaatggccaggcgacgcagcaatctctgaaaggcgatgatcgcaataagtttatgagcact

SEQ ID NO: 757326 - DNA, 75 bp, synthetic construct
  source 1..75: mol_type = other DNA
gaaggcgttgaaaggggatgcccgcaagacgtatatgagtgattgtctgaagaacagcaaatctgcgcccggcga

SEQ ID NO: 757327 - DNA, 75 bp, synthetic construct
  source 1..75: mol_type = other DNA
caccgttggcgacaaagtgctggcaaaagtgctggcgcaaatgaattacggcggctgcgtggcggcctgtggtct

SEQ ID NO: 757328 - DNA, 75 bp, synthetic construct
  source 1..75: mol_type = other DNA
ccgtctggagtttgacgccggacacaccgacatagcgcagtcatttatggcaatccgtcgcgccaccaccgccag

SEQ ID NO: 757329 - DNA, 75 bp, synthetic construct
  source 1..75: mol_type = other DNA
aatatattgagaatgcacataaaaatattatagaaaatgatgagttaaaacacgaaatttctctttttgcgaaag

SEQ ID NO: 757330 - DNA, 75 bp, synthetic construct
  source 1..75: mol_type = other DNA
gtatttgaaaatggacattatgattggggatgtgttgttaatgatgttctgccaaatatatgcaaaggcaatgcg

SEQ ID NO: 757331 - DNA, 75 bp, synthetic construct
  source 1..75: mol_type = other DNA
gggaatgtgttgttaatgatgttctgccaaatatatgcaaaggcaatgcgcgtatacctgtttttcacttcttca

SEQ ID NO: 757332 - DNA, 75 bp, synthetic construct
  source 1..75: mol_type = other DNA
atggttgacaatgtttttaagaagaaattggcatcaattaagaacgaacatgtgtcggtgttagatagttacaaa

SEQ ID NO: 757333 - DNA, 75 bp, synthetic construct
  source 1..75: mol_type = other DNA
gatgaagcgatgagcattcaggctctatcaagtaatttttgtagactggtctgtctgtatgattttataaagaat

SEQ ID NO: 757334 - DNA, 75 bp, synthetic construct
  source 1..75: mol_type = other DNA
ttggtgtaaatgagttatatcttgcttatgatttcggtttttttttgaggatgatgccctatatggaaccaggtt

SEQ ID NO: 757335 - DNA, 75 bp, synthetic construct
  source 1..75: mol_type = other DNA
gttctggtccggtgcgctattcaaccgtgggcgcaacaaagccgataaccggacatcaaccaggaggtctacggc

SEQ ID NO: 757336 - DNA, 75 bp, synthetic construct
  source 1..75: mol_type = other DNA
tgcgtggtggtggcaccgccagccgtaccgggcggcaaattccgcattcttgagcggcaccagtggcgcgggatg

SEQ ID NO: 757337 - DNA, 75 bp, synthetic construct
  source 1..75: mol_type = other DNA
cgtgacctatatcggcatcgactcgacaggtgtcggtcacggggtttacgagaacgtgaaagcgttctttcctgc

SEQ ID NO: 757338 - DNA, 75 bp, synthetic construct
  source 1..75: mol_type = other DNA
tattgagaatgcacataaaaatataatagataatgatgagttaaaacacgaaatttccctttttgcgaaagcaaa

SEQ ID NO: 757339 - DNA, 75 bp, synthetic construct
  source 1..75: mol_type = other DNA
gacttccgcgcccaggctgacgcgatcaaaaaactgaccgaacagtacaacgtgacctacatcggcatcgactcg

SEQ ID NO: 757340 - DNA, 75 bp, synthetic construct
  source 1..75: mol_type = other DNA
ccagaacctgctgatgtgcgagtttgtggacgatctcgcgtccgtgtttccgctcagcgagctgcaggcgtgcat

SEQ ID NO: 757341 - DNA, 75 bp, synthetic construct
  source 1..75: mol_type = other DNA
aattgcttggttttgctggtttgccaaagcaagcaactaacattacacgtaaggcacaaagagaaggctgggtgt

SEQ ID NO: 757342 - DNA, 75 bp, synthetic construct
  source 1..75: mol_type = other DNA
tttggcggtcatgcgatggcggcgggtttgtcgctggaagaggataaattcgaactctttcaacaacggtttggc

SEQ ID NO: 757343 - DNA, 75 bp, synthetic construct
  source 1..75: mol_type = other DNA
cggttatcgcctttgcgccagcaggtgatggtacgctgaaaggttcaggtcgctccattcaggggctgcatatgc

SEQ ID NO: 757344 - DNA, 75 bp, synthetic construct
  source 1..75: mol_type = other DNA
gggtgtggcgttttatctgatgctggcgctgcgcacctttttgcgcgatcagggctggtttgatgagcgcggcat

SEQ ID NO: 757345 - DNA, 75 bp, synthetic construct
  source 1..75: mol_type = other DNA
tggcggatgttgtgccactggacgccaataaccgcatcctgacctggcaagggatgagccgtattcgtgccggga

SEQ ID NO: 757346 - DNA, 75 bp, synthetic construct
  source 1..75: mol_type = other DNA
gccgtgaagtcgatgaaacggcagaattgcctgcggatttgccgcccttactgcgccgtttatatgccagccggg

SEQ ID NO: 757347 - DNA, 75 bp, synthetic construct
  source 1..75: mol_type = other DNA
gtcagacggtccgttaagcccggccgaaatgaccatggaagtggcgcagttgctgcgcgatgctggcccgtgggg

SEQ ID NO: 757348 - DNA, 75 bp, synthetic construct
  source 1..75: mol_type = other DNA
atgaaaaaaggcaccgttcttaattctgatatttcatcggtgatctcccgactgggacataccgatacgctggtg

SEQ ID NO: 757349 - DNA, 75 bp, synthetic construct
  source 1..75: mol_type = other DNA
atgaaaaaaggcgccgttcttaattctgatatttcgtcggtgatctcccgcctggggcataccgatacgctggtg

SEQ ID NO: 757350 - DNA, 75 bp, synthetic construct
  source 1..75: mol_type = other DNA
tctgggacataccgatacgttggtggtgtgtgatgctggtttacccatccccaaaagtacaacgcgtatcgatat

SEQ ID NO: 757351 - DNA, 75 bp, synthetic construct
  source 1..75: mol_type = other DNA
aggaatacaaaaaaaaagaatcttgggatgatgcacataatgatgcttatcaaaattatcaattaaaaacaccaa

SEQ ID NO: 757352 - DNA, 75 bp, synthetic construct
  source 1..75: mol_type = other DNA
attgcacttcacgaaatgattatttatatcagagaacgaaatattttatagaaaattcttatatagactcaaaga

SEQ ID NO: 757353 - DNA, 75 bp, synthetic construct
  source 1..75: mol_type = other DNA
gacggccatttccgcctgctgcaacagcgcctggtgggggagcgccatctgaaggttatggttgaaccggtcggc

SEQ ID NO: 757354 - DNA, 75 bp, synthetic construct
  source 1..75: mol_type = other DNA
cgccattgataaattacacacctgtgatgccgtattaagtggctatctgggatcggcggagcagggtgaacatat

SEQ ID NO: 757355 - DNA, 75 bp, synthetic construct
  source 1..75: mol_type = other DNA
tacgaaatcatggtgaccaccaaagcaatgcaggaatatgagctgcaagtggttgctgctcaggatcgtattgcc

SEQ ID NO: 757356 - DNA, 75 bp, synthetic construct
  source 1..75: mol_type = other DNA
gccggtaggtgttggtgatgtgacgagcggtttactgctggtgaaactgcttcagggggcaacgctgcaggaggc

SEQ ID NO: 757357 - DNA, 75 bp, synthetic construct
  source 1..75: mol_type = other DNA
acaagcgttgttgccggtaaaggctggggccaggcaaaacctgttgaacgtgctttcggtgttggtgggcttgag

SEQ ID NO: 757358 - DNA, 75 bp, synthetic construct
  source 1..75: mol_type = other DNA
gccgacgaccagaaaatcacccttgccgggctgtcgtcggtcggcattcgcctgtttctggtgacctacgatgcg

SEQ ID NO: 757359 - DNA, 75 bp, synthetic construct
  source 1..75: mol_type = other DNA
cgctggtcgatttcggtacgcgccagccggtaggcgttggtgatgtgacgagcggtttactgctggtgaaattgt

SEQ ID NO: 757360 - DNA, 75 bp, synthetic construct
  source 1..75: mol_type = other DNA
cattgcttcagcgatttatgacgatgttggaagcgtggttgcggctatctccatctcaggcccggcctcgagact

SEQ ID NO: 757361 - DNA, 75 bp, synthetic construct
  source 1..75: mol_type = other DNA
gatctgccgctctcgacgacttttcgcctgttaaaagtgttacaggcagcagattttgtctatcaggacagccag

SEQ ID NO: 757362 - DNA, 75 bp, synthetic construct
  source 1..75: mol_type = other DNA
atgacggaagttagacggcgcggcaggccaggacaggcggagcctgtggcacagaagggcgcacaggcgttagag

SEQ ID NO: 757363 - DNA, 75 bp, synthetic construct
  source 1..75: mol_type = other DNA
gccgcgaatccgcaggcgaaatatttttgcgatccggtaatgggtcatccggaaaaaggctgtatcgttgcaccg

SEQ ID NO: 757364 - DNA, 75 bp, synthetic construct
  source 1..75: mol_type = other DNA
cgcagaatacaaaccagcccatcatcagccgggcagaccttgaatgtctcgaacatatgcgcaacgtcggccagc

SEQ ID NO: 757365 - DNA, 75 bp, synthetic construct
  source 1..75: mol_type = other DNA
ccagcaacatctcaataaaattaatccgcactcagcacgcatcgcttttctcggccccaaaggttcttattccca

SEQ ID NO: 757366 - DNA, 75 bp, synthetic construct
  source 1..75: mol_type = other DNA
ctcaggcgtctttcccgacaggagcctgactttattgatgtccacgctcacctggcatacgtatttctggaacaa

SEQ ID NO: 757367 - DNA, 75 bp, synthetic construct
  source 1..75: mol_type = other DNA
aaccttgatggaacatcgatatacctgacgatggcggcggtatttatcgcccaggccactaacagtgagatggat

SEQ ID NO: 757368 - DNA, 75 bp, synthetic construct
  source 1..75: mol_type = other DNA
ctggaccacaaaaaactggacgatgtgctgaataatcgtgcgccggatggcaaaacgcacgaattatcctcttaa

SEQ ID NO: 757369 - DNA, 75 bp, synthetic construct
  source 1..75: mol_type = other DNA
gaaatcattaaatgcgccgaaatgctgatgcaggaagatgatttcgaaatatgcgaaagtattctaagacagcag

SEQ ID NO: 757370 - DNA, 75 bp, synthetic construct
  source 1..75: mol_type = other DNA
agaaatgcagaaatatgaatggtgaatatgtctggccctggatattgccgttttcagcagcaggcaggaaacatt

SEQ ID NO: 757371 - DNA, 75 bp, synthetic construct
  source 1..75: mol_type = other DNA
taatcgccttatacctgaaagtttcagcggtgaaatcatctggatgaatccgcaaaaccggccttatctgcgcgc

SEQ ID NO: 757372 - DNA, 75 bp, synthetic construct
  source 1..75: mol_type = other DNA
atgaacgacagattacgctttgaagtgaacgataaccaggggcgtttcgtatttccggatacctggttttgccca

SEQ ID NO: 757373 - DNA, 75 bp, synthetic construct
  source 1..75: mol_type = other DNA
aatgccccgcgtaaggcactgaacgccactcttaaaggactggcggcaggtaatcgtctcatcccggaaagtttc

SEQ ID NO: 757374 - DNA, 75 bp, synthetic construct
  source 1..75: mol_type = other DNA
catgcagatgaattttcaccttactggtatgaactcggccttctgcattttcttaatggggagctggtaaaagct

SEQ ID NO: 757375 - DNA, 75 bp, synthetic construct
  source 1..75: mol_type = other DNA
tgacaatggcggcggtgtttatcgcccaggccactaacagtcagatggatatcgtccaccaaatcacgctgttaa

SEQ ID NO: 757376 - DNA, 75 bp, synthetic construct
  source 1..75: mol_type = other DNA
ttcggggcaatggcgtttaccatcggtaaatacggcgtcggcacactggtgcaactggggcagctgattatctgt

SEQ ID NO: 757377 - DNA, 75 bp, synthetic construct
  source 1..75: mol_type = other DNA
ggcggcaggggtaacgggtagtggctttatcgtgctggcggcgacactctctgcggtgggccatttgccggtggc

SEQ ID NO: 757378 - DNA, 75 bp, synthetic construct
  source 1..75: mol_type = other DNA
aacaactatgtccgatactaacaatcagttggctgttcaggttcgccagaaagttaaaggtctggctcgtgcatt

SEQ ID NO: 757379 - DNA, 75 bp, synthetic construct
  source 1..75: mol_type = other DNA
ggaggagcctcaggttccgcaggccaacgcctacatgcttgaggccgccaccgctgcagtgaaggaagtcgctag

SEQ ID NO: 757380 - DNA, 75 bp, synthetic construct
  source 1..75: mol_type = other DNA
ggaaaaccctgaagtgccgcaagccaacgcttacatgcttgaggctgccaccaacgcagtgaaagaggtagctag

SEQ ID NO: 757381 - DNA, 75 bp, synthetic construct
  source 1..75: mol_type = other DNA
aacggaggtcaggtggccttcgatacagttaaccagctaaatatgcgatctgaccttgagacgtatgtttttcag

SEQ ID NO: 757382 - DNA, 75 bp, synthetic construct
  source 1..75: mol_type = other DNA
gcggatgtggaagtcgaagtcgactccctgaactttaaaaagtttaccgccgtggcccgtgccgcaggttcctgg

SEQ ID NO: 757383 - DNA, 75 bp, synthetic construct
  source 1..75: mol_type = other DNA
tgtcattcaacgccgatattgttgctcgttcaccgaagaagaaaccgaccttcttccctgagcaaatcgaaggct

SEQ ID NO: 757384 - DNA, 75 bp, synthetic construct
  source 1..75: mol_type = other DNA
atgcgccataacacggcaaaaattgccgttaacgttggcgttcgtgagcagatagagtccggcgttggtgcatgg

SEQ ID NO: 757385 - DNA, 75 bp, synthetic construct
  source 1..75: mol_type = other DNA
gcctgctcacacgtcatatgggacgccaatagcaagcagatggataagagcgacgctaagcactgcacggtgatt

SEQ ID NO: 757386 - DNA, 75 bp, synthetic construct
  source 1..75: mol_type = other DNA
tcgcagaaaattctgtaaaaaaagcaagtcagatcaaacgatttaaacaaaaggctgaaaaagaatatacaactt

SEQ ID NO: 757387 - DNA, 75 bp, synthetic construct
  source 1..75: mol_type = other DNA
aacaatgtgttgatgatgacaggggtgagcccgtcaatcggtaaaacctttgtctgcgccaacctggcggcggtg

SEQ ID NO: 757388 - DNA, 75 bp, synthetic construct
  source 1..75: mol_type = other DNA
actcaacgccgcgaagattgcagaaatcttcaacaatatggacctcgacaagcaggcagaactgcgtgagtacct

SEQ ID NO: 757389 - DNA, 75 bp, synthetic construct
  source 1..75: mol_type = other DNA
aacctggctaccgcaatgcgacgtgatggcgagatttatgcctcaatggtcaacgatatttatgacgttcctcgt

SEQ ID NO: 757390 - DNA, 75 bp, synthetic construct
  source 1..75: mol_type = other DNA
ttcttccctgagcaaatcgaaggctacgaatacatgtacggtggaaatgatgactatccgtactatctgcagaac

SEQ ID NO: 757391 - DNA, 75 bp, synthetic construct
  source 1..75: mol_type = other DNA
cggttatgctcactgataaaatactggcatacaatcctgaagataatcagggtgcccgctggttgttgggttcag

SEQ ID NO: 757392 - DNA, 75 bp, synthetic construct
  source 1..75: mol_type = other DNA
attgccctgactatcgtctttttactggcaaccgccacgctgtggccgttttctgcgtggggcggtaatgcagtc

SEQ ID NO: 757393 - DNA, 75 bp, synthetic construct
  source 1..75: mol_type = other DNA
ggcggtattaaagagcgcttcgcgcaactgcgccaaatgggcattaaaacggtgatgattaccggcgataaccgt

SEQ ID NO: 757394 - DNA, 75 bp, synthetic construct
  source 1..75: mol_type = other DNA
ccttgccgctcagggtgttctttccgcagcagcaaagggaatagggcgtggaataacggctataaaaggtgatat

SEQ ID NO: 757395 - DNA, 75 bp, synthetic construct
  source 1..75: mol_type = other DNA
caggagtcagccgttctgttcgcgagcttgaagaaaggctgggtgtccagctgctagtgcgcaccacgcgtaaac

SEQ ID NO: 757396 - DNA, 75 bp, synthetic construct
  source 1..75: mol_type = other DNA
tcaaaaagtcgatcaggttgcgcgtcagggggccacaccgctggtagtagtagaaggttctcgtgtgctgggcgt

SEQ ID NO: 757397 - DNA, 75 bp, synthetic construct
  source 1..75: mol_type = other DNA
gttttaacctgcgcgagcgcgatgtgcagtcgctccatgccacctttgtaccgtttactgcgcaaagccggatga

SEQ ID NO: 757398 - DNA, 75 bp, synthetic construct
  source 1..75: mol_type = other DNA
tggcatcagcatccggagatggcattgattcgttcagtcctgaaaacggcggcagaagaggtagagagtccgctc

SEQ ID NO: 757399 - DNA, 75 bp, synthetic construct
  source 1..75: mol_type = other DNA
gtaccgctttaacggcggctgacctgccggaaaacctggcggagctgcgtcaggcgattgaaactgcggtgccgc

SEQ ID NO: 757400 - DNA, 75 bp, synthetic construct
  source 1..75: mol_type = other DNA
aacgctgggaacgggtaaccactttattgaaatctgccttgatgagtcggatcaggtgtggattatgctgcactc

SEQ ID NO: 757401 - DNA, 75 bp, synthetic construct
  source 1..75: mol_type = other DNA
accatcgggtacggtccgtattaatgccagccagcacgccattgataaagtgctgctgccgaagctggcagtgtt

SEQ ID NO: 757402 - DNA, 75 bp, synthetic construct
  source 1..75: mol_type = other DNA
tgagagcatatcgtatctggctatcatacaaatggtagcgatgattttaacctttttaacgtatccttatttaat

SEQ ID NO: 757403 - DNA, 75 bp, synthetic construct
  source 1..75: mol_type = other DNA
gcaagacacggggatttttggctctgttttatgtatcagtgagccggctcaggagataaaaaaatcacctgagca

SEQ ID NO: 757404 - DNA, 75 bp, synthetic construct
  source 1..75: mol_type = other DNA
ctgaacagctggcgaacggctatgtggatctgctcgacggcctgccgttcggggaatcccgtgaataccgcgtca

SEQ ID NO: 757405 - DNA, 75 bp, synthetic construct
  source 1..75: mol_type = other DNA
atactgccgaagattattatgccacataccacccgttatgggggcaatatccggaagcattgctgtttgtaagct

SEQ ID NO: 757406 - DNA, 75 bp, synthetic construct
  source 1..75: mol_type = other DNA
aactgttacgaacaggtgatcatgagcgagccttcagtgtactgaaaaaacatgctgatgaattttcaccttact

SEQ ID NO: 757407 - DNA, 75 bp, synthetic construct
  source 1..75: mol_type = other DNA
caaacgggagtatgcggcgcttgggatgaaagcgaacttttcactgtttgacgataccgatcaactggcgttgct

SEQ ID NO: 757408 - DNA, 75 bp, synthetic construct
  source 1..75: mol_type = other DNA
cgaatttaccggcgagaagtaccgcgatattgcgcgcgtaatgggcgtgaaagtggaaggcatgagcctggaaga

SEQ ID NO: 757409 - DNA, 75 bp, synthetic construct
  source 1..75: mol_type = other DNA
ggcgctcggacagtatgtcgcgggcatgggcttctcgaacgttgggttggggctggtgcatggtatggcgcaccc

SEQ ID NO: 757410 - DNA, 75 bp, synthetic construct
  source 1..75: mol_type = other DNA
aaacggcatggtttggtcggggggctgttggagctttaaccgatgaagtgaaacgccgtggttatcagaaggcgc

SEQ ID NO: 757411 - DNA, 75 bp, synthetic construct
  source 1..75: mol_type = other DNA
ggcgatccccgcaccgccgggctggctgaacagctggcgaacggctatgtggatctgctcgacggcctgccgttc

SEQ ID NO: 757412 - DNA, 75 bp, synthetic construct
  source 1..75: mol_type = other DNA
cgccgtcagattgccgctgttggccagattgaggggccattgtctccgcgtcagatcggacagctcagcgagcgc

SEQ ID NO: 757413 - DNA, 75 bp, synthetic construct
  source 1..75: mol_type = other DNA
atgagcacacgtaagaaaaaaacggcggtttctgacgaggccgtgatggaggctatccgggatgcacttgaagac

SEQ ID NO: 757414 - DNA, 75 bp, synthetic construct
  source 1..75: mol_type = other DNA
caggtgcaactgatgaccctgcacgcgtcaaaaggactggagtttccttatgtttacatggtcggtatggaagaa

SEQ ID NO: 757415 - DNA, 75 bp, synthetic construct
  source 1..75: mol_type = other DNA
ggaaaggatgatgatcgactattggtaattcataataaaattattgaaaaaacgtatcatgataaaaatgatggg

SEQ ID NO: 757416 - DNA, 75 bp, synthetic construct
  source 1..75: mol_type = other DNA
agaattaaatattcaaatgctttatgtcttttatttgacaggcaactgtgtcagaagacaagaaaagattttaca

SEQ ID NO: 757417 - DNA, 75 bp, synthetic construct
  source 1..75: mol_type = other DNA
ggacggtcagggtggtgtgccgggagtggagtattacagataacgccaggtacagtgatttcagttgtatgatgg

SEQ ID NO: 757418 - DNA, 75 bp, synthetic construct
  source 1..75: mol_type = other DNA
ttgtggcgaccgccgaaacataaccggacggtgagggtggtgtgccgggagtggagcgtcacggataacgcccgg

SEQ ID NO: 757419 - DNA, 75 bp, synthetic construct
  source 1..75: mol_type = other DNA
gtggcatggtggttaccgtgcctttttgtggcgaccgccgaaacataaccggacggtgacgggttgtgtgccgtg

SEQ ID NO: 757420 - DNA, 75 bp, synthetic construct
  source 1..75: mol_type = other DNA
gcaaatacggcaacatcaggggccggcggtgtgggtgtacagttgtcggacaacgcggggccggttccggccgga

SEQ ID NO: 757421 - DNA, 75 bp, synthetic construct
  source 1..75: mol_type = other DNA
attcacacttataatggcatattcccagccatcgtttgcactgttgtgcagaaataaccagaccgggcagacttt

SEQ ID NO: 757422 - DNA, 75 bp, synthetic construct
  source 1..75: mol_type = other DNA
aacggctgcaatacccgttttgtggctgacgcgctggcgaaattcctgaaaattcatgcgcgtgaagtcagcttc

SEQ ID NO: 757423 - DNA, 75 bp, synthetic construct
  source 1..75: mol_type = other DNA
caatggcgtcggatcgcagcctgctgacagcgatgatgagcggcggcagtgcgaaagtatacgtctgcgataacc

SEQ ID NO: 757424 - DNA, 75 bp, synthetic construct
  source 1..75: mol_type = other DNA
actttttcgaccttgcactggaaactaccgtgcctgagctgaaagcggcaaaagacttcctgcagaagatggctg

SEQ ID NO: 757425 - DNA, 75 bp, synthetic construct
  source 1..75: mol_type = other DNA
agctgcgccagttcgccatgagtatcagcggttcagtgattttcggcagtaacggggaaatgcgtgtcctgtctt

SEQ ID NO: 757426 - DNA, 75 bp, synthetic construct
  source 1..75: mol_type = other DNA
ggatcccccgcgaggggatggagacgacacgaaagccatctgttattacggtaaagtttggtgacggatatgaac

SEQ ID NO: 757427 - DNA, 75 bp, synthetic construct
  source 1..75: mol_type = other DNA
tttcgtgtcacagatgaatattcccgcgccgcgctggacagttttttatcccgtcatgccgggatgcgtgctttt

SEQ ID NO: 757428 - DNA, 75 bp, synthetic construct
  source 1..75: mol_type = other DNA
gtttgcattacaactgcaccacagtacaaaatgtcagacacagtaaaaaagactgggtaatcaacccacacgtct

SEQ ID NO: 757429 - DNA, 75 bp, synthetic construct
  source 1..75: mol_type = other DNA
attcaaatagtaatccatttaaaatttatgtaagacagaggaacgaaatattagttcttatgttatatgaacttg

SEQ ID NO: 757430 - DNA, 75 bp, synthetic construct
  source 1..75: mol_type = other DNA
aacagattatggattaccggggctataaacaggatgaggtggtgctgcgtccggttctgcgagaagagctgtcga

SEQ ID NO: 757431 - DNA, 75 bp, synthetic construct
  source 1..75: mol_type = other DNA
gagtttgaagaacaggttgaagcccgtaagctcagtgatatcccggatgctttggcggtaaacaagcatgctcag

SEQ ID NO: 757432 - DNA, 75 bp, synthetic construct
  source 1..75: mol_type = other DNA
gttctccggcgctgaatgaagggctgctcaaagccaatgagcggatgtataaccatctgctctacggtatcgccg

SEQ ID NO: 757433 - DNA, 75 bp, synthetic construct
  source 1..75: mol_type = other DNA
agaccgcatagatcttgaggaacagctcagcggtacctttgcgtccggcggtgaattggccgggaaaaaagacaa

SEQ ID NO: 757434 - DNA, 75 bp, synthetic construct
  source 1..75: mol_type = other DNA
atcattttcaccctaatccagaaatttaattcagcgacaaaactccctgaatgcgtcaataccagccccgatatc

SEQ ID NO: 757435 - DNA, 75 bp, synthetic construct
  source 1..75: mol_type = other DNA
gccggaatgaatcaggtaaaccgtatcgtggaaactatcatccagatcctgcgcgttggtttgatgaaatcatga

SEQ ID NO: 757436 - DNA, 75 bp, synthetic construct
  source 1..75: mol_type = other DNA
cctgaaccgggtgtatttgggaaggtaattaacaacggagatttactggcaacgttatatgtgaataagttttcc

SEQ ID NO: 757437 - DNA, 75 bp, synthetic construct
  source 1..75: mol_type = other DNA
cggttatacggaatactgaatgcaatgcgtcatcgcgtctcgaatggaaatgcggaggcgctgaacagcaagatc

SEQ ID NO: 757438 - DNA, 75 bp, synthetic construct
  source 1..75: mol_type = other DNA
aggctgtacgggatcctgaatgcgatgcgacacagtgtctcaaacggaaatgcggaggcacttaacagcaagatc

SEQ ID NO: 757439 - DNA, 75 bp, synthetic construct
  source 1..75: mol_type = other DNA
gcagacccgatgggggcagggaaggtggtgttatctggcataccaccggctctggcaaatcgtacaccatggtgt

SEQ ID NO: 757440 - DNA, 75 bp, synthetic construct
  source 1..75: mol_type = other DNA
tattgacactcttattcagagtggtgtcctggcaggtataaaaactcttctttactatatggggattataaatac

SEQ ID NO: 757441 - DNA, 75 bp, synthetic construct
  source 1..75: mol_type = other DNA
gcatttcttcagaatgttgcagagcgagaaaaaattcttgaaacagtagccgatgaatcagatggaagactgaca

SEQ ID NO: 757442 - DNA, 75 bp, synthetic construct
  source 1..75: mol_type = other DNA
tgtggcgttgtaagcctgtggataatccatggacgttggattcattactaaaaaagactatttctgctgttttac

SEQ ID NO: 757443 - DNA, 75 bp, synthetic construct
  source 1..75: mol_type = other DNA
ttcaggcagaaccgcgttatattattttggttcctgtgctggcggctatctggattattggcagtctgacaagca

SEQ ID NO: 757444 - DNA, 75 bp, synthetic construct
  source 1..75: mol_type = other DNA
ccacaggtgaattgaccactcttggccgtgaactgggcaaaggtggtgaaggcgcggtttatgatatcgaggagt

SEQ ID NO: 757445 - DNA, 75 bp, synthetic construct
  source 1..75: mol_type = other DNA
aggccgaatgaagcgataacgccagcagacagacaagcggtaatggcgaaaatgaccgccaaacgacatcggctg

SEQ ID NO: 757446 - DNA, 75 bp, synthetic construct
  source 1..75: mol_type = other DNA
cattctgattgagatcgcactgtcagcgttatcgctgctgctttgcggccttcagacagaaccgcgttatatcat

SEQ ID NO: 757447 - DNA, 75 bp, synthetic construct
  source 1..75: mol_type = other DNA
tttcggcaatgcatgtttatcccggtcatttggctgactgcccgtggtgtgcgctggataatcaaggcgttatct

SEQ ID NO: 757448 - DNA, 75 bp, synthetic construct
  source 1..75: mol_type = other DNA
catcgacagatgaattgaccactctcgggcgtgaactgggcaaaggcggcgaaggtgcggtttatgatatcgagg

SEQ ID NO: 757449 - DNA, 75 bp, synthetic construct
  source 1..75: mol_type = other DNA
ctctgcggtcgatcaccggctggcagaactgaccatgaacaaactgtacgatcgtgttcccgcttcagtctggaa

SEQ ID NO: 757450 - DNA, 75 bp, synthetic construct
  source 1..75: mol_type = other DNA
acccgcgcccagaaagagttgacctttacgctgtgtaaagagcgtcgtcagtacggtgagctggtacgtccggag

SEQ ID NO: 757451 - DNA, 75 bp, synthetic construct
  source 1..75: mol_type = other DNA
gtggcagagactgccgtattcgttcaaacaactgctacggtcaggtatcccgtcgtgaccaggagagcgcgctgg

SEQ ID NO: 757452 - DNA, 75 bp, synthetic construct
  source 1..75: mol_type = other DNA
cctgcgcgtaaagcggcgttacggtcttttggtattgaaacagccgcagatgttacccgtcgtggcgttaagcaa

SEQ ID NO: 757453 - DNA, 75 bp, synthetic construct
  source 1..75: mol_type = other DNA
aatcgcgcgaaaatggactatgaccatttagtcagccagatccaacagttgggcgggctggaaggttttatcgcc

SEQ ID NO: 757454 - DNA, 75 bp, synthetic construct
  source 1..75: mol_type = other DNA
gtttggtgggcggcatccttattctggtgtgccgcttatctctgatgcggggaatgcgctggagacggatattgc

SEQ ID NO: 757455 - DNA, 75 bp, synthetic construct
  source 1..75: mol_type = other DNA
ctggcgaaagtctgggcgatggtgatggcgtcagtagcaccgccagcattgcaactgccattacccgatcatttc

SEQ ID NO: 757456 - DNA, 75 bp, synthetic construct
  source 1..75: mol_type = other DNA
ggtgctgaaaacgctcaatgagaagagtaacgcgctggtatttgaagcgaaggacaaaaaagatccagagccgaa

SEQ ID NO: 757457 - DNA, 75 bp, synthetic construct
  source 1..75: mol_type = other DNA
ggtcggtggagaccagcacctttgatacgcaaaaacgtagtatcagttatcaattgttcatcaatgcgccttatg

SEQ ID NO: 757458 - DNA, 75 bp, synthetic construct
  source 1..75: mol_type = other DNA
tgatttgcttgattcaccgccgctggcgccgccggatgctaaagggattcgaatcatactcgacagtaaaaaagc

SEQ ID NO: 757459 - DNA, 75 bp, synthetic construct
  source 1..75: mol_type = other DNA
tatagaaaacttgataaatataaaaacccaaaatcgggcgttatcagcactgaaaaaattagcattgattggatg

SEQ ID NO: 757460 - DNA, 75 bp, synthetic construct
  source 1..75: mol_type = other DNA
attaggctcaaaacctatttatacttatgaatggaacgagcgtaaaaaaagagtcgatgcagttgctagatattg

SEQ ID NO: 757461 - DNA, 75 bp, synthetic construct
  source 1..75: mol_type = other DNA
cttctggaaagatagtggcattgcggttgatctgacgtcagcgggaatgcgtgtggagatgggctcattgacaac

SEQ ID NO: 757462 - DNA, 75 bp, synthetic construct
  source 1..75: mol_type = other DNA
cacggatcatgccgttaatggaaccgctacgtcaggcggcagaaaaactggcccaggcgcaagcggatttaagcc

SEQ ID NO: 757463 - DNA, 75 bp, synthetic construct
  source 1..75: mol_type = other DNA
tgtcggctttgaacgtacagaaaatcacgataattttggccttgcgttgctgatttttcacgtcttgtttggtgg

SEQ ID NO: 757464 - DNA, 75 bp, synthetic construct
  source 1..75: mol_type = other DNA
tttcagcaggcattcactgaaagtggcgtggcaaccgggcgtccgacggctaaagcgtgggtagcggcacttgat

SEQ ID NO: 757465 - DNA, 75 bp, synthetic construct
  source 1..75: mol_type = other DNA
accagatccagcaggtgggtgggctggaaggttttatcgccaaacggacgatgcttgaaaaaatgaaggacgagc

SEQ ID NO: 757466 - DNA, 75 bp, synthetic construct
  source 1..75: mol_type = other DNA
tttggttcccgtgctggcggctatctggattattggcagcctgacaagcaaagcgtacaaagcagaagtccagcg

SEQ ID NO: 757467 - DNA, 75 bp, synthetic construct
  source 1..75: mol_type = other DNA
taatggcacgttgcatttatgcgaagttggcgtgtcgcattttacgccgccagagctacaaaccttgtcgtcatt

SEQ ID NO: 757468 - DNA, 75 bp, synthetic construct
  source 1..75: mol_type = other DNA
ccattatcagctccgggcggggaatggcggcacagcgggagcagatacaggctgttgtggcgatggccgaaggac

SEQ ID NO: 757469 - DNA, 75 bp, synthetic construct
  source 1..75: mol_type = other DNA
ggtgataagtcacggtgaccgccggcagcgttatgaacagctggccctggattatgctgttctgcatgcacaggg

SEQ ID NO: 757470 - DNA, 75 bp, synthetic construct
  source 1..75: mol_type = other DNA
acgttctccactgtaccggcaggcccgggaacaggtcagtccggagagtaagccactggatacagccatacagca

SEQ ID NO: 757471 - DNA, 75 bp, synthetic construct
  source 1..75: mol_type = other DNA
ctggcagagcagcaggggctgagcggaaaagtgagcgggaagaatttactgaccggagaagggctgaagcatgac

SEQ ID NO: 757472 - DNA, 75 bp, synthetic construct
  source 1..75: mol_type = other DNA
acgggagtgccagtcgttatgtgccggctgaaacctggctgcaggaaaaagccatccttcgcacaatggcagaag

SEQ ID NO: 757473 - DNA, 75 bp, synthetic construct
  source 1..75: mol_type = other DNA
ccgttctccactgtaccggcaggcccgggagcaggtcagtccggagggtaagccgctggatacggccatgcagca

SEQ ID NO: 757474 - DNA, 75 bp, synthetic construct
  source 1..75: mol_type = other DNA
ggctgaaacctggctgcaggaaaaagccattctgcgcacaatggcagaaggaaagaacacgcaacgcccgctgat

SEQ ID NO: 757475 - DNA, 75 bp, synthetic construct
  source 1..75: mol_type = other DNA
ttcctgtaacggtgctggtcagggagaaaacgcagacggaagccctgaaatccgtggcaggactggcgcagcaca

SEQ ID NO: 757476 - DNA, 75 bp, synthetic construct
  source 1..75: mol_type = other DNA
ggccatcagcagcggcgaactggtgccacttgataaggaaaaagggcttttcacctcctccattcatctgctcga

SEQ ID NO: 757477 - DNA, 75 bp, synthetic construct
  source 1..75: mol_type = other DNA
acagcttaacttctcaaaaacgctgtttcttatcgatgaaagctccatggtgggcaaccgggatatggctgacac

SEQ ID NO: 757478 - DNA, 75 bp, synthetic construct
  source 1..75: mol_type = other DNA
cggagcgacgtcagcagagcggtgaacagcttaacttctcaaaaacgctgtttcttatcgatgaaagctccatgg

SEQ ID NO: 757479 - DNA, 75 bp, synthetic construct
  source 1..75: mol_type = other DNA
ggtacggcacaccgtgcccagggggccagcgaggcctttgtgatagccctggccggtgcaaccggcgcacgccag

SEQ ID NO: 757480 - DNA, 75 bp, synthetic construct
  source 1..75: mol_type = other DNA
atcacacatccgcactttggcgataaaccggtaaaggtgttcgctcttacggtaaatatcagcactgaatgtcaa

SEQ ID NO: 757481 - DNA, 75 bp, synthetic construct
  source 1..75: mol_type = other DNA
tgtcgtggcgatgagaagaacgcagcaaggatttatcgggccagttgtgagcaaaaacctggtgattacggctta

SEQ ID NO: 757482 - DNA, 75 bp, synthetic construct
  source 1..75: mol_type = other DNA
tgaaataaaaacaatcacacatccgcacttcggtgataaaccggtaaaggtgttcgcgataaaggtaaatattga

SEQ ID NO: 757483 - DNA, 75 bp, synthetic construct
  source 1..75: mol_type = other DNA
ccgaagcgcgacgactccagccgcagaattaacgtccagtatgacggatatgaaatcaagacaatcacacatccc

SEQ ID NO: 757484 - DNA, 75 bp, synthetic construct
  source 1..75: mol_type = other DNA
tgaggaacggttattttgagctgatggacatttatgattcggaaggtcgtcactacaaaatagacgaggttgcga

SEQ ID NO: 757485 - DNA, 75 bp, synthetic construct
  source 1..75: mol_type = other DNA
aatccggtgtttaaagctcccagcgtgcataaatacgataccgaggattatcgccatgtcgatccgcagtttggc

SEQ ID NO: 757486 - DNA, 75 bp, synthetic construct
  source 1..75: mol_type = other DNA
ccatatggtcaaccgggagatcgtatttgggttcgtgaaacctaccgggtacatggcaaagcgacggacgtcgca

SEQ ID NO: 757487 - DNA, 75 bp, synthetic construct
  source 1..75: mol_type = other DNA
atcacacatccgcactttggcgataaaccggtaacggtgttcgctcttaaggtaaatatcagcactgaatgtcaa

SEQ ID NO: 757488 - DNA, 75 bp, synthetic construct
  source 1..75: mol_type = other DNA
atcacacatccgcactttggcgataaaccggtaatggtgttcgctcttacggtaaataacagcactgaatgtcaa

SEQ ID NO: 757489 - DNA, 75 bp, synthetic construct
  source 1..75: mol_type = other DNA
atcacacatccgcactttggcgataaaccggtaatggtgttcgctcttaaggtaaataccagcactgaatgtcaa

SEQ ID NO: 757490 - DNA, 75 bp, synthetic construct
  source 1..75: mol_type = other DNA
aacatatcgtgctgtggctgggactggcgctggcttgtcttggtcttgccatggtgctctggctgctggtcttgc

SEQ ID NO: 757491 - DNA, 75 bp, synthetic construct
  source 1..75: mol_type = other DNA
tgaagtgaaaacaatcacacatccccacttcggcgataaaccggtaaaggtgtacgcgataaaggtaaatattga

SEQ ID NO: 757492 - DNA, 75 bp, synthetic construct
  source 1..75: mol_type = other DNA
ctaacagaagagcaaattgaatctctgaaagtagcaactgaacagtttggggttgttttcaaccagacaacagcg

SEQ ID NO: 757493 - DNA, 75 bp, synthetic construct
  source 1..75: mol_type = other DNA
ttctgtcgggaatcgaaaccttcggcgagcgcattcaaccactgatgcaatgccgcgcccatctccatctacctg

SEQ ID NO: 757494 - DNA, 75 bp, synthetic construct
  source 1..75: mol_type = other DNA
aggtgactgttgtgaaatacaaattactgccatgcttactcgcgatattcctcacaggatgtgaccgcacagagg

SEQ ID NO: 757495 - DNA, 75 bp, synthetic construct
  source 1..75: mol_type = other DNA
tttcccccattggtgccggaattaattggtaattatcttgtaaccacctccatctcatcgtttatagggccggac

SEQ ID NO: 757496 - DNA, 75 bp, synthetic construct
  source 1..75: mol_type = other DNA
gcaattcttttataaaggtgcttactggcgacgtggccccgtcacgatgtcagccatttctgccattgatatggc

SEQ ID NO: 757497 - DNA, 75 bp, synthetic construct
  source 1..75: mol_type = other DNA
gccaatatgccgctgtatcaactgcttggcggtgcttctcgtgagggcgtgatggtttattgccataccaccggg

SEQ ID NO: 757498 - DNA, 75 bp, synthetic construct
  source 1..75: mol_type = other DNA
cagaaaaaagtatctcttatgaccagacttccggcaaagcccaggtagcagcagcaacagagaagcaaggccgga

SEQ ID NO: 757499 - DNA, 75 bp, synthetic construct
  source 1..75: mol_type = other DNA
cctttcgacggtcagcgcctcaaggaaactcacaagcgcattttttccggcatttatccatgggccggggagtat

SEQ ID NO: 757500 - DNA, 75 bp, synthetic construct
  source 1..75: mol_type = other DNA
ttggcatcgaattcgatgaaaagctggcggcgaaatatccctatgaacctgcttatctgccagtcgcacgtctgg

SEQ ID NO: 757501 - DNA, 75 bp, synthetic construct
  source 1..75: mol_type = other DNA
ggcaaaagtattgaagattatcgcctgttctggatgaaagatccgacacccgcagaaaaccaggagtcttccgcc

SEQ ID NO: 757502 - DNA, 75 bp, synthetic construct
  source 1..75: mol_type = other DNA
cgaagctgcggaagccatccctgatgcccgcgatcgcttgttctacgttgtgcagatgactgcgcaggccgcaga

SEQ ID NO: 757503 - DNA, 75 bp, synthetic construct
  source 1..75: mol_type = other DNA
ccacgttaaatggtcgcgaattgtcggtcgcttcttatctgaaagatcatctttgtccacaactaattggccgcg

SEQ ID NO: 757504 - DNA, 75 bp, synthetic construct
  source 1..75: mol_type = other DNA
cagctagcagaattaccttctgccggggtgagctgggaaaccgatgataatggctttgtgattaaagccagcagc

SEQ ID NO: 757505 - DNA, 75 bp, synthetic construct
  source 1..75: mol_type = other DNA
accgtgatgcccagacactggagaaaagagttcgtttgcagggaaaatgccagctagcagaattaccttctgccg

SEQ ID NO: 757506 - DNA, 75 bp, synthetic construct
  source 1..75: mol_type = other DNA
atggcctggcgaagggcaaagggcttgcgtatgaaccggcaaccaaaggccagtggccggaagagcagttgtggt

SEQ ID NO: 757507 - DNA, 75 bp, synthetic construct
  source 1..75: mol_type = other DNA
aatcgacttcgagcaagctgaaaagctgatcatgcagatgccttgcaacctctcttcattgcagaacaaggaata

SEQ ID NO: 757508 - DNA, 75 bp, synthetic construct
  source 1..75: mol_type = other DNA
agaaaaaccgggtcttggcatcgaattcgatgaaaagctggcggcgaaatatccctatgaacctgcttatctgcc

SEQ ID NO: 757509 - DNA, 75 bp, synthetic construct
  source 1..75: mol_type = other DNA
cggccatttcagcggttgatatggcgctgtgggatattaaagccaaagctgccaacatgccgctttaccagttac

SEQ ID NO: 757510 - DNA, 75 bp, synthetic construct
  source 1..75: mol_type = other DNA
taaaatcaagacaatcacacatacacacttcggagataaaccggtaaaggtgttcgcgataaaggtgaatatcgg

SEQ ID NO: 757511 - DNA, 75 bp, synthetic construct
  source 1..75: mol_type = other DNA
gaattgacgtcccgtatgacggatatgaaatcaagacaatcacacatccccacttcggtgataaaccggtaaagg

SEQ ID NO: 757512 - DNA, 75 bp, synthetic construct
  source 1..75: mol_type = other DNA
gtatagagcaacttgaaaacgagatctccagtcttcgcgatgaggttgctgttcaacgaattcttgtttcaggtc

SEQ ID NO: 757513 - DNA, 75 bp, synthetic construct
  source 1..75: mol_type = other DNA
agatttcagctatcattcctggtttgcgatgcttttttctgcaggaatggggatcggcctgatgttttttggtgt

SEQ ID NO: 757514 - DNA, 75 bp, synthetic construct
  source 1..75: mol_type = other DNA
aacgcctattgaagcagcacgctttggtaaaagcattgaagattatcgcatgttctggatggaagacccgacgcc

SEQ ID NO: 757515 - DNA, 75 bp, synthetic construct
  source 1..75: mol_type = other DNA
tgaaaagctggcggcgaaatatccctatgaacctgcttatctgccagtcgcacgtctggaagatggcacgctgtg

SEQ ID NO: 757516 - DNA, 75 bp, synthetic construct
  source 1..75: mol_type = other DNA
aagaggtaaacaaaacggttacgacagaaaagaagaaaaatcagcgccaaaaatagccactatatacaacgctaa

SEQ ID NO: 757517 - DNA, 75 bp, synthetic construct
  source 1..75: mol_type = other DNA
cgaaaagaagaaaaatcagcgccaaaaatagccactatttacaacgctaagaaggggacaaatctaaccccgctt

SEQ ID NO: 757518 - DNA, 75 bp, synthetic construct
  source 1..75: mol_type = other DNA
aagaggggaacaaaacggatacgatcgaaaagaagaaaaatcagcgccaaaaatagccactatttacaacgctaa

SEQ ID NO: 757519 - DNA, 75 bp, synthetic construct
  source 1..75: mol_type = other DNA
gccttttgccgggatgcagggagcgcaggccacggcgcgacagaggcggcgcgaccggaacggtcgctgcaagcc

SEQ ID NO: 757520 - DNA, 75 bp, synthetic construct
  source 1..75: mol_type = other DNA
cttcgctggctccgttcacgacagcccgccccgccagggggacgcccggaaaagccataaacaggagaggaacgg

SEQ ID NO: 757521 - DNA, 75 bp, synthetic construct
  source 1..75: mol_type = other DNA
ggaaaaaaggactggctgcactctgtttactggctgttgctgggcttagcggctgcgatcaacaagagaatgcgg

SEQ ID NO: 757522 - DNA, 75 bp, synthetic construct
  source 1..75: mol_type = other DNA
accagacggccacggtgaccggaacagggatcaccggtggtgcggatgtggaaacggtgccggagctgctttccc

SEQ ID NO: 757523 - DNA, 75 bp, synthetic construct
  source 1..75: mol_type = other DNA
gtcggagggggcaaaaacagatagtcccggagtgtatctgtgtaaatggtgttattggtataataatggtggtaa

SEQ ID NO: 757524 - DNA, 75 bp, synthetic construct
  source 1..75: mol_type = other DNA
tgtataccctgtggtatgaacttcacccgtttgagaaccttcgccgcaaggggcatcactgccacggcctgacgc

SEQ ID NO: 757525 - DNA, 75 bp, synthetic construct
  source 1..75: mol_type = other DNA
tgggtatggcccgaaagaggctcacggaaaaactggcgcaccattcgcgacggcaagatctgtgcgattgattta

SEQ ID NO: 757526 - DNA, 75 bp, synthetic construct
  source 1..75: mol_type = other DNA
atgttcaaattatcagaatcacaattatcaagaatgtttaagagtgctcctgtattttcggtggaaggtggtaaa

SEQ ID NO: 757527 - DNA, 75 bp, synthetic construct
  source 1..75: mol_type = other DNA
tggaaagggtggcaggattacaaaaatatcctccgcccggctgaagataacttcatggaaaaggtcgatgacctg

SEQ ID NO: 757528 - DNA, 75 bp, synthetic construct
  source 1..75: mol_type = other DNA
gtgaaattcaaaggcaatgcgtcagttctcccggcagatagcacgctggcaacggtgacctttaaaatcacagaa

SEQ ID NO: 757529 - DNA, 75 bp, synthetic construct
  source 1..75: mol_type = other DNA
cgacaatgaccagtattgagatcgcgaaactggtgggaagtcgtcactctgatgttaaacgcagcatcgaaagac

SEQ ID NO: 757530 - DNA, 75 bp, synthetic construct
  source 1..75: mol_type = other DNA
aaccttgtcaacgcttaccggattcccaccgatacacatgagtttttgacccccgatggcttgcttgcgcgacgc

SEQ ID NO: 757531 - DNA, 75 bp, synthetic construct
  source 1..75: mol_type = other DNA
acgctgcaggcaacgattcaggatggggtgatttggttatcggatgataagaataatctggaagtgaacttaacc

SEQ ID NO: 757532 - DNA, 75 bp, synthetic construct
  source 1..75: mol_type = other DNA
ccgacaaggtgaaggggatctacgttcgtccgtatccgaccacatcacagccagacatggttcgccaggtgggga

SEQ ID NO: 757533 - DNA, 75 bp, synthetic construct
  source 1..75: mol_type = other DNA
tcgcccgcaggatttaaccgtcgagccggtgatccttaaatccgctaacgccttcgctgcctatggtctggctgg

SEQ ID NO: 757534 - DNA, 75 bp, synthetic construct
  source 1..75: mol_type = other DNA
ctgttggcattgccggggctatctctcgcccgcaggatttaaccgtcgagccggtgatccttaaatccgctaacg

SEQ ID NO: 757535 - DNA, 75 bp, synthetic construct
  source 1..75: mol_type = other DNA
atccttgggaagtccattgaagattgtatctgttgcgcgtttaactgagaaaaaagggctacatgtagctattag

SEQ ID NO: 757536 - DNA, 75 bp, synthetic construct
  source 1..75: mol_type = other DNA
aaaaaggtctgcacgtggcgattgaagcctgccgccagttgaaagagcgcggggtcgcatttcattaccgcatcc

SEQ ID NO: 757537 - DNA, 75 bp, synthetic construct
  source 1..75: mol_type = other DNA
agcgccgggtgagacgctgcaaataatctcagtggcccgcctgacggagaaaaaaggtctgcatgtagcgattga

SEQ ID NO: 757538 - DNA, 75 bp, synthetic construct
  source 1..75: mol_type = other DNA
gctatgccaggtgacccgaccaaatctcttgccagtatggggatctacgttttcaacgccgattatctatatgaa

SEQ ID NO: 757539 - DNA, 75 bp, synthetic construct
  source 1..75: mol_type = other DNA
cgccatgaagcgtggctacgtgaccgttaatctcggttctgattttgatgccagcaccatcaaaaaaggcgaccc

SEQ ID NO: 757540 - DNA, 75 bp, synthetic construct
  source 1..75: mol_type = other DNA
acactacaggcaacgattcaggacggcattatctggttatcggatgataagaataatctggaagtaaacttaact

SEQ ID NO: 757541 - DNA, 75 bp, synthetic construct
  source 1..75: mol_type = other DNA
aaacgtggtgctgaccaatgctgaattcacaggtgccggtgatgctaacggcaatgcagaaatttcctggaagat

SEQ ID NO: 757542 - DNA, 75 bp, synthetic construct
  source 1..75: mol_type = other DNA
cgaagagatgaacgagtttgtcgatctgctgcctgcccagcagagaatgcagggtgaaaactggtatcgcggtac

SEQ ID NO: 757543 - DNA, 75 bp, synthetic construct
  source 1..75: mol_type = other DNA
atgaaggtcggcttcttcttattgaaattcccgctgtcgtcagaaaccttcgtcctcaatcaaattaccgcgttt

SEQ ID NO: 757544 - DNA, 75 bp, synthetic construct
  source 1..75: mol_type = other DNA
aatgaggcagtcagcgtcaaactcaacaataaagcgggtttcaacgctgaagcgcaaagtaaggctgcggcggcc

SEQ ID NO: 757545 - DNA, 75 bp, synthetic construct
  source 1..75: mol_type = other DNA
gagaaaattaaatgtttcaccttagttggagctgatataaaaaaaacacaactaaaaaaggctagcctgaaggtg

SEQ ID NO: 757546 - DNA, 75 bp, synthetic construct
  source 1..75: mol_type = other DNA
gcaggactgtttgaactcaatccttaaaaataccgtatacccattcaatctttatgttattgataataactcttc

SEQ ID NO: 757547 - DNA, 75 bp, synthetic construct
  source 1..75: mol_type = other DNA
gggtgagttgggaaaccgatgataatggcttcgtggttaaagccagcagtaaacagatgaagatggagtatcggt

SEQ ID NO: 757548 - DNA, 75 bp, synthetic construct
  source 1..75: mol_type = other DNA
caatggtcgtgaagaacgcatttctttgcaggcgctgatgcaaaacggcgacctcaatcagaaccgactgcttta

SEQ ID NO: 757549 - DNA, 75 bp, synthetic construct
  source 1..75: mol_type = other DNA
tgtgattacatttgaccaagactcatcagttgatagtgatttaattgatggactgtactcggaatatataaatat

SEQ ID NO: 757550 - DNA, 75 bp, synthetic construct
  source 1..75: mol_type = other DNA
tgtgcgcgttgagaatggggaagttatctacgcaacgttaattcctgatgatcatgtaattttatctatcgaggc

SEQ ID NO: 757551 - DNA, 75 bp, synthetic construct
  source 1..75: mol_type = other DNA
ggttcagcagtcagcgtcaccactcctgaagggataggccaaaagacggttatcgctataattagtattctttat

SEQ ID NO: 757552 - DNA, 75 bp, synthetic construct
  source 1..75: mol_type = other DNA
aagatccgcgctggctgtcgctggtggagaaatataaagacaattgggttctggcagcaaaagaattgtttgata

SEQ ID NO: 757553 - DNA, 75 bp, synthetic construct
  source 1..75: mol_type = other DNA
acagaagtaatttggattccggcgtcggaattgaaaagattatggaggaaatggagtctgccagaacaattaaag

SEQ ID NO: 757554 - DNA, 75 bp, synthetic construct
  source 1..75: mol_type = other DNA
gtgaaaacaaataacaaaaaaataaaagcattgattttttttatatcaatatttctctactttttcaaaagtgtt

SEQ ID NO: 757555 - DNA, 75 bp, synthetic construct
  source 1..75: mol_type = other DNA
ggttatcgcttgcaataacggtcactgaaaattattatgcaattccgttgtataatattagtttatttattgttt

SEQ ID NO: 757556 - DNA, 75 bp, synthetic construct
  source 1..75: mol_type = other DNA
cggttggcctgtgcctcgtgcatgtcgcctgcgacaagcgcccttggctggaaggactgaacgtggaaatggatt

SEQ ID NO: 757557 - DNA, 75 bp, synthetic construct
  source 1..75: mol_type = other DNA
cgtaatgacgatctgaaagtgtttgtgatgggtgaagtgaagaaacagagcaccctgaaaatggactttagcggc

SEQ ID NO: 757558 - DNA, 75 bp, synthetic construct
  source 1..75: mol_type = other DNA
acaaaaaggggcgcaatgggatcaagaacaacggaaatggtttgttccacaggggaaaaatccaatttattttat

SEQ ID NO: 757559 - DNA, 75 bp, synthetic construct
  source 1..75: mol_type = other DNA
gccgtattgaggaaaagaaatccgcgctggttaatttgggtgcttccttctctatatacgagcataataaggcgg

SEQ ID NO: 757560 - DNA, 75 bp, synthetic construct
  source 1..75: mol_type = other DNA
ccgcatgcagttgctgaacttaacagccgtattgaggaaaagaaatccgcgctggttaatttgggtgcttccttc

SEQ ID NO: 757561 - DNA, 75 bp, synthetic construct
  source 1..75: mol_type = other DNA
gtgtccgttaaactcaggctacctcactgttctgccgcctttacgctggtcgtaccgcaagcgacaacatccatg

SEQ ID NO: 757562 - DNA, 75 bp, synthetic construct
  source 1..75: mol_type = other DNA
gtcgtaccgcaagcgacaacatccatgacagcggttctgctgattggcatggcactgttctgtattcactttgcc

SEQ ID NO: 757563 - DNA, 75 bp, synthetic construct
  source 1..75: mol_type = other DNA
atggcgatcgttgtctttgatgttgccgcatttcgtgagcgttatccggagttcgatgccgtaagtaatacgcta

SEQ ID NO: 757564 - DNA, 75 bp, synthetic construct
  source 1..75: mol_type = other DNA
agattgagcaagtcagcttagaatttgctggcgagattgtcacgatgaagcatgagagttacctcagtgttttat

SEQ ID NO: 757565 - DNA, 75 bp, synthetic construct
  source 1..75: mol_type = other DNA
acggaagtcaccatccgtcacgctgacctgatgggggtattctgcatcctctctggcagcctgaatcagaagtaa

SEQ ID NO: 757566 - DNA, 75 bp, synthetic construct
  source 1..75: mol_type = other DNA
ctggggaaaattccgcatctgcgcacgccaggtctgctggtgatggacatggattccaccgccattcagattgaa

SEQ ID NO: 757567 - DNA, 75 bp, synthetic construct
  source 1..75: mol_type = other DNA
tgaatattcactgtctcgcgggacggtagaagtcaaatcgtattcttctcagtataaccgtaagctggttggtaa

SEQ ID NO: 757568 - DNA, 75 bp, synthetic construct
  source 1..75: mol_type = other DNA
tgaaactggtatcgagcgcggtactgtagaagttaaatccttctcttctcagtataaccgtaaactggtagggaa

SEQ ID NO: 757569 - DNA, 75 bp, synthetic construct
  source 1..75: mol_type = other DNA
gattccttgaacagcgtgaaaggaataatgcgccagtgcttatctgcaaggattgtggatattatgaaagaatat

SEQ ID NO: 757570 - DNA, 75 bp, synthetic construct
  source 1..75: mol_type = other DNA
atccggaatttatgtttaaattcagttatagcgcccaacaaaatagattagaacctcatcttctggttcccactt

SEQ ID NO: 757571 - DNA, 75 bp, synthetic construct
  source 1..75: mol_type = other DNA
attcggcaatcactgctcatcagcgtcgctttgccggtgccgtcgcgccgcaatatctgaatattaccactggag

SEQ ID NO: 757572 - DNA, 75 bp, synthetic construct
  source 1..75: mol_type = other DNA
tcgctcgacgatatcgacagtatgccattccgccccagctggatttacccatcggtcgccgaaattgacgttatc

SEQ ID NO: 757573 - DNA, 75 bp, synthetic construct
  source 1..75: mol_type = other DNA
atcgtctatttcgtggtgtgtaaagcttttaaccgccaggctctgccgttattcgccctgtttgtactgatgagc

SEQ ID NO: 757574 - DNA, 75 bp, synthetic construct
  source 1..75: mol_type = other DNA
gcgccgccatctgctgatggcttctttgctggctgttctggcggtcggtgcctggttgtttaatatctcgctgct

SEQ ID NO: 757575 - DNA, 75 bp, synthetic construct
  source 1..75: mol_type = other DNA
accaatggctggcaccagagcgcgatttaaacaataccgccaatgctgcttatgccgattccaccggcgagttcc

SEQ ID NO: 757576 - DNA, 75 bp, synthetic construct
  source 1..75: mol_type = other DNA
accaattgggatcgaggtcacccccgcgcacgtcactgaatatctgaacaaagtactgactgaaactgatcatgc

SEQ ID NO: 757577 - DNA, 75 bp, synthetic construct
  source 1..75: mol_type = other DNA
acgatacgccgcaggcgctggatgcagtctgggaagaagagcaggttaaattctttgctgaaaaaggctgcggtg

SEQ ID NO: 757578 - DNA, 75 bp, synthetic construct
  source 1..75: mol_type = other DNA
ctggttgccagcacaactgttgaatgcggacgttatccggttgagattttcatgatgggcgaagaagcaaaactg

SEQ ID NO: 757579 - DNA, 75 bp, synthetic construct
  source 1..75: mol_type = other DNA
ctcgacgatatcgacagtatgccgttccgccccagctggatttacccatcggtcgctgaaatcgacgttatctga

SEQ ID NO: 757580 - DNA, 75 bp, synthetic construct
  source 1..75: mol_type = other DNA
gatatcatctcgatgtctaccagcacgttaacaatgcccgctaccttgaatttctggaagaagcccgctgggatg

SEQ ID NO: 757581 - DNA, 75 bp, synthetic construct
  source 1..75: mol_type = other DNA
cgatgccgcagcgtgtaacagaagaaggaaaacaggatgatgaagaaaaaccgcaaccatctggaacaacggcag

SEQ ID NO: 757582 - DNA, 75 bp, synthetic construct
  source 1..75: mol_type = other DNA
attaccttttatccgcatctgaccactttccagcatccgttatcggaagtcctgagcaaatgctggatctatttc

SEQ ID NO: 757583 - DNA, 75 bp, synthetic construct
  source 1..75: mol_type = other DNA
actcgtcgccgtttttcccgcgaagtacaagaaaccatcgttaaacgtttgcaacaggaaccctggttcgttggc

SEQ ID NO: 757584 - DNA, 75 bp, synthetic construct
  source 1..75: mol_type = other DNA
cgcttaacgctcgaaaaatcctgctgatgcatacgccaaccgtattaacggaaaccgtcgccgatacgctgatgg

SEQ ID NO: 757585 - DNA, 75 bp, synthetic construct
  source 1..75: mol_type = other DNA
cgaaaatgcactgattgcggcgttgcagaaaggggaaattcacgccgctggtctggatgtcttcgaacaagagcc

SEQ ID NO: 757586 - DNA, 75 bp, synthetic construct
  source 1..75: mol_type = other DNA
gaaagcaaattagtcgacttctcggcgttaaccgccgaccttgatatgtcgcgcttccatcttatggattttggc

SEQ ID NO: 757587 - DNA, 75 bp, synthetic construct
  source 1..75: mol_type = other DNA
tggagtgtaacggtaaaccggtggcgaaactttctgacagccctggcaaaactatctgccatgacaaagcgtttg

SEQ ID NO: 757588 - DNA, 75 bp, synthetic construct
  source 1..75: mol_type = other DNA
tttacgcaaagcggtcgagctttatcgccacttctcttcccgtgtgcaattaagttttggtatcggtacacgcct

SEQ ID NO: 757589 - DNA, 75 bp, synthetic construct
  source 1..75: mol_type = other DNA
attcgccttgtttgtactgatgagtgtggcggttaatttcgttcccacgccgtggtggggaatgaacagtgtgat

SEQ ID NO: 757590 - DNA, 75 bp, synthetic construct
  source 1..75: mol_type = other DNA
tgccggtttttttctttatttctggctatttaattcgccgctatatcgatagcgtgccatggggaaattgtctcg

SEQ ID NO: 757591 - DNA, 75 bp, synthetic construct
  source 1..75: mol_type = other DNA
aacaccattgctatctacaccacccatcgcattctggtagaaatattcagcttaagcctgattccgcaaatgaac

SEQ ID NO: 757592 - DNA, 75 bp, synthetic construct
  source 1..75: mol_type = other DNA
ggttcaaatgagaatgttgatgccgcattgctggaaaaaatgccgaaactgcgtgccacatcaacgatctccgtc

SEQ ID NO: 757593 - DNA, 75 bp, synthetic construct
  source 1..75: mol_type = other DNA
gcgcgccgccaccatacagaagcagaagagcgcttcaacgctcgttactgcgatctggatacactgttacaagaa

SEQ ID NO: 757594 - DNA, 75 bp, synthetic construct
  source 1..75: mol_type = other DNA
tcgtttcaaagcagacttatcacaacatggggaaaatgatatagccaacaatacaataaatcactggctacatcg

SEQ ID NO: 757595 - DNA, 75 bp, synthetic construct
  source 1..75: mol_type = other DNA
agacatagagccaggtatttattacggaatttcgaatgagaattaccacgcgggtcccggtgtcagtaagtctca

SEQ ID NO: 757596 - DNA, 75 bp, synthetic construct
  source 1..75: mol_type = other DNA
gtactgaaatcagccaaccagttgacgaaaagatcccgagaatgccagtacaaacggcctgatgtactcagggct

SEQ ID NO: 757597 - DNA, 75 bp, synthetic construct
  source 1..75: mol_type = other DNA
gtcagcaatgataacccttattccgaatcgctcttccggacgattaagtattgtccatggtggccagagaatggt

SEQ ID NO: 757598 - DNA, 75 bp, synthetic construct
  source 1..75: mol_type = other DNA
aaacaacaaaccacgttcaaatctaataattttaaataataataaaaccgtatatgagcaattatgtcacaatgt

SEQ ID NO: 757599 - DNA, 75 bp, synthetic construct
  source 1..75: mol_type = other DNA
ctgaacgttggggcaagcatctacgtaactgggactacatatcagaagtctacctgaatccagaaaaagaggctg

SEQ ID NO: 757600 - DNA, 75 bp, synthetic construct
  source 1..75: mol_type = other DNA
gcctgagaacggttttcgcactattaatgatgccagagtatgggtaaaccgttttgtaaactggtacaactttga

SEQ ID NO: 757601 - DNA, 75 bp, synthetic construct
  source 1..75: mol_type = other DNA
cgagcgtcatcaaggtaatgatatgaaaatactggcggccagaaaaacagtataccagctggcacgcgaacagca

SEQ ID NO: 757602 - DNA, 75 bp, synthetic construct
  source 1..75: mol_type = other DNA
gtccgatgccgtcactgccgggttgcgcggacaaaaacctggggaaggctacaacattcagcaaatgctggagat

SEQ ID NO: 757603 - DNA, 75 bp, synthetic construct
  source 1..75: mol_type = other DNA
tgttccgcgatctgaaacgcgtcgcgcaaacgctggatagcattaacggcggcgaagcgtatcagaaagtgtgtg

SEQ ID NO: 757604 - DNA, 75 bp, synthetic construct
  source 1..75: mol_type = other DNA
aaaacctctatcgcatctgtttttgttaactttggagcaattactaccgcactgttaatgagcgcggttattatg

SEQ ID NO: 757605 - DNA, 75 bp, synthetic construct
  source 1..75: mol_type = other DNA
agttttccacccgatccctctcaggaagacgaccgtctcgaaaacctgattgtcgcgaccatgctgacattcaaa

SEQ ID NO: 757606 - DNA, 75 bp, synthetic construct
  source 1..75: mol_type = other DNA
gtgtattgccggttatgcgatgagcgccgcgccagtggtgtggatcctgtgctccgaaattcagccgctgaaatg

SEQ ID NO: 757607 - DNA, 75 bp, synthetic construct
  source 1..75: mol_type = other DNA
atttgccgtcctgggtcagaggtcagcatttttacctctatatgatcgtcgatatttacagtcgcaagattattg

SEQ ID NO: 757608 - DNA, 75 bp, synthetic construct
  source 1..75: mol_type = other DNA
ggcgcacaaaggtgacgttgtagtaatggtttccggtgcacttgtaccgagcggcactaccaacaccgcatctgt

SEQ ID NO: 757609 - DNA, 75 bp, synthetic construct
  source 1..75: mol_type = other DNA
acttctctcatggtgactatgcagaacacggtcagcgcattcagaatctgcgcaacgtgatgagcaaaactggta

SEQ ID NO: 757610 - DNA, 75 bp, synthetic construct
  source 1..75: mol_type = other DNA
agaatacacagaaatcatgaggccactgctgaagtgtgagcgtagcattcacgatagttgcaggtatattacggg

SEQ ID NO: 757611 - DNA, 75 bp, synthetic construct
  source 1..75: mol_type = other DNA
actgatgacttctaccgtctgggtaaagaactagctttgcagagcggtctggctcagaaaggtgatgttgtggtc

SEQ ID NO: 757612 - DNA, 75 bp, synthetic construct
  source 1..75: mol_type = other DNA
cgcagaagcaggtgacgttgctaacgccattctggatggtactgacgcagtgatgctgtctggtgaatccgcaaa

SEQ ID NO: 757613 - DNA, 75 bp, synthetic construct
  source 1..75: mol_type = other DNA
gcatcatggttgcgcgtggcgacctgggtgtagaaatcccggtagaagaagttatcttcgcccagaagatgatga

SEQ ID NO: 757614 - DNA, 75 bp, synthetic construct
  source 1..75: mol_type = other DNA
acgtaagaacaatcgtcgagcttggaaaggtaataggattcgaccctaagcgagatatgccattcaaaggaactc

SEQ ID NO: 757615 - DNA, 75 bp, synthetic construct
  source 1..75: mol_type = other DNA
tcgatccgcaaaccggagatatgggaccggaatttagtaagactatcgatctggaaactgctggcggagtcattg

SEQ ID NO: 757616 - DNA, 75 bp, synthetic construct
  source 1..75: mol_type = other DNA
ttgtgcaactctccagagtttgcatccttacctccaaatgtgatcgtaccaactctggcagacaggggtatttat

SEQ ID NO: 757617 - DNA, 75 bp, synthetic construct
  source 1..75: mol_type = other DNA
tcctgtggtggttgaaacaaagccctgaagcacgagctgcaatctgtattgatgatactttgtcgatcagcgatg

SEQ ID NO: 757618 - DNA, 75 bp, synthetic construct
  source 1..75: mol_type = other DNA
gcagttatgtacgcaggtccgaaaatatacagcttttctgcgatgggacgcatggccctatcgtcagctcaatcc

SEQ ID NO: 757619 - DNA, 75 bp, synthetic construct
  source 1..75: mol_type = other DNA
gcagttatgtacgcaggtccgaaaatatacggcttttctgcgatggaacgcatggccctatcgtcagctcaatcc

SEQ ID NO: 757620 - DNA, 75 bp, synthetic construct
  source 1..75: mol_type = other DNA
cgtgctgcctgtccttcagaacgaagccagacaacaaaaacgtgggctctggtcagatgctgatccggttccacc

SEQ ID NO: 757621 - DNA, 75 bp, synthetic construct
  source 1..75: mol_type = other DNA
gggctgcatgggtatatgagcagtacaacacagatcccgtgctgcctgtccttcagaacgaagccagacaacaaa

SEQ ID NO: 757622 - DNA, 75 bp, synthetic construct
  source 1..75: mol_type = other DNA
gttaatcagtttatggtccgtgcaggcgctgcatgggtttatgagcagtacaacaccgatcctgttccgccctgg

SEQ ID NO: 757623 - DNA, 75 bp, synthetic construct
  source 1..75: mol_type = other DNA
ttccactggtattatttatctttttatggctggtattgtctgcagatattcatggacgggttgttcgtgtactgg

SEQ ID NO: 757624 - DNA, 75 bp, synthetic construct
  source 1..75: mol_type = other DNA
catgtcaggttttttctgctgatattcatggacgggtcgtgcgtgttctggatggcgataccattgacgtcatgt

SEQ ID NO: 757625 - DNA, 75 bp, synthetic construct
  source 1..75: mol_type = other DNA
atggccggtggtcgacagacatgatgaaatcactggttgcaggaaaaacggttaccgtcacatattttcagcgag

SEQ ID NO: 757626 - DNA, 75 bp, synthetic construct
  source 1..75: mol_type = other DNA
atggcatagatggcttccttggattgacctggaatcaggagttagccgcgacaatcgaccgactggaatcactgg

SEQ ID NO: 757627 - DNA, 75 bp, synthetic construct
  source 1..75: mol_type = other DNA
ggtgcggatcaggctggtaaatattgatgcgccggaaaagaaacaggattatggccggtggtcgacagacatgat

SEQ ID NO: 757628 - DNA, 75 bp, synthetic construct
  source 1..75: mol_type = other DNA
acgtgggctctggtcagatgctgatccggttccaccctggatatggagacaccgtaaataaagcgatggcaatct

SEQ ID NO: 757629 - DNA, 75 bp, synthetic construct
  source 1..75: mol_type = other DNA
caacaccgatcctgttcttcctgttctgcagggagaagtacgacagcagaaacgtggtctgtgggcagacagcgc

SEQ ID NO: 757630 - DNA, 75 bp, synthetic construct
  source 1..75: mol_type = other DNA
tgatatggaaaaactgattagtgcgtatcgacgtatgctgcggcaagggaatcatgcgctgacggttattgttgg

SEQ ID NO: 757631 - DNA, 75 bp, synthetic construct
  source 1..75: mol_type = other DNA
gtgcttggtgaacacagcctcgaagatggcatagatggcttcctgggattgacctggaatcaggagttagccgcg

SEQ ID NO: 757632 - DNA, 75 bp, synthetic construct
  source 1..75: mol_type = other DNA
tacaacaccgatcctgttcttcccgtcctgcagggagaagcacgacagcagaaacgtggtctgtgggcagacagc

SEQ ID NO: 757633 - DNA, 75 bp, synthetic construct
  source 1..75: mol_type = other DNA
aatgtttatccgctgaccccgcgcctgattgatcaattacgcccacgcccgaacgtcgcgcgccccaatatgacg

SEQ ID NO: 757634 - DNA, 75 bp, synthetic construct
  source 1..75: mol_type = other DNA
cgcaggtggacgttaatatcgccgccttccgctcgcaaaaagcgtatatctccggtcaggtgaataaatccggtc

SEQ ID NO: 757635 - DNA, 75 bp, synthetic construct
  source 1..75: mol_type = other DNA
atccaaacagtgttggacacaggttgtcctagaaaggatacgcaaaagctacgcagattttatggatgagcatga

SEQ ID NO: 757636 - DNA, 75 bp, synthetic construct
  source 1..75: mol_type = other DNA
cggatgatggatgtcattcaggagatcgaacgtcagttgctgatggtgctgttggaaaacatccccgaacaggag

SEQ ID NO: 757637 - DNA, 75 bp, synthetic construct
  source 1..75: mol_type = other DNA
tacccacggtgcagataccctgcctggtctggaagaattacgtagctttgatcgcatggagcgtgatccaacctt

SEQ ID NO: 757638 - DNA, 75 bp, synthetic construct
  source 1..75: mol_type = other DNA
agtatcgcgtcgggccgggcgacgttcttaatgtcaccgtctgggatcacccggaactcaccacgccagctggtc

SEQ ID NO: 757639 - DNA, 75 bp, synthetic construct
  source 1..75: mol_type = other DNA
ttcttatatctatacttgcaacaggtaaggttgaggatattccaacagatgacattccggcaaaatatactagtg

SEQ ID NO: 757640 - DNA, 75 bp, synthetic construct
  source 1..75: mol_type = other DNA
accggcgaagtcagcaaatcgggtcagcagccgattaccaatattcctctgaccatcatggatgcgattaacgcc

SEQ ID NO: 757641 - DNA, 75 bp, synthetic construct
  source 1..75: mol_type = other DNA
atggccgatggtcaacagacatgatgaaatcactggttgcaggaaaaacggttaccgtcacatattttcagcgag

SEQ ID NO: 757642 - DNA, 75 bp, synthetic construct
  source 1..75: mol_type = other DNA
catttcattttcactaatgctggttgctatttgctttgccactgcctggcgcgtcttaactttgtcatggctggt

SEQ ID NO: 757643 - DNA, 75 bp, synthetic construct
  source 1..75: mol_type = other DNA
tcttcttccggatgagctcgccgttatagtctgttctacactaaagggggcactgatgttaaatcgacttccacc

SEQ ID NO: 757644 - DNA, 75 bp, synthetic construct
  source 1..75: mol_type = other DNA
cggcgtttcattttcgctaatgatggttgctctttttctttccatagcctggatggcgttgagttcggcagggct

SEQ ID NO: 757645 - DNA, 75 bp, synthetic construct
  source 1..75: mol_type = other DNA
gcatttatcttcggcgtattgccaatggcaaccagcacaggtgccggttccggtggtcagcatgcggtgggtact

SEQ ID NO: 757646 - DNA, 75 bp, synthetic construct
  source 1..75: mol_type = other DNA
ggcgcagactgacaaaaaagcgatggcgcaaatcatgactatcggcggcgcgaagggccatgccgccgaccagga

SEQ ID NO: 757647 - DNA, 75 bp, synthetic construct
  source 1..75: mol_type = other DNA
atgaccctcgtcggtttgctgccgacgatggtgctgatgatgacctgctttacgcgctttattatcgtgctgtcg

SEQ ID NO: 757648 - DNA, 75 bp, synthetic construct
  source 1..75: mol_type = other DNA
ccgtcacccgggaaacgagtacgaccagatgactttagacgccgctgtggatgaggccattctcatcaatgcata

SEQ ID NO: 757649 - DNA, 75 bp, synthetic construct
  source 1..75: mol_type = other DNA
atgaaacgccgcactcaactgacgctgggccttgggctgctggcgcttgcgccgctggcgttggcccagggcggc

SEQ ID NO: 757650 - DNA, 75 bp, synthetic construct
  source 1..75: mol_type = other DNA
atgctggtgatgcgccctatctggctcaatatttacgaccacgcggtggtgccgttcgaaaacgatcggattacc

SEQ ID NO: 757651 - DNA, 75 bp, synthetic construct
  source 1..75: mol_type = other DNA
atgaaacgccgcacgcaactgacgctgggccttgggctgctggcgctcgccccgctggcgttggcccagggcggc

SEQ ID NO: 757652 - DNA, 75 bp, synthetic construct
  source 1..75: mol_type = other DNA
tgtgctgataaaaacgcaacatcacagcagcgaatggtattgccgctttgtcacggtggttaccgaaatgccaga

SEQ ID NO: 757653 - DNA, 75 bp, synthetic construct
  source 1..75: mol_type = other DNA
aaaagccattgcacattatgaaaagctgggaattgatccacagagtaaaacgctggttttctctgacaatctgga

SEQ ID NO: 757654 - DNA, 75 bp, synthetic construct
  source 1..75: mol_type = other DNA
gccctggcaaaactatctgccatgataaagcgtttgttcgggcgctgcgcaaagcgttcgaccttccgcatatta

SEQ ID NO: 757655 - DNA, 75 bp, synthetic construct
  source 1..75: mol_type = other DNA
cgaacatcaccggagaaaaaaacaatacaacaacacgattctccggaaatatttacggcagtgaaaatactgtca

SEQ ID NO: 757656 - DNA, 75 bp, synthetic construct
  source 1..75: mol_type = other DNA
ttttttacttaagaagaataccaggttgtaaaatcaccataaagacaaatgcgaaaacattaaagctattagtaa

SEQ ID NO: 757657 - DNA, 75 bp, synthetic construct
  source 1..75: mol_type = other DNA
atggtgtttaaaccgcacagaataaattgtcgcgatttcacctttaaaatagaattaaaagagaaaaaaattctc

SEQ ID NO: 757658 - DNA, 75 bp, synthetic construct
  source 1..75: mol_type = other DNA
actggcaccgctgttttcgcgcatgatgctcggtaaaagcaaaagcgacaaaatcgttacgacgctggatgccgg

SEQ ID NO: 757659 - DNA, 75 bp, synthetic construct
  source 1..75: mol_type = other DNA
ttccggctggtcactggttttattctttacaggacttactcgacaattctgtgtttatggtttgtttctttgcct

SEQ ID NO: 757660 - DNA, 75 bp, synthetic construct
  source 1..75: mol_type = other DNA
atcctgctggtcactggatgtattcgttatacgatttactcgataattcagtgttcgtggtttgtttctttgcct

SEQ ID NO: 757661 - DNA, 75 bp, synthetic construct
  source 1..75: mol_type = other DNA
atcctgctggtcactggatgtattcgttatacgatttactcgacaattctgtgtttgtactttttttcttagtct

SEQ ID NO: 757662 - DNA, 75 bp, synthetic construct
  source 1..75: mol_type = other DNA
gttagtgaagcagctgccaaacggctttggtctggagtggacggcgatgtcgtatcaggagcggctttccggcgc

SEQ ID NO: 757663 - DNA, 75 bp, synthetic construct
  source 1..75: mol_type = other DNA
taacgagatgaaccaaaaaggccacgacctgtttgaagcgacgctccacgcctgccgtcagcgtttacgcccgat

SEQ ID NO: 757664 - DNA, 75 bp, synthetic construct
  source 1..75: mol_type = other DNA
gttatacgatttactcgataattcagtgttcgtggtttgtttctttgccttctgggtggcaacgggtcaattttt

SEQ ID NO: 757665 - DNA, 75 bp, synthetic construct
  source 1..75: mol_type = other DNA
tgctgattgtcctcaggctcgacaagaaatgattaatgtctggccattaccacttgaaccctggctacctgctgc

SEQ ID NO: 757666 - DNA, 75 bp, synthetic construct
  source 1..75: mol_type = other DNA
cagtgcgaatctgccggaagacccgcgtcctgattctgtaagccgtggcgttatctgctggccgggtgggcaatc

SEQ ID NO: 757667 - DNA, 75 bp, synthetic construct
  source 1..75: mol_type = other DNA
gattgccgttatatttgcccaacggtgctgcaccgaatctttcgctcattctcggcggcgctggtgcaaaactgg

SEQ ID NO: 757668 - DNA, 75 bp, synthetic construct
  source 1..75: mol_type = other DNA
gaaagccgttatgccgtgctgtttgatctgctgctgaaactggcgaataccgctatcgacagcgacaaagtggcg

SEQ ID NO: 757669 - DNA, 75 bp, synthetic construct
  source 1..75: mol_type = other DNA
atgttccgtcacccggaaaacgagtacgaccagatggactcagacgccgctgtggatgaggccctgctcatcaac

SEQ ID NO: 757670 - DNA, 75 bp, synthetic construct
  source 1..75: mol_type = other DNA
taaaagaggggcacgtaatagaagaggatcacttttcttagctgctacttcgccagaaaaaacactcgaagttgc

SEQ ID NO: 757671 - DNA, 75 bp, synthetic construct
  source 1..75: mol_type = other DNA
gccaaaagtgaatgaaaagacggaagtcaccatccgtcacgctgacctgatgggggtgttctgcatcctctccgg

SEQ ID NO: 757672 - DNA, 75 bp, synthetic construct
  source 1..75: mol_type = other DNA
tagcgatcaggatgatgtttggatgcctgaaaaagtttcaacattgaagtcgtatgcagataaattattgaataa

SEQ ID NO: 757673 - DNA, 75 bp, synthetic construct
  source 1..75: mol_type = other DNA
ttctgataacgagtttaacaaatttagcaacgagattattgatttctcatatcatatatcacatgaaataaagga

SEQ ID NO: 757674 - DNA, 75 bp, synthetic construct
  source 1..75: mol_type = other DNA
ctgtaaaagatggaatgaaaaagtcagccgacgcaacttatttaatggatttcagttctggtgcaaaaataaaca

SEQ ID NO: 757675 - DNA, 75 bp, synthetic construct
  source 1..75: mol_type = other DNA
gacctgatcttgctcgatatctatatgcaaaaagaaaacgggctcgatttactgcctgtcctgcacaacgctcga

SEQ ID NO: 757676 - DNA, 75 bp, synthetic construct
  source 1..75: mol_type = other DNA
aaaagattcgctgcactacggcgttgtggattacctgatcaaaccgttccaggcctctcgctttgaagaggcgct

SEQ ID NO: 757677 - DNA, 75 bp, synthetic construct
  source 1..75: mol_type = other DNA
caccggctggcggcaaaagaaaatggcgctggaaaaacatcagtattatgaccaggccgagcttgatcagctaat

SEQ ID NO: 757678 - DNA, 75 bp, synthetic construct
  source 1..75: mol_type = other DNA
aagcactactttttacttgagaatgaggagttgcgggaatttaagcacagcatgtctttaagaccttctgtgaaa

SEQ ID NO: 757679 - DNA, 75 bp, synthetic construct
  source 1..75: mol_type = other DNA
gaaatgcgccgcacgctacaggatatttcaagactgtcagatcgaaattcccgaaaaggcttctcgttaagcctg

SEQ ID NO: 757680 - DNA, 75 bp, synthetic construct
  source 1..75: mol_type = other DNA
gcaatgttcacctgcagatttatccgcatgatggtgccaggataacctcgttaaaggcatttggttctgaagtat

SEQ ID NO: 757681 - DNA, 75 bp, synthetic construct
  source 1..75: mol_type = other DNA
tcttttcatcatggtgattacaagatcatatttgaataccatacaaataaattcattaatgcaacagtcccttta

SEQ ID NO: 757682 - DNA, 75 bp, synthetic construct
  source 1..75: mol_type = other DNA
caacgcctttttttgtgacattagtcaatatctctattgatggtaagaccatacatagagatattgatgaggtta

SEQ ID NO: 757683 - DNA, 75 bp, synthetic construct
  source 1..75: mol_type = other DNA
tagaaggagtaacattaggttcaactcgagttatatataaatcaacagatgaaatgtcagttgttaaggtaacca

SEQ ID NO: 757684 - DNA, 75 bp, synthetic construct
  source 1..75: mol_type = other DNA
aatcgtggcacgaaacgttggcaaatctgggatatttcatcattgggctacatgctgccgcagcattagcacatc

SEQ ID NO: 757685 - DNA, 75 bp, synthetic construct
  source 1..75: mol_type = other DNA
gcgccccgtcgctcagcctcagtgcgccggaactgaccagcagcggcgtacttgtcgcttccgccctgaatacac

SEQ ID NO: 757686 - DNA, 75 bp, synthetic construct
  source 1..75: mol_type = other DNA
acggccagcgccaccacgctgacgcaggacggaatattgctggcgaaaggtcatgcgggactcgatgccggcacg

SEQ ID NO: 757687 - DNA, 75 bp, synthetic construct
  source 1..75: mol_type = other DNA
agagttcaatcgttcttatagaccacaagctgcctctgaagaggatgtggtttttgatttagtcgttcggcatca

SEQ ID NO: 757688 - DNA, 75 bp, synthetic construct
  source 1..75: mol_type = other DNA
tgagacaaaatcatacattccggttgagaatgtcgcagtacctgatggtgcaaattctgtttcagtcagagtggg

SEQ ID NO: 757689 - DNA, 75 bp, synthetic construct
  source 1..75: mol_type = other DNA
ccggattcaggggcggaacatcactctggatgccagcagcctgaccagcagcggtgctgttcagagtgcgctgga

SEQ ID NO: 757690 - DNA, 75 bp, synthetic construct
  source 1..75: mol_type = other DNA
cagccaccacggacaaccggggcagtctgctttcggccggcacgctctcccttgatggaaactcactggataaca

SEQ ID NO: 757691 - DNA, 75 bp, synthetic construct
  source 1..75: mol_type = other DNA
atgccttcaataacacccccatcgggacgctacgcattggctgttcttcaactatggcacaaaatgttctcgccg

SEQ ID NO: 757692 - DNA, 75 bp, synthetic construct
  source 1..75: mol_type = other DNA
aatttcgaacgggttgatagcttaaagtcgtggcatgaaacgctggcgaatctgggatattttgtcatcgggttg

SEQ ID NO: 757693 - DNA, 75 bp, synthetic construct
  source 1..75: mol_type = other DNA
catgctgccgcagcattagcacatcattatttctggaaggacaacacgcttttgcgcatgatgccgcgtaagcat

SEQ ID NO: 757694 - DNA, 75 bp, synthetic construct
  source 1..75: mol_type = other DNA
atgttaacggaaaattatgttaaagcgggaaatgttatggaaaataaatattcaaggttacaaatcagcattcac

SEQ ID NO: 757695 - DNA, 75 bp, synthetic construct
  source 1..75: mol_type = other DNA
atttgtcactaacgatccgatgacgctggttcgctggctaactgctggggcggggatcgcctacgtgccgctgat

SEQ ID NO: 757696 - DNA, 75 bp, synthetic construct
  source 1..75: mol_type = other DNA
ctggtgcgctggctaacggcgggtgccgggatcgcctacgtgccgctgatgtgggtgatcaacgagatcaatcgc

SEQ ID NO: 757697 - DNA, 75 bp, synthetic construct
  source 1..75: mol_type = other DNA
aagtgaagctggatgaagcaggcgttcgtatgatcggcccgaactgcccaggcgttatcactccgggtgaatgca

SEQ ID NO: 757698 - DNA, 75 bp, synthetic construct
  source 1..75: mol_type = other DNA
tttccgggtatcggcctgctggtggtgaccggcggcgaagcggtagtggaagcggcgcgtaaacacaccaataaa

SEQ ID NO: 757699 - DNA, 75 bp, synthetic construct
  source 1..75: mol_type = other DNA
atgaatcaacaggatattgaacaggtggtgaaagcggtactgctgaaaatgcaaagcagtgatacgccgcccgcc

SEQ ID NO: 757700 - DNA, 75 bp, synthetic construct
  source 1..75: mol_type = other DNA
cggtgaaggggtaaccagcgcgcgtacgtttgtccgtctgcgtcgctgtgtattagtcgatgcgtttcgcattgt

SEQ ID NO: 757701 - DNA, 75 bp, synthetic construct
  source 1..75: mol_type = other DNA
aacgatctggaaagtggtcgttatggcggagatttttacccgctgactggccgtgaagcgttttatttatgggga

SEQ ID NO: 757702 - DNA, 75 bp, synthetic construct
  source 1..75: mol_type = other DNA
acgatagattcagagcacgccgatctcattttcaggatgcgccctgtgtggtacaggtcgcaatgcgaaaatgac

SEQ ID NO: 757703 - DNA, 75 bp, synthetic construct
  source 1..75: mol_type = other DNA
cgaagcggtagtggaagcggcgcgcaaacacaccaataaacgcctgattgcggcaggtgccggtaacccgccggt

SEQ ID NO: 757704 - DNA, 75 bp, synthetic construct
  source 1..75: mol_type = other DNA
gtacaggtcgcaatgcgaaaatgacaggcgtgactggggcttctacggattgattgccgaggaagtaggagaaat

SEQ ID NO: 757705 - DNA, 75 bp, synthetic construct
  source 1..75: mol_type = other DNA
gtacaggtcgcaatgcgaaaatgacaggcgtgactggggcttctaaggattgattgccgaggaagtcggagaaat

SEQ ID NO: 757706 - DNA, 75 bp, synthetic construct
  source 1..75: mol_type = other DNA
gtacaggtcgcaatgcgaaaatgacaggcgtgactggggtttctaaggattgattgccgaggaagttggagaaat

SEQ ID NO: 757707 - DNA, 75 bp, synthetic construct
  source 1..75: mol_type = other DNA
aaagcaggatatcagtaccagatacacgaaaactgaagtggataataagctgaaaaacaaagtggaagtgaacga

SEQ ID NO: 757708 - DNA, 75 bp, synthetic construct
  source 1..75: mol_type = other DNA
gtacaggtcgcaatgcgaaaatgacaggcgtgactgggggttctagggattgattgccgaggaagtaggagaaat

SEQ ID NO: 757709 - DNA, 75 bp, synthetic construct
  source 1..75: mol_type = other DNA
gtacaggtcgcaatgcgaaaatgacaggcgtgactgggggttctaaggattgattgccgaggaagtgggagaaat

SEQ ID NO: 757710 - DNA, 75 bp, synthetic construct
  source 1..75: mol_type = other DNA
ccagctaacgaagatgatgcaccggaagctatttccagcaatggccttgttgccgaaggtgtaatgtacgaacgt

SEQ ID NO: 757711 - DNA, 75 bp, synthetic construct
  source 1..75: mol_type = other DNA
ggtgtaatcactccgggtgagtgtaaaatcggtatccagccgggccacatccatcgccctggtaaagtgggtatc

SEQ ID NO: 757712 - DNA, 75 bp, synthetic construct
  source 1..75: mol_type = other DNA
aatcaatggatgctttcacggcagatgtgttgtctgcctttaaagaggttgccgaaggaatgacgtcaaagaacg

SEQ ID NO: 757713 - DNA, 75 bp, synthetic construct
  source 1..75: mol_type = other DNA
agtcaatggataatttcacggctgatgtgctgtctgcgttccaggaagcagctaccggagcaaaagcaaccagag

SEQ ID NO: 757714 - DNA, 75 bp, synthetic construct
  source 1..75: mol_type = other DNA
atgagggcccccccccccgcgaaccataaacgcggtaaaaacccggtgtgcatcgtttttgattattcccgcaca

SEQ ID NO: 757715 - DNA, 75 bp, synthetic construct
  source 1..75: mol_type = other DNA
aacgcggtaaaaacccggtgtgcatcgtttttgattattcccgcacactcgcgcagaaggaattccccgtcgggc

SEQ ID NO: 757716 - DNA, 75 bp, synthetic construct
  source 1..75: mol_type = other DNA
ggttgtggtgatcactgaaggtgtaccgacactggatatggtgaaagttcgtcggctgcttgactgccacccgga

SEQ ID NO: 757717 - DNA, 75 bp, synthetic construct
  source 1..75: mol_type = other DNA
gttcgggtttgaattttcccaggaagttgtacatcggccgcatgcagggatgcggatagccgtcccgcataaata

SEQ ID NO: 757718 - DNA, 75 bp, synthetic construct
  source 1..75: mol_type = other DNA
gtactctatccagctgagctacggatgcatcgggaaatttattttactgctgatattgataccgctactaaagcc

SEQ ID NO: 757719 - DNA, 75 bp, synthetic construct
  source 1..75: mol_type = other DNA
tgcatcgggaaatttattttactgctgatattgataccgctactaaagccatatcaagtaagagatggtgcatcc

SEQ ID NO: 757720 - DNA, 75 bp, synthetic construct
  source 1..75: mol_type = other DNA
atggccgaacatcgtggtggttcaggaaatttcgccgaagatcgtgagaaggcatccgacgcaggtcgtaaaggt

SEQ ID NO: 757721 - DNA, 75 bp, synthetic construct
  source 1..75: mol_type = other DNA
gataagctgattgccgatctgcgagaagcgctgctcaagctgcaagagcagaacgacagtctgcaagcgcagatt

SEQ ID NO: 757722 - DNA, 75 bp, synthetic construct
  source 1..75: mol_type = other DNA
aaatcgaccttgaagcagccgacttttctgacgcgctgatgtggctgaaggatggcaagaaagttgcccggcgcg

SEQ ID NO: 757723 - DNA, 75 bp, synthetic construct
  source 1..75: mol_type = other DNA
tggatggccgggaaaaagattacacgcccggtaagacgtattattccgttattcaggcgggcggggatgttaaga

SEQ ID NO: 757724 - DNA, 75 bp, synthetic construct
  source 1..75: mol_type = other DNA
aatgccaccaccatcacggcaggacaactcacaaacggcgggcatctgcagggcgaaacgctgacgctggccgcc

SEQ ID NO: 757725 - DNA, 75 bp, synthetic construct
  source 1..75: mol_type = other DNA
tgcctccctcagcaatccgggaaaaatcatcgctgacacgctgaacgtcagggtgaccacgctggatggcgatgg

SEQ ID NO: 757726 - DNA, 75 bp, synthetic construct
  source 1..75: mol_type = other DNA
ctgatgaataacggaggttcactgctgaccagcggcgatctgacaatcaccgcaggcagtattaccagttccgga

SEQ ID NO: 757727 - DNA, 75 bp, synthetic construct
  source 1..75: mol_type = other DNA
tcttactgtttatgaggagagcactggaaaaacattatattggaatcctggaatgaaatcactcaaggagaaaaa

SEQ ID NO: 757728 - DNA, 75 bp, synthetic construct
  source 1..75: mol_type = other DNA
cgatgaactggcaggtgccctgaaaaatattgccggaggttcgccactgaccggtcagaccggtatcagtgatga

SEQ ID NO: 757729 - DNA, 75 bp, synthetic construct
  source 1..75: mol_type = other DNA
cagttcactgaccaactcaggtcgcgtgcagggcgacagcgggctgactcttacattgctgaatgccctgaccaa

SEQ ID NO: 757730 - DNA, 75 bp, synthetic construct
  source 1..75: mol_type = other DNA
caaagtctcggaagcactccaagaagaatacggtttggatgaagttcaggcgggaatagtcgcgagcgctgcggc

SEQ ID NO: 757731 - DNA, 75 bp, synthetic construct
  source 1..75: mol_type = other DNA
atcgcaggtgcaatcgcgaaggttttatatccggatgagaaagacctgtcgaagctgaccgaggaccagaagcag

SEQ ID NO: 757732 - DNA, 75 bp, synthetic construct
  source 1..75: mol_type = other DNA
acaggaatgaaatggcgaagtatggcaccggcagtgaaattcagcggggtatccaggccgcgacagccgcgcttc

SEQ ID NO: 757733 - DNA, 75 bp, synthetic construct
  source 1..75: mol_type = other DNA
tggcttcgacattacagtgggcagacatacccaactggagggtgcggtgattgcctccactgccacaccggataa

SEQ ID NO: 757734 - DNA, 75 bp, synthetic construct
  source 1..75: mol_type = other DNA
aacggaacataccagtggtttgatctgagtcagccgggtaatgagaacaaaaactgggactggaaaagcagtgcc

SEQ ID NO: 757735 - DNA, 75 bp, synthetic construct
  source 1..75: mol_type = other DNA
gtgaacaaccgttccggtggtgttctgatgagccggaatgcactgaatgtcagtactgcgaccctgagtaaccag

SEQ ID NO: 757736 - DNA, 75 bp, synthetic construct
  source 1..75: mol_type = other DNA
cgtcaagggcagttcactgctgcaacatggtacagggcggctgtacagtgcaggcaacctgctgcttgacgctca

SEQ ID NO: 757737 - DNA, 75 bp, synthetic construct
  source 1..75: mol_type = other DNA
ataagtgggagcaaaagtcagtccggtttctggcacactgatgacaacagttcatcatccaccacctcacagggc

SEQ ID NO: 757738 - DNA, 75 bp, synthetic construct
  source 1..75: mol_type = other DNA
accggaaaaagattatcgtttcctgggggatgcggtctttgatacccggtatgtcagtaacgcggtgctgagccg

SEQ ID NO: 757739 - DNA, 75 bp, synthetic construct
  source 1..75: mol_type = other DNA
gaccgcctcgggctgaaaccggaaaaagattatcgtttcctgggggatgcggtctttgatacccggtatgtcagt

SEQ ID NO: 757740 - DNA, 75 bp, synthetic construct
  source 1..75: mol_type = other DNA
cggtcagaccggtatcagtgatgactggccactgccttccggcaacaatggatacctggttccgtccacggaccc

SEQ ID NO: 757741 - DNA, 75 bp, synthetic construct
  source 1..75: mol_type = other DNA
tatcagcattaccggtgacagtgtggtggttgacccggggcatgatcgtcgtactgtggacgaaaaatttgagca

SEQ ID NO: 757742 - DNA, 75 bp, synthetic construct
  source 1..75: mol_type = other DNA
cggtcgtgatgtgaacagccaggctgccggtattacggctgaaaacagtatggatatccgcgccggacgggatgt

SEQ ID NO: 757743 - DNA, 75 bp, synthetic construct
  source 1..75: mol_type = other DNA
tgcctccctcagcaatccgggaaaaatcatcgctgacacgctgaacgtcagggcgaccacgctggatggtgatgg

SEQ ID NO: 757744 - DNA, 75 bp, synthetic construct
  source 1..75: mol_type = other DNA
agccgtcacgtttacggacacctgtgacgctaaaaaaataatcggccgggctgtgggaatgaaacccgataatgt

SEQ ID NO: 757745 - DNA, 75 bp, synthetic construct
  source 1..75: mol_type = other DNA
aggagaaggagcagaggcgtctgcagacagtggggcttatcagtgacattggcagtcaggtggcggatatcgcgc

SEQ ID NO: 757746 - DNA, 75 bp, synthetic construct
  source 1..75: mol_type = other DNA
ctgctaatgcaacagagaaacaacgtcaggaatatcttgcgaaactgcgtgacacgcaggcttacaggaatgaaa

SEQ ID NO: 757747 - DNA, 75 bp, synthetic construct
  source 1..75: mol_type = other DNA
tgccagcgttaatgcggcaaaaggcagggagaaaggtaacggtactgagtggactgaaaccacaacagacagcgg

SEQ ID NO: 757748 - DNA, 75 bp, synthetic construct
  source 1..75: mol_type = other DNA
tctcacagggctgtaacggacgctggctgacggcgggcgacctcaccctccggggtaaaacactgaataccgcag

SEQ ID NO: 757749 - DNA, 75 bp, synthetic construct
  source 1..75: mol_type = other DNA
atcggtgccggtggtaacggtgccggtatcagcgtctttgccggcgttaatgcggcaaaaggcagcgagaaaggt

SEQ ID NO: 757750 - DNA, 75 bp, synthetic construct
  source 1..75: mol_type = other DNA
agggattttctgccacaacaacaacccggactaacccctcatccattcagggaatgggaaatgctctggttgata

SEQ ID NO: 757751 - DNA, 75 bp, synthetic construct
  source 1..75: mol_type = other DNA
cagcttgcgggtggcaatattaccaacagcggcggcagcatcaacgcacagaatgacctcctgctcgacagcaca

SEQ ID NO: 757752 - DNA, 75 bp, synthetic construct
  source 1..75: mol_type = other DNA
tagcgggtgctctggccggagcttctgcaccggaactggcgcatctgctgaaatcaacagaaaaatacccggcag

SEQ ID NO: 757753 - DNA, 75 bp, synthetic construct
  source 1..75: mol_type = other DNA
acatcgctgcctcccgggataagatgaagagccgctttgactccgttgctgaacaaaccggaatgtttgccggtg

SEQ ID NO: 757754 - DNA, 75 bp, synthetic construct
  source 1..75: mol_type = other DNA
gctggcagtctccggtggcgtgaacaaccgttccggtggtgttctgctgagccggaatgcactgaatgtcagcac

SEQ ID NO: 757755 - DNA, 75 bp, synthetic construct
  source 1..75: mol_type = other DNA
aacagcagcagtggcggtggcgtgggtgtcagtatcggtgcaggtaaaggtgccggtatcagcgcctttgccagc

SEQ ID NO: 757756 - DNA, 75 bp, synthetic construct
  source 1..75: mol_type = other DNA
tggcacaggcagtgagattcagcggggtatacaggccgcgacagccgcgcttcagggactggcgggggataattt

SEQ ID NO: 757757 - DNA, 75 bp, synthetic construct
  source 1..75: mol_type = other DNA
gacagcggtaaaaccgtcaccatcaacagtggtcgggatacggtactgaacggtgctcaggtcaacggcaacagg

SEQ ID NO: 757758 - DNA, 75 bp, synthetic construct
  source 1..75: mol_type = other DNA
gggagaactgaatgcgttgaaggccgcgaaggaagcaaccggcgaaacacttcctgctaatgcaacagagaaaca

SEQ ID NO: 757759 - DNA, 75 bp, synthetic construct
  source 1..75: mol_type = other DNA
gcatgatatccgccggaggtcacagcggacatgcggaaggaacgactcaggccgcagtggcagaaggcactatca

SEQ ID NO: 757760 - DNA, 75 bp, synthetic construct
  source 1..75: mol_type = other DNA
gaattcaatcctgaactttttctcttattgtttataccccccttgttgtttgctgaaagctcaaaaatacaacct

SEQ ID NO: 757761 - DNA, 75 bp, synthetic construct
  source 1..75: mol_type = other DNA
gtttgccggactgtatgacctgctcaggatgcaacccggacaggcaccacgagaaacagacccggcatataccga

SEQ ID NO: 757762 - DNA, 75 bp, synthetic construct
  source 1..75: mol_type = other DNA
aaagtgactatcactatctggaaacgaagaaaaaaagcggaggttttctcagtaagaaaaccacccacaccatca

SEQ ID NO: 757763 - DNA, 75 bp, synthetic construct
  source 1..75: mol_type = other DNA
cttttgatacccgctatgtatcgaactatatgctgaaccagatcggggggcgctatatcaacggggttggttcag

SEQ ID NO: 757764 - DNA, 75 bp, synthetic construct
  source 1..75: mol_type = other DNA
cgcagataaacaacagcggtaccctctccggggcaaaggaacttgtggcttctgcagacacactgaccaccacag

SEQ ID NO: 757765 - DNA, 75 bp, synthetic construct
  source 1..75: mol_type = other DNA
atgtgatggttgccaacccgtatggtatcacctgtgacggctgtggttttatcaacacgccgcgcgcgacgctca

SEQ ID NO: 757766 - DNA, 75 bp, synthetic construct
  source 1..75: mol_type = other DNA
gctgaagctcacacgtggtttgatcgctcagggcgttatcgccgcgaataaagaactctccgtcagcagccaggg

SEQ ID NO: 757767 - DNA, 75 bp, synthetic construct
  source 1..75: mol_type = other DNA
gtgaccgttaacgccggtgataacctgacggtagagggttcggatgtggtggctgaccgggatgtgtcactggcg

SEQ ID NO: 757768 - DNA, 75 bp, synthetic construct
  source 1..75: mol_type = other DNA
atgatgcattgcttgaaaaagatatcagcagtgataaggcagtaatcactgcgtgcagtaacggacaggcagcca

SEQ ID NO: 757769 - DNA, 75 bp, synthetic construct
  source 1..75: mol_type = other DNA
cgggagccagattaagtccggcaatgacaccagcctgaatgcacagaacgatattctgctggctgccgccgctga

SEQ ID NO: 757770 - DNA, 75 bp, synthetic construct
  source 1..75: mol_type = other DNA
catcacggaagacagcgtcacccgtgagaagggctccctgctgtcggggaaccgcgtgaccgttaacgccggtga

SEQ ID NO: 757771 - DNA, 75 bp, synthetic construct
  source 1..75: mol_type = other DNA
ggacaactcacaaacggcgggcatctgcagggcgaaacgctgacgctggccgcctccggtggcgtgaacaaccgt

SEQ ID NO: 757772 - DNA, 75 bp, synthetic construct
  source 1..75: mol_type = other DNA
ctgccggtacgggtgcacaggcaggcaggaactcggctgaaaacaatatgctgaacgtgatagccactgaaacag

SEQ ID NO: 757773 - DNA, 75 bp, synthetic construct
  source 1..75: mol_type = other DNA
catcacggaagacagcgtcacccgtgagaagggctccctgctgtcgggaaaccgcgtgaccgttaacgccggtaa

SEQ ID NO: 757774 - DNA, 75 bp, synthetic construct
  source 1..75: mol_type = other DNA
aggagttgcagatagcctctggcgagctgagcactgccacacgcgccgctatggacgggcaggtgccagcgcata

SEQ ID NO: 757775 - DNA, 75 bp, synthetic construct
  source 1..75: mol_type = other DNA
gcgcggatggcgatatggaaggcattccggtggcgctgatggaagcgatggcggtcggcattccggtggtttcta

SEQ ID NO: 757776 - DNA, 75 bp, synthetic construct
  source 1..75: mol_type = other DNA
tccttgctatgggcttcactggtaaacgtgccgcccggttcaaagaggcatacatcaatgcctttaaccagatgg

SEQ ID NO: 757777 - DNA, 75 bp, synthetic construct
  source 1..75: mol_type = other DNA
tgtgggccggaaggctgcaaaaaatgggctgcccgagggaaaaaatcgccgtatcgcgcatgggcgtagacatga

SEQ ID NO: 757778 - DNA, 75 bp, synthetic construct
  source 1..75: mol_type = other DNA
ggcgtggcatttcgctatcgcattctcggcattggcccgtgggaacgacgcctgcgcaccctcatcgaacaatat

SEQ ID NO: 757779 - DNA, 75 bp, synthetic construct
  source 1..75: mol_type = other DNA
atatcaacaactgtttcgccgtggcgacctgatgttaccgataagcgatctgtgggccggaaggctgcaaaaaat

SEQ ID NO: 757780 - DNA, 75 bp, synthetic construct
  source 1..75: mol_type = other DNA
gagcgaagtggatagagaacttccagaagaaagtgcaagcgctcaaccaacatctgggcaactcctgccagctcg

SEQ ID NO: 757781 - DNA, 75 bp, synthetic construct
  source 1..75: mol_type = other DNA
ggggtttatgaaagccaacgacgtggcgttttagctggtggccggttcactgcaaagacacgaatcttcgacgag

SEQ ID NO: 757782 - DNA, 75 bp, synthetic construct
  source 1..75: mol_type = other DNA
ggagcctgcttgccctgagtgtggcggccagtctcgtcatggcaccgacaggggcgatagccgctaacggcctcc

SEQ ID NO: 757783 - DNA, 75 bp, synthetic construct
  source 1..75: mol_type = other DNA
ttatacgaactatgttaataaaagaattaaaagcgaaggttttagcgatataattgatatgcatgctgaatgcaa

SEQ ID NO: 757784 - DNA, 75 bp, synthetic construct
  source 1..75: mol_type = other DNA
tccttatgcgtcaaaagcatcagcagatttctttaatgacttgcgtgataataactacaataacatagtaatgtt

SEQ ID NO: 757785 - DNA, 75 bp, synthetic construct
  source 1..75: mol_type = other DNA
tggattcttataagcatgctggtatttttactaactttgtgaataaaaaacaaaaacagatatgtttggtgagat

SEQ ID NO: 757786 - DNA, 75 bp, synthetic construct
  source 1..75: mol_type = other DNA
atgaaggtcggcttctttttactgaaatttccgctgtcgtcggaaaccttcgtcctcaaccaaattaccgcgttt

SEQ ID NO: 757787 - DNA, 75 bp, synthetic construct
  source 1..75: mol_type = other DNA
tggtgatgcaaccgtgctgattgttaacgataaaagtcaggtggaagcggccctgtcgttgccagtcaggcgatt

SEQ ID NO: 757788 - DNA, 75 bp, synthetic construct
  source 1..75: mol_type = other DNA
atgacgaaacatgccaggtttttcctcctgccctcctctattctgatctccgctgctttaatcgcgggttgtaac

SEQ ID NO: 757789 - DNA, 75 bp, synthetic construct
  source 1..75: mol_type = other DNA
tcgcccgcaagttagtgggattgtgctaacaaggaattttaccgaaggcagcgatgtgcaagcaggtcagtcgct

SEQ ID NO: 757790 - DNA, 75 bp, synthetic construct
  source 1..75: mol_type = other DNA
cgtatgaggctgccatagtccgggtcaccattggcgaatacggtgcaacggggtttattaatggcacggtctgta

SEQ ID NO: 757791 - DNA, 75 bp, synthetic construct
  source 1..75: mol_type = other DNA
caaaagccaccgtcgaaagcgcacgaatcaatctcgcttataccaaagtgactgcgccaattagcggacgtatcg

SEQ ID NO: 757792 - DNA, 75 bp, synthetic construct
  source 1..75: mol_type = other DNA
atcctatctacgttgatgtgacccaatccagcaacgattttatgaggctgaagcaatccgtagagcaaggaaatt

SEQ ID NO: 757793 - DNA, 75 bp, synthetic construct
  source 1..75: mol_type = other DNA
aagattggtttttacccgctcaacgaatccaatgattttaattccgctttactttctaaagtcgtaaaaacatta

SEQ ID NO: 757794 - DNA, 75 bp, synthetic construct
  source 1..75: mol_type = other DNA
caacagcgatatcgtgaaaggcaaacagtggctgtctacgctggacaataaaaccagccatgactgcattattcg

SEQ ID NO: 757795 - DNA, 75 bp, synthetic construct
  source 1..75: mol_type = other DNA
ctctgcatagcggaatacctgaactggtggaggccgataaatccggctggctggtgcctgagaacgatgctcgcg

SEQ ID NO: 757796 - DNA, 75 bp, synthetic construct
  source 1..75: mol_type = other DNA
atgacgaaacatgccaggtttttcctcctgccctcctttattctgatctccgcggctttaatcgccggttgtaac

SEQ ID NO: 757797 - DNA, 75 bp, synthetic construct
  source 1..75: mol_type = other DNA
atgggatatttaaataacgtcaccggttaccgcgaagatttactggctaaccgtgcgattgttaaacacggtaat

SEQ ID NO: 757798 - DNA, 75 bp, synthetic construct
  source 1..75: mol_type = other DNA
aataggcataacagaaactgataatgaattgaaggtagagcttgttatattttacactgattacgcatctgtatt

SEQ ID NO: 757799 - DNA, 75 bp, synthetic construct
  source 1..75: mol_type = other DNA
cgattcgtcagggctggccagcattctcacagtggcttgatgccgtgattcagcgtgtcgaaatgtacaacgcat

SEQ ID NO: 757800 - DNA, 75 bp, synthetic construct
  source 1..75: mol_type = other DNA
gctaatactatgcagcacctgtatcactgggctatgcaggcaggttgtgccgctttggtaataaacctgaaagca

SEQ ID NO: 757801 - DNA, 75 bp, synthetic construct
  source 1..75: mol_type = other DNA
tgcagatcatgcaggaacatctgcgcgactttgccgttgagcaaagtgatggcgaagtgttgatcatcagccgca

SEQ ID NO: 757802 - DNA, 75 bp, synthetic construct
  source 1..75: mol_type = other DNA
atgaatcgctgggaaaacattcagctcacccacgaaaaccgacttgcgccgcgagcgtactttttttcatatgat

SEQ ID NO: 757803 - DNA, 75 bp, synthetic construct
  source 1..75: mol_type = other DNA
aatttgaaacctggttgaaacgccatcatcaacaccaggatgccgcccacgatctgtgtcattttcgccgcgtct

SEQ ID NO: 757804 - DNA, 75 bp, synthetic construct
  source 1..75: mol_type = other DNA
cgcgtatttgccgtttcaggggcattgagcttggcgctgtttgatggcgaagctcggtgccgaactggcggggga

SEQ ID NO: 757805 - DNA, 75 bp, synthetic construct
  source 1..75: mol_type = other DNA
tgcatacccgctacatacgaaaacacagcaacagtgggctattagcctttaccacgttacctttgtggtcgctga

SEQ ID NO: 757806 - DNA, 75 bp, synthetic construct
  source 1..75: mol_type = other DNA
caccctcagcgacggctggcagggtaaacagacgctgattaaatttgacggcgtcgaaacctattttgaagtcta

SEQ ID NO: 757807 - DNA, 75 bp, synthetic construct
  source 1..75: mol_type = other DNA
aaaactctgacccgcctcgcgcaggagtatgaaatcccgctggcgcagaccgtggcgaactctgaagtcttcccc

SEQ ID NO: 757808 - DNA, 75 bp, synthetic construct
  source 1..75: mol_type = other DNA
gctgcgcctgaccgccgtagtagccaatgaactggagatcatggacggtaaatttaccggtaatgtgattggcga

SEQ ID NO: 757809 - DNA, 75 bp, synthetic construct
  source 1..75: mol_type = other DNA
tttgtgatggcggaaaccgacgtcgaatcgcacggctttgctaatgtcggcgatatcagccgtattaccgacgat

SEQ ID NO: 757810 - DNA, 75 bp, synthetic construct
  source 1..75: mol_type = other DNA
acatcactctgaatctcgaccaccagttgcttggcctcggctccaactcctggggcagcgaggtgctggactcct

SEQ ID NO: 757811 - DNA, 75 bp, synthetic construct
  source 1..75: mol_type = other DNA
agcaagggcagtcgcctgaccgcagagtttgacatcagcgcgatggttaaaaccggcgacaacctgttgtgtgtg

SEQ ID NO: 757812 - DNA, 75 bp, synthetic construct
  source 1..75: mol_type = other DNA
agttcgagaactggttgaaaaaccatcatcaacatcaggacgcggcgcatgacctgtgtcattttcgccgtgtct

SEQ ID NO: 757813 - DNA, 75 bp, synthetic construct
  source 1..75: mol_type = other DNA
gcgcggatggcgatatggaaggcattccggtagcgctgatggaggcgatggcggtcggcattccggtggtttcta

SEQ ID NO: 757814 - DNA, 75 bp, synthetic construct
  source 1..75: mol_type = other DNA
aacccagaagaaaaattacccgacaacggttaagtcttgaagaatggcaaaaaatctttgatatcgcagatgcca

SEQ ID NO: 757815 - DNA, 75 bp, synthetic construct
  source 1..75: mol_type = other DNA
attgccactgaagccaatacgcgactggctgaacaaagaactcggcagattctggccatcagtgacaggatagca

SEQ ID NO: 757816 - DNA, 75 bp, synthetic construct
  source 1..75: mol_type = other DNA
cgcttaacctgaaatgcgatgctctgaatattacccttcgtgaagttatatctcagtgcagggatgctgttgtta

SEQ ID NO: 757817 - DNA, 75 bp, synthetic construct
  source 1..75: mol_type = other DNA
acttctcaaagaacgtgcgggaatgaaactgatatcttctgttgatgtcagggatattgctcaaattcttgaaga

SEQ ID NO: 757818 - DNA, 75 bp, synthetic construct
  source 1..75: mol_type = other DNA
tcgcggcaaaattgccactatcttccacggcattgatatttccagtcgggaagtgctcaaccattacactcccga

SEQ ID NO: 757819 - DNA, 75 bp, synthetic construct
  source 1..75: mol_type = other DNA
aatttagtgatatttgggaggatcatcttcacgtcattcaggaaaagactggaagcaaaatcgctatccctcttt

SEQ ID NO: 757820 - DNA, 75 bp, synthetic construct
  source 1..75: mol_type = other DNA
tgtggacggggggtaaatggattgaaggattaccagcacaacttaagcaactctccgtccctgtttttctcggta

SEQ ID NO: 757821 - DNA, 75 bp, synthetic construct
  source 1..75: mol_type = other DNA
cacggcattgatatctccagtcgggaagtgctcaaccactacactcccgaatatcaacaactgtttcgccgtggc

SEQ ID NO: 757822 - DNA, 75 bp, synthetic construct
  source 1..75: mol_type = other DNA
ttggggcataaatcaccaagtcagaccgctcgctatcatgacgatcggggaaaaggatggaccacaattgcagtt

SEQ ID NO: 757823 - DNA, 75 bp, synthetic construct
  source 1..75: mol_type = other DNA
tgccgtgattacgcagtgagcccatacttggtgcattttttccgttcaacctcgcaggcagaacgtggggcgcag

SEQ ID NO: 757824 - DNA, 75 bp, synthetic construct
  source 1..75: mol_type = other DNA
ctgggccataaaacccagcagcaaaccgatcgttaccatgatgaccgaggcaaaggatggagcaaagtagcgttg

SEQ ID NO: 757825 - DNA, 75 bp, synthetic construct
  source 1..75: mol_type = other DNA
ggtgtttaacctgcctgagatggtcacaatcaatgccgctttcgtctgcgaccgaccacgcgaaaacgagttcgg

SEQ ID NO: 757826 - DNA, 75 bp, synthetic construct
  source 1..75: mol_type = other DNA
accgcacagtgacggtcagccagagcaacagcctgaatcagcgcgtgcagaacatgataaagaatatctctgaca

SEQ ID NO: 757827 - DNA, 75 bp, synthetic construct
  source 1..75: mol_type = other DNA
ctgccagaaaaggttatcgtattcggcggcatttactggcagcactaatgggggccacgctgacaggcatttctt

SEQ ID NO: 757828 - DNA, 75 bp, synthetic construct
  source 1..75: mol_type = other DNA
atgacgctgccggatatcaatgctggatgtggcggcatcgacgcctatctcggctcgttcagttttattaatggt

SEQ ID NO: 757829 - DNA, 75 bp, synthetic construct
  source 1..75: mol_type = other DNA
tattttggctggtttagttggggcgttgattgatgataattttgttgataagttaaataatgaaattattcgtcc

SEQ ID NO: 757830 - DNA, 75 bp, synthetic construct
  source 1..75: mol_type = other DNA
gataaagaatatctctgacaaactggtcagtgatgacccgctgaccagccaggaaaaaggctttattgaaagcac

SEQ ID NO: 757831 - DNA, 75 bp, synthetic construct
  source 1..75: mol_type = other DNA
gcgcccctgcagctgccgaaccggaggaagccgcgccggtggccagcgctcccgcagctgccgaaccggaggaaa

SEQ ID NO: 757832 - DNA, 75 bp, synthetic construct
  source 1..75: mol_type = other DNA
aagctccgcacaacaattcagcagattaccggtgttgatctcagccgtgaggccgtgcctgaaaaagaactgtac

SEQ ID NO: 757833 - DNA, 75 bp, synthetic construct
  source 1..75: mol_type = other DNA
acggcgtatacgcttgatggacaggatgcgttttacgattacggctcacatctgcgtatggctacccctgaagcc

SEQ ID NO: 757834 - DNA, 75 bp, synthetic construct
  source 1..75: mol_type = other DNA
gtcagtgatgacccgctgaccagccaggaaaaaggctttattgaaagcaccagtgtgcccattctgcgttacctg

SEQ ID NO: 757835 - DNA, 75 bp, synthetic construct
  source 1..75: mol_type = other DNA
cctgccgtttgctgtgcgatgaaaaaacgctacaacagtggcactatccgccttccggattcggcatcacctacc

SEQ ID NO: 757836 - DNA, 75 bp, synthetic construct
  source 1..75: mol_type = other DNA
tcccgctctcttgcgtacaatccgacccggatgccgagccgtactggcgcgatgtgggtacgctggaagcttact

SEQ ID NO: 757837 - DNA, 75 bp, synthetic construct
  source 1..75: mol_type = other DNA
ggaacggcaaaaatttaccactgcaacgattcggacaagtgtctgaaggtggtggcggatgcaaatgtgaccatc

SEQ ID NO: 757838 - DNA, 75 bp, synthetic construct
  source 1..75: mol_type = other DNA
atggatgtattaatcaccgacgaagcgaaaatcgccatggcgagcgcagaagatgcgggtgatagcgacaaccgc

SEQ ID NO: 757839 - DNA, 75 bp, synthetic construct
  source 1..75: mol_type = other DNA
acgacgcaatggtcgcggagctgaatcgccgatacgtggcacaaatcccgggctttcaatgctgtggaacggctt

SEQ ID NO: 757840 - DNA, 75 bp, synthetic construct
  source 1..75: mol_type = other DNA
tgtttcctgccgtaaataccttatctggctggtcaactgccacatcttgttcaccagtatccattatggcgtcac

SEQ ID NO: 757841 - DNA, 75 bp, synthetic construct
  source 1..75: mol_type = other DNA
gtacaggtcgcaatgcgaaaatgacaggcgtgactggggattctaaggattgattgccgaggaagtaggagaaat

SEQ ID NO: 757842 - DNA, 75 bp, synthetic construct
  source 1..75: mol_type = other DNA
tcattttcaggatgcgccctgtgtggtacaggtcgcaatgcgaaaatgacaggcgtgactggggattctacggat

SEQ ID NO: 757843 - DNA, 75 bp, synthetic construct
  source 1..75: mol_type = other DNA
gtgcaaagcaggatatcagctccagatacacaaaaactgaagttgataataagctgaaaaacaaactggaagtga

SEQ ID NO: 757844 - DNA, 75 bp, synthetic construct
  source 1..75: mol_type = other DNA
acaagctgggctttgccaccaataccacccaggccggagtctggcaggggcaggctgccgggtatgcctatggtg

SEQ ID NO: 757845 - DNA, 75 bp, synthetic construct
  source 1..75: mol_type = other DNA
ctttctcgtgagatagcaggtaatatcaaaaactttcaaggtaagacgatccgtagttatgatgaggcgatggct

SEQ ID NO: 757846 - DNA, 75 bp, synthetic construct
  source 1..75: mol_type = other DNA
tatagccagttttattggagcattgattgatgacaaatttatagacaggttaaataacgaaattattcgccctgc

SEQ ID NO: 757847 - DNA, 75 bp, synthetic construct
  source 1..75: mol_type = other DNA
ttcgcttctggttcgggatggttcaggctaccaggtggatatattgttcagtttggcactttttcaggaaactcg

SEQ ID NO: 757848 - DNA, 75 bp, synthetic construct
  source 1..75: mol_type = other DNA
accggattattaatgagaccgtgaaagccattaacgacgtaaatcttaaaatagcggagaagaagaaacaacagg

SEQ ID NO: 757849 - DNA, 75 bp, synthetic construct
  source 1..75: mol_type = other DNA
gggtatgactattctggtcacaaaggatacccactattaccaggatggctgtcagttttctcgtctcatgaatga

SEQ ID NO: 757850 - DNA, 75 bp, synthetic construct
  source 1..75: mol_type = other DNA
atggtgctcgatgcgttcgtgaaagtctgggacgataaatatccgcaaatcagcaaaagctggcgtgcgcattgg

SEQ ID NO: 757851 - DNA, 75 bp, synthetic construct
  source 1..75: mol_type = other DNA
acatggcgggtctgtagtccacttcaggtcagttcaatatatccttactgtgtggggctgtttcagcgtatatcg

SEQ ID NO: 757852 - DNA, 75 bp, synthetic construct
  source 1..75: mol_type = other DNA
gcggcgtcagccgtgttacaacgatttactacaggccgctgcagatgacgtttgatggctctcactggcgcaccg

SEQ ID NO: 757853 - DNA, 75 bp, synthetic construct
  source 1..75: mol_type = other DNA
taaccgctggattagagaaaaaggctggaaaacagaaaaatttcccggagtgaaaggaggtcgcgccagacttat

SEQ ID NO: 757854 - DNA, 75 bp, synthetic construct
  source 1..75: mol_type = other DNA
aaactgccgccggtttcccgccgtggtttaatccttatcgacccgccgtatgaaatgaaaaccgactatcaggcg

SEQ ID NO: 757855 - DNA, 75 bp, synthetic construct
  source 1..75: mol_type = other DNA
aaagttgcgcaatttttgtcacgcgaaggaattcgtaatttccttgctcgtctcgacatagatgaatcagaataa

SEQ ID NO: 757856 - DNA, 75 bp, synthetic construct
  source 1..75: mol_type = other DNA
aaagttgcgcaatttttgtcacgcgaaggaattcgtcatttccttgctcgtctcgacatagatgaatcagcataa

SEQ ID NO: 757857 - DNA, 75 bp, synthetic construct
  source 1..75: mol_type = other DNA
ccggggcatcagacgggaagagccgggttgtgggtatcaggctgggtaatgaacagacttacagagcagaagaga

SEQ ID NO: 757858 - DNA, 75 bp, synthetic construct
  source 1..75: mol_type = other DNA
actggcgggtggattacagcacaaaaaacaaaccggatacggtcagccagcgggatgccagcacgacgcagaaag

SEQ ID NO: 757859 - DNA, 75 bp, synthetic construct
  source 1..75: mol_type = other DNA
tggcagcggaaatcctgaaacgtgcggaagcgtccgcagccagtgcggaggaggcaaaaaaacgggcagagaatg

SEQ ID NO: 757860 - DNA, 75 bp, synthetic construct
  source 1..75: mol_type = other DNA
acggggcccagaggtgagcggggcgagaagggagagaaaggagacccgggtggccctcctgggccaaagggcgat

SEQ ID NO: 757861 - DNA, 75 bp, synthetic construct
  source 1..75: mol_type = other DNA
aggtcctgcaggaccgcagggacctgaaggggatacgggagctgcaggcccggcaggcgcacaggggccaaaagg

SEQ ID NO: 757862 - DNA, 75 bp, synthetic construct
  source 1..75: mol_type = other DNA
tggcagcggaaatcctgaaacgtgcggaagcgtcagcagcaagtgcagaggaagcaaaaaaacgggcagagaatg

SEQ ID NO: 757863 - DNA, 75 bp, synthetic construct
  source 1..75: mol_type = other DNA
gcatgaccgcttccggcatgattgtgattaatccgccgtggaagctggaacagcagatgaataacgtgctgccgt

SEQ ID NO: 757864 - DNA, 75 bp, synthetic construct
  source 1..75: mol_type = other DNA
aagccctggcgttcttatgcgctgttgcatatctggtatacggaaggctggcaaccagacggaacggacgaattg

SEQ ID NO: 757865 - DNA, 75 bp, synthetic construct
  source 1..75: mol_type = other DNA
gctgtgttgatgcttttgagcagggcgtgcgggcgattttaggccaactggtgagcgtggcgatggcggcaaaat

SEQ ID NO: 757866 - DNA, 75 bp, synthetic construct
  source 1..75: mol_type = other DNA
cgtctgcacaaatccgccgttatgccgaacgctggagaccctggcgttcttatgcgctattgcatatctggtatg

SEQ ID NO: 757867 - DNA, 75 bp, synthetic construct
  source 1..75: mol_type = other DNA
tcggatacaggggagcccgcattatcacgggaggtaaatcacctgatccggataagagtgcggtccattcccgct

SEQ ID NO: 757868 - DNA, 75 bp, synthetic construct
  source 1..75: mol_type = other DNA
atgtataccctgaactggcagccgccatatgactggtcgtggatgttgggatttctcgccgcccgtgcggtgagc

SEQ ID NO: 757869 - DNA, 75 bp, synthetic construct
  source 1..75: mol_type = other DNA
agaagcggtagcgaccgagtgcctggcgaaaatgagccgcctgtttgatctgcaatgtaatccgcagattgttaa

SEQ ID NO: 757870 - DNA, 75 bp, synthetic construct
  source 1..75: mol_type = other DNA
tttattcagaacacgccagccttccataacacgccgatgcttctggaagccgaagaaccccttgccgaatacgca

SEQ ID NO: 757871 - DNA, 75 bp, synthetic construct
  source 1..75: mol_type = other DNA
taaacacaccgttcagagcctgatcatcgagtcgctgaaagagaaggataaaccgtttctctatctcgataccca

SEQ ID NO: 757872 - DNA, 75 bp, synthetic construct
  source 1..75: mol_type = other DNA
cgcgctgtggtatccagtggtgctgcgtcagcaaatcaagcgcatgatccacgagctggaagcgaccggtattcg

SEQ ID NO: 757873 - DNA, 75 bp, synthetic construct
  source 1..75: mol_type = other DNA
cggtgcgttgggcaagttaggcgcggggcggcccggattgcgtttacccggctgtgttgatgcttttgagcaggg

SEQ ID NO: 757874 - DNA, 75 bp, synthetic construct
  source 1..75: mol_type = other DNA
atgacccagggcggtcagattgcgtccatgcgtatccgcatgttcagccagatcgccaatatcatgctttactgc

SEQ ID NO: 757875 - DNA, 75 bp, synthetic construct
  source 1..75: mol_type = other DNA
aataacgtcggcattcgccgcagcaatgcagtggaattgctggatgtagatttgcagttgtttgatgagctggag

SEQ ID NO: 757876 - DNA, 75 bp, synthetic construct
  source 1..75: mol_type = other DNA
ttggctcaatttccctccatccaggaaggatttgtaacagaataccataatgttggtgtgtgtgttcttatctgg

SEQ ID NO: 757877 - DNA, 75 bp, synthetic construct
  source 1..75: mol_type = other DNA
cgggtcgcggatatcgtccagctgaacgggaatatccggccacgatcacgccagtggtggcagttattcaggatg

SEQ ID NO: 757878 - DNA, 75 bp, synthetic construct
  source 1..75: mol_type = other DNA
cggtttatctcaatggtgaaaccaacgttaagccgggtgatatcctgcgagtgaaagtcgagcacgccgatgagt

SEQ ID NO: 757879 - DNA, 75 bp, synthetic construct
  source 1..75: mol_type = other DNA
gttctacggcatcaggctggacggataatggcgacgggacctggactgcgcagatttctctcggcactacggcgg

SEQ ID NO: 757880 - DNA, 75 bp, synthetic construct
  source 1..75: mol_type = other DNA
gcctacacgctgacactgacagcggtggactccgagggtaatccggtgacgggagaagccagccgcctgcgactt

SEQ ID NO: 757881 - DNA, 75 bp, synthetic construct
  source 1..75: mol_type = other DNA
ggttattcaggatggtgtctcagtggcatgttgatgtggttatcgttgagcggcgttcgttcagtatttttgcag

SEQ ID NO: 757882 - DNA, 75 bp, synthetic construct
  source 1..75: mol_type = other DNA
aactcgataagctgaaacaggctgcgctggcccagcgtaaaaaaactatcgaagagaagaatacacaaaagcaac

SEQ ID NO: 757883 - DNA, 75 bp, synthetic construct
  source 1..75: mol_type = other DNA
gactaccataccgttcctggtgtgatgcgcattgaatttcagcgacatgccattttttatacggttcgtgatacg

SEQ ID NO: 757884 - DNA, 75 bp, synthetic construct
  source 1..75: mol_type = other DNA
tgtttattacgttataagagtagatgacattctcattgcgcgtattcttcatcagcagatggaacctcgccgtca

SEQ ID NO: 757885 - DNA, 75 bp, synthetic construct
  source 1..75: mol_type = other DNA
gatgccagaaaactgctgcagatgaccggagaatggctgaatacaacaggggctgatcagcagtccccggaacat

SEQ ID NO: 757886 - DNA, 75 bp, synthetic construct
  source 1..75: mol_type = other DNA
tattgagttacgggcagaagatgatgagctggtatggcaacaaatacttgagtacgccaaaaactatcctttagg

SEQ ID NO: 757887 - DNA, 75 bp, synthetic construct
  source 1..75: mol_type = other DNA
tcagttggttgccaacgtaccaatccttccatggtcaatactcctgacgggaaagaaagtgaaggcgaccaagag

SEQ ID NO: 757888 - DNA, 75 bp, synthetic construct
  source 1..75: mol_type = other DNA
atggtgaacgccgacaaggagggtaaagcggaactgaaagtggtttccgtgactgccggaacctatgagatcacg

SEQ ID NO: 757889 - DNA, 75 bp, synthetic construct
  source 1..75: mol_type = other DNA
atgtcaaagctgatgattgtgctggtcgtgttgttatcgctggcggtagcggggctgtttctggtgaaacacaaa

SEQ ID NO: 757890 - DNA, 75 bp, synthetic construct
  source 1..75: mol_type = other DNA
agtgagtctttgcccgatgccgggcagtgccccgcagacgaacggcgatttaagtgccgatatccggcagcttga

SEQ ID NO: 757891 - DNA, 75 bp, synthetic construct
  source 1..75: mol_type = other DNA
ggaaatcgacggcgcggtttatctcaatggtgaaaccaacgttaagccgggtgatatcctgcgtgtgaaagtcga

SEQ ID NO: 757892 - DNA, 75 bp, synthetic construct
  source 1..75: mol_type = other DNA
tctagtatcaatatacattcttcaggtgctacggcaactactacgacaaattataatgagcccacaatatttaat

SEQ ID NO: 757893 - DNA, 75 bp, synthetic construct
  source 1..75: mol_type = other DNA
cactggcggtggtaggtctgtttctggcgaagcatgaaaacgccagcctgcgcacctcactggacagggcgagca

SEQ ID NO: 757894 - DNA, 75 bp, synthetic construct
  source 1..75: mol_type = other DNA
ttgtgttgttatcactggcggtggcggggctgtttctggtgaagcatgaaaatgccagcctgcgcacctcactgg

SEQ ID NO: 757895 - DNA, 75 bp, synthetic construct
  source 1..75: mol_type = other DNA
tcgtgttgttatcgctggcggtggccggtctgtttctggcgaagcataaaaacgccagcctgcgcgcctcgctgg

SEQ ID NO: 757896 - DNA, 75 bp, synthetic construct
  source 1..75: mol_type = other DNA
gttccggaagaagtgaaagaagaacgctggaatcgcttcatgcaactgcaacagcagatttccgccgagcgcctg

SEQ ID NO: 757897 - DNA, 75 bp, synthetic construct
  source 1..75: mol_type = other DNA
cacattcaactctttgacatatggagggtatgaaatgaaacccgtgactgtgacaattaacgccgttcctgcaga

SEQ ID NO: 757898 - DNA, 75 bp, synthetic construct
  source 1..75: mol_type = other DNA
acagggcaaacaatgtcgccagcgggcagcagatgaccatcaccatgctgaaaaaacagtttcatgttgcgctca

SEQ ID NO: 757899 - DNA, 75 bp, synthetic construct
  source 1..75: mol_type = other DNA
gctggaaccgtttcatgcagttgcaacagcagatttccgccgaacgcctgcaagagaaagtcggccgtgaaattc

SEQ ID NO: 757900 - DNA, 75 bp, synthetic construct
  source 1..75: mol_type = other DNA
ggttgcacacccgacccgcctgcgccagcgccggtgattgtggtcagcggatgcccgagggtgagcctttgcccg

SEQ ID NO: 757901 - DNA, 75 bp, synthetic construct
  source 1..75: mol_type = other DNA
cttatggaagaatgagttgggataagcctgcgcctacacttacgacgaaatgtaatagttactccaatggtcgtt

SEQ ID NO: 757902 - DNA, 75 bp, synthetic construct
  source 1..75: mol_type = other DNA
aaaatcgctacccactgataacggagagcaatccagaaaagaggctcttaaatcttatctcacaacctacgggtg

SEQ ID NO: 757903 - DNA, 75 bp, synthetic construct
  source 1..75: mol_type = other DNA
aagcatacctcccagaccatgtaattaatttcctaggaggacgtgatggtgtaaacacgcttggcaatatggctg

SEQ ID NO: 757904 - DNA, 75 bp, synthetic construct
  source 1..75: mol_type = other DNA
agctgtaacttcaatgtcatcacttggggaagttggcgatactgatttatttagtgctgttatgggggcatacaa

SEQ ID NO: 757905 - DNA, 75 bp, synthetic construct
  source 1..75: mol_type = other DNA
gtacaaaaatcgctacctattgataacggagaacaatccaggaaagaagctctcaagtcttatctcacaacctat

SEQ ID NO: 757906 - DNA, 75 bp, synthetic construct
  source 1..75: mol_type = other DNA
aatagctcagacaagatggtcatggatgctatcaaacgtcatgctaagttagttgctcaggcggtagaagacgca

SEQ ID NO: 757907 - DNA, 75 bp, synthetic construct
  source 1..75: mol_type = other DNA
ctctcgcagctcatcttcctctggggtgtctcagtgatgggcgtggggggcgcaaacctgatagtcacacaagcc

SEQ ID NO: 757908 - DNA, 75 bp, synthetic construct
  source 1..75: mol_type = other DNA
gtggaaaaacaactctgcgctggtccagttgctcggcctttgtccgctgttggcgggccccccccccgcccccca

SEQ ID NO: 757909 - DNA, 75 bp, synthetic construct
  source 1..75: mol_type = other DNA
acctgcacaggctttcgtcacctatcaggacattgtgagtgccgccaccaatccggatgacctgtcgcgccaggc

SEQ ID NO: 757910 - DNA, 75 bp, synthetic construct
  source 1..75: mol_type = other DNA
gaggctctgttggcaacggcaatcggtctggtggctgcgattccggcggtcgttatctataacgtattcgcacgt

SEQ ID NO: 757911 - DNA, 75 bp, synthetic construct
  source 1..75: mol_type = other DNA
cagtagaaggaaacggaacaacagatcaatcgacgattggaaaattctttaatcccttcagtaaaaacgaataca

SEQ ID NO: 757912 - DNA, 75 bp, synthetic construct
  source 1..75: mol_type = other DNA
ctgaccgagtatctggacactcagggctggatcacgctgggcgcgtggtatcagacttttgcgaccgcaaaccag

SEQ ID NO: 757913 - DNA, 75 bp, synthetic construct
  source 1..75: mol_type = other DNA
ttgtttctggtggaagtaatttaagaagatctcctgccacaaatattattcagaagaaggatacaaacaaaaatg

SEQ ID NO: 757914 - DNA, 75 bp, synthetic construct
  source 1..75: mol_type = other DNA
gctccagctgtaacttcaatgtcatcacttggggaagttggcgatactgatttatttagtgctgttatgggggca

SEQ ID NO: 757915 - DNA, 75 bp, synthetic construct
  source 1..75: mol_type = other DNA
tctttatgctagaagttgcacaaccattgtagccgcagcatttgccttacaagcatacctcccagaccatgtaat

SEQ ID NO: 757916 - DNA, 75 bp, synthetic construct
  source 1..75: mol_type = other DNA
gagcttaccatgcgtaaaaaacagtacaactactatcgcgaccagttgttgagttttaaagagggtgaggttgag

SEQ ID NO: 757917 - DNA, 75 bp, synthetic construct
  source 1..75: mol_type = other DNA
tttacctgccgtttatcccgtttatcttctggatgaccggcatcggcaactggatagtcagcgtactgattggat

SEQ ID NO: 757918 - DNA, 75 bp, synthetic construct
  source 1..75: mol_type = other DNA
tgacgactcaaggagaaatctactaaatgaaactcatcgttttattagagaacttcttcctgaatatattatgct

SEQ ID NO: 757919 - DNA, 75 bp, synthetic construct
  source 1..75: mol_type = other DNA
gtaacggcgtgccactgcgaggcttaaagattcgccgtgaaaaagaacgtcagctttgcctgacgggactggtca

SEQ ID NO: 757920 - DNA, 75 bp, synthetic construct
  source 1..75: mol_type = other DNA
tgggtccgccaatgtgatggtgcaacttgccgctgataatatcgcaaatggttattcaatgactgtacagccagt

SEQ ID NO: 757921 - DNA, 75 bp, synthetic construct
  source 1..75: mol_type = other DNA
atggacaacgctgccagtgagtttgtgacaacatttctggaaaaaagaaattctggcaacggaacattgccggat

SEQ ID NO: 757922 - DNA, 75 bp, synthetic construct
  source 1..75: mol_type = other DNA
atctatttatttaccatttattccgtttattttctggatgactgggattggtaactgggtcattagtgtattaat

SEQ ID NO: 757923 - DNA, 75 bp, synthetic construct
  source 1..75: mol_type = other DNA
aacttcagcagacgaacaactactttcaaaaacaagcacgccacaagatgctttaatcaagcccacagagaagtt

SEQ ID NO: 757924 - DNA, 75 bp, synthetic construct
  source 1..75: mol_type = other DNA
caacagataacgcagaaactgagcgcagggagcagctgaaatcctacctgaccacctacggctgggttgccctgg

SEQ ID NO: 757925 - DNA, 75 bp, synthetic construct
  source 1..75: mol_type = other DNA
gctattcaatgaccgtacagccagttcatgtctccacccgcacggcagcacggggaatactggagatggcactgt

SEQ ID NO: 757926 - DNA, 75 bp, synthetic construct
  source 1..75: mol_type = other DNA
aatagaagcccaaaagcatgtctattcaggtatgggtaatcctaagctaatgagccatcaggtcgagaaaattac

SEQ ID NO: 757927 - DNA, 75 bp, synthetic construct
  source 1..75: mol_type = other DNA
tggtcttgaagtacaaattgagctttccagccgccgctttatggggttgaaggagcgccgccgggcgctggcggg

SEQ ID NO: 757928 - DNA, 75 bp, synthetic construct
  source 1..75: mol_type = other DNA
gccaaaggcgatcacggggaaggtaaaaaggcttcttcggctggtttaaccgcatgttcgagaagagcacgcacc

SEQ ID NO: 757929 - DNA, 75 bp, synthetic construct
  source 1..75: mol_type = other DNA
tgccaagctccttcttgccagatgaggaccagggcgtatttatgaccatggttcagctgccagcaggtgcaacgc

SEQ ID NO: 757930 - DNA, 75 bp, synthetic construct
  source 1..75: mol_type = other DNA
gagcgctgtaatctgacgctggtgggcttttgtaaaccggggcgggcaacggtttatacgcatccgcagcgtttg

SEQ ID NO: 757931 - DNA, 75 bp, synthetic construct
  source 1..75: mol_type = other DNA
tggttgtactcacgccgctgcctggatgttgccatctggcgaactggtcggcgggcatgaagacgtgggtcgcca

SEQ ID NO: 757932 - DNA, 75 bp, synthetic construct
  source 1..75: mol_type = other DNA
gtgaaaaaaacacagcaaaaagaaatcgaaaatgtgacgaatatcacaggtgttcgtcaaattgagttatggcgg

SEQ ID NO: 757933 - DNA, 75 bp, synthetic construct
  source 1..75: mol_type = other DNA
ggcattgtgtcgtgcctcattccgtttttcctgatctataaagtctcacaactggaaaaacttcgcgggtttaaa

SEQ ID NO: 757934 - DNA, 75 bp, synthetic construct
  source 1..75: mol_type = other DNA
agaggaggataaaggtttaaccttactggaaattgccggcgcactgattattatcggtattgtggttggtctcgc

SEQ ID NO: 757935 - DNA, 75 bp, synthetic construct
  source 1..75: mol_type = other DNA
aattgaagaactggtttaatcttgataactacgaaccgataaaatcgtttacaatcaaggaactgcatagagaaa

SEQ ID NO: 757936 - DNA, 75 bp, synthetic construct
  source 1..75: mol_type = other DNA
cagttcgacaacgtgatcacactaatggagtcatggaaaaaaaacttcgccacccaggaatccttgcataatgca

SEQ ID NO: 757937 - DNA, 75 bp, synthetic construct
  source 1..75: mol_type = other DNA
gtttcacaactggaaaaattgcgtgggctgaaaacctggctgattctgttgtatggcgtattgttgtgcttttca

SEQ ID NO: 757938 - DNA, 75 bp, synthetic construct
  source 1..75: mol_type = other DNA
tttttatctattccttatctgtggttttcgacagtgcttcatatctgaaaaccttcgggttgactgataccgatc

SEQ ID NO: 757939 - DNA, 75 bp, synthetic construct
  source 1..75: mol_type = other DNA
ttatctgaagatatccgaaggctgtaaccatcgctgcaccttctgcattattccgtctatgcgcggcgatctggt

SEQ ID NO: 757940 - DNA, 75 bp, synthetic construct
  source 1..75: mol_type = other DNA
ccagcacatctgcccgtgaggcggcaacccatgcgactgatgctgcaggctcagcacgcgcagccagcacgtcag

SEQ ID NO: 757941 - DNA, 75 bp, synthetic construct
  source 1..75: mol_type = other DNA
aatttctcaggatctctcggaatttgccctgcatgtacgcgcgttcctcggactgcctgttggcgggattcgtca

SEQ ID NO: 757942 - DNA, 75 bp, synthetic construct
  source 1..75: mol_type = other DNA
acggcggcagcacagagcaaaagtacagcagaatccgcggcaacgcgcgctgagacagcagcaaaacgggcagag

SEQ ID NO: 757943 - DNA, 75 bp, synthetic construct
  source 1..75: mol_type = other DNA
gtctgcttcaaaagatgaggcgaccagacaagcgtcagcagcgaatggcagagccacgactgcatcgacgaaggc

SEQ ID NO: 757944 - DNA, 75 bp, synthetic construct
  source 1..75: mol_type = other DNA
gtctgcttcaaaagatgaggcgaccagacaagcgtcagcagcgaatggcagagccacgacagcagcgacgaaggc

SEQ ID NO: 757945 - DNA, 75 bp, synthetic construct
  source 1..75: mol_type = other DNA
tcagcgcggtggatggcgtccatttctgtgcaccggtaggtcatcgccaggaagatggcgactaccgtgaatcct

SEQ ID NO: 757946 - DNA, 75 bp, synthetic construct
  source 1..75: mol_type = other DNA
gccggtgcctttgccaccggacacctgatttcactggcggatgagtggagccgtgaatgcccgtctgaaacaggc

SEQ ID NO: 757947 - DNA, 75 bp, synthetic construct
  source 1..75: mol_type = other DNA
ggctgctgcggcagcccgggagcagcgacgtgccctggcagaactgaacagccagttgacggaaattcgcggttc

SEQ ID NO: 757948 - DNA, 75 bp, synthetic construct
  source 1..75: mol_type = other DNA
atgaaaaaaattatcactttgatgttgtttttaacattctttgcccacgcgaacgattccgaacctggcagccaa

SEQ ID NO: 757949 - DNA, 75 bp, synthetic construct
  source 1..75: mol_type = other DNA
gcccttgaacgtgcgcaggagattgcccgtaaagtggtgctggcactgggcggttatgggctgtttggtgtcgag

SEQ ID NO: 757950 - DNA, 75 bp, synthetic construct
  source 1..75: mol_type = other DNA
ctgtgcccccgtaggccatcgccaggaagatggcgactaccgggaatcatggcaaccacagcaaatgagtccgct

SEQ ID NO: 757951 - DNA, 75 bp, synthetic construct
  source 1..75: mol_type = other DNA
gctggcgaccgcagagagtgttgatgaggccattgaacgtgcgaagctcgccgccggacaggtgaaagtacaagg

SEQ ID NO: 757952 - DNA, 75 bp, synthetic construct
  source 1..75: mol_type = other DNA
ggacacaccatcaccgttaacgctacgggtaacgaagaaaacaccgtaaaaaacatcgcatttaactatattgtg

SEQ ID NO: 757953 - DNA, 75 bp, synthetic construct
  source 1..75: mol_type = other DNA
acagccgcaagtgccggaaaccatactcatagtgtcacaggcgcatcagcaatcagccagtggtcacaaaatggg

SEQ ID NO: 757954 - DNA, 75 bp, synthetic construct
  source 1..75: mol_type = other DNA
tattgtctcaggaacaggatggcattaaatcgcatacccacagcgccagcgcatccagtacggatttggggacga

SEQ ID NO: 757955 - DNA, 75 bp, synthetic construct
  source 1..75: mol_type = other DNA
acccgaccatgtatggcaacgtattgcacatgaaaggtgcgagtgctgctggtgagggcgagttgcttattggct

SEQ ID NO: 757956 - DNA, 75 bp, synthetic construct
  source 1..75: mol_type = other DNA
ggttagctaataccagtacagatggtaatcatagccactcactgtccggcacagcagcatctgcaggtgcacacg

SEQ ID NO: 757957 - DNA, 75 bp, synthetic construct
  source 1..75: mol_type = other DNA
tggggtgtacaaggctcagtaggtatgtctacgggggcgttagctaataccagtacagatggtaaccatagccac

SEQ ID NO: 757958 - DNA, 75 bp, synthetic construct
  source 1..75: mol_type = other DNA
agcgcacactcatagtgtcagcggcacagctgcatctgcaggtgctcacgcacatactgtcggtattggtgctca

SEQ ID NO: 757959 - DNA, 75 bp, synthetic construct
  source 1..75: mol_type = other DNA
caaatcatcagtttgaagaagatgaactgcttgatgtcaaccataaaagaaaagtgggtaaaacacaaaaatatt

SEQ ID NO: 757960 - DNA, 75 bp, synthetic construct
  source 1..75: mol_type = other DNA
atggcaaaagttaactttttcgacacgcgtattgttaaaaaattttcagactacacatcaacaataagcactatt

SEQ ID NO: 757961 - DNA, 75 bp, synthetic construct
  source 1..75: mol_type = other DNA
cattgcttttaatgaatattttgatacacaagttgatgatgttatcatttctcataattcccttaatggattata

SEQ ID NO: 757962 - DNA, 75 bp, synthetic construct
  source 1..75: mol_type = other DNA
ctcactggtgtaaccgcagtaggagagggtgagttactcatcggctggagtggtacaagcggtgctcatgctccg

SEQ ID NO: 757963 - DNA, 75 bp, synthetic construct
  source 1..75: mol_type = other DNA
tggctggacgattaagggcaaacctgccagtggtcgagccgtattatctcaggaacaggacggcattaaatcgca

SEQ ID NO: 757964 - DNA, 75 bp, synthetic construct
  source 1..75: mol_type = other DNA
acagaggttatggcactacataacaagggatgtgggttcaggggaaatatcccgtattacaggcttatcccgtat

SEQ ID NO: 757965 - DNA, 75 bp, synthetic construct
  source 1..75: mol_type = other DNA
acagcgccagcgcatccagtacggatttggggacgaaaaccacatcatcttttgattacggcactaaatccacga

SEQ ID NO: 757966 - DNA, 75 bp, synthetic construct
  source 1..75: mol_type = other DNA
gtggcgctgctggaaaatcctattggcacaaccgcagaaaactatttaaccaacggcaatcgtttgttgctggat

SEQ ID NO: 757967 - DNA, 75 bp, synthetic construct
  source 1..75: mol_type = other DNA
atgccactgcataatttaacccgttttccacggctggagtttatcggcgcgccaacgccgctcgaatatctgccg

SEQ ID NO: 757968 - DNA, 75 bp, synthetic construct
  source 1..75: mol_type = other DNA
cagaaacgcttcaaagatgaagggccgattctgtttattcataccggcggcgcgcctgcgctgttcgcctatcat

SEQ ID NO: 757969 - DNA, 75 bp, synthetic construct
  source 1..75: mol_type = other DNA
ccattctgtcattattggtccccacggacacaccatcaccgttaacgctacgggtaacgaagaaaacaccgtaaa

SEQ ID NO: 757970 - DNA, 75 bp, synthetic construct
  source 1..75: mol_type = other DNA
ttatccgtcaggcgtgatccctgatatgcgtggctggacgattaagggcaaacctgccagtggtcgggccgtatt

SEQ ID NO: 757971 - DNA, 75 bp, synthetic construct
  source 1..75: mol_type = other DNA
ataactcctttcgagcacgcagtcgctggtgcagtggctgcgcgctgcaaaattatctgctgtttttaacctttt

SEQ ID NO: 757972 - DNA, 75 bp, synthetic construct
  source 1..75: mol_type = other DNA
attgataacacaatcctgttttctgccatggcggaagtcaggccttcagccgtgttgccgctggcggcggattta

SEQ ID NO: 757973 - DNA, 75 bp, synthetic construct
  source 1..75: mol_type = other DNA
gccataacgtcggctccggcagtaactctggaacgacggcaggtgcagttggcggcggagccgtaggtgcggcgg

SEQ ID NO: 757974 - DNA, 75 bp, synthetic construct
  source 1..75: mol_type = other DNA
atcccaatgcccaactggaagagctggcaacgcgagtcgaagcgcaagggttccgtccgtatgtcattccggttg

SEQ ID NO: 757975 - DNA, 75 bp, synthetic construct
  source 1..75: mol_type = other DNA
tttcgcccgtatgtcattccggttggcggttctaatgctctgggcgcgctgggttatgtggagagtgcgctggaa

SEQ ID NO: 757976 - DNA, 75 bp, synthetic construct
  source 1..75: mol_type = other DNA
tggatacgttgcgtcaatggctcgatgacctggggatgagtttttttgaatgtgataactgtcaggctctgcatc

SEQ ID NO: 757977 - DNA, 75 bp, synthetic construct
  source 1..75: mol_type = other DNA
ggatgcggcaaatcaacactgttacaactgctgacccgcgcattggacccgcaacagggcgagattttgcttaac

SEQ ID NO: 757978 - DNA, 75 bp, synthetic construct
  source 1..75: mol_type = other DNA
tcagggcgattacggcaaacagcgcgattacggtaacgacccgctgccgcgcttacaggattacgccgcgcaggg

SEQ ID NO: 757979 - DNA, 75 bp, synthetic construct
  source 1..75: mol_type = other DNA
cagtggctggcaggaagattccggggtttcactggaagaactggttgagacctatttacccgtcggcctgaagca

SEQ ID NO: 757980 - DNA, 75 bp, synthetic construct
  source 1..75: mol_type = other DNA
acggttctgaagcctttcccttcttacgtagcatactgccgggcattggttgctgcctgtacggcgcttcctgca

SEQ ID NO: 757981 - DNA, 75 bp, synthetic construct
  source 1..75: mol_type = other DNA
ggtcttaactggaatttaaatgcctgtaatcgtttcacaggccaaatgatactttggtctatgaataaagaaacc

SEQ ID NO: 757982 - DNA, 75 bp, synthetic construct
  source 1..75: mol_type = other DNA
tggctatgtcaaacgcgatagcgccgaaacgggtgtactgttcgagttaatagcgcatcgctatgaacgtgggag

SEQ ID NO: 757983 - DNA, 75 bp, synthetic construct
  source 1..75: mol_type = other DNA
tgatcgccgaagtgttcctggtctttatgctctatctgcgtaaccacaaccccgccacctttgtgttgatcccgg

SEQ ID NO: 757984 - DNA, 75 bp, synthetic construct
  source 1..75: mol_type = other DNA
gaaataacagaagatagatataatgctgcaataaaagccgaggatgaatgtctgactgaaataacacgggcacaa

SEQ ID NO: 757985 - DNA, 75 bp, synthetic construct
  source 1..75: mol_type = other DNA
catcatttgctgatgtgtcgccatttgccggacggtggcaagctaacgctgaccaattttcattttacccattat

SEQ ID NO: 757986 - DNA, 75 bp, synthetic construct
  source 1..75: mol_type = other DNA
cggctggcaagagaactcgggcgtttcactggaacaactggtggaaacctatctgcccgtcggcctgaaacatgt

SEQ ID NO: 757987 - DNA, 75 bp, synthetic construct
  source 1..75: mol_type = other DNA
tcagggcgattacggcaaacagcgcgattacggtaacgacccgctgccgcgcttacaggattacgccgcacaagg

SEQ ID NO: 757988 - DNA, 75 bp, synthetic construct
  source 1..75: mol_type = other DNA
tgatgaaacaatgcagttggtcagtgaacataatcagcacgctgtggcggcgggactgaatgcaatacacgttat

SEQ ID NO: 757989 - DNA, 75 bp, synthetic construct
  source 1..75: mol_type = other DNA
ggtaacaactaatgcggcgggtaaagctgatattgagttgatgtcaacggttgctggggaacacaatattactgc

SEQ ID NO: 757990 - DNA, 75 bp, synthetic construct
  source 1..75: mol_type = other DNA
cggtctggtgtatctgctgttctacggctccaacggcccgctgggcggctggctggatgaacataatctgcaaat

SEQ ID NO: 757991 - DNA, 75 bp, synthetic construct
  source 1..75: mol_type = other DNA
gtgcataaggccgtggagttggtcgccactgagcagcaaaacctgagtgcacgcaccgaaaaatccctgtctgag

SEQ ID NO: 757992 - DNA, 75 bp, synthetic construct
  source 1..75: mol_type = other DNA
gatgttgaggattatcaggaacgcccggcgaatggttgggatatccgcgcagagggctatttacctgcctggccg

SEQ ID NO: 757993 - DNA, 75 bp, synthetic construct
  source 1..75: mol_type = other DNA
agactgccctgcaggcacaacaagccgcctttaacgaactggtggataagctgagtcatgaagacagccgccagg

SEQ ID NO: 757994 - DNA, 75 bp, synthetic construct
  source 1..75: mol_type = other DNA
aaaccgtccctgttttcccgcgtcacggcgctgttcaccaaaaaagagcagtcagacgatgcccggttctctgat

SEQ ID NO: 757995 - DNA, 75 bp, synthetic construct
  source 1..75: mol_type = other DNA
gtgcataaggccgtggaactggtcgttactgagcagcaaaacctgagcacgcgcaccgaaaaatccctgtctgag

SEQ ID NO: 757996 - DNA, 75 bp, synthetic construct
  source 1..75: mol_type = other DNA
gctgacggtgatgatcgcgctgattgccgtaccggtaaacctggtgttcggtattctgctggcgtggctggtgac

SEQ ID NO: 757997 - DNA, 75 bp, synthetic construct
  source 1..75: mol_type = other DNA
gtgacgtttaatctaccaaagggggtcagacctattactgggaaacacatttgggtgaggaccaacgatgagggt

SEQ ID NO: 757998 - DNA, 75 bp, synthetic construct
  source 1..75: mol_type = other DNA
ccagttctgggcaggtaagccttcaggttgacgatagctctcaaagagcagcaaatggcagtgatgcctttacgc

SEQ ID NO: 757999 - DNA, 75 bp, synthetic construct
  source 1..75: mol_type = other DNA
ggagtcaatcccgtaggaggaagtatgtgggtcgacattgaggctccggaaggagtgacggagaaggattattga

SEQ ID NO: 758000 - DNA, 75 bp, synthetic construct
  source 1..75: mol_type = other DNA
cgaccctggaggttgatggcagcacgccaaaagtggcaaacgacaatgatgcctttacgctgacggcaacggtta

SEQ ID NO: 758001 - DNA, 75 bp, synthetic construct
  source 1..75: mol_type = other DNA
gatgcacatggcaacactatcagtggtctttcgttgtcggcaagtttgacggggaccgcctctgaaggggcgacc

SEQ ID NO: 758002 - DNA, 75 bp, synthetic construct
  source 1..75: mol_type = other DNA
acaataccacttgcccggtgataccgcagacagattgaattatcagaaaatggctcaggtagtggatggtgttat

SEQ ID NO: 758003 - DNA, 75 bp, synthetic construct
  source 1..75: mol_type = other DNA
tgcgggaggctgaacaggtgaagcgagagaaccagccggttgaggctggagcgtggaaagatgccgttgagtggg

SEQ ID NO: 758004 - DNA, 75 bp, synthetic construct
  source 1..75: mol_type = other DNA
gagggctgaccgttgcaggaaatgccatgctgacgcgtactatgggcgcttttgccggtcccgtgggctgggtgc

SEQ ID NO: 758005 - DNA, 75 bp, synthetic construct
  source 1..75: mol_type = other DNA
cgacgaaatcatttcgataagcagcgagatagaaaatattgaccgcctgctgatggagctttcacagcctacatg

SEQ ID NO: 758006 - DNA, 75 bp, synthetic construct
  source 1..75: mol_type = other DNA
cgtcactggcggtagcctgtatctctaccatgagagacagaaagaaaaaaagcatcacaaggggtttagggagca

SEQ ID NO: 758007 - DNA, 75 bp, synthetic construct
  source 1..75: mol_type = other DNA
aaacccatcattcccagcgatgtgtctggcgcgctcgcgaggtttgcggagatgcgtaacgagcacattgttggg

SEQ ID NO: 758008 - DNA, 75 bp, synthetic construct
  source 1..75: mol_type = other DNA
ctcattgaatatcccttcaaacggggcagccacattaattaaaaaaatgcgggccaccggaaccattgaaaacta

SEQ ID NO: 758009 - DNA, 75 bp, synthetic construct
  source 1..75: mol_type = other DNA
ggaattattaatttcaaaggaattataattaatgctccatgcggtatagctccagaatctgcagatcagtccatc

SEQ ID NO: 758010 - DNA, 75 bp, synthetic construct
  source 1..75: mol_type = other DNA
gcaataccacaacattaatgaatggagataatactctacattatcaggcgtgggtgcaaaaaggtgcacaagcag

SEQ ID NO: 758011 - DNA, 75 bp, synthetic construct
  source 1..75: mol_type = other DNA
ccgcgacaaaagttaaagaaggtgataataccctgcgctacagtacttgggttaaaaaagctactggtggcaccc

SEQ ID NO: 758012 - DNA, 75 bp, synthetic construct
  source 1..75: mol_type = other DNA
tttctgaatttgaaacggtcgaacaagaaaacagctataacgaatggttgcgagccaaagtggcagcaagcctcg

SEQ ID NO: 758013 - DNA, 75 bp, synthetic construct
  source 1..75: mol_type = other DNA
gtgaaaatacgctgcattattcttcatgggtaaaaaaagctactggtggtactgtaaaagaaggtgattttactg

SEQ ID NO: 758014 - DNA, 75 bp, synthetic construct
  source 1..75: mol_type = other DNA
gattttggacagatttctaaggctcacctgaacaatgatgggcgttccattcagaaaccagttgatatcaagctg

SEQ ID NO: 758015 - DNA, 75 bp, synthetic construct
  source 1..75: mol_type = other DNA
atttattggcctgggactgatgctggcaggaaaatacctgattgatgaaagaatgaaaaagcgccgtgctgaagc

SEQ ID NO: 758016 - DNA, 75 bp, synthetic construct
  source 1..75: mol_type = other DNA
ttatatcattactactatcactccctctgattattttttgccaaccttgggtcaatgcattaccgtcaacgcccc

SEQ ID NO: 758017 - DNA, 75 bp, synthetic construct
  source 1..75: mol_type = other DNA
gcgcagccgcgcggcgcggatgtatgaatttagcgatatggcggaagtggaatccacgctggaacaactggctaa

SEQ ID NO: 758018 - DNA, 75 bp, synthetic construct
  source 1..75: mol_type = other DNA
ggaaaaacaggtgacaacgccggagcaatatccgctttctgtaaatggtgtagtaacggcctgtaatcagaaaac

SEQ ID NO: 758019 - DNA, 75 bp, synthetic construct
  source 1..75: mol_type = other DNA
agagtatataaaagaggcctttatcagtagcggagccagagttaccgcgcaggatatccccattacgggtggccc

SEQ ID NO: 758020 - DNA, 75 bp, synthetic construct
  source 1..75: mol_type = other DNA
tctttcgtagcgatgaaatggggagcgcggtacatgcagcttcgcttgagcgtccagtgaaattaatgatagcgc

SEQ ID NO: 758021 - DNA, 75 bp, synthetic construct
  source 1..75: mol_type = other DNA
gcccttctttcgtagcgatgaaatggggagcgcggtacacgccgcttcgcttgagcgtccggtgaaattaatgat

SEQ ID NO: 758022 - DNA, 75 bp, synthetic construct
  source 1..75: mol_type = other DNA
tatacgctggcggtaagaagtggcaaggcctggtaaaccgccgcgatgttgaatatgccgtttgcgaatggggtg

SEQ ID NO: 758023 - DNA, 75 bp, synthetic construct
  source 1..75: mol_type = other DNA
acgatccttatcgtgatgttgttggtgtatggactgtttgctacggtcacaccggaaaagacatcatgcttggga

SEQ ID NO: 758024 - DNA, 75 bp, synthetic construct
  source 1..75: mol_type = other DNA
tggatgattgatggacgcgggattaataacgtctgcgatgtgctgatgtatctcgaagatgacgatacccgtgat

SEQ ID NO: 758025 - DNA, 75 bp, synthetic construct
  source 1..75: mol_type = other DNA
aactggacggccttccagccataaactggcgaaacaaatctatttccctgttgcggatggttatcacctgttatg

SEQ ID NO: 758026 - DNA, 75 bp, synthetic construct
  source 1..75: mol_type = other DNA
gttatgcccgctgttttccagctcactggcgcaggcaatgtatgaaaagctaaccgctgtgcgctttagcgagga

SEQ ID NO: 758027 - DNA, 75 bp, synthetic construct
  source 1..75: mol_type = other DNA
atgaaaatcgaagttttagcactaatcgcaatgggattgatagtatttggtgttcatgctgtagatctggactgg

SEQ ID NO: 758028 - DNA, 75 bp, synthetic construct
  source 1..75: mol_type = other DNA
tgagacgaagcagcatgacggttctggtcaacgtaattatggttgcagtcgtgggctggggcgtctactagatgg

SEQ ID NO: 758029 - DNA, 75 bp, synthetic construct
  source 1..75: mol_type = other DNA
tctcgacagtgccctggcgcaacaccgtgccgtctcgttaatccgggtggatttacgtttccctgagtatatgcc

SEQ ID NO: 758030 - DNA, 75 bp, synthetic construct
  source 1..75: mol_type = other DNA
tcgcgcaaacgcagaccactaacctggcagtcgttgcgccgggtatcgcagaagctctgttagcaacggcaatcg

SEQ ID NO: 758031 - DNA, 75 bp, synthetic construct
  source 1..75: mol_type = other DNA
aacaacgccacatggcgaatatcggctgttacaggaagggaacgactggattttgcagtttaatcatcatcagca

SEQ ID NO: 758032 - DNA, 75 bp, synthetic construct
  source 1..75: mol_type = other DNA
gttcccgagctcgtgcagaccacgccacacggagagtatcggttgttgcaggagggtgatgattgggtgttgcag

SEQ ID NO: 758033 - DNA, 75 bp, synthetic construct
  source 1..75: mol_type = other DNA
gattcagcggtgatttcccgttttttcgcatccctgaaagccaaaattcaggcttaccagcggaaaaaaagatgg

SEQ ID NO: 758034 - DNA, 75 bp, synthetic construct
  source 1..75: mol_type = other DNA
tggatgttctgataccaggaaggcttcagacaaaaagccgggtgtagccgctgtgctctgggtcaagcgtggtga

SEQ ID NO: 758035 - DNA, 75 bp, synthetic construct
  source 1..75: mol_type = other DNA
tggatgttctgataccaggaaggcttcagacaaaaagccgggtgaagccgctgtgctctggttcaagcgtggtga

SEQ ID NO: 758036 - DNA, 75 bp, synthetic construct
  source 1..75: mol_type = other DNA
gctgggtgatgggctggtccatttttccaggtggactccttcccgtaaaccgacatcacctgctgctcccccttc

SEQ ID NO: 758037 - DNA, 75 bp, synthetic construct
  source 1..75: mol_type = other DNA
gtgggtaataatttaatgcagacggacctctccgtctgggggatgtatcagcacgccgatattgtcgttaagtgc

SEQ ID NO: 758038 - DNA, 75 bp, synthetic construct
  source 1..75: mol_type = other DNA
tctcaacagtgccctggtgcaacaccgtgccgtctcgttaatccgggtggatttacgtttccctgagcatatgcc

SEQ ID NO: 758039 - DNA, 75 bp, synthetic construct
  source 1..75: mol_type = other DNA
tggatgttctgataccaggaaggcttcagacaaaaagccgggtgcagccgctgttctctggatcaagcgtggtga

SEQ ID NO: 758040 - DNA, 75 bp, synthetic construct
  source 1..75: mol_type = other DNA
ggactgggcgtggatgatgccaaacatgggtttacagtggatgatttagcgttggtgatggcagcgtttgatacg

SEQ ID NO: 758041 - DNA, 75 bp, synthetic construct
  source 1..75: mol_type = other DNA
cccctcgctgaccgttgtctggaactgcatcacgcatagtgaaagaacggacacggtaaggagaatacaacgtgc

SEQ ID NO: 758042 - DNA, 75 bp, synthetic construct
  source 1..75: mol_type = other DNA
gcaagatctgaatagtgatggcagggcagagcggatcctctttgcctttgatgatgaaagatacattgtctatgg

SEQ ID NO: 758043 - DNA, 75 bp, synthetic construct
  source 1..75: mol_type = other DNA
ctggcgtagtgttattcaatgcagtctattcatggaacagtctgcgtcgtcgtcggatatcccaggtatcgaact

SEQ ID NO: 758044 - DNA, 75 bp, synthetic construct
  source 1..75: mol_type = other DNA
agcgtaccagtttccgccttgagcgtcgggtcgccgcagtaggtcgccaaatgggccgtggtaatggctaccttg

SEQ ID NO: 758045 - DNA, 75 bp, synthetic construct
  source 1..75: mol_type = other DNA
agatatgaggagattatcgatatccttcgatacgtatctagatcatttgatttatctattcctgagcattggtta

SEQ ID NO: 758046 - DNA, 75 bp, synthetic construct
  source 1..75: mol_type = other DNA
ccgcgaaatggcgcggcggtaagtatggcggggttattccttccccgttgaggacaccgggttgtcaggttgacc

SEQ ID NO: 758047 - DNA, 75 bp, synthetic construct
  source 1..75: mol_type = other DNA
gctgttagcactggttaccggccaacggttaggtgatatctcacgtatgaaatttagcgatatttgggatgatca

SEQ ID NO: 758048 - DNA, 75 bp, synthetic construct
  source 1..75: mol_type = other DNA
tggggtttaacgttcgcagcttgttagggcgcgtagtgttatcaaatccgccagcattaccgccgcgcacccatc

SEQ ID NO: 758049 - DNA, 75 bp, synthetic construct
  source 1..75: mol_type = other DNA
ctctgcgtacagcagcagagtgattatgtgatgagtaatttctggtcggcgcactggccgcaatcgcattttcgc

SEQ ID NO: 758050 - DNA, 75 bp, synthetic construct
  source 1..75: mol_type = other DNA
cggtgttgctgcgctacttagtgcaccacgactcggcaaacttggcgatcgtatcggaccagaaaagatcctgat

SEQ ID NO: 758051 - DNA, 75 bp, synthetic construct
  source 1..75: mol_type = other DNA
gtctattggcgatataagcatccagtgaccgggaaatttcattcgttgggcacaaatgaagctgaagctattgct

SEQ ID NO: 758052 - DNA, 75 bp, synthetic construct
  source 1..75: mol_type = other DNA
atggcagccagaccacgtaagaataatgtttcagtcccgaacttgtatccgctctatagcagaaaagtaaataaa

SEQ ID NO: 758053 - DNA, 75 bp, synthetic construct
  source 1..75: mol_type = other DNA
atttacgtttccctgagcatatgcctgtcaccatcatggatcccgatccggattcagcggtgatttctcgttttt

SEQ ID NO: 758054 - DNA, 75 bp, synthetic construct
  source 1..75: mol_type = other DNA
ggcttaccagcggaaaaaaagatgggccaatcagcgtgtgcatgcaaccagcctgcgttatttctggtgccggga

SEQ ID NO: 758055 - DNA, 75 bp, synthetic construct
  source 1..75: mol_type = other DNA
atcgccgaataaattctccggttactttcagttttaccgcaagcacaaaggcaaatttgaccgggccagcaagaa

SEQ ID NO: 758056 - DNA, 75 bp, synthetic construct
  source 1..75: mol_type = other DNA
aaaccgagccttttttcccgcgtggctgcgatgttcagcaaaaaagaacaaagcgacgatgcgcgattctctgat

SEQ ID NO: 758057 - DNA, 75 bp, synthetic construct
  source 1..75: mol_type = other DNA
gttacggcaaagtgacggcgctggttgcagaggaaatccaggacggtccgctggcgggcaagatggcaatttacg

SEQ ID NO: 758058 - DNA, 75 bp, synthetic construct
  source 1..75: mol_type = other DNA
gcccgaagtttgctgatacgggcaaagcctccctggtcggcctggctgccactgatgcccctgccagtctgggca

SEQ ID NO: 758059 - DNA, 75 bp, synthetic construct
  source 1..75: mol_type = other DNA
gcgcaccgaaaaatccctgtctgagcaggaagaacgcctgtctgagcaggaagaacgcctgtctgagatggagac

SEQ ID NO: 758060 - DNA, 75 bp, synthetic construct
  source 1..75: mol_type = other DNA
caggaagaacgcctgtctgagctggaggctgccctgcaggcacagcaaaccgcctttaacgaactggtggacaag

SEQ ID NO: 758061 - DNA, 75 bp, synthetic construct
  source 1..75: mol_type = other DNA
ctggataaacttgccgaactgaaagcatggcgtgaacgagaaggtctggagtttgaaattgaggtggacggttcc

SEQ ID NO: 758062 - DNA, 75 bp, synthetic construct
  source 1..75: mol_type = other DNA
gcggccgcaggattacattgcgcaactggcgcgtgcgggagccgattttatcactctgcatccggaaaccatcaa

SEQ ID NO: 758063 - DNA, 75 bp, synthetic construct
  source 1..75: mol_type = other DNA
ggtggagctggtaaaaaaaggccagaagctgttcacctccatggaggtcagcccgaaatttgctgataccggtaa

SEQ ID NO: 758064 - DNA, 75 bp, synthetic construct
  source 1..75: mol_type = other DNA
caggaagaacgcctgtctgagctggagactgctctgcaggcacagcagaccgcctttaacgaactggtgaataag

SEQ ID NO: 758065 - DNA, 75 bp, synthetic construct
  source 1..75: mol_type = other DNA
ctcctttaacgaactggtgaataagctgagtcatgaagacagccgccaggactatcgccagcgtgcaacaggcgg

SEQ ID NO: 758066 - DNA, 75 bp, synthetic construct
  source 1..75: mol_type = other DNA
agaccgcctttaacgaactggtgaataagctgagtcatgaagacagccgccaggactaccgccaacgtgcaacag

SEQ ID NO: 758067 - DNA, 75 bp, synthetic construct
  source 1..75: mol_type = other DNA
gttcggcaaggaaaaaggcaggaaacattatcacgtgatattactgctcaacaaagatacctggtgctcgccagg

SEQ ID NO: 758068 - DNA, 75 bp, synthetic construct
  source 1..75: mol_type = other DNA
tatggtaacccgttgcagggacaaaatgtgacgctgactctgccgaaaggtgtgaccagcaagacggggaatacg

SEQ ID NO: 758069 - DNA, 75 bp, synthetic construct
  source 1..75: mol_type = other DNA
aggagtggctcgggaaatacggtactgcgcgcgtcaaactgaatgtcgataaagatttctcgctgaaggattctt

SEQ ID NO: 758070 - DNA, 75 bp, synthetic construct
  source 1..75: mol_type = other DNA
ctcacggcgaaagtggaacaggccaacggtcaggaatcgacgaaaactgctgaatctaaattcgtcgcggatgat

SEQ ID NO: 758071 - DNA, 75 bp, synthetic construct
  source 1..75: mol_type = other DNA
cgcttattgcaaaagatgcacatggcaacgctatcagcgacctttccctgtcggcaagcctgacaggtgctgcat

SEQ ID NO: 758072 - DNA, 75 bp, synthetic construct
  source 1..75: mol_type = other DNA
tgcaggggaacttgagatcgaggcctcggtgaaaaactctcagaagacggtcaaggtgaaattcaaggcggattt

SEQ ID NO: 758073 - DNA, 75 bp, synthetic construct
  source 1..75: mol_type = other DNA
atggcggaagttacccaattgaagcgttatgacgcgcgcccgattaactggggcaaatggtttctaattggcatc

SEQ ID NO: 758074 - DNA, 75 bp, synthetic construct
  source 1..75: mol_type = other DNA
cgtttgtggtgcgcgagctggtgccggtgatgttaagccagggcagccaggaagacgaagcggcgattttgcttg

SEQ ID NO: 758075 - DNA, 75 bp, synthetic construct
  source 1..75: mol_type = other DNA
ggctcgattcgcggcgaaaccctgtcgctgccgttacagattgaattgctggagcaggactacaacaccgtcggc

SEQ ID NO: 758076 - DNA, 75 bp, synthetic construct
  source 1..75: mol_type = other DNA
ggtggtacaacggtaaaacattcaggcacattttcagaacaaaatttcctgtctcctgatggtcagacagcttat

SEQ ID NO: 758077 - DNA, 75 bp, synthetic construct
  source 1..75: mol_type = other DNA
aagttacgctgactttaccgcagggtgtgaccagcaagacggggaatacagtaacaaccaatgcggcaggaaaag

SEQ ID NO: 758078 - DNA, 75 bp, synthetic construct
  source 1..75: mol_type = other DNA
tgaatctaaattcgtcgcggatgataaaaacgcgggtaatgactccaacttattgatagtgttttatgttcagat

SEQ ID NO: 758079 - DNA, 75 bp, synthetic construct
  source 1..75: mol_type = other DNA
gtctgcttcaaaagatgaggcgaccagacaagcgtcagcagcgaatggcagagccacgacggcaacgacgaaggc

SEQ ID NO: 758080 - DNA, 75 bp, synthetic construct
  source 1..75: mol_type = other DNA
tcctggcgtgggcgcagaagagcgcggtcagtctgaagctattgctcgcaacttgcgcgaaatgtctcgtctgaa

SEQ ID NO: 758081 - DNA, 75 bp, synthetic construct
  source 1..75: mol_type = other DNA
tttgtgccgttgatgacggatgagcatggtgcgaatgtgccgacaaacgagccgtcagaagatccggacattatc

SEQ ID NO: 758082 - DNA, 75 bp, synthetic construct
  source 1..75: mol_type = other DNA
taccaacgttactttagtgatgaagatcttcatatagatagttctggattaaaagttaatgaagttatcgttgac

SEQ ID NO: 758083 - DNA, 75 bp, synthetic construct
  source 1..75: mol_type = other DNA
gaggcaggtgtggcgatgttctggcgggcagataaaacggcacattatggtaccctgaatgagttggcccgggga

SEQ ID NO: 758084 - DNA, 75 bp, synthetic construct
  source 1..75: mol_type = other DNA
tcaaagagatttagtgttaattttggtgaatctgataagagttcattttcgatggaatatcatggtatggggaca

SEQ ID NO: 758085 - DNA, 75 bp, synthetic construct
  source 1..75: mol_type = other DNA
cttcgatttattgctgttgatggtgagagtaggactaaagagttttcagaaaattggcagcaagtgtttggcgat

SEQ ID NO: 758086 - DNA, 75 bp, synthetic construct
  source 1..75: mol_type = other DNA
gcgtacaaaaacagggagagcgacaacgttttctttgtgccgttcatgaccgacggtaacggcaacaacacgccc

SEQ ID NO: 758087 - DNA, 75 bp, synthetic construct
  source 1..75: mol_type = other DNA
gaccttgtgatgtggacaaatgatggctttacagcagatacgctgacgctgacagatatcacgggggcaaaagcg

SEQ ID NO: 758088 - DNA, 75 bp, synthetic construct
  source 1..75: mol_type = other DNA
gtgtatggacagagcagcagtggggggctgccggtggcaaaggcactgtgactgatgacggtggacggaaagcgc

SEQ ID NO: 758089 - DNA, 75 bp, synthetic construct
  source 1..75: mol_type = other DNA
aaagagaattgaggaattacttccggaatctgttattattgcatttaataaagttaggggatggcttgagctatg

SEQ ID NO: 758090 - DNA, 75 bp, synthetic construct
  source 1..75: mol_type = other DNA
gcttccgctgccggagacatatgaccgtccggacccgcgtattaaacagctggcgcgtcgcagcactgtcacgcc

SEQ ID NO: 758091 - DNA, 75 bp, synthetic construct
  source 1..75: mol_type = other DNA
gacgccggttattgatggtcaggatggcacaccgttcacgctgacgcagtcaccggtcagtgcattttcggcgga

SEQ ID NO: 758092 - DNA, 75 bp, synthetic construct
  source 1..75: mol_type = other DNA
ccttatctgccgcgcgccgaacagcgtgaactggggcaatacatccgcttatctatgctgcgcagtgtgctggcg

SEQ ID NO: 758093 - DNA, 75 bp, synthetic construct
  source 1..75: mol_type = other DNA
atggctaaaatctatgagtttccgcagggagctgaacgaggtaagcttagaaaagaaatcatccgggaccgtaaa

SEQ ID NO: 758094 - DNA, 75 bp, synthetic construct
  source 1..75: mol_type = other DNA
gatactggtagttggtgtgaaactcggctgtattaatcacgcgatgttgacggcacaggcaatacaacacgccgg

SEQ ID NO: 758095 - DNA, 75 bp, synthetic construct
  source 1..75: mol_type = other DNA
gattcgcgctggcatccatcaggtcacagttcgcgctcctgtggagtcagttgaaatcacagatgaaggttccct

SEQ ID NO: 758096 - DNA, 75 bp, synthetic construct
  source 1..75: mol_type = other DNA
accctgaagacggccctgatggttgacggaaagagagtggcactcagcgccagacagcagggtgaggatgtggtg

SEQ ID NO: 758097 - DNA, 75 bp, synthetic construct
  source 1..75: mol_type = other DNA
cagacagcagggtgaggatgtggtgataaccgtacctgaggcacagaagctggttgagttaagaacggatgcacc

SEQ ID NO: 758098 - DNA, 75 bp, synthetic construct
  source 1..75: mol_type = other DNA
gccgcgagtgttttacattttatctttgtttttgtgttagccattcttggtgcgtttaaatgggctgtgttctgg

SEQ ID NO: 758099 - DNA, 75 bp, synthetic construct
  source 1..75: mol_type = other DNA
cgatttccggaagaaattctgggaagaagtgtcaaaagatcccgagcttagtaagcaatttaaagacagtaataa

SEQ ID NO: 758100 - DNA, 75 bp, synthetic construct
  source 1..75: mol_type = other DNA
tgccatctgaaatagcaaaagatgacccgaaaatgatgtcaaagattgtgacgtcattaccggcagaaacagtaa

SEQ ID NO: 758101 - DNA, 75 bp, synthetic construct
  source 1..75: mol_type = other DNA
ttacgtaatagtgacgcgctggcgttacagcgcaacagtagcctgcagctggattacgcaacggtaaatccttac

SEQ ID NO: 758102 - DNA, 75 bp, synthetic construct
  source 1..75: mol_type = other DNA
ggtagtggtgttcactggggaggtggctccggcaatggtaatggcggggggaatggtaattccggtggtggcagc

SEQ ID NO: 758103 - DNA, 75 bp, synthetic construct
  source 1..75: mol_type = other DNA
tcttagccctgaccaggtaaaacaacgtcaggatgaagaaaatcgccgtcagcaggaatgggatgctacgcatcc

SEQ ID NO: 758104 - DNA, 75 bp, synthetic construct
  source 1..75: mol_type = other DNA
ccaatggctgctggtcacagaatgtggcaaatggcagggcttaaggcccagcgggcacagacggatgtaaataat

SEQ ID NO: 758105 - DNA, 75 bp, synthetic construct
  source 1..75: mol_type = other DNA
gatgtaccacaagggggagtcgaatgcgcaactgggcacatttggggcatttgaccataactggcatacagttgt

SEQ ID NO: 758106 - DNA, 75 bp, synthetic construct
  source 1..75: mol_type = other DNA
atataatacttaaggaaaaatttgcttatcgtgaaaatgattttcgccaaaattatttatcatcatcacttaaaa

SEQ ID NO: 758107 - DNA, 75 bp, synthetic construct
  source 1..75: mol_type = other DNA
aatctctcaagaagaaagcttaggaaaatttactgaacaagttctttcaacattctcaggtgcgatgaaagatta

SEQ ID NO: 758108 - DNA, 75 bp, synthetic construct
  source 1..75: mol_type = other DNA
tacatgtccgcgcttggcttaaacagcttgcaagacttcaaagatagaatgctaagtgtaacatatttagataac

SEQ ID NO: 758109 - DNA, 75 bp, synthetic construct
  source 1..75: mol_type = other DNA
atgacgtgcaggatatgagccagtacaaccacccgaaagccgacctgaacaaaggtcagtatggctgtgtgagtc

SEQ ID NO: 758110 - DNA, 75 bp, synthetic construct
  source 1..75: mol_type = other DNA
gatttagttcaatatttcaatggattatacaaagagaagattaaatcagaaaatgttggtaaaacggtaggtagt

SEQ ID NO: 758111 - DNA, 75 bp, synthetic construct
  source 1..75: mol_type = other DNA
gtggagccattattgaattaaaaaatagcgtaaaaaaagttaaggagtcactagagaaaagtatttcattaacaa

SEQ ID NO: 758112 - DNA, 75 bp, synthetic construct
  source 1..75: mol_type = other DNA
gattacaaccgtcgctcgatagcggaaacggcgatgtaccgggtaaaacagctgttcggggggttcactgacgct

SEQ ID NO: 758113 - DNA, 75 bp, synthetic construct
  source 1..75: mol_type = other DNA
tttcttgaagaagtacataagattgatcctgattcagaatatttttatcaaccctttacataccagacatcccac

SEQ ID NO: 758114 - DNA, 75 bp, synthetic construct
  source 1..75: mol_type = other DNA
accgggagtaatgcgcggtggaaatggacaacagattacaaccgtcgctcgatagcggaaacggcgatgtaccgg

SEQ ID NO: 758115 - DNA, 75 bp, synthetic construct
  source 1..75: mol_type = other DNA
aagtcggttaatatcagtttcaaaacgcccacccggggtgaaatcgcacacctggtaattgattccaccgggctg

SEQ ID NO: 758116 - DNA, 75 bp, synthetic construct
  source 1..75: mol_type = other DNA
gcagaacaaccggcagtcagaccggggccggtcacgctcatgagtctgctggcatcatctcctgaacgggaaagc

SEQ ID NO: 758117 - DNA, 75 bp, synthetic construct
  source 1..75: mol_type = other DNA
gctattgaactggatatcgactggcccgaatcgaatgacgacttttggaaagatggtgaagaaggtgcttatgcg

SEQ ID NO: 758118 - DNA, 75 bp, synthetic construct
  source 1..75: mol_type = other DNA
acaaactaaagatctctctgcatcccatcctgatgtggttaagaatatgaaggctgttatgattgacttcatcac

SEQ ID NO: 758119 - DNA, 75 bp, synthetic construct
  source 1..75: mol_type = other DNA
atttcagttcatgggcccgccgcggcattatttctgaccgcctggcaacggcgatcctgatgcatgccgggaaga

SEQ ID NO: 758120 - DNA, 75 bp, synthetic construct
  source 1..75: mol_type = other DNA
catgtagatccaccagaaatcactcgggatccttttcgcgctttcttttgaatttcgtccagatttttgtctcct

SEQ ID NO: 758121 - DNA, 75 bp, synthetic construct
  source 1..75: mol_type = other DNA
gacgaaattcctgattattatattgcgcatcttttgacaaaaaataaacgaatattatgtgctgcacctgagtat

SEQ ID NO: 758122 - DNA, 75 bp, synthetic construct
  source 1..75: mol_type = other DNA
gtgcattttgaattgttcgatcggcaaattgatttagtgcaggataatattgatctggatattcgtattaatgac

SEQ ID NO: 758123 - DNA, 75 bp, synthetic construct
  source 1..75: mol_type = other DNA
caaaaaagattaaatgaaatattacgcgcacaggtcattagtgggttaaaggcgtctgaggggctggcaaaatta

SEQ ID NO: 758124 - DNA, 75 bp, synthetic construct
  source 1..75: mol_type = other DNA
catctaaaaactctaagaatacagagtttaacactctgaaaaacaggaaggagtttctaagttcagtaatcaatg

SEQ ID NO: 758125 - DNA, 75 bp, synthetic construct
  source 1..75: mol_type = other DNA
tttatacaaaaagcaataagattgaaaattatacctttgcgaatgtgcatgataatatgttttattataatacag

SEQ ID NO: 758126 - DNA, 75 bp, synthetic construct
  source 1..75: mol_type = other DNA
atgattagatatagtggaatatttctaacgctgttaatgatttcaggttgtgcaaccgatgcattgaaaaatgaa

SEQ ID NO: 758127 - DNA, 75 bp, synthetic construct
  source 1..75: mol_type = other DNA
gtgcacaagtgattagtggattaaaggcgtctgaggggctggcaaaactacttcttgctagcggaataatgttat

SEQ ID NO: 758128 - DNA, 75 bp, synthetic construct
  source 1..75: mol_type = other DNA
aaatgagatattgcgcgcacaggtcattagtgggttaaaggcgtctgaggggctggcaaaattacttattgccag

SEQ ID NO: 758129 - DNA, 75 bp, synthetic construct
  source 1..75: mol_type = other DNA
gattgaatggggattatcttcctggtgtcttgttcgtaacaatccgacgtctcttactccacgtgaggaaaagac

SEQ ID NO: 758130 - DNA, 75 bp, synthetic construct
  source 1..75: mol_type = other DNA
ggaagatatcaaggagcggcttgggcgttcgcctggtaaaggcgatgcgctactgctgacgtttgcgttccctgt

SEQ ID NO: 758131 - DNA, 75 bp, synthetic construct
  source 1..75: mol_type = other DNA
gtctaagcgtctgcgaattcccgggcagcagaaccagcaaggcaaggccattacagattacgatccctatgctta

SEQ ID NO: 758132 - DNA, 75 bp, synthetic construct
  source 1..75: mol_type = other DNA
ccgacaaccagctacgaacgaagacctggccggaaattatcaagtggtcgaaccttgctatcacgaaagactggt

SEQ ID NO: 758133 - DNA, 75 bp, synthetic construct
  source 1..75: mol_type = other DNA
taccgcgaggcgttgttatctcccgaacaagatcttcatcgccatgctgatccttttccctttaacgaagagccc

SEQ ID NO: 758134 - DNA, 75 bp, synthetic construct
  source 1..75: mol_type = other DNA
taccgcgaggcgttattgtctcccggtcaggatattcaacgccaggccgatccctttccctttaacggtgaggca

SEQ ID NO: 758135 - DNA, 75 bp, synthetic construct
  source 1..75: mol_type = other DNA
atgaccgctatgagcactgcaattacacgccagatcgttctcgataccgaaactaccggtatgaaccagattggt

SEQ ID NO: 758136 - DNA, 75 bp, synthetic construct
  source 1..75: mol_type = other DNA
tatccgcggcgcggagttggtgatccataacgcagcgttcgatatcggctttatggactacgagttttcgttgct

SEQ ID NO: 758137 - DNA, 75 bp, synthetic construct
  source 1..75: mol_type = other DNA
ttgagattggtgccgttgaagtggtgaaccgtcgcctgacgggcaataacttccatgtttatctcaaacccgatc

SEQ ID NO: 758138 - DNA, 75 bp, synthetic construct
  source 1..75: mol_type = other DNA
tactgctgacgtttgcgttcccggtagccaagaaaactaatgacccacggcagcagcagggcagggctataacag

SEQ ID NO: 758139 - DNA, 75 bp, synthetic construct
  source 1..75: mol_type = other DNA
tgcgccaggcaagtaaattacgcgttgtttttgcgactgatgaagagcttgcagcgcatgaagcccgtctcgatc

SEQ ID NO: 758140 - DNA, 75 bp, synthetic construct
  source 1..75: mol_type = other DNA
ttatgtgctcgctacgaaatagataacagtaaacgaacgctgcacggggcattactcgatgcccagatccttgcg

SEQ ID NO: 758141 - DNA, 75 bp, synthetic construct
  source 1..75: mol_type = other DNA
gccgatgcgttccgagagatacgtgatcacctgcagaatccagagacgcgctatcagccgcttatgctggcacgt

SEQ ID NO: 758142 - DNA, 75 bp, synthetic construct
  source 1..75: mol_type = other DNA
ataaagaaacagtcaaaatcactcagcaaaacaggctgaatgcaaaatccagcagtggggtttaccttctgcctg

SEQ ID NO: 758143 - DNA, 75 bp, synthetic construct
  source 1..75: mol_type = other DNA
accctttacccgcattcagcggaaccgttgaatatggacaaattcagggaacaatagataactttcaggaaatca

SEQ ID NO: 758144 - DNA, 75 bp, synthetic construct
  source 1..75: mol_type = other DNA
gatgttgatattccgttacagttaaatggcatttcagtggatcagttaggctttatacgcatccacgacattcaa

SEQ ID NO: 758145 - DNA, 75 bp, synthetic construct
  source 1..75: mol_type = other DNA
atgatatggcgtcttgtttttaagcgaggaaagattttgagtgcgggacgcctgaataaaaaatctctgggtatc

SEQ ID NO: 758146 - DNA, 75 bp, synthetic construct
  source 1..75: mol_type = other DNA
aataatgggcaaagcgtgaaggctgggcaaaaaatcgccactatggggagcacggatgcggcatctgttcgcctg

SEQ ID NO: 758147 - DNA, 75 bp, synthetic construct
  source 1..75: mol_type = other DNA
tgttcgggtagcaaatcatccgatacaggaacgtattccggctccgtttacaccgtgaaacggggggatacgcta

SEQ ID NO: 758148 - DNA, 75 bp, synthetic construct
  source 1..75: mol_type = other DNA
tcaccagccgttgatgctggcccgcgcatccggccacggcatcggcaagtcagctttcatctcaatgctgattaa

SEQ ID NO: 758149 - DNA, 75 bp, synthetic construct
  source 1..75: mol_type = other DNA
tggggcaggacatggcagctaatcccgttcggcggcggctcgaccgatccccagatgctaaataagcgcggagag

SEQ ID NO: 758150 - DNA, 75 bp, synthetic construct
  source 1..75: mol_type = other DNA
gcaacaagaccaccgacgatttgattatggctaagcgaatcgccgactttgaagaccagtaccaggctgacgcgg

SEQ ID NO: 758151 - DNA, 75 bp, synthetic construct
  source 1..75: mol_type = other DNA
tgatgcagatggcaccaccctgacgctacgtattcagggcgagtcgaatgatcccttgcccgcattcagcggaac

SEQ ID NO: 758152 - DNA, 75 bp, synthetic construct
  source 1..75: mol_type = other DNA
ggtgaaggtgagtgggcatctttcctccaatagcggcgagattgtgttgcaatgggcgctggagggcaaaggaat

SEQ ID NO: 758153 - DNA, 75 bp, synthetic construct
  source 1..75: mol_type = other DNA
aacgatgtcacgccgccaggcaaacggcatggcgaatatatggccactctcacacgaatgattcctgcaccgctg

SEQ ID NO: 758154 - DNA, 75 bp, synthetic construct
  source 1..75: mol_type = other DNA
ggtcaccaaaaaacagtttaactatgggcagcaacagagccaacagggcaaggctctcacagagtacgatcccta

SEQ ID NO: 758155 - DNA, 75 bp, synthetic construct
  source 1..75: mol_type = other DNA
aagtatgatctacctgaaaatggtgataatgaagaagaggtctggaagaaggaaccatttttaagttttataaaa

SEQ ID NO: 758156 - DNA, 75 bp, synthetic construct
  source 1..75: mol_type = other DNA
tgaaattacgtgtctgcgtggagtttctggcggcgtggtgccaacagcgtctgggtaaacccaatgaggggtatc

SEQ ID NO: 758157 - DNA, 75 bp, synthetic construct
  source 1..75: mol_type = other DNA
tcagtgcgttcaggcaaatgaatacagtgagaaaacccaatatctgggggtggttaatggtcaggtggtggggaa

SEQ ID NO: 758158 - DNA, 75 bp, synthetic construct
  source 1..75: mol_type = other DNA
tctttatcgatttggataaaagcactgatgaaagaagttttgtggcaaagtttgatcttaatgctgactttcttg

SEQ ID NO: 758159 - DNA, 75 bp, synthetic construct
  source 1..75: mol_type = other DNA
cctgaagaaaaaccaatgcctaaccctcttaaaatgtacgcggtcgatgctgttgccgctattgcagaggtgaga

SEQ ID NO: 758160 - DNA, 75 bp, synthetic construct
  source 1..75: mol_type = other DNA
gcactggcctcgctggaagcaaaaccaataggtgctttccacattgcagaacagcaggtcgatggcacaagtgac

SEQ ID NO: 758161 - DNA, 75 bp, synthetic construct
  source 1..75: mol_type = other DNA
cagacagcagggtgaggatgtggtgataaccgttccggaggcacagaagctggttgagttaagaacggatgcacc

SEQ ID NO: 758162 - DNA, 75 bp, synthetic construct
  source 1..75: mol_type = other DNA
agagctgataatccggcatgcagaaagccgcccggcttccggcggactggcaaacatcacggtgaaacagactct

SEQ ID NO: 758163 - DNA, 75 bp, synthetic construct
  source 1..75: mol_type = other DNA
gccggataacggggaagcccgcatcaccctgaagacggccctgatggttgacggaaagagagtggcactcagcgc

SEQ ID NO: 758164 - DNA, 75 bp, synthetic construct
  source 1..75: mol_type = other DNA
agattgagttaagaacagatgcaccggcagagctggaggtgccggtcagctaccggggaaacctgcagatagcgc

SEQ ID NO: 758165 - DNA, 75 bp, synthetic construct
  source 1..75: mol_type = other DNA
ccgacagatccggtactgtaccggagtggagacacgacgcctcttcccgacagtctgaccatccgcaacgcagag

SEQ ID NO: 758166 - DNA, 75 bp, synthetic construct
  source 1..75: mol_type = other DNA
tggttgagttaagaacggatgtaccggcagagctggaggtgccggtcagttaccggggaaatctgcagatagcgc

SEQ ID NO: 758167 - DNA, 75 bp, synthetic construct
  source 1..75: mol_type = other DNA
catgttgatgctgttataaatatttactcaaatatatttatgccagccatgcttttagggaagccaatttttagc

SEQ ID NO: 758168 - DNA, 75 bp, synthetic construct
  source 1..75: mol_type = other DNA
cgtcattcgtcgcggttgtttccggtgcgcttatatctggcggtgtttaccgggttttacctggtgatttcgact

SEQ ID NO: 758169 - DNA, 75 bp, synthetic construct
  source 1..75: mol_type = other DNA
ttcagccatcggggatgcgttgattttccctacgctatcgtttatggcattcatgccggaaatatcggcgatgca

SEQ ID NO: 758170 - DNA, 75 bp, synthetic construct
  source 1..75: mol_type = other DNA
tacgacgccggaatggtggcgatcgcgtcattcgtcgcggttgtttccggtgcgcttatttctggcggcgtttac

SEQ ID NO: 758171 - DNA, 75 bp, synthetic construct
  source 1..75: mol_type = other DNA
gcggaaaacaaagagaaatatgcgaataaaatgtcttctttgaagcaggatttgcaggcattactcggtaaggaa

SEQ ID NO: 758172 - DNA, 75 bp, synthetic construct
  source 1..75: mol_type = other DNA
aacgattgtccacctgattgaagatgcggaaaacaaagagaaatatgcgaataaaatgtcttctttgaagcagga

SEQ ID NO: 758173 - DNA, 75 bp, synthetic construct
  source 1..75: mol_type = other DNA
tggcaacgtctggctggtcttgcgcagcgtcgcggtaaaacgctttctgaaacgattgttcagctgattgaagat

SEQ ID NO: 758174 - DNA, 75 bp, synthetic construct
  source 1..75: mol_type = other DNA
tttaactttaaaatcacaagtatatatgaaggagttctgtaaagattacgtttctttatttaaaggcaaatggga

SEQ ID NO: 758175 - DNA, 75 bp, synthetic construct
  source 1..75: mol_type = other DNA
ttttgctgaatgtaataatgaagtaaataaaaaaaataagcatttaattgaatatatcactagtatcaccgaaaa

SEQ ID NO: 758176 - DNA, 75 bp, synthetic construct
  source 1..75: mol_type = other DNA
aacagatttattctatctaatagaagaagatgtatataaaataacaaaattgaggagctttagttttgcgacaac

SEQ ID NO: 758177 - DNA, 75 bp, synthetic construct
  source 1..75: mol_type = other DNA
aaaaccaatcagaattggccctcgctcaattgcatgggtagagcaggaaattattgattggttagaagaaagaaa

SEQ ID NO: 758178 - DNA, 75 bp, synthetic construct
  source 1..75: mol_type = other DNA
tgttactggctggtctggtttatctggtgcgtattggcgcgctggactggacgcccgcgcgttctcgccgcgagc

SEQ ID NO: 758179 - DNA, 75 bp, synthetic construct
  source 1..75: mol_type = other DNA
accaaccgatttatttcatctaatagaagaagatgtatataacattacaggattgaggagctttaatttttcacg

SEQ ID NO: 758180 - DNA, 75 bp, synthetic construct
  source 1..75: mol_type = other DNA
aagatgggtatattgtccaccagcgacgtgaatggcacatgtacgatccggaaacaggtaagctcgcaacgaagg

SEQ ID NO: 758181 - DNA, 75 bp, synthetic construct
  source 1..75: mol_type = other DNA
gcgtgaatggcgtatgtacgatccagaaacaggaaaactgactacaaaagccggaacactttggggtctgttgaa

SEQ ID NO: 758182 - DNA, 75 bp, synthetic construct
  source 1..75: mol_type = other DNA
cattgatggacgaatccaagctaaaatagataagcaaaacaagcctcttcctaacggcaatatggctacagctca

SEQ ID NO: 758183 - DNA, 75 bp, synthetic construct
  source 1..75: mol_type = other DNA
atcatcatgtactacgcgccacgtatcttcaaaatggcgggctttacgaccacagaacaacagatgattgcgact

SEQ ID NO: 758184 - DNA, 75 bp, synthetic construct
  source 1..75: mol_type = other DNA
tacaaaatgaagtgccctccaggatcgtataagctggaaaaaataagattagagaaagatactgattttcttgga

SEQ ID NO: 758185 - DNA, 75 bp, synthetic construct
  source 1..75: mol_type = other DNA
aactactaacccgcgcatgggacccgcaacatggcgagattttatttaatggtaacccaatctccagcctgagtg

SEQ ID NO: 758186 - DNA, 75 bp, synthetic construct
  source 1..75: mol_type = other DNA
acatattgcgattctcggtcgaacgggatgcggtaaatcaacactgttacaactgctgactcgcgcatgggaccc

SEQ ID NO: 758187 - DNA, 75 bp, synthetic construct
  source 1..75: mol_type = other DNA
tgatgttcagttcacttatcctgagcaatcacagcaagctcttaaagggatttcccttcaggcaaacgccggaga

SEQ ID NO: 758188 - DNA, 75 bp, synthetic construct
  source 1..75: mol_type = other DNA
gcgtgatatcagtggcgttgaagcagttaggacctgggttcaggaacaaatccgggatgatgaagcctttttgaa

SEQ ID NO: 758189 - DNA, 75 bp, synthetic construct
  source 1..75: mol_type = other DNA
tttagcgccacgctgcgtgataatctgttactcgcctcgcctggcagtagtgatgaggctctggcggagatcttg

SEQ ID NO: 758190 - DNA, 75 bp, synthetic construct
  source 1..75: mol_type = other DNA
gtcgcaggcctgtatagttttaactatatgctgcccgccgcaggtgtgcgtggcgcggcaatcacccgtaccgcc

SEQ ID NO: 758191 - DNA, 75 bp, synthetic construct
  source 1..75: mol_type = other DNA
cgcgacatttgctaaaagcgtagcgttcgacgatgcgctaattaaagcggctgagatgaaagagaagggtgattt

SEQ ID NO: 758192 - DNA, 75 bp, synthetic construct
  source 1..75: mol_type = other DNA
aaactggcatatcaactggcagataaactgcgtaatcaaaaaaacgccagtggtcgcgcaggcatggttcaggga

SEQ ID NO: 758193 - DNA, 75 bp, synthetic construct
  source 1..75: mol_type = other DNA
aaattcccctgccgcgcgatctttacggtcacgggcgcgacaactcggcagggctggatctcgctaacgaacacc

SEQ ID NO: 758194 - DNA, 75 bp, synthetic construct
  source 1..75: mol_type = other DNA
tctccctcgatctgctggaaaaactctgtttcgagcctgaactggcaggctggaacggcatcggttttgttattc

SEQ ID NO: 758195 - DNA, 75 bp, synthetic construct
  source 1..75: mol_type = other DNA
tgaaaatgctgcgcggcgcaatggctgagtgccgaatgggtaatccgggtcgcctgaccaccgatatcgggccgg

SEQ ID NO: 758196 - DNA, 75 bp, synthetic construct
  source 1..75: mol_type = other DNA
cctctgccctgctcaacagcgcactgcaaaaatggcaggcccagccaatgctggaacagccggttacgacaggtg

SEQ ID NO: 758197 - DNA, 75 bp, synthetic construct
  source 1..75: mol_type = other DNA
taattcgcgacaaaatcagcaacggtaactggcagtcacatattggtcgtagcccgtcgttgtttgttaatgccg

SEQ ID NO: 758198 - DNA, 75 bp, synthetic construct
  source 1..75: mol_type = other DNA
aaaagccattgcacattatgagaggctgggaattgatccacagagtaaaacgctggttttctctgacaatctgga

SEQ ID NO: 758199 - DNA, 75 bp, synthetic construct
  source 1..75: mol_type = other DNA
ttacgtgctctttatgacaagcataacgttgctgggatcacggcatcgcagacaaaccgtgaaggtggcgcgtca

SEQ ID NO: 758200 - DNA, 75 bp, synthetic construct
  source 1..75: mol_type = other DNA
cgggctattaccgtatgtacaagagcgcgccctcttcatctgcgattctggatatgcttaagcgtgcgaaacgcg

SEQ ID NO: 758201 - DNA, 75 bp, synthetic construct
  source 1..75: mol_type = other DNA
cctttgacagcgcaggccagcgttgttcggcactgcgtgtgctgtgtctgcaagatgaaattgccgactacacgt

SEQ ID NO: 758202 - DNA, 75 bp, synthetic construct
  source 1..75: mol_type = other DNA
aagacgcgacagttcagcctgataaaaagaagagaaaaaagacgatacaaataccgctggcaccattgatattta

SEQ ID NO: 758203 - DNA, 75 bp, synthetic construct
  source 1..75: mol_type = other DNA
tgtttctttgcgtgaaggtttcgacttattaacaccaatcggtaaagcaatgcttactatgatggctggtttagc

SEQ ID NO: 758204 - DNA, 75 bp, synthetic construct
  source 1..75: mol_type = other DNA
aactgctgacccgcgcatgggacccgcaacagggcgagattttgcttaacgatagccccatagccagcctgaatg

SEQ ID NO: 758205 - DNA, 75 bp, synthetic construct
  source 1..75: mol_type = other DNA
aaagaaaaccgctacgccatccgtgctcaggtttctgcttggatcgccagcgacgatgtacaagtggtgttgatt

SEQ ID NO: 758206 - DNA, 75 bp, synthetic construct
  source 1..75: mol_type = other DNA
actcggcgaaagcatccgctgcaagccagaccgctgcaaaagcaagtgaagacgcagccagagagtatgcaagcc

SEQ ID NO: 758207 - DNA, 75 bp, synthetic construct
  source 1..75: mol_type = other DNA
accatccttactggatgtgcaaaggctcatgggcttatgcaaataataaggtcattacagatacaggttgcggaa

SEQ ID NO: 758208 - DNA, 75 bp, synthetic construct
  source 1..75: mol_type = other DNA
aaaaaagtgctgccgctgcagagtcctcaaaaagcgcggcagctaccagtgccggtgccgcgaaaacgtcagaaa

SEQ ID NO: 758209 - DNA, 75 bp, synthetic construct
  source 1..75: mol_type = other DNA
gccacttctgcatccaccgcgaccacgaaagcgtcagaagctgccacctcagcccgggatgcggcggcctcaaaa

SEQ ID NO: 758210 - DNA, 75 bp, synthetic construct
  source 1..75: mol_type = other DNA
tggtgaacacgctggcctcagaaaatccggatgaagccgggcgttacagtatggacgttgagtacggtcagtaca

SEQ ID NO: 758211 - DNA, 75 bp, synthetic construct
  source 1..75: mol_type = other DNA
ttcagcagaatccgcggcaacgcgcgccgagacagcagcaaaacgggcagaggatattgcatccgccgtggcgct

SEQ ID NO: 758212 - DNA, 75 bp, synthetic construct
  source 1..75: mol_type = other DNA
gtctgcttcaaaagatgaggcgaccagacaagcgtcagcagcgaatggcagggccacgacagcaacgacgaaggc

SEQ ID NO: 758213 - DNA, 75 bp, synthetic construct
  source 1..75: mol_type = other DNA
gtctgcttcaaaagatgaggcgaccagacaagcgtcagcagcgaatggcagcgccacgaccgcaccgacgaaggc

SEQ ID NO: 758214 - DNA, 75 bp, synthetic construct
  source 1..75: mol_type = other DNA
ttcggcggaatccgcggcaacgcgcgccgagacagcagcaaaacgggcagaggatattgcatccgccgtggcgct

SEQ ID NO: 758215 - DNA, 75 bp, synthetic construct
  source 1..75: mol_type = other DNA
ttccgccgaatccgcggcaacgcgcgccgagacagcagcaaaacgggcagaggatattgcatccgccgtggcgct

SEQ ID NO: 758216 - DNA, 75 bp, synthetic construct
  source 1..75: mol_type = other DNA
ttctgctgaatccgcggcaacgcgcgccgagacagcagcaaaacgggcagaggatattgcatccgccgtggcgct

SEQ ID NO: 758217 - DNA, 75 bp, synthetic construct
  source 1..75: mol_type = other DNA
taactcataccaggtacaaggggcggttggtctgggcattggcacgatggcgaatacgaactctgctggcgcgca

SEQ ID NO: 758218 - DNA, 75 bp, synthetic construct
  source 1..75: mol_type = other DNA
ttctccttgtcgccatcagtcgcatcagatgcgtgtaaacaggcttatgatgagaataaaggtagaaacaacata

SEQ ID NO: 758219 - DNA, 75 bp, synthetic construct
  source 1..75: mol_type = other DNA
atgaaccagcaacctcgccgtgcgctttcgcgttatgctctgacttttcagagaaatatcctttcagtaaactgt

SEQ ID NO: 758220 - DNA, 75 bp, synthetic construct
  source 1..75: mol_type = other DNA
agaccgtcagtctgctcagtgactgggctggagatcattctcatccggcactgaaatatatagaaacccgctggg

SEQ ID NO: 758221 - DNA, 75 bp, synthetic construct
  source 1..75: mol_type = other DNA
ccggactggcgcgctatcgtcagggcgaattgctcaaccgcgtggtggcggatgttgatacgctcgatcatcttt

SEQ ID NO: 758222 - DNA, 75 bp, synthetic construct
  source 1..75: mol_type = other DNA
cgtcgcgttggcctggagaagctgctcgaggatgcaggtctcaacagttggttaggtgaaggcggacgccagctc

SEQ ID NO: 758223 - DNA, 75 bp, synthetic construct
  source 1..75: mol_type = other DNA
cacttccccaaaagcgacaaacgatgatagcaaagtaactgaggcgatttctgctatttctggcattccgacaaa

SEQ ID NO: 758224 - DNA, 75 bp, synthetic construct
  source 1..75: mol_type = other DNA
agcagccaaaaaatcagaaaccaatgcgaaagcgaaaccaacgcaaagtccagccagacggcagcgaaaacaagc

SEQ ID NO: 758225 - DNA, 75 bp, synthetic construct
  source 1..75: mol_type = other DNA
ggtttctaatcgtcgcggtgaagaagacgatacctccggtcactatctgcgcgattcggcgcaggaagcgggcca

SEQ ID NO: 758226 - DNA, 75 bp, synthetic construct
  source 1..75: mol_type = other DNA
atgagaagtaccgtagttacctccggtcactatctgcgcgattcggcgcaagaagcgggccatcacgttgtcgat

SEQ ID NO: 758227 - DNA, 75 bp, synthetic construct
  source 1..75: mol_type = other DNA
ttactggtgcgggtattcgatgccttcgccgatgtctttgccggacgagtggtggacagtgtgaatacccgatgg

SEQ ID NO: 758228 - DNA, 75 bp, synthetic construct
  source 1..75: mol_type = other DNA
gccggaatggtgctttacttcatctgcttcaaatcgacgcgtgagaatgtggtacgtatcgttgcgcagccgtaa

SEQ ID NO: 758229 - DNA, 75 bp, synthetic construct
  source 1..75: mol_type = other DNA
agcagccgaaagcgagagtgctgcagctggttctgcgacttcagcagctggatcagcaactgctgcggctaacag

SEQ ID NO: 758230 - DNA, 75 bp, synthetic construct
  source 1..75: mol_type = other DNA
aaatattattctccctggaggctaccgacaggaaaatgttctgccaggtattacccccacggaagaaatggatga

SEQ ID NO: 758231 - DNA, 75 bp, synthetic construct
  source 1..75: mol_type = other DNA
gcacgggaagcccgtaaagcgcaagccagagcgaaacaggcagaactgcagcaaactaacgacgcagcaaccgtt

SEQ ID NO: 758232 - DNA, 75 bp, synthetic construct
  source 1..75: mol_type = other DNA
gattatcaacgcggctgagtgcgagccgtacattaccgccgatgaccgtttgatgcaggattgcgcggctcaggt

SEQ ID NO: 758233 - DNA, 75 bp, synthetic construct
  source 1..75: mol_type = other DNA
ctgctgataactattatgcgtcaatttactccgttgaccagggggttaaaaagatcctgaatacacttaaggaaa

SEQ ID NO: 758234 - DNA, 75 bp, synthetic construct
  source 1..75: mol_type = other DNA
gatatcaccgccacggcaatggtttcccgccgtcctattcagggagacgaatatcagtcacggctgaaaggtggc

SEQ ID NO: 758235 - DNA, 75 bp, synthetic construct
  source 1..75: mol_type = other DNA
caattttcgttccgatggtgactcccgcattaattgtgggtgcggccttacaactttccgcagaaacgaccgcct

SEQ ID NO: 758236 - DNA, 75 bp, synthetic construct
  source 1..75: mol_type = other DNA
ttggtgaaggtggtcataccatgcgcagattaccagcctggatgaaccagcccctcgaggccagtggtgaatggc

SEQ ID NO: 758237 - DNA, 75 bp, synthetic construct
  source 1..75: mol_type = other DNA
gttcgtcatgcactgaccaacctcagagagggggactggcagataaatcgtttcgccatcactttacctttagcg

SEQ ID NO: 758238 - DNA, 75 bp, synthetic construct
  source 1..75: mol_type = other DNA
ccccgtacatctcaatacctgggaaggtatttatttcgatcacaaccctgactacatcatgcagatggctgagcg

SEQ ID NO: 758239 - DNA, 75 bp, synthetic construct
  source 1..75: mol_type = other DNA
aagcactattgggcgccagttagctcaacaactcaatatggaattctacgattccgatcaagagattgagaaacg

SEQ ID NO: 758240 - DNA, 75 bp, synthetic construct
  source 1..75: mol_type = other DNA
aagtcggattcgcgccataactaccatgaactgatttcgaagtttaagcaggaaataagagaatcgttgcaggag

SEQ ID NO: 758241 - DNA, 75 bp, synthetic construct
  source 1..75: mol_type = other DNA
aatgaaaccctgcacacaccgtggttgtatgcctgccactctgcggatggccttaatggaatgagtcagcagtac

SEQ ID NO: 758242 - DNA, 75 bp, synthetic construct
  source 1..75: mol_type = other DNA
gtcaagtcaaaaaccgatcagtgatatcaaccaagccaaatttgagaatataaaaaaatctttaactaacgtgaa

SEQ ID NO: 758243 - DNA, 75 bp, synthetic construct
  source 1..75: mol_type = other DNA
gttcggcggcgtcatcggcatcatctgcgtctgcttcaaaagatgaggcgaccagacaagcgtcagcagcgaagg

SEQ ID NO: 758244 - DNA, 75 bp, synthetic construct
  source 1..75: mol_type = other DNA
aattgaccgtgcaagcaaactggaacagccatttatgatttatctggcatacagtgcaccacacctgcctaacga

SEQ ID NO: 758245 - DNA, 75 bp, synthetic construct
  source 1..75: mol_type = other DNA
tggtaatcatagccactcactgtccggcacagcagcatctgcaggtgcacacgcgcatactgtcggtattggtgc

SEQ ID NO: 758246 - DNA, 75 bp, synthetic construct
  source 1..75: mol_type = other DNA
ccggacaggccgcgacgtcggctcaggaggctttttccagcgcaggaacggcatcagcaaaagcctctgaggcat

SEQ ID NO: 758247 - DNA, 75 bp, synthetic construct
  source 1..75: mol_type = other DNA
aggcgcatcagcagtcagccagtggtcacaaaatgggtcagtacataaggtagtgtctgcggccagtgtgaatac

SEQ ID NO: 758248 - DNA, 75 bp, synthetic construct
  source 1..75: mol_type = other DNA
gaataacaccggggcgcatacgcacagtgtgagcggtacagccgcaagtgccggaaaccatactcatagtgtcac

SEQ ID NO: 758249 - DNA, 75 bp, synthetic construct
  source 1..75: mol_type = other DNA
aggatgcgagcacgacgaaaaaggggatagtacagctcagtagtgcgactaacagcacttccgagtcactggcgg

SEQ ID NO: 758250 - DNA, 75 bp, synthetic construct
  source 1..75: mol_type = other DNA
tagcgctggaaatcattcacacaatatacctgttggtcacactggcgcggggaatggtgtatcagccggttataa

SEQ ID NO: 758251 - DNA, 75 bp, synthetic construct
  source 1..75: mol_type = other DNA
ctgaaacggcagcgggacagagcgcctcagctgcggcagactctgagacaacagctgcatcatcggcccgtgagg

SEQ ID NO: 758252 - DNA, 75 bp, synthetic construct
  source 1..75: mol_type = other DNA
caccctatggcggggggatatgccggatgcggcgacacaggtgcaggggggggtcagcccggatcagtcgcaggc

SEQ ID NO: 758253 - DNA, 75 bp, synthetic construct
  source 1..75: mol_type = other DNA
gtgatgtttaccggttcaaccgaagtcgctacgttactgcaacgcaatatcgccagccgcctggacgctcagggt

SEQ ID NO: 758254 - DNA, 75 bp, synthetic construct
  source 1..75: mol_type = other DNA
cgcttccggctatggtctgacgcttggtgtccatacacgtattgatgaaaccatcgcccaggtcactggctcggc

SEQ ID NO: 758255 - DNA, 75 bp, synthetic construct
  source 1..75: mol_type = other DNA
cttctgccctgctcaatagtgcactgcaaaaatggcaggccttgccaatgctggaacaaccggtagcggcaggtg

SEQ ID NO: 758256 - DNA, 75 bp, synthetic construct
  source 1..75: mol_type = other DNA
gctggcggcaggtaacagcgtactggcaaaaccggcggagcaaacgccgctgattgcggcgcaagggatcgccat

SEQ ID NO: 758257 - DNA, 75 bp, synthetic construct
  source 1..75: mol_type = other DNA
actggcaggctggaacggcatcggttttgttattcaggcttatcaaaaacgctgcccgctggtgatcgattacct

SEQ ID NO: 758258 - DNA, 75 bp, synthetic construct
  source 1..75: mol_type = other DNA
ccggagctacctgcgctgctttctggcgcggccaatgagagcgatgaagcaccgaatccggcagatgaaccacac

SEQ ID NO: 758259 - DNA, 75 bp, synthetic construct
  source 1..75: mol_type = other DNA
gtgcgtgaagccacaccgcgtgaagtggaaaaggcgctggaaagcgcggttaataacgcgccaatctggtttgcg

SEQ ID NO: 758260 - DNA, 75 bp, synthetic construct
  source 1..75: mol_type = other DNA
tcgtcacgggtgaaaccattgcagaagcgttagccaatgcccgcaagctggaagagaaaggtttccgttactctt

SEQ ID NO: 758261 - DNA, 75 bp, synthetic construct
  source 1..75: mol_type = other DNA
tggcggtgccgaatctaatctacccgcagttcgcgacgcacaacgcccatacgctggcggcgatttatcaactgg

SEQ ID NO: 758262 - DNA, 75 bp, synthetic construct
  source 1..75: mol_type = other DNA
tggtcgcgcaggtatggttcaggggttattgcaggagttttcgctgtcatcgcaggaaggcgtggcgctgatgtg

SEQ ID NO: 758263 - DNA, 75 bp, synthetic construct
  source 1..75: mol_type = other DNA
ccgtctgctggcgaatcgcccggaaagtgcgctggcagtgacgctcgcgcgtcaggatgcagagtatccggtcga

SEQ ID NO: 758264 - DNA, 75 bp, synthetic construct
  source 1..75: mol_type = other DNA
cgtcctattccgctcatcgctgaaaccggcggtatgaacgcgatgattgtcgattcctccgctctgactgaacaa

SEQ ID NO: 758265 - DNA, 75 bp, synthetic construct
  source 1..75: mol_type = other DNA
agctggacgacgcaacgcgtgagcgtattaagtcagccgcgatacgaatcgatcgcacaccgcattggttaatta

SEQ ID NO: 758266 - DNA, 75 bp, synthetic construct
  source 1..75: mol_type = other DNA
cctaaatatgaacgcatcatagccgatgctattggtgtggaacctgcggagatctggccaagccggtatgccagt

SEQ ID NO: 758267 - DNA, 75 bp, synthetic construct
  source 1..75: mol_type = other DNA
cttacgttgctgatgattttcaaatagtagtgcaaacagatcgaaattatatagaagaagcgttctttcttcgca

SEQ ID NO: 758268 - DNA, 75 bp, synthetic construct
  source 1..75: mol_type = other DNA
ctgagtggtcatgtttttcagtgttacttgcctgagcagtcgagtgatattgataagctttataaagcgcaacaa

SEQ ID NO: 758269 - DNA, 75 bp, synthetic construct
  source 1..75: mol_type = other DNA
gaacgtgcggaagaagtcatggcttttcacggacgctggactcgtgaatttcagccgcacagggtacgtctcact

SEQ ID NO: 758270 - DNA, 75 bp, synthetic construct
  source 1..75: mol_type = other DNA
gctcggcgactggtatcttgatgagcaaaaatatccgcacggtctgaccccggttatcaaccacgtaaaatcgct

SEQ ID NO: 758271 - DNA, 75 bp, synthetic construct
  source 1..75: mol_type = other DNA
gggatctatttcgaccacgacccacagtacatcatgcgcatggcggatgaggcggcggaactgggcgttgagcgc

SEQ ID NO: 758272 - DNA, 75 bp, synthetic construct
  source 1..75: mol_type = other DNA
ctgcgtcacattagtgctgctgacttttgcgatgagttgctaccggttgagccatcgccgcctgatcgccagcta

SEQ ID NO: 758273 - DNA, 75 bp, synthetic construct
  source 1..75: mol_type = other DNA
tgcaggttatctaccatttatgtttttcaacaaggttgtcacacagcttaaatctgctgtcagcgcaaatatggg

SEQ ID NO: 758274 - DNA, 75 bp, synthetic construct
  source 1..75: mol_type = other DNA
actggcggtgacgctcgcacgtcaggatgcagaatatccggttgatgcccaactgaaagcagcattaattcagcc

SEQ ID NO: 758275 - DNA, 75 bp, synthetic construct
  source 1..75: mol_type = other DNA
aacagatgaagcatactattctgttataaaaccttgcgctgaaaaactggctaaagatcctgataacatacaaat

SEQ ID NO: 758276 - DNA, 75 bp, synthetic construct
  source 1..75: mol_type = other DNA
aacataatgcgaaaggcttaatgcaaatgcaacgaaatgcagtgaggcaggtttttaaatatcgacaacaaaaaa

SEQ ID NO: 758277 - DNA, 75 bp, synthetic construct
  source 1..75: mol_type = other DNA
cttcgccgcatcgtgatcaaggagcatcgcgaactgctcaacgaactactggagcaacctggcatgcctgccagc

SEQ ID NO: 758278 - DNA, 75 bp, synthetic construct
  source 1..75: mol_type = other DNA
gctgctggtgcagcaggcgcagcaacgggagagctggcagccagagcgattgccggaatgctgtatccgggagtg

SEQ ID NO: 758279 - DNA, 75 bp, synthetic construct
  source 1..75: mol_type = other DNA
atctggacgcagaaacaaaccgcattaacaacgaaaataagcgccttgaccggatgctatcagcagaaactaacg

SEQ ID NO: 758280 - DNA, 75 bp, synthetic construct
  source 1..75: mol_type = other DNA
ccgagggcaaaaagctcgaccaggctgttggttcgctgcagaactcgcagagcgaggagtcctttcgtcgcaacg

SEQ ID NO: 758281 - DNA, 75 bp, synthetic construct
  source 1..75: mol_type = other DNA
ttggtccgattgattacttcaatgttcaggacaagatggctggtcgtgagattgatcgcggaaaacttgcagaga

SEQ ID NO: 758282 - DNA, 75 bp, synthetic construct
  source 1..75: mol_type = other DNA
gagaagctggagtttattgagaagatgaaacatgcctggcaagcggcgaaatcttatcggcgatctgctaaatag

SEQ ID NO: 758283 - DNA, 75 bp, synthetic construct
  source 1..75: mol_type = other DNA
aggaagatttaattctcttttaatggacgataatatcatcacaaatcttgatttctctaatttgaatatcgattt

SEQ ID NO: 758284 - DNA, 75 bp, synthetic construct
  source 1..75: mol_type = other DNA
attaaaggtatcgtgccactaatcattctttttttctttgtggtttcgctggcttatggcatcgctacccgcaca

SEQ ID NO: 758285 - DNA, 75 bp, synthetic construct
  source 1..75: mol_type = other DNA
ttccctgaagagtttgaggaagtccgtaaagggatggggtatgtcgatgacgcccagcgggatgattttggcaat

SEQ ID NO: 758286 - DNA, 75 bp, synthetic construct
  source 1..75: mol_type = other DNA
tggttcgcgttcctgctggctctattgccgctccggctacatcggcagcaagcgcgcagaattacgcaatgaaga

SEQ ID NO: 758287 - DNA, 75 bp, synthetic construct
  source 1..75: mol_type = other DNA
gcaagctcaattgcagcacctgctacatcatcaaccaatgcgacaaactacgccatgaagaaggacattgatgca

SEQ ID NO: 758288 - DNA, 75 bp, synthetic construct
  source 1..75: mol_type = other DNA
cacttgggccagaaaaggcgtttgctgttcaggacaagatagctggtcgtgagattgaccgaggcagactggcag

SEQ ID NO: 758289 - DNA, 75 bp, synthetic construct
  source 1..75: mol_type = other DNA
ccagaatccagagcagctatcacacatgctgactactatgtctctcggtgcacttgggccagaaaaggcgtttgc

SEQ ID NO: 758290 - DNA, 75 bp, synthetic construct
  source 1..75: mol_type = other DNA
ccgtgcggcatcattagctgcgtggggaatgatggctttggtgatattaatatacatcgtctggctgctgacggt

SEQ ID NO: 758291 - DNA, 75 bp, synthetic construct
  source 1..75: mol_type = other DNA
gtttgcgtcactgaatgcagctgccgatgattccgtttttactgtcatggacgatcctgccagcgctaaaaaacc

SEQ ID NO: 758292 - DNA, 75 bp, synthetic construct
  source 1..75: mol_type = other DNA
ctcacatatttatgctgactttgatggaagccaggagaatatttccgggcttgtcgtatctggtgatgataatac

SEQ ID NO: 758293 - DNA, 75 bp, synthetic construct
  source 1..75: mol_type = other DNA
cctgtggaacagtctgaactgcctatggctatttctgcgctctggtcggtttatcgtgatgtgggggtgtactga

SEQ ID NO: 758294 - DNA, 75 bp, synthetic construct
  source 1..75: mol_type = other DNA
tgtggcaacggctgttggtgtggcgatggcggttctcataacacctcaaccaccacgtccactacacgctaatac

SEQ ID NO: 758295 - DNA, 75 bp, synthetic construct
  source 1..75: mol_type = other DNA
aaagccatcgtcaacaacgatggcgacaatgctatcagcaacggcggcaccggcacgcaaattaacggcgatgaa

SEQ ID NO: 758296 - DNA, 75 bp, synthetic construct
  source 1..75: mol_type = other DNA
caccgtgaacaataacggtaaaaccaccgttgatggtcagggctcgaccggcacggaaatcgcgggtaataacgc

SEQ ID NO: 758297 - DNA, 75 bp, synthetic construct
  source 1..75: mol_type = other DNA
ttttgccgctattactggtgaggattcattcggaagcaacactggcaatctcacgctttctcagtacctcgatgg

SEQ ID NO: 758298 - DNA, 75 bp, synthetic construct
  source 1..75: mol_type = other DNA
ataccactatcggaagagcgtctgggcaaaataacacttactttgatgaaatcgccttgattataaaagaaaact

SEQ ID NO: 758299 - DNA, 75 bp, synthetic construct
  source 1..75: mol_type = other DNA
ccgcagagataatgttaaatcgaagcaaaaagctaatgaaactcacttcgaggtcggccggaaagttaggcaaac

SEQ ID NO: 758300 - DNA, 75 bp, synthetic construct
  source 1..75: mol_type = other DNA
gcttgctgacgatgaagcatttaagcaacttcgtgaagacgaaaagcgtctgtttctgagaaatgagttgaaaga

SEQ ID NO: 758301 - DNA, 75 bp, synthetic construct
  source 1..75: mol_type = other DNA
accactggtggcgtggctgctggcgctgtcggcacggcgacggttgtcggtgtggcaacggctgttggtgtggcg

SEQ ID NO: 758302 - DNA, 75 bp, synthetic construct
  source 1..75: mol_type = other DNA
tgtggcaacggctgttggtgtggcaacgttggcagtagttgcagcaaatgacagtggcgatggcggttctcataa

SEQ ID NO: 758303 - DNA, 75 bp, synthetic construct
  source 1..75: mol_type = other DNA
tggcatgagaacaggcatggtttgtttcatatgaaaccaggaatagctgacacgaagacaattaacaaattagaa

SEQ ID NO: 758304 - DNA, 75 bp, synthetic construct
  source 1..75: mol_type = other DNA
actctggcggtctcctggctgggttaggaactaacaatcagaacgcgcctcgcgccagtgatgctgataccgcac

SEQ ID NO: 758305 - DNA, 75 bp, synthetic construct
  source 1..75: mol_type = other DNA
tacaaaagtcactacttttgagtcattcaaaagcatttcaagcaaagacttcatcaaaatatgtaatcatgaaaa

SEQ ID NO: 758306 - DNA, 75 bp, synthetic construct
  source 1..75: mol_type = other DNA
tttataaaaaaattaacggacatgaactcaacccaagtaaaatctgcattgttgccgttgacggtaagggtagtt

SEQ ID NO: 758307 - DNA, 75 bp, synthetic construct
  source 1..75: mol_type = other DNA
aaatagactcgggtgtaaataaaaaagtaaaccaattttttcctgacgtaagtgtaaagttacactttcccacac

SEQ ID NO: 758308 - DNA, 75 bp, synthetic construct
  source 1..75: mol_type = other DNA
ccggagacagcccttttgcagcgaatgcgctgggcaaacttgctgcacaggaaatgctggcggcatacgtgggtt

SEQ ID NO: 758309 - DNA, 75 bp, synthetic construct
  source 1..75: mol_type = other DNA
cttagccaatataccagtcccgtctctgatcttgatggcgtggactatccaaaaccgtatcgcggtaaacataaa

SEQ ID NO: 758310 - DNA, 75 bp, synthetic construct
  source 1..75: mol_type = other DNA
ttttggcaaataattctctccgccttaactactggaggctttctagcaacttttttcggcgcgggtgaagtaggc

SEQ ID NO: 758311 - DNA, 75 bp, synthetic construct
  source 1..75: mol_type = other DNA
atggcgacatggcaacttggcgggctgcctagcatggcaccgcaaaatgataatgctcctcgttcttccgttcct

SEQ ID NO: 758312 - DNA, 75 bp, synthetic construct
  source 1..75: mol_type = other DNA
gttttctctcggtcatgagaagtatttcgatatcaaagatcaaatggaaggtcgggatattgagcgtggcaagtt

SEQ ID NO: 758313 - DNA, 75 bp, synthetic construct
  source 1..75: mol_type = other DNA
gattgcggcagcccgagatatgggggcatctggcatcaacaccgaagcagaggccaataggtattttcagggtat

SEQ ID NO: 758314 - DNA, 75 bp, synthetic construct
  source 1..75: mol_type = other DNA
gcgaggcgtcggtttagcacttgtcaaacaacaggtagaaaatctcggcggcagcatcgccgtggaatcggaacc

SEQ ID NO: 758315 - DNA, 75 bp, synthetic construct
  source 1..75: mol_type = other DNA
gtgccatttcaaccttcagggacaaaactgaagtacgtaaactgatgcagcgactcgacggtctggtcaactatg

SEQ ID NO: 758316 - DNA, 75 bp, synthetic construct
  source 1..75: mol_type = other DNA
tatggcactgttttctctcggtcatgagaagtatttcgatatcaaagatcaaatggaaggtcgggatattgagcg

SEQ ID NO: 758317 - DNA, 75 bp, synthetic construct
  source 1..75: mol_type = other DNA
tcccagacgccgcagacaaacaaacgccagagattggctatatgccgggtcatctcacctggtacttcggcgaag

SEQ ID NO: 758318 - DNA, 75 bp, synthetic construct
  source 1..75: mol_type = other DNA
ctcaacgccctgcgcgcccgcggcctgacccgccacggcctgctggcctttcacagccgctacaagctgcagctg

SEQ ID NO: 758319 - DNA, 75 bp, synthetic construct
  source 1..75: mol_type = other DNA
tacgacaaattgctgaaaatgggaataagaaatataaatcaaattttacttttgatgctttcatgaaaaatgcag

SEQ ID NO: 758320 - DNA, 75 bp, synthetic construct
  source 1..75: mol_type = other DNA
ttatatctggttgctggcctggcaaaggtaagggttatgaaattgcttgtaacgcaaccttaaatttttatagta

SEQ ID NO: 758321 - DNA, 75 bp, synthetic construct
  source 1..75: mol_type = other DNA
atataacgttaatgttggtaaatctcagcggcagcaatctcaacctgcacaggtatcacagccagcagccagcag

SEQ ID NO: 758322 - DNA, 75 bp, synthetic construct
  source 1..75: mol_type = other DNA
atgaggcaaataagatttgagatagtaaatgacgccgtaaaagaaaacgctatcaggcagataagggagatacag

SEQ ID NO: 758323 - DNA, 75 bp, synthetic construct
  source 1..75: mol_type = other DNA
cttccagttccgcgtcctgctctacgtcttgttcgctcggcgcaaggaaatatacggatgtgtttcagccacgac

SEQ ID NO: 758324 - DNA, 75 bp, synthetic construct
  source 1..75: mol_type = other DNA
tgccgcacaaagatgaaaaagtgatgccattctttgagcaacataaatctttgttccgcaatccgaagaaattag

SEQ ID NO: 758325 - DNA, 75 bp, synthetic construct
  source 1..75: mol_type = other DNA
cagttaaagctttcctttgagagagaaggtaaaacaacctatgtcctgctttccagagtaaacaatatcacgttc

SEQ ID NO: 758326 - DNA, 75 bp, synthetic construct
  source 1..75: mol_type = other DNA
tccttccggacccttaagccagtttcggggacatgtttcaaaaaaaacagaaaacattgcgagaattgctgcgtt

SEQ ID NO: 758327 - DNA, 75 bp, synthetic construct
  source 1..75: mol_type = other DNA
cccttaagccgtttcgggacatgttcaaaaaacagaaaacattgcaagaattgcagcgttatttcagtatttcag

SEQ ID NO: 758328 - DNA, 75 bp, synthetic construct
  source 1..75: mol_type = other DNA
gagaacgaaaaaccgcagtggacaaattattaatgaagcccctgtaccagcaggagatgcagttatattccagat

SEQ ID NO: 758329 - DNA, 75 bp, synthetic construct
  source 1..75: mol_type = other DNA
gaagggaaaatctctgccgatatcatgacgtctgctgtcgtaataagttcgtggtacacagatgaatataaaaaa

SEQ ID NO: 758330 - DNA, 75 bp, synthetic construct
  source 1..75: mol_type = other DNA
atgggcgccattcaccagatatataaaccggaaatgttctataactggataggtgatggtaaacgatgtgtagca

SEQ ID NO: 758331 - DNA, 75 bp, synthetic construct
  source 1..75: mol_type = other DNA
cgcactgctggtaagcagcgaccgcaaaaaattcgtatccgttatgttattcaactgcttgttatcgaagtgtta

SEQ ID NO: 758332 - DNA, 75 bp, synthetic construct
  source 1..75: mol_type = other DNA
gcgtcgtggtaaagccacagccaatgccgcatttggcaacgctgccagtgtgctggtcggtgattttatttatac

SEQ ID NO: 758333 - DNA, 75 bp, synthetic construct
  source 1..75: mol_type = other DNA
gttctggctgctggttcgcaggctggtacggtacgtgtaactgcaaaagttcagggaaaaacctttactctgaat

SEQ ID NO: 758334 - DNA, 75 bp, synthetic construct
  source 1..75: mol_type = other DNA
tccgatagtattaagcctgaaagatagtaacggtaaggcattaaccggactggctgatgacattgaaatgtcagt

SEQ ID NO: 758335 - DNA, 75 bp, synthetic construct
  source 1..75: mol_type = other DNA
cggtggccatcgatacgggatcggtgggttgaaatgtatcgcaacagggaaatcattcccggggaaagtgctgca

SEQ ID NO: 758336 - DNA, 75 bp, synthetic construct
  source 1..75: mol_type = other DNA
tgcggccacgcccgttcagcgtaaggtctggcaggaaaaaatgagggcgcgtgaagccagcctgaaagcaagggg

SEQ ID NO: 758337 - DNA, 75 bp, synthetic construct
  source 1..75: mol_type = other DNA
tgacaacatggctgaggtgctgtctttcgagctggacagccttcggggagcctgtgaccgcacggccagaacata

SEQ ID NO: 758338 - DNA, 75 bp, synthetic construct
  source 1..75: mol_type = other DNA
aagttcgctgaatctggatgcgtacaactggaaagaggatggcatcatcagcgataaaggcgtgatgctgaactt

SEQ ID NO: 758339 - DNA, 75 bp, synthetic construct
  source 1..75: mol_type = other DNA
gttgaagctaaattccccggcgttgatcgtaaaaaccgcgcaatcagcctgtctgttcgtgcgaaagacgaagct

SEQ ID NO: 758340 - DNA, 75 bp, synthetic construct
  source 1..75: mol_type = other DNA
agctggaaatccaggtaggtgacgaagttgacgttgctctggacgcagtagaagacggcttcggggaaactctgc

SEQ ID NO: 758341 - DNA, 75 bp, synthetic construct
  source 1..75: mol_type = other DNA
gtaaggtttatatcatttatgataacccttgctttcttttcttcaaaaatatatataccaagaagaaaacgtaca

SEQ ID NO: 758342 - DNA, 75 bp, synthetic construct
  source 1..75: mol_type = other DNA
gtggtggtcgccgatgggcgcatcgcctggcagggtaagaccgatgagctgttgagcggtaaggcgagtgcttcg

SEQ ID NO: 758343 - DNA, 75 bp, synthetic construct
  source 1..75: mol_type = other DNA
tgatccccattgagcgtaatggtgaaatcctcggctatatctgggccaatgaattaaccgaagatattcgccgcc

SEQ ID NO: 758344 - DNA, 75 bp, synthetic construct
  source 1..75: mol_type = other DNA
gtcgcgaagtcatgcgtacaaatacccctttggtttattcaggcaggcaggtgcgcggcgatattttgaattcaa

SEQ ID NO: 758345 - DNA, 75 bp, synthetic construct
  source 1..75: mol_type = other DNA
aaatacaacaatgacaagtttaaaataacaatagataaaatctctgatggaaataataaatatgaaatacttgca

SEQ ID NO: 758346 - DNA, 75 bp, synthetic construct
  source 1..75: mol_type = other DNA
gggcgcgatgtattccaccattggtcatcgtatttggggcggattacgtaagcatacaacggtggtatcgcaacc

SEQ ID NO: 758347 - DNA, 75 bp, synthetic construct
  source 1..75: mol_type = other DNA
ctgaaaatgagattaacaccatggctgaaaagctcggtgatgaatatcaccaaaaattcatgatgacgcttaacg

SEQ ID NO: 758348 - DNA, 75 bp, synthetic construct
  source 1..75: mol_type = other DNA
acacgcatggtgaaatgataggtgctttggtgattttctctgatttaactgcccgcaaagaaacccaacgccgca

SEQ ID NO: 758349 - DNA, 75 bp, synthetic construct
  source 1..75: mol_type = other DNA
aggcgcttacagctctgtgcataacattaatgcggataaagcggcgattctgcctgcggcaatttcttttgagca

SEQ ID NO: 758350 - DNA, 75 bp, synthetic construct
  source 1..75: mol_type = other DNA
aaatatccgctgaaggatgcgcggcgagcgcatgagattctggaaagccgggcgacgcagggttccagcttactg

SEQ ID NO: 758351 - DNA, 75 bp, synthetic construct
  source 1..75: mol_type = other DNA
gtggcaggttattaactatcgtgaagagaatctggtcgagcgattgaaagagatcaccgctggtaagaaagtgcg

SEQ ID NO: 758352 - DNA, 75 bp, synthetic construct
  source 1..75: mol_type = other DNA
ttgctatatcaacagtagcgtacaacaaactgcaacgtagtgacgcctggcgctgggctcagcaaacacgattcg

SEQ ID NO: 758353 - DNA, 75 bp, synthetic construct
  source 1..75: mol_type = other DNA
ctgaaaggcttaacggtttattatctgctgcgcaaaacctatgaaattaaacccgatgagcagttcctgttccac

SEQ ID NO: 758354 - DNA, 75 bp, synthetic construct
  source 1..75: mol_type = other DNA
gcgtggtctatgcgcaggcggcattaggggcttacagttctgtgcataacgtcaatgctgataaagcagcgattc

SEQ ID NO: 758355 - DNA, 75 bp, synthetic construct
  source 1..75: mol_type = other DNA
gaacgattgatgtttctgcgaagtcactggtagtcagcgctaataatgccggcgatcagaatgccttcttctgga

SEQ ID NO: 758356 - DNA, 75 bp, synthetic construct
  source 1..75: mol_type = other DNA
aacaagggcggtatgacggttaccgatccggattccatcggtattctgatcgacggcgacaaagccatcgtcaac

SEQ ID NO: 758357 - DNA, 75 bp, synthetic construct
  source 1..75: mol_type = other DNA
ggctaatcaagcaaggtgacagcgttaacattgaaggtgtgaacggcaataacggtaacaatagcgaagtgcatt

SEQ ID NO: 758358 - DNA, 75 bp, synthetic construct
  source 1..75: mol_type = other DNA
tcagcaatgacggagacagcaccattactaacggcggtacgggcacgcaggttaacggcaacgatgctcaggtca

SEQ ID NO: 758359 - DNA, 75 bp, synthetic construct
  source 1..75: mol_type = other DNA
gaccgtcacccggaaattggcggcttgctgaccttcggtattccggctttcaagctggaaaaagaggtaatgacg

SEQ ID NO: 758360 - DNA, 75 bp, synthetic construct
  source 1..75: mol_type = other DNA
attgaagtgaacggcaacggcaaagtcagcggcgtaaaaatggtgcgcacagaaatgggcgaaccggatgccaaa

SEQ ID NO: 758361 - DNA, 75 bp, synthetic construct
  source 1..75: mol_type = other DNA
acgcgcgggaagaaggtgtagagttcaaattcaatatccagccactggggattgaagtgaacggtaacggcaaag

SEQ ID NO: 758362 - DNA, 75 bp, synthetic construct
  source 1..75: mol_type = other DNA
gcggcggtcacgggattgatatcaccggcgacagcgccacggtggacaacaagggcggtatgacggttaccgatc

SEQ ID NO: 758363 - DNA, 75 bp, synthetic construct
  source 1..75: mol_type = other DNA
gacggcgacagcacgatccttgatggcggcaccggaacccgcattacgggtgatgatgcgacggccaacaacagc

SEQ ID NO: 758364 - DNA, 75 bp, synthetic construct
  source 1..75: mol_type = other DNA
taacagtggtaccgccattaacgaacagaccggcgtgattaatattaatgctgacaatgggcaggcattttatag

SEQ ID NO: 758365 - DNA, 75 bp, synthetic construct
  source 1..75: mol_type = other DNA
ggtatccagatcgacggtgataaagccatcgtcaacaacgatggcgacaatgctatcagcaacggcggcaccggc

SEQ ID NO: 758366 - DNA, 75 bp, synthetic construct
  source 1..75: mol_type = other DNA
ttataatgctggaataggtatggccgcctacggtgccagcaataccgtgattaacgagggtatcatcaatctgga

SEQ ID NO: 758367 - DNA, 75 bp, synthetic construct
  source 1..75: mol_type = other DNA
ttgcggccagtaactcgtccagtgacggaagccagaacaaactgaatggttatgttgtaggaaccagttctgacg

SEQ ID NO: 758368 - DNA, 75 bp, synthetic construct
  source 1..75: mol_type = other DNA
acgcgcgggaagaaggcgtagagttcaaattcaacgtccagccactgggtattgaagtgaatggtaacggcaaag

SEQ ID NO: 758369 - DNA, 75 bp, synthetic construct
  source 1..75: mol_type = other DNA
catgctgctcggtgcagagttacagattaccgggatgtttggtaatacctttctacacagcttcgaaagtgttcc

SEQ ID NO: 758370 - DNA, 75 bp, synthetic construct
  source 1..75: mol_type = other DNA
gcagcattaataacatcaacgttatttggtatcgtggccgataaatggattagtgctaaatggatatatgccgct

SEQ ID NO: 758371 - DNA, 75 bp, synthetic construct
  source 1..75: mol_type = other DNA
atgcaagagcgcactttgcagcagtttttatgtcaacgacaagcgcgcggggaaatcccgacccactgtgacgtg

SEQ ID NO: 758372 - DNA, 75 bp, synthetic construct
  source 1..75: mol_type = other DNA
aggggacgattaacctcgaaaaaaatggtaattatgacgatagtctggcagcaaatactctggtagggatggctg

SEQ ID NO: 758373 - DNA, 75 bp, synthetic construct
  source 1..75: mol_type = other DNA
gcacagcaagctgcggtagcgacagctactgatttcgccatatttcagaatcatggttaccaggggctgtatggt

SEQ ID NO: 758374 - DNA, 75 bp, synthetic construct
  source 1..75: mol_type = other DNA
aaagagcattaaaagacatcgtactctcccgctatgcctgttacctggtagtacaaaacggcgaccctgcgaaac

SEQ ID NO: 758375 - DNA, 75 bp, synthetic construct
  source 1..75: mol_type = other DNA
aaactatcaacaaagcgacttcaatctacaaaattgagcacatcactgttggcaagccaggatctgaacaatacc

SEQ ID NO: 758376 - DNA, 75 bp, synthetic construct
  source 1..75: mol_type = other DNA
acgcagcgggaaaacgaccagaaccgacgcaaggcaagggggtatagctggaataagggctgtagcaaatgggag

SEQ ID NO: 758377 - DNA, 75 bp, synthetic construct
  source 1..75: mol_type = other DNA
cgaaatgggcgaaccggatgctaagggccgtcgccgcgcggagatcgtggctggttccgaacatatcgttccggc

SEQ ID NO: 758378 - DNA, 75 bp, synthetic construct
  source 1..75: mol_type = other DNA
gccaaagcgccaacgctatatgcggagttcaccaataaagagggattattccgcgccgtacttgatcgctatatc

SEQ ID NO: 758379 - DNA, 75 bp, synthetic construct
  source 1..75: mol_type = other DNA
gataaggccatgaagttgttctggcagcatggttatgaagccacttctcttgccgatctcgtcgaagcgaccgga

SEQ ID NO: 758380 - DNA, 75 bp, synthetic construct
  source 1..75: mol_type = other DNA
ccacgctttcggcgcgtatcgaaagggcaatcaaaacctggcaaggcgaactgcccaaaagtgagcagggctatg

SEQ ID NO: 758381 - DNA, 75 bp, synthetic construct
  source 1..75: mol_type = other DNA
taacgatgatgatgccacggcgaataacaacggcaaaaccaccgttgacggcaaggattccaccggtacagaaat

SEQ ID NO: 758382 - DNA, 75 bp, synthetic construct
  source 1..75: mol_type = other DNA
tactgaacagggcaaagcagatggaagcaacggtgaaggtctgattggcatcaaaggaaatggttctgcaacaac

SEQ ID NO: 758383 - DNA, 75 bp, synthetic construct
  source 1..75: mol_type = other DNA
ttcttcaatgagggaagctttagcggtgtaattagcggtgatagttataaacaaaacgttgtaaatacgggggag

SEQ ID NO: 758384 - DNA, 75 bp, synthetic construct
  source 1..75: mol_type = other DNA
gccaggtgacgcttgttgcagcttcggatggtgcaacggtcactctcaacagagactccgttattgacgttaccg

SEQ ID NO: 758385 - DNA, 75 bp, synthetic construct
  source 1..75: mol_type = other DNA
tctgcagggcggtattaacgtttcaggaacaggcgctgaggaggttgtaaccggtgtaaacgtttctggcatgaa

SEQ ID NO: 758386 - DNA, 75 bp, synthetic construct
  source 1..75: mol_type = other DNA
gtggatggcggtacggccgttattgtcaacggtgacaacgcgacgattaatacccagggtgacgccacatttact

SEQ ID NO: 758387 - DNA, 75 bp, synthetic construct
  source 1..75: mol_type = other DNA
ggttgttaacaacgaaggcgacagcaccatcagcaacggcggcaccggcacacagattaacggtgacgatgccac

SEQ ID NO: 758388 - DNA, 75 bp, synthetic construct
  source 1..75: mol_type = other DNA
gatattagtggtcatgttaatattacggtggaaggtgtattaatatatcaagatcacttggcgaatggcatggtc

SEQ ID NO: 758389 - DNA, 75 bp, synthetic construct
  source 1..75: mol_type = other DNA
cgggtaatgacagccatattagcgttgacggaagcattaatattaattccagtctcggcgataacgctgatgcac

SEQ ID NO: 758390 - DNA, 75 bp, synthetic construct
  source 1..75: mol_type = other DNA
gcaacggcggcaccggtacgcagattaacggtgatgacgccacggcgaacaacagcggcaaaaccaccgttgacg

SEQ ID NO: 758391 - DNA, 75 bp, synthetic construct
  source 1..75: mol_type = other DNA
gcaggaaaagacggctggagtgcgaacgccacgctggaaggcgggccgaacctgagctattcgaagagccagcgc

SEQ ID NO: 758392 - DNA, 75 bp, synthetic construct
  source 1..75: mol_type = other DNA
atggattgatgacaatgacaccaccagtttgcgtaccgatcttccgggggcaacggcaaaagattatggcgttgg

SEQ ID NO: 758393 - DNA, 75 bp, synthetic construct
  source 1..75: mol_type = other DNA
aacaataacgccgtatttaataacagcggtgagtttattcttaataatgctaaaaatgctattcacctgaatcag

SEQ ID NO: 758394 - DNA, 75 bp, synthetic construct
  source 1..75: mol_type = other DNA
cggtattccgcgaagcgcgtgtgttaagcaatcgctttagtatgctggcagacgccgcaccgaagatgggcaacg

SEQ ID NO: 758395 - DNA, 75 bp, synthetic construct
  source 1..75: mol_type = other DNA
gaacttggccgcaacgccacttttatcctaaaagatataaatacatttgatcattataatagtgacacatcacag

SEQ ID NO: 758396 - DNA, 75 bp, synthetic construct
  source 1..75: mol_type = other DNA
gtggcgacggatgcctcagtgaatgacgtggcaaaagcgctggatgcgggttacaccaacaacgagctgtatacc

SEQ ID NO: 758397 - DNA, 75 bp, synthetic construct
  source 1..75: mol_type = other DNA
atatcaccggcgacagcgcaacggtggacaacaaaggcggtatgaccgtcgcggatgcggattcgattggcattc

SEQ ID NO: 758398 - DNA, 75 bp, synthetic construct
  source 1..75: mol_type = other DNA
ctgccttcttcaatgagggaagctttagcggagtaattagcggtgatagttataaacaaaacgttgtaaatacgg

SEQ ID NO: 758399 - DNA, 75 bp, synthetic construct
  source 1..75: mol_type = other DNA
aagcaatcgctttagtatgctggcagacgccgcaccgaagatgggcaacgctctggcatttaacgtggtggcgaa

SEQ ID NO: 758400 - DNA, 75 bp, synthetic construct
  source 1..75: mol_type = other DNA
ttgaaatcacggaggatgcgaccttcagtatgaaggatattgacgtttacgcgcattatggcaataacccatcag

SEQ ID NO: 758401 - DNA, 75 bp, synthetic construct
  source 1..75: mol_type = other DNA
cgtgtatcgctatagcgttaagtggccaaagctggggggcggaaataacagaaggcgagagtgcagacagtatgc

SEQ ID NO: 758402 - DNA, 75 bp, synthetic construct
  source 1..75: mol_type = other DNA
cagcggcagccaggcaaccaccgtgttccacgaagcgcgtgtgttaagcaaccgcttcagtatgctggcggatgc

SEQ ID NO: 758403 - DNA, 75 bp, synthetic construct
  source 1..75: mol_type = other DNA
ggtggtgttgtcgatcttcttgataacggactttgggctgggcatttcaacaactggggtacagtgaatggggat

SEQ ID NO: 758404 - DNA, 75 bp, synthetic construct
  source 1..75: mol_type = other DNA
gcaaagagagctcgctgaatctggatgcctatcactggaaagaagacggcgtcagcgataaaggcgtgatgctca

SEQ ID NO: 758405 - DNA, 75 bp, synthetic construct
  source 1..75: mol_type = other DNA
gaaaacctttgagccgcgcgaagggctgaaagtcacgccgtatgcgggtgtcaaactgcgtcatacgctggaagg

SEQ ID NO: 758406 - DNA, 75 bp, synthetic construct
  source 1..75: mol_type = other DNA
gcgatacggaactggggtatccattgtgggtgaccgtgagcaggttgaattaagcggagatattaacgtattcca

SEQ ID NO: 758407 - DNA, 75 bp, synthetic construct
  source 1..75: mol_type = other DNA
attgcagtctgcccagcaaacgctgaacgaccagcaagagagcgatatcgacagcgacaaagtggcgcaaatgca

SEQ ID NO: 758408 - DNA, 75 bp, synthetic construct
  source 1..75: mol_type = other DNA
atgtttaacgtgataacccaccctgcagcactggatgaactgcttgaactaccagacgatctgcgaggtcgcatg

SEQ ID NO: 758409 - DNA, 75 bp, synthetic construct
  source 1..75: mol_type = other DNA
gattcttaggcgagaaaagcaagtcactcgaagagagactcaatgaccctgaaactcttgaagtgtttaaacgct

SEQ ID NO: 758410 - DNA, 75 bp, synthetic construct
  source 1..75: mol_type = other DNA
gttctggctacgttagtcaatgcagcagactacggcatcccacaaaaacgtgagcgtgtcttcattgttggcttc

SEQ ID NO: 758411 - DNA, 75 bp, synthetic construct
  source 1..75: mol_type = other DNA
tcctgggggcgagaacatgcttgttcgtgatgatggctcagtacgctattttactgtgcgagaaagtgccagaat

SEQ ID NO: 758412 - DNA, 75 bp, synthetic construct
  source 1..75: mol_type = other DNA
ggcatgattgatggcaaggtcaacatccgcgatcgcgaacaggttctggaacactatctcgaaaaaatcgctggc

SEQ ID NO: 758413 - DNA, 75 bp, synthetic construct
  source 1..75: mol_type = other DNA
ggcatataaaaaatactaatggcttattttattatgccttggattatattgatcatattgctgcagaaaaaataa

SEQ ID NO: 758414 - DNA, 75 bp, synthetic construct
  source 1..75: mol_type = other DNA
tgatgatgatttcgaagcgtttaaatcggcctgtgaattatcagatagtgttattagtactgtgcttcgggggtg

SEQ ID NO: 758415 - DNA, 75 bp, synthetic construct
  source 1..75: mol_type = other DNA
cagcgcttctgacaaatctccgcctgatagaacgctctcaagctgtattcattgatgacgcgcaacgtgccgtat

SEQ ID NO: 758416 - DNA, 75 bp, synthetic construct
  source 1..75: mol_type = other DNA
aatctatgtgggggtgaaagatgtaggaatgtcagtagctcgcgttaaccagcgtgtaagcctcggtggtcataa

SEQ ID NO: 758417 - DNA, 75 bp, synthetic construct
  source 1..75: mol_type = other DNA
ctacagcgcttgttaatggggttccatgcttcttaatcaactgtcctgtttttagagaatttttttcaaatagtg

SEQ ID NO: 758418 - DNA, 75 bp, synthetic construct
  source 1..75: mol_type = other DNA
agttattgtgcatgacatgtatccttttcatggctttaaagggaacctaaaaaaaatattgttctgtatttctgc

SEQ ID NO: 758419 - DNA, 75 bp, synthetic construct
  source 1..75: mol_type = other DNA
taaaaacattttgggaagacagcccagaatacattgacgctaaagagccaactttagcgtggtataggcatgcat

SEQ ID NO: 758420 - DNA, 75 bp, synthetic construct
  source 1..75: mol_type = other DNA
tataatgccggcgcgggaatgttcgctaatggtcatggcaatacggtcattaaccaggggactatcaacctggaa

SEQ ID NO: 758421 - DNA, 75 bp, synthetic construct
  source 1..75: mol_type = other DNA
gagtgagaaaccgtcggtggtgagggttcggtttggtgacggttatgaacagcgccgccccacaggactgaatcc

SEQ ID NO: 758422 - DNA, 75 bp, synthetic construct
  source 1..75: mol_type = other DNA
ttcacggtttataatgatacagacaacgaatatatcatcacagcacgggttatcaggtcagacggccggggagat

SEQ ID NO: 758423 - DNA, 75 bp, synthetic construct
  source 1..75: mol_type = other DNA
cgatatcggaaatggcgatgccagtgggttaaataccggaaccatcaatgttaataacgaaggtttcggtatgct

SEQ ID NO: 758424 - DNA, 75 bp, synthetic construct
  source 1..75: mol_type = other DNA
gtcagaagggcggcggcattaacagcctggcaagcgtcggcgtgaagtacagcagcaaagaaagttcgctgaatc

SEQ ID NO: 758425 - DNA, 75 bp, synthetic construct
  source 1..75: mol_type = other DNA
cgatggtttttggtatttgggtgatagtactgccaaaaataattcaggtatgcttgagattaataataactccgt

SEQ ID NO: 758426 - DNA, 75 bp, synthetic construct
  source 1..75: mol_type = other DNA
tcgatttcgctatctgccgcaacgtgattacctgcgccatccggctgcggcagttctcctgcttacccaactgat

SEQ ID NO: 758427 - DNA, 75 bp, synthetic construct
  source 1..75: mol_type = other DNA
tcagggatttttgggcggagaatcccgatgcagaacaaccgctaagggcatgggtggatgaggcagcaaaagctg

SEQ ID NO: 758428 - DNA, 75 bp, synthetic construct
  source 1..75: mol_type = other DNA
tgagggatttctggacggcgaatcccgatgcagagcagccgctaaaagcctgggtagatgaggccagtaaagctg

SEQ ID NO: 758429 - DNA, 75 bp, synthetic construct
  source 1..75: mol_type = other DNA
atttatcccccggcagcatcagaagcctgtcgggggtaagggtgtttctgtgcctcttgttctcgagcaacagat

SEQ ID NO: 758430 - DNA, 75 bp, synthetic construct
  source 1..75: mol_type = other DNA
aatcactcaatcctcttcacaaaaagagcaaaaaagtgatgaagagaccaaaaagaacgcaatgaagctaataaa

SEQ ID NO: 758431 - DNA, 75 bp, synthetic construct
  source 1..75: mol_type = other DNA
gttttttagcacaaaagatcggtatttcatgtattgtcgatataaaagatcgtgttagtattcgcgccacaacag

SEQ ID NO: 758432 - DNA, 75 bp, synthetic construct
  source 1..75: mol_type = other DNA
caaagtttggccgtaaaagccccaacgtagtttgcagtcttgaaagcgtcgataagctaattaccgacgcaggta

SEQ ID NO: 758433 - DNA, 75 bp, synthetic construct
  source 1..75: mol_type = other DNA
cgtggtttgtagtcttgaaagcgtcgataagctgattaccgacgcaggtatcgatccggcgtttcgtcaggcgct

SEQ ID NO: 758434 - DNA, 75 bp, synthetic construct
  source 1..75: mol_type = other DNA
tctggaacatgccggaaccgtcattcgtacttatggcggagtggtgttgaataaagaggaatccgatccgcctat

SEQ ID NO: 758435 - DNA, 75 bp, synthetic construct
  source 1..75: mol_type = other DNA
gctatttctaaagttatatataaatattttgaatgcccgatctacagtactttttgcagtaaatctttgttcaag

SEQ ID NO: 758436 - DNA, 75 bp, synthetic construct
  source 1..75: mol_type = other DNA
cgagagctggtagtttagaggtaacctcaaaagtaaaaggcttgaaaattattgcaataagtccagatttttatt

SEQ ID NO: 758437 - DNA, 75 bp, synthetic construct
  source 1..75: mol_type = other DNA
ggttgaagcactgctaaatacggtaattgaaaccacacaaatactcatctcaaatccggaggatgaggctacgcg

SEQ ID NO: 758438 - DNA, 75 bp, synthetic construct
  source 1..75: mol_type = other DNA
ttaatttttcacttagatatgacggtttggatgctgaaaagcatgagattgaactttcttcgctcggtgaatcgc

SEQ ID NO: 758439 - DNA, 75 bp, synthetic construct
  source 1..75: mol_type = other DNA
gatgcaacaacgacccgtaaagggatcgtacaactgagcagtgccaccaacagcacctctgaaacgctggccgcc

SEQ ID NO: 758440 - DNA, 75 bp, synthetic construct
  source 1..75: mol_type = other DNA
gggcacggcgttgaagtcagcggtagtaaggcgacaatcaataatcagggcaaactgaccgtaaaagatcaagac

SEQ ID NO: 758441 - DNA, 75 bp, synthetic construct
  source 1..75: mol_type = other DNA
gtgatccatctgcagtattcactataaccgcaaaggctactgttaaaaaaggccagataaacaggttatttattg

SEQ ID NO: 758442 - DNA, 75 bp, synthetic construct
  source 1..75: mol_type = other DNA
gcattatcaatctggagaaaaacggaaattacgatggcggcttgggcgcgaatatgctcgtggggatggcggtct

SEQ ID NO: 758443 - DNA, 75 bp, synthetic construct
  source 1..75: mol_type = other DNA
acggcgacaaggcggtcgtgaacaacgacggtgacaatgccatcagcaacggcggcaccggcacgcaggttaacg

SEQ ID NO: 758444 - DNA, 75 bp, synthetic construct
  source 1..75: mol_type = other DNA
cgatggtaaagagattacaggagtaactaaaaatatctcctcactgacctggtctgcgcagagcaataccttgtt

SEQ ID NO: 758445 - DNA, 75 bp, synthetic construct
  source 1..75: mol_type = other DNA
gatgtgtccggcgcagaatttaaccaacaaaaaaatacgcttctggtgctgtctcatgaatctcgcgcactctag

SEQ ID NO: 758446 - DNA, 75 bp, synthetic construct
  source 1..75: mol_type = other DNA
tatgccagtaccgattgaagaagcctccgcgtttggcgttatggcggttgatgagaacgataaaattatcgaatt

SEQ ID NO: 758447 - DNA, 75 bp, synthetic construct
  source 1..75: mol_type = other DNA
tgacagccgcaaagctggagcatgaaggccaccagcttactccggtagaggttcgggagatggagcgcatgatta

SEQ ID NO: 758448 - DNA, 75 bp, synthetic construct
  source 1..75: mol_type = other DNA
ctctcggtcatgagaagtatttcgatatcaaagatcaaatggaaggtcgggatattgagcgtggcaagttggcag

SEQ ID NO: 758449 - DNA, 75 bp, synthetic construct
  source 1..75: mol_type = other DNA
gcgcaccatgacggcatcaaaactgatagtcgcacgctaacgctggacaacgtgccgcgcgcgctcgccaacttc

SEQ ID NO: 758450 - DNA, 75 bp, synthetic construct
  source 1..75: mol_type = other DNA
gaaaccggaaacgctgaggtgatattggatcgtaatacttggttagggcatccaatttttcgtccgaataataac

SEQ ID NO: 758451 - DNA, 75 bp, synthetic construct
  source 1..75: mol_type = other DNA
tattgtcgccaataaagacactctggtgatgattggcgatttaagttctcacggcgtgttgttaggtattttagg

SEQ ID NO: 758452 - DNA, 75 bp, synthetic construct
  source 1..75: mol_type = other DNA
tctggcgcggaatttaacccacagaaaaatacgttgctggtgttgtcacatgagtcacgcgccctgcaggaagtg

SEQ ID NO: 758453 - DNA, 75 bp, synthetic construct
  source 1..75: mol_type = other DNA
tgagtcacgcgccctgcaggaagtgaccgtgacaggtgacgtgatcggcgaaatgtcgttaaccaaaggcaagta

SEQ ID NO: 758454 - DNA, 75 bp, synthetic construct
  source 1..75: mol_type = other DNA
cagagggccctgtaatagccaggcggtaccgcgaaatgatgaccagccccgcatatcgctggagcaaaccagcgc

SEQ ID NO: 758455 - DNA, 75 bp, synthetic construct
  source 1..75: mol_type = other DNA
tggtttgtattagctctgaagatatgattaacattgataatttaaaagataaaattgcaaacgattcatcagaga

SEQ ID NO: 758456 - DNA, 75 bp, synthetic construct
  source 1..75: mol_type = other DNA
ttaattttcccgccattgatttagctgataataaaaacatgatagcagttcaagttactacgaatgcaagtccag

SEQ ID NO: 758457 - DNA, 75 bp, synthetic construct
  source 1..75: mol_type = other DNA
gcttcaaaaggaacggcgaccaatgcaggcgaaataaatgtcgacggttttgtaccaacagttgatgaaaatggc

SEQ ID NO: 758458 - DNA, 75 bp, synthetic construct
  source 1..75: mol_type = other DNA
accggtaatattctggtggataaagaccaaaccgcagataacgcggtagattatttctacgacccatccgttggt

SEQ ID NO: 758459 - DNA, 75 bp, synthetic construct
  source 1..75: mol_type = other DNA
agcgaagatctcggcgcaggtacgcatgttgaggtgattgcgattgaagggataacgctggtcatccgtgcggtc

SEQ ID NO: 758460 - DNA, 75 bp, synthetic construct
  source 1..75: mol_type = other DNA
cggacaacagttaattggtcgtcgttttgtgctggaaacgccgctggtcaacgggcgtggccatatgcgcgttgg

SEQ ID NO: 758461 - DNA, 75 bp, synthetic construct
  source 1..75: mol_type = other DNA
agataaaccttctcggctcgccaatggacagtgcagactctcacatgggggctattccggaaaatctggatctgc

SEQ ID NO: 758462 - DNA, 75 bp, synthetic construct
  source 1..75: mol_type = other DNA
atcactgtttataatgccggtgctgctatggctgcttacggtgccagcaacatggttattaaccagggcattatc

SEQ ID NO: 758463 - DNA, 75 bp, synthetic construct
  source 1..75: mol_type = other DNA
actttaacctgagcatgaacagcggcagcgaaacggcggtggacagcatcgttgggctgaaactggactatgcag

SEQ ID NO: 758464 - DNA, 75 bp, synthetic construct
  source 1..75: mol_type = other DNA
atgtctttattgaaaaacatcaggctgagttcagcatcaaagcaatgtgccgcgtgctccgggtggcccgccagc

SEQ ID NO: 758465 - DNA, 75 bp, synthetic construct
  source 1..75: mol_type = other DNA
gatctggcagcaaatctctcaactggcaggttgcggaaatgtggtaatggcctgggcgaccaataccgagtcggg

SEQ ID NO: 758466 - DNA, 75 bp, synthetic construct
  source 1..75: mol_type = other DNA
aatgccgatttaatgtttgtcggtgctgatggtattgatgcggttaatggtattacgacctttaatgaaggttat

SEQ ID NO: 758467 - DNA, 75 bp, synthetic construct
  source 1..75: mol_type = other DNA
ggagcggcgtggcagcggtgattaccggcctggtggtctggctggtgccgctgggttgggagtggcaaggggtga

SEQ ID NO: 758468 - DNA, 75 bp, synthetic construct
  source 1..75: mol_type = other DNA
agcgaggatctcggcgctggtacgcatgttgaggtgattgcgattgaagggataacgttgatcatccgtgcggtc

SEQ ID NO: 758469 - DNA, 75 bp, synthetic construct
  source 1..75: mol_type = other DNA
atgaagtatgtctttattgaaaaacatcaggctgagttcagcatcaaagcaacgcgtcagcagttccgccaacac

SEQ ID NO: 758470 - DNA, 75 bp, synthetic construct
  source 1..75: mol_type = other DNA
aacagcaacggaaaatggatctggaataccgacacgggtgtaattagcggcgtgaatccaaatgcaccgttaatt

SEQ ID NO: 758471 - DNA, 75 bp, synthetic construct
  source 1..75: mol_type = other DNA
ttacggtaaagacggcattatctatatcaccaaaaccgtcggcgcaacggtggatgaccccgcgaacagcaacgt

SEQ ID NO: 758472 - DNA, 75 bp, synthetic construct
  source 1..75: mol_type = other DNA
ggggagtcacgtctgttcataatagcttatgtgcgccgtgtcttcatgaaaatctattctgtcggtactgaacct

SEQ ID NO: 758473 - DNA, 75 bp, synthetic construct
  source 1..75: mol_type = other DNA
aggctgaaatactggataaactcatcttatcagctgatcgtctgtttatgcagaaaacaaccggggattattccc

SEQ ID NO: 758474 - DNA, 75 bp, synthetic construct
  source 1..75: mol_type = other DNA
accatcgggggagaaaacaacactgtcgatctgcaaggcgacatcaatatcactgttgattcggatttcctggag

SEQ ID NO: 758475 - DNA, 75 bp, synthetic construct
  source 1..75: mol_type = other DNA
aatggcgttacaggcggttatagccagttctttggcctgaaacatcagatgtccttcgacaacggcatgaactgg

SEQ ID NO: 758476 - DNA, 75 bp, synthetic construct
  source 1..75: mol_type = other DNA
taaaaatgaactctatggcgtggtggtttcgggttcaaataacatcatcaacctcgatggtggtatcaatattac

SEQ ID NO: 758477 - DNA, 75 bp, synthetic construct
  source 1..75: mol_type = other DNA
cggtgacaatgccatcagcaacggcggcaccggcacgcaggttaacggcgacgaagccaccgtgaacaataacgg

SEQ ID NO: 758478 - DNA, 75 bp, synthetic construct
  source 1..75: mol_type = other DNA
accatcgagtattacgtcgaaacgaaagatggcgaagacaaacagcggattgcactggctcagttgagcagtgac

SEQ ID NO: 758479 - DNA, 75 bp, synthetic construct
  source 1..75: mol_type = other DNA
cgtttttcaatgagggcaacttcagcggttcggttgctggctctagctataagcaaaatgtggttaacacgggaa

SEQ ID NO: 758480 - DNA, 75 bp, synthetic construct
  source 1..75: mol_type = other DNA
gtccgtgcaggagtatatgtaggtgatgtatccgcaaaaattcgtgaaatgatctgggaacaaatatccggactg

SEQ ID NO: 758481 - DNA, 75 bp, synthetic construct
  source 1..75: mol_type = other DNA
gtaatgcccgttattatggtgcagggatggcggtaggttcagatagctatggtagcccggatgcaaatgtcacag

SEQ ID NO: 758482 - DNA, 75 bp, synthetic construct
  source 1..75: mol_type = other DNA
tggtgctcagcggagatggcaacagcgtgacgctggcagtagaagatcttaatgttactgggcagaaagcgatgg

SEQ ID NO: 758483 - DNA, 75 bp, synthetic construct
  source 1..75: mol_type = other DNA
gggtgatagcgcagcttagcaactggcagctcgcatgtttaattttttgcgggctgaatacgttggtaggatatg

SEQ ID NO: 758484 - DNA, 75 bp, synthetic construct
  source 1..75: mol_type = other DNA
gtgaaaccattatcgtccacgaaattccgtatcaggtaaacaaagcgcgcctgatcgagaagattgcggaactgg

SEQ ID NO: 758485 - DNA, 75 bp, synthetic construct
  source 1..75: mol_type = other DNA
ttaggcgaaggcgataaagtcgtctctctgatcgtgccgcgcggcgatggcgcaatccttactgcaacgcagaac

SEQ ID NO: 758486 - DNA, 75 bp, synthetic construct
  source 1..75: mol_type = other DNA
tcctgccggtgaccgagtttgaagaaggcgtgaaagtcttcatggcgaccgctaacggtaccgtgaagaaaactg

SEQ ID NO: 758487 - DNA, 75 bp, synthetic construct
  source 1..75: mol_type = other DNA
agatcctgcgacagtacaaagccctgattaatgcccgccgacgtgagaatggacagtcggcgctaaggacagaac

SEQ ID NO: 758488 - DNA, 75 bp, synthetic construct
  source 1..75: mol_type = other DNA
tatttttattgttaatgattgctcctagtttttatgctgaatatctcaaaatgaatatcggttctctaatggaag

SEQ ID NO: 758489 - DNA, 75 bp, synthetic construct
  source 1..75: mol_type = other DNA
gcgtattcttggtagcgccgatcgtttgatggaagtgatccgtgaagagctggagctggttcgtgaacagttcgg

SEQ ID NO: 758490 - DNA, 75 bp, synthetic construct
  source 1..75: mol_type = other DNA
atcgcggcgtttgttcgtcaccgccgtgaagtggtgacccgtcgtactattttcgaactgcgtaaagctcgcgat

SEQ ID NO: 758491 - DNA, 75 bp, synthetic construct
  source 1..75: mol_type = other DNA
aacagggcaatttctgcctgcgttgttgcaatccgcgccgctggcattcgtatcaaaggagaaaatgacaccagt

SEQ ID NO: 758492 - DNA, 75 bp, synthetic construct
  source 1..75: mol_type = other DNA
ggcaacctgtcatcttaagcgtggcattgccgcctggtcttgtgcgatttgaaacatcttcggaagacgcgagcc

SEQ ID NO: 758493 - DNA, 75 bp, synthetic construct
  source 1..75: mol_type = other DNA
gccgacgcctgcagaagcgaaaactgcgctggttgctaatccgtggcagctgggcaacgttgccgcgatgctcga

SEQ ID NO: 758494 - DNA, 75 bp, synthetic construct
  source 1..75: mol_type = other DNA
cgtgcgtgacggtctgtactacctgaccgaacagcaagctcaggcaattctggatctgcgtttgcagaaactgac

SEQ ID NO: 758495 - DNA, 75 bp, synthetic construct
  source 1..75: mol_type = other DNA
gcgttgacctgaccagcggcgaagacgaagtaatgctgttctccgctgaaggtaaagtggtgcgctttaaagagt

SEQ ID NO: 758496 - DNA, 75 bp, synthetic construct
  source 1..75: mol_type = other DNA
aggtgatcgacgaaatatgttactacatgacctgtcagagcgctgtttacctttgcggccagtttatacgacagg

SEQ ID NO: 758497 - DNA, 75 bp, synthetic construct
  source 1..75: mol_type = other DNA
tatcgtaagcaaatacgaaaaacttggcggttgtgagtatacgcttaccttaggttttgtcaacagcgaaacttt

SEQ ID NO: 758498 - DNA, 75 bp, synthetic construct
  source 1..75: mol_type = other DNA
gattgcgcggtctgccgaacatatccatcagcttcacgcgttcgctttaaaccacggtggcacggacgagggagc

SEQ ID NO: 758499 - DNA, 75 bp, synthetic construct
  source 1..75: mol_type = other DNA
aggccacaatacggacagggattccatagtgcctatgtacgcgatccggacgggaataagctggcgtttgtgttc

SEQ ID NO: 758500 - DNA, 75 bp, synthetic construct
  source 1..75: mol_type = other DNA
tttgcgggtggcgacccagatgggcaacaccgccgcgcttaaacgatacatacaaagtggtgcgaatgtagaaag

SEQ ID NO: 758501 - DNA, 75 bp, synthetic construct
  source 1..75: mol_type = other DNA
gtgcccgtccgcgccagtattgagccactaacctgggaaaacgccttctttggtgttaacagcgccatcgtgcgc

SEQ ID NO: 758502 - DNA, 75 bp, synthetic construct
  source 1..75: mol_type = other DNA
caaagcttcgctggcgctccgctctgctgtcggcagtggtgccgttctgtggccccgcagtcgccgccctccctg

SEQ ID NO: 758503 - DNA, 75 bp, synthetic construct
  source 1..75: mol_type = other DNA
atattgcgatggctgaagcgggtattccgcgcggtaccggaatgggttacggtggtggcggtcatatgggtatgg

SEQ ID NO: 758504 - DNA, 75 bp, synthetic construct
  source 1..75: mol_type = other DNA
atccataatgacttttacgcccaaagcagcgcgctgcaacagcaactggtgacgaagcgttatgaatacaacgct

SEQ ID NO: 758505 - DNA, 75 bp, synthetic construct
  source 1..75: mol_type = other DNA
tggtaatgatggcgctttcagcaatggcgatgggatcgacatctgcatttgctcacggcggacacggtatgtggc

SEQ ID NO: 758506 - DNA, 75 bp, synthetic construct
  source 1..75: mol_type = other DNA
atgaagaaggcgcatcctgggggacgttcagcaataaccataccatcggattgtgcgtcggcaggccctttaacc

SEQ ID NO: 758507 - DNA, 75 bp, synthetic construct
  source 1..75: mol_type = other DNA
caccatggtggcgctgaacgcccgttctattgaacatatcagacagttgcatgcgcttgcccttagtctgggggg

SEQ ID NO: 758508 - DNA, 75 bp, synthetic construct
  source 1..75: mol_type = other DNA
tggaaatagcgcgcacattgcagcaggaaacgcaattgccgctatacaggtgcaaacgtattgcccgaactgaaa

SEQ ID NO: 758509 - DNA, 75 bp, synthetic construct
  source 1..75: mol_type = other DNA
atgatcaaagagtgggctaccgtcgtctcctggcaaaacgggcaggcgctggtcagttgtgatgttaaagcctca

SEQ ID NO: 758510 - DNA, 75 bp, synthetic construct
  source 1..75: mol_type = other DNA
acagtgcaacggagctacgttcaccaaagaacaatatcctgttctggtcagagtctacccgaccctccgtcttcc

SEQ ID NO: 758511 - DNA, 75 bp, synthetic construct
  source 1..75: mol_type = other DNA
accaaaagcggtcaaggctgcatacgacctggcagccggcaaggcgcccggcagccacactcacccgtggagtca

SEQ ID NO: 758512 - DNA, 75 bp, synthetic construct
  source 1..75: mol_type = other DNA
accaaaagcggtcaaggctgcatacgacctcgcagccggcaaggcgcctgtcagccacactcacccgtggagtca

SEQ ID NO: 758513 - DNA, 75 bp, synthetic construct
  source 1..75: mol_type = other DNA
ctgcaaaacaggaagcaattgaatttgtccatttcgcaaatgttatcaatgactatctttataaatatccagaca

SEQ ID NO: 758514 - DNA, 75 bp, synthetic construct
  source 1..75: mol_type = other DNA
cgacgctgcttatgttgatgactggtaatgtctgggcagatggcgaaccgccaactgaaaatatcttaaaagatc

SEQ ID NO: 758515 - DNA, 75 bp, synthetic construct
  source 1..75: mol_type = other DNA
acaacccttacagctattggtcgcgctattatcgctatgggcagtataaaagaagtcctcaattaccttggttta

SEQ ID NO: 758516 - DNA, 75 bp, synthetic construct
  source 1..75: mol_type = other DNA
atatattaaaagcaatgactgcgaaaggtaaaaaagattatgagttcatgctccagtctttctctgatagccgca

SEQ ID NO: 758517 - DNA, 75 bp, synthetic construct
  source 1..75: mol_type = other DNA
aacagctgataatggataaaaaatatccttccaaaaaaatatcaaacttctttttaatagatttggtatcaaaga

SEQ ID NO: 758518 - DNA, 75 bp, synthetic construct
  source 1..75: mol_type = other DNA
aagttctcgatttcaccggtgtgcaatctggcccatcttgtactcaaatgctggcctggtttggcgctgacgtca

SEQ ID NO: 758519 - DNA, 75 bp, synthetic construct
  source 1..75: mol_type = other DNA
accaaaagcggtcaaggctgcatacgaccttgcagccggcaaggcgcctgccagccacactcacccgtggagtca

SEQ ID NO: 758520 - DNA, 75 bp, synthetic construct
  source 1..75: mol_type = other DNA
accaaaagcggtcaaggctgcatacgacctagcagccggcaaggcgccggacagccacactcacccgtggagtca

SEQ ID NO: 758521 - DNA, 75 bp, synthetic construct
  source 1..75: mol_type = other DNA
attgataagctaaataatgttaaagaaattgttaggattatggataggatattatattcacatgtctgtgataaa

SEQ ID NO: 758522 - DNA, 75 bp, synthetic construct
  source 1..75: mol_type = other DNA
catgtgtcactgcctgtgccatcaaacaagatattccggaatacattcgactgttgggcgaacatcgctatgccg

SEQ ID NO: 758523 - DNA, 75 bp, synthetic construct
  source 1..75: mol_type = other DNA
ccaccattaatgccattgttggtacggaggttctgcctaatcgcaatcgcccaatgactgcgctgccaacgctta

SEQ ID NO: 758524 - DNA, 75 bp, synthetic construct
  source 1..75: mol_type = other DNA
gggcggcggtggcattccggtggtgcgtactgacgcaggggattaccaaagcgtggacgcggttatcgacaaaga

SEQ ID NO: 758525 - DNA, 75 bp, synthetic construct
  source 1..75: mol_type = other DNA
aacatatcttagataccgtggcagcgctttgggtgcgagggcataacatcgatttgtctgcgtttgcaggtgagc

SEQ ID NO: 758526 - DNA, 75 bp, synthetic construct
  source 1..75: mol_type = other DNA
ggtcgtgcatcatacactatggaattcctgaagtatgatgaagcgccgagtaacgttgctcaggccgtaattgaa

SEQ ID NO: 758527 - DNA, 75 bp, synthetic construct
  source 1..75: mol_type = other DNA
tcatccagtgataaccagcgtgaactgaaaaacctgcagaccattgcaaccaaaatgaagcagtacaagttccag

SEQ ID NO: 758528 - DNA, 75 bp, synthetic construct
  source 1..75: mol_type = other DNA
gaaaatatccgttcccaccagaacgataaatactggaacaacgtcaatccggcggaaatctatcaacgtaaaggc

SEQ ID NO: 758529 - DNA, 75 bp, synthetic construct
  source 1..75: mol_type = other DNA
tctggaaatcactccccttcctgcgtgaatacaacaagggtacagcgctcaagctgggcaaacatgtggtcgttg

SEQ ID NO: 758530 - DNA, 75 bp, synthetic construct
  source 1..75: mol_type = other DNA
caaacctgccggttccggttcacgccatccggttgccgtgattggcgcgggtccagcaggtctggctgccggtta

SEQ ID NO: 758531 - DNA, 75 bp, synthetic construct
  source 1..75: mol_type = other DNA
gcatccgtcgcgcgggcgtcacctcgcttggcatgggcggcaccaatgcccatgttgtgctggaacaagcgccag

SEQ ID NO: 758532 - DNA, 75 bp, synthetic construct
  source 1..75: mol_type = other DNA
atggtgattgccatgcagtacgcgaataaatcagtggataaatgcttattacaacgtttatcgacctcatacaaa

SEQ ID NO: 758533 - DNA, 75 bp, synthetic construct
  source 1..75: mol_type = other DNA
gcgtatagaagtggcagaagacctgccgctgaccgactgctacgttgccccctgtgtcactgcctgcgccatcaa

SEQ ID NO: 758534 - DNA, 75 bp, synthetic construct
  source 1..75: mol_type = other DNA
tgacagaaacacgttataaaggtttaaatgagagagctgatgaacttatccaggcacttatcgataagattggag

SEQ ID NO: 758535 - DNA, 75 bp, synthetic construct
  source 1..75: mol_type = other DNA
ttcttgatggcccagctcgtgcaagcaaagggacttcagagattgctaaggtcgctgaccttatcgttcagccaa

SEQ ID NO: 758536 - DNA, 75 bp, synthetic construct
  source 1..75: mol_type = other DNA
gaagcatccgcctgtggcatcaaaacaaaattagctgacctcgacctggaacaggcaacgagtgctgagtggcat

SEQ ID NO: 758537 - DNA, 75 bp, synthetic construct
  source 1..75: mol_type = other DNA
tattttagttatggcggtttcaacaggatatataaactatttcaaagtaagatgtttattgagcttgagaaaaga

SEQ ID NO: 758538 - DNA, 75 bp, synthetic construct
  source 1..75: mol_type = other DNA
gctgcaatcatcggaaaaggcacatttatttttggatgtcatgtcatgtccatttgtctcaatagagacaaggcg

SEQ ID NO: 758539 - DNA, 75 bp, synthetic construct
  source 1..75: mol_type = other DNA
caggctatgaatgcgggtttagcagtgacggaaactcgctataagcggcttaaacaaaatgccgatgaagttata

SEQ ID NO: 758540 - DNA, 75 bp, synthetic construct
  source 1..75: mol_type = other DNA
atgagcaccgctatcgctattgcaaaagaatatgccagcctgattgacctgctggaaacctccgacgaactgacg

SEQ ID NO: 758541 - DNA, 75 bp, synthetic construct
  source 1..75: mol_type = other DNA
agcgctgcacagcgggacaggtaaagtcagctatgtgggcggcaatagtaaaagttcggcgctgttcatcagcct

SEQ ID NO: 758542 - DNA, 75 bp, synthetic construct
  source 1..75: mol_type = other DNA
cgctggttgccattagtcgggcttgtgtggcgcagggctgcgccaaccctgcgtacccgtaacccgcataaagca

SEQ ID NO: 758543 - DNA, 75 bp, synthetic construct
  source 1..75: mol_type = other DNA
gcttgagcaggatataaaagcattacgcccgcaaatctacgccgccaaatccgaagctaacagagccaatacacg

SEQ ID NO: 758544 - DNA, 75 bp, synthetic construct
  source 1..75: mol_type = other DNA
atgaaaacgattttcaccgtgggagctgttgttctggcgaccagcttactaagtggctgcgtcaatgaacaaaag

SEQ ID NO: 758545 - DNA, 75 bp, synthetic construct
  source 1..75: mol_type = other DNA
agaaaaagaccagatcatcgaagcacagaaagctgagattgaagaactgaaagctaaagaagttgctccggtggc

SEQ ID NO: 758546 - DNA, 75 bp, synthetic construct
  source 1..75: mol_type = other DNA
cgtagcaataataatgaaacaaatggaatacctattggttcagagtttagcagggtttttgcagaattaatattt

SEQ ID NO: 758547 - DNA, 75 bp, synthetic construct
  source 1..75: mol_type = other DNA
cctgtttgtgctgctgatcccgggcgcaattacacccgtgctgggttatctggtggcgattattgcaggtacgct

SEQ ID NO: 758548 - DNA, 75 bp, synthetic construct
  source 1..75: mol_type = other DNA
ggtactgggactgtgctttatttcggaaggtgcaattccgtttgctgcccgtgatccgatgcgagtgctgccgtg

SEQ ID NO: 758549 - DNA, 75 bp, synthetic construct
  source 1..75: mol_type = other DNA
ggtacgctggtggcgggtttggcctatgccttcctgaaacgtccggaagtggacgcagtagcgaaagcagcgtaa

SEQ ID NO: 758550 - DNA, 75 bp, synthetic construct
  source 1..75: mol_type = other DNA
acgtgcgactgacactcaatgcccacggcatcaaacgcaccggacaaccgctattgctaagtttgttggtgcgaa

SEQ ID NO: 758551 - DNA, 75 bp, synthetic construct
  source 1..75: mol_type = other DNA
gctgagtactcaaacctatggcccgatggcggcgattatggcggcaggtatggtgccaccgctggcaatgggcct

SEQ ID NO: 758552 - DNA, 75 bp, synthetic construct
  source 1..75: mol_type = other DNA
ctgttcctgagtgaagccaaaggtcatgcgaagccttacactgcgccggtcgttgcgacagcaccgattgccgcc

SEQ ID NO: 758553 - DNA, 75 bp, synthetic construct
  source 1..75: mol_type = other DNA
ctgccctactccacctacgaccgattgtctgaagtcgatcctgtcgcgattgttgataacaaaagactgggccat

SEQ ID NO: 758554 - DNA, 75 bp, synthetic construct
  source 1..75: mol_type = other DNA
taaccggcgcttcgccaaagcccccctgcatgattttaacgcacatcggccgctggcattagacgatgacctgga

SEQ ID NO: 758555 - DNA, 75 bp, synthetic construct
  source 1..75: mol_type = other DNA
cgaagacaacgcgcaccgaaaattcatcagccccgttaccggcggccctgtactggcgagcttatacagattgac

SEQ ID NO: 758556 - DNA, 75 bp, synthetic construct
  source 1..75: mol_type = other DNA
attgaaaccgaagcgaaaaaacgcggctggtgggtgaaagttgaaactcgtggctctgttggcgcgggtaatgcg

SEQ ID NO: 758557 - DNA, 75 bp, synthetic construct
  source 1..75: mol_type = other DNA
ggaacgggagcgtgcgcggtcctggcatgaagagcaggaacgggaagtacgggtatggcgtggtccgtcgctggg

SEQ ID NO: 758558 - DNA, 75 bp, synthetic construct
  source 1..75: mol_type = other DNA
aacgggagcgtgcgcggtcctggcatgaagagcaggaacgggaagcacgggtatggcgtggcccgtcaataggga

SEQ ID NO: 758559 - DNA, 75 bp, synthetic construct
  source 1..75: mol_type = other DNA
cattctggccgcgcttgtgggtggaatggttgcttgtggcagtgtactgatgcgtaacgccatgctttctcgcaa

SEQ ID NO: 758560 - DNA, 75 bp, synthetic construct
  source 1..75: mol_type = other DNA
ccacgatctgacgatcagtctggagatgatgctgtaccacgacgatgaacctctgacgtttgagttggtctggca

SEQ ID NO: 758561 - DNA, 75 bp, synthetic construct
  source 1..75: mol_type = other DNA
tattacctgaaaacacaggcagcaatacatcatcgctgcgtgattccgtatgtcgggatctctttcaacttttca

SEQ ID NO: 758562 - DNA, 75 bp, synthetic construct
  source 1..75: mol_type = other DNA
gggtaacgggccagggcgcattgcgtgtgaagcgtaatccggtatcgggcgaggtgttatggcagggcaatgatg

SEQ ID NO: 758563 - DNA, 75 bp, synthetic construct
  source 1..75: mol_type = other DNA
aaaaccttaagaccatctccgttagtaccgcgctgaaaacgtccgatgacacaccgctggcggttctttatgcca

SEQ ID NO: 758564 - DNA, 75 bp, synthetic construct
  source 1..75: mol_type = other DNA
ctggagatgatgctgtaccacgacgatgaaccgctaacattggaattgatctggcagagtaatggctggtgttgc

SEQ ID NO: 758565 - DNA, 75 bp, synthetic construct
  source 1..75: mol_type = other DNA
cagtatgatcccaaagtttatgacgaatatcgtaagacgaagcgggcagggcggttgaacaatgaaaatcactcc

SEQ ID NO: 758566 - DNA, 75 bp, synthetic construct
  source 1..75: mol_type = other DNA
tgatgaattaattgatacaactcaggcaaggccaattcagtattgcattaatgggacgtggtataacgcggggag

SEQ ID NO: 758567 - DNA, 75 bp, synthetic construct
  source 1..75: mol_type = other DNA
gaaccgtcgatatgaaaaagcgagcatcatactgacgtcaaacaaagggttcgcagactggggagaaatgttcgg

SEQ ID NO: 758568 - DNA, 75 bp, synthetic construct
  source 1..75: mol_type = other DNA
gaaattactgctgcggcgaccccgtaccggttgggacagcgtggcggcgtttcttgacgcgccacagcttaagga

SEQ ID NO: 758569 - DNA, 75 bp, synthetic construct
  source 1..75: mol_type = other DNA
caggcctgttttaatcttaatgctattaattatggagcggtggatctggccggtataccttatgccgccagaatt

SEQ ID NO: 758570 - DNA, 75 bp, synthetic construct
  source 1..75: mol_type = other DNA
tgttcggggacggatagtggatgcacaggcctgttttaatcttaatgccattaattatggagcagtggatctagc

SEQ ID NO: 758571 - DNA, 75 bp, synthetic construct
  source 1..75: mol_type = other DNA
atgaatactttttcaggtaacattgggaagataaatgttcatacaatgcctgttataattgactggttaaatcgt

SEQ ID NO: 758572 - DNA, 75 bp, synthetic construct
  source 1..75: mol_type = other DNA
aaaattactgaacatcctaaaaagggagatctcattttctatcctaattccccagaagatggtaaacctgaaaac

SEQ ID NO: 758573 - DNA, 75 bp, synthetic construct
  source 1..75: mol_type = other DNA
atgtccagaaaaacagaatttaaaggcaccgcagcttctcgccgtagagctcgtcgcgcaaacctgcaaagtcag

SEQ ID NO: 758574 - DNA, 75 bp, synthetic construct
  source 1..75: mol_type = other DNA
tgggcgttgtcggttgacagatgggatcagaactggccggaggaaaccaagcggcaggtcattcgcgattcatgg

SEQ ID NO: 758575 - DNA, 75 bp, synthetic construct
  source 1..75: mol_type = other DNA
cgcccacaaatctatgctgccaaatccgacgctaacagagccaatacgcgtcttgatgcacaggactatttcgac

SEQ ID NO: 758576 - DNA, 75 bp, synthetic construct
  source 1..75: mol_type = other DNA
gcgtggacgcggttatcgacaaagatctctctaccgcgctgctggcccgtgaaattcacgccgacattctggtga

SEQ ID NO: 758577 - DNA, 75 bp, synthetic construct
  source 1..75: mol_type = other DNA
agtgattatcaccacgccggaatgcctgcctgcggcgctgcgcggcgaaacgggcactcatattattaaacgtaa

SEQ ID NO: 758578 - DNA, 75 bp, synthetic construct
  source 1..75: mol_type = other DNA
atataccgccacagcctccactcagacatcatcatcgaacaaccacgccgaaaaacgtgcaatcggtacgctgaa

SEQ ID NO: 758579 - DNA, 75 bp, synthetic construct
  source 1..75: mol_type = other DNA
aggcctacgtgccgggctatcgcctgaaacagcgtgtccagtttgaagtcatcccggaagataaaccggtgaatc

SEQ ID NO: 758580 - DNA, 75 bp, synthetic construct
  source 1..75: mol_type = other DNA
gcgtgccaatatcgatgaatttacggaaaccacttcgcgcgccattgaagtggtgggcggcgcggcaaaagggaa

SEQ ID NO: 758581 - DNA, 75 bp, synthetic construct
  source 1..75: mol_type = other DNA
acgtggtggctgcatttgacccgactgccccggtcgaatccttccggaaaatggcggggatcatcggtaacgtct

SEQ ID NO: 758582 - DNA, 75 bp, synthetic construct
  source 1..75: mol_type = other DNA
gatagcacttctattttgcctacccgttctggaattaggactggaatggctggatggttttcatgaagtcttaat

SEQ ID NO: 758583 - DNA, 75 bp, synthetic construct
  source 1..75: mol_type = other DNA
atcgccgccgttttagcgacccggaagcgattgccttgctggttattttagttgccggttttggcattatctttt

SEQ ID NO: 758584 - DNA, 75 bp, synthetic construct
  source 1..75: mol_type = other DNA
gctggagatggtggtggtggggatagccacctggctgggtttcttactcttcgggctgaattattcactgttgct

SEQ ID NO: 758585 - DNA, 75 bp, synthetic construct
  source 1..75: mol_type = other DNA
tatgaaaaaaccgttcagagcgcatttaaagatgtcgctaacgcactggcgcggcggaccacgcttgaagagcaa

SEQ ID NO: 758586 - DNA, 75 bp, synthetic construct
  source 1..75: mol_type = other DNA
ttaccgctgttcactggcggaagtaatctggcgcagcttcgttacgcagaagcacaaaagcgtggactcattgcc

SEQ ID NO: 758587 - DNA, 75 bp, synthetic construct
  source 1..75: mol_type = other DNA
tggtgctgttgagtgcgggatgtgtctcgctcgatccccactacagcacgcctgaatccccaatcccggcgacct

SEQ ID NO: 758588 - DNA, 75 bp, synthetic construct
  source 1..75: mol_type = other DNA
ctgtttcaggagaacaacctgttcagtcacctgacggtcgcgcagaacatcgggctggggcttaatccgggattg

SEQ ID NO: 758589 - DNA, 75 bp, synthetic construct
  source 1..75: mol_type = other DNA
gtggtggtcgccgacgggcgcatcgcctggcagggtaagactgaagaattgttgagcggtaaggcgagtgcttcg

SEQ ID NO: 758590 - DNA, 75 bp, synthetic construct
  source 1..75: mol_type = other DNA
accgtcacgccgtccggtatcaatgctgtttcaggagaacaacctgttcagccacctgacggtagcgcagaacat

SEQ ID NO: 758591 - DNA, 75 bp, synthetic construct
  source 1..75: mol_type = other DNA
gctggtggctattgtgctggcctatttgctggaatggccaaccgtgcgcctgcaatctattggctgctcccgccg

SEQ ID NO: 758592 - DNA, 75 bp, synthetic construct
  source 1..75: mol_type = other DNA
cggcttgttcctttacagggctttgaactggattcattaagaagctgccggatagcacttctattttgcctaccc

SEQ ID NO: 758593 - DNA, 75 bp, synthetic construct
  source 1..75: mol_type = other DNA
cagcaagtcttcagtcgagctcaagcaccagaacattagcgccgtactcgatgccctgggcctgccctatatcaa

SEQ ID NO: 758594 - DNA, 75 bp, synthetic construct
  source 1..75: mol_type = other DNA
taatctggcgcagcttcgttacgcagaagcacaaaagcgtgggctcattgccacctatgaaaaaaaccgttcaga

SEQ ID NO: 758595 - DNA, 75 bp, synthetic construct
  source 1..75: mol_type = other DNA
gtctgtttgttaaccgccgtcgtctgcgtgaggtggcgcaggcggcaatgaccagtattaacgtcacattgccac

SEQ ID NO: 758596 - DNA, 75 bp, synthetic construct
  source 1..75: mol_type = other DNA
tacaagactctttcgatgcatccgggtttaacctgattattcatgaagttgctcataagctagatattcgaaatg

SEQ ID NO: 758597 - DNA, 75 bp, synthetic construct
  source 1..75: mol_type = other DNA
cgactggtacctttacaaggattcgaacttgataccttaaaaagccatcggatcgcgctgcttttctgtctgcct

SEQ ID NO: 758598 - DNA, 75 bp, synthetic construct
  source 1..75: mol_type = other DNA
tacgtattgcctattttggcggtggtggcggctggaagcgaaaaacactcgaaattctactctgtggcgctctga

SEQ ID NO: 758599 - DNA, 75 bp, synthetic construct
  source 1..75: mol_type = other DNA
aggtgcgtaatttaagtcgtcatggggaatatcaaaatattaacttgcgggtggaagcgggcgaagtggtgtcga

SEQ ID NO: 758600 - DNA, 75 bp, synthetic construct
  source 1..75: mol_type = other DNA
gctggtcgggacttttccggctgcagagatgaccacaaaacaactcggtttcctgatgaccggccaggagtttga

SEQ ID NO: 758601 - DNA, 75 bp, synthetic construct
  source 1..75: mol_type = other DNA
ctgaaaggcgttacggcgatcatcactatgaccgaatcgggtcgtaccgctctgatgacctcccgtatcagctcc

SEQ ID NO: 758602 - DNA, 75 bp, synthetic construct
  source 1..75: mol_type = other DNA
gtaaagttttcctcaatattggggataaattcctgttggacgccaacctgggtaaaggtgaaggcgataaagaaa

SEQ ID NO: 758603 - DNA, 75 bp, synthetic construct
  source 1..75: mol_type = other DNA
cattaccgctgttcaccggcggcagtaatctggcgcagcttcgttacgctgaagcacaaaaacgcgggcttattg

SEQ ID NO: 758604 - DNA, 75 bp, synthetic construct
  source 1..75: mol_type = other DNA
ctgatgtctggtgacctggtaattgtcacccagggcgatgtgatgagtaccgtgggttctaccaacaccacgcgt

SEQ ID NO: 758605 - DNA, 75 bp, synthetic construct
  source 1..75: mol_type = other DNA
gggcatgaaagtgttcaccgaagtgaccgtcggcggcccgctctccaacaataaagggatcaacaaactcggcgg

SEQ ID NO: 758606 - DNA, 75 bp, synthetic construct
  source 1..75: mol_type = other DNA
caacccgatgccgacccgtgcagaagtcatggacgtggcaaacgccgtactggatggtaccgatgctgtgatgtt

SEQ ID NO: 758607 - DNA, 75 bp, synthetic construct
  source 1..75: mol_type = other DNA
gtggtggtcgccgatgggcgcatcgcctggcagggtaagactgatgagttgttgagcggtaaggcgagtgcttcg

SEQ ID NO: 758608 - DNA, 75 bp, synthetic construct
  source 1..75: mol_type = other DNA
cggtcatttccagaatgacggcacagacggttattaatggaaaagacgtattgtatccgaacgggccaacgttcg

SEQ ID NO: 758609 - DNA, 75 bp, synthetic construct
  source 1..75: mol_type = other DNA
aatcatcgcgaaaatcaccgcttacggtaagatcatcccactactgggggggctagttatcggatacccacactt

SEQ ID NO: 758610 - DNA, 75 bp, synthetic construct
  source 1..75: mol_type = other DNA
cttcggtaccgcaagaatcacgctgggcgtggatgaagattttagcctgaagaattcccagttcgattttctcca

SEQ ID NO: 758611 - DNA, 75 bp, synthetic construct
  source 1..75: mol_type = other DNA
gttcggcccggtgcatgtggaacaaccatttaccagtgccgctaattttttcccgcccatcctgtttgcccaggg

SEQ ID NO: 758612 - DNA, 75 bp, synthetic construct
  source 1..75: mol_type = other DNA
acgccttcatcagagcctattaatcaatttgcgcgccagctcatcaccctacttgatacctctgatttaagttcg

SEQ ID NO: 758613 - DNA, 75 bp, synthetic construct
  source 1..75: mol_type = other DNA
cgtctcagttaccaggctgtttcctcaaccagccagactactgcggacagaataacagcacataatttacgcata

SEQ ID NO: 758614 - DNA, 75 bp, synthetic construct
  source 1..75: mol_type = other DNA
tttgaaaaagccaaaactgcactggcttccagcgttcgccaaacccaccagctgatgattaacagcaagcagttg

SEQ ID NO: 758615 - DNA, 75 bp, synthetic construct
  source 1..75: mol_type = other DNA
cagaatggctcgaaaaagctttggagcagtcagcgaaaaaggatgatcgctcattcagcaatgaggtgttgagga

SEQ ID NO: 758616 - DNA, 75 bp, synthetic construct
  source 1..75: mol_type = other DNA
tattgaagaattactggaagatggcagcgatccggacgcgctgtacaccatcgaacaccatctttccgcagacga

SEQ ID NO: 758617 - DNA, 75 bp, synthetic construct
  source 1..75: mol_type = other DNA
gctgatggcggtcgttccggcgaccaatatgtgggtggatgccaactttaaagagacgcagattgccaatatgcg

SEQ ID NO: 758618 - DNA, 75 bp, synthetic construct
  source 1..75: mol_type = other DNA
tatcggtcagccggtcaccatcaccaccgatatttacggcgatgatgtgaaatacaccggtaaagtggttggtct

SEQ ID NO: 758619 - DNA, 75 bp, synthetic construct
  source 1..75: mol_type = other DNA
actggcaaataaagtacgttccacaccggtcgcggtaagcaccgcgcgtgaaatcagcctggcacctgtcaataa

SEQ ID NO: 758620 - DNA, 75 bp, synthetic construct
  source 1..75: mol_type = other DNA
cagtaaagtgtttcagggagaagaagataagaagtttgccttctttaccatcggtgttcagggggctgatatgaa

SEQ ID NO: 758621 - DNA, 75 bp, synthetic construct
  source 1..75: mol_type = other DNA
ggtacgtgcgccggttatcacaccagaaccggaagccgtcagcgaaccgtggatcgccatgccggaagaggagcg

SEQ ID NO: 758622 - DNA, 75 bp, synthetic construct
  source 1..75: mol_type = other DNA
attacggcgcgaagctgaatatggaccaggtgaccgccattgtgcatctggtgtccggcagtattccggggctac

SEQ ID NO: 758623 - DNA, 75 bp, synthetic construct
  source 1..75: mol_type = other DNA
tagcgtgctgtggacggggaatcgcggctacgtctcgctctacggacgccaggaaaatctgcccgtgtcgcagat

SEQ ID NO: 758624 - DNA, 75 bp, synthetic construct
  source 1..75: mol_type = other DNA
gtggtggtcgccgacgggcgcatcgcctggcagggtaagaccaatgagttgttgagcggtaaggcgagtgcttcg

SEQ ID NO: 758625 - DNA, 75 bp, synthetic construct
  source 1..75: mol_type = other DNA
acggcgttgatcacaccacgacgccgccgtcacgccgtccggtatcgatgctgtttcaggagaacaacctgttca

SEQ ID NO: 758626 - DNA, 75 bp, synthetic construct
  source 1..75: mol_type = other DNA
gcctcgaagtgaaactcgagttcctgcaaaaactggccatgagcgacaccgatcgcgtagccgaagttctcagac

SEQ ID NO: 758627 - DNA, 75 bp, synthetic construct
  source 1..75: mol_type = other DNA
tcccgcccatcctgtttgcccagggcgatacaccaatgggggccgccattaccaaagccctggatatggttgaag

SEQ ID NO: 758628 - DNA, 75 bp, synthetic construct
  source 1..75: mol_type = other DNA
caaccgatgagtggcaggctgcagccaacaaagtgtttcgggggaagaagataaaaggtttgctttcttttccat

SEQ ID NO: 758629 - DNA, 75 bp, synthetic construct
  source 1..75: mol_type = other DNA
aacgtaagcgggagtatcgtgccaatggtatctcctattatcgtccgtggattttcctgatcaccgatggcgcgc

SEQ ID NO: 758630 - DNA, 75 bp, synthetic construct
  source 1..75: mol_type = other DNA
cccggcgatgacagcctgccgtcccagagttccggcctcgaagtgaaactcgagttcctgcaaaaactggccatg

SEQ ID NO: 758631 - DNA, 75 bp, synthetic construct
  source 1..75: mol_type = other DNA
aatcaaaacgccccggcgctgaaaaactggaagccggaacagaccacgcagcttaccgcgttgctgaacaatgcc

SEQ ID NO: 758632 - DNA, 75 bp, synthetic construct
  source 1..75: mol_type = other DNA
cccaggaacactacggcgacgcgccgaaaatcaaccgcgaagaaaacgtgctggacagcgacactaatcaggtgg

SEQ ID NO: 758633 - DNA, 75 bp, synthetic construct
  source 1..75: mol_type = other DNA
taaaattgaaaaggtaacaaaagatcaactaccagaagagataattcatgggaagtatcttgagcatattaaaac

SEQ ID NO: 758634 - DNA, 75 bp, synthetic construct
  source 1..75: mol_type = other DNA
ggagtccggagagtaacagaatagcagagagcttcgtgaaaacgataaagcgtgactacatcgttttcatgccca

SEQ ID NO: 758635 - DNA, 75 bp, synthetic construct
  source 1..75: mol_type = other DNA
tcgaattgttcattaaaaagccgcttgaaaacggacttactcgtggagaacaaatggaactggcacgtattgctc

SEQ ID NO: 758636 - DNA, 75 bp, synthetic construct
  source 1..75: mol_type = other DNA
aaggtctcccgcgtgaaatcgagttgcgccagaaacaatacgagtattatcgtgatttactgttcagtttcccga

SEQ ID NO: 758637 - DNA, 75 bp, synthetic construct
  source 1..75: mol_type = other DNA
gttggcgaagtattgatttctgccagtgggaccatcggcaggactgttatatttgatggtagggaatcatatttc

SEQ ID NO: 758638 - DNA, 75 bp, synthetic construct
  source 1..75: mol_type = other DNA
atggctctggcactcgttggcgaaaaaattgacagaaaccgtttcaccggtgagaaaattgaaaatagtacattt

SEQ ID NO: 758639 - DNA, 75 bp, synthetic construct
  source 1..75: mol_type = other DNA
ctacgctggtggcttctcgctactgggatctctccagcggctggcagcgtgccattaacctgcgctggagtctcg

SEQ ID NO: 758640 - DNA, 75 bp, synthetic construct
  source 1..75: mol_type = other DNA
acggactgataaagactatttgaagttgctcgatactcgcccggctataggcacggtgctgaatcagggcgacta

SEQ ID NO: 758641 - DNA, 75 bp, synthetic construct
  source 1..75: mol_type = other DNA
ctacaggtcgaagggttatcgggacagctggaaaagaacgttcgtgcgcagctttctacgattgaaagtgatgaa

SEQ ID NO: 758642 - DNA, 75 bp, synthetic construct
  source 1..75: mol_type = other DNA
tcgaattgttcattaaaaacccgcttgaaaacgggcttactcgtggggaacaaatggaactggcacgtattgctc

SEQ ID NO: 758643 - DNA, 75 bp, synthetic construct
  source 1..75: mol_type = other DNA
tactgccagcgttgatggttaaaatggcatcgcatgttaatgcccgctacgccagttatatggtgctgtttattg

SEQ ID NO: 758644 - DNA, 75 bp, synthetic construct
  source 1..75: mol_type = other DNA
gttccactgtttcttggattcctgcaacgctacaaaccagacgcgaaactgggtacttactattcgttagttttg

SEQ ID NO: 758645 - DNA, 75 bp, synthetic construct
  source 1..75: mol_type = other DNA
aacatcttctgagggagagattccattttataaaattgggacatttggtaaggaacccgactcctatatatctag

SEQ ID NO: 758646 - DNA, 75 bp, synthetic construct
  source 1..75: mol_type = other DNA
ccgaaaatatgcgcagtcggatgctgaccatgggcgattcggtggtgaaaatttccctcgcctcgctggtcggtt

SEQ ID NO: 758647 - DNA, 75 bp, synthetic construct
  source 1..75: mol_type = other DNA
ccagctgattgggacaggtggacgcgatatgagtgaaaaaattggcggcctgatgatgcttgacgcgattagcat

SEQ ID NO: 758648 - DNA, 75 bp, synthetic construct
  source 1..75: mol_type = other DNA
attaacggcgcagcgttgtgttttggcaatgcagtgcgtcgcggcaacatcggaatcattggtgcctccggtacg

SEQ ID NO: 758649 - DNA, 75 bp, synthetic construct
  source 1..75: mol_type = other DNA
atgaccaaattactcgatctcgactccattctgccgccgaaaaaaagcatcaaatttggtggcaaagaatatccc

SEQ ID NO: 758650 - DNA, 75 bp, synthetic construct
  source 1..75: mol_type = other DNA
atcgttgaaatgacggtaggtctgttcgtttccattaagcagatggaaggtaaagatctgaccaatatgtctcct

SEQ ID NO: 758651 - DNA, 75 bp, synthetic construct
  source 1..75: mol_type = other DNA
atttccctcgcctcgctggtcggtttgctgaccatagccgtctatctggtgctggtgccattgatggtcttcttc

SEQ ID NO: 758652 - DNA, 75 bp, synthetic construct
  source 1..75: mol_type = other DNA
aacaaaaaatacaataattatatcttgttttcctggcattgtccttacttctcagatagaagcttttatttcaaa

SEQ ID NO: 758653 - DNA, 75 bp, synthetic construct
  source 1..75: mol_type = other DNA
agagtcgcgtaatatgagccgtagcgaactgatcgaagagatgttgatgcaacaactcgcggcgctgcgtagtca

SEQ ID NO: 758654 - DNA, 75 bp, synthetic construct
  source 1..75: mol_type = other DNA
accgctgagcttaacatgcgtaaaaaacagtacaactactatcgcgaccaattgctgacttttaaagaaggtgag

SEQ ID NO: 758655 - DNA, 75 bp, synthetic construct
  source 1..75: mol_type = other DNA
aaaacacgtattttgattctgtttcactgatgtctatctccacgcgcgcaaataagcttgatggagttgagcagg

SEQ ID NO: 758656 - DNA, 75 bp, synthetic construct
  source 1..75: mol_type = other DNA
aaagtatttgattgaacatacattatttgcggattcgttaatttctatcttacttagaatagataagcctgataa

SEQ ID NO: 758657 - DNA, 75 bp, synthetic construct
  source 1..75: mol_type = other DNA
attaaaagatctacattgattatattgtttttgatcttttttaatttctttttctcattaggaccaaaaaaataa

SEQ ID NO: 758658 - DNA, 75 bp, synthetic construct
  source 1..75: mol_type = other DNA
tttcttcgccgggggcgatcgtagtattcgtggctataagtacaaatctatcgcaccgaaataccctgacggcga

SEQ ID NO: 758659 - DNA, 75 bp, synthetic construct
  source 1..75: mol_type = other DNA
atgagttttgtggtcattattcccgcgcgctacgcgtccacgcgtctgcccggtaaaccattggttgatattaac

SEQ ID NO: 758660 - DNA, 75 bp, synthetic construct
  source 1..75: mol_type = other DNA
tggagagaaaatccatgttgctgtcgcccaggaggttcctggcaccggtgtagatactcccgaagatcttgagcg

SEQ ID NO: 758661 - DNA, 75 bp, synthetic construct
  source 1..75: mol_type = other DNA
atcagagttcaccgtgggccgttgggggcggggtgattctgctgtttatgttggtgcttgggtatattcagcaat

SEQ ID NO: 758662 - DNA, 75 bp, synthetic construct
  source 1..75: mol_type = other DNA
tcgccctcgcgaaagcacaaagcgactacaaccgccgtgtgccgctgggcaatgccaacctgattggtcgcgaag

SEQ ID NO: 758663 - DNA, 75 bp, synthetic construct
  source 1..75: mol_type = other DNA
gtttgctgtcttagttttaggcggcgcatgggtcggtacgtcctacttagatcatcagacacaagtcgaaaccaa

SEQ ID NO: 758664 - DNA, 75 bp, synthetic construct
  source 1..75: mol_type = other DNA
tttatggctaccgcgcgggctttattcgtcgttatgttaactggcaaccgagcccgttagaacacatcgaaatgc

SEQ ID NO: 758665 - DNA, 75 bp, synthetic construct
  source 1..75: mol_type = other DNA
ggttgatcggtgtcgatgctattcgtggggctgcaatgagagtaatcggtaataagtttggtggctctaaggagt

SEQ ID NO: 758666 - DNA, 75 bp, synthetic construct
  source 1..75: mol_type = other DNA
ggctgatcggtgtcgatgctattcgtggggctgcaatgcgagtaatcggtaacaaatttggtggctctaaggagt

SEQ ID NO: 758667 - DNA, 75 bp, synthetic construct
  source 1..75: mol_type = other DNA
attatgtcgatcgttatggctggtttgcgcatcgcctattttggcggtggtggtggctggaagcgaaaaacgctc

SEQ ID NO: 758668 - DNA, 75 bp, synthetic construct
  source 1..75: mol_type = other DNA
gttttgctggcccattgtgtgttattcgtgagtggtgtggggcgtaagtcgctaaggaaacactatgaacctgtt

SEQ ID NO: 758669 - DNA, 75 bp, synthetic construct
  source 1..75: mol_type = other DNA
ttactggtggcaggctcagtagctctggggggcatgggcgatggacaacgttggggaatgattttgtggtgctct

SEQ ID NO: 758670 - DNA, 75 bp, synthetic construct
  source 1..75: mol_type = other DNA
ctgatcggtgtcgatgctattcgtggggctgcaatgcgagtaatcggtaacaagtttggtggctctaaggagtaa

SEQ ID NO: 758671 - DNA, 75 bp, synthetic construct
  source 1..75: mol_type = other DNA
cgctgcgtatcggtttatccacgctggtgagcgtcaataccactaaccgtgacggtcaggtactggcaaataaag

SEQ ID NO: 758672 - DNA, 75 bp, synthetic construct
  source 1..75: mol_type = other DNA
gtgcgctatatccgacagttatgctgtgtaagcttactctgcttaagcggatctgccgtcgccgcgaacgtccgt

SEQ ID NO: 758673 - DNA, 75 bp, synthetic construct
  source 1..75: mol_type = other DNA
ttcgttctttatgcgcaatatcgagacggtgagttttttgatgtagtccgtaatggtgatgaatttttcgaaaca

SEQ ID NO: 758674 - DNA, 75 bp, synthetic construct
  source 1..75: mol_type = other DNA
tgaaggtcgccaggcttcgtgcagatttcgatgcttctgaagtggacaggcgaggtatcggtagttgtctggatg

SEQ ID NO: 758675 - DNA, 75 bp, synthetic construct
  source 1..75: mol_type = other DNA
agcgttactctatcgactactccaacaccgcctggggatcggacgtcgatttctccgtattccaggcgcagaacg

SEQ ID NO: 758676 - DNA, 75 bp, synthetic construct
  source 1..75: mol_type = other DNA
gcgctggagtctcgaccactttactcagggtgaaatcactaacaccacgatgctgttttatcctggggtcatgat

SEQ ID NO: 758677 - DNA, 75 bp, synthetic construct
  source 1..75: mol_type = other DNA
atccgcgatgaatacctgcaaaatctggtgccgtttaaagagggcgatgagtacgaatcgaaagatctggcggaa

SEQ ID NO: 758678 - DNA, 75 bp, synthetic construct
  source 1..75: mol_type = other DNA
ggcgacggcacaaaatgtggtacatgctaaacctcagacgacagtttcatctgccccccctctaatagaaaataa

SEQ ID NO: 758679 - DNA, 75 bp, synthetic construct
  source 1..75: mol_type = other DNA
tatgaagctgataaagttggcacaacactgcatgaattacaaagtgttagtgaaaaaatcaaaagcaaatatctt

SEQ ID NO: 758680 - DNA, 75 bp, synthetic construct
  source 1..75: mol_type = other DNA
aatatgtgggtggatgccaactttaaagaaacgcagattgccaatatgcgtatcggtcagccggtcaccatcacc

SEQ ID NO: 758681 - DNA, 75 bp, synthetic construct
  source 1..75: mol_type = other DNA
cgatcaccgtggtcccaaacagggaacaatcggtaatgaccttaaatgccgggtcgggcagtgcgatcgctaaca

SEQ ID NO: 758682 - DNA, 75 bp, synthetic construct
  source 1..75: mol_type = other DNA
agaatgaaaaaggaagcgcggaatttgtcgaaccgccgcagcaaaaaacggatgcatacggtgttgccacaatca

SEQ ID NO: 758683 - DNA, 75 bp, synthetic construct
  source 1..75: mol_type = other DNA
gacaagtacggtaacccgatagtgacgtctgatcatctggaatttgtccagtcaggccccttcgtgaactttctc

SEQ ID NO: 758684 - DNA, 75 bp, synthetic construct
  source 1..75: mol_type = other DNA
gaggcggtgacggtgcctgccagggaagtgatccacgaccggtttaactgtttttttcatccgcttgtggggctg

SEQ ID NO: 758685 - DNA, 75 bp, synthetic construct
  source 1..75: mol_type = other DNA
atggatattcactcttatcactgtgaaggtttagtctgggaacagtactggatggaatttacccccaccagtatg

SEQ ID NO: 758686 - DNA, 75 bp, synthetic construct
  source 1..75: mol_type = other DNA
atgccatagaggagcctgaaacgtcacagcatccgaactatcagatgatgctgatgaaagcgttactggcactgg

SEQ ID NO: 758687 - DNA, 75 bp, synthetic construct
  source 1..75: mol_type = other DNA
aactgcgtattctggactggagccgggttgaacctctggtggcggatgacggcgacgtgttctaccgcatcacgc

SEQ ID NO: 758688 - DNA, 75 bp, synthetic construct
  source 1..75: mol_type = other DNA
gtcgcatgaaaacgctgggggatgcggtgaaaaatacgcttctcacgcccaatgaggcccgtaaacgggagaacc

SEQ ID NO: 758689 - DNA, 75 bp, synthetic construct
  source 1..75: mol_type = other DNA
atggacagcgaacgtcgcatgaaaacgctgggtgaatcggtgaaaaatacgcttctcacgcccaatgaggcccgt

SEQ ID NO: 758690 - DNA, 75 bp, synthetic construct
  source 1..75: mol_type = other DNA
atcctgctggtttcgtttggcggcggcaccgcatcggcgttctttaacaagctgacgctgatggcgaatgtctcc

SEQ ID NO: 758691 - DNA, 75 bp, synthetic construct
  source 1..75: mol_type = other DNA
tcgcccgaagcatcattgtcgctgggggtatggtttgcgcgtattaccggactttcgatgttcctcgcttacacg

SEQ ID NO: 758692 - DNA, 75 bp, synthetic construct
  source 1..75: mol_type = other DNA
gcgcagtcagaatcggtgcttcctggaattgaatgcgatatctgcggacatgtatctactgacccagagggacgg

SEQ ID NO: 758693 - DNA, 75 bp, synthetic construct
  source 1..75: mol_type = other DNA
ctgttagtaagcattactattttgttattaaatggtgggcatttcgcgcaggatattaatttccttgcatcaccg

SEQ ID NO: 758694 - DNA, 75 bp, synthetic construct
  source 1..75: mol_type = other DNA
ccttcattggtacgtttatgtggttttcctcttatatcatctggatggtgagtacctccgcgaaagtttgggtac

SEQ ID NO: 758695 - DNA, 75 bp, synthetic construct
  source 1..75: mol_type = other DNA
tattcttatggggcgtcagcactaactggcagcaggtattaagtaatggttctgttaaccttggtaatattactt

SEQ ID NO: 758696 - DNA, 75 bp, synthetic construct
  source 1..75: mol_type = other DNA
ttgcccgtctctgtcgtcgtcccaatgcacagcagaatcgtatccagttttttgaactgtggctgaacgccaaac

SEQ ID NO: 758697 - DNA, 75 bp, synthetic construct
  source 1..75: mol_type = other DNA
taccggttcgctttcactggatatcgcgctcggggcaggcggtctgccgatgggtcgtatcgtcgaaatctacgg

SEQ ID NO: 758698 - DNA, 75 bp, synthetic construct
  source 1..75: mol_type = other DNA
agaacgtgcccgctggcagcagcaccagtctcctgaggagactaagccagaaacgtccagtctcaatacggtacc

SEQ ID NO: 758699 - DNA, 75 bp, synthetic construct
  source 1..75: mol_type = other DNA
agaatgtagacgaggtaaaaacagtagcagcagagctacagcgcaatagtaaaaccaacctgttttattgcttat

SEQ ID NO: 758700 - DNA, 75 bp, synthetic construct
  source 1..75: mol_type = other DNA
taccggttcgctttcactggatatcgcgcttggggcaggtggtctgccgatgggtcgtatcgtcgaaatctacgg

SEQ ID NO: 758701 - DNA, 75 bp, synthetic construct
  source 1..75: mol_type = other DNA
aaaatcgctgcgccgtttaaacaggctgaattccagatcctctacggcgaaggtatcaacttctacggcgaactg

SEQ ID NO: 758702 - DNA, 75 bp, synthetic construct
  source 1..75: mol_type = other DNA
atccgtcgtatcggcgcggtgaaagagggcgaaaacgtggtgggtagcgaaacccgcgtgaaagtggtgaagaac

SEQ ID NO: 758703 - DNA, 75 bp, synthetic construct
  source 1..75: mol_type = other DNA
gaagtagctacgtagtcaccagcaaaggtgcagaggtaaagacggcttttaaggtcgttgacgccagcagtctga

SEQ ID NO: 758704 - DNA, 75 bp, synthetic construct
  source 1..75: mol_type = other DNA
ttatctgccgtttctgatgaaattgagactgagtttggcgaaggtaaagggttaattttttctatgtttgagcca

SEQ ID NO: 758705 - DNA, 75 bp, synthetic construct
  source 1..75: mol_type = other DNA
tggaggcgctggagcagcagtattattcccagtgtctgcagacgctgattgagtccattgagctgttactggatg

SEQ ID NO: 758706 - DNA, 75 bp, synthetic construct
  source 1..75: mol_type = other DNA
gctctgtttattgttgccaacaaccgaagcgctaagcgaatgggggccgctttcaagaaactggcgcaaaaaatt

SEQ ID NO: 758707 - DNA, 75 bp, synthetic construct
  source 1..75: mol_type = other DNA
aactggaacatggagaggggaaagggcttaacttcacgatgttcgaagccaaaacagaacaaagcgattttgggc

SEQ ID NO: 758708 - DNA, 75 bp, synthetic construct
  source 1..75: mol_type = other DNA
aacgacgaactgattcataaacagcaggcgttgggcgatatgttcggcggtggagatgtcgatctacgtagtatt

SEQ ID NO: 758709 - DNA, 75 bp, synthetic construct
  source 1..75: mol_type = other DNA
agatgaaacattcggcgatgtcggtccagttggtccgctgaagcacctttccaaagaagctatcgaggctgctgc

SEQ ID NO: 758710 - DNA, 75 bp, synthetic construct
  source 1..75: mol_type = other DNA
gccaaagcacgcaagctggagcagcaacaggctaatgcgaagccagaagaacaggttgacccgcgcaaagccgcc

SEQ ID NO: 758711 - DNA, 75 bp, synthetic construct
  source 1..75: mol_type = other DNA
cagcagacaaacgcagaaccagaagaacaggttgacccgcgcaaagccgctgtcgaagctgctatcgcccgcgcc

SEQ ID NO: 758712 - DNA, 75 bp, synthetic construct
  source 1..75: mol_type = other DNA
aatatttccgtcaggaaaaagccgagattgccgccattcgtcaggaagagaaacgcgccgcagaagctaaagcgc

SEQ ID NO: 758713 - DNA, 75 bp, synthetic construct
  source 1..75: mol_type = other DNA
agagcgcctggaggtttccggcacggtcaccatcgccgaccgcatggccgccgcccggcgccgcgtcatagagca

SEQ ID NO: 758714 - DNA, 75 bp, synthetic construct
  source 1..75: mol_type = other DNA
attacgttctcatgcgcctggtggagatcgaccagatggacgtgattgatatcctcaacgacgatgggagcctta

SEQ ID NO: 758715 - DNA, 75 bp, synthetic construct
  source 1..75: mol_type = other DNA
gccagtcatacatcaaaacgcctgaaaaccagactcaggcagcgattaacgcaggattctccccaaatacagcgg

SEQ ID NO: 758716 - DNA, 75 bp, synthetic construct
  source 1..75: mol_type = other DNA
cccgcgcaaagccgccgtcgaagccgctattgcccgcgccaaagcacgtaagctggagcaacagcaggctaacgc

SEQ ID NO: 758717 - DNA, 75 bp, synthetic construct
  source 1..75: mol_type = other DNA
tccgcgcaaagccgccgtcgaagcggctattgcaccgcgccaaagcgcgcaagctggaacagcaacaacaggcta

SEQ ID NO: 758718 - DNA, 75 bp, synthetic construct
  source 1..75: mol_type = other DNA
ggagcgcgaaaaagcggctcgccttgaacgacataagagcgcagccgttcaacctgcagccaaagataaagatgc

SEQ ID NO: 758719 - DNA, 75 bp, synthetic construct
  source 1..75: mol_type = other DNA
ctgacgcctgccctgccgatttattgccgcaacagttgtactggttcagtaaaggccagcagcacgataaagcta

SEQ ID NO: 758720 - DNA, 75 bp, synthetic construct
  source 1..75: mol_type = other DNA
ccagaagaacaggtcgacccgcgcaaggccgccgttgaagctgctatcgcccgcgccaaagcacgcaaactggaa

SEQ ID NO: 758721 - DNA, 75 bp, synthetic construct
  source 1..75: mol_type = other DNA
ggctaatgcggaaccagaagaacaggttgatccgcgcaaagccgccgtcgaagccgctattgcccgagccaaagc

SEQ ID NO: 758722 - DNA, 75 bp, synthetic construct
  source 1..75: mol_type = other DNA
gcggaactgaagctgattgcggagaaggtgaagaagggatatgtggagcaaacgaaggataattctttgcaacct

SEQ ID NO: 758723 - DNA, 75 bp, synthetic construct
  source 1..75: mol_type = other DNA
attaatgcacttctcgctgatgcatatcctttttaacctgctctggtggtggtatctcggcggtgcggtggaaaa

SEQ ID NO: 758724 - DNA, 75 bp, synthetic construct
  source 1..75: mol_type = other DNA
atagtttcacaaccaaattacactgaactgacatgggattatgtgaagaaaaaccaatggaataaagttacaaaa

SEQ ID NO: 758725 - DNA, 75 bp, synthetic construct
  source 1..75: mol_type = other DNA
gcagttaaggcgcttaataaagcgttgctggcacatttttacgccgtggcgaactgggatattccagagggtttc

SEQ ID NO: 758726 - DNA, 75 bp, synthetic construct
  source 1..75: mol_type = other DNA
gacatgcaattcctgttatgggatgcgcaacgtcgtgccggtatcagtgatgagcagattaccctggcgatggta

SEQ ID NO: 758727 - DNA, 75 bp, synthetic construct
  source 1..75: mol_type = other DNA
cgatatgactcagcactggcgcattgccggtctggagccaacgcaggtagtcggtctgttggcggtggcctggat

SEQ ID NO: 758728 - DNA, 75 bp, synthetic construct
  source 1..75: mol_type = other DNA
cttaatgggttatagtgcgattcccttttatatattttctgcattgttattctttattccattcgccttaatgat

SEQ ID NO: 758729 - DNA, 75 bp, synthetic construct
  source 1..75: mol_type = other DNA
ttagaatggcaaaacaccgtcgcccaggcgatcagtcagatcgacggcctgaaaacaacacagttaccatcacca

SEQ ID NO: 758730 - DNA, 75 bp, synthetic construct
  source 1..75: mol_type = other DNA
gtaatggctgtactcacggcacttgaaatgaaatgcacaagatataaagtgcgtgaggatgttatggatcagatc

SEQ ID NO: 758731 - DNA, 75 bp, synthetic construct
  source 1..75: mol_type = other DNA
gcggagctgaagctgattgcggagaaggtgaagaagggatatgtggagcaagcgaaggataattctttgcaacct

SEQ ID NO: 758732 - DNA, 75 bp, synthetic construct
  source 1..75: mol_type = other DNA
gaactgggatattcctgacggttttctgtgtccgccagtacctggccgggcggattatattcatcatcttgccga

SEQ ID NO: 758733 - DNA, 75 bp, synthetic construct
  source 1..75: mol_type = other DNA
gctgtcgtttttccgcccgaagttgtacacaccacgttaagtcatcgccgctttcccggagttcctgttcagtaa

SEQ ID NO: 758734 - DNA, 75 bp, synthetic construct
  source 1..75: mol_type = other DNA
gcccagcgtctactggggcaaaaaaaattaccctcgcttgagtggttaaaaatagtggcgactgatgagcacatt

SEQ ID NO: 758735 - DNA, 75 bp, synthetic construct
  source 1..75: mol_type = other DNA
tctttcgagttgatattaagaccaagaaatagcttacgcatagatttaaatacatcggaaacaaaaatatcttta

SEQ ID NO: 758736 - DNA, 75 bp, synthetic construct
  source 1..75: mol_type = other DNA
gtaattcttcctgtattggaacaggatattttctctcctaaaaacagtgaagacttatataatttaagtacacat

SEQ ID NO: 758737 - DNA, 75 bp, synthetic construct
  source 1..75: mol_type = other DNA
attgaatacgtgctgattcagctggccgatccgctgctgcgcccgattcgccgcctgctaccggcaatgggtggg

SEQ ID NO: 758738 - DNA, 75 bp, synthetic construct
  source 1..75: mol_type = other DNA
ataaaatataagatatttggtcatgttgatactttgccccccaaagataaggaattaataaaaatacttaaggat

SEQ ID NO: 758739 - DNA, 75 bp, synthetic construct
  source 1..75: mol_type = other DNA
actctgtctttcaatggaaattattatgcttctgccagatatattgaatttcattgtgataataatcatgctata

SEQ ID NO: 758740 - DNA, 75 bp, synthetic construct
  source 1..75: mol_type = other DNA
taaatgacattatagacagcagaaacatatcagccccccatgaactggcaaatattcttacccgcgaaaaaaata

SEQ ID NO: 758741 - DNA, 75 bp, synthetic construct
  source 1..75: mol_type = other DNA
caaaacctgcgttgtggcttgcccgtatggtgcgatggaagtggtggtgcgtccggtgattcgcaacagcggcgc

SEQ ID NO: 758742 - DNA, 75 bp, synthetic construct
  source 1..75: mol_type = other DNA
cctgataagcctgtttgatggattcactttattccattgtgttggaatgataacctttcttatccattatctcag

SEQ ID NO: 758743 - DNA, 75 bp, synthetic construct
  source 1..75: mol_type = other DNA
gtggtgaccttcctgccaatcatctggattgccggtttactgattctgctgaaaaccatcggcctgctgattttc

SEQ ID NO: 758744 - DNA, 75 bp, synthetic construct
  source 1..75: mol_type = other DNA
gcgctgatttgtgtcgatcgtaataaacttgaacaactgagcgcagaaaaacgccgccgtacggcgctgatgttc

SEQ ID NO: 758745 - DNA, 75 bp, synthetic construct
  source 1..75: mol_type = other DNA
gtatggcggcttgcccgacccatgcgctgatttgtgtcgatcgtaataaacttgaacaactgagcgcagaaaaac

SEQ ID NO: 758746 - DNA, 75 bp, synthetic construct
  source 1..75: mol_type = other DNA
cacaattaaaaaatgtagcacttgaacatgcaaaaagtgaagttattaacagtttaactatcgaggaatttaata

SEQ ID NO: 758747 - DNA, 75 bp, synthetic construct
  source 1..75: mol_type = other DNA
gccattgatgaaatgaatattgatggaattatggctattgtcggtattattcaatatatgaaaattacggggtat

SEQ ID NO: 758748 - DNA, 75 bp, synthetic construct
  source 1..75: mol_type = other DNA
ttaattgtccgataacgctacgtattcctgagacaggtgtttttgtcagaaatgctcgaaattcagaaatatgtg

SEQ ID NO: 758749 - DNA, 75 bp, synthetic construct
  source 1..75: mol_type = other DNA
tatgattgttgaaaagcgtcgtcaggagggagcaagagataaagatataagcctttcaggaactgcttcaatgct

SEQ ID NO: 758750 - DNA, 75 bp, synthetic construct
  source 1..75: mol_type = other DNA
actaagtaagcttcaaattcaagaagaatcagtttcggggatcttaagtgctattcaccagaaaatatcagagaa

SEQ ID NO: 758751 - DNA, 75 bp, synthetic construct
  source 1..75: mol_type = other DNA
atggtggtgttgttgagttttcagaaacagaaaagtttaaagagtatatgacagaacttttttctgcttcaggat

SEQ ID NO: 758752 - DNA, 75 bp, synthetic construct
  source 1..75: mol_type = other DNA
cccggggagtaatagacctttcggcaattgatataattggtaatctaaaactagatctttcaacagaaaatgtga

SEQ ID NO: 758753 - DNA, 75 bp, synthetic construct
  source 1..75: mol_type = other DNA
gccccgtagttgcagcaaagattgatataccaaaattcgaaaaatatcatggtgatattggcatattggatcctc

SEQ ID NO: 758754 - DNA, 75 bp, synthetic construct
  source 1..75: mol_type = other DNA
tagtggttctgtgaaacgcattgaatttcaagggaataatggtggcaatataaatgattttttagggaggatagt

SEQ ID NO: 758755 - DNA, 75 bp, synthetic construct
  source 1..75: mol_type = other DNA
attacgggatatggtggttatgtatcagcgatagaccatgcgaatttcgtgtcagatataaagacagtagtagag

SEQ ID NO: 758756 - DNA, 75 bp, synthetic construct
  source 1..75: mol_type = other DNA
gatggtattaaagcagataaaaatgacatgaactgctttagcatgactaatggagaaactcattttgaaatttct

SEQ ID NO: 758757 - DNA, 75 bp, synthetic construct
  source 1..75: mol_type = other DNA
gcgcagatttcctacgtcaaaatcatgtttcccaatccactgaaaaactaaaagcttcacatgcaagagagctgg

SEQ ID NO: 758758 - DNA, 75 bp, synthetic construct
  source 1..75: mol_type = other DNA
gtcaggtgctactatatatcctaggaaagggacaaatgtaataactatccctaataatattaatgttttttttgc

SEQ ID NO: 758759 - DNA, 75 bp, synthetic construct
  source 1..75: mol_type = other DNA
cgaatgcgcatttcaaatatatctttgatggcgtatatgaattcattcgtaatattcgcaaaaacagtacaccag

SEQ ID NO: 758760 - DNA, 75 bp, synthetic construct
  source 1..75: mol_type = other DNA
ggccagcgaaaaagatgccgttcgcgccgaccaaagagctgctgaagaagcggcagagaaaggcaaacgctgggt

SEQ ID NO: 758761 - DNA, 75 bp, synthetic construct
  source 1..75: mol_type = other DNA
atgagagtcctttgcctggtcttactgtttttcacctgggtttgcgtggcggcagacgactacagcttccgcacg

SEQ ID NO: 758762 - DNA, 75 bp, synthetic construct
  source 1..75: mol_type = other DNA
cttcagggacaggtggtggaggtgccggacgacagcgacagccgtctgcacaacctcaataacccgcagccggac

SEQ ID NO: 758763 - DNA, 75 bp, synthetic construct
  source 1..75: mol_type = other DNA
caatactaatctatttatttatccatcttggtgcttcggcatccgacaaaatatattcagcaaaagaaatattac

SEQ ID NO: 758764 - DNA, 75 bp, synthetic construct
  source 1..75: mol_type = other DNA
cggggtattactggctgcagatggccgaggtccgttttccccatctttgggttggctgaacaaacgcttgctacc

SEQ ID NO: 758765 - DNA, 75 bp, synthetic construct
  source 1..75: mol_type = other DNA
acctatccgctggttcagctcgaagaggcatatatcttcattcctgatataccgttgatgaatgacagacgctcg

SEQ ID NO: 758766 - DNA, 75 bp, synthetic construct
  source 1..75: mol_type = other DNA
atgccaacgaaagctgaattacaggtgcgcgtagatgagctgaaaaagagaacgcgagcctcaaaaaaaatgctg

SEQ ID NO: 758767 - DNA, 75 bp, synthetic construct
  source 1..75: mol_type = other DNA
gcttccccagtaacaaacatttcgcaaagaaaaacctacaacttgccagaagataatgtttatgacgaagagttc

SEQ ID NO: 758768 - DNA, 75 bp, synthetic construct
  source 1..75: mol_type = other DNA
atgtcacatttaggttaactgaggatgaatatgcgccgtttgctaaagcaatagcacagcttgatattagtaaat

SEQ ID NO: 758769 - DNA, 75 bp, synthetic construct
  source 1..75: mol_type = other DNA
gcacggcgaatcgccaggcactcgaacgttaactattccctgtaaatctgaccccgacttatgtatgcaactgga

SEQ ID NO: 758770 - DNA, 75 bp, synthetic construct
  source 1..75: mol_type = other DNA
gctatttcagatattaggcgaaagtatttatggttgtttataggatgcctctttcatctcagtaccccggttgta

SEQ ID NO: 758771 - DNA, 75 bp, synthetic construct
  source 1..75: mol_type = other DNA
tatttccacttgctggattttttttatttttttttgttgcgtttttgattgcgaattccagcaaatttaaactaa

SEQ ID NO: 758772 - DNA, 75 bp, synthetic construct
  source 1..75: mol_type = other DNA
ctggttctaaagaaaaaatatgcaaaggcctaattcaactgataaaatggataggcccaaggaaaataaaaaaat

SEQ ID NO: 758773 - DNA, 75 bp, synthetic construct
  source 1..75: mol_type = other DNA
cgtttccacgtcgaaatgcgaaaaggtcgagtagtcttcactcccgtcgcaaacagagcctttgccattgctgat

SEQ ID NO: 758774 - DNA, 75 bp, synthetic construct
  source 1..75: mol_type = other DNA
tggcgtttcagtatcgcctttactggagtgcgcaacctcccgttcattgtccattagcacgagtcctggcgacgc

SEQ ID NO: 758775 - DNA, 75 bp, synthetic construct
  source 1..75: mol_type = other DNA
acgcagatcgcaaatacagcctttgttaaggcagctataactgcacttatcaacggtgcgcctggcacactggat

SEQ ID NO: 758776 - DNA, 75 bp, synthetic construct
  source 1..75: mol_type = other DNA
taaggtttttaaaatcaaactttgagccatttatcaaaggaaatgattttaaaacaagccttgattactgtgatt

SEQ ID NO: 758777 - DNA, 75 bp, synthetic construct
  source 1..75: mol_type = other DNA
tcttcaataagtttttgttgtcttttgatccctcaacacagcaatggatcttcacttgcaggcttgggaaggtgc

SEQ ID NO: 758778 - DNA, 75 bp, synthetic construct
  source 1..75: mol_type = other DNA
aattatttcagatgatcctgtctgatgcaaaaaactatgcagagttaattcggctggcaaaagaaacagaagact

SEQ ID NO: 758779 - DNA, 75 bp, synthetic construct
  source 1..75: mol_type = other DNA
ttaactgcactgacaagtgttggacgtgcaattcttagtaagcccagtattcagagcgttcttaattaccttggt

SEQ ID NO: 758780 - DNA, 75 bp, synthetic construct
  source 1..75: mol_type = other DNA
tcagtggatattggtgaattctaccaggtaactattcagcatcgtaaggatatctctcttgcacttaacgcaggc

SEQ ID NO: 758781 - DNA, 75 bp, synthetic construct
  source 1..75: mol_type = other DNA
aacagcacgtctgaagtgctggccgccacaccgaaagctgtcaaggctgcatatgacctggctaacgggaagtat

SEQ ID NO: 758782 - DNA, 75 bp, synthetic construct
  source 1..75: mol_type = other DNA
taagtctgtaaaagatctggctgataccaaagcgccaatagaaagcccgagtctgacaggaacgccaaccgcgcc

SEQ ID NO: 758783 - DNA, 75 bp, synthetic construct
  source 1..75: mol_type = other DNA
acaaaactgcaaacagtacgcacaatcggcggggtgtcatttgatggtagtgctaatatcgacctgccgggtgtg

SEQ ID NO: 758784 - DNA, 75 bp, synthetic construct
  source 1..75: mol_type = other DNA
caggatgcaagcacaacgcaaaagggattagttcagctcagtagtgccactaacagcacgtctgaagtgctggcc

SEQ ID NO: 758785 - DNA, 75 bp, synthetic construct
  source 1..75: mol_type = other DNA
tcgtgcagttcaccgagatggtggtgcgtaaaaccagcccggtactttatcggctactcgggatttttctgccgc

SEQ ID NO: 758786 - DNA, 75 bp, synthetic construct
  source 1..75: mol_type = other DNA
cagggagccgatcgcccggtaaatgcccgcgttgttgccgaacgcggctgcgggattatccctggcgacgtcggc

SEQ ID NO: 758787 - DNA, 75 bp, synthetic construct
  source 1..75: mol_type = other DNA
ggtgcagatcgctctgttaatgcagaaattgttgcgatgcgtgggtgtgggattattccggacaagcatggactg

SEQ ID NO: 758788 - DNA, 75 bp, synthetic construct
  source 1..75: mol_type = other DNA
cgagacaagaagaagccgcttatcgccaactcgtgggttgccgtgtacaccgtccagggatgcggtaaaatcatt

SEQ ID NO: 758789 - DNA, 75 bp, synthetic construct
  source 1..75: mol_type = other DNA
ttaacttcttcgactccttccatttcagcaaagcctttaagcataaatttggttatgcgccatcagccgtgctga

SEQ ID NO: 758790 - DNA, 75 bp, synthetic construct
  source 1..75: mol_type = other DNA
cacatattatcgatgctactgtagattttatggcatcaagccaggcatttcgtgagtatctgagaaaacttcccc

SEQ ID NO: 758791 - DNA, 75 bp, synthetic construct
  source 1..75: mol_type = other DNA
tactttataccatgttttttaatagctcttaatcatttaataaatgaacacaaacaaggtgtgagtcgtttcata

SEQ ID NO: 758792 - DNA, 75 bp, synthetic construct
  source 1..75: mol_type = other DNA
gaaacagcaccgcatcagcagcagtgggagcacagagcgggaagaatgctgttgagaataactcactcagtgctg

SEQ ID NO: 758793 - DNA, 75 bp, synthetic construct
  source 1..75: mol_type = other DNA
agctcaggctgcgtatggcagagcaacagatgctattaataaaatagaatcagccttgaaaggatatggaatatg

SEQ ID NO: 758794 - DNA, 75 bp, synthetic construct
  source 1..75: mol_type = other DNA
gtgatttagcatggattgatgttgctcccccaagtatgagcattcttaaaaatgctgaagaaccggttatctcaa

SEQ ID NO: 758795 - DNA, 75 bp, synthetic construct
  source 1..75: mol_type = other DNA
acccatgggtgtcttcctcaacggcgcagatggtttcattcatcatggcggagcaggcaataccctgacagcgct

SEQ ID NO: 758796 - DNA, 75 bp, synthetic construct
  source 1..75: mol_type = other DNA
gtctggttgactggatacctatgggtgtattccttaatggagctgatggatttattcatcacggtggcgcaggta

SEQ ID NO: 758797 - DNA, 75 bp, synthetic construct
  source 1..75: mol_type = other DNA
gtacttcaatgcgttgtagaaactggtacttcaattgattggctggtatcagggaaaggtgagttaaaaaccaca

SEQ ID NO: 758798 - DNA, 75 bp, synthetic construct
  source 1..75: mol_type = other DNA
gtatttcagaagaagcctttaacgagcttaacagaattaaacaaacgaccaacttacctcatcaaactgttatgc

SEQ ID NO: 758799 - DNA, 75 bp, synthetic construct
  source 1..75: mol_type = other DNA
ttactcaggacgctttagatactttgaaggcacttaacagctttaaaattgatattgcccgtctaatgagtctca

SEQ ID NO: 758800 - DNA, 75 bp, synthetic construct
  source 1..75: mol_type = other DNA
tgccagcccgcacatgacggataaatatggcaaaacgccgctggaactggcgcgggaacggggctttgaagagat

SEQ ID NO: 758801 - DNA, 75 bp, synthetic construct
  source 1..75: mol_type = other DNA
cgtttccgccattggcattctgacgattacccccagcgaagcgtctattatcgcgtgcgatatcgccacaaagtc

SEQ ID NO: 758802 - DNA, 75 bp, synthetic construct
  source 1..75: mol_type = other DNA
atggaaaataaacacacactaaccagagttacaaagacagcctttgaagaacttaaccgaatcaaaaacattaca

SEQ ID NO: 758803 - DNA, 75 bp, synthetic construct
  source 1..75: mol_type = other DNA
gaggcagcaagacaccatatcaggattaagcaagatgaccttgatagtctgaaggctctaaatgcctttggactg

SEQ ID NO: 758804 - DNA, 75 bp, synthetic construct
  source 1..75: mol_type = other DNA
atgagtataaaaaatctacctgccgactatttattggctgcacaacagggtgatatcgataaagtaaaaacctgc

SEQ ID NO: 758805 - DNA, 75 bp, synthetic construct
  source 1..75: mol_type = other DNA
tccgtttcccgaaaaccctgtcagagcagaaccgcattattggactgccacttgatgaagccatccccgcagcag

SEQ ID NO: 758806 - DNA, 75 bp, synthetic construct
  source 1..75: mol_type = other DNA
acggtcagtggcttgtggaaatagaaggaaaattaagcataaaaaaaatcaatctaattccagttaaaaaagtca

SEQ ID NO: 758807 - DNA, 75 bp, synthetic construct
  source 1..75: mol_type = other DNA
gcgcatacggagattaacgttaaccagaccaaccatgttggctggacgccgctactggaagcgattgtgcttaat

SEQ ID NO: 758808 - DNA, 75 bp, synthetic construct
  source 1..75: mol_type = other DNA
atgagtataaaaaatctacctgccgactatttattggctgcacaacagggcgatatcgataaagtaaaaacctgt

SEQ ID NO: 758809 - DNA, 75 bp, synthetic construct
  source 1..75: mol_type = other DNA
gctactggaagcgattgtgcttaatgatggcgggattaaacagcaggcgattgtgcagttattgctggaacacgg

SEQ ID NO: 758810 - DNA, 75 bp, synthetic construct
  source 1..75: mol_type = other DNA
gtaacaatggttattttgtcccgtccacggccccggacagtccgtatctgattacggtgaacccgaaactggatg

SEQ ID NO: 758811 - DNA, 75 bp, synthetic construct
  source 1..75: mol_type = other DNA
gtacagaggcatcatgttgctgtggactggcggtaaatggattgaagggttacccgccgaactgaaacagctctc

SEQ ID NO: 758812 - DNA, 75 bp, synthetic construct
  source 1..75: mol_type = other DNA
gggcgcgacgctggtaatgcttacgcgcaatattgatgtttcagtgggttcgattaccggaatgtgcgcagtgct

SEQ ID NO: 758813 - DNA, 75 bp, synthetic construct
  source 1..75: mol_type = other DNA
ttgaaggctgcgcaggataaatatgggcctgttccggcggatacgacggaagaacagcggcaggcatatctggca

SEQ ID NO: 758814 - DNA, 75 bp, synthetic construct
  source 1..75: mol_type = other DNA
tcacccttcataatggcagcgttatcagcgggaacaacgtgcagcttgcgggtggcaatattaccaacagcggcg

SEQ ID NO: 758815 - DNA, 75 bp, synthetic construct
  source 1..75: mol_type = other DNA
tcgccagcggtggtgacaccaccgtcaacgcaggacgggatatcaccgctgttgcgtcatccgttaccgcaaccg

SEQ ID NO: 758816 - DNA, 75 bp, synthetic construct
  source 1..75: mol_type = other DNA
cggcagcatcaacgcacagaacgacctctcgctcgacagttccggctatatcgacaacctgaatgcggggctgat

SEQ ID NO: 758817 - DNA, 75 bp, synthetic construct
  source 1..75: mol_type = other DNA
gcacaactgaccagaagcatactgtggtgggagtccgtcaccatcaacggacagacagtcatggttccgaaactg

SEQ ID NO: 758818 - DNA, 75 bp, synthetic construct
  source 1..75: mol_type = other DNA
acagtttctgggctcatcgtacattcttgaccgtcttggcctgaaaccggaaaaagattaccgctttctggggga

SEQ ID NO: 758819 - DNA, 75 bp, synthetic construct
  source 1..75: mol_type = other DNA
cgctgaaggatatcccgggtgcgctgtcgctgtacggggcaagtgtaagcagctatcccctgccatccggtaaca

SEQ ID NO: 758820 - DNA, 75 bp, synthetic construct
  source 1..75: mol_type = other DNA
gcggtgctgttcagagtgcgctggatttggctctgaccctgagtggcgatgttattgctgccaccggcagcaaaa

SEQ ID NO: 758821 - DNA, 75 bp, synthetic construct
  source 1..75: mol_type = other DNA
attgtgctggttgaaggaaaatcggatgtcaccttcctgaggcatgccgcacgttcactgaagcagtccggtgta

SEQ ID NO: 758822 - DNA, 75 bp, synthetic construct
  source 1..75: mol_type = other DNA
gtggtgcactgaacctgaaggccatcggggatatcagcaatatcagctcagtcatcagcggtaaaaccgtatccc

SEQ ID NO: 758823 - DNA, 66 bp, synthetic construct
  source 1..66: mol_type = other DNA
gggagccgaaggtgcgcccggcagacagaacaacactgcagtagtcagaatcagagcagcagataa

SEQ ID NO: 758824 - DNA, 75 bp, synthetic construct
  source 1..75: mol_type = other DNA
ttgggggggctacaggtggggtagtgattgctctgactccggaagcaattgcagccgcccaggcagcagtcagtg

SEQ ID NO: 758825 - DNA, 75 bp, synthetic construct
  source 1..75: mol_type = other DNA
gctgacagcctgactgcacgtctgacgggtgagctcgtcagcacagcgggcagcaaagtcacctcgaacggtgaa

SEQ ID NO: 758826 - DNA, 75 bp, synthetic construct
  source 1..75: mol_type = other DNA
ggctaaatgtcagactgctgcctgtaaggctcagacagaagcaaaatggacggcaattgacctggggcaggatgg

SEQ ID NO: 758827 - DNA, 75 bp, synthetic construct
  source 1..75: mol_type = other DNA
gaaagcaaaaacagtcgcaacggcaggtcagaaagtcatgaaagccacgcagcagtgtccacggtgacggcgggc

SEQ ID NO: 758828 - DNA, 75 bp, synthetic construct
  source 1..75: mol_type = other DNA
tctgcaccggaactggcgcatctgctgaaatcaacagaaaaagacccggcagtaaacgccattgctcacgccatt

SEQ ID NO: 758829 - DNA, 75 bp, synthetic construct
  source 1..75: mol_type = other DNA
atagccagtatttttaatggtcctggtgaaaaattgaaccttgttccaatggatggaaatctgaacaaaggagcc

SEQ ID NO: 758830 - DNA, 75 bp, synthetic construct
  source 1..75: mol_type = other DNA
tccttaacgcaccgggttcacttcaggccggtggcgatgtgagtctgaacagccggagtgatatcaccatcagtg

SEQ ID NO: 758831 - DNA, 75 bp, synthetic construct
  source 1..75: mol_type = other DNA
tacaggaatgaaatggcgaagtatggtaccggcagtgaaattcagcggggtatccaggccgcgacagcggcgctt

SEQ ID NO: 758832 - DNA, 75 bp, synthetic construct
  source 1..75: mol_type = other DNA
ctctgaagaatctgttttctgtttaggggattttattttgcccttcaatgggaccgctaccacgcatcaggaggg

SEQ ID NO: 758833 - DNA, 75 bp, synthetic construct
  source 1..75: mol_type = other DNA
accataacaacagcggcgatattctcattaccgggagccagattaagtccggcaatgacaccagcctgaatgcac

SEQ ID NO: 758834 - DNA, 75 bp, synthetic construct
  source 1..75: mol_type = other DNA
cggcagcaggcgcaattggtgcgggtactggtgaagtgatcgcgtcagccattgcgaaaagcctctacccgggcg

SEQ ID NO: 758835 - DNA, 75 bp, synthetic construct
  source 1..75: mol_type = other DNA
accggtaataccactgtcatgccccgggcaggtggtgcaggtaacacgataacggtgccttcgctgaactccctg

SEQ ID NO: 758836 - DNA, 75 bp, synthetic construct
  source 1..75: mol_type = other DNA
cgcctgcgaatttaagctattccgaggcggcaatgctggcggtgttaccgcaagcgcccagccgactgcgcccgg

SEQ ID NO: 758837 - DNA, 75 bp, synthetic construct
  source 1..75: mol_type = other DNA
gcaaaatggctgaattgctaaatgatggacacccagagtggtgttttagcacatgcgaaaaacggattgctaatt

SEQ ID NO: 758838 - DNA, 75 bp, synthetic construct
  source 1..75: mol_type = other DNA
tatcggtgcatttcggcgacgaaagcgcgccgttccgcgccgtagaccgtatcagctacagcgtaaaacagggcg

SEQ ID NO: 758839 - DNA, 75 bp, synthetic construct
  source 1..75: mol_type = other DNA
aggtcaataatatcttactgtcgcgcagtgcgaatctgccggaagacccgcgcccgaactcagtcactcgtggcg

SEQ ID NO: 758840 - DNA, 75 bp, synthetic construct
  source 1..75: mol_type = other DNA
caagcgcccagccgtcttcgcccggatcgttggccggagcgtgccgaagccgcgcgtaataaagtgctcgaacgg

SEQ ID NO: 758841 - DNA, 75 bp, synthetic construct
  source 1..75: mol_type = other DNA
tgtatcttaaccgcgctccgtttggcggtacgttgcaggggatcggtgcggcaagttgggcttatctcggaaagt

SEQ ID NO: 758842 - DNA, 75 bp, synthetic construct
  source 1..75: mol_type = other DNA
atgatttatccggaaatgacaggacgaatgggggagcatctacgtcttgggacgctggaaagcgtgtggattcag

SEQ ID NO: 758843 - DNA, 75 bp, synthetic construct
  source 1..75: mol_type = other DNA
atgatttacccaacaaatacaggaaaaagcggggaacaccttcgtctcaccacgctggaaagtgtctggattcag

SEQ ID NO: 758844 - DNA, 75 bp, synthetic construct
  source 1..75: mol_type = other DNA
cgggtggtagtttatcatctgagtttggaagctccattatccagaaaaagaaagatgcaatggaggctgggaaat

SEQ ID NO: 758845 - DNA, 75 bp, synthetic construct
  source 1..75: mol_type = other DNA
ctggcgattatggggctgattgattatcccggtcgcgtgatggcagaaaagctggaatttaacggtcaggatttg

SEQ ID NO: 758846 - DNA, 75 bp, synthetic construct
  source 1..75: mol_type = other DNA
aatttgctcaggacaaagaacgtctggcgtcgttgccaggtgttgttcccggcaagtatgaccgcccgaacggct

SEQ ID NO: 758847 - DNA, 75 bp, synthetic construct
  source 1..75: mol_type = other DNA
aagtggtcgggattgtgggtgagtccggctctggtaaatcggtcagttcgctggcgattatggggctgattgatt

SEQ ID NO: 758848 - DNA, 75 bp, synthetic construct
  source 1..75: mol_type = other DNA
gccggttgttggtcagtttggctttgccagtgctgtaccgctgttgaatcaggtcaataatattttactgtcgcg

SEQ ID NO: 758849 - DNA, 75 bp, synthetic construct
  source 1..75: mol_type = other DNA
taggcagtggaaatatagatatttttttatctatcccgtcactccccactcgtggcggtaaagttgtcgggacac

SEQ ID NO: 758850 - DNA, 75 bp, synthetic construct
  source 1..75: mol_type = other DNA
gttaaacgcctttattttatttgaaggtggagcgctctctcaggaaatgcttcagatcataatggagcattataa

SEQ ID NO: 758851 - DNA, 75 bp, synthetic construct
  source 1..75: mol_type = other DNA
gcttttaatatcgcattcaaggcggatggacttgcagttagatttaatgttaatttcctcaataaaaatcagaaa

SEQ ID NO: 758852 - DNA, 75 bp, synthetic construct
  source 1..75: mol_type = other DNA
gaaatttcgtatgctggccgaatattcccgtagccagatgacaaaagttgtcgttgatattgagcctcatatcat

SEQ ID NO: 758853 - DNA, 75 bp, synthetic construct
  source 1..75: mol_type = other DNA
aagaagcgggggctgaccttattgttgttggcggtgcattatttaacaaacagcctcatgaaagttatcaggcat

SEQ ID NO: 758854 - DNA, 75 bp, synthetic construct
  source 1..75: mol_type = other DNA
accaggccagacatttattcataaaagtctggagaaaatccgtaataccaaaaaaatgatatctggcagagatat

SEQ ID NO: 758855 - DNA, 75 bp, synthetic construct
  source 1..75: mol_type = other DNA
cgtcgttgtctggcaacctggttattggatggaagccagccgccaaccctgttactgccagagcaagaagggatt

SEQ ID NO: 758856 - DNA, 75 bp, synthetic construct
  source 1..75: mol_type = other DNA
caagcgcccagccgactgcgcccggatcgctggccggagcgtgctgaggccgcgcgtaataaagtgctcgaacgg

SEQ ID NO: 758857 - DNA, 75 bp, synthetic construct
  source 1..75: mol_type = other DNA
ttgccgttgcaatcaagtggaggggcaggtgaacgctggtggtttctgaatggcgaaccgttaactgaacgcggg

SEQ ID NO: 758858 - DNA, 75 bp, synthetic construct
  source 1..75: mol_type = other DNA
aacgcaaatcaacgcagtacaagccactgacagcgatgcaggaggcttacgcgcaggaatacaccaaatgccctg

SEQ ID NO: 758859 - DNA, 75 bp, synthetic construct
  source 1..75: mol_type = other DNA
gcggtaaaagccagcgtcatgatgcgtgatgagcgtatccagaaacggatcgccgaactgatggaagagcgcaac

SEQ ID NO: 758860 - DNA, 75 bp, synthetic construct
  source 1..75: mol_type = other DNA
taactgaacgcgggcgcaacgtgaccctgcatttgacggataaaggcgattatcaattgctggtgatggatgacg

SEQ ID NO: 758861 - DNA, 75 bp, synthetic construct
  source 1..75: mol_type = other DNA
gctggccggcggtctaaccggaaacagcaccgcatcagcagcagtgggagcacagagcgggaagaatgctgttga

SEQ ID NO: 758862 - DNA, 75 bp, synthetic construct
  source 1..75: mol_type = other DNA
atgccggtattaagctggggatttagatcccacattaacgcgagtaaaatacttaccaacaggggagaaaaaagc

SEQ ID NO: 758863 - DNA, 75 bp, synthetic construct
  source 1..75: mol_type = other DNA
atatcgatcttgattacgtttatgacgaaaaccgccagcaaatggatcgcaatattgatgtgctaattcagcggg

SEQ ID NO: 758864 - DNA, 75 bp, synthetic construct
  source 1..75: mol_type = other DNA
ggtagcgacatgacccagcactggcatattgccggactggagcctacgcaggtggttggtctgctggcagtggca

SEQ ID NO: 758865 - DNA, 75 bp, synthetic construct
  source 1..75: mol_type = other DNA
gatatgcaaatatcaaccgtgtatttgcaggcatttgctgatcccgatggtgatgggctggtcaaagaggtctgg

SEQ ID NO: 758866 - DNA, 75 bp, synthetic construct
  source 1..75: mol_type = other DNA
aaactatggttattatcccgacaattttctgcataaccaacctgaaatagaccttattcgtcctgagttttcaac

SEQ ID NO: 758867 - DNA, 75 bp, synthetic construct
  source 1..75: mol_type = other DNA
tttgcccagcaaattatcagcgtacaagaaactgcggctgtgcgggttatgcatatcgaccttgattacgtttat

SEQ ID NO: 758868 - DNA, 75 bp, synthetic construct
  source 1..75: mol_type = other DNA
ttcgttatgttacccgggatcggtcaggagaacctgtcgtaaaaatgccggttcacgcggtactgaaggaagcca

SEQ ID NO: 758869 - DNA, 75 bp, synthetic construct
  source 1..75: mol_type = other DNA
gctaataaggaaagctaccgggaagaattacttgttctctgaagatgccgccgtcaacactgcggtcagaaaaag

SEQ ID NO: 758870 - DNA, 75 bp, synthetic construct
  source 1..75: mol_type = other DNA
ggatgattcaggaatatgtccctggtaagcaggtcacgctggcacatgtcatcgccaatccagggaaggatctgt

SEQ ID NO: 758871 - DNA, 75 bp, synthetic construct
  source 1..75: mol_type = other DNA
cgaacccaggttatcagtccggtctggcaatgctatcgtttgtggtatttgctatttttgcctatggcggaattg

SEQ ID NO: 758872 - DNA, 75 bp, synthetic construct
  source 1..75: mol_type = other DNA
tgtgggggcgttggtcgtatataggtggtggcaaaccaggaaatatgttcaatcagttgctggcatccaaaaaac

SEQ ID NO: 758873 - DNA, 75 bp, synthetic construct
  source 1..75: mol_type = other DNA
gaccggtatggaaagggcgcaggggattgttctggtagagggaaagtcggatgttactttcctgaggcatgcggc

SEQ ID NO: 758874 - DNA, 75 bp, synthetic construct
  source 1..75: mol_type = other DNA
gagcaatttaaacagtgggcccgctttaaaagtcgtgcgttaaggaaggtgcgaataagtggggaaattcttctc

SEQ ID NO: 758875 - DNA, 75 bp, synthetic construct
  source 1..75: mol_type = other DNA
tatggcaggcgcgctggcaggtgcttcagcgccggagctggcgaacatcatcggtcatcacgcgggtattgatga

SEQ ID NO: 758876 - DNA, 75 bp, synthetic construct
  source 1..75: mol_type = other DNA
gtattcatctgacctccactgaaagtggtgtcggggttaatcttggtaacctttatgcccgcgatggcgatatca

SEQ ID NO: 758877 - DNA, 75 bp, synthetic construct
  source 1..75: mol_type = other DNA
cgacagaaattacacattgatgtggccgcagatcctctgacggccttgtctggtgaagataaatggaatattgag

SEQ ID NO: 758878 - DNA, 75 bp, synthetic construct
  source 1..75: mol_type = other DNA
tggcgacatgtgcagaaaacccttccggtgccgcctgccagaaagcaatgaatgagagggatgctgtagggctgg

SEQ ID NO: 758879 - DNA, 75 bp, synthetic construct
  source 1..75: mol_type = other DNA
actatctgaacagtaatacgtcgaagggtgacagggctctggctttctttggggaaccggaaaattactggggta

SEQ ID NO: 758880 - DNA, 75 bp, synthetic construct
  source 1..75: mol_type = other DNA
agaatacggtttggatgaagttcaggcgggaatagtcgcgagcgctgcggcgtcagcatttgggggaattagtaa

SEQ ID NO: 758881 - DNA, 75 bp, synthetic construct
  source 1..75: mol_type = other DNA
cgcacctggctacttaagatatgaaggtgcaggtcttgaaatgatctataacccgaaaacgggacaagttggtca

SEQ ID NO: 758882 - DNA, 75 bp, synthetic construct
  source 1..75: mol_type = other DNA
tgtcctgcagcattgccccaggtagtgcctcttgtcagaaagggctggcgatgcaggatgcgctgatggttgcat

SEQ ID NO: 758883 - DNA, 75 bp, synthetic construct
  source 1..75: mol_type = other DNA
ggtcgtatattggcggtggcaggtcaggaaatatgttcaatcagttgttggcatccaaaaaattgacgaaaacag

SEQ ID NO: 758884 - DNA, 75 bp, synthetic construct
  source 1..75: mol_type = other DNA
agccagggtgacaccacgctgaaagcagccaccacggacaaccggggcagtctgctttcggccggcacgctctcc

SEQ ID NO: 758885 - DNA, 75 bp, synthetic construct
  source 1..75: mol_type = other DNA
gccagtggcacctctccggcaggtcagtaccgggcggttatcagcgctgccggtgatgtgtctgccagctttacc

SEQ ID NO: 758886 - DNA, 75 bp, synthetic construct
  source 1..75: mol_type = other DNA
attactatgatggtgctaccaaaactgctaccagtgtaaaatcaatggatacgcaaactatggcgaaattggcta

SEQ ID NO: 758887 - DNA, 75 bp, synthetic construct
  source 1..75: mol_type = other DNA
ctgcatttaatcagactgagtttaataaattgcttcttgaatgcgttgtaaaaacacagtcaacagttgccaaga

SEQ ID NO: 758888 - DNA, 75 bp, synthetic construct
  source 1..75: mol_type = other DNA
gacgctgccttccgtcaatgaaatggctgaactgttcgatatcatcgacccgattgctattgccgaagtacgcga

SEQ ID NO: 758889 - DNA, 75 bp, synthetic construct
  source 1..75: mol_type = other DNA
gaaaatgcgcgcggcgctggagcagttgaaagggctggaaaatctctctggcgatctgtacgagaagataaccaa

SEQ ID NO: 758890 - DNA, 75 bp, synthetic construct
  source 1..75: mol_type = other DNA
caccaaaattattgccgataaaaccaaatatcccttcctgctttccaatggtaaccgcgttgcgcaaggtgaact

SEQ ID NO: 758891 - DNA, 75 bp, synthetic construct
  source 1..75: mol_type = other DNA
ccgcttcgtctggacggcgaagcccttaaactagtctctattcatattaatgatgagccgtggacagcctggaaa

SEQ ID NO: 758892 - DNA, 75 bp, synthetic construct
  source 1..75: mol_type = other DNA
tgaaatgggatgaagaacgcttcggcctggagtatgacctcgacatctatatgatcgtcgcggtggatttcttca

SEQ ID NO: 758893 - DNA, 75 bp, synthetic construct
  source 1..75: mol_type = other DNA
atgatcgttgcagtggatttcttcaacatgggcgcaatggagaataaaggtcttaacatctttaactccaaatat

SEQ ID NO: 758894 - DNA, 75 bp, synthetic construct
  source 1..75: mol_type = other DNA
ctgtaggtagctccagtttaaagcgcaaaattgtcaatatgggtaatggtgacatcaataatgtcagctccgatg

SEQ ID NO: 758895 - DNA, 75 bp, synthetic construct
  source 1..75: mol_type = other DNA
caaagcggtaaaaatcaattcggttataccggtggaaagcctgttggccaaccatatgattcgggaactacataa

SEQ ID NO: 758896 - DNA, 75 bp, synthetic construct
  source 1..75: mol_type = other DNA
gcccaaaacaaaatcattaacgttgcaaagggtactatttccgccaccagcaccgatgtagtaaacggctctcaa

SEQ ID NO: 758897 - DNA, 75 bp, synthetic construct
  source 1..75: mol_type = other DNA
gacctttgtttttgataatgtctacttccagccggtgcctgcgctgctgtgcgaattctctgcgccagtgaaact

SEQ ID NO: 758898 - DNA, 75 bp, synthetic construct
  source 1..75: mol_type = other DNA
tttaccacgcgttctggtcgcgaagtagcgctggagctgtacgtcgatcgcggcaaccttgatcgcgcgccgtgg

SEQ ID NO: 758899 - DNA, 75 bp, synthetic construct
  source 1..75: mol_type = other DNA
atcaccaatgtcaaagccggtgacctgacagctggcagcactgacgccgttaacggctcccagctcaaaaccacc

SEQ ID NO: 758900 - DNA, 75 bp, synthetic construct
  source 1..75: mol_type = other DNA
cgattttgatgtactgcgcgacaccttcaccacgcgttctggccgtgaagtagcgttggaactgtatgtcgatcg

SEQ ID NO: 758901 - DNA, 75 bp, synthetic construct
  source 1..75: mol_type = other DNA
gctggttgaaggctttgacaagtcccctatttccgccaaggccctgcatattcggctcaaggcaaaaggtatcgt

SEQ ID NO: 758902 - DNA, 75 bp, synthetic construct
  source 1..75: mol_type = other DNA
gatgacagtactgacgcggttaatggctcgcaactgaaagctactaacgataacgtggcaaccaacaccaccaat

SEQ ID NO: 758903 - DNA, 75 bp, synthetic construct
  source 1..75: mol_type = other DNA
cgttaggagcatcgtccatatcagagggtaattactctatggcgttgggtgtcgtggcagttgcccacggtaact

SEQ ID NO: 758904 - DNA, 75 bp, synthetic construct
  source 1..75: mol_type = other DNA
attaccggtggggcaaatgccattgctcttggacaaggcagttatgccggtttagaaaatggcattgcaattggt

SEQ ID NO: 758905 - DNA, 75 bp, synthetic construct
  source 1..75: mol_type = other DNA
cgccatcggcagtgcggctaaagcgaccagcgattatacccttgcactggggaattctgctcaagctacaactga

SEQ ID NO: 758906 - DNA, 75 bp, synthetic construct
  source 1..75: mol_type = other DNA
tttccacgggtagccgctcaatcgccatcggcagtgcggctaaagcgaccagcgattatacccttgcactgggga

SEQ ID NO: 758907 - DNA, 75 bp, synthetic construct
  source 1..75: mol_type = other DNA
atgtttgaaggtcatgcgccgtacaaaccgcgctatgtcttacccgattacgcccgttttctggcgaacggttcc

SEQ ID NO: 758908 - DNA, 75 bp, synthetic construct
  source 1..75: mol_type = other DNA
tgagctgttacaactcactgccgttagcgggtggtggcagtacgctggtacgcctcaacctgaaagccattgccg

SEQ ID NO: 758909 - DNA, 75 bp, synthetic construct
  source 1..75: mol_type = other DNA
gccaccaacacagccaatatcgccactaacaccacggatattgcaaccaacactgccaatatcgccgataacact

SEQ ID NO: 758910 - DNA, 75 bp, synthetic construct
  source 1..75: mol_type = other DNA
tcattaatgttgctaaaggtacggtttctgcaaccagcaccgatgtagtaaacggctctcaattgtacgacctgc

SEQ ID NO: 758911 - DNA, 75 bp, synthetic construct
  source 1..75: mol_type = other DNA
gattctgtcgccatcggtgtaggggctgcagcagcgaccgacaattctgtcgctatcggcgcaggatcgaccaca

SEQ ID NO: 758912 - DNA, 75 bp, synthetic construct
  source 1..75: mol_type = other DNA
aatcgctggatgacttctttacgcgcactctaccgcactactgccagcagcagatcgccatcatcgatgcgcggt

SEQ ID NO: 758913 - DNA, 75 bp, synthetic construct
  source 1..75: mol_type = other DNA
agcgatggcaccgtaaccgcagtaagctacgcgttgagaagcggaacctataataacgtgggtgatgctctgtca

SEQ ID NO: 758914 - DNA, 75 bp, synthetic construct
  source 1..75: mol_type = other DNA
attgaaaaacatcaggctgagttcagcatcaaagcaatgtgccgcgtgctccgggtggcccgcagcggctggtat

SEQ ID NO: 758915 - DNA, 75 bp, synthetic construct
  source 1..75: mol_type = other DNA
tatcaggcgctgctgaagcgacacaacctgcgtggcagtatgagtgcgaaaggctactgttatgacaatgcctgt

SEQ ID NO: 758916 - DNA, 75 bp, synthetic construct
  source 1..75: mol_type = other DNA
cgctttagcagccgggaaataatgcgggcaacggtgtttaattatatcgagtgtgattacaatcgctggcgtcgt

SEQ ID NO: 758917 - DNA, 75 bp, synthetic construct
  source 1..75: mol_type = other DNA
gtaagaggccccggaagttatcgttcacacggaccgtggaggccagtactgttcagcagattatcaggcgcaact

SEQ ID NO: 758918 - DNA, 75 bp, synthetic construct
  source 1..75: mol_type = other DNA
tctgctggagctgaatttttacgccactgaccctgaccagaagtggtcgggagacatcactcacgtacatgcaga

SEQ ID NO: 758919 - DNA, 75 bp, synthetic construct
  source 1..75: mol_type = other DNA
aaaacagcgttacggtgccccacgcctgacggatgaactgcgtgctcagggttacccctttaacgtaaaaaccgt

SEQ ID NO: 758920 - DNA, 75 bp, synthetic construct
  source 1..75: mol_type = other DNA
tgaagcggcataatctgcgtggaagtatgagcgcaaaagttgctgctacgataatgcctgcgtggaaagcttctt

SEQ ID NO: 758921 - DNA, 75 bp, synthetic construct
  source 1..75: mol_type = other DNA
cattcgctgaaagtggaatgtatccatggagaacactttatcagccgggaaataatgcgggcaacggtgttttaa

SEQ ID NO: 758922 - DNA, 75 bp, synthetic construct
  source 1..75: mol_type = other DNA
atgtggctgtttacttactataaggaagttaaaaacatcatttctaaagcgccatttgaagagtctgcgcgtaaa

SEQ ID NO: 758923 - DNA, 75 bp, synthetic construct
  source 1..75: mol_type = other DNA
acggggaacgctttagcagccgggaaataatgcgggcaacggtgtttaattctatcgagtgtgattacaatcgct

SEQ ID NO: 758924 - DNA, 75 bp, synthetic construct
  source 1..75: mol_type = other DNA
ccgtattggagaatctgctggagcaggacttcagcgccagtggcccgaaccagaagtgggcgggtgacatcacgt

SEQ ID NO: 758925 - DNA, 75 bp, synthetic construct
  source 1..75: mol_type = other DNA
ccgccttgctgacgaactgccggagttcaatattaaaaccattgccgccagcctgcgtcgtcaggggctgcgggc

SEQ ID NO: 758926 - DNA, 75 bp, synthetic construct
  source 1..75: mol_type = other DNA
ggaccgtggaggccagtactgttcagcagattatcaggcgcaactgaagcggcataatctgcgtggaagtatgag

SEQ ID NO: 758927 - DNA, 75 bp, synthetic construct
  source 1..75: mol_type = other DNA
tcggaaagttactaagctgttttgacaatagtcgtggctcgtatcaggttaactattgcatgtggcttatgtggt

SEQ ID NO: 758928 - DNA, 75 bp, synthetic construct
  source 1..75: mol_type = other DNA
gatggagttagcccgacacaggctcgccagttagataagatccgcaaggtcaacgacgcatccaacacctttgag

SEQ ID NO: 758929 - DNA, 75 bp, synthetic construct
  source 1..75: mol_type = other DNA
tacctcgaagtgaaacccaatggcaaaaaggcatggcgctatcggtttaaactcaacggtaaatccagcatgttt

SEQ ID NO: 758930 - DNA, 75 bp, synthetic construct
  source 1..75: mol_type = other DNA
cacggtactgatgccaccagcaaaatcaccaacgtcaaagacggtgacctgacggctggcagcactgacgcggtt

SEQ ID NO: 758931 - DNA, 75 bp, synthetic construct
  source 1..75: mol_type = other DNA
gtaaagtcgtggagtacgcaaagcaggtgaagccgtcggagcgtggtgaactggagattacctccatcaaccaga

SEQ ID NO: 758932 - DNA, 75 bp, synthetic construct
  source 1..75: mol_type = other DNA
tgaaagactgggccgaaatcaccaaaacgcgccgactggatatgcttgaacgtgtggtttttcccgccatcggta

SEQ ID NO: 758933 - DNA, 75 bp, synthetic construct
  source 1..75: mol_type = other DNA
aacgacgtaaagaactcaaaatgacgcaagttacgttggctgagctcacaggagtgagccagcaggcaataaaca

SEQ ID NO: 758934 - DNA, 75 bp, synthetic construct
  source 1..75: mol_type = other DNA
attatatcgaatgtgattacattcggtggcggcggcacagttggtgtggcggtctcactcaggaacaatttgaaa

SEQ ID NO: 758935 - DNA, 75 bp, synthetic construct
  source 1..75: mol_type = other DNA
attatatcgaatgtgattacattcgctggcggcggcacagttggtgtggcggtctcagtcaggaacaatttgaaa

SEQ ID NO: 758936 - DNA, 75 bp, synthetic construct
  source 1..75: mol_type = other DNA
gacgggagtgagaagtcaatgacgcttgatatctccaatgataacaaacaactgccctatcttgctcaggcatgg

SEQ ID NO: 758937 - DNA, 75 bp, synthetic construct
  source 1..75: mol_type = other DNA
cgctagcggcgttgactgctggaaagcgcctgttttccgcgaaagttccggcaggtgtccagcgttatctgcgtg

SEQ ID NO: 758938 - DNA, 75 bp, synthetic construct
  source 1..75: mol_type = other DNA
gagtgcgatcttcctgacgccgatactgtcgtcgtccctcaaactggcagatgcacggttacgacgcgcccatct

SEQ ID NO: 758939 - DNA, 75 bp, synthetic construct
  source 1..75: mol_type = other DNA
gtcttgaacgcctatacaggtgcgaccgcattcaatgcacacatctttgatgttcgtgaacgtaacccgattgta

SEQ ID NO: 758940 - DNA, 75 bp, synthetic construct
  source 1..75: mol_type = other DNA
ctggatacgctgaacgaactggcagcggcgctggggaatgatccgaactttgccacgacaataactaactccctt

SEQ ID NO: 758941 - DNA, 75 bp, synthetic construct
  source 1..75: mol_type = other DNA
atatttcaaatggagaagccgccagagtaccacaacaaaagacctgatgacgttgaaatgggatgcactaaatat

SEQ ID NO: 758942 - DNA, 75 bp, synthetic construct
  source 1..75: mol_type = other DNA
ggtgggcttacttttgaaaacgactcaatccttgcctggattcgaaatactgactgggcaaagattggttttaaa

SEQ ID NO: 758943 - DNA, 75 bp, synthetic construct
  source 1..75: mol_type = other DNA
tggttattcctcctgaaacgggcggattctggatccgggaaattggtgtatttgatgagcacggcgatttaatcg

SEQ ID NO: 758944 - DNA, 75 bp, synthetic construct
  source 1..75: mol_type = other DNA
ggcatacgaccttgcagccggcaaggcccccgtcagccacactcatccgtggagtcagataacgggagtccctgc

SEQ ID NO: 758945 - DNA, 75 bp, synthetic construct
  source 1..75: mol_type = other DNA
aggtggtagctctattgttcttggtgataatgacaccggatttaaacagaatggagacggtattctggatgttta

SEQ ID NO: 758946 - DNA, 75 bp, synthetic construct
  source 1..75: mol_type = other DNA
ctattaacagcagtaatggtatgtggattcagatgcgcgataacaacgctatctttgggaaaaatatagttaaca

SEQ ID NO: 758947 - DNA, 75 bp, synthetic construct
  source 1..75: mol_type = other DNA
ttaacggtgtctcgtttgatggttctaaaaacattgagttaacggcggaagatttaaatctacaggaattcatta

SEQ ID NO: 758948 - DNA, 75 bp, synthetic construct
  source 1..75: mol_type = other DNA
tacatggataataacggtaactggctttgtggtgcacaaattattcccggcaattatggcaattttgactcacgc

SEQ ID NO: 758949 - DNA, 75 bp, synthetic construct
  source 1..75: mol_type = other DNA
aaagccgcgtatgacctggctaacgcaaaatataccgctcaggacgccacgacggcacgaaaagggatagtccag

SEQ ID NO: 758950 - DNA, 75 bp, synthetic construct
  source 1..75: mol_type = other DNA
ctgacaaaagtcgggcgggatattcttgcgaaatcgaccgttgccgctgttatcgaatacctcggtttacaggaa

SEQ ID NO: 758951 - DNA, 75 bp, synthetic construct
  source 1..75: mol_type = other DNA
ttatggtaattacggattctttattcgtaatgatggttcaaatacatacttcatgttgacaaactccggtgacaa

SEQ ID NO: 758952 - DNA, 75 bp, synthetic construct
  source 1..75: mol_type = other DNA
cagggaacgaataatactcagatcgcaaacacggctttcgttatggccgcgattgccgcccttgtagactcgtcg

SEQ ID NO: 758953 - DNA, 75 bp, synthetic construct
  source 1..75: mol_type = other DNA
acagcacgtctgaaacactggctgcaacgccgaaagccgttaagacggtaatggatgaaacgaacaagaaagcgc

SEQ ID NO: 758954 - DNA, 75 bp, synthetic construct
  source 1..75: mol_type = other DNA
caccacaacggtgatggcaacgcaggattatgttgatgacaaaattgcagaacatgaacagtcacgacgtcaccc

SEQ ID NO: 758955 - DNA, 75 bp, synthetic construct
  source 1..75: mol_type = other DNA
cctgttgcctcattaatttccagctatgaatttgataacagcccgcaggatattgccctgctgcgcaatatttgt

SEQ ID NO: 758956 - DNA, 75 bp, synthetic construct
  source 1..75: mol_type = other DNA
gtgcgtgccggtgtttatgttggtgatacatcaaaacgtattcgggaaatgatctggcagcaaattacccaactg

SEQ ID NO: 758957 - DNA, 75 bp, synthetic construct
  source 1..75: mol_type = other DNA
cgattaccggattaagaatcattggtgaagtagatggcgatgatgaagccatcttcaggccgatacaaaaataca

SEQ ID NO: 758958 - DNA, 75 bp, synthetic construct
  source 1..75: mol_type = other DNA
atgtggagaggtgaatggcaaaaacgtcttgaacgcctatacaggtgcgaccgcattcaatgcacacatctttga

SEQ ID NO: 758959 - DNA, 75 bp, synthetic construct
  source 1..75: mol_type = other DNA
attgccgtgggaaactgcccggaaagctataagccgcaactggctgaaggtagcgggcgcactcagaccgtgcgc

SEQ ID NO: 758960 - DNA, 75 bp, synthetic construct
  source 1..75: mol_type = other DNA
aacaagcaatttggcatctacatgattaataattcaaggacagaaaatggcaccgatggtcaggcgtacatggat

SEQ ID NO: 758961 - DNA, 75 bp, synthetic construct
  source 1..75: mol_type = other DNA
ggtctggatgttacaggagatataacaactaacgcatgggtgtacgcaaaccgccttgcaattaacagcagcaca

SEQ ID NO: 758962 - DNA, 75 bp, synthetic construct
  source 1..75: mol_type = other DNA
ataacgtccatgttatgcgctttgtttccggaagcattcaaagtaataagaccataaatattacggggcgtgtta

SEQ ID NO: 758963 - DNA, 75 bp, synthetic construct
  source 1..75: mol_type = other DNA
tcgccgcaacaccaaaagccgttaagacggtaatggatgaaacgaacaagaaagcgccattaaacagccctgcac

SEQ ID NO: 758964 - DNA, 75 bp, synthetic construct
  source 1..75: mol_type = other DNA
aagtaaaaatatcgacagtcaatgcactgaggatatttaattcatcttttggtgctatttttcgccgttctgaag

SEQ ID NO: 758965 - DNA, 75 bp, synthetic construct
  source 1..75: mol_type = other DNA
gccgacgccaggatatcactctgaccttggctcaagagtttttaaacaagtctcaaaagtcctgtttcactccct

SEQ ID NO: 758966 - DNA, 75 bp, synthetic construct
  source 1..75: mol_type = other DNA
cgaagctaaagtattttttccctgatagtcaggattttatcgatcccagtttcgacttcttccgcgaaacgcgta

SEQ ID NO: 758967 - DNA, 75 bp, synthetic construct
  source 1..75: mol_type = other DNA
tccataacttgactcaaagcggaggtgtggcattaacccgaaataaaaaaggcccgcatgggcctatttttttgc

SEQ ID NO: 758968 - DNA, 75 bp, synthetic construct
  source 1..75: mol_type = other DNA
ccaggagggggtactcccttcgctaaaggagagctgatttttacagctgagctgcataacataacaagaaatata

SEQ ID NO: 758969 - DNA, 75 bp, synthetic construct
  source 1..75: mol_type = other DNA
acgaaaacggctatgtctcagccagtctgtactgcaaccgctcattagttggaaatacatcgttttatgtaccag

SEQ ID NO: 758970 - DNA, 75 bp, synthetic construct
  source 1..75: mol_type = other DNA
gcccggcctataccgctgtgcgtgtccctcagtttgatgcgaatccaagtttgagtcgcaaaataaaatctggcg

SEQ ID NO: 758971 - DNA, 75 bp, synthetic construct
  source 1..75: mol_type = other DNA
ccccgtagaacctcctacccacacgactcagctcttattcatgatgacaatacagtgagtctgggattccaacag

SEQ ID NO: 758972 - DNA, 75 bp, synthetic construct
  source 1..75: mol_type = other DNA
tcatgagttactccatgttttccacaatttaaatggggagcgcctgaaagttgaaagttcccgaccagaattaca

SEQ ID NO: 758973 - DNA, 75 bp, synthetic construct
  source 1..75: mol_type = other DNA
gtcttcacggcagcacacggcaccgaggccaccagcaaaatcaccaacgttaaagatgccgacctgacggctgac

SEQ ID NO: 758974 - DNA, 75 bp, synthetic construct
  source 1..75: mol_type = other DNA
tccctaactttactcaaagagggggagcggcattaacccgaaataaaaaaggcccgtatgggcctatttttttgc

SEQ ID NO: 758975 - DNA, 75 bp, synthetic construct
  source 1..75: mol_type = other DNA
aatgggtgactgcggcgcgtttacttatgtaaatcaggatgtcccgccgtatcgcgttgaagaagttattgagtt

SEQ ID NO: 758976 - DNA, 75 bp, synthetic construct
  source 1..75: mol_type = other DNA
ccccgtagaacatcctaccctcacgactcagctctcattcatgatgacaatacagtgagtcagggattcctacag

SEQ ID NO: 758977 - DNA, 75 bp, synthetic construct
  source 1..75: mol_type = other DNA
cgtttggtgcggtagataacagcaatggcgatctggtcgcagttatggcggctgtcacttatcgcagtgcggacg

SEQ ID NO: 758978 - DNA, 75 bp, synthetic construct
  source 1..75: mol_type = other DNA
gaaatacagataactcagtaacatttgctgttaacggtcagatacagcccagcaactgggggaattttgattccc

SEQ ID NO: 758979 - DNA, 75 bp, synthetic construct
  source 1..75: mol_type = other DNA
cattggtgaagtagatggcgatgatgaagccatcttcaggccaatacaaaaatacatcaatggcacatggtataa

SEQ ID NO: 758980 - DNA, 75 bp, synthetic construct
  source 1..75: mol_type = other DNA
ccgacacagaatagttatccagtcactatcggcgcaggtggggccggtggtgttagtgcaacgaacggcaccagg

SEQ ID NO: 758981 - DNA, 75 bp, synthetic construct
  source 1..75: mol_type = other DNA
tatgaccttgctaacgggaaatataccgcacaggacgctaccacagcgcaaaaaggtcttgtccagctaagtagt

SEQ ID NO: 758982 - DNA, 75 bp, synthetic construct
  source 1..75: mol_type = other DNA
tttgattccagatatgtgaaagatgttcgacttgggtcacagcaatattatggagtgaacaactggcaaacatgg

SEQ ID NO: 758983 - DNA, 75 bp, synthetic construct
  source 1..75: mol_type = other DNA
atggatgaaacgaacaagaaagcgccattaaacagccctgcactgaccggaacgccaacgacgccaactgcgcga

SEQ ID NO: 758984 - DNA, 75 bp, synthetic construct
  source 1..75: mol_type = other DNA
cgcccctttacgcttaatctcagaactggtcggataagcatggggcatggtcttgatgttacaggggatatattt

SEQ ID NO: 758985 - DNA, 75 bp, synthetic construct
  source 1..75: mol_type = other DNA
gtggttcagcttagtagtgcaaccaacagcacgtctgaaacgcaggctgcaacgccgaaagcagtaaaggcagca

SEQ ID NO: 758986 - DNA, 75 bp, synthetic construct
  source 1..75: mol_type = other DNA
gacccgcaaaccctctgcgggagatgttggtgcatacacgcaggcagaatgtaactcaaggtttattacaggtat

SEQ ID NO: 758987 - DNA, 75 bp, synthetic construct
  source 1..75: mol_type = other DNA
ggatagtggtgcatataacgccctgattggtggtgcatctgtattaattcttcactttaatataaatgctggtag

SEQ ID NO: 758988 - DNA, 75 bp, synthetic construct
  source 1..75: mol_type = other DNA
aggccattcgctataaatctgagaacaggtgctatatctgtcagccacggggccaaaattgaaggaggtctagct

SEQ ID NO: 758989 - DNA, 75 bp, synthetic construct
  source 1..75: mol_type = other DNA
ctcaatccttgcctggattcgaaatactgactgggcaaagattgggtttaaaaataattcggatgcagacaccga

SEQ ID NO: 758990 - DNA, 75 bp, synthetic construct
  source 1..75: mol_type = other DNA
aaacgctgacggggaaacaggatgacgccctgctggcggtacttaaccgctttaccgaaaacgtgacggaaaaag

SEQ ID NO: 758991 - DNA, 75 bp, synthetic construct
  source 1..75: mol_type = other DNA
agtactgtcgattttgcggcaatgctattccggaaaaacgccgtcagacgttgccgggtgtaacaacctgtactg

SEQ ID NO: 758992 - DNA, 75 bp, synthetic construct
  source 1..75: mol_type = other DNA
ccattcactcagaccaaattgctggtggggtttttattatagaaataggcaaaaatgatgggagaattctgaatt

SEQ ID NO: 758993 - DNA, 75 bp, synthetic construct
  source 1..75: mol_type = other DNA
atttaccgcccgctgggacaggaagcgatgcgcgccattgtggaaatgaaactggcgcaggtggttcgtcgtctt

SEQ ID NO: 758994 - DNA, 75 bp, synthetic construct
  source 1..75: mol_type = other DNA
gctatgaatgggatatcgacacgctctggcagtctctgctggcacatctggacaccttaccccgctcggtccgcg

SEQ ID NO: 758995 - DNA, 75 bp, synthetic construct
  source 1..75: mol_type = other DNA
ttcgtcggtttcctttttgattgctcgctggatggggcgagaactggtgctgaaatatgttggggataccaccgt

SEQ ID NO: 758996 - DNA, 75 bp, synthetic construct
  source 1..75: mol_type = other DNA
caaacgcagtgcgacggttttcgtctcgacgcagtcaaacatattccggcctggttttataaagagtggatcgaa

SEQ ID NO: 758997 - DNA, 75 bp, synthetic construct
  source 1..75: mol_type = other DNA
acgtatattgatcaggtggaaggcaaaaccatgctgttcgatgcgccgctgcagatgaaattccatgaagcatcg

SEQ ID NO: 758998 - DNA, 75 bp, synthetic construct
  source 1..75: mol_type = other DNA
acgcaaattgatgatgaaatcattgagtgcgaaggctggacccgttacaccttcccggctcgtgccggtcaatac

SEQ ID NO: 758999 - DNA, 75 bp, synthetic construct
  source 1..75: mol_type = other DNA
cggcacggcttgaccagtcgagtttcgtagttcagcgggccagaccaatgctgaaaagcctgcgggcaagacaat

SEQ ID NO: 759000 - DNA, 75 bp, synthetic construct
  source 1..75: mol_type = other DNA
tgctgcggtagcaacgccagctggcgcaggaactcccttactggctcagatgttaaataaaaaagtttatccgtt

SEQ ID NO: 759001 - DNA, 75 bp, synthetic construct
  source 1..75: mol_type = other DNA
ataacttattattcttttcatatggctattactgcatgaaagaccagagtggaaatgctgaagcgcttagcttga

SEQ ID NO: 759002 - DNA, 75 bp, synthetic construct
  source 1..75: mol_type = other DNA
atttgaacagcgcctgaaaaacgtgattgatgccgtgcagcagtcaccgactcctgttctgctgtttatagatga

SEQ ID NO: 759003 - DNA, 75 bp, synthetic construct
  source 1..75: mol_type = other DNA
ttaagacgtaagatgcgaaaagcagccatggacagaaactatctggcgtcagtccttgcggggagcgggctttcg

SEQ ID NO: 759004 - DNA, 75 bp, synthetic construct
  source 1..75: mol_type = other DNA
gatgatccacaggtatttgcagccttatttgacgcagcggaagggtggctgaagtcacaaggggcacgcaacatc

SEQ ID NO: 759005 - DNA, 75 bp, synthetic construct
  source 1..75: mol_type = other DNA
tttacttgaacgaatcaccagtaaattacgtgacggatggaaaagagttgaggtcttattatgcgcaatgaaata

SEQ ID NO: 759006 - DNA, 75 bp, synthetic construct
  source 1..75: mol_type = other DNA
taattgtccggtgggaacgtcgagggtcactgccagcttcagcggggcagccgacagtaccggatattataaaaa

SEQ ID NO: 759007 - DNA, 75 bp, synthetic construct
  source 1..75: mol_type = other DNA
attccccaaccggattccgtcatggcccgaaatcgctggtcaatgacgaaacgctggtggtggtgtttgtctcca

SEQ ID NO: 759008 - DNA, 75 bp, synthetic construct
  source 1..75: mol_type = other DNA
gcgatgaccagcagcattaccaccatgatggccagctgcctcgcggttttcgcacctgagacgatcaacagccaa

SEQ ID NO: 759009 - DNA, 75 bp, synthetic construct
  source 1..75: mol_type = other DNA
tactggatgcagagcctgtgccgcttcagggggaccgtgtggagtttgtcgggcgcccggtcgacgccgatacaa

SEQ ID NO: 759010 - DNA, 75 bp, synthetic construct
  source 1..75: mol_type = other DNA
cgtgcggcgaaaacgggtctgacatccggtaacggcccccagggggtgttcctgctggtcggtcccagtggtgtg

SEQ ID NO: 759011 - DNA, 75 bp, synthetic construct
  source 1..75: mol_type = other DNA
aggccggtgccggcgtgaaaggtgaatttgaacagcgcctgaaaaacgtgattgatgccgtgcagcagtcaccgg

SEQ ID NO: 759012 - DNA, 75 bp, synthetic construct
  source 1..75: mol_type = other DNA
agtttaaaatcgccttagtggagcagtcactgcagcccggagcctgtgtggcgcagatcgcccgggaaaacggaa

SEQ ID NO: 759013 - DNA, 75 bp, synthetic construct
  source 1..75: mol_type = other DNA
gtcgtacgtcctgaaaacaccgttatatccgaagcccccgtggtaaaaaaaacgtccccggcggcccaacttccc

SEQ ID NO: 759014 - DNA, 75 bp, synthetic construct
  source 1..75: mol_type = other DNA
ttatctgacagaacgtcagttaccggacaaggccgttgacctgctcgatactgctgctgcccgtgtgcgtatgag

SEQ ID NO: 759015 - DNA, 75 bp, synthetic construct
  source 1..75: mol_type = other DNA
gcattgaccgtaaatggcggagccactcagggaaccattcaggcagtgattagcatcacctatacctacagctga

SEQ ID NO: 759016 - DNA, 75 bp, synthetic construct
  source 1..75: mol_type = other DNA
catcctttaatcagacagagtttaataaggtacttcttgagtgtgttgtaaaaacacagtcatcagtggctaaga

SEQ ID NO: 759017 - DNA, 75 bp, synthetic construct
  source 1..75: mol_type = other DNA
gtttttcagcaacggcttcaatgcttcttgaactgggtcttcgtgtatatgaggctcagatggagcgcaaagagt

SEQ ID NO: 759018 - DNA, 75 bp, synthetic construct
  source 1..75: mol_type = other DNA
aagactcagtttactgtatccaaacttttggctattggctctctaagcctcatgttacaggtgatgaacgattcg

SEQ ID NO: 759019 - DNA, 75 bp, synthetic construct
  source 1..75: mol_type = other DNA
cacccaggcagaatatcgctggattgaaatgttcgtgcatggcaagcgtatgaatatgccgtggtggggcggttt

SEQ ID NO: 759020 - DNA, 75 bp, synthetic construct
  source 1..75: mol_type = other DNA
cgctttgtgccgtagcggtgcaggtactggctggtctttttaccggaaactgggcttacggcgcgatagccggtt

SEQ ID NO: 759021 - DNA, 75 bp, synthetic construct
  source 1..75: mol_type = other DNA
gtgcattcggagctggtctgtgcggccctgtttgtgctggtgccttcgctgttggatcttctgccgctgttgctg

SEQ ID NO: 759022 - DNA, 75 bp, synthetic construct
  source 1..75: mol_type = other DNA
accacagccgcaattcacagccgaggaaatcatcctcctttgctacatgcagctctggatggaaaaagcccaaca

SEQ ID NO: 759023 - DNA, 75 bp, synthetic construct
  source 1..75: mol_type = other DNA
gaagctcagatggaacgtaaagagtctgcatttaatcagactgagtttaataaattacttcttgaatgtgttgta

SEQ ID NO: 759024 - DNA, 75 bp, synthetic construct
  source 1..75: mol_type = other DNA
ccatgtctccgggaatccaaagtttgaatatgctaatatggttgaagatattcgtgagaaggtgtcatctgagat

SEQ ID NO: 759025 - DNA, 75 bp, synthetic construct
  source 1..75: mol_type = other DNA
atggctaaggtgaacctgtatatcagcaatgatgcttatgaaaaaataaatgcgattattgaaaaacgtcgacag

SEQ ID NO: 759026 - DNA, 75 bp, synthetic construct
  source 1..75: mol_type = other DNA
atggctaaggtgaacctgtatatcagcaatgatgcctatgaaaaaataaattcgattattgagaagcgtcgacag

SEQ ID NO: 759027 - DNA, 75 bp, synthetic construct
  source 1..75: mol_type = other DNA
gtaacgatgtttatgaaaagataaatgcgattgttgaaaaacgtcgccaggaaggggcgagagaaaaagatgtca

SEQ ID NO: 759028 - DNA, 75 bp, synthetic construct
  source 1..75: mol_type = other DNA
atggccagagtaaatctgtatatcagtaatgaggttcatgaaaaaattaacatgattgttgaaaagcgtcgtcag

SEQ ID NO: 759029 - DNA, 75 bp, synthetic construct
  source 1..75: mol_type = other DNA
tgatccgcgcgtgtgggatatggcaagcctggtggattttgctgtgccggtggtggcgtgtctgctgatctggct

SEQ ID NO: 759030 - DNA, 75 bp, synthetic construct
  source 1..75: mol_type = other DNA
atggatataacacctttccttcatgcactttgtgctgtggctgcgcagacactggttggtctttttaccggaaac

SEQ ID NO: 759031 - DNA, 75 bp, synthetic construct
  source 1..75: mol_type = other DNA
cactggctgcggcggctatgcaggttgttatcggcctgcttactggtgattatctcactggcggcctgattggat

SEQ ID NO: 759032 - DNA, 75 bp, synthetic construct
  source 1..75: mol_type = other DNA
gccgccgatgtcactatcactgttaatggtcgggtagtcgctaaaccctgcactattcaaaccaaagaagctaac

SEQ ID NO: 759033 - DNA, 75 bp, synthetic construct
  source 1..75: mol_type = other DNA
atgcaaacgattatccgcgtcgaacaactgagcaaaaccttcaatcagcatcaggcgctgcacgcggttgatctg

SEQ ID NO: 759034 - DNA, 75 bp, synthetic construct
  source 1..75: mol_type = other DNA
ccgccggcagccatatcgagctgctgggccgcacagtccagcgcgaaggccgtctggcgcgcgatatccgcaaaa

SEQ ID NO: 759035 - DNA, 75 bp, synthetic construct
  source 1..75: mol_type = other DNA
aatatcgctggattgaaatgttcgggcatggcaagcggattaacatgccgtggtggggcggttttgatccgcgcg

SEQ ID NO: 759036 - DNA, 75 bp, synthetic construct
  source 1..75: mol_type = other DNA
tgacccacgagcgtgggatatggcaagtctgatggattttgcagtgccggtggtggcatgtctgctggtctggct

SEQ ID NO: 759037 - DNA, 75 bp, synthetic construct
  source 1..75: mol_type = other DNA
gaatatgcaaatatggttgaagatatcagggagaaggtatcaattgagatggatagattttttccaaaaattgat

SEQ ID NO: 759038 - DNA, 75 bp, synthetic construct
  source 1..75: mol_type = other DNA
gcgtgtgtggaatgtggccagtctgatggattttgtggtgccggtggtggcctgtgcgggattgtatggctgtat

SEQ ID NO: 759039 - DNA, 75 bp, synthetic construct
  source 1..75: mol_type = other DNA
gtacgttctttattgcccgagaacatacccaggcagaatatcgctggattaagcgttttggtgatggtcacagac

SEQ ID NO: 759040 - DNA, 75 bp, synthetic construct
  source 1..75: mol_type = other DNA
gcataccccggtacttgcgcgcgtccattccgaatgtctgaccggtgacgccctgttcagcttgcgctgcgattg

SEQ ID NO: 759041 - DNA, 75 bp, synthetic construct
  source 1..75: mol_type = other DNA
gtaaatttctttttgcctgtcttatttttgcgctggtcatttacgctatccacgctttcggtttattcgatctgc

SEQ ID NO: 759042 - DNA, 75 bp, synthetic construct
  source 1..75: mol_type = other DNA
gatgcatgggaacgctacagcgttctggtcagtcgtgtggatacggcaaatcctgaatggccacaaaagcctgaa

SEQ ID NO: 759043 - DNA, 75 bp, synthetic construct
  source 1..75: mol_type = other DNA
atgacaatatctgagcctgtcaggtctcttgatacacatgaactgatgcctggcgatatttacccacatcctgca

SEQ ID NO: 759044 - DNA, 75 bp, synthetic construct
  source 1..75: mol_type = other DNA
aggtaactggatgttcaaagatgacactgtaattaaacgtgtatatacggatgcagaacggcagcagcaagccga

SEQ ID NO: 759045 - DNA, 75 bp, synthetic construct
  source 1..75: mol_type = other DNA
ctcgtcgtgctcatttctgttggcgcgctttttggggcgcgatctgctgctgaaatacgtgggccatagccatac

SEQ ID NO: 759046 - DNA, 75 bp, synthetic construct
  source 1..75: mol_type = other DNA
ttctgacccgcttaatcccgctgtttccttacaatattcaaaattacgcttacggattaactgctatagccttct

SEQ ID NO: 759047 - DNA, 75 bp, synthetic construct
  source 1..75: mol_type = other DNA
cacgcttaaccctgaaggttatagcgtcgttgaggttcctgatattacagctaatcgtcgtgctgatgattccgg

SEQ ID NO: 759048 - DNA, 75 bp, synthetic construct
  source 1..75: mol_type = other DNA
gaagcctgggaacgctacagtgttctggtcagccgtgtggatacggcagatcccgaatggccacaaaagcctgaa

SEQ ID NO: 759049 - DNA, 75 bp, synthetic construct
  source 1..75: mol_type = other DNA
agttctggtaacagtgtcaaagccgactttgaggtcactcgcttaccggcgattatcgagatgttagagaaaaaa

SEQ ID NO: 759050 - DNA, 75 bp, synthetic construct
  source 1..75: mol_type = other DNA
atgcagcatttaaaaaacattaagtcaggtaatccaaaaaccgttgaacaatatcagctaacaaagaattttaat

SEQ ID NO: 759051 - DNA, 75 bp, synthetic construct
  source 1..75: mol_type = other DNA
cagggaacccaaaaacacctgaacaataccagttaaccaaaaaagctggagttgtctggctttatactgaagatg

SEQ ID NO: 759052 - DNA, 75 bp, synthetic construct
  source 1..75: mol_type = other DNA
cagttgcccgcgctaacctggcaactaaattctcgtctcatttgaaggtgatcgagctcttcaacacgatgcagg

SEQ ID NO: 759053 - DNA, 75 bp, synthetic construct
  source 1..75: mol_type = other DNA
tccgctatgtggaaaaggatgtgacagctatcagaccagatggattaagtgttgttgaagtggcggatattactg

SEQ ID NO: 759054 - DNA, 75 bp, synthetic construct
  source 1..75: mol_type = other DNA
taagtggatgtttaaggacggagctgtagttaaacggatttatacggcagacgagcagcaacaacaggccgaatc

SEQ ID NO: 759055 - DNA, 75 bp, synthetic construct
  source 1..75: mol_type = other DNA
cacgcttaatcctgaaggctttagcgtcgttgaggtccccgatataacagcaaatcgtcgtgccgatgattccgg

SEQ ID NO: 759056 - DNA, 75 bp, synthetic construct
  source 1..75: mol_type = other DNA
gtggttaagcggatttatacggcagacgaacagcaacaacaggccgaatcacaaaaggccgcattgctttccgaa

SEQ ID NO: 759057 - DNA, 75 bp, synthetic construct
  source 1..75: mol_type = other DNA
attggctggtcaatgtcgccacgcatgacggcgcaactggcctgcgatgccctgcagatggcgctgtggcggcgt

SEQ ID NO: 759058 - DNA, 75 bp, synthetic construct
  source 1..75: mol_type = other DNA
gcactgcaaatggcgttgtggcggagaagacgcccggaaagcgtcattgttcatacggaccgtggtggtcaatac

SEQ ID NO: 759059 - DNA, 75 bp, synthetic construct
  source 1..75: mol_type = other DNA
atgactcaaaactatgaactgattgtgaaagggatccgcaattttgagaataaagttgcggtaactgtagcatta

SEQ ID NO: 759060 - DNA, 75 bp, synthetic construct
  source 1..75: mol_type = other DNA
gctgaatccgtgattttgctgctggagcgcgctgtcaggctgaatatggcaacagaggaggaacgcagccgactg

SEQ ID NO: 759061 - DNA, 75 bp, synthetic construct
  source 1..75: mol_type = other DNA
aagattgtttacgatgaaaataatattattgtcgccatcaccagagatgcctccacgcttaatcccgaaggtttt

SEQ ID NO: 759062 - DNA, 75 bp, synthetic construct
  source 1..75: mol_type = other DNA
gaggaacgcacacgactggaagcatgggaacgctacagtgttctggtcaaccgtgtggatacggcaaatcctgaa

SEQ ID NO: 759063 - DNA, 75 bp, synthetic construct
  source 1..75: mol_type = other DNA
aggaattgcagcagcaggcagaaaaccggaaagccagacttcttgcagatgctgaatccgtgattttgccactgg

SEQ ID NO: 759064 - DNA, 75 bp, synthetic construct
  source 1..75: mol_type = other DNA
gtaagaactggtacgaagaacaaaagtattttgctgatgacacgataaaaatagcgtacgacaaagataatatta

SEQ ID NO: 759065 - DNA, 75 bp, synthetic construct
  source 1..75: mol_type = other DNA
aaagtggatgtttaaggatggagctgtagttaaacggatttatacggcaaacgagcaacaacaacaggccgaatc

SEQ ID NO: 759066 - DNA, 75 bp, synthetic construct
  source 1..75: mol_type = other DNA
gtagttaaacggatttatacggcagacgaacagcaacaacaggccgaatcacaaaaggccgcattgctttccgaa

SEQ ID NO: 759067 - DNA, 75 bp, synthetic construct
  source 1..75: mol_type = other DNA
ttagctaatcaatcatttagtcagccatctcaacagattgcttttcaacactattgtcagagtctggagcagatt

SEQ ID NO: 759068 - DNA, 75 bp, synthetic construct
  source 1..75: mol_type = other DNA
tcctgttttcgccttcttcctgcccggtgccagcacttttactggtgtgttatcagtgtgaaccttgcgggtatt

SEQ ID NO: 759069 - DNA, 75 bp, synthetic construct
  source 1..75: mol_type = other DNA
cgattatcgctattgaatcgggcggtaacccaaacgcggtcagtaagtcgaatgcgattggtctgatgcagttga

SEQ ID NO: 759070 - DNA, 75 bp, synthetic construct
  source 1..75: mol_type = other DNA
gttaccgaagtctgacagcaaaagggaaaaaatcacaagtagccattacggcggtggctcgtgagttgactggat

SEQ ID NO: 759071 - DNA, 75 bp, synthetic construct
  source 1..75: mol_type = other DNA
tataaccaaccggactcgcgacacattgctccgcgaagcagcaaaacttgatcccgccaactatatggtgcacag

SEQ ID NO: 759072 - DNA, 75 bp, synthetic construct
  source 1..75: mol_type = other DNA
taaggcatttatcgcttttccgtcatcactttatcccgacgatccaaactggataccccctttattcattgaacg

SEQ ID NO: 759073 - DNA, 75 bp, synthetic construct
  source 1..75: mol_type = other DNA
ttgaagccttacgcgatccgtttgcccgccggaagatcgatgcgctggagatgtcatggatcctcgaaaccaata

SEQ ID NO: 759074 - DNA, 75 bp, synthetic construct
  source 1..75: mol_type = other DNA
atcaggaaagcggattactgattgaaggtttcgatacaccaccctgtgcgatgatgccgcacggtaaaccgtggt

SEQ ID NO: 759075 - DNA, 75 bp, synthetic construct
  source 1..75: mol_type = other DNA
atgaaatggcgcaaacgtgggtatttattggcggcaatgttggcgctcgcaagcgcgacggtacgggcagccgat

SEQ ID NO: 759076 - DNA, 75 bp, synthetic construct
  source 1..75: mol_type = other DNA
accgcagatatcctgaccgccgcgtctcgcgacctggataaattcctgtggtttatcgagtctaacatcgaataa

SEQ ID NO: 759077 - DNA, 75 bp, synthetic construct
  source 1..75: mol_type = other DNA
cggtacaactgggcggcgttgcccttggcaccactcaagttatcaatagcaaaacaccgctgaaaagctacccgc

SEQ ID NO: 759078 - DNA, 75 bp, synthetic construct
  source 1..75: mol_type = other DNA
aggaaatatctcgcctgttacctgagtggtctctgtgcaatctggtctgccagttgcaggctctaaaaggtgttg

SEQ ID NO: 759079 - DNA, 75 bp, synthetic construct
  source 1..75: mol_type = other DNA
tggctggcagctattcacgctgagccgatgaagctcggccttgacctgcgtggcggtgttcacttcctgatggaa

SEQ ID NO: 759080 - DNA, 75 bp, synthetic construct
  source 1..75: mol_type = other DNA
gtcgttgaggttcccgatattacagccaaccgccgcgctgatgattcaggaaagtggatgtttaaggatggagct

SEQ ID NO: 759081 - DNA, 75 bp, synthetic construct
  source 1..75: mol_type = other DNA
gagtcatgggaacgctacagcgttctggtcagccgtgtggatacagcaaatccagaatggccacaaaagcctgag

SEQ ID NO: 759082 - DNA, 75 bp, synthetic construct
  source 1..75: mol_type = other DNA
tcgatgcgaacatcaccacgctgattaaagtcatcatcctgtacgcagtgggtaccggggcaattaaagggttcg

SEQ ID NO: 759083 - DNA, 75 bp, synthetic construct
  source 1..75: mol_type = other DNA
ctggaagcatgggaacgctacagtgttctggtcagccgtgtggatacggcaaatcctgaatggccacaaaagcct

SEQ ID NO: 759084 - DNA, 75 bp, synthetic construct
  source 1..75: mol_type = other DNA
aggacggaactgtggttaagcggatttatacagcagacgaacagcaacaacaggccgaatcacaaaaggtcgcgt

SEQ ID NO: 759085 - DNA, 75 bp, synthetic construct
  source 1..75: mol_type = other DNA
acagaaggcaactttgctttccgaagctgaatccgtgattttgccgctggaacgcgctgtcaggctgaatatggc

SEQ ID NO: 759086 - DNA, 75 bp, synthetic construct
  source 1..75: mol_type = other DNA
tgaccgtatcgttgttgaactgccaggtattcaggacactgcgcgtgcgaaagagattctgggtgcgacggcaac

SEQ ID NO: 759087 - DNA, 75 bp, synthetic construct
  source 1..75: mol_type = other DNA
taacagcttccgtatcaccggtattaacaacccgaacgaagcccgtcagctttcacttttgctgcgtgccggtgc

SEQ ID NO: 759088 - DNA, 75 bp, synthetic construct
  source 1..75: mol_type = other DNA
tggcggtgttcacttcctgatggaagtggatatggacaccgcgcttggcaaactccaggaacaaaatatcgatag

SEQ ID NO: 759089 - DNA, 75 bp, synthetic construct
  source 1..75: mol_type = other DNA
gctggaattccgtctggtaaacaccaacgttgaccaggccgctgccgcgtctggccgcgtaccgggtgactctga

SEQ ID NO: 759090 - DNA, 75 bp, synthetic construct
  source 1..75: mol_type = other DNA
aacaacccgaacgaagcccgtcagctgtcactgctgctgcgtgccggtgcattgatcgcgccgattcagattgtt

SEQ ID NO: 759091 - DNA, 75 bp, synthetic construct
  source 1..75: mol_type = other DNA
gaagaacgtaccattggcccaaccctgggtatgcagaacattgaacaggggctggaggcttgccttgccggtctg

SEQ ID NO: 759092 - DNA, 75 bp, synthetic construct
  source 1..75: mol_type = other DNA
ccattcaactggatacccccattatgcgcggtaaaacagaaattaccgaaattgtgttgcgtaaaccgcagtccg

SEQ ID NO: 759093 - DNA, 75 bp, synthetic construct
  source 1..75: mol_type = other DNA
atgagcgataagcagactgaaaagactattcaactggatacccccatcaagcgcggtaaaacagaaatcaccgaa

SEQ ID NO: 759094 - DNA, 75 bp, synthetic construct
  source 1..75: mol_type = other DNA
tctccagtccgacactgactgcacaggaaatcgcagagatggacccggcagatctcacagccatgtcggttgagg

SEQ ID NO: 759095 - DNA, 75 bp, synthetic construct
  source 1..75: mol_type = other DNA
gttccatgagttcggtcacggcctgcatcatatgctgacccgcatcgagaccgcaggcgtttccggtatcaacgg

SEQ ID NO: 759096 - DNA, 75 bp, synthetic construct
  source 1..75: mol_type = other DNA
cgcctccgatcaaggcccgaacgctggtaagtgggacaacagtaaagtgatggaagagatcctcaccttgcgtca

SEQ ID NO: 759097 - DNA, 75 bp, synthetic construct
  source 1..75: mol_type = other DNA
ctccccggtcagccacctgaactcggtgaaaaatagcccggaactgcgtgaagcgtacgaacaaaccctgccgct

SEQ ID NO: 759098 - DNA, 75 bp, synthetic construct
  source 1..75: mol_type = other DNA
tgattttcattcccagcatcaacgggatcagccataacccggcggaacgcaccaatattaccgaccttgccgaag

SEQ ID NO: 759099 - DNA, 75 bp, synthetic construct
  source 1..75: mol_type = other DNA
cgttgcgccaacgttggtttcgactggacgacgcttggtccggtagtcgataaagtctacgaagagatcgacgag

SEQ ID NO: 759100 - DNA, 75 bp, synthetic construct
  source 1..75: mol_type = other DNA
atgaatcaaatcgaccgtttgctcactatcatgcagcgtcttcgtgacccggaaaacggctgtccgtgggacaaa

SEQ ID NO: 759101 - DNA, 75 bp, synthetic construct
  source 1..75: mol_type = other DNA
ctcactgccatgtcggttgaggttgttcactttttgttgaagaagtcggtgcttgccggtttaccgacagcctga

SEQ ID NO: 759102 - DNA, 75 bp, synthetic construct
  source 1..75: mol_type = other DNA
ggccattatggatatggatgtgaacgcgatgatgaccgtgatcccccgtatctccagcccggcactgaccgcaca

SEQ ID NO: 759103 - DNA, 75 bp, synthetic construct
  source 1..75: mol_type = other DNA
gatcagccataacccggcggaacgcaccaatattaccgaccttgccgaaggggtcaaaacgttggcactcatgct

SEQ ID NO: 759104 - DNA, 75 bp, synthetic construct
  source 1..75: mol_type = other DNA
gagctgttcaaacgcttccgtggtcgtgaaccacagctggatgcgatgctggagcattacggcattaagggctga

SEQ ID NO: 759105 - DNA, 75 bp, synthetic construct
  source 1..75: mol_type = other DNA
aatacactatcttttcaagatctactattaaccaagcccgaaataatagtatccataaataaaagattctataat

SEQ ID NO: 759106 - DNA, 75 bp, synthetic construct
  source 1..75: mol_type = other DNA
gaggcgcagcgtcttctgcgtctgggggtgattgttccactggcggagatgaagggtgatgaccggaccggttga

SEQ ID NO: 759107 - DNA, 75 bp, synthetic construct
  source 1..75: mol_type = other DNA
atgagcgataagcagactgaaaagactattcaactggatactcccatcaagcgcggtaaaacagaaattaccgaa

SEQ ID NO: 759108 - DNA, 75 bp, synthetic construct
  source 1..75: mol_type = other DNA
gcggctaacggatcgaatcccatcagcatcgtcgtaccttgccatcgggttattggccgaaacggcaccatgacc

SEQ ID NO: 759109 - DNA, 75 bp, synthetic construct
  source 1..75: mol_type = other DNA
gcggctaacggatcgaatcccatcagcattgttgtaccttgccatcgggttattggccgaaacggcaccatgacc

SEQ ID NO: 759110 - DNA, 75 bp, synthetic construct
  source 1..75: mol_type = other DNA
aagagccgtaaaaatacaggcagcatctataaatgttgcacgtttattattagaagaaccacacaatatatatga

SEQ ID NO: 759111 - DNA, 75 bp, synthetic construct
  source 1..75: mol_type = other DNA
tcgcgctttgaggaagagggcattttcaaccgtgatactggacagtcgttcctcgacaacattctgagccgtggc

SEQ ID NO: 759112 - DNA, 75 bp, synthetic construct
  source 1..75: mol_type = other DNA
atcgatgagttgcagccgtgggatatcgcgtactacagcgaaaaacaaaaacagcacctctacagcatcagtgac

SEQ ID NO: 759113 - DNA, 75 bp, synthetic construct
  source 1..75: mol_type = other DNA
ccactaaaatggcagaaaacccgcagcaggtgcttgatttcttaaccgatctggcaaaacgcgcgcgtccgcaag

SEQ ID NO: 759114 - DNA, 75 bp, synthetic construct
  source 1..75: mol_type = other DNA
gcgatgatgaccgtcatcccgcgcatttccaccccgacactgaccgctcaggaaatggcagaactggaccccgcc

SEQ ID NO: 759115 - DNA, 75 bp, synthetic construct
  source 1..75: mol_type = other DNA
tctccagtccggcactgactgcacaggaaatcgcagagatggacccggcagatctcacaaccatgtcggttgagg

SEQ ID NO: 759116 - DNA, 75 bp, synthetic construct
  source 1..75: mol_type = other DNA
aacgaactgcgcggtagcttctacctcgacctgtatgcccgtgaaaacaagcgcggcggggcgtggatggatgac

SEQ ID NO: 759117 - DNA, 75 bp, synthetic construct
  source 1..75: mol_type = other DNA
cttatacccttgaagaaacctacgaagtgctggatgccattgcccgcgaagactttgacgatctgcgcggtgaac

SEQ ID NO: 759118 - DNA, 75 bp, synthetic construct
  source 1..75: mol_type = other DNA
tggtctgggctgggtacagcgggacaaacggctggcctcgcagcaggggctggacagcacccgctggttcggaca

SEQ ID NO: 759119 - DNA, 75 bp, synthetic construct
  source 1..75: mol_type = other DNA
gcgacctgatgcgatctcgccggtgggggctcagggactggcgcagtttatgcctgccactgccgactggataag

SEQ ID NO: 759120 - DNA, 75 bp, synthetic construct
  source 1..75: mol_type = other DNA
tggcgacctgatgcggtctcgccggttggcgctcaggggctggctcagtttatgcccgccaccgctgactggata

SEQ ID NO: 759121 - DNA, 75 bp, synthetic construct
  source 1..75: mol_type = other DNA
caccatgcacaccatttcgtcgatggcatggcggcagcgaccgcatcatgggatttggttgagtcggaagttacg

SEQ ID NO: 759122 - DNA, 75 bp, synthetic construct
  source 1..75: mol_type = other DNA
gctgattaccaccctcgccagctacctgatattgcgcaaaaactacggctgggcgacggtcggttttactattac

SEQ ID NO: 759123 - DNA, 75 bp, synthetic construct
  source 1..75: mol_type = other DNA
tgaaaaagctgccgtggcgcggcattctgctggtcattcttatcaatgcctttctggtcggcctgtatgccatgg

SEQ ID NO: 759124 - DNA, 75 bp, synthetic construct
  source 1..75: mol_type = other DNA
gtatcggccgtgtttgcggggctcgtggctctactctcgctccgtcttcaatttgctacaatggcggcggcagcc

SEQ ID NO: 759125 - DNA, 75 bp, synthetic construct
  source 1..75: mol_type = other DNA
gtgactcttataccaatgcagacaactttatgactggtcgtgccaatggcgtcgcgacttatcgtaatactgatt

SEQ ID NO: 759126 - DNA, 75 bp, synthetic construct
  source 1..75: mol_type = other DNA
tcccactgctcgatgccgttggcgccctctcgaacactgggctgatcgcttgcgtggtgctcggtgccgcgttcg

SEQ ID NO: 759127 - DNA, 75 bp, synthetic construct
  source 1..75: mol_type = other DNA
tgtggcggtttcttcagtcaggcccgcgcagcccagccgccacaggccgctctgcagtatcgcgacgatgtgatc

SEQ ID NO: 759128 - DNA, 75 bp, synthetic construct
  source 1..75: mol_type = other DNA
ccggcactatccgcagcgtattttacgggagctggcaccgcgctaccgctcctggggaggcggcagttgtgtgga

SEQ ID NO: 759129 - DNA, 75 bp, synthetic construct
  source 1..75: mol_type = other DNA
accgcgacaagaagctggcgacgcagcgcgggctggatgcaggcgtctggttcgatgttgtagccacggtcaatg

SEQ ID NO: 759130 - DNA, 75 bp, synthetic construct
  source 1..75: mol_type = other DNA
actgtctggctgtggccgcagtggcagagcgggttattgcgtaagaacgcccatgacgctttagaagcctatcag

SEQ ID NO: 759131 - DNA, 75 bp, synthetic construct
  source 1..75: mol_type = other DNA
tcagtgcccagcgttcatggaatgaagacggcgacactgacgatagcgtttatctcaggaaggtgcgaataagcg

SEQ ID NO: 759132 - DNA, 75 bp, synthetic construct
  source 1..75: mol_type = other DNA
atttgctgcggatatttatgatgagcaaggcaataatattggaaatgtcggccagggcgggcaagcttttgtacg

SEQ ID NO: 759133 - DNA, 75 bp, synthetic construct
  source 1..75: mol_type = other DNA
ttggacgttgggatattagcggcggtcaggtcttaaaagatgatattcaggatgagcctaatttatttcaggcca

SEQ ID NO: 759134 - DNA, 75 bp, synthetic construct
  source 1..75: mol_type = other DNA
agttatagcgtgaatactggttatacgatgaataaatccagtgaagatttaagttatgtcggtggctatgccagc

SEQ ID NO: 759135 - DNA, 75 bp, synthetic construct
  source 1..75: mol_type = other DNA
ttcaggtttccagagtattgacacgcaactaagcagtgactttaaaggcaataaccaactcaacgtcagtagcag

SEQ ID NO: 759136 - DNA, 75 bp, synthetic construct
  source 1..75: mol_type = other DNA
ataaccaactcaacgttagggaaggtgcgaataagcggggaaattcttctcggctgactcagtcatttcatttct

SEQ ID NO: 759137 - DNA, 75 bp, synthetic construct
  source 1..75: mol_type = other DNA
caaaattacttcccgcatcgctgctggcagctatttttaccttaagtctggcgggatacatgcccgtctgggaac

SEQ ID NO: 759138 - DNA, 75 bp, synthetic construct
  source 1..75: mol_type = other DNA
gaagcgattcgtctgattctgagtaaagatccacaacctacaccactggcctggcagcgaatgcgggtgaatcaa

SEQ ID NO: 759139 - DNA, 75 bp, synthetic construct
  source 1..75: mol_type = other DNA
gggcgacggtcggttttaccattaccgcagtgtataccctgcaactgttgtggctgaacggtgagcagtacatcc

SEQ ID NO: 759140 - DNA, 75 bp, synthetic construct
  source 1..75: mol_type = other DNA
ccgatataaataacgaaaaagccgttctgcttgccagggatgaaacactcggcaattgccttaatttgacggaaa

SEQ ID NO: 759141 - DNA, 75 bp, synthetic construct
  source 1..75: mol_type = other DNA
cgccgccatttttaccctcagtctggcgggatacatgccggtctgggaaccgttgctcatctatgcgctgggcac

SEQ ID NO: 759142 - DNA, 75 bp, synthetic construct
  source 1..75: mol_type = other DNA
cggtcattgccgccggaactggcgcaggagtacttgcagtcttgtgaaatcgccattcagcgttgtcagcaacga

SEQ ID NO: 759143 - DNA, 75 bp, synthetic construct
  source 1..75: mol_type = other DNA
acatcgatgaactgtttaagcgtgttgatgatgccttgtatcgggcaaaaaatgacggacgcaaccgcgtgttag

SEQ ID NO: 759144 - DNA, 75 bp, synthetic construct
  source 1..75: mol_type = other DNA
gaagccagtctgttcttccggttgctgaaccgtcgatatgaaaaagcgagcatcgtgctgacatcaaataaaggg

SEQ ID NO: 759145 - DNA, 75 bp, synthetic construct
  source 1..75: mol_type = other DNA
ccaaactgcatctttatgatgcgttctccattcaggaatcgcgtcacgtggatgccggggatatggttgctccac

SEQ ID NO: 759146 - DNA, 75 bp, synthetic construct
  source 1..75: mol_type = other DNA
tgctggaaggcgaattcctcggacgtttacggcgagaaagtaaacgtaacatgatgacgacaattctgacgattc

SEQ ID NO: 759147 - DNA, 75 bp, synthetic construct
  source 1..75: mol_type = other DNA
cgggattgcttaaccgacgacagttttatcacattaccgaacaaggtcagatgcaacatttagcgattgctcagg

SEQ ID NO: 759148 - DNA, 75 bp, synthetic construct
  source 1..75: mol_type = other DNA
aatctagcagaaagctacaataagctcgatcaagctggttatgacgttgtgaatgttgttcctgtcgccattggt

SEQ ID NO: 759149 - DNA, 75 bp, synthetic construct
  source 1..75: mol_type = other DNA
ggcaaaacaggaaaaccggctggaaaaacagctacagcagcttggttatgcccgggtactgatactggatgagat

SEQ ID NO: 759150 - DNA, 75 bp, synthetic construct
  source 1..75: mol_type = other DNA
gttcgtggagcgtagcgagaacgtgatcctgctgggtccgcctggtgtgggtaaaacgcacctggcagtcgctct

SEQ ID NO: 759151 - DNA, 75 bp, synthetic construct
  source 1..75: mol_type = other DNA
accacactgaacatcaaaggagaaagctaccgattaaaggaaaaacgcaaagcgggagtgctggcaaaaaacgcc

SEQ ID NO: 759152 - DNA, 75 bp, synthetic construct
  source 1..75: mol_type = other DNA
acagcaggaatggaacggcaggcatcagcgcggtatggagtccaggctgaagcaggctcgtctgccgtgggtcaa

SEQ ID NO: 759153 - DNA, 75 bp, synthetic construct
  source 1..75: mol_type = other DNA
ccaaaatcgttaaagactacgttaacaatgtgcctgatttagatgattatgccgcaaagcttgctgagagctata

SEQ ID NO: 759154 - DNA, 75 bp, synthetic construct
  source 1..75: mol_type = other DNA
attgtataaatggaaagatgaaattatcggcaacagtgcttaccagactatgcgtaaacataacgacccttccct

SEQ ID NO: 759155 - DNA, 75 bp, synthetic construct
  source 1..75: mol_type = other DNA
agcggtggggtactggctcatgccaatggcgtaacgctggggcagccgttaaacgatacggtggtgcttgttaaa

SEQ ID NO: 759156 - DNA, 75 bp, synthetic construct
  source 1..75: mol_type = other DNA
tggcgacagcgattatgcagttgcgaacaaaacccagaactttgaagttactagtaccagtttgatttttgtctg

SEQ ID NO: 759157 - DNA, 75 bp, synthetic construct
  source 1..75: mol_type = other DNA
gtggtgataaagcagacgcgtggactgctgggctaaaatacgatgctaacaatatttacctggcaaccatgtatt

SEQ ID NO: 759158 - DNA, 75 bp, synthetic construct
  source 1..75: mol_type = other DNA
cgtaattcaaacgccagttacagtatgtcaaacgatttgaaaggcggcatgaccaatctatcgggggtttatggc

SEQ ID NO: 759159 - DNA, 75 bp, synthetic construct
  source 1..75: mol_type = other DNA
gcaccagtggttacagttctcttaattatcgtggagcttatggtaatactaatgtcggttacagtcggagtggtg

SEQ ID NO: 759160 - DNA, 75 bp, synthetic construct
  source 1..75: mol_type = other DNA
acccacggaggtaatacatcgtctggcaccagtggttacagttctcttaattatcgtggagcttatggtaatact

SEQ ID NO: 759161 - DNA, 75 bp, synthetic construct
  source 1..75: mol_type = other DNA
gcattattgctcatgctgatggcatcacctttggacagccgctgggcgacacaatggttctggttaaggctcctg

SEQ ID NO: 759162 - DNA, 75 bp, synthetic construct
  source 1..75: mol_type = other DNA
cggcgtgaaagcagcagatgcaggccatcgggtgttgttcatgccgctggacaggctggtagcgacgttgatgaa

SEQ ID NO: 759163 - DNA, 75 bp, synthetic construct
  source 1..75: mol_type = other DNA
ttccagcccggtatcgatcgtaaagtcgtccgggaactggccggtctggcgttcgttgagcgctgcgagaacgtg

SEQ ID NO: 759164 - DNA, 75 bp, synthetic construct
  source 1..75: mol_type = other DNA
tttatggcaaagttgatggcctgcattatttttctgatagttctgcaaaagatggcgatcagagctatgcacgtc

SEQ ID NO: 759165 - DNA, 75 bp, synthetic construct
  source 1..75: mol_type = other DNA
aaaaccgtgttgctcttaacgcgaattcccttgcagataatgttgaactggatgaaaccgtggtcactgtcatcc

SEQ ID NO: 759166 - DNA, 75 bp, synthetic construct
  source 1..75: mol_type = other DNA
tctgactggacttccacagtcagggaaattacaggtttcatggggcaaagataaaaactcaaactgtattgtcga

SEQ ID NO: 759167 - DNA, 75 bp, synthetic construct
  source 1..75: mol_type = other DNA
atgctgagcagagaggacttttacatgataaagcaaatgcgccagcagggcgcgtaccgggagttcctgtgcatg

SEQ ID NO: 759168 - DNA, 75 bp, synthetic construct
  source 1..75: mol_type = other DNA
atgacgcccttgctcgaattaaaggatattcgtcgcagctatcctgccggtgatgagcaggttgaggtgctgaag

SEQ ID NO: 759169 - DNA, 75 bp, synthetic construct
  source 1..75: mol_type = other DNA
cgcgtgtggttgccttacagcaccatgtccgggcgggttatggggcagtcgtggcttaactccattaccgtaaga

SEQ ID NO: 759170 - DNA, 75 bp, synthetic construct
  source 1..75: mol_type = other DNA
tcagtgaagggaacacctttaatcaggaacagctgaatggccgtgcgcaagtcgtggttctcgacagtaatactc

SEQ ID NO: 759171 - DNA, 75 bp, synthetic construct
  source 1..75: mol_type = other DNA
ggtaaagggatttcgtggaatacccaggatgaaatcgatttcctcggcaaactcaattacaccaagcgtgatggc

SEQ ID NO: 759172 - DNA, 75 bp, synthetic construct
  source 1..75: mol_type = other DNA
gctgaaatcgggcgatttacgtatggcctgcgaacaaccagatagcggcagcaatcatccgcgtaatttgtttgt

SEQ ID NO: 759173 - DNA, 75 bp, synthetic construct
  source 1..75: mol_type = other DNA
gccgtgctggtttgtctggtgggtggtgcgctggggataacgctgtcactgttaatcgctttcacattgcagctt

SEQ ID NO: 759174 - DNA, 75 bp, synthetic construct
  source 1..75: mol_type = other DNA
ccgtcggctcaaaccgcgacgaattcatcatgatccgcaagatgaagaacgttaactggctggatgatgaaggtc

SEQ ID NO: 759175 - DNA, 75 bp, synthetic construct
  source 1..75: mol_type = other DNA
aaaaccgcgccgaatattgtggcggtggagcgcgactaccctgctacctatgaacgctttacctcactcgggcca

SEQ ID NO: 759176 - DNA, 75 bp, synthetic construct
  source 1..75: mol_type = other DNA
gttcaaacctgcttggctcttccggcaagggccacgagtatatgcagaagtatctgctgggtacgaaaagtggca

SEQ ID NO: 759177 - DNA, 75 bp, synthetic construct
  source 1..75: mol_type = other DNA
caggccgagcgggtgatcgaaattcgcgacggcgaaattgtgcgcaatcctcccgccattgaaaaagtgaatgtt

SEQ ID NO: 759178 - DNA, 75 bp, synthetic construct
  source 1..75: mol_type = other DNA
tcagtgaccgagcggacgcgggaaattggcattcgcatggctgtaggtgcgcgagcaagcgatgttttgcaacag

SEQ ID NO: 759179 - DNA, 75 bp, synthetic construct
  source 1..75: mol_type = other DNA
aggccaccagcggcacctatcgcgtcgccggtcaggatgttgccacactggacgccgatgcgctggcgcaactgc

SEQ ID NO: 759180 - DNA, 75 bp, synthetic construct
  source 1..75: mol_type = other DNA
aagtgattctggcactggcaccggaaaccaacggtcatgttgcagtcaaagcgtggcaggcgctgggcgagatca

SEQ ID NO: 759181 - DNA, 75 bp, synthetic construct
  source 1..75: mol_type = other DNA
ccagccgatgctgaacaccgcaattgatgcggcagagatgatcctgacactggcaccggaaaccaacggtcaggt

SEQ ID NO: 759182 - DNA, 75 bp, synthetic construct
  source 1..75: mol_type = other DNA
agcaaactgacgtaccggaatctgctgactggtacaactccagctacatcatcgcctggggttcaaacgtgccgc

SEQ ID NO: 759183 - DNA, 75 bp, synthetic construct
  source 1..75: mol_type = other DNA
ctgtgcagccagctatgacgatgtgaaagcttacactccggcgtgggccgagcaaatcactggcgtttctcgtag

SEQ ID NO: 759184 - DNA, 75 bp, synthetic construct
  source 1..75: mol_type = other DNA
atgaatcaaatcgaccgtttgctcactattatgcagcgtcttcgcgacccggaaaacggctgcccgtgggataaa

SEQ ID NO: 759185 - DNA, 75 bp, synthetic construct
  source 1..75: mol_type = other DNA
ttgaagacgttagtaaatatataaaaacatgccttgacggaatggcgataaaattcatccccacagatattcaaa

SEQ ID NO: 759186 - DNA, 75 bp, synthetic construct
  source 1..75: mol_type = other DNA
gggtaaagaaaccgacatcgtcacgctgcctatccagcacgactctgccgctgaactggcgcaaccgctggatgt

SEQ ID NO: 759187 - DNA, 75 bp, synthetic construct
  source 1..75: mol_type = other DNA
gagttcatcatgatccgcaagatgaagaacgttaactggctggatgatgaaggtcgcgatcaggtacaggaggcg

SEQ ID NO: 759188 - DNA, 75 bp, synthetic construct
  source 1..75: mol_type = other DNA
tggggcattcactcaacctacagtgaaaacctgctaatgctgacgctctctcgcggtggaccgattgtctggatc

SEQ ID NO: 759189 - DNA, 75 bp, synthetic construct
  source 1..75: mol_type = other DNA
gcgtggcaggcgctgggcgagatcaccgggcgcgaacatacccatctggcgctgcacaaagaggacgagaagatt

SEQ ID NO: 759190 - DNA, 75 bp, synthetic construct
  source 1..75: mol_type = other DNA
gaagctaaacctgcacctgcacctgcacctgcaccgcaagctgatactccggcagccgcgccgcaaggagaataa

SEQ ID NO: 759191 - DNA, 75 bp, synthetic construct
  source 1..75: mol_type = other DNA
gatatctacctgcgcgaaaatattcgttcccgtctgctggtcgcagcacaagctgtaccgcgtcatcaggaagaa

SEQ ID NO: 759192 - DNA, 75 bp, synthetic construct
  source 1..75: mol_type = other DNA
gaaaatccgcattttcgcagcgtaaaacacaatccggtgctggtgcgccaattgcccgttaaaaacctgacgtta

SEQ ID NO: 759193 - DNA, 75 bp, synthetic construct
  source 1..75: mol_type = other DNA
agtgaaatgaagcgcctgtatgccgtcgggagtgagaacgggggcgacggtgacgcattcgtcagggaagaacgc

SEQ ID NO: 759194 - DNA, 75 bp, synthetic construct
  source 1..75: mol_type = other DNA
atgaaatcacgtgctgccgttgcatttgcacccggtaaaccactggaaatcgttgaaattgacgtagcgccgccg

SEQ ID NO: 759195 - DNA, 75 bp, synthetic construct
  source 1..75: mol_type = other DNA
tcttacaacgggcagccgctttatcactacatggggtgctctacattcagtgaatacaccgtggtcgcggaagtg

SEQ ID NO: 759196 - DNA, 75 bp, synthetic construct
  source 1..75: mol_type = other DNA
gcgaaggaaaggtagcggagattagcgcacatccgggctacgcaggaacggtcgaatacaagaccgaactggtgg

SEQ ID NO: 759197 - DNA, 75 bp, synthetic construct
  source 1..75: mol_type = other DNA
gaatcactggataatccaggtcagttttatcaggcggacgtgctgactcagggcaagccggtgctgctgaacgtc

SEQ ID NO: 759198 - DNA, 75 bp, synthetic construct
  source 1..75: mol_type = other DNA
gtatatggcgacttcgaactgatcaaagacattttcatgatgcttgaacttggcatacctggctatttgtggggt

SEQ ID NO: 759199 - DNA, 75 bp, synthetic construct
  source 1..75: mol_type = other DNA
gccgcgtgcggctgatggccatccccaagattgcagatcgctcgctgaacagcacaccgggcagcattgccgcac

SEQ ID NO: 759200 - DNA, 75 bp, synthetic construct
  source 1..75: mol_type = other DNA
catcaccatcacctggaccagtagcgaagcggtacagatttaccttgtggttcgaccgtatgagagcgcgaaaga

SEQ ID NO: 759201 - DNA, 75 bp, synthetic construct
  source 1..75: mol_type = other DNA
catgcccagccgctgagcgccaatgacacgctgaaaaataaactcctcgccgccttaccgttcaagccaacgggc

SEQ ID NO: 759202 - DNA, 75 bp, synthetic construct
  source 1..75: mol_type = other DNA
ttctcggtcacgaaggggccggcgttgtggttgaagtcggtgaaggcgtaaccagcgtcaaacctggcgaccatg

SEQ ID NO: 759203 - DNA, 75 bp, synthetic construct
  source 1..75: mol_type = other DNA
gcccgccactttaactgcgtgatacgggattttttaaaatcactaaagaacgcccaagagcatgtgttttcttta

SEQ ID NO: 759204 - DNA, 75 bp, synthetic construct
  source 1..75: mol_type = other DNA
gcaagggcaaagaagcgacgccagcctgccaggcatggcagaacgccatactggcggctcaggaaactgtttcag

SEQ ID NO: 759205 - DNA, 75 bp, synthetic construct
  source 1..75: mol_type = other DNA
cgatgttaaaggtgattcattagatattgcatggctgaaagataacaacagcgttgatgtgactaacctgcctga

SEQ ID NO: 759206 - DNA, 75 bp, synthetic construct
  source 1..75: mol_type = other DNA
aatgaccgcgaaacgcctgaccggtatcgtctctcgcggcggttcgattatggcgaaatggtgcctctcccatca

SEQ ID NO: 759207 - DNA, 75 bp, synthetic construct
  source 1..75: mol_type = other DNA
ctcggcggtcacttcttccatcgaagaagaagtggaaaaactggtatggtccacgcgctggggagcggataccgt

SEQ ID NO: 759208 - DNA, 75 bp, synthetic construct
  source 1..75: mol_type = other DNA
caggcgtgggaggtattcgaaaaactggaagactgctatttcagccagaagcagatgccatcagaacagaatcag

SEQ ID NO: 759209 - DNA, 75 bp, synthetic construct
  source 1..75: mol_type = other DNA
ccacggcttaaaaatggctattgaacgaggcacaagccgcctgatcctaccgccacaacgctgcaaaaacgctaa

SEQ ID NO: 759210 - DNA, 75 bp, synthetic construct
  source 1..75: mol_type = other DNA
cactacgcccgccagggtatcatcacaccggaaatggaattcatcgccatccgcgagaatatgggccgcgagcgc

SEQ ID NO: 759211 - DNA, 75 bp, synthetic construct
  source 1..75: mol_type = other DNA
cttagcccgacgctaattggcggtagcaaagaacagccgcagtttgaagaaaacgaagcgattccggtctacgac

SEQ ID NO: 759212 - DNA, 75 bp, synthetic construct
  source 1..75: mol_type = other DNA
gtgattggcgatgaactaaagaatttgcgggtgactttaagtcactcacaaaatcccatctctcccaaaactcgc

SEQ ID NO: 759213 - DNA, 75 bp, synthetic construct
  source 1..75: mol_type = other DNA
ctctggagcggtttaaattttatctggagcaacacggctggatcgttgcccgtaaagaacaactggtggaacggt

SEQ ID NO: 759214 - DNA, 75 bp, synthetic construct
  source 1..75: mol_type = other DNA
acctagtgtattagcgattgaagcaaaagaagaattaaccactgctttagcagaactggatgctttattgacttt

SEQ ID NO: 759215 - DNA, 75 bp, synthetic construct
  source 1..75: mol_type = other DNA
ctctttccccgatcacacacaaccagatcccagttgtcactacagagttacttgccaaactatatggctgtagcg

SEQ ID NO: 759216 - DNA, 75 bp, synthetic construct
  source 1..75: mol_type = other DNA
ctctctccccgatcactcataaccagatccctgttattaccactgaacttttggcgcagctttacggtacagaag

SEQ ID NO: 759217 - DNA, 75 bp, synthetic construct
  source 1..75: mol_type = other DNA
gtatgcactctggaacggtttaaattttatctggagcaacatgggtggatcgttgcccgtaaagaacaactagtg

SEQ ID NO: 759218 - DNA, 75 bp, synthetic construct
  source 1..75: mol_type = other DNA
tctggtacagggcgatgtaggttccggtaaaacactggttgccgctctcgctgcgctgcgtgctatcgctcacgg

SEQ ID NO: 759219 - DNA, 75 bp, synthetic construct
  source 1..75: mol_type = other DNA
gcgcgcaactggtcattatgacgattgcgctgtcactggcgacattcatgcaggtgctggactccaccattgcta

SEQ ID NO: 759220 - DNA, 75 bp, synthetic construct
  source 1..75: mol_type = other DNA
caaagtgggctttgctgaggataacacctggcgctttaacccgagttacctgcctccaacgctggcgcagtattt

SEQ ID NO: 759221 - DNA, 75 bp, synthetic construct
  source 1..75: mol_type = other DNA
caagaggaagtggtgacagtgccggggctgggttccatgctgttaccgggcaaagtgggctttgccgagaataac

SEQ ID NO: 759222 - DNA, 75 bp, synthetic construct
  source 1..75: mol_type = other DNA
ctattactgaataactacccgccagccaaacgttccatcgcactggccttgtggtcaatgacggtgattgtcgcg

SEQ ID NO: 759223 - DNA, 75 bp, synthetic construct
  source 1..75: mol_type = other DNA
cagggaacgtgggtaatcacttctttcggggtggcgaatgccatctcgatcccgcttaccggctggctggcaaag

SEQ ID NO: 759224 - DNA, 75 bp, synthetic construct
  source 1..75: mol_type = other DNA
ccattacgctgtctggtttgccaccggaacgactggcggcggcatcgagcctctccaactttacgcgtacgctgg

SEQ ID NO: 759225 - DNA, 75 bp, synthetic construct
  source 1..75: mol_type = other DNA
gcacaccatggaactggataaaatcaatgaagcttttgatttgatgcacgacggcaaatccatccgcacagtcat

SEQ ID NO: 759226 - DNA, 75 bp, synthetic construct
  source 1..75: mol_type = other DNA
actgcggtcgtctcgacagcaaagacgcaaaagcacgggaagaactggtgcgtaacgcgcacacattgaataagt

SEQ ID NO: 759227 - DNA, 75 bp, synthetic construct
  source 1..75: mol_type = other DNA
ctggggtttatttacctggccactcaacttagcggtcactacgatgtggctgcggcatttggtcaaaagccattt

SEQ ID NO: 759228 - DNA, 75 bp, synthetic construct
  source 1..75: mol_type = other DNA
catgatgcctgacagcgatccgcaaaaagcgcggatgctcaaccggtttaaaccgatggcgacattcactgagaa

SEQ ID NO: 759229 - DNA, 75 bp, synthetic construct
  source 1..75: mol_type = other DNA
acgctggcgcagtatttcacccgctttggcgcgccgtggaccacgctgcgcgaaaccaatcaacgtttattgctg

SEQ ID NO: 759230 - DNA, 75 bp, synthetic construct
  source 1..75: mol_type = other DNA
ccgctttggcgcgccgtggaccacgctgcgcgaaaccaatcaacgtttattgctggaaaccgccccgaaaggttt

SEQ ID NO: 759231 - DNA, 75 bp, synthetic construct
  source 1..75: mol_type = other DNA
gatcctgagggcgttttcccggtggttctcggccacgaaggggccggtgtcgtcgtggaggtcggtgaaggcgtg

SEQ ID NO: 759232 - DNA, 75 bp, synthetic construct
  source 1..75: mol_type = other DNA
gcgtcagacgggtaatgctgaatttaaagtggcggatttactgcgcgatcaggcgatgatcccggaagttcagcg

SEQ ID NO: 759233 - DNA, 75 bp, synthetic construct
  source 1..75: mol_type = other DNA
agctacgaacactgttccagcggctagcaatggtggtgaatcaggtacagatttaccaaaaggcggtagcgataa

SEQ ID NO: 759234 - DNA, 75 bp, synthetic construct
  source 1..75: mol_type = other DNA
gaatactggaacagcgaggaagttaaggattacatcaaggggcttgcttacagctatgcgcacaacatcaaagta

SEQ ID NO: 759235 - DNA, 75 bp, synthetic construct
  source 1..75: mol_type = other DNA
accgttattgaagtcggcgttgatgtgcctaacgccagtctgatgattatcgaaaaccctgagcgtctgggtctg

SEQ ID NO: 759236 - DNA, 75 bp, synthetic construct
  source 1..75: mol_type = other DNA
ctggcgttatgggagaaaggccagcagcaaggcttccatccgcatcagttgatcatgaccgccacgccgatcccc

SEQ ID NO: 759237 - DNA, 75 bp, synthetic construct
  source 1..75: mol_type = other DNA
gcgtgcagggcgatctcagcacaccggagttacaagaaacgctcacgccggtttacccaaccactgaaggcgtaa

SEQ ID NO: 759238 - DNA, 75 bp, synthetic construct
  source 1..75: mol_type = other DNA
ggagggtgcagacgtgactaccacgctgtacgccccatttctcaatagagagtttatcccatcaattagatctga

SEQ ID NO: 759239 - DNA, 75 bp, synthetic construct
  source 1..75: mol_type = other DNA
ccaactgactggatacttaaaccattaaccgggaaaggcgcggaactccttgaacgaatgcgagcgtcacttcct

SEQ ID NO: 759240 - DNA, 75 bp, synthetic construct
  source 1..75: mol_type = other DNA
gagccagaagccggacacgcgcttatcctgggtcagacgggtacgggtaaaacaacgttacaggcaacgctaaat

SEQ ID NO: 759241 - DNA, 75 bp, synthetic construct
  source 1..75: mol_type = other DNA
ccatgttactgacccgtatgacgcgggtggtaaatgttgatatctggaatatctggcatatgaccttcaccggca

SEQ ID NO: 759242 - DNA, 75 bp, synthetic construct
  source 1..75: mol_type = other DNA
aatcactgcgcaccagcgcggcactggcaaaactgtactgcgcccgcacagcgctggaagttattgatgatgcaa

SEQ ID NO: 759243 - DNA, 75 bp, synthetic construct
  source 1..75: mol_type = other DNA
gaagagtatttccgcacctgcgatcaaaacgggacatacccgcgtgagtttatgcgggcgctggcggataacggt

SEQ ID NO: 759244 - DNA, 75 bp, synthetic construct
  source 1..75: mol_type = other DNA
cgggataccagctgctggataacctgggcaaggcgtttggtattacagattacgtctggtatcagctaccggatg

SEQ ID NO: 759245 - DNA, 75 bp, synthetic construct
  source 1..75: mol_type = other DNA
gctaccctgatggccggagccattcagcaggtcagtgccggggattttagccaggccgtgaaaggcaacaggctg

SEQ ID NO: 759246 - DNA, 75 bp, synthetic construct
  source 1..75: mol_type = other DNA
taaagtgggcggtgctgtagccgtggaggttggcgaaagcctgacagagaagattgccgcactgcgtaaatcagt

SEQ ID NO: 759247 - DNA, 75 bp, synthetic construct
  source 1..75: mol_type = other DNA
aatcaacctgttggatgaagatgacagcttctacgctgccaacggcatctctaccgatgatattgtcgctttagg

SEQ ID NO: 759248 - DNA, 75 bp, synthetic construct
  source 1..75: mol_type = other DNA
aaacatttaactcgtttggcgcaattatcgcggttgtctttgggcaaagtcttattttgtctaacgtgccacatc

SEQ ID NO: 759249 - DNA, 75 bp, synthetic construct
  source 1..75: mol_type = other DNA
tagcaccttttgtcggcttcggttttatgcgccgggcgctttatggttcatttctgctttgtttaagcgcttgcc

SEQ ID NO: 759250 - DNA, 75 bp, synthetic construct
  source 1..75: mol_type = other DNA
acggttgccggagactgggaacgccagacggatcagacaatccgcgaaaactccatgactcgcgaagtcaccacc

SEQ ID NO: 759251 - DNA, 75 bp, synthetic construct
  source 1..75: mol_type = other DNA
cgtgggcggcagccttacgaaaagattaagggcgtccgtcacagtattgcgctggcgcagaagctggttggcgat

SEQ ID NO: 759252 - DNA, 75 bp, synthetic construct
  source 1..75: mol_type = other DNA
taagcaaaacgcgttgtttgcctggttacgggagaacggcatcctgatagcgtccggtggacgtaaaaatgtgcc

SEQ ID NO: 759253 - DNA, 75 bp, synthetic construct
  source 1..75: mol_type = other DNA
accacactgctggccggagccatccagcaggtaagcgccggtgattatagccaggcggtgaaaggtaacaggctg

SEQ ID NO: 759254 - DNA, 75 bp, synthetic construct
  source 1..75: mol_type = other DNA
tccaccctgatggccggagccatccagcaggtcagtgccggtgattatagccaggccgtgaaatgcaacaggctg

SEQ ID NO: 759255 - DNA, 75 bp, synthetic construct
  source 1..75: mol_type = other DNA
atgttcatttcagcacccgacattaagggatgtagccggctggctgacggaaaacagcgggatcggtgtcagtgt

SEQ ID NO: 759256 - DNA, 75 bp, synthetic construct
  source 1..75: mol_type = other DNA
tcgccgtaaagcggcaggacttcccgcatttaccgtcatgtcatgtgacaacatgccagaaaacggtcacgttat

SEQ ID NO: 759257 - DNA, 75 bp, synthetic construct
  source 1..75: mol_type = other DNA
ctgctttaccaacaacattccgcagcgtgatggcggtactcacctggcgggcttccgtgcggcgatgacccgcac

SEQ ID NO: 759258 - DNA, 75 bp, synthetic construct
  source 1..75: mol_type = other DNA
agagttatccttccttaactccggcgtttccattcgcctgaaagacaaacgtgacggcaaagaagaccacttcca

SEQ ID NO: 759259 - DNA, 75 bp, synthetic construct
  source 1..75: mol_type = other DNA
ttcaccaatgtaaccgagtttgaatatgaaattctggcgaaacgcctgcgagagttatccttccttaactccggc

SEQ ID NO: 759260 - DNA, 75 bp, synthetic construct
  source 1..75: mol_type = other DNA
aggcaatatgcagaacagttaactgattgctacaacgaactagatcgggatggttacgatgtggttaacatcgta

SEQ ID NO: 759261 - DNA, 75 bp, synthetic construct
  source 1..75: mol_type = other DNA
atggtggtaatggcttcgttattaatgatattacgacttcaaataacattatatggtcatcgccaaatggctgga

SEQ ID NO: 759262 - DNA, 75 bp, synthetic construct
  source 1..75: mol_type = other DNA
aacaaagacggcaacaaattagatctgtacggtaaagttgacggcctgcactatttctccgataacgactctaaa

SEQ ID NO: 759263 - DNA, 75 bp, synthetic construct
  source 1..75: mol_type = other DNA
gatgccggaaatcatcgaacgcggtcatgtctacattgctcagccgccgctgtacaaagtgaagaaaggcaagca

SEQ ID NO: 759264 - DNA, 75 bp, synthetic construct
  source 1..75: mol_type = other DNA
atgcgtggacggctcgcgtcgttggcgtcgtgaaaaaagccctgcatgtgcaaatggatggcttagaagccgtgt

SEQ ID NO: 759265 - DNA, 75 bp, synthetic construct
  source 1..75: mol_type = other DNA
attgcacgctacagcaacccggcgttacgtcaccggacctggcagatagcgatggatggcagccagaaactgccg

SEQ ID NO: 759266 - DNA, 75 bp, synthetic construct
  source 1..75: mol_type = other DNA
gcgctcgcgggtcactgtaaagaaattatcgtcactattcatgctgataattccgtctctgtacaggatgacggg

SEQ ID NO: 759267 - DNA, 75 bp, synthetic construct
  source 1..75: mol_type = other DNA
ctgttcaccacgctgatgggcgacgccgttgaaccgcgtcgtgcgtttattgaagagaacgccctgaaagcggcg

SEQ ID NO: 759268 - DNA, 75 bp, synthetic construct
  source 1..75: mol_type = other DNA
ttgttcaccacgctgatgggcgacgccgtagaaccgcgccgtgcgtttatcgaagaaaacgccctgaaagcggcg

SEQ ID NO: 759269 - DNA, 75 bp, synthetic construct
  source 1..75: mol_type = other DNA
caggtgtgtttgagaggatgtggccatgttcgtttcaacacccgactttgcgtgaaattgcgggctggctggaag

SEQ ID NO: 759270 - DNA, 75 bp, synthetic construct
  source 1..75: mol_type = other DNA
gatgcgctgatgcgtgaactgggggcgagcgatgaggccgatttgcagcgtcagttgctggaagaagcgtttggt

SEQ ID NO: 759271 - DNA, 75 bp, synthetic construct
  source 1..75: mol_type = other DNA
aagaccaacgtgctgttctttaccaaagggacggtggcgaacccgaatcaggataagaactgtaccgatgatgtg

SEQ ID NO: 759272 - DNA, 75 bp, synthetic construct
  source 1..75: mol_type = other DNA
gatgcgctgatgcgtgaactgggagcgagcgatgaagcggatttgcagcgtcagttgctggaagaagcgtttggt

SEQ ID NO: 759273 - DNA, 75 bp, synthetic construct
  source 1..75: mol_type = other DNA
aatgttgttgagccggaacaccatacctacctttaaccgattaatgctggatgattaccgcaacaagatcctcag

SEQ ID NO: 759274 - DNA, 75 bp, synthetic construct
  source 1..75: mol_type = other DNA
gatgaaggaatgctaaaggcaacggactacccgttagcaatggcttttctgacggatgcgagctatctgaaatcg

SEQ ID NO: 759275 - DNA, 75 bp, synthetic construct
  source 1..75: mol_type = other DNA
atgattaccgcaacaagatcctcagcggtgaaatctttttcagtggtgatactgccaccattggacatgagcttg

SEQ ID NO: 759276 - DNA, 75 bp, synthetic construct
  source 1..75: mol_type = other DNA
cgctttcactgatttcttcgctgcttcacgaggacagtgacaacgatcgtgatgaaggaatgctcaaggctacag

SEQ ID NO: 759277 - DNA, 75 bp, synthetic construct
  source 1..75: mol_type = other DNA
cgctttcactgatttcttcgctacttcatgaagacagcgacaacgatcgtgatgaaggaatgctaaaggctacag

SEQ ID NO: 759278 - DNA, 75 bp, synthetic construct
  source 1..75: mol_type = other DNA
ccgacctttaaccgattaatgctggatgattaccgcaacaagatcttcagcggtgaaatctttttcagtggtgat

SEQ ID NO: 759279 - DNA, 75 bp, synthetic construct
  source 1..75: mol_type = other DNA
ccggaaggctaccgctgggacgacctgaaatcccgtatcggtcaggagcagttgcagttctaccgtaacctgctg

SEQ ID NO: 759280 - DNA, 75 bp, synthetic construct
  source 1..75: mol_type = other DNA
tgaaatcccgcatcggccaggagcagttgcagttctaccgtaacctgctggtgcatctgggcgccgacaatcaaa

SEQ ID NO: 759281 - DNA, 75 bp, synthetic construct
  source 1..75: mol_type = other DNA
tcacttgaagattatatgatggaaaacaattacttaaaagacatcccggtttctgaacacgtcaaagacgataag

SEQ ID NO: 759282 - DNA, 75 bp, synthetic construct
  source 1..75: mol_type = other DNA
cgctttcactgatttcctcgctgcttcacgaggacagcgacaacgatcgtgatgaaggaatgctcaaggctacag

SEQ ID NO: 759283 - DNA, 75 bp, synthetic construct
  source 1..75: mol_type = other DNA
caccgtatcctgttgtctgatatccgcgaatacctgctcgaacaggggcatctgaattacgcaaccgtcgcagcc

SEQ ID NO: 759284 - DNA, 75 bp, synthetic construct
  source 1..75: mol_type = other DNA
ctgcggcttgtggatgttgagccggactgtctaaatgagggtgtgaaccgtgaaaaactggagtatgtatattac

SEQ ID NO: 759285 - DNA, 75 bp, synthetic construct
  source 1..75: mol_type = other DNA
ctccctgaattgcatgataaaaaaagacagcgtttcaatcgctggaaaaatgataatccggggctcgaaatggat

SEQ ID NO: 759286 - DNA, 75 bp, synthetic construct
  source 1..75: mol_type = other DNA
atcagcagctggtggccgccgctcctaaggtcgattttgccgaccgggtatcagtggccaaggggatcctgattg

SEQ ID NO: 759287 - DNA, 75 bp, synthetic construct
  source 1..75: mol_type = other DNA
aaaaattcatgcaccttcagttcaggaatcggagctggtggttgttcagaatcagtctgatgaaattcccgttct

SEQ ID NO: 759288 - DNA, 75 bp, synthetic construct
  source 1..75: mol_type = other DNA
gaaatgagaaaggaggcacatataatgaccggtaataatttgaatgttgaaaaaccagcacctgttacgtcagct

SEQ ID NO: 759289 - DNA, 75 bp, synthetic construct
  source 1..75: mol_type = other DNA
gccgggacctatgccgaaaaactggcggaaaagggatttgtcacattgcttatgacgcatcttatcagggtgaaa

SEQ ID NO: 759290 - DNA, 75 bp, synthetic construct
  source 1..75: mol_type = other DNA
atggcgaaattggggatgcggacgatttcctggactgctttatcattccagcccgcattgttggtggtacatttt

SEQ ID NO: 759291 - DNA, 75 bp, synthetic construct
  source 1..75: mol_type = other DNA
tcaaccgcgacggtcgccaaagtgtcgaacatgatcactccgcccgaacgactggataagccctgggcggtgcaa

SEQ ID NO: 759292 - DNA, 75 bp, synthetic construct
  source 1..75: mol_type = other DNA
ttatagcgaagaaagctggaatgctaatccctgggtttgggtaatcgagtttaagcgtattcaggggggcaacca

SEQ ID NO: 759293 - DNA, 75 bp, synthetic construct
  source 1..75: mol_type = other DNA
ctgcattgtcggcattccgaatcaacaaactgctggcacgttttcaggctgccaggctcccggttcacactattt

SEQ ID NO: 759294 - DNA, 75 bp, synthetic construct
  source 1..75: mol_type = other DNA
ttatgacgcatcttatcaaggtgaaagtggcggcgagccgcgtcagttagaaaacccatacattcgtactaagac

SEQ ID NO: 759295 - DNA, 75 bp, synthetic construct
  source 1..75: mol_type = other DNA
gaatgcaaattgcagaagattatcaggccttcaaccttggtattggtaaagatttaggactttttggtgcctttt

SEQ ID NO: 759296 - DNA, 75 bp, synthetic construct
  source 1..75: mol_type = other DNA
acgtgccggtagcgggaaaaaattcacggtcagcagcagcaatacatccacgaaggaagccgcattcaatttgtg

SEQ ID NO: 759297 - DNA, 75 bp, synthetic construct
  source 1..75: mol_type = other DNA
aaggcagcctatgaccttgctaacgggaaatataccgcacaggacgccaccacagcgcgaaaaggtcttgtccag

SEQ ID NO: 759298 - DNA, 75 bp, synthetic construct
  source 1..75: mol_type = other DNA
atgagtaccacaacacgaaaatttaaaaccgttatcaccgatacgggtgccaaaaaattagctcaggcagccgcg

SEQ ID NO: 759299 - DNA, 75 bp, synthetic construct
  source 1..75: mol_type = other DNA
agcacttccaccggaggcggcaccactaacgctcaattcacctatattaatcatggtgatgcttatgctcctggc

SEQ ID NO: 759300 - DNA, 75 bp, synthetic construct
  source 1..75: mol_type = other DNA
agtctgcaatgactattcgtattaccacaccaacaacatcaagcggtgggggcgctacaagcgcgcaatttactt

SEQ ID NO: 759301 - DNA, 75 bp, synthetic construct
  source 1..75: mol_type = other DNA
caccaacagcgattctgaaacgctggcggcaacgccaaaggcggttaagacagcgtatgaccttgctaacgggaa

SEQ ID NO: 759302 - DNA, 75 bp, synthetic construct
  source 1..75: mol_type = other DNA
acgacaatggcttgatccaagacctcaagctgttcgttacgtgcaaagtccccatcaagaacaataacccgactg

SEQ ID NO: 759303 - DNA, 75 bp, synthetic construct
  source 1..75: mol_type = other DNA
catgattgccgccggtgagtacaaatttatttcccctgtttttgcctacaacaagcgcggcgaagtgctggagct

SEQ ID NO: 759304 - DNA, 75 bp, synthetic construct
  source 1..75: mol_type = other DNA
atgccgcgtatgaagatgaacattgcggcgttaagcctcgaaatcaccaaagcaactcacagcgaaatccagctg

SEQ ID NO: 759305 - DNA, 75 bp, synthetic construct
  source 1..75: mol_type = other DNA
gaaacgcttgcggcaacgccaaaggcggttaagacagtgtatgaccttgctaacgggaaatacactgcacaggat

SEQ ID NO: 759306 - DNA, 75 bp, synthetic construct
  source 1..75: mol_type = other DNA
tcgctgccagcatgggcgtgaatgccatatcgatgatcctgcctatgcagcaggcttcccatatggggcgtgcga

SEQ ID NO: 759307 - DNA, 75 bp, synthetic construct
  source 1..75: mol_type = other DNA
aacaaaaacctggtgatcgcagccgaatccggctcgggtaaatcgttccttaccaacgaactgattttttcctac

SEQ ID NO: 759308 - DNA, 75 bp, synthetic construct
  source 1..75: mol_type = other DNA
tatccagcacggccaccgtggcgcttaccgtggataacaccatggtgatggccacagtggattacgtggatgaca

SEQ ID NO: 759309 - DNA, 75 bp, synthetic construct
  source 1..75: mol_type = other DNA
ttgaatgacgcatttccacactttatcagtcagatggaatcgatgctgaccactggtgaactaatcccctgtcac

SEQ ID NO: 759310 - DNA, 75 bp, synthetic construct
  source 1..75: mol_type = other DNA
aaatataccgcacaggacgccaccacagcgcgaaaaggccttgttcagctcagtagcgccaccaacagcgattct

SEQ ID NO: 759311 - DNA, 75 bp, synthetic construct
  source 1..75: mol_type = other DNA
aaagttataagccagctcttgccgaaggctcagggcgttcgcagacctgtcgcatggtcatcatcgtcagcagtg

SEQ ID NO: 759312 - DNA, 75 bp, synthetic construct
  source 1..75: mol_type = other DNA
gggccagcattaccggtcagttcagtgatgccgaatgtcttaagctggatgtggcagttccgcattttatcagcc

SEQ ID NO: 759313 - DNA, 75 bp, synthetic construct
  source 1..75: mol_type = other DNA
cagtatcaccggtaagttcagcgaagcagaatgtcttaagctggatttggcattcccgcattttatcagccagat

SEQ ID NO: 759314 - DNA, 75 bp, synthetic construct
  source 1..75: mol_type = other DNA
gctgaccgggcaagtatcaccggtaagtttagtgatgccgaaagcctgaagctggatgtcgtatttccacatttt

SEQ ID NO: 759315 - DNA, 75 bp, synthetic construct
  source 1..75: mol_type = other DNA
gggatacgaccgacgcaaactggtcgccgtgggcgcagctttacacctcggctcatcctcctgaaaagttttatc

SEQ ID NO: 759316 - DNA, 75 bp, synthetic construct
  source 1..75: mol_type = other DNA
ccaaaagcagtgaagtctgcctatgacaatgctgaaaaacgtcttcagaaagatcagaacggtgcggatattccg

SEQ ID NO: 759317 - DNA, 75 bp, synthetic construct
  source 1..75: mol_type = other DNA
taacgggaaatacactgcacaggatgccaccacggcgcgaaaaggccttgtccagctcagtagcgccaccaacag

SEQ ID NO: 759318 - DNA, 75 bp, synthetic construct
  source 1..75: mol_type = other DNA
aaataacaaaatcattacggataccggatgtggtgatatccacctggctggttgtgtcgtcgaggtcatgggaac

SEQ ID NO: 759319 - DNA, 75 bp, synthetic construct
  source 1..75: mol_type = other DNA
aactctgccgataacattggtggcgtatattacagaccggtgcagaaatacattaacgggacttggtataacgtg

SEQ ID NO: 759320 - DNA, 75 bp, synthetic construct
  source 1..75: mol_type = other DNA
aatggcatgacatggacacatcaggcaccgtccgggtgtgtatattccggcattattgttcaggataccggctca

SEQ ID NO: 759321 - DNA, 75 bp, synthetic construct
  source 1..75: mol_type = other DNA
aaagattacgccagccgcgatatcaacggctttaagtcctggctggataacgcaccgaaacttgttgcgctcagt

SEQ ID NO: 759322 - DNA, 75 bp, synthetic construct
  source 1..75: mol_type = other DNA
taccgggttcttttggtggctgttgatcaatgggcctggctttgcaatggatattatcaactcgttgagaaatat

SEQ ID NO: 759323 - DNA, 75 bp, synthetic construct
  source 1..75: mol_type = other DNA
tgttcagggcgttgatctgggcagtatgatcatcacctccggtcagatcccggtaaacccgaaaactggcgaagt

SEQ ID NO: 759324 - DNA, 75 bp, synthetic construct
  source 1..75: mol_type = other DNA
tgaaaaggtcatcggggcattcatcgaaaaaacatgttttactaattggaggcattaccacatgcagaaaggtta

SEQ ID NO: 759325 - DNA, 75 bp, synthetic construct
  source 1..75: mol_type = other DNA
tggcggcagaacttgccgaatttgcaccaccggagaagaaaaaaggacgtccagccagcgaggaacgcatcatcg

SEQ ID NO: 759326 - DNA, 75 bp, synthetic construct
  source 1..75: mol_type = other DNA
gttggcagcatcaccgaggctggctatataaaaattaccggacgcaaaaaagatattattgtccgcggcggcgaa

SEQ ID NO: 759327 - DNA, 75 bp, synthetic construct
  source 1..75: mol_type = other DNA
ggtaaaatacaaaagtttttgttaagaaaagatattatgcggcgattaacgcaggatgtctgtgaagagattgaa

SEQ ID NO: 759328 - DNA, 75 bp, synthetic construct
  source 1..75: mol_type = other DNA
ataccagttacttacagactcaaaataattgatgatgtggtatgtaagggtattgaaaaagtagctggtgagtgt

SEQ ID NO: 759329 - DNA, 75 bp, synthetic construct
  source 1..75: mol_type = other DNA
atttacccgtatgctggaaacgcatctgaaaatgccagtatatacgcatccagatgcacaatttgcaggcgctat

SEQ ID NO: 759330 - DNA, 75 bp, synthetic construct
  source 1..75: mol_type = other DNA
ttcccaacaactgatagcgcaaggcgtgccacaaagttggacaaacggcatcaatacaccggattcgcaaattgc

SEQ ID NO: 759331 - DNA, 75 bp, synthetic construct
  source 1..75: mol_type = other DNA
taccgatgaaacctgtcgtgaattgctggcattgctcacaccctttaatatcggaatgctgaccactgatgagtg

SEQ ID NO: 759332 - DNA, 75 bp, synthetic construct
  source 1..75: mol_type = other DNA
cccgttgtcagtcagctcaggtttaccgccatggtcagaaccctaaaggccgtgacagacttcgctgccgtgact

SEQ ID NO: 759333 - DNA, 75 bp, synthetic construct
  source 1..75: mol_type = other DNA
gtggcgcttatctgcgagcttgatgagcaatggggctacgttggcagtaaagcccgacaacactggctctggtac

SEQ ID NO: 759334 - DNA, 75 bp, synthetic construct
  source 1..75: mol_type = other DNA
atgaaaacaagaacattaaagaaagataataatttattttcaatgatgaaggggtatagcttcaggatttctgat

SEQ ID NO: 759335 - DNA, 75 bp, synthetic construct
  source 1..75: mol_type = other DNA
aggcaatacgtttcgctggtcagtacaaatcgttcactgcgagtttcatgcagaacgtgcttggacgtgaggtat

SEQ ID NO: 759336 - DNA, 75 bp, synthetic construct
  source 1..75: mol_type = other DNA
ccttatgaacttctggacagaatccgggcgtaacagcaacgccatgatgataacaaactggctggcgaagaacgc

SEQ ID NO: 759337 - DNA, 75 bp, synthetic construct
  source 1..75: mol_type = other DNA
ccttcctgttccgccagttctttatgacgctgccggatgagctggtggaagccgcgcggatcgacggcgcgtcac

SEQ ID NO: 759338 - DNA, 75 bp, synthetic construct
  source 1..75: mol_type = other DNA
ctggccgcgcagcttgtcgcacaggtggcagcccgtaccacgccttttgtcattgattacgaacatcagacgctg

SEQ ID NO: 759339 - DNA, 75 bp, synthetic construct
  source 1..75: mol_type = other DNA
gcctcgaaattactaaagcaacccacagcgaaatccagctgtttccggcaggcgagttcagtgcggtggatggtc

SEQ ID NO: 759340 - DNA, 75 bp, synthetic construct
  source 1..75: mol_type = other DNA
ccgtgcagaagatgtaaacgcgattaaacagttaacgcgcaaaggcctttctgttgctgatgccatctcccagtt

SEQ ID NO: 759341 - DNA, 75 bp, synthetic construct
  source 1..75: mol_type = other DNA
aagtcatcgccaacctgaagatgctcgacagctacgccggtttaacgctgccgctgatggcctcggcgaccgcca

SEQ ID NO: 759342 - DNA, 75 bp, synthetic construct
  source 1..75: mol_type = other DNA
tataaaaaataatcctgacaacgtttatgacatcgataagagactaagtgcgttttttaaccccttatctaatat

SEQ ID NO: 759343 - DNA, 75 bp, synthetic construct
  source 1..75: mol_type = other DNA
ttttaaatacgttcggatttttaaatggtaaaaacgaccaaattgaatgtttcacttgtaaaaactttagagcct

SEQ ID NO: 759344 - DNA, 75 bp, synthetic construct
  source 1..75: mol_type = other DNA
ttttatcaccctgatgctgccggttgaagtacgtatcttcccgacggtggaagtcatcgccaacctgaaaatgct

SEQ ID NO: 759345 - DNA, 75 bp, synthetic construct
  source 1..75: mol_type = other DNA
gacgctgccggatgagctggtggaagcggctcgtatcgacggtgcgtcaccgatgcgcttcttttgcgacattgt

SEQ ID NO: 759346 - DNA, 75 bp, synthetic construct
  source 1..75: mol_type = other DNA
atggcggcgatgttgttaaccctgatcccaccagtagtgattgttttagtgatgcagcgtgcctttgtgcgcggc

SEQ ID NO: 759347 - DNA, 75 bp, synthetic construct
  source 1..75: mol_type = other DNA
tggagttgagcgacggcactttatcgtggttagggaacgccttgtactggatgcctctaccggaaccgccgcagg

SEQ ID NO: 759348 - DNA, 75 bp, synthetic construct
  source 1..75: mol_type = other DNA
tgcgtgaaaaggcagagaaagccggtgaagataagtggcaggctaaaaaaataaatggtgattttttcgttattc

SEQ ID NO: 759349 - DNA, 75 bp, synthetic construct
  source 1..75: mol_type = other DNA
ctgtaatcggcgagctaaattggagaactagttttcctttgctgattacgtgtgagatcggcgttataccagctt

SEQ ID NO: 759350 - DNA, 75 bp, synthetic construct
  source 1..75: mol_type = other DNA
atgcggaagcggacctgcgtggcatcattcgctatacgcgtaaacagtggggcacagcacaggctcgtcgttata

SEQ ID NO: 759351 - DNA, 75 bp, synthetic construct
  source 1..75: mol_type = other DNA
caggaagaagccgtcttgtttgctcgctcggcctccgttggtgcgcagaaattcccggtacactggggtggcgac

SEQ ID NO: 759352 - DNA, 75 bp, synthetic construct
  source 1..75: mol_type = other DNA
ttattcgacaaaacgcccaattgcagccattgttgcgacttcatatcaacgtcttatagcccatttttataatca

SEQ ID NO: 759353 - DNA, 75 bp, synthetic construct
  source 1..75: mol_type = other DNA
cacccacaaactggcgactggctttacgatgaccctgttgagcttgcaaaggctattcgcaaaggtccggatatg

SEQ ID NO: 759354 - DNA, 75 bp, synthetic construct
  source 1..75: mol_type = other DNA
gatagcggttataactatcgcggcattgtcgaatttattccatttatggtgactcgccagatgtgctcactgaat

SEQ ID NO: 759355 - DNA, 75 bp, synthetic construct
  source 1..75: mol_type = other DNA
atctgatgcatatgcgtactggcgatgtctctgcgtttaagccagaaacgcagttacagtatgttgggcacctga

SEQ ID NO: 759356 - DNA, 75 bp, synthetic construct
  source 1..75: mol_type = other DNA
ggttggataagctgtagtgagcgaatgcctgtaattggcgagctaaattggagaactagttttcctttactggtt

SEQ ID NO: 759357 - DNA, 75 bp, synthetic construct
  source 1..75: mol_type = other DNA
atgaccactttaaccgacaaagaactgattaaagaaatcaaagagcgcataggcggcctggacgttcgagacaat

SEQ ID NO: 759358 - DNA, 75 bp, synthetic construct
  source 1..75: mol_type = other DNA
ttgctggatgaaccactggcctcgctggatcttccgcgaaaacgcgagctattgccttatctgcaacggttgacg

SEQ ID NO: 759359 - DNA, 75 bp, synthetic construct
  source 1..75: mol_type = other DNA
ttgtgaaagtaaatggtctgcaagacggttcgcaggctgaaagtgagcaggggctggtggtgaagcctcaaggga

SEQ ID NO: 759360 - DNA, 75 bp, synthetic construct
  source 1..75: mol_type = other DNA
gcgaaagccgctgccgatgacggtctgttcccaccgatttttgcccgcgtcaacaaagcaggcacaccggtagcc

SEQ ID NO: 759361 - DNA, 75 bp, synthetic construct
  source 1..75: mol_type = other DNA
atgggtaaattaactctggtagagcaggctttacggctccataaagaatattacggtgaagataattttggtact

SEQ ID NO: 759362 - DNA, 75 bp, synthetic construct
  source 1..75: mol_type = other DNA
aatctatgaaaccgattttttatccagtgcaccgcaaaaccctcatccttcagggcgtggcggatatcaaacttt

SEQ ID NO: 759363 - DNA, 75 bp, synthetic construct
  source 1..75: mol_type = other DNA
aggaccctcagtttgcgattgaaggcctgctaaattacgcgatggcactggataacccgacattgaacaaattga

SEQ ID NO: 759364 - DNA, 75 bp, synthetic construct
  source 1..75: mol_type = other DNA
gtaaggctcgctgtgagcattgttcaggtacgggattttataatgtattgcgcgaagtggtgaaacactacagac

SEQ ID NO: 759365 - DNA, 75 bp, synthetic construct
  source 1..75: mol_type = other DNA
cggcaagtaaggctcgctgtgagcattgttcaggtacgggattttataatgtattgcgcgaagtggtgaaacact

SEQ ID NO: 759366 - DNA, 75 bp, synthetic construct
  source 1..75: mol_type = other DNA
gctattttcataacgcacagtattgcaacaaaggataatatagaaaatctaatagcctcaaatggtggagctgaa

SEQ ID NO: 759367 - DNA, 75 bp, synthetic construct
  source 1..75: mol_type = other DNA
atccggtttgctaatgctccgaaagatacagttagaaataaaataatatttcaacataatgataagttgagcgag

SEQ ID NO: 759368 - DNA, 75 bp, synthetic construct
  source 1..75: mol_type = other DNA
tggagccacgatatcggcggctttgaaaataccgctccggcgcacgtttacaaacgctggtgcgcgtttggtttg

SEQ ID NO: 759369 - DNA, 75 bp, synthetic construct
  source 1..75: mol_type = other DNA
atgaaccttgaagccttaccgaaatattactccccaaaatctccaaaattgagcgatgacgcatcggcgacaggc

SEQ ID NO: 759370 - DNA, 75 bp, synthetic construct
  source 1..75: mol_type = other DNA
atgaaccttgaagccttaccaaaatattactccccaaaatctccaaaattgagtgatgacgcaccggcgacaggc

SEQ ID NO: 759371 - DNA, 75 bp, synthetic construct
  source 1..75: mol_type = other DNA
ttgtcctggatgaaaaaagaacccggcttcatggcacgcctgtttataagacttgtgggcgttgcaatggaaacc

SEQ ID NO: 759372 - DNA, 75 bp, synthetic construct
  source 1..75: mol_type = other DNA
gactcgccagatgtgctcactgaatccgttctccgaggattttcgtcaacagtgcgtcagcggcctggcgaaagc

SEQ ID NO: 759373 - DNA, 75 bp, synthetic construct
  source 1..75: mol_type = other DNA
taactgaagacgccctggatgatcttatcccttcttttctactgacaggtcagcagacaccagcgtttggtcgaa

SEQ ID NO: 759374 - DNA, 75 bp, synthetic construct
  source 1..75: mol_type = other DNA
caattaaagacgtcggcacaggttcgtttgtcgctgctgaggtactggctcgttggtacgacgaaggccgggttc

SEQ ID NO: 759375 - DNA, 75 bp, synthetic construct
  source 1..75: mol_type = other DNA
cactattgcaagtttgacgcgagaagactgcggtcgcttgaagactactcggccatcctccactgccgccgaaaa

SEQ ID NO: 759376 - DNA, 75 bp, synthetic construct
  source 1..75: mol_type = other DNA
ggttctgaaccttgacagatcccgacttcctgtcgggtgcattgaaaagattgaagccattcttggagaccttga

SEQ ID NO: 759377 - DNA, 75 bp, synthetic construct
  source 1..75: mol_type = other DNA
atgaagcgtgcacccgtcattccaagacatacagcaaatactcaggcagttgaagacatgtcagcgccagctgca

SEQ ID NO: 759378 - DNA, 75 bp, synthetic construct
  source 1..75: mol_type = other DNA
tgtggccgtgaagtaaaatttacccttgaagtgctccggggagacactgttgagagcgcttcacgcgtatggtca

SEQ ID NO: 759379 - DNA, 75 bp, synthetic construct
  source 1..75: mol_type = other DNA
gaaaggtaagagcgcgctgatgttcaacctgcaagagccgtacttcacctggccgctgattgctgctgacggggg

SEQ ID NO: 759380 - DNA, 75 bp, synthetic construct
  source 1..75: mol_type = other DNA
atgaaaataaaaacaggtgcacgcatcctcgcattatccgcattaacgacaatgatgttttccgcctcggctctc

SEQ ID NO: 759381 - DNA, 75 bp, synthetic construct
  source 1..75: mol_type = other DNA
gtatttccacattttatcagccagatagagtcgatgctgaccactggtgaactgaatccccgccatgcccaatgc

SEQ ID NO: 759382 - DNA, 75 bp, synthetic construct
  source 1..75: mol_type = other DNA
ggttgagccatggctggaacttatgaccggggttggagcactggtgaaaggtttggtcaagttttcagcgaagtt

SEQ ID NO: 759383 - DNA, 75 bp, synthetic construct
  source 1..75: mol_type = other DNA
agaagctgcctttaataaaggcgaaacagcgatgaccatcaacggcccgtgggcatggtccaacatcgacaccag

SEQ ID NO: 759384 - DNA, 75 bp, synthetic construct
  source 1..75: mol_type = other DNA
tggataacgccggcgcgaaagcgggtctgactttcctggttgatctggttaaaaacaaacacatgaatgcggata

SEQ ID NO: 759385 - DNA, 75 bp, synthetic construct
  source 1..75: mol_type = other DNA
cgacggcagccgtcgccgtaaagccgcaatcctgacggaaagtgattatcgcgttctggttggtgaactggacga

SEQ ID NO: 759386 - DNA, 75 bp, synthetic construct
  source 1..75: mol_type = other DNA
tgagcgacggcactttatcgtggttagggaacgccttgtactggatgcctctaccggaaccgccgcaggaggtta

SEQ ID NO: 759387 - DNA, 75 bp, synthetic construct
  source 1..75: mol_type = other DNA
atgaaatcaggtgttcagctcaatctcagagcaagagaatcacagcggatactcattgataccgctgcagaaatt

SEQ ID NO: 759388 - DNA, 75 bp, synthetic construct
  source 1..75: mol_type = other DNA
atgcagagttcatcgatatgctcgatgcaccagtcgaggatgagcccgccattaataaactactggcaaggaaac

SEQ ID NO: 759389 - DNA, 75 bp, synthetic construct
  source 1..75: mol_type = other DNA
gtctgcttctcccttgctttcttttactttcggcctgtaccgttgatattagtcagccagactcatcagccacag

SEQ ID NO: 759390 - DNA, 75 bp, synthetic construct
  source 1..75: mol_type = other DNA
ggctgtcaaattccagcatcaaagctctttcaccgaacaatcaataaaagaaataacggcacctgatctcaaacc

SEQ ID NO: 759391 - DNA, 75 bp, synthetic construct
  source 1..75: mol_type = other DNA
ttcaaatttctgaccggaccagaaaccgtgctggcactgctggatgaacgggaaagaaaccagcaatacatcaaa

SEQ ID NO: 759392 - DNA, 75 bp, synthetic construct
  source 1..75: mol_type = other DNA
attagatagcctgtttgactcacacgttgatgagatacgtaagatcataaatgatggtttactacctatcaatgt

SEQ ID NO: 759393 - DNA, 75 bp, synthetic construct
  source 1..75: mol_type = other DNA
tcgttatcaaacctaacgccaacagccgcccgaccggcgataccactggttatctggctaatccggaggaagtgt

SEQ ID NO: 759394 - DNA, 75 bp, synthetic construct
  source 1..75: mol_type = other DNA
atgctgaaaaagggcacatgacgaagtgcgatggttgttattcgcgcgtcgccgaggggaaacaacccatatgtg

SEQ ID NO: 759395 - DNA, 75 bp, synthetic construct
  source 1..75: mol_type = other DNA
ctaccgccgccgccaacgtgcaggggctgaaagcctcccgtcaaatgctcaatatggtcagcgatcaaaaattcc

SEQ ID NO: 759396 - DNA, 75 bp, synthetic construct
  source 1..75: mol_type = other DNA
ccgttccattgccaaaagatattctcgacctccaccacgattacgttgcggaacgcgcacgttttgaaggacgcc

SEQ ID NO: 759397 - DNA, 75 bp, synthetic construct
  source 1..75: mol_type = other DNA
gggtgtgaaatctatcaccgttggttatggacaggtcggcagcctgacgcaggatgttgcggcgatccagtctct

SEQ ID NO: 759398 - DNA, 75 bp, synthetic construct
  source 1..75: mol_type = other DNA
ttagcaggatggatcgcagctgtacccggcggctatgtccgattgaggagggccatgccatgttcgacgtactaa

SEQ ID NO: 759399 - DNA, 75 bp, synthetic construct
  source 1..75: mol_type = other DNA
gaatcaaccaaaccatcatttaatctcagcggatagtgaattttatccttcccaacttctggcgacagcagatta

SEQ ID NO: 759400 - DNA, 75 bp, synthetic construct
  source 1..75: mol_type = other DNA
actcgaactggagttagcagggtggatcgcagcagtacccggcggctatgtccgattgaggagggcatgccatgt

SEQ ID NO: 759401 - DNA, 75 bp, synthetic construct
  source 1..75: mol_type = other DNA
atgtttgagtcttatatggcagagcgtcttcgccgccgctgggtgcgcctgcgcttatatcgtttccccggttct

SEQ ID NO: 759402 - DNA, 75 bp, synthetic construct
  source 1..75: mol_type = other DNA
agggctttcattactgcaggcacagcgtttcctctctttttcgcagaagagtctggatagtgcgcttatgtggct

SEQ ID NO: 759403 - DNA, 75 bp, synthetic construct
  source 1..75: mol_type = other DNA
tgacctgacacgagatgttgacggtttctactgtcgtgaaattgtgaaacgaatgtttgaagtgtggtgccactg

SEQ ID NO: 759404 - DNA, 75 bp, synthetic construct
  source 1..75: mol_type = other DNA
agcgactacggcttctcctacggcgcgggtctgcagttcaacccaatcgaaaacgttgctctggacttctcttac

SEQ ID NO: 759405 - DNA, 75 bp, synthetic construct
  source 1..75: mol_type = other DNA
aaacgttgctctggacttctcttacgagcagagccgtattcgtagcgttgacgtaggcacctggattgccggtgt

SEQ ID NO: 759406 - DNA, 75 bp, synthetic construct
  source 1..75: mol_type = other DNA
ccagtctgcttgaacagggtggcgctctcgtctcggaatttcccctcgatgttccaccccttgcttacaatttcc

SEQ ID NO: 759407 - DNA, 75 bp, synthetic construct
  source 1..75: mol_type = other DNA
tacgccagcgttacggcaatcgctatgatctgacgcgagatgttgacggtttctactgtcgtgaagttgtgaagc

SEQ ID NO: 759408 - DNA, 75 bp, synthetic construct
  source 1..75: mol_type = other DNA
ttcgcaagacattcggcaatcgctacgacctgacccgtgatgttgacggcttctactgccgtgaagttgtgaaac

SEQ ID NO: 759409 - DNA, 75 bp, synthetic construct
  source 1..75: mol_type = other DNA
gccttgatgttgcaggaacaagcgccgacgctgaaagtgcagggcgttgatttgcaagattacgctaaccgatta

SEQ ID NO: 759410 - DNA, 75 bp, synthetic construct
  source 1..75: mol_type = other DNA
ttgcggcgctttgtccgttggggctggcgttgctcgtgggatttgcgatccccgacagagtcatggaagggaaac

SEQ ID NO: 759411 - DNA, 75 bp, synthetic construct
  source 1..75: mol_type = other DNA
tcgccgtcccggtattaagcgtgctgccgtgggtagcgacgcaaaaacgctggaaagatctctttatttacggct

SEQ ID NO: 759412 - DNA, 75 bp, synthetic construct
  source 1..75: mol_type = other DNA
ttgccgtgccggtattaagcgtgcttccatgggttgcatcgcaaaaacgctggaaagatctctttatttacggct

SEQ ID NO: 759413 - DNA, 75 bp, synthetic construct
  source 1..75: mol_type = other DNA
gcggattaatggctggattaacatcgcttttggtgtcactggcattattgccacatttgtggtctccccctgggg

SEQ ID NO: 759414 - DNA, 75 bp, synthetic construct
  source 1..75: mol_type = other DNA
gcgaattaatggctgggttaacattgcatttggcgtcacgggtattattgccacgtttgttgtctccccctgggg

SEQ ID NO: 759415 - DNA, 75 bp, synthetic construct
  source 1..75: mol_type = other DNA
aaccgtctcgccattccacctgcagatgccgtcgatcatcaggggcgtctggtgctcattcagtatcgccccaaa

SEQ ID NO: 759416 - DNA, 75 bp, synthetic construct
  source 1..75: mol_type = other DNA
cctgcggttgtaccggttttccggttctgtcgtgactgattaccgaatactgaaaaattacgccaaaacactgaa

SEQ ID NO: 759417 - DNA, 75 bp, synthetic construct
  source 1..75: mol_type = other DNA
cgacgggacaattaatgttagagcatccgatggtggccgccgatctgcaaaatccccaccagccaaaaaccgcgg

SEQ ID NO: 759418 - DNA, 75 bp, synthetic construct
  source 1..75: mol_type = other DNA
aaagtgacggaagcgtacttgtctttattagcgcatggcgcgaaagcgaccgtggcaaaatattccgtgaagtaa

SEQ ID NO: 759419 - DNA, 75 bp, synthetic construct
  source 1..75: mol_type = other DNA
ggcgttgctggtaggattttcaattcctgacagagttatggaaggaaaacatccgcaattttttgtcgagatgac

SEQ ID NO: 759420 - DNA, 75 bp, synthetic construct
  source 1..75: mol_type = other DNA
catgcagagcgcagaaaatggcgagatcatgccaaacattcctgagctgagttcattctggtatgcggagaaaac

SEQ ID NO: 759421 - DNA, 75 bp, synthetic construct
  source 1..75: mol_type = other DNA
gccgataccggtattcctgtcacggtggaacaaccgaaaaatatagaggaaagattccccttggtggcaagcagt

SEQ ID NO: 759422 - DNA, 75 bp, synthetic construct
  source 1..75: mol_type = other DNA
attcccggcttacaaacacgacaccagcgactatggtttctcctatggcgcaggtctgcagttcaacccgatcga

SEQ ID NO: 759423 - DNA, 75 bp, synthetic construct
  source 1..75: mol_type = other DNA
tggcgcaaaaaattgctccgctatggcgttgagttatatgaactgaaaccgacgcgggaacaaagcagcacgttg

SEQ ID NO: 759424 - DNA, 75 bp, synthetic construct
  source 1..75: mol_type = other DNA
cgcagcaaagcgtggcgttcgcgtccgtttgttgctggacgacaacaatacgcccggacttgacgacattttacg

SEQ ID NO: 759425 - DNA, 75 bp, synthetic construct
  source 1..75: mol_type = other DNA
cgccaatgatgtcgcagtggtgcatgctggctacgcacgctggcgcaaaaaattgctccgttatggcgtagaact

SEQ ID NO: 759426 - DNA, 75 bp, synthetic construct
  source 1..75: mol_type = other DNA
tcgtgttactggtcgccctgctgatcatgctgacgaaattcccggcattgcagagtgataatcacagtgacgcca

SEQ ID NO: 759427 - DNA, 75 bp, synthetic construct
  source 1..75: mol_type = other DNA
tgcagagtgataatcacagtgacgccaaacaaggatcgttctccgcatcgctttctcgcctggcgcgtattcgtc

SEQ ID NO: 759428 - DNA, 75 bp, synthetic construct
  source 1..75: mol_type = other DNA
ttgtaccgacacgcgcaggtgtggcgcaactcttacggatggtgagaaaaggggtaaagattgcgatcctaacca

SEQ ID NO: 759429 - DNA, 75 bp, synthetic construct
  source 1..75: mol_type = other DNA
aggaaaacaaaaattatgtgggtgatgttggttacagcattacgcgcggggcggttgttgtgggtaaacttaaat

SEQ ID NO: 759430 - DNA, 75 bp, synthetic construct
  source 1..75: mol_type = other DNA
gatttattacggaatgagtggtgggattattgctcatgctgatggcatcacctttggacagccgctgggcgacac

SEQ ID NO: 759431 - DNA, 75 bp, synthetic construct
  source 1..75: mol_type = other DNA
ggccggagccgggacgttcaccattgccacgcactacaccggctactgggaagggaaagaaaacaccacgtacat

SEQ ID NO: 759432 - DNA, 75 bp, synthetic construct
  source 1..75: mol_type = other DNA
attctgctgattgtgcgccgccttgccgaaactggcgagatggtaattggcagcggcgaggatacctatgtctga

SEQ ID NO: 759433 - DNA, 75 bp, synthetic construct
  source 1..75: mol_type = other DNA
tcctgttcgagaatctggtggatgtcgatgatcgcagcattcagcgtctgttgcaggaagtggattccgaatcgc

SEQ ID NO: 759434 - DNA, 75 bp, synthetic construct
  source 1..75: mol_type = other DNA
atcctcttgctattgcagctattcgtaatttattgatcaaaaatgatattggaatcttagcagagttgagtgaag

SEQ ID NO: 759435 - DNA, 75 bp, synthetic construct
  source 1..75: mol_type = other DNA
gttatgaccattattggcggcggtattgtcactccggtcatgggttttgtcagtgacgcggcgggcaacatcccc

SEQ ID NO: 759436 - DNA, 75 bp, synthetic construct
  source 1..75: mol_type = other DNA
gaagtgatgcacagtctccatgcagataaaagcgggacgattaccgttaaccttctgaagacatcaccgacaaat

SEQ ID NO: 759437 - DNA, 75 bp, synthetic construct
  source 1..75: mol_type = other DNA
cggcaaaggccagcttgcgcaggcgaaaaatgtcttcgccgaactggatgtctcatgggataaaaatcatccgct

SEQ ID NO: 759438 - DNA, 75 bp, synthetic construct
  source 1..75: mol_type = other DNA
cggcgctataacattaccggcattacgcctggtgatgattatgcggcaatgaatcaggtgctgcgtcggcgttac

SEQ ID NO: 759439 - DNA, 75 bp, synthetic construct
  source 1..75: mol_type = other DNA
cactggccgcagttctggctttcaccgcaggtacttctgttgctgcgacttctaccgtaactggtggttatgcac

SEQ ID NO: 759440 - DNA, 75 bp, synthetic construct
  source 1..75: mol_type = other DNA
acaaccggataatgccaacgctaaaaccggtaatacgatgccgtgggtgtttgactgcggcaagattgaccaggt

SEQ ID NO: 759441 - DNA, 75 bp, synthetic construct
  source 1..75: mol_type = other DNA
cggcacgcagtgttgcgttccagaaacaaccggataacgccaacgctaaaaccggtaatacgatgccgtgggtgt

SEQ ID NO: 759442 - DNA, 75 bp, synthetic construct
  source 1..75: mol_type = other DNA
caaatctgccagtaatgatggactcactattttaagagccacagataaagagtccgcacacaaatttgtacagga

SEQ ID NO: 759443 - DNA, 75 bp, synthetic construct
  source 1..75: mol_type = other DNA
atgcgtatcgaaatctgcatagctaaagaaaaattcagcaagatgccaaaaggctctgttccagccctgcaacag

SEQ ID NO: 759444 - DNA, 75 bp, synthetic construct
  source 1..75: mol_type = other DNA
tctgttacacgcaccgcagataaagattctgcaaaaacttttgttcaggagacgctgaaagatacctgggagtct

SEQ ID NO: 759445 - DNA, 75 bp, synthetic construct
  source 1..75: mol_type = other DNA
cgaaagtacccggcgggacggaactgggggaagtggtggaaacttttgtcggtcagttctatttacagggcagtc

SEQ ID NO: 759446 - DNA, 75 bp, synthetic construct
  source 1..75: mol_type = other DNA
agccggaaggtgagggattcagtttgccgccagattctcccgcgctgcatgttatccagcatattcgcgatgaat

SEQ ID NO: 759447 - DNA, 75 bp, synthetic construct
  source 1..75: mol_type = other DNA
gaagcgttattgctggaacataactacatcaaactttatcaaccgcgttacaacgttctgttgcgcgatgataag

SEQ ID NO: 759448 - DNA, 75 bp, synthetic construct
  source 1..75: mol_type = other DNA
agctggcagagaaacgggaggctaacgagtcgtttgtatatggctggattaaagagcgcgtatcaggaatcaatt

SEQ ID NO: 759449 - DNA, 75 bp, synthetic construct
  source 1..75: mol_type = other DNA
attggtgatgctgaccgcgctgaactgtacccagggcgaactctatctggagctggcagagaagcgagaagccaa

SEQ ID NO: 759450 - DNA, 75 bp, synthetic construct
  source 1..75: mol_type = other DNA
atatcagggcgatatgcgtgacctgacacgcgaacaggcgctggaaatccttgaggcggattactggttcggacc

SEQ ID NO: 759451 - DNA, 75 bp, synthetic construct
  source 1..75: mol_type = other DNA
cattctggccccgaccgtggaggtggcggctaacgccttcaaccctgccagggatatggtacgacgggacgatga

SEQ ID NO: 759452 - DNA, 75 bp, synthetic construct
  source 1..75: mol_type = other DNA
cctggcagaccatcgtgaacggcagactggggctgcacgacccgaacgcaccggagaaccggcgggcactggtca

SEQ ID NO: 759453 - DNA, 75 bp, synthetic construct
  source 1..75: mol_type = other DNA
tccctgataacctgccggaaacgaaacaggcgattgctgagagcgttacacgggggcttgatgtgctttaccgtg

SEQ ID NO: 759454 - DNA, 75 bp, synthetic construct
  source 1..75: mol_type = other DNA
aaggcaaattgttcccggatatggacgcagacgggcgtatcggcccccgcacgattaatgcactacggacttatc

SEQ ID NO: 759455 - DNA, 75 bp, synthetic construct
  source 1..75: mol_type = other DNA
acgcagggcgaccgttatctggacctggcggagaaacgcgaagcaaatgagtcgtttgtctatggctggatgaaa

SEQ ID NO: 759456 - DNA, 75 bp, synthetic construct
  source 1..75: mol_type = other DNA
gctttcgttgattgcggtggccgcacgctaacccctggcatttatgtttatacgatggatgtatttggccgtccg

SEQ ID NO: 759457 - DNA, 75 bp, synthetic construct
  source 1..75: mol_type = other DNA
tccattggtgttatctcttcgtgaaaagcctcacaatggctttttgttctatcacgccagcattacagaacgtgc

SEQ ID NO: 759458 - DNA, 75 bp, synthetic construct
  source 1..75: mol_type = other DNA
gtgataccggtgtgaatatggggccaaccgtggcgtccagaatgcttcagcgctggctgaatgtgttcaatctgc

SEQ ID NO: 759459 - DNA, 75 bp, synthetic construct
  source 1..75: mol_type = other DNA
agccgcgggcaggctctggaaatccttgaggcggactattggtatggacctcgttttgaccaggtggcaaacctg

SEQ ID NO: 759460 - DNA, 75 bp, synthetic construct
  source 1..75: mol_type = other DNA
cgggcagacaggccgagaattgatgcctggcagacgctggtgaatcaccattacgggctgcatgaccccaacgcc

SEQ ID NO: 759461 - DNA, 75 bp, synthetic construct
  source 1..75: mol_type = other DNA
aatttctacaagaacaacctgcgcctgttccttgaaaacgatctgacctttggcgacgacggcagagtgttaatc

SEQ ID NO: 759462 - DNA, 75 bp, synthetic construct
  source 1..75: mol_type = other DNA
gagcaaacctacattcagcttcttgagcagcgttatctcccctcgttaatgaacggcctgatccgggatctaaac

SEQ ID NO: 759463 - DNA, 75 bp, synthetic construct
  source 1..75: mol_type = other DNA
cagcagcgggaggaagaaaaagatccgttgaccgtggaactccaccgccagcagcaatatctggatcactggctg

SEQ ID NO: 759464 - DNA, 75 bp, synthetic construct
  source 1..75: mol_type = other DNA
tattcaggcgcaactgatggcgcatctggactatgcgctggagcacaccgactggcacgcgcagcgccagagcgg

SEQ ID NO: 759465 - DNA, 75 bp, synthetic construct
  source 1..75: mol_type = other DNA
aagtcctgctggccgagccaaaccttgcaggtgaaaacagcgtctggctgaacagctcccggcgcaggctgaccg

SEQ ID NO: 759466 - DNA, 75 bp, synthetic construct
  source 1..75: mol_type = other DNA
gtgttcaaatttcccacatcccgactgttcagcacgttgaaatctgcgctcaggccagcgatgccgcggtttaaa

SEQ ID NO: 759467 - DNA, 75 bp, synthetic construct
  source 1..75: mol_type = other DNA
gggacgctctggtatcttggcggacggatacagacgaacctggaagaaatcaggaagcaggaagagacattgcag

SEQ ID NO: 759468 - DNA, 75 bp, synthetic construct
  source 1..75: mol_type = other DNA
aaaagctgaaagagagagccgaatctacagagaaaatgctgaacgacgagttcaggaagctcggcgagtctgtca

SEQ ID NO: 759469 - DNA, 75 bp, synthetic construct
  source 1..75: mol_type = other DNA
ccggagaaccgccggacgctgactctccctgataacctgccggaaacgaaacaggcgcttgctgagggcgttaca

SEQ ID NO: 759470 - DNA, 75 bp, synthetic construct
  source 1..75: mol_type = other DNA
cagtgagtatgtaggtcactcgctacctgatggaatgcatgagctttatgctgccccgccagcgtcggtagtgcc

SEQ ID NO: 759471 - DNA, 75 bp, synthetic construct
  source 1..75: mol_type = other DNA
attcatatcactaaatatgttttttcttgttaatgattttatcgcaaaatggataggtgttaattatacattaag

SEQ ID NO: 759472 - DNA, 75 bp, synthetic construct
  source 1..75: mol_type = other DNA
aaaagattatgactggggctcaaaccgttctgtacttctaaaattgtcgacgaatgaagttatgcagatggcatc

SEQ ID NO: 759473 - DNA, 75 bp, synthetic construct
  source 1..75: mol_type = other DNA
catatagcaagaatgcagcttctccggtagagcttaaaaactatattgagcttctacgctaccctgaaatagaga

SEQ ID NO: 759474 - DNA, 75 bp, synthetic construct
  source 1..75: mol_type = other DNA
tggcggagctgaccgaagtactgaatggcttgctcgacggtcagaatctcaagcgcagcaaaatgggcggcgtga

SEQ ID NO: 759475 - DNA, 75 bp, synthetic construct
  source 1..75: mol_type = other DNA
tccctgataaccaggagtttcgcatcaccctgggcgacataagctacacgctccgcgtgctatggcgcgacgatg

SEQ ID NO: 759476 - DNA, 75 bp, synthetic construct
  source 1..75: mol_type = other DNA
attcacctttcatttgacatatgggttacctgtccactcacctcacctgacgatataaaaaatttcagaaacagt

SEQ ID NO: 759477 - DNA, 75 bp, synthetic construct
  source 1..75: mol_type = other DNA
caactcaccgaagttctggcggagtttgagcaagaggctgaacaatttgccgcactgaatatcaacgccaacgat

SEQ ID NO: 759478 - DNA, 75 bp, synthetic construct
  source 1..75: mol_type = other DNA
tggtgcatctgaagcgtgcgcaggccgccgatattctggcgttgttcgatgaacgtctgcgccacgacgtgatgt

SEQ ID NO: 759479 - DNA, 75 bp, synthetic construct
  source 1..75: mol_type = other DNA
gaacgtcacgcagatctccaacaagcagctaaccgatgtgctggcggagtttgagcaagaagcagaacagtttgc

SEQ ID NO: 759480 - DNA, 75 bp, synthetic construct
  source 1..75: mol_type = other DNA
atgcagtttatccagaataacagggcaaaaataagcgcagacttgcttcaaaagaataaactgtatcttaaagaa

SEQ ID NO: 759481 - DNA, 75 bp, synthetic construct
  source 1..75: mol_type = other DNA
gtatatcaatgacatggcaacttttatgcgatgatcatggttttacccgggagcactacaatcagctgaagaagt

SEQ ID NO: 759482 - DNA, 75 bp, synthetic construct
  source 1..75: mol_type = other DNA
ctgacaccgccggaggatattctgggacaggttatccgtgaatatgaacgaagaatacgggactgtccgtcctta

SEQ ID NO: 759483 - DNA, 75 bp, synthetic construct
  source 1..75: mol_type = other DNA
ctccccgcctcatcatactcgctgcgggtaatgctcccgtccgcatgttccttcttcaccacccgcttcaggcca

SEQ ID NO: 759484 - DNA, 75 bp, synthetic construct
  source 1..75: mol_type = other DNA
tacgacaacgaaaagaaaaaatgggttgtcgccggaactgcatggggtatttattactattccaatggaaaaacg

SEQ ID NO: 759485 - DNA, 75 bp, synthetic construct
  source 1..75: mol_type = other DNA
attatcgagggtcagaagactcagtaccggcgaaatgctgcatgacctgattgttgaagagtataaaaggtaccg

SEQ ID NO: 759486 - DNA, 75 bp, synthetic construct
  source 1..75: mol_type = other DNA
cgctcaactttatggagccgcagagcgccgccgatctgattcgtgatgagcatccgcaaattatcgccaccattc

SEQ ID NO: 759487 - DNA, 75 bp, synthetic construct
  source 1..75: mol_type = other DNA
ctctttcgtgatgctgtggccctggaatggatcaagatacgtagccagctaaaaccagagcgtgatcgaggctcg

SEQ ID NO: 759488 - DNA, 75 bp, synthetic construct
  source 1..75: mol_type = other DNA
cacaacggatttttattctatcgtgcgtcaatcattgaccgtgcagacggaaagcgctcaacgtggcattcacag

SEQ ID NO: 759489 - DNA, 75 bp, synthetic construct
  source 1..75: mol_type = other DNA
tatcccgcgtgaacctttacccgccggcacttatcgtgtggactggcgtgcggtttcatcagatacacatcctat

SEQ ID NO: 759490 - DNA, 75 bp, synthetic construct
  source 1..75: mol_type = other DNA
ggagtagcacagcttcttgatcgaaatcaaattccagaagacaggatcgcccttctcctgggccatacacgcggc

SEQ ID NO: 759491 - DNA, 75 bp, synthetic construct
  source 1..75: mol_type = other DNA
taacgtttaagggtgaagttatcgatgcaccttgctctattgctcctggtgatgaagatcaaacaataaatctcg

SEQ ID NO: 759492 - DNA, 75 bp, synthetic construct
  source 1..75: mol_type = other DNA
ccgtagaagtgctcttagaacatctgaaaaagcgcgatgttcagcttcgtgacattaaccgaaccaccgttacag

SEQ ID NO: 759493 - DNA, 75 bp, synthetic construct
  source 1..75: mol_type = other DNA
cacctgttacgtgaatgcaggtcaattttcccggcgactgaactagcgaatgatttcaccgtgtttaacgtttaa

SEQ ID NO: 759494 - DNA, 75 bp, synthetic construct
  source 1..75: mol_type = other DNA
agccgtcaggcggcgactctggctcgtgaggcgggtgtcggcaaattgatcattactcacgtcagctcacgctat

SEQ ID NO: 759495 - DNA, 75 bp, synthetic construct
  source 1..75: mol_type = other DNA
actggaatgttatggctatcgtattgaagaacatgataaaccgggtgcattaaatgcccaggcattaaaagctgc

SEQ ID NO: 759496 - DNA, 75 bp, synthetic construct
  source 1..75: mol_type = other DNA
aatctgaccgtgaaattctcaggtgcaaaattaacgatgacgggtatgaaaggcatgtcatcacattctccgatg

SEQ ID NO: 759497 - DNA, 75 bp, synthetic construct
  source 1..75: mol_type = other DNA
atggaattaatttttttaggtacttcagccggtgtgccaacccgtacgcgcaatgtcacggcaatattgcttaac

SEQ ID NO: 759498 - DNA, 75 bp, synthetic construct
  source 1..75: mol_type = other DNA
atggaattaatttttttaggcacttctgcaggtgttccgacccggacacgtaatgtcacggcaatattgcttaat

SEQ ID NO: 759499 - DNA, 75 bp, synthetic construct
  source 1..75: mol_type = other DNA
ggactaacctgcgaagccgatacgctgggttcctgtggttacgtctatatcgctatttatcccactcaacgctga

SEQ ID NO: 759500 - DNA, 75 bp, synthetic construct
  source 1..75: mol_type = other DNA
atgctggtgggcgttggttgcgcctggctgacagcctgttttattcccgctaaaaaaggcagcatttttgcactc

SEQ ID NO: 759501 - DNA, 75 bp, synthetic construct
  source 1..75: mol_type = other DNA
gattcaacactaatctggttacatctcgaaaactatcattcagacattgtaaaaagaatctattcaaaatttgaa

SEQ ID NO: 759502 - DNA, 75 bp, synthetic construct
  source 1..75: mol_type = other DNA
tggagatgatccgcagcattgccggaatcaaacaaccagcaagcaaaattaacaggtgttcagcgcctgtttccg

SEQ ID NO: 759503 - DNA, 75 bp, synthetic construct
  source 1..75: mol_type = other DNA
ttgtgctgcaacaggaacgccaccagcatgatgatgtgaggccgtatcagtggcggaaaccggacaggccgcgac

SEQ ID NO: 759504 - DNA, 75 bp, synthetic construct
  source 1..75: mol_type = other DNA
ggtagatcaatacctggtaaatcaatcgcaaacagcaagagccagtgcttttggcatctggcaagggagtgagga

SEQ ID NO: 759505 - DNA, 75 bp, synthetic construct
  source 1..75: mol_type = other DNA
atgtggttaccgcgcgcgcgaaaggagtgagtgagaaaaacattctctggaaacatgtgttccgcaacgccatgc

SEQ ID NO: 759506 - DNA, 75 bp, synthetic construct
  source 1..75: mol_type = other DNA
tgtttgccatcctgctgattgtcttcttcgcgggcggcagctatttcgacctgttccctctgcgcggcctggttt

SEQ ID NO: 759507 - DNA, 75 bp, synthetic construct
  source 1..75: mol_type = other DNA
cggtttccatcaccctcggattgtggagcacgctgattatctatctggtgtcgattccgttaggcattcgcaaag

SEQ ID NO: 759508 - DNA, 75 bp, synthetic construct
  source 1..75: mol_type = other DNA
ttttttatgtaggccaccgataaagaaaattcaagtaattttaaaaaatggatttcattttttttgttcaacact

SEQ ID NO: 759509 - DNA, 75 bp, synthetic construct
  source 1..75: mol_type = other DNA
ttattgtagctgaaattttcgttggcatgggaatgcttaaacaattcattaaagtaaataaaaccgtatgtaggc

SEQ ID NO: 759510 - DNA, 75 bp, synthetic construct
  source 1..75: mol_type = other DNA
gtatcagaaaatcaccgattatctgtggcatatcacgctgccggtgctggcgacagtgattggcggctttgcggc

SEQ ID NO: 759511 - DNA, 75 bp, synthetic construct
  source 1..75: mol_type = other DNA
gttcctggagtacggtcaccgagtatggtgatgcgaattacttgaatgttgttagcatccctgccgttgattgta

SEQ ID NO: 759512 - DNA, 75 bp, synthetic construct
  source 1..75: mol_type = other DNA
taatattgtcgacattgtaagcggtcgtccaaccgttgtgttaagcgatgacaagcaagttaaccctgacaatat

SEQ ID NO: 759513 - DNA, 75 bp, synthetic construct
  source 1..75: mol_type = other DNA
aggaggctatagttatcttactggcggcacggtgggttcacttcattcctatcaaaagggtgagatgatctccac

SEQ ID NO: 759514 - DNA, 75 bp, synthetic construct
  source 1..75: mol_type = other DNA
gaaatgacccatgcgggaaccgttaataacatctataacgataaaacacgttttcctgtcttctatcgtatgggg

SEQ ID NO: 759515 - DNA, 75 bp, synthetic construct
  source 1..75: mol_type = other DNA
gttttcctgttttctaccgtattgggtcagggacacagtacattaaaacgccatccgggcagcttcagtatattt

SEQ ID NO: 759516 - DNA, 75 bp, synthetic construct
  source 1..75: mol_type = other DNA
tgacagtggacgactttgttgccagcaacagtcagttcattgtgaatacagacggtaaaacggcggatacggtga

SEQ ID NO: 759517 - DNA, 75 bp, synthetic construct
  source 1..75: mol_type = other DNA
tgaacactttgttggagggattgacagcgctgacagttcggtgacggtggcgtccaccgatgccttgttcagcca

SEQ ID NO: 759518 - DNA, 75 bp, synthetic construct
  source 1..75: mol_type = other DNA
aatcatacacccattgtctgtactggtgaagatgcattattggcgcagcgtattgccattgctgcaaaacaatca

SEQ ID NO: 759519 - DNA, 75 bp, synthetic construct
  source 1..75: mol_type = other DNA
tttttgtgaaaaaccgctcagcatgaatgaagatgagcaggcctcaatggcggtgctgagaaaagtgaaagagaa

SEQ ID NO: 759520 - DNA, 75 bp, synthetic construct
  source 1..75: mol_type = other DNA
caggcagcagaggggcaggtgacggccttaagtgtgggcggtaaagccctgaccaacgccaaagggcgtaaagat

SEQ ID NO: 759521 - DNA, 75 bp, synthetic construct
  source 1..75: mol_type = other DNA
tcccgccagttcctacaattgttgacgcacaagggaaactagataaggctggcatggcccggatgatcgaccatg

SEQ ID NO: 759522 - DNA, 75 bp, synthetic construct
  source 1..75: mol_type = other DNA
gcgtcaggatgctgttgatgctgatatcgcaactgatgaagaaacttcaactctcaccgaatggaagaaataccg

SEQ ID NO: 759523 - DNA, 75 bp, synthetic construct
  source 1..75: mol_type = other DNA
ggtgatgctgactttcagaaacggcggctacgcgctcattgataacagccgtcgggcggtatatggctatgacca

SEQ ID NO: 759524 - DNA, 75 bp, synthetic construct
  source 1..75: mol_type = other DNA
atggaagtgattctgaaatcaaaaaatggtgtgcacgtacatttagatgctaatgattcaagaggcttattaaat

SEQ ID NO: 759525 - DNA, 75 bp, synthetic construct
  source 1..75: mol_type = other DNA
tgtcaaagggatcgtggaagcggtgcatgagcgcacctcggtgttgacgcgcccggatttctacgacggcgtgaa

SEQ ID NO: 759526 - DNA, 75 bp, synthetic construct
  source 1..75: mol_type = other DNA
tcatactcaggatgggctgaaaccgctggaagaggcgttgaccgggcgcatcagcatttttgccgggcagtccgg

SEQ ID NO: 759527 - DNA, 75 bp, synthetic construct
  source 1..75: mol_type = other DNA
aaatcgttgagaaaggcaaaaccgctccgcgaatcaccccgcagcacatcgaagacgtgattaaaagcgagcatt

SEQ ID NO: 759528 - DNA, 75 bp, synthetic construct
  source 1..75: mol_type = other DNA
atgtttaaacaactaaccggagccgttcgtcggctgttcagtcctgccacgggggaagttgtcaccgtgaacaag

SEQ ID NO: 759529 - DNA, 75 bp, synthetic construct
  source 1..75: mol_type = other DNA
atgcgggttcaggaatcggagctgcgggaccggttcggcctggctgaaccggacgacggggctgatgttctgcat

SEQ ID NO: 759530 - DNA, 75 bp, synthetic construct
  source 1..75: mol_type = other DNA
cggtctggcccgtctggtggcggtgatgtacatgctgaaatcctataccgtgcgtgactggtgggcattcgcgga

SEQ ID NO: 759531 - DNA, 75 bp, synthetic construct
  source 1..75: mol_type = other DNA
cggtaaaaactgtgtctttgctcactgcgtccatctcgaagaaaaagagtgggatcgtctcagcgaaaccaaatc

SEQ ID NO: 759532 - DNA, 75 bp, synthetic construct
  source 1..75: mol_type = other DNA
ttggtcggaagattgcccggcaaaatgctgtaaacaaaatctggatgctcgaaggttacttgctgaagcagaagc

SEQ ID NO: 759533 - DNA, 75 bp, synthetic construct
  source 1..75: mol_type = other DNA
cgtggcggagcaattttctctttcgctgcgtacgctacatcggcagcttaagcagcaaacgggactgacgcctca

SEQ ID NO: 759534 - DNA, 75 bp, synthetic construct
  source 1..75: mol_type = other DNA
atgaacgaccagcaaatcgaaaaagaaatcgttgaaaaaggcaaaacagccccgcgaatcactcctcagcacatc

SEQ ID NO: 759535 - DNA, 75 bp, synthetic construct
  source 1..75: mol_type = other DNA
gaagacgtgattaaaagcgagcattactttgctgcttatgatggacgtaatggtgccatttccagcaacgaatat

SEQ ID NO: 759536 - DNA, 75 bp, synthetic construct
  source 1..75: mol_type = other DNA
aaatcgttgagaaaggcaaaacggcaccgcgcgttacgccccaatatatcgaaagcatcattcttgaagagcatt

SEQ ID NO: 759537 - DNA, 75 bp, synthetic construct
  source 1..75: mol_type = other DNA
tatatgctcaagtcctacaccgtccgggactggtgggcgtttgctgaaaaatttggtatcccgattgtggtgggt

SEQ ID NO: 759538 - DNA, 75 bp, synthetic construct
  source 1..75: mol_type = other DNA
gattacctggcgaatattttccgcgttaacggcgtggatcaattaagtacctatcgcaataacatcggtggctaa

SEQ ID NO: 759539 - DNA, 75 bp, synthetic construct
  source 1..75: mol_type = other DNA
tccggaagatttacgtctggttgaaagcgtacagaaagggctgaaatcgcgtggctatcgtggtcaggggcgcat

SEQ ID NO: 759540 - DNA, 75 bp, synthetic construct
  source 1..75: mol_type = other DNA
gctaccaggcctggcggcaaaagtgctggaagcctgcccggaagtccacgacctgaaactggcggctcgttttac

SEQ ID NO: 759541 - DNA, 75 bp, synthetic construct
  source 1..75: mol_type = other DNA
ctacagctcgcaggggctgattgacgaaattccgctggtcactttcctgacgatcatgtttaagaagaacccgct

SEQ ID NO: 759542 - DNA, 75 bp, synthetic construct
  source 1..75: mol_type = other DNA
ctacagttcgcaggggctgattgacgaaattccgctggtcaccttcctgacgatcatgtttaagaagaacccgct

SEQ ID NO: 759543 - DNA, 75 bp, synthetic construct
  source 1..75: mol_type = other DNA
aacccggaattcagcagcgcctttggttgtacctatattaaacaggtggtcgatggtgaaacactactggaactg

SEQ ID NO: 759544 - DNA, 75 bp, synthetic construct
  source 1..75: mol_type = other DNA
acgtatctgttatgtcacgaatcagccgtggtcgccggaagcggagaaagcctggcgtgatggcctgtaccggaa

SEQ ID NO: 759545 - DNA, 75 bp, synthetic construct
  source 1..75: mol_type = other DNA
aatccgggggcgcttatctgtcacgcgtgctgattgaagccgccatgacgccagtgcgggatatcccgattctgc

SEQ ID NO: 759546 - DNA, 75 bp, synthetic construct
  source 1..75: mol_type = other DNA
attatctccacgcataacggcgtcgataatctgtttaatcagtacattcaggaagcccgcgaagggcgcaaggat

SEQ ID NO: 759547 - DNA, 75 bp, synthetic construct
  source 1..75: mol_type = other DNA
atcaaagggatgatgacggtcatttatgaattcccggtggattctgaaactaccctgcaaaactacgatatttac

SEQ ID NO: 759548 - DNA, 75 bp, synthetic construct
  source 1..75: mol_type = other DNA
ggctccggctgtatgtggataaccaagcaggacggctggtgctttggcgtcactacccggatgaggggctggacg

SEQ ID NO: 759549 - DNA, 75 bp, synthetic construct
  source 1..75: mol_type = other DNA
aatctctgcgcaaaaaatgccagccattatcccctgtaaggttacagggtttgcaattactgaccgaaaatgtac

SEQ ID NO: 759550 - DNA, 75 bp, synthetic construct
  source 1..75: mol_type = other DNA
gctaagattatcgagcagccacaacttactgtggatgccgtcgccaacactctggctgggtggtcgcgagaaacc

SEQ ID NO: 759551 - DNA, 75 bp, synthetic construct
  source 1..75: mol_type = other DNA
gccgctccggtgcgttaacggtaagtgaaattgccgcggcggggttaccggcgttgtttgtgccgtttcagcaca

SEQ ID NO: 759552 - DNA, 75 bp, synthetic construct
  source 1..75: mol_type = other DNA
ggagagcgtcaccagagtgggaccttctgatctttctctgattttgctcgcaataggcgtagcaggttttgtcgg

SEQ ID NO: 759553 - DNA, 75 bp, synthetic construct
  source 1..75: mol_type = other DNA
ccgaagcacggcatcgaaatcgactttattcgcatctctggcctacgcggcaaaggtgttaaagctctgctcgca

SEQ ID NO: 759554 - DNA, 75 bp, synthetic construct
  source 1..75: mol_type = other DNA
gctccgttgcgtatctttaacgcctggcgtcaggcgcgggcgattatgaaagcgtataaacctgacgtggtgctc

SEQ ID NO: 759555 - DNA, 75 bp, synthetic construct
  source 1..75: mol_type = other DNA
gtaacccggtgcgtaccgatgtgctggcgctgccgttgccgcagcaacgtttggctggacgtgaaggtccggttc

SEQ ID NO: 759556 - DNA, 75 bp, synthetic construct
  source 1..75: mol_type = other DNA
ctaatattttttcagtagccaaaaaactgggcgttaatatagaagacgacagcaaggtcgataagttacttcatg

SEQ ID NO: 759557 - DNA, 75 bp, synthetic construct
  source 1..75: mol_type = other DNA
ctactcctgtgagcgtaaaaaagagggaaacggccagatttgcggcggggagttcttctgcaaagacggcagttg

SEQ ID NO: 759558 - DNA, 75 bp, synthetic construct
  source 1..75: mol_type = other DNA
atttggtatagctcaaatatgaagtaccgtttcaccattacgctgacgattcaggttccttccagaaaatgggta

SEQ ID NO: 759559 - DNA, 75 bp, synthetic construct
  source 1..75: mol_type = other DNA
atgtctgatcccttttcccggctggcagcgcgtatggatgctatcacggtcagaaagatgggaaagacagcctcg

SEQ ID NO: 759560 - DNA, 75 bp, synthetic construct
  source 1..75: mol_type = other DNA
gcaatatacgtcatggttatccgcttgtaaccagtcaatgcctagtggcggtaaaaaagcaagaaagtttggctg

SEQ ID NO: 759561 - DNA, 75 bp, synthetic construct
  source 1..75: mol_type = other DNA
tactcgtgaaaatgggattacttttcatccaaaaatatatttatttgatggtccaaaacatgcgaaagcaattat

SEQ ID NO: 759562 - DNA, 75 bp, synthetic construct
  source 1..75: mol_type = other DNA
ctgggttcacataatatcaggtggaacaacggatcaacagcgggcaagggatccgcgtcactcttcccccttcac

SEQ ID NO: 759563 - DNA, 75 bp, synthetic construct
  source 1..75: mol_type = other DNA
gtaataagcctggattctttctgttatcgggatacattcccccttcacccaaatggagcgaggttgaaaatctgt

SEQ ID NO: 759564 - DNA, 75 bp, synthetic construct
  source 1..75: mol_type = other DNA
attttttattacaataatatcatttgcaataaccaaatcatatccgcaattaatgatgtcttaacggaatacggt

SEQ ID NO: 759565 - DNA, 75 bp, synthetic construct
  source 1..75: mol_type = other DNA
atgttatcctcatataaaataaaacttctcaatggtgcgatgcgtaatcgggaattacaacttccgatgggaaac

SEQ ID NO: 759566 - DNA, 75 bp, synthetic construct
  source 1..75: mol_type = other DNA
tatctccggttgaattttggattgatgggcaacccacgccctatgaagcagataaaccattacctgtcggaaaga

SEQ ID NO: 759567 - DNA, 75 bp, synthetic construct
  source 1..75: mol_type = other DNA
acgagagtaagatccttgccattataaatgcaatgaacaaaaatagtaacgtcaagatactctttcagaacattc

SEQ ID NO: 759568 - DNA, 75 bp, synthetic construct
  source 1..75: mol_type = other DNA
tcttgccatcataaacgagatgagcaaaaagagtaacgtcaagatactctttcagaatatccagccgtacatttc

SEQ ID NO: 759569 - DNA, 75 bp, synthetic construct
  source 1..75: mol_type = other DNA
aaataaaaaataccaatcagcaaaagttgtctttgaatgtgaaggttatcgttttggtgggagcgcgacaaaacc

SEQ ID NO: 759570 - DNA, 75 bp, synthetic construct
  source 1..75: mol_type = other DNA
tagagcggcaatacaaaatcattactgatttgctacgaaaatcatcatcggtgattaatgctggcgatcctgatg

SEQ ID NO: 759571 - DNA, 75 bp, synthetic construct
  source 1..75: mol_type = other DNA
ccgggtggatgaacgatccaaacggcctgatctggtttaacgatcgttatcacgcgttttatcaacatcacccga

SEQ ID NO: 759572 - DNA, 75 bp, synthetic construct
  source 1..75: mol_type = other DNA
agatgaaacgcccgacggtgcagagctggaaacagcgcgacggctgggacagcgttgcccccatcagccgtgtcg

SEQ ID NO: 759573 - DNA, 75 bp, synthetic construct
  source 1..75: mol_type = other DNA
gataaagttaacccttcttacaaaacttgggttatgtcggatctgccgatggacttaaccgaagtttcccacgaa

SEQ ID NO: 759574 - DNA, 75 bp, synthetic construct
  source 1..75: mol_type = other DNA
taaaggcgatcagatttatggtcttaacatgacgcgctattatacgcttctaaatcgtcagcatggcggcaatgg

SEQ ID NO: 759575 - DNA, 75 bp, synthetic construct
  source 1..75: mol_type = other DNA
gtgtggatcaggttgctggcttcacggaaatcaccacacaccagtgcctgcgggacacgaaaattgaacagtact

SEQ ID NO: 759576 - DNA, 75 bp, synthetic construct
  source 1..75: mol_type = other DNA
acccgtaacccattaaccagagaaggtaaaaccgcctcgttcaatgaagagggccgcatgcacttgacggtttct

SEQ ID NO: 759577 - DNA, 75 bp, synthetic construct
  source 1..75: mol_type = other DNA
catcgaggaagggcgtaaggaaattgaccgtaaaacgtggaaaacgctctttgaagaaacgggtatggaccggta

SEQ ID NO: 759578 - DNA, 75 bp, synthetic construct
  source 1..75: mol_type = other DNA
cgactcgaacatgatgagatataacggcttttctcaggataatctcttctatttgaacgactttgagaatatcgt

SEQ ID NO: 759579 - DNA, 75 bp, synthetic construct
  source 1..75: mol_type = other DNA
cagcttgagcacctttcttaccttgagcagagcaatatcacgctgattgagttaggccaggactaccaccagcgg

SEQ ID NO: 759580 - DNA, 75 bp, synthetic construct
  source 1..75: mol_type = other DNA
tccagcaccactacaccacggaagccaatatgctggcgcgtatcgtgctgggtggcatgactgcaaaacagtggg

SEQ ID NO: 759581 - DNA, 75 bp, synthetic construct
  source 1..75: mol_type = other DNA
attgagttgggtatgacttaccagcagcgaaaagccgaattaatccgcctttcacagcgctggctggcccgtcgc

SEQ ID NO: 759582 - DNA, 75 bp, synthetic construct
  source 1..75: mol_type = other DNA
taaatacaaaaagagagttggttgtagtatctgaactttctggtgggattaaaaaaccagctcgaaataagctat

SEQ ID NO: 759583 - DNA, 75 bp, synthetic construct
  source 1..75: mol_type = other DNA
aatagtgaagctggcgcatgggcacgcatcatgagcggaaccggctctgccggtggtggtttcagtgacaactac

SEQ ID NO: 759584 - DNA, 75 bp, synthetic construct
  source 1..75: mol_type = other DNA
atgaataaaatatatgcagtaaaaaggaacgcaaagggcgagatagttgttgtttcagaaattagtaaaggcatt

SEQ ID NO: 759585 - DNA, 75 bp, synthetic construct
  source 1..75: mol_type = other DNA
gcccagcaatttgtgatgccaaaaaaactggtactacgtggcatttttcccgactcgaacatgatgagatataac

SEQ ID NO: 759586 - DNA, 75 bp, synthetic construct
  source 1..75: mol_type = other DNA
atgcaaaaatttctggacggtattatgctgattgccgaagcctcagctatttgcgggttttcactatttaacagc

SEQ ID NO: 759587 - DNA, 75 bp, synthetic construct
  source 1..75: mol_type = other DNA
ccattaattcaggcatcaattgtgggaatggatatcccatatcagacctatcgtgatttcgctgaaaataaagga

SEQ ID NO: 759588 - DNA, 75 bp, synthetic construct
  source 1..75: mol_type = other DNA
cgtgctgggtggcatgactgcaaaacagtgggcgcaggcgaacggcattacaggcgaaccacgcgaccacatgag

SEQ ID NO: 759589 - DNA, 75 bp, synthetic construct
  source 1..75: mol_type = other DNA
cagaagatgatcagagtcgtttcaatggacatgtacagttgaaacaaggatcggcactaactattaatgaacatt

SEQ ID NO: 759590 - DNA, 75 bp, synthetic construct
  source 1..75: mol_type = other DNA
cttgtcgactggcagattaatggggttactggtgatagtttgcataaactgggtacgggtacgttaaaaattaac

SEQ ID NO: 759591 - DNA, 75 bp, synthetic construct
  source 1..75: mol_type = other DNA
tcacttccctaccaaacgtatcgtgattttgcagaaaataaaggagctttccaggctggcgcagaaaatgttccg

SEQ ID NO: 759592 - DNA, 75 bp, synthetic construct
  source 1..75: mol_type = other DNA
acagccgcttgttgcaaatgagcagtttaaccagggaatgaatctgagtagccagaataagggacagggggccag

SEQ ID NO: 759593 - DNA, 75 bp, synthetic construct
  source 1..75: mol_type = other DNA
tcgttattgatggtggagtggatactcaggggagtgtaactcagcaaaatggtcggctatttatgcaaggacatc

SEQ ID NO: 759594 - DNA, 75 bp, synthetic construct
  source 1..75: mol_type = other DNA
ggaacgatgtattttgccaaaagctgggagcttagcgggcaaagcacgagcttaaatgttggcgcaggtgggagc

SEQ ID NO: 759595 - DNA, 75 bp, synthetic construct
  source 1..75: mol_type = other DNA
acatctgatggagcaatacccggatgttccgttcacctggctggagtttgataacggcggcgacggtgtgtttat

SEQ ID NO: 759596 - DNA, 75 bp, synthetic construct
  source 1..75: mol_type = other DNA
ggctacagcagctttgtgagaatttgctaaacaaccaagggtatctgccaacactggataatctagcggataaaa

SEQ ID NO: 759597 - DNA, 75 bp, synthetic construct
  source 1..75: mol_type = other DNA
ccagcagcgctctttggctgcccccacaaatgccgcataagtttgttgcgacaggcaacgtacttttaaaaaccg

SEQ ID NO: 759598 - DNA, 75 bp, synthetic construct
  source 1..75: mol_type = other DNA
ctgggcgttggtttcggcagtggtaaatctccggactgtcgggggatcacggtggatgaactgcaaaaactggac

SEQ ID NO: 759599 - DNA, 75 bp, synthetic construct
  source 1..75: mol_type = other DNA
cctgaccaacaaagcctggttctgcggccatgaattttacgtcgatgaacgcgtgctggtgccgcgctcgccgat

SEQ ID NO: 759600 - DNA, 75 bp, synthetic construct
  source 1..75: mol_type = other DNA
attacctcgctgatgatggcgtgctgatttgtgaagtcggcaacagcatggtacatcttatggaacaatatccgg

SEQ ID NO: 759601 - DNA, 75 bp, synthetic construct
  source 1..75: mol_type = other DNA
gacaaacagtgaccctgaatatgggcagcagctggtttgcgcagagtgcaacggaaagcggttttctcaacatcg

SEQ ID NO: 759602 - DNA, 75 bp, synthetic construct
  source 1..75: mol_type = other DNA
cgatgcagaactgcgtcaggccgacgggaagattatcagcaacaccggcaaccagattacgctgcagttacccgc

SEQ ID NO: 759603 - DNA, 75 bp, synthetic construct
  source 1..75: mol_type = other DNA
tgcgccccgcgtcagcttcacgcagcagttgtatctcaccctgcaggccggcaggaccactgctgtggcagacgg

SEQ ID NO: 759604 - DNA, 75 bp, synthetic construct
  source 1..75: mol_type = other DNA
aacagaaggtcagttgaacggaattatcagtgagtggggagagctccagaaatatccgggctggacatcactggt

SEQ ID NO: 759605 - DNA, 75 bp, synthetic construct
  source 1..75: mol_type = other DNA
agggccgtaccaccacgacgtgggaaagtaccacgcccggaacggccaccattaccgctgacgcgtatggtcagc

SEQ ID NO: 759606 - DNA, 75 bp, synthetic construct
  source 1..75: mol_type = other DNA
cgtgaccctgaatatgggcagcaactggtttgcgcagagtgcgacaaaatcggagtggctgagtggtgactacaa

SEQ ID NO: 759607 - DNA, 75 bp, synthetic construct
  source 1..75: mol_type = other DNA
ccgcaaacagacgctgattaccctgcagctaccgccggatgtgtatggtgcagaactgacgaccgtcaccctgac

SEQ ID NO: 759608 - DNA, 75 bp, synthetic construct
  source 1..75: mol_type = other DNA
ctgtcagtggcgaacgcgtggactggcatgttgacagcggtaatctctggcagacacagggcacaacggatgcac

SEQ ID NO: 759609 - DNA, 75 bp, synthetic construct
  source 1..75: mol_type = other DNA
caaaaacggtaattcgcatccgcaaaggtagctctaacggtgtggaactaaccggattgcaactggacgaagaaa

SEQ ID NO: 759610 - DNA, 75 bp, synthetic construct
  source 1..75: mol_type = other DNA
gtcgccagctgggcgcacaggtggcgtcatccggtgcccttcagggcgttatcagtgaatggggtgaactggaaa

SEQ ID NO: 759611 - DNA, 75 bp, synthetic construct
  source 1..75: mol_type = other DNA
ggctggattgcagttcttttttcaggttaccccggcatttgccggcgtctttcaggctgatgagcagtctgtggc

SEQ ID NO: 759612 - DNA, 75 bp, synthetic construct
  source 1..75: mol_type = other DNA
accgaccagaacggccagctgtctgtgcaactgaccagcacccgtgccggacaggcggtggtgaatgcctccgtg

SEQ ID NO: 759613 - DNA, 75 bp, synthetic construct
  source 1..75: mol_type = other DNA
gccggtatgcagcggcagtttgcttgcaatgtccgatcaaaaactgtcagtggcagaactgcttactgagttacc

SEQ ID NO: 759614 - DNA, 75 bp, synthetic construct
  source 1..75: mol_type = other DNA
gcggcgtcagttttgatggttcaggagatatcagtctcccgggtgtgaatacccagggcaaccagaacacaaccg

SEQ ID NO: 759615 - DNA, 75 bp, synthetic construct
  source 1..75: mol_type = other DNA
cgctcacgcaatcaccctgacgccacgctggacgaaaagggatttgcgcaatattgcagtgatacagacagtgac

SEQ ID NO: 759616 - DNA, 75 bp, synthetic construct
  source 1..75: mol_type = other DNA
ggcaaaaaatgccgttcagcgtgatggtgacaccatgaccggggaactgaaaatccgtggtgttaatgcgctgag

SEQ ID NO: 759617 - DNA, 75 bp, synthetic construct
  source 1..75: mol_type = other DNA
cgtgcgatgtgcccattcttaccggtaatcgcttcattatgacgtggcgggaagagaaggctgaatatccgcact

SEQ ID NO: 759618 - DNA, 75 bp, synthetic construct
  source 1..75: mol_type = other DNA
gaagagaagtctgactcaccgcacttgcagcaatttcgtgaatggttgctggcgaaatcggttgtaccgcaggag

SEQ ID NO: 759619 - DNA, 75 bp, synthetic construct
  source 1..75: mol_type = other DNA
gaagcgttgatgaatgacgcctccggcctggtgtcattaaagtttgctgtggcagtggcgatggggacgatgatc

SEQ ID NO: 759620 - DNA, 75 bp, synthetic construct
  source 1..75: mol_type = other DNA
gcgatgctggaatttgtctttaacggcatggtgttcttgctgttgggtctgcaactaccgggtattctggaaacg

SEQ ID NO: 759621 - DNA, 75 bp, synthetic construct
  source 1..75: mol_type = other DNA
aagcttttggcctgatttttcgtcgttcggaagagtgcctgcaccttatccctaccagtgaaggtcagggcgaga

SEQ ID NO: 759622 - DNA, 75 bp, synthetic construct
  source 1..75: mol_type = other DNA
taggttaccgcctgacgaatggatttaccggtagccattttacatttactgcagtgccatttaaaaacggtagta

SEQ ID NO: 759623 - DNA, 75 bp, synthetic construct
  source 1..75: mol_type = other DNA
atgcaaacaaaaaaatacatcttgtgcgtggatggttttagtacagagcgtaataataagggtatgaaaatgaaa

SEQ ID NO: 759624 - DNA, 75 bp, synthetic construct
  source 1..75: mol_type = other DNA
agtttcagagccagttggcgaactatgtaccacagttcacccctgaattttggccggtgtggctggtcattgccg

SEQ ID NO: 759625 - DNA, 75 bp, synthetic construct
  source 1..75: mol_type = other DNA
cgccttccggcactgcatcagcagttgatacgccagtttcacgattacgcggcggcggaaaccgatgcggcgcag

SEQ ID NO: 759626 - DNA, 75 bp, synthetic construct
  source 1..75: mol_type = other DNA
ggatggcagtagcgtgcgctgtattattttatttgcggtacgtcttgaagatcaaaataccacccatatccgttt

SEQ ID NO: 759627 - DNA, 75 bp, synthetic construct
  source 1..75: mol_type = other DNA
gtccggtttcttctggcgtaatccggggctggggctgtttttactgctgcttggcccgctaatgtggtttggcat

SEQ ID NO: 759628 - DNA, 75 bp, synthetic construct
  source 1..75: mol_type = other DNA
tctgccgggtgatccagaaacgctgaatgcccgtgcgctggcattgctttctgatgaaggactcagcctaccggg

SEQ ID NO: 759629 - DNA, 75 bp, synthetic construct
  source 1..75: mol_type = other DNA
tgaaaataaatacaaatcattaacgagagaaactaaggaaaaattcaatgttttttttcttgagtcaatgatagg

SEQ ID NO: 759630 - DNA, 75 bp, synthetic construct
  source 1..75: mol_type = other DNA
ccgaaaaggtatagaaatattagttaagcagggagaactgttatcatcattgataaatgatcataaagaaaataa

SEQ ID NO: 759631 - DNA, 75 bp, synthetic construct
  source 1..75: mol_type = other DNA
cgagcaactggtttctctcatttatctgatgactgagcaactggatgaagtggtgcagcactgccatgacaatct

SEQ ID NO: 759632 - DNA, 75 bp, synthetic construct
  source 1..75: mol_type = other DNA
ttcccagtggtgctggtgctctatgagcaaatggtgtttgccattgccggaagtttagtggtctgcaccatcatt

SEQ ID NO: 759633 - DNA, 75 bp, synthetic construct
  source 1..75: mol_type = other DNA
gggagcgttaaggatcagttttgatgctctttttgatgaggaataccgcgatatctggctcaatattcgtctacc

SEQ ID NO: 759634 - DNA, 75 bp, synthetic construct
  source 1..75: mol_type = other DNA
gggcggaaatacgctgtcaacttccgggctggggcgctttctggtgtttctctatatctggttgccgttcatgat

SEQ ID NO: 759635 - DNA, 75 bp, synthetic construct
  source 1..75: mol_type = other DNA
agcgccattctgtcttttccaatggcgtggtatatggcgcgctataccagcgggaaaatgaaagcgttttttata

SEQ ID NO: 759636 - DNA, 75 bp, synthetic construct
  source 1..75: mol_type = other DNA
gtgctggctcattatctcaagactgaagatcttcagcgtgtactggcttcgaactctccagctaaccgtatcttg

SEQ ID NO: 759637 - DNA, 75 bp, synthetic construct
  source 1..75: mol_type = other DNA
gtcagaaaatatgatcaatggcaggccgatttgtctgtttaaattgcatgaaccggtacaggttgctcactggca

SEQ ID NO: 759638 - DNA, 75 bp, synthetic construct
  source 1..75: mol_type = other DNA
cgtcaggcaaccaaagacgcaggccgtatcgctggtctcgaagtaaaacgtatcatcaacgaaccgaccgcagct

SEQ ID NO: 759639 - DNA, 75 bp, synthetic construct
  source 1..75: mol_type = other DNA
tgggtactaccaactcttgtgtagcgattatggatggcaccactcctcgtgtgctggagaatgccgaaggcgatc

SEQ ID NO: 759640 - DNA, 75 bp, synthetic construct
  source 1..75: mol_type = other DNA
cagcggtaaagagcagaagatcaccattaaggcttcttctggtctgaacgaagatgaaatccagaaaatggtacg

SEQ ID NO: 759641 - DNA, 75 bp, synthetic construct
  source 1..75: mol_type = other DNA
tttcccggcaacaacccagtctaaatttaatcccttacagcaggttgcctatgttggtgtcatgtatggattgct

SEQ ID NO: 759642 - DNA, 75 bp, synthetic construct
  source 1..75: mol_type = other DNA
aaacaaacgcgattttatttgtttggcattatgcagggggaagaacatcctttcccggcaacaacacagtctaaa

SEQ ID NO: 759643 - DNA, 75 bp, synthetic construct
  source 1..75: mol_type = other DNA
tggaagacctggtgaaccgttccatcgagccgctgaaagttgcactgcaggacgctggcctgtccgtatctgata

SEQ ID NO: 759644 - DNA, 75 bp, synthetic construct
  source 1..75: mol_type = other DNA
aagttcggttcaggaagagaacctggagcgtcgcttccgtctggcggcgctgcgttctgaacgcgctgaactcta

SEQ ID NO: 759645 - DNA, 75 bp, synthetic construct
  source 1..75: mol_type = other DNA
atccgacgctggcggtcaccgatggcaaaacgacgattaagtttcatccgtggtctatcgaagagattgtcgcca

SEQ ID NO: 759646 - DNA, 75 bp, synthetic construct
  source 1..75: mol_type = other DNA
atggcgaactggcaatctatcgacgagttgcaggatattgcaacggatttaccgcgatttatccacgcattagac

SEQ ID NO: 759647 - DNA, 75 bp, synthetic construct
  source 1..75: mol_type = other DNA
tcagactcgtatgccaatggttcagaagaaagttgctgagttctttggtaaagagccgcgtaaagacgttaaccc

SEQ ID NO: 759648 - DNA, 75 bp, synthetic construct
  source 1..75: mol_type = other DNA
accggattgcaactggacgaagaaagaaaacaagtgatgaaaattatgcagaaggtgtgggaagacgacagctgg

SEQ ID NO: 759649 - DNA, 75 bp, synthetic construct
  source 1..75: mol_type = other DNA
aagagcagaagattagccagtctatcctggacgcccttgaatccgagctttaccgcaatctgcgccccctgtatc

SEQ ID NO: 759650 - DNA, 75 bp, synthetic construct
  source 1..75: mol_type = other DNA
tatgccgacggcatgcgcgatctcccggaggacaggcggcttgcgatcttggctgtttgcgtctcggaatggcag

SEQ ID NO: 759651 - DNA, 75 bp, synthetic construct
  source 1..75: mol_type = other DNA
ataacggcggcgatggtgtgtttatgctcactaaagagcagcttattgccgcacgagaacatttcgcgatttata

SEQ ID NO: 759652 - DNA, 75 bp, synthetic construct
  source 1..75: mol_type = other DNA
tattttgctgcgtaacagcacccttgaaatattcgacaatatcgaagatgccatcagtatttatcagaaactata

SEQ ID NO: 759653 - DNA, 75 bp, synthetic construct
  source 1..75: mol_type = other DNA
catcaccgatctcctgctggaggtggatgcggcgaccggcttcaccgaagcgttcacccatctgcgcacaggagc

SEQ ID NO: 759654 - DNA, 75 bp, synthetic construct
  source 1..75: mol_type = other DNA
gatctcttggcccatgtttcgccgctcggatgggaacacatcaatctcaccggagaatatcgctggccaaagcct

SEQ ID NO: 759655 - DNA, 75 bp, synthetic construct
  source 1..75: mol_type = other DNA
tggcatcgccaccttcgggcccagagggctggcgacgctcgcctatgggagatcgcggtgctgttccatctgcgc

SEQ ID NO: 759656 - DNA, 75 bp, synthetic construct
  source 1..75: mol_type = other DNA
cgtcctcttttatgttggttggttgcactccgcgcatagaggtggctgcgccgaaggagccaatcaccattaata

SEQ ID NO: 759657 - DNA, 75 bp, synthetic construct
  source 1..75: mol_type = other DNA
tgaacgttaaaattgagcatgagatcatcattaaggcagacaaagatgtcgaagatttactcaaaacccgtagcg

SEQ ID NO: 759658 - DNA, 75 bp, synthetic construct
  source 1..75: mol_type = other DNA
gcgaacattaatgaacagtcttgccagcagaaaccagtaccaacagctctggcggcatggctggcagcaaacgca

SEQ ID NO: 759659 - DNA, 75 bp, synthetic construct
  source 1..75: mol_type = other DNA
atcatggtgtcgcacgatatgaagaacttacgtcaacagtgcgatatgggtattttgctgcgtaacagcaccctt

SEQ ID NO: 759660 - DNA, 75 bp, synthetic construct
  source 1..75: mol_type = other DNA
agtattaccccaccaagtttggccgtaactacgtgctgcgtgacgtaagcattacgctacctcgcgatcgcaaca

SEQ ID NO: 759661 - DNA, 75 bp, synthetic construct
  source 1..75: mol_type = other DNA
ccgcattcatggtgtacgcgatacaagccccgtagaagagtgggttaaagagttttctgaaattggacaacatta

SEQ ID NO: 759662 - DNA, 75 bp, synthetic construct
  source 1..75: mol_type = other DNA
gcacaggcagcgttacccatggcccggttctggggcatgggcacgtcggcttcgagcgacggacagttcttcgtc

SEQ ID NO: 759663 - DNA, 75 bp, synthetic construct
  source 1..75: mol_type = other DNA
gcaactgttgaaaaaaattcgccattttatggaaaccatcagcccgttccccggaggcaaacatgggctggcaaa

SEQ ID NO: 759664 - DNA, 75 bp, synthetic construct
  source 1..75: mol_type = other DNA
agcgctgcacagcgggacaggtaaagtcagctatgtgggcggcaacagcaaaagttcggcgctgttcatcagcct

SEQ ID NO: 759665 - DNA, 75 bp, synthetic construct
  source 1..75: mol_type = other DNA
aggagataacacctacccgcttttatcaaaaattaagcacaatgcctaacaacattcatcaacacaacgtagaaa

SEQ ID NO: 759666 - DNA, 75 bp, synthetic construct
  source 1..75: mol_type = other DNA
aagccgtgaaacgttgcgctggctgaaagcaaacccgaagttcagggtgatttatcagccagtttactcgccgtg

SEQ ID NO: 759667 - DNA, 75 bp, synthetic construct
  source 1..75: mol_type = other DNA
ggtcacctgatgtatggactggtggaggtgttggactgcttgcaggcctgctacttcgctacgtcctcgtcagag

SEQ ID NO: 759668 - DNA, 75 bp, synthetic construct
  source 1..75: mol_type = other DNA
agattgtttggtcgtgaatggtcatttgacctcaaggacaggaccagaacagacaaccacacagacccccgttaa

SEQ ID NO: 759669 - DNA, 75 bp, synthetic construct
  source 1..75: mol_type = other DNA
catttgatgtttttcatgttggtcatgtaaatatccttgagcgagctgcttcacttggcgactatcttattgtag

SEQ ID NO: 759670 - DNA, 75 bp, synthetic construct
  source 1..75: mol_type = other DNA
acccggatgccagcgcgagcgttccggttgaactggtgacggcatcggcaagcgggctggacaataacatcaccc

SEQ ID NO: 759671 - DNA, 75 bp, synthetic construct
  source 1..75: mol_type = other DNA
gcgttcaatccgtcggccgccccggcgcacctgcgagcgttgatcggcggaaaggtcaaccaagccatgatcgag

SEQ ID NO: 759672 - DNA, 75 bp, synthetic construct
  source 1..75: mol_type = other DNA
ggagcaatctggcagtcagtaaccctgagctggataaactaatagccgcacgcgttgctgcattacgggccgcta

SEQ ID NO: 759673 - DNA, 75 bp, synthetic construct
  source 1..75: mol_type = other DNA
tacaatgaaaaagaacgaatgaagataatttcatctttaaaatttgtagatgaagtatttcttgaaaaatcatta

SEQ ID NO: 759674 - DNA, 75 bp, synthetic construct
  source 1..75: mol_type = other DNA
gggagatgattggactggaaggtttgattgggtaaaaacagattgcgaagtgatttatttaccaagaacaccttc

SEQ ID NO: 759675 - DNA, 75 bp, synthetic construct
  source 1..75: mol_type = other DNA
acggcttcccgcgtaccattccgcaggcagacgcgatgaaagaagcgggcatcaacgttgattacgttctggaat

SEQ ID NO: 759676 - DNA, 75 bp, synthetic construct
  source 1..75: mol_type = other DNA
ttgactattcttgctgtggaatggctggacagccgcttactttgggatgcacatgagtcaggaaacgcccgcttc

SEQ ID NO: 759677 - DNA, 75 bp, synthetic construct
  source 1..75: mol_type = other DNA
ctatttctatcatttatctgaacggaggacggcaggaagatacaattctttccggaattatgtcgctggcaagta

SEQ ID NO: 759678 - DNA, 75 bp, synthetic construct
  source 1..75: mol_type = other DNA
ttgactattcttgctgtggaatggctggacagccgcttactttgggatgcacatgagccaggaaatgcccgcttc

SEQ ID NO: 759679 - DNA, 75 bp, synthetic construct
  source 1..75: mol_type = other DNA
atcaattggcgaagcgttgccgcatggtgattaccaacgctgcccgcaatgtgacatgctgttcagcctgccaga

SEQ ID NO: 759680 - DNA, 75 bp, synthetic construct
  source 1..75: mol_type = other DNA
atggcacttaacaccccgcaaattacgccaacaaaaaagataacagtgagctcaatcggcaaggaactgccgcgt

SEQ ID NO: 759681 - DNA, 75 bp, synthetic construct
  source 1..75: mol_type = other DNA
taaccgactgggaatgaatttacgtccggtactgctgatgcttgagcgacttaaagagtgggtaatgctggatat

SEQ ID NO: 759682 - DNA, 75 bp, synthetic construct
  source 1..75: mol_type = other DNA
caaaaaatgccgttcagcgtgatggtgacaccatgaccggggaactgaaaatccgtggtgttaatgcgctgagga

SEQ ID NO: 759683 - DNA, 75 bp, synthetic construct
  source 1..75: mol_type = other DNA
taactcaattgctttcggggataacgatacaggtataaaacaaaacggcgacggcattctggatgtttatgcgaa

SEQ ID NO: 759684 - DNA, 75 bp, synthetic construct
  source 1..75: mol_type = other DNA
tgcacttcattcccacgcaggaagaccatggagaaaatggtgatattggcccactgcggcccatttccattaacc

SEQ ID NO: 759685 - DNA, 75 bp, synthetic construct
  source 1..75: mol_type = other DNA
attttggcgcagccgtaattttgactattcttgctgtggaatggctggacagccgcttactttgggatgcacatg

SEQ ID NO: 759686 - DNA, 75 bp, synthetic construct
  source 1..75: mol_type = other DNA
ttacccacaacaatcagcctctcactgtgacaaaaaattacgcgtttgccttggttgtcactttacgggttatcc

SEQ ID NO: 759687 - DNA, 75 bp, synthetic construct
  source 1..75: mol_type = other DNA
attaccaacgttgcccgcaatgtgacatgctgtttagcctgcctgagataaattctcatcaaagtgcctattgtc

SEQ ID NO: 759688 - DNA, 75 bp, synthetic construct
  source 1..75: mol_type = other DNA
aataccgtagcgccagtgataccggcaactgggttaacgccgatggtgcgattttctacccctatattggtcgcc

SEQ ID NO: 759689 - DNA, 75 bp, synthetic construct
  source 1..75: mol_type = other DNA
cgatcgcgagatgccgggatttggtgaacagatgcgccagattagcctgcattttgtaccaaccgcgatcctttc

SEQ ID NO: 759690 - DNA, 75 bp, synthetic construct
  source 1..75: mol_type = other DNA
ccatctggtgctcaccacgggcggaactggcccggcgcgtcgtgacgtaacgcccgatgcgacgctggcagtagc

SEQ ID NO: 759691 - DNA, 75 bp, synthetic construct
  source 1..75: mol_type = other DNA
ttctggccgttggtaaaggtattccgggcgtaccaatggaacaactgtgtatcctgctggtgctgtctatcggta

SEQ ID NO: 759692 - DNA, 75 bp, synthetic construct
  source 1..75: mol_type = other DNA
taatgaccctcgtggtctcgctgtccggggtggtcactcgtgtcatgccctttcagatcccgcttccgcttatgc

SEQ ID NO: 759693 - DNA, 75 bp, synthetic construct
  source 1..75: mol_type = other DNA
tttccatttctgatcgcgcgtccagcggcgtttatcaggataaaggcattcctgcactggaagagtggctggcat

SEQ ID NO: 759694 - DNA, 75 bp, synthetic construct
  source 1..75: mol_type = other DNA
gttgctggaaggaccatacgttgaaacggcaccggaagtggttgcggcattcagaccaaagagcgcaagacgaga

SEQ ID NO: 759695 - DNA, 75 bp, synthetic construct
  source 1..75: mol_type = other DNA
atgtctttagcaaaagataagatatggaaattattgaccccactggtggtgatgggcgtcatgtttcttatccct

SEQ ID NO: 759696 - DNA, 75 bp, synthetic construct
  source 1..75: mol_type = other DNA
cacttaccagaccagatggatctcctgttcctttcggtagctcagtgtctgtattaacaactgatagttacgtta

SEQ ID NO: 759697 - DNA, 75 bp, synthetic construct
  source 1..75: mol_type = other DNA
gtacatgctttcgaaatggggggtagctatacctgatgaaaaaaatgaaagggaggaaattcttggtaaagactt

SEQ ID NO: 759698 - DNA, 75 bp, synthetic construct
  source 1..75: mol_type = other DNA
cgcaacggtgattgtactggttctggtgttctactttgcacactacctgtttgccagcctgtctgcgcacaccgc

SEQ ID NO: 759699 - DNA, 75 bp, synthetic construct
  source 1..75: mol_type = other DNA
gccgtaaagagtggaccctgataggtctggtgctgctgagcttaggcttatgggtattcggcggcgaaatgatcg

SEQ ID NO: 759700 - DNA, 75 bp, synthetic construct
  source 1..75: mol_type = other DNA
cttttaatgcccaaaaacaggcgctgaaatggggactggctggtttttccagtaccactgtctggctggtatttg

SEQ ID NO: 759701 - DNA, 75 bp, synthetic construct
  source 1..75: mol_type = other DNA
atgatgatgggtgaagtacagtcattaccgtctgccggattacatcctgcgttacagggcgcgttaacgctggca

SEQ ID NO: 759702 - DNA, 75 bp, synthetic construct
  source 1..75: mol_type = other DNA
gaagcgattctcacggaaaatcgtgaccgtgtttaccacgccgcgatgatggatccgcacaccgccgctgtgctg

SEQ ID NO: 759703 - DNA, 75 bp, synthetic construct
  source 1..75: mol_type = other DNA
cgatgtatgcccgttatccgcatatcaaacaggtagggctgtgccattcggtgcagggaacggcggaagagctgg

SEQ ID NO: 759704 - DNA, 75 bp, synthetic construct
  source 1..75: mol_type = other DNA
ttatcggcgctggttcgacgattttcgttaaaaatattcttggtgatgtgtttcatcgcgaggcgctgaaaacgg

SEQ ID NO: 759705 - DNA, 75 bp, synthetic construct
  source 1..75: mol_type = other DNA
gcgcgttaactgagagcccagttgtgcgcgaggcattcggctgtcgtgagcaggataaaattgtcggttttctct

SEQ ID NO: 759706 - DNA, 75 bp, synthetic construct
  source 1..75: mol_type = other DNA
atgcagagcgcatttttatgcccccggaaataatgcgtttcaaggaacgccttgaagaggcaatgaatggagaat

SEQ ID NO: 759707 - DNA, 75 bp, synthetic construct
  source 1..75: mol_type = other DNA
tgtcggcgggttgcgcggttatggcaatgcaaatggcggcggttgcccagggctttggcggcatctggcgcagtg

SEQ ID NO: 759708 - DNA, 75 bp, synthetic construct
  source 1..75: mol_type = other DNA
atggtaaatcgtgaaatagtaatggattacatcctttcctgtttacaggatttggtcgaaaacggtgtggaaatt

SEQ ID NO: 759709 - DNA, 75 bp, synthetic construct
  source 1..75: mol_type = other DNA
gaaaaactgacggcgctcccttccctgtcaggcttccttgcggtcggctatctggcgctgtttggttcgattatc

SEQ ID NO: 759710 - DNA, 75 bp, synthetic construct
  source 1..75: mol_type = other DNA
ttattactgcttgctgtcggtaacggtatggtaacggtggctgaacatcaaaatgttccttccggcattgccgcc

SEQ ID NO: 759711 - DNA, 75 bp, synthetic construct
  source 1..75: mol_type = other DNA
tacgctgcgttaccgttgcgcaggtatcaaccatatggcgttttacctggaactggagcgtaaaaccgccgacgg

SEQ ID NO: 759712 - DNA, 75 bp, synthetic construct
  source 1..75: mol_type = other DNA
atgaaatccatcacagttatcagccagcagattaacaaagtgcagtcggccattatggcacttaaggcgacgaac

SEQ ID NO: 759713 - DNA, 75 bp, synthetic construct
  source 1..75: mol_type = other DNA
aagataaagattttgtatgtgcatttgtgacttcaccggatagcttgtatgaggctattgaaacctatcgtaatt

SEQ ID NO: 759714 - DNA, 75 bp, synthetic construct
  source 1..75: mol_type = other DNA
ccgtagcgccaaaccctgtatttctgcgaataccctgctccagctgcatattcgcttaccggataatctcgacga

SEQ ID NO: 759715 - DNA, 75 bp, synthetic construct
  source 1..75: mol_type = other DNA
aaaaccgggtaggtctgaacattgaaacgctggaaaacgatgttgaactgaaaagtaccagcgcaatcaccgtac

SEQ ID NO: 759716 - DNA, 75 bp, synthetic construct
  source 1..75: mol_type = other DNA
aagcggatggttccaaacgttcctttacgcagcccttctcctccgtcgtgcagatgcagcgtcctggcgtgggtc

SEQ ID NO: 759717 - DNA, 75 bp, synthetic construct
  source 1..75: mol_type = other DNA
ttcgccagccagaaaagttagcggataacgcaattttgcaaaaacgcgaaaacgctgcgcaggattgcctgaacg

SEQ ID NO: 759718 - DNA, 75 bp, synthetic construct
  source 1..75: mol_type = other DNA
ttgcgccaattattcatggtgttgcgaacactaacgccaaggtcactattacccaaggcagttataagatctatg

SEQ ID NO: 759719 - DNA, 75 bp, synthetic construct
  source 1..75: mol_type = other DNA
gctgcttgcaagggacaacgaactcggggattgcctcaacctggcggaactcatcccccagacgtcgattcgtta

SEQ ID NO: 759720 - DNA, 75 bp, synthetic construct
  source 1..75: mol_type = other DNA
ttgtaccagtttactcatcacaaaagtcgtacaccgaaaaaaacgctacttgcggcctgttgcgccctcctttat

SEQ ID NO: 759721 - DNA, 75 bp, synthetic construct
  source 1..75: mol_type = other DNA
ctcggttatgcagatgctgcgtccgggcgtcgggcgttgggatctcagcggtgggcaaatcgttcgcgacgattt

SEQ ID NO: 759722 - DNA, 75 bp, synthetic construct
  source 1..75: mol_type = other DNA
tcgatactaacgatcagaagttggatatcacggttccgcagatctggatcctcagtaattatcagggatatatcg

SEQ ID NO: 759723 - DNA, 75 bp, synthetic construct
  source 1..75: mol_type = other DNA
gctcaatcagttgcatattaaacagccggatctcaaagacggagaggctgtattacgcaaaggcgaagcggaagc

SEQ ID NO: 759724 - DNA, 75 bp, synthetic construct
  source 1..75: mol_type = other DNA
tattcattatcagataccgtcatcacccaccatgaccggtaaaactatcgtactcaacggcgtgccatgcaccca

SEQ ID NO: 759725 - DNA, 75 bp, synthetic construct
  source 1..75: mol_type = other DNA
aaaaacagtaccgatctggctgatatcgggggctacataagttacgaatctccctggggaacgttgtctgcttcc

SEQ ID NO: 759726 - DNA, 75 bp, synthetic construct
  source 1..75: mol_type = other DNA
accgtgtttcatggaacaaaatgtttaatgagaccaatacgtctttaaatcttgccgcttatcgctactccacca

SEQ ID NO: 759727 - DNA, 75 bp, synthetic construct
  source 1..75: mol_type = other DNA
ttgcagaatggggcagatcctgaatggatacaaaagattaccggactttcgacagagcaaatgcaggcattagag

SEQ ID NO: 759728 - DNA, 75 bp, synthetic construct
  source 1..75: mol_type = other DNA
ctgatatcgcaagataagtttgatgcagaagcgggtaatgactccaacttattgatagtgttttatgttcagata

SEQ ID NO: 759729 - DNA, 75 bp, synthetic construct
  source 1..75: mol_type = other DNA
atggcatctacggcattagtgaatccaacactcgctgagtgtgaaaaaggcgtaaaaagtgctgtggcgttaacg

SEQ ID NO: 759730 - DNA, 75 bp, synthetic construct
  source 1..75: mol_type = other DNA
tgtcaaaaaggaataaaaagagtcgtggcgttaacgcctgcgctggaacccattgatggtgtggcgttgaattat

SEQ ID NO: 759731 - DNA, 75 bp, synthetic construct
  source 1..75: mol_type = other DNA
cgtaccgtaatgacgccgccatggtgatgcgtcgtctaatccgctctctgcccgatgcgaaagccgtcattggcg

SEQ ID NO: 759732 - DNA, 75 bp, synthetic construct
  source 1..75: mol_type = other DNA
gacgttgcgcattgctatgaaaaccgaggagcgagcccattggtgttcatcatgacggtacatgagaaatcatcc

SEQ ID NO: 759733 - DNA, 75 bp, synthetic construct
  source 1..75: mol_type = other DNA
tccactactactctctggcagtcatgatttcagcgaaacaaattaataacctgatatcgcaagagaagtttgatg

SEQ ID NO: 759734 - DNA, 75 bp, synthetic construct
  source 1..75: mol_type = other DNA
aaagcacgcaagctggaacagcaacaggctaatgcggagccagaagaacagattgatccgcgcaaagcggctgtt

SEQ ID NO: 759735 - DNA, 75 bp, synthetic construct
  source 1..75: mol_type = other DNA
ttaccgcctgcctaacctccgtcgacaatgtcataaatgcacaagtccagaaaatagagacattaatatccaata

SEQ ID NO: 759736 - DNA, 75 bp, synthetic construct
  source 1..75: mol_type = other DNA
aaaataatataaatcgtcttgttgactctataaataaccttactcgcggagccggacgttttgctgatccttctg

SEQ ID NO: 759737 - DNA, 75 bp, synthetic construct
  source 1..75: mol_type = other DNA
cgcatcgtgccaatgtttcacagtaggtaaagtgtataccggatcactcgacacttacacccgccttatgcacgt

SEQ ID NO: 759738 - DNA, 75 bp, synthetic construct
  source 1..75: mol_type = other DNA
gtcgaagccgctattgcccgcgccaaagcacgcaagctggaacagcaacaggctaatgcggaaccagaagaacag

SEQ ID NO: 759739 - DNA, 75 bp, synthetic construct
  source 1..75: mol_type = other DNA
gccagaagaacagattgatccgcgcaaagcggcagttgctgcggctattgcccgcgttcaggccaaaaaagccgc

SEQ ID NO: 759740 - DNA, 75 bp, synthetic construct
  source 1..75: mol_type = other DNA
tgcccgccgtgcgggttgtaaagcctgcgcctcctccggcggcggctgtcaatttctgggcaccgccgggacatc

SEQ ID NO: 759741 - DNA, 75 bp, synthetic construct
  source 1..75: mol_type = other DNA
cccaaacgctgctttactttatggtggctggaccccacttctccaggggtgaagctcaatagtctgcacaaagtc

SEQ ID NO: 759742 - DNA, 75 bp, synthetic construct
  source 1..75: mol_type = other DNA
tccgcgcatcaattgcaatagcctcccaatggatttagatattttcacgacaggcgatttatttgtaaatagttc

SEQ ID NO: 759743 - DNA, 75 bp, synthetic construct
  source 1..75: mol_type = other DNA
tttcgacgttgaaaaaggccatatcacccgcgcccaggtgtttaccgacagcctcaaccccgcgccgctggaagc

SEQ ID NO: 759744 - DNA, 75 bp, synthetic construct
  source 1..75: mol_type = other DNA
gacgttaaatttagattatttaaggccgactgatgatgaatattcatctggatggactgcaaatgacttagttga

SEQ ID NO: 759745 - DNA, 75 bp, synthetic construct
  source 1..75: mol_type = other DNA
gcggatacgtaagcttaaccgggtatctgcacggattttgtctgatgccatcaaaagaggggagcactggtggga

SEQ ID NO: 759746 - DNA, 75 bp, synthetic construct
  source 1..75: mol_type = other DNA
ttacaaaaactgacaaatcgttagctggtggacgattccgcgccatgccgcaaaaacaaaatgcggatcacaaag

SEQ ID NO: 759747 - DNA, 75 bp, synthetic construct
  source 1..75: mol_type = other DNA
ttctgcgcgaacaggagcagatcgacgccgacgaggtgatcatgtcgccacagcgggcacgggagcgcggcctga

SEQ ID NO: 759748 - DNA, 75 bp, synthetic construct
  source 1..75: mol_type = other DNA
cttcaggccgtgagtggtgggacatggaccggttgtatttatgatgtaaacaaaattggcgcggctttgcgcgat

SEQ ID NO: 759749 - DNA, 75 bp, synthetic construct
  source 1..75: mol_type = other DNA
ccttcatggcgggaggtgtgccggaagtgatgctgcatcttcgcagtctgggattgctgcatgaagacgtgatga

SEQ ID NO: 759750 - DNA, 75 bp, synthetic construct
  source 1..75: mol_type = other DNA
actcttacgacccgtggtttaacctggcggtggaagagtgtatttttcgccaaatgcccgccacgcagcgcgttc

SEQ ID NO: 759751 - DNA, 75 bp, synthetic construct
  source 1..75: mol_type = other DNA
cagatgcccgccacgcagcgcgttctgtttctctggcgcaatgccgacacggtagtgattggtcgcgcgcagaac

SEQ ID NO: 759752 - DNA, 75 bp, synthetic construct
  source 1..75: mol_type = other DNA
tggaggaaacctaccaggtcaccagcgccctgaaacatctgtcctacggcaagcatgtttcactgatcaccgatg

SEQ ID NO: 759753 - DNA, 75 bp, synthetic construct
  source 1..75: mol_type = other DNA
acgctgattgatgaagtagaacatcctgagcaagatcttgagcctaaatccatgcgcaattactcgcgcatgaaa

SEQ ID NO: 759754 - DNA, 75 bp, synthetic construct
  source 1..75: mol_type = other DNA
cacgacatcagaaaaaaatagcacaatctattattctgaacggacttcgttgtcagatacagtaacatcaaggga

SEQ ID NO: 759755 - DNA, 75 bp, synthetic construct
  source 1..75: mol_type = other DNA
tcttagcccgtcaggttatggcagcgatctcattgtgactatcgaagaagctgatggcacaaaacggacgttctc

SEQ ID NO: 759756 - DNA, 75 bp, synthetic construct
  source 1..75: mol_type = other DNA
tacaagcactgtttaattacgttttacaaacgggggatgcccagcggttccgtacatttataggtgagatagcgg

SEQ ID NO: 759757 - DNA, 75 bp, synthetic construct
  source 1..75: mol_type = other DNA
ttggtgatcccgatgctgttttatcatggttgcagaagtccttatccttattcactctgctggcttgatgaattt

SEQ ID NO: 759758 - DNA, 75 bp, synthetic construct
  source 1..75: mol_type = other DNA
atcgccgtggggaacgctgtcaggttcagcctcagcaagcagtgataatagtcgccaattctcactcaatactga

SEQ ID NO: 759759 - DNA, 75 bp, synthetic construct
  source 1..75: mol_type = other DNA
ccagacgctggtctttaacggctacgcgcaggacgctgaggccttcgccagaaacattatcgtggagcagaacaa

SEQ ID NO: 759760 - DNA, 75 bp, synthetic construct
  source 1..75: mol_type = other DNA
aagcacgcgccaaccaacatctggaacgcgcagcggagctggccggcaacgacaccattccggtagaaatcaccc

SEQ ID NO: 759761 - DNA, 75 bp, synthetic construct
  source 1..75: mol_type = other DNA
ccagtatgacgatcgcctgctgctgccgatcccgcgtctgaaaaccaataacccggaacagctggaaaaagtgct

SEQ ID NO: 759762 - DNA, 75 bp, synthetic construct
  source 1..75: mol_type = other DNA
tggcctggctggaaaaacatcctcaggcattaacggggatacagcgcggtcttgagcgcgaaactttacgtgtta

SEQ ID NO: 759763 - DNA, 75 bp, synthetic construct
  source 1..75: mol_type = other DNA
ttacggcgcggtgcgtcaggtagatgacctggaagagctggatatcggcatccaggcgatggcggcaattccggt

SEQ ID NO: 759764 - DNA, 75 bp, synthetic construct
  source 1..75: mol_type = other DNA
cgcacgtttgatttcattgtcctggcgtattccgacaccacatcgctcaacgacatgaaggattttctgtcggat

SEQ ID NO: 759765 - DNA, 75 bp, synthetic construct
  source 1..75: mol_type = other DNA
taaaagccctgtttaattatgtattacaaacgggagatgcccagcgtttccgtgcatttattggtgagataacag

SEQ ID NO: 759766 - DNA, 75 bp, synthetic construct
  source 1..75: mol_type = other DNA
acctgcacaccggcattactgaacctgctggcgtatgaccgggacataacccgctttgatggtgagccattgagt

SEQ ID NO: 759767 - DNA, 75 bp, synthetic construct
  source 1..75: mol_type = other DNA
taccgctgctggtcaatattttgttgatggggggcgcattctggtggctctttacgcaactcgatgtctggatcc

SEQ ID NO: 759768 - DNA, 75 bp, synthetic construct
  source 1..75: mol_type = other DNA
taccgctgagtctgaaatctgtcagtgactccggggagtttgaagggtatgactccgtctttggtgtaaaggaca

SEQ ID NO: 759769 - DNA, 75 bp, synthetic construct
  source 1..75: mol_type = other DNA
cgcttccagtcgttaacatccacgccgatcaatattcaggcgggcagcgtacacaatgactatgtgtgtcacgcc

SEQ ID NO: 759770 - DNA, 75 bp, synthetic construct
  source 1..75: mol_type = other DNA
gggttttgcccggatatttgaacggctggaaataggttttgtcgggataaatgagcgtgtagacggtattgactg

SEQ ID NO: 759771 - DNA, 75 bp, synthetic construct
  source 1..75: mol_type = other DNA
tccgttatgagtcatgggatgtaaactacgataatccgaaaaagcaggataagtggaaactggaactacgctttt

SEQ ID NO: 759772 - DNA, 75 bp, synthetic construct
  source 1..75: mol_type = other DNA
catgcacacatgaaggccggttcgttaaccggcctttctattgggtacgtcctgaaggactgggaatacgaccgg

SEQ ID NO: 759773 - DNA, 75 bp, synthetic construct
  source 1..75: mol_type = other DNA
cgttcatcacgcagatattaacctttcagaccttgccgaaacggtagaaatcctgactgtcccgccgtttgttaa

SEQ ID NO: 759774 - DNA, 75 bp, synthetic construct
  source 1..75: mol_type = other DNA
atgaaagaagatgatgtcgggctttatgtcagggggcgattactcgttgatgatgatcccctggcaaaacgtgca

SEQ ID NO: 759775 - DNA, 75 bp, synthetic construct
  source 1..75: mol_type = other DNA
taaccggcctttctattgggtacgtcctgaaggactgggaatacgaccggagcaaagaagcctttctgctgaaag

SEQ ID NO: 759776 - DNA, 75 bp, synthetic construct
  source 1..75: mol_type = other DNA
tttcaggcttccttgcggttggctatctggcgctgtttggttcgattatcgccattaacgcttatatgtatttaa

SEQ ID NO: 759777 - DNA, 75 bp, synthetic construct
  source 1..75: mol_type = other DNA
aagagatcgacctgtgggaagtcagtctcgtcacgtttccgtcgaacgatgaagcgcgtgtaagtgatgtcaaaa

SEQ ID NO: 759778 - DNA, 75 bp, synthetic construct
  source 1..75: mol_type = other DNA
cgcgtaaacagaccgaacaggcgctgctgaaactggcggaaggtgattatcagcaagtcgaaaagctgatggcga

SEQ ID NO: 759779 - DNA, 75 bp, synthetic construct
  source 1..75: mol_type = other DNA
aattaaacgtcagtagttcgggtaacagcgaagataatctcatcggttacagtgtgaatacgggttataaccttg

SEQ ID NO: 759780 - DNA, 75 bp, synthetic construct
  source 1..75: mol_type = other DNA
aataccgactttaacggttcgcatcagttaaacgttagtagctcaggtaacagcgaagataatctcattggttac

SEQ ID NO: 759781 - DNA, 75 bp, synthetic construct
  source 1..75: mol_type = other DNA
ccgggacagtatctacggagccttcaacactggcctcaatttcggagcctggcacctgcgtgctcgcggcaacta

SEQ ID NO: 759782 - DNA, 75 bp, synthetic construct
  source 1..75: mol_type = other DNA
atgctaccacctacattagccagttttgcgccaattattcatggtgttgctaacaccaacgcaaaagtcaccatt

SEQ ID NO: 759783 - DNA, 75 bp, synthetic construct
  source 1..75: mol_type = other DNA
aggctgaagttagctatgacggcggtgagcagtatctggaaatttcaattccgcaggcgtacgtctataaaacgt

SEQ ID NO: 759784 - DNA, 75 bp, synthetic construct
  source 1..75: mol_type = other DNA
gaagctacaagcacctcatttaaccttgctgcttatcgttattccaccgagaattatctcggtctacatgatgcg

SEQ ID NO: 759785 - DNA, 75 bp, synthetic construct
  source 1..75: mol_type = other DNA
ttgtatacgttaactcatcagaaaagccgtctaccaaaaacaacacttctggctgcatgttgtgcttttttttat

SEQ ID NO: 759786 - DNA, 75 bp, synthetic construct
  source 1..75: mol_type = other DNA
ccggattactgggtctgggcctgaatacctctttaggtgctttttcattcgatatcacccattcaaatgtcagca

SEQ ID NO: 759787 - DNA, 75 bp, synthetic construct
  source 1..75: mol_type = other DNA
ctattgaagaagcggatggttcgaagcgaactttctcacaaccattttcatcagttgtacagatgttacgaccag

SEQ ID NO: 759788 - DNA, 75 bp, synthetic construct
  source 1..75: mol_type = other DNA
ccgtattacctggaacaaattgttagaagcaacaagcacctcatttaaccttgctgcctatcgttattccaccag

SEQ ID NO: 759789 - DNA, 75 bp, synthetic construct
  source 1..75: mol_type = other DNA
ccgggacagtatatacggagccttcaataccggtctgaatttaggagcctggcacctgcgtgcgcgcggcaacta

SEQ ID NO: 759790 - DNA, 75 bp, synthetic construct
  source 1..75: mol_type = other DNA
tccgcactggccagctatgcgccaaccattcgcggcgtggcaaactctaacgccaaagtgaccgtgacccagaac

SEQ ID NO: 759791 - DNA, 75 bp, synthetic construct
  source 1..75: mol_type = other DNA
gcagcaaccaactcagtatcagtagtagtggttttagcgacgataaccgtatcagttatagcgtcaatacgggct

SEQ ID NO: 759792 - DNA, 75 bp, synthetic construct
  source 1..75: mol_type = other DNA
agcggcaactactaccacgcaacgcaaccacgccaactaggggaaaaacccctggataaagtccgctaccattaa

SEQ ID NO: 759793 - DNA, 75 bp, synthetic construct
  source 1..75: mol_type = other DNA
agtcgatgcccggttgacgaaagaggcgcaaagcgcgctgcgtccggtgatcaacctgacgggaaccgtgctgca

SEQ ID NO: 759794 - DNA, 75 bp, synthetic construct
  source 1..75: mol_type = other DNA
tacgacggacgtctgtggctggatttacgctgccttgaagatgagcaacggtttttggagatgttgttgaaatga

SEQ ID NO: 759795 - DNA, 75 bp, synthetic construct
  source 1..75: mol_type = other DNA
gcgatggtagtgctgtttgccattgagtggctactgcggcggatcttccgcacaggcgcgcacacccgtgggtgg

SEQ ID NO: 759796 - DNA, 75 bp, synthetic construct
  source 1..75: mol_type = other DNA
tgttgctgattgcggggatcgtggttggcccgatgattgccggccatcagggttacgtgctgatccagaccgaca

SEQ ID NO: 759797 - DNA, 75 bp, synthetic construct
  source 1..75: mol_type = other DNA
gacaccattccggtagaaatcacccgtgtacgtctgcaactggcccgtaatgaaaaccatgctgcacgccacggc

SEQ ID NO: 759798 - DNA, 75 bp, synthetic construct
  source 1..75: mol_type = other DNA
ctgaacggcaaccatcagttcaacacgaacctctccggaggcaatgaagataacgctctctcctatagtgtaaac

SEQ ID NO: 759799 - DNA, 75 bp, synthetic construct
  source 1..75: mol_type = other DNA
cagggacaatcagcgattatgaacatcaagcgaactgacggtaaaaacattccgtttgccgcagatatttatgac

SEQ ID NO: 759800 - DNA, 75 bp, synthetic construct
  source 1..75: mol_type = other DNA
agctatgaatctccctggggaactctttccagttcagtttccgcaagcagtgataatagccgtcaaatctcattt

SEQ ID NO: 759801 - DNA, 75 bp, synthetic construct
  source 1..75: mol_type = other DNA
cgggcgtcagcctggtgagcttctccggcgacaagttgttaggcgggccgcaggcagggatcatcgttggtaaga

SEQ ID NO: 759802 - DNA, 75 bp, synthetic construct
  source 1..75: mol_type = other DNA
taggcagtggctcgctggtcgatcttagccagtacggtttgccgaaagagccaatgccgcaggagttgattgcgg

SEQ ID NO: 759803 - DNA, 75 bp, synthetic construct
  source 1..75: mol_type = other DNA
acgtgcgcggtattcaggagcaaggcgtgctcagcattcgttggtttgaaaataaccaacccgtggagtgtcttg

SEQ ID NO: 759804 - DNA, 75 bp, synthetic construct
  source 1..75: mol_type = other DNA
ctggaggcggggttactggtgaccgcactggacggcctgttctggtctggcagtcagcgtattgcggctgatgtc

SEQ ID NO: 759805 - DNA, 75 bp, synthetic construct
  source 1..75: mol_type = other DNA
ttgaataaacacaccttccctactgaacgtcgttatgaggatttagagtacgcccgcgaaatgtcggcgttcttc

SEQ ID NO: 759806 - DNA, 75 bp, synthetic construct
  source 1..75: mol_type = other DNA
gttcgtgatgatgacgttgggcgatgaccgttcgatctaccgcacctacgttgatggtcgtctggtgtacgaacg

SEQ ID NO: 759807 - DNA, 75 bp, synthetic construct
  source 1..75: mol_type = other DNA
atacattccggtatcatctgtctcaccgtattcggcgggtggttgcgaatgaaaacacatcatcgccataccaac

SEQ ID NO: 759808 - DNA, 75 bp, synthetic construct
  source 1..75: mol_type = other DNA
taccatctgccggtttacatccagcactactggacgcgttaacgctggcattagctgccaggccgcaggaaaaag

SEQ ID NO: 759809 - DNA, 75 bp, synthetic construct
  source 1..75: mol_type = other DNA
ggagaaccgcataagccgggatgcgttgtcggcgaacctggtgagattaaaaaggtggtagtgaaggttaaggct

SEQ ID NO: 759810 - DNA, 75 bp, synthetic construct
  source 1..75: mol_type = other DNA
gcgccgattcgcccgaaacgcgttacccgcagcggcgaatcgccatctgatgcgttgttacgtggcggcattgaa

SEQ ID NO: 759811 - DNA, 75 bp, synthetic construct
  source 1..75: mol_type = other DNA
aactggaaccgggtgatcctcgaaggtcgcaaaccgggtctgacgctgggtatcggctgcgaaaccgcgcagttc

SEQ ID NO: 759812 - DNA, 75 bp, synthetic construct
  source 1..75: mol_type = other DNA
gggacgtatcgccattatgaatcgcgggaaatttgtccagattggcgagccggaagagatctacgagcatccaac

SEQ ID NO: 759813 - DNA, 75 bp, synthetic construct
  source 1..75: mol_type = other DNA
tttacctggccacgctcggcggagcgaaatctctgggccttgacgatttgattggcaactttttacctggcaaag

SEQ ID NO: 759814 - DNA, 75 bp, synthetic construct
  source 1..75: mol_type = other DNA
gggctttgctcttaaaatctatggaggggatgaggaacttcgaactggctcttatatttttttgcagggtgaaga

SEQ ID NO: 759815 - DNA, 75 bp, synthetic construct
  source 1..75: mol_type = other DNA
taacggtgccgaatatacaatgacattgcgaggcagtggatttgaatacgaagaaattcccataacaataaatga

SEQ ID NO: 759816 - DNA, 75 bp, synthetic construct
  source 1..75: mol_type = other DNA
ccgtcaacggctgaagtatgcgctggagacaggattgcaggtgagcgcactggacggcctgttctggttcggcag

SEQ ID NO: 759817 - DNA, 75 bp, synthetic construct
  source 1..75: mol_type = other DNA
cggataaatactgttttacagaacggagcgaatcgccccgtcttcgccagcagtggcaggatgttctggaggagt

SEQ ID NO: 759818 - DNA, 75 bp, synthetic construct
  source 1..75: mol_type = other DNA
aatgccggtggtaacgacgaccgtggaggtgcacgataacctgacgggaacaacccgcaaaataccggcatacca

SEQ ID NO: 759819 - DNA, 75 bp, synthetic construct
  source 1..75: mol_type = other DNA
ccgtattcgtcgcgtggttgggaatgaaagcacatcatcgccatatcagcaggttgcccgggaagtgaaagcgcc

SEQ ID NO: 759820 - DNA, 75 bp, synthetic construct
  source 1..75: mol_type = other DNA
agctaccggagaatgggcaagcggaaaaacggcaacctggatgctcgataaacgaggagaacagccgccacatga

SEQ ID NO: 759821 - DNA, 75 bp, synthetic construct
  source 1..75: mol_type = other DNA
gtgctgcgtgaagaatgggacatcagccagaaaaatgtggtgttcaacgataaacgctttggctgcgtgtacagc

SEQ ID NO: 759822 - DNA, 75 bp, synthetic construct
  source 1..75: mol_type = other DNA
agattgcccgggaagtgaaagcgccccgtgaacgactgaagtatgcgctggagacgagattgcaggtgaccgcac

SEQ ID NO: 759823 - DNA, 75 bp, synthetic construct
  source 1..75: mol_type = other DNA
tgccggatacataccggtatcatctgtctcatcgtattcgccggctgcttgggattgaaaagacatcatcgccat

SEQ ID NO: 759824 - DNA, 75 bp, synthetic construct
  source 1..75: mol_type = other DNA
tgccggatacataccggtatcatctgtctcatcgtattcgccggttggttgggaatgaaaagacatcatcgccat

SEQ ID NO: 759825 - DNA, 75 bp, synthetic construct
  source 1..75: mol_type = other DNA
tgccggatacataccggtatcatctgtctcatcgtattcgccggatgtttgggactgaaaagacatcatcgccat

SEQ ID NO: 759826 - DNA, 75 bp, synthetic construct
  source 1..75: mol_type = other DNA
aatgtggattacgtcaccagttttgaactgccttttcgcttgttgcttactcgtacaccacaactgattgcagcg

SEQ ID NO: 759827 - DNA, 75 bp, synthetic construct
  source 1..75: mol_type = other DNA
cgggaagtgaaagcgccccgtgaacggctgaagcatgcgctggaggcggggttgctggtgactgcactggacggc

SEQ ID NO: 759828 - DNA, 75 bp, synthetic construct
  source 1..75: mol_type = other DNA
gcgaagaggattttgtagccgagcgcgaggcgtctgaacgccgtcagcaggaaatggaagccgctgataccgaac

SEQ ID NO: 759829 - DNA, 75 bp, synthetic construct
  source 1..75: mol_type = other DNA
gcattgtttccccatatgactgtggagcagaacatcgcctttggcctgaaacaggacaaactaccgaaagcggaa

SEQ ID NO: 759830 - DNA, 75 bp, synthetic construct
  source 1..75: mol_type = other DNA
gacagcacattccaacaacctgatgatgctgtggttaagcgccggtgtgttggttggtctggcggatggtgcggg

SEQ ID NO: 759831 - DNA, 75 bp, synthetic construct
  source 1..75: mol_type = other DNA
tgtgactttctacgtcatttttgccctgctgattctgtctctggcgctttcaacgaccattcgccagccagagca

SEQ ID NO: 759832 - DNA, 75 bp, synthetic construct
  source 1..75: mol_type = other DNA
atgacaccttcaaattatcagcgtacccgctggttgacactcatcggtactatcattacccagtttgcgctgggg

SEQ ID NO: 759833 - DNA, 75 bp, synthetic construct
  source 1..75: mol_type = other DNA
aagccgggcgaagagtatatgaatgaagcccagctggcgcacttccgtcgtattctggaagcatggcgtaatcaa

SEQ ID NO: 759834 - DNA, 75 bp, synthetic construct
  source 1..75: mol_type = other DNA
cctgacgcaaacggagcgatagaaccgagaaattatattggagaaaatggtctccctgttcgtttcaagccggat

SEQ ID NO: 759835 - DNA, 75 bp, synthetic construct
  source 1..75: mol_type = other DNA
atgaagaaagtgtctgaactggaaacgctggtggcgcaggccaaagaagcggataaaagcggcatgaatttctcg

SEQ ID NO: 759836 - DNA, 75 bp, synthetic construct
  source 1..75: mol_type = other DNA
aatggtcgatgaaatatttcagtcaattgtaatcgcggggcgggtttgtgatgagcgcggatatgtcacgaagtc

SEQ ID NO: 759837 - DNA, 75 bp, synthetic construct
  source 1..75: mol_type = other DNA
aagttccgtactctgactgggataaagagcaacttcaggatgcaaacacaagctggatggtcgacgactcatttc

SEQ ID NO: 759838 - DNA, 75 bp, synthetic construct
  source 1..75: mol_type = other DNA
acatttaacactcaatcgcccgttgagaaaaaagccgaattgcacgaacaatacattgatatccagctgttatta

SEQ ID NO: 759839 - DNA, 75 bp, synthetic construct
  source 1..75: mol_type = other DNA
agtcgatgcgtaaaccgcagtactggatgttagcggtaatgttcctgactgcctgcatgagcggcctgtacgtga

SEQ ID NO: 759840 - DNA, 75 bp, synthetic construct
  source 1..75: mol_type = other DNA
gcccctattgcaaaagcaaaaatgccagcgcaaccggtggctgatgaacaagcggttttcgacgaaaaaatgaat

SEQ ID NO: 759841 - DNA, 75 bp, synthetic construct
  source 1..75: mol_type = other DNA
attgaagaaagagaagggaaaacattccactactactctctggcagtcatgatttcagcgaaacaaattaataac

SEQ ID NO: 759842 - DNA, 75 bp, synthetic construct
  source 1..75: mol_type = other DNA
catcgtccctgagtattctcgctatcgctggggtggagccatatcaggagaagccgggcgaagagtatatgaatg

SEQ ID NO: 759843 - DNA, 75 bp, synthetic construct
  source 1..75: mol_type = other DNA
gggggaggtgatacacattgcctatctcggcgatctttcggtgtatcacgttcgtctgaaaagtgggcagatgat

SEQ ID NO: 759844 - DNA, 75 bp, synthetic construct
  source 1..75: mol_type = other DNA
ggtacacgtagcgctgcgcccggaaaaaatcatgctttgcgaagagccgcccgccaatggttgtaacttcgcggt

SEQ ID NO: 759845 - DNA, 75 bp, synthetic construct
  source 1..75: mol_type = other DNA
tcggcctggtacatatgcaggagttcgccaaacgcaaaccgcaccagctttccggcggtcagcgacagcgtgtgg

SEQ ID NO: 759846 - DNA, 75 bp, synthetic construct
  source 1..75: mol_type = other DNA
tatcaatatgatgtttcagtcctacgcgttgtttccgcatatgaccgtggagcagaacatcgcctttggtttgaa

SEQ ID NO: 759847 - DNA, 75 bp, synthetic construct
  source 1..75: mol_type = other DNA
cagcgctcagctacaaaacgctcatcgatatcgcaaagggttaccaacctggggcgacgaagtgcgtttgtgctg

SEQ ID NO: 759848 - DNA, 75 bp, synthetic construct
  source 1..75: mol_type = other DNA
cacccgctatagcgctgaatttatcggttcggttaatgtctttgaaggtgtactcaaagagcgtcaggaagatgg

SEQ ID NO: 759849 - DNA, 75 bp, synthetic construct
  source 1..75: mol_type = other DNA
gaacggaatgaatctccacgccttcgccggcagtggcaggatgttctggaggagtgtcggctgacagaggccgga

SEQ ID NO: 759850 - DNA, 75 bp, synthetic construct
  source 1..75: mol_type = other DNA
ggcgacacaactggcgcaaaatggcagtgcgctggcgcgtaccagcctcggcagtggtttctggctggctgcggc

SEQ ID NO: 759851 - DNA, 75 bp, synthetic construct
  source 1..75: mol_type = other DNA
aacagcgtctgtgcattgcgcgtggtatcgccattcgcccggaagtgctgctgctcgacgaaccgtgttcggcgc

SEQ ID NO: 759852 - DNA, 75 bp, synthetic construct
  source 1..75: mol_type = other DNA
atgtagcgggtctgaagcgggcaattaaaacgccgtcggaagagtacgcgaagattggtcttgagaaagacggca

SEQ ID NO: 759853 - DNA, 75 bp, synthetic construct
  source 1..75: mol_type = other DNA
tgaggcatcaaaacgtcgtcagcaggaaatggaagccgcagatgctgagccgtttgcggtgtggctggaaaagca

SEQ ID NO: 759854 - DNA, 75 bp, synthetic construct
  source 1..75: mol_type = other DNA
gcgatttttggtgcggattctattgacagcggaacgctaaaattaaatggtaaggaaaccgttattaaagatatt

SEQ ID NO: 759855 - DNA, 75 bp, synthetic construct
  source 1..75: mol_type = other DNA
gcgatgatcaaccagcgtgcggcacaccccatgcccttaacgtcaggcacaccgctgtgccggtttgaactgttg

SEQ ID NO: 759856 - DNA, 75 bp, synthetic construct
  source 1..75: mol_type = other DNA
attcagaacacccaagcttatgtggtggatgcatataatcgtttggtaccgccaggtgcctgtggagaactctgt

SEQ ID NO: 759857 - DNA, 75 bp, synthetic construct
  source 1..75: mol_type = other DNA
ccgattcctcgcgtcgaaatcgacagcgcggcggtcagtgccatgccaacgacggatctgcgttaccgaccacat

SEQ ID NO: 759858 - DNA, 75 bp, synthetic construct
  source 1..75: mol_type = other DNA
gtcagggaaattttcagcatccggccatttatggttatgccggacgggaatagcggtggttttgccctgccggtc

SEQ ID NO: 759859 - DNA, 75 bp, synthetic construct
  source 1..75: mol_type = other DNA
tctggacggcgttctgcataatgccggattactcggcgatatttgtccaataagcgaacaaaatccacaggtctg

SEQ ID NO: 759860 - DNA, 75 bp, synthetic construct
  source 1..75: mol_type = other DNA
ctcaaaatttgccaccgaaggaatgatgcaggtactggccgatgaatatcaacagcgcctgcgcgtgaactgcat

SEQ ID NO: 759861 - DNA, 75 bp, synthetic construct
  source 1..75: mol_type = other DNA
cgccaaggccaaagaatactttgaaggtgataatcctgctgcatggaaaggtatgctgaaacctctcctgcctca

SEQ ID NO: 759862 - DNA, 75 bp, synthetic construct
  source 1..75: mol_type = other DNA
aattgaacatgcgttagctcaccagttggcagataaggcagaggctgcgtatcaacgtgggacgttatggcctaa

SEQ ID NO: 759863 - DNA, 75 bp, synthetic construct
  source 1..75: mol_type = other DNA
acccagcaaagttcaaaaccaaaaacatcatgccgcccttccctatggtgatattgggacatttatgggcgaact

SEQ ID NO: 759864 - DNA, 75 bp, synthetic construct
  source 1..75: mol_type = other DNA
caaacagaacgcaaacacatcattctcgataacgattcgccggaagccattgccgagctggtggaacatctgaag

SEQ ID NO: 759865 - DNA, 75 bp, synthetic construct
  source 1..75: mol_type = other DNA
ctggcggcagcagttgaaaagatcggcttcgatttactgatctttggtgaaggttccggcgacctttatgcccag

SEQ ID NO: 759866 - DNA, 75 bp, synthetic construct
  source 1..75: mol_type = other DNA
gttgggactggtgcgtggaaagacgctgttgactgggtgctcgaagaggcttgccaggctgtaaatacagacatc

SEQ ID NO: 759867 - DNA, 75 bp, synthetic construct
  source 1..75: mol_type = other DNA
gtatcaaggattattgattggggtgacgctggcaattgttgtgggttccccgacaggtgaaattgatacggcgtt

SEQ ID NO: 759868 - DNA, 75 bp, synthetic construct
  source 1..75: mol_type = other DNA
gccgtgggttgcttctgccacgcctgccgtctcgcaaaatctgcgcctgcgttacagcaatgttgatgttgctgc

SEQ ID NO: 759869 - DNA, 75 bp, synthetic construct
  source 1..75: mol_type = other DNA
cccacgatggtgagtatgtcttaattgcagaagatggctcggctagtttagaaaattattcaattcaatatgcaa

SEQ ID NO: 759870 - DNA, 75 bp, synthetic construct
  source 1..75: mol_type = other DNA
gctcaatacattaccaagtaaattcgcagagggagaccataaacgccaatggattagtaattattctcaaaaaaa

SEQ ID NO: 759871 - DNA, 75 bp, synthetic construct
  source 1..75: mol_type = other DNA
gccgccagaagaaggggtatttaataatgttgattcatatgatggtggtcgctatatctactataacggctgtga

SEQ ID NO: 759872 - DNA, 75 bp, synthetic construct
  source 1..75: mol_type = other DNA
gaaagattttggcgatgacgatccgcaatatcatcaggcgctgaagtacgacgacttaatcgccatccaaaaaca

SEQ ID NO: 759873 - DNA, 75 bp, synthetic construct
  source 1..75: mol_type = other DNA
gttggcaacatgcctgcgagagtcatcggcgtggcggaagaaaaacagtcaatgtttggcagcagtaaagtgcta

SEQ ID NO: 759874 - DNA, 75 bp, synthetic construct
  source 1..75: mol_type = other DNA
gaaatcgagttgcgccagaaacaatacgaatactaccgtgatttactgttcagtttcccaaaacctgaaactgtc

SEQ ID NO: 759875 - DNA, 75 bp, synthetic construct
  source 1..75: mol_type = other DNA
tggctgatgcaccggaaatgagcagtagcgaacttgcctgtacacgcgttaactggaaccgggtgatcctcgaag

SEQ ID NO: 759876 - DNA, 75 bp, synthetic construct
  source 1..75: mol_type = other DNA
tcattacgctatgccaaacatggagatgtcgtgataactgacgtgggggagactgtagaagacgttggtaaagca

SEQ ID NO: 759877 - DNA, 75 bp, synthetic construct
  source 1..75: mol_type = other DNA
ggtaaatcaaatgttgtttttcatgatgcttgcttttcatacagatgcttactaaaccctaaatatattgcatac

SEQ ID NO: 759878 - DNA, 75 bp, synthetic construct
  source 1..75: mol_type = other DNA
atttctgcgggctatttccgcgttatccgcaattactatcgtttcggttgggtcattccttatctgtttggtgca

SEQ ID NO: 759879 - DNA, 75 bp, synthetic construct
  source 1..75: mol_type = other DNA
tgtttacacaactcattcgttatcacaggttagagctgatatggcagcgtcattacgctatgccaaacatggaga

SEQ ID NO: 759880 - DNA, 75 bp, synthetic construct
  source 1..75: mol_type = other DNA
gcgttttaaaacccctgttgccgatgccaagtaaagttcagaccaaaaaacaccatgcagcattgccttataaag

SEQ ID NO: 759881 - DNA, 75 bp, synthetic construct
  source 1..75: mol_type = other DNA
aatgttccggttgtcagctatttttcaggaaaagacaaaactcgagatgccttatccttttattgggggtatagg

SEQ ID NO: 759882 - DNA, 75 bp, synthetic construct
  source 1..75: mol_type = other DNA
aatatatctatcttctgaaataggattaaagaaaaaaacaggggatttatttaagtatgtaataaatgacaatag

SEQ ID NO: 759883 - DNA, 75 bp, synthetic construct
  source 1..75: mol_type = other DNA
tccctgaagcgtgccttcaagtcgatgtgggatgctgcacttgatattggcagacctgacaccgcccaggagatg

SEQ ID NO: 759884 - DNA, 75 bp, synthetic construct
  source 1..75: mol_type = other DNA
caacaaatatagccaattttggtatagcgttgtatcagggaaaaggaatgtcaacacctcttacattaggtaatg

SEQ ID NO: 759885 - DNA, 75 bp, synthetic construct
  source 1..75: mol_type = other DNA
gaacatggcacaggcctgtatgttggcttttggtctctgtttgttgctgctactggtgatgagcggtgcgtgggg

SEQ ID NO: 759886 - DNA, 75 bp, synthetic construct
  source 1..75: mol_type = other DNA
ggggattgcggctatgatgcgccaatcgttcctgatggcgtcacactgagcagtatgcagcagtggtttgtggag

SEQ ID NO: 759887 - DNA, 75 bp, synthetic construct
  source 1..75: mol_type = other DNA
gtaatctggctgccggtggtcgcggtgaacctcgtccgctgacggaaagtgactggaaaatcgcccgtcagatcg

SEQ ID NO: 759888 - DNA, 75 bp, synthetic construct
  source 1..75: mol_type = other DNA
ggtggcagactatctatcactattgctaaatgcagaacataacatgattcctttatcatccacccccttatcatc

SEQ ID NO: 759889 - DNA, 75 bp, synthetic construct
  source 1..75: mol_type = other DNA
gcgcatctttttgcaaaggaagaagcatatcagcaggaatgcgaagcccaggaagctgcaagtgatgatggacac

SEQ ID NO: 759890 - DNA, 75 bp, synthetic construct
  source 1..75: mol_type = other DNA
gtgcgctgttctatgcctggtaccagggctcatccacactatctgacttcaacaaaacgctggtactgtcgggga

SEQ ID NO: 759891 - DNA, 75 bp, synthetic construct
  source 1..75: mol_type = other DNA
atggtgaatattaatgttttttttctaaggacaactaaaagaattgaatcatactcgcaaaatagcaataaatta

SEQ ID NO: 759892 - DNA, 75 bp, synthetic construct
  source 1..75: mol_type = other DNA
atctcgcatggacgaaataagctccttgaattggcggggaaatgccatagtgaagagttgtggagtccggttcgt

SEQ ID NO: 759893 - DNA, 75 bp, synthetic construct
  source 1..75: mol_type = other DNA
caacgacacttataaccttgaccgcagcaaagcgccctggccgaaaaacgaggctgagttgaacgcgctgtggga

SEQ ID NO: 759894 - DNA, 75 bp, synthetic construct
  source 1..75: mol_type = other DNA
ccaagacgtttgaatatggggcttggcccttacccggaagtctccttagccgaagcgcgtgacaaagcgcgtgag

SEQ ID NO: 759895 - DNA, 75 bp, synthetic construct
  source 1..75: mol_type = other DNA
aatgaaactgccagtcgtctacgtggacgtattgaaacagtgatcgattacgccaaggccaaagaatactttgaa

SEQ ID NO: 759896 - DNA, 75 bp, synthetic construct
  source 1..75: mol_type = other DNA
acgccgttcccgatgtccatttacgacaacatcgcctttggtgtccgtctgtttgagaagctctcccgtgccgac

SEQ ID NO: 759897 - DNA, 75 bp, synthetic construct
  source 1..75: mol_type = other DNA
ggagcatcgcgtaccgctgtccgatactgctgttgaacttcttaaagccttaccgcgatttacagataacaatct

SEQ ID NO: 759898 - DNA, 75 bp, synthetic construct
  source 1..75: mol_type = other DNA
agaggctgcgtatcaacgtgggacgttatggcctaagcgggtggcgttgatggatgagtggtcggggttttgtct

SEQ ID NO: 759899 - DNA, 75 bp, synthetic construct
  source 1..75: mol_type = other DNA
accgcagcacgctcaggtgaaattcgtggtgccgagtggtcagagatcgatcttgaaggtaaaacgtggaccata

SEQ ID NO: 759900 - DNA, 75 bp, synthetic construct
  source 1..75: mol_type = other DNA
cgaagatgatgcgacgcgtctggcgcggttgaacgatcgctttaaacgcgaaggaaaaccggagttgaagaaact

SEQ ID NO: 759901 - DNA, 75 bp, synthetic construct
  source 1..75: mol_type = other DNA
ggcgatgaacttcgcaccggcaaacttgacgttttctacgatctctacaatctggcgcaaaaacgccgcttcgaa

SEQ ID NO: 759902 - DNA, 75 bp, synthetic construct
  source 1..75: mol_type = other DNA
gtgttggtcaaacaggcaagccgatggttgacgtgattggctggcgtcttgatgatgtggttgccttaattaaag

SEQ ID NO: 759903 - DNA, 75 bp, synthetic construct
  source 1..75: mol_type = other DNA
caggattacactgtggtgatcgtcacccacaacatgcagcaggctgcgcgttgttccgaccacacggcgtttatg

SEQ ID NO: 759904 - DNA, 75 bp, synthetic construct
  source 1..75: mol_type = other DNA
aaagagaataatgaagatgatgcgacgcgtctggcgcgtttgaacgaacgctttaaacgcgaaggtaaaccggag

SEQ ID NO: 759905 - DNA, 75 bp, synthetic construct
  source 1..75: mol_type = other DNA
gttgtgggtgaaccgacatttggtaaaggcaccgttcagcagtaccgttcattgaaccgtatttacgatcagatg

SEQ ID NO: 759906 - DNA, 75 bp, synthetic construct
  source 1..75: mol_type = other DNA
cggtcttggtcttaacgccgtctatgctcgtgcaaaaattgaacgttttgcaggtgatctggggcaactggttgc

SEQ ID NO: 759907 - DNA, 75 bp, synthetic construct
  source 1..75: mol_type = other DNA
cgaaatatgggggcgtgattcagaaactgttgagtataaattagaagagaattttaggcgaattctttctatcgg

SEQ ID NO: 759908 - DNA, 75 bp, synthetic construct
  source 1..75: mol_type = other DNA
atgaaacgtccaaatatgcccgtacaggggcagggcttcgttcggcctgaaaccagcatgagcgatattctggtt

SEQ ID NO: 759909 - DNA, 75 bp, synthetic construct
  source 1..75: mol_type = other DNA
gactgctcactgtgcaacttgtgccaaagatttcaccattcaggctctttgtcctgactgccaccagccattgca

SEQ ID NO: 759910 - DNA, 75 bp, synthetic construct
  source 1..75: mol_type = other DNA
tgatggcggtggatccgctgcgtcgggttatttctccccgtttctgggctggggttatttcattaccactgttga

SEQ ID NO: 759911 - DNA, 75 bp, synthetic construct
  source 1..75: mol_type = other DNA
ctttcgccattgcttgatgccatttatttcagttcccggattttggtcggcagcgtctcttgcctgtttattgaa

SEQ ID NO: 759912 - DNA, 75 bp, synthetic construct
  source 1..75: mol_type = other DNA
taaactgcctggcgcgcccttcacttcctggctgacattactgtttttactgagtgtccttgtgctgatggcgtt

SEQ ID NO: 759913 - DNA, 75 bp, synthetic construct
  source 1..75: mol_type = other DNA
aataaattccccggcgatttgccgaaatttcgtctggcattaacgatgattatcgctcatcagcgactgcgcgat

SEQ ID NO: 759914 - DNA, 75 bp, synthetic construct
  source 1..75: mol_type = other DNA
tggtgatgatagcagtggtcacctcgttggcgatgcgtttaccgaatccgcgtatggtggcgatcgactttatct

SEQ ID NO: 759915 - DNA, 75 bp, synthetic construct
  source 1..75: mol_type = other DNA
ttgccgaaatttcgcctggcgctgacgatgattatcgcgcaccagcgcctgcgtgatgcgccgatcccggttaac

SEQ ID NO: 759916 - DNA, 75 bp, synthetic construct
  source 1..75: mol_type = other DNA
atgacgaaatatcaggtctgggaggacgactggatggttgatgagtgtttatgtgcgatgtacgacgccacgcta

SEQ ID NO: 759917 - DNA, 75 bp, synthetic construct
  source 1..75: mol_type = other DNA
gataccgtagggtttattcgccacttgccgcacgatctggtggcggcgtttaaagccacgttacaagagacgcgg

SEQ ID NO: 759918 - DNA, 75 bp, synthetic construct
  source 1..75: mol_type = other DNA
ggagcgtttgtgcgagtgtcgtgttatcgaccgcaccggccttattttagatattttcgcccaacgtgcgcgtac

SEQ ID NO: 759919 - DNA, 75 bp, synthetic construct
  source 1..75: mol_type = other DNA
caaccactcgcaccgttgtccactcgtctctggctgttctggggctggattttgtgctgaccgcattgatgtttg

SEQ ID NO: 759920 - DNA, 75 bp, synthetic construct
  source 1..75: mol_type = other DNA
gaacgacatgttccgcctgacgtatgcgctggaaacagcgaaagacatgggctggaattaccgcgtaatgagcga

SEQ ID NO: 759921 - DNA, 75 bp, synthetic construct
  source 1..75: mol_type = other DNA
aacagtcccgcaataaatatcagtgctcaattgggggcaatgatgacttttatttttaatgacattggcacctgc

SEQ ID NO: 759922 - DNA, 75 bp, synthetic construct
  source 1..75: mol_type = other DNA
aaggctgaagagcacattagcagctctcacggcgacgtagattacgctcaggcgtctgcggaactggtcaaagcg

SEQ ID NO: 759923 - DNA, 75 bp, synthetic construct
  source 1..75: mol_type = other DNA
gtgttttcttattactttcaaggtcttgctcttggggcagctatgattctgccgctcggcccacaaaatgctttt

SEQ ID NO: 759924 - DNA, 75 bp, synthetic construct
  source 1..75: mol_type = other DNA
gttttacattactggaaattatggtggtaattgtcatcattggcgtactcgccagcctggtggttcccaacctga

SEQ ID NO: 759925 - DNA, 75 bp, synthetic construct
  source 1..75: mol_type = other DNA
gaacgacctgttccggctgacgtatgccctggaaactgcgaaggatatgctctggaactaccgcctgctgaacga

SEQ ID NO: 759926 - DNA, 75 bp, synthetic construct
  source 1..75: mol_type = other DNA
cctccattgaaatggtgggtacagctgccggagaatgtaaagatccgcagaccatggtgcctaaagccattaaca

SEQ ID NO: 759927 - DNA, 75 bp, synthetic construct
  source 1..75: mol_type = other DNA
cctggtgctgatggcgttcgattacccgaacgggacttataccatcgcggcgctgccgattatcggtattctgct

SEQ ID NO: 759928 - DNA, 75 bp, synthetic construct
  source 1..75: mol_type = other DNA
tgatggccgtagacccgttgcgccgggttatttctccacgtttctgggctggggttatttcattgccgctgctga

SEQ ID NO: 759929 - DNA, 75 bp, synthetic construct
  source 1..75: mol_type = other DNA
tcgtcagcgcagagcaacaaatgttctctggtctggtcgagaaaatccaggtaacgggtagcgaaggtgaactgg

SEQ ID NO: 759930 - DNA, 75 bp, synthetic construct
  source 1..75: mol_type = other DNA
tattttaacgaaaacaacttaggtataactggaattattagcacatattaccctgtctttcgtataaataaaggc

SEQ ID NO: 759931 - DNA, 75 bp, synthetic construct
  source 1..75: mol_type = other DNA
cgcgtatttgagattgtgttgaacttcgcgtcgctgggaatcatcgcttcatgggcgtttatcatcgtgtgccag

SEQ ID NO: 759932 - DNA, 75 bp, synthetic construct
  source 1..75: mol_type = other DNA
atgggtattttctccattgctaaccaacatattcgctttgcggtaaaactggcgaccgccattgtactggcgctg

SEQ ID NO: 759933 - DNA, 75 bp, synthetic construct
  source 1..75: mol_type = other DNA
tcagaaaccctgattaccagatggtttttgaatggcggatggaacgcttacagcgcattcgccagaaccctgaaa

SEQ ID NO: 759934 - DNA, 75 bp, synthetic construct
  source 1..75: mol_type = other DNA
tcttacgacagcatgcgttatgaactgggtgtagatgcaggttataccttcacctacagcgaagaccaggctctg

SEQ ID NO: 759935 - DNA, 75 bp, synthetic construct
  source 1..75: mol_type = other DNA
aactccgacgcttggggcttcggtttgaaagccggttacgacttcaaactgggtgatgctggttacgtgactcct

SEQ ID NO: 759936 - DNA, 75 bp, synthetic construct
  source 1..75: mol_type = other DNA
taatagctgctggtttgctggctggctgcggcgagaaaacgccaaaatgcagtagtgatgatgcaaaaaatctgg

SEQ ID NO: 759937 - DNA, 75 bp, synthetic construct
  source 1..75: mol_type = other DNA
tctcttcaacaaagaaatggttatcggtttcggctcccgtaaagaggaatacgtcgacagcactggtgacccgaa

SEQ ID NO: 759938 - DNA, 75 bp, synthetic construct
  source 1..75: mol_type = other DNA
atgaatacagcattcgcactcgttctgactgcttttcttaatacgggcgaaccggttgatgtggttactggtata

SEQ ID NO: 759939 - DNA, 75 bp, synthetic construct
  source 1..75: mol_type = other DNA
ggtattctctcaggtccattaactgtttcgctgttccagtacggtaaatttaccgcctttgatgcgctgatgact

SEQ ID NO: 759940 - DNA, 75 bp, synthetic construct
  source 1..75: mol_type = other DNA
tgtcagtcagatctccttgatcatcaacaccatttttgcttcgtttttggcatccggttcagtctcctggatgta

SEQ ID NO: 759941 - DNA, 75 bp, synthetic construct
  source 1..75: mol_type = other DNA
gcgtgtgcttggcttcgcacgagacgcaattgtcgccagaatctttggcgcagggatggcaaccgacgccttttt

SEQ ID NO: 759942 - DNA, 75 bp, synthetic construct
  source 1..75: mol_type = other DNA
gttaattgcgggtaatttgctgctggcacgtctgacctcgcgccgtaccgtacgttcgctgattattatgggggg

SEQ ID NO: 759943 - DNA, 75 bp, synthetic construct
  source 1..75: mol_type = other DNA
atgcaaaatagattagcttccggtgcccggcttggacgtcaggcgttactttttcctctctgtctggtgctctac

SEQ ID NO: 759944 - DNA, 75 bp, synthetic construct
  source 1..75: mol_type = other DNA
caatcatgatgaatacaaccgtttgatggactgggggctgcgtctttgtttcctgttggcgctgccgagtgcggt

SEQ ID NO: 759945 - DNA, 75 bp, synthetic construct
  source 1..75: mol_type = other DNA
gtatgtcgctggctgggcgacccggcaacttcggcacgcgttttcacaattatctgtatgaaaagctggggctga

SEQ ID NO: 759946 - DNA, 75 bp, synthetic construct
  source 1..75: mol_type = other DNA
ttgttgctggggtatcgttcgcagtgtttatagccgtcgatccagctttggtccctttatgctgacgttaggatt

SEQ ID NO: 759947 - DNA, 75 bp, synthetic construct
  source 1..75: mol_type = other DNA
aacagaaaattcccggtaactgttacccggtcgataaagttattcaccaggataatatcgaaatcccggcaggtc

SEQ ID NO: 759948 - DNA, 75 bp, synthetic construct
  source 1..75: mol_type = other DNA
ctgccgcggcagagcaaaaaattcccgggaactgttatcctgtcgacaaaattattcgcatgaacaataacgaaa

SEQ ID NO: 759949 - DNA, 75 bp, synthetic construct
  source 1..75: mol_type = other DNA
ttaactatcattttgcaccgcgtcgcgagggcgatcttccggcctactgggcggacgccagcaaagccgaccgtg

SEQ ID NO: 759950 - DNA, 75 bp, synthetic construct
  source 1..75: mol_type = other DNA
gatcctgcacgatcatgccatcgacgcagtgatccactttgccgggctgaaagccgttggcgagtcggtacaaaa

SEQ ID NO: 759951 - DNA, 75 bp, synthetic construct
  source 1..75: mol_type = other DNA
gatcggcgctaacctgtcgctgggcggttcatcactggcagtggcgtggaaaacgaaaaacccggaactgcgtca

SEQ ID NO: 759952 - DNA, 75 bp, synthetic construct
  source 1..75: mol_type = other DNA
atgaattcagcatttgcgcttgttctgacagtttatcttgtttccggagagccagttgatattgcagtcagtgtt

SEQ ID NO: 759953 - DNA, 75 bp, synthetic construct
  source 1..75: mol_type = other DNA
tttactgaagatgccattaataagagaaaacacgaacgggagctattaaatcaaatatgcattgtttcaatgctg

SEQ ID NO: 759954 - DNA, 75 bp, synthetic construct
  source 1..75: mol_type = other DNA
cgcagggaaatgcacaaccggttaaataatggcgcaacggttattcgcagcgccttcggtctggcgcagaaatat

SEQ ID NO: 759955 - DNA, 75 bp, synthetic construct
  source 1..75: mol_type = other DNA
aacaagaacgggagctattaaataaaatatgcattgtttcaatgctggctcgtttacgtctgatgccaaaaggat

SEQ ID NO: 759956 - DNA, 75 bp, synthetic construct
  source 1..75: mol_type = other DNA
gcggcgcgtgaactgctggggggcgaagaggttgcgggtcagttctggcagcaattgcgtgaacaacaactgccg

SEQ ID NO: 759957 - DNA, 75 bp, synthetic construct
  source 1..75: mol_type = other DNA
tgctgccctgcgagccaccgtattatggtgaagaagccacctggggcggcatggtcgcttgcggtctggcggggc

SEQ ID NO: 759958 - DNA, 75 bp, synthetic construct
  source 1..75: mol_type = other DNA
taccgtatcggtcgcgcctacggcgaatttctgaaacccgggaagatagtggtggggggcgatgtgcgcctcaca

SEQ ID NO: 759959 - DNA, 75 bp, synthetic construct
  source 1..75: mol_type = other DNA
gtgaactccggcaacggggcggcggggcacgtgattgatgaggtggagaaacgcttcgcggcggccggggcgccg

SEQ ID NO: 759960 - DNA, 75 bp, synthetic construct
  source 1..75: mol_type = other DNA
acggcagagctatttattgatcaaatgcgaggggtattttctctcattgataatgtattagtcgaaaagggtttt

SEQ ID NO: 759961 - DNA, 75 bp, synthetic construct
  source 1..75: mol_type = other DNA
ttgtggatgagcagactctcaggcagcgtattgatgaagggctgggatttgctgtttcggcgaagggaaaacatg

SEQ ID NO: 759962 - DNA, 75 bp, synthetic construct
  source 1..75: mol_type = other DNA
gcaccaagtggtgttgaagtaataatgacctccattgaagatacgttacaacgctggaataacaataacttttat

SEQ ID NO: 759963 - DNA, 75 bp, synthetic construct
  source 1..75: mol_type = other DNA
gcgttccctgcgtcgggagagatcaaccgcaagctaaggaatgctgctgaggcgatcgcccgcatccgggcgcag

SEQ ID NO: 759964 - DNA, 75 bp, synthetic construct
  source 1..75: mol_type = other DNA
ggatggcgtcggtgtacaaattctacggtgccggtgcatccgaagagcttgactgtattccggccaacggtggcg

SEQ ID NO: 759965 - DNA, 75 bp, synthetic construct
  source 1..75: mol_type = other DNA
ctgaatacgccatgcagcgctacggctccggccgggttcagcaggtgatgccaaccgaaggctggtaccgggagc

SEQ ID NO: 759966 - DNA, 75 bp, synthetic construct
  source 1..75: mol_type = other DNA
atgtcctctaattttgaacgttctcagcagaccaaagtcatgatctcgtctgcaccggtaacggcagaaacgctg

SEQ ID NO: 759967 - DNA, 75 bp, synthetic construct
  source 1..75: mol_type = other DNA
atcgactggggcatgacgacagacccgcgcaacattgattatggcctgccggtcaccatcccttttctgctgttc

SEQ ID NO: 759968 - DNA, 75 bp, synthetic construct
  source 1..75: mol_type = other DNA
tgaactacagcgcatcagcggaaggcgttctgattccatccgaatgggtacaggctgccgttgatgcacatatca

SEQ ID NO: 759969 - DNA, 75 bp, synthetic construct
  source 1..75: mol_type = other DNA
tggctaacccgttcgcgcagaagcgccacggcggaaagataccagtattcacgtttcactggcgagatgacccgc

SEQ ID NO: 759970 - DNA, 75 bp, synthetic construct
  source 1..75: mol_type = other DNA
gccttatgaatggtcaggcagcaacaggacagtatcagatccgaactcaaaaaaacgcggcaacgcagattaccc

SEQ ID NO: 759971 - DNA, 75 bp, synthetic construct
  source 1..75: mol_type = other DNA
gagctgaaaaacgcgccgcgttacccctcaatcatctggtcgcgaagctgaaagagtacaacgctgcgcctccgt

SEQ ID NO: 759972 - DNA, 75 bp, synthetic construct
  source 1..75: mol_type = other DNA
gtgctggttgccgatgtgcccgtggaagagtctgcgcccttccgccaggccgcgttgcgccataatgtcgcacct

SEQ ID NO: 759973 - DNA, 75 bp, synthetic construct
  source 1..75: mol_type = other DNA
gcaacatattaatgagccagagaaaatgctggcggcactgaaagcttttgtacaaccgatgaaagcggcgacgcg

SEQ ID NO: 759974 - DNA, 75 bp, synthetic construct
  source 1..75: mol_type = other DNA
tgacgccgttcatgatgtccggagagaactctggaaagccctgcttggatggatgccggacccgcaagggggcga

SEQ ID NO: 759975 - DNA, 75 bp, synthetic construct
  source 1..75: mol_type = other DNA
aagagtctgcgcccttccgtcaggccgcattgcgccataacgtcgcccctatctttatctgcccgccgaatgccg

SEQ ID NO: 759976 - DNA, 75 bp, synthetic construct
  source 1..75: mol_type = other DNA
gcaacatattaatgagccagagaaaatgctggtggcattgaaagcttttgtacaaccgatgaaagcggcaacacg

SEQ ID NO: 759977 - DNA, 75 bp, synthetic construct
  source 1..75: mol_type = other DNA
cgcttaatatggataagcagcaattaatcgcctcgcccgatggcgcgaagggtagcctacaactgcgccagcagg

SEQ ID NO: 759978 - DNA, 75 bp, synthetic construct
  source 1..75: mol_type = other DNA
gcccacgcctggatatggatcatgatttcaaaacgtgggtgggtgtggtgcgctcgctggccgaatacggcgaat

SEQ ID NO: 759979 - DNA, 75 bp, synthetic construct
  source 1..75: mol_type = other DNA
atcgataatgatgagacggaatatagcctcccagatgagaatcaagatgacattatcgacgttgtgcctgacgaa

SEQ ID NO: 759980 - DNA, 75 bp, synthetic construct
  source 1..75: mol_type = other DNA
cgatacccgccagcaggatgagctgaacagtctggatgaactgcgaacgctggcgattgatgttgattatctcga

SEQ ID NO: 759981 - DNA, 75 bp, synthetic construct
  source 1..75: mol_type = other DNA
ttcgttttatggtccggcggggatggtgtatgcgtcccggtttcgtgacggtatatctgtaccgcagaacaatgc

SEQ ID NO: 759982 - DNA, 75 bp, synthetic construct
  source 1..75: mol_type = other DNA
gctggttgccgattccccactgcgcgctttgctgatagatttgcctgtccagttgtttttacagggagatgatga

SEQ ID NO: 759983 - DNA, 75 bp, synthetic construct
  source 1..75: mol_type = other DNA
gcgtatacctgtgaggtttctgattcagcaagcccgattaataaggtgacctccacttcctgcaccgtaactgtc

SEQ ID NO: 759984 - DNA, 75 bp, synthetic construct
  source 1..75: mol_type = other DNA
gacatcattgatggtaaaccgcagtattcgcgtattgaaatgaatagtaagagtgctcgcctgattcgtgagtaa

SEQ ID NO: 759985 - DNA, 75 bp, synthetic construct
  source 1..75: mol_type = other DNA
gtttaagtttgagttgtctcaactggtggagatgcgcatcagtgatgaatggggtgaggttaaatcccgcgcgca

SEQ ID NO: 759986 - DNA, 75 bp, synthetic construct
  source 1..75: mol_type = other DNA
gctggcaggagcggatcgactggcagcgggtggcaaaaatgcgcgataacggtattcgcttacaatttgccttta

SEQ ID NO: 759987 - DNA, 75 bp, synthetic construct
  source 1..75: mol_type = other DNA
tgagtcaatgctggaagcaacagaagatgatcgtcatccgggttgtccggtatttgccggtatgaaattaccgga

SEQ ID NO: 759988 - DNA, 75 bp, synthetic construct
  source 1..75: mol_type = other DNA
tgagtcaatgctggaagcaacagaagatgatcgtcatccaggttgcccggtatttgctggtatggaattaccgga

SEQ ID NO: 759989 - DNA, 75 bp, synthetic construct
  source 1..75: mol_type = other DNA
gtttaagtttgaactgtcacaactggtggagatgcgcatcagtgatgaatggggtgaggttaaagctcgcgcgca

SEQ ID NO: 759990 - DNA, 75 bp, synthetic construct
  source 1..75: mol_type = other DNA
tatcacaccaatctggcgggctatttcaatgaatatccgtggtgggtggctcactattatcaacgtcgtccggac

SEQ ID NO: 759991 - DNA, 75 bp, synthetic construct
  source 1..75: mol_type = other DNA
cctcaatcatctggttgcgaagctgaaagagtacaacgctgcgcctccattgcagggatttggtatttccgcccc

SEQ ID NO: 759992 - DNA, 75 bp, synthetic construct
  source 1..75: mol_type = other DNA
gggacaattagcgcctctttcctgtggttctttggtctggctcttctcgcagcctggctggcaccgcgtctgcgc

SEQ ID NO: 759993 - DNA, 75 bp, synthetic construct
  source 1..75: mol_type = other DNA
aaaaattcaccgccttgttatgcgctctggggctaatttccatcgttgcgatttatccccgccagacggtgaatt

SEQ ID NO: 759994 - DNA, 75 bp, synthetic construct
  source 1..75: mol_type = other DNA
aggcgacggaaggcgaaaagctggtggacccctatttttcgcgtaactggcaactaagccgcgaaaatggcctgc

SEQ ID NO: 759995 - DNA, 75 bp, synthetic construct
  source 1..75: mol_type = other DNA
tggcaaaaatgcgcgataacggtattcgcttgcaatttgcctttatcaaggcgacggaaggcgaaaagctggtgg

SEQ ID NO: 759996 - DNA, 75 bp, synthetic construct
  source 1..75: mol_type = other DNA
atatggcaattcatgatccactaacgaatacatacaatagaagatactttattgactcattgaataatatatcaa

SEQ ID NO: 759997 - DNA, 75 bp, synthetic construct
  source 1..75: mol_type = other DNA
aacagcaggagcaaatcgcctggtacctgatggatggcctgccaaacctgatgggcgcggcgcttgatgcccgtg

SEQ ID NO: 759998 - DNA, 75 bp, synthetic construct
  source 1..75: mol_type = other DNA
cgtctgtctgcgcaccgggaaggaatggtcggaggcatccgagcaggcctggatggcatcggtgtacaaattcta

SEQ ID NO: 759999 - DNA, 75 bp, synthetic construct
  source 1..75: mol_type = other DNA
aagacacactggatgacctgcgggccgttcaggtggtgaacggtgtccccgcgtaccggagcaacgctcaaaagc

SEQ ID NO: 760000 - DNA, 75 bp, synthetic construct
  source 1..75: mol_type = other DNA
tgcaccggtaacagcagaaaccctggattctgccagctatcttggcctgagctgtacaatcaaagaggtgcagtt

SEQ ID NO: 760001 - DNA, 75 bp, synthetic construct
  source 1..75: mol_type = other DNA
caactatgccgccagtgaaatcgaagagggtttctgggaagaggacgaagacgacaagcatatcaagacctacac

SEQ ID NO: 760002 - DNA, 75 bp, synthetic construct
  source 1..75: mol_type = other DNA
cgctgggtggctgacacctctccgcttaaggtgattgagaagagccgccgtaccggtatcacctgggctgaagcg

SEQ ID NO: 760003 - DNA, 75 bp, synthetic construct
  source 1..75: mol_type = other DNA
gttgcaccatcaaagaaattcagttcactggtggccagaagcaggatatcgacgtaacaacactttgctctaccg

SEQ ID NO: 760004 - DNA, 75 bp, synthetic construct
  source 1..75: mol_type = other DNA
ttacctttatggcagaggtgcgtcagcatacctggtctgcaggaaccaatggtgttgtggctgcaacgttttcct

SEQ ID NO: 760005 - DNA, 75 bp, synthetic construct
  source 1..75: mol_type = other DNA
tatctcttaattctttcattcgcgtttttgaacaacacgtattatttattagaagtggctattatttctttatat

SEQ ID NO: 760006 - DNA, 75 bp, synthetic construct
  source 1..75: mol_type = other DNA
caccgccgggcagaaacaggatattgatgtgaccacgctctgctccacagagcaggagaacatcaacggtctggg

SEQ ID NO: 760007 - DNA, 75 bp, synthetic construct
  source 1..75: mol_type = other DNA
attgttgttttgtcaatattaattctttttattactccgtttgtagcaaaaaatctaagcagtgacaatataaaa

SEQ ID NO: 760008 - DNA, 75 bp, synthetic construct
  source 1..75: mol_type = other DNA
ggcgtagtggcggcaacgttctccctgcgcctgaaaggtaagcctgaaaacatcgagctggctcctgagaggtct

SEQ ID NO: 760009 - DNA, 75 bp, synthetic construct
  source 1..75: mol_type = other DNA
tacgcgtatccataacgatatgcgcgtgaacccggcgttcctgtttgccgccatgttctggtatccactgctgga

SEQ ID NO: 760010 - DNA, 75 bp, synthetic construct
  source 1..75: mol_type = other DNA
cccgcgatatctggcagttgcagttgcgtatgtcccgtcgtcagggtaaacgcgcatggaaactgctggagcatc

SEQ ID NO: 760011 - DNA, 75 bp, synthetic construct
  source 1..75: mol_type = other DNA
tgttccgtaactgccgcctggtgggtcgccgtttccgtctggctcatgtgatgtttggcccggagattatcgaag

SEQ ID NO: 760012 - DNA, 75 bp, synthetic construct
  source 1..75: mol_type = other DNA
ctgaagttcctgtctgagctggggctgataacctaccagacggaatacgacccgacaattggctgtaatatcccg

SEQ ID NO: 760013 - DNA, 75 bp, synthetic construct
  source 1..75: mol_type = other DNA
gtgcgccgccgcattgaactgtggttccgacgcaacaaaatcagcaacccgatgatttacgccacggtcggcggg

SEQ ID NO: 760014 - DNA, 75 bp, synthetic construct
  source 1..75: mol_type = other DNA
aggcagagcttaagtcccgtggaataaagcgtgcccgtgcgcgtcgtgatgcggacagacagcgtcaggatatcg

SEQ ID NO: 760015 - DNA, 75 bp, synthetic construct
  source 1..75: mol_type = other DNA
taatcagagaagccatgttggctctgttgccgctgattagcggcgtggtgctggtggcactcatttcaccagtca

SEQ ID NO: 760016 - DNA, 75 bp, synthetic construct
  source 1..75: mol_type = other DNA
gcgcggcgtcggatgatggccgatgtgccgaaagcggatgtcattgtcaataacccgacccactattcggtagcg

SEQ ID NO: 760017 - DNA, 75 bp, synthetic construct
  source 1..75: mol_type = other DNA
gttgcagtatgacgaaaacaaaatgagcgcaccgaaagtggtcgctaaaggtgcagggctggtcgcgctgcgcat

SEQ ID NO: 760018 - DNA, 75 bp, synthetic construct
  source 1..75: mol_type = other DNA
aaaaggtagtcactggcgaagcggatctggcgattgcgggtaaaccggaaaccttgcccggcgcagtggcgtttt

SEQ ID NO: 760019 - DNA, 75 bp, synthetic construct
  source 1..75: mol_type = other DNA
attacatatcttctgctcggtgaccgctgcctacagccatctgccgccgattcttgacagattccgcgcggaaca

SEQ ID NO: 760020 - DNA, 75 bp, synthetic construct
  source 1..75: mol_type = other DNA
tctggcgattgccgggaagccggagacgctgcccggtgcggtggcgttttcgatgctggagaatctggcagtggt

SEQ ID NO: 760021 - DNA, 75 bp, synthetic construct
  source 1..75: mol_type = other DNA
ggcagattcagcgcctggaagaagatcttggtcagccgctgtttgtgcgcgataaccgcacggtaacgctgacgg

SEQ ID NO: 760022 - DNA, 75 bp, synthetic construct
  source 1..75: mol_type = other DNA
aagccgccattttggccgcagcgcgcgggcgatgcacgttagcccatccacgctctcacggcagattcagcgcct

SEQ ID NO: 760023 - DNA, 75 bp, synthetic construct
  source 1..75: mol_type = other DNA
agtgccagtcgtgaggcggtaaaacgtgaagtggagcgtcgtgtgaaggagcgcatgattctgtcacgtaaccgc

SEQ ID NO: 760024 - DNA, 75 bp, synthetic construct
  source 1..75: mol_type = other DNA
cgatgctggagaatctggcggtagtgctgattgcgcccgcgctgccctgcccggtgcgtaatcaggtctcggtag

SEQ ID NO: 760025 - DNA, 75 bp, synthetic construct
  source 1..75: mol_type = other DNA
aaattattccgcaatacatttcgtgcactacagggtatggagtatgacccggatgagattatttccatcagcagc

SEQ ID NO: 760026 - DNA, 75 bp, synthetic construct
  source 1..75: mol_type = other DNA
gtcccggggaataaagcgtgcccgtgcgcgtcgtgatgcgaacagggaacgtcaggatatcgtcaccctggtgaa

SEQ ID NO: 760027 - DNA, 75 bp, synthetic construct
  source 1..75: mol_type = other DNA
tcctgcatctggcggaaagccgccattttggccgtagcgcgcgggcaatgcacgttagcccgtctacgctttcgc

SEQ ID NO: 760028 - DNA, 75 bp, synthetic construct
  source 1..75: mol_type = other DNA
gcggacaggcagcgtcaggatatcgtcaccttggtgaaacggcagctgacgcgtgaaatcgcggaaggacgtttc

SEQ ID NO: 760029 - DNA, 75 bp, synthetic construct
  source 1..75: mol_type = other DNA
ggaaaactctccatcacccgggccacccgggccctgacgttccttgcagagctgggactgattacctaccagacg

SEQ ID NO: 760030 - DNA, 75 bp, synthetic construct
  source 1..75: mol_type = other DNA
agacagagcttaagtcccgtggaataaagcgtgcccgtgcgcgtcgtgatgcgaacagggaacgtcaggatatcg

SEQ ID NO: 760031 - DNA, 75 bp, synthetic construct
  source 1..75: mol_type = other DNA
caggaaaactctccatcacccgtgccacccgtgccctgacgttcctgtcagagctggggctgattagctaccaga

SEQ ID NO: 760032 - DNA, 75 bp, synthetic construct
  source 1..75: mol_type = other DNA
ctgcaggggctgtgttttcactatgatccgctggccaaccgtgtccagtgctccatcaccacgctggccattgag

SEQ ID NO: 760033 - DNA, 75 bp, synthetic construct
  source 1..75: mol_type = other DNA
atatctcagaagaggcggtggcttccgcacgccgcagccgtgtggaatgggaaaacagacagcgcaaaagcaggg

SEQ ID NO: 760034 - DNA, 75 bp, synthetic construct
  source 1..75: mol_type = other DNA
acgcgatggatgttgtgggattgtgcgcgcttttagtggtgcttggggtcatcccaatggtgggatttgacgtct

SEQ ID NO: 760035 - DNA, 75 bp, synthetic construct
  source 1..75: mol_type = other DNA
actgggatgtgaacgccgcagccgttcgtgctctgccagttctggagaaaattcagaaagagtctggcaaagctt

SEQ ID NO: 760036 - DNA, 75 bp, synthetic construct
  source 1..75: mol_type = other DNA
tgcggattctggtctgtctgttagtgagctggtatcggtggcctgggcgtctgcttctaccttccgtggtggcga

SEQ ID NO: 760037 - DNA, 75 bp, synthetic construct
  source 1..75: mol_type = other DNA
atgagcacgtcagacgatatccataacacgacagccactggcaaatgcccgttccatcagggcggtcacgaccag

SEQ ID NO: 760038 - DNA, 75 bp, synthetic construct
  source 1..75: mol_type = other DNA
cgaaagagctgttcgaaggccgtgaccgtgaaacgggtgaagtgaaatacactgccagccgtgcggacctggtat

SEQ ID NO: 760039 - DNA, 75 bp, synthetic construct
  source 1..75: mol_type = other DNA
gccgacattattgttcttgccggtgtcgttggtgttgaaaaagcggcgagtgcggcgggtatcagcgttaatgtt

SEQ ID NO: 760040 - DNA, 75 bp, synthetic construct
  source 1..75: mol_type = other DNA
atgagcacgtctgacgatatccataacacaacagctagcggaaaatgtccgttccatcatggcggtcatgaccag

SEQ ID NO: 760041 - DNA, 75 bp, synthetic construct
  source 1..75: mol_type = other DNA
gggccgacctgtttatccttgcgggtaacgtcgcactggaaaactccggtttccgtacctttggtttcggtgctg

SEQ ID NO: 760042 - DNA, 75 bp, synthetic construct
  source 1..75: mol_type = other DNA
atgagtacgtcagacgacatccataacacaacagccactggcaaatgcccgttccatcagggcggtcatgatcag

SEQ ID NO: 760043 - DNA, 75 bp, synthetic construct
  source 1..75: mol_type = other DNA
cgcgcgccgcagccgtgtggaatgggaaaacctgcagcgcaaaaaacagcaactgaaaccgctggagatggacga

SEQ ID NO: 760044 - DNA, 75 bp, synthetic construct
  source 1..75: mol_type = other DNA
ttggttctaactctgtcttgcgtgcggtggcggaagtttacgccagcagcgatgcccacgagaagtttgttaaag

SEQ ID NO: 760045 - DNA, 75 bp, synthetic construct
  source 1..75: mol_type = other DNA
cacagcaactgacgctgaccgcgccggaaatgactgcgctggtgggcggcatgcgtgtactgggtgccaacttcg

SEQ ID NO: 760046 - DNA, 75 bp, synthetic construct
  source 1..75: mol_type = other DNA
attgagatgtttgagctgctggagccaattgctgacggtttccgtaactatcgcgctcgtctggacgtttccacc

SEQ ID NO: 760047 - DNA, 75 bp, synthetic construct
  source 1..75: mol_type = other DNA
acagcggcgaaccgctttctgcggcggcagctatccgcgcgacctttggcaacatggggatgaacgacgaagaaa

SEQ ID NO: 760048 - DNA, 75 bp, synthetic construct
  source 1..75: mol_type = other DNA
taatgcgtagcctgctggcgcgtaacccggcgctggaagcggcggccctcgacgatatttactggggttgtgtgc

SEQ ID NO: 760049 - DNA, 75 bp, synthetic construct
  source 1..75: mol_type = other DNA
tgtctgaggtggcggtggcttccgcacgccgcagtcgtgtggaatgggaaaacagacagcgcaagaagcagggac

SEQ ID NO: 760050 - DNA, 75 bp, synthetic construct
  source 1..75: mol_type = other DNA
ctttcagttccagtttggtaaggcggtgaaaagcgaaaaatgcacggtgctgtttccctcacgctggcaggattt

SEQ ID NO: 760051 - DNA, 75 bp, synthetic construct
  source 1..75: mol_type = other DNA
cgtggagcatatgggccatgtgccaatgagtcacggcgtcgattttcaccccggcctgagccgcaatgtcgccaa

SEQ ID NO: 760052 - DNA, 75 bp, synthetic construct
  source 1..75: mol_type = other DNA
ttcatccatgcaggcactgcatgacgcagcacgaatgatcatgaccggcgatgcgcaggcatgtctggttggcgg

SEQ ID NO: 760053 - DNA, 75 bp, synthetic construct
  source 1..75: mol_type = other DNA
caattcgcaccccgatgggccgttcgaagggcggtgcttttcgtcaagtgcgtgcagaagatctctccgctcatt

SEQ ID NO: 760054 - DNA, 75 bp, synthetic construct
  source 1..75: mol_type = other DNA
ggccgtgggcttcacctcccgttttgattttgccgcgcatgtggcgtatgcccgttcgcgcggcctgcgccggcg

SEQ ID NO: 760055 - DNA, 75 bp, synthetic construct
  source 1..75: mol_type = other DNA
aaagatctgaaagccctgctgacagaatctcaaccgtggtggccagccgactggggcagctacgccggtctgttt

SEQ ID NO: 760056 - DNA, 75 bp, synthetic construct
  source 1..75: mol_type = other DNA
ggcattaatgccgcagcgcgactgggatgtgaacgccgcagccgttcgtgcgctgccagttctggagaaaattca

SEQ ID NO: 760057 - DNA, 75 bp, synthetic construct
  source 1..75: mol_type = other DNA
ttcagcgtcaaaaccgtcgacgtcgccgcatcgcttacacgtaactaccagcgaagctatatcaatattaatcgc

SEQ ID NO: 760058 - DNA, 75 bp, synthetic construct
  source 1..75: mol_type = other DNA
agcggcgggatttatcagcgccagctcgctggaggggattagctatgcgctggatagcgcagagattctgcgttc

SEQ ID NO: 760059 - DNA, 75 bp, synthetic construct
  source 1..75: mol_type = other DNA
ctgcaggggctgtgttttcactatgacccgctggccaaccgcgtccagtgctccatcaccacactggccattgag

SEQ ID NO: 760060 - DNA, 75 bp, synthetic construct
  source 1..75: mol_type = other DNA
ctcaatgtctttgctggtagagtcagctccggcaaatcgtcgtggtttttacagtagctggtcgctggcgactca

SEQ ID NO: 760061 - DNA, 75 bp, synthetic construct
  source 1..75: mol_type = other DNA
atgacggcgatcgtaaatgaaaccgtgagtgtgaagaaaaagcctagtggcaggcgggtgatttttgcttcggcg

SEQ ID NO: 760062 - DNA, 75 bp, synthetic construct
  source 1..75: mol_type = other DNA
gcgccggcaaatcgtcgcggcttttacagcagttggtcgctggcgacccaggggctggcaacgacctttggtggc

SEQ ID NO: 760063 - DNA, 75 bp, synthetic construct
  source 1..75: mol_type = other DNA
aaactggtttctgtaagcactgaaccaggtgccgcaactggcgtaggtatcggtatttatgataacaccaatacc

SEQ ID NO: 760064 - DNA, 75 bp, synthetic construct
  source 1..75: mol_type = other DNA
gcgattcggtcgggcgtaaaaagctgattttaatctcccgtgtgatggtgcttctctgtagctggccgtcattct

SEQ ID NO: 760065 - DNA, 75 bp, synthetic construct
  source 1..75: mol_type = other DNA
gctccggcaaatcgtcgtggtttttacagtagctggtcgctggcgactcaaggcctggcaacaacctttggcggt

SEQ ID NO: 760066 - DNA, 75 bp, synthetic construct
  source 1..75: mol_type = other DNA
ttatcacccgtgcgtttgaaggcaaaaacgggctgaggttcgtgcacgaatcccgcgaattcagtaatgaatttg

SEQ ID NO: 760067 - DNA, 75 bp, synthetic construct
  source 1..75: mol_type = other DNA
ccttcgtaaagagtacggacaggggaacgtcccgttgagtgtgaccgtggagcgttaccggaaaaacgagctgga

SEQ ID NO: 760068 - DNA, 75 bp, synthetic construct
  source 1..75: mol_type = other DNA
aatgcgttgattgtagcgctggcgagtgcagattttgtggtgtcaccgattgaactggaggtgtattccatccag

SEQ ID NO: 760069 - DNA, 75 bp, synthetic construct
  source 1..75: mol_type = other DNA
taagcgggtgatttttgcctcggcgtttggcaatgcgctcgaattttttgattttggcgtttacaacttttttgt

SEQ ID NO: 760070 - DNA, 75 bp, synthetic construct
  source 1..75: mol_type = other DNA
cgctgttactggcatttgcgacttttggcgtgagcttttttatgcgcccgctcggtgggattatcgttggcgcct

SEQ ID NO: 760071 - DNA, 75 bp, synthetic construct
  source 1..75: mol_type = other DNA
cgctgttactggcatttgcaacgtttggcgtgagtttttttatgcgcccgcttggtggaattatcgtcggggcct

SEQ ID NO: 760072 - DNA, 75 bp, synthetic construct
  source 1..75: mol_type = other DNA
aaggagacgcagctatcgaagctggcgacaaagctgctgcacagaaagcatttaacgaaatgcaaccgatcgtgg

SEQ ID NO: 760073 - DNA, 75 bp, synthetic construct
  source 1..75: mol_type = other DNA
tgactgtttttcttaatactggcgagcctgttgacatggttattaacatttacggttcaatgaaagaatgcatgg

SEQ ID NO: 760074 - DNA, 75 bp, synthetic construct
  source 1..75: mol_type = other DNA
gttttgctcgtcgtcatctttcgaccagccgattattgctggcgggggttgcattagggattatctgtagtgcat

SEQ ID NO: 760075 - DNA, 75 bp, synthetic construct
  source 1..75: mol_type = other DNA
atgtactggatgatgggcggctttggcggcgttgactggcggcaaagttggttgatggtagggcttgttcctgta

SEQ ID NO: 760076 - DNA, 75 bp, synthetic construct
  source 1..75: mol_type = other DNA
ttgcagtcagtgttcacagaacaatgcaggaatgtatggcagcagcaaccgaacagaaaattccaggcaactgtt

SEQ ID NO: 760077 - DNA, 75 bp, synthetic construct
  source 1..75: mol_type = other DNA
tgcagcaaccgaacagaaaattcccggtaactgttacccggtcgataaagttattcaccaggataatatcgaaat

SEQ ID NO: 760078 - DNA, 75 bp, synthetic construct
  source 1..75: mol_type = other DNA
cggtaactgttatccggtcgataaagttattcacatggataataacgaaatcccggcaggacttaaaacagcgcc

SEQ ID NO: 760079 - DNA, 75 bp, synthetic construct
  source 1..75: mol_type = other DNA
gggctgaataaactggattccctggctaatccccgtatccggactaattatcgtgagtgtcttgatgccatacgg

SEQ ID NO: 760080 - DNA, 75 bp, synthetic construct
  source 1..75: mol_type = other DNA
tggtgttctgcataccgatccaccgaaatggctggataacgatcatcccccttttaagaaacatatgtacggtgt

SEQ ID NO: 760081 - DNA, 75 bp, synthetic construct
  source 1..75: mol_type = other DNA
ctgtggaaattcactgggcgaacggtaatattcaggtcatcagacctgtgcgggggatcagtattaatggtgaag

SEQ ID NO: 760082 - DNA, 75 bp, synthetic construct
  source 1..75: mol_type = other DNA
agcgacaaaacgtacgctggttatttagcctgtcagttctgatgctgctgacacttctcctgagcctttgtgcag

SEQ ID NO: 760083 - DNA, 75 bp, synthetic construct
  source 1..75: mol_type = other DNA
gcacagtggaaaaatcccggtgtttacgtttcactggcgtagcgatccgcgtaaagacgatgagtggtatcacaa

SEQ ID NO: 760084 - DNA, 75 bp, synthetic construct
  source 1..75: mol_type = other DNA
agaacaaaccgatccgtgtctggctttctgcgcagaccggagcggggataccacagctttttcaggctttgacgg

SEQ ID NO: 760085 - DNA, 75 bp, synthetic construct
  source 1..75: mol_type = other DNA
ttcagtcaacatctatcggagaaggtacaaatatttggcaatttgtagtcgtccttagaaaagcaataattggta

SEQ ID NO: 760086 - DNA, 75 bp, synthetic construct
  source 1..75: mol_type = other DNA
atgaagaaatgcgtaataaaaatatacattgcgcctcctgaaaaaataaattttttatgctattacgtatattcg

SEQ ID NO: 760087 - DNA, 75 bp, synthetic construct
  source 1..75: mol_type = other DNA
atgaaattggcgatattgtctttacatgtataggtgctgcattatttggccaaatttctgctgcatcaaattgct

SEQ ID NO: 760088 - DNA, 75 bp, synthetic construct
  source 1..75: mol_type = other DNA
tgggtgaaatagagacgtttggagaactgttaaatagcaatccgaatgcaaaactcactttctggaaattctggt

SEQ ID NO: 760089 - DNA, 75 bp, synthetic construct
  source 1..75: mol_type = other DNA
cgcacgccgcagccgtgtggaatgggaaaacagacagcgcaaaaagcagggactggatgcactgggtatggatga

SEQ ID NO: 760090 - DNA, 75 bp, synthetic construct
  source 1..75: mol_type = other DNA
cggaatatgacccgcttatcgggtgctacattccgaccgatatcacgttcacaccggcgctgtttgccgcccttg

SEQ ID NO: 760091 - DNA, 75 bp, synthetic construct
  source 1..75: mol_type = other DNA
cggtcatgacagcgatgattatctggtcgcagaaagccgtgttcccctttccaccataaccacactgtcccgctt

SEQ ID NO: 760092 - DNA, 75 bp, synthetic construct
  source 1..75: mol_type = other DNA
ggcagaaaacgacctgcacgtaccgaccttcaccaaactgttcccgaacgctaactggtatgagcgtgaaacctg

SEQ ID NO: 760093 - DNA, 75 bp, synthetic construct
  source 1..75: mol_type = other DNA
gatcgcgttaacgtcattcgcgtaatgctctccgaactgttccgcatcaacagtcacctgctgtatatctccacc

SEQ ID NO: 760094 - DNA, 75 bp, synthetic construct
  source 1..75: mol_type = other DNA
ttccactatgacccgctggccaaccgtgtccagtgctccatcaccacgctggccattgagtgcgggctggcgaca

SEQ ID NO: 760095 - DNA, 75 bp, synthetic construct
  source 1..75: mol_type = other DNA
gccgaaaccttacgtcatgctatttgacttacacggcatggacgaacgtctgcgcacacaccgcgaagggttacc

SEQ ID NO: 760096 - DNA, 75 bp, synthetic construct
  source 1..75: mol_type = other DNA
tgcaacatatcgaaaccctgatcacccacttccttcaagtgtcgtgggggccggtgatgcctgccaatgaatctt

SEQ ID NO: 760097 - DNA, 75 bp, synthetic construct
  source 1..75: mol_type = other DNA
ggtcacccgaacctgcgccgcatcatgatgccgcaaacctggaaaggtcacccgctgcgtaaagattacccggcg

SEQ ID NO: 760098 - DNA, 75 bp, synthetic construct
  source 1..75: mol_type = other DNA
tcaccctggtgaaacggcagctgacgcgtgaaatcgcggaagggcgtttccggggaagcctggaggccgtgaagc

SEQ ID NO: 760099 - DNA, 75 bp, synthetic construct
  source 1..75: mol_type = other DNA
tttcagtgcaaaagtagttcgttatgagcgccgaaatgtcgacgcttttattcaaaagtgtcgcagccagtatta

SEQ ID NO: 760100 - DNA, 75 bp, synthetic construct
  source 1..75: mol_type = other DNA
agaaaaactgagagacagtactgatcttatctgccatctgggcattctcgatgaagtcgctccaatctatatttt

SEQ ID NO: 760101 - DNA, 75 bp, synthetic construct
  source 1..75: mol_type = other DNA
aacaaaaaaaacttaaaattggtttttacaccagcagttctgggactatccgcagccattcagttgctaagcaag

SEQ ID NO: 760102 - DNA, 75 bp, synthetic construct
  source 1..75: mol_type = other DNA
gtggcggtgagttatattgatgctgccgtggcgttgggtaataccattaacgaaatggataaatattacacccag

SEQ ID NO: 760103 - DNA, 75 bp, synthetic construct
  source 1..75: mol_type = other DNA
cgtgaatttaaggtccgtctggctaagcaggcattacagcccggtgctgttgttgcccggatcgccagagagcac

SEQ ID NO: 760104 - DNA, 75 bp, synthetic construct
  source 1..75: mol_type = other DNA
tgcgcgccgcagtcgtgtggaatgggaaaacagacagcgcaagaagcaggggctggataccctgggtatggatga

SEQ ID NO: 760105 - DNA, 75 bp, synthetic construct
  source 1..75: mol_type = other DNA
gcgtcgccgggctattgatgcgctgctgcaggggctgtgttttcactatgacccgctggccaaccgtgtccagtg

SEQ ID NO: 760106 - DNA, 75 bp, synthetic construct
  source 1..75: mol_type = other DNA
gtttccactatgacccgctggccaaccgcgtccagtgctccatcaccacgctggccattgagtgcggactggcga

SEQ ID NO: 760107 - DNA, 75 bp, synthetic construct
  source 1..75: mol_type = other DNA
gtgaagtggagcgtcgtgtgaaggagcgcatgattctgtcacgtaaccgcaattacagtcggctggccacagctt

SEQ ID NO: 760108 - DNA, 75 bp, synthetic construct
  source 1..75: mol_type = other DNA
agacagagcttaagtcccgtggaataaaacgtgcccgtgcgcgtcgtgatgcgaacagagaacgtcaggatatcg

SEQ ID NO: 760109 - DNA, 75 bp, synthetic construct
  source 1..75: mol_type = other DNA
gaaacgtgcccgtgcacgtcgtgacgcggacaggacccgccaggacatcgtcaccctggtgaaacggcagctgac

SEQ ID NO: 760110 - DNA, 75 bp, synthetic construct
  source 1..75: mol_type = other DNA
tgcgcgccgcagtcgtgtggaatgggaaaacagacagcgcaaaaagcagggactggataccctgggtatggatga

SEQ ID NO: 760111 - DNA, 75 bp, synthetic construct
  source 1..75: mol_type = other DNA
ccctaatggatgtggtccttttttgcaacatcgaagtcgttgagccagaaggggtaaaagtccatgttgataaaa

SEQ ID NO: 760112 - DNA, 75 bp, synthetic construct
  source 1..75: mol_type = other DNA
tcatcaacaataaatatatgaaaagaataattcctctctatatcatattgctaatattttctcttcctttacttg

SEQ ID NO: 760113 - DNA, 75 bp, synthetic construct
  source 1..75: mol_type = other DNA
attactacgactacgcatatgtttatgccagtttctcattggcctgtagttttttgccgtgatcctgcaacactt

SEQ ID NO: 760114 - DNA, 75 bp, synthetic construct
  source 1..75: mol_type = other DNA
cgaacgcctgacccgtcagaccctttttcgcatcaatgccctgtttatggcggcatacaacgaaatgcttgagct

SEQ ID NO: 760115 - DNA, 75 bp, synthetic construct
  source 1..75: mol_type = other DNA
atgtctctgtttcacttaattgccccatcgggttactgcattaaacagcacgccgcgctgcgtggtatccagcgc

SEQ ID NO: 760116 - DNA, 75 bp, synthetic construct
  source 1..75: mol_type = other DNA
cgtttttgcgttcccgcctgtcgattccactcattaccggcctcgattttggtcatgaacaacgcacggttacgc

SEQ ID NO: 760117 - DNA, 75 bp, synthetic construct
  source 1..75: mol_type = other DNA
agcccggcgatacagcagacagactgaactatcagaaaatggcgcaggtggtggatggtgttataaccttgttgt

SEQ ID NO: 760118 - DNA, 75 bp, synthetic construct
  source 1..75: mol_type = other DNA
cgctggctgcggcggcatcagccattatggcggggatttccgaaccggcgttatacggcgtggcgatccgcctga

SEQ ID NO: 760119 - DNA, 75 bp, synthetic construct
  source 1..75: mol_type = other DNA
agtatgtagatattcgtgcggaagggatcactaaagaagatctacaacaaaaggcaggtaaacccgtagaaaccg

SEQ ID NO: 760120 - DNA, 75 bp, synthetic construct
  source 1..75: mol_type = other DNA
atgcaaaccgttatttttggtcgtccgggttgcccttactgtgtgcgtgcaaaagatctggctgagaaattgagc

SEQ ID NO: 760121 - DNA, 75 bp, synthetic construct
  source 1..75: mol_type = other DNA
atgccgttaccattccccttcgattttaaacatcctgattaccagatggtttttgaatggcggatggaacgctta

SEQ ID NO: 760122 - DNA, 75 bp, synthetic construct
  source 1..75: mol_type = other DNA
cgctgatcggcaccatgtcaccgctgatcccggcgatcatcggcggatcgatggtcaaactgctggcgatgatcc

SEQ ID NO: 760123 - DNA, 75 bp, synthetic construct
  source 1..75: mol_type = other DNA
tcttatcagcggttttatttgcggcgcggttgccggtatggcggggcttgccagccactcaatggcagcgccggg

SEQ ID NO: 760124 - DNA, 75 bp, synthetic construct
  source 1..75: mol_type = other DNA
aatgtcatcacctttagcggccccatgctggtagcaaactttggcgcggatgaactgaacgcctttaccgagcac

SEQ ID NO: 760125 - DNA, 75 bp, synthetic construct
  source 1..75: mol_type = other DNA
gggctggaacgcagaggctggcaacgtctggaagaaagcggcagcgtctatgcgatgcgcaaatctaccccttat

SEQ ID NO: 760126 - DNA, 75 bp, synthetic construct
  source 1..75: mol_type = other DNA
tgaaacggggtatggcgaccagctaccggttgaaagcgtaaaaatcacctcgccagatgatcgctacggtaaaca

SEQ ID NO: 760127 - DNA, 75 bp, synthetic construct
  source 1..75: mol_type = other DNA
gcccggcttttatcagttcaccttatggcgcagaccacggcttaaaagtaacaacctgcctctgccagatgacgc

SEQ ID NO: 760128 - DNA, 75 bp, synthetic construct
  source 1..75: mol_type = other DNA
cttttatcagttcaccttatggcgcagaccacggcttaaaagtaacaacctgcctctgccagatgacgctatgcg

SEQ ID NO: 760129 - DNA, 75 bp, synthetic construct
  source 1..75: mol_type = other DNA
tggcgcacccgcaaaagaaaactgggcatttacttcgcttgggattttaggcaatgacgacaccgcgcgtaaatt

SEQ ID NO: 760130 - DNA, 75 bp, synthetic construct
  source 1..75: mol_type = other DNA
gcacggcaaccttttgcggcgttactgatccctgaacgcccggatattgccaatgctatggcgctacgttatgca

SEQ ID NO: 760131 - DNA, 75 bp, synthetic construct
  source 1..75: mol_type = other DNA
gaaaatcgcggactgacaatggccgaactggaagaccgcctggcaccggatttagggcttgatatcaacggctcg

SEQ ID NO: 760132 - DNA, 75 bp, synthetic construct
  source 1..75: mol_type = other DNA
tcgtctggagcaggctatgtgccagcgcagacgctggacgcagagcagttccgcctgtttctggtggatcatccg

SEQ ID NO: 760133 - DNA, 75 bp, synthetic construct
  source 1..75: mol_type = other DNA
ataatatcgaggttattgcccgtcgttgtgagcgctttgcgggtacggaaacggagcgtctggaagatatcaatt

SEQ ID NO: 760134 - DNA, 75 bp, synthetic construct
  source 1..75: mol_type = other DNA
aaactgaacctttctcattgatttatggtgaaacggggtatagcgatttgctgcctgttgaaggcgtaaaaatca

SEQ ID NO: 760135 - DNA, 75 bp, synthetic construct
  source 1..75: mol_type = other DNA
ggttaagtatgatggtaagcgatgatgttgccctggccatccaggaaaaatatggtttcccaccgctatataatg

SEQ ID NO: 760136 - DNA, 75 bp, synthetic construct
  source 1..75: mol_type = other DNA
tattcaccctctttattggggccagtgaactagccttaccaatggcgcagcggttacagaaaaaaatggcttaca

SEQ ID NO: 760137 - DNA, 75 bp, synthetic construct
  source 1..75: mol_type = other DNA
gcgtgcgcatggagttcgtcaaagaagggctaacgttcaccggcgaggactcaccgatggccaatctgatgctgt

SEQ ID NO: 760138 - DNA, 75 bp, synthetic construct
  source 1..75: mol_type = other DNA
aatcgcgttattactgacgtggcgattaaaaaacggcctccggtggaagtacctgaggccatctcatcatcttaa

SEQ ID NO: 760139 - DNA, 75 bp, synthetic construct
  source 1..75: mol_type = other DNA
aaacgtggcgatgatctgctttagcgttgagataatcggcctgctattggttggcgtagccaccgtaccgtggat

SEQ ID NO: 760140 - DNA, 75 bp, synthetic construct
  source 1..75: mol_type = other DNA
ggaagtggcgcatttgcagaccagttgaataatgccaccgcgccttttgttcagacgcagtttgcctggaatccc

SEQ ID NO: 760141 - DNA, 75 bp, synthetic construct
  source 1..75: mol_type = other DNA
atgaaacactgttgtaaaaacgtggtgatcctcatgcccgaacccgttgccgaaccggcatttaacggattgcgc

SEQ ID NO: 760142 - DNA, 75 bp, synthetic construct
  source 1..75: mol_type = other DNA
aaacgtggcgatgctctgctttagcgttgagattatcggcctgctgctggtcggtgtggcgaccctgccgtggat

SEQ ID NO: 760143 - DNA, 75 bp, synthetic construct
  source 1..75: mol_type = other DNA
tgagcggtctggggtatctgacggcaggattaaccgccagtctgcccgtcatcagcctgttattactttgcctgg

SEQ ID NO: 760144 - DNA, 75 bp, synthetic construct
  source 1..75: mol_type = other DNA
gtaacgacaataatgttcatgataagacgttcagggatggctcgttccttaaaattggttggccctcggtcaaca

SEQ ID NO: 760145 - DNA, 75 bp, synthetic construct
  source 1..75: mol_type = other DNA
cctgtggccctgggcaaaaaaggaaaagatcgtgattgtgcccgccaggcgcttcgtctgctggtgaatttaaac

SEQ ID NO: 760146 - DNA, 75 bp, synthetic construct
  source 1..75: mol_type = other DNA
atacttcttgagtttacggaagaccattctgacaatcccacttatctcttcgaacgcatcagcgagactgaaaat

SEQ ID NO: 760147 - DNA, 75 bp, synthetic construct
  source 1..75: mol_type = other DNA
actggcgatatatcgtctgtgaggctgaatggaaaagctattcctaacgctcagtcgccggatatcaagacgctt

SEQ ID NO: 760148 - DNA, 75 bp, synthetic construct
  source 1..75: mol_type = other DNA
agatgaatcaccagatgtgtttttgactactttatgcgtgaaatgtctgacagccatgacgggctgttcctcaac

SEQ ID NO: 760149 - DNA, 75 bp, synthetic construct
  source 1..75: mol_type = other DNA
aaggagaacgttaacggtaatattcactttaactttggcagccagggtaaaggttcgatggtgctcgaaggctac

SEQ ID NO: 760150 - DNA, 75 bp, synthetic construct
  source 1..75: mol_type = other DNA
tcttctgttcctggatctatttatttgttctgggattatggaaaaaagcaattatagttctattacttggcattc

SEQ ID NO: 760151 - DNA, 75 bp, synthetic construct
  source 1..75: mol_type = other DNA
gaactatcctgtgagagcaatttactggattatcgattatattagcattcgagcttacccagaaaaagaaaatga

SEQ ID NO: 760152 - DNA, 75 bp, synthetic construct
  source 1..75: mol_type = other DNA
ttaaacatcctgattaccagatggtttttgaatggcggatggaacgcttacagcgcattcgccagaaccctgaaa

SEQ ID NO: 760153 - DNA, 75 bp, synthetic construct
  source 1..75: mol_type = other DNA
ataccacattccctgttgctgactattacccccatttgcctgtttttgttacaaaaacgccgggagcggggaaaa

SEQ ID NO: 760154 - DNA, 75 bp, synthetic construct
  source 1..75: mol_type = other DNA
tgacgatgcggaaatcgaagtttacatggcaggcggcggctgcacgctacctggccgctcgaaagtgttaatgcc

SEQ ID NO: 760155 - DNA, 75 bp, synthetic construct
  source 1..75: mol_type = other DNA
tgtcgctaactttaccgccatgatttctacccgaatgcctgatgacgtggtggataaactaaaacagctaaagga

SEQ ID NO: 760156 - DNA, 75 bp, synthetic construct
  source 1..75: mol_type = other DNA
atgacctctacaccgattactaccgctgatatcgctaaaggtaaaattgacgatgcgttatctgtacgggaaaaa

SEQ ID NO: 760157 - DNA, 75 bp, synthetic construct
  source 1..75: mol_type = other DNA
gtgccagtgccgcgaaaacgtcagaaacgaatgcggcagcgtcacaaaaatctgcagccacttctgcatccgccg

SEQ ID NO: 760158 - DNA, 75 bp, synthetic construct
  source 1..75: mol_type = other DNA
gtagcagcctatgttgctgttaacacgaacaaatggttttatgagaaagaggtaaaagggttaaatacctggagc

SEQ ID NO: 760159 - DNA, 75 bp, synthetic construct
  source 1..75: mol_type = other DNA
ggtacctgcgtcttgcctgaaccagaaaggctcagacacccgcagcgataataccatattcctgtctggttacga

SEQ ID NO: 760160 - DNA, 75 bp, synthetic construct
  source 1..75: mol_type = other DNA
ctgaccggaacgccaacaacgccaactgcgccgaaagggactaataatactcagatcgcaagcacggcttatgtg

SEQ ID NO: 760161 - DNA, 75 bp, synthetic construct
  source 1..75: mol_type = other DNA
atgaccggagaactgaaaattggcacggtgaatgcgctgcgaattttcaatgatgccttcggtcttattttccgt

SEQ ID NO: 760162 - DNA, 75 bp, synthetic construct
  source 1..75: mol_type = other DNA
gcaaccagtttgaagtggaagtcctgagctacggtcatctaccgctggcctactccgcccgctgctttaccgcgc

SEQ ID NO: 760163 - DNA, 75 bp, synthetic construct
  source 1..75: mol_type = other DNA
ccgcgactggctggtgaatctgcttaatcagtgcgatgagctgggcattcgcaaccagtttgaagtggaagtcct

SEQ ID NO: 760164 - DNA, 75 bp, synthetic construct
  source 1..75: mol_type = other DNA
atcgacgctctggacaaatggtttggtaacggactcggccattcagtagataaactgctggcagggggtaacgat

SEQ ID NO: 760165 - DNA, 75 bp, synthetic construct
  source 1..75: mol_type = other DNA
tgtggtactggccaaaagagacgctggaagaattttatcagcaggccgccgccagcagcgccgacgtgatttatc

SEQ ID NO: 760166 - DNA, 75 bp, synthetic construct
  source 1..75: mol_type = other DNA
ccttccgcgctaatgaaaatggcgctgcaccactgccgttgacggcaaacagcgactgtaacggctactggcggc

SEQ ID NO: 760167 - DNA, 75 bp, synthetic construct
  source 1..75: mol_type = other DNA
tgtggtactggccaaaagagacgcttgaagatttttatcagcaggccgccgccagcagcgcagacgtgatttatc

SEQ ID NO: 760168 - DNA, 75 bp, synthetic construct
  source 1..75: mol_type = other DNA
gttggcaggtatacaagatattcttattattacaacgccagaagatcagcaggggttcataagattacttgggga

SEQ ID NO: 760169 - DNA, 75 bp, synthetic construct
  source 1..75: mol_type = other DNA
gctggttaaaccatgatgaattacaggcaaaaggtgaatttttgaaaaaaaatcactatggacagtatttactaa

SEQ ID NO: 760170 - DNA, 75 bp, synthetic construct
  source 1..75: mol_type = other DNA
ccggaagagatagcatggcgaaatggctggttaaaccatgatgaattaaatgataaaggagagtttttgaaaaaa

SEQ ID NO: 760171 - DNA, 75 bp, synthetic construct
  source 1..75: mol_type = other DNA
tgagtttgaacgactggaaaaggccgcagaggacaaactcatccagactcttcccgaagaactccaggatgcagt

SEQ ID NO: 760172 - DNA, 75 bp, synthetic construct
  source 1..75: mol_type = other DNA
attcagcaagggaagtcggtggatctggcagtcatgcttgctcatgcttcgttgcatgatgcagccgaggttctc

SEQ ID NO: 760173 - DNA, 75 bp, synthetic construct
  source 1..75: mol_type = other DNA
agggtttgcgtggctggataccggcacacatgatagtctcattgaagcatctaattttgtcgaaaccgttcaacg

SEQ ID NO: 760174 - DNA, 75 bp, synthetic construct
  source 1..75: mol_type = other DNA
ctgggcgaactgaaacgctatgttgagaacggtgagtttctgattgaagccagcgatctcggcgtggtgaatatg

SEQ ID NO: 760175 - DNA, 75 bp, synthetic construct
  source 1..75: mol_type = other DNA
cgcaataaacgcatgacctggcggactttgttgacgctactgtcggtgcgtaacggcaaacgtctggctgatgga

SEQ ID NO: 760176 - DNA, 75 bp, synthetic construct
  source 1..75: mol_type = other DNA
ataaacagcaactggtcactcacgcctttttgtacgctaacgactacgtttgccagggcgaagtctattcccaac

SEQ ID NO: 760177 - DNA, 75 bp, synthetic construct
  source 1..75: mol_type = other DNA
gcgacgcagatcctgcatatcaatcacggcgaaatgcagatcacctcgtcaccgaaaaaattctccgggtacttc

SEQ ID NO: 760178 - DNA, 75 bp, synthetic construct
  source 1..75: mol_type = other DNA
ttcttttactggtacaacaatcaatggacagaatcaggagttaggtactactggtgatacagggactgcaatagt

SEQ ID NO: 760179 - DNA, 75 bp, synthetic construct
  source 1..75: mol_type = other DNA
gaaaaaggatctggatattaaactggttaattgtgttcttgacaccaaaaaaccgacagtaaaagtggccttttc

SEQ ID NO: 760180 - DNA, 75 bp, synthetic construct
  source 1..75: mol_type = other DNA
acctggcgcaccttgctgacgctgctgtcggtgcgtaacggcaaacgtctggctgatggtattcgggggcgctaa

SEQ ID NO: 760181 - DNA, 75 bp, synthetic construct
  source 1..75: mol_type = other DNA
aagaggtcctcgttttactttaagtgataaagatgattcgtttttcaataaagcaggcttagaaacagatatttt

SEQ ID NO: 760182 - DNA, 75 bp, synthetic construct
  source 1..75: mol_type = other DNA
agcctgccagcctgccgttgtacccgaaatcgccgttctcccgtcagttgttctataagcgcaacatcattggca

SEQ ID NO: 760183 - DNA, 75 bp, synthetic construct
  source 1..75: mol_type = other DNA
tattgatgatgacgatgagtggacatccaaccgcctttcgctgtttctcgaacataaacagcaattgatggatca

SEQ ID NO: 760184 - DNA, 75 bp, synthetic construct
  source 1..75: mol_type = other DNA
cgtttgatggtacaactaaaactaatgccactaaattaatggatggtaataacaccctacattaccaggcatggg

SEQ ID NO: 760185 - DNA, 75 bp, synthetic construct
  source 1..75: mol_type = other DNA
atcagttgattgtgcgcgtgctgaaagaaaccaacggcgtggttgccgggcctaaaggcgctgcgcaacgtctgg

SEQ ID NO: 760186 - DNA, 75 bp, synthetic construct
  source 1..75: mol_type = other DNA
cccgtcgtctggggcgcaatatcgacagcattcctgccgagacgctgcgcaccttgagcaacatggagtggccgg

SEQ ID NO: 760187 - DNA, 75 bp, synthetic construct
  source 1..75: mol_type = other DNA
gtggctgtctttccggtagacaagcccaccagcaactacattggcgcaggtcgccgtttcattatctctccactt

SEQ ID NO: 760188 - DNA, 75 bp, synthetic construct
  source 1..75: mol_type = other DNA
ccagagttagtatgcgacgtcattccctgggttaatgctaaggcggcaggcatcttatctgaatgtcgtcctcag

SEQ ID NO: 760189 - DNA, 75 bp, synthetic construct
  source 1..75: mol_type = other DNA
attcgctgtggtctggaaactaccattgaaatcacccttctcgctcttcaactaaaatataaatcagtaaaaggc

SEQ ID NO: 760190 - DNA, 75 bp, synthetic construct
  source 1..75: mol_type = other DNA
cccatcaccaaagccactcctgaagttaaaactccccctgtgagtcaaaataaacacccatggctggctgatgat

SEQ ID NO: 760191 - DNA, 75 bp, synthetic construct
  source 1..75: mol_type = other DNA
atgcaggatgagctattcacgctaccagcaggaaacatcggtattccgcatatgctggaaatcccccctgaatct

SEQ ID NO: 760192 - DNA, 75 bp, synthetic construct
  source 1..75: mol_type = other DNA
tatggaagcgtattgccaataacactaaagcgtatacccccaacaataattacaattcttatcctgaaaactggc

SEQ ID NO: 760193 - DNA, 75 bp, synthetic construct
  source 1..75: mol_type = other DNA
ctgcgcaaagacggtgagatatggaagcgtattgcagataacaccagggcatatgatcccgacaacaattaccga

SEQ ID NO: 760194 - DNA, 75 bp, synthetic construct
  source 1..75: mol_type = other DNA
tacagttcttatccggaaaactggcagctggcgtttgccgaattacagttgcgaatccaggataatctacagaca

SEQ ID NO: 760195 - DNA, 75 bp, synthetic construct
  source 1..75: mol_type = other DNA
agaaatcacataaattctgggcggttgagcagcaaggcaacgagttgcatatcagttggggcaaagttgggacca

SEQ ID NO: 760196 - DNA, 75 bp, synthetic construct
  source 1..75: mol_type = other DNA
aacatgccagcgacagaatcaatatggtcgccgaaaatcgcggactgacaatggccgaactggaagatcgcctgg

SEQ ID NO: 760197 - DNA, 75 bp, synthetic construct
  source 1..75: mol_type = other DNA
acggctttgccaggccggacgcattgtcgggctggaacgcagaggctggcaacgtctggaagaaagcggcagcgt

SEQ ID NO: 760198 - DNA, 75 bp, synthetic construct
  source 1..75: mol_type = other DNA
tatttgatttaccggtacttcccatccctgccgtcactgatatcacaccaggaattacagagttaatcagtcata

SEQ ID NO: 760199 - DNA, 75 bp, synthetic construct
  source 1..75: mol_type = other DNA
ggcagcctgagttcacagataaaacactctccaggaaccccggggcggttcataccgacctgccgccgatcaaaa

SEQ ID NO: 760200 - DNA, 75 bp, synthetic construct
  source 1..75: mol_type = other DNA
cgcaattcaaattctaatcctcggtataaatggcaagaaaaagcatctggaatacttaagcaaagcctgtcaaaa

SEQ ID NO: 760201 - DNA, 75 bp, synthetic construct
  source 1..75: mol_type = other DNA
cagaagcgcagaaaacgatgtccgggcatgggaaaaagcacatggcatacgcctttacgtagccgctaaccagct

SEQ ID NO: 760202 - DNA, 75 bp, synthetic construct
  source 1..75: mol_type = other DNA
gttgaactcactttttgggccattcgccggaatctgaaagatgagctgccagatgaagccggtcgcattgcattt

SEQ ID NO: 760203 - DNA, 75 bp, synthetic construct
  source 1..75: mol_type = other DNA
gtggctgtctttccggtagacaagcccaccagtaactacattggcgcaggtcgccgtttcattatctccccactt

SEQ ID NO: 760204 - DNA, 75 bp, synthetic construct
  source 1..75: mol_type = other DNA
tcctatatatgcgccgtccaaaaaccttactcggaaaaagcccggcttatctccggtttgtggtgtctcgcccgt

SEQ ID NO: 760205 - DNA, 75 bp, synthetic construct
  source 1..75: mol_type = other DNA
ttaccaaccagtcactggcacccttttttcaaagtgagcgcgtatttaacgcgttaggtggtgaggattctctcg

SEQ ID NO: 760206 - DNA, 75 bp, synthetic construct
  source 1..75: mol_type = other DNA
atgagtgcaataatcacacctcatttcgtaaacggagctggtgtggctgtctttccggtagacaagcccaccagt

SEQ ID NO: 760207 - DNA, 75 bp, synthetic construct
  source 1..75: mol_type = other DNA
caatgccatgtgcgacctgcgtacaaccatgaatgagatggagcagcggtacagctttaatgctgacaccctgcc

SEQ ID NO: 760208 - DNA, 75 bp, synthetic construct
  source 1..75: mol_type = other DNA
gtaatagttggtcgggcattactggaaggtaaattcaccgtgaaggaggctatcgcatgctggcaaaacgcataa

SEQ ID NO: 760209 - DNA, 75 bp, synthetic construct
  source 1..75: mol_type = other DNA
gtttcactggaacaactggtggaaacctatctgcccgtcggcctgaaacatgtgctgtgtaccgatatctcgcgc

SEQ ID NO: 760210 - DNA, 75 bp, synthetic construct
  source 1..75: mol_type = other DNA
gcagattatgcgccgttgaataaagtcgacagcgcccgtcgctgtggcctctattttggtcgtctggaaaaacag

SEQ ID NO: 760211 - DNA, 75 bp, synthetic construct
  source 1..75: mol_type = other DNA
gaaggcgaagttaacctcggcatgatctggaacggttctgctttcgttgcacgccaggcgggtacgccaattgac

SEQ ID NO: 760212 - DNA, 75 bp, synthetic construct
  source 1..75: mol_type = other DNA
ctgtatcgcgccaatcgcctgttcatggaggcgtataccgaaattctggaactggatgcgtgctttaaagattga

SEQ ID NO: 760213 - DNA, 75 bp, synthetic construct
  source 1..75: mol_type = other DNA
ctacctgcagtattgtttgccgctttcgctaccacttccgcctgggcggcagaaagcgtccagccactggaaaaa

SEQ ID NO: 760214 - DNA, 75 bp, synthetic construct
  source 1..75: mol_type = other DNA
gaagatgaatctaccctgaaagtagaactgttaatcggtcagacgctggaagtcgactgcaatttgcatcgtctc

SEQ ID NO: 760215 - DNA, 75 bp, synthetic construct
  source 1..75: mol_type = other DNA
ctgttgcagccctggcggtaagtcaaagcaatgtgggtattaccgatcgtccgcagttggccgcaatgatggcgc

SEQ ID NO: 760216 - DNA, 75 bp, synthetic construct
  source 1..75: mol_type = other DNA
tgtagatgtgaagtaccgcgtctggaaggcggaagagaaaattgacaacgcggtagttcgctacaccgctgtgaa

SEQ ID NO: 760217 - DNA, 75 bp, synthetic construct
  source 1..75: mol_type = other DNA
cgcaagctgaaaaaggcatgaagcgtcaggtgattcagttaaccccgcaagaagatgaatctaccctgaaagtag

SEQ ID NO: 760218 - DNA, 75 bp, synthetic construct
  source 1..75: mol_type = other DNA
gaaagcaaaacgctggaaggctggggctatgattattatgtctttgataaagttagctcgccggtttccacgatg

SEQ ID NO: 760219 - DNA, 75 bp, synthetic construct
  source 1..75: mol_type = other DNA
cgacgttgcacataacgccagcgttctctattcctacatttcatcaattcatcaggtctggctgcagcagcttta

SEQ ID NO: 760220 - DNA, 75 bp, synthetic construct
  source 1..75: mol_type = other DNA
tccagacgcttgagtgctctgttgaattcactgagctgaattttcagcccagtgattacaccgattgcacaggcc

SEQ ID NO: 760221 - DNA, 75 bp, synthetic construct
  source 1..75: mol_type = other DNA
cactatggcaaccacccctacccaaactcaccctaaaattgatgttatccatgggaaggctgttacctcttcttt

SEQ ID NO: 760222 - DNA, 75 bp, synthetic construct
  source 1..75: mol_type = other DNA
gaaatgaaagatgtgattgaagctgcgcatgcgctgcgtgaacaaggtattgcgcatgtcgttatttcactgggt

SEQ ID NO: 760223 - DNA, 75 bp, synthetic construct
  source 1..75: mol_type = other DNA
tagtagccgtgaagcgttagtggcaggtttgaaagcagcgccgtggctggtgaaacctaaccgtcgcgagctgga

SEQ ID NO: 760224 - DNA, 75 bp, synthetic construct
  source 1..75: mol_type = other DNA
tgtgttattgatggcaaagtcgttacttcttcgctggctgttgccgattatttccataaaccccacaaagacgta

SEQ ID NO: 760225 - DNA, 75 bp, synthetic construct
  source 1..75: mol_type = other DNA
atgaagaccattctacctgcagtattgtttgccgctttcgctaccactcccgcctgggcggcagaaagcgcccag

SEQ ID NO: 760226 - DNA, 75 bp, synthetic construct
  source 1..75: mol_type = other DNA
ttgaacaacgcgaacgatacagccgtaccgcgattaacaacatcaaaaaattctggtcgctgacggcgaaaggct

SEQ ID NO: 760227 - DNA, 75 bp, synthetic construct
  source 1..75: mol_type = other DNA
atctgtgcttggggcctgtcagaaactccaggaggctgttggcttaccgaatctggcaccgcgctatgccattga

SEQ ID NO: 760228 - DNA, 75 bp, synthetic construct
  source 1..75: mol_type = other DNA
cgatcggactggcctgctcgctttgtctcttcaacaaagaaatggttatcggtttcggctcccgtaaagaggaat

SEQ ID NO: 760229 - DNA, 75 bp, synthetic construct
  source 1..75: mol_type = other DNA
aaaaattatccggacaggctgctgacaagatgcaggctggtgtgattctgctggactttatgcgccgggaattaa

SEQ ID NO: 760230 - DNA, 75 bp, synthetic construct
  source 1..75: mol_type = other DNA
ccagcgcacctgaaaaattatccggacaggctgctgacaagatgcaggctggcgtgattctgctggactttatgc

SEQ ID NO: 760231 - DNA, 75 bp, synthetic construct
  source 1..75: mol_type = other DNA
ggagccgggaaagtttctttccagccaacaaactgttgagcttgttcatgaattgaccaacacccagaatttggg

SEQ ID NO: 760232 - DNA, 75 bp, synthetic construct
  source 1..75: mol_type = other DNA
aaattggcgtttccggtggtgaaggtaattcactgttatcggaggctgccatcatggctactgtcccagccctca

SEQ ID NO: 760233 - DNA, 75 bp, synthetic construct
  source 1..75: mol_type = other DNA
agcgtcttttttatcgtctgcgtctgcgcacacccaaattatggtgggctggacgggggcactgaaaggtgcgcc

SEQ ID NO: 760234 - DNA, 75 bp, synthetic construct
  source 1..75: mol_type = other DNA
gcttcactggtaaacgtgctgcccggttcaaagaggcatacatcaacgcctttaacctgatggagaagagtttat

SEQ ID NO: 760235 - DNA, 75 bp, synthetic construct
  source 1..75: mol_type = other DNA
ccgcgcgagacacagccgcatttcttcgaatcccgattccctgagctgttaaagctgctcgataccgttcattga

SEQ ID NO: 760236 - DNA, 75 bp, synthetic construct
  source 1..75: mol_type = other DNA
caggctgcggttgatgcacatatcagactgggcattcagcccggcggccaacggcttggtgcaatggatgtcgcc

SEQ ID NO: 760237 - DNA, 75 bp, synthetic construct
  source 1..75: mol_type = other DNA
tcaacgaactctccagaaaggaatccgcgcaggcgctctacaccttcattgaaagtttgccaccagacccggcgc

SEQ ID NO: 760238 - DNA, 75 bp, synthetic construct
  source 1..75: mol_type = other DNA
cgttctctgttcctacatttcatcaattcatcaggtctggctgcagcagctttatcctatgttggcaaaagccga

SEQ ID NO: 760239 - DNA, 75 bp, synthetic construct
  source 1..75: mol_type = other DNA
gatgagggtaaaaacgccgggtcatcgtacgcaaattggttcactctccggcggtaatcagcaaaaagtcattat

SEQ ID NO: 760240 - DNA, 75 bp, synthetic construct
  source 1..75: mol_type = other DNA
agtgcgtaacctgacgtcgctgcgccagccttccatccgcgatgtttcgtttgatctgcacaaaggggagatcct

SEQ ID NO: 760241 - DNA, 75 bp, synthetic construct
  source 1..75: mol_type = other DNA
ttgatgaactggatattgatatcgatccgcgtgcgcgcgtcggcacattatccgtttcgcaaatgcagatgatcg

SEQ ID NO: 760242 - DNA, 75 bp, synthetic construct
  source 1..75: mol_type = other DNA
gcgatacccagtgggtcattgattcgatgcgggtaaaaacgccaggtcatcggacgcaaattggttcgctctccg

SEQ ID NO: 760243 - DNA, 75 bp, synthetic construct
  source 1..75: mol_type = other DNA
agagttgttagggataacagaccgtattctggtcatgagcaatggtctcgtttccggaattgtcgatacaaaaac

SEQ ID NO: 760244 - DNA, 75 bp, synthetic construct
  source 1..75: mol_type = other DNA
ttgatctgcataaaggggagatcctcggtattgccggtctggtgggggcgaaacgtactgatattgttgagacgt

SEQ ID NO: 760245 - DNA, 75 bp, synthetic construct
  source 1..75: mol_type = other DNA
gccattaagggatattttcccggcgacctcgttccgtatggtgcttatttcgccttaaaaaatgcacaaggtgta

SEQ ID NO: 760246 - DNA, 75 bp, synthetic construct
  source 1..75: mol_type = other DNA
gatggcaagaaagttgctcgacgcgggtggtgtcaacgacggatgaaaagtgatccacttatatctccaccaacg

SEQ ID NO: 760247 - DNA, 75 bp, synthetic construct
  source 1..75: mol_type = other DNA
agccagggacgtaactatttctgctggcggtatcgctactctacaagaagaaatcgaccttgaagcagccgactt

SEQ ID NO: 760248 - DNA, 75 bp, synthetic construct
  source 1..75: mol_type = other DNA
agagttgttagggataacagaccgtattctggttatgagcaatggcctcgtttccggaattgtcgatacaaaaac

SEQ ID NO: 760249 - DNA, 75 bp, synthetic construct
  source 1..75: mol_type = other DNA
cagtggatcgctaccgagccgctggcggggctgacgatggacaagatcatcgccatgatggttggccgttctctt

SEQ ID NO: 760250 - DNA, 75 bp, synthetic construct
  source 1..75: mol_type = other DNA
aggctaccgcgtacaaccgcgtagatgcggtttttttgtacgcattattttgtcacgcccaaattatggtggggc

SEQ ID NO: 760251 - DNA, 75 bp, synthetic construct
  source 1..75: mol_type = other DNA
ggtgcgtaacctgacgtcactgcgccagccgtcgattcgcgatgtctcgtttgatctgcataaaggggagatcct

SEQ ID NO: 760252 - DNA, 75 bp, synthetic construct
  source 1..75: mol_type = other DNA
tgtttcgtcgtgattttgttgagtgcgaagcgccaccaacatagcgactctatatttaacctcgttgacaaaatt

SEQ ID NO: 760253 - DNA, 75 bp, synthetic construct
  source 1..75: mol_type = other DNA
tggacaagccagctttatccaatgcttaaggctgttgaatctccgctggccagcaaactgtacgaccgtgtaggt

SEQ ID NO: 760254 - DNA, 75 bp, synthetic construct
  source 1..75: mol_type = other DNA
ccgcaaactcccttgttaccaaatcacccgcgacggttttgcgtttcttgccatgggcttcactggtaaacgtgc

SEQ ID NO: 760255 - DNA, 75 bp, synthetic construct
  source 1..75: mol_type = other DNA
ctgatgatgcttcagcttgggttaagtctgcgcacaatgcggtactacgagagctgtattgaagcattccataag

SEQ ID NO: 760256 - DNA, 75 bp, synthetic construct
  source 1..75: mol_type = other DNA
gccaggccgttaccacttctttggctgttgccaacttcttctccaagcgtcatgacgatgtgctgaaaaagatcc

SEQ ID NO: 760257 - DNA, 75 bp, synthetic construct
  source 1..75: mol_type = other DNA
tactcgcaaacttccctgctaccaaatcacccgcgacggcttcgccttccttgctatgggcttcactggtaaacg

SEQ ID NO: 760258 - DNA, 75 bp, synthetic construct
  source 1..75: mol_type = other DNA
tccggacgacgaagcggtgcgcggcgacaacggacaggccgcccgcctgaacaaggacttctttgctaacgccaa

SEQ ID NO: 760259 - DNA, 75 bp, synthetic construct
  source 1..75: mol_type = other DNA
ctttgacgaggacgggctgggcgctggcgttcgcggcgatgcacgcgctatcaacgaactgcgtaacgctgcgcg

SEQ ID NO: 760260 - DNA, 75 bp, synthetic construct
  source 1..75: mol_type = other DNA
gatgaaggcagggacaaaaatgccttttccacccgtcatggcttcctcctggaaaatgtgcgggaatggtccggt

SEQ ID NO: 760261 - DNA, 75 bp, synthetic construct
  source 1..75: mol_type = other DNA
tggcgaacccgttcgcgcagaagcgccacggcggaaaaataccagtattcacgttccactggcgagatgacccgc

SEQ ID NO: 760262 - DNA, 75 bp, synthetic construct
  source 1..75: mol_type = other DNA
acaggacaacctcgaagagtttcgcttcgacgaggacggcctgggtgctggcgttcgcggcgatgcgcgcgccat

SEQ ID NO: 760263 - DNA, 75 bp, synthetic construct
  source 1..75: mol_type = other DNA
gagctgaattttcagcccagtgattacaccgattgcacaggccgcaaactaccttgctatcaaatcacccgcgat

SEQ ID NO: 760264 - DNA, 75 bp, synthetic construct
  source 1..75: mol_type = other DNA
aggggctgtacaatttattaaataaaagagtacagcccgaatatttaaaccataattctttggaagttagggtat

SEQ ID NO: 760265 - DNA, 75 bp, synthetic construct
  source 1..75: mol_type = other DNA
ggttgataaggctcacatagtcggtatgtcgatgggtggaattattacgcagatagtagctcttaaacatcccga

SEQ ID NO: 760266 - DNA, 75 bp, synthetic construct
  source 1..75: mol_type = other DNA
aagagaaattcttttccttcagtgaatcaaaacaaatatctgaatgcgatgtggcgcaaaggaggcaaccagtga

SEQ ID NO: 760267 - DNA, 75 bp, synthetic construct
  source 1..75: mol_type = other DNA
acggagcgtctggaagatctcaattctcttgccagactgactacccccaacaccatcgtgctgtctgtacgcggc

SEQ ID NO: 760268 - DNA, 75 bp, synthetic construct
  source 1..75: mol_type = other DNA
gcttgggtattggcttgatggcaggctttttaggcctgaagtttggcggcaacggcgcgctgctggcgtttggta

SEQ ID NO: 760269 - DNA, 75 bp, synthetic construct
  source 1..75: mol_type = other DNA
tgggcttactacagggagtatattgcgtgggtagtattccccaaaaaggttatgaccaaaaatggatatccctta

SEQ ID NO: 760270 - DNA, 75 bp, synthetic construct
  source 1..75: mol_type = other DNA
cagggtaacccgccggcattaattatttccgatcatctgatgccgggcaaaaatggcgtgcaattgctgacagaa

SEQ ID NO: 760271 - DNA, 75 bp, synthetic construct
  source 1..75: mol_type = other DNA
gtacggcaactttaagctatgtggcctgcaatggatttacctggactcatggtctttactggtctgagtattttg

SEQ ID NO: 760272 - DNA, 75 bp, synthetic construct
  source 1..75: mol_type = other DNA
atgacgaggacatcattcgcacaatgccattcccgataggcagttactacctggctaactcacctcgtggcagtg

SEQ ID NO: 760273 - DNA, 75 bp, synthetic construct
  source 1..75: mol_type = other DNA
cgtctgaacgacgaatgtcttaatcctctcattgaccgcgctttctcgatgatggtgcgtaaaaacatgctgccg

SEQ ID NO: 760274 - DNA, 75 bp, synthetic construct
  source 1..75: mol_type = other DNA
aatgatggattatggccctgttaagttgtggcttgaggcggtgcagaaccgcatgaacgatatgttcaataagtc

SEQ ID NO: 760275 - DNA, 75 bp, synthetic construct
  source 1..75: mol_type = other DNA
atgagaggacttacatacaatcccggcattcttccggcagaaatgattattcgtcaacgcgtaaagccaatgcca

SEQ ID NO: 760276 - DNA, 75 bp, synthetic construct
  source 1..75: mol_type = other DNA
gcaatcaggttcgtgaagaaattgaatctctggtaatggaaaggaggcaggagggagcaacagaaaatgatgcca

SEQ ID NO: 760277 - DNA, 75 bp, synthetic construct
  source 1..75: mol_type = other DNA
acgattgaaaagattaagcctgctatggagaagtttgttaatgagcaggtcggtattttttttcataacgatgac

SEQ ID NO: 760278 - DNA, 75 bp, synthetic construct
  source 1..75: mol_type = other DNA
ggagtctgttgtcagcggtcatttcacgattgaaaagattaagcctgctatggagaagtttgttaatgagcaggt

SEQ ID NO: 760279 - DNA, 75 bp, synthetic construct
  source 1..75: mol_type = other DNA
tggccttgaatgaagcgcatctggtacagacgaaactgattgaaggcgacgcgggtgaaggcaagatgaaagtga

SEQ ID NO: 760280 - DNA, 75 bp, synthetic construct
  source 1..75: mol_type = other DNA
tcatttaatgacttcaatgctcgcgcgtgaactgattagtgaattaattgagcttcatgaaaaactgaaagcata

SEQ ID NO: 760281 - DNA, 75 bp, synthetic construct
  source 1..75: mol_type = other DNA
gataatgaagtaatgaaaagatctataaccaaattcgcagaagaccaggtaagggttttctttccagaagaagaa

SEQ ID NO: 760282 - DNA, 75 bp, synthetic construct
  source 1..75: mol_type = other DNA
cgatgtcgatgccctgctggcggcgatcaatgaaattagcgaaagcgaagttcatcgcagccagagcgattctga

SEQ ID NO: 760283 - DNA, 75 bp, synthetic construct
  source 1..75: mol_type = other DNA
tgaataccatacatggcgtgaattagccgatgcctttgaactggatgttcatgactttagcgtctctgaagtaaa

SEQ ID NO: 760284 - DNA, 75 bp, synthetic construct
  source 1..75: mol_type = other DNA
tgcgcgacgacgttgcggagatagctaacgaactgtatgagttgtggcagaaggttgaacgtttcgaaaaggaat

SEQ ID NO: 760285 - DNA, 75 bp, synthetic construct
  source 1..75: mol_type = other DNA
tctggcgcagggatccgcgttaacggcgtcgctccgggctggattgatacgccaatgctgcgcaaagccattgag

SEQ ID NO: 760286 - DNA, 75 bp, synthetic construct
  source 1..75: mol_type = other DNA
gaacgccgtaacaaaatcctgggtcgtaccccgatgaaaaaattcggcaagccggaggatatcggttgggctgcg

SEQ ID NO: 760287 - DNA, 75 bp, synthetic construct
  source 1..75: mol_type = other DNA
gggattcgcgtcaacggtattgcgccaggctggatcgatacgccgatgctgcgtaaagccattgaaggtgatgat

SEQ ID NO: 760288 - DNA, 75 bp, synthetic construct
  source 1..75: mol_type = other DNA
tatggacattctttgccagttcagccagagcgcataatcaacacacaactcagactaaaaactcaacgaatgacg

SEQ ID NO: 760289 - DNA, 75 bp, synthetic construct
  source 1..75: mol_type = other DNA
ctggctgataacagcacccgcaacgagtattgggatgcccggttcacattccattcagaccctgacaaggacatg

SEQ ID NO: 760290 - DNA, 75 bp, synthetic construct
  source 1..75: mol_type = other DNA
caccagacaaggtttataataacgcggctcacaccgtgaaaattgaaattatttctgagcagataacgaatgcaa

SEQ ID NO: 760291 - DNA, 75 bp, synthetic construct
  source 1..75: mol_type = other DNA
atgaatacaactccctcacagcgattaggttttttgcatcacatcaggctggttccgttatttgcctgcattctt

SEQ ID NO: 760292 - DNA, 75 bp, synthetic construct
  source 1..75: mol_type = other DNA
accgcagtgggtgtttgcgcttgccgcgctgactatcgttggcaccatgaacatgatcggcgtgaaatggttcgc

SEQ ID NO: 760293 - DNA, 75 bp, synthetic construct
  source 1..75: mol_type = other DNA
cctccatcgaaatggtcggaactgccgccggagaatgtaaagatccgcagactatggtgccaaaagcaattaaca

SEQ ID NO: 760294 - DNA, 75 bp, synthetic construct
  source 1..75: mol_type = other DNA
tgtgtatgtcgtcggcgtattcctcaactatctggtgccgtcgcgcgtatttgagattgtgttgaacttcgcgtc

SEQ ID NO: 760295 - DNA, 75 bp, synthetic construct
  source 1..75: mol_type = other DNA
cctgctgacacgccagaacctgtggggacacctggactggaacagccgcacgctggtcatcaccccgaccgcagc

SEQ ID NO: 760296 - DNA, 75 bp, synthetic construct
  source 1..75: mol_type = other DNA
gcaggctgctgacaagatgcaggctggtgtgattctgctggactttatgcgtcgggaattaaacctgtctaactc

SEQ ID NO: 760297 - DNA, 75 bp, synthetic construct
  source 1..75: mol_type = other DNA
gttgtcacaaacgacgcgttgccgtatcgacctgagttcagttaacggcatggctaacccgttcgctcagaagcg

SEQ ID NO: 760298 - DNA, 75 bp, synthetic construct
  source 1..75: mol_type = other DNA
ccgggctggacagcagaaaaaggtgccacactgcgccagacactcacccgctgggcagcacaggtgccctgcacc

SEQ ID NO: 760299 - DNA, 75 bp, synthetic construct
  source 1..75: mol_type = other DNA
ggacacctggactggaacagccgcacgctggtcatcaccccgaccgcagccgcaccactcagtaccggcgggccg

SEQ ID NO: 760300 - DNA, 75 bp, synthetic construct
  source 1..75: mol_type = other DNA
atgccgccacaccggcactccggacgcgtatcgcctcctggtctgccaatgaccagtggacgcgttcactgaaca

SEQ ID NO: 760301 - DNA, 75 bp, synthetic construct
  source 1..75: mol_type = other DNA
ggcgcgggagcccgactgcaaatggcggggccagcactggcactggtctatttgatctgcggcctgttttcattt

SEQ ID NO: 760302 - DNA, 75 bp, synthetic construct
  source 1..75: mol_type = other DNA
agtagcgcgtgttttcaggcatcacggcgtgcttacgttaatggtcagagagtacgaaaatgcgcttcttcatca

SEQ ID NO: 760303 - DNA, 75 bp, synthetic construct
  source 1..75: mol_type = other DNA
atgatctggcagcctgagttcacagataaaacactctccaggaaacccggggcggttcaccaggaacgtccgtac

SEQ ID NO: 760304 - DNA, 75 bp, synthetic construct
  source 1..75: mol_type = other DNA
aaccgggcgctgtgagatcgcaagggataaaacacgagcctggctgcggaagtacgtaacaaacggggctgagcc

SEQ ID NO: 760305 - DNA, 75 bp, synthetic construct
  source 1..75: mol_type = other DNA
tatgggcattctttgccagttcagccagagcgcataatcaacacgcagaacaaattaaaaactcaacaactgacg

SEQ ID NO: 760306 - DNA, 75 bp, synthetic construct
  source 1..75: mol_type = other DNA
gtttcaatttaattttgccgttcgacgcacacgcgttcaggtcaatcgcatgatgcaggcgcaggaagagctgac

SEQ ID NO: 760307 - DNA, 75 bp, synthetic construct
  source 1..75: mol_type = other DNA
gaaattcacgaagccccctgcaggctcccggcattctgcaaaaatacaaacgtacaaaatcataaggctgttcta

SEQ ID NO: 760308 - DNA, 75 bp, synthetic construct
  source 1..75: mol_type = other DNA
agatgaccaggacgtgatccgcacaatgcctttccctattggcagttactacctggctaacagtccgcgcggtag

SEQ ID NO: 760309 - DNA, 75 bp, synthetic construct
  source 1..75: mol_type = other DNA
attactggggggcgtttggcggcgtgccgcagtgggtctttgcgctcgctgcgctgaccatcgttggcaccatga

SEQ ID NO: 760310 - DNA, 75 bp, synthetic construct
  source 1..75: mol_type = other DNA
cggggccagcactggcactggtctatttgatctgcggcctgttttcattttttattctgcgtgcattgggtgagc

SEQ ID NO: 760311 - DNA, 75 bp, synthetic construct
  source 1..75: mol_type = other DNA
ccatcactccagttattgatatggtgcgccagttgtccggcatttacaccctctggtttgtaaccgggcgctgtg

SEQ ID NO: 760312 - DNA, 75 bp, synthetic construct
  source 1..75: mol_type = other DNA
aagaaaattggtctgagtaaaattgcgttcgcgctggaagataagattgaagtgcgcgtgttttcaggagacacg

SEQ ID NO: 760313 - DNA, 75 bp, synthetic construct
  source 1..75: mol_type = other DNA
atgtctgcatttaccccggcaagtgaagtcttgctgcgccacagtgatgatttcgaacaaagccgtattctgttt

SEQ ID NO: 760314 - DNA, 75 bp, synthetic construct
  source 1..75: mol_type = other DNA
ttgcagagcaacatgtacgaagtatgtttacaggtaccagccagatttgtaccaggactgcggaggtgcactcac

SEQ ID NO: 760315 - DNA, 75 bp, synthetic construct
  source 1..75: mol_type = other DNA
gtgaggcctgtggtacggggatttattgcagagcaacatgtacgaagtatgtttacaggtaccagccagatttgt

SEQ ID NO: 760316 - DNA, 75 bp, synthetic construct
  source 1..75: mol_type = other DNA
gagcacgatttacatgccctgaccgcgcaacagaagacggactgcgtggtgctgaatccggaaaaatcccatcct

SEQ ID NO: 760317 - DNA, 75 bp, synthetic construct
  source 1..75: mol_type = other DNA
actgacgattccgctaacgctggggatggtggcagcggcgctgaccgatctcgatgaccgactggcgggacgttt

SEQ ID NO: 760318 - DNA, 75 bp, synthetic construct
  source 1..75: mol_type = other DNA
aaactaaaggcttcgcgcaaagatcgttatgagcactatatatacgtaaaggatattgaaggtaccaagacaaat

SEQ ID NO: 760319 - DNA, 75 bp, synthetic construct
  source 1..75: mol_type = other DNA
atatcatcaggtgaattaagtttcgacaaagtctgtaaaaacataaaaagggacgacctcttaatagatatttac

SEQ ID NO: 760320 - DNA, 75 bp, synthetic construct
  source 1..75: mol_type = other DNA
cggcaggccgcgttcgttcaagaggggtagaagtcgaccttgcgggagcattaactgaaaacattaatatcattg

SEQ ID NO: 760321 - DNA, 75 bp, synthetic construct
  source 1..75: mol_type = other DNA
gggaaaccattgccgaatgttcctcgtcataccggttcgctattcctgacctatgacattcataacatgcctggc

SEQ ID NO: 760322 - DNA, 75 bp, synthetic construct
  source 1..75: mol_type = other DNA
ggacagtgatcagacgatcaaacaggagagctactcagcgtatgcacaggacgcactctatctgaccgataactg

SEQ ID NO: 760323 - DNA, 75 bp, synthetic construct
  source 1..75: mol_type = other DNA
aggcctgtggtacggggatttattgtgtcacgaacggtgcaatagtgatccacacccaacgcctgaaatcagatc

SEQ ID NO: 760324 - DNA, 75 bp, synthetic construct
  source 1..75: mol_type = other DNA
gagcacgatttacatgccctgagcgcgcaacagaaggcagcctgtgtggtactgaatccggaaaagtccccccct

SEQ ID NO: 760325 - DNA, 75 bp, synthetic construct
  source 1..75: mol_type = other DNA
aggcctgtggtacggggatttattgcagagcggtatgtacgaagtctgtttacaggtaccagccagatttgtacc

SEQ ID NO: 760326 - DNA, 75 bp, synthetic construct
  source 1..75: mol_type = other DNA
atcgcactttgcggcacaactgcgtttccgtggtggctgggtgatgtaaaacttacgattccgctgactctcggg

SEQ ID NO: 760327 - DNA, 75 bp, synthetic construct
  source 1..75: mol_type = other DNA
gaaaaacgaccgtactggaaccggaacgctttccatttttggtcatcagatgcgttttaacctgcaggatggatt

SEQ ID NO: 760328 - DNA, 75 bp, synthetic construct
  source 1..75: mol_type = other DNA
tcctatacgcggactgataagccaggcgaaacaatgaattatcatcagtactatcctgtcgacatcgtcaacggc

SEQ ID NO: 760329 - DNA, 75 bp, synthetic construct
  source 1..75: mol_type = other DNA
atggaagaccagatcattaacgatctgaatgacacccgcatcaaacgccagggtatttccctctccggcggcgat

SEQ ID NO: 760330 - DNA, 75 bp, synthetic construct
  source 1..75: mol_type = other DNA
aaaacgtccccgctcgccggagctatcatggagcttgactcggtcagttatctgaaatcatcccgtcatactcat

SEQ ID NO: 760331 - DNA, 75 bp, synthetic construct
  source 1..75: mol_type = other DNA
caatattgcttatctgaatgaaaacaatgtcactatctgggacgaatgggccgatgaaaatggcgatcttggccc

SEQ ID NO: 760332 - DNA, 75 bp, synthetic construct
  source 1..75: mol_type = other DNA
cagttctatgtggcagacggcaaactctcttgccagctttatcagcgctcctgtgacgtcttcctcggcctgccg

SEQ ID NO: 760333 - DNA, 75 bp, synthetic construct
  source 1..75: mol_type = other DNA
gaccgaaccacgccatgtcgataccatcttgctggaaaacgggacactgaatctcaccaacaagacggcgccgct

SEQ ID NO: 760334 - DNA, 75 bp, synthetic construct
  source 1..75: mol_type = other DNA
cagttcaccagccgctgggaaggcggaatggtccgaacgtcagggaactggcaacgcgacgggaaaacactgatc

SEQ ID NO: 760335 - DNA, 75 bp, synthetic construct
  source 1..75: mol_type = other DNA
gtccagcgaaccgaatgtcacaccgcaaattcgcgaggacgcgttccggttactctgccttaaccatacgtttac

SEQ ID NO: 760336 - DNA, 75 bp, synthetic construct
  source 1..75: mol_type = other DNA
tatccgatatcagtcgtttcggtgaagatgtgaagctgaaaattctgtataaaacgtcccctcttgccggagcca

SEQ ID NO: 760337 - DNA, 75 bp, synthetic construct
  source 1..75: mol_type = other DNA
tgctgaaaaacaacaagtgacccaaaccatgaatgctggcgtggtttccagtggtgaagttacatcgacggagcc

SEQ ID NO: 760338 - DNA, 75 bp, synthetic construct
  source 1..75: mol_type = other DNA
ttagcgggcaattgcatgccgtgaatgccgcaaagcagcaagtgactcaaaccatgaatgcgggcgtcgtttcca

SEQ ID NO: 760339 - DNA, 75 bp, synthetic construct
  source 1..75: mol_type = other DNA
ttttttcatgggaagaagttctgtgaggcctgtggcacggggatctattccagagcaacatgtacgaagtctgtt

SEQ ID NO: 760340 - DNA, 75 bp, synthetic construct
  source 1..75: mol_type = other DNA
ttgggtatcgccatctatctatgaacggacgctctgtcgcgcgcgtaaaatacttgctgcggcgcattgattttg

SEQ ID NO: 760341 - DNA, 75 bp, synthetic construct
  source 1..75: mol_type = other DNA
ggtgctgccaactcccacgccgcaatcatggtgcgtgcactggggatccccaccgtgatgggcgcggacattcag

SEQ ID NO: 760342 - DNA, 75 bp, synthetic construct
  source 1..75: mol_type = other DNA
ttatggtacgcgcactggggattcccactgtgatgggagcggacattcagccttcggtgttgcactgccggacgt

SEQ ID NO: 760343 - DNA, 75 bp, synthetic construct
  source 1..75: mol_type = other DNA
ttcgtcgtaaccgcgagctttctgcacaaggctttaacttcatcggtacgggtgtttccggtggtgaagagggcg

SEQ ID NO: 760344 - DNA, 75 bp, synthetic construct
  source 1..75: mol_type = other DNA
gactggcgctgctggacgatacgctgacccactggcacaccaacgcacggttgctgcaacaaatgatgagctggt

SEQ ID NO: 760345 - DNA, 75 bp, synthetic construct
  source 1..75: mol_type = other DNA
gtggcaaatcgcgatggttcttcaggcgacgcaggcgcaaaaactggggctgcgggcagaatatggtatcgatta

SEQ ID NO: 760346 - DNA, 75 bp, synthetic construct
  source 1..75: mol_type = other DNA
attctggccgttgatcgcaacaataccgggtggcgaacatttatgacagtcttcatcctgcaatgttacgagctc

SEQ ID NO: 760347 - DNA, 75 bp, synthetic construct
  source 1..75: mol_type = other DNA
acaaaggaactggtaaatggaccagtcaaagcgcccttgatctcggtgaacccttatcgcttataactgaatcgg

SEQ ID NO: 760348 - DNA, 75 bp, synthetic construct
  source 1..75: mol_type = other DNA
gatggcgcaggtcactatgtgaagatggttcacaacggtattgaatacggtgatatgcaactgattgctgaagcc

SEQ ID NO: 760349 - DNA, 75 bp, synthetic construct
  source 1..75: mol_type = other DNA
ttgatgatgccaaccagggggcgaacgcctggccggaacgtttcattctggtggcagatgaactgtcagcgacaa

SEQ ID NO: 760350 - DNA, 75 bp, synthetic construct
  source 1..75: mol_type = other DNA
tttaagcccggaacatgaagaaaaactgggcagccgtattgatggcatcggtctttatcgcactgaaatcccatt

SEQ ID NO: 760351 - DNA, 75 bp, synthetic construct
  source 1..75: mol_type = other DNA
gacacccggctgcgtcgcgaattgtttgccgaggttgataaaggctcggtggcagagtgggcggtaaaaacggtc

SEQ ID NO: 760352 - DNA, 75 bp, synthetic construct
  source 1..75: mol_type = other DNA
actataaagcgcgggcgcagaagttctttgatgaactggatgcattctttaccgagctggagaaatctgaccgta

SEQ ID NO: 760353 - DNA, 75 bp, synthetic construct
  source 1..75: mol_type = other DNA
ggcacagcgtgactattttggtgcgcatacttataagcgtattgataaagaaggcgtgttccataccgaatggct

SEQ ID NO: 760354 - DNA, 75 bp, synthetic construct
  source 1..75: mol_type = other DNA
tgagcgagcagttaggtgaaagcgaaatcgaactgcgtaatgaactgcctggcggagaagtccatgccgcatggc

SEQ ID NO: 760355 - DNA, 75 bp, synthetic construct
  source 1..75: mol_type = other DNA
ttctattttctggtcaagtttggcctgttatgggcgggatatcttaacttccatccgctgcttaacctggtgttt

SEQ ID NO: 760356 - DNA, 75 bp, synthetic construct
  source 1..75: mol_type = other DNA
ggtaacaccttcttccaggacaccattcgtcgtaaccgtgaactctctgctgaaggtttcaacttcatcggtacc

SEQ ID NO: 760357 - DNA, 75 bp, synthetic construct
  source 1..75: mol_type = other DNA
gactttcaccgagtggaataaaggtgagctgagcagctatctgatcgacatcactaaagatatcttcaccaaaaa

SEQ ID NO: 760358 - DNA, 75 bp, synthetic construct
  source 1..75: mol_type = other DNA
tgttaacgtcatccctaacggtcccggctttcaggatttaatccgcactgagatcagagcgaacaacaatcagtt

SEQ ID NO: 760359 - DNA, 75 bp, synthetic construct
  source 1..75: mol_type = other DNA
tcaatgaaggtattcgttatgcaactggactcgatacgaaagatgtaggccgcttatatcgtggtgaggaaacac

SEQ ID NO: 760360 - DNA, 75 bp, synthetic construct
  source 1..75: mol_type = other DNA
tggtgggcagaaagaagcctatgaactggttgctcctatcctgaccaaaatcgccgccgtggctgaagatggcga

SEQ ID NO: 760361 - DNA, 75 bp, synthetic construct
  source 1..75: mol_type = other DNA
atgtggcaggcaatcagtcttcttttgagcgagcagttaggcgaaggcgaaattgaactgcgtaatgaactgcct

SEQ ID NO: 760362 - DNA, 75 bp, synthetic construct
  source 1..75: mol_type = other DNA
cgcaactgtcaacgacggatgaaaagtcccacccttacattgaggatatggcgatgtttttatcgccattaccga

SEQ ID NO: 760363 - DNA, 75 bp, synthetic construct
  source 1..75: mol_type = other DNA
attcatacgtcaccagcatattctgctaataagccggaagggttaacggacggtacagtttattcactctatacg

SEQ ID NO: 760364 - DNA, 75 bp, synthetic construct
  source 1..75: mol_type = other DNA
gtggttgccattctgctatggctgaacgtacttaccctggcgggaccaagtttctccttgtggccagccggtcaa

SEQ ID NO: 760365 - DNA, 75 bp, synthetic construct
  source 1..75: mol_type = other DNA
atgaatcaacctgagccagtagtgcaacaggaaccggaaatagcctgcaatgcctgcggccagactggcggggat

SEQ ID NO: 760366 - DNA, 75 bp, synthetic construct
  source 1..75: mol_type = other DNA
tactccggcactgtatttgtggcgtaaaaatgcccccgtggacaccacaaagacaaaaacgctcgatttaggaac

SEQ ID NO: 760367 - DNA, 75 bp, synthetic construct
  source 1..75: mol_type = other DNA
tagacgtatttgaaatggaattaagcgacaaagccgttcgtcatgctgaatttctcgcccaggatgatggtgtaa

SEQ ID NO: 760368 - DNA, 75 bp, synthetic construct
  source 1..75: mol_type = other DNA
ctgactcgcgtcaccgcacctcagctgacaaccaccgatatttcctcaatggcgaccggagactttacggcactg

SEQ ID NO: 760369 - DNA, 75 bp, synthetic construct
  source 1..75: mol_type = other DNA
ggcgaccggagactttacggcactgtgcgaagaaatcacgccttttttgacgaaagcggcgccgtccgcaccgag

SEQ ID NO: 760370 - DNA, 75 bp, synthetic construct
  source 1..75: mol_type = other DNA
aatggcacttaagcccgaaggctggctggcattttggcgcgtacatcatgccggacggtacggttatcggcgaat

SEQ ID NO: 760371 - DNA, 75 bp, synthetic construct
  source 1..75: mol_type = other DNA
gcactcaaagaggcataccagacgaaccacggagccgcaggccgtgaatggattaaatggcttgcaggccaccag

SEQ ID NO: 760372 - DNA, 75 bp, synthetic construct
  source 1..75: mol_type = other DNA
ttgagacgtttctttctgctggtgggctgaaagttaaggccgggcaactggtgcgactgcttaatttaccgatgg

SEQ ID NO: 760373 - DNA, 75 bp, synthetic construct
  source 1..75: mol_type = other DNA
ttgccattcgtattgtggcaattgctgttctggtctgggcaatccgttggtggtgatatgaatcgtgtgctgtat

SEQ ID NO: 760374 - DNA, 75 bp, synthetic construct
  source 1..75: mol_type = other DNA
acgggctggctaacggaaaggcccacgccgatgcactgaaagagtcatggattgataaccacggcgcagcagggc

SEQ ID NO: 760375 - DNA, 75 bp, synthetic construct
  source 1..75: mol_type = other DNA
atgataccgttactcgcctttgccgcgtggagtggcaccggaaaaacaacgctgctgaaaaaattgatcccggca

SEQ ID NO: 760376 - DNA, 75 bp, synthetic construct
  source 1..75: mol_type = other DNA
tttgctgccgatgtgcgtcgtttcgaagagcatttgcaacatgaggcggaagaacgcctgcagacaatggttggt

SEQ ID NO: 760377 - DNA, 75 bp, synthetic construct
  source 1..75: mol_type = other DNA
aatgttttgcaccgccggttatgggaacatgccctgggctggctggtagagaagcgcgcccgtcagccgctgaac

SEQ ID NO: 760378 - DNA, 75 bp, synthetic construct
  source 1..75: mol_type = other DNA
tatctcatcccgcatgtcgggcaacaggcggtgatattcgatattgatggctcgctctgtgaacagccggatgca

SEQ ID NO: 760379 - DNA, 75 bp, synthetic construct
  source 1..75: mol_type = other DNA
tggcgcgatagcgtggtaaaaccgtttaacgagcaactggcaaataactatccgtttaatcctcgttctgcacag

SEQ ID NO: 760380 - DNA, 75 bp, synthetic construct
  source 1..75: mol_type = other DNA
gtcgctgtctgatgtgctgaatctgaaagcggaatccatgtttacgctgctgtcacgcgtgacatcaccggcgac

SEQ ID NO: 760381 - DNA, 75 bp, synthetic construct
  source 1..75: mol_type = other DNA
cattattcgcgaagatattattgcgcaactggaaaccgcgcagaaaatccgtgacatattcttcagcaaacagaa

SEQ ID NO: 760382 - DNA, 75 bp, synthetic construct
  source 1..75: mol_type = other DNA
cgctgactgtgttgcgtgacaacacacagccaggcgtcttttctgaaaaactttctgccaaagaacgggatgagg

SEQ ID NO: 760383 - DNA, 75 bp, synthetic construct
  source 1..75: mol_type = other DNA
aggccgtgctctttgatatcgacggcacactctgcgctcccgctgatgcggatatcctgcatcgtcacctgtggg

SEQ ID NO: 760384 - DNA, 75 bp, synthetic construct
  source 1..75: mol_type = other DNA
gcgataacaacgtcattatccgcgaagatattattgcgcaactggaaaccgcgcagaaaatccgtgacatcttct

SEQ ID NO: 760385 - DNA, 75 bp, synthetic construct
  source 1..75: mol_type = other DNA
tcagcacagaaagaactgagcaaactgcctgtctaccagcgggtttaccagagcctgaaaacgcgggcgctgggc

SEQ ID NO: 760386 - DNA, 75 bp, synthetic construct
  source 1..75: mol_type = other DNA
ggcagtggcaaaacgacactgctgcgcgaggggtttccgtccgacattatttatgccccggagggcgcgcgcggc

SEQ ID NO: 760387 - DNA, 75 bp, synthetic construct
  source 1..75: mol_type = other DNA
ctatggcgactggggcgaccgcagccgtctggccgatatgggactgtaccagggacgacgtatcgggccttatgt

SEQ ID NO: 760388 - DNA, 75 bp, synthetic construct
  source 1..75: mol_type = other DNA
tttcactcagtcagccgcccgccagtaccgactaggcaataacccactggcgtcctggcccctggtggacaccgc

SEQ ID NO: 760389 - DNA, 75 bp, synthetic construct
  source 1..75: mol_type = other DNA
cattcactggatcaccccgaaagtggataaagacacaggggaaattatcaataccgaggcgtggctatgctctcc

SEQ ID NO: 760390 - DNA, 75 bp, synthetic construct
  source 1..75: mol_type = other DNA
acgtaaagatgcggaagacatcccggcccgcaaacgggcggaataccgcagacggaatgcgctgctggacagtat

SEQ ID NO: 760391 - DNA, 75 bp, synthetic construct
  source 1..75: mol_type = other DNA
cgtttttttttgcgcacgttgtttgtatatccagatgccaccttccgttatctgcaggcattgtgtgagctggaa

SEQ ID NO: 760392 - DNA, 75 bp, synthetic construct
  source 1..75: mol_type = other DNA
gatatctgtaggaggacaacacgatggcaacggtttttaccaattgccagtgcctttaccacgtaaaggttcgga

SEQ ID NO: 760393 - DNA, 75 bp, synthetic construct
  source 1..75: mol_type = other DNA
tcaagacaagatcgaagccggtatcccgattcttgagtttaaggtccaatctgcctctgatattcagatgttgct

SEQ ID NO: 760394 - DNA, 75 bp, synthetic construct
  source 1..75: mol_type = other DNA
atgaaagtatggttaagcaacatgcgagaaaatctgcccggggaaacacgtcccggtaacggaaaaaataacaaa

SEQ ID NO: 760395 - DNA, 75 bp, synthetic construct
  source 1..75: mol_type = other DNA
cactggtcagtacagaagggcgtggcggggcacagatatccatcacctgtacaccctgtgggtttgaccgtgaag

SEQ ID NO: 760396 - DNA, 75 bp, synthetic construct
  source 1..75: mol_type = other DNA
agcacaactctatcagtctccaacagggcatgagcttgaaatcattccgttatccgatataagtcgtttcagtga

SEQ ID NO: 760397 - DNA, 75 bp, synthetic construct
  source 1..75: mol_type = other DNA
gggcatgagcttgaaatcattccgttatccgatataagtcgtttcagtgaagatgtgaagctgaaagtcctgtat

SEQ ID NO: 760398 - DNA, 75 bp, synthetic construct
  source 1..75: mol_type = other DNA
aaaatccccggatttataacgggaaagaggcaataacactgaagccagcgtccacggattatgtctataaaactg

SEQ ID NO: 760399 - DNA, 75 bp, synthetic construct
  source 1..75: mol_type = other DNA
gacacagccggaaccggtaaggcattatctgcaggtttatcgggagactccgctggtcaccacagaagggcgtgg

SEQ ID NO: 760400 - DNA, 75 bp, synthetic construct
  source 1..75: mol_type = other DNA
atgatgaaaaatacaggctatatcttagctctttgtctgacagcatcggggcatgtcctggcccacgatgtctgg

SEQ ID NO: 760401 - DNA, 75 bp, synthetic construct
  source 1..75: mol_type = other DNA
aagaaaagttttcaggacaaaagcctgtgtgatgaaactgtcgatgtggcaaccttaagcttctcccgaaattaa

SEQ ID NO: 760402 - DNA, 75 bp, synthetic construct
  source 1..75: mol_type = other DNA
gcaatatgaaaggaaaagtatttctcattcgttggattttataccaccacccatggggggcagaaaaagactgtg

SEQ ID NO: 760403 - DNA, 75 bp, synthetic construct
  source 1..75: mol_type = other DNA
ggggcgggtaagggaaggagggcggcaaattcgcgtttatgtgctcaacttcatggatgaggaaagcagccagcc

SEQ ID NO: 760404 - DNA, 75 bp, synthetic construct
  source 1..75: mol_type = other DNA
gatgctcaaacgtgccgggatgcgatacagcacacctataacgcatggctgaaagagttcggcacggggaacaaa

SEQ ID NO: 760405 - DNA, 75 bp, synthetic construct
  source 1..75: mol_type = other DNA
gtggcaatcagcaccggggaaatggatttagaaacgttcatcgccaccgcaggacgcaagacaaaagcggggcaa

SEQ ID NO: 760406 - DNA, 75 bp, synthetic construct
  source 1..75: mol_type = other DNA
tcccgctgctgtctgatggctcgatgttgatcacattgacgaacgtagccggggcgattaccggggcgcaggtca

SEQ ID NO: 760407 - DNA, 75 bp, synthetic construct
  source 1..75: mol_type = other DNA
cggtggcattggcgaccgtgacggctggcggttgttgaaagaccacggccttaacgtgacaaccaacggcaaata

SEQ ID NO: 760408 - DNA, 75 bp, synthetic construct
  source 1..75: mol_type = other DNA
ggcggcaggcatacgggatgcgaattattaccccgacgggatgcacagccagaagcgggagaactggcgcgaata

SEQ ID NO: 760409 - DNA, 75 bp, synthetic construct
  source 1..75: mol_type = other DNA
tgcaaatgtatgcactagtggcgaagtataaatacagtcaaattaagaagttgataattattgcaacggaaagca

SEQ ID NO: 760410 - DNA, 75 bp, synthetic construct
  source 1..75: mol_type = other DNA
ggtttgggtatagaaaatgactttcatagtcatgaggaaacagttagacaactggcagcagaaagcagagtgtca

SEQ ID NO: 760411 - DNA, 75 bp, synthetic construct
  source 1..75: mol_type = other DNA
atgagtgctattaatgtgttatctcaggaggaaaaatttatacatgttgttgataaatttataacccataatcac

SEQ ID NO: 760412 - DNA, 75 bp, synthetic construct
  source 1..75: mol_type = other DNA
ttgatgccgttcgtgagtgtgaggcccgctggcgcagtctaattcctgccgactatggggaacaggttcaccgtg

SEQ ID NO: 760413 - DNA, 75 bp, synthetic construct
  source 1..75: mol_type = other DNA
ggcagtggcagcaattgacgcgggcaacctgctacccgttgccgaagtgatgcgccggaagtatccacaggcaca

SEQ ID NO: 760414 - DNA, 75 bp, synthetic construct
  source 1..75: mol_type = other DNA
tgagagccgcaaagatggcgtttactggatcacgcctaaagtggacaaggaaagcggcgagattatcaacaatga

SEQ ID NO: 760415 - DNA, 75 bp, synthetic construct
  source 1..75: mol_type = other DNA
ctggacgttgctggcgggtcaaacggcgaaagccgctgccgatgacggactgttcccaccgatttttgcccgtgt

SEQ ID NO: 760416 - DNA, 75 bp, synthetic construct
  source 1..75: mol_type = other DNA
gcagcgggtaaatggcggcgtggttccgtggtcaccagaagccggtaaagtgctgggtacgaaggcgcagattca

SEQ ID NO: 760417 - DNA, 75 bp, synthetic construct
  source 1..75: mol_type = other DNA
gtcaaaggggctcggtgaagtagtcgaggccatcggtaaggttaaacaaaatgaaaataacacaaccttatacgt

SEQ ID NO: 760418 - DNA, 75 bp, synthetic construct
  source 1..75: mol_type = other DNA
caggacagtgacagttggaagcaagttgtatggtgaagcaggcaagataacttctggtgctttgtctggttcaat

SEQ ID NO: 760419 - DNA, 75 bp, synthetic construct
  source 1..75: mol_type = other DNA
agggggttgcggttggtttgggcaatggctgggattcaataatatatcttgatggtgtcaagcgaaatgaggaaa

SEQ ID NO: 760420 - DNA, 75 bp, synthetic construct
  source 1..75: mol_type = other DNA
cggctggcggatatccgtctacaaagcgaaaaatcgctaactgacttctttgcgccattacgctctgtcccgtcg

SEQ ID NO: 760421 - DNA, 75 bp, synthetic construct
  source 1..75: mol_type = other DNA
aatctttttgccctcagcaacgtactgcagtgctcgccaacatggattctatttggcgatgaagacaagcagcca

SEQ ID NO: 760422 - DNA, 75 bp, synthetic construct
  source 1..75: mol_type = other DNA
tttggcgactacatgaccaaatccgggcaactggtgacgggcgatattccggtgttctttgcccaattgcgcgac

SEQ ID NO: 760423 - DNA, 75 bp, synthetic construct
  source 1..75: mol_type = other DNA
atgaacaagaaaactttaggccaacgaatcagagaaagacgtaagcaggtaggcttaagtcaaaacggtttaagc

SEQ ID NO: 760424 - DNA, 75 bp, synthetic construct
  source 1..75: mol_type = other DNA
tgctgcgtttgtatcgcgcacttcctaaatcagagcaacaagcacaactcagcgaactccgcgcccgcgttgaga

SEQ ID NO: 760425 - DNA, 75 bp, synthetic construct
  source 1..75: mol_type = other DNA
tgtggcgacccgcagcgtgcaggaactggcgcaggagatggtcgatgaaattgagcagggtatcgatggcactga

SEQ ID NO: 760426 - DNA, 75 bp, synthetic construct
  source 1..75: mol_type = other DNA
tggggcgcaatgcgcaatttatgctcgatgtaatgcgcgaaaccgggatcaacgtggtggcctgtaccggttatt

SEQ ID NO: 760427 - DNA, 75 bp, synthetic construct
  source 1..75: mol_type = other DNA
tatttttatccctgtcaggctgtaatgatgctttagctggatggcacaatgtaatgttttatgcttttaacgact

SEQ ID NO: 760428 - DNA, 75 bp, synthetic construct
  source 1..75: mol_type = other DNA
gctggaaaatctacgttaaaaatggtctggtgacctgggaaaaccaacagactgactagccgcgcactcgcccgg

SEQ ID NO: 760429 - DNA, 75 bp, synthetic construct
  source 1..75: mol_type = other DNA
gctggaaaatctacgttaaaaaaggtctggtgacctgggaaaaccagcagactgactatccgcgcactcgcccgg

SEQ ID NO: 760430 - DNA, 75 bp, synthetic construct
  source 1..75: mol_type = other DNA
gctggaaaatctacgttaaaaaaggtctggtgacctgggaaaaccatcagactgactagccgcgcactcgcccgg

SEQ ID NO: 760431 - DNA, 75 bp, synthetic construct
  source 1..75: mol_type = other DNA
gctggaaaatctacgttaaaaagggtctggtgacctgggaaaaccaacagactgactatccgcgcactcgcccgg

SEQ ID NO: 760432 - DNA, 75 bp, synthetic construct
  source 1..75: mol_type = other DNA
gctggaaaatctacgttaaaaatggtctggtgacctgggaaaaccagcagactgactaaccgcgcactcgcccgg

SEQ ID NO: 760433 - DNA, 75 bp, synthetic construct
  source 1..75: mol_type = other DNA
gctggaaaatctacgttaaaaatggtctggtgacctgggaaaaccatcagactgactatccgcgcactcgcccgg

SEQ ID NO: 760434 - DNA, 75 bp, synthetic construct
  source 1..75: mol_type = other DNA
ttcataactcggtcacccgtatcacgccgaaaccgacgcatatgatcggtggctatgcccatctggcatacggct

SEQ ID NO: 760435 - DNA, 75 bp, synthetic construct
  source 1..75: mol_type = other DNA
cttcaacaaagtggaactggaaaacgtgctgctgcacaaactgccggtgaaacgcctgcaactggctgatggcag

SEQ ID NO: 760436 - DNA, 75 bp, synthetic construct
  source 1..75: mol_type = other DNA
ggcagcggcagttaagaatccgcaggcctctaaatccagcttctggggtgaactcccgcagcatgtgatgtcagg

SEQ ID NO: 760437 - DNA, 75 bp, synthetic construct
  source 1..75: mol_type = other DNA
tggatgcgtgatttcggtgaaagcttgctggtttatcgtccgccgatcgacacccgttcggtgaaagaagtgatg

SEQ ID NO: 760438 - DNA, 75 bp, synthetic construct
  source 1..75: mol_type = other DNA
actgagcctgctgggtagccaggatgagatcgctgaggtgggcttcccgtactttggtggcgacggcacggaaca

SEQ ID NO: 760439 - DNA, 75 bp, synthetic construct
  source 1..75: mol_type = other DNA
ctgaactggcgcagccgctggatgtgaaagactggaaaaaaggcgaatgcgatctgatcccaggtaaaaccgcac

SEQ ID NO: 760440 - DNA, 75 bp, synthetic construct
  source 1..75: mol_type = other DNA
atcgccaccatcggcggggtattgattgccgccgtttgctatgtactctctaccaccgcaattatggggatgata

SEQ ID NO: 760441 - DNA, 75 bp, synthetic construct
  source 1..75: mol_type = other DNA
agacggttttcaatgctttggacggaagtgttgtcgattatgtaaacaataaaccgaaaagaaaagaaaattacg

SEQ ID NO: 760442 - DNA, 75 bp, synthetic construct
  source 1..75: mol_type = other DNA
ttagtttctttcatcttgatgattgttactccgagctcacaacaaagtatcatgatgtaaatgatttattatctc

SEQ ID NO: 760443 - DNA, 75 bp, synthetic construct
  source 1..75: mol_type = other DNA
acccttcagtgcgacatcaagtcgcgcttgttactgccttcgctgtctttttcctgtagctttcacctttcagtt

SEQ ID NO: 760444 - DNA, 75 bp, synthetic construct
  source 1..75: mol_type = other DNA
taacatttttatgtattgaactgattattggtggtggtggaagattactggagccattgggaatattccctttgc

SEQ ID NO: 760445 - DNA, 75 bp, synthetic construct
  source 1..75: mol_type = other DNA
acacccatggggatttttattataggagttgtagttttatggatattttctatagaaaatgtcaacattagtaac

SEQ ID NO: 760446 - DNA, 75 bp, synthetic construct
  source 1..75: mol_type = other DNA
aaaaaaaactttgatcttctactaaaccaaatacctaacatattcccatctataactacggaaatattgccaatc

SEQ ID NO: 760447 - DNA, 75 bp, synthetic construct
  source 1..75: mol_type = other DNA
cctggcttacaccagctggagtcagttccagcagctgaaagcgacctcaacgagtggcgacacgctgttccagaa

SEQ ID NO: 760448 - DNA, 75 bp, synthetic construct
  source 1..75: mol_type = other DNA
gacgcgggtaacgtcagtcgtaacccggcgttgattactatgtttgatcgcccgactttttctgccggtgcggtt

SEQ ID NO: 760449 - DNA, 75 bp, synthetic construct
  source 1..75: mol_type = other DNA
ccagagcgtgaaaattaacgaagggccatatcagttcgagtctgaaggtaaagcctggctgttcggtacgaactt

SEQ ID NO: 760450 - DNA, 75 bp, synthetic construct
  source 1..75: mol_type = other DNA
aactggtaccagacctgacggattatcagtggtacaaaggatatgcagatgtcattgataaactggttacaaagt

SEQ ID NO: 760451 - DNA, 75 bp, synthetic construct
  source 1..75: mol_type = other DNA
gctgattattccaggtctgcggcaagtaaggctcgctgtgagcgttgtgctggtactggatttcataatgtattg

SEQ ID NO: 760452 - DNA, 75 bp, synthetic construct
  source 1..75: mol_type = other DNA
gctgattattccagatctgtggcaagtaaggcttgctgtgggcattgtgcaggtacgggatttcatcatgtatta

SEQ ID NO: 760453 - DNA, 75 bp, synthetic construct
  source 1..75: mol_type = other DNA
atgcctgatttgaagatcgtagagctgaagccatcgaaagaggctgacaacaacaacgttgaagtcatccgcctg

SEQ ID NO: 760454 - DNA, 75 bp, synthetic construct
  source 1..75: mol_type = other DNA
cgctgcgagcagttgagctggctccggagtcagtgatgaaagatgattctcttgccagcaacagttcggtttcag

SEQ ID NO: 760455 - DNA, 75 bp, synthetic construct
  source 1..75: mol_type = other DNA
aggcgatatagaaaattctgttctggcgacaggccgtattgatgcaattgaacgggtaaacgtaggggcacaggt

SEQ ID NO: 760456 - DNA, 75 bp, synthetic construct
  source 1..75: mol_type = other DNA
aagcacgccagcaatctccggctggctgcgtgatggtattcgccgcccgtattcgtcagggggtgtgccatgcct

SEQ ID NO: 760457 - DNA, 75 bp, synthetic construct
  source 1..75: mol_type = other DNA
atgacaaagattttaactaccgcagaacacaatcaagcaagagttgatctcgccacattaaccgctgtcgttgag

SEQ ID NO: 760458 - DNA, 75 bp, synthetic construct
  source 1..75: mol_type = other DNA
atgataaagattttaactaccgcagaacacaatcaagcaagagctgatctcgcaacattaaccgctatcgttgag

SEQ ID NO: 760459 - DNA, 75 bp, synthetic construct
  source 1..75: mol_type = other DNA
tgactgctcaggttaccctgattactgatgaagcccaaaatacactgctggtacccattcaggcagtgcacagaa

SEQ ID NO: 760460 - DNA, 75 bp, synthetic construct
  source 1..75: mol_type = other DNA
atggaagcgaaaacggaaaccttcataaaaacgtctgttgatgataacggcatgtggatgctgaccgtcccggcg

SEQ ID NO: 760461 - DNA, 75 bp, synthetic construct
  source 1..75: mol_type = other DNA
aaaatttcacctggtaccgaatcaggactaagccggaaaccgaggcctggcggcttagtctcaaatcaggaccgg

SEQ ID NO: 760462 - DNA, 75 bp, synthetic construct
  source 1..75: mol_type = other DNA
agtgtgctggattgctggcataacggtgggcgtccatacgtcatggttggggcgatagaatcgcttcgcctggac

SEQ ID NO: 760463 - DNA, 75 bp, synthetic construct
  source 1..75: mol_type = other DNA
cagcgaacaggaagcacgccagcaatccccggctggctgcgtgatggtattcgccgcccgtattcgtcagggggt

SEQ ID NO: 760464 - DNA, 75 bp, synthetic construct
  source 1..75: mol_type = other DNA
tacgtaccacattaaaaatacgcaaccattaaatacagcgaagcccggcagtgcgggaacactaaccgggcttct

SEQ ID NO: 760465 - DNA, 75 bp, synthetic construct
  source 1..75: mol_type = other DNA
gtagctatgagaaatcataccacacacccgcaagggcgggactcgcacaacctgaataaatacatctggcgtttt

SEQ ID NO: 760466 - DNA, 75 bp, synthetic construct
  source 1..75: mol_type = other DNA
ttggcactggtgtacctgcgggcaccgtggtgtgcggcagtgataattttatggcaaccaccaaatttgacgcgc

SEQ ID NO: 760467 - DNA, 75 bp, synthetic construct
  source 1..75: mol_type = other DNA
atggagtctttgaatcaatttgttaattcgcttgccccaaaattatcgcactggcgacgtgattttcatcactat

SEQ ID NO: 760468 - DNA, 75 bp, synthetic construct
  source 1..75: mol_type = other DNA
aaaaaagcaggcaacgttgctgctgatggcgtgatcaaaaccaaaatcgacggcaactacggcatcattctggaa

SEQ ID NO: 760469 - DNA, 75 bp, synthetic construct
  source 1..75: mol_type = other DNA
cgttatccagggcaacaccattctgcatccgttccataaggacggcagcgcgctgaaacgctttgactacatcgt

SEQ ID NO: 760470 - DNA, 75 bp, synthetic construct
  source 1..75: mol_type = other DNA
gccttgccgccagttgcgatgcggtttttgtgcattccagcaccgccagccactttgacgtggtcagtacgttac

SEQ ID NO: 760471 - DNA, 75 bp, synthetic construct
  source 1..75: mol_type = other DNA
cgacgtcattaatcaatatgtttttgaccgtgcacaacaagcgattcagggcgcagcaaccatgtatggtgtcgg

SEQ ID NO: 760472 - DNA, 75 bp, synthetic construct
  source 1..75: mol_type = other DNA
cgattatcacgttcgccggcatgatgagattttcgcggccatcaacgcagtcagtgaatcggacgcacaaacacg

SEQ ID NO: 760473 - DNA, 75 bp, synthetic construct
  source 1..75: mol_type = other DNA
tactggctcgcgatctggtaaacgatcacaatatcatccaggttgatatgcgtaaccacggtctttcaccgagag

SEQ ID NO: 760474 - DNA, 75 bp, synthetic construct
  source 1..75: mol_type = other DNA
ttaatttccgcagcaatgtacggcgtatttttgctaattcagaccaaaacgcatcagagtctgtttgtctatgaa

SEQ ID NO: 760475 - DNA, 75 bp, synthetic construct
  source 1..75: mol_type = other DNA
accggaaaaatgacggatgaagatgactggcaggctgttctgcatattgccgtcttcatccgggcacaggcaccg

SEQ ID NO: 760476 - DNA, 75 bp, synthetic construct
  source 1..75: mol_type = other DNA
ggcggcagtattgatgaggaagagtgggaggctgtccttcacattgaagtattccttaaagcaactgctaccgat

SEQ ID NO: 760477 - DNA, 75 bp, synthetic construct
  source 1..75: mol_type = other DNA
cattgaagtgcattcaccgggcgttggtgcgtgcctggcttctgcgcatgaagaaggtttaagcaacctgcgcgt

SEQ ID NO: 760478 - DNA, 75 bp, synthetic construct
  source 1..75: mol_type = other DNA
ggagaatctggagtgtttgtttagccagtcgcgcgaaatggaagcggagattaagaagcagatggcggggctgaa

SEQ ID NO: 760479 - DNA, 75 bp, synthetic construct
  source 1..75: mol_type = other DNA
acacgttgcttaaccgtgcaaggttgtttggcgggcagcatttggttattgcccagcagtcactggatagattgt

SEQ ID NO: 760480 - DNA, 75 bp, synthetic construct
  source 1..75: mol_type = other DNA
cataacgcatttattttaggacagcaaattgcgcacctgcatcaatggagtgaccagccgcaatttggcctcgat

SEQ ID NO: 760481 - DNA, 75 bp, synthetic construct
  source 1..75: mol_type = other DNA
ccatactgtgttttgcacataaacgatattttctggcgtgcactcatgctcagatggaatgcctatagcggtgag

SEQ ID NO: 760482 - DNA, 75 bp, synthetic construct
  source 1..75: mol_type = other DNA
gcggcaaccgttgcggcgacgggtggcgcaccggtagtgggtgatatgcccgcacaaactgcaccgccaacaacg

SEQ ID NO: 760483 - DNA, 75 bp, synthetic construct
  source 1..75: mol_type = other DNA
tgtccgcacattggcttgctgcaaagttaaatttacctcttttaacattggatctctcatctgtaatgagttctc

SEQ ID NO: 760484 - DNA, 75 bp, synthetic construct
  source 1..75: mol_type = other DNA
acacgttacttaatcgtgcaaggttgtttggcgggcagcatttggttattgctcagcagtcactggatagattat

SEQ ID NO: 760485 - DNA, 75 bp, synthetic construct
  source 1..75: mol_type = other DNA
tcgttcgtcgttcattcgatattcatcatgaacagcaaaaaatatcgttgcataacgagagtatcctgctgctgg

SEQ ID NO: 760486 - DNA, 75 bp, synthetic construct
  source 1..75: mol_type = other DNA
tgacaatctggagagtttgtttagccagtcgctcgagctagaagcggagattaaaatgcagatggcggggctgaa

SEQ ID NO: 760487 - DNA, 75 bp, synthetic construct
  source 1..75: mol_type = other DNA
gagatttaccagttgttcctgcaacacatcattttctcgctgaaaccggatgggaaggcggcggtcgtggtgccg

SEQ ID NO: 760488 - DNA, 75 bp, synthetic construct
  source 1..75: mol_type = other DNA
tcgcctgccgttcgtttgatatttatcatgaacagcaaaaaatatcgttgaacaaagagagtattctactactgg

SEQ ID NO: 760489 - DNA, 75 bp, synthetic construct
  source 1..75: mol_type = other DNA
ccgatactgagcaatatgctctacctttcctgtttatcgatgttttctcataagaaagaactgatccccttactt

SEQ ID NO: 760490 - DNA, 75 bp, synthetic construct
  source 1..75: mol_type = other DNA
acgccttattagctttgatatcgccaaacgttggtatctgcgcgatatcgcggaaagaatgtataccagcgagag

SEQ ID NO: 760491 - DNA, 75 bp, synthetic construct
  source 1..75: mol_type = other DNA
cgggcgtactaacgtcctcaacggcgcagcgcatctggctctgtttgccgcctatttgatgacgatatttgcctg

SEQ ID NO: 760492 - DNA, 75 bp, synthetic construct
  source 1..75: mol_type = other DNA
tgaccgcattttttcggcagaacgtgccgccacgtgccatgcagtcatttgacagtgttatggatgagatggagt

SEQ ID NO: 760493 - DNA, 75 bp, synthetic construct
  source 1..75: mol_type = other DNA
cccgccgcagctgcttatgtccttactggcggcgtggctggatgatgctgacagggaactactggatgaagtggg

SEQ ID NO: 760494 - DNA, 75 bp, synthetic construct
  source 1..75: mol_type = other DNA
tgaccccaccgatgccgttggttacagcaatattcgatagttttactaaagaggacattgcttcaacgacattaa

SEQ ID NO: 760495 - DNA, 75 bp, synthetic construct
  source 1..75: mol_type = other DNA
cggcagctggcaagtggaaaatctgcgcatggcggatatccgtctacaaagcgaaaaatcgctaaccgacttctt

SEQ ID NO: 760496 - DNA, 75 bp, synthetic construct
  source 1..75: mol_type = other DNA
ccaaagatagtgcactgaaaatgctgaaattatcatacttgatttctcgaatggggatagccccagatataatta

SEQ ID NO: 760497 - DNA, 75 bp, synthetic construct
  source 1..75: mol_type = other DNA
gtctgaacactttttcacctatatctatttctatccggaatatagcgacaaataagtttttaattatccatactg

SEQ ID NO: 760498 - DNA, 75 bp, synthetic construct
  source 1..75: mol_type = other DNA
aaaataagttttgcaaaaaatatatcgtatgattatggggttaaatgctacgatgaattctattctgctttagaa

SEQ ID NO: 760499 - DNA, 75 bp, synthetic construct
  source 1..75: mol_type = other DNA
tggaatgctggagcatattaaagggaaaataagttttgcaaaaaatatatcgtatgattatggggttaaatgcta

SEQ ID NO: 760500 - DNA, 75 bp, synthetic construct
  source 1..75: mol_type = other DNA
gctggaaaatctacgttaaaaagggtctggtgacctgggaaaaccatcagactgactaaccgcgcactcgcccgg

SEQ ID NO: 760501 - DNA, 75 bp, synthetic construct
  source 1..75: mol_type = other DNA
aaagcaaaatcactattccgtggtttgccatcttgttcatcgtcgttgccatctttaactcgttccacctgttac

SEQ ID NO: 760502 - DNA, 75 bp, synthetic construct
  source 1..75: mol_type = other DNA
atagatctgatattagtaaaatcattggccgtgtcgttgattacttacgaaaaaaaggatactccttaaataaaa

SEQ ID NO: 760503 - DNA, 75 bp, synthetic construct
  source 1..75: mol_type = other DNA
acagttacaaagatggatcaattattatattttgagaaatcttaaaccacatccttgttgttattcttatcataa

SEQ ID NO: 760504 - DNA, 75 bp, synthetic construct
  source 1..75: mol_type = other DNA
cacgctacagcctgcaccgtctacgtcactggatagccctaccaatcggttttgcattgttctggcacgacacct

SEQ ID NO: 760505 - DNA, 75 bp, synthetic construct
  source 1..75: mol_type = other DNA
ctcctttggtaatgggtattcacaggtattattacagaacaatgttgtttctggcttgttcttttttttttgcaa

SEQ ID NO: 760506 - DNA, 75 bp, synthetic construct
  source 1..75: mol_type = other DNA
atagaaaagttaattcagattgagcgtaacgcgaaagcgcggatacgcagggcgtcaaaatccagaactgaataa

SEQ ID NO: 760507 - DNA, 75 bp, synthetic construct
  source 1..75: mol_type = other DNA
agagcgtcaggtccgctgtaaaatctgcggtgcagttgtggagccatttgactggatgctctctgtggcgaaaag

SEQ ID NO: 760508 - DNA, 75 bp, synthetic construct
  source 1..75: mol_type = other DNA
cgccgctggaagagaaggtgtttattgccgccgcgctggcacataaccagaccggacgtccgaatctccacgcat

SEQ ID NO: 760509 - DNA, 75 bp, synthetic construct
  source 1..75: mol_type = other DNA
atcggctccagcgaagggaagattacgccgctggaagagaaggtgtttattgccgccgcgctggcacataaccag

SEQ ID NO: 760510 - DNA, 75 bp, synthetic construct
  source 1..75: mol_type = other DNA
gtgattgagatgaccaaccgctacatggggcgaaatgcacaatttatgctcgatgtgatgcgtgaaacggggatc

SEQ ID NO: 760511 - DNA, 75 bp, synthetic construct
  source 1..75: mol_type = other DNA
tgtggtcagacatcgcataccaatctgtatcaaccggcaaacaatgactgttacctatttgataacctttcaaaa

SEQ ID NO: 760512 - DNA, 75 bp, synthetic construct
  source 1..75: mol_type = other DNA
agactggcagatgatgtaaggctattgcgccaggaggaacaggaaaggcggagaaatatagaaaagctgatacag

SEQ ID NO: 760513 - DNA, 75 bp, synthetic construct
  source 1..75: mol_type = other DNA
gtcgactggaaaaaactcaccagtggattaccgcagacagcaccagtatccgaaaactcaaatgcggtagtcatc

SEQ ID NO: 760514 - DNA, 75 bp, synthetic construct
  source 1..75: mol_type = other DNA
taagcaatatcgttttatttccggtaaaagaggatgacccacgtaatcaggttaattttctttatgaggcatcgg

SEQ ID NO: 760515 - DNA, 75 bp, synthetic construct
  source 1..75: mol_type = other DNA
caggtccgctgcaaaatctgtggtgcagttgtggagccgtttgactggatgctctctgtggctaaaagagaaacc

SEQ ID NO: 760516 - DNA, 75 bp, synthetic construct
  source 1..75: mol_type = other DNA
agactggcagatgatgtaaggctcttgcgtcaagaggagcgggaaaggcgaaaaaatatagaaaagctaattcag

SEQ ID NO: 760517 - DNA, 75 bp, synthetic construct
  source 1..75: mol_type = other DNA
attgaacaggctggatccctgcgtggtctgtcgctgtctgatgtgctgaatctgaaagcggataccatgttgacg

SEQ ID NO: 760518 - DNA, 75 bp, synthetic construct
  source 1..75: mol_type = other DNA
cggcaatgccggaaggtggcgataatgctgatgatgtaatgaatgttacggacccgatttcagggattacgttcc

SEQ ID NO: 760519 - DNA, 75 bp, synthetic construct
  source 1..75: mol_type = other DNA
atggctggaaataccctgaccgggttgatcccgactatttacaccgccctggatgttgtatcccgtgagcaggta

SEQ ID NO: 760520 - DNA, 75 bp, synthetic construct
  source 1..75: mol_type = other DNA
atgtcaaagcaacagatcggcgtcgtcggtatggctgtgatgggacgcaacctcgcgcttaacatcgaaagccgt

SEQ ID NO: 760521 - DNA, 75 bp, synthetic construct
  source 1..75: mol_type = other DNA
ggaaccgacattggctatgaactgtgtaaactgctgtggcagtaccacccgctgggcgggaaacttgtcgaaaaa

SEQ ID NO: 760522 - DNA, 75 bp, synthetic construct
  source 1..75: mol_type = other DNA
gaatcagtatgttgtggcagcagcgaccagcaatctgattactcttgcagcgccgggactgcgtcaggatctggc

SEQ ID NO: 760523 - DNA, 75 bp, synthetic construct
  source 1..75: mol_type = other DNA
ttgatcgcaacgcgtttctgctggcatcccgtactccggcaatgccggaaggtggcgataatgctgatgatgtaa

SEQ ID NO: 760524 - DNA, 75 bp, synthetic construct
  source 1..75: mol_type = other DNA
ttggttgcgcccatcctgactaaaattgccgctgtggcggaagatggcgagccttgcgtaacctacattggcgct

SEQ ID NO: 760525 - DNA, 75 bp, synthetic construct
  source 1..75: mol_type = other DNA
ggttataccgtctctatctttaaccgctcccgtgaaaaaaccgaagaggttgtcactgagaatcccggtaaaaat

SEQ ID NO: 760526 - DNA, 75 bp, synthetic construct
  source 1..75: mol_type = other DNA
tgcgcagttcctgcagaagatcactgatgcttatgcacaaaacgccagcattgctaacctgcttttagctcctta

SEQ ID NO: 760527 - DNA, 75 bp, synthetic construct
  source 1..75: mol_type = other DNA
ggtgtttccggcggtgaagagggcgcgctgaaagggccttccatcatgcctggtggtcagaaagaagcctatgaa

SEQ ID NO: 760528 - DNA, 75 bp, synthetic construct
  source 1..75: mol_type = other DNA
ggtgtttccggcggtgaagagggcgcgctgaaaggcccatctatcatgcctggtggtcagaaagaagcctatgag

SEQ ID NO: 760529 - DNA, 75 bp, synthetic construct
  source 1..75: mol_type = other DNA
tcggtatggcagtaatggggcgcaacttggcgctcaatattgaaagccgtggttataccgtttccgtattcaacc

SEQ ID NO: 760530 - DNA, 75 bp, synthetic construct
  source 1..75: mol_type = other DNA
tccgtcacgcacactaaaaatcttcaacggcacaccgatttatctggagtttcagagttcatcgttcggattcac

SEQ ID NO: 760531 - DNA, 75 bp, synthetic construct
  source 1..75: mol_type = other DNA
gctgaaaaaatctggcaaaccagtgattgccattgatcctatccgctccgaaaccatcgacttctttggcgataa

SEQ ID NO: 760532 - DNA, 75 bp, synthetic construct
  source 1..75: mol_type = other DNA
cgtggtatgcgtgctgaaggtgcatggccagatctggaaaatggcttgtgtaaaaacggtagtgcgaacgtgtta

SEQ ID NO: 760533 - DNA, 75 bp, synthetic construct
  source 1..75: mol_type = other DNA
atggataaaacaaatattaatttaatggaaaggtatctacttctgcttgatcgattcgttgataaacttacggaa

SEQ ID NO: 760534 - DNA, 75 bp, synthetic construct
  source 1..75: mol_type = other DNA
ggaggtctatgaacagcagacttcctggccgctgattctggaaaacagtcaggtggaggtgttgtggggcatgaa

SEQ ID NO: 760535 - DNA, 75 bp, synthetic construct
  source 1..75: mol_type = other DNA
ggtgaacagaaacactggatgctggtgacgctggcggcgatgttagggcagattggtacaccgggcggcgggttt

SEQ ID NO: 760536 - DNA, 75 bp, synthetic construct
  source 1..75: mol_type = other DNA
gggcagattggtacaccgggcggcggttttggtttctcttatcattactccaacggtggcaacccgacgcgtgtt

SEQ ID NO: 760537 - DNA, 75 bp, synthetic construct
  source 1..75: mol_type = other DNA
aggtcaacgagaagattaaaaatctgttttttctgtctcgttgctacggtgctgcagcgatcggcgtgggcaccg

SEQ ID NO: 760538 - DNA, 75 bp, synthetic construct
  source 1..75: mol_type = other DNA
aattatgaaccaccgaagcaggagacgcctgatggcaatttccagccgggcggggaggaagaagaaacggatcag

SEQ ID NO: 760539 - DNA, 75 bp, synthetic construct
  source 1..75: mol_type = other DNA
aattatgaaccaccgaagcaggagacgcctgatggcaatttccagccgggcggggaggaggaagagacggatcag

SEQ ID NO: 760540 - DNA, 75 bp, synthetic construct
  source 1..75: mol_type = other DNA
tctatgctaatgagaaaaggaaatatgaggcttcaactctaaaaagagaattatcgaaaaaggataaaaggaaaa

SEQ ID NO: 760541 - DNA, 75 bp, synthetic construct
  source 1..75: mol_type = other DNA
cctgcgtaaagaatttttccgcgtgaagcttgagaaaatcattaatgaagtggagcgtcaccacgggcaggtgga

SEQ ID NO: 760542 - DNA, 75 bp, synthetic construct
  source 1..75: mol_type = other DNA
tcggtatggcagtgatggggcgcaacctggcgctcaacatcgaaagccgcggttataccgtctccgttttcaacc

SEQ ID NO: 760543 - DNA, 75 bp, synthetic construct
  source 1..75: mol_type = other DNA
cactttccaacgaagagctggcgcaaaccttcaccgaatggaacgaaggtgagttaagcagctacctgatcgaca

SEQ ID NO: 760544 - DNA, 75 bp, synthetic construct
  source 1..75: mol_type = other DNA
agatggccccggtcaaatggaatggtgaagagcaattggctttgggcccggctggtacctacaacaccatcctgg

SEQ ID NO: 760545 - DNA, 75 bp, synthetic construct
  source 1..75: mol_type = other DNA
caatgtattgcagtttattggtaggcctaataagcgcggcgcatcaggcaatcttacgcttatcatcagtctcat

SEQ ID NO: 760546 - DNA, 75 bp, synthetic construct
  source 1..75: mol_type = other DNA
tgcgcagttcctgcagaagatcaccgatgcctacgctgaaaatgccggtatcgcaaacctgctgctggcgccgta

SEQ ID NO: 760547 - DNA, 75 bp, synthetic construct
  source 1..75: mol_type = other DNA
cagttctgccagctaacctgatccaggctcagcgtgattactttggtgcgcatacctataaacgtaccgataaag

SEQ ID NO: 760548 - DNA, 75 bp, synthetic construct
  source 1..75: mol_type = other DNA
agatgaagacggtaactacctggttgatgtgatcctggatgaagcggctaacaaaggtaccggtaaatggaccag

SEQ ID NO: 760549 - DNA, 75 bp, synthetic construct
  source 1..75: mol_type = other DNA
ggcagataaaggataatgcgattgaagcattactacatgatcccttgttcagacaacgagttgagaaaaataaga

SEQ ID NO: 760550 - DNA, 75 bp, synthetic construct
  source 1..75: mol_type = other DNA
ggcagataaaggataatgcagttgaagcattactgcatgaccccttgttcagactgcgagtagagaaaaacaaga

SEQ ID NO: 760551 - DNA, 75 bp, synthetic construct
  source 1..75: mol_type = other DNA
gtaggtaatattggtttatatcgtattggaattagagtagataggaataatccaaaattgcaattggcggatagt

SEQ ID NO: 760552 - DNA, 75 bp, synthetic construct
  source 1..75: mol_type = other DNA
tagtgttatctggtttggcggtgtgtcgctggcccgtcgattgtcgggcatgctctccgcagggctgcattttga

SEQ ID NO: 760553 - DNA, 75 bp, synthetic construct
  source 1..75: mol_type = other DNA
tgtttatgccggatgcggcgtgaacgccttatccggcctacaaaatcgtgctaattcaagatgttgcattatatg

SEQ ID NO: 760554 - DNA, 75 bp, synthetic construct
  source 1..75: mol_type = other DNA
atttgaagggctggcatggaaagcagatgatcggatgctgtttgtcgcaaaagaaagacgcccaagtaaaatatt

SEQ ID NO: 760555 - DNA, 75 bp, synthetic construct
  source 1..75: mol_type = other DNA
tggtgcataatggcattgagtatggcgacatgcagctgattgccgaagcctatgcgctgttgaaaggcggtctgg

SEQ ID NO: 760556 - DNA, 75 bp, synthetic construct
  source 1..75: mol_type = other DNA
aaagtgctgagcggtccgcaggctcagccggccggtgataaagcggaatttatcgaaaaagttcgtcgcgcgttg

SEQ ID NO: 760557 - DNA, 75 bp, synthetic construct
  source 1..75: mol_type = other DNA
tatgcgctgttgaaaggcggcctggcgctctccaacgaagagcttgcgcaaactttcactgaatggaatgaaggt

SEQ ID NO: 760558 - DNA, 75 bp, synthetic construct
  source 1..75: mol_type = other DNA
cttcaagcaaattgccgatgactaccagcaggcgctgcgcgatgtcgttgcttatgcagtacagaacggtatccc

SEQ ID NO: 760559 - DNA, 75 bp, synthetic construct
  source 1..75: mol_type = other DNA
ctgaactacggcgaaatcgcgaagattttccgtgctggttgcatcattcgtgcgcagttccttcagaaaatcact

SEQ ID NO: 760560 - DNA, 75 bp, synthetic construct
  source 1..75: mol_type = other DNA
tgacatgcagctaattgccgaggcctatgcgctactgaaaggcggtctggctctttctaatgaagagttggcgca

SEQ ID NO: 760561 - DNA, 75 bp, synthetic construct
  source 1..75: mol_type = other DNA
gatgcttatgcgcaaaacgctggcattgctaacctcctgctggcgccatacttcaaacagatcgctgatgactat

SEQ ID NO: 760562 - DNA, 75 bp, synthetic construct
  source 1..75: mol_type = other DNA
gacggagcgggtcattatgtgaagatggttcacaatggaattgaatatggcgatatgcagttaatcgcagaagct

SEQ ID NO: 760563 - DNA, 75 bp, synthetic construct
  source 1..75: mol_type = other DNA
aaagtgctgagcggcccgcagactcagccggccggtgataaagctgaatttattgaaaaagtgcgtcgcgcgttg

SEQ ID NO: 760564 - DNA, 75 bp, synthetic construct
  source 1..75: mol_type = other DNA
cttcaagcagatcgctgatgactatcaacaggcgctgcgtgatgtcgtggcgtatgccgtgcagaatggtattcc

SEQ ID NO: 760565 - DNA, 75 bp, synthetic construct
  source 1..75: mol_type = other DNA
tggttcacaacggtattgaatacggtgatatgcaactgattgctgaagcctattctctcctgaaaggcggcctga

SEQ ID NO: 760566 - DNA, 75 bp, synthetic construct
  source 1..75: mol_type = other DNA
cttcaaacagatcgctgatgattatcagcaggcgctgcgtgatgtcgtggcttatgccgtgcagaatggtattcc

SEQ ID NO: 760567 - DNA, 75 bp, synthetic construct
  source 1..75: mol_type = other DNA
tatgcgctgttgaaaggcggtctggcactttccaacgaagagctggcgcaaaccttcaccgaatggaacgaaggt

SEQ ID NO: 760568 - DNA, 75 bp, synthetic construct
  source 1..75: mol_type = other DNA
cagttctgtctgccctgaaagaaaatatttctgagcgggtgaactggtttgacggccgcccggtatttattgatg

SEQ ID NO: 760569 - DNA, 75 bp, synthetic construct
  source 1..75: mol_type = other DNA
atgaaacaccgtgaaatacgggcggcagttctgtctgccctgaaagaaaatatttctgagcgggtgaactggttt

SEQ ID NO: 760570 - DNA, 75 bp, synthetic construct
  source 1..75: mol_type = other DNA
atacttctgcagctcgaaacaaattatactgaaccgccccgggaatcctggagactaaacttcctgagaaagagg

SEQ ID NO: 760571 - DNA, 75 bp, synthetic construct
  source 1..75: mol_type = other DNA
gatccagatgctggcaggtctggcgctgttgagtaccattggcggcagtttgtatcaggcgctgcataatgagcg

SEQ ID NO: 760572 - DNA, 75 bp, synthetic construct
  source 1..75: mol_type = other DNA
cgttgcaggcattttttatttgctcgcaggtctttttggtagtgccattaccgggatgatggctgccctgcccgt

SEQ ID NO: 760573 - DNA, 75 bp, synthetic construct
  source 1..75: mol_type = other DNA
gtgaaacacagagaaattcgggcggcaatattgtctgccctgaaagaaaatatttctgagcgggtgacctggttt

SEQ ID NO: 760574 - DNA, 75 bp, synthetic construct
  source 1..75: mol_type = other DNA
ggcgtgtgtgcgcagaaaaagcggctacatgagccgctaattgaggcattctggaagattttgccgaaccattaa

SEQ ID NO: 760575 - DNA, 75 bp, synthetic construct
  source 1..75: mol_type = other DNA
gatgtttattaacatcttcccgaactgccttgcgccgctgattgttcaggcgtcgctcggtttctctaacgccat

SEQ ID NO: 760576 - DNA, 75 bp, synthetic construct
  source 1..75: mol_type = other DNA
ggggcacagccgccaacgccggagtggggcaccatgctctccgacgtgttgcagttcgcgcaaagcgcctggtgg

SEQ ID NO: 760577 - DNA, 75 bp, synthetic construct
  source 1..75: mol_type = other DNA
tgcctttgcatccctggcggtggagacaagcaatgcttccgacatgcctgaactggatttgcccctatatttcca

SEQ ID NO: 760578 - DNA, 75 bp, synthetic construct
  source 1..75: mol_type = other DNA
aataaaggggtaaaaaacacggttatcacgctcggtagcaagggctcgctcgcatttgatggcaaaaaattcatt

SEQ ID NO: 760579 - DNA, 75 bp, synthetic construct
  source 1..75: mol_type = other DNA
acaagcaatgcttccgacatgcctgaacatgaatctgtgatacatcgaattcagagtatacattatcagcaaact

SEQ ID NO: 760580 - DNA, 75 bp, synthetic construct
  source 1..75: mol_type = other DNA
cggttcccgtttcgccgctgattgtctttactggactactggcacttctattttctccgtttggcgtttattccg

SEQ ID NO: 760581 - DNA, 75 bp, synthetic construct
  source 1..75: mol_type = other DNA
gcgaacagggaacgtcaggatatcgtcaccctggtgaaacgacagctgacgcgtgaaatctcggaagggcgcttt

SEQ ID NO: 760582 - DNA, 75 bp, synthetic construct
  source 1..75: mol_type = other DNA
gccgcctacagccatctgccgccgattctcgaccgctttcgcgcggaacatccgtcagtggagattaaactcacg

SEQ ID NO: 760583 - DNA, 75 bp, synthetic construct
  source 1..75: mol_type = other DNA
gtgttatgtatttcagcacattttccgttatttcgctgattttatttgttctggtatcggttgttcctatgaagt

SEQ ID NO: 760584 - DNA, 75 bp, synthetic construct
  source 1..75: mol_type = other DNA
gcgccggcgtgcaattgacgctcttctgcaggcaatgtgtttccactacgatccgctggccaatcgcgtgcagcg

SEQ ID NO: 760585 - DNA, 75 bp, synthetic construct
  source 1..75: mol_type = other DNA
tgtgtttccactatgacccgctggccaaccgtgtgcagtgctccatcaccacgctggccattgagtgcggtctgg

SEQ ID NO: 760586 - DNA, 75 bp, synthetic construct
  source 1..75: mol_type = other DNA
agagctggggctgattagctaccagacggaatatgacccgcttattggctgcaacattccgaccgatatctcgtt

SEQ ID NO: 760587 - DNA, 75 bp, synthetic construct
  source 1..75: mol_type = other DNA
aattcggtgatatctgtcacccatttctcacagggagcttccgctttgaactgtcgctgaaggatattttctgca

SEQ ID NO: 760588 - DNA, 75 bp, synthetic construct
  source 1..75: mol_type = other DNA
ctctgtcttgacccggcctgtagacgacaaaaaggggagccccattcacagtgcctgcattcaggtaagcgaggt

SEQ ID NO: 760589 - DNA, 75 bp, synthetic construct
  source 1..75: mol_type = other DNA
gaatgtggcggttgaaacaagtgaaacaccagcaccaacagtcgcctcagaggttatcagttgtaatttgtgtct

SEQ ID NO: 760590 - DNA, 75 bp, synthetic construct
  source 1..75: mol_type = other DNA
ctaatgaaatagaaagtgttgaatttattaaagtacataatagtaatcctaacaaaggtgaggcagaaaatggtt

SEQ ID NO: 760591 - DNA, 75 bp, synthetic construct
  source 1..75: mol_type = other DNA
tactgttatttgtgcttttcatcatgcccggctttattagcatgagagtttacaggctctttcacccatctgcgg

SEQ ID NO: 760592 - DNA, 75 bp, synthetic construct
  source 1..75: mol_type = other DNA
aggggaagtcgtaggtggtgattgcctggttgtagtgccgaccattcgtgaaggtgctcatttttcagatcgtga

SEQ ID NO: 760593 - DNA, 75 bp, synthetic construct
  source 1..75: mol_type = other DNA
tggattgcaccctataacccagcggaacagttccgcgatgcactgcttgccccgcctgcctggcaggaaggcggc

SEQ ID NO: 760594 - DNA, 75 bp, synthetic construct
  source 1..75: mol_type = other DNA
atgcctttattgcttcgtttggtcaaggcaaaccggttgggggaatatgacgccctggcaggtttaagtcaacaa

SEQ ID NO: 760595 - DNA, 75 bp, synthetic construct
  source 1..75: mol_type = other DNA
gcgcccttgatgccgtaacgttgatgaccactggcaccaacttcctcaacgaacatattattgaaaaatttgcgc

SEQ ID NO: 760596 - DNA, 75 bp, synthetic construct
  source 1..75: mol_type = other DNA
cttcgacaaagcctgttccagttatctcccgaatcgcaccttagaaaatgccatgtaccatgccctatcccattt

SEQ ID NO: 760597 - DNA, 75 bp, synthetic construct
  source 1..75: mol_type = other DNA
atatatgggactacttcaatgtgtgcgctggtacaaaatgggcggccaggctatgtcttgtatccgcaagacgac

SEQ ID NO: 760598 - DNA, 75 bp, synthetic construct
  source 1..75: mol_type = other DNA
aagcaaaaaaagaaggtgttagcttgggaaactggctcaaggaacttggcagggcggaactaaaacgtaagggga

SEQ ID NO: 760599 - DNA, 75 bp, synthetic construct
  source 1..75: mol_type = other DNA
ggcatcgactgatgtcggcgacgtcagttggaaactgcctgttgcccagtgtttcagcccctgttttgccgtcgg

SEQ ID NO: 760600 - DNA, 75 bp, synthetic construct
  source 1..75: mol_type = other DNA
ccactcgatgagtaaaccttttgaggaatatcagggaactgtccacttttcgaaccagaaagggatacgtgcgga

SEQ ID NO: 760601 - DNA, 75 bp, synthetic construct
  source 1..75: mol_type = other DNA
tgattcatgagcaacatgatcgtattcgtaaagctaacggaccatcggccatttttgccggatcttacggctggc

SEQ ID NO: 760602 - DNA, 75 bp, synthetic construct
  source 1..75: mol_type = other DNA
gcttctgaccgcacatccggcacaccgtttacacagtcagcttaactatgcggaactgcgtaaaaaatatgcggt

SEQ ID NO: 760603 - DNA, 75 bp, synthetic construct
  source 1..75: mol_type = other DNA
atagtaatagtctttatggcgaaaaaccgtaaagaaaaaaccgcccctgaattggggatgcggacgatttcctag

SEQ ID NO: 760604 - DNA, 75 bp, synthetic construct
  source 1..75: mol_type = other DNA
gtaccgatgaagcaagtggttgcgccgcagtttgaagcacgtaacgattttgacgtgtttgccgatcttgctgaa

SEQ ID NO: 760605 - DNA, 75 bp, synthetic construct
  source 1..75: mol_type = other DNA
cttatcattactccaacggtggcaacccgacgcgtgttggcggcgtgctgccggaaatgtctgcggcgattgccg

SEQ ID NO: 760606 - DNA, 75 bp, synthetic construct
  source 1..75: mol_type = other DNA
caccattctctgcttttgcgaccacccgctggctgaatggaccggaaagactggtgcgctacaacggctcggcag

SEQ ID NO: 760607 - DNA, 75 bp, synthetic construct
  source 1..75: mol_type = other DNA
cagcaccaggccaccagggcggcgttggttttaccaaaacacccgccggacgtttctaccatgactactatggtg

SEQ ID NO: 760608 - DNA, 75 bp, synthetic construct
  source 1..75: mol_type = other DNA
aggcgaccgggaaaaatcaatcgccgcgctggatcgcgatctgctggagcttgtcgatgaattcgcctggattct

SEQ ID NO: 760609 - DNA, 75 bp, synthetic construct
  source 1..75: mol_type = other DNA
tatgccatctgcgcatcaaacgatgtggctgtatcaatgatggacggcaacagcggtctgtcactgactcaggaa

SEQ ID NO: 760610 - DNA, 75 bp, synthetic construct
  source 1..75: mol_type = other DNA
ctaggctgggggttccggaaagctttcagctttgagccagttattaaaaccccttttgatttgttaaaacacctt

SEQ ID NO: 760611 - DNA, 75 bp, synthetic construct
  source 1..75: mol_type = other DNA
atgcaggaaaatttattttttccggcctttttgtgcacagaaaacccccagctaggctgggggttccggaaagct

SEQ ID NO: 760612 - DNA, 75 bp, synthetic construct
  source 1..75: mol_type = other DNA
cggttgaacgaagcctattccggcctaccggtggcggaaatcaccccgcgtgaagcgtacaacgcgattgtcgac

SEQ ID NO: 760613 - DNA, 75 bp, synthetic construct
  source 1..75: mol_type = other DNA
aatgggtgaagatggtgaactggaagaaaccggtgttccggcggcgctggtcactgcctggcttggtcgccacgg

SEQ ID NO: 760614 - DNA, 75 bp, synthetic construct
  source 1..75: mol_type = other DNA
gggttccggaaagctttcagctttcagccagttattaaaaccccttttgatttgttaaaacaccttgcggtctgg

SEQ ID NO: 760615 - DNA, 75 bp, synthetic construct
  source 1..75: mol_type = other DNA
tttttgtgcacagaaaacccccagctaggctggggggtccggaaagctttcagctttgagccagttattaaaacc

SEQ ID NO: 760616 - DNA, 75 bp, synthetic construct
  source 1..75: mol_type = other DNA
cctggcgatcacaacggtcctaccgttttcgccacccactccacccacaaactgctgaatgcgctgtcacaggct

SEQ ID NO: 760617 - DNA, 75 bp, synthetic construct
  source 1..75: mol_type = other DNA
cgatctatgccgatcactatgccatgcgcggcgaaccgggcgatcacagcggcccgaccgttttcgccactcatt

SEQ ID NO: 760618 - DNA, 75 bp, synthetic construct
  source 1..75: mol_type = other DNA
ctaaccgcaccatcatgcaagcctgtatgaccgataacgatgtcgtcgtcgtcgaccgtaactgtcacaaatcta

SEQ ID NO: 760619 - DNA, 75 bp, synthetic construct
  source 1..75: mol_type = other DNA
tattggtcagcatatgccgctctactgttcggcgatgggtaaggtttatatggcgtttggtcatcaggactacgt

SEQ ID NO: 760620 - DNA, 75 bp, synthetic construct
  source 1..75: mol_type = other DNA
aatgagatccagccgctaacccgcaataccattaccgatttgcccgcgatgtttgacgaactggcgcagattcgt

SEQ ID NO: 760621 - DNA, 75 bp, synthetic construct
  source 1..75: mol_type = other DNA
ccggtatgctgcgaacccgcgcctatatcggtcagcatatgccgctctactgctctgcgatgggtaagatctata

SEQ ID NO: 760622 - DNA, 75 bp, synthetic construct
  source 1..75: mol_type = other DNA
ccgcaaccatctggcgcagatgaacaggcaacggctgaaacaatggaaccggatgcaactgaacatcatcaggac

SEQ ID NO: 760623 - DNA, 75 bp, synthetic construct
  source 1..75: mol_type = other DNA
gcctgctcgaccagctggagattcgcgacctccacaaactggtgcgtgatactgacaaagttttccctgatccga

SEQ ID NO: 760624 - DNA, 75 bp, synthetic construct
  source 1..75: mol_type = other DNA
gacaactgcgcccgctgcggggagttaccgcctgaccacaaaatttattgctgtcgggcaaaaggcgctgtcgtc

SEQ ID NO: 760625 - DNA, 75 bp, synthetic construct
  source 1..75: mol_type = other DNA
aaaatcggaacaaaacggccaaaatgcgcgacaaaatgaaccagaagcgcaacaggaaccggaaaaagtctgcgc

SEQ ID NO: 760626 - DNA, 75 bp, synthetic construct
  source 1..75: mol_type = other DNA
tacgccgttcatatgaacggcaggggatcccctgcccatggcgttacaccaatgatcgcgatgtaagaacgatgg

SEQ ID NO: 760627 - DNA, 75 bp, synthetic construct
  source 1..75: mol_type = other DNA
ttaaaaaacacaatgccagtctgccagcactgatgacaccagagcagatgaaagagtggatcgaaagctacaaca

SEQ ID NO: 760628 - DNA, 75 bp, synthetic construct
  source 1..75: mol_type = other DNA
cgcaggaaaaagagcgtccagccggaagccagagtctgtttcgcgggttgatgctgattgagattttgagcaact

SEQ ID NO: 760629 - DNA, 75 bp, synthetic construct
  source 1..75: mol_type = other DNA
agcaattaaccgaaatcgcacggaaaattcgcccggaactggtgacactggaagactggcaaaaacgccagcaag

SEQ ID NO: 760630 - DNA, 75 bp, synthetic construct
  source 1..75: mol_type = other DNA
tcttatacagccactgtcggtaagtgccggggccgaagaaacaggcatcctttactgttcgcttccggaggaatt

SEQ ID NO: 760631 - DNA, 75 bp, synthetic construct
  source 1..75: mol_type = other DNA
accgatggatgacgcgctgttgcagttcagggagtttatcgacgaaaactccggtgaattttttgttcaggtatg

SEQ ID NO: 760632 - DNA, 75 bp, synthetic construct
  source 1..75: mol_type = other DNA
accaattgggatcgaggtcatccccgcgcacgtcactgaatatctgaacaaggtactgactgaaaccgatcatgc

SEQ ID NO: 760633 - DNA, 75 bp, synthetic construct
  source 1..75: mol_type = other DNA
gcgagtcagcttgggaagaaatgacctgcttattcgcaccttccctaacgctggcggcggaaatattaccgatcg

SEQ ID NO: 760634 - DNA, 75 bp, synthetic construct
  source 1..75: mol_type = other DNA
acaaaacggaccggaagagcaacagccagggccagtaatgcaacaggaagtggaaaaggtttgcaccgcatgcag

SEQ ID NO: 760635 - DNA, 75 bp, synthetic construct
  source 1..75: mol_type = other DNA
gttaccgctgacgaagtaaacaaaattatgcaggcagccaatatcagccagcctgacgccgataagttgcttgcg

SEQ ID NO: 760636 - DNA, 75 bp, synthetic construct
  source 1..75: mol_type = other DNA
atgcccatttctgggacatcacgtccgtcagcgccctggataaggtggtcattaagttccgtagagagggcgccg

SEQ ID NO: 760637 - DNA, 75 bp, synthetic construct
  source 1..75: mol_type = other DNA
gcgcgcgacgtagccactggcgtactggcccgttcaatggacgtggatatttataaccttcatccggcacacgct

SEQ ID NO: 760638 - DNA, 75 bp, synthetic construct
  source 1..75: mol_type = other DNA
gatccagacccgcgattctgtgtaccagcatcagccagaaacggaacagaacgacctaaaatcggaacaaaacgg

SEQ ID NO: 760639 - DNA, 75 bp, synthetic construct
  source 1..75: mol_type = other DNA
agtcacaggtaaattctgttgatacgaaatatcagaaactgcgggcagaactccatgaagcccggaaaaacattc

SEQ ID NO: 760640 - DNA, 75 bp, synthetic construct
  source 1..75: mol_type = other DNA
actcatgtatcaaagcgttatggctttgccgctggggcaatggcttgttgaaagcgccggacacgctgaatcatc

SEQ ID NO: 760641 - DNA, 75 bp, synthetic construct
  source 1..75: mol_type = other DNA
gtgtgaaattcccgtcgccactctgagccttactcatcgcttccttcacctcttcttattcagcaaagatgaaga

SEQ ID NO: 760642 - DNA, 75 bp, synthetic construct
  source 1..75: mol_type = other DNA
gatccggaaatcgtggatattgcctgcggtcgctcctctgccccgatgccgcagcgagtaacagaagaaggaaaa

SEQ ID NO: 760643 - DNA, 75 bp, synthetic construct
  source 1..75: mol_type = other DNA
gcgagacggcagatcccttaattacggtgaacggtcatcgcattatcacatccaccagcaggacgtgtgaccatc

SEQ ID NO: 760644 - DNA, 75 bp, synthetic construct
  source 1..75: mol_type = other DNA
ccgcatccgtaccggtatcaccacactgtggatgtggccggggccgtggtgcggttgcacactggcctgagcgtg

SEQ ID NO: 760645 - DNA, 75 bp, synthetic construct
  source 1..75: mol_type = other DNA
aaattaaagcaagttgttgttgctgttcacggttcttgcgatttctgtgtcgacaacggactggttcgaaacact

SEQ ID NO: 760646 - DNA, 75 bp, synthetic construct
  source 1..75: mol_type = other DNA
catgcacataaaacacttacacaaatagcaatacctgttaaaggatcttgcaagtttttgcttgatgacggtaag

SEQ ID NO: 760647 - DNA, 75 bp, synthetic construct
  source 1..75: mol_type = other DNA
gcgcaccggatgattctcaacaactgggtttctctgatgacggggaaccggcgggaacggcaggtaaaccgatgc

SEQ ID NO: 760648 - DNA, 75 bp, synthetic construct
  source 1..75: mol_type = other DNA
ttgcccctaaatattcttggttttatgggaaaattcacgggtgtcttaatggaaaataaaaataaatccctgaat

SEQ ID NO: 760649 - DNA, 75 bp, synthetic construct
  source 1..75: mol_type = other DNA
tttatccgtctgaagatggaatgcgctggatgagatttgaacaacagaagataagtagagggcagttagttgaag

SEQ ID NO: 760650 - DNA, 75 bp, synthetic construct
  source 1..75: mol_type = other DNA
ggctattcacgaaaagaggtttgtgaacggcacaatgtttcgccaggatatttttctggggcattaggacggttt

SEQ ID NO: 760651 - DNA, 75 bp, synthetic construct
  source 1..75: mol_type = other DNA
gtctgtcgctgtctgatgtgctgaatctgaaagcggataccatgttcacgctgttgcctcgcgtgacctcgccac

SEQ ID NO: 760652 - DNA, 75 bp, synthetic construct
  source 1..75: mol_type = other DNA
attgagcaggctggatccctgcgtggtctgtcgctgtctgatgtgctgaatctgaaagcggataccatgttaagg

SEQ ID NO: 760653 - DNA, 75 bp, synthetic construct
  source 1..75: mol_type = other DNA
attgaccaggctggatccctgcgtggtctgtcgctgtctgatgtgctgaatctgaaagcggataccatgttgaag

SEQ ID NO: 760654 - DNA, 75 bp, synthetic construct
  source 1..75: mol_type = other DNA
agtgaaagcgtatggcggcggcgtgaatcaggcgctgcgccagctaacgacccaacgcaagacgccattaaccga

SEQ ID NO: 760655 - DNA, 75 bp, synthetic construct
  source 1..75: mol_type = other DNA
attgaagcgttgctggggcagtgtgacggcaaaattatcaacagtgattatcaggcattcgttctgctgcgggtg

SEQ ID NO: 760656 - DNA, 75 bp, synthetic construct
  source 1..75: mol_type = other DNA
atttatttggagagaaatgtatgacttttccgaggactgcgtattaatggttttagccgactctcattacgatga

SEQ ID NO: 760657 - DNA, 75 bp, synthetic construct
  source 1..75: mol_type = other DNA
ttgcccctaagcattcttggttttatgggaaaattcgcgggtgtcttaatggaaaataaaaacaaatccctgaat

SEQ ID NO: 760658 - DNA, 75 bp, synthetic construct
  source 1..75: mol_type = other DNA
ttctggcagaatcaatggataaactgcctttgccgaaagcggaactggttatctatttccacgtcttctataacc

SEQ ID NO: 760659 - DNA, 75 bp, synthetic construct
  source 1..75: mol_type = other DNA
cagcccgccgtgtcgcgctgggtagtctgctgtttaagctggtgggtagcctgattatcctgccgtttgttcatt

SEQ ID NO: 760660 - DNA, 75 bp, synthetic construct
  source 1..75: mol_type = other DNA
gttctctataccgccattaagctgtatctggcgcggatgccaaaagaggaactggcagaagaagagtcgcgtcgc

SEQ ID NO: 760661 - DNA, 75 bp, synthetic construct
  source 1..75: mol_type = other DNA
acgaattaaacgactttgatcttcgtcgtcttgagaagatgataaataacctgccttcatcaggtgatccagaag

SEQ ID NO: 760662 - DNA, 75 bp, synthetic construct
  source 1..75: mol_type = other DNA
ctgtggatatggctgcggacgtggtgcggtggcgcactggccagagagtcgcgttcacgctgcaccggagaaagg

SEQ ID NO: 760663 - DNA, 75 bp, synthetic construct
  source 1..75: mol_type = other DNA
gcgcaagctggcggatgatatcaacgtcctctacaccgcgattaaactttatctggcgcggatgccaaaagaaga

SEQ ID NO: 760664 - DNA, 75 bp, synthetic construct
  source 1..75: mol_type = other DNA
gaatggtccgcagcacttcgtgcaaccccgggtattctggactattcccgcgccgctatttttgcacttatccga

SEQ ID NO: 760665 - DNA, 75 bp, synthetic construct
  source 1..75: mol_type = other DNA
ttaaggggattgaaacctgcgattctgtgaaccagaaccagcaagaaacggaacagaacgaccagaaagcagaac

SEQ ID NO: 760666 - DNA, 75 bp, synthetic construct
  source 1..75: mol_type = other DNA
aagattattaatgcattgcgggattatcttgtatcaggcgaaaccagaaaaacatcgtgtgaacgatacggtgcc

SEQ ID NO: 760667 - DNA, 75 bp, synthetic construct
  source 1..75: mol_type = other DNA
atctatttccacgtcttctacaaccttgtgcgctgtctggtaatgctgccatttgttgacccgatggcgcggttt

SEQ ID NO: 760668 - DNA, 75 bp, synthetic construct
  source 1..75: mol_type = other DNA
gtattggtcttgggctgattttgctggcgttggagttgattgtgcaggccgtaacgccgatcacccaggcaaacg

SEQ ID NO: 760669 - DNA, 75 bp, synthetic construct
  source 1..75: mol_type = other DNA
cgcgccgggcaactgggccgcgtcggtattggtcttgggttgattttgctggcgctggagttgattgtgcaggcc

SEQ ID NO: 760670 - DNA, 75 bp, synthetic construct
  source 1..75: mol_type = other DNA
gcaccaattgggatcgaggttatccctgcgcatgtcactgaatatctgaacaaggtgctgattgaaaccgatcat

SEQ ID NO: 760671 - DNA, 75 bp, synthetic construct
  source 1..75: mol_type = other DNA
ggacacgctgaatcatcaatttactgggaagatcctgaaacagcaattttgtgtcggtgccgtccggacaaaatt

SEQ ID NO: 760672 - DNA, 75 bp, synthetic construct
  source 1..75: mol_type = other DNA
agcgtgttgccgaaacttcgcgatcgccagcagcttgctgcgttaattcgtagcggtgagctggaagtacagggc

SEQ ID NO: 760673 - DNA, 75 bp, synthetic construct
  source 1..75: mol_type = other DNA
tatgtgtggataaaacagttgtacatcacctgatcactcccaagaaagcagaaaatatattctgtccaggaaatg

SEQ ID NO: 760674 - DNA, 75 bp, synthetic construct
  source 1..75: mol_type = other DNA
agtacatactcaggttcacaacaaaatactggtgcatctgacacgaccgcacaaccagagccggtaaaagttacc

SEQ ID NO: 760675 - DNA, 75 bp, synthetic construct
  source 1..75: mol_type = other DNA
tttgcaccgcctgcggtcaggctggcggcggcaactgtcctgactgtggcgcggtgatgggcgacgcaacgtatc

SEQ ID NO: 760676 - DNA, 75 bp, synthetic construct
  source 1..75: mol_type = other DNA
gtgctggccgttatcagtgaaatacagtccttcgccctgaccgatgacgaacgtgaactgatgcagcagtggctg

SEQ ID NO: 760677 - DNA, 75 bp, synthetic construct
  source 1..75: mol_type = other DNA
ttgttgttacacataacctggcctttggtgtgctgaccggcgtactgatagcctcgctcaactttgccactaaag

SEQ ID NO: 760678 - DNA, 75 bp, synthetic construct
  source 1..75: mol_type = other DNA
gaacataaatacccgcaaacgcaaaccaccagggcgcgtaaaccgggaagaagccgcaatggcgacgcctcgcgc

SEQ ID NO: 760679 - DNA, 75 bp, synthetic construct
  source 1..75: mol_type = other DNA
cggggggttaggggggtgaagcttgcagaaaaactaagttttcctgacggaaaactactacgactgaaagtcgcg

SEQ ID NO: 760680 - DNA, 75 bp, synthetic construct
  source 1..75: mol_type = other DNA
atctggcggaaagccgccattttggccgtagcgcgcgggcaatgcacgttagcccgtctacgctttcgcgacaaa

SEQ ID NO: 760681 - DNA, 75 bp, synthetic construct
  source 1..75: mol_type = other DNA
gtcatgcttgccactgtcgcggttgtagtggcaacacataatctggccttcggcgtgctgaccggcgtactgatt

SEQ ID NO: 760682 - DNA, 75 bp, synthetic construct
  source 1..75: mol_type = other DNA
tcaccggagttaatttatgtgtagataaagcagttgtacattacctgatcactccacaaaaaaatagaaaatata

SEQ ID NO: 760683 - DNA, 75 bp, synthetic construct
  source 1..75: mol_type = other DNA
agatggaacagagttcctggatgacccggatatctgtgctcctatcactttctatctcctgtatcgggtaacctc

SEQ ID NO: 760684 - DNA, 75 bp, synthetic construct
  source 1..75: mol_type = other DNA
attcaggacatgcttcagaaatacggaaatccggcatcgttcgcaccacaaactaagataaaacgacaaacaact

SEQ ID NO: 760685 - DNA, 75 bp, synthetic construct
  source 1..75: mol_type = other DNA
ggatttttttcttacctggttatgataagcataaaatcgaattatcgaaaatgcacaaggattcattcctaaccc

SEQ ID NO: 760686 - DNA, 75 bp, synthetic construct
  source 1..75: mol_type = other DNA
tggttcaccagtgaattttgctatacttagtaaatgtatctctcgtgatgatttcgaaacgcttacgaagctgat

SEQ ID NO: 760687 - DNA, 75 bp, synthetic construct
  source 1..75: mol_type = other DNA
gaagaattactgcttatcaatgcttttacgcggtaattttgaccatcactttttctgcaatgctaagagagacga

SEQ ID NO: 760688 - DNA, 75 bp, synthetic construct
  source 1..75: mol_type = other DNA
tgcagcccttacggaagaaaaggacgcagaggcgctggccggagagctgcatgatgttaaaaatgagcttttgat

SEQ ID NO: 760689 - DNA, 75 bp, synthetic construct
  source 1..75: mol_type = other DNA
atcaataacctctcccacgcgttgatgctgaaaaccgcgcgtgatgaagtgatcctgccgtactggcgtcaactg

SEQ ID NO: 760690 - DNA, 75 bp, synthetic construct
  source 1..75: mol_type = other DNA
gcgccagtaccgccagcttaaccaggtggagatcctcggcaaaatcaacggcgcggtcggtaactataacgccca

SEQ ID NO: 760691 - DNA, 75 bp, synthetic construct
  source 1..75: mol_type = other DNA
tggaataaatgaaatagacgagaatggtaaatttgtaattaaaaaactaaactcaaaactatatccattttttaa

SEQ ID NO: 760692 - DNA, 75 bp, synthetic construct
  source 1..75: mol_type = other DNA
acagaatttaatatccaaaatttttaataaaattgcctccaaaatatgtggaataggatacaatgttaaacgata

SEQ ID NO: 760693 - DNA, 75 bp, synthetic construct
  source 1..75: mol_type = other DNA
ttaagagacaattcctgttggctatttccctgaatggtcagcgtaatgctgttaacctggcgaatgatattgata

SEQ ID NO: 760694 - DNA, 75 bp, synthetic construct
  source 1..75: mol_type = other DNA
taaaaaccgccacccgcaccagccgtggagaccagtttgccgaaggctgggtgctggccgttatcagtgaaatac

SEQ ID NO: 760695 - DNA, 75 bp, synthetic construct
  source 1..75: mol_type = other DNA
ggggaaatggagccaacttcgacaacacgattttgcgccgttcatacgaacggcaggggatcccctgcccgtggc

SEQ ID NO: 760696 - DNA, 75 bp, synthetic construct
  source 1..75: mol_type = other DNA
taccccacaatgcactggatgatgcccgtcaccaggcgaaatacgtttcagctatctggcaaaaactgatcccga

SEQ ID NO: 760697 - DNA, 75 bp, synthetic construct
  source 1..75: mol_type = other DNA
gaatggtcatcataagctcacatccaccagcagagcagggattcatctgatgatcgaccttgaaaccatgggaaa

SEQ ID NO: 760698 - DNA, 75 bp, synthetic construct
  source 1..75: mol_type = other DNA
aaagcgttatggctttgccgctggggcaatggcttgttgaaagcgccggacacgctgaatcatcaatttactggg

SEQ ID NO: 760699 - DNA, 75 bp, synthetic construct
  source 1..75: mol_type = other DNA
aaaacacgatggtgaagaaaaaccgcaaccatcttgcgcaatggcagataaacaggcaacggctgaaacagtgga

SEQ ID NO: 760700 - DNA, 75 bp, synthetic construct
  source 1..75: mol_type = other DNA
ttccgcccaaaaatcctgtcgatgcagacaaattactggctgcctctcgcggagaatttgttgaagggattagcg

SEQ ID NO: 760701 - DNA, 75 bp, synthetic construct
  source 1..75: mol_type = other DNA
caaccacccggatcgcaaatctgaaatcagctatttcgggtttgatgaagaaaccgggctggaaatcagggtccg

SEQ ID NO: 760702 - DNA, 75 bp, synthetic construct
  source 1..75: mol_type = other DNA
ccctcctctgctgaaagccagtggaacacgggagcagctcctggagcaaattgaaactgtagatccagaactggc

SEQ ID NO: 760703 - DNA, 75 bp, synthetic construct
  source 1..75: mol_type = other DNA
atgggtcaaggggatggaaacccgcgattctgtgaaccagaaccagcaagaaacggaacagaacggccagaaagc

SEQ ID NO: 760704 - DNA, 75 bp, synthetic construct
  source 1..75: mol_type = other DNA
aaagagcaattaaccgaaatcgcacggaaaattcgcccggaactggtgacactggaggactggcaaaaacgccag

SEQ ID NO: 760705 - DNA, 75 bp, synthetic construct
  source 1..75: mol_type = other DNA
gtagtgcaacaacaggaaacggagaaagtttgcaccgcctgcggtaaggctggcggcggcaactgtcctgactgt

SEQ ID NO: 760706 - DNA, 75 bp, synthetic construct
  source 1..75: mol_type = other DNA
atgggtgaaggggattgaaacccgcgattctgtgaaccagaaccagcaagaatcggaacggaacgaccagaaagc

SEQ ID NO: 760707 - DNA, 75 bp, synthetic construct
  source 1..75: mol_type = other DNA
ctggagcaaattgaaactgtagatccagaactggcaaaaaaagaacgtgctaaatctttgccttacaacatcagt

SEQ ID NO: 760708 - DNA, 75 bp, synthetic construct
  source 1..75: mol_type = other DNA
atatttaatacgtttatgaatagtcctgttctgggtactggcttgggggggagtgcagaagacgtacgttcatta

SEQ ID NO: 760709 - DNA, 75 bp, synthetic construct
  source 1..75: mol_type = other DNA
gagtacgacagtattcgggtagttaagcagaaagtttccattccggttatcgcgaatggcgacattactgacccg

SEQ ID NO: 760710 - DNA, 75 bp, synthetic construct
  source 1..75: mol_type = other DNA
acacgggagcaacttctggagcaaattgaaactatagatccagaactggcgaaaaaagaacgtgctaaatctttg

SEQ ID NO: 760711 - DNA, 75 bp, synthetic construct
  source 1..75: mol_type = other DNA
taagtgattgttgtacaaatgttagcaaagaagcagtggatgagtttttacggataaaagcctttaatcccgcta

SEQ ID NO: 760712 - DNA, 75 bp, synthetic construct
  source 1..75: mol_type = other DNA
ctgtttgtggcacaaaaatatgatccgacaactccttggataaatgcccgtaaaatggcagataaattttcagct

SEQ ID NO: 760713 - DNA, 75 bp, synthetic construct
  source 1..75: mol_type = other DNA
taaagggagtattattataataagtggtgggcctggattacccggaattaatccttatatcaattttgactggcc

SEQ ID NO: 760714 - DNA, 75 bp, synthetic construct
  source 1..75: mol_type = other DNA
gatcgaaagctacaacagcattcttatacagccactgtcggtaagcgctggggccgaagaaacaggcatccttta

SEQ ID NO: 760715 - DNA, 75 bp, synthetic construct
  source 1..75: mol_type = other DNA
gaatatcaggaaaaagatccggtggaaatggaaggcgctgaacatccgcacaatgagaatgctggcagcgatccg

SEQ ID NO: 760716 - DNA, 75 bp, synthetic construct
  source 1..75: mol_type = other DNA
aaaacacaatgccagtctgccatcactgatgacaccagagctgatgaaagagtggctcgaaagctacaacagcac

SEQ ID NO: 760717 - DNA, 75 bp, synthetic construct
  source 1..75: mol_type = other DNA
aactggcgggaggccaggaagaaaacgcgcaggcagacgcccacggggattgccaggattgcgaagtctctgtag

SEQ ID NO: 760718 - DNA, 75 bp, synthetic construct
  source 1..75: mol_type = other DNA
gcaattcaagcttggggctgatgactgcttttttcgaagcatacctggacgcagactacaccgatcgcggtctgc

SEQ ID NO: 760719 - DNA, 75 bp, synthetic construct
  source 1..75: mol_type = other DNA
agtcagcctcggttatgtgcggcaggaacgacttaaagatcgcctgcaccgtgaaattattgagcgtgattatca

SEQ ID NO: 760720 - DNA, 75 bp, synthetic construct
  source 1..75: mol_type = other DNA
ggtattaagccagaaattgctatctctttagctattcctctgggattgctaggcgtggttctggaaaacgtacgt

SEQ ID NO: 760721 - DNA, 75 bp, synthetic construct
  source 1..75: mol_type = other DNA
gcaaatccggcggcgttatttcgtttaaaaatatgcattcctgcggtaccgctaccgcaatatccgttccgtgca

SEQ ID NO: 760722 - DNA, 75 bp, synthetic construct
  source 1..75: mol_type = other DNA
acgacaacctgttctcatcgattttggggctgtgggacgtaagcaccagcgtctataatcctgaccgcgatttgt

SEQ ID NO: 760723 - DNA, 75 bp, synthetic construct
  source 1..75: mol_type = other DNA
tcgaattgttcattaaatccccgcttgaaaacgggcttacccgtggcgaacaaatggaactggcacgaattgcgc

SEQ ID NO: 760724 - DNA, 75 bp, synthetic construct
  source 1..75: mol_type = other DNA
tacctgccaaccctgaacaacaccaaggctatgctcgctaatgtcagggaacagttgcaaaaccttaacaatgta

SEQ ID NO: 760725 - DNA, 75 bp, synthetic construct
  source 1..75: mol_type = other DNA
cttatcaggtaccagttgaagtccgtccggttcgtcgtaatgctctggcaatgcgttggatcgttgaagctgctc

SEQ ID NO: 760726 - DNA, 75 bp, synthetic construct
  source 1..75: mol_type = other DNA
ttttctggcacgacctggcagcaccgatcctggcgggaattattaccgcagtgattgtcagctggtggcgtaacc

SEQ ID NO: 760727 - DNA, 75 bp, synthetic construct
  source 1..75: mol_type = other DNA
gcccaatgaggcccgtaaacgtgagaacctgccgccccttgccggcggtgatgcactgtatcttcagcagcagaa

SEQ ID NO: 760728 - DNA, 75 bp, synthetic construct
  source 1..75: mol_type = other DNA
ccggtggatgcgcagacggtggaacaactgaagatgaccgctgaaattgtctgttcggtgttccgtgtcccggcc

SEQ ID NO: 760729 - DNA, 75 bp, synthetic construct
  source 1..75: mol_type = other DNA
tgatgcactgtatcttcagcagcagaactacagtctggaggcgctgtcccgtcgtgatgcccgtgaagatccgtt

SEQ ID NO: 760730 - DNA, 75 bp, synthetic construct
  source 1..75: mol_type = other DNA
cgccgctccacccgttccagtagtaccggaagaaaaactaatgccgaaccctcttagcagatatgcggttgatgc

SEQ ID NO: 760731 - DNA, 75 bp, synthetic construct
  source 1..75: mol_type = other DNA
gcactgtcctcgcttgaggcaaaaccaataggtgcattccacattgcagaacagcaagttgacggtacaagtgac

SEQ ID NO: 760732 - DNA, 75 bp, synthetic construct
  source 1..75: mol_type = other DNA
tacgcggttgatgctgttgccgctattgcagaggtgagaggctggaacgcctgccgcgctgcaatgcttcaggga

SEQ ID NO: 760733 - DNA, 75 bp, synthetic construct
  source 1..75: mol_type = other DNA
aaagcgcggcgtggcgattcgtgaggcctttaaccagatacatcgttacagcaaagagagttttaacagcgaaaa

SEQ ID NO: 760734 - DNA, 75 bp, synthetic construct
  source 1..75: mol_type = other DNA
cattggtaaaatctttgaaaccaaccacgcgttctctatcgaatctgatagcggcgttgagctgttcgtccactt

SEQ ID NO: 760735 - DNA, 75 bp, synthetic construct
  source 1..75: mol_type = other DNA
ttgcctgaaaatccagccagctacagggtcgttcgcacgaaatcttatttattcaacaaagcccctattttcccg

SEQ ID NO: 760736 - DNA, 75 bp, synthetic construct
  source 1..75: mol_type = other DNA
aatcttctcctttgccgccaatgaagaacaaaatgccattggtgaaatttccgatgaaacttttgataccagcgc

SEQ ID NO: 760737 - DNA, 75 bp, synthetic construct
  source 1..75: mol_type = other DNA
gcaggacaatatcgactgcgaatcgggaattatctttgacaacgattaggataaaacggattcggcagcactgct

SEQ ID NO: 760738 - DNA, 75 bp, synthetic construct
  source 1..75: mol_type = other DNA
ggcatggccttctggcatgatttagcggctccggtcattgctggcattcttgccagtatgatcgtgaactggctg

SEQ ID NO: 760739 - DNA, 75 bp, synthetic construct
  source 1..75: mol_type = other DNA
tacccactttcgactggtaatcaggacaaaagacactggatgaaattattaaccacagaaacggcgctggatatt

SEQ ID NO: 760740 - DNA, 75 bp, synthetic construct
  source 1..75: mol_type = other DNA
aatacctgcgtgccgagaacgtcctgcaaaactatgatgaatttgccacgctgaaagccctgcaacaaatcgatc

SEQ ID NO: 760741 - DNA, 75 bp, synthetic construct
  source 1..75: mol_type = other DNA
gaggccttcaaccagatacatcgttacagcaaagagagttttaacagcgaaaattccctgtttaagtatctgcaa

SEQ ID NO: 760742 - DNA, 75 bp, synthetic construct
  source 1..75: mol_type = other DNA
acacgctgattaaagacctcaaagactttaccgctacctttttccagaaacatactctgcttaatgtcttagtga

SEQ ID NO: 760743 - DNA, 75 bp, synthetic construct
  source 1..75: mol_type = other DNA
agcggtggctttatctggcacaccaccggttctggtaaaaccctcaccagctttaaagccgcgcggctggcaaca

SEQ ID NO: 760744 - DNA, 75 bp, synthetic construct
  source 1..75: mol_type = other DNA
agaactggactttattgataaagttttctttgtggtcgacaggaaagacctcgattaccagaccatgaaggaata

SEQ ID NO: 760745 - DNA, 75 bp, synthetic construct
  source 1..75: mol_type = other DNA
gcaatatatcctgaacaacttccgccagaagacccaccgtacttaccccggctccaaaggttttaatgccatgct

SEQ ID NO: 760746 - DNA, 75 bp, synthetic construct
  source 1..75: mol_type = other DNA
cacacgccaggagggcgcatctgacggtaataaggccataagcgaaacagagcgtgatgcggtgaaggcgatgtt

SEQ ID NO: 760747 - DNA, 75 bp, synthetic construct
  source 1..75: mol_type = other DNA
aaagcgtggcgtggcgattcgtgaggctttcaaccagttacatcgttacagcaaggagagttttaacagcgaaaa

SEQ ID NO: 760748 - DNA, 75 bp, synthetic construct
  source 1..75: mol_type = other DNA
gacgtcactatcctggttaatggtttgccgctggtgcaaatcgaactgaaaaagcgtggcgtggcgattcgtgag

SEQ ID NO: 760749 - DNA, 75 bp, synthetic construct
  source 1..75: mol_type = other DNA
tgataagtacatcaaagctgagcaaacaggcgacagctatcagagcgaatcggacctggaacgtgaactaattca

SEQ ID NO: 760750 - DNA, 75 bp, synthetic construct
  source 1..75: mol_type = other DNA
acaggcgacagctatcagagcgaatcggacctggaacgggaactgattcaggacctgcgaaatcagggctatgaa

SEQ ID NO: 760751 - DNA, 75 bp, synthetic construct
  source 1..75: mol_type = other DNA
tgtggaaaattaagagctcctttacagcgaagaactggtcaaaaccggaaagcggtgggtatatctggcacacca

SEQ ID NO: 760752 - DNA, 75 bp, synthetic construct
  source 1..75: mol_type = other DNA
gcgcaaaaggttttaatgctatgttggcagtgagcagcgtggatgctgcaaaagcctattacgcggcgtttaaac

SEQ ID NO: 760753 - DNA, 75 bp, synthetic construct
  source 1..75: mol_type = other DNA
aatgtagtgttagaaaagagttatgcagagtatatggaaggctttactgatgctgctactggtgaagctaagcgc

SEQ ID NO: 760754 - DNA, 75 bp, synthetic construct
  source 1..75: mol_type = other DNA
gcgactttatttttgacgacgggcgacttgagaacatctatttgatagataaaaagaatctcatgcgcaataagg

SEQ ID NO: 760755 - DNA, 75 bp, synthetic construct
  source 1..75: mol_type = other DNA
tggaaatcaccggtaaatccgtcagcatcgatttcatgctgcagtggataaatagcactgacgtgccgcgtcacc

SEQ ID NO: 760756 - DNA, 75 bp, synthetic construct
  source 1..75: mol_type = other DNA
atcctccatgtcctgtataagcataaaaatgaaggaacccccgcaacccttccttatgttgatgcaatcatggcc

SEQ ID NO: 760757 - DNA, 75 bp, synthetic construct
  source 1..75: mol_type = other DNA
cacgaccagcggcaaacgtgccagtgcagtgctgggcggggtatcaaaaaccatgcaggaagtacagcgcccact

SEQ ID NO: 760758 - DNA, 75 bp, synthetic construct
  source 1..75: mol_type = other DNA
ttaccggtacacctattttcccggaaaacgcactgggggcagaaaccaccgccagcgtcttcgggcgtgaattac

SEQ ID NO: 760759 - DNA, 75 bp, synthetic construct
  source 1..75: mol_type = other DNA
gcaaaactatgatgaatttgccacgctaaaagccctgcaacaaatcgatcttagcgatcctgttgcggtagaaaa

SEQ ID NO: 760760 - DNA, 75 bp, synthetic construct
  source 1..75: mol_type = other DNA
tgttgccgtggagtttgacaggaaaggtgactggcgaatgaaatgggctacttacatcccggggcatcctgacgc

SEQ ID NO: 760761 - DNA, 75 bp, synthetic construct
  source 1..75: mol_type = other DNA
ttcagacgcttttatcagtttggttttactggtacgcctattttcccggaaaatgcactgggggcagaaaccacc

SEQ ID NO: 760762 - DNA, 75 bp, synthetic construct
  source 1..75: mol_type = other DNA
aaagcttattacacgacgtttaaaatgctacaggaagaagcagcaaagaaatcaggcagctataaatgccttcgg

SEQ ID NO: 760763 - DNA, 75 bp, synthetic construct
  source 1..75: mol_type = other DNA
gttgatcaaagaagaaaatctcaatgaagaggcggcgaaacgctatattcgcacgtctttaaaacgcgaatacgc

SEQ ID NO: 760764 - DNA, 75 bp, synthetic construct
  source 1..75: mol_type = other DNA
aatacctgcgtgccgagaacatcctgcaaaactatgatgaatttgtcacactgaaagccctgcaacaaatcgacc

SEQ ID NO: 760765 - DNA, 75 bp, synthetic construct
  source 1..75: mol_type = other DNA
ttaccggtacccctattttcccggaaaacgccttaggctcagaaacaaccgccagcgtatttggtcgtgaattgc

SEQ ID NO: 760766 - DNA, 75 bp, synthetic construct
  source 1..75: mol_type = other DNA
aatcgtcagaaaaaaggtaaagaagccctgactgaagaggtcagacgcttaatccggtcaagtctgggcaaccgt

SEQ ID NO: 760767 - DNA, 75 bp, synthetic construct
  source 1..75: mol_type = other DNA
gaagaggctgcaaggcgctatatccgcacatcactaaaacgagagtatgctaccgaaaatgggacggaattaaat

SEQ ID NO: 760768 - DNA, 75 bp, synthetic construct
  source 1..75: mol_type = other DNA
gctgaaaatcagcaggcgtttcttcatcccatgcgtattcaggaaatcacgcaatatatcctgaacaacttccgc

SEQ ID NO: 760769 - DNA, 75 bp, synthetic construct
  source 1..75: mol_type = other DNA
gaagaagctgcaaggcgctatatccgcacatcactaaaacgggagtatgccaccgaaaatgggacggagctaaat

SEQ ID NO: 760770 - DNA, 75 bp, synthetic construct
  source 1..75: mol_type = other DNA
cccggtactttgccagtaccactaagcgggataaaaacagctttgatttcaccatgaactgggcgaagtcggata

SEQ ID NO: 760771 - DNA, 75 bp, synthetic construct
  source 1..75: mol_type = other DNA
gaagcgatctcgtgaagtgcaaaatgaacagcagcaggtttataccctggcacgcattgaaaatcagattgttga

SEQ ID NO: 760772 - DNA, 75 bp, synthetic construct
  source 1..75: mol_type = other DNA
actgttgccctgtatcgaacaggccagagaggatatccgtaccctgcgccaactgcagcttcagcaccagaaccg

SEQ ID NO: 760773 - DNA, 75 bp, synthetic construct
  source 1..75: mol_type = other DNA
cactggatattctgattgcgtggctgcaggacaatatcgactgcgaaccgggaattatctttgacaacgatgagg

SEQ ID NO: 760774 - DNA, 75 bp, synthetic construct
  source 1..75: mol_type = other DNA
atggtgaattactgtcttatatcattggcgctgacaaacgttacgcggcaacaatcaggcttcgcctgaacacgc

SEQ ID NO: 760775 - DNA, 75 bp, synthetic construct
  source 1..75: mol_type = other DNA
cccctaaatcctgattaccctatttttcgtagtgcagatatgaacttacagatcataggtgtaatgatcgaacac

SEQ ID NO: 760776 - DNA, 75 bp, synthetic construct
  source 1..75: mol_type = other DNA
attgcaggattattacgccatactctcggccaactcaatgtgcaaaaacagcaacttgaacaagaaattaccgat

SEQ ID NO: 760777 - DNA, 75 bp, synthetic construct
  source 1..75: mol_type = other DNA
atgaaatcattaaccacggatacagtgctggatattctgattgcatggctgcaggacaatatcgactgcaaatcg

SEQ ID NO: 760778 - DNA, 75 bp, synthetic construct
  source 1..75: mol_type = other DNA
atgaaatcattaaccacggaaacggcgctggatattctgattgcgtggctgcaggacaatatcgcctacgaatcg

SEQ ID NO: 760779 - DNA, 75 bp, synthetic construct
  source 1..75: mol_type = other DNA
atgcctgccgggtttacccactttcgactggtaaccaggaacaacatgaaatcattaaccacggaaaccgcactg

SEQ ID NO: 760780 - DNA, 75 bp, synthetic construct
  source 1..75: mol_type = other DNA
acaatatcgactgcgaatcgggaattatcttcgacaacgatgaagataaaacggattcggcagcactgttgccct

SEQ ID NO: 760781 - DNA, 75 bp, synthetic construct
  source 1..75: mol_type = other DNA
gaatcgggaattatctttgacaacgatgaggataaaacggattcggcagcactgcttgaaccgccccgggaatcc

SEQ ID NO: 760782 - DNA, 75 bp, synthetic construct
  source 1..75: mol_type = other DNA
accgtaaaaattattcaccagttgttagcgggcgtacatattgctgccggagccgaagcgatggcacttgcagcc

SEQ ID NO: 760783 - DNA, 75 bp, synthetic construct
  source 1..75: mol_type = other DNA
acggcgtctccgttcgtgtcgatggcgatggtcgctataacttcaacgatcttcatgctgcggcagtagcaaaag

SEQ ID NO: 760784 - DNA, 75 bp, synthetic construct
  source 1..75: mol_type = other DNA
gagtatttacaaaccggaaggtctgccagatcagtgtgaaattgttgatacgcccgggctgtttggggataaaga

SEQ ID NO: 760785 - DNA, 75 bp, synthetic construct
  source 1..75: mol_type = other DNA
cgcccgttactcggtttcacccgcgacgatgagcagatgattgaagacgtcattatcaggcatctcggcaaataa

SEQ ID NO: 760786 - DNA, 75 bp, synthetic construct
  source 1..75: mol_type = other DNA
acgtcatctgggctacgaaagcggtggtgaccaactgaaatcaggacttttccggccgtttctgtggcatatacg

SEQ ID NO: 760787 - DNA, 75 bp, synthetic construct
  source 1..75: mol_type = other DNA
aggctgttttctgtgtggtcgctttcgtcttcatggtggtaatagctggcgcgactgcggcaattattagctata

SEQ ID NO: 760788 - DNA, 75 bp, synthetic construct
  source 1..75: mol_type = other DNA
catcgctaagcaggcccgtagtcgtttacaggcgaagttcggcggtcaggagttcctgattggcctggatcccgc

SEQ ID NO: 760789 - DNA, 75 bp, synthetic construct
  source 1..75: mol_type = other DNA
ggtcgagtttaccggcaaggtgcaacgtattgctcagattcatcagctcggacttaaagaccggccaaacccaca

SEQ ID NO: 760790 - DNA, 75 bp, synthetic construct
  source 1..75: mol_type = other DNA
tcgctggatgagtattttccccgtattcactctgctttccttattgaagggaacctgaatctggtggtagaccag

SEQ ID NO: 760791 - DNA, 75 bp, synthetic construct
  source 1..75: mol_type = other DNA
aatcgaaagagatcagcaagtgcgccagccagatggcccggtggggtgtcggtggtcgtaagcagctattgcacg

SEQ ID NO: 760792 - DNA, 75 bp, synthetic construct
  source 1..75: mol_type = other DNA
aagccaaatggctaagtggggcgttggtgggcgaaaaagattgcttcatgttgcacgtgagagagcggcaaatga

SEQ ID NO: 760793 - DNA, 75 bp, synthetic construct
  source 1..75: mol_type = other DNA
ttttattaaaaacggcgtcgtatatcgcagtgatgacgggatagtaatgaaagagtggttattcaaaagtaaaga

SEQ ID NO: 760794 - DNA, 75 bp, synthetic construct
  source 1..75: mol_type = other DNA
aacctggaagaagaaatgttgattgaggttattaaaaatgaaaatcggggtaagttatttccgggcgaaagataa

SEQ ID NO: 760795 - DNA, 75 bp, synthetic construct
  source 1..75: mol_type = other DNA
atggacgtttacgaagatctctacctacagaccaatagccgcactttttattttctgaaaagcggcgtcgtatat

SEQ ID NO: 760796 - DNA, 75 bp, synthetic construct
  source 1..75: mol_type = other DNA
gtaatcagggaaattcacaacatgaaatcattaacgacagaaacggcgctggatattctgattgcgtggctgcag

SEQ ID NO: 760797 - DNA, 75 bp, synthetic construct
  source 1..75: mol_type = other DNA
cgtatacagtgcgctggagaccctggctcagcgctctggtaaatctgaactggaagcattcgaagtagctctcga

SEQ ID NO: 760798 - DNA, 75 bp, synthetic construct
  source 1..75: mol_type = other DNA
atgcctgccgggtttacccactttcgactggtaaccagcaacaacatgaaatcattaaccacggaaactgctctg

SEQ ID NO: 760799 - DNA, 75 bp, synthetic construct
  source 1..75: mol_type = other DNA
atgcctgccgggtttacccactttccactggtaaccaggaacaacatgaaatcattaaccacggaaactgctctg

SEQ ID NO: 760800 - DNA, 75 bp, synthetic construct
  source 1..75: mol_type = other DNA
actgattgcagctcatttgtcaaattctgaaacaatgacttatgttactcgtcttgggttcccaattgtcagcat

SEQ ID NO: 760801 - DNA, 75 bp, synthetic construct
  source 1..75: mol_type = other DNA
gaggctcttgataatcgttcgtcgatggattggtgtgttgctgtccatgatatgaatgcagggtttgatgaaaag

SEQ ID NO: 760802 - DNA, 75 bp, synthetic construct
  source 1..75: mol_type = other DNA
ttcgcacactaccgttggttatcccttcggagttttagtcaccaggcgggcgcttccagtaagcagcccgctttg

SEQ ID NO: 760803 - DNA, 75 bp, synthetic construct
  source 1..75: mol_type = other DNA
agcaacgcaggttacggaaaagaagacgacagcgcagtcatcaagattttctctggcatcactctaccgggagcg

SEQ ID NO: 760804 - DNA, 75 bp, synthetic construct
  source 1..75: mol_type = other DNA
gtgctgtttggtgaaacaggcgttgcacaacatctgaaacccggtacggcagtaatggtttcttccactatcgct

SEQ ID NO: 760805 - DNA, 75 bp, synthetic construct
  source 1..75: mol_type = other DNA
cgtatcggttttgtaaatcaacaaattaccaccctccagcagagtattgactatgcaaaagagacgctgcgtctg

SEQ ID NO: 760806 - DNA, 75 bp, synthetic construct
  source 1..75: mol_type = other DNA
atgcctgccgggtttacccactttctactggtaaccagcaacaacatgaaatcattaaccacggaaacagctctg

SEQ ID NO: 760807 - DNA, 75 bp, synthetic construct
  source 1..75: mol_type = other DNA
atgcctgccgggtttacccactttcaactggtaaccagtaacaacatgaaatcattaaccacggaaacggctctg

SEQ ID NO: 760808 - DNA, 75 bp, synthetic construct
  source 1..75: mol_type = other DNA
ataaaacggattcggcagcactgttgccctgtattgaacaggcgagggagggtatccgtaccctgcgccaacagt

SEQ ID NO: 760809 - DNA, 75 bp, synthetic construct
  source 1..75: mol_type = other DNA
tcagacaggccagccgggaactgaatattccggtggaatggggcggcgactggaagaccctgaaagacggaccgc

SEQ ID NO: 760810 - DNA, 75 bp, synthetic construct
  source 1..75: mol_type = other DNA
agccagttgctaaaactgaaacatcaaccgttgcagaacacaaagtccaaaaaacattcgaatatggtgaaaaaa

SEQ ID NO: 760811 - DNA, 75 bp, synthetic construct
  source 1..75: mol_type = other DNA
gtgcgaatgccaaaccgcaaacgtgcaagtgcggtttatctcggaggaggttttgtattgagcataattggttca

SEQ ID NO: 760812 - DNA, 75 bp, synthetic construct
  source 1..75: mol_type = other DNA
cgctggggtgggtcattcagaacattgtgctggggccgatgacgctgctccttgatggcctcggtaccgtgctga

SEQ ID NO: 760813 - DNA, 75 bp, synthetic construct
  source 1..75: mol_type = other DNA
ggaattatcttcgacaacgatgaggataaaacggattcagcagcactgttgccctgtatcgaacaggccagagag

SEQ ID NO: 760814 - DNA, 75 bp, synthetic construct
  source 1..75: mol_type = other DNA
ccctcaaagaatatcgcgacgagctaaaagaaacccggcacgaaatcgttaaggattatgtcggtttcaaaagtg

SEQ ID NO: 760815 - DNA, 75 bp, synthetic construct
  source 1..75: mol_type = other DNA
caagcgcggtttacctcggtggctgtctggcgttgggcgttattggctcaatcttatggccgactgaaaagagtc

SEQ ID NO: 760816 - DNA, 75 bp, synthetic construct
  source 1..75: mol_type = other DNA
gaccactgtatccatcgctgtcagatcaaattgccagtgaacctgtgctgtttctggcgggagctgtgggtgtgg

SEQ ID NO: 760817 - DNA, 75 bp, synthetic construct
  source 1..75: mol_type = other DNA
aaggaaaaactgcgcacgcaggacggcgatccacagaaccggttcaccgcaacgggcgcagcctccgatcaactg

SEQ ID NO: 760818 - DNA, 75 bp, synthetic construct
  source 1..75: mol_type = other DNA
acggattcgacagccctgttgtcctgtattgaacaggccagggaggatatccgtaccctgcgccaactgcagctt

SEQ ID NO: 760819 - DNA, 75 bp, synthetic construct
  source 1..75: mol_type = other DNA
gggagtgggaccctgttcagaaaaaaatggttcagaagtcctgggtacccactccggccgctcctgtcagcaata

SEQ ID NO: 760820 - DNA, 75 bp, synthetic construct
  source 1..75: mol_type = other DNA
gcgttttcccgtgcccgccagcaggtgacctcgactgaaaacagtctgaacgaggcgcgtgcgcgacttcagcgc

SEQ ID NO: 760821 - DNA, 75 bp, synthetic construct
  source 1..75: mol_type = other DNA
ccaacgttgaagttcctcaaggcgttcttgaatcaggaagaactggtaaggatatggagttaatcaataaactaa

SEQ ID NO: 760822 - DNA, 75 bp, synthetic construct
  source 1..75: mol_type = other DNA
cctgccggtgatgctctaccgcggtgtgttcagagccggtgaaacctaccaccccggtgatacggtgacgtgggg

SEQ ID NO: 760823 - DNA, 75 bp, synthetic construct
  source 1..75: mol_type = other DNA
cgcgtgatggtcgtgattatgatccggaagtactgaagcaggcggtgaatgatgcggttgcgaatattccggtac

SEQ ID NO: 760824 - DNA, 75 bp, synthetic construct
  source 1..75: mol_type = other DNA
tgaatgatgcggtcgcaaatattccgcagccggcagacggtaaaagtctcaccccggatgatgtgcatccgatgc

SEQ ID NO: 760825 - DNA, 75 bp, synthetic construct
  source 1..75: mol_type = other DNA
gtgactacgatccggatgttctgcagaaggcggttctggatgcggtgagtgccctgccggctccgcaggacgggc

SEQ ID NO: 760826 - DNA, 75 bp, synthetic construct
  source 1..75: mol_type = other DNA
cgcgtgatggtcgtgactatgatcccgatgttctgcagaaggctgttctggatgcggtgagagccctgccggctc

SEQ ID NO: 760827 - DNA, 75 bp, synthetic construct
  source 1..75: mol_type = other DNA
acgatcaaaaatcctttccccggggcacgtatgccacacacccgggcggactctggcgggcgtatgaaaaaacgc

SEQ ID NO: 760828 - DNA, 75 bp, synthetic construct
  source 1..75: mol_type = other DNA
aaagattactcttgcagatacagtaccatcagctatatctgcaggtgattttgtagatattattgttacaaagac

SEQ ID NO: 760829 - DNA, 75 bp, synthetic construct
  source 1..75: mol_type = other DNA
tctggcgggcgtatgaaaaaacgtacgggatgcggggatgggaatgcctggttgacggggtggcggatattgacg

SEQ ID NO: 760830 - DNA, 75 bp, synthetic construct
  source 1..75: mol_type = other DNA
gcactgcaacagtatgaccgccgataaaccgggggatgcgcatgcatctggctggacgctggctgccaaacgggg

SEQ ID NO: 760831 - DNA, 75 bp, synthetic construct
  source 1..75: mol_type = other DNA
ccggcggacggtaaaagtctcaccccggatgatgtgcgtccgatgcttgaacagatggtgacagaggcagtgagc

SEQ ID NO: 760832 - DNA, 75 bp, synthetic construct
  source 1..75: mol_type = other DNA
aaaaaacgcacgggatgcggggatgggaatgcctggttgacggggtggcggatattgacgtcagcatgacgggtg

SEQ ID NO: 760833 - DNA, 75 bp, synthetic construct
  source 1..75: mol_type = other DNA
gatgtgcgtccgatgcttgaacagatggtgaaggaggcggtaagccatattcctgttccgcgtgatggtcgtgac

SEQ ID NO: 760834 - DNA, 75 bp, synthetic construct
  source 1..75: mol_type = other DNA
gtggcactgcaacagtatgaccggtgataaacccggagaagctcattcatcagcctggaccctggctgcaaaacg

SEQ ID NO: 760835 - DNA, 75 bp, synthetic construct
  source 1..75: mol_type = other DNA
gcacgcgtcgtcaggtgaacaacctgcgtcacgctaccaacagcgagctgctgtgcgaagcgtttctgcatgcct

SEQ ID NO: 760836 - DNA, 75 bp, synthetic construct
  source 1..75: mol_type = other DNA
cgggcaacctttgccggatgatgccgatctgcgtaaagagcgcagcgacgaaattccggaggcggcaaaagagat

SEQ ID NO: 760837 - DNA, 75 bp, synthetic construct
  source 1..75: mol_type = other DNA
cctgattttgatttctataaaaagaaaatagaacaatatatcaacgaggcgcagtttaattcgaaacgatatgag

SEQ ID NO: 760838 - DNA, 75 bp, synthetic construct
  source 1..75: mol_type = other DNA
gctggattatctggacgcactggaactggtcgatacttccggggcgccagatattgaatggcctacgcctccggc

SEQ ID NO: 760839 - DNA, 75 bp, synthetic construct
  source 1..75: mol_type = other DNA
gcggttgggggcattttcatatacctgatagcttgttcattgaattacgtgattacttacgtgatatggatcacg

SEQ ID NO: 760840 - DNA, 75 bp, synthetic construct
  source 1..75: mol_type = other DNA
tgaaccagatctaacctctttgctttctgctaaagagatagctgagtgtgcgatggcacgatggatggttccacg

SEQ ID NO: 760841 - DNA, 75 bp, synthetic construct
  source 1..75: mol_type = other DNA
tctggtggctcggttttttgccaggtaaagcagtttttagtagccgttatttcaacgatccatttatcagagatt

SEQ ID NO: 760842 - DNA, 75 bp, synthetic construct
  source 1..75: mol_type = other DNA
ttctggaagttcatggcgagcgtatgattaaacgcacctttaatccgggcttcaaaatcgctctgcaccagaaag

SEQ ID NO: 760843 - DNA, 75 bp, synthetic construct
  source 1..75: mol_type = other DNA
acattttccctgccggtgatgctctaccgcggtgtgttcagagccggtgaaacctaccaccccggcgatacggtg

SEQ ID NO: 760844 - DNA, 75 bp, synthetic construct
  source 1..75: mol_type = other DNA
gataagctggctgatggcgcaggcgcgggctggctcgctaccagtcacacacttggctatggactgtgcgctttg

SEQ ID NO: 760845 - DNA, 75 bp, synthetic construct
  source 1..75: mol_type = other DNA
ctgatttttgtgggcgatcacgatccgcgtaagccgatgagtgagaatacggttaacaaggctctgcgagtgatg

SEQ ID NO: 760846 - DNA, 75 bp, synthetic construct
  source 1..75: mol_type = other DNA
ttggaaaagatcaaaagcatgaatggaaaccgagagctgatctccgttggtaatcacgatccgcgtaagccgatg

SEQ ID NO: 760847 - DNA, 75 bp, synthetic construct
  source 1..75: mol_type = other DNA
tgacgcagtgggggccattccgctaccgcgtgatggtcgcgattatgatccggaagtactgaagcaggcggtgaa

SEQ ID NO: 760848 - DNA, 75 bp, synthetic construct
  source 1..75: mol_type = other DNA
gcaagaatgccggatggcagcgaaaatgatcgtttttatgaatataactatacccggaccgtcacggagacacag

SEQ ID NO: 760849 - DNA, 75 bp, synthetic construct
  source 1..75: mol_type = other DNA
ttctgctgccggtgagacgatcattacggccggggcgacggataaccggaacggacgtattgtgtctgacgggaa

SEQ ID NO: 760850 - DNA, 75 bp, synthetic construct
  source 1..75: mol_type = other DNA
tgggggaaggtctttccggcggtcaaaaacagcgtatattcattgcccgagctttataccggaaacctggaatat

SEQ ID NO: 760851 - DNA, 75 bp, synthetic construct
  source 1..75: mol_type = other DNA
caaagccgtgtcactgctggccggcagaaatattaccagcgaaaccaccacccgcagtgacggtgtgaaccgctg

SEQ ID NO: 760852 - DNA, 75 bp, synthetic construct
  source 1..75: mol_type = other DNA
aactccgtaaatccagatgcaactttagcatttgatttaatgggtaagggaaccgcagttgatgaaattaataag

SEQ ID NO: 760853 - DNA, 75 bp, synthetic construct
  source 1..75: mol_type = other DNA
attaccgtccggccccggtaacggaaaccattgatctgaaaagcctgacctggcagggacacgctgtggtaccgg

SEQ ID NO: 760854 - DNA, 75 bp, synthetic construct
  source 1..75: mol_type = other DNA
gtgccgcacgatcctgacgtgaaagccttgctgcgtctggcgacggtatggaacattccggtcgccaccaacgtg

SEQ ID NO: 760855 - DNA, 75 bp, synthetic construct
  source 1..75: mol_type = other DNA
cggcgcgtaaacatattgcgctggtggcacatgatcactgcaagcaaatgctcatgagctgggtgaaacggcatc

SEQ ID NO: 760856 - DNA, 75 bp, synthetic construct
  source 1..75: mol_type = other DNA
atcatccagtcgccgcatttcaacgacgcggtcgatattctgatccccgattatcagcgttatctcgcagaacgc

SEQ ID NO: 760857 - DNA, 75 bp, synthetic construct
  source 1..75: mol_type = other DNA
atgtgcaataaaaacacgccggacgcagcaggcgaagccatcagaacgctgatggacgcgctgattgatatttca

SEQ ID NO: 760858 - DNA, 75 bp, synthetic construct
  source 1..75: mol_type = other DNA
tggcactgaatgaggccaaagccatcctgattgctgattgtgaaaatgggggggggttatgcgtgatgatcgttt

SEQ ID NO: 760859 - DNA, 75 bp, synthetic construct
  source 1..75: mol_type = other DNA
atgtgcaataacccccgtccggacgcagccgccgaagctatcagaacgctgatgcacgcgctgattgatatttca

SEQ ID NO: 760860 - DNA, 75 bp, synthetic construct
  source 1..75: mol_type = other DNA
cgtgaagagaagaaatccggcctgatgagcagtggcggtattggttttaccgtgggtaaacagtctctgaagcaa

SEQ ID NO: 760861 - DNA, 75 bp, synthetic construct
  source 1..75: mol_type = other DNA
ggaggcagtgagccatattcctgttccgcgcgatggtcgtgactacgatcccgatgttctgcagcaggcggtgca

SEQ ID NO: 760862 - DNA, 75 bp, synthetic construct
  source 1..75: mol_type = other DNA
tggtgatatgtttacattctcagcagatacggcatcgtttcgcatttacctgtatgcattagatggagatgggaa

SEQ ID NO: 760863 - DNA, 75 bp, synthetic construct
  source 1..75: mol_type = other DNA
accccggcgatacggtgacgtgggggggctcgctgtggcactgcaacagtatgaccggtgataaacccggagaag

SEQ ID NO: 760864 - DNA, 75 bp, synthetic construct
  source 1..75: mol_type = other DNA
aggtaactgataatggcaaggggaatgcagtatttcatattcaggaaaatatatccgatgaagtaacattgtttt

SEQ ID NO: 760865 - DNA, 75 bp, synthetic construct
  source 1..75: mol_type = other DNA
ccggaggacggtaaaagtatcaccccggatgatgtgcgtccgatgcttgaacagatggtgacagaggcagtgagc

SEQ ID NO: 760866 - DNA, 75 bp, synthetic construct
  source 1..75: mol_type = other DNA
ttcgtgcactgggagaagaattctccacagtgctggcggatttacagcgcacatttgaggggaagatggcctcgc

SEQ ID NO: 760867 - DNA, 75 bp, synthetic construct
  source 1..75: mol_type = other DNA
gatgttctgcagaaggctgttctggatgcggtgagtgccctgccggctccgcaggacgggcgtgatgccacggca

SEQ ID NO: 760868 - DNA, 75 bp, synthetic construct
  source 1..75: mol_type = other DNA
ggcgcatatttaggtagttcaatcaagcatgaggatccaaccgcatcagtagcaggctcgatttttggttcagtg

SEQ ID NO: 760869 - DNA, 75 bp, synthetic construct
  source 1..75: mol_type = other DNA
gcagaatatgggttgtcagcatcgacactagctacatcgatgtcaaaggataataaattaccacaagaagttacc

SEQ ID NO: 760870 - DNA, 75 bp, synthetic construct
  source 1..75: mol_type = other DNA
aaggaacagtcacttattaccctccattcagtgatatcaaattggtatatacggatggggttgaaaataaattat

SEQ ID NO: 760871 - DNA, 75 bp, synthetic construct
  source 1..75: mol_type = other DNA
aagtcgccctttccaaaacacagcgtcgccttaaagtcggctatgtcggcatttcccacaccaaccgtaagacca

SEQ ID NO: 760872 - DNA, 75 bp, synthetic construct
  source 1..75: mol_type = other DNA
ggcgtccctgtctgtggtattacagaagtgcgtgacgggcgatgatatgcgtccgatgcttgagcagatggtgaa

SEQ ID NO: 760873 - DNA, 75 bp, synthetic construct
  source 1..75: mol_type = other DNA
agcagttcccgattggttactggtcaatgcgcaaggaattttccggtagccgacgcccgtcgtggtcaaaggtta

SEQ ID NO: 760874 - DNA, 75 bp, synthetic construct
  source 1..75: mol_type = other DNA
tactggtcaatgaagaaggagttttccggcagccgccgaccttcatggtcaaaggttaaagagaaaaatcagcag

SEQ ID NO: 760875 - DNA, 75 bp, synthetic construct
  source 1..75: mol_type = other DNA
ggttcattgaacggtccggacagcggattaattccggtggatgttggtggcgagaagtggttgcagggctctgtt

SEQ ID NO: 760876 - DNA, 75 bp, synthetic construct
  source 1..75: mol_type = other DNA
tccgtaaacatcataacgttagccgttcaggtttttataatatatatagctgccgcatttttagtttggttatct

SEQ ID NO: 760877 - DNA, 75 bp, synthetic construct
  source 1..75: mol_type = other DNA
cgcgcttaacgcctgccgcgctgccatgcttcagggtagggaacgccttgttctggatgccgctaccagaaccgc

SEQ ID NO: 760878 - DNA, 75 bp, synthetic construct
  source 1..75: mol_type = other DNA
gacaatggggaagaaccggcatcgaaagtaacccactggatgccgctaccagaaccgccgcaggaggttaaccgt

SEQ ID NO: 760879 - DNA, 75 bp, synthetic construct
  source 1..75: mol_type = other DNA
aaagctgccgaggagatcgggcaactcatcaccgtcgcgcgtgaagaactccagcgccgcaaggccaaagaacag

SEQ ID NO: 760880 - DNA, 75 bp, synthetic construct
  source 1..75: mol_type = other DNA
atgaaaaatgaaggtatagccaaggctgtagatattgcaggaagccagcttgctctggcaaagcgttgtggtcgc

SEQ ID NO: 760881 - DNA, 75 bp, synthetic construct
  source 1..75: mol_type = other DNA
ccggaagtggttgaaacgacgcatcctgaagtgatcgctgccgcggtaactgaacagccgcaggtgattaccgag

SEQ ID NO: 760882 - DNA, 75 bp, synthetic construct
  source 1..75: mol_type = other DNA
acactatctgggcttttaagggtgacggcggaaaatcgttatggcaggtctgcggcggtcagagcaacagttgca

SEQ ID NO: 760883 - DNA, 75 bp, synthetic construct
  source 1..75: mol_type = other DNA
gcaggtggaaaaaatcggtgtcaaagctgccgaggagatcgggcaactcgtcaccgtcgcgcgtgaagaactcca

SEQ ID NO: 760884 - DNA, 75 bp, synthetic construct
  source 1..75: mol_type = other DNA
gcggaagaaatcgggcagcttgtcaccgttgcacgcgaagaactccagcgtcgcaagaccaaagaaccagagtaa

SEQ ID NO: 760885 - DNA, 75 bp, synthetic construct
  source 1..75: mol_type = other DNA
atgcaggtgagccagtggactggacagaacggtgaaacgcggcagggctggcaggttatcgcagacagcgtaatc

SEQ ID NO: 760886 - DNA, 75 bp, synthetic construct
  source 1..75: mol_type = other DNA
agtgcgcgaacggcgcgaccgggcggcaaaaaaggccagcaggggcaggccactgacgcactgaacagggcaaaa

SEQ ID NO: 760887 - DNA, 75 bp, synthetic construct
  source 1..75: mol_type = other DNA
tttagatcttcttttttctgcgtatgatagattatcaacacaacctatgatattacctgcgctgactgaatctgg

SEQ ID NO: 760888 - DNA, 75 bp, synthetic construct
  source 1..75: mol_type = other DNA
cgacagaccggacagcagggaaatcagccaccagcgggaggtgatgacccgttctctgacgatattccgttctga

SEQ ID NO: 760889 - DNA, 75 bp, synthetic construct
  source 1..75: mol_type = other DNA
caataaaacattctggaatttaatcaaaaacagccaggaatgccctacaaatacagataacgtattgaatgaatg

SEQ ID NO: 760890 - DNA, 75 bp, synthetic construct
  source 1..75: mol_type = other DNA
cgatgttgccagcgtatccggcacgatgcaggtaagccagtggaccggacagaacggggaaacgcggcgggggta

SEQ ID NO: 760891 - DNA, 75 bp, synthetic construct
  source 1..75: mol_type = other DNA
tggaatgttcaaggaaggcacagagggcaccggagccgccggataatttcggagacctgaaaaaggcagtcgatc

SEQ ID NO: 760892 - DNA, 75 bp, synthetic construct
  source 1..75: mol_type = other DNA
tgtttgcccgctcggcctccgtcggtgcgcagaaattcccggtacactggggtggtgactgttacgctaactacg

SEQ ID NO: 760893 - DNA, 75 bp, synthetic construct
  source 1..75: mol_type = other DNA
agcgacaatattaggtgggcaacagcaccgttcagatctggtatgactgtatacgattcttctatagttcagcgg

SEQ ID NO: 760894 - DNA, 75 bp, synthetic construct
  source 1..75: mol_type = other DNA
ggaacagacgcaaaaccacaggcacacagggtaatcagccaccagctggaggcgatgacccctacggtgacaata

SEQ ID NO: 760895 - DNA, 75 bp, synthetic construct
  source 1..75: mol_type = other DNA
ggcggctggtggacgacccacaggtaaaacagaccagcaagggtacacccatgacgctggcacggatggcggtat

SEQ ID NO: 760896 - DNA, 75 bp, synthetic construct
  source 1..75: mol_type = other DNA
gcaggttatcgccgacagcgtaatcagtgcccgtactgttcgccctggtggaggtcagagaaaacacacaggcca

SEQ ID NO: 760897 - DNA, 75 bp, synthetic construct
  source 1..75: mol_type = other DNA
ggcgtataaaaatatcccgttctacatgactaaccgtggttatggggtactggtcaatcatccccaatgcgtctc

SEQ ID NO: 760898 - DNA, 75 bp, synthetic construct
  source 1..75: mol_type = other DNA
gtagaagcccccgttcaggttgccgaaccgcaaccggaagtggttgaaacgacgcatcctgaagtgatcgctgcc

SEQ ID NO: 760899 - DNA, 75 bp, synthetic construct
  source 1..75: mol_type = other DNA
tgaaaaataatggctatgtgcaggacactaataatcaacgaaattatatgtttgagcggctggatcttggcgtcg

SEQ ID NO: 760900 - DNA, 75 bp, synthetic construct
  source 1..75: mol_type = other DNA
acaggcgcgggcgaggcgaagaactggacactgtgcttgcgtaatattgcgaaagtaaatggtttgcaaggcggt

SEQ ID NO: 760901 - DNA, 75 bp, synthetic construct
  source 1..75: mol_type = other DNA
aaactgaaaggtctggtcgcgatgggcgttgattgctttaagaccgactttggcgaacgtatcccaactgatgtt

SEQ ID NO: 760902 - DNA, 75 bp, synthetic construct
  source 1..75: mol_type = other DNA
catagagcatactacggaaatattaggccccaattagtggatcatctttatagctatttactaagtgcatatagc

SEQ ID NO: 760903 - DNA, 75 bp, synthetic construct
  source 1..75: mol_type = other DNA
gtgaagtgcccgctgctgacggttcggtgatctttactctaaaagcagcacgtactggcaacacgattactgtga

SEQ ID NO: 760904 - DNA, 75 bp, synthetic construct
  source 1..75: mol_type = other DNA
tctgcaagacgggcgtgaagctgtctgtgaagtgcccgccgccgacggttcggtgatcttcaccctgaaagcggc

SEQ ID NO: 760905 - DNA, 75 bp, synthetic construct
  source 1..75: mol_type = other DNA
gctggattatctggaagcactggatctggtggatacgtccagtgcgccagatattgaatggcctactcctccggc

SEQ ID NO: 760906 - DNA, 75 bp, synthetic construct
  source 1..75: mol_type = other DNA
gctggattatctggaagcactggaactggtggatacatccagtgcgccagatattgaatggcctacccctccggc

SEQ ID NO: 760907 - DNA, 75 bp, synthetic construct
  source 1..75: mol_type = other DNA
gctggattatcttgatgcgctggaagcggtggacgtatccagcgctccagatattgtttggccctcctcaaccta

SEQ ID NO: 760908 - DNA, 75 bp, synthetic construct
  source 1..75: mol_type = other DNA
gcgtcgattgctttaagaccgactttggcgaacgtattccaacagacgttcagtggtttgacggttccgatccgc

SEQ ID NO: 760909 - DNA, 75 bp, synthetic construct
  source 1..75: mol_type = other DNA
gctggattatctggaagcactggagctggtggatacttccagtgcgccagatattgaatggcctactcctccggc

SEQ ID NO: 760910 - DNA, 75 bp, synthetic construct
  source 1..75: mol_type = other DNA
gctggattatctggaagcactggacctggtggatacctccagtgcgccagatattgaatggcctacgcctccggc

SEQ ID NO: 760911 - DNA, 75 bp, synthetic construct
  source 1..75: mol_type = other DNA
gaataaaattttcgatgagttagtttccaagggggatgagtttgccgtttttcgactaataaaaatatttgaatc

SEQ ID NO: 760912 - DNA, 75 bp, synthetic construct
  source 1..75: mol_type = other DNA
agattaataccgcctgcgtagcacttaacacaccgcttatcatcgccagcgcggtcggatttggtggtcagttga

SEQ ID NO: 760913 - DNA, 75 bp, synthetic construct
  source 1..75: mol_type = other DNA
gtaaggcgttaaaagatgcggtagcacgggccgatgtggtactcgactgtaccgacaacatggcgactcgccagg

SEQ ID NO: 760914 - DNA, 75 bp, synthetic construct
  source 1..75: mol_type = other DNA
ggcgtcgggacgctggtactggcagatgacgacgatgtgcatttaagcaatctgcaacgacaaatcctctttacc

SEQ ID NO: 760915 - DNA, 75 bp, synthetic construct
  source 1..75: mol_type = other DNA
agcaaaaaatgccggtgatacagcctcaattccgattatcgaagcgattttaaatgaggaaaagcaaatggccga

SEQ ID NO: 760916 - DNA, 75 bp, synthetic construct
  source 1..75: mol_type = other DNA
taagttattaagcggtatagagacgcctgcgggagaactccgactgttcgacggtaaatcgagccagtggcgcag

SEQ ID NO: 760917 - DNA, 75 bp, synthetic construct
  source 1..75: mol_type = other DNA
actgaagatatcgatcgcccgaaatcacaggtcagccaacagcgactgacacagttgaatcccgacattcaactg

SEQ ID NO: 760918 - DNA, 75 bp, synthetic construct
  source 1..75: mol_type = other DNA
gagtttgtggtgggttacggcattgattacgcacagcgttaccgtcatctgccgtatatcggcaaagtgattctg

SEQ ID NO: 760919 - DNA, 75 bp, synthetic construct
  source 1..75: mol_type = other DNA
taaattgcacaggagtcgctgaaaaatacgcgttaatcgaacaatggcgacaacaatttcccattgaagcgatgt

SEQ ID NO: 760920 - DNA, 75 bp, synthetic construct
  source 1..75: mol_type = other DNA
aatcttcggtattagccaaaattgttgttaatacaacagactacgtttccgcggcgtggcaggcaaatgaaaaac

SEQ ID NO: 760921 - DNA, 75 bp, synthetic construct
  source 1..75: mol_type = other DNA
ccgaagctgtcagaacggttcttgaaaatcaactttcgatcagtgaaggcgcttcccgattatctcttcctgaag

SEQ ID NO: 760922 - DNA, 75 bp, synthetic construct
  source 1..75: mol_type = other DNA
gaagctcgccttgagcgatatatattaaaaaaagcaactgtagattcaattggtcaacgcaacagttatgtgaaa

SEQ ID NO: 760923 - DNA, 75 bp, synthetic construct
  source 1..75: mol_type = other DNA
gcgtggctcatttatgtttatggcggatctgtgccgtgaagttcaggtatctcatgaagtcgactttatgaccgc

SEQ ID NO: 760924 - DNA, 75 bp, synthetic construct
  source 1..75: mol_type = other DNA
atggccgaaatagcctgccgagccctttcccccgcagtgaacgatcctggaaccgccattgatgtcattggcaga

SEQ ID NO: 760925 - DNA, 75 bp, synthetic construct
  source 1..75: mol_type = other DNA
gtgctcacagtcggtggggtagaggttaccggtggccacttctatcttggacagcgaatgaaacctgccgggcat

SEQ ID NO: 760926 - DNA, 75 bp, synthetic construct
  source 1..75: mol_type = other DNA
cgtctatttgctgaatttaaacactgggcagatgagaaaatccgtgaacattcaggactggcgacagtggctgat

SEQ ID NO: 760927 - DNA, 75 bp, synthetic construct
  source 1..75: mol_type = other DNA
tcttcccgatcccagcgttttaaaagccccagttcagaaattaatttctgttgcagaatcctgtatcaacgcgct

SEQ ID NO: 760928 - DNA, 75 bp, synthetic construct
  source 1..75: mol_type = other DNA
atctttgctaaagaccattacccgaaaagaaaacgtatttatcagttgggtgatgcgattgctgattgtcgtaag

SEQ ID NO: 760929 - DNA, 75 bp, synthetic construct
  source 1..75: mol_type = other DNA
tccatcagcattccgcaactgaacatgatctcgtctcgtctgtaccaactgatcagccagcagcagggttcacac

SEQ ID NO: 760930 - DNA, 75 bp, synthetic construct
  source 1..75: mol_type = other DNA
gcttctcaccttctcctgaatttatctcagccgtaatgacgctcagattaggggcgatggtcgccttgattgacg

SEQ ID NO: 760931 - DNA, 75 bp, synthetic construct
  source 1..75: mol_type = other DNA
gattttagctgcgatcaatctaaaattaaaatagctgagaccttattttttaatctcgataaagaaccctatgac

SEQ ID NO: 760932 - DNA, 75 bp, synthetic construct
  source 1..75: mol_type = other DNA
attattacgttgtcgtcatggtggacgaaaccatcgtgacaggacagtggtattcacaagccattttatactcta

SEQ ID NO: 760933 - DNA, 75 bp, synthetic construct
  source 1..75: mol_type = other DNA
atggttagcaggaaacgtaatagcgttatttaccggtttgccagtttattattggtgttgatgttaagtgcctgt

SEQ ID NO: 760934 - DNA, 75 bp, synthetic construct
  source 1..75: mol_type = other DNA
tgctggcggttatctggcttctgttttccaaaaagaaaaaatcgccgccccccagagtaaacaacaaaatcatca

SEQ ID NO: 760935 - DNA, 75 bp, synthetic construct
  source 1..75: mol_type = other DNA
cagttatcagccgcagcgcaccgtttgtgctgacaggcacggagcagcgtggcggacgcacatatgctgcggtgg

SEQ ID NO: 760936 - DNA, 75 bp, synthetic construct
  source 1..75: mol_type = other DNA
ggtaatgaattaaaaattagaacaagaatgatgaaaatcctccggaatggcaaaatcaatatatatgaatatatg

SEQ ID NO: 760937 - DNA, 75 bp, synthetic construct
  source 1..75: mol_type = other DNA
atgaaaaagaaagtaatcagcgggctgtttctgatgttatggatagcgctgttaatcgccgcaatggtgtatccg

SEQ ID NO: 760938 - DNA, 75 bp, synthetic construct
  source 1..75: mol_type = other DNA
gcccgctctggcaggagttgagggcatctttgctgaagaccattacccgaaaagaaaacgtatttatcagctgga

SEQ ID NO: 760939 - DNA, 75 bp, synthetic construct
  source 1..75: mol_type = other DNA
tctcgcctggacggggtgggctattaccctggtcttttatctactgaccgttattgccttctggatcacccgtaa

SEQ ID NO: 760940 - DNA, 75 bp, synthetic construct
  source 1..75: mol_type = other DNA
gccagcattgataacgataagggctaccacactgcaagagtctatatgcctggcattgatgcgccagggctaacc

SEQ ID NO: 760941 - DNA, 75 bp, synthetic construct
  source 1..75: mol_type = other DNA
cagcgtcaggtttttcgagagaaagttcaggagagccgcccgcagcgtctaaacgacagtaaccatactgcccga

SEQ ID NO: 760942 - DNA, 75 bp, synthetic construct
  source 1..75: mol_type = other DNA
ataatcaaataggacaattagcattactaggaaaaacattaggtaataaaggtattggattggaagggggaggga

SEQ ID NO: 760943 - DNA, 75 bp, synthetic construct
  source 1..75: mol_type = other DNA
ttatgcgattgctgattgtcgtaagtctcgcctggacggggtgggccattaccctggtcttttatctgctgaccg

SEQ ID NO: 760944 - DNA, 75 bp, synthetic construct
  source 1..75: mol_type = other DNA
tgaccgtggcgggcgtaaatctgagctttgagccgaataaaaccgcgttcaacaacctgcttaacgaaatgacca

SEQ ID NO: 760945 - DNA, 75 bp, synthetic construct
  source 1..75: mol_type = other DNA
gtgacgcctgccagccgcgacgcactggctgacctgattgcgcgttatccgggctgtgagatgcagatcgtcgag

SEQ ID NO: 760946 - DNA, 75 bp, synthetic construct
  source 1..75: mol_type = other DNA
atgaaaaagaaattaatcagcgggctgtttctgctgttatggatggcgctgttaattgcagcaatggtgtatccg

SEQ ID NO: 760947 - DNA, 75 bp, synthetic construct
  source 1..75: mol_type = other DNA
tgccgccaccgatcacgtcaactttgccttaaacgtggggagatttttggtttgctggggccaaacggcgcgggt

SEQ ID NO: 760948 - DNA, 75 bp, synthetic construct
  source 1..75: mol_type = other DNA
ccgtagtgcttaatgtgccagatgatttcaccggacgcgtactggtttacctggataaagggaaagtgaaatcac

SEQ ID NO: 760949 - DNA, 75 bp, synthetic construct
  source 1..75: mol_type = other DNA
aaagaagcattggcagaagtattaaagcgtccgggggctgcacttcaactagttggcaaagtaaatgatatttat

SEQ ID NO: 760950 - DNA, 75 bp, synthetic construct
  source 1..75: mol_type = other DNA
gcaaaagacgttgaaccgccaaaatttaccgaagttaccgacgtggtactgatcacgcgtgacaactttaaagaa

SEQ ID NO: 760951 - DNA, 75 bp, synthetic construct
  source 1..75: mol_type = other DNA
ctgctggcgtcggctgagatgcagcacagcgaactgcgcggcggcgtgttgctgctggccctgctgcattcgccg

SEQ ID NO: 760952 - DNA, 75 bp, synthetic construct
  source 1..75: mol_type = other DNA
cgtggcaggccaggtgccggacaagctgaaaaacaccgatatcatgacccttgacctgggcgcattgcaggccgg

SEQ ID NO: 760953 - DNA, 75 bp, synthetic construct
  source 1..75: mol_type = other DNA
aagggctggcgctgcgtattgtctcaggccaggtgccggacaagctgaaaaacaccgatattatgacccttgacc

SEQ ID NO: 760954 - DNA, 72 bp, synthetic construct
  source 1..72: mol_type = other DNA
atgcgggcgaaacttctgggaatagtcctgacaccccctattgcgatcagctcttttgcttctaccgagact

SEQ ID NO: 760955 - DNA, 75 bp, synthetic construct
  source 1..75: mol_type = other DNA
ccgtttgcgcaaagataaaaaacgcgaaaaagtgatgatcaacatagcagccatgaccgttgatgcgctttcaga

SEQ ID NO: 760956 - DNA, 75 bp, synthetic construct
  source 1..75: mol_type = other DNA
gattggctcacctcctggctatgtcggctatggcgaaggcggcgtactgactgaagccatccgccagaaaccgta

SEQ ID NO: 760957 - DNA, 75 bp, synthetic construct
  source 1..75: mol_type = other DNA
acacggcgattgcccgcatccgcctgtcggcggcagacggcgcgttcacggcagacgtggaagatgctctggacg

SEQ ID NO: 760958 - DNA, 75 bp, synthetic construct
  source 1..75: mol_type = other DNA
ccgcctgattgactgcaaaaatatcgtcttcttcctgacgtccaacctcggctaccaggtaatagtcgagcatgc

SEQ ID NO: 760959 - DNA, 75 bp, synthetic construct
  source 1..75: mol_type = other DNA
actgggcgtggcagaggacgatgcggcgccgttgccggacgcagataccgtggaggatacgcagccagagtcaga

SEQ ID NO: 760960 - DNA, 75 bp, synthetic construct
  source 1..75: mol_type = other DNA
aaatgtcggtcatcaccgacctgccgaaatggctgggcgacaccatcaaaggccaggacctggcgattgccagcc

SEQ ID NO: 760961 - DNA, 75 bp, synthetic construct
  source 1..75: mol_type = other DNA
ctactggcctccgcagaaatgcagcacagtgaactgcgcggtggtgtgctgttgctgactttgctgcattcaccg

SEQ ID NO: 760962 - DNA, 75 bp, synthetic construct
  source 1..75: mol_type = other DNA
gacagagaacaaccggaagagaccgctgaaacagtttccccggtacagcggctgtcggtcatgttccgccacgcc

SEQ ID NO: 760963 - DNA, 75 bp, synthetic construct
  source 1..75: mol_type = other DNA
gatgctgcaccggcgcaaaccaccgtttacgccggaggagttaaaagcgctgatggatgcgaataaaccaaatta

SEQ ID NO: 760964 - DNA, 75 bp, synthetic construct
  source 1..75: mol_type = other DNA
tgggcttccggacaaaatcgtagcaattactctattggctacagtaacagtgcatcctggggcagctacagtgtc

SEQ ID NO: 760965 - DNA, 75 bp, synthetic construct
  source 1..75: mol_type = other DNA
catggggaacgctggcaggttcaatttctgcaaatagcgataacagccgtcaagtttctctcagcaccgacggtg

SEQ ID NO: 760966 - DNA, 75 bp, synthetic construct
  source 1..75: mol_type = other DNA
acaaaatcgtagcaattactctattggctacagtaacagtacatcctggggcagctacagtgtcagtgcccagcg

SEQ ID NO: 760967 - DNA, 75 bp, synthetic construct
  source 1..75: mol_type = other DNA
ctatggatgcgctgaaagcggccggattcccggaaaaacaaatttatcaggtacctaccaaatctaacgacatcc

SEQ ID NO: 760968 - DNA, 75 bp, synthetic construct
  source 1..75: mol_type = other DNA
ctctataacctgctttataccagcaccacgaaggttccccagactgaagccggtattacccgactgttatcaaat

SEQ ID NO: 760969 - DNA, 75 bp, synthetic construct
  source 1..75: mol_type = other DNA
aaattacttggcactgaacaacggacttcaggtttccagagtattgatactcaaatgagcagtgactttaagggt

SEQ ID NO: 760970 - DNA, 75 bp, synthetic construct
  source 1..75: mol_type = other DNA
tgccatgcgatgttgcaccgacgcaaaccaccgttttcgccggagcagttaaaagcgttgatggatgcaaattaa

SEQ ID NO: 760971 - DNA, 75 bp, synthetic construct
  source 1..75: mol_type = other DNA
ttacccctcgaaggcgattgctggcatcgcagcgacattgatgacggggacgcaatttacccctgcggatttcac

SEQ ID NO: 760972 - DNA, 75 bp, synthetic construct
  source 1..75: mol_type = other DNA
gataaaaaggcccgagataaagcggtcgaacatcatggatgccagtgcaacgtatgcggtgttgatctggtgaag

SEQ ID NO: 760973 - DNA, 75 bp, synthetic construct
  source 1..75: mol_type = other DNA
tacggttcattttatctttccggaagttggtccgattactgggcttccggacaaaatcgtagcaattactctatt

SEQ ID NO: 760974 - DNA, 75 bp, synthetic construct
  source 1..75: mol_type = other DNA
tttgaaacagttcagggacaatcggcaattatgaacatcgtgcgaagcgatggtaaaaatattccatttgcagcg

SEQ ID NO: 760975 - DNA, 75 bp, synthetic construct
  source 1..75: mol_type = other DNA
atgaataaactccccgatcatcttccgcggcggtatatcatcgaagctatccatttatgggatgcgggagaaact

SEQ ID NO: 760976 - DNA, 75 bp, synthetic construct
  source 1..75: mol_type = other DNA
ttgcgcaggctgccgacgctgacccgctcaatactgcggacgcagatgtacagcaaatgattgctgacgggattg

SEQ ID NO: 760977 - DNA, 75 bp, synthetic construct
  source 1..75: mol_type = other DNA
gtggcctcagcgtcgtgtgcgggctgtgccgtgcctccatcttagccgggctggcgttgatgcaagggtacgctt

SEQ ID NO: 760978 - DNA, 75 bp, synthetic construct
  source 1..75: mol_type = other DNA
cggtatcgctcacgaactgcgaacaccgttagtgcgcctgcgttatcgactggagatgagcgataacctgagacc

SEQ ID NO: 760979 - DNA, 75 bp, synthetic construct
  source 1..75: mol_type = other DNA
gggggctgatgtgccagacattcgcaacgtcatcgttacctatattcctgatgacctgcctgacctcattcagat

SEQ ID NO: 760980 - DNA, 75 bp, synthetic construct
  source 1..75: mol_type = other DNA
tgcctacgggttatggcaagaccgccgccttcgcttatccattgatttatgagtcccgcgctggcgttggtctgt

SEQ ID NO: 760981 - DNA, 75 bp, synthetic construct
  source 1..75: mol_type = other DNA
gtaacgcagatttcaaacgctacggagactcaggggagtttcgtcaattgtggtgtggagagtcgaagcctaccg

SEQ ID NO: 760982 - DNA, 75 bp, synthetic construct
  source 1..75: mol_type = other DNA
atgagaagggggagccgccgagggtcattgagatggccattcgcgttctgtcgtttgacgatatggttaaggatc

SEQ ID NO: 760983 - DNA, 75 bp, synthetic construct
  source 1..75: mol_type = other DNA
tcgtttgacgatatggtgaaggatctttcacaccttgataaagacgcgattctgttaaggctgcaaacccttgta

SEQ ID NO: 760984 - DNA, 75 bp, synthetic construct
  source 1..75: mol_type = other DNA
atgaccacttttaccgacgaggacaaagaactaattaaagaaatcagagagcgaattggcagcctggacgtgcga

SEQ ID NO: 760985 - DNA, 75 bp, synthetic construct
  source 1..75: mol_type = other DNA
gatgggcatctcagtgagcgtatccactttgatgaaggttcgagctttgaacgacttggcgtcgcatttaaccag

SEQ ID NO: 760986 - DNA, 75 bp, synthetic construct
  source 1..75: mol_type = other DNA
acctgttattgtttgtctgcttccttgtgatgtctctgctggtcgggctggtgtacaaatttaccgccgaacgcg

SEQ ID NO: 760987 - DNA, 75 bp, synthetic construct
  source 1..75: mol_type = other DNA
acaaagcactggatatgttatcaactgcattaaattgtcgatttgatgatgaagggttgagaatttcagcagttt

SEQ ID NO: 760988 - DNA, 75 bp, synthetic construct
  source 1..75: mol_type = other DNA
gcaatacagatttcaaacgctacggggactcagcggagtttcgtcaattgtggtgtggagagtcgaaacctaccg

SEQ ID NO: 760989 - DNA, 75 bp, synthetic construct
  source 1..75: mol_type = other DNA
caactgacacagccctcaaaccatgccagcgccgatctactgccagccatattagtctcaccgccctggctttcg

SEQ ID NO: 760990 - DNA, 75 bp, synthetic construct
  source 1..75: mol_type = other DNA
aagaagtcgcacgacggttactggagcagaaaaatgtccaaactgttgaatggctgaaacttgttgtacaagaat

SEQ ID NO: 760991 - DNA, 75 bp, synthetic construct
  source 1..75: mol_type = other DNA
ggcgagacggtgatcgaagcgaaagagctgaccaagaaatttggtgattttgccgccaccgatcacgtgaatttt

SEQ ID NO: 760992 - DNA, 75 bp, synthetic construct
  source 1..75: mol_type = other DNA
aggcactgtatccaggattattgcaggtgaaagatgcctgtaccaccgactcactggctgaatttgcctgggatc

SEQ ID NO: 760993 - DNA, 75 bp, synthetic construct
  source 1..75: mol_type = other DNA
tttctcacttgcaaatgacgatgtatggcagcgctgcgccgacaaactgattgccgctctcggaaacatgcccgc

SEQ ID NO: 760994 - DNA, 75 bp, synthetic construct
  source 1..75: mol_type = other DNA
gaaagtcgcgaactcactgtagcggagcttgaagatcggttagcgcccgatctcggtctggatgataacggttcg

SEQ ID NO: 760995 - DNA, 75 bp, synthetic construct
  source 1..75: mol_type = other DNA
ggtcgccgaaaatcgcggactgacaatggccgaactggaagatcgcctggcaccggatttagggcttgatagcag

SEQ ID NO: 760996 - DNA, 75 bp, synthetic construct
  source 1..75: mol_type = other DNA
tcggcactctcctgtccggtgggttttaaaaatggtaccgatggcaacacgcggattgccgtggatgctatccgc

SEQ ID NO: 760997 - DNA, 75 bp, synthetic construct
  source 1..75: mol_type = other DNA
ggctggagtggaggccggggcagttgtctgttgctgatgcgatcttttcccgtggcagtgatgtgcttgccgttc

SEQ ID NO: 760998 - DNA, 75 bp, synthetic construct
  source 1..75: mol_type = other DNA
ggcgtttatagcgccgaaaaccagctacaggcgtgctttagggtggcggaagataacagctacagcaccgctgac

SEQ ID NO: 760999 - DNA, 75 bp, synthetic construct
  source 1..75: mol_type = other DNA
atcgggaatatgcccgccaggcactcctcctgctagtgaaattaaaccagcgagaaacgattgaggaaatcgccc

SEQ ID NO: 761000 - DNA, 75 bp, synthetic construct
  source 1..75: mol_type = other DNA
atggtaaacaatcctcacccactttctccgtgctcgacgacatcaccgccagcgagctgattaacgacattgaat

SEQ ID NO: 761001 - DNA, 75 bp, synthetic construct
  source 1..75: mol_type = other DNA
gccaaatttgcctggtggtttcacaattgaagaagcaaaagaattacacgaaaatctggtaaaaagtcacgtaag

SEQ ID NO: 761002 - DNA, 75 bp, synthetic construct
  source 1..75: mol_type = other DNA
tggaacttagccgcgaaatggtggcgatctattcagagcacagggccactttcagcaaacgcgtgatcaataacg

SEQ ID NO: 761003 - DNA, 75 bp, synthetic construct
  source 1..75: mol_type = other DNA
aaagcgttttacggcggtaatcagggcggtggtgctggctaccaacaataacccgatgatattcaccgaacgggc

SEQ ID NO: 761004 - DNA, 75 bp, synthetic construct
  source 1..75: mol_type = other DNA
cgcctgtaaagtgttgcgtgatcaaataggcaagcatcacaaatgggtgtttgtacataccaaggcggctaagcg

SEQ ID NO: 761005 - DNA, 75 bp, synthetic construct
  source 1..75: mol_type = other DNA
gcacggaagctcgctgacctgattgaggcatgggagccacctgaccactggttcaccggcatcggcaaatctgaa

SEQ ID NO: 761006 - DNA, 75 bp, synthetic construct
  source 1..75: mol_type = other DNA
agcaacagacggatccggttattgagttttgccagtttctgaattttctggaggaagcgcgcggcctgatgatgg

SEQ ID NO: 761007 - DNA, 75 bp, synthetic construct
  source 1..75: mol_type = other DNA
ggcgatctattcagagcacagggccactttcagcaaacgcgtgatcaataacgccgttgaagcgttaaaagttat

SEQ ID NO: 761008 - DNA, 75 bp, synthetic construct
  source 1..75: mol_type = other DNA
ttagcctttattcagccgggggaaattttgccctgttgttgccgagcaaaaggcgatattgaaatcgagttgtga

SEQ ID NO: 761009 - DNA, 75 bp, synthetic construct
  source 1..75: mol_type = other DNA
acctgacgccggaacaggaaaaagcgtggagtcgccttgtgaaggctgtaaaggatttcagggcagccggaggaa

SEQ ID NO: 761010 - DNA, 75 bp, synthetic construct
  source 1..75: mol_type = other DNA
atgcagactaacccgcagaaccagcagcgaagagaggcagcgcgtgagcgcattcagcccgcctcgcctgagcag

SEQ ID NO: 761011 - DNA, 75 bp, synthetic construct
  source 1..75: mol_type = other DNA
ggcgtcccattatcagtgcttcaggaaatgggcggatgggagtccagagaaatggttcgtagatatgctcacctt

SEQ ID NO: 761012 - DNA, 75 bp, synthetic construct
  source 1..75: mol_type = other DNA
tacaaaagaatcaggcaaaacgcctgattgatgagagccccgaaccactgaaatctgtcgtcaaatttgcgctgg

SEQ ID NO: 761013 - DNA, 75 bp, synthetic construct
  source 1..75: mol_type = other DNA
gcctgaacgcactcagcaaacgctggaacatgccctgctgaatgccattgctcagtttattgatagctaccagcg

SEQ ID NO: 761014 - DNA, 75 bp, synthetic construct
  source 1..75: mol_type = other DNA
cccgattgactgcacacgttcaaaggtccgcaaactggcggatttgattgaggcatgggagcctcccgaccactg

SEQ ID NO: 761015 - DNA, 75 bp, synthetic construct
  source 1..75: mol_type = other DNA
gtcgtctggtgcgagaatgtgctcgattcggaaatcttttatgcgatgaggcgcgaaattgagaaggaatttcca

SEQ ID NO: 761016 - DNA, 75 bp, synthetic construct
  source 1..75: mol_type = other DNA
tggttaactttattaatgatgctcatttccgccgcatatggaggcatccgaagaaaatcattaactctcgtcaga

SEQ ID NO: 761017 - DNA, 75 bp, synthetic construct
  source 1..75: mol_type = other DNA
tattgccgaaccaatgggcgagccgtcaggtgacttgctgccgttcgctaatggcgtacttgacctgaaaacggg

SEQ ID NO: 761018 - DNA, 75 bp, synthetic construct
  source 1..75: mol_type = other DNA
tatctccaacgcggccttcccgattctgatggcgcgtaatgataaaaactactggctggccttcggcgaaaaacg

SEQ ID NO: 761019 - DNA, 75 bp, synthetic construct
  source 1..75: mol_type = other DNA
cccagacggatctttcggagttctttaagaaatggaatccgggcgcgaatgcttaccagctgccgggggcgagcg

SEQ ID NO: 761020 - DNA, 75 bp, synthetic construct
  source 1..75: mol_type = other DNA
aaaccggatctaaacgcttccttcgtgtcggctaacgcggaacagttttatcagtatcaaccttcggaaatcatt

SEQ ID NO: 761021 - DNA, 75 bp, synthetic construct
  source 1..75: mol_type = other DNA
tgtttatagaagccaccggagacggcgggagcggaaaaagcacatttacccatatcgccagccttctggcaggga

SEQ ID NO: 761022 - DNA, 75 bp, synthetic construct
  source 1..75: mol_type = other DNA
gtgaccgtcgagattgaagataaaggcgggaactgtggttcgattggcatgatggggaatggtacgtggtttacc

SEQ ID NO: 761023 - DNA, 75 bp, synthetic construct
  source 1..75: mol_type = other DNA
gttctccggcatcggcaaatctgagggaaaagcgcttctcattgcctttctgcgtaactgcaagggttttcgcac

SEQ ID NO: 761024 - DNA, 75 bp, synthetic construct
  source 1..75: mol_type = other DNA
cgtaaatgactttggcaaggctatgaagcccgccgcaaaagtttacggacatgaatatattacgcggaaagttaa

SEQ ID NO: 761025 - DNA, 75 bp, synthetic construct
  source 1..75: mol_type = other DNA
ttcatcttgcaggttgcgttattgaggttatgggtaataaaggtgccatgaccatccgtgtaacaacaccaagca

SEQ ID NO: 761026 - DNA, 75 bp, synthetic construct
  source 1..75: mol_type = other DNA
acaacacgcaaaccctctgcgggagatgttggtgcatatacgcaggcagaatgtaactcaaggtttattacaggt

SEQ ID NO: 761027 - DNA, 75 bp, synthetic construct
  source 1..75: mol_type = other DNA
gttaccatgcgcggtcaggatctggattcgcaaaccgccgctcggaatcaggcaatcacaatgcgcgggcaagat

SEQ ID NO: 761028 - DNA, 75 bp, synthetic construct
  source 1..75: mol_type = other DNA
gacggtcgaacagaatttacgcttttctctggtgtgtatggcttacgcggtcgggcgcagaacgaaaaaatctcc

SEQ ID NO: 761029 - DNA, 75 bp, synthetic construct
  source 1..75: mol_type = other DNA
cttcgatccagaaaaaaccgggaaacaccttggtccttataacgctgatggtcatctgggtgatctccctccggt

SEQ ID NO: 761030 - DNA, 75 bp, synthetic construct
  source 1..75: mol_type = other DNA
ctgttattggcgattgcggtggtgtgggttattaaggcgattaaagcaccaaaagtgccgaaatatcagcgctat

SEQ ID NO: 761031 - DNA, 75 bp, synthetic construct
  source 1..75: mol_type = other DNA
acctatttttgcagtatacgaaagtgaagccgaattaaatatagattctttgcctgacgaaccatttatcattaa

SEQ ID NO: 761032 - DNA, 75 bp, synthetic construct
  source 1..75: mol_type = other DNA
cttgaccggatgctatcagcagaaactaacgacctgaagcgccaggaaatacagagccgcatagcagccaacaac

SEQ ID NO: 761033 - DNA, 75 bp, synthetic construct
  source 1..75: mol_type = other DNA
ctaatgagcattgacctggcaacaccgcggcgtcagcgccttgtcacctgtcagtacgatgataatggttatctg

SEQ ID NO: 761034 - DNA, 75 bp, synthetic construct
  source 1..75: mol_type = other DNA
atgtgcataatccattagggtgggcagacccttttgggctagccaaaaagaacgctcagaatacagttttcagat

SEQ ID NO: 761035 - DNA, 75 bp, synthetic construct
  source 1..75: mol_type = other DNA
cccggatggtgaacgctgggaatacaaatacgaccccttcggcaggcgcatcagcaagcgctgcaccaaccgcga

SEQ ID NO: 761036 - DNA, 75 bp, synthetic construct
  source 1..75: mol_type = other DNA
gtacgtgactaatgatggaaaagcgaactacccggtactcgcaccgaaactaactgaattaaaagatataaatgg

SEQ ID NO: 761037 - DNA, 75 bp, synthetic construct
  source 1..75: mol_type = other DNA
ataccaccttattacgccttacttccagtgcagatagtgcaactggagtgggcgtcgaaattttagataacgatg

SEQ ID NO: 761038 - DNA, 75 bp, synthetic construct
  source 1..75: mol_type = other DNA
caatcaacggcaggcgtacagaatacagttacgacaataatctcgacacagtttcacagcgcaccaccgcaggca

SEQ ID NO: 761039 - DNA, 75 bp, synthetic construct
  source 1..75: mol_type = other DNA
aagccaatacctttcgctatgcgctacgaattggcacctgcaccatggaatgaacagcgaacattgctgaaagtt

SEQ ID NO: 761040 - DNA, 75 bp, synthetic construct
  source 1..75: mol_type = other DNA
tgaaagcgaaaagcggcgcgggcgtggcgatctacagcgacgacaagcaccggaacacctacatggtggtgctgc

SEQ ID NO: 761041 - DNA, 75 bp, synthetic construct
  source 1..75: mol_type = other DNA
gctgatcgatggctgcgattttgcccgcgcttacacctccggcgtgctgtcatttcaggagccggacattgcaga

SEQ ID NO: 761042 - DNA, 75 bp, synthetic construct
  source 1..75: mol_type = other DNA
tacaaaagttcacaggggttgactccttttctaacctaactaaagacttatcatctaagctaatagaaatacacg

SEQ ID NO: 761043 - DNA, 75 bp, synthetic construct
  source 1..75: mol_type = other DNA
ggacggcttgagctgaattttgtcatcccgaacatcgaattgcagagcggcaaacgcctgcaaccctactttgac

SEQ ID NO: 761044 - DNA, 75 bp, synthetic construct
  source 1..75: mol_type = other DNA
ctgctgatcggcatcctgggcgggataatctggtttcagggcactatcatcacctcacgcctgagcgagatagac

SEQ ID NO: 761045 - DNA, 75 bp, synthetic construct
  source 1..75: mol_type = other DNA
gaccgggtgtgtcagcacttgagcagtcaggtagagagcttgcgcgcgcaggtcgagagcttgagcaggaacgtc

SEQ ID NO: 761046 - DNA, 75 bp, synthetic construct
  source 1..75: mol_type = other DNA
acaaaaccatagcctacacctctggtgagggagtactgcagtggaaatatgatgcagctaatggcaccggcacac

SEQ ID NO: 761047 - DNA, 75 bp, synthetic construct
  source 1..75: mol_type = other DNA
ataacctgacctttacccgtcttcaggcggctgactacggggccatcatcaccaataacagtgagaaaaaatcaa

SEQ ID NO: 761048 - DNA, 75 bp, synthetic construct
  source 1..75: mol_type = other DNA
acccaaaattgaattttccatcattgcaaaaaatggcgtgtttatatcaaaatttatctcccttgatgaagatgc

SEQ ID NO: 761049 - DNA, 75 bp, synthetic construct
  source 1..75: mol_type = other DNA
gcggaatggggggctggaaaaacatattttactaaacgcctagccaagacaatttcccactaccatcccacaata

SEQ ID NO: 761050 - DNA, 75 bp, synthetic construct
  source 1..75: mol_type = other DNA
caggcggtgatgctcggactggcagcaaccatttcgcataccgcagtggtctggttgattgcctttggcgggatg

SEQ ID NO: 761051 - DNA, 75 bp, synthetic construct
  source 1..75: mol_type = other DNA
atgaaaatatcaaaaaagaatattggccgtttagccagacagtaccgtaagttattgatgttttataaagttaga

SEQ ID NO: 761052 - DNA, 75 bp, synthetic construct
  source 1..75: mol_type = other DNA
tcccctaccctgtcacagccaatatggctgaagcagtgatggtggtgcagtcggtgaagctgaacggctgcccgg

SEQ ID NO: 761053 - DNA, 75 bp, synthetic construct
  source 1..75: mol_type = other DNA
gacccgtttgcgctgcgtcgtgcggcactcggcgtgttgcgtattatcgtcgagaagaacctgaacctcgatctg

SEQ ID NO: 761054 - DNA, 75 bp, synthetic construct
  source 1..75: mol_type = other DNA
cctgccgtccaacccggtagcttgtgcgctggcgattgctgataagatggatactctggcgggtatcttcggtat

SEQ ID NO: 761055 - DNA, 75 bp, synthetic construct
  source 1..75: mol_type = other DNA
ccgcgtcgtctggcgctgaaagtcgctaacctggcggaggcgcaaccggatcgtgaaatcgaaaaacgtggcccg

SEQ ID NO: 761056 - DNA, 75 bp, synthetic construct
  source 1..75: mol_type = other DNA
accgtgttgttccagcaacagctgggtacgctgcgtgacaagactgaccgcattcaggcgctggctggctggatt

SEQ ID NO: 761057 - DNA, 75 bp, synthetic construct
  source 1..75: mol_type = other DNA
atgtctgagaaaacttttctggtggaaatcggcactgaagaactgccaccaaaagcactgcgcagcctggctgag

SEQ ID NO: 761058 - DNA, 75 bp, synthetic construct
  source 1..75: mol_type = other DNA
accgtgctgttccagcaacagctgggtacactgcgtgacaaaactgaccgcatccaggcactggctggctggatt

SEQ ID NO: 761059 - DNA, 75 bp, synthetic construct
  source 1..75: mol_type = other DNA
accgtgctgttccagcaacaactgggtacgctgcgcgacaaaactgaccgcattcaggcgctggctggctggatt

SEQ ID NO: 761060 - DNA, 75 bp, synthetic construct
  source 1..75: mol_type = other DNA
cagaactgagtgcttttgctaacagtctgcagcagacggttcaagcattggtaatggaaatagaaaaacgtgaag

SEQ ID NO: 761061 - DNA, 75 bp, synthetic construct
  source 1..75: mol_type = other DNA
aaaccagattttgatgttctgatatgtggtaacgatcgcgcagcctttgtggcttatcaggttcttctggcgaag

SEQ ID NO: 761062 - DNA, 75 bp, synthetic construct
  source 1..75: mol_type = other DNA
ggaagataatctgccgcgtctgcaaaccgtactgttccagcaacagttggggacactacgcgacaagaccgatcg

SEQ ID NO: 761063 - DNA, 75 bp, synthetic construct
  source 1..75: mol_type = other DNA
tgcgtgagcgcggtaaagtcatcgctgattacgaagaacgtaaggcgaagatcaaagccgatgccgaagaagcgg

SEQ ID NO: 761064 - DNA, 75 bp, synthetic construct
  source 1..75: mol_type = other DNA
tgagaagaacctcaatcttgacctgcaaaccctgaccgaagaagcagtgcgtctgtatggcgataagctgactaa

SEQ ID NO: 761065 - DNA, 75 bp, synthetic construct
  source 1..75: mol_type = other DNA
gggcgagccggaatttactatcgacaatgccgatcagtatccggaaattctgcgtgagcgcgggaaagtcatcgc

SEQ ID NO: 761066 - DNA, 75 bp, synthetic construct
  source 1..75: mol_type = other DNA
tgcttgacaaaaacaatttcacggatgttctgggtattaacacagatgatataatcgccactggtctggtatatc

SEQ ID NO: 761067 - DNA, 75 bp, synthetic construct
  source 1..75: mol_type = other DNA
aatgaccaggtgacggacgaggaagtctcacagggcaacagtgagcgaactctgagtgccaccacatttcgctat

SEQ ID NO: 761068 - DNA, 75 bp, synthetic construct
  source 1..75: mol_type = other DNA
tgatcgtctggaaaggtaagcagcagttatggggccgtgaagaaggcattaataataaggaagatgcgcccacct

SEQ ID NO: 761069 - DNA, 75 bp, synthetic construct
  source 1..75: mol_type = other DNA
gctccctgatttgcatccggcctcggtagttgctctcaatgcacgggcactgaaggaaattttcagcgatgagcg

SEQ ID NO: 761070 - DNA, 75 bp, synthetic construct
  source 1..75: mol_type = other DNA
gctacttcgtgaagaaggtgatttcgaatacattctcaccacggctgagctatcagaaagttcatttgcgctacg

SEQ ID NO: 761071 - DNA, 75 bp, synthetic construct
  source 1..75: mol_type = other DNA
aatgagcaacaggaaccaggaaattggcggcatgatttatgactatggctcgctggcgctgggaggatatggtct

SEQ ID NO: 761072 - DNA, 75 bp, synthetic construct
  source 1..75: mol_type = other DNA
taagatcgcatgttgataatttcccagctaactctggctatttattcaaagatactccattcggcgatgtatgga

SEQ ID NO: 761073 - DNA, 75 bp, synthetic construct
  source 1..75: mol_type = other DNA
atttgaatataacgatgtaaaccagattgttgccgaaacgctgaacggaaggcgcacagaataccgttacgaccc

SEQ ID NO: 761074 - DNA, 75 bp, synthetic construct
  source 1..75: mol_type = other DNA
acaggaattcagtaaatcggttttcgcgggcggtaagcctgttctccgtcacttcgacaagttctggatgaatgc

SEQ ID NO: 761075 - DNA, 75 bp, synthetic construct
  source 1..75: mol_type = other DNA
gtatcgatccgctggggcgggaagaaattaccgtctggaataatgcccggcttcagtcacgcaccgatgcgctgg

SEQ ID NO: 761076 - DNA, 75 bp, synthetic construct
  source 1..75: mol_type = other DNA
gtcaacggaaggctatttcgatgaccgctttatctataacgacgatgaaaaatgcaccacctacctggatgcaga

SEQ ID NO: 761077 - DNA, 75 bp, synthetic construct
  source 1..75: mol_type = other DNA
gcagacacagatattttctccggcagggaacggcgtctggctgttgtctgctgttttcgataattacggcaaccg

SEQ ID NO: 761078 - DNA, 75 bp, synthetic construct
  source 1..75: mol_type = other DNA
gaccatgccggtaacgcctccccccttccctgccccacccacatggggaaacctcggaatatggggcgaccgcct

SEQ ID NO: 761079 - DNA, 75 bp, synthetic construct
  source 1..75: mol_type = other DNA
gaaacgctggtggtagctgcggcgacaggaccagtgggggcgacggtggggcaaatcggcaaacttaaaggttgc

SEQ ID NO: 761080 - DNA, 75 bp, synthetic construct
  source 1..75: mol_type = other DNA
gccgttgggttctggcttcgcgaccacatggcgcgccggttctggataattttcgtctggaggaagacgcgctca

SEQ ID NO: 761081 - DNA, 75 bp, synthetic construct
  source 1..75: mol_type = other DNA
atgtactggattcatggtgtacagcaaatgttcctccaacgagccagggactatccctttatgtaaaacctgtca

SEQ ID NO: 761082 - DNA, 75 bp, synthetic construct
  source 1..75: mol_type = other DNA
atgaaaaaattcgcagcagtaatcgcagtaatcgcagtaatggccctgtgcagtgcaccggttatggcagcagag

SEQ ID NO: 761083 - DNA, 75 bp, synthetic construct
  source 1..75: mol_type = other DNA
aaaaatcataccatcccatgttttaaaaagagcggtgcgctgtgtagaagattattgccttactttggaaacaaa

SEQ ID NO: 761084 - DNA, 75 bp, synthetic construct
  source 1..75: mol_type = other DNA
gcattcgcagtgtaccggcactggtggtgttctgcagtcagggatacgacattatccggggaaacctgcgggtcg

SEQ ID NO: 761085 - DNA, 75 bp, synthetic construct
  source 1..75: mol_type = other DNA
cctggtggtgttctgcagccaggggcacgacatcatccggggaaatctgcgcgtcaggcaggcgctggagaaagt

SEQ ID NO: 761086 - DNA, 75 bp, synthetic construct
  source 1..75: mol_type = other DNA
tgggcgaaacccggcattacggtattccggccacactgcggggcatggtgaacaacgacctgaaggccacggctg

SEQ ID NO: 761087 - DNA, 75 bp, synthetic construct
  source 1..75: mol_type = other DNA
atgaagctctggcccacgctgggtgtcgctttccttctgattgccggatggggaacatccatgcgtctgtcatgg

SEQ ID NO: 761088 - DNA, 75 bp, synthetic construct
  source 1..75: mol_type = other DNA
agaaagacaaaccacaacagggggccgtgtattttgtatcgttttccatacccgaagaggggctgaaacagatgc

SEQ ID NO: 761089 - DNA, 75 bp, synthetic construct
  source 1..75: mol_type = other DNA
atgaacaaaaaaatatacattttattcgccctgactgcaggactgtttatctctgcttatgcttcggaaaatgtg

SEQ ID NO: 761090 - DNA, 75 bp, synthetic construct
  source 1..75: mol_type = other DNA
tttgctgccatgctggaagccgcgatggcggaaaatcctcaagccgaaatttgggtgaaggtgcatccggatgtc

SEQ ID NO: 761091 - DNA, 75 bp, synthetic construct
  source 1..75: mol_type = other DNA
gtggcacatctgcgtattaatcctgttctggcattgctgctattgctggcggcaatagcggcggcgctaccgttt

SEQ ID NO: 761092 - DNA, 75 bp, synthetic construct
  source 1..75: mol_type = other DNA
tgcggcgttaatcggcgcaggcggttttggtgcgctggttttccaggggctgctaagcagtgccattgatttagt

SEQ ID NO: 761093 - DNA, 75 bp, synthetic construct
  source 1..75: mol_type = other DNA
tgctggtgtggggagctggaaaggcggcgacacaactggcgcaaaatggcagtgcgctggcgcgtaccagcctcg

SEQ ID NO: 761094 - DNA, 75 bp, synthetic construct
  source 1..75: mol_type = other DNA
aagtttgttatgaataatcctgtaggggaacgagcggattcacccaaggtgattatagaaatttcactttccgct

SEQ ID NO: 761095 - DNA, 75 bp, synthetic construct
  source 1..75: mol_type = other DNA
gcaaaccgcgacctcgcgaagtgtcagaggattggcttcccctcattagctcgttttttgagcgagaatcagaat

SEQ ID NO: 761096 - DNA, 75 bp, synthetic construct
  source 1..75: mol_type = other DNA
gcaaaccgcgacctcgcgaagtgtcagaggattggattccccttaccagctcgttttttgagcaagtatcagaat

SEQ ID NO: 761097 - DNA, 75 bp, synthetic construct
  source 1..75: mol_type = other DNA
cgggatctactatgacgccacgcgccccagcgacctggaagtgctgattaatcacagccagttaacgctggcgca

SEQ ID NO: 761098 - DNA, 75 bp, synthetic construct
  source 1..75: mol_type = other DNA
ggtatgcaggctggggcttaacggacgatcgtcatccgcagtccgctttgttatctgcccgacgcggttctgcca

SEQ ID NO: 761099 - DNA, 75 bp, synthetic construct
  source 1..75: mol_type = other DNA
cagcgactggttgaaagcaaactgagcaagtacaacctgggagccgatttctctctaccagccgaagccaaagat

SEQ ID NO: 761100 - DNA, 75 bp, synthetic construct
  source 1..75: mol_type = other DNA
aagaggcaaatagatttcggaaactgctcgaaaaatgtgatccatcgaaaacttaccttgtacctaacagctttc

SEQ ID NO: 761101 - DNA, 75 bp, synthetic construct
  source 1..75: mol_type = other DNA
tccaatgattcgttatggcactcgtgattattatgtgaaatatgtcatctggtttttgcatcatgaagttcaggc

SEQ ID NO: 761102 - DNA, 75 bp, synthetic construct
  source 1..75: mol_type = other DNA
caatagagcgcctttgcgcttctgtttcaatcactccccacgaaatggcccttgcgttagctgatcttaatccgt

SEQ ID NO: 761103 - DNA, 75 bp, synthetic construct
  source 1..75: mol_type = other DNA
tcgccctgacagcaggactgtttatctctgttcatgcttcagaaaatgtgaacacaactgaaaaccgccagttcc

SEQ ID NO: 761104 - DNA, 75 bp, synthetic construct
  source 1..75: mol_type = other DNA
gtaaaaaggttgatagcttcggtgactggtcgccacagactgaacatccagctatcactattcagcgtcaagagc

SEQ ID NO: 761105 - DNA, 75 bp, synthetic construct
  source 1..75: mol_type = other DNA
atcacctttgtggctcctgagcctcaagatatgccggatatttgcaagagtgaagcattacttgagcttgaaaag

SEQ ID NO: 761106 - DNA, 75 bp, synthetic construct
  source 1..75: mol_type = other DNA
tattacccactgctgaaagcacaaagaattaaacttgatgacgcttacagtaaagttaccctgatgcaatcagct

SEQ ID NO: 761107 - DNA, 75 bp, synthetic construct
  source 1..75: mol_type = other DNA
gcctgatgcgacgctggctgaactgaaccccaaaacctggacagtttcagttaaccggctttttgatactcagtc

SEQ ID NO: 761108 - DNA, 75 bp, synthetic construct
  source 1..75: mol_type = other DNA
cggtcgcgaagctgagcaccgcattagccgctgcattgatgctgagcgggtgcatgcccggtgaaatccgcccga

SEQ ID NO: 761109 - DNA, 75 bp, synthetic construct
  source 1..75: mol_type = other DNA
agagctatgaagcaactaatcagtgactatgaaacgcagaagaagattgctatgcaggctgatattgagcagtta

SEQ ID NO: 761110 - DNA, 75 bp, synthetic construct
  source 1..75: mol_type = other DNA
gcatccggtctgttgcccgacatggcgaacaataacgcggtacatgttaacgaaaaaatcataccgaatgtggcc

SEQ ID NO: 761111 - DNA, 75 bp, synthetic construct
  source 1..75: mol_type = other DNA
tccctgcgtcaggagactgacaggatcatgcaggaggtgctgaccacctggcctgtggaggccatcgccgcaggt

SEQ ID NO: 761112 - DNA, 75 bp, synthetic construct
  source 1..75: mol_type = other DNA
ccaacacggctacaacctattacggtagaagaagctgcggaatatttaatcaagacgccgcgcaagccgatgttt

SEQ ID NO: 761113 - DNA, 75 bp, synthetic construct
  source 1..75: mol_type = other DNA
agagttaaagatgtcaccaaaggaaatcatctttgtgtctcctgagcctcaagaaatgcctgatatctgcaaaac

SEQ ID NO: 761114 - DNA, 75 bp, synthetic construct
  source 1..75: mol_type = other DNA
tcttcctgatggatatcgaattgtgaagatggttaaagcttcaagaggtgctggtcagtttatttacatgaccaa

SEQ ID NO: 761115 - DNA, 75 bp, synthetic construct
  source 1..75: mol_type = other DNA
aagaaatgcctgatgtatgcaaaactgaagcactatttaatcttgagcgtgaatattacccactgctgaaagcac

SEQ ID NO: 761116 - DNA, 75 bp, synthetic construct
  source 1..75: mol_type = other DNA
caccttcactaacgcgggtttcaccgaacgctaccacttacaggaatggttggcgaagcatccgcaggcattgac

SEQ ID NO: 761117 - DNA, 75 bp, synthetic construct
  source 1..75: mol_type = other DNA
aatacacccgaaaaccgccagttcctgaagcagcaggaaacactgagtcagcagttacgtgaaaagccggacaca

SEQ ID NO: 761118 - DNA, 75 bp, synthetic construct
  source 1..75: mol_type = other DNA
tgggagaaacccggcactacggtattccggccacactgcggggtatggtgaacaacgacctgaaagccacggctg

SEQ ID NO: 761119 - DNA, 75 bp, synthetic construct
  source 1..75: mol_type = other DNA
tcagatcgcgataacgcagtgggtgtggaatgaatttaaaacccagtctggtaccagaaaaattgcaggaaaaac

SEQ ID NO: 761120 - DNA, 75 bp, synthetic construct
  source 1..75: mol_type = other DNA
atggctacatacggcggtcagtttacgcttacagaaaatgtgaacacaactgaaaaccgccagttcctgaagcag

SEQ ID NO: 761121 - DNA, 75 bp, synthetic construct
  source 1..75: mol_type = other DNA
atgtgacggggttggtggggccggacggtgcaggtaaaaccacgctgatgcggatgttggcgggattactgaaac

SEQ ID NO: 761122 - DNA, 75 bp, synthetic construct
  source 1..75: mol_type = other DNA
aaagtggccaccacgggggactgccggcaggtggcccgggcgttgctgaataaccccggagataaacaaaaatga

SEQ ID NO: 761123 - DNA, 75 bp, synthetic construct
  source 1..75: mol_type = other DNA
tccggtaatttataacgtctgcaattatcagaaacccgctgccggtgagcctgcgttgttactctgggatgatgt

SEQ ID NO: 761124 - DNA, 75 bp, synthetic construct
  source 1..75: mol_type = other DNA
agcaatcaacgcttaataaaacacatccggtaatttataacgtctgcaattatcagaaacccgctgccggtgagc

SEQ ID NO: 761125 - DNA, 75 bp, synthetic construct
  source 1..75: mol_type = other DNA
ccgaatttatgggctgggaaagcctgaaagaaggggtgctcaaccgcaaaggcacccagcgcgtcatcatggttg

SEQ ID NO: 761126 - DNA, 75 bp, synthetic construct
  source 1..75: mol_type = other DNA
gatgtcgatgattttgaattgcgggcgctggtggcggaaaatatggatcttcctgctataccgccacgctatcgc

SEQ ID NO: 761127 - DNA, 75 bp, synthetic construct
  source 1..75: mol_type = other DNA
ttgccgccaccgatcacgtcaactttgccgtcaaacgcggtgaaatctttggtttgctcgggccaaacggcgcag

SEQ ID NO: 761128 - DNA, 75 bp, synthetic construct
  source 1..75: mol_type = other DNA
ctggaggtattacgaacagcggcaatctccgatgtcacgaacggtgcaatagtgatccacacccaacacctgaaa

SEQ ID NO: 761129 - DNA, 75 bp, synthetic construct
  source 1..75: mol_type = other DNA
cctgcgtggtacatgcagagggcaaatttttagttgttgaagagacgattaacggtaaagcgttatggaaccaac

SEQ ID NO: 761130 - DNA, 75 bp, synthetic construct
  source 1..75: mol_type = other DNA
atgtttaaaccgcacgttaccgttgcttgcgtagtgcacgcagagggtaaatttttagtcgttgaagagacgatt

SEQ ID NO: 761131 - DNA, 75 bp, synthetic construct
  source 1..75: mol_type = other DNA
aatggtaaagcgttatggaaccaacctgccgggcatctggaagcagatgaaaccttagtggaagccgccgcccgt

SEQ ID NO: 761132 - DNA, 75 bp, synthetic construct
  source 1..75: mol_type = other DNA
ctggtggtggatggtgccgggatgcctggcaatggtgttactgaacgcagccgtcagttacggcattgtcagact

SEQ ID NO: 761133 - DNA, 75 bp, synthetic construct
  source 1..75: mol_type = other DNA
ttattgtggcaccggccgttgtgggcggagcagaagatattacggcagacattcagcagtcagtggctgcacgta

SEQ ID NO: 761134 - DNA, 75 bp, synthetic construct
  source 1..75: mol_type = other DNA
cagcactgtctgaatcctctgtttctgctgagtcagtcagaaaaggggggaatattaatgttaaagggagccggc

SEQ ID NO: 761135 - DNA, 75 bp, synthetic construct
  source 1..75: mol_type = other DNA
acggcagcagctcagagcaaaactgctgctgaatccgctgcgacccgtgcggaagctgctgctgatcgtgctgaa

SEQ ID NO: 761136 - DNA, 75 bp, synthetic construct
  source 1..75: mol_type = other DNA
ttattctaaatacagtgttaacacttcttctgcaggcgctcatacgcactctgtatcgggtactgctgcaagcgc

SEQ ID NO: 761137 - DNA, 75 bp, synthetic construct
  source 1..75: mol_type = other DNA
tgccattgagcttgagcaaatatgcccgacccagcctcatgacagcgatatcgactgctgtcgttgggtcagcgc

SEQ ID NO: 761138 - DNA, 75 bp, synthetic construct
  source 1..75: mol_type = other DNA
gacagcgtattctatatagaaggtggggcatttcccgtagaggtttttttagaagaaggactctccgttactgca

SEQ ID NO: 761139 - DNA, 75 bp, synthetic construct
  source 1..75: mol_type = other DNA
cgacagaggcagctggcagtgcgacggcggcagctcagagcaaaagtacggcggaatccgcggcaacgcgcgccg

SEQ ID NO: 761140 - DNA, 75 bp, synthetic construct
  source 1..75: mol_type = other DNA
gaacaggcccgcgtgaaactggaacagattgctgctgatatcaagagtggtaaaacgacttttgctgccgcagcg

SEQ ID NO: 761141 - DNA, 75 bp, synthetic construct
  source 1..75: mol_type = other DNA
tctccgacgacgaaatggcgaagctgcatgtgcgctatatggtcggcgggcgtccatcgcatccgttgcaggaac

SEQ ID NO: 761142 - DNA, 75 bp, synthetic construct
  source 1..75: mol_type = other DNA
tacgtctcggaacgctgcgaactgggcgaacagcgtgaagcgttgctggcggtgaccatcccggaagaaaaaggc

SEQ ID NO: 761143 - DNA, 75 bp, synthetic construct
  source 1..75: mol_type = other DNA
gcgcaccggaaggcgctgagtatttacgggcggtgctacgcgcgccggtctatgaagcggcgcaggtcacgccgc

SEQ ID NO: 761144 - DNA, 75 bp, synthetic construct
  source 1..75: mol_type = other DNA
gctgcgatcgacgggatcgatcgtattcgctttaccaccagccatccgatcgaattcaccgacgatatcatcgaa

SEQ ID NO: 761145 - DNA, 75 bp, synthetic construct
  source 1..75: mol_type = other DNA
cggatttcgaaacccggctgaatgagctgggctacgattgccacgacgaaaccaataacccggcgttcaggttct

SEQ ID NO: 761146 - DNA, 75 bp, synthetic construct
  source 1..75: mol_type = other DNA
ccggtgccccggaaggtgccgaatatttaagagcggtgctacgcgcaccggtctacgaggcggcgcaggtcacgc

SEQ ID NO: 761147 - DNA, 75 bp, synthetic construct
  source 1..75: mol_type = other DNA
caactatcgctttgctgacgccaaagatgcctgcatttttgtcggcgtgcgcctgagccgcggcctcgaagaacg

SEQ ID NO: 761148 - DNA, 75 bp, synthetic construct
  source 1..75: mol_type = other DNA
gcgcaaagaaattttgcagatgctcaacgacggcggctacagcgtggtggatctctccgacgacgaaatggcgaa

SEQ ID NO: 761149 - DNA, 75 bp, synthetic construct
  source 1..75: mol_type = other DNA
cgcagtggccagcggggcgggcgatatcactgatgagattcagacaggggtggcacaccgaatggcggcgggagg

SEQ ID NO: 761150 - DNA, 75 bp, synthetic construct
  source 1..75: mol_type = other DNA
tcgacgacatcatcaccgtcgatagcgatgccatctgtgcggcgatgaaagacctgttcgaagatgtgcgcgcgg

SEQ ID NO: 761151 - DNA, 75 bp, synthetic construct
  source 1..75: mol_type = other DNA
cgcggtggcggaaccctctggcgcgctggcgctggcgggaatgaaaaaatatatcgcccagcacaacattcgcgg

SEQ ID NO: 761152 - DNA, 75 bp, synthetic construct
  source 1..75: mol_type = other DNA
tgatgcgatctgtgcggcgatgaaggatttattcgaagatgtgcgcgcggtggcggaaccctctggcgcgctggc

SEQ ID NO: 761153 - DNA, 75 bp, synthetic construct
  source 1..75: mol_type = other DNA
ggcgcaccaatcccgtggccatcagataccgttccgtctggttatgccctgatgcaggggcagacttttgacaaa

SEQ ID NO: 761154 - DNA, 75 bp, synthetic construct
  source 1..75: mol_type = other DNA
ccggataccaaagcgccgggcctcactcaggcgctaaatactaaagatggcgcagtgatggtgatgagttacggg

SEQ ID NO: 761155 - DNA, 75 bp, synthetic construct
  source 1..75: mol_type = other DNA
gtaaaggctccatcactgaacaactgcttaacgctcgtgccgatgtaacgcttggcggcggtgcaaaaacgtttg

SEQ ID NO: 761156 - DNA, 75 bp, synthetic construct
  source 1..75: mol_type = other DNA
atcgtccgttaccggcagattatgttacgcactgccggaatgcttctgtaaaggtcattacacctgattcagaag

SEQ ID NO: 761157 - DNA, 75 bp, synthetic construct
  source 1..75: mol_type = other DNA
atgcgactggtgtaaatattcaatgggattataccagtaatgccagcgtgacgattcatacgtcaccagcatatt

SEQ ID NO: 761158 - DNA, 75 bp, synthetic construct
  source 1..75: mol_type = other DNA
ccctgatatgcgtagctggacgattaagggcaagcccgccagtggtcgtgcagtattgtctcaggaacaggacgg

SEQ ID NO: 761159 - DNA, 75 bp, synthetic construct
  source 1..75: mol_type = other DNA
aatatccggtgttccatttgatggttctactgatatcactttaaccgccgcgcatgtggctgcttttgccagaag

SEQ ID NO: 761160 - DNA, 75 bp, synthetic construct
  source 1..75: mol_type = other DNA
tcacaacaaataaatattagaaaaaaggaagaatacttaatagaacgattcggttttaccaaacatcccgttata

SEQ ID NO: 761161 - DNA, 75 bp, synthetic construct
  source 1..75: mol_type = other DNA
gggaagttttatatgacgttaaaactgtactggagatagatcgcgagcggcgacaacacaatcagagaacacctg

SEQ ID NO: 761162 - DNA, 75 bp, synthetic construct
  source 1..75: mol_type = other DNA
gccgatatggtcgatacctgtaagcaatttctccctgagttttctctgactttctctttccagcgcggctgggag

SEQ ID NO: 761163 - DNA, 75 bp, synthetic construct
  source 1..75: mol_type = other DNA
cgcaatctgccgcgccctggtccagcaggaactgcaaaccaaaacacttcgtgtcggtaagcgtgtgtatcgggt

SEQ ID NO: 761164 - DNA, 75 bp, synthetic construct
  source 1..75: mol_type = other DNA
cggcatctgtcgtgatttgattaagcaggaacttaaaaccaaaacactgtgcatcggaaagcgtgtgtatcgggt

SEQ ID NO: 761165 - DNA, 75 bp, synthetic construct
  source 1..75: mol_type = other DNA
tggttggccacctatttcttagcggccggagtcgcattcgccttttacgtaggtcagttagtcgtaaaactgttg

SEQ ID NO: 761166 - DNA, 75 bp, synthetic construct
  source 1..75: mol_type = other DNA
gggtcagcgtgtgggcctgcccgttgcttatcgcgatagccgcaccaatggcctaatggcgcaggcacaacagca

SEQ ID NO: 761167 - DNA, 75 bp, synthetic construct
  source 1..75: mol_type = other DNA
gtaaatatactgcgcaggatgccaccacagcgcgaaaaggccttgtccagctcagtagcgccaccaacagcacgt

SEQ ID NO: 761168 - DNA, 75 bp, synthetic construct
  source 1..75: mol_type = other DNA
cgctcacgccagccagattgtcgcgccggataccaaagctccgggtctgactcaggcattaatgaccaaagatgg

SEQ ID NO: 761169 - DNA, 75 bp, synthetic construct
  source 1..75: mol_type = other DNA
ctcaccactgctgagcgttgggacggtaaactgcccgataccatgatccccggcagtacagttccgtttatctct

SEQ ID NO: 761170 - DNA, 75 bp, synthetic construct
  source 1..75: mol_type = other DNA
acaccgttaatgaaggtgaacgcggcattttgctgcgctacggaaaaatcgtaaaagttgccgagccggggctgg

SEQ ID NO: 761171 - DNA, 75 bp, synthetic construct
  source 1..75: mol_type = other DNA
tcgttaatcgttaacgataacttgtcgtgcaaaaaactttttgccacagacgaaattgtagcgcgtggtggtaat

SEQ ID NO: 761172 - DNA, 75 bp, synthetic construct
  source 1..75: mol_type = other DNA
tgcagccgcttatccgtcaggcgtgatccctgatatgcgtggctggacgattaagggcaaacctgccagtggtcg

SEQ ID NO: 761173 - DNA, 75 bp, synthetic construct
  source 1..75: mol_type = other DNA
gcctaatggcgcaggcacaacaacaactcggcaaacgcgatatttatcaacgtagcggcatccagtttctgccct

SEQ ID NO: 761174 - DNA, 75 bp, synthetic construct
  source 1..75: mol_type = other DNA
agatttctcgcaactgcatattgtcggcggcggctgccagaacacgctgctcaaccagctgtgtgccgatgcctg

SEQ ID NO: 761175 - DNA, 75 bp, synthetic construct
  source 1..75: mol_type = other DNA
ccggcctgccgcttcatcatcaatcccaatgacgatcgctttattaatcctgacgagatgtgcagcgaaattcag

SEQ ID NO: 761176 - DNA, 75 bp, synthetic construct
  source 1..75: mol_type = other DNA
aagcagagacgattcgcgtaagaggcgcggcagaagcagaaactattcgtttaaaaagtggggctgaagcagaag

SEQ ID NO: 761177 - DNA, 75 bp, synthetic construct
  source 1..75: mol_type = other DNA
attgagaatattgatttttctgatgcttatgaaaagtcgattgaggaccggatgaaagcggaagtcgctattgcc

SEQ ID NO: 761178 - DNA, 75 bp, synthetic construct
  source 1..75: mol_type = other DNA
cagtgcgaccaacagtacgtctgaaacgctggcggcaacgccaaaggcagtaaaagcagcctatgacaatgcaga

SEQ ID NO: 761179 - DNA, 75 bp, synthetic construct
  source 1..75: mol_type = other DNA
ctttaaggccgttattcagtggcctgccaacatgaagctgtgggacgagtgggaagaactcatccgcaacaaaca

SEQ ID NO: 761180 - DNA, 75 bp, synthetic construct
  source 1..75: mol_type = other DNA
aggcttatccgatgctggaagccatcaaggctgaactggagtttaacccccgtttaaaaaacgatttcccggaag

SEQ ID NO: 761181 - DNA, 75 bp, synthetic construct
  source 1..75: mol_type = other DNA
cgggaaaaccaacaagaaaaacatgggatcctcagactgaagactggtcagaggacagcaaggccggtggagccg

SEQ ID NO: 761182 - DNA, 75 bp, synthetic construct
  source 1..75: mol_type = other DNA
ataacccgatgtggaaaacggcccgctttaaggctgtcattcagtggcctgccaatatgaagctgtgggacgagt

SEQ ID NO: 761183 - DNA, 75 bp, synthetic construct
  source 1..75: mol_type = other DNA
ccgcatatggccaacggcctgattcgcatcagtccggcacatcagacgctgattgaccagctgcgccactacccc

SEQ ID NO: 761184 - DNA, 75 bp, synthetic construct
  source 1..75: mol_type = other DNA
gggaagaactcatccgcaacaaacagccggaagcagcggaggcactttaccggcagaacgaagccgacatgctcg

SEQ ID NO: 761185 - DNA, 75 bp, synthetic construct
  source 1..75: mol_type = other DNA
cggacaaatcgttgaggagcgcccggtaacctttagtgcagagcaactggcggcggcactcgattcattccgtgg

SEQ ID NO: 761186 - DNA, 75 bp, synthetic construct
  source 1..75: mol_type = other DNA
cgccgtctggcagtaagtaaatatccagtcgaacggatggtgactctggaacatctgcgtgaactggttgagcaa

SEQ ID NO: 761187 - DNA, 75 bp, synthetic construct
  source 1..75: mol_type = other DNA
aatgatgcgctgcaaaaagtgaaacggatttataacgccaaccgtgccgggcataccggtgcgctggacccgctg

SEQ ID NO: 761188 - DNA, 75 bp, synthetic construct
  source 1..75: mol_type = other DNA
caatggctgccagagcggcgcaagcgcatctttatgaacttggtaaacatccagattggcaggtgctattaacaa

SEQ ID NO: 761189 - DNA, 75 bp, synthetic construct
  source 1..75: mol_type = other DNA
gatgagccagaaaatgcgttacacccaatggctgccagagcggcgcaagcgcatctttatgaacttggtaaacat

SEQ ID NO: 761190 - DNA, 75 bp, synthetic construct
  source 1..75: mol_type = other DNA
gccgaacagcaggatattccagctgcggagttacttgatccattactgatgccaatggacagtccagcttcggac

SEQ ID NO: 761191 - DNA, 75 bp, synthetic construct
  source 1..75: mol_type = other DNA
aacaggcagagccagaatagcccacctggttatgacagaagggagccggttcccggtaatcgctcaggcttattt

SEQ ID NO: 761192 - DNA, 75 bp, synthetic construct
  source 1..75: mol_type = other DNA
agcaggcgggcaaggtgacaacagatcgtactttgatgtatcgcataggttacggttcaaacggtgaatatggca

SEQ ID NO: 761193 - DNA, 75 bp, synthetic construct
  source 1..75: mol_type = other DNA
agcgtgctgctggttaacctactgggtgacggcgtgggtataggaagtataaaccacctttttgctcctcatccg

SEQ ID NO: 761194 - DNA, 75 bp, synthetic construct
  source 1..75: mol_type = other DNA
gtagcgtttgccggaccgagtttgtctcacgccatgtttgctgtctggctggcgctgctgccgcgtatggtacgt

SEQ ID NO: 761195 - DNA, 75 bp, synthetic construct
  source 1..75: mol_type = other DNA
ttgtggcgcttctgttggtgtcgcacgtctgccatgcagccgttacgccagcagccagccgtttcgacccccgta

SEQ ID NO: 761196 - DNA, 75 bp, synthetic construct
  source 1..75: mol_type = other DNA
cagcagccagtattactgacctgaaaaaaaatcctatgggaaccgtagctgaaggcgagggagacgcagttgtga

SEQ ID NO: 761197 - DNA, 75 bp, synthetic construct
  source 1..75: mol_type = other DNA
accaggaactggtgaaactggttactgaacgcagcaatcagccactgcatgatgtggatctggacagttatttat

SEQ ID NO: 761198 - DNA, 75 bp, synthetic construct
  source 1..75: mol_type = other DNA
ctggttaacttctataccggagtcggaagttgccggaccctgcagatgaaggcgcattacagaaatggaggtctg

SEQ ID NO: 761199 - DNA, 75 bp, synthetic construct
  source 1..75: mol_type = other DNA
actgtgaaatattgcagggaaacgcccgctttgttgacgaacacacgctggcgctggattgcccggacggtacgg

SEQ ID NO: 761200 - DNA, 75 bp, synthetic construct
  source 1..75: mol_type = other DNA
agcagtgaatacgtgcattcctacctgcgcaatgaaggttatgcactcggtgaacctgaactgtacgcggctgtt

SEQ ID NO: 761201 - DNA, 75 bp, synthetic construct
  source 1..75: mol_type = other DNA
cgggaaatacaccgcacaggatgcaacgacagcacagaaagggataatccagctaagcagcgcgaccaacagcac

SEQ ID NO: 761202 - DNA, 75 bp, synthetic construct
  source 1..75: mol_type = other DNA
gcaacccatgcgactgatgctgcaggctcagcacgtgcagccagcacgtcagccggacaggccgcgacgtcggct

SEQ ID NO: 761203 - DNA, 75 bp, synthetic construct
  source 1..75: mol_type = other DNA
atggcggttaagttagaagtaattatctataccgatgaaaaaggctgtgttttaacccagaccacggggagttat

SEQ ID NO: 761204 - DNA, 75 bp, synthetic construct
  source 1..75: mol_type = other DNA
acagagacggatacctgcgcccggatcagctattccgatatgtctcatatttaccataccggcgtgccggatgag

SEQ ID NO: 761205 - DNA, 75 bp, synthetic construct
  source 1..75: mol_type = other DNA
ttttcgaagaggctgtagggcggaaggttgaatttgttcaggataaccattctaaatcaactaagggtgtattac

SEQ ID NO: 761206 - DNA, 75 bp, synthetic construct
  source 1..75: mol_type = other DNA
atgaacgtaattaaaactgaaattccagatgtattaattttcgagccgaaagtttttggtgatgaacgtggtttt

SEQ ID NO: 761207 - DNA, 75 bp, synthetic construct
  source 1..75: mol_type = other DNA
gatattgcatccgccgtggcgcttgaggatgcaagtacgacgaaaaaggggatagtacagctcagcagtgcgacc

SEQ ID NO: 761208 - DNA, 75 bp, synthetic construct
  source 1..75: mol_type = other DNA
tgcgcaatgaaggttatgcactcggtgaacctgaactgtacgcggctgttgatgagtgcaccctgacgtttgcgg

SEQ ID NO: 761209 - DNA, 75 bp, synthetic construct
  source 1..75: mol_type = other DNA
tttatggaaagctttaatcagaaagttttcgaagaggctgtagggcgtaaggttgaatttgttcaggataatcat

SEQ ID NO: 761210 - DNA, 75 bp, synthetic construct
  source 1..75: mol_type = other DNA
gcgctgatttcggtaagctggcgattgctcattctgccgaccagcaggcgctgaacggcggccagatgggctggg

SEQ ID NO: 761211 - DNA, 75 bp, synthetic construct
  source 1..75: mol_type = other DNA
ggtgtacaaggctcagtaggtatgtctacggggtggttagctaataccagtacagatggtaatcatagccactca

SEQ ID NO: 761212 - DNA, 75 bp, synthetic construct
  source 1..75: mol_type = other DNA
tcttccatcagttgggtcgctggaaactgttaaaagagaagaatccagacctgattatcggtgtcggcggctgcg

SEQ ID NO: 761213 - DNA, 75 bp, synthetic construct
  source 1..75: mol_type = other DNA
atgaaagcacactgattaaagttaaagacggatttatgttatcccttgcctatgatattcgtaaagcacgggaag

SEQ ID NO: 761214 - DNA, 75 bp, synthetic construct
  source 1..75: mol_type = other DNA
ccaattgtgtctacaacatctggctcaggtttgtaccgtatatcagggaagacatcatcagatggagcgcatacc

SEQ ID NO: 761215 - DNA, 75 bp, synthetic construct
  source 1..75: mol_type = other DNA
ccaccaaatcatggaacgtttgatcatggatcaaattatcctgcagatggggcagaaaatgggagtgaaaatctc

SEQ ID NO: 761216 - DNA, 75 bp, synthetic construct
  source 1..75: mol_type = other DNA
agaaacgaacgcatcatcaagtgccagtagtgcagcttcctcggcaacggcggcagcaaattctgcgaaggcggc

SEQ ID NO: 761217 - DNA, 75 bp, synthetic construct
  source 1..75: mol_type = other DNA
aaagaaattggcattatatggccgtgtaagtctaaagtgttgctttctgtaaaggacgcgagacaacccactctt

SEQ ID NO: 761218 - DNA, 75 bp, synthetic construct
  source 1..75: mol_type = other DNA
gagacggctgaatttgtttataagacgacgaattattacgcagcgaaacatgaacgatgtattcaatggaaggat

SEQ ID NO: 761219 - DNA, 75 bp, synthetic construct
  source 1..75: mol_type = other DNA
tttttgaggaagctgtaggccgcaaagttgaatttgtccaggataaccattcgaagtcttgtaaaggtgttttac

SEQ ID NO: 761220 - DNA, 75 bp, synthetic construct
  source 1..75: mol_type = other DNA
agtttcaggtggcaacaggattgcatgatgttatcaaggaagcactgagaaatgactacaacggcgtgaatattt

SEQ ID NO: 761221 - DNA, 75 bp, synthetic construct
  source 1..75: mol_type = other DNA
tgcattgagggtgaagtatttgatattgctgtagatatacggaagtcatctccattttttggtaaatgggttggt

SEQ ID NO: 761222 - DNA, 75 bp, synthetic construct
  source 1..75: mol_type = other DNA
ccagatataaaaatagattggccactaattaatgagcctattgtatcagagaaagactctaagcaaccatttctt

SEQ ID NO: 761223 - DNA, 75 bp, synthetic construct
  source 1..75: mol_type = other DNA
cgaataatttctttaataagcaatacgagcgttctattatttggaatgataaatttttagatataaaatggggaa

SEQ ID NO: 761224 - DNA, 75 bp, synthetic construct
  source 1..75: mol_type = other DNA
aagaccgtttgctattgataacgcaaccggcgaactggttattggaaccaaactgtccgcaagtctgaacggtaa

SEQ ID NO: 761225 - DNA, 75 bp, synthetic construct
  source 1..75: mol_type = other DNA
gtgaatttatctgctgagaataagcgtcaattgtggatcccggaaggatttgcgcatgggtttttggtgctgagt

SEQ ID NO: 761226 - DNA, 75 bp, synthetic construct
  source 1..75: mol_type = other DNA
gcgggctgcattatcagttagaaccttatgcgcaagggaaattggtacgttgcgttgttggtgaggtttttgatg

SEQ ID NO: 761227 - DNA, 75 bp, synthetic construct
  source 1..75: mol_type = other DNA
cgatcgcggcatccgctggaacgatgagaccattgggattacctggccggaaatcgacagcgagatcctcacctc

SEQ ID NO: 761228 - DNA, 75 bp, synthetic construct
  source 1..75: mol_type = other DNA
atacccgcaaaggcgaaagaggtacgatttaacatagtgaacggaacacccaattcacgaacgttcccgaaatat

SEQ ID NO: 761229 - DNA, 75 bp, synthetic construct
  source 1..75: mol_type = other DNA
aaaaaggacatcgttacataacggtgatctccgatcgcgatggtcgggcgctggccttaacggatgatcgcggca

SEQ ID NO: 761230 - DNA, 75 bp, synthetic construct
  source 1..75: mol_type = other DNA
ggatgactgagtcccggcaggaaaagctgatgtggttgcgggaacagatgcaacagacaagccagtgctggacac

SEQ ID NO: 761231 - DNA, 75 bp, synthetic construct
  source 1..75: mol_type = other DNA
cgaaggtaaatctaaccaactggcgcgcgcggcggctcgccaggtggcggataaccccggtggcgcttataaccc

SEQ ID NO: 761232 - DNA, 75 bp, synthetic construct
  source 1..75: mol_type = other DNA
gcggcggctcgccaggtggcagacaaccctggcggcgcctataacccgctgttcctttatggcggcacggggctg

SEQ ID NO: 761233 - DNA, 75 bp, synthetic construct
  source 1..75: mol_type = other DNA
tgcatatgaaatacgccattgtagattcaattggtcaacgcaacagttatgtgaaaacatggggttgcggaggtt

SEQ ID NO: 761234 - DNA, 75 bp, synthetic construct
  source 1..75: mol_type = other DNA
attgatccacaaatgatgaaactggagggggctaccggcgagttacgtcgtgacggcagcattgtgtacaggcag

SEQ ID NO: 761235 - DNA, 75 bp, synthetic construct
  source 1..75: mol_type = other DNA
gttccgccggagcgggcgtataaatctgaagggcttgagcgtgtggtgctcagtgacagtgaacggcagaaaact

SEQ ID NO: 761236 - DNA, 75 bp, synthetic construct
  source 1..75: mol_type = other DNA
aacttgctgtctgtgatatccgtaaccctgaacgtttttccgtgccgttgtctgattttggtcacgagtggagta

SEQ ID NO: 761237 - DNA, 75 bp, synthetic construct
  source 1..75: mol_type = other DNA
tgtcgatttggtcgatattctgaatgtcgatgattgctggcaggcagatcccgaattacttaatgaatttcgcaa

SEQ ID NO: 761238 - DNA, 75 bp, synthetic construct
  source 1..75: mol_type = other DNA
aagttgctgcggtattaacgctctttatattggtaatcatgaccattgctgcggtaataatgcgttactgttttc

SEQ ID NO: 761239 - DNA, 75 bp, synthetic construct
  source 1..75: mol_type = other DNA
gttatgtggtggatgtacataacgtcagaaatcccgggatgaaacgttatatcagccgggaagacgcggataaat

SEQ ID NO: 761240 - DNA, 75 bp, synthetic construct
  source 1..75: mol_type = other DNA
tcgctcaaggcgagcttcatttaacgccttacgcagttgcagaatttcagattccagttcagccaccgtgcggga

SEQ ID NO: 761241 - DNA, 75 bp, synthetic construct
  source 1..75: mol_type = other DNA
tggtcattctgcattgtgccgtacagcagcgctttctgcattcgtgatgacggtaaattactggtgctcacgtat

SEQ ID NO: 761242 - DNA, 75 bp, synthetic construct
  source 1..75: mol_type = other DNA
tataaagacttcggtaagaacaaccctattcaggatgacgatcgcatcatctacacctacgccgggcgacaggtg

SEQ ID NO: 761243 - DNA, 75 bp, synthetic construct
  source 1..75: mol_type = other DNA
gatggatggggcggtaccggatcagatgataccgggatacagtgggaatacctgcacagcggtttcggcattgca

SEQ ID NO: 761244 - DNA, 75 bp, synthetic construct
  source 1..75: mol_type = other DNA
tggattataacggcgcggcagtcgaaaaaactggcgataccgtgatgatcgataccgccaacggcgtactgggcg

SEQ ID NO: 761245 - DNA, 75 bp, synthetic construct
  source 1..75: mol_type = other DNA
tcgaacggacgcgatggcctacaacggacccaggaaaccgacctgttgcacgccatcgagaaagcactcggtatt

SEQ ID NO: 761246 - DNA, 75 bp, synthetic construct
  source 1..75: mol_type = other DNA
cagcaataccgcggttaccgtccgattcaatcgaaacgtgccacctgcgcttcgcaatgtggccacaactaactg

SEQ ID NO: 761247 - DNA, 75 bp, synthetic construct
  source 1..75: mol_type = other DNA
ctattcaggatgacgatcgcatcatctacacctacgccgggcgacaggtgaatgagatccgccatcttattgacg

SEQ ID NO: 761248 - DNA, 75 bp, synthetic construct
  source 1..75: mol_type = other DNA
gggcacggtacgcatggaacagtgtcaacggctacccgagcacggttgtttactatcagcagcgcctgtatttcg

SEQ ID NO: 761249 - DNA, 75 bp, synthetic construct
  source 1..75: mol_type = other DNA
ctgtacatccatttctgaagattctttattaatcagtttttatgcgaaaggtgggagcatggatattgttatgca

SEQ ID NO: 761250 - DNA, 75 bp, synthetic construct
  source 1..75: mol_type = other DNA
agcaactactaccgcgcgaatactgcaggtaagaccgggacccttcgcccgtctcacactgaaggtatgtcttgg

SEQ ID NO: 761251 - DNA, 75 bp, synthetic construct
  source 1..75: mol_type = other DNA
tggtcattctgcatcgtgccgtacagcagcgcgttctgcattcgtgatgacggcaagttgctggtgttgacctat

SEQ ID NO: 761252 - DNA, 75 bp, synthetic construct
  source 1..75: mol_type = other DNA
ccgacgttggcgcgcagatccagttcccgtactcagaaacggatcctgataccggcgaagtggtggcgaaagaat

SEQ ID NO: 761253 - DNA, 75 bp, synthetic construct
  source 1..75: mol_type = other DNA
tagaaaaatgtgagttgtttgaaaatcgctggataggaacgaacctagcgggtgcatcactgaaagagtcagact

SEQ ID NO: 761254 - DNA, 75 bp, synthetic construct
  source 1..75: mol_type = other DNA
atgtacggaacatgcgaaacgctatgccggtagctggcagcaaagtatccgggagacacgcctctgatgctggtt

SEQ ID NO: 761255 - DNA, 75 bp, synthetic construct
  source 1..75: mol_type = other DNA
atgtacggaacatgcgaaacgctatgccggaagctggcagcaaagtatccgggagacacgccgctgatgctggtt

SEQ ID NO: 761256 - DNA, 75 bp, synthetic construct
  source 1..75: mol_type = other DNA
tatttcttccggcgtggcgatggagatcatcaataacgtgagagaaaaccgtcaggtgaccgtcccggctgaact

SEQ ID NO: 761257 - DNA, 75 bp, synthetic construct
  source 1..75: mol_type = other DNA
aacgactgatgttatcgccgcctgcgggcggcgattcagggagaccatgaatcatgaacgaaacgctgaatgcac

SEQ ID NO: 761258 - DNA, 75 bp, synthetic construct
  source 1..75: mol_type = other DNA
ctgaacgagataatacccatttatcgattccatttttagccgatgcacttacttcacgcgggcaacgtatattag

SEQ ID NO: 761259 - DNA, 75 bp, synthetic construct
  source 1..75: mol_type = other DNA
atgtacggaacatgcgaaacgctatgccggcagctggcagcaaagtatacgggagacacgcccctgatgctggtt

SEQ ID NO: 761260 - DNA, 75 bp, synthetic construct
  source 1..75: mol_type = other DNA
gatgcgggtcaactatccaacacaagccgatttagacgctgtcctggaaaaaatacccgtccgtcgtctggggac

SEQ ID NO: 761261 - DNA, 75 bp, synthetic construct
  source 1..75: mol_type = other DNA
taacatgttgccgcttattgccgtgttgggtatttatttttacatacaaaagtgtggcccacatttcttacgcat

SEQ ID NO: 761262 - DNA, 75 bp, synthetic construct
  source 1..75: mol_type = other DNA
tgcaggaaaaaccagcgaagcgtctggctatagagggacttccagggaattatttcaacgccggtgtagtatatc

SEQ ID NO: 761263 - DNA, 75 bp, synthetic construct
  source 1..75: mol_type = other DNA
catctatctcgacaaagcgcgtaatctgctgtttgccacggtagagattgaatctgaagaacggtggaatgcggt

SEQ ID NO: 761264 - DNA, 75 bp, synthetic construct
  source 1..75: mol_type = other DNA
tatttcttccggcgtggcgatggagatcatcaataacgtgagcgaaaaccgccaggtgaccgtccctgctgaact

SEQ ID NO: 761265 - DNA, 75 bp, synthetic construct
  source 1..75: mol_type = other DNA
gccaggtgaccgtccctgctgaactgctggcgtccctgattcagaccgctgaacaggcactgtggaaacgtgagt

SEQ ID NO: 761266 - DNA, 75 bp, synthetic construct
  source 1..75: mol_type = other DNA
gaacaggcattgtggaaacgtgaatgggccgcctgggatcatggcctcgccgtcccggaatgcgtcacccgccgt

SEQ ID NO: 761267 - DNA, 75 bp, synthetic construct
  source 1..75: mol_type = other DNA
gtgtttcggcaccgaccgttaagagcagaggtgtttatacgtcttttagggaaaatgattgaagttgctgcggta

SEQ ID NO: 761268 - DNA, 75 bp, synthetic construct
  source 1..75: mol_type = other DNA
aaattacggatgagtttgctgacatcgcgttatgcacttggcgttgggccgttgcgggaagcgctttcgcaactg

SEQ ID NO: 761269 - DNA, 75 bp, synthetic construct
  source 1..75: mol_type = other DNA
cggaagaccagcggactgaatccggtgtttcttccggtacggcgatggagattatcaaatacgtgagcgaaaacc

SEQ ID NO: 761270 - DNA, 75 bp, synthetic construct
  source 1..75: mol_type = other DNA
ggcaccacaacttttcacataaagacttaagtgatctcaccttcaccgcttgcacattcattcgcagcgactttc

SEQ ID NO: 761271 - DNA, 75 bp, synthetic construct
  source 1..75: mol_type = other DNA
ttaatgaattccgcaaagttcctgagatggattactcaagagttatggcctctgctgatttgttgaagttgattg

SEQ ID NO: 761272 - DNA, 75 bp, synthetic construct
  source 1..75: mol_type = other DNA
cggcaacaccctcagctaagcactcgatgtcgcatgagcgatcgttgtgggggcctggaagcctctaaatccgat

SEQ ID NO: 761273 - DNA, 75 bp, synthetic construct
  source 1..75: mol_type = other DNA
gtgatggcgattggcctgaacttagcgcctatcgcagtgaaaagtgtatcggcttcggcctttgatagctggatg

SEQ ID NO: 761274 - DNA, 75 bp, synthetic construct
  source 1..75: mol_type = other DNA
taatgggcgttcaacacgcggtggcgatgtttggcgcgacggtgttaatgccgattctgatggggctggatccca

SEQ ID NO: 761275 - DNA, 75 bp, synthetic construct
  source 1..75: mol_type = other DNA
tatttcttccgccactgcgatggagattatcagcaacgtgagcgaaaaccgccaggtgaccgtccctgctgaact

SEQ ID NO: 761276 - DNA, 75 bp, synthetic construct
  source 1..75: mol_type = other DNA
aaaatatcggtgtgatggccgtgaccaaagtctactcgacgctggtgtttgttgctgctgccgtcatcgccatgc

SEQ ID NO: 761277 - DNA, 75 bp, synthetic construct
  source 1..75: mol_type = other DNA
ttcgcgatgcgatgtcctgcatgggcgcggcggtcaatatcatcaccacggacggtccagccgggcgcgccgggt

SEQ ID NO: 761278 - DNA, 75 bp, synthetic construct
  source 1..75: mol_type = other DNA
tggtggcggaaaacttaggtcatctcaaggcggtcgccgggatgaccggacgcaatatggatccgtatatgggac

SEQ ID NO: 761279 - DNA, 75 bp, synthetic construct
  source 1..75: mol_type = other DNA
aattcgttacctggcattctttatgaccacccgcgcttttgaacgttcaggattccgacaacgccatcctgacaa

SEQ ID NO: 761280 - DNA, 75 bp, synthetic construct
  source 1..75: mol_type = other DNA
atgccgacaagatgtttcttgatatgatcattgacatgggagagagtaaaattattcatggagacttacatatgg

SEQ ID NO: 761281 - DNA, 75 bp, synthetic construct
  source 1..75: mol_type = other DNA
atatggaaacgtggagaatcaaccacagagtatacccgcgcacaccagcgaacaatcagacgactgcgcagactc

SEQ ID NO: 761282 - DNA, 75 bp, synthetic construct
  source 1..75: mol_type = other DNA
tttcgcccatcgttacgctgaagaagcatcccgtctggcgcagcaggagagcaatccgacccgtaaacgcgaact

SEQ ID NO: 761283 - DNA, 75 bp, synthetic construct
  source 1..75: mol_type = other DNA
ggttgtgcgtgtggcgggttacagtgcgcaatttgtctcactggataaaagcgtacaggacgatattatcctgcg

SEQ ID NO: 761284 - DNA, 75 bp, synthetic construct
  source 1..75: mol_type = other DNA
ggtgctgaaatttactgtcacgaggtagaaaaatataccaaccctcgaggcggtttattccaggctggcttatat

SEQ ID NO: 761285 - DNA, 75 bp, synthetic construct
  source 1..75: mol_type = other DNA
tgttactggcagcgttatttatgtctgcctccacgcaggcatcagataatctgcagtttaaaggaaaattaatca

SEQ ID NO: 761286 - DNA, 75 bp, synthetic construct
  source 1..75: mol_type = other DNA
gatatgtcgagtgatgaacttgaggttttttgtggtgagatttaccatgcatgtatgaataggaaaaatatatta

SEQ ID NO: 761287 - DNA, 75 bp, synthetic construct
  source 1..75: mol_type = other DNA
ctgcagcagtaaacagtgcgaagaataatgtatatcttactgccggcgtcgctcgagaaggggaaatgtcattgc

SEQ ID NO: 761288 - DNA, 75 bp, synthetic construct
  source 1..75: mol_type = other DNA
aactctcacgcgttgaaaggagaagtgccgcacgacgattatgttcagcatctgcttagcgatctggacaacgat

SEQ ID NO: 761289 - DNA, 75 bp, synthetic construct
  source 1..75: mol_type = other DNA
gcgcttggcgatctacgccaggctattgaactgaatccgccgcatctttcctggtatcaactgaccatcgaacct

SEQ ID NO: 761290 - DNA, 75 bp, synthetic construct
  source 1..75: mol_type = other DNA
agcaatatgaaacctccgcttacgccaaaccgggttatcaatgccaacacaatctcaactactggcgatttggtg

SEQ ID NO: 761291 - DNA, 75 bp, synthetic construct
  source 1..75: mol_type = other DNA
ttcggcgtagccgataccggcgactccgtctatgccatccagaaacaggtattcgaagatcgtaaactgtctttg

SEQ ID NO: 761292 - DNA, 75 bp, synthetic construct
  source 1..75: mol_type = other DNA
aactgctgaattcgaaacactggatatcaacattaacggacaggaaacgctgctggacaaaaaacaggtgatccc

SEQ ID NO: 761293 - DNA, 75 bp, synthetic construct
  source 1..75: mol_type = other DNA
tgatttttacatatcgtatctgaggagaagtaaaaacgatgtgtctgatggtgagccggaagaagattatgaaga

SEQ ID NO: 761294 - DNA, 75 bp, synthetic construct
  source 1..75: mol_type = other DNA
ttttttcaaagggatcgatgccttaccgttgactggtcaatacacccactatgcgctggataaaaaaacgggcaa

SEQ ID NO: 761295 - DNA, 75 bp, synthetic construct
  source 1..75: mol_type = other DNA
caacgaacccggatttttcaccgcctggagcaatctcaagcgattgctcaagcagcgcaatgcggcgctgcgcca

SEQ ID NO: 761296 - DNA, 75 bp, synthetic construct
  source 1..75: mol_type = other DNA
gaagcacagcattgttgactggtgcttctcgatagtcccttactccagcgccttctgcatccgtgatgacggtaa

SEQ ID NO: 761297 - DNA, 75 bp, synthetic construct
  source 1..75: mol_type = other DNA
agcccatgagtacacctccggacacagggagagacgtttaccatccaccagggcgaagtttcgggtgcatgccta

SEQ ID NO: 761298 - DNA, 75 bp, synthetic construct
  source 1..75: mol_type = other DNA
cgggaaagtcggtgaaacctataatattggtggtcacaacgagcgtaagaatctcgaggttgtggaaaccatctg

SEQ ID NO: 761299 - DNA, 75 bp, synthetic construct
  source 1..75: mol_type = other DNA
cccgtgaacttggctggctgccgcaggaaacctttgaaagtggaatgcgtaaaacggtgcagtggtatctggcta

SEQ ID NO: 761300 - DNA, 75 bp, synthetic construct
  source 1..75: mol_type = other DNA
cataggagccagtcgcgcgatggtgagcttgttaagccgcccgttaaaactcattcgctcgccgtatattattct

SEQ ID NO: 761301 - DNA, 75 bp, synthetic construct
  source 1..75: mol_type = other DNA
attggcgtgatgattattatggcgctggtcattgccatttgtgccattgtgatgggctcaggcggtgatgctgcc

SEQ ID NO: 761302 - DNA, 75 bp, synthetic construct
  source 1..75: mol_type = other DNA
cgccgcgacacaggcacttccggcctgccgcttcatcatcaatcccaatgacgatcgctttattaatcctgacga

SEQ ID NO: 761303 - DNA, 75 bp, synthetic construct
  source 1..75: mol_type = other DNA
caacaatgtggatgatttccatcaggtcgtcagcaccaccgcgaatctgaccacctttacccctaatcctgacag

SEQ ID NO: 761304 - DNA, 75 bp, synthetic construct
  source 1..75: mol_type = other DNA
tggcccaggtgaccggtgcccgggagcagcaacaactgacggatatcatccgagagtcacggcgtgaggccggag

SEQ ID NO: 761305 - DNA, 75 bp, synthetic construct
  source 1..75: mol_type = other DNA
atgtggccaacagtctgtgggaggtggccgggttcactgacgacggggccatccgtttccgccagggagagcagg

SEQ ID NO: 761306 - DNA, 75 bp, synthetic construct
  source 1..75: mol_type = other DNA
actggcgatcgtcgaccattgacggaagacaccttgcgattgctggaaaaaatcgccccttctgcacataaaatt

SEQ ID NO: 761307 - DNA, 75 bp, synthetic construct
  source 1..75: mol_type = other DNA
ggaaggcgttgttaccgatccacacaccggcgatcgtcggccactaacagaagacaccttacgattgctggaaaa

SEQ ID NO: 761308 - DNA, 75 bp, synthetic construct
  source 1..75: mol_type = other DNA
aagcccggtggccattctcagtggtcgcggaggcgcgcaggccctgcgtgagcgcacggaagacgtggccatgat

SEQ ID NO: 761309 - DNA, 75 bp, synthetic construct
  source 1..75: mol_type = other DNA
gcacggccattcaggaacagaccgtgctggtctttcctgaacgggcacaggaacgcgatataccggcaggtgatg

SEQ ID NO: 761310 - DNA, 75 bp, synthetic construct
  source 1..75: mol_type = other DNA
caccgggccgtgcatgagatgcgtgaggccggggtggaggcacgaacgctcgccagtttcctgagtgaaacccgc

SEQ ID NO: 761311 - DNA, 75 bp, synthetic construct
  source 1..75: mol_type = other DNA
cagtggcgatgacgccatttatttgctgcacggcctgtcacggtttgtgccgcacttcatcgccctttccgccgc

SEQ ID NO: 761312 - DNA, 75 bp, synthetic construct
  source 1..75: mol_type = other DNA
aggtcgtcagcggtctgaatgaagcgcagctgatgcgcgatttcgtcgccgatggcggctcgctgattgggctgg

SEQ ID NO: 761313 - DNA, 75 bp, synthetic construct
  source 1..75: mol_type = other DNA
cgacagcattaaagatctgcactgggatattcgcccccagtcctcattttggcacggtggaggttcgggtgatgg

SEQ ID NO: 761314 - DNA, 75 bp, synthetic construct
  source 1..75: mol_type = other DNA
ctgaaccttttaccctcggtattgaactggaaatgcaggtggttaatcctccgggatatgaccttagccaggact

SEQ ID NO: 761315 - DNA, 75 bp, synthetic construct
  source 1..75: mol_type = other DNA
atctgggccggtgactaagtcgggaattgccttacagaagaatatccctgacaatggtgttttaacttacattta

SEQ ID NO: 761316 - DNA, 75 bp, synthetic construct
  source 1..75: mol_type = other DNA
taccgatccgcacactggcgatcgtcgaccgctaacggaagataccttgcgattgctggaaaaaatcgccccttc

SEQ ID NO: 761317 - DNA, 75 bp, synthetic construct
  source 1..75: mol_type = other DNA
cgttgaccgcgcggagcggctgtcgctgaaagagacggtgctgctgcaggaaaaggcgctcagcgccggggcgca

SEQ ID NO: 761318 - DNA, 75 bp, synthetic construct
  source 1..75: mol_type = other DNA
gcccatgactatgtggaagggaccggggccggtaccagcgcgtcgcgcacggtactggctgcagtcggtccgcga

SEQ ID NO: 761319 - DNA, 75 bp, synthetic construct
  source 1..75: mol_type = other DNA
tgaactactgaaggctgactggcgccggcggctgaccgaagaaaaattcgatatcgataactacatcagccaggc

SEQ ID NO: 761320 - DNA, 75 bp, synthetic construct
  source 1..75: mol_type = other DNA
gccaggcaaaagcctgggccgatcctgaactgctgaaagctgactggcgccggcgcttaaccgacgaaaaattcg

SEQ ID NO: 761321 - DNA, 75 bp, synthetic construct
  source 1..75: mol_type = other DNA
gcggctatgtggccaacagcctgtgggaggtggccgggttcactgatgatggtgccatccggttccgccagggag

SEQ ID NO: 761322 - DNA, 75 bp, synthetic construct
  source 1..75: mol_type = other DNA
gagacatcccttcggcaggtggatgacgtcagcccactacaggttccgcgacaggccggggcatggataccggaa

SEQ ID NO: 761323 - DNA, 75 bp, synthetic construct
  source 1..75: mol_type = other DNA
atggtgggcaaccgcgatatggcagaactctaccagctggttgctgcaggcggcggacggatggtctccagcggg

SEQ ID NO: 761324 - DNA, 75 bp, synthetic construct
  source 1..75: mol_type = other DNA
tcttcacccatcgtgaactgaccctcagccagggagaccgggtgcgttttacccgctccgatactgaccggggtt

SEQ ID NO: 761325 - DNA, 75 bp, synthetic construct
  source 1..75: mol_type = other DNA
aaatcagccgccaggtggacagtggagcgctgattaagctggattcggttgccggggcgggaaaccgcgtgctgg

SEQ ID NO: 761326 - DNA, 75 bp, synthetic construct
  source 1..75: mol_type = other DNA
caccccgcgaactgacggtcagtcagggggaccgggtgcgctttacccgctcggacaccgaccgcggctatgtgg

SEQ ID NO: 761327 - DNA, 75 bp, synthetic construct
  source 1..75: mol_type = other DNA
acacgtatgaaaaccggattcggtgaaaatctgtatgcgctgcaggtggcgatcggaaacctcgtactgcaacca

SEQ ID NO: 761328 - DNA, 75 bp, synthetic construct
  source 1..75: mol_type = other DNA
cattggtggtgatacccgcctgcttgatgcgtggaaccgcagtgtggaaaacggcatgaaagaggtagagaagct

SEQ ID NO: 761329 - DNA, 75 bp, synthetic construct
  source 1..75: mol_type = other DNA
gaccccattacgctgcctccggatgagcagcagaagctggcggaggtgcaggagaaagccgcccgtgaactggcg

SEQ ID NO: 761330 - DNA, 75 bp, synthetic construct
  source 1..75: mol_type = other DNA
ttatggcgcttctgatggcggcgcacgtctgtcatgctgctgttcttccttcaggcagtcgctttgacccacgca

SEQ ID NO: 761331 - DNA, 75 bp, synthetic construct
  source 1..75: mol_type = other DNA
gcgacgtatctgtaagacactcataaagaatgatttctggtgccggaccctctccttcagtccgaacaaaccccg

SEQ ID NO: 761332 - DNA, 75 bp, synthetic construct
  source 1..75: mol_type = other DNA
ctgccagcggggcgctttatgccaatgagagcggtgcctattttgccctgcgtaagcgtatcacgaagccacctc

SEQ ID NO: 761333 - DNA, 75 bp, synthetic construct
  source 1..75: mol_type = other DNA
cgggccaaagggggaaccgggtcccgcgggtcctcaggggccgaagggagataaaggagagcgtggagacaccgg

SEQ ID NO: 761334 - DNA, 75 bp, synthetic construct
  source 1..75: mol_type = other DNA
agatagagaaggcacaacaattcatactattggtagatggactgatgtatattagccctgcatcccgaaaagtta

SEQ ID NO: 761335 - DNA, 75 bp, synthetic construct
  source 1..75: mol_type = other DNA
ggcgaatacggcggttgcccggattcggttgtcggcagtggacggcgcatttacggcagacgtggaagatgctca

SEQ ID NO: 761336 - DNA, 75 bp, synthetic construct
  source 1..75: mol_type = other DNA
accatggtgctgaagcccgccagtcagacgccgttctctgcgctggcgctggcggaactggcgattcgcgcgggc

SEQ ID NO: 761337 - DNA, 75 bp, synthetic construct
  source 1..75: mol_type = other DNA
gcaggcccggcaggcccacagggaccgaaaggagaaacaggtgtggctggcccggtaggggcaaccggacctcag

SEQ ID NO: 761338 - DNA, 75 bp, synthetic construct
  source 1..75: mol_type = other DNA
ggtgcggcaggcccacagggaccgaaaggagaaacaggtgcggctggcccggtgggggcaaccggacctcaggga

SEQ ID NO: 761339 - DNA, 75 bp, synthetic construct
  source 1..75: mol_type = other DNA
ctcaaaaagccagtgagtcatcacaaagtgcagcagatgctgaattgtcaaaaaagacggcagaaagtgcagccg

SEQ ID NO: 761340 - DNA, 75 bp, synthetic construct
  source 1..75: mol_type = other DNA
agggaccgaaaggagaaacaggtgcggctggcccggtgggggctaccggacctcaggggccgaagggcgacccgg

SEQ ID NO: 761341 - DNA, 75 bp, synthetic construct
  source 1..75: mol_type = other DNA
gaggcactgcgtcgttttgaactgatggtggaagaagcggcgcgtcacgcagaggaggcgaagaagaatgccgga

SEQ ID NO: 761342 - DNA, 75 bp, synthetic construct
  source 1..75: mol_type = other DNA
gttgcggaaagcatgatgactgtgaacacgggcagtcgcttacagtacaactgcgactggggccggcagacatcc

SEQ ID NO: 761343 - DNA, 75 bp, synthetic construct
  source 1..75: mol_type = other DNA
gtggaacagattaattcaaataaaaaacattctgacagaagaaaatattttgctttgttagcggtagttttattt

SEQ ID NO: 761344 - DNA, 75 bp, synthetic construct
  source 1..75: mol_type = other DNA
atcagccgggataatgcactgaagtctcagattactaaacttctggccagcattcagaacaaggctgtcagtgac

SEQ ID NO: 761345 - DNA, 75 bp, synthetic construct
  source 1..75: mol_type = other DNA
cattacaacaaggcggctatatgacgctcgcgcagtttgccatgattttctggcacgacctggcagcaccgatcc

SEQ ID NO: 761346 - DNA, 75 bp, synthetic construct
  source 1..75: mol_type = other DNA
atggcaaacgatcctgagtggtttcttgagctgacgcggcagcttcacaagcgccgttttatctcgaccggtggg

SEQ ID NO: 761347 - DNA, 75 bp, synthetic construct
  source 1..75: mol_type = other DNA
gcgatatgaacaacttcttcaataagctgggctttgcgtccaataccagccagccgcaggtctggcagggacagg

SEQ ID NO: 761348 - DNA, 75 bp, synthetic construct
  source 1..75: mol_type = other DNA
aggcccgggtgcaggccggcagtaaaaacttcccggaagaacagatgaagatgttacgggagaatttttcagaag

SEQ ID NO: 761349 - DNA, 75 bp, synthetic construct
  source 1..75: mol_type = other DNA
cgcattcagcatgatcagcggtgaagaaatacagcgtttcgtgaaacaaatcatgagcaacgccgccggctacgc

SEQ ID NO: 761350 - DNA, 75 bp, synthetic construct
  source 1..75: mol_type = other DNA
agaagagcaccaacgagctttccgcaaaagaagcaaacagccttgtatggttatgggattatgctaaccgctcac

SEQ ID NO: 761351 - DNA, 75 bp, synthetic construct
  source 1..75: mol_type = other DNA
accgatcaggcgtgggatgtgttcgaaaaactggaagactgctatttcagccagtgcgagaaaaatactggcaaa

SEQ ID NO: 761352 - DNA, 75 bp, synthetic construct
  source 1..75: mol_type = other DNA
ccagtgcgagaaaaatactggcaaacaagagaagaagcccaacgggctttccgcaaaagaaacagacagccttgt

SEQ ID NO: 761353 - DNA, 75 bp, synthetic construct
  source 1..75: mol_type = other DNA
agtacagcccgaaagatgcggtctgggactcacagcggacgtttactgattctgtcgggggtatttatcggactg

SEQ ID NO: 761354 - DNA, 75 bp, synthetic construct
  source 1..75: mol_type = other DNA
atggtgccgccctcaatgctatctggtgacggttacgtaaaacatgctcgctgggttgaactctggcgggagtgc

SEQ ID NO: 761355 - DNA, 75 bp, synthetic construct
  source 1..75: mol_type = other DNA
gggaagcactacttcaaattggaaggggctgaattgcgggaatttaagaacaaggttactcaaagtaacttagtt

SEQ ID NO: 761356 - DNA, 75 bp, synthetic construct
  source 1..75: mol_type = other DNA
ccgtcacatgccgggaccatcaccgtgtatgaagattctcaacccggtacgctgaatgattttctcggtgccatg

SEQ ID NO: 761357 - DNA, 75 bp, synthetic construct
  source 1..75: mol_type = other DNA
caataacgataaaaacaggaatatctcagttggggtttccggtcagcaatggggaattggttacagcctgaatta

SEQ ID NO: 761358 - DNA, 75 bp, synthetic construct
  source 1..75: mol_type = other DNA
ttcaaaaaaatacgcacaactaccaggaacttatcaggttgatatctggctgaataaaaagaaggtttcacagaa

SEQ ID NO: 761359 - DNA, 75 bp, synthetic construct
  source 1..75: mol_type = other DNA
gggaattggttacagcctgaattatcaatacagccgctacactgatcaaaataatgaccgcgcactctctttgaa

SEQ ID NO: 761360 - DNA, 75 bp, synthetic construct
  source 1..75: mol_type = other DNA
tcaggcagatcaacaatgtcagtttgcttttagtacaccggattcagaaccaacaacctctgtattacaaggcac

SEQ ID NO: 761361 - DNA, 75 bp, synthetic construct
  source 1..75: mol_type = other DNA
taaccggcactcttttcatggctatcaatggcgtacgcagtacatcaaagatatcccggaaaccaacaccaatat

SEQ ID NO: 761362 - DNA, 75 bp, synthetic construct
  source 1..75: mol_type = other DNA
ggctatgcagtggttccttatctcacaacttactcaggaaaaccgtctctcggtagatactacgcagctgcccga

SEQ ID NO: 761363 - DNA, 75 bp, synthetic construct
  source 1..75: mol_type = other DNA
gccggtaatgcagccagggatgcaacgaccgcaacagaaaaagcccgggagtcagcagaaagcgcacagtcagcg

SEQ ID NO: 761364 - DNA, 75 bp, synthetic construct
  source 1..75: mol_type = other DNA
catcccggcagatttatatattgtttatgaaacgcagcaggtgacgcccgcgatggttaagctgttggcagcatt

SEQ ID NO: 761365 - DNA, 75 bp, synthetic construct
  source 1..75: mol_type = other DNA
gtcaggtttggtgacgggccgtggcaggatgttaaggggcttgatgaagtgggcagtgatacaggcagaacagga

SEQ ID NO: 761366 - DNA, 75 bp, synthetic construct
  source 1..75: mol_type = other DNA
aagcagcatcctgaagcggcgcgtcagatgaaggtggcagcgaaagataatcaatcctgcatcgactgtcataaa

SEQ ID NO: 761367 - DNA, 75 bp, synthetic construct
  source 1..75: mol_type = other DNA
aaatcagaaaccaacgcgaaaaatagcgagacagccgcaaagacgagcgaaaccaacgcaaagtccagccagacg

SEQ ID NO: 761368 - DNA, 75 bp, synthetic construct
  source 1..75: mol_type = other DNA
tgatgctggtccggcaggcccgcaggggccgaaaggtgacaggggagagcggggagagaccggtctgacgggaaa

SEQ ID NO: 761369 - DNA, 75 bp, synthetic construct
  source 1..75: mol_type = other DNA
ggggaacaggggcccgcgggtcctcaggggccgaagggtgataagggagagcgcggtgacaccggccctgtcggg

SEQ ID NO: 761370 - DNA, 75 bp, synthetic construct
  source 1..75: mol_type = other DNA
gtaaaccgaatccccaccgtggtgggacctcccgggccaaagggggaacaggggcccgcgggtcctcaggggccg

SEQ ID NO: 761371 - DNA, 75 bp, synthetic construct
  source 1..75: mol_type = other DNA
atggacgttgagtatggtcagtacagcgttattctgttggtggagggattcccgccgtcacatgccgggactatc

SEQ ID NO: 761372 - DNA, 75 bp, synthetic construct
  source 1..75: mol_type = other DNA
gcgtcctcgtcctcggcttctgcggccgctcaaaaagccagtgagtcatcacaaagtgcagcagaagctgaattg

SEQ ID NO: 761373 - DNA, 75 bp, synthetic construct
  source 1..75: mol_type = other DNA
gtttggtgacgggccgtggcaggatgttaagggcttgatgaagtgggcagtgatacaggcagaacaggagaatga

SEQ ID NO: 761374 - DNA, 75 bp, synthetic construct
  source 1..75: mol_type = other DNA
acggaacgcgaagcgcgtaaccattgcccgtccggttgtgtcgctgtattcgccgcccgtattcgtcaggaggtg

SEQ ID NO: 761375 - DNA, 75 bp, synthetic construct
  source 1..75: mol_type = other DNA
gaagcacgccagcaatctcctgatggctgcgtgatggtattcgccgcccgtattcgtcaggaggtgcgccatgtg

SEQ ID NO: 761376 - DNA, 75 bp, synthetic construct
  source 1..75: mol_type = other DNA
cagggtccaaagggagataccggtgcggcaggcccggcaggcccacagggaccgaaaggagaaacaggtgcggct

SEQ ID NO: 761377 - DNA, 75 bp, synthetic construct
  source 1..75: mol_type = other DNA
ccggaagccctgacagcgggctgtttggtgtcggttcttttgttcttgcggcgtattaccagacgtattattcgg

SEQ ID NO: 761378 - DNA, 75 bp, synthetic construct
  source 1..75: mol_type = other DNA
caagagcactcgcaaccgcagctgattgttctacatctgatgggctcacatccgcaggcctgcgaccggacacaa

SEQ ID NO: 761379 - DNA, 75 bp, synthetic construct
  source 1..75: mol_type = other DNA
tcagcaggggatgcattggagtcagcccggcaggcggcagaaagtgcagccgctgcaaagcagtcagaggatgcg

SEQ ID NO: 761380 - DNA, 75 bp, synthetic construct
  source 1..75: mol_type = other DNA
taggggcaaccggacctcaggggccgaagggcgacccgggggagacgcaaatacggttccgtctggggccgggaa

SEQ ID NO: 761381 - DNA, 75 bp, synthetic construct
  source 1..75: mol_type = other DNA
agggcgacccgggggagacacaaatacggttccgtctggggccgggaaacattattgagacaaacagcaatggct

SEQ ID NO: 761382 - DNA, 75 bp, synthetic construct
  source 1..75: mol_type = other DNA
tgcagttaatcttattcctgctaaagttgagggatggaaaatatataccgcaggtgaacttattaaagatataca

SEQ ID NO: 761383 - DNA, 75 bp, synthetic construct
  source 1..75: mol_type = other DNA
ttgttacccgtagccgggtatttagcccgtggactgcgttctactttttacagtcgctattaattaacctcggct

SEQ ID NO: 761384 - DNA, 75 bp, synthetic construct
  source 1..75: mol_type = other DNA
aatcagggacaaattggtgaatacgataccgccatcgccagcatcgccaaacgtgcggatgaagtgtacttcctg

SEQ ID NO: 761385 - DNA, 75 bp, synthetic construct
  source 1..75: mol_type = other DNA
aaacaacgaaaaagagagatttttaaatcattctcattaaatgagtttttttcagattatagtacctgttttcgt

SEQ ID NO: 761386 - DNA, 75 bp, synthetic construct
  source 1..75: mol_type = other DNA
cagttaatgttactcctgtcgaagttgatggatggaaaatatataccgtgggtgagcttgttaaagatgtacagg

SEQ ID NO: 761387 - DNA, 75 bp, synthetic construct
  source 1..75: mol_type = other DNA
cctctccatgaaggtatatttgttacccggacagagatgtcggtaattcagcgcttacgctctcagcaagggtta

SEQ ID NO: 761388 - DNA, 75 bp, synthetic construct
  source 1..75: mol_type = other DNA
cggggcagggggagcgttacgaccagatactcgcgtttgcttatcccgacaacagccttagccgctggggagcgc

SEQ ID NO: 761389 - DNA, 75 bp, synthetic construct
  source 1..75: mol_type = other DNA
cgcgatatcctccgggcgattatggaggggggaacggcaaaaatttaccactgcaacgattcggacaagtgtctg

SEQ ID NO: 761390 - DNA, 75 bp, synthetic construct
  source 1..75: mol_type = other DNA
ctggagaatctgaatcaggcacagcaacagattgctgttttccaggcacagcaacagattgctgttttccagggt

SEQ ID NO: 761391 - DNA, 75 bp, synthetic construct
  source 1..75: mol_type = other DNA
tcgtattaaagtcgcgatgctaaaacctgaacctcccagagatccccatatcccgctgatgggggattttaacta

SEQ ID NO: 761392 - DNA, 75 bp, synthetic construct
  source 1..75: mol_type = other DNA
atgaaagcaataaaaccagatttgccaatggggcaagccacacatgcactaaggcacagctttgccactcatttc

SEQ ID NO: 761393 - DNA, 75 bp, synthetic construct
  source 1..75: mol_type = other DNA
tacgccaaaagttaaagaaaagctactgcttcttggtaatggggcgacccgtggcggcaagacttttatgaaaaa

SEQ ID NO: 761394 - DNA, 75 bp, synthetic construct
  source 1..75: mol_type = other DNA
gaggtgatactgctaaccaggggcgttttgttcttaaaatgcctcgttccggcatcaatcactaccgagtccctg

SEQ ID NO: 761395 - DNA, 75 bp, synthetic construct
  source 1..75: mol_type = other DNA
atttagtgcatgagatggaagccagcctgatggagctgatgtcttccagcctgaagcaacgtttaaccgcagaac

SEQ ID NO: 761396 - DNA, 75 bp, synthetic construct
  source 1..75: mol_type = other DNA
ctgaagcagcgcttaaccgcagaaccggtacgttttgtttatcaacgcgatatgcccagtgcgctggttgaagtg

SEQ ID NO: 761397 - DNA, 75 bp, synthetic construct
  source 1..75: mol_type = other DNA
gtggcaaaagattcacgtatcatcgactcgatgatccacgctgcgcacaacggcaagaaagtgaccgtggtggtt

SEQ ID NO: 761398 - DNA, 75 bp, synthetic construct
  source 1..75: mol_type = other DNA
gctgaacgccgtgccacacgatcccgacgtcaaagcattgctacgtctggcaacggtgtggaatattccggtcgc

SEQ ID NO: 761399 - DNA, 75 bp, synthetic construct
  source 1..75: mol_type = other DNA
ttaatttcccgcaccaccggaatgaacgttaacgccatgctaagcggcccaatgggcggcgatcagcaagtgggc

SEQ ID NO: 761400 - DNA, 75 bp, synthetic construct
  source 1..75: mol_type = other DNA
aatggggggtgaccagcaggttggcgcattgatctcagaagggaaaattgatgtattgattttcttctgggaccc

SEQ ID NO: 761401 - DNA, 75 bp, synthetic construct
  source 1..75: mol_type = other DNA
atggtgcaaaaggctccagcagttcatttgtggccatcgctcaggttattggcctggtgctctttattgccggcc

SEQ ID NO: 761402 - DNA, 75 bp, synthetic construct
  source 1..75: mol_type = other DNA
gcgcgtgtcagcaaaggtgagttctggtcactggattttctgcgcaacggcgaacgtattaccggtagtcaggtg

SEQ ID NO: 761403 - DNA, 75 bp, synthetic construct
  source 1..75: mol_type = other DNA
agatattaagcgtaaatttgaatcaaaattcaagtgcagaaagttttatgtttatcattctcttgaagtaagtga

SEQ ID NO: 761404 - DNA, 75 bp, synthetic construct
  source 1..75: mol_type = other DNA
gattatttaatggtgtcgccgcaaaactcccgccgcctgttgtatgaaatggtggaccgcgagatcgccaacgcg

SEQ ID NO: 761405 - DNA, 75 bp, synthetic construct
  source 1..75: mol_type = other DNA
aggctccaactctcattcccgccatttactgggcaaaattcagtcccgggtgctgaaagccgatcaggaattcga

SEQ ID NO: 761406 - DNA, 75 bp, synthetic construct
  source 1..75: mol_type = other DNA
ggctggatatgctgacagcctggggatttgtgatcggattagcctgctgggcatacgatctctttatggtccagt

SEQ ID NO: 761407 - DNA, 75 bp, synthetic construct
  source 1..75: mol_type = other DNA
ggcggaaattcgccagcttgagcgcgagcttcgcatcggactgcgtaccgacacatcacggatgaccgaggtgct

SEQ ID NO: 761408 - DNA, 75 bp, synthetic construct
  source 1..75: mol_type = other DNA
gctacccggcattttccccgatgctggttgagtggctgaaagagggctggctgctggcgtcggctgagatgcagc

SEQ ID NO: 761409 - DNA, 75 bp, synthetic construct
  source 1..75: mol_type = other DNA
atgatccagattgatcttcccacgctggtaaaacggcttaacctgttctcccgccaggcgctggagatggccgcc

SEQ ID NO: 761410 - DNA, 75 bp, synthetic construct
  source 1..75: mol_type = other DNA
ttcaaggggctgatggcggaggtcattttctccccggtgccggtcattctgtttatcgacgaagcacataccctg

SEQ ID NO: 761411 - DNA, 75 bp, synthetic construct
  source 1..75: mol_type = other DNA
tacggcggttgcccggattcggttgtcggcagtggacggcgcatttacggcagacgtggaagatgctcagaacga

SEQ ID NO: 761412 - DNA, 75 bp, synthetic construct
  source 1..75: mol_type = other DNA
ttactgggcgtggcagaggacgatgcggcgccgttgccggacgcagataccgtggaggatacgcagccagagtca

SEQ ID NO: 761413 - DNA, 75 bp, synthetic construct
  source 1..75: mol_type = other DNA
aaaacctggcctggggcggcgtatttaaattgaaggatactggctatccggtatttcgttttgctaaggatgtca

SEQ ID NO: 761414 - DNA, 75 bp, synthetic construct
  source 1..75: mol_type = other DNA
gcggcacgctatgtaaccggcggttcgttctatgcccgcacaggaaacaaaaatatccagctgatatccatcagc

SEQ ID NO: 761415 - DNA, 75 bp, synthetic construct
  source 1..75: mol_type = other DNA
ttcgcgctttgttgagcagtatccagaataaagcggtggctgatgaaaaactgacggagcaggagaaagggttta

SEQ ID NO: 761416 - DNA, 75 bp, synthetic construct
  source 1..75: mol_type = other DNA
ccaggtgatgcgtaacaagaacctgatgtgggagatcctgaagaagaacggcatgatgaacggcaacaccgagct

SEQ ID NO: 761417 - DNA, 75 bp, synthetic construct
  source 1..75: mol_type = other DNA
taccagctgacggactatatcggttacgacatcctgctgcagtacattcaggagctgatacagcaggcccgggcg

SEQ ID NO: 761418 - DNA, 75 bp, synthetic construct
  source 1..75: mol_type = other DNA
ggataatgcactgaagtcacagattacaaaactgctcaccagtattcagaataaagcggtgagtgatacccctct

SEQ ID NO: 761419 - DNA, 75 bp, synthetic construct
  source 1..75: mol_type = other DNA
agcagcagacgctggtacaggaaattatcgcgctgcgccagcagttactgggcgtggcagaagacgacgttgcgt

SEQ ID NO: 761420 - DNA, 75 bp, synthetic construct
  source 1..75: mol_type = other DNA
gataaccttaatcaggcgcagcaacagattgccattttccagagccaggtgcaggtccagcaggatgcactgctg

SEQ ID NO: 761421 - DNA, 75 bp, synthetic construct
  source 1..75: mol_type = other DNA
gccggatattaacgccggctgtggcggcatcgatgcctatctcggctctttcagcttcattaacggtgaacagtt

SEQ ID NO: 761422 - DNA, 75 bp, synthetic construct
  source 1..75: mol_type = other DNA
atgtttgacggcaacaaagagttgaaagaatttatcatgacgctcaccggtacgctgatttttggggaagacagc

SEQ ID NO: 761423 - DNA, 75 bp, synthetic construct
  source 1..75: mol_type = other DNA
gcgggcttttcccccggacgcaggggtcccagcagaaagtctgtcaggacattgccggtgagagcaatatttttg

SEQ ID NO: 761424 - DNA, 75 bp, synthetic construct
  source 1..75: mol_type = other DNA
tattgtccgggcgattatggaagggggcaccgcgaaaatttatcactgcaatgattcggataagtgcctcaaagt

SEQ ID NO: 761425 - DNA, 75 bp, synthetic construct
  source 1..75: mol_type = other DNA
aacagcgacatgaatcagttctttaataagctgggatttgcttccaataccacacagccgggcgtctggcagggg

SEQ ID NO: 761426 - DNA, 75 bp, synthetic construct
  source 1..75: mol_type = other DNA
actggcgcgacagcgtggtgaaaccgtttaacgagcaactggcaaataactatccgtttaatccgcgttctgcac

SEQ ID NO: 761427 - DNA, 75 bp, synthetic construct
  source 1..75: mol_type = other DNA
ggcatcagcaacagacgctggtgcaggagattatcgccctgcgccagcagttactgggtatggcagaagacgatg

SEQ ID NO: 761428 - DNA, 75 bp, synthetic construct
  source 1..75: mol_type = other DNA
atcaatatgtctgagttccaggagaaacacaccgtttcgcggctgattggctctcctccgggttatgtcggctac

SEQ ID NO: 761429 - DNA, 75 bp, synthetic construct
  source 1..75: mol_type = other DNA
tgcataacgaccgcttgctggtctccccgcacgtcgataaaaaacagattgcggcggtgattgccgaatggaccg

SEQ ID NO: 761430 - DNA, 75 bp, synthetic construct
  source 1..75: mol_type = other DNA
aggggcgcaactataccgcccatctggtctggcctaacaatatgcgcgaaggcaacgaaagcaaactgacgctgg

SEQ ID NO: 761431 - DNA, 75 bp, synthetic construct
  source 1..75: mol_type = other DNA
ggtcgagtggctgaaagaggggtggctgctggcctccgcagagatgcagcacagcgaactgcgtggcggtgtact

SEQ ID NO: 761432 - DNA, 75 bp, synthetic construct
  source 1..75: mol_type = other DNA
aggattggctgtatctggggacactataaccgtcaaagaagccggtttggtgttggtcattggggttatcctgtg

SEQ ID NO: 761433 - DNA, 75 bp, synthetic construct
  source 1..75: mol_type = other DNA
ttgtttccgtactttgtcgagttgttcgtggctcactacatgacgctctgggcggcagatagccgggcaatgctc

SEQ ID NO: 761434 - DNA, 75 bp, synthetic construct
  source 1..75: mol_type = other DNA
atgtcaaagaatcaaagtctgccagcggtaagtgattttcgacgcgacttcccgcagtttgctgacccggcaaaa

SEQ ID NO: 761435 - DNA, 75 bp, synthetic construct
  source 1..75: mol_type = other DNA
ggcttatcatttagcaaattaattcttgaagaacgaatggtgatggctgaaaggttattaagttacaatttctat

SEQ ID NO: 761436 - DNA, 75 bp, synthetic construct
  source 1..75: mol_type = other DNA
gcgggtatgacaatgcatcatattttgtaagtgtttttagaagatattttggtgtgcctccgcaccaatatttat

SEQ ID NO: 761437 - DNA, 75 bp, synthetic construct
  source 1..75: mol_type = other DNA
gagcggtgctgcgcccaccgttggcggcgcatttgtcgtgacattttccgcgacgatctgcggtctggtgctcgg

SEQ ID NO: 761438 - DNA, 75 bp, synthetic construct
  source 1..75: mol_type = other DNA
gacgaaaatacagcaatcattctttctaaaccaaaattagaagagcttctggaaattcgagatctccttaaggaa

SEQ ID NO: 761439 - DNA, 75 bp, synthetic construct
  source 1..75: mol_type = other DNA
gggctacctggtcgccggtgaattatgaatcgagagtaatttttccgccggctggaataacaaaaacgagcaata

SEQ ID NO: 761440 - DNA, 75 bp, synthetic construct
  source 1..75: mol_type = other DNA
agcagcgcttgatggagatgagttccgcgttccccttaattctcctgtaatacttgttcaatccggcaaccgcgc

SEQ ID NO: 761441 - DNA, 75 bp, synthetic construct
  source 1..75: mol_type = other DNA
tgacaaggtaagtgtcagttatgacatcagcgcgacgctgaatcctgatgcaggcttctggaataacacccgata

SEQ ID NO: 761442 - DNA, 75 bp, synthetic construct
  source 1..75: mol_type = other DNA
gttggcggcccgggcggttcaaccaatggtgttcaatcctctaagtctgttgacaaggtaagcgtcagctatgac

SEQ ID NO: 761443 - DNA, 75 bp, synthetic construct
  source 1..75: mol_type = other DNA
aaagataaaaatgagaacgaggatgttgccagtgctgaaaatatgaactggatgcaggcattgcgttttgtggct

SEQ ID NO: 761444 - DNA, 75 bp, synthetic construct
  source 1..75: mol_type = other DNA
atgcgtttattatattctgctgttgtcctgatttcagccttattgttacagggatgcgttgctgcaactgtggtg

SEQ ID NO: 761445 - DNA, 75 bp, synthetic construct
  source 1..75: mol_type = other DNA
ttgatctcggcgcatccagtgggcgcgtaatgctggcgcgttaccaccgtgaatgtcgcagcctgacgctgcgtg

SEQ ID NO: 761446 - DNA, 75 bp, synthetic construct
  source 1..75: mol_type = other DNA
gcttatcgcgatagccgcaccaatggcctgatggcgcaggcacaacaacaactcggcaaacgcgatatttatcaa

SEQ ID NO: 761447 - DNA, 75 bp, synthetic construct
  source 1..75: mol_type = other DNA
atctgaccacctttacccctaatcctgacagtgaaattgcgcactacgtggcgcggattcactctacacgaaaga

SEQ ID NO: 761448 - DNA, 75 bp, synthetic construct
  source 1..75: mol_type = other DNA
ggtgctgaaaaatatcatgggtttatggctgctccagcgggtacttcaggagcgacaaatcaacgatctcccgac

SEQ ID NO: 761449 - DNA, 75 bp, synthetic construct
  source 1..75: mol_type = other DNA
gcttatcgcgatagccgcacccatggtctgatggcgcaggcacaacggcaactcggcaaatgcgatatttatcag

SEQ ID NO: 761450 - DNA, 75 bp, synthetic construct
  source 1..75: mol_type = other DNA
cgtagcggcatccagtttctgcccttcaatacgatctatcagttgcgtgcgctgacggcgcaacaacctgaactt

SEQ ID NO: 761451 - DNA, 75 bp, synthetic construct
  source 1..75: mol_type = other DNA
tattccatttctttcaaggttatggggaggtacgccaacagaatgtaaagtgctaaagagattggatccgccata

SEQ ID NO: 761452 - DNA, 75 bp, synthetic construct
  source 1..75: mol_type = other DNA
cacaagtctaaaggacttgaatttaaaatagtattacatttggatatggatgaatggtcttttccatatagatta

SEQ ID NO: 761453 - DNA, 75 bp, synthetic construct
  source 1..75: mol_type = other DNA
aggcaataggtactgcgcaagaattaattaataaagtatttgatggcttaatcatgaatgacaaccatcagtttt

SEQ ID NO: 761454 - DNA, 75 bp, synthetic construct
  source 1..75: mol_type = other DNA
atgagctggcgcagctgcgcggtgaagatttctcgcaactgcatattgtcggcggaggctgccagaacacgctgc

SEQ ID NO: 761455 - DNA, 75 bp, synthetic construct
  source 1..75: mol_type = other DNA
gtaatctgttattaatggttacgctattgggtagcgcactatttgccaacgcttcggaaaaagaaatgaccattg

SEQ ID NO: 761456 - DNA, 75 bp, synthetic construct
  source 1..75: mol_type = other DNA
attcaggtgcctatcgatctctataccaaaacggaagacggtaaacagtggctggcaacgcacgttgatggtctg

SEQ ID NO: 761457 - DNA, 75 bp, synthetic construct
  source 1..75: mol_type = other DNA
tacttgttcagtctggtagtcgcgcaccggaaaccattatgcaggaggagatgagaaaatattatacagttgcca

SEQ ID NO: 761458 - DNA, 75 bp, synthetic construct
  source 1..75: mol_type = other DNA
agagtttgaacgttaccagaaggctaaactggacgcggaatttgacgccatcatggctattcatggcagcgaaat

SEQ ID NO: 761459 - DNA, 75 bp, synthetic construct
  source 1..75: mol_type = other DNA
cgcgacagaaccttgcattggttctggaaacagcggcgacaggtactccggtaacgatcacgaggcgtgggcata

SEQ ID NO: 761460 - DNA, 75 bp, synthetic construct
  source 1..75: mol_type = other DNA
gcaagaaaaattatgtttagcaagcactataccagtgaatgaattaaaaaaaattgtcatgcaaaaaaaagggct

SEQ ID NO: 761461 - DNA, 75 bp, synthetic construct
  source 1..75: mol_type = other DNA
cctaataatcaaaatgcggatggcttaatggcatggtgcaaaacgtgctgggacgagcacaaagcgaaacgatag

SEQ ID NO: 761462 - DNA, 75 bp, synthetic construct
  source 1..75: mol_type = other DNA
cgcggcgttattcgcattcgcctcggtgctcgcggcgctggccgataccgccgcgctgttgatcgcggcgcgcgc

SEQ ID NO: 761463 - DNA, 75 bp, synthetic construct
  source 1..75: mol_type = other DNA
taccgactttgtgaaggatgccgacgcagtagcagtcaaaagcatgggaacagatcgttatggtagaacgctggc

SEQ ID NO: 761464 - DNA, 75 bp, synthetic construct
  source 1..75: mol_type = other DNA
ccggtagttacagtgcagttattgatatgcctagtggtggtggtagcgtcactctggagtttaagattttccaga

SEQ ID NO: 761465 - DNA, 75 bp, synthetic construct
  source 1..75: mol_type = other DNA
atcgttttggtgatgatgaggcatttgaagaaaacgtgcgcctggaaatggagcgcaaccacgaacgttatgtgt

SEQ ID NO: 761466 - DNA, 75 bp, synthetic construct
  source 1..75: mol_type = other DNA
caggagcgttaagtatttttttaacacgaccattccagccagcttatcggtcattgaacacacgccatctgctac

SEQ ID NO: 761467 - DNA, 75 bp, synthetic construct
  source 1..75: mol_type = other DNA
acaagaaaaattatgtttagcgagcactataccagtgaatgaattgaaaaagatcgttattaataaaaaaggact

SEQ ID NO: 761468 - DNA, 75 bp, synthetic construct
  source 1..75: mol_type = other DNA
agtgcagttattgatatgccgagtggcaggggaagcgtcactctggagtttaagattttccagaaaggcaatcag

SEQ ID NO: 761469 - DNA, 75 bp, synthetic construct
  source 1..75: mol_type = other DNA
agtgcagttattgatatgcctagtggtggtggtagcgtcactctggagtttaagattttccagaaaggcaatcag

SEQ ID NO: 761470 - DNA, 75 bp, synthetic construct
  source 1..75: mol_type = other DNA
ccgttgatgtggcggtgaagcgattcagtacagataagatgtttaactgtaaggtaaacgtctctgcatatagcc

SEQ ID NO: 761471 - DNA, 75 bp, synthetic construct
  source 1..75: mol_type = other DNA
gcgctgaaatcaacagtgtggtcagattataaaaatcaaaaactaactgacacaatgtcattacgttttttggtt

SEQ ID NO: 761472 - DNA, 75 bp, synthetic construct
  source 1..75: mol_type = other DNA
gtgccgggagggcgcgtgcagaaagacgaaacgctggaagccgcatttgagcggctgacgatggcggaactgggg

SEQ ID NO: 761473 - DNA, 75 bp, synthetic construct
  source 1..75: mol_type = other DNA
ttgggatcaattattttcttccattcagcgggtcctggtgggttgggcatgaccattgccacactctcttatcct

SEQ ID NO: 761474 - DNA, 75 bp, synthetic construct
  source 1..75: mol_type = other DNA
attatctggccgtccggatacttcgatgatcagggcaaccacattgtaagactcatgcgaaagcggcgctcctga

SEQ ID NO: 761475 - DNA, 75 bp, synthetic construct
  source 1..75: mol_type = other DNA
tcccgcagcgcgggactggcgtccgccacgctggcaaatacgctgacccgctcctggccgcgcggcgaaaaactc

SEQ ID NO: 761476 - DNA, 75 bp, synthetic construct
  source 1..75: mol_type = other DNA
gcaaaaggacatcagaaagcgattattgtttaccaggatatattgcagacaggaaaatatgactctgcgctgaaa

SEQ ID NO: 761477 - DNA, 75 bp, synthetic construct
  source 1..75: mol_type = other DNA
gcacatggcgttcctggtagtgccgatggtcggtgcgttctttattgatatcgttaacgcgctggtgattaagct

SEQ ID NO: 761478 - DNA, 75 bp, synthetic construct
  source 1..75: mol_type = other DNA
cgcataacgcatttaaatttcttcagtatagactggataatatcgagcaggctgaggcatttatcaaatacagaa

SEQ ID NO: 761479 - DNA, 75 bp, synthetic construct
  source 1..75: mol_type = other DNA
aatgccagcggtgagcatgtaacaaccccggatatgttcctcccggtaggcctgattaagtcacgaaaatcatta

SEQ ID NO: 761480 - DNA, 75 bp, synthetic construct
  source 1..75: mol_type = other DNA
cgcgtgcagaaggacgagacgctggccaacgcgtttgagcgtctcactctggtggaactgggcctgcaactgccg

SEQ ID NO: 761481 - DNA, 75 bp, synthetic construct
  source 1..75: mol_type = other DNA
cacgagatagttacagccttaaaattgagttctcaatggttagtttgtaccttcatcctgaggaagagattaaaa

SEQ ID NO: 761482 - DNA, 75 bp, synthetic construct
  source 1..75: mol_type = other DNA
tgaaacactccaccacaccgaacggtattccggatgaccaggaagttccgactgcgttcgaaaagccggatgtgg

SEQ ID NO: 761483 - DNA, 75 bp, synthetic construct
  source 1..75: mol_type = other DNA
gccgtaaaccgaatccccaccgtggtgggacctcccgggccaaagggggaacaggggcccgcgggtcctcagggg

SEQ ID NO: 761484 - DNA, 75 bp, synthetic construct
  source 1..75: mol_type = other DNA
cccaccgtggtgggacctcccgggccaaagggggaacaggggcccgcgggtcctcaggggccgaagggtgataag

SEQ ID NO: 761485 - DNA, 75 bp, synthetic construct
  source 1..75: mol_type = other DNA
ggctggaccagcaggtccggcaggggcgccggggccgaaaggcgataaaggtgatccgggagtagcaggtccagc

SEQ ID NO: 761486 - DNA, 75 bp, synthetic construct
  source 1..75: mol_type = other DNA
ggtgcggcaggcccggctggcccacagggaccgaaaggagaaacaggtgcggctggcccggtgggggcaaccgga

SEQ ID NO: 761487 - DNA, 75 bp, synthetic construct
  source 1..75: mol_type = other DNA
agggaccgaaaggagaaacaggtgtggctggcccggtaggagcaaccggacctcagggaccaaagggcgccccgg

SEQ ID NO: 761488 - DNA, 75 bp, synthetic construct
  source 1..75: mol_type = other DNA
ggccgtaaaccgaatccccaccgtggtgggacctcccgggccaaagggggaacaggggcccgcgggtcctcaggg

SEQ ID NO: 761489 - DNA, 75 bp, synthetic construct
  source 1..75: mol_type = other DNA
acgaccgcaacagaaaaagcccgggagtcagcagaaagcgcacagtcagcggaacaaagcaggatagcggcggaa

SEQ ID NO: 761490 - DNA, 75 bp, synthetic construct
  source 1..75: mol_type = other DNA
accgtgtatgaggactcaaagccgggcacactgaatgatttcctcggtgcaatgacggaggatgatgtccggccg

SEQ ID NO: 761491 - DNA, 75 bp, synthetic construct
  source 1..75: mol_type = other DNA
atggacgttgagtacggtcagtacagcgttattctgttggtggaagggttcccgccgtcacatgccgggaccatc

SEQ ID NO: 761492 - DNA, 75 bp, synthetic construct
  source 1..75: mol_type = other DNA
gcccgtcctgaggcactgcgccgttttgaactgatggtggaagaggtggtgcgtaacgcagaggaggcgaagaag

SEQ ID NO: 761493 - DNA, 75 bp, synthetic construct
  source 1..75: mol_type = other DNA
cccggcaggcggcagaaagtgcagccgctgcaaagcagtcagaggatgcgtcctcgtcctcggcttctgcggccg

SEQ ID NO: 761494 - DNA, 75 bp, synthetic construct
  source 1..75: mol_type = other DNA
gcccgcaggggccgaaaggcgacaggggagagcggggagagaccggtctgacgggaaatgcaggtccacagggtc

SEQ ID NO: 761495 - DNA, 75 bp, synthetic construct
  source 1..75: mol_type = other DNA
agacacaaatccgttttcgtctggggccggcgagcattattgagacaaacagcaatggctggttcccgggaacag

SEQ ID NO: 761496 - DNA, 75 bp, synthetic construct
  source 1..75: mol_type = other DNA
aaagagtgcagtaaatgctgagacttctgcaggggatgcatcggagtcagcccggcaggcgacggaaagtgcagc

SEQ ID NO: 761497 - DNA, 75 bp, synthetic construct
  source 1..75: mol_type = other DNA
cgccaacggttggatcggccaaatcaacggcatgatcggctttaccagcctggataaacgtgaagagcgcaccat

SEQ ID NO: 761498 - DNA, 75 bp, synthetic construct
  source 1..75: mol_type = other DNA
ccggcatatcagccagtcaggcagaagagagtgctgcaaatgctgacacttcagcaggggaggcatcggagtcag

SEQ ID NO: 761499 - DNA, 75 bp, synthetic construct
  source 1..75: mol_type = other DNA
cgccactggtgatttgtgaaagccgtgatccaaaaggcttatataagaaagcgcgtgcaggggaactgcgtaatt

SEQ ID NO: 761500 - DNA, 75 bp, synthetic construct
  source 1..75: mol_type = other DNA
ggcgaatttaatggttgaagcagggctggtggtgctgaccgcgtttatctcgccgcatcgcgcagaacgccagat

SEQ ID NO: 761501 - DNA, 75 bp, synthetic construct
  source 1..75: mol_type = other DNA
tttttcagcatttgcaggtcagatttggcgacgggccgtggcaggatgtcaaggggatggatgaagtgggcagtg

SEQ ID NO: 761502 - DNA, 75 bp, synthetic construct
  source 1..75: mol_type = other DNA
cagattaacttgaccacagacaaaaccgccatcgtgcaggcgttgttagcatttaacgacttttaccaaccggca

SEQ ID NO: 761503 - DNA, 75 bp, synthetic construct
  source 1..75: mol_type = other DNA
gacaggggagagcggggagagaccggtctgacgggaaatgcaggtccacagggtccaaagggagataccggtgcg

SEQ ID NO: 761504 - DNA, 75 bp, synthetic construct
  source 1..75: mol_type = other DNA
gtccacagggtccaaagggagataccggtgcggcaggcccggcaggcccacagggaccgaaaggagaaacaggtg

SEQ ID NO: 761505 - DNA, 75 bp, synthetic construct
  source 1..75: mol_type = other DNA
gtgaagcgcaaactggaagcgagcaatgatatctaccagacctttattgctcactccattgatacacctgaaaaa

SEQ ID NO: 761506 - DNA, 75 bp, synthetic construct
  source 1..75: mol_type = other DNA
aagccagtgagtcatcacaaagtgcagcagaagctgaattgtcaagaaagacggcagaaagtgcagccggtaatg

SEQ ID NO: 761507 - DNA, 75 bp, synthetic construct
  source 1..75: mol_type = other DNA
aatttaatgatgccgcgttacaggcgctgcgcaaaaaaggtctgtgtgatttagcaagtgaaacaccagagttta

SEQ ID NO: 761508 - DNA, 75 bp, synthetic construct
  source 1..75: mol_type = other DNA
ccggaacatcctctgttgcaaacattgctgtataaaggctatgacgcctttgcagaacaggcgcttgccgagcgg

SEQ ID NO: 761509 - DNA, 75 bp, synthetic construct
  source 1..75: mol_type = other DNA
ctgatttactggtatatgccaacagccctgctgcgcggtattttccataatgttcccgattcgtgtttccggcag

SEQ ID NO: 761510 - DNA, 75 bp, synthetic construct
  source 1..75: mol_type = other DNA
ctggtttgccactgaacaaggtcaggcggtggatctgaacagcctgaaacgttcgccaaagcaacaacaggcact

SEQ ID NO: 761511 - DNA, 75 bp, synthetic construct
  source 1..75: mol_type = other DNA
cgaagtggtgctgcaaacgcaccatccggaacatcctctgttgcaaacgttgctctataaaggctacgacgcctt

SEQ ID NO: 761512 - DNA, 75 bp, synthetic construct
  source 1..75: mol_type = other DNA
ctgcggcgaacgcgccgatgtggtactggtttgccactgaacaaggtcaggcggtggatcttaacagcctgaaac

SEQ ID NO: 761513 - DNA, 75 bp, synthetic construct
  source 1..75: mol_type = other DNA
atggttggtgcgttctttatcgatatcgtcaacgcactggtgattaagttgtatttgatgctgcctatttttgca

SEQ ID NO: 761514 - DNA, 75 bp, synthetic construct
  source 1..75: mol_type = other DNA
cgatcactgaacgctttggcccgtcgcacatggcgtttctggtggtgccgatggtcggtgcgttctttatcgata

SEQ ID NO: 761515 - DNA, 75 bp, synthetic construct
  source 1..75: mol_type = other DNA
agacagcattcgattactggcagtcagaaaaccacagcatagctggtaaatatactcactgggaatctaaaaacg

SEQ ID NO: 761516 - DNA, 75 bp, synthetic construct
  source 1..75: mol_type = other DNA
gacgcatcattattagcgaagaacaaggctccaactctcattcccgccatttactgggcaaaattcagtcccggg

SEQ ID NO: 761517 - DNA, 75 bp, synthetic construct
  source 1..75: mol_type = other DNA
tcgggattaaaaaactgaaaaaagggcggggcagctcctggttacgtgacctgatttactggtatatgccaacag

SEQ ID NO: 761518 - DNA, 75 bp, synthetic construct
  source 1..75: mol_type = other DNA
gttgttggtctgttggtgatgcaaaatgccattggcattggtatggccagcctgttaggactcgatccgcttatg

SEQ ID NO: 761519 - DNA, 75 bp, synthetic construct
  source 1..75: mol_type = other DNA
ctggcgcttattaatacaataccggattcccgtaaggtgaaatgggtgctggatgtcgatcccatcgagggctaa

SEQ ID NO: 761520 - DNA, 75 bp, synthetic construct
  source 1..75: mol_type = other DNA
cctcggcttctgcggccgctcaaaaagccagtgagtcatcacaaagtgcagcagaagctgaattgtcaagaaaga

SEQ ID NO: 761521 - DNA, 75 bp, synthetic construct
  source 1..75: mol_type = other DNA
gacaccggccctgtcggggcaaccggcgaacggggaccggcaggtgatgctggtccggtgtcacgaacggtgcaa

SEQ ID NO: 761522 - DNA, 75 bp, synthetic construct
  source 1..75: mol_type = other DNA
tgaggaggcgaagaagaatgccggagaggcagagacgtcagcgaggaatgcgggtatatcagccggccaggcgga

SEQ ID NO: 761523 - DNA, 75 bp, synthetic construct
  source 1..75: mol_type = other DNA
atttgcaggtcaggtttggtgacgggccatggcaggatgttaagggactggatgaagtgggcagtgatacaggca

SEQ ID NO: 761524 - DNA, 75 bp, synthetic construct
  source 1..75: mol_type = other DNA
aacgctgaggaggcgaagaagaatgccggagaggcggagacgtcagcaaggaatgccggcatatcagccagtcag

SEQ ID NO: 761525 - DNA, 75 bp, synthetic construct
  source 1..75: mol_type = other DNA
caggtgcggctggcccggtgggggcaaccggacctccgggaccgaagggcgacccgggggagacacaaatccgtt

SEQ ID NO: 761526 - DNA, 75 bp, synthetic construct
  source 1..75: mol_type = other DNA
gtgccgcgccagtgcccttcctgcggttccacgcacctggtccccgtggggctgggcaccgaacagcttgaacag

SEQ ID NO: 761527 - DNA, 75 bp, synthetic construct
  source 1..75: mol_type = other DNA
ctgttcctgcaacagttgcgaaatctcatcctctccagtccgctggcggatgagaaactgtgggttctcggcccg

SEQ ID NO: 761528 - DNA, 75 bp, synthetic construct
  source 1..75: mol_type = other DNA
caggaaaaatcacagagagagcaaaaggttttacgaacaacgcttcaaccagttacctgtaaagcaattacaaaa

SEQ ID NO: 761529 - DNA, 75 bp, synthetic construct
  source 1..75: mol_type = other DNA
gagcgtggcgacaccggtcctgtcggggcaaccggtgagcggggaccggcaggtgatgctggtccggcaggcccg

SEQ ID NO: 761530 - DNA, 75 bp, synthetic construct
  source 1..75: mol_type = other DNA
tggttacatcgtaatctggtcaatttcgaacattgaccgtggcggggaatatctcattgtaatgttctttccttt

SEQ ID NO: 761531 - DNA, 75 bp, synthetic construct
  source 1..75: mol_type = other DNA
cagccgcagacgctggactcagacatcatggccgttggtcgctatgtgctttctgccgatatttggccggaactg

SEQ ID NO: 761532 - DNA, 75 bp, synthetic construct
  source 1..75: mol_type = other DNA
gctacgctacaaccttgctgccatgattgcgcgcttcaatgaaacgggacgcagccaggtgctggcaaaacgtat

SEQ ID NO: 761533 - DNA, 75 bp, synthetic construct
  source 1..75: mol_type = other DNA
gacgcattcaaatacggtcaattcatgatgaacgcgaaggatgatgaataccgggatttcttcctgagggcgctt

SEQ ID NO: 761534 - DNA, 75 bp, synthetic construct
  source 1..75: mol_type = other DNA
acagctacgactgcggtaaaaaaatgggttatatgcaggcgtttgtgaagtatggactgcgtaacctgaaagaag

SEQ ID NO: 761535 - DNA, 75 bp, synthetic construct
  source 1..75: mol_type = other DNA
ctgtccaccgggcgtgaccattatgaacgtgcgtcagggcgaacctttaggtttaggccactccattttgtgtgc

SEQ ID NO: 761536 - DNA, 75 bp, synthetic construct
  source 1..75: mol_type = other DNA
gaaatcctcctggtgactcacgcgtccaagaacgcggtcgaaaaccacttcgacacctcttatgaattagaatct

SEQ ID NO: 761537 - DNA, 75 bp, synthetic construct
  source 1..75: mol_type = other DNA
ggatcctggcgcgaaaagcgcagcttgagccgatgctgggccacccgttacacgcctttaaaaccaacacagaac

SEQ ID NO: 761538 - DNA, 75 bp, synthetic construct
  source 1..75: mol_type = other DNA
cacaaattagcctgtcgcagctggtagccgcggcgctgatcctctatccccgctatctggatccggtcctgggcc

SEQ ID NO: 761539 - DNA, 75 bp, synthetic construct
  source 1..75: mol_type = other DNA
tcgaacctgtgccgcccttcctcgctctccatcgacccggtggggatctacttcgacagccgccgtccgagcggg

SEQ ID NO: 761540 - DNA, 75 bp, synthetic construct
  source 1..75: mol_type = other DNA
ataagcatccatcagaaagacgccatcgtacattaacgttgagtgcattagcatatattacattagtaaaatatc

SEQ ID NO: 761541 - DNA, 75 bp, synthetic construct
  source 1..75: mol_type = other DNA
gatatattatgatgcacatcagacgagtcaattagaacagcttattattgaacctgttgatacggctttacttgc

SEQ ID NO: 761542 - DNA, 75 bp, synthetic construct
  source 1..75: mol_type = other DNA
tagcgcaaggtttaccaccagcagtggtacagcacaggttaggtatcagcaaagccaccttctatcggctaaaga

SEQ ID NO: 761543 - DNA, 75 bp, synthetic construct
  source 1..75: mol_type = other DNA
aacgtgcgtcagggcgaacctttaggtctgggccactccattttgtgtgcgcgaccggccattggtgacaaccca

SEQ ID NO: 761544 - DNA, 75 bp, synthetic construct
  source 1..75: mol_type = other DNA
gctggttctgtacaaagacggtgaacgccgttacatcctggcccctaaaggcctgaaagctggcgaccagattca

SEQ ID NO: 761545 - DNA, 75 bp, synthetic construct
  source 1..75: mol_type = other DNA
cgatagcgcactgccggaaggttccgttcgggagctgactcccgccggccgtcgtcgaattgttatcctggtcac

SEQ ID NO: 761546 - DNA, 75 bp, synthetic construct
  source 1..75: mol_type = other DNA
gactggatgtggaaatcgcggcagtcatcggcaaccacgataccttgcgttcgctggttgaacgttttgatattc

SEQ ID NO: 761547 - DNA, 75 bp, synthetic construct
  source 1..75: mol_type = other DNA
gaggtggcactccgctttccaatatggtcaaagaggttgcggctgattttgccgcgaaacttcgcaaaggaggca

SEQ ID NO: 761548 - DNA, 75 bp, synthetic construct
  source 1..75: mol_type = other DNA
atgaaacaaatgacactaattgagatggatggttttctgaaaggcaaatgcatcccacgagatttaaaggttaac

SEQ ID NO: 761549 - DNA, 75 bp, synthetic construct
  source 1..75: mol_type = other DNA
ctgcgttctggtgaaatgcgtaaagtagaagcagactgccgtgcaactctgggagaagttggcaatgctgagcat

SEQ ID NO: 761550 - DNA, 75 bp, synthetic construct
  source 1..75: mol_type = other DNA
aaacattcactaagcttcgagtgctggatctggatatcaaaattgatcgtacagaagcatttaacctgtttatca

SEQ ID NO: 761551 - DNA, 75 bp, synthetic construct
  source 1..75: mol_type = other DNA
gcctgcgcaggtttactgatctctttcatcctgccgcaaaaatggaccagctcagccgttattactcccgccgaa

SEQ ID NO: 761552 - DNA, 75 bp, synthetic construct
  source 1..75: mol_type = other DNA
ggcggtgcatttaacctgtttatcaagaagtttcagtctgttagcttgctggaagagtacctgcgttcatcacct

SEQ ID NO: 761553 - DNA, 75 bp, synthetic construct
  source 1..75: mol_type = other DNA
gactggatgtggaaatagcggcagtcatcggcaaccacgacactttgcgttcactggtggagcgttttgatatcc

SEQ ID NO: 761554 - DNA, 75 bp, synthetic construct
  source 1..75: mol_type = other DNA
cgatagcgcattgccggaaggttctgtgcgtgagctcactcccgccggtcgtcgtcggatagtcattctggtcac

SEQ ID NO: 761555 - DNA, 75 bp, synthetic construct
  source 1..75: mol_type = other DNA
agctccagcaccgggcattaccccagaactgcgtcgttacatcggcgaacgttgcgctaaagcgtgtgttgatat

SEQ ID NO: 761556 - DNA, 75 bp, synthetic construct
  source 1..75: mol_type = other DNA
tggttgccgctgcgcggcgtaatcaccccggcgcccgcctgctgctgcgtacccatccggatacccggctgggca

SEQ ID NO: 761557 - DNA, 75 bp, synthetic construct
  source 1..75: mol_type = other DNA
ggttcacttgagatcaacaaaaacatgctgttatggataaatgacgcactgatggcgatatttttcctgttagtt

SEQ ID NO: 761558 - DNA, 75 bp, synthetic construct
  source 1..75: mol_type = other DNA
actgggcaaaattaggcattctggtgggatcgatctcttcggcagtaattggatatagctggttacgtgttcgtt

SEQ ID NO: 761559 - DNA, 75 bp, synthetic construct
  source 1..75: mol_type = other DNA
tcgatgctctgttggttcataagatggccatggctttattgccgttggtggatgctggcgatacaagcgagggtg

SEQ ID NO: 761560 - DNA, 75 bp, synthetic construct
  source 1..75: mol_type = other DNA
gatagttcggtgccagcgccaggaaagggcgtcaccggtgaacgtatccgcattaagccgcatgtttatcgcgaa

SEQ ID NO: 761561 - DNA, 75 bp, synthetic construct
  source 1..75: mol_type = other DNA
ttaagccggggcatacgcttggcattattgatgcactattggttcataagatggccagggctttattgccgctgg

SEQ ID NO: 761562 - DNA, 75 bp, synthetic construct
  source 1..75: mol_type = other DNA
actgggcgaaattaggcattctggtcggttcaatctcttcggcggtaattggatatagctggctacgcattcgtc

SEQ ID NO: 761563 - DNA, 75 bp, synthetic construct
  source 1..75: mol_type = other DNA
atgtcgcaaaaatcgcttatcaccgtcacaatttgtatgacggttatcttcactatctggatgttgcacggttca

SEQ ID NO: 761564 - DNA, 75 bp, synthetic construct
  source 1..75: mol_type = other DNA
ccaagaacgcggtcgaaaaccacttcgacacctcttatgaattagaatctctccttgaactgcgcgtgaagcgtc

SEQ ID NO: 761565 - DNA, 75 bp, synthetic construct
  source 1..75: mol_type = other DNA
gggctatatgcaggcgtttgtgaagtatgggctacgcaacttgaaagaaggggcgaagttccgtctatttattca

SEQ ID NO: 761566 - DNA, 75 bp, synthetic construct
  source 1..75: mol_type = other DNA
tttgggcgcaatttttgttgtgagattgagcttccaattggtgaccttgatagcgatgaataccagtcagttgtc

SEQ ID NO: 761567 - DNA, 75 bp, synthetic construct
  source 1..75: mol_type = other DNA
accagaaataatgcggtattactgcccgcagagcagttattactggaagcgttatttcgtaaaggcgataaggtc

SEQ ID NO: 761568 - DNA, 75 bp, synthetic construct
  source 1..75: mol_type = other DNA
tataccagtttgttggggcgaagctattccggtggtggtgctggcggcggtgcgggtggcggaggcggtggtggt

SEQ ID NO: 761569 - DNA, 75 bp, synthetic construct
  source 1..75: mol_type = other DNA
atcataaacaagccgagaaaagtgacctggaaaggtgtcaccttgaggcggcattaaacattaagccggggcata

SEQ ID NO: 761570 - DNA, 75 bp, synthetic construct
  source 1..75: mol_type = other DNA
atccgcgctgcaaagcggtgtacgacgcctgcacgcagctgccagcgttcattgccgcagcgccagaaaatcaac

SEQ ID NO: 761571 - DNA, 75 bp, synthetic construct
  source 1..75: mol_type = other DNA
ctggtgccgacgctgctgactgacgagggcgaatcactcggacaatcgctggcgattattgactggctggagagg

SEQ ID NO: 761572 - DNA, 75 bp, synthetic construct
  source 1..75: mol_type = other DNA
atccacgctgcaaagcggtgtacgacgcctgcacacagctgccagcgttcattgccgcagcgccagaaaatcaac

SEQ ID NO: 761573 - DNA, 75 bp, synthetic construct
  source 1..75: mol_type = other DNA
cgccagcatggggtgagcaaatataacgttggcaccatcaaaccgttcaccccacctgctgatggccgttcgctg

SEQ ID NO: 761574 - DNA, 75 bp, synthetic construct
  source 1..75: mol_type = other DNA
aaatcgcatacggtcatgctaccgctctagtgctcagtgaactgggccaacaagagaattggtgcaaggcttatg

SEQ ID NO: 761575 - DNA, 75 bp, synthetic construct
  source 1..75: mol_type = other DNA
gacgttgacctcagcagtaagaaaatcacgatttctcacgaagccatcccggcggttggctggcctgctatgact

SEQ ID NO: 761576 - DNA, 75 bp, synthetic construct
  source 1..75: mol_type = other DNA
tcattgatgccatgttggttcatgaaatggcgaaggctttattgccgctggtggctgataaaattccgaataagg

SEQ ID NO: 761577 - DNA, 75 bp, synthetic construct
  source 1..75: mol_type = other DNA
ccatcgcagatggtgtgatgaacttgatagcaattttccctactttgcggaagggaacacctgccctcaatgcag

SEQ ID NO: 761578 - DNA, 75 bp, synthetic construct
  source 1..75: mol_type = other DNA
acgcgggaaaatcgatgtggactgtggttgtgtgtccactgaaacattcatgcactggctgcgggtagcttacga

SEQ ID NO: 761579 - DNA, 75 bp, synthetic construct
  source 1..75: mol_type = other DNA
atgccatttcgcctgattgtcgcgctgatcatcgcactcttagcacctggcgcggcggcacacaattttgtcact

SEQ ID NO: 761580 - DNA, 75 bp, synthetic construct
  source 1..75: mol_type = other DNA
gaaaagtccgcattatccagtatatcgccgggcgcaagtcggcaaagaaaaagaactcactgttaatcaaaacag

SEQ ID NO: 761581 - DNA, 75 bp, synthetic construct
  source 1..75: mol_type = other DNA
tggctctgatccagagaaaagcccgcgtgggcgcaatttttgccttgaggtcaggcttccgataagtaaccttga

SEQ ID NO: 761582 - DNA, 75 bp, synthetic construct
  source 1..75: mol_type = other DNA
gtgaagttttcgacgttacacgcatgattttgtcagcgaaagaagagttggctaatgaaccgcatccgattgatg

SEQ ID NO: 761583 - DNA, 75 bp, synthetic construct
  source 1..75: mol_type = other DNA
tgcacccgattgatggcctgtccggtgaatatgcggagaaatcccttgaagaatgggcggaacagattcgcaaag

SEQ ID NO: 761584 - DNA, 75 bp, synthetic construct
  source 1..75: mol_type = other DNA
gcggcaatgcatgaaactattgaagccgttcggagtgttgcggataactccagtggaattgccggatggcatttg

SEQ ID NO: 761585 - DNA, 75 bp, synthetic construct
  source 1..75: mol_type = other DNA
taggcgggagagcatcagaacctacgcagtgaattgcaatgacgcatggctaaacaccgaaggtgatgacatctc

SEQ ID NO: 761586 - DNA, 75 bp, synthetic construct
  source 1..75: mol_type = other DNA
tgcggagtgtgcatacacacttgaacatcatgatcacgcagtagccttcgccgctgagcttcgcaaaggaggcaa

SEQ ID NO: 761587 - DNA, 75 bp, synthetic construct
  source 1..75: mol_type = other DNA
ggaagactgaagcacgcaaggaaggcgcttattttgtggcgaacagaatgttggcagcctggaaagctggtttta

SEQ ID NO: 761588 - DNA, 75 bp, synthetic construct
  source 1..75: mol_type = other DNA
ggagagaatcaaacgtgttataaccgattcgaagattcgcgccagcgatatgatgcttttggaacacagtaaatt

SEQ ID NO: 761589 - DNA, 75 bp, synthetic construct
  source 1..75: mol_type = other DNA
aagcggcacagagtgattgctgtatgcaccctggttcagaccgggtagggaaggttgaaatgactgagtggttag

SEQ ID NO: 761590 - DNA, 75 bp, synthetic construct
  source 1..75: mol_type = other DNA
atcaaaagtatagacccattcgatgacgagtacacagaagtcttgaaagagacagccagagcggcaagatgcttc

SEQ ID NO: 761591 - DNA, 75 bp, synthetic construct
  source 1..75: mol_type = other DNA
attactggcagatgaaacggtctgtatcggccctgctccgtcagtaaaaagttatctgaacatcccggcaatcat

SEQ ID NO: 761592 - DNA, 75 bp, synthetic construct
  source 1..75: mol_type = other DNA
cagcagctatatagcgcatttattgaaagacgccccttgtgaagtcattttacttggcggtgtgtaccagaaaaa

SEQ ID NO: 761593 - DNA, 75 bp, synthetic construct
  source 1..75: mol_type = other DNA
ttgagtattataacgttataagaattacagcgatgaattcccgacaacaaacaattctacagatggtcattgacc

SEQ ID NO: 761594 - DNA, 75 bp, synthetic construct
  source 1..75: mol_type = other DNA
gcggggctgaagtctggcgctatgggcgaaatcaaggttatcaaccgtggagggcaggcatattgcgtaaaagat

SEQ ID NO: 761595 - DNA, 75 bp, synthetic construct
  source 1..75: mol_type = other DNA
aaaatcctcggtcgttttgagaacccgtatctgaaagatgatgtagagcgcgtaggccgtcagccgctgcgtaaa

SEQ ID NO: 761596 - DNA, 75 bp, synthetic construct
  source 1..75: mol_type = other DNA
taaccgcgtacctcggaaaactggccggtcatcagaccattcgtgacgcaattctcgacgagaaaatccgcgcgg

SEQ ID NO: 761597 - DNA, 75 bp, synthetic construct
  source 1..75: mol_type = other DNA
aagcaagcgatacttatgaagatttcatccaattgcttgataaggtacaccctctactaaccgtagaagatattg

SEQ ID NO: 761598 - DNA, 75 bp, synthetic construct
  source 1..75: mol_type = other DNA
cagcattggcgacgacgtggtggatttaatcgcccaggttgatttagtcaccaccgcagttggcccggtcgtgct

SEQ ID NO: 761599 - DNA, 75 bp, synthetic construct
  source 1..75: mol_type = other DNA
tggtctgccacataaaaacctgattgaaggtattgccgctgcaatgcacttccgcagtgaagatgatccgcaggc

SEQ ID NO: 761600 - DNA, 75 bp, synthetic construct
  source 1..75: mol_type = other DNA
ggcgtcgatgccgtcagcagcattggcgatgatgtcgttgatctgattgctcaggtcgatttagtcactaccgcc

SEQ ID NO: 761601 - DNA, 75 bp, synthetic construct
  source 1..75: mol_type = other DNA
gttacgcgcatgattctgtcagcaaaagaagagttagctaatgaatcgcatccgattgatggcctgtccggtgaa

SEQ ID NO: 761602 - DNA, 75 bp, synthetic construct
  source 1..75: mol_type = other DNA
taaggcagttcaggcattatgcgatgttgttggcgacaacaccgaggttatcgctgaggtggttgggcgagatgg

SEQ ID NO: 761603 - DNA, 75 bp, synthetic construct
  source 1..75: mol_type = other DNA
aaggttaacgaaacaaacgctgaatatctggtgcgtaaatttgctgaagcggaggccaagtgcgcgtcgctggcc

SEQ ID NO: 761604 - DNA, 75 bp, synthetic construct
  source 1..75: mol_type = other DNA
gatggttttgatgcgtttgcctctccaaaccttcctccgttactggaagcaggtatccatattcgtcgtttgaat

SEQ ID NO: 761605 - DNA, 75 bp, synthetic construct
  source 1..75: mol_type = other DNA
cgctgatcggcctgatgtcgccggtaggttcgttttatctggtgctggcgattggtctggcgctgaacatttcat

SEQ ID NO: 761606 - DNA, 75 bp, synthetic construct
  source 1..75: mol_type = other DNA
ctgatgccgcccgtcgcggcgggtcttgcgacgttcattgcgcccaaactgtttactcaacaggaaaaagaggcc

SEQ ID NO: 761607 - DNA, 75 bp, synthetic construct
  source 1..75: mol_type = other DNA
caagagggtggaatgactatcgcgcaaagtctctgcaatcagacaccccagccaccgacgctttcctggctgaag

SEQ ID NO: 761608 - DNA, 75 bp, synthetic construct
  source 1..75: mol_type = other DNA
gaacgcactcagccaggtgcatggggacgtatacagttgacagatgccattgctgaactggctaaaaaacaagcc

SEQ ID NO: 761609 - DNA, 75 bp, synthetic construct
  source 1..75: mol_type = other DNA
gaacgcactcagccaggtgcatggggacgtatccaactgactgatgctattgctgaactggcgaaaaaacagtct

SEQ ID NO: 761610 - DNA, 75 bp, synthetic construct
  source 1..75: mol_type = other DNA
ttctgccgatatttggccggaactggaacgtactcagccaggtgcatggggacgtatccaactaactgatgctat

SEQ ID NO: 761611 - DNA, 75 bp, synthetic construct
  source 1..75: mol_type = other DNA
gtgcgtgctaatgcgctggccgaagaccaccagagcgcgattgagtcaattaagcaggctgatgcggctgttaag

SEQ ID NO: 761612 - DNA, 75 bp, synthetic construct
  source 1..75: mol_type = other DNA
ctgaagacttcggattcaatcatgcaatagagcggatgaggaggcagattcctgaaaccccagccaccgatgctt

SEQ ID NO: 761613 - DNA, 75 bp, synthetic construct
  source 1..75: mol_type = other DNA
atgcaacgttccgagcagggatatattccggtgtcgggccatctgcaacgccagttagcgctgatgccagaattc

SEQ ID NO: 761614 - DNA, 75 bp, synthetic construct
  source 1..75: mol_type = other DNA
aagtagtttccggtgaatatacggtgagcagcacgatgacgctgaccgacgccgaaatcgcagaaggttatgtac

SEQ ID NO: 761615 - DNA, 75 bp, synthetic construct
  source 1..75: mol_type = other DNA
gagcagcactatgacgctgaccgacgctgagatcgccgaaggttacgtactggcttgttcctgccatccgcaggg

SEQ ID NO: 761616 - DNA, 75 bp, synthetic construct
  source 1..75: mol_type = other DNA
ccgcaggatgtcatttttgccgacgaatggcgcaactatccggtgacgctggtggcagaaaataacgtcagcgag

SEQ ID NO: 761617 - DNA, 75 bp, synthetic construct
  source 1..75: mol_type = other DNA
gggttatatgcaggcgtttgtgaagtatgggctgcgcaacctaaaagaaggggcgaagttccgtaaagggattga

SEQ ID NO: 761618 - DNA, 75 bp, synthetic construct
  source 1..75: mol_type = other DNA
gtagagatgatgcgcgaacatccagcaatcaaactttgttgtttgacgcacatatgtgatgagttagccgcccag

SEQ ID NO: 761619 - DNA, 75 bp, synthetic construct
  source 1..75: mol_type = other DNA
attatggcgatgcgtcgctggttggcgaaaaaccgtccgcaggcagatgtccaggtgatctacaacgtgcgcacg

SEQ ID NO: 761620 - DNA, 75 bp, synthetic construct
  source 1..75: mol_type = other DNA
aattcgcattgctatatcaccacaaaagcccattccagccactgatgctttcctgcctgaagtgcgggcgcaggg

SEQ ID NO: 761621 - DNA, 75 bp, synthetic construct
  source 1..75: mol_type = other DNA
cgcttgagcaacgtggatttgtcggctgtgcgcggcacttcattgaatgtgtgcaaaatcagacagttccgcaaa

SEQ ID NO: 761622 - DNA, 75 bp, synthetic construct
  source 1..75: mol_type = other DNA
tacgggcacagggcgtggagatgtttgctgagtgcgcatacacacttgaacatcatgatcacgcagtagccttcg

SEQ ID NO: 761623 - DNA, 75 bp, synthetic construct
  source 1..75: mol_type = other DNA
ttacgagctgtcattcatcagcatcaataaacaaggtgttgagtctctgcgttatcgacatgcacgcctcgataa

SEQ ID NO: 761624 - DNA, 75 bp, synthetic construct
  source 1..75: mol_type = other DNA
tggaaatgtttgcggagtgtgcatacacacttgaacatcatgatcacgcagtagcttttgccgccgagctacgca

SEQ ID NO: 761625 - DNA, 75 bp, synthetic construct
  source 1..75: mol_type = other DNA
cgaaaccacagccaccgacgctttcctggctgaagttcgggcgcagggggtggaaatgtttgcggagtgtgcata

SEQ ID NO: 761626 - DNA, 75 bp, synthetic construct
  source 1..75: mol_type = other DNA
tggcggcgcggaaaaaactgacgttgatggtcggttttaaccgtcgtttcgcaccactctacggtgagttaaaaa

SEQ ID NO: 761627 - DNA, 75 bp, synthetic construct
  source 1..75: mol_type = other DNA
gtttgagtaacttacgtcgttttgctgacacactccacgccattgaacgtgagttctttaccaaagagctacctg

SEQ ID NO: 761628 - DNA, 75 bp, synthetic construct
  source 1..75: mol_type = other DNA
gcgacatcgttacggtgaaagaagcgacggacgccctgctgcattgtgcggagcagcttcgcaaaggaggcagcc

SEQ ID NO: 761629 - DNA, 75 bp, synthetic construct
  source 1..75: mol_type = other DNA
tgatcagcgatttggcaacgcaactggaagtgcaactggtgcgtgctaatgcgctggccgaagaccaacagaaag

SEQ ID NO: 761630 - DNA, 75 bp, synthetic construct
  source 1..75: mol_type = other DNA
acgcttaatggcgattacattgttgattctctgccatcgctcatctataccgatttcaaacgcctttctccttac

SEQ ID NO: 761631 - DNA, 75 bp, synthetic construct
  source 1..75: mol_type = other DNA
tgatatacgcgataactggaaactactcggtgaacatgccactgactttgccgcagagcttcgcaaaggaggcaa

SEQ ID NO: 761632 - DNA, 75 bp, synthetic construct
  source 1..75: mol_type = other DNA
aagtgcgggcgcagggggtgaatatggctcgtaacgcgatgattgattttgttgatggtgaagttgggccaaaca

SEQ ID NO: 761633 - DNA, 75 bp, synthetic construct
  source 1..75: mol_type = other DNA
gacgtatatcgaatttgataacagcaatgccgtcagcggaacaccggctccccgccagcgcgtgctgatgttcgg

SEQ ID NO: 761634 - DNA, 75 bp, synthetic construct
  source 1..75: mol_type = other DNA
tcagcaaagttcgtcagcgagtgtaaccatgatgtccggctgaattactacccggaggatgttgctccgacgggg

SEQ ID NO: 761635 - DNA, 75 bp, synthetic construct
  source 1..75: mol_type = other DNA
cacccacagtatcgcagccatggggacgcgccagtataactatatagtgatgccctataaggacagcgcaaacct

SEQ ID NO: 761636 - DNA, 75 bp, synthetic construct
  source 1..75: mol_type = other DNA
atcaggtgctggtgacacgcagtaagcagacgttgcatcaagttgagccattgcgggaagttgaacctggcaggc

SEQ ID NO: 761637 - DNA, 75 bp, synthetic construct
  source 1..75: mol_type = other DNA
ctgagtgcaaaatttacgggtgcattatctgccgtggatgtgcgctggaactattacgcgggtgaaaccacccct

SEQ ID NO: 761638 - DNA, 75 bp, synthetic construct
  source 1..75: mol_type = other DNA
gccaccggtcaggccgtggtgacgccatccgtgatcaaaacggagctgctggcactgtttgaagaatgggaaaac

SEQ ID NO: 761639 - DNA, 75 bp, synthetic construct
  source 1..75: mol_type = other DNA
cactgacccgtgcgggtgttcttgagcgttcccgggatgtggacaccaccgacaaaggtgatcgccgtgccgatg

SEQ ID NO: 761640 - DNA, 75 bp, synthetic construct
  source 1..75: mol_type = other DNA
gatttgtggcgtgatgtgagctgggccatctctgacattctgtgccgcccgcgaatctttgcggagttgtgctga

SEQ ID NO: 761641 - DNA, 75 bp, synthetic construct
  source 1..75: mol_type = other DNA
cccttgacgcacagacagatgatttgtggcgtgatgtgcgatgggccattgctgacattctgggccgcccccgcc

SEQ ID NO: 761642 - DNA, 75 bp, synthetic construct
  source 1..75: mol_type = other DNA
gcggcgaaatttaccggcgaatgctccgtgcatgatatccggctgaattattattccggtgaagtgacacctgcc

SEQ ID NO: 761643 - DNA, 75 bp, synthetic construct
  source 1..75: mol_type = other DNA
ccgcccctgcacgggacgatatccccgacaccgacgacggcgacgccaccatcaccgccggggcattctggccgg

SEQ ID NO: 761644 - DNA, 75 bp, synthetic construct
  source 1..75: mol_type = other DNA
agcggtgcccagtggttggtgattctcggagacgtgctgaatcatggtccgcgaaacgccctgcctgaagggtat

SEQ ID NO: 761645 - DNA, 75 bp, synthetic construct
  source 1..75: mol_type = other DNA
gcagacgttacatcaagtcgagccattgcgggaagttgaacctggcaggcagcgcctggtatttgatgagaatct

SEQ ID NO: 761646 - DNA, 75 bp, synthetic construct
  source 1..75: mol_type = other DNA
gaattgatccgctgggcaggcagaaaatgcccgagtggtcgggtaatggggctggcgaataaaggctggataaag

SEQ ID NO: 761647 - DNA, 75 bp, synthetic construct
  source 1..75: mol_type = other DNA
atgaaattgcccagcgtctactgggggcaaaaaaaaaaattaccctcgcttgagtggttaaaaatagtggcgact

SEQ ID NO: 761648 - DNA, 75 bp, synthetic construct
  source 1..75: mol_type = other DNA
cttgcctcattagaaaaatatcacgaaccatatgccatttttgatgattactattgtggtgcgatatggtcagcc

SEQ ID NO: 761649 - DNA, 75 bp, synthetic construct
  source 1..75: mol_type = other DNA
ccgccgactcactggctggatttgcctgggatctgtttaccgcctggcagaccgctggcgcgccgtcgaaagaga

SEQ ID NO: 761650 - DNA, 75 bp, synthetic construct
  source 1..75: mol_type = other DNA
cccacgccagttcaccgtcagctttgatgaaaccttaaaaccgtttgtgcgtgacgcttccggcagccgcctgaa

SEQ ID NO: 761651 - DNA, 75 bp, synthetic construct
  source 1..75: mol_type = other DNA
cctggttgagcatccgctggttcgccacttaacccgccgtctgatttggggcgtttatagcgccgaaaaccagct

SEQ ID NO: 761652 - DNA, 75 bp, synthetic construct
  source 1..75: mol_type = other DNA
aggcttatttaattataggccagtaaaaccagtagatacgattattgcgcgggctttattagaaactttaatcta

SEQ ID NO: 761653 - DNA, 75 bp, synthetic construct
  source 1..75: mol_type = other DNA
aggtttatttaattacaggcctgtaaggcctattgatactctattggcaaggacactcctagaaacaataatata

SEQ ID NO: 761654 - DNA, 75 bp, synthetic construct
  source 1..75: mol_type = other DNA
ccaatactaattaagcctttatattttatatcatgtattatgtttcctctacatgcaatcccaaagcaatattgg

SEQ ID NO: 761655 - DNA, 75 bp, synthetic construct
  source 1..75: mol_type = other DNA
cctcaaaaacaccatcatacactaaatcagtaagttggcagcattacctacaccttcaacagattgatattgaat

SEQ ID NO: 761656 - DNA, 75 bp, synthetic construct
  source 1..75: mol_type = other DNA
atccgcatttgtgaaagccaaagcagaaatgccagctaattacctgattgtcggcagcccggcgaaagcgattcg

SEQ ID NO: 761657 - DNA, 75 bp, synthetic construct
  source 1..75: mol_type = other DNA
aggcttatttaattatagaccagtgaaaccaatagatacaattatcgctcggactatacttgagttcgttatata

SEQ ID NO: 761658 - DNA, 75 bp, synthetic construct
  source 1..75: mol_type = other DNA
accggagagcttcagcatcgcagcagcttaagtgcacagctcaatatgaagtgtcacgagtttgatcagaagaaa

SEQ ID NO: 761659 - DNA, 75 bp, synthetic construct
  source 1..75: mol_type = other DNA
tccggtgttcggcgcggtgattgtcgcgaatgccatcgtggcgcgtttcgttaaagatccgaccgaaccgcgctt

SEQ ID NO: 761660 - DNA, 75 bp, synthetic construct
  source 1..75: mol_type = other DNA
atcaaagatccgaccgaaccgcggtttatctggcgtgccgtgcccattcaactggtcggcctcgcgctattgatt

SEQ ID NO: 761661 - DNA, 75 bp, synthetic construct
  source 1..75: mol_type = other DNA
ttccggtcttcggcgcggtgattgtcgccaacaccatcgtggcgcgatttatcaaagatccgaccgaaccgcggt

SEQ ID NO: 761662 - DNA, 75 bp, synthetic construct
  source 1..75: mol_type = other DNA
gtgttgtatgtaatttacgctcaagacaaagccgatagtctcgaaaaacgtctttccgttcgtccggcacattta

SEQ ID NO: 761663 - DNA, 75 bp, synthetic construct
  source 1..75: mol_type = other DNA
tctggaagcagcgcaagcatgggctgatgccgatccttacgtggcggctggagtgtatgaacacgtttcagtcaa

SEQ ID NO: 761664 - DNA, 75 bp, synthetic construct
  source 1..75: mol_type = other DNA
tctggaagcagcgcaagcctgggccgatgccgatccttacgtagcggccggtgtatatgaacaagtatcagtgaa

SEQ ID NO: 761665 - DNA, 69 bp, synthetic construct
  source 1..69: mol_type = other DNA
aagcgtaaactgaccgccgtatgtagccatcagacgaaaattggtaacttagacgcccatctgatatag

SEQ ID NO: 761666 - DNA, 75 bp, synthetic construct
  source 1..75: mol_type = other DNA
acattcctgttgcacagccaatcatcattaacgctggcggatatccggtatataacggacagattgccaaattcg

SEQ ID NO: 761667 - DNA, 75 bp, synthetic construct
  source 1..75: mol_type = other DNA
caaatagttcctatattaggttacattcatctgatgatccaaactacccaaattcgatcattgaaggaacaagaa

SEQ ID NO: 761668 - DNA, 75 bp, synthetic construct
  source 1..75: mol_type = other DNA
atattctggtgctcgccgggcgtactgacagtgacgatcctaaagcgaaaggctccatgcagggggcagaattcg

SEQ ID NO: 761669 - DNA, 75 bp, synthetic construct
  source 1..75: mol_type = other DNA
aattaccggtatcgcctttacgccggacaaccgtacgctgtttattaatatccagcatcccggcgaaggcggcga

SEQ ID NO: 761670 - DNA, 75 bp, synthetic construct
  source 1..75: mol_type = other DNA
aagcgtaaactgaccgccgtatgtagccatcagacgagaattggtaacttagacgcccatctgacacagacggac

SEQ ID NO: 761671 - DNA, 75 bp, synthetic construct
  source 1..75: mol_type = other DNA
tattcacgcaggctttgactgggacagcaacaccatcctgatctatccggaagagcagctcacccggttgacgcc

SEQ ID NO: 761672 - DNA, 75 bp, synthetic construct
  source 1..75: mol_type = other DNA
gcttacaggagtggacagtggattgtcagtgtagcctgtagcaatggatggcgttggtggaaccgaaagaataaa

SEQ ID NO: 761673 - DNA, 75 bp, synthetic construct
  source 1..75: mol_type = other DNA
ttattgactggatagccttccttcaggttttgctcatctggttttatatggcttacaggagtggacagtggattg

SEQ ID NO: 761674 - DNA, 75 bp, synthetic construct
  source 1..75: mol_type = other DNA
gaggattctggttatcgtaaagtctttatacctgaccgagttaagtctggatcagaaattacatttgatgaatgc

SEQ ID NO: 761675 - DNA, 75 bp, synthetic construct
  source 1..75: mol_type = other DNA
gcaacagcttaagtgcgcagctcaacatgaaatgtcatgagtttgaccagaagaaagacatggcgagcttctgcg

SEQ ID NO: 761676 - DNA, 75 bp, synthetic construct
  source 1..75: mol_type = other DNA
gagctggagaaaaaccacgaatctgtggttttcactgcccgcggcgtacacggcggaacctatggcgggaagttt

SEQ ID NO: 761677 - DNA, 75 bp, synthetic construct
  source 1..75: mol_type = other DNA
atgaaatcattaaccctcttcaatcaaccaatccgtatcggtgaagatggcatgatctgcctcactgatatgtgg

SEQ ID NO: 761678 - DNA, 75 bp, synthetic construct
  source 1..75: mol_type = other DNA
aaagatgatagatatcagacaatagatgatgtggcgtttgattttgtgcattcttttttaaggagtgagtcatga

SEQ ID NO: 761679 - DNA, 75 bp, synthetic construct
  source 1..75: mol_type = other DNA
taatgccgagtattcagttaagactgatgtttatgcggtggggcggttaattgaggacttaaatttagatgataa

SEQ ID NO: 761680 - DNA, 75 bp, synthetic construct
  source 1..75: mol_type = other DNA
aagaagtgcctgacacggctgatgactttgttacttttgacggcggtctgtatgagttcgatacgtcggctgggt

SEQ ID NO: 761681 - DNA, 75 bp, synthetic construct
  source 1..75: mol_type = other DNA
gtgctagtctagggtccattgaggatggagaacgttttgcccaagacttaactggcttatcaccaacctcttcga

SEQ ID NO: 761682 - DNA, 75 bp, synthetic construct
  source 1..75: mol_type = other DNA
cctggttctgtcgttgtagtcaccactcaaagcggcatgaccattcagattcataaaccaaaagaggaaaaatga

SEQ ID NO: 761683 - DNA, 75 bp, synthetic construct
  source 1..75: mol_type = other DNA
cagatgatggggctaaaatttacacaccacttaccctaaagctttatgactggtgggttttgggtgtatcaaatc

SEQ ID NO: 761684 - DNA, 75 bp, synthetic construct
  source 1..75: mol_type = other DNA
taacagatgccacccataaaaccagtattcataatgactggaaagttgttgttgcaaagaaaaaaccggcgcggg

SEQ ID NO: 761685 - DNA, 75 bp, synthetic construct
  source 1..75: mol_type = other DNA
gtgatgtggttgatcctgaaactcgatgctgggttcctgatgatgcggaatcagataaaatttgtagcggtattt

SEQ ID NO: 761686 - DNA, 75 bp, synthetic construct
  source 1..75: mol_type = other DNA
tgaggatatacaggatgagaagattagattttcaataccggatgtttatcggcaggtaattgcaggtaaattcta

SEQ ID NO: 761687 - DNA, 75 bp, synthetic construct
  source 1..75: mol_type = other DNA
gtggtttatgatgcactgggttacaccgatatgctgcctgagtttggcggtgacacggcatacagcgatgacttc

SEQ ID NO: 761688 - DNA, 75 bp, synthetic construct
  source 1..75: mol_type = other DNA
acgtagcagatcagactttgttggaaagtcaggttgaagcacaaattcagacttacatttccgggatagggactg

SEQ ID NO: 761689 - DNA, 75 bp, synthetic construct
  source 1..75: mol_type = other DNA
gagaatacagcatctcgcctgatgaaatttaatgagtgtagtgcagccagacagggggtaaatcaaaaagatgca

SEQ ID NO: 761690 - DNA, 75 bp, synthetic construct
  source 1..75: mol_type = other DNA
gctacggattgccagggggcttcaacatcggacatcatcaatgaattactcagccatatatctataagtgctatt

SEQ ID NO: 761691 - DNA, 75 bp, synthetic construct
  source 1..75: mol_type = other DNA
gcttctttattccgttaaaagagaagcatgggcgttctccagcgaagcgactggagcatgtgttgcacccgtggg

SEQ ID NO: 761692 - DNA, 75 bp, synthetic construct
  source 1..75: mol_type = other DNA
atgcggcaagggcagtttcgccgtgatctgttttatcggctgagtattttgcgtctgcaattgccaccactgcgc

SEQ ID NO: 761693 - DNA, 75 bp, synthetic construct
  source 1..75: mol_type = other DNA
cggcgattaactggggtacggttaccgacgtagctaaacgcaaatcagcatttgcgggtacgccgatcagcgtcg

SEQ ID NO: 761694 - DNA, 75 bp, synthetic construct
  source 1..75: mol_type = other DNA
catcggtgcgaaaaccttatggatgcagctaggggtgattaatgagcaagctgcggtactggcgcgggaagctgg

SEQ ID NO: 761695 - DNA, 75 bp, synthetic construct
  source 1..75: mol_type = other DNA
ttatttataaacttcaacagaccgacagttcttatcgctataccaatggtacacaaggtacggcgtggacattaa

SEQ ID NO: 761696 - DNA, 75 bp, synthetic construct
  source 1..75: mol_type = other DNA
aaaaataaaatcgcaaagtatgttgatatgaaatctttgcctactcaaggatattcaatatcagatattatagaa

SEQ ID NO: 761697 - DNA, 75 bp, synthetic construct
  source 1..75: mol_type = other DNA
tgaaagggaagagccatgattgcggcaataaattaggttacatgcaagcctttgtcgaatacggtattcggcata

SEQ ID NO: 761698 - DNA, 75 bp, synthetic construct
  source 1..75: mol_type = other DNA
tactccgtcatccagaccaaagagccgatggtggctgaaggccaggtggcgcgtatcgttgagtttattgaaaaa

SEQ ID NO: 761699 - DNA, 75 bp, synthetic construct
  source 1..75: mol_type = other DNA
catggggccgtatccaactgaccgacgccattgccgaactggcgaagaagcagtccgtcgatgcgatgctgatga

SEQ ID NO: 761700 - DNA, 75 bp, synthetic construct
  source 1..75: mol_type = other DNA
gctacgttacaaccttgctgccatgattgcgcgcttcaacgaaacgggccgcagccaggtgctggcaaaacgtat

SEQ ID NO: 761701 - DNA, 75 bp, synthetic construct
  source 1..75: mol_type = other DNA
gatactatggcgtacaccgcgtctgcgctctcgttcatgctggaaaatcttggtaagcccgtcatagtgaccggg

SEQ ID NO: 761702 - DNA, 75 bp, synthetic construct
  source 1..75: mol_type = other DNA
tgccaggctgtatgcctaaagtgctgggctgggtaacggagaaaatccaccagccgctgattgctggcgggctgg

SEQ ID NO: 761703 - DNA, 75 bp, synthetic construct
  source 1..75: mol_type = other DNA
ttttaacgtccactcacaccattgcgctggtaggggcaagtgataaacctgaccgtccaagttatcgcgtaatga

SEQ ID NO: 761704 - DNA, 75 bp, synthetic construct
  source 1..75: mol_type = other DNA
cgcggtattgtgtgctcacccggtagtgggtgatgaaccggtagctgttattttgcctgacgttattctggatga

SEQ ID NO: 761705 - DNA, 75 bp, synthetic construct
  source 1..75: mol_type = other DNA
cgcatgctgagagcgagtgggtatttttatcacgtaaggggaatccgctttctcggcaacagttttaccatatta

SEQ ID NO: 761706 - DNA, 75 bp, synthetic construct
  source 1..75: mol_type = other DNA
ctgtcctcctggcgtgaccatcatgaacgttcgccaggcgcagccgttgggcctgggacactctatcctgtgcgc

SEQ ID NO: 761707 - DNA, 75 bp, synthetic construct
  source 1..75: mol_type = other DNA
cgttgagttcatcgaaaaaccagaccaaccgcaaacgctggattccgacctgatggccgtagggcgctatgtgct

SEQ ID NO: 761708 - DNA, 75 bp, synthetic construct
  source 1..75: mol_type = other DNA
gaactggaacgtaccgagccaggcgcatgggggcgtatccaactgaccgacgccattgccgaactggcgaagaag

SEQ ID NO: 761709 - DNA, 75 bp, synthetic construct
  source 1..75: mol_type = other DNA
gaacgtgaccatcatcacctgcggcagccggaaggcggagaccagtccgctgcgtccgctgagtgaggcggcaca

SEQ ID NO: 761710 - DNA, 75 bp, synthetic construct
  source 1..75: mol_type = other DNA
gatttggggcgtttatagcgccaacaaccagctactggcttgctttcgtgtagcggaagacaacagctacagcac

SEQ ID NO: 761711 - DNA, 75 bp, synthetic construct
  source 1..75: mol_type = other DNA
ggctgaatttgcctgggatctgtttatcgcctggcagacggctggcgcgccgtcgaaagagagctgggcgttcag

SEQ ID NO: 761712 - DNA, 75 bp, synthetic construct
  source 1..75: mol_type = other DNA
ctctcaaggtagcggacttatccaccattattcaggaacaaccctctttcgtagcagaaacccgtgcgcctgaca

SEQ ID NO: 761713 - DNA, 75 bp, synthetic construct
  source 1..75: mol_type = other DNA
atgctgactgacgcaccagaacaaacaacaccagcgccagcaatgccacctacggacaaacctaatctgcatgag

SEQ ID NO: 761714 - DNA, 75 bp, synthetic construct
  source 1..75: mol_type = other DNA
acgatccgttgcaagcactcaaggatgttgggggcgggctgggagacatcgacttcccatttgacgtattcaacg

SEQ ID NO: 761715 - DNA, 75 bp, synthetic construct
  source 1..75: mol_type = other DNA
tcctccacctcggtgaaatgctccgcttccctcaggaagaggctctgtatccgggattattgcaggtgaaagatg

SEQ ID NO: 761716 - DNA, 75 bp, synthetic construct
  source 1..75: mol_type = other DNA
gaaaccgagcgcaatgccagcgaattgacccgctgggcaggcagaaaatgcccgagcggtcgggtaatggggctg

SEQ ID NO: 761717 - DNA, 75 bp, synthetic construct
  source 1..75: mol_type = other DNA
ccgccgactcactggctgaatttgcctgggatctgtttaccgcctggcagaccgctggcgcaccgtcgaagaaag

SEQ ID NO: 761718 - DNA, 75 bp, synthetic construct
  source 1..75: mol_type = other DNA
attagttggggcaaagtcagtaccaacgggcaaagccaggtaaaaagctttgctgatgctgcggcggcggaaaaa

SEQ ID NO: 761719 - DNA, 75 bp, synthetic construct
  source 1..75: mol_type = other DNA
taatcctcgaaccactctgttatctgacaaaagaactcagtaataaacttttgaccaaatatatctggtattcaa

SEQ ID NO: 761720 - DNA, 75 bp, synthetic construct
  source 1..75: mol_type = other DNA
acggttcgttgctgctggattttggcccacgccagttcaccgtcagctttgatgaaaccttaaaaccgtttgtgc

SEQ ID NO: 761721 - DNA, 75 bp, synthetic construct
  source 1..75: mol_type = other DNA
accgcaacagttatgccctgactgaagtcgaacgcaacgccagcgaactaacccgctgggcaggcagaaaatgcc

SEQ ID NO: 761722 - DNA, 75 bp, synthetic construct
  source 1..75: mol_type = other DNA
gctgcaccgcaatacgatggggcgctgggttgacatcatgggagagcagcttcgcccgctgtatgatgaactgaa

SEQ ID NO: 761723 - DNA, 75 bp, synthetic construct
  source 1..75: mol_type = other DNA
tggctattatcgacgatcttggggccatcattatcatcgctttgttctacactaatgacttatcgatggcctctc

SEQ ID NO: 761724 - DNA, 75 bp, synthetic construct
  source 1..75: mol_type = other DNA
gtgttagcccgctggaaacaacctcacggtggatatatatcacccgcggcatttattccacttgctgaaaaatgc

SEQ ID NO: 761725 - DNA, 75 bp, synthetic construct
  source 1..75: mol_type = other DNA
ggttcgacaaacgtcgctggcagattgtgaaccagaacgatcgtcaggtgctgtttgccctgagttcagatgatg

SEQ ID NO: 761726 - DNA, 75 bp, synthetic construct
  source 1..75: mol_type = other DNA
aaaaaaactcatggagggagaatctgtattctttgacacgcctaaaccattgagattattagatagaatattaca

SEQ ID NO: 761727 - DNA, 75 bp, synthetic construct
  source 1..75: mol_type = other DNA
agcggttggcggtatattaactcctgctcttatttacgtagcctttaatgccaacgatcctgaggcgatttctgg

SEQ ID NO: 761728 - DNA, 75 bp, synthetic construct
  source 1..75: mol_type = other DNA
ggtgtacgccgcacgggcgtttatattctggttggcgtggtgttgtggactgcggtgttgaaatcgggggttcac

SEQ ID NO: 761729 - DNA, 75 bp, synthetic construct
  source 1..75: mol_type = other DNA
atctttagcagtatcagcaatcgttctgtaggtgctattgaagcgaaccaggggttgtttaattatcgtccagta

SEQ ID NO: 761730 - DNA, 75 bp, synthetic construct
  source 1..75: mol_type = other DNA
attttgaaataataagtttattacaactggtacttgtatggactcttctgattattatttcatgtagtgtcggat

SEQ ID NO: 761731 - DNA, 75 bp, synthetic construct
  source 1..75: mol_type = other DNA
atgtactggagccgggtcagggtaaaacccgtaccggacggctgtgggtctatgttcgtgacgatcgcaacgccg

SEQ ID NO: 761732 - DNA, 75 bp, synthetic construct
  source 1..75: mol_type = other DNA
cagcctgtctggatttaacaagagcggcagcctttgccattcgtattatagccattgctgttctgatctgggcaa

SEQ ID NO: 761733 - DNA, 75 bp, synthetic construct
  source 1..75: mol_type = other DNA
tgaaattattctttatattcaagattataataaagggataatgccatttacgacctatgaacaccgtagtatttc

SEQ ID NO: 761734 - DNA, 75 bp, synthetic construct
  source 1..75: mol_type = other DNA
tagctgggctactcgctttactttatctgtatggctctattatcaaagaaacagctaacgcaacatttaaaaaag

SEQ ID NO: 761735 - DNA, 75 bp, synthetic construct
  source 1..75: mol_type = other DNA
aactaacgatccgctggaagtgacggtagaaactttcagcgaatggattgtcgataaaacgcagttcaaaggcac

SEQ ID NO: 761736 - DNA, 75 bp, synthetic construct
  source 1..75: mol_type = other DNA
agtgacgtgagcctgggtaaaaaggtgagcggaaaagtcagcgtggatgccgtaaacgactggggaggagtccag

SEQ ID NO: 761737 - DNA, 75 bp, synthetic construct
  source 1..75: mol_type = other DNA
aggaagtgccaccgaagccggaagtgaaggatggtgaaggcagcgtactggccatcgccatgaacacccgcgtga

SEQ ID NO: 761738 - DNA, 75 bp, synthetic construct
  source 1..75: mol_type = other DNA
tggctgcactcctttctctctctttctgcagccagtccatggctgcgttcgtgctgaacggaacccgcttcattt

SEQ ID NO: 761739 - DNA, 75 bp, synthetic construct
  source 1..75: mol_type = other DNA
acgcgtacccgcagtttggttctatggcgcgacgctttcggcaatgcactttgtgcgcattctggataacgccat

SEQ ID NO: 761740 - DNA, 75 bp, synthetic construct
  source 1..75: mol_type = other DNA
aagactttatcctcagcatgaaaccccgctttgtgaagcgtggtgcacgcccgttactgctgacgacgcttatcg

SEQ ID NO: 761741 - DNA, 75 bp, synthetic construct
  source 1..75: mol_type = other DNA
gtacagaacctaaccttgaactgctgaccgaaatgaaaccgtcgtttatggtctggtcggcaggatatggccctt

SEQ ID NO: 761742 - DNA, 75 bp, synthetic construct
  source 1..75: mol_type = other DNA
acatcatgttctgttcaccgacaatatggtgttaatttgccgcgagggaaatccactactctctttagaagatga

SEQ ID NO: 761743 - DNA, 75 bp, synthetic construct
  source 1..75: mol_type = other DNA
tcatctatcgggcgattaaaactcattatccgcagcttttactgcgcaacccccctatcagcgacgcggaaagcc

SEQ ID NO: 761744 - DNA, 75 bp, synthetic construct
  source 1..75: mol_type = other DNA
tacaacagctacaacagctacaacagctacaacagctacaacagctacaacagctacaacagctacaacagctac

SEQ ID NO: 761745 - DNA, 75 bp, synthetic construct
  source 1..75: mol_type = other DNA
gattccaaaatggtgtattgaccgtatcccttctgatgctcaaatcataggtgaaacggaattacattatcttgt

SEQ ID NO: 761746 - DNA, 75 bp, synthetic construct
  source 1..75: mol_type = other DNA
ttcggtctgtttgtgaaaacttaaagttacaaactaaaccagccttaagaattaaaagcaaacgtcaagttatca

SEQ ID NO: 761747 - DNA, 75 bp, synthetic construct
  source 1..75: mol_type = other DNA
aatggacacgctggaagcgctgagcaaaaaatggggcgataaagtggtggttgtggcggtcaataccgaccctga

SEQ ID NO: 761748 - DNA, 75 bp, synthetic construct
  source 1..75: mol_type = other DNA
cgtctggcggcgtataaagacgttgatgtgctctgttttgatcacgacaacagcaaagacatggatgcgctaatg

SEQ ID NO: 761749 - DNA, 75 bp, synthetic construct
  source 1..75: mol_type = other DNA
acccttccaatacttattgtcgcattttctatggcaaaacctcaactggcagattctgttcctcaactgccaaca

SEQ ID NO: 761750 - DNA, 75 bp, synthetic construct
  source 1..75: mol_type = other DNA
aagacctacggtggtcaggtgtggattgataacaccaaccaggggaacggcgtctacatggttccacagcccccg

SEQ ID NO: 761751 - DNA, 75 bp, synthetic construct
  source 1..75: mol_type = other DNA
ggacacagctctgccaaaggaccgtgagtccctgttctggcttaacgtccaggaagtgccaccaaaaccgaaagt

SEQ ID NO: 761752 - DNA, 75 bp, synthetic construct
  source 1..75: mol_type = other DNA
ggacagtatgcaggacgtgatcagggaaacactcgatgagctgaagcaggatcaaaaacatgagtccccccataa

SEQ ID NO: 761753 - DNA, 75 bp, synthetic construct
  source 1..75: mol_type = other DNA
caataccggtgcgggatttgaacacgacctgattgaaaaactggtcggtgaacgcctggccgccgtgcggaacaa

SEQ ID NO: 761754 - DNA, 75 bp, synthetic construct
  source 1..75: mol_type = other DNA
tggttttatggtgcgacgctctcggcaatgcactttgtgcgtattctggataacgccattggaggtaaagcgtga

SEQ ID NO: 761755 - DNA, 75 bp, synthetic construct
  source 1..75: mol_type = other DNA
gccgtcgactgttaacggcgatggcgctttctccgttgttatggcagatgaataccgcccgcgcggcggctattg

SEQ ID NO: 761756 - DNA, 75 bp, synthetic construct
  source 1..75: mol_type = other DNA
gtacagaacctaacctcgaactgctgaccgaaatgaaaccgtcgtttatggtctggtcggcgggatatggtcctt

SEQ ID NO: 761757 - DNA, 75 bp, synthetic construct
  source 1..75: mol_type = other DNA
taaatgccaggagcatcagcttaccgtgcgccgccataaccgcgtggtgcgtggagaggccgtctatcgctgcgt

SEQ ID NO: 761758 - DNA, 75 bp, synthetic construct
  source 1..75: mol_type = other DNA
agtgtaaaacatgatggtaaagatatttccctcagtgataatgtgatgaaagaaatcgcacaacttaggccattt

SEQ ID NO: 761759 - DNA, 75 bp, synthetic construct
  source 1..75: mol_type = other DNA
gacacctacggtggtcaggtgtgggtggataacgtcagtgaaggtggtggcgtgtatatggttcctactccgcca

SEQ ID NO: 761760 - DNA, 75 bp, synthetic construct
  source 1..75: mol_type = other DNA
atttcagcggtctgcggcagagagttcaagagatgtttccggaccggcaaatcagtttcaccagctacaacattt

SEQ ID NO: 761761 - DNA, 75 bp, synthetic construct
  source 1..75: mol_type = other DNA
cgcgaacaacaagtgatagccgtgatgcatgaagtgggattagatcctgaaacacgccaccgttatccggcggag

SEQ ID NO: 761762 - DNA, 75 bp, synthetic construct
  source 1..75: mol_type = other DNA
ctagatgttgaacaacttcaagttgccttccccattcgtaaagggatcttgaagcgcattgtggatcataatgtg

SEQ ID NO: 761763 - DNA, 75 bp, synthetic construct
  source 1..75: mol_type = other DNA
ataccctggaaaaacagctttatgaagtgctttcactccaccgcgggatgcgtcgggaagcggctcgtggcgaaa

SEQ ID NO: 761764 - DNA, 75 bp, synthetic construct
  source 1..75: mol_type = other DNA
ctggatgttgaacagcttcaggttgccttccccattcgcaaagggattttgagcgcattgtggatcataatgtgg

SEQ ID NO: 761765 - DNA, 75 bp, synthetic construct
  source 1..75: mol_type = other DNA
ctattcgccatcgcattcaggtggtatttcaggatcctaactcctcgctcaacccacgactcaacgttttgcaaa

SEQ ID NO: 761766 - DNA, 75 bp, synthetic construct
  source 1..75: mol_type = other DNA
ccaatggtgtcgttaaatccattgcataccctggaaaaacagctttatgaagtgctttcactccatcgcgggatg

SEQ ID NO: 761767 - DNA, 75 bp, synthetic construct
  source 1..75: mol_type = other DNA
tctttatgcgcaatatcgagacggtgagtttttcgatattgtccgcaatggtgaggagttcttcgaaacgcagag

SEQ ID NO: 761768 - DNA, 75 bp, synthetic construct
  source 1..75: mol_type = other DNA
agggcatggaagtttccattgatgtaagcacttgtgatgctgatttaggtaatcgctatttcggcaccgtcaccg

SEQ ID NO: 761769 - DNA, 75 bp, synthetic construct
  source 1..75: mol_type = other DNA
gtggagttgagcgacggcactttatcgtggttagggaacgccttgtactggatgcctctaccagaaccgccgcag

SEQ ID NO: 761770 - DNA, 75 bp, synthetic construct
  source 1..75: mol_type = other DNA
atacgtgcgctatccgctggtgccgttgcagagcgttcctgtccagtatcgcggtctgtatcagattgcgaccta

SEQ ID NO: 761771 - DNA, 75 bp, synthetic construct
  source 1..75: mol_type = other DNA
tttttccgcccatgccgctaacgccgacaattataaaaacgtgattaaccgtactggcgcgccgcagtacatgaa

SEQ ID NO: 761772 - DNA, 75 bp, synthetic construct
  source 1..75: mol_type = other DNA
ggcggtgttgcgggacctgcatttccgtgcggcaccggcaggtgaacatgtactggctgcgattcattatctggc

SEQ ID NO: 761773 - DNA, 75 bp, synthetic construct
  source 1..75: mol_type = other DNA
aaaatttgtcggtgggttttcgccatcagcaaactgttcgtaccgtagtgaatgatgtgtcactacacattgagg

SEQ ID NO: 761774 - DNA, 75 bp, synthetic construct
  source 1..75: mol_type = other DNA
tggctgaacaagcggaagtaacgtgtcatgcgggcgtcaggctgccgttaacgtgtcatgcgggcgtcaggctgc

SEQ ID NO: 761775 - DNA, 75 bp, synthetic construct
  source 1..75: mol_type = other DNA
gtggaactcaaaactatccctgtggatagtcttggtcgtccgctggaaacgacattcgtttgtgttgcaccatta

SEQ ID NO: 761776 - DNA, 75 bp, synthetic construct
  source 1..75: mol_type = other DNA
aagaattaatggatatgattgttctcggtcaggttgagcggatcaccgctcgtcacggggaatatttacagatac

SEQ ID NO: 761777 - DNA, 75 bp, synthetic construct
  source 1..75: mol_type = other DNA
tcgttaatgcagcgaaagtgcttaatctgaccccctcggcaatcagtcagtctattcagaaactgcgcgttatat

SEQ ID NO: 761778 - DNA, 75 bp, synthetic construct
  source 1..75: mol_type = other DNA
gaaaacaaagcggaaaataccgttatccgcaaagttacgctggacgatctggagttcagcgacattatcgccctg

SEQ ID NO: 761779 - DNA, 75 bp, synthetic construct
  source 1..75: mol_type = other DNA
cactgccaccctgaaacttcagtgcgcctgcgtcaccgcctctccggccggcatcgccgccatcatccgggagct

SEQ ID NO: 761780 - DNA, 75 bp, synthetic construct
  source 1..75: mol_type = other DNA
tgctcgacgagccgcacgaatgcgctgcagttttacaacagattgctgctatccgtggcgcggtaaacggtctga

SEQ ID NO: 761781 - DNA, 75 bp, synthetic construct
  source 1..75: mol_type = other DNA
ggttcctgaacaagcgagcaagaaagcggctaaataccaaactattcaggattcagccatacccaaaaagcagtt

SEQ ID NO: 761782 - DNA, 75 bp, synthetic construct
  source 1..75: mol_type = other DNA
atcatacttctttcgaactaatcaataaaaagaaaataggcaagtattataggagtgttaagtatggggagtcaa

SEQ ID NO: 761783 - DNA, 75 bp, synthetic construct
  source 1..75: mol_type = other DNA
ctcctcccgaaacagaagcacagttgttagcgcaagcacagcaactttccggttatacactgggtgaactggcgg

SEQ ID NO: 761784 - DNA, 75 bp, synthetic construct
  source 1..75: mol_type = other DNA
ggcgaacggattctgacgctgccacgcggcttttatttgaagaaaaatttcaccagtgcactactggcccgtcat

SEQ ID NO: 761785 - DNA, 75 bp, synthetic construct
  source 1..75: mol_type = other DNA
ggcttgatgcgagaagtgattaaaggccatctgacggaacacattgttcatcagggcgatgaattaaagcgtgaa

SEQ ID NO: 761786 - DNA, 75 bp, synthetic construct
  source 1..75: mol_type = other DNA
atggcttttcgtgcaggttaaatcaggggacgagtttattactggatggattacacgaacatacacaaagcctct

SEQ ID NO: 761787 - DNA, 75 bp, synthetic construct
  source 1..75: mol_type = other DNA
tgccgggattctgccgtggaaacagggcgaagcactggaggcagtgaaagcgatgtttgatgcgtgggcgggtta

SEQ ID NO: 761788 - DNA, 75 bp, synthetic construct
  source 1..75: mol_type = other DNA
ttccccgctggaagtcatcgccatgaccagcgacagcaaagacgaaaactacgggcgattactccgttttctcac

SEQ ID NO: 761789 - DNA, 75 bp, synthetic construct
  source 1..75: mol_type = other DNA
tcgacgcgctgctgcgcgacacgtttctgacggtggtggaactgcgtcagggaaccaccgtgcgtcacggtatcg

SEQ ID NO: 761790 - DNA, 75 bp, synthetic construct
  source 1..75: mol_type = other DNA
gtgcgccctgctggacgaaacagtcctgagtcgtggcggcatggacgacggtcaggccatctggatgaagaatcc

SEQ ID NO: 761791 - DNA, 75 bp, synthetic construct
  source 1..75: mol_type = other DNA
ttgcatgtcggcccttctttaaatagtgaagtgattgaatgcattggcaaaaacacaattgttgctattttagat

SEQ ID NO: 761792 - DNA, 75 bp, synthetic construct
  source 1..75: mol_type = other DNA
agcaatgaactggctgttctggctacagggggctgcgccgttcctcggcggtggttttggtcacttttaccatta

SEQ ID NO: 761793 - DNA, 75 bp, synthetic construct
  source 1..75: mol_type = other DNA
ctgaacgagcagttgcatgagcgccatgacgccagtgatttcgagacaaatacggaagataagcgtcaggggtaa

SEQ ID NO: 761794 - DNA, 75 bp, synthetic construct
  source 1..75: mol_type = other DNA
cgaaagtctggacgtgggataaatcctctggcggcgcgttcgccaatatcaatcgcccgatgtctggcccgacac

SEQ ID NO: 761795 - DNA, 75 bp, synthetic construct
  source 1..75: mol_type = other DNA
cggtcacatccgggaagcgaaaaccaccacgcaagaaacaccccaaagtcagcccggcgcgtccgggctacgcca

SEQ ID NO: 761796 - DNA, 75 bp, synthetic construct
  source 1..75: mol_type = other DNA
ctggcggcgcgttcgccaatatcaatcgcccggtttctggtccgacgcatgaaaaaacgctgcccgttggcaaac

SEQ ID NO: 761797 - DNA, 75 bp, synthetic construct
  source 1..75: mol_type = other DNA
gcggagaaatttggctacttcctgccgcaggatctggcaaagcgtactgaaacgatgaactggctgttctggtta

SEQ ID NO: 761798 - DNA, 75 bp, synthetic construct
  source 1..75: mol_type = other DNA
actggcgctgctactggcgggcgtctggtgggggctacaccactggctgaatgtactggtggatgaactgctgcc

SEQ ID NO: 761799 - DNA, 75 bp, synthetic construct
  source 1..75: mol_type = other DNA
cgcgatctgaccgatgccgccgtgaaaatggtacgcgtccaggctatcgagaaaaaccgttatcgcgctgaagaa

SEQ ID NO: 761800 - DNA, 75 bp, synthetic construct
  source 1..75: mol_type = other DNA
caatcggtcgatgccccgctgctttctgaaaccgcgcgtcgtttcaacgtcaataacaacattattagtgcgcag

SEQ ID NO: 761801 - DNA, 75 bp, synthetic construct
  source 1..75: mol_type = other DNA
caacaagatacgcaagccgccattgcctggctgcaagaacaccatgtaaaagtagaggtactaggttatgtctga

SEQ ID NO: 761802 - DNA, 75 bp, synthetic construct
  source 1..75: mol_type = other DNA
ttatctaaaggggaagcaacaccagaaagtgagtcaactacttctgcaaaggatgaagaagaacaaccgaaggca

SEQ ID NO: 761803 - DNA, 75 bp, synthetic construct
  source 1..75: mol_type = other DNA
acgccagcgatttaagcggtcaaactatcactattgacgcagattatgtgagcaaacatctggatgcgttggtgg

SEQ ID NO: 761804 - DNA, 75 bp, synthetic construct
  source 1..75: mol_type = other DNA
ccgtcgtctggctaagctggcgaatgcgccgttcatcaaagttgaagcgaccaaattcaccgaagtgggctatgt

SEQ ID NO: 761805 - DNA, 75 bp, synthetic construct
  source 1..75: mol_type = other DNA
tcgaatggattgttgtcgatggcggttccaacgacggcacccgtgagtatctggaaaatctcaatggtatctata

SEQ ID NO: 761806 - DNA, 75 bp, synthetic construct
  source 1..75: mol_type = other DNA
aggacgttatcgactactggcagtggttggcgggctattatgcgttctgttactggcaatggtcggctggaaaag

SEQ ID NO: 761807 - DNA, 75 bp, synthetic construct
  source 1..75: mol_type = other DNA
gctggtaacgctgacgctgctactggccggtgtctggtggggactgcaccactggctgaacgtgctggtggatga

SEQ ID NO: 761808 - DNA, 75 bp, synthetic construct
  source 1..75: mol_type = other DNA
gagaccacaaagctcagcaggaagagatcactactatggccgatcaatcttctgcggaactgagcagtaataacg

SEQ ID NO: 761809 - DNA, 75 bp, synthetic construct
  source 1..75: mol_type = other DNA
gcctgagcggtgcctggtggtggcaagaccacaaagctcagcaggaagagatcaccactatggccgatcaatctt

SEQ ID NO: 761810 - DNA, 75 bp, synthetic construct
  source 1..75: mol_type = other DNA
agtttcttccgattacgcgctggcagccaaaatgtataaagccggttatgcatttaaaaaactcaatggcctggt

SEQ ID NO: 761811 - DNA, 75 bp, synthetic construct
  source 1..75: mol_type = other DNA
atcccaaacctgactctttaatcagcgaacatccgacagctttggaagcgatggatgcgaaaaaacgctatgagg

SEQ ID NO: 761812 - DNA, 75 bp, synthetic construct
  source 1..75: mol_type = other DNA
tgtgtttgcccagcaaatggctgtaccggaactacaccaacaggtgacagatcttactgatacgttaagttcacc

SEQ ID NO: 761813 - DNA, 75 bp, synthetic construct
  source 1..75: mol_type = other DNA
atattactggtaccttaagcacgtctgaacaacaatcactaacacaacagctgcaggatattacacaaaaaacac

SEQ ID NO: 761814 - DNA, 75 bp, synthetic construct
  source 1..75: mol_type = other DNA
tcaacgacaaaacacttcaccaagggatacaactggcacaatctcgctactggcaaaccggcgatatgtatcagg

SEQ ID NO: 761815 - DNA, 75 bp, synthetic construct
  source 1..75: mol_type = other DNA
ttctattcactttgtggtgccttcctgggcttgcccagcaaattgctgtgccggagctgcgccaacaggtgaccg

SEQ ID NO: 761816 - DNA, 75 bp, synthetic construct
  source 1..75: mol_type = other DNA
aaaaagctacgcgccaaatacaaaaaactcagtaaagatagagcttcaagaaaaggttcttcttcatcctcttcc

SEQ ID NO: 761817 - DNA, 75 bp, synthetic construct
  source 1..75: mol_type = other DNA
gttgcctgcggtatgctcacgccttttgctatcgtaccactgcttattttttggcttatcgttaataaaaagcta

SEQ ID NO: 761818 - DNA, 75 bp, synthetic construct
  source 1..75: mol_type = other DNA
cggggattatcagcggttctgcagagacattcagcgtgtatctggaacagcagatagaatcgctgattgtctggc

SEQ ID NO: 761819 - DNA, 75 bp, synthetic construct
  source 1..75: mol_type = other DNA
ggcctggctgaagagctgcggctggcaggtgtggaaaaagccgatccggctgactttctgaagctgaaggccgag

SEQ ID NO: 761820 - DNA, 75 bp, synthetic construct
  source 1..75: mol_type = other DNA
gccagtacaacaacatatcatttctgtgatggagggcgggcgggaggcctttgagcggcgcagggaagtttacag

SEQ ID NO: 761821 - DNA, 75 bp, synthetic construct
  source 1..75: mol_type = other DNA
gggaaatagcaacgtaactcaacagattgttgatattctgaaaaaaaatagtaaaaatactcctatcatgctgag

SEQ ID NO: 761822 - DNA, 75 bp, synthetic construct
  source 1..75: mol_type = other DNA
atgaaaattttagttactggcgctgcagggtttatcggtcgaaatttggtattccggcttaaggaagctggatat

SEQ ID NO: 761823 - DNA, 75 bp, synthetic construct
  source 1..75: mol_type = other DNA
ggtgtgatcaccaatcacaataaatttgatcccggcgagtttaaggcactgcgtaaagccgcgcgccgtgaaggc

SEQ ID NO: 761824 - DNA, 75 bp, synthetic construct
  source 1..75: mol_type = other DNA
atggtgaattaccggaaggcagggggaattattacagtatcaatccccctatcccattttcgcttgctgtactta

SEQ ID NO: 761825 - DNA, 75 bp, synthetic construct
  source 1..75: mol_type = other DNA
tgctttcgccagaagaattagcgatgctggacaaagcgtatccggcaccaaaagtaaaaactgcgctggatatgg

SEQ ID NO: 761826 - DNA, 75 bp, synthetic construct
  source 1..75: mol_type = other DNA
ttatcatcttggctcacggggtattgagttcgatttactcccctggtgccagcaacagcagatgccggtgatggc

SEQ ID NO: 761827 - DNA, 75 bp, synthetic construct
  source 1..75: mol_type = other DNA
gcgcattgtagaaagcgttctgccgtcactgccgaaacgcccgcaggtgatcctctccgccaacgatgatatggc

SEQ ID NO: 761828 - DNA, 75 bp, synthetic construct
  source 1..75: mol_type = other DNA
aaaaggaaaaccagggcagaccgtaacctggtatcagctcagagccgatcatcccaaacctgactctttaatcag

SEQ ID NO: 761829 - DNA, 75 bp, synthetic construct
  source 1..75: mol_type = other DNA
gcgatggttggctgatgactttcacctggctggtgctgtttgtggtgattggcctgagcggcgcctggtggtggc

SEQ ID NO: 761830 - DNA, 75 bp, synthetic construct
  source 1..75: mol_type = other DNA
tccctcggcaaacgccgcaaaaaacgcgatggttggctgatgactttcacctggctggtgctgtttgtggtgatt

SEQ ID NO: 761831 - DNA, 75 bp, synthetic construct
  source 1..75: mol_type = other DNA
ccgctgttgtgttttaccgcagcagctacacgcctgcgtctctccacgttaggctttttccagtatattggtccg

SEQ ID NO: 761832 - DNA, 75 bp, synthetic construct
  source 1..75: mol_type = other DNA
ccacgcgcttgcgtctctcaacgttaggctttttccagtacattggcccgacgctgatgttcctgctggctgtga

SEQ ID NO: 761833 - DNA, 75 bp, synthetic construct
  source 1..75: mol_type = other DNA
gcgtattactcgctcttgccgcttattttatttggggtattgcgccagcgtacttcaagttgatttactacgtgc

SEQ ID NO: 761834 - DNA, 75 bp, synthetic construct
  source 1..75: mol_type = other DNA
accttgcccaggcgctgatttgccgttcagacttgctgctgctcgacgaaccgactaaccaccttgacctcgaca

SEQ ID NO: 761835 - DNA, 75 bp, synthetic construct
  source 1..75: mol_type = other DNA
gccagcgccaaatccggcctggaagagtgcgaaatggcatggctggaagcccaggagcagcttgagcagatgttg

SEQ ID NO: 761836 - DNA, 75 bp, synthetic construct
  source 1..75: mol_type = other DNA
ctggcagtctctgccgtgctgattggcggcaactggctactgtttatctgggcggtgaacaatcaccatatgctg

SEQ ID NO: 761837 - DNA, 75 bp, synthetic construct
  source 1..75: mol_type = other DNA
cgacctcgaggagcaatatcagcttggcactgaagcagctctgaaacctcacctgcgcacaatcatcattctcaa

SEQ ID NO: 761838 - DNA, 75 bp, synthetic construct
  source 1..75: mol_type = other DNA
aacgggcgtgcgattcgtgcttatgagcgatgtggtttcattgaatctccgtataccattatgaaagtgggttta

SEQ ID NO: 761839 - DNA, 75 bp, synthetic construct
  source 1..75: mol_type = other DNA
atgtgggatgcatctataatgaagagtctcaaacggtagagttgttaattaacccagcattaaaagaaaatatta

SEQ ID NO: 761840 - DNA, 75 bp, synthetic construct
  source 1..75: mol_type = other DNA
catttcagtattatctataaccagccgccactatttagctttaccagaatgatcgacaaaggcttgggtattttg

SEQ ID NO: 761841 - DNA, 75 bp, synthetic construct
  source 1..75: mol_type = other DNA
ggactgtgtgctggatctggcgcgcaaactttctatcagtattgttgccgaaggtgtcgaaacgaaggagcaact

SEQ ID NO: 761842 - DNA, 75 bp, synthetic construct
  source 1..75: mol_type = other DNA
gggacagcttcacgcgccatgatttgaatctcgttcttgaggttactgagcgtgaagctttgcatgttgatgaaa

SEQ ID NO: 761843 - DNA, 75 bp, synthetic construct
  source 1..75: mol_type = other DNA
attttcttatcgccattcttaatacatggtttctggtgcaacaaattaaaaccagaaaaacactggctatatctc

SEQ ID NO: 761844 - DNA, 75 bp, synthetic construct
  source 1..75: mol_type = other DNA
gcatcactattcagcgacgaacagccacccagtcaccaaccacaggggcaatggaatacacctggaatgaccttg

SEQ ID NO: 761845 - DNA, 75 bp, synthetic construct
  source 1..75: mol_type = other DNA
tccgacctacgttcggcacccgtaggctggataagatgcgccagcatcgcatccggcaacgcgcacaggataaca

SEQ ID NO: 761846 - DNA, 75 bp, synthetic construct
  source 1..75: mol_type = other DNA
aaaaccattacctcgtcatgatagtgaatacacacctgatgtgaatgaaaatgtgggatgcatctataatgaaga

SEQ ID NO: 761847 - DNA, 75 bp, synthetic construct
  source 1..75: mol_type = other DNA
aaagggtatgttatgggtgactggaattttgctaaaaataacaccttgcatgccgggagttattcagcctttcgc

SEQ ID NO: 761848 - DNA, 75 bp, synthetic construct
  source 1..75: mol_type = other DNA
gttagcggtagctcagggcgaaccatacgtttagtccagtcagaacgtgtctttttaccgttgacacaatatgcc

SEQ ID NO: 761849 - DNA, 75 bp, synthetic construct
  source 1..75: mol_type = other DNA
aaggttttcatattggaattaattttagcgcttcgcatattatttcgccgacgtttgtcgacgagtgtttaaatt

SEQ ID NO: 761850 - DNA, 75 bp, synthetic construct
  source 1..75: mol_type = other DNA
ttctgatggtgaatacctgcatgcagctattgtttccgcagctgtatatttcgctgcagagcttcgcaaaggagg

SEQ ID NO: 761851 - DNA, 75 bp, synthetic construct
  source 1..75: mol_type = other DNA
tatggagcgtggtggattcagtgatgcgcttaacgaaatcaaaaccccagccaccgatgctttcctgtctgaagt

SEQ ID NO: 761852 - DNA, 75 bp, synthetic construct
  source 1..75: mol_type = other DNA
acgcgacggttgccgggctggacgatggcgacatcgttacggtgaaagaagcgacggacgccctgctgcattgtg

SEQ ID NO: 761853 - DNA, 75 bp, synthetic construct
  source 1..75: mol_type = other DNA
cagaaagcgattgagtcaattaagcaggctgatgcggctgttaagttggcacacgagaagttttcggcgctagcg

SEQ ID NO: 761854 - DNA, 75 bp, synthetic construct
  source 1..75: mol_type = other DNA
tggatggatttctgaaaggtaaatgcatcccgcgagatttaaaggttaacgaaacaaacgctgaatatctggtgc

SEQ ID NO: 761855 - DNA, 75 bp, synthetic construct
  source 1..75: mol_type = other DNA
gcatatgcagtcgagcggttcgttaacatttggagattgctacatatcacttaacgagttcgccgcccagcttcg

SEQ ID NO: 761856 - DNA, 75 bp, synthetic construct
  source 1..75: mol_type = other DNA
acattttgaacatccagctctggtattccgcaaaagcagagtacctggcgggagcgagatatgccgccaacaata

SEQ ID NO: 761857 - DNA, 75 bp, synthetic construct
  source 1..75: mol_type = other DNA
tgagaaggttcactccacaagatatcatttcactattatctttaacccaccaccattctttagcttctacagact

SEQ ID NO: 761858 - DNA, 75 bp, synthetic construct
  source 1..75: mol_type = other DNA
cgcctcgcatattatttcgccgacatttgtcgacgagtgcttaaattaccgtgacagttttacccgtcgcgattt

SEQ ID NO: 761859 - DNA, 75 bp, synthetic construct
  source 1..75: mol_type = other DNA
cgcgttgaaattgattttaatgggttttctttttttattgagataattgataataatgtttttgttacatttgct

SEQ ID NO: 761860 - DNA, 75 bp, synthetic construct
  source 1..75: mol_type = other DNA
agatgatgcgcgaacatccatcaatcaaactttgttctttgacgcacatatgtgatgagttagccgcccagcttc

SEQ ID NO: 761861 - DNA, 75 bp, synthetic construct
  source 1..75: mol_type = other DNA
ccttttgctttagatcgcaaatacccttctgcttatcgacaagcggcgtggatgtttgtctttccctccagcacg

SEQ ID NO: 761862 - DNA, 75 bp, synthetic construct
  source 1..75: mol_type = other DNA
ctaccagattttcgagcacacgcactcaaaaatttggttaaagaatctctaaaaatcgaagaactaccgttcata

SEQ ID NO: 761863 - DNA, 75 bp, synthetic construct
  source 1..75: mol_type = other DNA
gctgttgcgcacagagataccaggtggcttttcaccggaagaagcgcaggcactcctggataatctggtgcgcag

SEQ ID NO: 761864 - DNA, 75 bp, synthetic construct
  source 1..75: mol_type = other DNA
atgacaaacatgatctcatatcagggacttgttcgcaccttccctagaattatgggcctggttaaatggtttaac

SEQ ID NO: 761865 - DNA, 75 bp, synthetic construct
  source 1..75: mol_type = other DNA
gccctgcttaccgctaaacacatgaacccggaaatgatcgctcaggcaacgcaggcgcatacggccctgatgacc

SEQ ID NO: 761866 - DNA, 75 bp, synthetic construct
  source 1..75: mol_type = other DNA
tggttatacttctgtcatatacaaaattcctttacgccaataaaaaagttgtagaatacaaatcatcaaataaaa

SEQ ID NO: 761867 - DNA, 75 bp, synthetic construct
  source 1..75: mol_type = other DNA
gagtgcatccagcagcagcttgccacacatttggactcagtggcgtttgactcagtggctagcgagtctctcgat

SEQ ID NO: 761868 - DNA, 75 bp, synthetic construct
  source 1..75: mol_type = other DNA
aggcacgcttatcagccgaaatggtaacgcaattgcaggagctgcatttgccggtggactttcttcacttgccgg

SEQ ID NO: 761869 - DNA, 75 bp, synthetic construct
  source 1..75: mol_type = other DNA
acgatacccggtgtacgaacctgtacggaatgccagcgggtactggaaatccggcaaaaacactgcctgaggagg

SEQ ID NO: 761870 - DNA, 75 bp, synthetic construct
  source 1..75: mol_type = other DNA
ggaacgaattgctccggcgattgctaaagggctggtgaaacgcaaagaacaaggtaatgcatccccactgaacat

SEQ ID NO: 761871 - DNA, 75 bp, synthetic construct
  source 1..75: mol_type = other DNA
ccgtcatagctatcaggttcatgtggtcggtgaaaccgagcaggtagataccgtttccggcgtcaatgctgtcag

SEQ ID NO: 761872 - DNA, 75 bp, synthetic construct
  source 1..75: mol_type = other DNA
gggagtcagttgtatcgcaggacaatggcgaacgctattcccgtctaattgaaaaatctgctgtttctgcgctgg

SEQ ID NO: 761873 - DNA, 75 bp, synthetic construct
  source 1..75: mol_type = other DNA
ttgatgaaattgatactaataaagactatggtcactatgagcctgagaaatacaactgcgtctatattgatgatg

SEQ ID NO: 761874 - DNA, 75 bp, synthetic construct
  source 1..75: mol_type = other DNA
atgcaggactgtcagttgaggatatcaagcggcaggtgatggaaagcagtgaagaggaaattgattatcagatat

SEQ ID NO: 761875 - DNA, 75 bp, synthetic construct
  source 1..75: mol_type = other DNA
atgatacagaaacgaccgcccgtgcgaatgttgtccgttatctgctgatagttgcagtgcggtcgcagtttgatc

SEQ ID NO: 761876 - DNA, 75 bp, synthetic construct
  source 1..75: mol_type = other DNA
gggcgcttatattgcctcgtcgattgccgataaaccggctttcgctccggcgtttctggtttgttatctggcgaa

SEQ ID NO: 761877 - DNA, 75 bp, synthetic construct
  source 1..75: mol_type = other DNA
ttcggctgataatacagactattacgcaaatgcaggtacggcttcgaatattatgattgagttacaagaccagtc

SEQ ID NO: 761878 - DNA, 75 bp, synthetic construct
  source 1..75: mol_type = other DNA
aaaggagactttcatccgtcagacaaataccggcagagcgatatagaactggcacggcagcttcatcagtgtggt

SEQ ID NO: 761879 - DNA, 75 bp, synthetic construct
  source 1..75: mol_type = other DNA
ccaccggccaaagcactaccgtctggtaaagaccggtgagctcattgggatggacgccattgagctcagaatggg

SEQ ID NO: 761880 - DNA, 75 bp, synthetic construct
  source 1..75: mol_type = other DNA
ttcttgttatcattacaggaatttatgcatttttgacatacaagatgtcgagaataagcgaacgaacagctcaga

SEQ ID NO: 761881 - DNA, 75 bp, synthetic construct
  source 1..75: mol_type = other DNA
tgggtagtggttctcagaccacccgtggtgcgcagactggctacaccgcctacaacatggacgcaccgcagaact

SEQ ID NO: 761882 - DNA, 75 bp, synthetic construct
  source 1..75: mol_type = other DNA
ttatcggacgaactgaagcggcagtgagaacgaaggcacgggagctgggcatcagcatgatgttacgtggtgatt

SEQ ID NO: 761883 - DNA, 75 bp, synthetic construct
  source 1..75: mol_type = other DNA
ggtgatacgacagctacatgagcagggcatttcaggtcgcgagatagcggaaaaattcgaaatgccgctgcgcac

SEQ ID NO: 761884 - DNA, 75 bp, synthetic construct
  source 1..75: mol_type = other DNA
gtgagtggctggaagaagtggtgccgtgcggaaattatgatactccggcagtgtgcgggagcgatgacagtcgaa

SEQ ID NO: 761885 - DNA, 75 bp, synthetic construct
  source 1..75: mol_type = other DNA
cggcgtgaaatagccagaaaattcggtatgccgctgcgtacagtgaataactacgtctatttctacaggagggtt

SEQ ID NO: 761886 - DNA, 75 bp, synthetic construct
  source 1..75: mol_type = other DNA
ttacggggtgattttcacccgtcggcaaaatattcacagcgtgatattgagctggcgcggcaactgcatcagcgt

SEQ ID NO: 761887 - DNA, 75 bp, synthetic construct
  source 1..75: mol_type = other DNA
atcgccagaaaatttggaatgccgctgcgcacagtgaataactacgtttatttcgacaggagggtgtctgcgtga

SEQ ID NO: 761888 - DNA, 75 bp, synthetic construct
  source 1..75: mol_type = other DNA
atgaaacatgtactgaatatcgcgctgatggctgttgttattcttggcctggctatgcttgaggccaccaactgg

SEQ ID NO: 761889 - DNA, 75 bp, synthetic construct
  source 1..75: mol_type = other DNA
aaactgtcgtcacggataagaatatacaacatttctgataacaaaaacatcataacgtgtttcagatatgttccg

SEQ ID NO: 761890 - DNA, 75 bp, synthetic construct
  source 1..75: mol_type = other DNA
catcgcttatgctgttaaccagttgtttattaatttccaatgcaacgctggcgaaaacaacattaaaactcagtc

SEQ ID NO: 761891 - DNA, 75 bp, synthetic construct
  source 1..75: mol_type = other DNA
atgtttatcgctatcatgttcgtaaggctggattaaccggagagaaatcacctcacagtatgcgttaccattttt

SEQ ID NO: 761892 - DNA, 75 bp, synthetic construct
  source 1..75: mol_type = other DNA
cttgattcagggcatgattctcttctcgttgtttttgggacgaaaggtggaaggcccagagatacaacgatcatt

SEQ ID NO: 761893 - DNA, 75 bp, synthetic construct
  source 1..75: mol_type = other DNA
aaaagatggacgacttaaaatcgcagatccttctaacccattattgagtaatgaagcgctcggcctaaaggatac

SEQ ID NO: 761894 - DNA, 75 bp, synthetic construct
  source 1..75: mol_type = other DNA
ctaccgaaatatctggaaaatatcgctcgtggcgatgtaaccgcgaatgcccgcccggaatgcttaacaagtgaa

SEQ ID NO: 761895 - DNA, 75 bp, synthetic construct
  source 1..75: mol_type = other DNA
aagtgcgttggttagctgccgggctgctggaacttaatggctgtgatgccgatatcgctcaggatgtggcggaac

SEQ ID NO: 761896 - DNA, 75 bp, synthetic construct
  source 1..75: mol_type = other DNA
cccgcaatgtagcgatgacgatggcctgatcattagctctgcgatgacagttcttaagaaaaaggaaccgtatca

SEQ ID NO: 761897 - DNA, 75 bp, synthetic construct
  source 1..75: mol_type = other DNA
gcaaaaacaacattaaaactgagtcataatcaggataaaagccatgctgtccataaagcattaagctatttagcg

SEQ ID NO: 761898 - DNA, 75 bp, synthetic construct
  source 1..75: mol_type = other DNA
gctgcgccgggacaattgatcgatgcacagggaaatccgagtatcgatcctggagtgctattcagcaatccgcca

SEQ ID NO: 761899 - DNA, 75 bp, synthetic construct
  source 1..75: mol_type = other DNA
ataaaggatttggcctggcactgatgattgaaatgatggcggggatcttatctggtggtgacacgatcgccgaag

SEQ ID NO: 761900 - DNA, 75 bp, synthetic construct
  source 1..75: mol_type = other DNA
aactccccgaagaggtcaggcgctggctggagcgggcgctgaccgacagcggcttcagcggttatgccgaactgg

SEQ ID NO: 761901 - DNA, 75 bp, synthetic construct
  source 1..75: mol_type = other DNA
cccgatacgccgatctactgtactgccaacgctatcgactcgataaatggtcatcaccatcatccggagtggaat

SEQ ID NO: 761902 - DNA, 75 bp, synthetic construct
  source 1..75: mol_type = other DNA
cttgccggtcgatatgattgccacctctcacggtgtggtgtggcgcgataacccgacgcagattgtcgagctgta

SEQ ID NO: 761903 - DNA, 75 bp, synthetic construct
  source 1..75: mol_type = other DNA
aggacgctctggagttatgtcgtgaacacggtcgcgaaatcgcccgtcagtgggcgctcgcgccgctgccgcaga

SEQ ID NO: 761904 - DNA, 75 bp, synthetic construct
  source 1..75: mol_type = other DNA
ttgagcgacggcactttatcgtggttagggaacgccttgttctggatgccgctaccagaaccgccgcaggaggtg

SEQ ID NO: 761905 - DNA, 75 bp, synthetic construct
  source 1..75: mol_type = other DNA
atatgcgcccggcacaggtgataaaccattttcagattagcgaatcgacgctatggaactgggttaaaaaaggta

SEQ ID NO: 761906 - DNA, 75 bp, synthetic construct
  source 1..75: mol_type = other DNA
gaataacacccgcatgatggctgacgctatcgcccaggggattgcggaaaccgacccacgcgtggcggtgaaaat

SEQ ID NO: 761907 - DNA, 75 bp, synthetic construct
  source 1..75: mol_type = other DNA
tcagaccgagctgttcgagagcatcgtccagctgcaggaagcggaagaaggcgaagtcgaccccaaagagcgcgt

SEQ ID NO: 761908 - DNA, 75 bp, synthetic construct
  source 1..75: mol_type = other DNA
ggccctgctgtcgaaggtggcgaagaatgtggctacgctgtcccgcgcgtccgtcaacctcaaaaagttccagtc

SEQ ID NO: 761909 - DNA, 75 bp, synthetic construct
  source 1..75: mol_type = other DNA
ttctaacgaaaaaaatgggaagtattttactaactggtatagaaaagattgtttcaaggaaaacatgatagtaga

SEQ ID NO: 761910 - DNA, 75 bp, synthetic construct
  source 1..75: mol_type = other DNA
accagaccaacctgaccttcgctataggctgggccgatggtactgcagatcctactgctgcaacagtcggtgacc

SEQ ID NO: 761911 - DNA, 75 bp, synthetic construct
  source 1..75: mol_type = other DNA
gtcattgatggtcaacaacggctgacgaccgcaatgttgctgattgaggctttatcgcgccatcttggcgaagac

SEQ ID NO: 761912 - DNA, 75 bp, synthetic construct
  source 1..75: mol_type = other DNA
ggaagtcgcctttggtcagcaaggttacagcgaattgaggtgtactggcaatagcggacactaccatttgttctt

SEQ ID NO: 761913 - DNA, 75 bp, synthetic construct
  source 1..75: mol_type = other DNA
gctgctgcggcagcgaaagaagtcaacgtgcctgacatcggcggtgatgaagttgaagtcactgaaatcctggtg

SEQ ID NO: 761914 - DNA, 75 bp, synthetic construct
  source 1..75: mol_type = other DNA
tgaacgttatgttctgggtgatttttattctgatttttatcggactggcgttacaagactccggcgcccgaatga

SEQ ID NO: 761915 - DNA, 75 bp, synthetic construct
  source 1..75: mol_type = other DNA
ccgacgcccaattttaatggtggcgtgaacgttatgttctgggtgattttcatcctgatttttgtcggactggcg

SEQ ID NO: 761916 - DNA, 75 bp, synthetic construct
  source 1..75: mol_type = other DNA
ttcttgcagtttttttcactctatatcctgccggtcatttgtattgctgctgggtatgtgtttttttctctgctt

SEQ ID NO: 761917 - DNA, 75 bp, synthetic construct
  source 1..75: mol_type = other DNA
accgaactgcgtcgtctgcggcaactggaggatgaaaatcagcgcctgaagaaactggtcgcagatttgagtctg

SEQ ID NO: 761918 - DNA, 75 bp, synthetic construct
  source 1..75: mol_type = other DNA
aaagatgtacaggtcgaaatgattctgcgcttcgccacgccgcgcacatcactactggaaaccaaaatcaccagc

SEQ ID NO: 761919 - DNA, 75 bp, synthetic construct
  source 1..75: mol_type = other DNA
gcaccggatacggtttgatgtctggctggtcgttaaacgggatcacgccattatttcgttcttcgatcaggggat

SEQ ID NO: 761920 - DNA, 75 bp, synthetic construct
  source 1..75: mol_type = other DNA
ccacttctacaaaaagagatgggcgctgtcctgtggaccccggagaagggtgaggaaaatattcatcttgcagaa

SEQ ID NO: 761921 - DNA, 75 bp, synthetic construct
  source 1..75: mol_type = other DNA
ttgccgagtgtgtgcttgtatcacccgatgaagctccatcaaaagcattagatctctgttggaagttcggttccg

SEQ ID NO: 761922 - DNA, 75 bp, synthetic construct
  source 1..75: mol_type = other DNA
gacccacaatttgaagaaaataatcgggcgctggccgctattttctttctggcaaaaataccggcggctcgtcat

SEQ ID NO: 761923 - DNA, 75 bp, synthetic construct
  source 1..75: mol_type = other DNA
aggtgttgaggatcaactcattctggagaaggctaaaggggaagaggggttaacgcgtgaacagattgagtcacg

SEQ ID NO: 761924 - DNA, 75 bp, synthetic construct
  source 1..75: mol_type = other DNA
ttgctgttttgaaaaggattttgggttgggtgatttttataccgacacttgtttccacgttaatttccttgctga

SEQ ID NO: 761925 - DNA, 75 bp, synthetic construct
  source 1..75: mol_type = other DNA
gtaacattcgacgatcagtttatggattgcttattgttcttatcgccggaaatgtgtggttaggccttagagctg

SEQ ID NO: 761926 - DNA, 75 bp, synthetic construct
  source 1..75: mol_type = other DNA
atggctaaacagaagtgtacctggttatttgcggcgatcaaccgcagtcaacgtaatgcccgtccggtgatgtta

SEQ ID NO: 761927 - DNA, 75 bp, synthetic construct
  source 1..75: mol_type = other DNA
ggaagcatttgaaaattcctataaattatttagcctgccttatttgttccgcgatcgtgatcattattatcaggt

SEQ ID NO: 761928 - DNA, 75 bp, synthetic construct
  source 1..75: mol_type = other DNA
tgctggtagatggtcgtctaatctataccgccagcgacctgaaagtcggtctgttccaggatacttctgcattct

SEQ ID NO: 761929 - DNA, 75 bp, synthetic construct
  source 1..75: mol_type = other DNA
atggccattacgttggctgaactggtttattccgaactgatcggacttgttcagcgtacacgtgttagctatcct

SEQ ID NO: 761930 - DNA, 75 bp, synthetic construct
  source 1..75: mol_type = other DNA
ctccggctgcgaaagccgaaggcaaatctgaatttgctgaaaacgacgcttacgttcacgcgactccgctgatcc

SEQ ID NO: 761931 - DNA, 75 bp, synthetic construct
  source 1..75: mol_type = other DNA
ttggacttgcgttgcaagattccggtgcccgtatgagccgccaggcgcgtttcttacgtgaaggtgttgaggatc

SEQ ID NO: 761932 - DNA, 75 bp, synthetic construct
  source 1..75: mol_type = other DNA
gtcgccaggcgcgcttcttgcgggaaggtgttgaagatcaactcattctggaaaaagccaaaggggaagaggggc

SEQ ID NO: 761933 - DNA, 75 bp, synthetic construct
  source 1..75: mol_type = other DNA
tagaacagcctgcacctgaaacacaggaaccgttagaagcgacacactctattgagcaggaaacacaggcagaaa

SEQ ID NO: 761934 - DNA, 75 bp, synthetic construct
  source 1..75: mol_type = other DNA
atgtgttagagaattttgcatctcttattatcaagcagaagaataccagaacaggaggagcatcatttattgagt

SEQ ID NO: 761935 - DNA, 75 bp, synthetic construct
  source 1..75: mol_type = other DNA
ccgggcggtgcggtgaaatttaacaccgttacaccgtcggtgaccgggcgctggttctccggcaatcagacctag

SEQ ID NO: 761936 - DNA, 75 bp, synthetic construct
  source 1..75: mol_type = other DNA
cagcaaagacatggatgcgctaatggcaaccccgctgtggcaggccatgccgtttgttcgcgccggacgctttca

SEQ ID NO: 761937 - DNA, 75 bp, synthetic construct
  source 1..75: mol_type = other DNA
atgaaaaagtagctaatgataatgaggcatatttttctaagcattacccaaatatatacgatgactttgatattc

SEQ ID NO: 761938 - DNA, 75 bp, synthetic construct
  source 1..75: mol_type = other DNA
agatacgggctaaaacgaccaaatggtattgaggcatatttttctaagcattacccaaatgtatacgaagacttt

SEQ ID NO: 761939 - DNA, 75 bp, synthetic construct
  source 1..75: mol_type = other DNA
ttatatgataaaaataatgacttttatgagttaataacggaaaatttatccacaattgagaaaaaattccttatt

SEQ ID NO: 761940 - DNA, 75 bp, synthetic construct
  source 1..75: mol_type = other DNA
ccgcaaacggtcctggaataatgaagcatcagtttcctcgatccgtaacctcattatctcagaagaggtttccac

SEQ ID NO: 761941 - DNA, 75 bp, synthetic construct
  source 1..75: mol_type = other DNA
agcagatggcaatgcatccgtctgaacagatcgccgggttccgcacactggcagagcaggggaaaacccccgcgc

SEQ ID NO: 761942 - DNA, 75 bp, synthetic construct
  source 1..75: mol_type = other DNA
gtattgctgaatttttaggtaccggactgtttttgttttttggcattggttgcctgtgtgcgctgaaagttgctg

SEQ ID NO: 761943 - DNA, 75 bp, synthetic construct
  source 1..75: mol_type = other DNA
accgctggggggcatgggctgctgcagaaaacagtggtgtggactggcaaccggtagctgctggcttcaagcgga

SEQ ID NO: 761944 - DNA, 75 bp, synthetic construct
  source 1..75: mol_type = other DNA
tctccagtgtgatgatgatgaaggcatcatgatagatagttgtgtggctaggttgcgtaaatataagccggaaga

SEQ ID NO: 761945 - DNA, 75 bp, synthetic construct
  source 1..75: mol_type = other DNA
aaaaggtatggcagcttcgctacaagattgacggtaaggaaaaaatactgaccgtaggaaaatatccgctaatga

SEQ ID NO: 761946 - DNA, 75 bp, synthetic construct
  source 1..75: mol_type = other DNA
tttacaaccatgctcagtatctagaaaagcgcagagaaatgatgcaatggtgggcggattggattgatgaaaagg

SEQ ID NO: 761947 - DNA, 75 bp, synthetic construct
  source 1..75: mol_type = other DNA
gccaacggcggatctgtgcgtggtatttacaaccatgctcagtatctcgataaacgcagagaaatgatgcaatgg

SEQ ID NO: 761948 - DNA, 75 bp, synthetic construct
  source 1..75: mol_type = other DNA
atgagtaacactgcagttctggatgaaaacggtatcgccactttcgcaggcgatatcactgtatatcactatgat

SEQ ID NO: 761949 - DNA, 75 bp, synthetic construct
  source 1..75: mol_type = other DNA
ccgggcggaagttgacgcaggcagaaaccacccggcttaacgccgtgctggattatatagacgcactgaacgcaa

SEQ ID NO: 761950 - DNA, 75 bp, synthetic construct
  source 1..75: mol_type = other DNA
gattacactgacgcggtgacggcaacagataccagcaccgcgccggatgtcatctggcctgaactgccggcggcg

SEQ ID NO: 761951 - DNA, 75 bp, synthetic construct
  source 1..75: mol_type = other DNA
tctctggctgtgtatctgactgccgggatatctggaggtcatttgaaccccgctgtaactattgcgctgtggttg

SEQ ID NO: 761952 - DNA, 75 bp, synthetic construct
  source 1..75: mol_type = other DNA
cggggttgttgttggggattggtggggctctgtcgaatcccaatacgttgacggcctacccattcttgaatgtcg

SEQ ID NO: 761953 - DNA, 75 bp, synthetic construct
  source 1..75: mol_type = other DNA
atgatgcaaatatttagcggcgcttcgtcaggcgcatggtttgaaaaagcgcagcggttcggcaaatcgttcatg

SEQ ID NO: 761954 - DNA, 75 bp, synthetic construct
  source 1..75: mol_type = other DNA
actgcttatccgtttttagatgtcgactggttgcaggcaatattcgcgctcatgaccagcgcaggttctattgtg

SEQ ID NO: 761955 - DNA, 75 bp, synthetic construct
  source 1..75: mol_type = other DNA
tattcgcggcaacggtgttcaggtgatttatggcccgcatgtcaccataattaaaaatgaagtcgaagagatctt

SEQ ID NO: 761956 - DNA, 75 bp, synthetic construct
  source 1..75: mol_type = other DNA
gttaacgctcaacggaacgttggcgcacgaaaatccaggtgctgtgggccaagggatgacgctgggcattcagac

SEQ ID NO: 761957 - DNA, 75 bp, synthetic construct
  source 1..75: mol_type = other DNA
tttgccaacctgtcggtactctttgcggtcggcgtcgccgtggggctggcgaaatcggataaaggcactgccggg

SEQ ID NO: 761958 - DNA, 75 bp, synthetic construct
  source 1..75: mol_type = other DNA
atgcgacaaatcattgacaccctggcgcagttacagcgcctgcgtgataaatcggtcaaagacaaaaccgtcgag

SEQ ID NO: 761959 - DNA, 75 bp, synthetic construct
  source 1..75: mol_type = other DNA
cgggctatgacaacaatatcaaagcattaggctacctggtggagaaaacgtctgcgggcgcggcggcatcggtgg

SEQ ID NO: 761960 - DNA, 75 bp, synthetic construct
  source 1..75: mol_type = other DNA
agagaaggcgacaccttacacgtccactctcttgatcgtcttggacgtaacaccttagacattcttgctttagtt

SEQ ID NO: 761961 - DNA, 75 bp, synthetic construct
  source 1..75: mol_type = other DNA
actgatgctagaacgtaaacgagaagcgcaagccgtcaatcctacaaagcgtggtaaagggaaggcagtagatag

SEQ ID NO: 761962 - DNA, 75 bp, synthetic construct
  source 1..75: mol_type = other DNA
attgcaagcgtgtttagcctatctgagagaaggcgacaccttacacgtgcactctctcgaccgtttaggacgtaa

SEQ ID NO: 761963 - DNA, 75 bp, synthetic construct
  source 1..75: mol_type = other DNA
acaggaaagcgccacggcgaaagcgcaaaaagcggtggatgatatcgccgttcagtgctggctgcggcacaaatt

SEQ ID NO: 761964 - DNA, 75 bp, synthetic construct
  source 1..75: mol_type = other DNA
tttacaaccatgctcagtatctcgataagcgcagggagatgatgcagtggtgggcggactgggttgatgaaaagc

SEQ ID NO: 761965 - DNA, 75 bp, synthetic construct
  source 1..75: mol_type = other DNA
ctaatgttctccaaagagatttcaaggctacgcggccaaacgagaagtgggttaccgatgttactgaatttgcag

SEQ ID NO: 761966 - DNA, 75 bp, synthetic construct
  source 1..75: mol_type = other DNA
atggtgatttcaggtccacgctggatgacgttgacgttttttgcgctgataagttttctggcattgaaagaatat

SEQ ID NO: 761967 - DNA, 75 bp, synthetic construct
  source 1..75: mol_type = other DNA
cccgctttacagcccggggctaaaaaggtcatcgtcttatttcatcgcggtcatgaacattctggtcgtctacaa

SEQ ID NO: 761968 - DNA, 75 bp, synthetic construct
  source 1..75: mol_type = other DNA
tatatttcactggatgacttccgcatcgtgcgcgatgagttactgggagaaggcaaacgtagcacagacgatcgg

SEQ ID NO: 761969 - DNA, 75 bp, synthetic construct
  source 1..75: mol_type = other DNA
taaagccaggaaatgccggtgtcgcggtaaacgagcgcggagcaattgtcgttgacaagcaattacataccacag

SEQ ID NO: 761970 - DNA, 75 bp, synthetic construct
  source 1..75: mol_type = other DNA
tatcacgagaatagaggccgatacggataccgtagggtaacgctgtctcttcatcgagaaggaaaacagattaac

SEQ ID NO: 761971 - DNA, 75 bp, synthetic construct
  source 1..75: mol_type = other DNA
ttttcttgtcggcaaaggttatgacggaagtggagataattatattcgctcacagctacaatctataaatgcaaa

SEQ ID NO: 761972 - DNA, 75 bp, synthetic construct
  source 1..75: mol_type = other DNA
gcttcaaaaatggcaccgacggtacgattaaagtggctatcgatgctattaatgccgccggtgcgccgcactgct

SEQ ID NO: 761973 - DNA, 75 bp, synthetic construct
  source 1..75: mol_type = other DNA
atacggttgcccatgcccgaaaagcgatccataagatcctgaaaggtaatgatgatcgcctgttagtggtgattg

SEQ ID NO: 761974 - DNA, 75 bp, synthetic construct
  source 1..75: mol_type = other DNA
tcagtggcaaaacggtgcgaaaactgatgcaacagctcggcctgaagtctcctgtgcgtctgaagaaataccggt

SEQ ID NO: 761975 - DNA, 75 bp, synthetic construct
  source 1..75: mol_type = other DNA
ttgagaaaccatctcaacttaaaaaagaccctgaaatatctaacaacacgataaccgtaatatcaaatgggcggg

SEQ ID NO: 761976 - DNA, 75 bp, synthetic construct
  source 1..75: mol_type = other DNA
ctaagaaaaagacttgccagacggtttagcataattggtcctggtcatgattttatagttaaaatcaatgacact

SEQ ID NO: 761977 - DNA, 75 bp, synthetic construct
  source 1..75: mol_type = other DNA
attgctgataatatcgcgactattttacgcgagcagggagtggatattatcctcaacgcccatgtgcagcgtatc

SEQ ID NO: 761978 - DNA, 75 bp, synthetic construct
  source 1..75: mol_type = other DNA
tccacgatacgattaagtcattgtttaacccgataaatgtcatgtacgcgctggtcgttggcggtctattgttga

SEQ ID NO: 761979 - DNA, 75 bp, synthetic construct
  source 1..75: mol_type = other DNA
atcctgttattggttacggttacggtaacgttgcatataaagatgtctataataaacgtgtcgttgattatccag

SEQ ID NO: 761980 - DNA, 75 bp, synthetic construct
  source 1..75: mol_type = other DNA
tgacaccgcccctgtccagggttggtatgacagaagaacaagccaaagagagtggtgctgatattcaggtggtga

SEQ ID NO: 761981 - DNA, 75 bp, synthetic construct
  source 1..75: mol_type = other DNA
tttacaaccatgctcagtatctcgataagcgcagagaaatgatgcagtggtgggcggactggcttgatgggaagg

SEQ ID NO: 761982 - DNA, 75 bp, synthetic construct
  source 1..75: mol_type = other DNA
gattacattgacgcggtgacggcaatagataccagcaccgcgccgaatgtcatctggcctgaactgccggaggcg

SEQ ID NO: 761983 - DNA, 75 bp, synthetic construct
  source 1..75: mol_type = other DNA
gtggatcacttttcatccgtcgttgacatcaagcgataccgctcttacagaggagaggtagggcaaaccgcccct

SEQ ID NO: 761984 - DNA, 75 bp, synthetic construct
  source 1..75: mol_type = other DNA
aatggacctttagacaatcaatagggccacataattttgcgctattcatctggtttggcactggtttattagggc

SEQ ID NO: 761985 - DNA, 75 bp, synthetic construct
  source 1..75: mol_type = other DNA
ccgttgccgtcgagagcggtgtaccggaacagccctttggcagtgaggaaacgcgcgctggcgcacgaaatcggg

SEQ ID NO: 761986 - DNA, 75 bp, synthetic construct
  source 1..75: mol_type = other DNA
cgccagccagcgcggcgaggcgcgttcggcaactttgccgttacctgcggtgattctggaaaagttcgtgaaggc

SEQ ID NO: 761987 - DNA, 75 bp, synthetic construct
  source 1..75: mol_type = other DNA
taaccattttagaagcagcttcgctgtttttgcctcgggaagatcgggatattgctgataatatcgcgacgattt

SEQ ID NO: 761988 - DNA, 75 bp, synthetic construct
  source 1..75: mol_type = other DNA
tataatgcttcatcctggaaagtcacatcgatgcgaattgataataattcaaccgcaacagcagtattgtataaa

SEQ ID NO: 761989 - DNA, 75 bp, synthetic construct
  source 1..75: mol_type = other DNA
agtggtgctgatattcaggtggtgacattgcctgtagctgcaattccgcgcgccagagtgatgaacgatacccgt

SEQ ID NO: 761990 - DNA, 75 bp, synthetic construct
  source 1..75: mol_type = other DNA
aggacaagagccattacaggtattgatggtgatatccgaatcaacaaggctttatggatgattgccgaacagttc

SEQ ID NO: 761991 - DNA, 75 bp, synthetic construct
  source 1..75: mol_type = other DNA
tggtactgctggtggcgtggctgctgtggcggaaagcggtacgcccgcagctaacacgtcgcgccgaggcggtga

SEQ ID NO: 761992 - DNA, 75 bp, synthetic construct
  source 1..75: mol_type = other DNA
gatataattctattcgccgtgagcgcccgttaacggatgacgaattaatgcactttgttccatctgtcttttctg

SEQ ID NO: 761993 - DNA, 75 bp, synthetic construct
  source 1..75: mol_type = other DNA
gcaccggggaaatgtggtggataaagtaattgaaggggcttacgaggtggtgggcgtgtttgaccggattgagga

SEQ ID NO: 761994 - DNA, 75 bp, synthetic construct
  source 1..75: mol_type = other DNA
gcaccggggaaatgtggtggaaacagttattgaaggggcttacgaggtggtgggcgtgtttgaccggattgagga

SEQ ID NO: 761995 - DNA, 75 bp, synthetic construct
  source 1..75: mol_type = other DNA
gcaccggggaaatgtggtggaaatagtcattgaaggggcttacgaggtggtgggcgtgtttgaccggattgagga

SEQ ID NO: 761996 - DNA, 75 bp, synthetic construct
  source 1..75: mol_type = other DNA
aattttggcgaaatccgcgttccacataaaggtgatattgtcgggcaggttattgagggagcgtatgaagtgctc

SEQ ID NO: 761997 - DNA, 75 bp, synthetic construct
  source 1..75: mol_type = other DNA
ttgaccggatactgttcaatgccatgaacggcaaccgcgctgaaatgagcccggaagccgccggtattgctgcct

SEQ ID NO: 761998 - DNA, 75 bp, synthetic construct
  source 1..75: mol_type = other DNA
gaccaatatcgctgcgtcaacggctgatattaaccattggggcaattctgctggtgtttgagctgatcagcgttt

SEQ ID NO: 761999 - DNA, 75 bp, synthetic construct
  source 1..75: mol_type = other DNA
gcagattcagctgtttgagcaggcgctacgcgacaatcgcaacaacgatcgccacatcatgcgtgagatccgcga

SEQ ID NO: 762000 - DNA, 75 bp, synthetic construct
  source 1..75: mol_type = other DNA
gggaaatgtggtggacagagtcattgaaggggcttacgaggtggtgggggtttttgagcggattgaagaaaagcg

SEQ ID NO: 762001 - DNA, 75 bp, synthetic construct
  source 1..75: mol_type = other DNA
aaaccggcaagagacttccggcacgcgggcctgggtacggctgaagaaagatcagaacgtggcaaaccagatata

SEQ ID NO: 762002 - DNA, 75 bp, synthetic construct
  source 1..75: mol_type = other DNA
agccgatctgtgttgaatcttgtccgctgcgggcgctggatttcggccctatcgacgagctgcgtaaaaaacatg

SEQ ID NO: 762003 - DNA, 75 bp, synthetic construct
  source 1..75: mol_type = other DNA
gataccgatggttctgaaaagacatggacaggtcagggccgaactcctcgtgctatcgctgctgcgctcgaagcc

SEQ ID NO: 762004 - DNA, 75 bp, synthetic construct
  source 1..75: mol_type = other DNA
cctgaacaaataattactccccgtcgtcgggaagataaacagaacgatctctggacaacctgtcagcgggttcag

SEQ ID NO: 762005 - DNA, 75 bp, synthetic construct
  source 1..75: mol_type = other DNA
atcttaacagtgacgaacaacatttatttggcagagctgcattgatggtcaggtatgaagatgaaaataaaacgc

SEQ ID NO: 762006 - DNA, 75 bp, synthetic construct
  source 1..75: mol_type = other DNA
tttcccgtgtttatctggatgcgtccgcactggcaggacatgttaaaactggaagcagcggcgcaacgatttggc

SEQ ID NO: 762007 - DNA, 75 bp, synthetic construct
  source 1..75: mol_type = other DNA
ccagcgaactgggtggtgcccgcttctcgttcagctggccgttatggcataacatcccgcaattcacctctgcct

SEQ ID NO: 762008 - DNA, 75 bp, synthetic construct
  source 1..75: mol_type = other DNA
aatttgctcaataacgccctgcggtactgccattcaacggttgaaaccagctgctactgtcggggaatagagcga

SEQ ID NO: 762009 - DNA, 75 bp, synthetic construct
  source 1..75: mol_type = other DNA
agtgacgatcaacatttatttggcagagctgcactgatggacaggtaggaagatgaaaataaaacgccagtgacg

SEQ ID NO: 762010 - DNA, 75 bp, synthetic construct
  source 1..75: mol_type = other DNA
agtgacgaacaacatttatttggcagagctgcactgatggtcaggtaggaagatgaaaataaaacgccagtgacg

SEQ ID NO: 762011 - DNA, 75 bp, synthetic construct
  source 1..75: mol_type = other DNA
gactacaaagatttgacaccagaagtcagcttccgccgaatttatgaatatgcgggcggcgactggcaggaagat

SEQ ID NO: 762012 - DNA, 75 bp, synthetic construct
  source 1..75: mol_type = other DNA
ttgataaagtcactgaaaatatggagacaatgaaagagatacatcttaacagtgacgaacaacattttgatggct

SEQ ID NO: 762013 - DNA, 75 bp, synthetic construct
  source 1..75: mol_type = other DNA
gagaatatgataaaaggtggattatcggggcgaagtgcctccggtaaaaataccaggacaagagccattacaggc

SEQ ID NO: 762014 - DNA, 75 bp, synthetic construct
  source 1..75: mol_type = other DNA
agtgacgaccaacatttatttggcagagctgcattgatggccaggtaggaagatgaaaataaaacgccagtgacg

SEQ ID NO: 762015 - DNA, 75 bp, synthetic construct
  source 1..75: mol_type = other DNA
aaattttcgtaacccccatggataagaaaaaaggcggtgcggatcaggttgttattgtgatgacctataaacaag

SEQ ID NO: 762016 - DNA, 75 bp, synthetic construct
  source 1..75: mol_type = other DNA
agcgcgcccgcgcccttgttgaacggtacctcaacgagtgtgaatgccgtgacctcaccgatatcatgtgcgccc

SEQ ID NO: 762017 - DNA, 75 bp, synthetic construct
  source 1..75: mol_type = other DNA
tgaacacactcacccacacggcagagcacgaggtgccgtaccggatggaaaccactgcagaaggtggtctgcaca

SEQ ID NO: 762018 - DNA, 75 bp, synthetic construct
  source 1..75: mol_type = other DNA
atgacgctctaccagataaaaccgctctttcagacgctattaagaccgacgatgttttggctttataagcaccat

SEQ ID NO: 762019 - DNA, 75 bp, synthetic construct
  source 1..75: mol_type = other DNA
ccattattgcaccgatcattggggcatgtgttggtgcggcgatttatcgctatctcattgcaaagaatttacctg

SEQ ID NO: 762020 - DNA, 75 bp, synthetic construct
  source 1..75: mol_type = other DNA
ggctgccgttactgtcatatggcttgcccgtatggcgcaccgcaatataacgaaacgaaaggccatatgaccaaa

SEQ ID NO: 762021 - DNA, 75 bp, synthetic construct
  source 1..75: mol_type = other DNA
gcctgtacggcagtgaacattgcgatcgcgccgggtacgaaaattacaactttctaagctgcctgtacggcagtg

SEQ ID NO: 762022 - DNA, 75 bp, synthetic construct
  source 1..75: mol_type = other DNA
gggaatatgatgctcacagtgcttgcagcagtggcacaaatggaacgtgaaatgatgcttgagcggcaacgtgaa

SEQ ID NO: 762023 - DNA, 75 bp, synthetic construct
  source 1..75: mol_type = other DNA
cacgagaaccccggtgcagttggtcaggggatgacgctgggtattcagacgctggaaacgggcgtgtttggtggg

SEQ ID NO: 762024 - DNA, 75 bp, synthetic construct
  source 1..75: mol_type = other DNA
attaacgctcaacgggacgctggcgcacgagaaccccggtgcagttggtcaggggatgacgctgggtattcagac

SEQ ID NO: 762025 - DNA, 75 bp, synthetic construct
  source 1..75: mol_type = other DNA
gcgttaactccgcggcctacgctggcgattgtgtctggtctgtatgagctttttcccgaaaatgagccggtgaaa

SEQ ID NO: 762026 - DNA, 75 bp, synthetic construct
  source 1..75: mol_type = other DNA
actgcacaggaccatcagcggatcgatggcggctactttctggtggacccgtgccattatcgccggttgatttag

SEQ ID NO: 762027 - DNA, 75 bp, synthetic construct
  source 1..75: mol_type = other DNA
atattttgttacgtgattacagtgagttaaatgttgcacaagggcaagagatgattgccctaagggggatgtctg

SEQ ID NO: 762028 - DNA, 75 bp, synthetic construct
  source 1..75: mol_type = other DNA
gagaaattgttggcgagatatatggaaaaatatggtgagttttccagggaagaacagagagggaaagtggaaatt

SEQ ID NO: 762029 - DNA, 75 bp, synthetic construct
  source 1..75: mol_type = other DNA
atgcacaaagcatctcctgttgagttaagaacgagcattgagattgcacatagccttgctcaaattggagtcagg

SEQ ID NO: 762030 - DNA, 75 bp, synthetic construct
  source 1..75: mol_type = other DNA
ctgcgccggaaggttgtgcgcgagtacggtattaaatcgctggtggatgcaccagtcatctttttcggagattaa

SEQ ID NO: 762031 - DNA, 75 bp, synthetic construct
  source 1..75: mol_type = other DNA
tgttattgcgtaatctggtcgaaaacgcccatcgctatagcccaccaaacaccaacatcatgattaagctgcaag

SEQ ID NO: 762032 - DNA, 75 bp, synthetic construct
  source 1..75: mol_type = other DNA
tcaaaatatccgctaacaaggttggtcgcattgccaatacctacatgctcaaaacagaacaatacgggaaatggg

SEQ ID NO: 762033 - DNA, 75 bp, synthetic construct
  source 1..75: mol_type = other DNA
aagcaggtttctggctggatgatgctcaggtcgttgattaccgtgttgtgaagatgcccgttaccaaaggtggga

SEQ ID NO: 762034 - DNA, 75 bp, synthetic construct
  source 1..75: mol_type = other DNA
aagcgcaacggcgatgctttgcatgaacgctttaagctggcacaggcggcgttttccagtcttaatgaccgcacc

SEQ ID NO: 762035 - DNA, 75 bp, synthetic construct
  source 1..75: mol_type = other DNA
ctgatgatgccggtgctgcccgtcgtgcgcgtcgccaacgtggcggatgccattgcgctggcggtgaaactggaa

SEQ ID NO: 762036 - DNA, 75 bp, synthetic construct
  source 1..75: mol_type = other DNA
accggtgaaggggtaaccagcgcgcggacgtttgtccgtctgcgtcgctgtgtattagtcgatgcgtttcgcatt

SEQ ID NO: 762037 - DNA, 75 bp, synthetic construct
  source 1..75: mol_type = other DNA
cggtctgtctgccgggatggttcgcccgcgctggcagaaagagcagccgccactgctaccggttgaaacgaactg

SEQ ID NO: 762038 - DNA, 75 bp, synthetic construct
  source 1..75: mol_type = other DNA
gttgctgccgtttgatggggaattccggttgagcaataacaccagcacagagcgcggatggctgataccaaccag

SEQ ID NO: 762039 - DNA, 75 bp, synthetic construct
  source 1..75: mol_type = other DNA
accgtcttaaccgcgagcccgtggtctggcgcggcctgaccaccagtgagctgtttctggcgctggctctcggtc

SEQ ID NO: 762040 - DNA, 75 bp, synthetic construct
  source 1..75: mol_type = other DNA
atgatgggaaaactgatttggttaatggggccgtccggctccgggaaagacagcctgctggcggaactccgcctg

SEQ ID NO: 762041 - DNA, 75 bp, synthetic construct
  source 1..75: mol_type = other DNA
gtcaggattgcaaagactccattctggtgcgtgtgcatcgcggaaccggggccggaatcatctctaacgggcgca

SEQ ID NO: 762042 - DNA, 75 bp, synthetic construct
  source 1..75: mol_type = other DNA
gcaattttcacgcaatcggcgtacggcttggtcgtcatgacgccaccatcactctgttcgatctcagcagtaaag

SEQ ID NO: 762043 - DNA, 75 bp, synthetic construct
  source 1..75: mol_type = other DNA
gatggtcagaatgcgtggcgacaggatccgtcttttattcctccggtggcgtcatttggggcaagtccggtcctg

SEQ ID NO: 762044 - DNA, 75 bp, synthetic construct
  source 1..75: mol_type = other DNA
gcgaaggtgttttgctctcccctcaacagtttcagcagcagactgaatgggagtcttttcgcagtgccggtattt

SEQ ID NO: 762045 - DNA, 75 bp, synthetic construct
  source 1..75: mol_type = other DNA
gccctgagcgagcaggagttttttacccgcgcggggcaaaacctgctggccttaagctggcacgctaatggtttg

SEQ ID NO: 762046 - DNA, 75 bp, synthetic construct
  source 1..75: mol_type = other DNA
tctacaccgagcatttttatccagacggtagccgcgggcgtcgggcgaagtccattgcttttgcgaatatggacg

SEQ ID NO: 762047 - DNA, 75 bp, synthetic construct
  source 1..75: mol_type = other DNA
tttacaccgagcatttttatccggacggtagccgtggacgcagggcaagatctatcgcgtttgcaaatatggacg

SEQ ID NO: 762048 - DNA, 75 bp, synthetic construct
  source 1..75: mol_type = other DNA
actcaagtcctttgacgcttttcgcgaatgggtaaccattcaggccggattttacaccgagcatatttatcctga

SEQ ID NO: 762049 - DNA, 75 bp, synthetic construct
  source 1..75: mol_type = other DNA
caaactgcgagagttaatcgccatttcggttattctgccagggcttgtcgacccggacagcggcaaaattcatta

SEQ ID NO: 762050 - DNA, 75 bp, synthetic construct
  source 1..75: mol_type = other DNA
aaaattacgcgtcagcttatcgaacgcgggttgatcaaagaagttgatcagcaggcctccaccggaggccgccgc

SEQ ID NO: 762051 - DNA, 75 bp, synthetic construct
  source 1..75: mol_type = other DNA
actcaagtcctttgacgcttttcgcgaatgggtaaccattcaggccggattttacaccgaacatttttatccgga

SEQ ID NO: 762052 - DNA, 75 bp, synthetic construct
  source 1..75: mol_type = other DNA
tgtggttttcattgaactgaaacaaaaaggtgtgatgtgggagggggcattacacgatgcgcgcctgcgcgaagg

SEQ ID NO: 762053 - DNA, 75 bp, synthetic construct
  source 1..75: mol_type = other DNA
ggtcatatcgactacgcagatctggaaaaacaagccaaagaacacaagccgaaaatgattatcggtggcttctct

SEQ ID NO: 762054 - DNA, 75 bp, synthetic construct
  source 1..75: mol_type = other DNA
cctccgaaaactacaccagcccgcgcgtaatgcaggcgcagggggctcagctaaccaacaaatatgctgaaggtt

SEQ ID NO: 762055 - DNA, 75 bp, synthetic construct
  source 1..75: mol_type = other DNA
ctgctggcgtctacccgaacccggttcctcatgctcacgtagtaactaccaccactcacaaaaccctggcgggtc

SEQ ID NO: 762056 - DNA, 75 bp, synthetic construct
  source 1..75: mol_type = other DNA
gtacgataaaaatcacaaccagcgcggtcatcgataaccgtgcaaacctgaattatcttctgacccattccggtc

SEQ ID NO: 762057 - DNA, 75 bp, synthetic construct
  source 1..75: mol_type = other DNA
acaaatgaacaaaagcatgcaaatgacgctcttaatgccctgttgaaggaaaaagagaatatccgtagccagctt

SEQ ID NO: 762058 - DNA, 75 bp, synthetic construct
  source 1..75: mol_type = other DNA
tgctggaacccggcgataccgttctgggtatgaacctggcgcacggtggtcacctgactcatggttctccggtta

SEQ ID NO: 762059 - DNA, 75 bp, synthetic construct
  source 1..75: mol_type = other DNA
ctcatcacctcatctgaaggattatctgtaccaacaaatatcgtgactgattcaacagggcatgtttctgttccg

SEQ ID NO: 762060 - DNA, 75 bp, synthetic construct
  source 1..75: mol_type = other DNA
accccgaactggtctggcgggagctggcgaggcttgccggtgcgctgctgacgttttcccttgagcataacgtca

SEQ ID NO: 762061 - DNA, 75 bp, synthetic construct
  source 1..75: mol_type = other DNA
ctgaggggacattcctgtcttctcagcagtttcagcagcaggcccgctgggaagcgttcagcaatgacagcattg

SEQ ID NO: 762062 - DNA, 75 bp, synthetic construct
  source 1..75: mol_type = other DNA
tcaaaacttaccagcagcaggtcgcgaaaaacgccaaagcgatggtagaagtgttcctggaacgcggctacaaag

SEQ ID NO: 762063 - DNA, 75 bp, synthetic construct
  source 1..75: mol_type = other DNA
catcggtgcttacctgttcgttgatatggcgcacgttgcgggcctggttgctgctggcgtctacccgaacccggt

SEQ ID NO: 762064 - DNA, 75 bp, synthetic construct
  source 1..75: mol_type = other DNA
taaacattcagttggttgatgcgaataacaatgcgtttacaggtgaggtggatttaacgattacaccatcgacgg

SEQ ID NO: 762065 - DNA, 75 bp, synthetic construct
  source 1..75: mol_type = other DNA
tttacaccgagcatttttatccggatggtagccgtgggcgcagggcgaaatcaatcgcgtttgcgaatatggacg

SEQ ID NO: 762066 - DNA, 75 bp, synthetic construct
  source 1..75: mol_type = other DNA
cttaacggtatcgcccagaagctgaaattcaaagcattgcaggagcgggcaaaagaaaagattgccaacattgcc

SEQ ID NO: 762067 - DNA, 75 bp, synthetic construct
  source 1..75: mol_type = other DNA
ggtgaaagccgcctgtaccgccgactcactggctgaatttgcctgggatctgtttaccgcctggcagaccgctgg

SEQ ID NO: 762068 - DNA, 75 bp, synthetic construct
  source 1..75: mol_type = other DNA
tcggcaaagccggtgaagcccaggataacgcccgcgctgccttgcgtatgcttaccgaaaacggtcatcagccat

SEQ ID NO: 762069 - DNA, 75 bp, synthetic construct
  source 1..75: mol_type = other DNA
gcgccactgatcgcccgcgccttcaacaaactcaaaaccctacgacaagacgcccgtagctggctgctgaaatac

SEQ ID NO: 762070 - DNA, 75 bp, synthetic construct
  source 1..75: mol_type = other DNA
tcaccgacggatgccgccgcttttggtcagctttttgccgactacgaactgttaccgccgttccgccagcttgat

SEQ ID NO: 762071 - DNA, 75 bp, synthetic construct
  source 1..75: mol_type = other DNA
cgcctgatttggggcgtttatagcaccgacaaccagctactggcttgctttcgcgttgcggaagataacagctac

SEQ ID NO: 762072 - DNA, 75 bp, synthetic construct
  source 1..75: mol_type = other DNA
gcctctcagcaacgaacagatgaagcaaattgaagctctgacccgcgaggcgatgggcttttctgaaaaacgcgg

SEQ ID NO: 762073 - DNA, 75 bp, synthetic construct
  source 1..75: mol_type = other DNA
cggtcatggtcgcactgatcctgtgggcgaaagcccccgactaccgcacattattcagcaatctttccgatcagg

SEQ ID NO: 762074 - DNA, 75 bp, synthetic construct
  source 1..75: mol_type = other DNA
acgcactgcagcgcacgggctgctggcataacctgccgctggacccgtcacgcaaatctgccgctttcaacactg

SEQ ID NO: 762075 - DNA, 75 bp, synthetic construct
  source 1..75: mol_type = other DNA
aacatgcgctgctggcaaatcagtttattgatggcgaaataattctggctggcagtgaaatgctgcgccctgaca

SEQ ID NO: 762076 - DNA, 75 bp, synthetic construct
  source 1..75: mol_type = other DNA
tgtgtaggaaagaacaaagggtggcggaaagttcagaaagccagcgattatggcgtaattattctgacagaagaa

SEQ ID NO: 762077 - DNA, 75 bp, synthetic construct
  source 1..75: mol_type = other DNA
ttgctggctgccggtcgctggttgctggtactgctggtggcgtggttgctgtggcggaaagcggtacgcccgcag

SEQ ID NO: 762078 - DNA, 75 bp, synthetic construct
  source 1..75: mol_type = other DNA
agccttacgtatgttgcttgaaaacggtcatcagccattactgcaagaaatcgcccggcgttataaccagccgga

SEQ ID NO: 762079 - DNA, 75 bp, synthetic construct
  source 1..75: mol_type = other DNA
tcgattactggactccggtcggtggggcgatcacgcctcgcgaacgaaagctggtttcaggattcgttgattacc

SEQ ID NO: 762080 - DNA, 75 bp, synthetic construct
  source 1..75: mol_type = other DNA
cgcgctgctggatgctgctgagcagtatctcgatcaggtgggcagccgccgcatcaccaatggcatcagcctgtg

SEQ ID NO: 762081 - DNA, 75 bp, synthetic construct
  source 1..75: mol_type = other DNA
ttgttttttgattacatactttttagctcaggcatgagagctaatgcctctgcactatctgttatttgtgtcttt

SEQ ID NO: 762082 - DNA, 75 bp, synthetic construct
  source 1..75: mol_type = other DNA
tgtgtgactcggtcggccgggaacatacgccagccctgagtgatgccgcagaacaatatctgaataccattgcga

SEQ ID NO: 762083 - DNA, 75 bp, synthetic construct
  source 1..75: mol_type = other DNA
tcgattactggactccaagcggtggggtgatcacgcctcgagaacgagaactggtatcaggcttcgttgagtacc

SEQ ID NO: 762084 - DNA, 75 bp, synthetic construct
  source 1..75: mol_type = other DNA
tcgattactggactccggtcggtggggcgatcacgccacgcgaacgagaactgctgtctggtttcgttgattacc

SEQ ID NO: 762085 - DNA, 75 bp, synthetic construct
  source 1..75: mol_type = other DNA
cagcgttccgttatggcagcgacgtcactggcgtcggggatttaatcagagcgatttgctgtgtcagccgttatc

SEQ ID NO: 762086 - DNA, 75 bp, synthetic construct
  source 1..75: mol_type = other DNA
tgcggtcgctgcctgaaaaaaccgccaccgtggcaaagactgatcactgttgccaactatgcacctccattaagc

SEQ ID NO: 762087 - DNA, 75 bp, synthetic construct
  source 1..75: mol_type = other DNA
tgacgctggcggcttaccgttattcatcccgtgacttctggagtcttcgggatgccatcctgaccaggaatcgtg

SEQ ID NO: 762088 - DNA, 75 bp, synthetic construct
  source 1..75: mol_type = other DNA
ggggctttctacgggtaaagatggtgttagtttcacttttggttttggtccaagttggggttggagtgcaactga

SEQ ID NO: 762089 - DNA, 75 bp, synthetic construct
  source 1..75: mol_type = other DNA
aataaattatttaataaattgtttaacaattatgataaccctaagtctttgattttgaagctggttaaagggttt

SEQ ID NO: 762090 - DNA, 75 bp, synthetic construct
  source 1..75: mol_type = other DNA
atttttgtgaaacgttggtggatttacaaactgctgatgattacatttctgatgtgattattaagaaggaaggcc

SEQ ID NO: 762091 - DNA, 75 bp, synthetic construct
  source 1..75: mol_type = other DNA
aagtttgaagttccaatcccctgcccggacaatccggaaaaatcccttgccatccagtctgaaatcgttcggatt

SEQ ID NO: 762092 - DNA, 75 bp, synthetic construct
  source 1..75: mol_type = other DNA
gtggcaaggctggaatccgccatgtgcctgcgccgccgctggtcaccagaaaacttccagctctttctggttgag

SEQ ID NO: 762093 - DNA, 75 bp, synthetic construct
  source 1..75: mol_type = other DNA
cgcgtagcggaagataacagctacagcaccgctgacgatgatcttttcaccctgccggaaggcgatatctctatt

SEQ ID NO: 762094 - DNA, 75 bp, synthetic construct
  source 1..75: mol_type = other DNA
aagtatcgtctcgcgcatagcaactcaagttctgcaatatacagtactgaggactaaagagctccggtccatgca

SEQ ID NO: 762095 - DNA, 75 bp, synthetic construct
  source 1..75: mol_type = other DNA
accatccatctattaatgatagagaacgtcgtgtcttggaagaactaggtatatgtaatggtgcacactttaata

SEQ ID NO: 762096 - DNA, 75 bp, synthetic construct
  source 1..75: mol_type = other DNA
acagtacaactactatcgcgaccagttgttgagttttgatgaggagcaggaaaaacctgtttatctggaaaaatt

SEQ ID NO: 762097 - DNA, 75 bp, synthetic construct
  source 1..75: mol_type = other DNA
ctactgatgtaataatacatcttcaacaaatatctattgaatgggattatgtcaacaataatattgttttcctgt

SEQ ID NO: 762098 - DNA, 75 bp, synthetic construct
  source 1..75: mol_type = other DNA
accctgaccaactccatcaccgaaggtctcccgcgtgaaatcgagttgcgccagaaacaatacgaatactaccgt

SEQ ID NO: 762099 - DNA, 75 bp, synthetic construct
  source 1..75: mol_type = other DNA
cactgttatgcttttcgacattctttgaatccaaaatttatttcctattacatgcaaaccgattcgtttatttct

SEQ ID NO: 762100 - DNA, 75 bp, synthetic construct
  source 1..75: mol_type = other DNA
tccagctttgaattacgcctacgtaaacatttatcactggcggaagagtctctctggcaaaaatgtgcacaaaaa

SEQ ID NO: 762101 - DNA, 75 bp, synthetic construct
  source 1..75: mol_type = other DNA
gaactgacccgctgggcaggcagaaaatgcccgagtggtcgggtcatggggctggcgaataaaggctggataaag

SEQ ID NO: 762102 - DNA, 75 bp, synthetic construct
  source 1..75: mol_type = other DNA
gaagctggcattgatggtgacagcactttcagttgggtggtgattgaaaacgccagccagcgcggcgaggcgcgt

SEQ ID NO: 762103 - DNA, 75 bp, synthetic construct
  source 1..75: mol_type = other DNA
atttgaacaacatgcctttcagtgaagaacctgagtgcattattaacgagctaaatctgttttcaatacaggtaa

SEQ ID NO: 762104 - DNA, 75 bp, synthetic construct
  source 1..75: mol_type = other DNA
caggagttgctacgcaatgacgatggccagaaaacggcggcgggcgtggatgatattgaaacgctggaaaaggcc

SEQ ID NO: 762105 - DNA, 75 bp, synthetic construct
  source 1..75: mol_type = other DNA
cgtacaacaaaaacgccggagttaagaccatgcgcgaaaaaatccgcgcccggattaacggcctgacccagcttt

SEQ ID NO: 762106 - DNA, 75 bp, synthetic construct
  source 1..75: mol_type = other DNA
gatattttctcgtcaacatacctcatggatagtcccacttgttatcggaattatcatctttattgttgcaccata

SEQ ID NO: 762107 - DNA, 75 bp, synthetic construct
  source 1..75: mol_type = other DNA
ggggcgcaattggcgcacgtacaacagaatcgcaagttcaccgcgaacttgcttcgggcctttcttgtccggtcg

SEQ ID NO: 762108 - DNA, 75 bp, synthetic construct
  source 1..75: mol_type = other DNA
atgaattatcagaacgacgatttacgcatcaaagaaatcaaagagttacttcctcctgtcgcattgctggaaaaa

SEQ ID NO: 762109 - DNA, 75 bp, synthetic construct
  source 1..75: mol_type = other DNA
gatcagctgctggctattgcagaaaaacactactcaaaaattggcgtcagaacggcgcggcagacaattgccgcc

SEQ ID NO: 762110 - DNA, 75 bp, synthetic construct
  source 1..75: mol_type = other DNA
attattttcgcgtcaacataccgcatggatagtcccactcgttatcggaattatcatctttattgttgctcctta

SEQ ID NO: 762111 - DNA, 75 bp, synthetic construct
  source 1..75: mol_type = other DNA
aagccagcaattaccatcattgccctggtaattggctatatcgcgatcttctcgcgccagcatgcatcgtggatt

SEQ ID NO: 762112 - DNA, 75 bp, synthetic construct
  source 1..75: mol_type = other DNA
ctcacgccagcatgcttcctggatttacccattagctatcgggatcatcatctttatcatcgcgccatatctccc

SEQ ID NO: 762113 - DNA, 75 bp, synthetic construct
  source 1..75: mol_type = other DNA
gattgacggtaaggagaaaatcctgaccgtcggaaaatatccgcttatgactttgcaggaggcaagggataaagc

SEQ ID NO: 762114 - DNA, 75 bp, synthetic construct
  source 1..75: mol_type = other DNA
tacgagcacaagaagcaagtctggtcagtaggctatgcaactgaacttgccaaaatgtttgatgacgacatttta

SEQ ID NO: 762115 - DNA, 75 bp, synthetic construct
  source 1..75: mol_type = other DNA
gaacttctcactacgctaagctccatcactaaaccagtatcagagtttgtttttgccgggcgcaacgataagaag

SEQ ID NO: 762116 - DNA, 75 bp, synthetic construct
  source 1..75: mol_type = other DNA
acggcgtcaatgcagatcaaccttaactccagtgatcctcttccgacagtcaaaactttcgatgccagcgatgcg

SEQ ID NO: 762117 - DNA, 75 bp, synthetic construct
  source 1..75: mol_type = other DNA
agctccactccgggttcttacgtgattaaagctcatgctggttctcagatgtctactgagttaacagtaaccttt

SEQ ID NO: 762118 - DNA, 75 bp, synthetic construct
  source 1..75: mol_type = other DNA
aacgtttccaactatgcggtgatgaatattagcgttatcaatagtggtgtctcgacagcggattcttcttttatg

SEQ ID NO: 762119 - DNA, 75 bp, synthetic construct
  source 1..75: mol_type = other DNA
ccatattattgtttgccaaccaccgtcattttcttcatgacaatcaggactggtcaggcgcaatcaatcagttac

SEQ ID NO: 762120 - DNA, 75 bp, synthetic construct
  source 1..75: mol_type = other DNA
gacgtaaggcgcaactgcttagccagatccagcaacaacggctggatctttccgccagtcgtcgtgaatggctgg

SEQ ID NO: 762121 - DNA, 75 bp, synthetic construct
  source 1..75: mol_type = other DNA
ttatctggtacggttgagttttctgctggtagtgaagatagtccagactctcaacgggtcaaaatggagcctgct

SEQ ID NO: 762122 - DNA, 75 bp, synthetic construct
  source 1..75: mol_type = other DNA
cattcactgcggctggcggtaagatcagtggaaatggcacatcatggcagatcactttaccggcttataaaagcg

SEQ ID NO: 762123 - DNA, 75 bp, synthetic construct
  source 1..75: mol_type = other DNA
atgatcaatttcaagcctaaaattccggcgatgcttggggctctggcggttcatgcacaacaggcccgtctgctc

SEQ ID NO: 762124 - DNA, 75 bp, synthetic construct
  source 1..75: mol_type = other DNA
tgcactgaacgcttttgataaattccgtaataatctgaacaagaaatataacatacaagatcgcatggccatttc

SEQ ID NO: 762125 - DNA, 75 bp, synthetic construct
  source 1..75: mol_type = other DNA
cgagcaggcagcaagacgcgcagcggcggcaaagtggcagcaactacaacgcggagccgcatcattctccatcac

SEQ ID NO: 762126 - DNA, 75 bp, synthetic construct
  source 1..75: mol_type = other DNA
cgctataccggcattgatgagattggtcgtaaagaaggggcgatcggcgtgtttaccgccgggaaactcacccgc

SEQ ID NO: 762127 - DNA, 75 bp, synthetic construct
  source 1..75: mol_type = other DNA
atatgccgcagaaattcggtctgtatgaagatctcacggtgatggagaacctcaatctgtacgcggatttgcgca

SEQ ID NO: 762128 - DNA, 75 bp, synthetic construct
  source 1..75: mol_type = other DNA
cacgtgtcgatgtctttcatggtaccccgcctgcatggagttccttcgggaacaaaaccatctggggcggaaacg

SEQ ID NO: 762129 - DNA, 75 bp, synthetic construct
  source 1..75: mol_type = other DNA
tccgccagtcgtcgtgaatggctggaggcaacaggcgcttacgatcgtcgctggaatatgctgctaagtctgcgc

SEQ ID NO: 762130 - DNA, 75 bp, synthetic construct
  source 1..75: mol_type = other DNA
tacctggagcaaggcaaacgcatcaccctctcgccgcgtaactactgggtgcgcggtattgagccacgctacagc

SEQ ID NO: 762131 - DNA, 75 bp, synthetic construct
  source 1..75: mol_type = other DNA
cggacagccagtggatacgcgccgtcaataacaaagggatcaccaccggtggtgaaatcaaagggggcaaagtca

SEQ ID NO: 762132 - DNA, 75 bp, synthetic construct
  source 1..75: mol_type = other DNA
ttggctaacgtcgtggaataccagcaataaccctgcatatggaaaaacagccattaccccgtttcctcatgatgt

SEQ ID NO: 762133 - DNA, 75 bp, synthetic construct
  source 1..75: mol_type = other DNA
cagtaacctgatcggtcacggcgtgatgatccccggcacaactgttcttgcgggaaccggcagtgaagaaggggc

SEQ ID NO: 762134 - DNA, 75 bp, synthetic construct
  source 1..75: mol_type = other DNA
tgctcatgacatgagcgtgtactttgtgaagaccggggataataactggcaggtctacacccaggataggcagtg

SEQ ID NO: 762135 - DNA, 75 bp, synthetic construct
  source 1..75: mol_type = other DNA
tgttggggcagattgtgctggctaacttcgctaacaacgaaggactggcgtccgaaggcgataatgtctggtctg

SEQ ID NO: 762136 - DNA, 75 bp, synthetic construct
  source 1..75: mol_type = other DNA
ggacgcactcttcgggcctgcatctcggaatgagcaccggctttgattcaggcagttcgctggattatgtctatc

SEQ ID NO: 762137 - DNA, 75 bp, synthetic construct
  source 1..75: mol_type = other DNA
aaaatcacgttatacgatcatccttagactcaggggcaaagattctgtctcagtaaatcaggtggccaaattcag

SEQ ID NO: 762138 - DNA, 75 bp, synthetic construct
  source 1..75: mol_type = other DNA
tccgaatatgctggtccgctgggccaggcgcggttttggagtatggagtgcctggcgtctggttaaaaccaccct

SEQ ID NO: 762139 - DNA, 75 bp, synthetic construct
  source 1..75: mol_type = other DNA
tggaaaactcaaagttactcagctttccaccacaggttatctggggcaattcgacttctgtgccattgccagaat

SEQ ID NO: 762140 - DNA, 75 bp, synthetic construct
  source 1..75: mol_type = other DNA
gtgataactgaacgccggaacgtattgctccagggagctggctggttattgttgctggccccatttttcttcttc

SEQ ID NO: 762141 - DNA, 75 bp, synthetic construct
  source 1..75: mol_type = other DNA
ggaatggtggttccgccggggtagattgtgctaacacatccagattgcagggatacgttgcaggggcattgatta

SEQ ID NO: 762142 - DNA, 75 bp, synthetic construct
  source 1..75: mol_type = other DNA
gcgcttgatggagcgcgtgctggataacttgctcaataatgccctgcgctactgccattcaacagtcgaaaccag

SEQ ID NO: 762143 - DNA, 75 bp, synthetic construct
  source 1..75: mol_type = other DNA
tactccggcgtacctggtcaatgctgacgtcattcagattaaagtcgcccagggcgcgaagccgggcgaaggcgg

SEQ ID NO: 762144 - DNA, 75 bp, synthetic construct
  source 1..75: mol_type = other DNA
tcgtctgtatgccgcaggccgcgcgggtgaacgtttcggcgtgcgtaactccggtgctatcaccgtggtagaagg

SEQ ID NO: 762145 - DNA, 75 bp, synthetic construct
  source 1..75: mol_type = other DNA
gtggggcgagctttgaagacttccagcaggatctgctgaatctgtcgaaacgtgcctggctggcgcgcaagccca

SEQ ID NO: 762146 - DNA, 75 bp, synthetic construct
  source 1..75: mol_type = other DNA
gcttatccctgatctgcacgacgcagcgccattcgtcaacgaaaccggttctgactccagctcgatggataacat

SEQ ID NO: 762147 - DNA, 75 bp, synthetic construct
  source 1..75: mol_type = other DNA
cccagacgcacggcgatcaggggctggctgccgatccgatcaaggcgtacttcaacggcaccgcaggccagagct

SEQ ID NO: 762148 - DNA, 75 bp, synthetic construct
  source 1..75: mol_type = other DNA
cgcggaaagcttcggcttcggcactggcccgatggtggcgctcggctgtaaatatctgcgtatttgccatctgaa

SEQ ID NO: 762149 - DNA, 75 bp, synthetic construct
  source 1..75: mol_type = other DNA
tcgccaaactgcgctattcggtgcccggagtgacgctgatctccccgccgccgcaccatgatatctactctatcg

SEQ ID NO: 762150 - DNA, 75 bp, synthetic construct
  source 1..75: mol_type = other DNA
aaatcgccctctcctctctgccacgcattgagcaaatttttgtgaacgccccggcaggctggcgtccgcgcgata

SEQ ID NO: 762151 - DNA, 75 bp, synthetic construct
  source 1..75: mol_type = other DNA
gtgggcctgtgcttccagggggcagttagccgcattggggggcgagctttgaagacttccagcaggatctgctga

SEQ ID NO: 762152 - DNA, 75 bp, synthetic construct
  source 1..75: mol_type = other DNA
cctcaagcaggtcaatccaaaagcgatgatctccgtgaagctggtttccgaaccgggcgtaggcaccatcgcgac

SEQ ID NO: 762153 - DNA, 75 bp, synthetic construct
  source 1..75: mol_type = other DNA
aggacttagcgcagcttattttcgacctgaaacaggttaacccgaaagcgatgatctccgtgaagctggtgtctg

SEQ ID NO: 762154 - DNA, 75 bp, synthetic construct
  source 1..75: mol_type = other DNA
tatactgctggcactgattattgtggtcctgctgactactgtcagcgtcagtgtgtatatactgtgtagctggtg

SEQ ID NO: 762155 - DNA, 75 bp, synthetic construct
  source 1..75: mol_type = other DNA
tttgattgcttccactgtaggcgcaccgaaaacaccgaaggtacaaagcccagataacgcagtgacactaggaac

SEQ ID NO: 762156 - DNA, 75 bp, synthetic construct
  source 1..75: mol_type = other DNA
gggacagacttcacagcaaattttcaatatcaatgcactggcaaaagatcgctcctacgattaccgcgtttgtgc

SEQ ID NO: 762157 - DNA, 75 bp, synthetic construct
  source 1..75: mol_type = other DNA
gttatgaccgcagtcgctatcggtatggctgctggtgcaatgaccttgatcgcttccactgtaggcgcaccaaaa

SEQ ID NO: 762158 - DNA, 75 bp, synthetic construct
  source 1..75: mol_type = other DNA
tgggtagaactgattaaccagaatcctactgttacctatgaattgccgactccggttattcgaatcaaaaatcag

SEQ ID NO: 762159 - DNA, 75 bp, synthetic construct
  source 1..75: mol_type = other DNA
atgcggtgacactaggaacatcaaccgatccaaaaacagtagtacccgttctttttggtgttacccgtactggca

SEQ ID NO: 762160 - DNA, 75 bp, synthetic construct
  source 1..75: mol_type = other DNA
ttgattcattcctgaaagtacgttctcaagttcgccagatgaatttgcactctaacggtgcatgtgatccgaacg

SEQ ID NO: 762161 - DNA, 75 bp, synthetic construct
  source 1..75: mol_type = other DNA
ctataacccaattggatatatcagtgatttgactgtgcttgtaactaagaaagcctcaacgggcatttctatttc

SEQ ID NO: 762162 - DNA, 75 bp, synthetic construct
  source 1..75: mol_type = other DNA
ctaccggatggcatattaacaagaatggctctgctacgttcatgaacgcaacgatcaggggaaatattaccgctg

SEQ ID NO: 762163 - DNA, 75 bp, synthetic construct
  source 1..75: mol_type = other DNA
tgaagatgatcacccgtttgatcgtcagattatcgttccggctattagctttggtggtcttaatgcgcgtgaagg

SEQ ID NO: 762164 - DNA, 75 bp, synthetic construct
  source 1..75: mol_type = other DNA
ttgaagctactcaggttaagggtgatttcgttaaggtgattggtcgtaagttcccgcaccgtgatgttaacgttg

SEQ ID NO: 762165 - DNA, 75 bp, synthetic construct
  source 1..75: mol_type = other DNA
atggaacgcgaattcatgctttattgcgtagaaggtggcgtaggtcatgatgcctacgtcgccgggaaaagctat

SEQ ID NO: 762166 - DNA, 75 bp, synthetic construct
  source 1..75: mol_type = other DNA
gcgttgagggcggcgtaggtagcgatgcctacgtcgccgggaaaagctatccagccgatgaagttctttctaata

SEQ ID NO: 762167 - DNA, 75 bp, synthetic construct
  source 1..75: mol_type = other DNA
aagcgatgaacagcatcggcggtaactcgaactccggtgaaggcggtgaagatccggcgcgctacggcaccaaca

SEQ ID NO: 762168 - DNA, 75 bp, synthetic construct
  source 1..75: mol_type = other DNA
cgacagaagagttccagcgcgaaaccattcgccaggcgctggcacaaaataatcacaattgggccgcctgtgcgc

SEQ ID NO: 762169 - DNA, 75 bp, synthetic construct
  source 1..75: mol_type = other DNA
aggtgctggagtgcgatgcgtctgcgttgctacgttacgactcgcggcagtttattccgcttgccatcgacggtc

SEQ ID NO: 762170 - DNA, 75 bp, synthetic construct
  source 1..75: mol_type = other DNA
gaattagtcggggcgatttagctactttgaaggaactgaacaactttaaaattgatattgcccgactattgagta

SEQ ID NO: 762171 - DNA, 75 bp, synthetic construct
  source 1..75: mol_type = other DNA
tttccgctttcggtgccgccgctgcgtgagcggggcgatgacgtcactcttctggcagggtatttctgtgagcag

SEQ ID NO: 762172 - DNA, 75 bp, synthetic construct
  source 1..75: mol_type = other DNA
atgtgaaaggagcgtttactggcgctatcagtaaccgcagtgggaagtttgaaatggcggataacggcacgctgt

SEQ ID NO: 762173 - DNA, 75 bp, synthetic construct
  source 1..75: mol_type = other DNA
tggcatgacgcaactgaaaaaagagattgagattgtggcggcgtccgatctcaacgtcctgatcagcggtgagac

SEQ ID NO: 762174 - DNA, 75 bp, synthetic construct
  source 1..75: mol_type = other DNA
aaaacgtcacaatctcctggggttatttactaaaaataacgcctgttttaataagcattagcgatatgtattctg

SEQ ID NO: 762175 - DNA, 75 bp, synthetic construct
  source 1..75: mol_type = other DNA
ttacaaagacagcctttgacgaacttaaccgaatcaaaaacattacaggtctgccacactcagcagtgatgaagc

SEQ ID NO: 762176 - DNA, 75 bp, synthetic construct
  source 1..75: mol_type = other DNA
aaaacagggtatcaccacccatacggcagccagcggcaacgtcgccagcctggtgaatatggcggatcagtcatc

SEQ ID NO: 762177 - DNA, 75 bp, synthetic construct
  source 1..75: mol_type = other DNA
tggaagcggaagatatcgataccggcaaaaaatatacatggcaggcgcgcggcctggttaatgctaccggcccgt

SEQ ID NO: 762178 - DNA, 75 bp, synthetic construct
  source 1..75: mol_type = other DNA
tcagaaaaaatagattattacatcgatataatcattaaagattatgaaagcgtcaaagaaaatgcttatcttatc

SEQ ID NO: 762179 - DNA, 75 bp, synthetic construct
  source 1..75: mol_type = other DNA
ttttcaaaaagaattagcgtacttacaaaatgtaattctttataatgactcgtctcttcgtctggattttttagg

SEQ ID NO: 762180 - DNA, 75 bp, synthetic construct
  source 1..75: mol_type = other DNA
tattcgccaggcgctggcacaaaatcatcacaactgggctgccagcgcacggatgctggaaaccgacgtcgccaa

SEQ ID NO: 762181 - DNA, 75 bp, synthetic construct
  source 1..75: mol_type = other DNA
tggcgcagccattccgctacctggcacataacggtgaaatcaacaccatcaccggcaaccgtcagtgggcacgcg

SEQ ID NO: 762182 - DNA, 75 bp, synthetic construct
  source 1..75: mol_type = other DNA
acgactacttccgccagcagtttgctcaggtaaccaacccgccaatcgacccgctgcgcgaagcgcatgttatgt

SEQ ID NO: 762183 - DNA, 75 bp, synthetic construct
  source 1..75: mol_type = other DNA
gtaacggcatcaacaaaggcttgtacaaaatcatgtccaaaatgggcatctccaccatcgcctcttaccgctgct

SEQ ID NO: 762184 - DNA, 75 bp, synthetic construct
  source 1..75: mol_type = other DNA
gccatctgcctgtttcaccagcgcttttccactaacaccgtaccgcgctggccgctggcgcagccgttccgctac

SEQ ID NO: 762185 - DNA, 75 bp, synthetic construct
  source 1..75: mol_type = other DNA
tctcgaagccgacaaagacttctacgtctgtagcctgtcgaatctggtcaatatttataaaggtctgtgtatgcc

SEQ ID NO: 762186 - DNA, 75 bp, synthetic construct
  source 1..75: mol_type = other DNA
cgcagaaagcttcggcttcggcactggcccgatggtggcgctcggctgtaaatatctacgtatttgccatctgaa

SEQ ID NO: 762187 - DNA, 75 bp, synthetic construct
  source 1..75: mol_type = other DNA
attccctgcgtacttaaccgggaaaacccattctggcaagatatgacggaacaacatttaccggtgctgtttacc

SEQ ID NO: 762188 - DNA, 75 bp, synthetic construct
  source 1..75: mol_type = other DNA
ttctttcccgccactggtcgcagctgtcgcccgattttccgttagaggaatttgtctgttatgcccgcgagcaag

SEQ ID NO: 762189 - DNA, 75 bp, synthetic construct
  source 1..75: mol_type = other DNA
agtatggcgatattcagcgcgttggcgatgaccgcagtttgcgggtcgatgtgcgcgtgctggcggcgactaacc

SEQ ID NO: 762190 - DNA, 75 bp, synthetic construct
  source 1..75: mol_type = other DNA
tattgtctgtattctgggtaaaaccggcgttaacttcggtgcgggcatgaccggcggcttcgcttacgttctcga

SEQ ID NO: 762191 - DNA, 75 bp, synthetic construct
  source 1..75: mol_type = other DNA
gaactgatggtgatcgacacccgcagtgggcgtattctgcactcggcagaaaccgatgacgatctgaaaagccgc

SEQ ID NO: 762192 - DNA, 75 bp, synthetic construct
  source 1..75: mol_type = other DNA
gctctgcgcgctgttcatcaacagtttggcgatacggtaaaagtggtggtgccgatgggctatccgcctaataac

SEQ ID NO: 762193 - DNA, 75 bp, synthetic construct
  source 1..75: mol_type = other DNA
cactcacggcgacccgtcgctacgcttttcacaatgcagcgacatcgcacgcagtggtttctcaggtcattgaaa

SEQ ID NO: 762194 - DNA, 75 bp, synthetic construct
  source 1..75: mol_type = other DNA
ctacaaaaagctgtgtaatacgcaatgcggcgcaggccttaactgacgatggaactctatacggagccacaattc

SEQ ID NO: 762195 - DNA, 75 bp, synthetic construct
  source 1..75: mol_type = other DNA
ccactcgacgataaagcgcgtatgggtctatatcactggcgtgaccgatcaccatcagaacagccagccccggtc

SEQ ID NO: 762196 - DNA, 75 bp, synthetic construct
  source 1..75: mol_type = other DNA
aagaaatacccgacggtgctgacgagcttgttacttttagcggcggcttatatgaattcgaaacgtctgcgggtt

SEQ ID NO: 762197 - DNA, 75 bp, synthetic construct
  source 1..75: mol_type = other DNA
ctgcctgatacaaagtccggacaccctttcacctgcccacttgcacctccagccattgcagttgtccagtgccag

SEQ ID NO: 762198 - DNA, 75 bp, synthetic construct
  source 1..75: mol_type = other DNA
ctgtggctaccggatttgcagttgtataaaaagagtcctcagtcagagttgtcaaaactcaacctctacgttcgc

SEQ ID NO: 762199 - DNA, 75 bp, synthetic construct
  source 1..75: mol_type = other DNA
ggcgtgatccccagggttctgaagaatactcgacgataaagcgcgtatgggtctacatcactggtgtgaccgatc

SEQ ID NO: 762200 - DNA, 75 bp, synthetic construct
  source 1..75: mol_type = other DNA
gttttggtggactttccgcgctgtatgccggactgcactggcctgaacgctttggctgtgtattaagccagtcag

SEQ ID NO: 762201 - DNA, 75 bp, synthetic construct
  source 1..75: mol_type = other DNA
gcagatcgtgtggaagaagagggtgaagtccgcgtctttatcgaacataacgacaacttccgcctgccaaccaat

SEQ ID NO: 762202 - DNA, 75 bp, synthetic construct
  source 1..75: mol_type = other DNA
ggccgcatcggggcgggcagcaagagggcgtgttacttgaaaagcttaaagctggtgaagttagcgccgaaggtc

SEQ ID NO: 762203 - DNA, 75 bp, synthetic construct
  source 1..75: mol_type = other DNA
atgccaactggcgcggcagctactgttttattcccaccgaacgtgctgacattttttctacaccatcaccagatc

SEQ ID NO: 762204 - DNA, 75 bp, synthetic construct
  source 1..75: mol_type = other DNA
ggtggccgcgccggggcgggccgcaagagggcgtgttacttgaacaacttaaagcgggtgaagttagcgccgaag

SEQ ID NO: 762205 - DNA, 75 bp, synthetic construct
  source 1..75: mol_type = other DNA
gcgccaggaattaagcgttcgtaaatcatttggcgaagatgccgaacggctggctaataacaagtggcttaataa

SEQ ID NO: 762206 - DNA, 75 bp, synthetic construct
  source 1..75: mol_type = other DNA
tgacaacatctatcgttacaccctggcaggtacggaagtatccgcactgctgggccgtatgccttcagcggtagg

SEQ ID NO: 762207 - DNA, 75 bp, synthetic construct
  source 1..75: mol_type = other DNA
ctcgtgagggtaacgacttctaccacgaaatgaccgactccaacgttatcgacaaagtatccctggtgtatggcc

SEQ ID NO: 762208 - DNA, 75 bp, synthetic construct
  source 1..75: mol_type = other DNA
ggcgtgctgaccaactcgcagggcttgccgttgcagccggaaatcgacgttccggcgggggcgacgaatgttgcg

SEQ ID NO: 762209 - DNA, 75 bp, synthetic construct
  source 1..75: mol_type = other DNA
tctggcgtgccgtgcccattcaactggccggcctcgcactgttgattgtcggcaatttgctgtcgccacacgtct

SEQ ID NO: 762210 - DNA, 75 bp, synthetic construct
  source 1..75: mol_type = other DNA
gccatcctgggtatggatgaactgtctgaagaagacaaactggtcgtagcgcgtgctcgtaagatccagcgcttc

SEQ ID NO: 762211 - DNA, 75 bp, synthetic construct
  source 1..75: mol_type = other DNA
acatgatggagcttattcgtaacatcgcgatcgagcactccggttattcagtgtttgcgggcgtaggtgaacgta

SEQ ID NO: 762212 - DNA, 75 bp, synthetic construct
  source 1..75: mol_type = other DNA
tttggcgaggacggcacggtgacggcgatcttacccggcgacagcgatgtgaccgagttagggcaactgacactg

SEQ ID NO: 762213 - DNA, 75 bp, synthetic construct
  source 1..75: mol_type = other DNA
acggcgatatcgcctatacccgcgacggcaacttgcaggtgaacgccgacggcgtactgaccaactcgcagggct

SEQ ID NO: 762214 - DNA, 75 bp, synthetic construct
  source 1..75: mol_type = other DNA
atgaaattcctgacggcgctgatgaacttatcactttcggtggcgggctgtacgagtttgaaacgtcggctgggt

SEQ ID NO: 762215 - DNA, 75 bp, synthetic construct
  source 1..75: mol_type = other DNA
gcgccgggcgcgatgctcgaccagaacaacatcatgccgaccgggctgcaattcgggagcggcgtacgcattgtc

SEQ ID NO: 762216 - DNA, 75 bp, synthetic construct
  source 1..75: mol_type = other DNA
aaaccggcctctcggcgcaggatgctgaaatgagcgcgattgccaacaacatcgccaacgttaacaccacaggct

SEQ ID NO: 762217 - DNA, 75 bp, synthetic construct
  source 1..75: mol_type = other DNA
acgccgcatccggcaaccgcggcccaaaacaatacggaatttaccaccatgaacgcagcactatggatcagcaaa

SEQ ID NO: 762218 - DNA, 75 bp, synthetic construct
  source 1..75: mol_type = other DNA
actggaaaataccgcttttgccgtgtttagccttggtgacacctcttatgagtttttctgccagtccggtaaaga

SEQ ID NO: 762219 - DNA, 75 bp, synthetic construct
  source 1..75: mol_type = other DNA
gcgggttaatgtctacccagccaacgcaactgctgaactttgatcccagtaccatgcagtgggcgacctcttcac

SEQ ID NO: 762220 - DNA, 75 bp, synthetic construct
  source 1..75: mol_type = other DNA
cggggatcgcgctgggggcagtcataactgcgctgatggtggtgttcctgcgtctgatgatgttccgtaaaggca

SEQ ID NO: 762221 - DNA, 75 bp, synthetic construct
  source 1..75: mol_type = other DNA
ctcaactttatccgcagggtaagaccgcgatgttcctggcgtttatggggattagtgagggtgcgattccgtttg

SEQ ID NO: 762222 - DNA, 75 bp, synthetic construct
  source 1..75: mol_type = other DNA
ggtatccgtaccgtgctgaccgccgcgggtgagaagggcgcgctgatgtatgcgatgggtatcgcagcagcgacc

SEQ ID NO: 762223 - DNA, 75 bp, synthetic construct
  source 1..75: mol_type = other DNA
gcaatcgaccttggtggcccgatcaacaaagcggcaggtttcgttgccttcagctttaccactgaccacgtatta

SEQ ID NO: 762224 - DNA, 75 bp, synthetic construct
  source 1..75: mol_type = other DNA
tgtggcgaactctatcggtggcaaactggcgttcccggctgggtttatcggcggcttgatgtctacccagccgac

SEQ ID NO: 762225 - DNA, 75 bp, synthetic construct
  source 1..75: mol_type = other DNA
cgtaagatttatcgtgactgcatggcagaagggaagggggttgttgaaatggacaacgggaaagcaaagggcgag

SEQ ID NO: 762226 - DNA, 75 bp, synthetic construct
  source 1..75: mol_type = other DNA
caaaacctgcgttgtggcttgcccgtatggcgcgatggaagtggtggtgcgtccggtgattcgcaatagcggcgc

SEQ ID NO: 762227 - DNA, 75 bp, synthetic construct
  source 1..75: mol_type = other DNA
cttggtgtggcaccgtcgattcatgttatcgcccggcaactgatggataaggcacttaaagaggtgagactgtga

SEQ ID NO: 762228 - DNA, 75 bp, synthetic construct
  source 1..75: mol_type = other DNA
agggaccgtctccgcatcgctgaatatggtgatcctgatggtgatgtcggtctcggtcgaaatcggccgctggct

SEQ ID NO: 762229 - DNA, 75 bp, synthetic construct
  source 1..75: mol_type = other DNA
ttactaagaacgctctggctactctgaaggaactgaacaactttaaaattgatattgcccgactattgagcatca

SEQ ID NO: 762230 - DNA, 75 bp, synthetic construct
  source 1..75: mol_type = other DNA
ctgctttactgaccgcaccggtgacattttctgcactggcgcaacagcccgtcgaagtagcccgcgtcagcgtgt

SEQ ID NO: 762231 - DNA, 75 bp, synthetic construct
  source 1..75: mol_type = other DNA
gcattataacgaatggcatccgcatagtgcgctgggttatcgctcgccacgggaatatctgcggcaagcgggctt

SEQ ID NO: 762232 - DNA, 75 bp, synthetic construct
  source 1..75: mol_type = other DNA
gctggtgaacgcaggcgactataaattcaaacaaatcgccagcgaaaaactgcttatcgtggtgacttcaacaca

SEQ ID NO: 762233 - DNA, 75 bp, synthetic construct
  source 1..75: mol_type = other DNA
cttgccgctacacccgccgcagaaatgccgggtatcaccatcatatccgcctcgcaaacgggtaatgctcgccgg

SEQ ID NO: 762234 - DNA, 75 bp, synthetic construct
  source 1..75: mol_type = other DNA
cgaaagacgttgagcaggcacttctggaagtgattgccgaatttggtggcatggacaccgaagcggcggatgaat

SEQ ID NO: 762235 - DNA, 75 bp, synthetic construct
  source 1..75: mol_type = other DNA
gatcaatgacggtgcccacatttatgtctgcggtgacgctaattgcatggcgaaagacgttgagcaggcacttct

SEQ ID NO: 762236 - DNA, 75 bp, synthetic construct
  source 1..75: mol_type = other DNA
cctgtcaccgtcgagggcaaaacgttgcctctgaacgaagcgctacagtggcacttcgaactgaccgtcaacacc

SEQ ID NO: 762237 - DNA, 75 bp, synthetic construct
  source 1..75: mol_type = other DNA
gcactttgaactgaccgtcaacaccgcgaatattgttgagaactacgccacgcttacccgcagcgaaacgctgct

SEQ ID NO: 762238 - DNA, 75 bp, synthetic construct
  source 1..75: mol_type = other DNA
catctgtgatgaaaatggcgctccagttttcactgttgccgatatcactggtgaagcagatcctgagcgcggcgc

SEQ ID NO: 762239 - DNA, 75 bp, synthetic construct
  source 1..75: mol_type = other DNA
gccctcctggctgcaattcatgatgtaaacgaactgggaaagactacgaactcacaggagaagacgagttctggt

SEQ ID NO: 762240 - DNA, 75 bp, synthetic construct
  source 1..75: mol_type = other DNA
atgttgggacttgaaccgaagaacacggcggtgcggagtccggagagtaacggaatagcagagagcatcgtgaaa

SEQ ID NO: 762241 - DNA, 75 bp, synthetic construct
  source 1..75: mol_type = other DNA
gctttgtcatcgaccacatccactactacgccgatgggcactgttgcaaatagtcggtggtgataaacttatcat

SEQ ID NO: 762242 - DNA, 75 bp, synthetic construct
  source 1..75: mol_type = other DNA
cagccgcactatggcggcatcgtggaacggatcatcggcacggcgatgcagatgattcacgacgaactgccggga

SEQ ID NO: 762243 - DNA, 75 bp, synthetic construct
  source 1..75: mol_type = other DNA
tggattggcagatgagcggcaagcccttgctgctctacctagacaacgcggccgagttcaagagcgaggccctgc

SEQ ID NO: 762244 - DNA, 75 bp, synthetic construct
  source 1..75: mol_type = other DNA
ggtcggttatgtagaacaggaactagcggaatattgcggaaaggtgaaacagactattttgcagatcgccacaat

SEQ ID NO: 762245 - DNA, 75 bp, synthetic construct
  source 1..75: mol_type = other DNA
atggcccgttttcgtcgtgtgaatattgacggtaaatctattaccgaaaccgcagtatctgccgcagagcttaaa

SEQ ID NO: 762246 - DNA, 75 bp, synthetic construct
  source 1..75: mol_type = other DNA
ttgatggtaaatccatcactgaaacccgcctcgctggtgctgaattaaaacctggtgaactggttaaactggaag

SEQ ID NO: 762247 - DNA, 75 bp, synthetic construct
  source 1..75: mol_type = other DNA
gctactgcgcggtgcagttcgtaccagtgcaatgaatgatgttccggtcagcggtcatatcgtcaatcagatagc

SEQ ID NO: 762248 - DNA, 75 bp, synthetic construct
  source 1..75: mol_type = other DNA
aggagttgtgccgccagttgggggtaaaggttcgcggcaatattcacgaactgattaatgcctgtgtacacgaat

SEQ ID NO: 762249 - DNA, 75 bp, synthetic construct
  source 1..75: mol_type = other DNA
acagtaccggatgatgttaagaggctatatactgaagcagcaaccagtgactttgctgcgttagcccaaacggct

SEQ ID NO: 762250 - DNA, 75 bp, synthetic construct
  source 1..75: mol_type = other DNA
gtgattcttggtcaggtgttgactgcaggggcagggcagaatccggcaagacaatcggctattaaaggtggtctt

SEQ ID NO: 762251 - DNA, 75 bp, synthetic construct
  source 1..75: mol_type = other DNA
cccatgtattttctctgcccgcttttctaccgattcgcgcaattctctcagttactggtgcctccctgttaacgc

SEQ ID NO: 762252 - DNA, 75 bp, synthetic construct
  source 1..75: mol_type = other DNA
acttggttgcggtgctattgtgacaggtgtcgcgggacagttactggatattacgtatgaagggatttgtcgtat

SEQ ID NO: 762253 - DNA, 75 bp, synthetic construct
  source 1..75: mol_type = other DNA
tatatcgttaacccagcattccatgaaggtaaaaccattgcagatgcaatcgcagctaatgctacggttgttgct

SEQ ID NO: 762254 - DNA, 75 bp, synthetic construct
  source 1..75: mol_type = other DNA
gctgttacgccgcgaccaaagccgcgctcaatagcttcacgcgctcctggtcgaaagagctgggtaagcacggta

SEQ ID NO: 762255 - DNA, 75 bp, synthetic construct
  source 1..75: mol_type = other DNA
atgttgatgggcgttgcgattaatcaacgcccggaattgttccacggcgttatcgcccaggtaccgtttgttgat

SEQ ID NO: 762256 - DNA, 75 bp, synthetic construct
  source 1..75: mol_type = other DNA
gctgctgcgcggtgcggtccgcaccagcgcgatgaatgatgttccggtcagcggtcatatcgtcaaccagatagc

SEQ ID NO: 762257 - DNA, 75 bp, synthetic construct
  source 1..75: mol_type = other DNA
gcgaggcgttaaaatcggcggggatcactgtgttgtttaaccaggcaacggtaatcgccacatcaaaacggcaat

SEQ ID NO: 762258 - DNA, 75 bp, synthetic construct
  source 1..75: mol_type = other DNA
acacatctacacaacccgtggcgtgggcagtttgtatggtttgcgtctgaacagccgcccggaagtaacgatgct

SEQ ID NO: 762259 - DNA, 75 bp, synthetic construct
  source 1..75: mol_type = other DNA
ttagcgaagcgctgaaatcagcgggtatcaaggtgttgtttaacgaggcaacggttctctccacacagaatcgac

SEQ ID NO: 762260 - DNA, 75 bp, synthetic construct
  source 1..75: mol_type = other DNA
ctatgggccagggagcctggcacgaggccaatatgtctggcgataaaatcgaccacggcggctgtgtgaatacgc

SEQ ID NO: 762261 - DNA, 75 bp, synthetic construct
  source 1..75: mol_type = other DNA
agatattgagaacagtaagctggtggtgatgtttggtaataacccagccgaaacaagaatgagcggcggcggcat

SEQ ID NO: 762262 - DNA, 75 bp, synthetic construct
  source 1..75: mol_type = other DNA
ggaacggagaaaaatcacttaattggcgaggcgttaaagtcggcggggatcactgtgttatttaacgaagccact

SEQ ID NO: 762263 - DNA, 75 bp, synthetic construct
  source 1..75: mol_type = other DNA
tgcttgcatggtaacaccatcacctgttctggatcatgacatctggctgcatatccgcctgctgatgggcgagat

SEQ ID NO: 762264 - DNA, 75 bp, synthetic construct
  source 1..75: mol_type = other DNA
agtgccagcgatgcaaaacgcttccttgatacgctcgccatcgggcactgtgcttgcatggtaacaccatcacct

SEQ ID NO: 762265 - DNA, 75 bp, synthetic construct
  source 1..75: mol_type = other DNA
gcgttattggcgcggactgccatgcagtaggcaataaagttctggaccgcgtttttagcaaccatgacttcagag

SEQ ID NO: 762266 - DNA, 75 bp, synthetic construct
  source 1..75: mol_type = other DNA
aaaattctttttcttgccgatctccattactcccgctttgttccactcaccctgatatcagaagccattgccctt

SEQ ID NO: 762267 - DNA, 75 bp, synthetic construct
  source 1..75: mol_type = other DNA
gtgggctgcgtggctataacccgaatgatagctggaacccatatctggagctgagcgccagctacaatttcctca

SEQ ID NO: 762268 - DNA, 75 bp, synthetic construct
  source 1..75: mol_type = other DNA
cgacagctggagcccttacctggagctgagcgccagctacaacttcctcggcgactggagtgtttacggtaccgc

SEQ ID NO: 762269 - DNA, 75 bp, synthetic construct
  source 1..75: mol_type = other DNA
atgcaatcccatcaaatgttcctcctcagtgggatctagatttgaaaggtcagcaatattcagagcctaccaagc

SEQ ID NO: 762270 - DNA, 75 bp, synthetic construct
  source 1..75: mol_type = other DNA
cgaaggctacagcaagaactcaattcccatcgggcgttcaggacgactcgccgaagtggctgatttcgtgtgtta

SEQ ID NO: 762271 - DNA, 75 bp, synthetic construct
  source 1..75: mol_type = other DNA
gcgcgccagtgctggcgctggcggggaatacagtgtcggtaaagcgcatgcaaaaccatgcaccttatgcatgca

SEQ ID NO: 762272 - DNA, 75 bp, synthetic construct
  source 1..75: mol_type = other DNA
gataaaaaatacggggattttcatgcaaagccatgcaccttatggatgcatggctttttcgggaaaaatagcgga

SEQ ID NO: 762273 - DNA, 75 bp, synthetic construct
  source 1..75: mol_type = other DNA
aatgcgttcaataaggttcatgctgatgcatgggcttctggtgatccatcgggactatttaagtttgcccaggaa

SEQ ID NO: 762274 - DNA, 75 bp, synthetic construct
  source 1..75: mol_type = other DNA
aattttgcgcccagaaacaggtgcagcaattactctgccagagatgcaggagtattccaaaatgtacctgcctca

SEQ ID NO: 762275 - DNA, 75 bp, synthetic construct
  source 1..75: mol_type = other DNA
tatcctggtcaattagagaaaattcagtctggtatgaagtgggcagacgaagaccagcgcaattctatcggcacc

SEQ ID NO: 762276 - DNA, 75 bp, synthetic construct
  source 1..75: mol_type = other DNA
gcgcttaatggaacgcgtgctggataatttactcaataacgcgctgcgttactgccattcaacggttgaaaccag

SEQ ID NO: 762277 - DNA, 75 bp, synthetic construct
  source 1..75: mol_type = other DNA
ctacgtgctggcagttggtcctgttccttatctttattacctccatcagatgcgattgctggatatcgccctgat

SEQ ID NO: 762278 - DNA, 75 bp, synthetic construct
  source 1..75: mol_type = other DNA
actggagatgagcgataacctgagcgccgccgaatcccaggcgttgaatcgtgatatcagtcaacttgaagcttt

SEQ ID NO: 762279 - DNA, 75 bp, synthetic construct
  source 1..75: mol_type = other DNA
ccggtaaaaatacaaggacaagagccattacaggcattgatggtgatatccgaatcaacaaagcattatggatga

SEQ ID NO: 762280 - DNA, 75 bp, synthetic construct
  source 1..75: mol_type = other DNA
tacaaggacaagagccattacaggcattgatggtgacatccgaatcaacaaagcattatggatgattgccgaaca

SEQ ID NO: 762281 - DNA, 75 bp, synthetic construct
  source 1..75: mol_type = other DNA
cagtttgttccatctgtcttttctggtgataaacatgaatcccggagtgagcgttatacatatatcccaaccatc

SEQ ID NO: 762282 - DNA, 75 bp, synthetic construct
  source 1..75: mol_type = other DNA
gatgttcactcgctgcgtagagataggttattaacagaatatataattgccagttgtatgctatcgcgaaagagt

SEQ ID NO: 762283 - DNA, 75 bp, synthetic construct
  source 1..75: mol_type = other DNA
cccaacgttttctgaataaagggatgtctcgggaagacgttgcagaggtgacagctttatctcttgcagagattg

SEQ ID NO: 762284 - DNA, 75 bp, synthetic construct
  source 1..75: mol_type = other DNA
aggaatgtctcgggaagacgttgcagagttggcaaatttacctcttgcagagattgataagctaattaactctaa

SEQ ID NO: 762285 - DNA, 75 bp, synthetic construct
  source 1..75: mol_type = other DNA
ggcggcgactggcaggaagataatggcgtctggcaccagaacgtgttcgcttattatctctccatctcctgtaac

SEQ ID NO: 762286 - DNA, 75 bp, synthetic construct
  source 1..75: mol_type = other DNA
tatgattggtcagatgccaacgtttggggttattcgaatggctgggcgcggcatgagataaaaaaagaaacactt

SEQ ID NO: 762287 - DNA, 75 bp, synthetic construct
  source 1..75: mol_type = other DNA
atggtgaacgaaagaagcattaatgggcaagctggcaaaattgtcagcaaatgggtaacactggcaaacaatgca

SEQ ID NO: 762288 - DNA, 75 bp, synthetic construct
  source 1..75: mol_type = other DNA
ccaggcagacgttggcgcagtggtttgaagataagggaagacaagaggtaagacaggaatgcgccctgcgtcttc

SEQ ID NO: 762289 - DNA, 75 bp, synthetic construct
  source 1..75: mol_type = other DNA
catccttgctgacgtttgccagtggcaatacagaggcgacgggtgtatgtacgctggcggaccagtagcaaacga

SEQ ID NO: 762290 - DNA, 75 bp, synthetic construct
  source 1..75: mol_type = other DNA
gtcaaaaattacgcttggcaataatgttatatcaaaatgataaggatgctaaagctaatgaaattattaagcaaa

SEQ ID NO: 762291 - DNA, 75 bp, synthetic construct
  source 1..75: mol_type = other DNA
agatttttgatttattagaaaatggttggttggctggagctgctaatattttaaaagaagagcagctccatgaag

SEQ ID NO: 762292 - DNA, 75 bp, synthetic construct
  source 1..75: mol_type = other DNA
acgctggcggaccagtagcaaacgataaagacgagccgacaagcgatcctaaagccgacagatgcagccaccgct

SEQ ID NO: 762293 - DNA, 75 bp, synthetic construct
  source 1..75: mol_type = other DNA
tggaagggattaacttacaacagctacccgatcgaggctactggcttcgaaatgaaaaacgagggcgtttattcg

SEQ ID NO: 762294 - DNA, 75 bp, synthetic construct
  source 1..75: mol_type = other DNA
ttattgattccgtggacgctggtgtgggcgcggtgattgacttgttcgaactggacttgtcgcccctgggtggcg

SEQ ID NO: 762295 - DNA, 75 bp, synthetic construct
  source 1..75: mol_type = other DNA
tgccccccgcattgatgggtatgggaccagtgcctgccacgcaaaaagcgttacaactggcggggctgcagctgg

SEQ ID NO: 762296 - DNA, 75 bp, synthetic construct
  source 1..75: mol_type = other DNA
caggatgaactggcactaaattcacagcgtaaagcggcagcggcaattgaatctggtgcttttacagccgaaatt

SEQ ID NO: 762297 - DNA, 75 bp, synthetic construct
  source 1..75: mol_type = other DNA
aaaacgctggggctggcaacactgtgcattggtggcggccagggaattgcgatggtgattgaacggttgaattaa

SEQ ID NO: 762298 - DNA, 75 bp, synthetic construct
  source 1..75: mol_type = other DNA
cctgtcagcgcccgttgcgccgcagcattcgcgttaatacgctgaaaatctccgttgctgatttcctgcaattaa

SEQ ID NO: 762299 - DNA, 75 bp, synthetic construct
  source 1..75: mol_type = other DNA
ttatggaagaatcggcggcgctggcggcaggcctaaaaccactggcacgcattaaaagctatgccagcggcggcg

SEQ ID NO: 762300 - DNA, 75 bp, synthetic construct
  source 1..75: mol_type = other DNA
ggcacgcgataaaacgctggggctggcaacgctatgtattggtggtggtcagggaattgcgatggtgattgaacg

SEQ ID NO: 762301 - DNA, 75 bp, synthetic construct
  source 1..75: mol_type = other DNA
ctgaaggcatggtgatggctgctggccccggcgggaaagatatcttcctgttaagcccggatgctggtgctaaac

SEQ ID NO: 762302 - DNA, 75 bp, synthetic construct
  source 1..75: mol_type = other DNA
tccggcattcgttctgcttacccagatccacaggcactgattggtcgtcacaccattatggtggctaacctggct

SEQ ID NO: 762303 - DNA, 75 bp, synthetic construct
  source 1..75: mol_type = other DNA
cctgtttgttcatggctatgtgacggtgaacggtgcgaagatgtccaagtctcgcggcacctttattaaagccag

SEQ ID NO: 762304 - DNA, 75 bp, synthetic construct
  source 1..75: mol_type = other DNA
tgctctacagcagattcaaccagaatcttggcaagctatctgggatgccgaaatcgcgccccaaatggaggcttt

SEQ ID NO: 762305 - DNA, 75 bp, synthetic construct
  source 1..75: mol_type = other DNA
tatgagcaccattgatcgcatggagcgcaatggcgagttcccgcagcgattctggattactgataagcgttgtgc

SEQ ID NO: 762306 - DNA, 75 bp, synthetic construct
  source 1..75: mol_type = other DNA
ttccacgtgaactggacgaacaacaaaaagcagcacttgctgcagatattaccgatgttattattcgccatctga

SEQ ID NO: 762307 - DNA, 75 bp, synthetic construct
  source 1..75: mol_type = other DNA
gaagaaggcttcttgcacgtcttcccacaaatttatgactgcgaaggcttcttcgttgctcgtctgcgtaaaact

SEQ ID NO: 762308 - DNA, 75 bp, synthetic construct
  source 1..75: mol_type = other DNA
agtccgtatctgcgccagggcgacaaccgcctgtgtgtgatggtgatgcgctggagcgccggcacctggcttgaa

SEQ ID NO: 762309 - DNA, 75 bp, synthetic construct
  source 1..75: mol_type = other DNA
tccacaaaattctctccagagaagactggcaaaatcagaatatcactcaccttaaccgcctgcccgcccatccct

SEQ ID NO: 762310 - DNA, 75 bp, synthetic construct
  source 1..75: mol_type = other DNA
acgcaataacccaacttcaggcgagcgaaagcccacggcgcgatgctgaaatcctgctggagcatgttaccggca

SEQ ID NO: 762311 - DNA, 75 bp, synthetic construct
  source 1..75: mol_type = other DNA
ggatgagaaactgaaaccccagctggagcaggaattcagggaaaaccggttgcggacttcagaaggtatgggcag

SEQ ID NO: 762312 - DNA, 75 bp, synthetic construct
  source 1..75: mol_type = other DNA
caacaaaaacagcgggtggtggcattctgcatgatggtaaatcggcgatttccagtctggcgacggatatccagt

SEQ ID NO: 762313 - DNA, 75 bp, synthetic construct
  source 1..75: mol_type = other DNA
ccatacctgtgaagcgctggccaacaatgtgctgaagagggagcttaaggtggattcctcaaaaggcggcaagac

SEQ ID NO: 762314 - DNA, 75 bp, synthetic construct
  source 1..75: mol_type = other DNA
gcctggggattaaacttgccgaaacgcacaacaaaggttatcgctggcagcatgaagccgttattgcccttgcct

SEQ ID NO: 762315 - DNA, 75 bp, synthetic construct
  source 1..75: mol_type = other DNA
ggaggagtggtatcgcgggcgcgatgtttacccgcaagccgcgccagtggcggaggatgtattgttactttccag

SEQ ID NO: 762316 - DNA, 75 bp, synthetic construct
  source 1..75: mol_type = other DNA
gtctgcgtaaaactcaggcgattcccgcgttgcctgcgccgaaatataaagtgggcaattttccgtttaccccgg

SEQ ID NO: 762317 - DNA, 75 bp, synthetic construct
  source 1..75: mol_type = other DNA
aaccttgccgtattcttgatctcgggacgggtaccggggcgattgcgcttgcgctggctagcgagcgcccggact

SEQ ID NO: 762318 - DNA, 75 bp, synthetic construct
  source 1..75: mol_type = other DNA
tggtgaaacgcagctgactgacgaacaatgtcagcaacttgatgcgctactgacgcgtcgtcgcgatggtgaacc

SEQ ID NO: 762319 - DNA, 75 bp, synthetic construct
  source 1..75: mol_type = other DNA
cgcaagccgcgccagtggcggatgatgtattggttactttccagcatcagccgattggtttagccaaacggattg

SEQ ID NO: 762320 - DNA, 75 bp, synthetic construct
  source 1..75: mol_type = other DNA
ctgggatggaaagataaccaggaaaatgcaagaatgttttatgcgttcatcggatgcattatcagtgccattact

SEQ ID NO: 762321 - DNA, 75 bp, synthetic construct
  source 1..75: mol_type = other DNA
gataaccagtacagcaatgcgtattcactactgagttcgccgcatgacacctcttgttatcagattgccgttcgg

SEQ ID NO: 762322 - DNA, 75 bp, synthetic construct
  source 1..75: mol_type = other DNA
taccgaacaggtgaaacgcttcacgctggtgtcaaccgatggcaaaccgctgcctgcgttcaccggcggaagtca

SEQ ID NO: 762323 - DNA, 75 bp, synthetic construct
  source 1..75: mol_type = other DNA
taaccactctgcgcccttcaccactggcgaagggaaacccgcagcacaccaatcttgttgagatcgaaaaggttt

SEQ ID NO: 762324 - DNA, 75 bp, synthetic construct
  source 1..75: mol_type = other DNA
cctatacccagacccatgaggaaatctctacaccggccatcggccccgtcctggttactcaacatgccatcgatc

SEQ ID NO: 762325 - DNA, 75 bp, synthetic construct
  source 1..75: mol_type = other DNA
cgattgtatgtaatttgtaaatccaatcctcgttttaaggctgttcagggacgcaaaaaaagcgttgattccgaa

SEQ ID NO: 762326 - DNA, 75 bp, synthetic construct
  source 1..75: mol_type = other DNA
gatgtaataacctgcgcaattgaaaacctttatgaaaacctgccgtatgaagaagcacaggatgaatataccggt

SEQ ID NO: 762327 - DNA, 75 bp, synthetic construct
  source 1..75: mol_type = other DNA
ccctgaatgggcagccaaaattacggggatcccggaagatcgcatcataaaactcgcccgcgaaattggcaccac

SEQ ID NO: 762328 - DNA, 75 bp, synthetic construct
  source 1..75: mol_type = other DNA
gatcagccatttctcgataaatactgcatcggttatgacgaaaaaactttaccggcggatgccccgcgcaatggc

SEQ ID NO: 762329 - DNA, 75 bp, synthetic construct
  source 1..75: mol_type = other DNA
atgttgcctattttgacgggcaatgtcggcatcagcggcggaaatagtggcgcgcgtgaatcgacctataccatt

SEQ ID NO: 762330 - DNA, 75 bp, synthetic construct
  source 1..75: mol_type = other DNA
ccacgcattctccctggagttagtgcatgggccagggagcctggcacgaggccaatatgtctggcgataaaatcg

SEQ ID NO: 762331 - DNA, 75 bp, synthetic construct
  source 1..75: mol_type = other DNA
tatgacccgctcttctccatcagcctcggcggtcaaacgcctgatgaactgctacggcggttcactcaaccagta

SEQ ID NO: 762332 - DNA, 75 bp, synthetic construct
  source 1..75: mol_type = other DNA
gcaacgacgagtatggcaatcatcaagtacgtgcctgtttgcgcggtcggtccatccgtcgacgtattaatcatc

SEQ ID NO: 762333 - DNA, 75 bp, synthetic construct
  source 1..75: mol_type = other DNA
gttcaagtacctgatggtgatcaacgacgacaaccaaaaacgtgttcttgtcacagtgtttgagcgaaatgagta

SEQ ID NO: 762334 - DNA, 75 bp, synthetic construct
  source 1..75: mol_type = other DNA
tggccggcctctgacggggattttttgtctggtgttacagataacgctgctgggctggataccggcaacaatatg

SEQ ID NO: 762335 - DNA, 75 bp, synthetic construct
  source 1..75: mol_type = other DNA
atgctgatggcagctccggtgtgggctgtggtgatgcttctgcggttgcccggcacaccaccacagcccacaccg

SEQ ID NO: 762336 - DNA, 75 bp, synthetic construct
  source 1..75: mol_type = other DNA
ataagctggccgacggcgcaggcgcgggctggctcgcttgcagtcacacacttggctatgggctttgcgcgttgt

SEQ ID NO: 762337 - DNA, 75 bp, synthetic construct
  source 1..75: mol_type = other DNA
taactgcattatttgaattattctgtttcgttatatcagttcctgtggttgccatttacttaatttttatattct

SEQ ID NO: 762338 - DNA, 75 bp, synthetic construct
  source 1..75: mol_type = other DNA
acacctccgacgatctgattgtaaatatcattatgggcgtgatgttcctggtgttacccgcattctggctggggg

SEQ ID NO: 762339 - DNA, 75 bp, synthetic construct
  source 1..75: mol_type = other DNA
aatcacttgaattacatgctgttgcggaaagtcacgtcacacctctttatcagttaatctgtaaaaataaaacct

SEQ ID NO: 762340 - DNA, 75 bp, synthetic construct
  source 1..75: mol_type = other DNA
cgaatcgacaccgccgaaaggtaaccgcaagcgctggacacatccgcagtttggcaacttcacctactacaccga

SEQ ID NO: 762341 - DNA, 75 bp, synthetic construct
  source 1..75: mol_type = other DNA
tgccggtggtgcctccagcttcctcgcggaccgtgtggaagaagagggtgaagtccgcgtctttatcgaacataa

SEQ ID NO: 762342 - DNA, 75 bp, synthetic construct
  source 1..75: mol_type = other DNA
tttcaagtttgcttcttgtctcaccggtcgtctgaaaggcgcaaccattgaggtctcgcagagtatggagtttat

SEQ ID NO: 762343 - DNA, 75 bp, synthetic construct
  source 1..75: mol_type = other DNA
aatcagaagtagaacttttgcttgcagaggcaagaagaagtagcacaccggagcgtgatcgttgtctgctttata

SEQ ID NO: 762344 - DNA, 75 bp, synthetic construct
  source 1..75: mol_type = other DNA
tcaaatgcgttggcgttggatggattcttctaacgttttttattgttctgcatagctacattcgccttgtgaatg

SEQ ID NO: 762345 - DNA, 75 bp, synthetic construct
  source 1..75: mol_type = other DNA
tgaggcttctcggtgctatgtggatggtggcgacgttcattgtggttgctggctgttttgtccggttggtaggcg

SEQ ID NO: 762346 - DNA, 75 bp, synthetic construct
  source 1..75: mol_type = other DNA
agagtacgtcgatttcgcgggtggcattgcggttacggcattaggccattgccatccggcgctggtggaagcgtt

SEQ ID NO: 762347 - DNA, 75 bp, synthetic construct
  source 1..75: mol_type = other DNA
atattcgcggtatggggctgttgattggcgcggagcttaagccacagttcaaaggtcgggcgcgtgatttcctgt

SEQ ID NO: 762348 - DNA, 75 bp, synthetic construct
  source 1..75: mol_type = other DNA
aaggcattcgcgcgaaacgtcagcgttttgttgatcatttgcagaagatagatcagcagtacgatgtgtttggcg

SEQ ID NO: 762349 - DNA, 75 bp, synthetic construct
  source 1..75: mol_type = other DNA
gtcgacgagcaaagccgcgaactgtgctttgtcagccccgatattctgtttgaacgcatgggagtcaaaccatga

SEQ ID NO: 762350 - DNA, 75 bp, synthetic construct
  source 1..75: mol_type = other DNA
ttaattccctgaaacaggaattttccggcgttcctgatgatgcggctgatgcgctttcgtcaatatctgaaatta

SEQ ID NO: 762351 - DNA, 75 bp, synthetic construct
  source 1..75: mol_type = other DNA
gcaccggcgatctgtttgcttatatgcactatggcgtgacaccggatattctgacgtccgcgaaagcgttaggcg

SEQ ID NO: 762352 - DNA, 75 bp, synthetic construct
  source 1..75: mol_type = other DNA
cacgtttttcggcggtggaaatgtatctggtcagcgattgtattgagcatatcctgtccagtgggctggcctgcg

SEQ ID NO: 762353 - DNA, 75 bp, synthetic construct
  source 1..75: mol_type = other DNA
gtggcagacgatgcgcggcgtatccgggcggcgctgaccaccaccggtcagacgttgctgacccgccagacgcgc

SEQ ID NO: 762354 - DNA, 75 bp, synthetic construct
  source 1..75: mol_type = other DNA
atgtgctgcgtataccggatgaaccgccccgccgctggtttgaccgtgatgttctgcgggaggtggtccgggaag

SEQ ID NO: 762355 - DNA, 75 bp, synthetic construct
  source 1..75: mol_type = other DNA
ccggtggtttgaccgtggtgttctgcgggaagttgtccgggaagcccgggccgaaatccgcagcatggcggatgc

SEQ ID NO: 762356 - DNA, 75 bp, synthetic construct
  source 1..75: mol_type = other DNA
cgcactgtcagttaccaggtggcagaagatacgcggcgtatccgggcggcgctgaccacaaccgggcagacgttg

SEQ ID NO: 762357 - DNA, 75 bp, synthetic construct
  source 1..75: mol_type = other DNA
tgctggttcgatgaggacgacgaaaacctgcccgtggtgctcgatgccatcctgaaccggggcgcacgtttttcg

SEQ ID NO: 762358 - DNA, 75 bp, synthetic construct
  source 1..75: mol_type = other DNA
ctgaagtcgagctgaccattccctttcacgacgtcgatatgatgggcgtggcctggcacggtaactattttcgct

SEQ ID NO: 762359 - DNA, 75 bp, synthetic construct
  source 1..75: mol_type = other DNA
aagacctgaaagggatgaagatccgcgtgccgaataacgttatgcagattaaagccattgaagcaatgggcgcaa

SEQ ID NO: 762360 - DNA, 75 bp, synthetic construct
  source 1..75: mol_type = other DNA
ctgcaaagtcggggaattagcgcggcggcctatcatgccgggctggagaataatgtccgcgccgatgtgcaggaa

SEQ ID NO: 762361 - DNA, 75 bp, synthetic construct
  source 1..75: mol_type = other DNA
agatatcgtgcgcctgctggggcttaacgatccgctgattcaaatcagtagttttgaccgcccgaatattcgcta

SEQ ID NO: 762362 - DNA, 75 bp, synthetic construct
  source 1..75: mol_type = other DNA
acgttccgacggagatcaaccctgaccgttatcaatctctggtagatatgtttgagcagtcggtcgcgcgctacg

SEQ ID NO: 762363 - DNA, 75 bp, synthetic construct
  source 1..75: mol_type = other DNA
gatcgctgcgtgggctgtctttgcttgcgctttacaacatgaactgtgatgccatggtcacctggcttgcgcgtg

SEQ ID NO: 762364 - DNA, 75 bp, synthetic construct
  source 1..75: mol_type = other DNA
tttcagtaccctgacacctgcgcagttagatattattcaccagacagcgtatgaagctggtttatatagccagaa

SEQ ID NO: 762365 - DNA, 75 bp, synthetic construct
  source 1..75: mol_type = other DNA
cgaaggtcgccaggaaccgtgcggtaactgcgatatctgcctcgatccgccgaagcagtatgatgcttcgactga

SEQ ID NO: 762366 - DNA, 75 bp, synthetic construct
  source 1..75: mol_type = other DNA
gttttgaccgtccgaatattcgctacatgctgatggagaaattcaaaccgctcgatcagttgatgcgctacgtac

SEQ ID NO: 762367 - DNA, 75 bp, synthetic construct
  source 1..75: mol_type = other DNA
cagcgttttggtatgggctatgtggtggaagtgattcgcggcgctaataaccagcgtatccgcgactatggtcat

SEQ ID NO: 762368 - DNA, 75 bp, synthetic construct
  source 1..75: mol_type = other DNA
cagaaatccttcggcggcaactatgatcgcaaactgttcgccaaattacgcaaactgcgtaaatcgattgccgat

SEQ ID NO: 762369 - DNA, 75 bp, synthetic construct
  source 1..75: mol_type = other DNA
tgacacaaaacatcgcccagcattctgccctacaactgacagaagccgcgcgcccggtgctgcgtggcgaatccc

SEQ ID NO: 762370 - DNA, 75 bp, synthetic construct
  source 1..75: mol_type = other DNA
aagggcagttgcaggatatcgagcgccataaactcaatgcgatgggcgcatttgccgaagcgcaaacctgtcgcc

SEQ ID NO: 762371 - DNA, 75 bp, synthetic construct
  source 1..75: mol_type = other DNA
caaggtactggctcaggcatcgactgaaaataccgttaaagcgcgcaacgccgattacaacgcggcagagaaaat

SEQ ID NO: 762372 - DNA, 75 bp, synthetic construct
  source 1..75: mol_type = other DNA
gccgtctggggcacggcgctggcggtggttctctccatccccttcggcctgatgagcgccgaaaacctggtgccg

SEQ ID NO: 762373 - DNA, 75 bp, synthetic construct
  source 1..75: mol_type = other DNA
ggcgacgttactcgttaaccgccacgatggcgtactgccgccgcacctggcctccgccattcagaaactgaccgg

SEQ ID NO: 762374 - DNA, 75 bp, synthetic construct
  source 1..75: mol_type = other DNA
ccccgccggtggtttgaccgtggtgttctgcgggaggtggtccgggaagcccgggccgaaatccgcagcatggcg

SEQ ID NO: 762375 - DNA, 75 bp, synthetic construct
  source 1..75: mol_type = other DNA
aagatgcgcggcgtatcagggcggcgctgaccacaaccggtcagacgttgctgacccgccagacgcgccgctttc

SEQ ID NO: 762376 - DNA, 75 bp, synthetic construct
  source 1..75: mol_type = other DNA
ggctctgcaacgggaagcgcaggaacaaaaacgtggtttgtgggccgatgcaaatccggttccaccgtgggaatg

SEQ ID NO: 762377 - DNA, 75 bp, synthetic construct
  source 1..75: mol_type = other DNA
ctggtcgtctcgtggcagggcgcggaaatggccccgctcacgctgattaaagacggcggcaacatggcgacgttc

SEQ ID NO: 762378 - DNA, 75 bp, synthetic construct
  source 1..75: mol_type = other DNA
cggttaaacccgccgtcgacggcgaacatcttacgctccgggtgagctggaaaggctctgacggacaaccccgga

SEQ ID NO: 762379 - DNA, 75 bp, synthetic construct
  source 1..75: mol_type = other DNA
atgaacgaaacgctgaatgcactgatttatcgccacgccagtaacctgttgctggcgcagggctggccggaagat

SEQ ID NO: 762380 - DNA, 75 bp, synthetic construct
  source 1..75: mol_type = other DNA
gatgatgacaatttgccggtggtgctcgatgccatcctgaacaaaggggcacgctacagtagcgtcgagttcttt

SEQ ID NO: 762381 - DNA, 75 bp, synthetic construct
  source 1..75: mol_type = other DNA
acccgaagtatccgggctggatcagcatttatgttctgctggatgcgccccggctggcgacgttacttatcaacc

SEQ ID NO: 762382 - DNA, 75 bp, synthetic construct
  source 1..75: mol_type = other DNA
gaaaacctgcccgtggtgctcgatgccatcctgaaccgtggcgcacgtttttcgtcggtggaaatgtacctggtc

SEQ ID NO: 762383 - DNA, 75 bp, synthetic construct
  source 1..75: mol_type = other DNA
gcgacgttacttatcaaccgccacgatggcgtgctgccaccgcgcctggcgtctgccatgcaaaaaatgaccgga

SEQ ID NO: 762384 - DNA, 75 bp, synthetic construct
  source 1..75: mol_type = other DNA
ctgcgggaggtggtccgggaagcccgggccgaaatccgcagcatggcggatgccctggcaaaaatccggaaatga

SEQ ID NO: 762385 - DNA, 75 bp, synthetic construct
  source 1..75: mol_type = other DNA
tttcccgtatgccggagaatggctgaccgaagacgaaatcagggctgtacttgcggcggtgcgcgatgcggtacg

SEQ ID NO: 762386 - DNA, 75 bp, synthetic construct
  source 1..75: mol_type = other DNA
gcctggtcgtgaaggaaagcgatcacccctgctggctcgatgaagatgacgaaaatctgcccgtggtgctcgatg

SEQ ID NO: 762387 - DNA, 75 bp, synthetic construct
  source 1..75: mol_type = other DNA
tcagaaactgaccggaaccggagcggaacttgttctgtccggcagtcagtggcagtcgctgccggtacttccggc

SEQ ID NO: 762388 - DNA, 75 bp, synthetic construct
  source 1..75: mol_type = other DNA
cgtagtaaatgaaaagctggtcgtggtgccgaatacccattattgggataacgctaaaacggtgctgcagaaagt

SEQ ID NO: 762389 - DNA, 75 bp, synthetic construct
  source 1..75: mol_type = other DNA
ctcagtggaaaagtaatgacaaccgtatctggacttttaccctgcgcgataacgcaaaatgggcggatggcacac

SEQ ID NO: 762390 - DNA, 75 bp, synthetic construct
  source 1..75: mol_type = other DNA
aacgccaaatgggccgatggtacgccggtaacggcgcaggattttgtctatagctggcagcgtctggtgaacccg

SEQ ID NO: 762391 - DNA, 75 bp, synthetic construct
  source 1..75: mol_type = other DNA
atgaacgaaaacacaacgctgaatgcactgatttatcgccacgcccgtaacctgctgctggcgcagggctggccg

SEQ ID NO: 762392 - DNA, 75 bp, synthetic construct
  source 1..75: mol_type = other DNA
ggaaatgtacctggtctgtgagtgtgtggagcatatcctggccagtggtctggtctgtgatgtgctgcgtatacc

SEQ ID NO: 762393 - DNA, 75 bp, synthetic construct
  source 1..75: mol_type = other DNA
gccgtggacgtaaggccgcgcagcccgagcctcagcctcagccgcaaccgccggagggggaggattacgggtatt

SEQ ID NO: 762394 - DNA, 75 bp, synthetic construct
  source 1..75: mol_type = other DNA
ttcttgatgcggtgcacgatgcggtacgaagcatctgttaccaggtggcagaagatgcgcggcgtatccgtgcgg

SEQ ID NO: 762395 - DNA, 75 bp, synthetic construct
  source 1..75: mol_type = other DNA
cgctggtttgaccgtggtgttctgcgggaggtggtccgggaagcccggaacgaaatccgcagcatggcggatgtc

SEQ ID NO: 762396 - DNA, 75 bp, synthetic construct
  source 1..75: mol_type = other DNA
atgaacaaaacgctgaatgcactggtttatcgccacgcccgtaacctgctgctggcgcagggttggtcggaagag

SEQ ID NO: 762397 - DNA, 75 bp, synthetic construct
  source 1..75: mol_type = other DNA
aagggaaggtttcatatcttgaaaagtgcgaatcaaacccaataaaaacgtcttatgatttgctctggtgcgaat

SEQ ID NO: 762398 - DNA, 75 bp, synthetic construct
  source 1..75: mol_type = other DNA
aatgttaaatacttcggctattgaggcaattgagtctaataaaaccagtactcttccaactattacaaaaattaa

SEQ ID NO: 762399 - DNA, 75 bp, synthetic construct
  source 1..75: mol_type = other DNA
tttgctcaatagcagagttaattgagaaagcaaaaattgttttttctactgaattgacatcacatgtatcaatta

SEQ ID NO: 762400 - DNA, 75 bp, synthetic construct
  source 1..75: mol_type = other DNA
gtgctggaaagcgtaaacggtaagcccgtgaccagcgataaaaatccgccagaaatcagctttggtgaaaagatg

SEQ ID NO: 762401 - DNA, 75 bp, synthetic construct
  source 1..75: mol_type = other DNA
acgccagaacagctacagcatcatcgctttgtgctggaaagcgtaaacggtaagcccgtgaccagcgataaaaat

SEQ ID NO: 762402 - DNA, 75 bp, synthetic construct
  source 1..75: mol_type = other DNA
gctttgaggccggcgacgctggcgagatgtatgtcgatattaccgggatgcgtaccgataccggtgcgtcagttt

SEQ ID NO: 762403 - DNA, 75 bp, synthetic construct
  source 1..75: mol_type = other DNA
taacagcagttgctaaagctgcgtttaactcggcagttgatgctgtccgtaagtggtcggttcgctggtcggcac

SEQ ID NO: 762404 - DNA, 75 bp, synthetic construct
  source 1..75: mol_type = other DNA
gctcactgaaacatggcgaagccctgctgaaaatggagtgttgtggtgtatgtcataccgatcttcatgttaaga

SEQ ID NO: 762405 - DNA, 75 bp, synthetic construct
  source 1..75: mol_type = other DNA
actttatccaggcaaaaaaccgaaacagacgctgccggagcgcaccggctactttctgctgttacagcacgaaaa

SEQ ID NO: 762406 - DNA, 75 bp, synthetic construct
  source 1..75: mol_type = other DNA
cgccgccaaaattgtgcaggagaaaaccggtggcgctcacgctgcggtggtaacagcggtagctaaagctgcgtt

SEQ ID NO: 762407 - DNA, 75 bp, synthetic construct
  source 1..75: mol_type = other DNA
cgccgccaaaattgtgcaggagaaaactggtggcgctcacgcagcagtggtgacagcggtagctaaagctgcgtt

SEQ ID NO: 762408 - DNA, 75 bp, synthetic construct
  source 1..75: mol_type = other DNA
gtggtgccgaaagtcgccctgcgtccgttagcggacatcaacaccatctttactgagatggaagaaggcaaaatc

SEQ ID NO: 762409 - DNA, 75 bp, synthetic construct
  source 1..75: mol_type = other DNA
gaagataaaatcctaaccagactgccagtccttcggggctggcgctgtatctcctctgttctcctcaggaaaatc

SEQ ID NO: 762410 - DNA, 75 bp, synthetic construct
  source 1..75: mol_type = other DNA
ggggcggcgaaatttatcgctatctggtggtgtctgctggcatttatcgcgtccggctacgagcactccatcgct

SEQ ID NO: 762411 - DNA, 75 bp, synthetic construct
  source 1..75: mol_type = other DNA
atcttcgcctccccctataccctgtctcttgatcagatctcctgatcaagagacttcatcaccaggtaaccctca

SEQ ID NO: 762412 - DNA, 75 bp, synthetic construct
  source 1..75: mol_type = other DNA
ggcacttccaggaagaatagaacgccgctgccgtgatgttatgcggataatgctgccactggtgaaggaactggc

SEQ ID NO: 762413 - DNA, 75 bp, synthetic construct
  source 1..75: mol_type = other DNA
gcgttgaaatggttaaacaggtgtgcgtggaaaatcgcgttacccatctgttttataactatcaatatgaagtga

SEQ ID NO: 762414 - DNA, 75 bp, synthetic construct
  source 1..75: mol_type = other DNA
aacatgacgctgttcgcgctctcctggttcggtaaccacagcgaagcctatacgctggcaggtattgggcataac

SEQ ID NO: 762415 - DNA, 75 bp, synthetic construct
  source 1..75: mol_type = other DNA
gctggctaaaaccaccgcaccggcaatggtattattcttcaaaggcgcattgtgtaactggctggtttgtctggc

SEQ ID NO: 762416 - DNA, 75 bp, synthetic construct
  source 1..75: mol_type = other DNA
gttgtaatgatgcagaagttttcgacaaagcgggtattgctgtactttccgttgaagcgacaaactggagtcttg

SEQ ID NO: 762417 - DNA, 75 bp, synthetic construct
  source 1..75: mol_type = other DNA
tgaagtaagccgcatgttaaatatcacaccagggcgcgttagccagcttatgaagtccgaaaaaaaccgcaaaaa

SEQ ID NO: 762418 - DNA, 75 bp, synthetic construct
  source 1..75: mol_type = other DNA
gcgcagaaaaaactcagagcttatgtagaacgaagccagcaaacaattgatatcaaggcagagattatgctggag

SEQ ID NO: 762419 - DNA, 75 bp, synthetic construct
  source 1..75: mol_type = other DNA
caaagccggtattgcggtactttcggtggaggcgaccaactggaatcttggaaataaggatggttatcagcaacg

SEQ ID NO: 762420 - DNA, 75 bp, synthetic construct
  source 1..75: mol_type = other DNA
cgaaaagaaaaatactttattggtgattaatctcgataatctgattgttggcgataagctgtatttcaacagtgg

SEQ ID NO: 762421 - DNA, 75 bp, synthetic construct
  source 1..75: mol_type = other DNA
ttccgattctcgacggtaacgtcaaacgggtgctggcgcgctgctatgctgtaagcggctggccagggaaaaaag

SEQ ID NO: 762422 - DNA, 75 bp, synthetic construct
  source 1..75: mol_type = other DNA
tcgcggtaggtgaaatcgcttgtgtatcggtacacggcgctaaccgtctgggcggcaactcgctgctggacctgg

SEQ ID NO: 762423 - DNA, 75 bp, synthetic construct
  source 1..75: mol_type = other DNA
catcatgatcgaaatccgtgaaggccgcggctgtgatggtccgtgggggccacacgcaaaactgaaacttgacca

SEQ ID NO: 762424 - DNA, 75 bp, synthetic construct
  source 1..75: mol_type = other DNA
atggaacgtttgtaccttgtattgcaatcacagatcctggagctatttgaagcaggaaaagtgaaggaggtaacg

SEQ ID NO: 762425 - DNA, 75 bp, synthetic construct
  source 1..75: mol_type = other DNA
acaaaaacatcgccgatgcggttaacagtgtgctgaccgacaccattgctgatatgtctcaggacaccagcatcc

SEQ ID NO: 762426 - DNA, 75 bp, synthetic construct
  source 1..75: mol_type = other DNA
gttgatatggcaacgagtgccgttgcttttggaaaaattcttcatgccaaagagactgggcaaccaatcggtgaa

SEQ ID NO: 762427 - DNA, 75 bp, synthetic construct
  source 1..75: mol_type = other DNA
gactacaacggttgggttgggtgtgaatatacaccccaaaccaccacggaagccggtttacgctggatggatccg

SEQ ID NO: 762428 - DNA, 75 bp, synthetic construct
  source 1..75: mol_type = other DNA
atcaaaaatggctggttacacaccggcgacatcgcggtaatggatgaagaaggattcctgcgcattgtcgatcgt

SEQ ID NO: 762429 - DNA, 75 bp, synthetic construct
  source 1..75: mol_type = other DNA
accggcgtaaacaccttgttcaacgcgttgctgaacaataaagagtttcaacaactggatttctccagtctgcac

SEQ ID NO: 762430 - DNA, 75 bp, synthetic construct
  source 1..75: mol_type = other DNA
agccgtgaaaatctttgtggtgaagaaagatccatcgctcactgacgagtcgctggtgaccttttgccgtcgcca

SEQ ID NO: 762431 - DNA, 75 bp, synthetic construct
  source 1..75: mol_type = other DNA
aagattggcgaacgtgcccgtcagagtggttcactgcgtggtctgtctctggctcacctgtacagcctgaacttt

SEQ ID NO: 762432 - DNA, 75 bp, synthetic construct
  source 1..75: mol_type = other DNA
accattaactgcctgctgtttatcgaactgggtgggcagaacctgcttatcactaacccgcgcgatattccaggg

SEQ ID NO: 762433 - DNA, 75 bp, synthetic construct
  source 1..75: mol_type = other DNA
gcagctggatttctccagtctgcatctttccgcaggcggagggatgccagtgcagcaagtggtggcagaacgttg

SEQ ID NO: 762434 - DNA, 75 bp, synthetic construct
  source 1..75: mol_type = other DNA
tcgaatcagacgctcacatccagggggatgcgttctggttgttggtcgagggggaatccatgactgccccggtcg

SEQ ID NO: 762435 - DNA, 75 bp, synthetic construct
  source 1..75: mol_type = other DNA
aaagtcatttcccgaacgtcgagccaggatgccggcgttgatgcatcagcggatgtcgtggtcgccacctcttcg

SEQ ID NO: 762436 - DNA, 75 bp, synthetic construct
  source 1..75: mol_type = other DNA
gtgaagccagcaacatggacgcccggcgggaggctaacaagaatctgcatttgcagctttcacagcgcggtatgc

SEQ ID NO: 762437 - DNA, 75 bp, synthetic construct
  source 1..75: mol_type = other DNA
gctagcgctgcgcggcgatccggtttctgaaacggcattactgtctaccaccattcaggccactatgctgatatc

SEQ ID NO: 762438 - DNA, 75 bp, synthetic construct
  source 1..75: mol_type = other DNA
cccgcgcgcgcaatctacataaagcggcacagcacgttgccaccttacacggcggtaagttcccggagacctttg

SEQ ID NO: 762439 - DNA, 75 bp, synthetic construct
  source 1..75: mol_type = other DNA
tgaagtatttctggcgcagcgtccgccaagtggattgtggggcggtttatactgcttcccgcagtttgctgatga

SEQ ID NO: 762440 - DNA, 75 bp, synthetic construct
  source 1..75: mol_type = other DNA
gtgccgttattggctggtcaatgtcgccacgcatgacggcgcaactggcctgcgatgccctgcagatggcgctgt

SEQ ID NO: 762441 - DNA, 75 bp, synthetic construct
  source 1..75: mol_type = other DNA
gtatatcggtcaggtactgaatatagcatctgccgtttcttctttttttggcatggtgatccttgccgcactcat

SEQ ID NO: 762442 - DNA, 75 bp, synthetic construct
  source 1..75: mol_type = other DNA
cgctttgcattgtctgtgttagtgggtatatcggtcaggtactgaatatagcatctgccgtttcttctttttttg

SEQ ID NO: 762443 - DNA, 75 bp, synthetic construct
  source 1..75: mol_type = other DNA
ggcggcgccgagcgctttttgggtactaaccccatcgcctttggtttcccggtggaaaacagccatccgatgatt

SEQ ID NO: 762444 - DNA, 75 bp, synthetic construct
  source 1..75: mol_type = other DNA
aggaaaatgcggggcggaagatccgtattgctgcattttttggcgatacaccagtgaaggtggagtggagtaaga

SEQ ID NO: 762445 - DNA, 75 bp, synthetic construct
  source 1..75: mol_type = other DNA
tacttcaccatgtggttaactggcggtaatgaactagtgacggggatatttatgtttcttgccccggcttgtggc

SEQ ID NO: 762446 - DNA, 75 bp, synthetic construct
  source 1..75: mol_type = other DNA
ggcggtaatgaactagtgacggggatatttatgtttcttgccccggcttgtggcttgatgattcgctttatggtg

SEQ ID NO: 762447 - DNA, 75 bp, synthetic construct
  source 1..75: mol_type = other DNA
ctttcatcagatcgcgccatcaaaacgctgatcgatatgatgtcgccagaacaaaaacaaaaagcattatgcttg

SEQ ID NO: 762448 - DNA, 75 bp, synthetic construct
  source 1..75: mol_type = other DNA
atggaaagaacaagttacagcaaactatcacagcgtgacgttgatcgcgcagaaacagatttactcatcaacctg

SEQ ID NO: 762449 - DNA, 75 bp, synthetic construct
  source 1..75: mol_type = other DNA
tttattgcttcggtcttgtgtgctttcggaatggcatcagacatcagtccgattagcagggcttttaagtatgca

SEQ ID NO: 762450 - DNA, 75 bp, synthetic construct
  source 1..75: mol_type = other DNA
gttttgaccgtccgaatattcgctacatgctgatggagaaattcaaaccgctcgatcagttgatgcgttatgtac

SEQ ID NO: 762451 - DNA, 75 bp, synthetic construct
  source 1..75: mol_type = other DNA
gttggttctggatatactgggagggatgccaccggaactggatgttccgcatattacccgttcggcggttgcgct

SEQ ID NO: 762452 - DNA, 75 bp, synthetic construct
  source 1..75: mol_type = other DNA
atcaatattctgggaggcgagcccctgcaactgggatggccgcatattacagcgggtaccttggctttgttccgc

SEQ ID NO: 762453 - DNA, 75 bp, synthetic construct
  source 1..75: mol_type = other DNA
agatcaccgccgcgcagagctggcctgtaaaaagatttttgataaagttcctaaatcagcctggaaatttgtcaa

SEQ ID NO: 762454 - DNA, 75 bp, synthetic construct
  source 1..75: mol_type = other DNA
acgtaacaaaaaatagtttcattgcttacatttccatattaaccatgattttaattaccagcggtgcatatacag

SEQ ID NO: 762455 - DNA, 75 bp, synthetic construct
  source 1..75: mol_type = other DNA
ttaaaaacaaattgtaacagcatttttagaaaaataataatgacgttgaacctgctcataggtattggaatatgc

SEQ ID NO: 762456 - DNA, 75 bp, synthetic construct
  source 1..75: mol_type = other DNA
aaaacacatgaagtaaaaggcagcatgtccagcgcgcatgataaaatgtgcaaggatggtatgtgcaaaaatgca

SEQ ID NO: 762457 - DNA, 75 bp, synthetic construct
  source 1..75: mol_type = other DNA
atggaacaaacaagttacagcaaactatcacagcgtgacgttgatcgcgcagaaacagatttacttatcaatctg

SEQ ID NO: 762458 - DNA, 75 bp, synthetic construct
  source 1..75: mol_type = other DNA
aattccggcgcgcaagcactgatgaaacgcttgaaaaaatggttgagcatatggatttaaaagtaagccaaagcg

SEQ ID NO: 762459 - DNA, 75 bp, synthetic construct
  source 1..75: mol_type = other DNA
caatatcgaatcctattatcaggaaactggacgcgccgggcgtgatggcctgcccgcggaagcgatgctgtttta

SEQ ID NO: 762460 - DNA, 75 bp, synthetic construct
  source 1..75: mol_type = other DNA
cctatcaggctgagcagcgtggtaacaccgttgttctgcaacagatggagctgaccgactacgctaacatggcgc

SEQ ID NO: 762461 - DNA, 75 bp, synthetic construct
  source 1..75: mol_type = other DNA
tgatctcgacactaatggttgggatggcaccgatcgtctggatctgaccctgaacaatggcagcaaatgggtcgg

SEQ ID NO: 762462 - DNA, 75 bp, synthetic construct
  source 1..75: mol_type = other DNA
tgggatggtactgatcgcctggatctgaccctgaacaatggcagcaagtgggtcggtgcggcaatgtctgcgcat

SEQ ID NO: 762463 - DNA, 75 bp, synthetic construct
  source 1..75: mol_type = other DNA
aagatatacactaaaaaaatcattaatcccgggagccaaaatgagcaagaagtagactcatctaactggaaagaa

SEQ ID NO: 762464 - DNA, 75 bp, synthetic construct
  source 1..75: mol_type = other DNA
gttggcagtcacctgaacgtgggttgattccaccgttggacttcatttcctacgcagaagagtcagggctaattg

SEQ ID NO: 762465 - DNA, 75 bp, synthetic construct
  source 1..75: mol_type = other DNA
ccaaagcgcgtgcgatttttgcatatttagacttggatattagggttattgaggctacaccaaatgataaattgt

SEQ ID NO: 762466 - DNA, 75 bp, synthetic construct
  source 1..75: mol_type = other DNA
aagtattgccgattatccggtgaaggttcgtaaactcatccgccgtttgcgccgtatccgcatcgaccgattaat

SEQ ID NO: 762467 - DNA, 75 bp, synthetic construct
  source 1..75: mol_type = other DNA
attccatcgataacggtactgaagggtctgcggtacgtgttggtctgggtactcagttcagcttcaccaagaact

SEQ ID NO: 762468 - DNA, 75 bp, synthetic construct
  source 1..75: mol_type = other DNA
tctatggcatgggccgtgataaaagccatgaacattgggtgagcgtgatccgccagctgattcacctcggcctgg

SEQ ID NO: 762469 - DNA, 75 bp, synthetic construct
  source 1..75: mol_type = other DNA
accgtctggcattgtctgttgataactcgactatcgatgacaactacgaacattatacttacaacggtacttata

SEQ ID NO: 762470 - DNA, 75 bp, synthetic construct
  source 1..75: mol_type = other DNA
tcataaagatgcttttgaagcatataatatgggctatgaccatgggatgcataaaaaagcttacggtatggcctc

SEQ ID NO: 762471 - DNA, 75 bp, synthetic construct
  source 1..75: mol_type = other DNA
cacagaattaaaggatgaaggaaatattattattccagaacgtgaagattatactaaaattttttccaagttaac

SEQ ID NO: 762472 - DNA, 75 bp, synthetic construct
  source 1..75: mol_type = other DNA
ttagggcaatttacattttatagattcatcttaatcacagataaaaaagaatacgttagttcggctatattattt

SEQ ID NO: 762473 - DNA, 75 bp, synthetic construct
  source 1..75: mol_type = other DNA
aattatctagtagaagaaaatccacaagaagaattaccttcctttctagattcccattcatattgggaatatgag

SEQ ID NO: 762474 - DNA, 75 bp, synthetic construct
  source 1..75: mol_type = other DNA
ctgaccagaaatgaccgcctgccctttgacattatctccgctgtggcaaaagccatacatccacttaacccctcc

SEQ ID NO: 762475 - DNA, 75 bp, synthetic construct
  source 1..75: mol_type = other DNA
aaggccatcaccggcggcgatgcggtgtccgttgacccgaaataccgggatgcgtactccacgcacatcccggcg

SEQ ID NO: 762476 - DNA, 75 bp, synthetic construct
  source 1..75: mol_type = other DNA
cactggtgaccttttgccgccgtcagctcacgggctacaaagtaccgaagctggtggagtttcgtgatgagttac

SEQ ID NO: 762477 - DNA, 75 bp, synthetic construct
  source 1..75: mol_type = other DNA
gagaaaatttcggcgtaaaggtgtttggcatttcaaaagtgaaggtgtcaaatcttcctgttactgaaaaaacaa

SEQ ID NO: 762478 - DNA, 75 bp, synthetic construct
  source 1..75: mol_type = other DNA
taatacgtcttattgatggcgttcaacatataaggcgactaggaatttacatcaaagcattcagaaggggttatt

SEQ ID NO: 762479 - DNA, 75 bp, synthetic construct
  source 1..75: mol_type = other DNA
ctctttctggaggtgaccggtcccggcggcagcggcaaaagtatcatggccgaaatagccaccctgctggccggg

SEQ ID NO: 762480 - DNA, 75 bp, synthetic construct
  source 1..75: mol_type = other DNA
ggtcccggcggcagcggcaaaagtatcatggccgaaatagccaccctgctggccggggaggataacgccacgtcg

SEQ ID NO: 762481 - DNA, 75 bp, synthetic construct
  source 1..75: mol_type = other DNA
agctggccgtgattgtgcgccagcttatgcagaagttcagcaacccgatgacagcgcgtgccctgctccagtcac

SEQ ID NO: 762482 - DNA, 75 bp, synthetic construct
  source 1..75: mol_type = other DNA
cagcgaaaaggccatgcgtatctatgagcattacggcgaggcgctcgcggttgatgccaacggccagcttctgtc

SEQ ID NO: 762483 - DNA, 75 bp, synthetic construct
  source 1..75: mol_type = other DNA
ctgattattccgcagcaggatacaccggcgcgccgtctgattggctttcgcaacggggtactcgatactcaaagc

SEQ ID NO: 762484 - DNA, 75 bp, synthetic construct
  source 1..75: mol_type = other DNA
tgacgataccgtcgcactggttaaccttcagcttatcaatgctgacggtctcaaacgcaccctgaaaggcggtca

SEQ ID NO: 762485 - DNA, 75 bp, synthetic construct
  source 1..75: mol_type = other DNA
gttgactttttataatcctccgaagacagttaagtcttttattgatttcttgtcaaaaggtgaaggggtaaatgt

SEQ ID NO: 762486 - DNA, 75 bp, synthetic construct
  source 1..75: mol_type = other DNA
ttctgggcgtggttaccgcagtaggtggcgggacaattcgcgacatggcgctggatcacggtccggtattttggg

SEQ ID NO: 762487 - DNA, 75 bp, synthetic construct
  source 1..75: mol_type = other DNA
catgattttacgtacagaaatctacgcaactgcctgtattatcggcggtattgtccacgctacggcttattacac

SEQ ID NO: 762488 - DNA, 75 bp, synthetic construct
  source 1..75: mol_type = other DNA
atgtggaatgacctgacattaccggatccgctattaccaaaactgtttacccgcgtatgggtgcagactgatacc

SEQ ID NO: 762489 - DNA, 75 bp, synthetic construct
  source 1..75: mol_type = other DNA
aaataccagtatctggaacgcgtacttaatgcagtgagagacggtcttaagcaaatagagaaggtggaaccatga

SEQ ID NO: 762490 - DNA, 75 bp, synthetic construct
  source 1..75: mol_type = other DNA
gtatctaatcggctatttcgactctcaactgcgaagcacggtcgacgatgacaacgatgcaaatctgcttttcgt

SEQ ID NO: 762491 - DNA, 75 bp, synthetic construct
  source 1..75: mol_type = other DNA
agtatgatgggaatggttgtaacgctattaattcggctggcggctattcggtggcatctgaaattgccgactttt

SEQ ID NO: 762492 - DNA, 75 bp, synthetic construct
  source 1..75: mol_type = other DNA
gctggcatgttgaaagcgaagccatgaaccaggcattggcaattgtggtggccgcgcagggtaaactgccgatgt

SEQ ID NO: 762493 - DNA, 75 bp, synthetic construct
  source 1..75: mol_type = other DNA
gatggtgccgaggcactcatactggatctgtatcgccgaatgccgtccgttcggattaccgacatgctgcttgaa

SEQ ID NO: 762494 - DNA, 75 bp, synthetic construct
  source 1..75: mol_type = other DNA
tttgaactaactagtggagcctcggcaataattcctgaagaacatgtgtcggtctttaatgatgctatttcttat

SEQ ID NO: 762495 - DNA, 75 bp, synthetic construct
  source 1..75: mol_type = other DNA
gctacagagcaaggtgaggccatgaacctggtcaacgcgaaatatggcaataccccgggcctgaaagcctatagc

SEQ ID NO: 762496 - DNA, 75 bp, synthetic construct
  source 1..75: mol_type = other DNA
gctcacaacaggttcggcttcgccctgcaattgtgtgtcctgcgctatcccggccgggtgctggctccaggcgaa

SEQ ID NO: 762497 - DNA, 75 bp, synthetic construct
  source 1..75: mol_type = other DNA
tacgtatttaatcccgatacgacccccagggagttacgcaagttggtaggtggaaaagcccgggaggatcttatc

SEQ ID NO: 762498 - DNA, 75 bp, synthetic construct
  source 1..75: mol_type = other DNA
tacgacgtattgatcaaacggaagagatcctcggcgtcacgcgtgcgatctccgaccctgataacatcgatgccg

SEQ ID NO: 762499 - DNA, 75 bp, synthetic construct
  source 1..75: mol_type = other DNA
tgcagctggcgtcaccgtataaagaaaaaggcgacaaataccccttcaagccaaatcctaaagcaaaatggccga

SEQ ID NO: 762500 - DNA, 75 bp, synthetic construct
  source 1..75: mol_type = other DNA
ccggagtggcgtgctcaagcaaaaagcaaagagtacctgaagaccggtatgaagctgaaagagcgcctggctatg

SEQ ID NO: 762501 - DNA, 75 bp, synthetic construct
  source 1..75: mol_type = other DNA
gaccttgccaacctggcggtaatggcgtcgatgattgctttagccagccgtggcaatattttccgcaccgttctg

SEQ ID NO: 762502 - DNA, 75 bp, synthetic construct
  source 1..75: mol_type = other DNA
gctcggcgtaattgccggatacgatttcaaaaaagtcttgctgcttggcatcagcattggcggtgtgatgttcat

SEQ ID NO: 762503 - DNA, 75 bp, synthetic construct
  source 1..75: mol_type = other DNA
atggatccggcgtgggatgcggctattcagcgtgccggtttgttgcgggtacaggatactcacgagctgttttcg

SEQ ID NO: 762504 - DNA, 75 bp, synthetic construct
  source 1..75: mol_type = other DNA
attgacaagaaagcctttggcatcctcctcagctactacgcccatggatcttccaagcacgccattgcatcttac

SEQ ID NO: 762505 - DNA, 75 bp, synthetic construct
  source 1..75: mol_type = other DNA
cgaagggcggcaggagccgtgcgggaactgcgatatctgcctcgatccgccgaaacagtacgatggttcaaccga

SEQ ID NO: 762506 - DNA, 75 bp, synthetic construct
  source 1..75: mol_type = other DNA
gcgttgggatgcgcaagctggaggaacgctttggcaaaccgtttatggcgctgattcgtgcgcatgttgatggcg

SEQ ID NO: 762507 - DNA, 75 bp, synthetic construct
  source 1..75: mol_type = other DNA
gtgctcgacttttttaagaccatccaccgtgactacggcgttcgctttcgcatgatcgccggcaatcacgatctg

SEQ ID NO: 762508 - DNA, 75 bp, synthetic construct
  source 1..75: mol_type = other DNA
atatcgcccttgaatttaaaggcatgaaaagtgctggatctttagatgtagataaaaatctgaccttcaggattc

SEQ ID NO: 762509 - DNA, 75 bp, synthetic construct
  source 1..75: mol_type = other DNA
agctaaaaatgccaataaagtaaataaaaaacttgtattacctgacgaatatatagcacttgaatttaaaggtat

SEQ ID NO: 762510 - DNA, 75 bp, synthetic construct
  source 1..75: mol_type = other DNA
tgaagcgtccattcgctttatggccgttcatcccgacgtgcaggacaaagggttaggaacgctgatggcgatgac

SEQ ID NO: 762511 - DNA, 75 bp, synthetic construct
  source 1..75: mol_type = other DNA
tccagtgggctggcctgcgatgtgctgcgtataccggatgaaccgccccgccgctggtttgaccgtggtgttctg

SEQ ID NO: 762512 - DNA, 75 bp, synthetic construct
  source 1..75: mol_type = other DNA
accagcacctccggcctgcatgaaggcgacacgcacgttaacctacgcacccacgggcagccgagcaccacatgg

SEQ ID NO: 762513 - DNA, 75 bp, synthetic construct
  source 1..75: mol_type = other DNA
actatccgggctggatcagcatttacgtgcggctggatgcgccccggctggcgacgttacttatcaaccgtcacg

SEQ ID NO: 762514 - DNA, 75 bp, synthetic construct
  source 1..75: mol_type = other DNA
agtgagtgtgtggagcatatcctgtccagtggtctggtctgtgatgtgctgcgtataccggaagaaccgtcccgt

SEQ ID NO: 762515 - DNA, 75 bp, synthetic construct
  source 1..75: mol_type = other DNA
agatgacgaaaacctgcccgtggtgctcgatgccatcgtgaaccggggagcacgtttttcgtcggtggaaatgta

SEQ ID NO: 762516 - DNA, 75 bp, synthetic construct
  source 1..75: mol_type = other DNA
cgaaaacctgcctgtggtgctcgatgccatcctgaaccggggcgcacgtttttcgtcggtggaaatgtacctggt

SEQ ID NO: 762517 - DNA, 75 bp, synthetic construct
  source 1..75: mol_type = other DNA
ctggagcgatccgcgtatttctcaggagcgtattcttggcttgctggcgcgtggtcatagtctggcgttggcggt

SEQ ID NO: 762518 - DNA, 75 bp, synthetic construct
  source 1..75: mol_type = other DNA
ctgccagcggtcacgctcggcctgaaatccgccccggcgatattttccgggataactacggcggcacggtaacga

SEQ ID NO: 762519 - DNA, 75 bp, synthetic construct
  source 1..75: mol_type = other DNA
aaaacctgtcgccactctggatgatattctgcatcgcggcgactggtgcgcgcagctgcaacaggcgtggtacga

SEQ ID NO: 762520 - DNA, 75 bp, synthetic construct
  source 1..75: mol_type = other DNA
tttatcgccacgcccgtaacctgctgctggcgcagggttggccggaagagacggatattgaacaactgaatccgc

SEQ ID NO: 762521 - DNA, 75 bp, synthetic construct
  source 1..75: mol_type = other DNA
atccgtcgcgttttctcagccactggctggcgctcgacggcccggcttataccctttcaaccgcctgctcctcca

SEQ ID NO: 762522 - DNA, 75 bp, synthetic construct
  source 1..75: mol_type = other DNA
aacgagagtcgcctggctgtgcgcccttatcctcatcagctggaagaatgggtagaattgaaaaacggcgaacgt

SEQ ID NO: 762523 - DNA, 75 bp, synthetic construct
  source 1..75: mol_type = other DNA
ccacagccgacgacaccacgcggcaggatatcgtgcgcctgctggggctgaacgatccgctgattcaaatcagca

SEQ ID NO: 762524 - DNA, 75 bp, synthetic construct
  source 1..75: mol_type = other DNA
aaaaagaacgctggtctgatggtaaagatccggctgcctttatcaaaaccggactggacgccgcaggtatgagtc

SEQ ID NO: 762525 - DNA, 75 bp, synthetic construct
  source 1..75: mol_type = other DNA
aaaaagaacgctggtctgacggtaaagatccggctgcttttatcaaaaccggtctggatgccgcaggtatgagtc

SEQ ID NO: 762526 - DNA, 75 bp, synthetic construct
  source 1..75: mol_type = other DNA
agctttggctgtttcatttaccgcatctgcattcaccgaaggcacggattacatggttctggaaaaacctattcc

SEQ ID NO: 762527 - DNA, 75 bp, synthetic construct
  source 1..75: mol_type = other DNA
agctgtggtcactgcgacgcctgtattagcggtaatcagatcaactgcgagcaaggtgcggtgccgacgattatg

SEQ ID NO: 762528 - DNA, 75 bp, synthetic construct
  source 1..75: mol_type = other DNA
gaaaaatggaaagcctcttatgaagtcgccaaaatccagggggttccagcctatgtcgttaatggtaagtacttg

SEQ ID NO: 762529 - DNA, 75 bp, synthetic construct
  source 1..75: mol_type = other DNA
gaaaaatggaaagcggcctatgacgtagccaaaattcagggcgttccggcctatgtcgtcaatggtaaatacttg

SEQ ID NO: 762530 - DNA, 75 bp, synthetic construct
  source 1..75: mol_type = other DNA
attcttctattcaaccggccatgacagcaatggtgacggtgtccttgataccaacggtggttgggtagatgatgc

SEQ ID NO: 762531 - DNA, 75 bp, synthetic construct
  source 1..75: mol_type = other DNA
tgacagcggtagctaaagctgcgtttaactcggcggttgatgctgtccgtgcaggcgggcgtgttgtggcagtcg

SEQ ID NO: 762532 - DNA, 75 bp, synthetic construct
  source 1..75: mol_type = other DNA
atttatggcgctctgccaatgctgtttctttggctatgtttatttggtattgcgctaaacaaatatgaacaatcc

SEQ ID NO: 762533 - DNA, 75 bp, synthetic construct
  source 1..75: mol_type = other DNA
tgcgaatgctggtatcagttatctggctgatggtactgtagatccggcaaacgcagccattgcaggctgggtgaa

SEQ ID NO: 762534 - DNA, 75 bp, synthetic construct
  source 1..75: mol_type = other DNA
ctggcgcggctgctggggctggtgccgggaagaacgttgttgagaataatttacttggcggtagtgaagatgctc

SEQ ID NO: 762535 - DNA, 75 bp, synthetic construct
  source 1..75: mol_type = other DNA
cgctgggtaactggattgacaacaaagatccgctgtcgggtgcactaatcaatggggctggttcgggtattggct

SEQ ID NO: 762536 - DNA, 75 bp, synthetic construct
  source 1..75: mol_type = other DNA
cgtgcgccatctgcacgaagctccgttcggcccctggctctgtctggcgattactgttcaactgctcttattctg

SEQ ID NO: 762537 - DNA, 75 bp, synthetic construct
  source 1..75: mol_type = other DNA
ggtcatcgcgatatcgaaaaactcggcggcattggcaagaaaatgccggttatctccatcgccatgttagtcggg

SEQ ID NO: 762538 - DNA, 75 bp, synthetic construct
  source 1..75: mol_type = other DNA
ctgggcggtaacgcgccgctgtggtggggaattgcgctgctggtgctcggtatgatcaccgcattcgtcggcggc

SEQ ID NO: 762539 - DNA, 75 bp, synthetic construct
  source 1..75: mol_type = other DNA
ctgtatgcgttgatggaacacaacatccagcgcctgctggcttaccacaccctggaaaatatcggcattattctg

SEQ ID NO: 762540 - DNA, 75 bp, synthetic construct
  source 1..75: mol_type = other DNA
ctcgatcagttgatgcgctacgtgcaggaacaacgcggtaagtcggggattatttactgcaacagccgggcgaaa

SEQ ID NO: 762541 - DNA, 75 bp, synthetic construct
  source 1..75: mol_type = other DNA
tatctccatcgccatgttagtcgggctgatggcaatggctgcgctgccgccgctgaacggttttgccggggaatg

SEQ ID NO: 762542 - DNA, 75 bp, synthetic construct
  source 1..75: mol_type = other DNA
atgagcgcaatttccctgatcaatagcggcgtggcgtggtttgttgccgccgctgttctggcatttctcttttct

SEQ ID NO: 762543 - DNA, 75 bp, synthetic construct
  source 1..75: mol_type = other DNA
atgagcataagagagctaaacctcaccaaagaacagcacgattggctgaatggctggcttgaactgtggggcgca

SEQ ID NO: 762544 - DNA, 75 bp, synthetic construct
  source 1..75: mol_type = other DNA
cgaccgggacattctgctcctattccgctgaaacatcagcagacatcaaaagcgaaatcataccaattcagatag

SEQ ID NO: 762545 - DNA, 75 bp, synthetic construct
  source 1..75: mol_type = other DNA
tattgcaggacatattggataaaactgatgccaataatatttctgccacggcgatggttattggtgaattgggaa

SEQ ID NO: 762546 - DNA, 75 bp, synthetic construct
  source 1..75: mol_type = other DNA
tgcagatcaatatgttgatggctgccgccgtctgcgccgtcatcgccagcaacctcggcatgttcgtggtaatgg

SEQ ID NO: 762547 - DNA, 75 bp, synthetic construct
  source 1..75: mol_type = other DNA
gtcagtttagtagagaaagtatttctttcttaagtgaagtaaaacggcaaaacagtaaagagtggttcgataaaa

SEQ ID NO: 762548 - DNA, 75 bp, synthetic construct
  source 1..75: mol_type = other DNA
tggctggcttgaactgtggggcgcatgggtttattcaggtcgcctggaaaagcgcatgagcagcgtaatagcgaa

SEQ ID NO: 762549 - DNA, 75 bp, synthetic construct
  source 1..75: mol_type = other DNA
tttacgccgtttaagaatgcctggctgaaacggctgcgggaagggatgccggagtgcgtctccgcaccgaaagtg

SEQ ID NO: 762550 - DNA, 75 bp, synthetic construct
  source 1..75: mol_type = other DNA
acttagctcgattcttctctactggtatcactacagccacaacggcgaacgcatccagccggaaaccgatgacga

SEQ ID NO: 762551 - DNA, 75 bp, synthetic construct
  source 1..75: mol_type = other DNA
ccagaaagaactggtgtgggtagggcgtgtgatggtgctggtggtggcgctggtggcgattgcgttggcagcgaa

SEQ ID NO: 762552 - DNA, 75 bp, synthetic construct
  source 1..75: mol_type = other DNA
ggtggccgggcggttgcgtgtgcataccgaatacaacaataacgccttaacattgccggattatttcaccgggcg

SEQ ID NO: 762553 - DNA, 75 bp, synthetic construct
  source 1..75: mol_type = other DNA
cggggtaaatcaggattatcagcaatcaaaattatggtatgaaaaggcggctgcgcaaaatgatgttgatgcgca

SEQ ID NO: 762554 - DNA, 75 bp, synthetic construct
  source 1..75: mol_type = other DNA
gcagtttagataaaatgctggcagaaatagatgttgcttttgcatcaacttataccgcgcttacactatctagtt

SEQ ID NO: 762555 - DNA, 75 bp, synthetic construct
  source 1..75: mol_type = other DNA
acagtacccatgtcattaaaccgaaaaaatcggtggcactttccggcgttccggcgggcaatacggcgctctgca

SEQ ID NO: 762556 - DNA, 75 bp, synthetic construct
  source 1..75: mol_type = other DNA
tttggcgggcgctatcaggcgcttcaggcgcagtgtgtggccgatcctgactgttcgctggaaatggcccgcgag

SEQ ID NO: 762557 - DNA, 75 bp, synthetic construct
  source 1..75: mol_type = other DNA
aaatacatcaccacctcagatcgcaaggagaccattgctctggccacctacggggagattttctccatcacccgc

SEQ ID NO: 762558 - DNA, 75 bp, synthetic construct
  source 1..75: mol_type = other DNA
gcgtaatatctcgcttgtcatgacagaagcagataaagcgttacgtgaggcgaaaaccgatggcggtaacaaagt

SEQ ID NO: 762559 - DNA, 75 bp, synthetic construct
  source 1..75: mol_type = other DNA
atgctcaatataatttaggtcagatctattactacggtcagggcgtaactcagagctatcgaaaggcgaaggaat

SEQ ID NO: 762560 - DNA, 75 bp, synthetic construct
  source 1..75: mol_type = other DNA
aataagggattaatccagggctgggaggaatcagaagaaaccttccagaaatggacccgcaaaggtcgcctgtct

SEQ ID NO: 762561 - DNA, 75 bp, synthetic construct
  source 1..75: mol_type = other DNA
ggcaattttgtgggagacgggatccgccaggcgatgctggcccgtgccggatttgaaaatgtcgagaaggataac

SEQ ID NO: 762562 - DNA, 75 bp, synthetic construct
  source 1..75: mol_type = other DNA
atgaaaattatattaacaatatttatttttctctttactgcttttcagtctgcaaatgcaggtggaatacctggt

SEQ ID NO: 762563 - DNA, 75 bp, synthetic construct
  source 1..75: mol_type = other DNA
agattgttgatgaagtctgcgattttgtggtgaatcagcaggctgtgttcctgggcggtcactacatcctgcagg

SEQ ID NO: 762564 - DNA, 75 bp, synthetic construct
  source 1..75: mol_type = other DNA
atcattctgccactggcaatgccagcggtggcggcgggctgggtgttaagctttaccctgtcgatggacgatgtg

SEQ ID NO: 762565 - DNA, 75 bp, synthetic construct
  source 1..75: mol_type = other DNA
aatttattcgatggtcaaagtcggcgtatcgccggaagttaacgcgctggcaaccatattactggtgctgtcgct

SEQ ID NO: 762566 - DNA, 75 bp, synthetic construct
  source 1..75: mol_type = other DNA
tcgttttggcggcaaccttgcattgacgctgggaactttcggtggggtttatattgcaggtggcatcgtgccacg

SEQ ID NO: 762567 - DNA, 75 bp, synthetic construct
  source 1..75: mol_type = other DNA
atgaatatcagcacagaaagtcgcgaaattctgcgtaattacagggccgtgattaatgcgcggcgtcgtgaaatg

SEQ ID NO: 762568 - DNA, 75 bp, synthetic construct
  source 1..75: mol_type = other DNA
gccgtgattaatgcgcggcgtcgtgaaatggggcagaaaccgctcaccaccgcgcagattgttgatgaagtctgc

SEQ ID NO: 762569 - DNA, 75 bp, synthetic construct
  source 1..75: mol_type = other DNA
gggcagaaaccgctcaccaccgcgcagattgttgatgaaatctgtgattttgtggcgaatcagcaggcggttttc

SEQ ID NO: 762570 - DNA, 75 bp, synthetic construct
  source 1..75: mol_type = other DNA
agattgttgatgaaatctgcgattttgtagcgaatcagcaggctgttttcctcggtggtcagtacatccttcagg

SEQ ID NO: 762571 - DNA, 75 bp, synthetic construct
  source 1..75: mol_type = other DNA
aaatcctgcgacaatacaaggcggtgattaatgcccgccgccgtgagaatggccagtcggccctcagaacggaac

SEQ ID NO: 762572 - DNA, 75 bp, synthetic construct
  source 1..75: mol_type = other DNA
tggaagcggcgaaagatctcggtgccagtgaatttaccattctgcgaaaaatcattctgccactggcaatgccag

SEQ ID NO: 762573 - DNA, 75 bp, synthetic construct
  source 1..75: mol_type = other DNA
tcgacccgatgggcaacgttctcggttatatcggccacggcccgcgtctggttgcgatggatgctcacatcgaca

SEQ ID NO: 762574 - DNA, 75 bp, synthetic construct
  source 1..75: mol_type = other DNA
tcttggcgaattacaagaactgtcccaacgtttgggctatgacgaattccttggcaaaggcactctgaccgtttc

SEQ ID NO: 762575 - DNA, 75 bp, synthetic construct
  source 1..75: mol_type = other DNA
ctggcgctgatcccttttttagtttttccccttctggcacacaatctgagcagttataacgctgactattctttg

SEQ ID NO: 762576 - DNA, 75 bp, synthetic construct
  source 1..75: mol_type = other DNA
gtttcgttggccccgggcattcgcaggggatgaatctctggttaatgaccagcccggaataccatatgaaacgcc

SEQ ID NO: 762577 - DNA, 75 bp, synthetic construct
  source 1..75: mol_type = other DNA
taagcaggagaacaacaaaacagacaataatcagggcagcagtaatcagagtcagaacaggaggaaaaagagaat

SEQ ID NO: 762578 - DNA, 75 bp, synthetic construct
  source 1..75: mol_type = other DNA
cgaccggaacggtcgctgcaagccagggggtttggcgtcagggatggaagcccgccagggcggagacagcttcgc

SEQ ID NO: 762579 - DNA, 75 bp, synthetic construct
  source 1..75: mol_type = other DNA
atgagcgaaacggcatcctggcagccgagcgcatctattcctaacttgttaaaacgcgcggcgattatggcggaa

SEQ ID NO: 762580 - DNA, 75 bp, synthetic construct
  source 1..75: mol_type = other DNA
caagccttcttgcgttatctggaaattgatccgctctctgctgataaaacgcagttgcgggaagtggcggcaaag

SEQ ID NO: 762581 - DNA, 75 bp, synthetic construct
  source 1..75: mol_type = other DNA
tcttacaacaggtgctggactgcccggcagcagaaagcctttcttatcaacaagctttcttgcgttatctggaaa

SEQ ID NO: 762582 - DNA, 75 bp, synthetic construct
  source 1..75: mol_type = other DNA
gttgccccttacatcccggcggccttttgccgggatgccgggagcgcaggccacggcgcgacaagggtggcgcga

SEQ ID NO: 762583 - DNA, 75 bp, synthetic construct
  source 1..75: mol_type = other DNA
ttttgtgggctgttcatttaccccggacagtcagtgcggcaggttgtggctgtatcagcccccggcgacaggggc

SEQ ID NO: 762584 - DNA, 75 bp, synthetic construct
  source 1..75: mol_type = other DNA
tgtctgtgcccccggcgacaggggcttaaacaggtgtatggcaccggacacaacaacgggcagggacccgccgca

SEQ ID NO: 762585 - DNA, 75 bp, synthetic construct
  source 1..75: mol_type = other DNA
ccggacacaacaacgggcaggcacccgccgcaacgacgtgaagcgcggtttgcgaaacggcgttgccccttacat

SEQ ID NO: 762586 - DNA, 75 bp, synthetic construct
  source 1..75: mol_type = other DNA
gcgacagaggcggcgcgaccggaacggtcgctgcaagccagggtttcgcgtcagggatagaagcccgccagggcg

SEQ ID NO: 762587 - DNA, 75 bp, synthetic construct
  source 1..75: mol_type = other DNA
gtctatgcccccggcgacagggactcatacgggtgtgtggcacccggcaggcaatgagcagggacccgcagcaac

SEQ ID NO: 762588 - DNA, 75 bp, synthetic construct
  source 1..75: mol_type = other DNA
gcaaccgtaatgttgcacaccgtaccgggcaaatcgctatggacggttcgcaaaagcttccccagcgagcgctga

SEQ ID NO: 762589 - DNA, 75 bp, synthetic construct
  source 1..75: mol_type = other DNA
ctgtcaggattcgcctggcaaacattgatgcaccggagaaaaaacaggcttttggacgctggtcaacaaatcaac

SEQ ID NO: 762590 - DNA, 75 bp, synthetic construct
  source 1..75: mol_type = other DNA
cgaacgtgataatgtctacaacgggatgaccctgcgtgaatatgcccgtatgtcactaactgaacgtggtattgg

SEQ ID NO: 762591 - DNA, 75 bp, synthetic construct
  source 1..75: mol_type = other DNA
cctgtgcgtaaggaggggattgtcggttatgcagtgaagccgggggcagatcgttctctgttcgatgccagcggt

SEQ ID NO: 762592 - DNA, 75 bp, synthetic construct
  source 1..75: mol_type = other DNA
taatatctcgcttgtcatgacggaagcagataaagccttacgcgaagcgaaaagcgaggggggcaacaaagtgat

SEQ ID NO: 762593 - DNA, 75 bp, synthetic construct
  source 1..75: mol_type = other DNA
tttagcgagcgaactttggccgtcaatcgcgttattatgtctggcctcactctgttgtaacttgttgctactgac

SEQ ID NO: 762594 - DNA, 75 bp, synthetic construct
  source 1..75: mol_type = other DNA
cagttcagctctacgagagttatcctcagtgaaaacccgaaagaagagttggctcgcatttacaataaatatgta

SEQ ID NO: 762595 - DNA, 75 bp, synthetic construct
  source 1..75: mol_type = other DNA
tacgcaagggtgcgcgccacgacatttccatcgcgctgcgctaccgactattctgcccgccttactggaagaaga

SEQ ID NO: 762596 - DNA, 75 bp, synthetic construct
  source 1..75: mol_type = other DNA
caacaaaactggtttggcaaatatcaacccgtcgccgcaccggtaaaacaacctgaatctgcgcctgtggcagaa

SEQ ID NO: 762597 - DNA, 75 bp, synthetic construct
  source 1..75: mol_type = other DNA
ccgcagcaatccataaactggctgaacctcaggtaaaaatcgtttcattaaccatcaccgagaaaggttattgcc

SEQ ID NO: 762598 - DNA, 75 bp, synthetic construct
  source 1..75: mol_type = other DNA
tatcaggggaaaatggaacgtttgagtctggctgaggaggagcgttccgccgtagccgtgaccaacaaaaaagcc

SEQ ID NO: 762599 - DNA, 75 bp, synthetic construct
  source 1..75: mol_type = other DNA
atgctgcgctatcagggaaaaatagagcgcctgagcctggcagaagaggagcgttccacggttgctgtgacccgc

SEQ ID NO: 762600 - DNA, 75 bp, synthetic construct
  source 1..75: mol_type = other DNA
attatttctacgaaaatggcgcactcactctggcgctacatcgtcttttctgcggaatatacgacggtttcttca

SEQ ID NO: 762601 - DNA, 75 bp, synthetic construct
  source 1..75: mol_type = other DNA
atgcgataccgtcgagaagatgacgatggggattacaccttcggtcagggcgatgatacgtggctggttaactcc

SEQ ID NO: 762602 - DNA, 75 bp, synthetic construct
  source 1..75: mol_type = other DNA
taccacgacccgacgtgtcatgttttccgctgaaatcgacactctctatggaataacgactgttaaatcggaggc

SEQ ID NO: 762603 - DNA, 75 bp, synthetic construct
  source 1..75: mol_type = other DNA
gatgtcagtcagttcaggaacagataaacaggtaaatattcgtcttaaggattttcagtatcagcaacttctttt

SEQ ID NO: 762604 - DNA, 75 bp, synthetic construct
  source 1..75: mol_type = other DNA
cctttgctgttgccctgttgccagctaccttatgtgctgctcagattcaggggaaggttattcgtgtacttgatg

SEQ ID NO: 762605 - DNA, 75 bp, synthetic construct
  source 1..75: mol_type = other DNA
tcttttttatgatgctgggcgtacctttttaccttctttataaaattgcccgggacatttttggtaccgccggtg

SEQ ID NO: 762606 - DNA, 75 bp, synthetic construct
  source 1..75: mol_type = other DNA
ccggaaaacacccgcctgtttgaaatggtaaaaagaaaggagagtgaatatgagcgcatcggcactggtttgcct

SEQ ID NO: 762607 - DNA, 75 bp, synthetic construct
  source 1..75: mol_type = other DNA
acggaatcacgcatattggtccggcacggcaacaggatggcgattacagttatctggcggatattttgcaaaccg

SEQ ID NO: 762608 - DNA, 75 bp, synthetic construct
  source 1..75: mol_type = other DNA
ggagacagacggttcgatatttaacgaatcgctgaccgccaatgatcctgattttctggccaccagcgatctact

SEQ ID NO: 762609 - DNA, 75 bp, synthetic construct
  source 1..75: mol_type = other DNA
aagaaggtcagctagtaatagatccatttagtggtagcggttcaactcttgttgccgcaaaagagctgggtagaa

SEQ ID NO: 762610 - DNA, 75 bp, synthetic construct
  source 1..75: mol_type = other DNA
catcaacactacctgtaaccacaccaattttgctgatccacaacggcatgggcaccattgaagagttacagaaca

SEQ ID NO: 762611 - DNA, 75 bp, synthetic construct
  source 1..75: mol_type = other DNA
gaatcgctgaccgccaacgatcccgattttctcgccaccagcgatctgctcctggtgacgctgaaagcatggcag

SEQ ID NO: 762612 - DNA, 75 bp, synthetic construct
  source 1..75: mol_type = other DNA
tagaccgcgtatttcttgcactttctcacagtgaaaacatgctggaaatattacgcatatggcttgaaacgcttg

SEQ ID NO: 762613 - DNA, 75 bp, synthetic construct
  source 1..75: mol_type = other DNA
ggcacgcgcggcgtccgcctgcatacagtcaatgcaacaacgtccggcagcaagccgattttccccacgaaataa

SEQ ID NO: 762614 - DNA, 75 bp, synthetic construct
  source 1..75: mol_type = other DNA
ttgctaaccttgatgtgtggatcgttgacgcgtcgcagttaacggttgaggaaatacgcgcaacaacggaacgca

SEQ ID NO: 762615 - DNA, 75 bp, synthetic construct
  source 1..75: mol_type = other DNA
cctggcggcgaaggtcagcgggtcggcgttttgctgttcacgcttgaaatgtcgctcgatcagatgactgaacgt

SEQ ID NO: 762616 - DNA, 75 bp, synthetic construct
  source 1..75: mol_type = other DNA
caacctgaaggggtacgccacgctattgcaggaggaataccagcggcggcaaatgttggaactgatggaggatat

SEQ ID NO: 762617 - DNA, 75 bp, synthetic construct
  source 1..75: mol_type = other DNA
gatagtcggtgatgaaatcggtagcgaaaatttcatcccgttaatgcaaacggcgcggtcgtgtccatctgctgc

SEQ ID NO: 762618 - DNA, 75 bp, synthetic construct
  source 1..75: mol_type = other DNA
cttgaggtcgtcaaagagacgatgaaagactttgattcccggtattcaaaattgaaggtaacgaaagacaagatc

SEQ ID NO: 762619 - DNA, 75 bp, synthetic construct
  source 1..75: mol_type = other DNA
tacaacgcggatgagtcattaccggctctgcaacgggaagcgcaggaacaaaaacgaggtttatgggctgacagt

SEQ ID NO: 762620 - DNA, 75 bp, synthetic construct
  source 1..75: mol_type = other DNA
gagcctgtaataatggaactgcaagaaatagatctattgcacgacagatataaagaacagcacaccggagaataa

SEQ ID NO: 762621 - DNA, 75 bp, synthetic construct
  source 1..75: mol_type = other DNA
tcacagtgaaaacatgttggaaatattgcgcttatggcttgaaacgcttggcgataatgaacgcgacaaacaaaa

SEQ ID NO: 762622 - DNA, 75 bp, synthetic construct
  source 1..75: mol_type = other DNA
tttgaaattatccgggcgcaagccagaaacagaaatcttatcgacgccttgctggttggtgatgagattggcaac

SEQ ID NO: 762623 - DNA, 75 bp, synthetic construct
  source 1..75: mol_type = other DNA
ttgagcaagacgctgacaggatcatcatggtgtaccgcgatggttactacgatgaacagtctgtagcacgcgaat

SEQ ID NO: 762624 - DNA, 75 bp, synthetic construct
  source 1..75: mol_type = other DNA
ctaccatagtattgaagttaattctggagaaaatagtgctattgcagttagtggtaaggtatcggggaccgcaag

SEQ ID NO: 762625 - DNA, 75 bp, synthetic construct
  source 1..75: mol_type = other DNA
gcgcactgattaacgagtacggcgaagcacagggcgccgctgccgcgctggcactgctgactgacatgctggagc

SEQ ID NO: 762626 - DNA, 75 bp, synthetic construct
  source 1..75: mol_type = other DNA
agctggcacccggtgtcagcctggccccggcttccggcagtgaactggcccgtcgcctccagattgcgcattatc

SEQ ID NO: 762627 - DNA, 75 bp, synthetic construct
  source 1..75: mol_type = other DNA
gccatcatcggggtcagcgctggcacgccgtctgcagctgaatcactggccggtactgataacggacagcggaat

SEQ ID NO: 762628 - DNA, 75 bp, synthetic construct
  source 1..75: mol_type = other DNA
tgtgcgcttttttgtggctggtggtgagtcacgctttggctgcggatagcacgattactatccgcggctatgtca

SEQ ID NO: 762629 - DNA, 75 bp, synthetic construct
  source 1..75: mol_type = other DNA
gtgtggccgctgaatcaaccaattttactgttgatctgatggaaaacgcggcgaagcaatttaacaacattggcg

SEQ ID NO: 762630 - DNA, 75 bp, synthetic construct
  source 1..75: mol_type = other DNA
cgtcactgctgaccgcgccgccggtactgaccgcgcgcggctgtgaagtgatggcggagatgtaccgcacgcttc

SEQ ID NO: 762631 - DNA, 75 bp, synthetic construct
  source 1..75: mol_type = other DNA
cgaagaagaggccattattctcgaaatactgcgtgctgaaataggccatgtctctgctgaacgcgtgctctctgg

SEQ ID NO: 762632 - DNA, 75 bp, synthetic construct
  source 1..75: mol_type = other DNA
tttaccgctgtatcgatggcgatcccgatgctgaaaaaagagcatctgatccagtttggcggtaaggaaccagtt

SEQ ID NO: 762633 - DNA, 75 bp, synthetic construct
  source 1..75: mol_type = other DNA
ccctgggctggtgaatttgtatcgcgcaattgttaaagccgacaaccgcctgccagaaaatctcaagccaaaaga

SEQ ID NO: 762634 - DNA, 75 bp, synthetic construct
  source 1..75: mol_type = other DNA
ctgccgtggggtaatgtcgttaccaacccactgaaggcgcaacgactggctgaagaacttaacgaaaagcaggtg

SEQ ID NO: 762635 - DNA, 75 bp, synthetic construct
  source 1..75: mol_type = other DNA
ttcaccatggtcagcttgctaaatacatggtcaagaaagaaaaaaacaaaggccgcgtaagcctgcgttatttaa

SEQ ID NO: 762636 - DNA, 75 bp, synthetic construct
  source 1..75: mol_type = other DNA
aatacagctattattagcagaggattttattttgagaaatgaacgagcgttcaaaataaatgaaaaggggcttaa

SEQ ID NO: 762637 - DNA, 75 bp, synthetic construct
  source 1..75: mol_type = other DNA
tccgaactggagacagcggtaaaagacctgggcaaagcggtgtcttataagggaatgtatggcgatgtggccatc

SEQ ID NO: 762638 - DNA, 75 bp, synthetic construct
  source 1..75: mol_type = other DNA
gagcgcttttgcaaaattcagggaatgctctggcagcgcggcaatgccatccgtcggtcggttctcagctattac

SEQ ID NO: 762639 - DNA, 75 bp, synthetic construct
  source 1..75: mol_type = other DNA
acgccaggcgctttcccgactgatcggcgactttttcattgccggctttcaggaacgctcaaccgaacgtatttt

SEQ ID NO: 762640 - DNA, 75 bp, synthetic construct
  source 1..75: mol_type = other DNA
atggttccgcaatcaaccgcttcagcaagcccggacgcttgtcgccgactaccgtttcgtccgtcgcccgcgcaa

SEQ ID NO: 762641 - DNA, 75 bp, synthetic construct
  source 1..75: mol_type = other DNA
tgcggatggcaacaatgccaatctgcttgcattagaaagtcattcgtcgtccgccgcaggggtggggatacagct

SEQ ID NO: 762642 - DNA, 75 bp, synthetic construct
  source 1..75: mol_type = other DNA
tatccagaaaatgcaggcggcaatggcgacacttgactggctgagcatgaagatccccggaagtaatatctggtc

SEQ ID NO: 762643 - DNA, 75 bp, synthetic construct
  source 1..75: mol_type = other DNA
gcgggacatgggggcaaaaaacctttgtcttcaccgacgatctggatatcaataaccgactttatcatcaactgt

SEQ ID NO: 762644 - DNA, 75 bp, synthetic construct
  source 1..75: mol_type = other DNA
tggcgctgaccaatgcgcgcggcgcgttcgatccctgggatacgcaaaccgggcaaccctgtacgctggaaggca

SEQ ID NO: 762645 - DNA, 75 bp, synthetic construct
  source 1..75: mol_type = other DNA
gcagaaacgcgtcttaatgtggtgctgcgcgggatcgcctttggtgccagacctggcgcggttattgaagaaggc

SEQ ID NO: 762646 - DNA, 75 bp, synthetic construct
  source 1..75: mol_type = other DNA
tcaccctcagtcttacacataccgagttggctcacaggagcctgccattaatttgagagcttcagtagagactag

SEQ ID NO: 762647 - DNA, 75 bp, synthetic construct
  source 1..75: mol_type = other DNA
atggctttcattccaccaactatcgacgacgttagacattgctctaacgctttatctgtagatcccaccgaaacc

SEQ ID NO: 762648 - DNA, 75 bp, synthetic construct
  source 1..75: mol_type = other DNA
cctggagactaaccaaatccagctcctcaacacgtcaacgggcgaatggcgtgagccggtcgtctgcgaaagcgg

SEQ ID NO: 762649 - DNA, 75 bp, synthetic construct
  source 1..75: mol_type = other DNA
tgaaaatctttatgccgtccattcgattgaatatcgcgccctggagcaggatttttatctgtttgccgttcgctg

SEQ ID NO: 762650 - DNA, 75 bp, synthetic construct
  source 1..75: mol_type = other DNA
atattgtactgtatagcaaagatggtctatcaaacctccaaagaatcattaaaaagtattcatcaaaagatattt

SEQ ID NO: 762651 - DNA, 75 bp, synthetic construct
  source 1..75: mol_type = other DNA
tttactataggtacaccaatgaattggaaattaattgtcactgccattattggatttttaagtttttgtattttt

SEQ ID NO: 762652 - DNA, 75 bp, synthetic construct
  source 1..75: mol_type = other DNA
gtcggcaatccgtggggaaacagcgaagctaattcttgataaaacaatagcggcagaggcgcaaattcttgtcga

SEQ ID NO: 762653 - DNA, 75 bp, synthetic construct
  source 1..75: mol_type = other DNA
cgatagcccacgtcgtgccttcctgatgattatgtggggcattgtcggggggctgatcggggctggtgtcgcatt

SEQ ID NO: 762654 - DNA, 75 bp, synthetic construct
  source 1..75: mol_type = other DNA
tgagctgaaaggcgcatgggcggcacgcaccatccagatgaaagctcaggtgaagcgtcaggaagaggtggcgaa

SEQ ID NO: 762655 - DNA, 75 bp, synthetic construct
  source 1..75: mol_type = other DNA
cggccgaagacgctgaaaatgaactggatattcgtgggttgtttcgtaccttgtgggctgggaagctatggatta

SEQ ID NO: 762656 - DNA, 75 bp, synthetic construct
  source 1..75: mol_type = other DNA
cgtgaagtggatgactttgtcgccagtgtcgaaatagttaaacaggtgtgcgcggaaaacagcgttacccacctg

SEQ ID NO: 762657 - DNA, 75 bp, synthetic construct
  source 1..75: mol_type = other DNA
cttaaaaaaggcgatgaatttgcggtattaatgtcacgcgaaatgctggatggcaaacgcgaacaaagtcagttg

SEQ ID NO: 762658 - DNA, 75 bp, synthetic construct
  source 1..75: mol_type = other DNA
aagtgagcgcagtgatcaaagcgctacagtggcagatggactttcggaaggtgaaaaaaggcgatgaatttgctg

SEQ ID NO: 762659 - DNA, 75 bp, synthetic construct
  source 1..75: mol_type = other DNA
gttcgcggacgtaaaatggtggcgtttctggtctgctgcgtggcgctggcgataagcgcgatgtatgaattaatc

SEQ ID NO: 762660 - DNA, 75 bp, synthetic construct
  source 1..75: mol_type = other DNA
gatatccacgacatcatcggagagctggcctggcgtaagttcccgcaggaaatggagacactgacggaatggata

SEQ ID NO: 762661 - DNA, 75 bp, synthetic construct
  source 1..75: mol_type = other DNA
catcctgcgccagaaccgtgatgcgttccgtaaatactgcctggataacccggaggcctttaaccgctttgagcg

SEQ ID NO: 762662 - DNA, 75 bp, synthetic construct
  source 1..75: mol_type = other DNA
cgcgctcgacctgcgcttcaacccctttgccaacattaaggacattagagcatccgccgagagtgtccgcaacct

SEQ ID NO: 762663 - DNA, 75 bp, synthetic construct
  source 1..75: mol_type = other DNA
tttttgcgtagccgggttcgcatcgcgcaacgtaatcttgagctctgctttcctgaactcagtccctcccggcgt

SEQ ID NO: 762664 - DNA, 75 bp, synthetic construct
  source 1..75: mol_type = other DNA
actcaagacgcctttaacaaacagaatccttgctgaatatgctcgtacaaaacatcccgagcacatctttgaagg

SEQ ID NO: 762665 - DNA, 75 bp, synthetic construct
  source 1..75: mol_type = other DNA
ggcaacgggcgggttatcgcctcgccagtgtttgcatcgcttgttggcggaacagccgcaggcgctggacggtgg

SEQ ID NO: 762666 - DNA, 75 bp, synthetic construct
  source 1..75: mol_type = other DNA
gataagcgcgatgtatgagttaatcgagtggtgggcagcgctggcaatgggccagggagcggatgattttctcgg

SEQ ID NO: 762667 - DNA, 75 bp, synthetic construct
  source 1..75: mol_type = other DNA
gctggggttgagccgtaatccgtatgacaagctggggcattttttccaggggctggtgcctgcactggtggcacg

SEQ ID NO: 762668 - DNA, 75 bp, synthetic construct
  source 1..75: mol_type = other DNA
aacgttaatcctgatttataccggcatttcggcccatgacaaactcacctggctgatggaagtgacaccggtgat

SEQ ID NO: 762669 - DNA, 75 bp, synthetic construct
  source 1..75: mol_type = other DNA
gctattgaaaagcagatgaacgcagcagcagcgaagggtgacgtagaagcgtatcgcaagctgaaggcacaattg

SEQ ID NO: 762670 - DNA, 75 bp, synthetic construct
  source 1..75: mol_type = other DNA
agcgcgcgtttatctgggcaaaaccgactcgttacggaaggtgggattattgttgcgggcagtcttcttctgacc

SEQ ID NO: 762671 - DNA, 75 bp, synthetic construct
  source 1..75: mol_type = other DNA
gtctatcgctaactgtaagattgtgtcatgcaatgccacgcgtactgatgtgggccataaaagcactataacagg

SEQ ID NO: 762672 - DNA, 75 bp, synthetic construct
  source 1..75: mol_type = other DNA
gtgatacgacatccaaaattaaagctgccgatgacaaaccaatcagcgatcttaaatccatgattgctggatgcc

SEQ ID NO: 762673 - DNA, 75 bp, synthetic construct
  source 1..75: mol_type = other DNA
cgtggaagtgggcgcagaaagcaggtgtgacgctggattatccgcaaccgatagtcgatcacaaagaagcgagag

SEQ ID NO: 762674 - DNA, 75 bp, synthetic construct
  source 1..75: mol_type = other DNA
ggccggtagcgtctggcttaatgagttgatctggcgcgagttctaccgtcatctgatgacgtattacccctcgtt

SEQ ID NO: 762675 - DNA, 75 bp, synthetic construct
  source 1..75: mol_type = other DNA
tttgcagccagagaagtttatcggcccggtttatcagccagaagaacaagaggcactggaaacggcttacggctg

SEQ ID NO: 762676 - DNA, 75 bp, synthetic construct
  source 1..75: mol_type = other DNA
aacaacgctgttgaaatacgtagcgccagagcaaatcatctgacggagcaggcgcatcagcgcactcgactgggg

SEQ ID NO: 762677 - DNA, 75 bp, synthetic construct
  source 1..75: mol_type = other DNA
ggaagtgcgtgttccacaccggggaaatgtagtggagaaagttatcgaaggggcttacgaggtggtgggcgtgtt

SEQ ID NO: 762678 - DNA, 75 bp, synthetic construct
  source 1..75: mol_type = other DNA
ctaccagatgctgccgggttacttcaggttcgtctgccagaacgggtgcgtctgtggccagtctctgggggaagt

SEQ ID NO: 762679 - DNA, 75 bp, synthetic construct
  source 1..75: mol_type = other DNA
ggggactgtctgcgccggtggccgacttcgccgcgcagctgcatcaggaaagcggctggcgacctgatgcggtct

SEQ ID NO: 762680 - DNA, 75 bp, synthetic construct
  source 1..75: mol_type = other DNA
cgctggcaatgcggacctttcatctcgcaccgaagaacaagcggcggcaattgaacaaactgccgccagcatgga

SEQ ID NO: 762681 - DNA, 75 bp, synthetic construct
  source 1..75: mol_type = other DNA
gtgattcgacctctgcagcatgctgcgcaacgcattgaacaaattgccagcggcaatctgacaatggctgacgaa

SEQ ID NO: 762682 - DNA, 75 bp, synthetic construct
  source 1..75: mol_type = other DNA
gcaggaaggcaaaacgggatacccgattgttgatgctgccatgcgtcagcttaacagcactggctggatgcataa

SEQ ID NO: 762683 - DNA, 75 bp, synthetic construct
  source 1..75: mol_type = other DNA
ctggcaggtagcgccagccgactgccggaagcaggtgaagacttagagctgaaaatgggcgaaaactggcgtcgt

SEQ ID NO: 762684 - DNA, 75 bp, synthetic construct
  source 1..75: mol_type = other DNA
accgcagctgactgaactgaaaaaatatgcggtgttctctaaagtgaccatcgcgccagacgacgagcgtgtgct

SEQ ID NO: 762685 - DNA, 75 bp, synthetic construct
  source 1..75: mol_type = other DNA
tgaaaggtgttgccgttgaagagctggcgcaggtaaccaccgataacttcgcccgtctgtttcacatcgacgctt

SEQ ID NO: 762686 - DNA, 75 bp, synthetic construct
  source 1..75: mol_type = other DNA
atccgctggtctggatgaacaagtggttgttaaccgacacactgcaaattgcaccacaagaggcagagcaaagca

SEQ ID NO: 762687 - DNA, 75 bp, synthetic construct
  source 1..75: mol_type = other DNA
tgcagcaacgtgcgcctgccgacccgacacccggcaccaccgtcacccgcaacgttcagccggtctctccggacg

SEQ ID NO: 762688 - DNA, 75 bp, synthetic construct
  source 1..75: mol_type = other DNA
gcttggtgttgccggttttcaggcgcgcgccgcgctggcaaatctctttagtgaactgccttcgaaagaaaaaca

SEQ ID NO: 762689 - DNA, 75 bp, synthetic construct
  source 1..75: mol_type = other DNA
attgatggcccacaaaacgacgttacacgcatgcagctgatgagcgcagtggttattgcgctggcgacatgggag

SEQ ID NO: 762690 - DNA, 75 bp, synthetic construct
  source 1..75: mol_type = other DNA
atcctgatggcacgggaacgctgacggatgccgcccacgtgtggcagtcagccagtgacattcttaacaccccga

SEQ ID NO: 762691 - DNA, 75 bp, synthetic construct
  source 1..75: mol_type = other DNA
atccggacgggacgggaaacctgaacgatatggagcacctgaaacagtcagtcagggacatcctgaccaccccgc

SEQ ID NO: 762692 - DNA, 75 bp, synthetic construct
  source 1..75: mol_type = other DNA
gcgcgaagaaaaagtgacggattgcggtggcgtactacattgttttacagaggacagagaaacggcgggtaaatt

SEQ ID NO: 762693 - DNA, 75 bp, synthetic construct
  source 1..75: mol_type = other DNA
acacgctgtgtgccaccgggccggctaatggtgtgctgtaccgccagcccctgcccgccgtgcagtatcagcagg

SEQ ID NO: 762694 - DNA, 75 bp, synthetic construct
  source 1..75: mol_type = other DNA
cttgacagtccggcaaatgaaataaccagactgcgctgtatgagtgccgccgtgatcgccattacacgatgggag

SEQ ID NO: 762695 - DNA, 75 bp, synthetic construct
  source 1..75: mol_type = other DNA
gtattgagttttatcagttatcgtttaagtccacaaaacagttagcaaatctcggagatgcttttcagtctgtag

SEQ ID NO: 762696 - DNA, 75 bp, synthetic construct
  source 1..75: mol_type = other DNA
gggccgacaattatttttaatggcatttcaccaatcgcataccagtttttctgtagcaaatgcacctgatgaacc

SEQ ID NO: 762697 - DNA, 75 bp, synthetic construct
  source 1..75: mol_type = other DNA
atggcacaacctgccgcgattattcggataaagaaccttcgtttacgaacgtttattggcattaaggacgaagag

SEQ ID NO: 762698 - DNA, 75 bp, synthetic construct
  source 1..75: mol_type = other DNA
gatggtttctttattgattatattgacgttgaatggtgcttaagagcaaaaagcaaggggtacagtgtttatgtc

SEQ ID NO: 762699 - DNA, 75 bp, synthetic construct
  source 1..75: mol_type = other DNA
cggcggttggcgggattgtcagcgcgcagctggtgccggtgattggctggcacgggatcctggtgttgggtggcg

SEQ ID NO: 762700 - DNA, 75 bp, synthetic construct
  source 1..75: mol_type = other DNA
tgggtgtgctgatggataagttcaatcctttccgcgtactggcgctgagctatgccacaggcgctatatgcatcg

SEQ ID NO: 762701 - DNA, 75 bp, synthetic construct
  source 1..75: mol_type = other DNA
acctgcgacagcaaacgcaaagcgcgacgctggaagaagcatttattaatctgttacggcaagcgcaacgccagg

SEQ ID NO: 762702 - DNA, 75 bp, synthetic construct
  source 1..75: mol_type = other DNA
cattcgccagcggcagagcaatatgagcgtgctggttgccaccgcctacatggaagaggccgaacgcttcgactg

SEQ ID NO: 762703 - DNA, 75 bp, synthetic construct
  source 1..75: mol_type = other DNA
atacatcgcgctggggatgctgaactttttcctgctctgcgccctgtcggtgtttgtgtttggcgtaccgcataa

SEQ ID NO: 762704 - DNA, 75 bp, synthetic construct
  source 1..75: mol_type = other DNA
ggtgacgtatgctgaagtggagatcgataaactacacgcgctgcgctacgccgattcggtatccatgaccttgag

SEQ ID NO: 762705 - DNA, 75 bp, synthetic construct
  source 1..75: mol_type = other DNA
tcgacatcgcacgtgaacatcactgggtgacgtatgctgaagtggagatcgataaacctcacgcgctgcgctacg

SEQ ID NO: 762706 - DNA, 75 bp, synthetic construct
  source 1..75: mol_type = other DNA
gtataaagaaccttcgtttacgtacgtttatcggaattaaagacgaagagattaacaatcgtcaggatattgtta

SEQ ID NO: 762707 - DNA, 75 bp, synthetic construct
  source 1..75: mol_type = other DNA
ctgggtcaccgccgcgttccagattggcggtacgttgggcgcgctggcgctgggcgtgctgatggataagttcaa

SEQ ID NO: 762708 - DNA, 75 bp, synthetic construct
  source 1..75: mol_type = other DNA
atcactgccacggtgagaaaaattgaagcggcagagaaagaaaaccttcgccggaagctggataacccgacgccg

SEQ ID NO: 762709 - DNA, 75 bp, synthetic construct
  source 1..75: mol_type = other DNA
ccgcactgcttcatccgcgttattggttaacctggttgggtattggcgtactttggttggtcgtgcaattgccct

SEQ ID NO: 762710 - DNA, 75 bp, synthetic construct
  source 1..75: mol_type = other DNA
tttatttatgaatgcatggctgatccggttcttaacgctgccgttacgcatctgatgattgaagaacaggccagg

SEQ ID NO: 762711 - DNA, 75 bp, synthetic construct
  source 1..75: mol_type = other DNA
aaagctgggaaaaggcgatgcatatctcgctggtgctgtacgccgaacacgagtttaacgcttccacctttacca

SEQ ID NO: 762712 - DNA, 75 bp, synthetic construct
  source 1..75: mol_type = other DNA
ccggcgggcaatacggcgctctgcacggtgggtaaaagcggcaatgacctgcactaccgtggttacgatattctc

SEQ ID NO: 762713 - DNA, 75 bp, synthetic construct
  source 1..75: mol_type = other DNA
gaaagcgaaaaaagtggcaaaaaccaggaagcggagaaaacgctctcccaatggcacacgcgctccccgcaaaaa

SEQ ID NO: 762714 - DNA, 75 bp, synthetic construct
  source 1..75: mol_type = other DNA
tcctttccgcgtactggcgctgagctatgccataggcgctatatgcatcgtgatgattggcttaagccaggatgg

SEQ ID NO: 762715 - DNA, 75 bp, synthetic construct
  source 1..75: mol_type = other DNA
agccgcgccacgggcgtgagctggtcaaacgccgtcggccgctgcggcgcgattgtcggctcgctttctggcggc

SEQ ID NO: 762716 - DNA, 75 bp, synthetic construct
  source 1..75: mol_type = other DNA
tatcctgatactcatttttatctcaacgaatcagtcgcaactgctaatagcagtattcgtcagttattcgcaggg

SEQ ID NO: 762717 - DNA, 75 bp, synthetic construct
  source 1..75: mol_type = other DNA
caggtagagggggcgctttacgaggtaaagcccgatgccagcattcctgacgacgatacggagctgctgcgcgat

SEQ ID NO: 762718 - DNA, 75 bp, synthetic construct
  source 1..75: mol_type = other DNA
gttgaggcactggagattatagtcaccgcgatgcttcgcaatatggcgcaaaaagaccaacagcagttgattgat

SEQ ID NO: 762719 - DNA, 75 bp, synthetic construct
  source 1..75: mol_type = other DNA
cctgtagccgttatcgagatgaaagactacggcaccatgaacggacaggcagttcttgaatttgcgatgaaacta

SEQ ID NO: 762720 - DNA, 75 bp, synthetic construct
  source 1..75: mol_type = other DNA
attgagacgcgctatcgctataacccggacgtaaaaagcctgccggcgattgttccggcggtgatcccgcttctg

SEQ ID NO: 762721 - DNA, 75 bp, synthetic construct
  source 1..75: mol_type = other DNA
ggatctggtgaaaaaccaggatggcgcagtggtcggttgtaccgcactgtgtattgaaactggcgaagtggttta

SEQ ID NO: 762722 - DNA, 75 bp, synthetic construct
  source 1..75: mol_type = other DNA
gtattccgaccaaagtgactggtcaggcgctgaccgtgaacgagaaaggcgaagatgtggtgattccagggctgt

SEQ ID NO: 762723 - DNA, 75 bp, synthetic construct
  source 1..75: mol_type = other DNA
gaacataaatacccgcaaacgcaaaccaccagggcgcgtaaaggaagaagccgcaatggcggcgcctcgcgctat

SEQ ID NO: 762724 - DNA, 75 bp, synthetic construct
  source 1..75: mol_type = other DNA
ggtcataaaatgcagcaattagacagcattatctctgcgaaaggccagacggcgtactcttccgtcattctgggt

SEQ ID NO: 762725 - DNA, 75 bp, synthetic construct
  source 1..75: mol_type = other DNA
tgcaaattacgctgcccgctgacaatcagcaaaaagcgcagaccaccgcagaaaacatcattaatacgctggtta

SEQ ID NO: 762726 - DNA, 75 bp, synthetic construct
  source 1..75: mol_type = other DNA
cccagaaactgatgcaggcctataacatcacccaggctgacctcgcactcagtgatattgatgaaagcgtcagta

SEQ ID NO: 762727 - DNA, 75 bp, synthetic construct
  source 1..75: mol_type = other DNA
aatttgagccgctgaatacagaatgtgttgaccgttccctgcggctgatgctgcatccggatcgcattgaacaga

SEQ ID NO: 762728 - DNA, 75 bp, synthetic construct
  source 1..75: mol_type = other DNA
cgttcgcgtatggatgagattatcgtcgggctggaaaagtactgctcctggggaatttacggcgattacttcaac

SEQ ID NO: 762729 - DNA, 75 bp, synthetic construct
  source 1..75: mol_type = other DNA
ggattcactggcgcgtttttacttcaacgttacgctgttttgtgaagacagggatgaagtggcgctggaaacgga

SEQ ID NO: 762730 - DNA, 75 bp, synthetic construct
  source 1..75: mol_type = other DNA
tccatgcacaaccaatggttgaccgagcgagccaggcagcagggcatcgattcgaggtccctcgccagcatccag

SEQ ID NO: 762731 - DNA, 75 bp, synthetic construct
  source 1..75: mol_type = other DNA
gatatccacgacattatcggagaactggcctggcgcaagttcccgcaggaaatggagacactgaacggatggata

SEQ ID NO: 762732 - DNA, 75 bp, synthetic construct
  source 1..75: mol_type = other DNA
cgtgcacgtatggaagaaatcattgtcggtctggacaagtactgctcctggggcatttacggcgaatacttcaac

SEQ ID NO: 762733 - DNA, 75 bp, synthetic construct
  source 1..75: mol_type = other DNA
tcataacattagatatgaaaaaaaaacaaaagtgctgaatgtcgaatcattgttgtcgctaatcctaaacccgac

SEQ ID NO: 762734 - DNA, 75 bp, synthetic construct
  source 1..75: mol_type = other DNA
ctatatctatccaaacaaattgatggttataacattgaccatgatccagacaagcacaacagcgtaaacttcgtg

SEQ ID NO: 762735 - DNA, 75 bp, synthetic construct
  source 1..75: mol_type = other DNA
aagccttaacgacaagcaaagattgaacatggagtttttaaggctcctgattaataaatcccatgataacaatcc

SEQ ID NO: 762736 - DNA, 75 bp, synthetic construct
  source 1..75: mol_type = other DNA
ctggcagcaggaatatcttgccgagttcgtggactggtccaaagacgcgttactcgatgtcgataagctgctggt

SEQ ID NO: 762737 - DNA, 75 bp, synthetic construct
  source 1..75: mol_type = other DNA
tacgtgactcccaccacccgtagcgaatttttgcttggcaaacagctgccatacatcgcgctggggatgctgaac

SEQ ID NO: 762738 - DNA, 75 bp, synthetic construct
  source 1..75: mol_type = other DNA
acgtctgcccgcgcatcgcctggatgccgcaggggctgggcaaaaatctctaccacaccttgtcggtgtatgaaa

SEQ ID NO: 762739 - DNA, 75 bp, synthetic construct
  source 1..75: mol_type = other DNA
attaccggctctgcaacgggaagcgcaggaacaaaaacgaggtttatgggctgacagtaatccggttcctccgtg

SEQ ID NO: 762740 - DNA, 75 bp, synthetic construct
  source 1..75: mol_type = other DNA
aagccgcagaatatcctctgtcaccgcatcagtgagtcagaggttatccccgtcgtctgcgacaacattggtgaa

SEQ ID NO: 762741 - DNA, 75 bp, synthetic construct
  source 1..75: mol_type = other DNA
ggacaaaaatacaaccgaacaaacagcaaaggccaggttgtttacgacctgatgatacctcatcgtgaaaaccat

SEQ ID NO: 762742 - DNA, 75 bp, synthetic construct
  source 1..75: mol_type = other DNA
atgaaaaatatcaatgaaactgccgttgctgatactgaaaccgtcaatccgaatgtggtgatttttgataccccg

SEQ ID NO: 762743 - DNA, 75 bp, synthetic construct
  source 1..75: mol_type = other DNA
agtccttgacacaaaacgaacttgaatatcttcatgagattgtccgcatcgccttttacaatcaccggcttaaca

SEQ ID NO: 762744 - DNA, 75 bp, synthetic construct
  source 1..75: mol_type = other DNA
cctccctgaagaaggcagaccatgcagatatggcgatggaaattatccggcatttttttgacggtctgacttctg

SEQ ID NO: 762745 - DNA, 75 bp, synthetic construct
  source 1..75: mol_type = other DNA
aaaacatcctctgccatcgcatcagcgaatcagagattgtccctgtcgtctgcgacaatattggggaaagtacgc

SEQ ID NO: 762746 - DNA, 75 bp, synthetic construct
  source 1..75: mol_type = other DNA
gcgaagccggagcgaagaaagtgtacctcgcttctgcggcaccggaaattcgcttcccgaacgtttatggtattg

SEQ ID NO: 762747 - DNA, 75 bp, synthetic construct
  source 1..75: mol_type = other DNA
ccgaaagcgttgcgctcgatacactgggctttgatttcctgcgtgacgtcgcgcctggcgaagcgatttacatca

SEQ ID NO: 762748 - DNA, 75 bp, synthetic construct
  source 1..75: mol_type = other DNA
ctagcgcaaagcctgaaaccgggcgggatcatgcttatcggcgaaccctactggcgtcagctaccagcaacagaa

SEQ ID NO: 762749 - DNA, 75 bp, synthetic construct
  source 1..75: mol_type = other DNA
gtgaagccggagcgaagaaagtgtatctcgcctctgccgcgccggaaattcgtttcccgaacgtttatggtattg

SEQ ID NO: 762750 - DNA, 75 bp, synthetic construct
  source 1..75: mol_type = other DNA
actttgcccgcccggattcgttcatcgacaaaatttccgtttatagcgcccgcgttaatatgggcaccaagcttg

SEQ ID NO: 762751 - DNA, 75 bp, synthetic construct
  source 1..75: mol_type = other DNA
gacaatattttcgctgccattgctgccacaaaccgcttaatccgcggcgcgtatgcctgtgtggcgatgattatc

SEQ ID NO: 762752 - DNA, 75 bp, synthetic construct
  source 1..75: mol_type = other DNA
aagcgaaatataccatcatattcgtaagggcataccaataaatggcgttcctttccctaaaccactgaaacaatt

SEQ ID NO: 762753 - DNA, 75 bp, synthetic construct
  source 1..75: mol_type = other DNA
acagccagtctcgcagtcgctggtacgtgcgatcgtcgccgtggctcaggcgctcaatcttcaggtgattgccga

SEQ ID NO: 762754 - DNA, 75 bp, synthetic construct
  source 1..75: mol_type = other DNA
cctgcgagtggcggtaaatatttctgcacgtcagctcgccgatcaaaccattttcaccgccctgaaacaggttct

SEQ ID NO: 762755 - DNA, 75 bp, synthetic construct
  source 1..75: mol_type = other DNA
cctcggcagcggctcgggcgagatgctctgcacctgggccagggatcatggcattacggggactggcatcgacat

SEQ ID NO: 762756 - DNA, 75 bp, synthetic construct
  source 1..75: mol_type = other DNA
aaattggaagtattacgtatactttccatcaaggaaacagccgtgattcatctgattttgatatctatgatattg

SEQ ID NO: 762757 - DNA, 75 bp, synthetic construct
  source 1..75: mol_type = other DNA
ttgatgtttatgctacattgacagatgcatcacagccagtgaacagaacagatatattgaccttaagcagtgaat

SEQ ID NO: 762758 - DNA, 75 bp, synthetic construct
  source 1..75: mol_type = other DNA
aatccgtgcctgtttgagtatgtatactttgcccgcccggactcgttcatcgacaaaatttccgtttacagcgcc

SEQ ID NO: 762759 - DNA, 75 bp, synthetic construct
  source 1..75: mol_type = other DNA
aaagcgactctcatttttccgattatcatctgacgccgcccagtaataatgaaattgatttactgaatcttatcg

SEQ ID NO: 762760 - DNA, 75 bp, synthetic construct
  source 1..75: mol_type = other DNA
gatcctttccgcgttgatcggcggtatggttgcttgtggcagtgtgctcttgcatcatgcaatggcatccagaaa

SEQ ID NO: 762761 - DNA, 75 bp, synthetic construct
  source 1..75: mol_type = other DNA
ggtaatcgcggtggccttaacctttgcctgtatcgggttactggtgtctttcattctgccgcaaaagtggaccag

SEQ ID NO: 762762 - DNA, 75 bp, synthetic construct
  source 1..75: mol_type = other DNA
tttcctgattatgcgccagcttggcgagatggtggttgaggagccagtatccggttcatttgctcactttgccta

SEQ ID NO: 762763 - DNA, 75 bp, synthetic construct
  source 1..75: mol_type = other DNA
atgcagtactggttcccggatgttcccacctggatctgggctgccgccttctttattatcatcaacgccgttaac

SEQ ID NO: 762764 - DNA, 75 bp, synthetic construct
  source 1..75: mol_type = other DNA
tcgcatacttgaaaatcaaaaagggacagtttgggtatatgaccaggatgatgcgtttcttgatattaaagcaaa

SEQ ID NO: 762765 - DNA, 75 bp, synthetic construct
  source 1..75: mol_type = other DNA
ggggtggctatcgacgagaatttacaggatgtaaatcagatccaactgtatcatggtgctccttatatctttaca

SEQ ID NO: 762766 - DNA, 75 bp, synthetic construct
  source 1..75: mol_type = other DNA
ggcatgaagagaatgagagggctttcttcgaaaggctgggtacgatcagtgaccgatatgaggcgagtcctgatt

SEQ ID NO: 762767 - DNA, 75 bp, synthetic construct
  source 1..75: mol_type = other DNA
gcaacgtatacgaaagtgtaatacgcgccgtccatgacagccgtagcaggcttatcgatcagcatacagtcgata

SEQ ID NO: 762768 - DNA, 75 bp, synthetic construct
  source 1..75: mol_type = other DNA
atttaacctgtttatcaagaagtttcagtctgttagcttactagaagagtacctgcgctcatcaccttatgtaat

SEQ ID NO: 762769 - DNA, 75 bp, synthetic construct
  source 1..75: mol_type = other DNA
cgatgatcggcgggatggtggcttgtggtggcgtgctgttgcgctatgcgatggcatccagaaaacaggatgccg

SEQ ID NO: 762770 - DNA, 75 bp, synthetic construct
  source 1..75: mol_type = other DNA
caaaagcaaatatcaacgatgtgaattttacgccgtttaaatatcagttaagcccgtcattgccagtgaaaaaag

SEQ ID NO: 762771 - DNA, 75 bp, synthetic construct
  source 1..75: mol_type = other DNA
atagagttaggacccaccgagattctcgcacgtcgtgtcgctcaagaactgggatggagtgttcccgacttcaaa

SEQ ID NO: 762772 - DNA, 75 bp, synthetic construct
  source 1..75: mol_type = other DNA
cagagacatgaatgtccagggctgtcagggatggctctacaggcgtgtggaagctgatgaattatccgcgattac

SEQ ID NO: 762773 - DNA, 75 bp, synthetic construct
  source 1..75: mol_type = other DNA
cgtgactcggcggcaagtattgttgcgcaagggaatttttacggcactgaccgttctgcggaaggaataagatta

SEQ ID NO: 762774 - DNA, 75 bp, synthetic construct
  source 1..75: mol_type = other DNA
gcctgttaaagaaaaaattgcgcgaagaaggtacgtcatattcacagttgcttactgagtgtaggatgcagcgtg

SEQ ID NO: 762775 - DNA, 75 bp, synthetic construct
  source 1..75: mol_type = other DNA
atgaagtttttaccctatatttttcttctctgttgtggtctttggtcgaccataagtttcgcagacggagattac

SEQ ID NO: 762776 - DNA, 75 bp, synthetic construct
  source 1..75: mol_type = other DNA
tgtttaaacgttatagccaaacaagtgcaggtcgtcagcaaacaggttctggtttaggcttaatgatctgcaaag

SEQ ID NO: 762777 - DNA, 75 bp, synthetic construct
  source 1..75: mol_type = other DNA
attacgacctccctggttcacattgatgacaaccacgctgttatcaaaatgacgattatggattctggaagtgga

SEQ ID NO: 762778 - DNA, 75 bp, synthetic construct
  source 1..75: mol_type = other DNA
acaacgacaaggctggatgcaaatgtcgtgatgctaagccattcatcgaactactgacagaaacaaaaacacgta

SEQ ID NO: 762779 - DNA, 75 bp, synthetic construct
  source 1..75: mol_type = other DNA
gtattagcgaaaatggacaaaaaacggtcaatcaggatggcgtaaacgaagcggcattgcgttgcttggccttct

SEQ ID NO: 762780 - DNA, 75 bp, synthetic construct
  source 1..75: mol_type = other DNA
aaacacggcttcagatttttacttcggcaatggctttactgcgacacttgatttcctgcttaaaccaaaaacgct

SEQ ID NO: 762781 - DNA, 75 bp, synthetic construct
  source 1..75: mol_type = other DNA
ggaggaggcattaaatcttcatgcacataaaaaaatttcttcattactcgttcatcactgtagcagagatattcc

SEQ ID NO: 762782 - DNA, 75 bp, synthetic construct
  source 1..75: mol_type = other DNA
aaaattgcgcgaagaagagacatcatattcacagttgcttactgagtgtagaatgcaacgtgctttgcaacttat

SEQ ID NO: 762783 - DNA, 75 bp, synthetic construct
  source 1..75: mol_type = other DNA
ggcttcagatttttacttcggcaatggcttcactgcgacacttgatttcctgcttaaaccaaaaacgctacgtga

SEQ ID NO: 762784 - DNA, 75 bp, synthetic construct
  source 1..75: mol_type = other DNA
aattacctttccggcgctggtaaccacccttcacgattcaatgcgaccgcttacctcatcaaaaccagtaaatat

SEQ ID NO: 762785 - DNA, 75 bp, synthetic construct
  source 1..75: mol_type = other DNA
ctgacagtaacgccttactacaaccgcccatcgcaggaaggtttatatcagcatttcaaagccatcgctgaacat

SEQ ID NO: 762786 - DNA, 75 bp, synthetic construct
  source 1..75: mol_type = other DNA
atgagaaggtacacattggttgcattaaatacagaaacgaatacgagcttaacgaagaatcttctgtcaaaattg

SEQ ID NO: 762787 - DNA, 75 bp, synthetic construct
  source 1..75: mol_type = other DNA
cgtaaagcgcccaactcttgcggtagccagaatgaaagacctgattcgtcacattgttgatgggcatggtcagcc

SEQ ID NO: 762788 - DNA, 75 bp, synthetic construct
  source 1..75: mol_type = other DNA
tgagccgatcacagacatttcgtgatgccgtaagctatggcattcataatgagaaggtacacattggttgcatta

SEQ ID NO: 762789 - DNA, 75 bp, synthetic construct
  source 1..75: mol_type = other DNA
tgagcggcgatgatgcgagcgcgctggacttcatgcaattaggcggtcatggggttatttccgttacggctaacg

SEQ ID NO: 762790 - DNA, 75 bp, synthetic construct
  source 1..75: mol_type = other DNA
ctgacggtaaccccttactacaatcgtccgtcgcaagaaggtttgtatcagcatttcaaagccatcgctgaacat

SEQ ID NO: 762791 - DNA, 75 bp, synthetic construct
  source 1..75: mol_type = other DNA
tcgataatgccagcgctgcatttcacaaggttaaggaaggtgaacttgatgctctggtcgcgacacagctaaatt

SEQ ID NO: 762792 - DNA, 75 bp, synthetic construct
  source 1..75: mol_type = other DNA
tttgtcattagaaagtcatcccggcataggaacgacttttacaatcacaatcccggtagaaattacccagcaagt

SEQ ID NO: 762793 - DNA, 75 bp, synthetic construct
  source 1..75: mol_type = other DNA
agtcgctcctcggcttaattggtgaaatccttgatgtcgacaaaattgaatcgggtaactatcaacttcaaccac

SEQ ID NO: 762794 - DNA, 75 bp, synthetic construct
  source 1..75: mol_type = other DNA
atgctgcaggcaccgcaaacgctcggcgaagaagcatcgaagttaagtaaagatttcgatcgcggcaatatgcgc

SEQ ID NO: 762795 - DNA, 75 bp, synthetic construct
  source 1..75: mol_type = other DNA
aagattgacttcaaatcaattaggtgtaccagaaactattggaaatgcaaaaattaatggtacaggaaaaattgc

SEQ ID NO: 762796 - DNA, 75 bp, synthetic construct
  source 1..75: mol_type = other DNA
ttttatctattttagggctctatatttattcaccaataattgctttaggccagttgaatgaagtaaatagtagtc

SEQ ID NO: 762797 - DNA, 75 bp, synthetic construct
  source 1..75: mol_type = other DNA
actcacttcacccacaaagcatggcacagcagctctgaaaccatcgctaaaatcaaatatgcgatgatcggcgac

SEQ ID NO: 762798 - DNA, 75 bp, synthetic construct
  source 1..75: mol_type = other DNA
ccggctaattcaggaagaccacggtggtgctcctggcatcgaaaaaatagagaaagcaattcgtgcgggtaaggg

SEQ ID NO: 762799 - DNA, 75 bp, synthetic construct
  source 1..75: mol_type = other DNA
ttatcagaataccggacaggtttgtgcagcggcaaaacgctttattatcgaagagggaattgcttcggcatttac

SEQ ID NO: 762800 - DNA, 75 bp, synthetic construct
  source 1..75: mol_type = other DNA
ataaccgtcatcaccggtaaaacggtcccgatgttacgggcgtttaaagtggcaaaacaggaggctggcaatggt

SEQ ID NO: 762801 - DNA, 75 bp, synthetic construct
  source 1..75: mol_type = other DNA
cgcaaaacgttacgcggcaacaatcaggcttcgcctgaacacgctggataaaagcgcgtggacattgattgccga

SEQ ID NO: 762802 - DNA, 75 bp, synthetic construct
  source 1..75: mol_type = other DNA
ttttgcggacattggcgagcaggtcgagcgcattggtcagcaatgtcagattgcgtttgctgcagatggccgttg

SEQ ID NO: 762803 - DNA, 75 bp, synthetic construct
  source 1..75: mol_type = other DNA
ccaacccactggaaaacgtcagacagtatcgtactgatgaaaccgaaatggctttcctcactaccgaagaaattg

SEQ ID NO: 762804 - DNA, 75 bp, synthetic construct
  source 1..75: mol_type = other DNA
gatgctaacactggctgatattccttatcagttcgttgatgtcagtggttttgaccacgagggagcttcacgcga

SEQ ID NO: 762805 - DNA, 75 bp, synthetic construct
  source 1..75: mol_type = other DNA
ggctcctgacgcacctgaacagttaaagaagaatgttattgaatatcgtaaatcgctttatatctggctgaattc

SEQ ID NO: 762806 - DNA, 75 bp, synthetic construct
  source 1..75: mol_type = other DNA
acggttctggcgaatgttaccccagaaatgaccgcgtttcgggaagaaatgtttggccccgttgcggcaatcacc

SEQ ID NO: 762807 - DNA, 75 bp, synthetic construct
  source 1..75: mol_type = other DNA
ctcttcagcttgcagtggaaggttttcgcggctggcgcgagacaagcgtagattaccgggcggaaaaactgcgag

SEQ ID NO: 762808 - DNA, 75 bp, synthetic construct
  source 1..75: mol_type = other DNA
ttaccgaacgttttgtggcagctgcggcagccttgaaaatgggcgatccccgtgacgaagagaacgctctcggac

SEQ ID NO: 762809 - DNA, 75 bp, synthetic construct
  source 1..75: mol_type = other DNA
ggactaaagcaaaaatcattgttacctgctggctctgggagtttcgccgctataaccgggttgtggatgcggcgc

SEQ ID NO: 762810 - DNA, 75 bp, synthetic construct
  source 1..75: mol_type = other DNA
gcgtttgtgcatcaggccaagccgttttacttcggagacaacgacacgggctggacggcagattttgattacctg

SEQ ID NO: 762811 - DNA, 75 bp, synthetic construct
  source 1..75: mol_type = other DNA
gtctattccggagacagacgcgcccattaagcaggcgcttgcgcatggattattattacacttaaaaatatccac

SEQ ID NO: 762812 - DNA, 75 bp, synthetic construct
  source 1..75: mol_type = other DNA
ttaaagagaatatccatgccggacgcttcaccggacttaagaaattagtgcagtttatcgattcagtacgaacag

SEQ ID NO: 762813 - DNA, 75 bp, synthetic construct
  source 1..75: mol_type = other DNA
ccagtagttaaacaagatatgactaaggatattgctcatgtggtgatgcgcgatagtgaggcgctaagcgtgtga

SEQ ID NO: 762814 - DNA, 75 bp, synthetic construct
  source 1..75: mol_type = other DNA
atattgctcatgtggtgatgcgcgatagtgaggcgctaagcgtgttatacggcgtatgggggtacgaggtcccag

SEQ ID NO: 762815 - DNA, 75 bp, synthetic construct
  source 1..75: mol_type = other DNA
taccgcatattgggtgataaccgcccccggaaaatgcagcttgccgtggtgatgagtggaaccattatcgctctt

SEQ ID NO: 762816 - DNA, 75 bp, synthetic construct
  source 1..75: mol_type = other DNA
gcaataaaacctcagcaaaaacttttatagttaaccgtgtcagtagattatatccactttatatatttacatttg

SEQ ID NO: 762817 - DNA, 75 bp, synthetic construct
  source 1..75: mol_type = other DNA
tctttattggtggcctgacctataaaattacgattgcggtcataaaaaatattggtgcaaaattattttttattt

SEQ ID NO: 762818 - DNA, 75 bp, synthetic construct
  source 1..75: mol_type = other DNA
acacaaggctcgtctacagcttgatattcaaaagctgcaagacggtgacattgatctggtgaaacaggccaagca

SEQ ID NO: 762819 - DNA, 75 bp, synthetic construct
  source 1..75: mol_type = other DNA
cggttgggcgcgccgaacgtcagcagtttcaacggctattggtctggctggttgctaatgtctatccaacattca

SEQ ID NO: 762820 - DNA, 75 bp, synthetic construct
  source 1..75: mol_type = other DNA
tatcagttcgttgatgtcagtggttttgaccacgagggaacctcacgcgagttattgaaaaccctgaacccgttg

SEQ ID NO: 762821 - DNA, 75 bp, synthetic construct
  source 1..75: mol_type = other DNA
tgtcaggttccgacactggcgctggaaaatggcgagattatgaccgaaagcgcggctattgcgctaatggtgctc

SEQ ID NO: 762822 - DNA, 75 bp, synthetic construct
  source 1..75: mol_type = other DNA
ggttgtctggagattcagggggccagtctaagggaaaataagcgtaatgttcatcaccagattatgtacgatgag

SEQ ID NO: 762823 - DNA, 75 bp, synthetic construct
  source 1..75: mol_type = other DNA
taatggtgaagagatcgttgatacgaatatttaccatgttgcgactacgactttccttgcacttgggggcgatgg

SEQ ID NO: 762824 - DNA, 75 bp, synthetic construct
  source 1..75: mol_type = other DNA
acatgtccaatgtcgtaatcgattattttaagaaaggccacaagattactcctgcacaggtaaatgaaatgcggg

SEQ ID NO: 762825 - DNA, 75 bp, synthetic construct
  source 1..75: mol_type = other DNA
cacgataatgcgcagaatatcagcgcgatcgctgaagctgtatgtcagttaccgaaattacaagaagtattaaaa

SEQ ID NO: 762826 - DNA, 75 bp, synthetic construct
  source 1..75: mol_type = other DNA
tgtggcgctgagtgcagagcctgttacgggctgggggcgtcatctgtcctggatacgtgaactgagggcagaaat

SEQ ID NO: 762827 - DNA, 75 bp, synthetic construct
  source 1..75: mol_type = other DNA
ttctgtacggtactgatgtggtgaaggtcgtaagtgtgaggcaaaaaatccttctgaccggaacctgctggtatg

SEQ ID NO: 762828 - DNA, 75 bp, synthetic construct
  source 1..75: mol_type = other DNA
ggtactgatgtggtgaatgtcgtaagcgtaagacaaaaaattcttctgaccggaacctgctggtgtgagctgaca

SEQ ID NO: 762829 - DNA, 75 bp, synthetic construct
  source 1..75: mol_type = other DNA
tctgaacaagtgattaaagatcagggcgcaaccaaccttaccgacgcgctcaaaaacgtccccggcgtgggttaa

SEQ ID NO: 762830 - DNA, 75 bp, synthetic construct
  source 1..75: mol_type = other DNA
acggtaatttctgaacaagtgattaaagatcagggcgcaaccaaccttaccgacgcgctcaaaaacgtccccggc

SEQ ID NO: 762831 - DNA, 75 bp, synthetic construct
  source 1..75: mol_type = other DNA
ggtagcggatactacccgcacgatgacggtaatttctgaacaagtgattaaagatcagggcgcagcgcaccgaca

SEQ ID NO: 762832 - DNA, 75 bp, synthetic construct
  source 1..75: mol_type = other DNA
aggagaagaaattcccaattactcaagagctatacgagcggctggaaagcgtcatccatgattacgatggtgaaa

SEQ ID NO: 762833 - DNA, 75 bp, synthetic construct
  source 1..75: mol_type = other DNA
ttgcaaccagaagccctcgccttcaacggcattgacccgaacgatcccgatcgcggcgcggtcagcgaatacgag

SEQ ID NO: 762834 - DNA, 75 bp, synthetic construct
  source 1..75: mol_type = other DNA
tagcctcctcacttcatgacatttataattctcgtcagaaaaaagagaagaaggccagaagaataaactatgttc

SEQ ID NO: 762835 - DNA, 75 bp, synthetic construct
  source 1..75: mol_type = other DNA
atgacgcgttatgcgatccgttttatgccgccgatcgccgtatttactctctgctggcagattgccctgggcggt

SEQ ID NO: 762836 - DNA, 75 bp, synthetic construct
  source 1..75: mol_type = other DNA
gcgatctgtgaacattaaagccttgaacaaggcattcagaatgtatcacgcaatccgcaaagaagtacccggaat

SEQ ID NO: 762837 - DNA, 75 bp, synthetic construct
  source 1..75: mol_type = other DNA
tgtacgacactgaacgcaccgccgtgctgttttgtgaaatcgtcaaccgctggaaacgactgggcggctggccgc

SEQ ID NO: 762838 - DNA, 75 bp, synthetic construct
  source 1..75: mol_type = other DNA
tcggacaaaccgtattatcaaaagcctgccagaccgctggcatggagtttgacagcactcaggcacactccgcgc

SEQ ID NO: 762839 - DNA, 75 bp, synthetic construct
  source 1..75: mol_type = other DNA
aaaccggtactttcctggtggcggcggcgatttctcgcggcaaaattatctgccgtaacgcgcagccagatactc

SEQ ID NO: 762840 - DNA, 75 bp, synthetic construct
  source 1..75: mol_type = other DNA
ttaagtcctccctgtttatgggattctcgttacgcatgtcagcaaaaaatgcgaattttcaacttactatcacca

SEQ ID NO: 762841 - DNA, 75 bp, synthetic construct
  source 1..75: mol_type = other DNA
tcagtttatgcgaggcgattggcacacttgaattgctgaagcagtcactgattgaaagcgcgaaagagtccttaa

SEQ ID NO: 762842 - DNA, 75 bp, synthetic construct
  source 1..75: mol_type = other DNA
gcattgttcgctctgagtttaccgatgcagggattgtggtggctgggcaagcgttccgttacgccattaccgcca

SEQ ID NO: 762843 - DNA, 75 bp, synthetic construct
  source 1..75: mol_type = other DNA
ataaagtcagcgtcggtgcaactgtgaccatcatgtgcgcagcgactctggcggaaggcaccaccattattgaaa

SEQ ID NO: 762844 - DNA, 75 bp, synthetic construct
  source 1..75: mol_type = other DNA
tgcatggcaaacgtccgaaggctgttaacgtacgtaccgcgccgcatccggcattcccgaccgatatgcaggccc

SEQ ID NO: 762845 - DNA, 75 bp, synthetic construct
  source 1..75: mol_type = other DNA
ctggtatctcactgagatgaagcagctgcttggcgaggcgacggttgaatcgctgcgccatgccctcttttttga

SEQ ID NO: 762846 - DNA, 75 bp, synthetic construct
  source 1..75: mol_type = other DNA
tctggcacatcttgtccagcatgtatgttcggttgagcgtattaaaggattacagtggcaggcacgccgtcgcct

SEQ ID NO: 762847 - DNA, 75 bp, synthetic construct
  source 1..75: mol_type = other DNA
gaaaaatcttgatttacataatgtttcaacccgtcacggcgatggatggcaaggttggcaagcacgtgcgccgtt

SEQ ID NO: 762848 - DNA, 75 bp, synthetic construct
  source 1..75: mol_type = other DNA
ccggtcggttttgactaccgctccaagattgaagaaacccgctggcgtaacatgtgggactggggcatcttcatt

SEQ ID NO: 762849 - DNA, 75 bp, synthetic construct
  source 1..75: mol_type = other DNA
ggcctgatggtgccaccattaatgctggcgctgctgacgcaggaaaaagcattagatgtgtcgccggaacatttc

SEQ ID NO: 762850 - DNA, 75 bp, synthetic construct
  source 1..75: mol_type = other DNA
gtttatccgcctggatgaacccgctccgcttaacgccatgacgctggcgcaatggtcatcaccgaatgcgttaag

SEQ ID NO: 762851 - DNA, 75 bp, synthetic construct
  source 1..75: mol_type = other DNA
tgctgcctgcgcaggccaccagctttaccgaatatctgccgatgagtgacagcgaatacgcgcaaaagcgtgcgc

SEQ ID NO: 762852 - DNA, 75 bp, synthetic construct
  source 1..75: mol_type = other DNA
tcggcgttgctggcgtgacgcttgaaaagatgccaaatgaagaagattactggcaattaaccgctaaagaccgcg

SEQ ID NO: 762853 - DNA, 75 bp, synthetic construct
  source 1..75: mol_type = other DNA
tgatgccgagcaaaactggcattttagaaaagtcggcgttgctggcgtgacgcttgaaaagatgccaaatgatga

SEQ ID NO: 762854 - DNA, 75 bp, synthetic construct
  source 1..75: mol_type = other DNA
caccagtatttgaaacgggtgcgtcgtcggggaggcgaatttattatcgataccgtggaggctgtgcgctttgtc

SEQ ID NO: 762855 - DNA, 75 bp, synthetic construct
  source 1..75: mol_type = other DNA
cgtctggctaaagaagacccgtctttccgtgtatggactgacgaagaatctaaccagaccatcatcgcgggtatg

SEQ ID NO: 762856 - DNA, 75 bp, synthetic construct
  source 1..75: mol_type = other DNA
tgaccaaaggtcgtgcatcatacactatggaattcctgaagtatgatgaagcgccgagtaacgttgctcaggccg

SEQ ID NO: 762857 - DNA, 75 bp, synthetic construct
  source 1..75: mol_type = other DNA
ccgctgctgaccatcctgactgcacgtatggataaagcggcgtgggcgtttgtgttctcctccctgacgctggcc

SEQ ID NO: 762858 - DNA, 75 bp, synthetic construct
  source 1..75: mol_type = other DNA
attaccatcgctcttgaggtggttttgtttacactctgcctgtcattcagccatgctttttttggcgggaagatg

SEQ ID NO: 762859 - DNA, 75 bp, synthetic construct
  source 1..75: mol_type = other DNA
ggatgctatcggtagcagggcaaaggaagagtgcaggtcgtttaactcagaggttatcaagcgcctgatagacag

SEQ ID NO: 762860 - DNA, 75 bp, synthetic construct
  source 1..75: mol_type = other DNA
gccgactggcagaaacgttatccgaacaacccgggcgcgaaaatgctgcctacgcagttggtaaacgtaaaagca

SEQ ID NO: 762861 - DNA, 75 bp, synthetic construct
  source 1..75: mol_type = other DNA
aatagcacaaggaaggttcaatggcgactcaatgacaaggcttgttacagaggaaaattttatagttcggctgta

SEQ ID NO: 762862 - DNA, 75 bp, synthetic construct
  source 1..75: mol_type = other DNA
cgctgcccgtgctgggtgtgcgggatgcggaatgccgcgtgaagccgaagcagggcgatatttttctcatcgtgc

SEQ ID NO: 762863 - DNA, 75 bp, synthetic construct
  source 1..75: mol_type = other DNA
actataagccagtgctaaaaccaatttttcccggagaaattattaccaccaaagatattactggcggcttgtggt

SEQ ID NO: 762864 - DNA, 75 bp, synthetic construct
  source 1..75: mol_type = other DNA
caacaaaaatttggatccaccagcgaattacgcgcaggtgttaacggcggttctggtatcgctttaacaggtagt

SEQ ID NO: 762865 - DNA, 75 bp, synthetic construct
  source 1..75: mol_type = other DNA
atgcaaaacgcttatgccacgccaggtggctacttagatctcgccggttttgatgtctcaaccactcgcccggtc

SEQ ID NO: 762866 - DNA, 75 bp, synthetic construct
  source 1..75: mol_type = other DNA
gagacatcacgtactgtgtgcccggagttcagggcgggcatggatgcttaaatgaaccgcgagtctgtctggaat

SEQ ID NO: 762867 - DNA, 75 bp, synthetic construct
  source 1..75: mol_type = other DNA
cacgtcatattcgtgaccaggggaaacaggcaccgctggtgctgatcccgcgcagttcgcttggcgatcgcgtag

SEQ ID NO: 762868 - DNA, 75 bp, synthetic construct
  source 1..75: mol_type = other DNA
gacaagcaccgcagcggtaagcgcacccgcaaatccatccgcagagctgaaaatctacgatacctcatcacaacc

SEQ ID NO: 762869 - DNA, 75 bp, synthetic construct
  source 1..75: mol_type = other DNA
actgcaaaccacaccaaccagtgatcaattcaccaataacggcggtcgagtggacgcggtgtatatcgtcgcgac

SEQ ID NO: 762870 - DNA, 75 bp, synthetic construct
  source 1..75: mol_type = other DNA
atgtgcgcttttttattgagcttagtgttgccagcgcaggccaccagctttaccgaatatctgccgatgagtgac

SEQ ID NO: 762871 - DNA, 75 bp, synthetic construct
  source 1..75: mol_type = other DNA
tggataacggcattcgccatattattctcggcattggcggcagtgcgacggtcgacggcggtatgggcatggcgc

SEQ ID NO: 762872 - DNA, 75 bp, synthetic construct
  source 1..75: mol_type = other DNA
tgatgttgataacccgctggtggggccacgcggtgcggcggcggtgtttggtccgcaaaaaggggcaacgccgga

SEQ ID NO: 762873 - DNA, 75 bp, synthetic construct
  source 1..75: mol_type = other DNA
aaagcgccgctgggcgtggcgtcggtggcgaagcagtttaatgtcccggtgattgggattgctggcgtattgggt

SEQ ID NO: 762874 - DNA, 75 bp, synthetic construct
  source 1..75: mol_type = other DNA
atgcttaaaactgacgcacttttgtatttcggttcaaaaacaaaacttgcacaagctgctggtattcgtttggct

SEQ ID NO: 762875 - DNA, 75 bp, synthetic construct
  source 1..75: mol_type = other DNA
ggtgctacatcaatgttgataaaaacagctttgattttggaacaatttattctaactctggcaacggacctttga

SEQ ID NO: 762876 - DNA, 75 bp, synthetic construct
  source 1..75: mol_type = other DNA
ttattctcttgagataacaagacatgtagccactataaccgatgacgcaggtaacaattatatgttcactcttgc

SEQ ID NO: 762877 - DNA, 75 bp, synthetic construct
  source 1..75: mol_type = other DNA
tgaagagttaactcaggttcgtatgggtaagatcatcaaagaaaagtatcctgagcttgatgctgaagatcagga

SEQ ID NO: 762878 - DNA, 75 bp, synthetic construct
  source 1..75: mol_type = other DNA
tgtgtccgctaacccggataacaagcttggtcagcatctgggacagttcattgagcgtgacaagacgcacatcgt

SEQ ID NO: 762879 - DNA, 75 bp, synthetic construct
  source 1..75: mol_type = other DNA
tactaacctgatcgccgagccggatgctgttgagggggctgtcaccgaggcagtcaacgataccttgaaagccat

SEQ ID NO: 762880 - DNA, 75 bp, synthetic construct
  source 1..75: mol_type = other DNA
cacaatgcctcctgtatggcaggcatggcatttaactccgccgggctggggttggtacacggcatggcacacgcc

SEQ ID NO: 762881 - DNA, 75 bp, synthetic construct
  source 1..75: mol_type = other DNA
gccgattgtcatcgacttcaacagcaaacgggccagcactgaaacccgcgatcgctatcaccgttgcgcgcaaat

SEQ ID NO: 762882 - DNA, 75 bp, synthetic construct
  source 1..75: mol_type = other DNA
attatcggtcgcgccactcgtgacgctccgggtaaaacccgcgcgagatttactaacttgatcgccgagccggac

SEQ ID NO: 762883 - DNA, 75 bp, synthetic construct
  source 1..75: mol_type = other DNA
atggtgaagccgtcgtttaaatccctgacagggcgtggacggatagtgtgcgtcggatgtggttattccggtgtg

SEQ ID NO: 762884 - DNA, 75 bp, synthetic construct
  source 1..75: mol_type = other DNA
cgctaacccatacccaaatggcgaaacaggccgggaaactcggcgcgttgatgttctctggtacgacgctaaacg

SEQ ID NO: 762885 - DNA, 75 bp, synthetic construct
  source 1..75: mol_type = other DNA
ggcggaaaccaatgcggagctttacgactaccggctgcgccagattgccgcagggtttaagacactggccgacgt

SEQ ID NO: 762886 - DNA, 75 bp, synthetic construct
  source 1..75: mol_type = other DNA
ctgtaaattttgaacatatcagtaattcagcgtggcgtgtggcaaccagtgatatctcatatcaatacagattca

SEQ ID NO: 762887 - DNA, 75 bp, synthetic construct
  source 1..75: mol_type = other DNA
ggagagatcaacggcaaactcatctggagtaataccggttatttgatcaactggtatctgacagagatgaagcag

SEQ ID NO: 762888 - DNA, 75 bp, synthetic construct
  source 1..75: mol_type = other DNA
gcgcagcctgtttctgggtcgatgtatgtgaagataaaaacgcaacaacgcattctccacaacaacgaatggaaa

SEQ ID NO: 762889 - DNA, 75 bp, synthetic construct
  source 1..75: mol_type = other DNA
atgatccgcgagaacaaaccgctgatctcactatgggcacaatggtatatcggcctgatggtgccaccattaatg

SEQ ID NO: 762890 - DNA, 75 bp, synthetic construct
  source 1..75: mol_type = other DNA
taaggccggaagtttaataatgataaaaccaagtcgatatgcggaggatcccagaacaaacttaattgtaagtac

SEQ ID NO: 762891 - DNA, 75 bp, synthetic construct
  source 1..75: mol_type = other DNA
gcgcgttaatcacggcgttgctggaagaaaaaccattgccagaggcgattcgttttgcccatgctgccgctgcga

SEQ ID NO: 762892 - DNA, 75 bp, synthetic construct
  source 1..75: mol_type = other DNA
gtcggggaggcgaatttattatcgatatcgtggaggccgtgcgctttgtccctttagtgaagggtgagctggctt

SEQ ID NO: 762893 - DNA, 75 bp, synthetic construct
  source 1..75: mol_type = other DNA
tcgaatcctgccccgcaggttttgtctgtaaattttgaacatatcagtaattcagcgtggcgtgtggcaaccagt

SEQ ID NO: 762894 - DNA, 75 bp, synthetic construct
  source 1..75: mol_type = other DNA
atgccatttgcttgttatttcttcattttcataaacgttggtttgggagaagcggcaaaacgaaatgtgggaaca

SEQ ID NO: 762895 - DNA, 75 bp, synthetic construct
  source 1..75: mol_type = other DNA
gaagcggcaaaacgaaatgtgggaacaggggaaaatcagataccggacatggcttcatttagtggggtgagggat

SEQ ID NO: 762896 - DNA, 75 bp, synthetic construct
  source 1..75: mol_type = other DNA
tccatgaatttggcggcggcgtttcgcaactgatcggcaccggcgggcgcgacctgagcgagaaaatcggcggtc

SEQ ID NO: 762897 - DNA, 75 bp, synthetic construct
  source 1..75: mol_type = other DNA
gtgattctggccagcagcagcaccaataccggattgctggcgcgtgaatttatctgcaaaggggaggaagcctga

SEQ ID NO: 762898 - DNA, 75 bp, synthetic construct
  source 1..75: mol_type = other DNA
tgatgctctccggcgtgaaacaggaacatctcgagctgcatacgctgaaccagtcgttgattgctgacgtgcgcg

SEQ ID NO: 762899 - DNA, 75 bp, synthetic construct
  source 1..75: mol_type = other DNA
ttatttcaggcctgatggcgttaacttcaggatgtaaggaagaagctaaaacaacaaaatggtatcgtgaacatc

SEQ ID NO: 762900 - DNA, 75 bp, synthetic construct
  source 1..75: mol_type = other DNA
accctgatgaattaaaactcgtttatgaaaagtgccaaaagagtggtgatgctactgaaaactgcggtgatgctg

SEQ ID NO: 762901 - DNA, 75 bp, synthetic construct
  source 1..75: mol_type = other DNA
ggtcggttccaccatcgaggcgatcaaagaagcgaaagcgatcgctgccgccgaaggccgcgagttgatcattct

SEQ ID NO: 762902 - DNA, 75 bp, synthetic construct
  source 1..75: mol_type = other DNA
caacgattggctttgtgaggaggggatacgggagagaaatcctgtcagacgaggtgtctggaaaaacggagggaa

SEQ ID NO: 762903 - DNA, 75 bp, synthetic construct
  source 1..75: mol_type = other DNA
cttagtgcgcgtgatcttacggaaaaatttaacgcaggtatggcgtcgatacatgaacatcggttacaccattta

SEQ ID NO: 762904 - DNA, 75 bp, synthetic construct
  source 1..75: mol_type = other DNA
cagctggccgctgccactatccgccaccggctgacggtggtacgactgtacaacgattggctttgtgaggagggg

SEQ ID NO: 762905 - DNA, 75 bp, synthetic construct
  source 1..75: mol_type = other DNA
gtaatctgcttgacagaccctgccatgcgtccgatgacagcctgaataaacatgtcgtattcaagacccgcgcgt

SEQ ID NO: 762906 - DNA, 75 bp, synthetic construct
  source 1..75: mol_type = other DNA
gtttgtcatcaggctggaaaactgccatgcaacagcagttggcaaaattgtgacactgacctttaaggggacgga

SEQ ID NO: 762907 - DNA, 75 bp, synthetic construct
  source 1..75: mol_type = other DNA
ctgtatcaactgggcgcgctctgccattgaagggcgcaatacaaggcactgttgcaaagttagcgatgaggcagc

SEQ ID NO: 762908 - DNA, 75 bp, synthetic construct
  source 1..75: mol_type = other DNA
tctgaaaactgcaaacatgcaaatgaagctcattggcaaattcaacaattaaatgcacctgaaataagttttaac

SEQ ID NO: 762909 - DNA, 75 bp, synthetic construct
  source 1..75: mol_type = other DNA
aacattgttttttcgccacgcggctggagcgatttttgtccgctgaaagagggggcgttatgtcagcttccctga

SEQ ID NO: 762910 - DNA, 75 bp, synthetic construct
  source 1..75: mol_type = other DNA
atcaacaccggactggtacgaaaaagtaagcagggcgtttattacgccaaatttaacgccggggcgttactgcgc

SEQ ID NO: 762911 - DNA, 75 bp, synthetic construct
  source 1..75: mol_type = other DNA
aacgtggcttttttgaggcctgccgcgaactgcatcaggatgaggccgatccggagttgatgtttcaggattatg

SEQ ID NO: 762912 - DNA, 75 bp, synthetic construct
  source 1..75: mol_type = other DNA
atgcgaaccgcgatgaaaaacttcaaaacgttttgctcgattatggtctggaaggatacggtctttattggtact

SEQ ID NO: 762913 - DNA, 75 bp, synthetic construct
  source 1..75: mol_type = other DNA
ctactgacagaaacaaaaacatgtaaagcgtatacggagaatgagatcacgttagtaattgagtgggctttaacc

SEQ ID NO: 762914 - DNA, 75 bp, synthetic construct
  source 1..75: mol_type = other DNA
tcgttgtggcgaacaggcgaagtcattgatggaaacattgttttttcgccacgcggctggagcgatttttgtccg

SEQ ID NO: 762915 - DNA, 75 bp, synthetic construct
  source 1..75: mol_type = other DNA
tgatcataacgggcaattttcccggtttttctattttttatatgatccctctactgataattcaagtgatttttt

SEQ ID NO: 762916 - DNA, 75 bp, synthetic construct
  source 1..75: mol_type = other DNA
ggcgaaggcggttatacagttaaaactctttcaaaagtatccatcatttcacaatggttaggctttatttcatcg

SEQ ID NO: 762917 - DNA, 75 bp, synthetic construct
  source 1..75: mol_type = other DNA
atctcaccgtttattttgtctttcatttctggtgaaggtatttatacagttaaaacactttcacaactttcagtt

SEQ ID NO: 762918 - DNA, 75 bp, synthetic construct
  source 1..75: mol_type = other DNA
atgttatgcaagcgacggacgcttttgcccgctcgttgaaagaaatcgccagttggaactggccgtgcaaactgg

SEQ ID NO: 762919 - DNA, 75 bp, synthetic construct
  source 1..75: mol_type = other DNA
cgtttttgtccgcgacgtcgggcagttcgtcaatatcctgctgcagttttggttctggtttacgccgattgttta

SEQ ID NO: 762920 - DNA, 75 bp, synthetic construct
  source 1..75: mol_type = other DNA
ccagaacgtgatgctctatcaccagagccctaaggaaggtgcgaataagcggggaaattcttctcggctgactca

SEQ ID NO: 762921 - DNA, 75 bp, synthetic construct
  source 1..75: mol_type = other DNA
tgttaaatggcctgtttacgctggtcatacattacgcggcgccggagatgttgggaggcacggcgtactatgccg

SEQ ID NO: 762922 - DNA, 75 bp, synthetic construct
  source 1..75: mol_type = other DNA
aatattgtccgcctgtttcgggcctacccggatgaagaggttaatacggattttgtttgccataataaattctac

SEQ ID NO: 762923 - DNA, 75 bp, synthetic construct
  source 1..75: mol_type = other DNA
gggatttaactaaaaacaatctatttaataacacacatcatatttatagagtaagaaactctcattataaacttt

SEQ ID NO: 762924 - DNA, 75 bp, synthetic construct
  source 1..75: mol_type = other DNA
gcgtacgtgcagggcgaagagaacaccgaacagtggtcgcatgagaccgtgagcctgatcttgtgcttctatggc

SEQ ID NO: 762925 - DNA, 75 bp, synthetic construct
  source 1..75: mol_type = other DNA
aactctatcgcgccacactgggacggtaaccaggtatggctaatcaccgcaggtggcgcgctgttcgctgcctgg

SEQ ID NO: 762926 - DNA, 75 bp, synthetic construct
  source 1..75: mol_type = other DNA
cgttggtgaactgcacctgcgtacccgtgcaacggctcaggtggcggcgctggtaacgctggtgtgcttcgcact

SEQ ID NO: 762927 - DNA, 75 bp, synthetic construct
  source 1..75: mol_type = other DNA
gtaacttcttccaactgctcaatccgttcggcctgctggctggtgtggtaagcgtcgggatgatcatcactcagg

SEQ ID NO: 762928 - DNA, 75 bp, synthetic construct
  source 1..75: mol_type = other DNA
tatctggggccggggacgctttcccgggcggaatacgcccgttgcgatggtcatttttatttgcacaaaaaagag

SEQ ID NO: 762929 - DNA, 75 bp, synthetic construct
  source 1..75: mol_type = other DNA
ttgccaaaattcgcattacccctgttccgcgaggaagcggcggatctgcttttgggtggtttcagacggttgttg

SEQ ID NO: 762930 - DNA, 75 bp, synthetic construct
  source 1..75: mol_type = other DNA
tgacacccacagagtatcaggaacaaatagcacaaggaaagttcaatggcgactcaatgacaagacttgttacag

SEQ ID NO: 762931 - DNA, 75 bp, synthetic construct
  source 1..75: mol_type = other DNA
tgtcagatgttaatcacaccaagaaagatgttgttcagagcgcacttaatattatcattgacattacggtaatga

SEQ ID NO: 762932 - DNA, 75 bp, synthetic construct
  source 1..75: mol_type = other DNA
cttcggcaaaagaaccgtggcttatctttagcagtacaaatgactttaaaccccgggaaatcatgaaattgtaca

SEQ ID NO: 762933 - DNA, 75 bp, synthetic construct
  source 1..75: mol_type = other DNA
acgacactccccgctaattttaaaacgaacggtgctaagcaccattcttaatcacctcaccagaacctaccagaa

SEQ ID NO: 762934 - DNA, 75 bp, synthetic construct
  source 1..75: mol_type = other DNA
ggaaactactgcctaaagattcagagcagcagcagaaagcgaaagacgtttatgacattcgcttaaaagagctta

SEQ ID NO: 762935 - DNA, 75 bp, synthetic construct
  source 1..75: mol_type = other DNA
taccggtagcgccgtgggtggcattaacccgcgcagaatttgaaaaaggccttagtgataagcagttagcagaaa

SEQ ID NO: 762936 - DNA, 75 bp, synthetic construct
  source 1..75: mol_type = other DNA
cctggctggttagatgaaatcctgctcggcgtaatgaaatacgtcgttctgagtgccgggattatcttctttgtc

SEQ ID NO: 762937 - DNA, 75 bp, synthetic construct
  source 1..75: mol_type = other DNA
ccaggtgtgttggactacgtgattttatttctcttcaagtggggagtactggcttccggtctggcgttttttttc

SEQ ID NO: 762938 - DNA, 75 bp, synthetic construct
  source 1..75: mol_type = other DNA
cgcgaaggttccagtgtgggaatgtcaaaagtagtagcagaaaatgctctacaagatgcattaagattggcattt

SEQ ID NO: 762939 - DNA, 75 bp, synthetic construct
  source 1..75: mol_type = other DNA
gaaagcatggatgactttaggttgcaaaggatggggacgtattgacgtcatgctggatagtgatggacagtttta

SEQ ID NO: 762940 - DNA, 75 bp, synthetic construct
  source 1..75: mol_type = other DNA
gtgccgatggcggcacgtcaggcaggtatgagcttctcgcagttggtagtacgaattctggaactggcggactaa

SEQ ID NO: 762941 - DNA, 75 bp, synthetic construct
  source 1..75: mol_type = other DNA
cgaaaattgacgtgcgactgacactcaatgcccacggcatcaaacgcaccggacaaccgctattgctaagtttgt

SEQ ID NO: 762942 - DNA, 75 bp, synthetic construct
  source 1..75: mol_type = other DNA
ctgctttccagctttgtcgcctggaaacaaacaacggataacgtcgatgaattgttcgacacccaactgatgctg

SEQ ID NO: 762943 - DNA, 75 bp, synthetic construct
  source 1..75: mol_type = other DNA
aacagccgcgacagcagaaaaacccgccaaaacaacaaccacagcagccgaaagcgccgccaaatcctgatgaag

SEQ ID NO: 762944 - DNA, 75 bp, synthetic construct
  source 1..75: mol_type = other DNA
gccaaattgcatggcatgaatgttgtgtttgggaatgcgaaacaaggtggatttgaggcgaaagtaagctggtag

SEQ ID NO: 762945 - DNA, 75 bp, synthetic construct
  source 1..75: mol_type = other DNA
gtcactctgaatgcagataatttcaccgtaagagacaacggccccggcgtgacgccagaggcgctggcgcgaatt

SEQ ID NO: 762946 - DNA, 75 bp, synthetic construct
  source 1..75: mol_type = other DNA
atgccctgacatttgccatttttacccgcgacggcagaatggttcttaacgatggcgataatggagaagatattc

SEQ ID NO: 762947 - DNA, 75 bp, synthetic construct
  source 1..75: mol_type = other DNA
atcctgtaaataagcacgttaaatccgctacactctttagttcagaaagggttccacctgcaagttgttattcca

SEQ ID NO: 762948 - DNA, 75 bp, synthetic construct
  source 1..75: mol_type = other DNA
atgaaaatgaacgtaacggacaccgtgaaacaggcgtgcggccactggccgcgcattctcccggcgctgggggta

SEQ ID NO: 762949 - DNA, 75 bp, synthetic construct
  source 1..75: mol_type = other DNA
atgaggccgggatatggaaaatcattccgccgtcagattttgcccgcgatgtggccgggttgttccagcgtctgc

SEQ ID NO: 762950 - DNA, 75 bp, synthetic construct
  source 1..75: mol_type = other DNA
aggtggcctccgtggtggacaccctgaagctgattattccgcagcaggaagccccctcccgccgcctgattggct

SEQ ID NO: 762951 - DNA, 75 bp, synthetic construct
  source 1..75: mol_type = other DNA
ctgattattccccagcaggacgccccgccacggcggctgattggttttcgcaacggggtgctcgataccaaaagc

SEQ ID NO: 762952 - DNA, 75 bp, synthetic construct
  source 1..75: mol_type = other DNA
atgaggcgggcatatggaaaatcattccgccgtcggactttgcgcgcgacgtggccgggctgtttcagcgtctgc

SEQ ID NO: 762953 - DNA, 75 bp, synthetic construct
  source 1..75: mol_type = other DNA
cgccagactgatggagaaaacccaaccggccaccggcaacgcctacctcacccgcaagggctttcccggccggga

SEQ ID NO: 762954 - DNA, 75 bp, synthetic construct
  source 1..75: mol_type = other DNA
ccgtcacactggatgcgcaccctgtgcgatgtggatttcaccccgccggtggacggtgaaacgctggaaacccac

SEQ ID NO: 762955 - DNA, 75 bp, synthetic construct
  source 1..75: mol_type = other DNA
agtggtggtgtgtcccgcaggagagttattctgcattttcctgagcagatagcaccggaagaacgcgatccgcag

SEQ ID NO: 762956 - DNA, 75 bp, synthetic construct
  source 1..75: mol_type = other DNA
taacgctgacggggagctggtgaatattcagcttatcagtagcaatggtagcaagtgttttcttaaaggaggtca

SEQ ID NO: 762957 - DNA, 75 bp, synthetic construct
  source 1..75: mol_type = other DNA
acgctatccggccaccggcgcaaagtccgttcgacaccatgagcgaggcggaattcaccgccatgagcgccagcg

SEQ ID NO: 762958 - DNA, 75 bp, synthetic construct
  source 1..75: mol_type = other DNA
atgaaaacggcatctggaaaaatatccctgccgccactttctcacggaatgtggctgacttattccagcgtctgc

SEQ ID NO: 762959 - DNA, 75 bp, synthetic construct
  source 1..75: mol_type = other DNA
agtgcggcgcgggtgacggacttaagctggtagaaaaagtgtttggcgtgaccccgtctgaggccgccgggaagg

SEQ ID NO: 762960 - DNA, 75 bp, synthetic construct
  source 1..75: mol_type = other DNA
ctgattattccgcagcaggatgccccgccacggcggctgattggctttcgcaacggcgtgcttgataccagtacc

SEQ ID NO: 762961 - DNA, 75 bp, synthetic construct
  source 1..75: mol_type = other DNA
ggcgaaacgctggaaactcacgcgccggatttctggcgctggctcgaccgcgccgccggtggcagaccggaaaaa

SEQ ID NO: 762962 - DNA, 75 bp, synthetic construct
  source 1..75: mol_type = other DNA
atgtctgacgctcaccgtcatgcataaaaccggcggcgtgacattccgcgccggtgatgtggtgatgccgctgta

SEQ ID NO: 762963 - DNA, 75 bp, synthetic construct
  source 1..75: mol_type = other DNA
tgatgcgtttataccgtacggcgaggaagccacgcgcaaagccatttatgacgctatccggccaccggcgcaaag

SEQ ID NO: 762964 - DNA, 75 bp, synthetic construct
  source 1..75: mol_type = other DNA
gggtgataatgcacttcccggaacagattgcgccggaagagcgtgacccgaagctgaaagataaaattgcccgtg

SEQ ID NO: 762965 - DNA, 75 bp, synthetic construct
  source 1..75: mol_type = other DNA
gggcgcggcacctggctctgcaaccagtgcggggccggtgacggcatggacctggtgaaaaaggcgctgcgcatt

SEQ ID NO: 762966 - DNA, 75 bp, synthetic construct
  source 1..75: mol_type = other DNA
cgcagcggcggtgtttcccgtcgacgggtgatcctgcatttcccggaacagattgccccggaggaacgcgacccg

SEQ ID NO: 762967 - DNA, 75 bp, synthetic construct
  source 1..75: mol_type = other DNA
tatgcagaaattcagcgacccgatgaccgcccgcgtactgctccagtcgcagcagaactccgacgaggcgctcag

SEQ ID NO: 762968 - DNA, 75 bp, synthetic construct
  source 1..75: mol_type = other DNA
ggtccgggtgggagtggcaaaagtattctggctgaaatcgcgaccctgctcgccggagaggataacgccacgtca

SEQ ID NO: 762969 - DNA, 75 bp, synthetic construct
  source 1..75: mol_type = other DNA
ccagaacaaagccgcggcggccgcagaagcctgtgaaggcattgtcgccctgccaccggtgttcggtgactggaa

SEQ ID NO: 762970 - DNA, 75 bp, synthetic construct
  source 1..75: mol_type = other DNA
ccagagtaaagccgctgcggccgcagatgcctgtgagggcattgttgccctgccgccggtgttcggtgactggaa

SEQ ID NO: 762971 - DNA, 75 bp, synthetic construct
  source 1..75: mol_type = other DNA
accggggaaaccgtcatggtggcgctgtcctccgtgaacctcctttctctggcgagccttgcccgtcataaacac

SEQ ID NO: 762972 - DNA, 75 bp, synthetic construct
  source 1..75: mol_type = other DNA
caaaccaacctgtcgctgaaagaggaaagctacggcgactggctgccgaagtgtgacgaccccgcagcaacataa

SEQ ID NO: 762973 - DNA, 75 bp, synthetic construct
  source 1..75: mol_type = other DNA
ttccggcggttatcctggccgtaaataataatcctatgcgcttcactgatcgcagtggtggtgtgtcccgcagga

SEQ ID NO: 762974 - DNA, 75 bp, synthetic construct
  source 1..75: mol_type = other DNA
actggcaaaactgggactgaaagcacaagaaattacgcaaaaaacgctctcccaggatttcgcccgtaaccgcca

SEQ ID NO: 762975 - DNA, 75 bp, synthetic construct
  source 1..75: mol_type = other DNA
caagaaattacgcaaaaaacgctctcccaggattttgcccgtaaccgccagatccacaactgctggctgattacc

SEQ ID NO: 762976 - DNA, 75 bp, synthetic construct
  source 1..75: mol_type = other DNA
atcatctggcgctgatgaaagatttgaaacgtctgctgcgtgcaggtgggacgatcatgttctcgaacaataaac

SEQ ID NO: 762977 - DNA, 75 bp, synthetic construct
  source 1..75: mol_type = other DNA
gggcgcgtcaggaaggcattgaatgctaccgcctgtacgacgccgatctaccggaatacaacgttgccgttgatc

SEQ ID NO: 762978 - DNA, 75 bp, synthetic construct
  source 1..75: mol_type = other DNA
ctgttaagttgcctgcagttgcgtgcagacaaacagtacaaagcgaaaaacggtccattagactgcgtgcagaaa

SEQ ID NO: 762979 - DNA, 75 bp, synthetic construct
  source 1..75: mol_type = other DNA
agcggctgggcacagcatgatgaagccatctggcaggaagtgaaagcagaagcgcaaacccgcgcccgtaaaggc

SEQ ID NO: 762980 - DNA, 75 bp, synthetic construct
  source 1..75: mol_type = other DNA
taatggccctggcagaacggcttcagttggacagcctcatcggcgcagctccggcattatcccagcaggcagcgg

SEQ ID NO: 762981 - DNA, 75 bp, synthetic construct
  source 1..75: mol_type = other DNA
taacagcgccctgaccgtgcgcgtgcggattattttgtcgctggcgctggcaatcatcatcacgccgttgatccc

SEQ ID NO: 762982 - DNA, 75 bp, synthetic construct
  source 1..75: mol_type = other DNA
ccgttgaccgttatgccgactgggtggtggtgcaggagtatgcgccgccaaaaactattgatgcgcacaaagcgc

SEQ ID NO: 762983 - DNA, 75 bp, synthetic construct
  source 1..75: mol_type = other DNA
tgcgaaaacatctatccggtacgccaggaactctattttggcatggtggtggatcgtgaaagccagcgggtcacg

SEQ ID NO: 762984 - DNA, 75 bp, synthetic construct
  source 1..75: mol_type = other DNA
gctgccggaagcacaggcttttgtacagcaaatgttgggatcgcaactggtgacttatcagaccgggccagaagg

SEQ ID NO: 762985 - DNA, 75 bp, synthetic construct
  source 1..75: mol_type = other DNA
cggacagcaaaccggcgatggtggcggaagattacgccaaccgtctgcgtaagaacctgaagaaattcgaaaaat

SEQ ID NO: 762986 - DNA, 75 bp, synthetic construct
  source 1..75: mol_type = other DNA
tgttcacgtccaattgctgaaggcgagaactggatggagcgcgaacgctacattggtgtttccggcgtgctgctg

SEQ ID NO: 762987 - DNA, 75 bp, synthetic construct
  source 1..75: mol_type = other DNA
taccagaagcgcaaaacaaaacatggcataaggtcaaacgtcacgcttcacgacgactcagaagactggatgcct

SEQ ID NO: 762988 - DNA, 75 bp, synthetic construct
  source 1..75: mol_type = other DNA
atgcctatctggtctatatggaggctaacggctataaaaacacgctcagtctgaccatgtttggcaaggggctgc

SEQ ID NO: 762989 - DNA, 75 bp, synthetic construct
  source 1..75: mol_type = other DNA
gaaggacgcggaacatggttctgcaatcagtgcggagccggagatggtttagcgcttgtcaccagggcactgaat

SEQ ID NO: 762990 - DNA, 75 bp, synthetic construct
  source 1..75: mol_type = other DNA
ggccatcgggtgtggggaaaacgcatctggcgatagcgatgggatacgaagcggtccgggcgggtatcaaggttc

SEQ ID NO: 762991 - DNA, 75 bp, synthetic construct
  source 1..75: mol_type = other DNA
gtccggctaagagcatccgtgtaaccattcacactgctcgcccgggtatcgttattggtaaaaaaggtgaagacg

SEQ ID NO: 762992 - DNA, 75 bp, synthetic construct
  source 1..75: mol_type = other DNA
tgacagcatcacttctcagttggaacgtcgcgttatgttccgtcgtgctatgaagcgtgctgtacagaacgcaat

SEQ ID NO: 762993 - DNA, 75 bp, synthetic construct
  source 1..75: mol_type = other DNA
catctcaccccgattgagtttcgcctgctggcggtgctgctcaacaatgccggaaaagtgctcacccagcgccag

SEQ ID NO: 762994 - DNA, 75 bp, synthetic construct
  source 1..75: mol_type = other DNA
gtgacaaacgttctgattgttgaagatgaacaggctattcgtcgctttctgcgcacggcgctggagggcgatagg

SEQ ID NO: 762995 - DNA, 75 bp, synthetic construct
  source 1..75: mol_type = other DNA
atgaacaggctattcgtcgctttctgcgcacggcgctggagggcgacggtatgcgcttctttgaggccgaaacgc

SEQ ID NO: 762996 - DNA, 75 bp, synthetic construct
  source 1..75: mol_type = other DNA
gcggttcggtaaaaacaccggcgcagatcgccgctgcctatgctgctgttatcgccagtgaagaggacccggcac

SEQ ID NO: 762997 - DNA, 75 bp, synthetic construct
  source 1..75: mol_type = other DNA
acgtatcagccttcgcttcccgcgtgaaaaactcagcacccgaaccatcgcaaaagtggaaagcgaactgtatga

SEQ ID NO: 762998 - DNA, 75 bp, synthetic construct
  source 1..75: mol_type = other DNA
tggttgaatggtttttaacgccgcaggggcagagtttggtagaagacgtgggttatgtgccgctgtatccaacaa

SEQ ID NO: 762999 - DNA, 75 bp, synthetic construct
  source 1..75: mol_type = other DNA
atgtctgacaacaagattgaatttatagaaagtcgctatgctgcttttatcgcagggttgattgaatcctcacct

SEQ ID NO: 763000 - DNA, 75 bp, synthetic construct
  source 1..75: mol_type = other DNA
cctttctttaattaaaagtggcaaaattcctttgcctatcgataaggttcgtccgctggcgctggcactgggtat

SEQ ID NO: 763001 - DNA, 75 bp, synthetic construct
  source 1..75: mol_type = other DNA
ataagaattgacaaacttgtttgctccgttaattcattagagtattctggtaaacttaaaattactaataacgct

SEQ ID NO: 763002 - DNA, 75 bp, synthetic construct
  source 1..75: mol_type = other DNA
gcggcattagcgcaaactcgggcggtaatgttacaggccagtaccgcgctgaacaaagcgggcactctgacggca

SEQ ID NO: 763003 - DNA, 75 bp, synthetic construct
  source 1..75: mol_type = other DNA
ttaccgtcgatttagctgctcgcctgattcaccgcggcgaggaagaagtgcatttaacgcccatcgagtttcgcc

SEQ ID NO: 763004 - DNA, 75 bp, synthetic construct
  source 1..75: mol_type = other DNA
gcgccagtggagcgcggtgccggtgattgtgctttccgcacgtagtgaagagagcgacaaaatcgccgcgctgga

SEQ ID NO: 763005 - DNA, 75 bp, synthetic construct
  source 1..75: mol_type = other DNA
tacaaaaatccgttaagcgtgctttttttaccggtaaaaaaatgggcggccttgtactctttgtcgtcattgcac

SEQ ID NO: 763006 - DNA, 75 bp, synthetic construct
  source 1..75: mol_type = other DNA
tatcaggaacttgttcgcaccttccctaaggtaaactcaactatgagtattattatcaacaactggcggatggac

SEQ ID NO: 763007 - DNA, 75 bp, synthetic construct
  source 1..75: mol_type = other DNA
gcaaacaacagaacattattaaaaccatcccgaaaaaaggttacctgtgcaataaagagtatgtgtctttgccgg

SEQ ID NO: 763008 - DNA, 75 bp, synthetic construct
  source 1..75: mol_type = other DNA
gcagctgttatattggttggctcaaccgtggggtattcacacttgaaaagtacacctgacgccccgcaactggta

SEQ ID NO: 763009 - DNA, 75 bp, synthetic construct
  source 1..75: mol_type = other DNA
tgccggggaagataacgccacatcggccactatcgaaacgctggagtcgccgcgtgaacgtgctgcgctgattgg

SEQ ID NO: 763010 - DNA, 75 bp, synthetic construct
  source 1..75: mol_type = other DNA
tcccggcggtgattctggccgtgaacaataaaataacccgatgcgcttcaccgaccgcagcggcggcgtgtcacg

SEQ ID NO: 763011 - DNA, 75 bp, synthetic construct
  source 1..75: mol_type = other DNA
atgaacaaaattaagtttgttatcttttctggcatccttggtctcagcctgaatgcctttgcgggtggtagcggt

SEQ ID NO: 763012 - DNA, 75 bp, synthetic construct
  source 1..75: mol_type = other DNA
atgcctctcgtggtgaacggcatgcaaatcactaataaaaaagcccgacatattgagtttgtgggcttaaaaata

SEQ ID NO: 763013 - DNA, 75 bp, synthetic construct
  source 1..75: mol_type = other DNA
tctatagtgggccacaccttaagtgttctagggtgaaaaaggcgaagcccggcagtgcagcaacactaaccgggc

SEQ ID NO: 763014 - DNA, 75 bp, synthetic construct
  source 1..75: mol_type = other DNA
attatcagcgcacgatatgacaatgaccctatattatcgctatgtgcataaccgactggagagcgatatggtatt

SEQ ID NO: 763015 - DNA, 75 bp, synthetic construct
  source 1..75: mol_type = other DNA
aaagggaagtatccgaaaaatacctggaaggtgagctgagtttgaagtctgttggaaaaatgtacaatattgact

SEQ ID NO: 763016 - DNA, 75 bp, synthetic construct
  source 1..75: mol_type = other DNA
gactggattgtcgtggatttgggcgatgtgattgtccatgtcatgcaggaagagagccgtccctgtatgaactgg

SEQ ID NO: 763017 - DNA, 75 bp, synthetic construct
  source 1..75: mol_type = other DNA
atggatcaggatctactggacggtggttatcgctgctataccggcgaaaagatcgatgtctggttcaacactgcg

SEQ ID NO: 763018 - DNA, 75 bp, synthetic construct
  source 1..75: mol_type = other DNA
ataagaattgacaggcttgtttgctctgttaattcattagaatattccggtaagctcaagatcaccaatagcggc

SEQ ID NO: 763019 - DNA, 75 bp, synthetic construct
  source 1..75: mol_type = other DNA
atgcttatctggtctacatggaagccaacggctataaaaacacgctcagtctgaccatgtttggcaaggggttgc

SEQ ID NO: 763020 - DNA, 75 bp, synthetic construct
  source 1..75: mol_type = other DNA
ggccccggaggaagcggcaaaagtatcctggctgaaatcgcaaccatgctggcaggtgaggataactccacctcg

SEQ ID NO: 763021 - DNA, 75 bp, synthetic construct
  source 1..75: mol_type = other DNA
ggtggattacacgcagcccgttgacggtgagtcactggaaacccatgccccggcattctggcgctggctggatcg

SEQ ID NO: 763022 - DNA, 75 bp, synthetic construct
  source 1..75: mol_type = other DNA
gtggattaacggtgctatgggaaaatcgtcagagttcgccagtaatgagagtaagttcagaaagtatacaaaaag

SEQ ID NO: 763023 - DNA, 75 bp, synthetic construct
  source 1..75: mol_type = other DNA
ggtgatcgcctttaccggcgtgtttctggcaaaagtgattggcgatttcggcctctcgccgctgctggcgtttcc

SEQ ID NO: 763024 - DNA, 75 bp, synthetic construct
  source 1..75: mol_type = other DNA
gctggtgctgatgatgggctgtgccttcggcgcatttatggggcttttgatcgacgccctgaagatccctgcgtt

SEQ ID NO: 763025 - DNA, 75 bp, synthetic construct
  source 1..75: mol_type = other DNA
aaggtgattaaaaaccgccatcagtcctgcccggtatgcggcggttctgaccgcttccgctttgacgataaagag

SEQ ID NO: 763026 - DNA, 75 bp, synthetic construct
  source 1..75: mol_type = other DNA
gggccgggtggcagcgggaaaagtattctggccgaaattgcgaccctgctcgccggggaagataacgccacatcg

SEQ ID NO: 763027 - DNA, 75 bp, synthetic construct
  source 1..75: mol_type = other DNA
agcagaactcagacgaggcactgaacatcaaacgggatgccgacccgacgtttgattttatcggctatctggaaa

SEQ ID NO: 763028 - DNA, 75 bp, synthetic construct
  source 1..75: mol_type = other DNA
ggtcctggcggaagcggaaagagtattctggctgaaatagcaacaatgctggcaggtgaggataatgctacctcc

SEQ ID NO: 763029 - DNA, 75 bp, synthetic construct
  source 1..75: mol_type = other DNA
cgacagccgcgcctgtacctgtatcacgcctatctggtttacatggaggcgcacggctacaagaaccctctcagc

SEQ ID NO: 763030 - DNA, 75 bp, synthetic construct
  source 1..75: mol_type = other DNA
accgcaaagccgccgccgcgctggccgtaaaactgatggagaaagcccgcccggccaccggcaatgcctacctca

SEQ ID NO: 763031 - DNA, 75 bp, synthetic construct
  source 1..75: mol_type = other DNA
gctggtgctggtgatgggctgtgcctttggcgcatttatggggcttttgatcgacgccctgaagatcccggcgtt

SEQ ID NO: 763032 - DNA, 75 bp, synthetic construct
  source 1..75: mol_type = other DNA
atatgtcagcattctggcaattgcgtacgtggtaacggcaagttatttaacctcaaacgtacgtgcccgagcggc

SEQ ID NO: 763033 - DNA, 75 bp, synthetic construct
  source 1..75: mol_type = other DNA
cgcaacgtgatacttgccgccctgtttatggtgctggcgaaccgttacgactggcagctctttcttgaggtgacc

SEQ ID NO: 763034 - DNA, 75 bp, synthetic construct
  source 1..75: mol_type = other DNA
ctgattattccgcagcaggacgccccggcacggcgtctgattggctttcgcaacggcgtactcgataccgccacc

SEQ ID NO: 763035 - DNA, 75 bp, synthetic construct
  source 1..75: mol_type = other DNA
gagcgtattatttatcacgatcaagtttctaattttgacggaagcgaaactatcgtagaaagagtcgaataccgc

SEQ ID NO: 763036 - DNA, 75 bp, synthetic construct
  source 1..75: mol_type = other DNA
cgtcgtcacatccagactgaaatcaaccgcagacttttccgcgcatcacgcgtcgcgcaaatcatgcacatcaat

SEQ ID NO: 763037 - DNA, 75 bp, synthetic construct
  source 1..75: mol_type = other DNA
gaaaagataattagcgaagatagaataagtaatctatacggcaacagtaccgctgttgaacgcattgaatataga

SEQ ID NO: 763038 - DNA, 75 bp, synthetic construct
  source 1..75: mol_type = other DNA
tttttgcgcggtgtcagctatctcatctcagaagagtcgatcccgataaaccatcctgtttatgacacgctctca

SEQ ID NO: 763039 - DNA, 75 bp, synthetic construct
  source 1..75: mol_type = other DNA
tttcggaagagtcgatcccgattaaccatcccatttatgaaacgctctcaagcctggcgtggaaaatccccggcg

SEQ ID NO: 763040 - DNA, 75 bp, synthetic construct
  source 1..75: mol_type = other DNA
gtgataaaacgtaacttgccactgatgatcaccatcggcgtctttgtgttgggctatctctactgtctgacgcag

SEQ ID NO: 763041 - DNA, 75 bp, synthetic construct
  source 1..75: mol_type = other DNA
gctggttgccccggaggtgattgcggccgcagaagctgaaacggaggttgaccgcaaagcggcggccgtgctggc

SEQ ID NO: 763042 - DNA, 75 bp, synthetic construct
  source 1..75: mol_type = other DNA
ccgttctcctccgggaaggtggcctccgtggtggacaccctgaagctgattattccgcagcaggaagccccctcc

SEQ ID NO: 763043 - DNA, 75 bp, synthetic construct
  source 1..75: mol_type = other DNA
atgagacgggtgtttgtggataaaaagttttccattttgagaaaaagagtaaagcattctcaaaagaaagtcatg

SEQ ID NO: 763044 - DNA, 75 bp, synthetic construct
  source 1..75: mol_type = other DNA
tcatcggcgtacaagaaacgcgttatctgatggacatcatggagaggaaatataacgaacttgtgaaagagcttc

SEQ ID NO: 763045 - DNA, 75 bp, synthetic construct
  source 1..75: mol_type = other DNA
gaagtttgtaaaaggggatgctattgctggtattatcattgttttagttaacctgtttggtggcgttctcattgg

SEQ ID NO: 763046 - DNA, 75 bp, synthetic construct
  source 1..75: mol_type = other DNA
tacgaactatttttgaaacgcttattttttggtccacaaaagaaaaagatgtggttatcttgtgcgaatacgttc

SEQ ID NO: 763047 - DNA, 75 bp, synthetic construct
  source 1..75: mol_type = other DNA
cgcattaacgggatgtgactacattgaagaaggcaagccagaaagtagtttactgaaacaagaagaagaacataa

SEQ ID NO: 763048 - DNA, 75 bp, synthetic construct
  source 1..75: mol_type = other DNA
aataacctgggatatctgaagttagccatcaatatggaaaatattcagtttgacaatcttcccgctgctgataat

SEQ ID NO: 763049 - DNA, 75 bp, synthetic construct
  source 1..75: mol_type = other DNA
atatctcatggtattgagtatatggaggacggtcttcccgatccggtgaaagcgatggggcgtcttctggtggag

SEQ ID NO: 763050 - DNA, 75 bp, synthetic construct
  source 1..75: mol_type = other DNA
acccatgctgacggaagcgttcgggattgaggttaacgcctcaaacatgaaccgtccggaggatggtgcgcggtt

SEQ ID NO: 763051 - DNA, 75 bp, synthetic construct
  source 1..75: mol_type = other DNA
aacgagagtcggctggcagtgcgcccttatccgcatcagctggaagagtgggtagaattgaaaaacggcgaacgt

SEQ ID NO: 763052 - DNA, 75 bp, synthetic construct
  source 1..75: mol_type = other DNA
gccggtgtcgccctgtattgttttgcctgtgataacgagtttggcgcggaagtgtattccggtgccacgacagag

SEQ ID NO: 763053 - DNA, 75 bp, synthetic construct
  source 1..75: mol_type = other DNA
agaagaaaaccttgcaggtgatattgttcaacaggtttctgttaatagtcgcccttttttaatcagtgccgcact

SEQ ID NO: 763054 - DNA, 75 bp, synthetic construct
  source 1..75: mol_type = other DNA
ggcatacctgcattctggcgtttgaccttgcgcgaaagctggatttgaacgcaatggtacggctttttacccgag

SEQ ID NO: 763055 - DNA, 75 bp, synthetic construct
  source 1..75: mol_type = other DNA
agccactgatgtgggccattactactgccgggtacaacattgaggggccgtgctacgacaagcggcgggaagtca

SEQ ID NO: 763056 - DNA, 75 bp, synthetic construct
  source 1..75: mol_type = other DNA
acttttcaacacatcaatgacatccacattgaaattattaccaggtcaatggcaagacattaatttgacactgaa

SEQ ID NO: 763057 - DNA, 75 bp, synthetic construct
  source 1..75: mol_type = other DNA
gctggtgattatctgggctgtcagtgtaatggcgttgggggtcgttgccacaatattcaaattgctaatgacagc

SEQ ID NO: 763058 - DNA, 75 bp, synthetic construct
  source 1..75: mol_type = other DNA
caataacacagccggacgaaaacaatccggagatgcctccgcccgcggtgatatctcatggtattgaatatatgg

SEQ ID NO: 763059 - DNA, 75 bp, synthetic construct
  source 1..75: mol_type = other DNA
acgcaaaaacgaaaatttgcgctggcgctcatgtccgggaaaaacaaaacagcgtcagccattgccgccggttat

SEQ ID NO: 763060 - DNA, 75 bp, synthetic construct
  source 1..75: mol_type = other DNA
gatgccttatttgacgggttccggttgcgcctgctgacagtcattgacctctacacgcgcgaatgcctgggaatt

SEQ ID NO: 763061 - DNA, 75 bp, synthetic construct
  source 1..75: mol_type = other DNA
tcgttcaacggcaggctgcgacaggaatgcctgaacgagaactggttcatgtccctgaaggatgcgtggtgcaaa

SEQ ID NO: 763062 - DNA, 75 bp, synthetic construct
  source 1..75: mol_type = other DNA
agaggtcgcagagatgctgaacagcattgcgctcagacgccccttgcaacagttactgaaaaccgacaacggctt

SEQ ID NO: 763063 - DNA, 75 bp, synthetic construct
  source 1..75: mol_type = other DNA
tcgtatttttctctatgaggagccaattcatccattaaattcggataatatgcagaaagttgcccgttcaacatc

SEQ ID NO: 763064 - DNA, 75 bp, synthetic construct
  source 1..75: mol_type = other DNA
tgggaattcctcttcaggaaaacattttggggaatgggcggtggtaatgttttttacgcaggtatgagcgctatt

SEQ ID NO: 763065 - DNA, 75 bp, synthetic construct
  source 1..75: mol_type = other DNA
tgctgaaaatcggcagaaaagaagcaaaaaaataaatgcagttagtacgcttataacaaggaatagcgagcatca

SEQ ID NO: 763066 - DNA, 75 bp, synthetic construct
  source 1..75: mol_type = other DNA
gcgaccgggctgtcacatgaccttgctgatgaagacctgaatcccgtcactatcgtccagaacttcaccaatatg

SEQ ID NO: 763067 - DNA, 75 bp, synthetic construct
  source 1..75: mol_type = other DNA
aggatggtcttcccgatccggtgaaagctatggggcggatcctggtggaaaacctctgcattgatccgaaactgg

SEQ ID NO: 763068 - DNA, 75 bp, synthetic construct
  source 1..75: mol_type = other DNA
aaactgacagagaaagctatcgccgttctccggtttgattttactggtctgggaaacagcgaaggggatttttcc

SEQ ID NO: 763069 - DNA, 75 bp, synthetic construct
  source 1..75: mol_type = other DNA
ccaaacatttgaccggacacacgctcggcgcggctggcattaccgaggcggcaattagtatgttgattttacagc

SEQ ID NO: 763070 - DNA, 75 bp, synthetic construct
  source 1..75: mol_type = other DNA
caacaagaactcgacaagcgcaagatagaacactttgaaaaacaacaaactaccatcataaacagtaccaaaacg

SEQ ID NO: 763071 - DNA, 75 bp, synthetic construct
  source 1..75: mol_type = other DNA
tatgggtttctacgcgacatggggggggagaaaaacccaccgacatcaacgcattagcaaaatggcagcaattgc

SEQ ID NO: 763072 - DNA, 75 bp, synthetic construct
  source 1..75: mol_type = other DNA
cagccagagtcatgagtcttatctgtgggggaatacctcgtttttactggccgccaacctggcggaaagttttgc

SEQ ID NO: 763073 - DNA, 75 bp, synthetic construct
  source 1..75: mol_type = other DNA
ctttgaaggcccggcctattcccgctggcgtgccttgcgtgaatctgaagattcacgctacctggggctgactgc

SEQ ID NO: 763074 - DNA, 75 bp, synthetic construct
  source 1..75: mol_type = other DNA
tcaaagacctcccggtgcatctgtatgaatccatggggcaaatgcaggcaaaaattccgactgaagtgttgatca

SEQ ID NO: 763075 - DNA, 75 bp, synthetic construct
  source 1..75: mol_type = other DNA
ataatttgttgctatatacgaaacaaagcgtacacaatacggttaaaaacaatcagttacctgaagatatcagaa

SEQ ID NO: 763076 - DNA, 75 bp, synthetic construct
  source 1..75: mol_type = other DNA
gcttcgcgaaatgtcgtctattccggagaccgacgcacccattaagcaggcgcttgcgcatggattattattaca

SEQ ID NO: 763077 - DNA, 75 bp, synthetic construct
  source 1..75: mol_type = other DNA
attgcaaatgtattcttcttgaacaccatatgcctttgctgagaattttccctaaagggaaagagtgtatgcgtg

SEQ ID NO: 763078 - DNA, 75 bp, synthetic construct
  source 1..75: mol_type = other DNA
tctttgacgcttgagttttttcagtcagttcttgaacgttacgggatagagaatgtatctctgctgcctggtcat

SEQ ID NO: 763079 - DNA, 75 bp, synthetic construct
  source 1..75: mol_type = other DNA
atgaaagtgaataaattattgataagcgtcctggcggcttcgacaatactgatgctgtcaggttgtgactatgtc

SEQ ID NO: 763080 - DNA, 75 bp, synthetic construct
  source 1..75: mol_type = other DNA
tctgatgcatgctaccaaagaagaactgctggatgattttgaatttgctccggaaattacccagtcaggatacta

SEQ ID NO: 763081 - DNA, 75 bp, synthetic construct
  source 1..75: mol_type = other DNA
atccgtcgcgctttctcagccactggctggcgctcgatggcccggcttataccctttcaaccgcttgctcttcca

SEQ ID NO: 763082 - DNA, 75 bp, synthetic construct
  source 1..75: mol_type = other DNA
ctgaaattgtccatcaatatggacaatattcagttcgatactgttcaacctgctgaaaatcggcagcgaaaaaac

SEQ ID NO: 763083 - DNA, 75 bp, synthetic construct
  source 1..75: mol_type = other DNA
acttattaagtgttcctgtatcaaatatgggtttttacgcgacatgggggggggagaaaaacccaccgacatcaa

SEQ ID NO: 763084 - DNA, 75 bp, synthetic construct
  source 1..75: mol_type = other DNA
ctgcaattaatgcctggtcaatggcaagacattaatctgacattaaaaggcgtttcgcctaataacctgaagtat

SEQ ID NO: 763085 - DNA, 75 bp, synthetic construct
  source 1..75: mol_type = other DNA
acgttcgccggggatgcagccctgacatcggcgatgctggaccggatcttacatcactcacacgtagtccagata

SEQ ID NO: 763086 - DNA, 75 bp, synthetic construct
  source 1..75: mol_type = other DNA
caacaattacttttcaacaccaccctgaattccactctgcaattaatgcctggtcaatggcaagacattaatctg

SEQ ID NO: 763087 - DNA, 75 bp, synthetic construct
  source 1..75: mol_type = other DNA
gaaaaagcgagtaaggtcgacgacctcgttacacagcaagagttgcaaaaaagcaaaattgaggcgcttgaaaaa

SEQ ID NO: 763088 - DNA, 75 bp, synthetic construct
  source 1..75: mol_type = other DNA
gcaatggtgtatcacggtgagatgatgccccttgatgcgaaacttatcactatttctgaccctcaatttacaata

SEQ ID NO: 763089 - DNA, 75 bp, synthetic construct
  source 1..75: mol_type = other DNA
aatgcctgctatggttggggtttataactatagacgaaccgattacgacagacctgtctatgtaactatgaccgg

SEQ ID NO: 763090 - DNA, 75 bp, synthetic construct
  source 1..75: mol_type = other DNA
catcaggtaaatggtagccccggaacaataacagtttatgctttttctgatatggtgttaccacattctggctat

SEQ ID NO: 763091 - DNA, 75 bp, synthetic construct
  source 1..75: mol_type = other DNA
tatcacaaacagcaccagaatacttgccagcattgtaaagacagtcaaagaaaaacaggacgaatttgtcttcac

SEQ ID NO: 763092 - DNA, 75 bp, synthetic construct
  source 1..75: mol_type = other DNA
caagaacaatataaaaataaagcagaactgtttgaaaaacaacaaaataatatcacaaacagcaccagaatactt

SEQ ID NO: 763093 - DNA, 75 bp, synthetic construct
  source 1..75: mol_type = other DNA
caacaacctcaaatatctgaaattagccatcaacatggcaaatattcagttcgaccgtcttcaacctgctgaatc

SEQ ID NO: 763094 - DNA, 75 bp, synthetic construct
  source 1..75: mol_type = other DNA
cttggtgaaggcggtgtggagtggcgtcctgaagatcaagccgtcgtggcgctgccgccactgaacatgaacctg

SEQ ID NO: 763095 - DNA, 75 bp, synthetic construct
  source 1..75: mol_type = other DNA
cgggtcgcctgaccaccgatatcggtccggtgattgatggcgaagcgaagaccaatattgagcgccatattcaga

SEQ ID NO: 763096 - DNA, 75 bp, synthetic construct
  source 1..75: mol_type = other DNA
ccggatgacgcgctgcatcgtcagttagtgaaggcattgccatcggcagtcagcgaacgtattcaactggcgaaa

SEQ ID NO: 763097 - DNA, 75 bp, synthetic construct
  source 1..75: mol_type = other DNA
ccaccaaaaacatctgatagctgttctaacaaagaaacagatccagcactgacgctgcagtatcctaaaacagaa

SEQ ID NO: 763098 - DNA, 75 bp, synthetic construct
  source 1..75: mol_type = other DNA
ttaagcgcagctatttagaagatgcaaaacgcctccagcaactggagccaaatgcaggcactggggcacgcatct

SEQ ID NO: 763099 - DNA, 75 bp, synthetic construct
  source 1..75: mol_type = other DNA
cggataacctattaaaaactcttgaagagaaaaaacaatattacaatatgatctacgaagaaatcagcaaaaaga

SEQ ID NO: 763100 - DNA, 75 bp, synthetic construct
  source 1..75: mol_type = other DNA
cgggccatttaatatggtttcgccctacccggtgcgcaatgaacaatttgcccatgcgctcggtcatgcgctgca

SEQ ID NO: 763101 - DNA, 75 bp, synthetic construct
  source 1..75: mol_type = other DNA
ggcaccggatggcggtattctcggtaaaatgctgccgccgtttcgtcttggcctgggcgggccgattggttccgg

SEQ ID NO: 763102 - DNA, 75 bp, synthetic construct
  source 1..75: mol_type = other DNA
cccacgcgctaggccatgcactgcatcgcccggcgattatgcgcgtccctgccgcagccattcgcttgctgatgg

SEQ ID NO: 763103 - DNA, 75 bp, synthetic construct
  source 1..75: mol_type = other DNA
actggcggggtagttaaggcataccagattcgcccggatcttccgaagttgtttccacataccgaaaagaatgca

SEQ ID NO: 763104 - DNA, 75 bp, synthetic construct
  source 1..75: mol_type = other DNA
ttttctttgcccaaaaatgaagcatttctctatctgacaaaggactataactctcgtcgatattggattgcattg

SEQ ID NO: 763105 - DNA, 75 bp, synthetic construct
  source 1..75: mol_type = other DNA
cccatgcgctcggtcatgcactgcatcgtccggccattttgcgcgtccctgcgaccgccattcggctgttaatgg

SEQ ID NO: 763106 - DNA, 75 bp, synthetic construct
  source 1..75: mol_type = other DNA
ccgagccaccaaacggctggtcgatgttattcggcaacagtgcctgggaaccaccttccatgctttagccgagca

SEQ ID NO: 763107 - DNA, 75 bp, synthetic construct
  source 1..75: mol_type = other DNA
gctgctcccgcaacagaaagcgcgcaagtattaattgaagcggtaaagcatcatccccgcagcaaatatgtctct

SEQ ID NO: 763108 - DNA, 75 bp, synthetic construct
  source 1..75: mol_type = other DNA
ggatggcgtttgatattacgctgttcagtacaacaattcacgtaaataaaattacgttaaacattacggataata

SEQ ID NO: 763109 - DNA, 75 bp, synthetic construct
  source 1..75: mol_type = other DNA
gcaggacactcacgaactgttttcggcggtagaaacccttagccatatgcgcccgctacgtggcgaccggctgat

SEQ ID NO: 763110 - DNA, 75 bp, synthetic construct
  source 1..75: mol_type = other DNA
cacctactggccgattggcaacgcgctgcatccgcaaaccctgcgcaccatcgcgctggcctttagctgggtgct

SEQ ID NO: 763111 - DNA, 75 bp, synthetic construct
  source 1..75: mol_type = other DNA
tcaccgatcgccgcgaatttgaactggctgaagagggttttatcaccctgaccatgcgtaaagactctgataatg

SEQ ID NO: 763112 - DNA, 75 bp, synthetic construct
  source 1..75: mol_type = other DNA
atctgccggtacatctgttcgaaacaatgggtcatattcaggccaaaatcccaaccgaggtgctggtcaccgatc

SEQ ID NO: 763113 - DNA, 75 bp, synthetic construct
  source 1..75: mol_type = other DNA
atggatgtggaaggcgaacccggatggtatcaggttgcactgagtgtgaggccgcattttaaatttatgggggca

SEQ ID NO: 763114 - DNA, 75 bp, synthetic construct
  source 1..75: mol_type = other DNA
ataataataaacagcttttaaaagtcgaattgattggcggtgttgcatttcttttgatgatttttgttttatgtt

SEQ ID NO: 763115 - DNA, 75 bp, synthetic construct
  source 1..75: mol_type = other DNA
gtcgctgcttgatcaaatcatggcgcagacccgcattcagcccggctcggaaggttatgacgttgcccgccaggg

SEQ ID NO: 763116 - DNA, 75 bp, synthetic construct
  source 1..75: mol_type = other DNA
tttccagtcacgtcgagcaaacatcatcgctgcttgatcaaataatggcgcagacccgtattcagccaggctcag

SEQ ID NO: 763117 - DNA, 75 bp, synthetic construct
  source 1..75: mol_type = other DNA
aatgggagaggggcaagcgtacctggcagtaacactgatatacaaagaatcagtactatttgtaataatgcctca

SEQ ID NO: 763118 - DNA, 75 bp, synthetic construct
  source 1..75: mol_type = other DNA
gctatcgtagcaacctcaaaccagcgtattttttcgcatttttataatcaccttgtatttgccttgccggcaggt

SEQ ID NO: 763119 - DNA, 75 bp, synthetic construct
  source 1..75: mol_type = other DNA
tgctggcgttgccgggcatcatctttgtggtactccttcctgttatcctttcactatggattgccctcctttggg

SEQ ID NO: 763120 - DNA, 75 bp, synthetic construct
  source 1..75: mol_type = other DNA
gccattgttgccacctcaaaacagcgtcttctctcccatttttataaccatcttatctttgctttacccgcaggt

SEQ ID NO: 763121 - DNA, 75 bp, synthetic construct
  source 1..75: mol_type = other DNA
caccggaacaacttcgtcgccaggcgcaggagatgcttcgttgtgctgaacagatggaaaaaatgagcgtggcaa

SEQ ID NO: 763122 - DNA, 75 bp, synthetic construct
  source 1..75: mol_type = other DNA
aagatgtgagcaaggcacgaaataaaatggctggctttctggctgggtggcgtcatgccataagcgttcgccgtg

SEQ ID NO: 763123 - DNA, 75 bp, synthetic construct
  source 1..75: mol_type = other DNA
atggttgccaggctgctttcatctgagcgtgacgagtactccagtgaagaaacagaacatcgatttgatgaaggt

SEQ ID NO: 763124 - DNA, 75 bp, synthetic construct
  source 1..75: mol_type = other DNA
gccgattataagcgtgaacctaacgtttctatctattattaccgcgatacgccttttttctctggctataaaatg

SEQ ID NO: 763125 - DNA, 75 bp, synthetic construct
  source 1..75: mol_type = other DNA
tccggcagagtttattccgctggcagaaaaggaggggatgatagaacagataactgattatgttattgataatgt

SEQ ID NO: 763126 - DNA, 75 bp, synthetic construct
  source 1..75: mol_type = other DNA
caacgcgccctcgaaaaatcatcaactttgtctttattaccagccaataatcgatatcaaaacagaaaaatgtat

SEQ ID NO: 763127 - DNA, 75 bp, synthetic construct
  source 1..75: mol_type = other DNA
accgtgatacgctcttttttttaggttataaaatgacctatatgcagcggggaaattatgtggcagttatcaacc

SEQ ID NO: 763128 - DNA, 75 bp, synthetic construct
  source 1..75: mol_type = other DNA
tatcaatgaactgatatatgcccatgataatcattttttatgctcatcgcttatggcccctgctaacggctatat

SEQ ID NO: 763129 - DNA, 75 bp, synthetic construct
  source 1..75: mol_type = other DNA
cggggaatcagggacaggtaatgacgccagcagagtttattccgctggcggaacaagagggtctaattacgcagg

SEQ ID NO: 763130 - DNA, 75 bp, synthetic construct
  source 1..75: mol_type = other DNA
ttgaacaaccagacaatgacttttacctctgaacaattgcgtaaacacgcgcaggaaatgttgcgacaggcggaa

SEQ ID NO: 763131 - DNA, 75 bp, synthetic construct
  source 1..75: mol_type = other DNA
gctgccgtcgcacagaatgcgcgggtgcgcatgatatcgggacaagtggtcagcggcgttgttgatgcagatggg

SEQ ID NO: 763132 - DNA, 75 bp, synthetic construct
  source 1..75: mol_type = other DNA
caatcatcgcgatgctgttcagtccgtggagtacggcgggcaatctcacatcgctattgcaaaccttttttgcag

SEQ ID NO: 763133 - DNA, 75 bp, synthetic construct
  source 1..75: mol_type = other DNA
cgatcatcgcgatactgttcagtccgttaagtgcggcgagcaatctcacatcgcaattgcacaccttttttagcg

SEQ ID NO: 763134 - DNA, 75 bp, synthetic construct
  source 1..75: mol_type = other DNA
atcagaacaaaatatagaatggtttatcgatgcaggtttaaccaatgataattatgcattgcaagccattaccgc

SEQ ID NO: 763135 - DNA, 75 bp, synthetic construct
  source 1..75: mol_type = other DNA
ccgatcaacctatccagttaacccagtttcgccaggcatggcgggtaaaagcgggacaacgcgtcaacgtgatcg

SEQ ID NO: 763136 - DNA, 75 bp, synthetic construct
  source 1..75: mol_type = other DNA
gaattatgtcgttgccgcgatgcccattgtgcggggaggaaaactggaatctgccagcgtcaaactgaaacgcgg

SEQ ID NO: 763137 - DNA, 75 bp, synthetic construct
  source 1..75: mol_type = other DNA
ttggtaaaattgacactgaccctgtaaatcctgaaaaccagattcaggtttatgtggagaacgaagatggttatc

SEQ ID NO: 763138 - DNA, 75 bp, synthetic construct
  source 1..75: mol_type = other DNA
cattctgaactgaacgctataactgcaaataggcttacgtgcagtcagaacagtgaatggggtatcctcggggac

SEQ ID NO: 763139 - DNA, 75 bp, synthetic construct
  source 1..75: mol_type = other DNA
atatgctcggccattattccttcacgctggcagaactggtgaccaaaggacatctgagaccattaaaagaggcgt

SEQ ID NO: 763140 - DNA, 75 bp, synthetic construct
  source 1..75: mol_type = other DNA
gctgcggtaacgacaaacgatatttacaggttaatgtgcaggccacaggaaattatgtggttgccgcgatgccca

SEQ ID NO: 763141 - DNA, 75 bp, synthetic construct
  source 1..75: mol_type = other DNA
tcaggtagaaataatgttgttcagggggtagtcattgacaataaaagaagaaacttatatacgctacatatgtca

SEQ ID NO: 763142 - DNA, 75 bp, synthetic construct
  source 1..75: mol_type = other DNA
aaaataaaagaatctatatttacacattaaaaggagagcttgtaagaaaatttaataatgtaacaataggaaaaa

SEQ ID NO: 763143 - DNA, 75 bp, synthetic construct
  source 1..75: mol_type = other DNA
tcgtaatattcgtcacaccgtctggtataccgccagcaatgccgggcgtttttacggcatctgggatagacccag

SEQ ID NO: 763144 - DNA, 75 bp, synthetic construct
  source 1..75: mol_type = other DNA
cccttcactttgaagagatcggagctataaaaatggtgttatccggcttcctcaaattgaggtttccgaaaatat

SEQ ID NO: 763145 - DNA, 75 bp, synthetic construct
  source 1..75: mol_type = other DNA
caacggaagcgctggtccctgccccgctttaccagggaatgcgcgacggcaaaattgtccgttttgaagagataa

SEQ ID NO: 763146 - DNA, 75 bp, synthetic construct
  source 1..75: mol_type = other DNA
ctgtctgttaggtatgctttctgacagggtgatgacggtgccggaactcactggtgaagccagtcaactctatgc

SEQ ID NO: 763147 - DNA, 75 bp, synthetic construct
  source 1..75: mol_type = other DNA
catgtcaaccgtcggctatggcgatattgtccctgtttctgaatcagcacgattgttcactatttcggtcattat

SEQ ID NO: 763148 - DNA, 75 bp, synthetic construct
  source 1..75: mol_type = other DNA
aagatcgcgctcgtctgcgccgttacttcgaacagcgtgtcgccacacataaagaagctcactggcaggcttatt

SEQ ID NO: 763149 - DNA, 75 bp, synthetic construct
  source 1..75: mol_type = other DNA
gaagaggacgattcgcctgatacgcaagaggaaagccagaccttgctgctgcgtgccacccgcatggataacagc

SEQ ID NO: 763150 - DNA, 75 bp, synthetic construct
  source 1..75: mol_type = other DNA
atcttttgcagattaaatattttggacattccacaggcggtgttgagttttttaacatgcttaataaagtcatcg

SEQ ID NO: 763151 - DNA, 75 bp, synthetic construct
  source 1..75: mol_type = other DNA
taagattaggcaggctgcccttggcaagatggttggcgtgtctaatgttgctatttcccaatgggagcgttctga

SEQ ID NO: 763152 - DNA, 75 bp, synthetic construct
  source 1..75: mol_type = other DNA
agtgacagcgaacttgatgcggcattttatgctgtaatcgtcatgcttgatgaggcaatattgtgttcagagctt

SEQ ID NO: 763153 - DNA, 75 bp, synthetic construct
  source 1..75: mol_type = other DNA
atggtgctggtatcgcgggcagacgccgctggacgcggtttatccgtgctgatgctggaggcgcaggatctcgct

SEQ ID NO: 763154 - DNA, 75 bp, synthetic construct
  source 1..75: mol_type = other DNA
agtattctatttgtatcaacgattatactttttgggatatatcgttcagattataatgtcgaatcaagcataaga

SEQ ID NO: 763155 - DNA, 75 bp, synthetic construct
  source 1..75: mol_type = other DNA
ataatgatgaaatcaatgattatatattgagactgaaaaaacaatgcgggttaaatattcgtgttgaagaaaaaa

SEQ ID NO: 763156 - DNA, 75 bp, synthetic construct
  source 1..75: mol_type = other DNA
aaacagcagtaaatttatgggtgaccctgcggcacgatattatcgcgctagccgtctttttaaatggattgctta

SEQ ID NO: 763157 - DNA, 75 bp, synthetic construct
  source 1..75: mol_type = other DNA
atcaaagctgtctttaaacatgataaaggggcgtttgttgcgggatggcaggccagagaagatcagcctggtctt

SEQ ID NO: 763158 - DNA, 75 bp, synthetic construct
  source 1..75: mol_type = other DNA
ggctttaaccggaaaatccggtaaggttgttgaatataagcaagagccaaagaaaaaatatcatccaaaagccta

SEQ ID NO: 763159 - DNA, 75 bp, synthetic construct
  source 1..75: mol_type = other DNA
aaaagtcaaatcaaaaacttttgatgactctaagtgtacagcgcaccatggcattattccaacgatgcacaaagg

SEQ ID NO: 763160 - DNA, 75 bp, synthetic construct
  source 1..75: mol_type = other DNA
agcggttatcccacctgtaaagagtcttacccggatattaaaggtagtccgaactataaccccgtaaaacgcgct

SEQ ID NO: 763161 - DNA, 75 bp, synthetic construct
  source 1..75: mol_type = other DNA
ctaaagaagccgataagctagtagcggctttaaccgggaaatccggtaaagttgtggaatataagcaagagccta

SEQ ID NO: 763162 - DNA, 75 bp, synthetic construct
  source 1..75: mol_type = other DNA
gttttggccgtgcagctcttgcgcgtggtcgtgctgactggcttgttggcatgaacttttcacgcgggtttaccc

SEQ ID NO: 763163 - DNA, 75 bp, synthetic construct
  source 1..75: mol_type = other DNA
caagaactgattttgtgctcttttgaagcacgtaaccaaacagggcttaacggccctgttttatcactgactcgt

SEQ ID NO: 763164 - DNA, 75 bp, synthetic construct
  source 1..75: mol_type = other DNA
aggtggaagattatttaataggaataggaggttacacagaaaacagcaaaaaggattttgaaaactcatacatag

SEQ ID NO: 763165 - DNA, 75 bp, synthetic construct
  source 1..75: mol_type = other DNA
atgtggaaacctacaggtgacaagttaatcaccgcgttgattgacggcaagccacaatacttacgcattgaaatg

SEQ ID NO: 763166 - DNA, 75 bp, synthetic construct
  source 1..75: mol_type = other DNA
gcgatcaagttctggctatatgtcagtctctttatgaaacgcataaacttgccagttatccacgttctgatagct

SEQ ID NO: 763167 - DNA, 75 bp, synthetic construct
  source 1..75: mol_type = other DNA
agcaccaatactcgctcaggagccttctgacgttgcgaaaaacgtgcgtatgatggtttccggtattgtcagtta

SEQ ID NO: 763168 - DNA, 75 bp, synthetic construct
  source 1..75: mol_type = other DNA
aacgcggaaagtgaagcttggacagaattaattgagaaagcgtcaaagtccgtccaggttgattatgcaggagga

SEQ ID NO: 763169 - DNA, 75 bp, synthetic construct
  source 1..75: mol_type = other DNA
cagtatttaaactcatatcatctgtcagagttttccctgaagaatatagtgattacgacagtactagaaagaata

SEQ ID NO: 763170 - DNA, 75 bp, synthetic construct
  source 1..75: mol_type = other DNA
caaacggcacgccgtcgtcaacggtgtccttatggttcatcgtggatgggataaggggaaagctactgatgcgtg

SEQ ID NO: 763171 - DNA, 75 bp, synthetic construct
  source 1..75: mol_type = other DNA
gaagttatattagcctcgctgaagctgctggcggtacaaattaaacaccttgaacctgatttcatcatctttgca

SEQ ID NO: 763172 - DNA, 75 bp, synthetic construct
  source 1..75: mol_type = other DNA
tgctggcggtacaaattaaacaccttgagcctgatttcatcatctttgcatctggagcccggagaacagactaca

SEQ ID NO: 763173 - DNA, 75 bp, synthetic construct
  source 1..75: mol_type = other DNA
cagggtgatatgccgttcaagtcattattgacgcagcttatttgcctgggagatgaagaaccgcaggtgactgcg

SEQ ID NO: 763174 - DNA, 75 bp, synthetic construct
  source 1..75: mol_type = other DNA
ggacagcggcctgacctttacgatcgaacagcatgaagatttaaaaagccatgaactggtgtcgctggtcaaaga

SEQ ID NO: 763175 - DNA, 75 bp, synthetic construct
  source 1..75: mol_type = other DNA
gcgggcggtcacttcaacatggttgagaagaaaacggatatggataaccgtactgagatagcaatcagctggatc

SEQ ID NO: 763176 - DNA, 75 bp, synthetic construct
  source 1..75: mol_type = other DNA
acttgaaaatttaacttcgctattacctgttgagtttctgattaaactgaataagaaaagtggtgaagatgtgga

SEQ ID NO: 763177 - DNA, 75 bp, synthetic construct
  source 1..75: mol_type = other DNA
ctggactgccagagctattgccgcggcatcagatcgggggagatgctgctgcggtaacagaggcttttagttccc

SEQ ID NO: 763178 - DNA, 75 bp, synthetic construct
  source 1..75: mol_type = other DNA
aattgcccatccaagggctatgcgcggacaccagaagtacagagatgaggtgattgcacgaattaagcaactttg

SEQ ID NO: 763179 - DNA, 75 bp, synthetic construct
  source 1..75: mol_type = other DNA
tttcggtctatagcgccgttattggcgtacattttttcttctgggcacctatcccgctggtgccagtgccatcct

SEQ ID NO: 763180 - DNA, 75 bp, synthetic construct
  source 1..75: mol_type = other DNA
cgtacattttttcttctgggcacctatcctgccggtgccagtgccatccttaatgccattcgtacactcattacc

SEQ ID NO: 763181 - DNA, 75 bp, synthetic construct
  source 1..75: mol_type = other DNA
gctgcaacgtcgtcgcctgacgctgcatgatattgaactggagctgcaaaaagaggcgaaaaagaagacgccgca

SEQ ID NO: 763182 - DNA, 75 bp, synthetic construct
  source 1..75: mol_type = other DNA
ttcggcctgctgtttatgtggatctgctactcgggcgtgaaagagcgttatgtcgaaacccaacctgctaatccg

SEQ ID NO: 763183 - DNA, 75 bp, synthetic construct
  source 1..75: mol_type = other DNA
cccaacgaacgcgcctcactggcggcatggcgtcagggcggcgctacgctgggcctgctgctgtgcacggtggga

SEQ ID NO: 763184 - DNA, 75 bp, synthetic construct
  source 1..75: mol_type = other DNA
ccgtagattacggtgaatggaaaaccggtattcgtgccgaaggttctgtttataccggttataccttctttcgta

SEQ ID NO: 763185 - DNA, 75 bp, synthetic construct
  source 1..75: mol_type = other DNA
aagaagcttgtcatagacgcaggaagacgcttcttgaagcctctcaacccgcaatatcccatgattgaagtgaat

SEQ ID NO: 763186 - DNA, 75 bp, synthetic construct
  source 1..75: mol_type = other DNA
tgagccggacaacaaaaactacactttgagcagcgacggcggctttagcgcccgtgggcaagcgggccagatgct

SEQ ID NO: 763187 - DNA, 75 bp, synthetic construct
  source 1..75: mol_type = other DNA
ctttggttcggcgtttgttaacagcctgaactgggcgctggtttccgacaccgtcgagtacggcgagtggcgcac

SEQ ID NO: 763188 - DNA, 75 bp, synthetic construct
  source 1..75: mol_type = other DNA
agctatccagacaagttgaatgatctgtctgagccgcctttctggttgtttgctcaaggcaatgtatccttgcta

SEQ ID NO: 763189 - DNA, 75 bp, synthetic construct
  source 1..75: mol_type = other DNA
tcaagtacaaccgagacagcaaaggcgaacgtcacgtaatagttaacggcgtcctgatggtcacgccaggcaaaa

SEQ ID NO: 763190 - DNA, 75 bp, synthetic construct
  source 1..75: mol_type = other DNA
gcgcaaaacgcatgttgggcggtaaaactggcgcacgatggcgcgttatccctcaatcaatgtgatgagaggatg

SEQ ID NO: 763191 - DNA, 75 bp, synthetic construct
  source 1..75: mol_type = other DNA
cggcgtgttcctgatgcctggcgcagtcagacgttttggtaagaagaaggtctatatcggcggcctgctgatttg

SEQ ID NO: 763192 - DNA, 75 bp, synthetic construct
  source 1..75: mol_type = other DNA
attaatttattgtcgtggatgggattcttcagtatgggatgcatcctcgtcggcgtattactggtgccagtaact

SEQ ID NO: 763193 - DNA, 75 bp, synthetic construct
  source 1..75: mol_type = other DNA
gaaaattttgttcgtagaaatagaattcaagcagctttaagtgatgtattgatcccagttgaatggggcctaaaa

SEQ ID NO: 763194 - DNA, 75 bp, synthetic construct
  source 1..75: mol_type = other DNA
aactgcttgtcgtcggcggcaccagcggcatgggtctcgccgtggcacgcatggtactggaagcgggcggcagtg

SEQ ID NO: 763195 - DNA, 75 bp, synthetic construct
  source 1..75: mol_type = other DNA
agccgctttacaagatgcctgtctatccaccaatccggtaaccgtatcgggtacggatatacgtgctattcttag

SEQ ID NO: 763196 - DNA, 75 bp, synthetic construct
  source 1..75: mol_type = other DNA
gtatattacgctttcctctttcagagtcaaccctgaatttcaggatttttctcttcaaccgaaccggctgtttgt

SEQ ID NO: 763197 - DNA, 75 bp, synthetic construct
  source 1..75: mol_type = other DNA
ctgcctgtcatcattcacactcaacaagaggcgatgatttcaggctgcaatggtttttattttggcaacgagtca

SEQ ID NO: 763198 - DNA, 75 bp, synthetic construct
  source 1..75: mol_type = other DNA
tgacgtcagatttgccgtaaacctggatgccttatcgcgtagcggtgtaaaggtcaacccggatgtcttaatgct

SEQ ID NO: 763199 - DNA, 75 bp, synthetic construct
  source 1..75: mol_type = other DNA
accaatatacgaaggcttcatggacaaagcggatatcgctgatgctatgaagtcgttgaacgatttccacccgtt

SEQ ID NO: 763200 - DNA, 75 bp, synthetic construct
  source 1..75: mol_type = other DNA
cacggggttacgtcactggtatgcacgccgacgcggtcacgatccgcgggcaatgttgtacaatgcggttcagca

SEQ ID NO: 763201 - DNA, 75 bp, synthetic construct
  source 1..75: mol_type = other DNA
agtgctggctcgcatagccagaatgaatcacaggaaccacagccaccggttgacgagtttaccattgcgaggttg

SEQ ID NO: 763202 - DNA, 75 bp, synthetic construct
  source 1..75: mol_type = other DNA
atggcctctgtagtagagatctgtaatcgtgcgctgtccaatattggcaatagccgcagcattaacagcctgacg

SEQ ID NO: 763203 - DNA, 75 bp, synthetic construct
  source 1..75: mol_type = other DNA
gtggtaatatttgcattgaagaaaaaacagtacctcagatcacatctgttgatgatgtgctggtaaaagtctgct

SEQ ID NO: 763204 - DNA, 75 bp, synthetic construct
  source 1..75: mol_type = other DNA
atcgccgtggcctgcgccgcgacgggcatggtggggcgagaatctgaactgttccgctacaccgtgaagcacagt

SEQ ID NO: 763205 - DNA, 75 bp, synthetic construct
  source 1..75: mol_type = other DNA
ggaaaatcaggtcatcactgaagaacaactcgatacagcactgcgtaatcgcgtcgaaggtctacgcctgggcgg

SEQ ID NO: 763206 - DNA, 75 bp, synthetic construct
  source 1..75: mol_type = other DNA
agtacccctaatgaagccacccgtggggcactgactgaagccctgcagtcaccgtcagctgcggcatattttgac

SEQ ID NO: 763207 - DNA, 75 bp, synthetic construct
  source 1..75: mol_type = other DNA
gcgctatctactacgttgtcgcgctacaaatctgggaatattttagcttctacggaatgcgcgccctgctgattc

SEQ ID NO: 763208 - DNA, 75 bp, synthetic construct
  source 1..75: mol_type = other DNA
ttatatgctgctttccggcgcgattgcgaactatctggctggcgtgattgccgatcagacatcgcaggcttcgtt

SEQ ID NO: 763209 - DNA, 75 bp, synthetic construct
  source 1..75: mol_type = other DNA
cacaacaggggggtagctcgattagcctttatatcgaccgcttcgttaaccgcgatatgtttggttataccgttc

SEQ ID NO: 763210 - DNA, 75 bp, synthetic construct
  source 1..75: mol_type = other DNA
attggcctgggtgtactggcaaaaatttatcgcaaagcagaaaaccagaaacagcgtaaggagctggggctgatt

SEQ ID NO: 763211 - DNA, 75 bp, synthetic construct
  source 1..75: mol_type = other DNA
tggcgatcggtcatgtggtgctgggtgccagtgagatccatccgtcattcctctatctgtccctggcgattatcg

SEQ ID NO: 763212 - DNA, 75 bp, synthetic construct
  source 1..75: mol_type = other DNA
gtcgggatgatcgccgggctggtcattttcttatgcggcaatcgtcacttcgctcatacccggggcgttaataag

SEQ ID NO: 763213 - DNA, 75 bp, synthetic construct
  source 1..75: mol_type = other DNA
gttggcatgatcgcgggtctggtcattttcttatgtggcaatcgtcatttcactcatacccgcggcgttaataaa

SEQ ID NO: 763214 - DNA, 75 bp, synthetic construct
  source 1..75: mol_type = other DNA
ataacgttgcatggcttaacggtatatgcctgattctttttgttattggtgtggtcggtgcgctggcaatggttg

SEQ ID NO: 763215 - DNA, 75 bp, synthetic construct
  source 1..75: mol_type = other DNA
ccctaatgaggccacccgtggagcactgactgaagccctgcagtcaccatccgctgcggcatattttgaccgtac

SEQ ID NO: 763216 - DNA, 75 bp, synthetic construct
  source 1..75: mol_type = other DNA
tgccgatcagacatcgcaggcttcgtttgatgcttccggggcgatcaactactccatcaatgcatatattgaagt

SEQ ID NO: 763217 - DNA, 75 bp, synthetic construct
  source 1..75: mol_type = other DNA
cgcatggcggtgatgctgggggcgttattgatggcgatcggtcatgtggtgctgggtgccagtgagatccatccg

SEQ ID NO: 763218 - DNA, 75 bp, synthetic construct
  source 1..75: mol_type = other DNA
ttcagtatgttgttctgggccttcgcacaacagggcggcagctcgattagcctttatatcgaccgcttcgttaac

SEQ ID NO: 763219 - DNA, 75 bp, synthetic construct
  source 1..75: mol_type = other DNA
cgggtgattttcgtcactggctactacggtctgacgcaggggctgctatctgtcctgcgtcttttctggggcaac

SEQ ID NO: 763220 - DNA, 75 bp, synthetic construct
  source 1..75: mol_type = other DNA
ttgattatgccgatatttctcaacgcgaacagttggctgcagcattaaaacgctggccgctgttggctgagtttg

SEQ ID NO: 763221 - DNA, 75 bp, synthetic construct
  source 1..75: mol_type = other DNA
aaggcacgccagcgtctggacgccagcaaagcggaattgctctcttatcaggacaacaacaacgttctggatcca

SEQ ID NO: 763222 - DNA, 75 bp, synthetic construct
  source 1..75: mol_type = other DNA
cataatggttcgctaaaagaaatctgcttgaattttttcagagcgttggatcgagccttgggctcgaactatgag

SEQ ID NO: 763223 - DNA, 75 bp, synthetic construct
  source 1..75: mol_type = other DNA
cgcttccgcagcggtagagattggtaatgtggcgcaggtcaccgcgctttttaccgacgaggaaccgcctgccgc

SEQ ID NO: 763224 - DNA, 75 bp, synthetic construct
  source 1..75: mol_type = other DNA
agcgtgggtgcgattgagagtgatggcgcgttgatggagttcgatgtgaatgaagccaacgtggtgaaaacgatg

SEQ ID NO: 763225 - DNA, 75 bp, synthetic construct
  source 1..75: mol_type = other DNA
accatacactcgacgcgcttggcttgcgctgcccggaaccggtgatgatggtgcgtaaaacggtgcgcaatatgc

SEQ ID NO: 763226 - DNA, 75 bp, synthetic construct
  source 1..75: mol_type = other DNA
ctacggggcatcgggaaaacgcattcgtaaacagtttgcgacaaaaagtgaggcgctctcttatgagcgccgttt

SEQ ID NO: 763227 - DNA, 75 bp, synthetic construct
  source 1..75: mol_type = other DNA
gggcacagcacgatcatgatgacaatgaggtatgcgcattttgccccaaaccaccttgatgctgcggtagcactt

SEQ ID NO: 763228 - DNA, 75 bp, synthetic construct
  source 1..75: mol_type = other DNA
tccgttggtcgctcatttcgacaaaaatatgtttgcagtgtatcgggaaaggaggttaaacggtgagtggaatca

SEQ ID NO: 763229 - DNA, 75 bp, synthetic construct
  source 1..75: mol_type = other DNA
gatctaaagcaaaaaagagttattctggctcataatattcatcaaatcacaggctcatttttccagcctttagca

SEQ ID NO: 763230 - DNA, 75 bp, synthetic construct
  source 1..75: mol_type = other DNA
atcttttgtcaaacccgatttttaaatttcccaactgtttgccgtttctatcaacagtttgttgcatttgcagac

SEQ ID NO: 763231 - DNA, 75 bp, synthetic construct
  source 1..75: mol_type = other DNA
atgtcggttcgtaagattccatcaggtaaatggctttgcgaatgttatccctacggggcatcgggaaaacgcatt

SEQ ID NO: 763232 - DNA, 75 bp, synthetic construct
  source 1..75: mol_type = other DNA
atgaccgaaaacgctgttctccagttacgcgccgaacgtattgcacgcgcaacgcgtccttttcttgcccgtggt

SEQ ID NO: 763233 - DNA, 75 bp, synthetic construct
  source 1..75: mol_type = other DNA
gttatatcatcaaaacttaaaacatattacatcgtgtatatggggtttgtatttctattatcttttttagggttt

SEQ ID NO: 763234 - DNA, 75 bp, synthetic construct
  source 1..75: mol_type = other DNA
gatttcaaatcaatggttatgaatatacgagacgatgccagagaggttgtggaaagatttttcccatcacaggat

SEQ ID NO: 763235 - DNA, 75 bp, synthetic construct
  source 1..75: mol_type = other DNA
atgagaacaggatgtgaaccgacccgatttggtaatgaagctaagaccattattcacggtgatgcgcttgccgaa

SEQ ID NO: 763236 - DNA, 75 bp, synthetic construct
  source 1..75: mol_type = other DNA
gctgaaggccaatattgtactgccgaggtagccatcgcactgttagggaaggtgcgaataagcggggaaattctt

SEQ ID NO: 763237 - DNA, 75 bp, synthetic construct
  source 1..75: mol_type = other DNA
tttaaaacgcgctatctggcaggaaaaacgcaacatctgggtagcatcacagcagaacagttagaaagcgtttaa

SEQ ID NO: 763238 - DNA, 75 bp, synthetic construct
  source 1..75: mol_type = other DNA
gagttccgcagcatggtgagtaacattcgagaagatgcaaaagatgttatttctcacttcttccccgagcaggaa

SEQ ID NO: 763239 - DNA, 75 bp, synthetic construct
  source 1..75: mol_type = other DNA
cttcagcggcgtcctttgtggccgattttcgcgccgattatctggtaacaagcgtaggcgcaatcgagagcgatg

SEQ ID NO: 763240 - DNA, 75 bp, synthetic construct
  source 1..75: mol_type = other DNA
gcgatgatcgacggcagccacttcccgtttgccgagaacgtgaagctggtgaaatcggttgtcgacttctgccac

SEQ ID NO: 763241 - DNA, 75 bp, synthetic construct
  source 1..75: mol_type = other DNA
acgatttaacgcgatgaaattgttgcgagttggcctgattgcggcaattttgtgtgcattgctcacattcttatg

SEQ ID NO: 763242 - DNA, 75 bp, synthetic construct
  source 1..75: mol_type = other DNA
agaaagaatttggctttagcccaatgcaattcagcctggtgtttggccttaacggcatcgggcttatcatcgctt

SEQ ID NO: 763243 - DNA, 75 bp, synthetic construct
  source 1..75: mol_type = other DNA
ctctggttctggccttctccagcgcaaccgctgcgtttgctgctattccgcaaaatatccgtatcggcaccgatc

SEQ ID NO: 763244 - DNA, 75 bp, synthetic construct
  source 1..75: mol_type = other DNA
aacgtcagcaagaaattgccttcaccgacaaactgtacgctgccgattctcgtctggtggtggcgaaaaattccg

SEQ ID NO: 763245 - DNA, 75 bp, synthetic construct
  source 1..75: mol_type = other DNA
tgtatgtgctgagaaaaacctacccgaacgaagaagccgcgcgtcgcgcagctgccgcacgctggcagcaacttc

SEQ ID NO: 763246 - DNA, 75 bp, synthetic construct
  source 1..75: mol_type = other DNA
tcacgatattggcgggggagggtttaccacgtcgctggaactggaagtaaaaatcgacgactggacagcggagag

SEQ ID NO: 763247 - DNA, 75 bp, synthetic construct
  source 1..75: mol_type = other DNA
tattctgacctgactgccggacgtattgatgccgcgttccaggatgaggtcgctgccagcgaaggtttcctcaaa

SEQ ID NO: 763248 - DNA, 75 bp, synthetic construct
  source 1..75: mol_type = other DNA
accagggactgaacgagcacggatacattattccgggcctcggcgatgccggtgacaaaatctttggtacgaaat

SEQ ID NO: 763249 - DNA, 75 bp, synthetic construct
  source 1..75: mol_type = other DNA
acacacctgggcaagttggctggttcaagccggagccccgttgtcagtgttacaggaaatgggaggctgggagtc

SEQ ID NO: 763250 - DNA, 75 bp, synthetic construct
  source 1..75: mol_type = other DNA
agctgtaccaaaccagacggaacgaaagcgccaacagtcaggaagatgcggtatgacgcaaacacagcctggaaa

SEQ ID NO: 763251 - DNA, 75 bp, synthetic construct
  source 1..75: mol_type = other DNA
atgacgaaccggcgtcatgaggaaaactggaaactcagggcagaagcatgcagaaaaaaagggaaacctgttcca

SEQ ID NO: 763252 - DNA, 75 bp, synthetic construct
  source 1..75: mol_type = other DNA
attgagcacgtcatcgacgacagcggcttcaccaccagactggagctggaagcaaaaatcgcagactggatagca

SEQ ID NO: 763253 - DNA, 75 bp, synthetic construct
  source 1..75: mol_type = other DNA
tgacgctcaggcgctcaccgaactgacggcattgataggcctgcaaaatctgtcagcccgttttaattctgccat

SEQ ID NO: 763254 - DNA, 75 bp, synthetic construct
  source 1..75: mol_type = other DNA
cttcccgctatattgactcaacggcgtcactcgttcgtgccggaataaaatggtacgaaaatcgtgtcggtaaac

SEQ ID NO: 763255 - DNA, 75 bp, synthetic construct
  source 1..75: mol_type = other DNA
acttcggtcttaatggcgctttattagctattattctttatacggcaatatctggcgttgtgatgattacctttt

SEQ ID NO: 763256 - DNA, 75 bp, synthetic construct
  source 1..75: mol_type = other DNA
aaaaaactgactggtcgggatgaacaggatatccggcgtctctggcaggagaaagtggatgcaaagcaggagtct

SEQ ID NO: 763257 - DNA, 75 bp, synthetic construct
  source 1..75: mol_type = other DNA
tatgagtctgactgaagactgtccggatatgcaccaggaactgcttaaccgcctgctgtccggtaaaaaactgac

SEQ ID NO: 763258 - DNA, 75 bp, synthetic construct
  source 1..75: mol_type = other DNA
gcctgctgtcaggtaaaaaactgaccaagagggaaatcaggagtctctggcaggaaaggcagaggaaacactatg

SEQ ID NO: 763259 - DNA, 75 bp, synthetic construct
  source 1..75: mol_type = other DNA
gaaaaaagtcagcgtgaaacgccgcaaaccgaaaaaagagaaaagcagcagccgtgaaggtgactatatggaagg

SEQ ID NO: 763260 - DNA, 75 bp, synthetic construct
  source 1..75: mol_type = other DNA
ctgttgacgatagtgggtttaaaacgcggctggagttggaagcaaaaatacctgaatggattgcagaaaccgaat

SEQ ID NO: 763261 - DNA, 75 bp, synthetic construct
  source 1..75: mol_type = other DNA
cacaggaaaaaagccacagccgtgaaggtgattacatggaaggcgcagaaggcaatgtgtttgtgttgcgaagaa

SEQ ID NO: 763262 - DNA, 75 bp, synthetic construct
  source 1..75: mol_type = other DNA
ctcccgccgcccggcaccgtagcgcgccgtctgatagaagatacggtggcgatgtgtcgggcagagtatgagtga

SEQ ID NO: 763263 - DNA, 75 bp, synthetic construct
  source 1..75: mol_type = other DNA
acaggcttcaaaagtgacatcgacaatcaggactggattattgcaaaagccgagcacaccattgataacagcggc

SEQ ID NO: 763264 - DNA, 75 bp, synthetic construct
  source 1..75: mol_type = other DNA
tatcgctacgacgatttaccattattgccaccaccgggcactgtggcgcgccgtctgatagaagatacggtggcg

SEQ ID NO: 763265 - DNA, 75 bp, synthetic construct
  source 1..75: mol_type = other DNA
gaaaacagcagggtctccataagagatgggtgtttgtccacaccaaacctgcctaccgaagcgacggaacaaaaa

SEQ ID NO: 763266 - DNA, 75 bp, synthetic construct
  source 1..75: mol_type = other DNA
ttttcgcgtgcggggtgaggtgatcgacatcttcccggcagagtccgacgacgttgcgctacgtgtagaattgtt

SEQ ID NO: 763267 - DNA, 75 bp, synthetic construct
  source 1..75: mol_type = other DNA
cagaacattgccaaaaccaaagcgaagggcagaggaaaatcgcgaccgattgttgagccggataatgtgccgatg

SEQ ID NO: 763268 - DNA, 75 bp, synthetic construct
  source 1..75: mol_type = other DNA
tgtggttcagcgctctcccttaagccgaggcatggcaacatactgggttctgaaaggagagaggcaggcgggtca

SEQ ID NO: 763269 - DNA, 75 bp, synthetic construct
  source 1..75: mol_type = other DNA
tacggcttccggccggggcgcaacgcatggcaggcggtgcaacaggcactgcgttacatacggggcggcaaacgg

SEQ ID NO: 763270 - DNA, 75 bp, synthetic construct
  source 1..75: mol_type = other DNA
ataacgagagaaaacctgatgctggcttatcagcgcgtggtggaaaacaaaggcgcggcggggggggataacctc

SEQ ID NO: 763271 - DNA, 75 bp, synthetic construct
  source 1..75: mol_type = other DNA
agcggaagttcctcgggtacagtgtgacatggcacaaacaggcgaagctgaaaatagccctgacgagcgtgaaca

SEQ ID NO: 763272 - DNA, 75 bp, synthetic construct
  source 1..75: mol_type = other DNA
acaattacgcatatgattttttcaaatctgccttggaagacttgtcagttcaaattgaacaatatgaggaaattg

SEQ ID NO: 763273 - DNA, 75 bp, synthetic construct
  source 1..75: mol_type = other DNA
ataattaaacgagatgaggcattagacgaggaaatatatattggtgttatttgtaaagttggaaagataattcag

SEQ ID NO: 763274 - DNA, 75 bp, synthetic construct
  source 1..75: mol_type = other DNA
gtaacggacagcctttcgccgtaacggaaggcagtgacactacggcgcaacgttttcgcgctactgtcccggtgc

SEQ ID NO: 763275 - DNA, 75 bp, synthetic construct
  source 1..75: mol_type = other DNA
tgtggttcagcgctctcccttaagtcgaggcatggcaacatactgggttctgaaaggagagaggcaggcgggcca

SEQ ID NO: 763276 - DNA, 75 bp, synthetic construct
  source 1..75: mol_type = other DNA
atgaagaatgaaatactggaatttctgaacaggcatgatggagggaaaacggcagaaattgcagaggcgctggcg

SEQ ID NO: 763277 - DNA, 75 bp, synthetic construct
  source 1..75: mol_type = other DNA
tatcagcactggtttcctgcgccctgatttcaggttgtaaagaagaaaataaaacgaatgtctccattgagttta

SEQ ID NO: 763278 - DNA, 75 bp, synthetic construct
  source 1..75: mol_type = other DNA
ggctgaaggagaaagtccgcagtctgaccacgggaaaccggagcaaatcagtgaaagcgacaatcaatgccctga

SEQ ID NO: 763279 - DNA, 75 bp, synthetic construct
  source 1..75: mol_type = other DNA
cagtcgatcagattgccgtcaaaatgctcaaatccttcggtcacagtcgcgcgcattatgccattggccttgcgg

SEQ ID NO: 763280 - DNA, 75 bp, synthetic construct
  source 1..75: mol_type = other DNA
cgaaacgctgaaaacctggaccatgatggaaaccatcctcggcactgtcggtgccatcgttgggatgattgcgtt

SEQ ID NO: 763281 - DNA, 75 bp, synthetic construct
  source 1..75: mol_type = other DNA
ggctggaaaaagcgcctgtcatcaagataccagcggtcagaaacaagcgagtcagatggctggaaaaggaggaag

SEQ ID NO: 763282 - DNA, 75 bp, synthetic construct
  source 1..75: mol_type = other DNA
ctcaggagttgcacgacaagcgaaaagcagaactctggcgagtagacagactgggggatatgccagatgtcactt

SEQ ID NO: 763283 - DNA, 75 bp, synthetic construct
  source 1..75: mol_type = other DNA
gtgcggcaattccggggatgattattgccggcccgctgtggggtaatttcatcagccgttacgttgagctgcata

SEQ ID NO: 763284 - DNA, 75 bp, synthetic construct
  source 1..75: mol_type = other DNA
ttgacacctgttattgatgaactcaataaggctatggcaattcacgagaataataacgcgcatcacaccggagaa

SEQ ID NO: 763285 - DNA, 75 bp, synthetic construct
  source 1..75: mol_type = other DNA
ttgttcattctgaaaacgcattaatcctcgcaaaggaaatggacgcattactacttaagttaattgatgtgccgg

SEQ ID NO: 763286 - DNA, 75 bp, synthetic construct
  source 1..75: mol_type = other DNA
atgggggctggccttttttccggtatgccgctcgataaaatcgcagcgacgatggaaaaagggatgggaggcacc

SEQ ID NO: 763287 - DNA, 75 bp, synthetic construct
  source 1..75: mol_type = other DNA
cgaaacgctgaaaacctggaccatgatggaaaccattcttggtactgtcggtgccatcgtcgggatgattgcgtt

SEQ ID NO: 763288 - DNA, 75 bp, synthetic construct
  source 1..75: mol_type = other DNA
ttcggattcagcctgtcgctgatcctgttgccgctggtgctggtggggctgaaaaccattgccgcgcgttttgtg

SEQ ID NO: 763289 - DNA, 75 bp, synthetic construct
  source 1..75: mol_type = other DNA
ggcttacagtatgcctgctgcaatccccgcgccatgccgaactgcgccaaaaacacgggcaccaaagcagttcgg

SEQ ID NO: 763290 - DNA, 75 bp, synthetic construct
  source 1..75: mol_type = other DNA
atgccattctatttcaggaaggagtgtccgttaaactcaggctacctcagatattactgctacagggacccaagg

SEQ ID NO: 763291 - DNA, 75 bp, synthetic construct
  source 1..75: mol_type = other DNA
agaagctcaatatgccttgggtctcatgtatttatatagagaaatactggatattgactatcagcaatcaaaatc

SEQ ID NO: 763292 - DNA, 75 bp, synthetic construct
  source 1..75: mol_type = other DNA
tgcctgccatcgctggtgggcgttatatttcccccgctggtgtaaatccaccagccgggcgtagcaacccgttta

SEQ ID NO: 763293 - DNA, 75 bp, synthetic construct
  source 1..75: mol_type = other DNA
tggcctggaagttgaatgaggggctggcttacagtatgcctgctgcaatccccgcgccatgtcgcaccgcgccaa

SEQ ID NO: 763294 - DNA, 75 bp, synthetic construct
  source 1..75: mol_type = other DNA
ggtgctatcagctgcgtatcgggcaaacgactgccggaccggtgactggatgaacgtcgatggaaatctgatgcg

SEQ ID NO: 763295 - DNA, 75 bp, synthetic construct
  source 1..75: mol_type = other DNA
gaatgtggaatcacgcggtgatgtgccgctgatggaagcgcgaacgcgaactctgctgacgttgctgaacgagta

SEQ ID NO: 763296 - DNA, 75 bp, synthetic construct
  source 1..75: mol_type = other DNA
tcttaaccgggcgatcaatgatgcggagtctgttctggggacaacttgtcgtcgccgtcgtccgctgggagtgag

SEQ ID NO: 763297 - DNA, 75 bp, synthetic construct
  source 1..75: mol_type = other DNA
cgccgacgcatgatcgtcattttttcggtggggatgcgacgagttttgagagtattgaccagtctgacctgttca

SEQ ID NO: 763298 - DNA, 75 bp, synthetic construct
  source 1..75: mol_type = other DNA
tgtctcggtgccaagcggaaacttcggcgatttgacggcgggtctgctggcgaagtcactcggtctgccggtgaa

SEQ ID NO: 763299 - DNA, 75 bp, synthetic construct
  source 1..75: mol_type = other DNA
gaaagatcacaacgagcaggtcagctttgcgcaagccgtaacccaggggttgggcaaaaatcaggggctgttttt

SEQ ID NO: 763300 - DNA, 75 bp, synthetic construct
  source 1..75: mol_type = other DNA
cagatcgaagcggcagatattttttctattggcctggtggacaatctctccctgttcattgacgaaatggcgcat

SEQ ID NO: 763301 - DNA, 75 bp, synthetic construct
  source 1..75: mol_type = other DNA
tgattaccgttttactacctgcgcgtagttacaagatcaactgcgctttgaccactgaaaaactgatgcctggaa

SEQ ID NO: 763302 - DNA, 75 bp, synthetic construct
  source 1..75: mol_type = other DNA
tggcatttaaagatttcggcggtcgctttatggcacaaatgctgacccatattgcgggcgataagccagtgacca

SEQ ID NO: 763303 - DNA, 75 bp, synthetic construct
  source 1..75: mol_type = other DNA
aaaccacgcaacagacaatgcgtgagttaaaagcgctgggctatacctcggagccgcacgctgccgtagcttatc

SEQ ID NO: 763304 - DNA, 75 bp, synthetic construct
  source 1..75: mol_type = other DNA
cggtgatgaagtgaccttcagcatcatgcacaaactctcaaaacgtccgacgatgggagatgagcgtgttgaagg

SEQ ID NO: 763305 - DNA, 75 bp, synthetic construct
  source 1..75: mol_type = other DNA
gggatgccgatccgtttctataaggactcaaaggtccttgtatcgaaaaacgatatggcagcaaccacagaggag

SEQ ID NO: 763306 - DNA, 75 bp, synthetic construct
  source 1..75: mol_type = other DNA
gctggcgaatgcgtacggtcagaagggcggcggtcacttcaacatggttgagaagaaaacggatatggataaccg

SEQ ID NO: 763307 - DNA, 75 bp, synthetic construct
  source 1..75: mol_type = other DNA
cgaataagctgtatcaggtggcgctttttaccgctgccaatcgcaaccgctcgatggtcaatatcctcactgaac

SEQ ID NO: 763308 - DNA, 75 bp, synthetic construct
  source 1..75: mol_type = other DNA
tttaacctggcatcctcagccagaacgcttctggggacgtactttaatgacctgcaggaccagtgtgcgatagtg

SEQ ID NO: 763309 - DNA, 75 bp, synthetic construct
  source 1..75: mol_type = other DNA
gatgatggttcgtgccgtgaaccgtgcaaaaggttttaatcatccgctgttcaaaggtgaatgtgcgatgtggcg

SEQ ID NO: 763310 - DNA, 75 bp, synthetic construct
  source 1..75: mol_type = other DNA
atgctgtgtcccaaaagcccggaagatttgcattacaactgcactacagtacaaaatgtcagacacatgggtaat

SEQ ID NO: 763311 - DNA, 75 bp, synthetic construct
  source 1..75: mol_type = other DNA
atcagaaaggagaatgtaacgcagagtatcaaacctaaagaagttaccgtatatccccaatatgccatgcgtggc

SEQ ID NO: 763312 - DNA, 75 bp, synthetic construct
  source 1..75: mol_type = other DNA
accaaagattaaacgcaaacctggtgataaaggcgtagtatcttactttcctgaatcaaaggaggcagcacttaa

SEQ ID NO: 763313 - DNA, 75 bp, synthetic construct
  source 1..75: mol_type = other DNA
atgaccattctggactacatcgctacccatcagggttgtagcggcggagaaatcgccgcagcactgaatactcca

SEQ ID NO: 763314 - DNA, 75 bp, synthetic construct
  source 1..75: mol_type = other DNA
gggcgtcgaaagatgccggattaatgcagtttgctaacggtacgcagatccctattggcacgctgggggcagcca

SEQ ID NO: 763315 - DNA, 75 bp, synthetic construct
  source 1..75: mol_type = other DNA
cgcctcggcctcggaaattgcccgcgtgctggaaagcttgaccaaaaacagcggcgagaaccaaccagcaacgct

SEQ ID NO: 763316 - DNA, 75 bp, synthetic construct
  source 1..75: mol_type = other DNA
cgtgatgactggtgcaccatcgtccatagcgatgttgaagccacacggctgagtctgaaaacctgcctgggactt

SEQ ID NO: 763317 - DNA, 75 bp, synthetic construct
  source 1..75: mol_type = other DNA
ggagaattgccatatggcgaagcggcaaatttcgatcttgtgggtcagcgcgcactacaaatcggcgaatggcag

SEQ ID NO: 763318 - DNA, 75 bp, synthetic construct
  source 1..75: mol_type = other DNA
caatgcaggagtctgccacccgtcagcgtgaacaggataccatcaggaagtttactgaagagaaaaaatccgaat

SEQ ID NO: 763319 - DNA, 75 bp, synthetic construct
  source 1..75: mol_type = other DNA
caatgcaggcgtctgccacccgtcagcgtgaacaggataccatccggaagtttactgaagagagtaaatctgaat

SEQ ID NO: 763320 - DNA, 75 bp, synthetic construct
  source 1..75: mol_type = other DNA
ggtcgattctcttaccaggtaaacccgatgccgttcgggtgtagcaacccactaaccctcatgtttaaccagcta

SEQ ID NO: 763321 - DNA, 75 bp, synthetic construct
  source 1..75: mol_type = other DNA
atgaccattctggactacatcgctacccatccgggttgtagcggcggagaaatcgcagcagcactgaatactcca

SEQ ID NO: 763322 - DNA, 75 bp, synthetic construct
  source 1..75: mol_type = other DNA
gtgggtatgatcgcgggtctggtcattttcttatgtggcaatagtcatttcacacatacccgcggcgttaacaaa

SEQ ID NO: 763323 - DNA, 75 bp, synthetic construct
  source 1..75: mol_type = other DNA
acaccgcgcagccggtactgccagcgcaaaatcaggccttaccgccagaagttcgtgcgttccttaatgccggga

SEQ ID NO: 763324 - DNA, 75 bp, synthetic construct
  source 1..75: mol_type = other DNA
cagataatgaagccgggctgttttttcccgacttcgccagcgctgccgattactgtatggagaaagatattccgt

SEQ ID NO: 763325 - DNA, 75 bp, synthetic construct
  source 1..75: mol_type = other DNA
cataatttttaaaggcctttgggcatgtaaaccggaaacatcagggaataacaccaacaaatggtattacggaaa

SEQ ID NO: 763326 - DNA, 75 bp, synthetic construct
  source 1..75: mol_type = other DNA
gccagaacctgaatttaataatacaagttatgtacaacgtataggatttagccctcctgataataaaaaaatttt

SEQ ID NO: 763327 - DNA, 75 bp, synthetic construct
  source 1..75: mol_type = other DNA
agcgtaaggaactggaaactaaatgtcaacagatatttgagtacatcgtttctgtggggcttgacccggaagaat

SEQ ID NO: 763328 - DNA, 75 bp, synthetic construct
  source 1..75: mol_type = other DNA
cgggtgatcccctgctccggaggaacagataatgaagccgggctgttttttcccgacttcgccagcgctgccgat

SEQ ID NO: 763329 - DNA, 75 bp, synthetic construct
  source 1..75: mol_type = other DNA
agcctgctcgcacaattgaaaaagcaggaagaagcgatctctgaagccacccgtaagctgcgcgaaacgcaaaac

SEQ ID NO: 763330 - DNA, 75 bp, synthetic construct
  source 1..75: mol_type = other DNA
cagcgtgccgaactggaagagaaacagagcgagcagcaaacactgttatatgagcagcgcgcccaacaagcgaag

SEQ ID NO: 763331 - DNA, 75 bp, synthetic construct
  source 1..75: mol_type = other DNA
gttgatcgtggaagttgccgaaggcagcaatatcaacttcggcgtgcagtgggcgtcgaaagatgccggattaat

SEQ ID NO: 763332 - DNA, 75 bp, synthetic construct
  source 1..75: mol_type = other DNA
attaaaaagaataacgctactcaaaagatttctaatcgtataaccaccatttatccacaatacgccatgcgtggc

SEQ ID NO: 763333 - DNA, 75 bp, synthetic construct
  source 1..75: mol_type = other DNA
ggtttgcaatcaggcccatcatctacgccagcgttctgagcgctggcgtattgttgtgcgccttttccgcccacg

SEQ ID NO: 763334 - DNA, 75 bp, synthetic construct
  source 1..75: mol_type = other DNA
aagccattgccgatggtcgggtgattctggctgactggctgcaaggttatggtctggtggtcgtggttgaacacg

SEQ ID NO: 763335 - DNA, 75 bp, synthetic construct
  source 1..75: mol_type = other DNA
ggcgtgtgtaggactggtgctgatgatttggctgtatcaggcgcttaagttcagaaaccgcgcgctggcgctgga

SEQ ID NO: 763336 - DNA, 75 bp, synthetic construct
  source 1..75: mol_type = other DNA
tcttgccgttcgatgaccggtaactgtgcggcactggcggcgctggctgatgaacctggctacgcacaaatcaat

SEQ ID NO: 763337 - DNA, 75 bp, synthetic construct
  source 1..75: mol_type = other DNA
tgctgaccggtaacctcggtaagccgcatgcgggtgtaaacccggttcgtggtcagaacaacgtgcagggtgcct

SEQ ID NO: 763338 - DNA, 75 bp, synthetic construct
  source 1..75: mol_type = other DNA
tgcgtcatctgtgcccggatttctacggtgcgacttacgagaaaatgggcgaactgggcttcattcagtggcctt

SEQ ID NO: 763339 - DNA, 75 bp, synthetic construct
  source 1..75: mol_type = other DNA
gactatcgcctcgaaacaactgctggcagcggtagggcagagtcgactgattcaactgtgggaacagctgttttc

SEQ ID NO: 763340 - DNA, 75 bp, synthetic construct
  source 1..75: mol_type = other DNA
aaaagcgtgactggcaatttctcgcgtggtgaagtcatccgcatttgcaacctcgaaggtcgcgatatcgcccac

SEQ ID NO: 763341 - DNA, 75 bp, synthetic construct
  source 1..75: mol_type = other DNA
aggtcagcgatcgtccgaacaaaggggcgatttatatgacctaccagtggtggattggtgcctgtaacgagctgg

SEQ ID NO: 763342 - DNA, 75 bp, synthetic construct
  source 1..75: mol_type = other DNA
tattggaatatctaagactgaaagaaaaagaacagcttggtattattgataaaaatagacaagaaagactgttga

SEQ ID NO: 763343 - DNA, 75 bp, synthetic construct
  source 1..75: mol_type = other DNA
cggcattgatgacgcactgcgcgcgattgccggtgatagcgtttcaggcctcggaactggcggtatgagcaccaa

SEQ ID NO: 763344 - DNA, 75 bp, synthetic construct
  source 1..75: mol_type = other DNA
gctgaccgatcaaaaaggtttgtataccgctgacccgcgcagcaatccgcaggcagaactgattaaagatgtgta

SEQ ID NO: 763345 - DNA, 75 bp, synthetic construct
  source 1..75: mol_type = other DNA
gaactgatccgcaacgtcgccggtatggcgtggcgttactggtgggggttctttcaggaattatttcggcatttg

SEQ ID NO: 763346 - DNA, 75 bp, synthetic construct
  source 1..75: mol_type = other DNA
tgagacgcaaagagttaggacttaccaaactagccctagccaagacgctagggctgtcaggtgtcagcatattga

SEQ ID NO: 763347 - DNA, 75 bp, synthetic construct
  source 1..75: mol_type = other DNA
agtaaaaaagaaagtgttagtcagccaataaaaaaagacttcattcctgaaaaatattattctgaaaatagtctt

SEQ ID NO: 763348 - DNA, 75 bp, synthetic construct
  source 1..75: mol_type = other DNA
gcaaactggcggaacatgcgctggaaaaactgacgccgtattatcagggcattggcccggcgtggacgaaagaga

SEQ ID NO: 763349 - DNA, 75 bp, synthetic construct
  source 1..75: mol_type = other DNA
gcggtttcttatgacagtgattatttctggttccggggcctgggcgggggcttttatctgtggaatgacagtgcg

SEQ ID NO: 763350 - DNA, 75 bp, synthetic construct
  source 1..75: mol_type = other DNA
tgattgatcagccttataaaggttacgactctgaagcgtatcttattccggcagtgtcttatgacggcgacagct

SEQ ID NO: 763351 - DNA, 75 bp, synthetic construct
  source 1..75: mol_type = other DNA
tcccactgatatctggctgtttccggcggtatcttataacaacgattccttctggtttcgaggactgggaggagg

SEQ ID NO: 763352 - DNA, 75 bp, synthetic construct
  source 1..75: mol_type = other DNA
gtgtggtgtttttttccacacttaaagttgctagcatattgggtaatgtttttttaagttttttaataccagtaa

SEQ ID NO: 763353 - DNA, 75 bp, synthetic construct
  source 1..75: mol_type = other DNA
acaaaaccattccacaacctcatgagccacataaatcgaatagcagatttttatattctgacgtaatgaaattta

SEQ ID NO: 763354 - DNA, 75 bp, synthetic construct
  source 1..75: mol_type = other DNA
acgggagaagttagcaggtaaagaactcgatgctatgatgagcgcctcagaccatcggagagccgaaatcacaca

SEQ ID NO: 763355 - DNA, 75 bp, synthetic construct
  source 1..75: mol_type = other DNA
ggcgctgaagcatctgacgccggtatctgaagaaattaaacccgccggcacaccggctgtgcagtcaccaaagcg

SEQ ID NO: 763356 - DNA, 75 bp, synthetic construct
  source 1..75: mol_type = other DNA
ctacagaaaaaaaaccaacatgctggtctggcaaaaaacttcccgaaaaaccaacctctttgaaagctagttcat

SEQ ID NO: 763357 - DNA, 75 bp, synthetic construct
  source 1..75: mol_type = other DNA
aggggcaggtaccagctaatctgcactacagaaaaaaaccaacatgctggtctggcaaaaaacttcccgaaaaac

SEQ ID NO: 763358 - DNA, 75 bp, synthetic construct
  source 1..75: mol_type = other DNA
ccagcggcgtaacgctggctgatggcgctgaagtgctgctctggccggaaagcgaagtggaactgccggaagaac

SEQ ID NO: 763359 - DNA, 75 bp, synthetic construct
  source 1..75: mol_type = other DNA
gcccatattgttgaactcgttcgccagtgcgcgcagttacatgccgccgggcatcggattgttattgtgacgtcg

SEQ ID NO: 763360 - DNA, 75 bp, synthetic construct
  source 1..75: mol_type = other DNA
tcggtatttctactcttgatgatgtgctgaccgacattcgccgtatcaccgacgtttgttcgctgccgctgctgg

SEQ ID NO: 763361 - DNA, 75 bp, synthetic construct
  source 1..75: mol_type = other DNA
gcaaaacgaagataaacgtattgtgttcgtgatcccgtggatggacgagttttccatcatcggcaccaccgatgt

SEQ ID NO: 763362 - DNA, 75 bp, synthetic construct
  source 1..75: mol_type = other DNA
tagggggcggcatcaatggtgctggtatcgcggcagacgccgctggacgcggttcatccgtgctgatgctggagg

SEQ ID NO: 763363 - DNA, 75 bp, synthetic construct
  source 1..75: mol_type = other DNA
cgtgcgggagggcaagggctccaaggatcgggccttgatgttacccgagagcttggcacccagcctgcgcgagca

SEQ ID NO: 763364 - DNA, 75 bp, synthetic construct
  source 1..75: mol_type = other DNA
cgtttcgcgctgcactgactaaagaaaatccattgcagattgtcggcaccatcaacgctaaccatgcgctgctgg

SEQ ID NO: 763365 - DNA, 75 bp, synthetic construct
  source 1..75: mol_type = other DNA
gtgaaatcgatgattaaagccggtgcggcgggcttacatattgaagatcaggttggagcaaaacgctgcggtcat

SEQ ID NO: 763366 - DNA, 75 bp, synthetic construct
  source 1..75: mol_type = other DNA
cgatccgagcctgctgcgtaacgatgttaaagacatcagcgttagtccgttcaccctggtgttccagcacgcggg

SEQ ID NO: 763367 - DNA, 75 bp, synthetic construct
  source 1..75: mol_type = other DNA
ttgttctatgtgttcgcgatcctgattatcagcctgattattccgtacaccgatccgagcctgctgcgtaacgat

SEQ ID NO: 763368 - DNA, 75 bp, synthetic construct
  source 1..75: mol_type = other DNA
ctgggaaaaatattccgcgtgcggtgcgtcaggtattctggcgaatcctgctgttctatgtgtttgcgattctga

SEQ ID NO: 763369 - DNA, 75 bp, synthetic construct
  source 1..75: mol_type = other DNA
gcggcgacgtatatcggtattccgctattcctgatcatctggttcggctacaaactgattaaaggaacccacttc

SEQ ID NO: 763370 - DNA, 75 bp, synthetic construct
  source 1..75: mol_type = other DNA
ctatcgccgttgacctggttgctgcgcagctggttatgagctggtggttcccggatacacccggttggatctgga

SEQ ID NO: 763371 - DNA, 75 bp, synthetic construct
  source 1..75: mol_type = other DNA
atgggttccgaaactaaaactacagaagcgccgggcttacgccgtgaattgaaggcgcgtcacctgacgatgatt

SEQ ID NO: 763372 - DNA, 75 bp, synthetic construct
  source 1..75: mol_type = other DNA
ggtaacggaatgacgcccggaacatacgtatatggttatgtgaatgatcgtggagttattgtgtacgaaagagtt

SEQ ID NO: 763373 - DNA, 75 bp, synthetic construct
  source 1..75: mol_type = other DNA
caggtcaccatttctgatgagcgcaagaaaaatacgatttctcaaccccgtacaccatttctggtattcaggcgc

SEQ ID NO: 763374 - DNA, 75 bp, synthetic construct
  source 1..75: mol_type = other DNA
tctggcggcgctggatctggtgaaaaaaaccaacgatacgctggcagtaaccggtgaagcattctctcgtcagga

SEQ ID NO: 763375 - DNA, 75 bp, synthetic construct
  source 1..75: mol_type = other DNA
tctggctgcgctggatttggtgaaaaaaaccaatgatacgctggcagtaaccggcgaagccttctcccgccagga

SEQ ID NO: 763376 - DNA, 75 bp, synthetic construct
  source 1..75: mol_type = other DNA
tgccctttcgggctaccgacttcattccacaggtggggattgaaaagctatctgaaccgccccgggtttcctgga

SEQ ID NO: 763377 - DNA, 75 bp, synthetic construct
  source 1..75: mol_type = other DNA
atgacaagccgcagccgccaggctgcctactcgataacaccggaggaacaagaacaacagacaacggcgtattta

SEQ ID NO: 763378 - DNA, 75 bp, synthetic construct
  source 1..75: mol_type = other DNA
tccacaggtggggattgaaaagctatcagaccttagtgtccaacctggttttgtatgggggtataccgattcagg

SEQ ID NO: 763379 - DNA, 75 bp, synthetic construct
  source 1..75: mol_type = other DNA
gactatcgcctcgaagcaactattggcggcggtagggcagagtcgactgattcaactgtgggaacaactctttgc

SEQ ID NO: 763380 - DNA, 75 bp, synthetic construct
  source 1..75: mol_type = other DNA
atgctgctgacccgtgctgatatggaagaccgtgaacgcttcctgaacgcccgcgacaccctgcgagcgttgctc

SEQ ID NO: 763381 - DNA, 75 bp, synthetic construct
  source 1..75: mol_type = other DNA
tcattattcgcgcattcaaaaataaagatgcatctgcacttttcgattatctgtcttcacctcgcacaccttgtt

SEQ ID NO: 763382 - DNA, 75 bp, synthetic construct
  source 1..75: mol_type = other DNA
gatttatggcattcacgtcgggcaaatgctgctgactcgtgctgatatggaagaccgtgaacgcttcctgaacgc

SEQ ID NO: 763383 - DNA, 75 bp, synthetic construct
  source 1..75: mol_type = other DNA
ccttgagatttcaggaaaacactttgcaactagccgttttgaatatgatgatgtttgtagtgaagttcttagcat

SEQ ID NO: 763384 - DNA, 75 bp, synthetic construct
  source 1..75: mol_type = other DNA
ttgcgggtgccgataaactgttgctgctgaccgatcaaaaaggtttgtataccgctgacccgcgcagcaatccgc

SEQ ID NO: 763385 - DNA, 75 bp, synthetic construct
  source 1..75: mol_type = other DNA
gtcaatgccgccactggtacgctgggagtatgattatcaaccggaagaaggcagcccggaagcggcgttgagtga

SEQ ID NO: 763386 - DNA, 75 bp, synthetic construct
  source 1..75: mol_type = other DNA
gtggtcacaatgagcgtaagaatattgaagtcgtaaatactatttgtactattctggacgaaatcattactgcga

SEQ ID NO: 763387 - DNA, 75 bp, synthetic construct
  source 1..75: mol_type = other DNA
cccaggcattgcttgctaccgcaggtatgaacggtgaactgacggatgtcgttttcgatggcgaccgtatatcaa

SEQ ID NO: 763388 - DNA, 75 bp, synthetic construct
  source 1..75: mol_type = other DNA
tttatgcaggcggtaggtaaaggctacaccgacgcttatttaccgattgttgaacgccgtaaagcaatgacatac

SEQ ID NO: 763389 - DNA, 75 bp, synthetic construct
  source 1..75: mol_type = other DNA
agagcgacgtaaagcgatggaatacggcgagcgcgagcgtaatttccagctctaccgtcgcggtcgttatgtcga

SEQ ID NO: 763390 - DNA, 75 bp, synthetic construct
  source 1..75: mol_type = other DNA
gcgtcaacttttcgcatgttcacggcgacgcgatgcctgcttccgccacggcacatcgcccggagcttgccggac

SEQ ID NO: 763391 - DNA, 75 bp, synthetic construct
  source 1..75: mol_type = other DNA
atttactcccggctggaacacagcaaagggattgattacccgttcattaacttcgtccataaaggcagcgatgct

SEQ ID NO: 763392 - DNA, 75 bp, synthetic construct
  source 1..75: mol_type = other DNA
ccgcgctatacgatcaactgcaagcgcagggcggaagtatgatcatgctggcgaaaggcaaccgcagccagcagg

SEQ ID NO: 763393 - DNA, 75 bp, synthetic construct
  source 1..75: mol_type = other DNA
cgttttacatgctttaaatttaatccatcaagtgatcttccaatgatttaccgtgtagctggcgacggtgaagaa

SEQ ID NO: 763394 - DNA, 75 bp, synthetic construct
  source 1..75: mol_type = other DNA
atcgaccctgaaactatgaccggcgaagcgacgcaggaacgtctcaagttcgctagagacaacctaatgacagca

SEQ ID NO: 763395 - DNA, 75 bp, synthetic construct
  source 1..75: mol_type = other DNA
gatgagtgctctgccatcagctgaactggaatctatcagggggtggtcagttgacagcatcgcatacacgtttgc

SEQ ID NO: 763396 - DNA, 75 bp, synthetic construct
  source 1..75: mol_type = other DNA
tcgtcgccgtgaagaacaaaaacgaattaatgacctgaaaaacaaccaaattgaccatgaacgtttgctgggatg

SEQ ID NO: 763397 - DNA, 75 bp, synthetic construct
  source 1..75: mol_type = other DNA
cgacgaatacttctacctcaaacatcgtaacgaacaacgcggcattggcggcctgttctttgatgacctgaacac

SEQ ID NO: 763398 - DNA, 75 bp, synthetic construct
  source 1..75: mol_type = other DNA
ggtaaagcattcaacgaaatgacgctggtctatgcaggtgacgcacgtaacaacatgggaaactcgatgcttgaa

SEQ ID NO: 763399 - DNA, 75 bp, synthetic construct
  source 1..75: mol_type = other DNA
atgtccgggttttatcataagcatttcctgaaattacttgatttcacgccagcggaactcaatagcctgctccag

SEQ ID NO: 763400 - DNA, 75 bp, synthetic construct
  source 1..75: mol_type = other DNA
cgccagaagcgcagcaggctatcagatttgcagagcgtgaaggagttcctctgcacaccacagacctgttacaac

SEQ ID NO: 763401 - DNA, 75 bp, synthetic construct
  source 1..75: mol_type = other DNA
ttaccgactacattgatgaagattatctacaacgtgttaatgcttttaccagcaaaaatgctaacgttgaagtaa

SEQ ID NO: 763402 - DNA, 75 bp, synthetic construct
  source 1..75: mol_type = other DNA
cggcaagtattgtctttgaccaggcagaaaaccggatgcacaccataaaagctgttatggtcgctacattagcaa

SEQ ID NO: 763403 - DNA, 75 bp, synthetic construct
  source 1..75: mol_type = other DNA
gtttggcctgcacggtgggatggaagtgacggatgaggtctttgaatctgccgccagtattgtttttgatcaggc

SEQ ID NO: 763404 - DNA, 75 bp, synthetic construct
  source 1..75: mol_type = other DNA
cgttatgcctttgagcgagcagacatctgtgacggtagcgccatggcgcgcattttcgcgcaacatcagccggat

SEQ ID NO: 763405 - DNA, 75 bp, synthetic construct
  source 1..75: mol_type = other DNA
atgaaacccgacgcacaccaggttaaacagtttctgctcaaccttcaggatacgatttgtcagcagttgaccgcc

SEQ ID NO: 763406 - DNA, 75 bp, synthetic construct
  source 1..75: mol_type = other DNA
ctgtgcctgccatttggcgaagatgtttatccacgctacaaaaagtggtgcgacgaatacttctaccttaaacat

SEQ ID NO: 763407 - DNA, 75 bp, synthetic construct
  source 1..75: mol_type = other DNA
tatttgctgaagcattgccttacctcactcctgctggcgttgagagagcggcggtacaggcaccaacacttgctg

SEQ ID NO: 763408 - DNA, 75 bp, synthetic construct
  source 1..75: mol_type = other DNA
ctgcagaagcttggtaaggttgctgataacgagactatttcaaaacttcagtcatatcgtgatgagcttgttcgc

SEQ ID NO: 763409 - DNA, 75 bp, synthetic construct
  source 1..75: mol_type = other DNA
taacctgcagaagcttggtaaggttgctgataacgagactatttcaaaacttcagtcatatcgtgatgagcttgt

SEQ ID NO: 763410 - DNA, 75 bp, synthetic construct
  source 1..75: mol_type = other DNA
ggaacatcaacactcattaagttacaggatggtgaatttataactgatgatcaggcagggatggggtttggtgat

SEQ ID NO: 763411 - DNA, 75 bp, synthetic construct
  source 1..75: mol_type = other DNA
gcaaaatttacctacggtattgatccatccacggctaaatacctgattccgtatctggttaagaatactttttcg

SEQ ID NO: 763412 - DNA, 75 bp, synthetic construct
  source 1..75: mol_type = other DNA
gacttaacgttgacactatcgcggcaatcgtgcgcaaacacctgcctgaagcgacgcatcacttcccggaagatt

SEQ ID NO: 763413 - DNA, 75 bp, synthetic construct
  source 1..75: mol_type = other DNA
gatcgaacgtttcgtctctaacgaacgcggtggttatgacatcaacggtttgattctcgttgagcgtgaagggca

SEQ ID NO: 763414 - DNA, 75 bp, synthetic construct
  source 1..75: mol_type = other DNA
tatctggcgttgcctggtgatatgcccgtcgctaagttcaaggctaaacacgttaaataccatcgcaaaaaccct

SEQ ID NO: 763415 - DNA, 75 bp, synthetic construct
  source 1..75: mol_type = other DNA
ctaacatcgtgctgggcggcagccgtctcggtgatgaaacgttggatcaaatgtcgcgctcactcggtgagatag

SEQ ID NO: 763416 - DNA, 75 bp, synthetic construct
  source 1..75: mol_type = other DNA
cttttttatttgcagttactttgcctccagtaatggtatggtttttagtggctaaatttacttacggcattgacc

SEQ ID NO: 763417 - DNA, 75 bp, synthetic construct
  source 1..75: mol_type = other DNA
aagtaccactggaagaacttgaagaatatgtcagaggcactaaagcacaggctttatttgctggtagcggtcggg

SEQ ID NO: 763418 - DNA, 75 bp, synthetic construct
  source 1..75: mol_type = other DNA
tgaagagaaagccagagcagaagccgaagcaaaggcaaaagccgaaattgaagcagcagcaaggcgagaagcaga

SEQ ID NO: 763419 - DNA, 75 bp, synthetic construct
  source 1..75: mol_type = other DNA
aggcaaaagccgaaattgaagcagcagcaaggcgagaagcagaagctaaggccgcagcggaacgtgcagagcgtg

SEQ ID NO: 763420 - DNA, 75 bp, synthetic construct
  source 1..75: mol_type = other DNA
ttgaagcgcgtaaagacatgcaggaaatgttcgaagcgcctgttcaccttgagctgtgggtaaaagtgaaatccg

SEQ ID NO: 763421 - DNA, 75 bp, synthetic construct
  source 1..75: mol_type = other DNA
gtagacaacgtgcaggagaaagccgatctactgccgcacttacagtttctggcaagccaaatgaatttcctcgat

SEQ ID NO: 763422 - DNA, 75 bp, synthetic construct
  source 1..75: mol_type = other DNA
tacacgtcaccgtattgtgggtatccatactgaaggtgcgtatcaggcgatctacgttgataccccgggcctgca

SEQ ID NO: 763423 - DNA, 75 bp, synthetic construct
  source 1..75: mol_type = other DNA
aaattcgcccagttaaaggggattgccgaactggcgcggcgttactacaacgtacggatgcgtgaagaaagcctt

SEQ ID NO: 763424 - DNA, 75 bp, synthetic construct
  source 1..75: mol_type = other DNA
acaacgcgctgaacgcggtcacggaagtggtgttcaccggggaccggggcggtgaaatccgccaccggctggcac

SEQ ID NO: 763425 - DNA, 75 bp, synthetic construct
  source 1..75: mol_type = other DNA
tttttaccaccgccgcagcaggtgctggaaaaactgctcaccattgccgggccgcaaggatttatggacgccaca

SEQ ID NO: 763426 - DNA, 75 bp, synthetic construct
  source 1..75: mol_type = other DNA
gctggcggggatcgcggtgattgcgattatcgcctttcttttagaactgggtctgcgcgcgttacagcgccgcct

SEQ ID NO: 763427 - DNA, 75 bp, synthetic construct
  source 1..75: mol_type = other DNA
cgagtttttgtgataccaggtattaaaaaatactttgacttttatgcgttttttgaactgaagaaaatattgaag

SEQ ID NO: 763428 - DNA, 75 bp, synthetic construct
  source 1..75: mol_type = other DNA
attgtggaaaaatacctttctttattaactgatgttatatggtgtgtttccaaaagtgatgaaaaaaaagcaatt

SEQ ID NO: 763429 - DNA, 75 bp, synthetic construct
  source 1..75: mol_type = other DNA
aaattgctgtggcgtttgaaagtcagcggtgtgcgaactgcgcgagtaccgctgatgggcgtgcgcgacgagtat

SEQ ID NO: 763430 - DNA, 75 bp, synthetic construct
  source 1..75: mol_type = other DNA
tggggcaagccatacggcaatatcgccaagcagaacccacagggaaagagcggacaacaataggtagcaaacgtc

SEQ ID NO: 763431 - DNA, 75 bp, synthetic construct
  source 1..75: mol_type = other DNA
acgtattttatcgttgtcagtatcacctcgtctggaccccgaagtataggtataaaatcctaaaaggaaatttgg

SEQ ID NO: 763432 - DNA, 75 bp, synthetic construct
  source 1..75: mol_type = other DNA
aaaattgaatatccctatatggaaaaggtcaaagttttcattattaacacacctgatttagacccggcatcccag

SEQ ID NO: 763433 - DNA, 75 bp, synthetic construct
  source 1..75: mol_type = other DNA
ctggccgctctcgcgtcaggtgaccttaagcattggcacgttagcggttttgctcactgtatggtgggcagtggc

SEQ ID NO: 763434 - DNA, 75 bp, synthetic construct
  source 1..75: mol_type = other DNA
tgacgcgtattgtgctggcattagttgcggcggtgttgatcggcattccggttgggatcgccatggggctaagcc

SEQ ID NO: 763435 - DNA, 75 bp, synthetic construct
  source 1..75: mol_type = other DNA
ttcacagatcaatgatataaaagaaaaaaatcaatttaaacggtcagaaaagcacaaaaagcatgttcacactca

SEQ ID NO: 763436 - DNA, 75 bp, synthetic construct
  source 1..75: mol_type = other DNA
atggtgtggcgatagcgttaaaaaatattcaggccggaaatgctaaaaaattcacgttatccagcgccaacaact

SEQ ID NO: 763437 - DNA, 75 bp, synthetic construct
  source 1..75: mol_type = other DNA
ctcaggtcaatggtgcgctgggtatcggcgttcagaacgcgctgggcggaaactcaattgctttcggggataacg

SEQ ID NO: 763438 - DNA, 75 bp, synthetic construct
  source 1..75: mol_type = other DNA
agcgtgcatgtgttgcgttttcagagtggcagtatccagagtaataaagctgtaaacgttacaggacgggtaaca

SEQ ID NO: 763439 - DNA, 75 bp, synthetic construct
  source 1..75: mol_type = other DNA
gatgtgcgttatggttccgaaatgtattacaaccctggcagcaatgtaatctcctggacatatcacgctcctgcg

SEQ ID NO: 763440 - DNA, 75 bp, synthetic construct
  source 1..75: mol_type = other DNA
gttgcagagcttggcgatgattctggctggcatttctacagtcagagaaatactgatggtagtatcacattcgct

SEQ ID NO: 763441 - DNA, 75 bp, synthetic construct
  source 1..75: mol_type = other DNA
gttgcagagcttggtgatgattccggctggcatttttacagccagagaaatacggataacagtataacgttcgct

SEQ ID NO: 763442 - DNA, 75 bp, synthetic construct
  source 1..75: mol_type = other DNA
caggctgaaactggccgagtgacgccggaggacttcgagcaggcgttggacactatccgacaggtgacaaagctg

SEQ ID NO: 763443 - DNA, 75 bp, synthetic construct
  source 1..75: mol_type = other DNA
aacagtcactgtgactttcagactgacagcagaacatatcgagaatcagcctgtcattaaactgaacagggtatg

SEQ ID NO: 763444 - DNA, 75 bp, synthetic construct
  source 1..75: mol_type = other DNA
caaccgtcgatggttcccgtctggggattgctatctgtaccgttgatgggcagcttttccaggccggagacgcgc

SEQ ID NO: 763445 - DNA, 75 bp, synthetic construct
  source 1..75: mol_type = other DNA
aagcaggtcagcagataatattggtggtgtgtattacaaacaggctcagatttatattgatggcgcatggcgctc

SEQ ID NO: 763446 - DNA, 75 bp, synthetic construct
  source 1..75: mol_type = other DNA
gggggcgtgcagaattttcagtataccaacgaagtgtttcacaatcccggaggaaacgaaatcacgtggacattt

SEQ ID NO: 763447 - DNA, 75 bp, synthetic construct
  source 1..75: mol_type = other DNA
ctcagcaagcaattcatcaggcagcaaccgagctggccgccttggagttcattgaccaggaaaccgcccggcagg

SEQ ID NO: 763448 - DNA, 75 bp, synthetic construct
  source 1..75: mol_type = other DNA
acccagaatttttaaaaatggtgcacattattatccaataacgttaggtcatgaatttagcggctatattgatgc

SEQ ID NO: 763449 - DNA, 75 bp, synthetic construct
  source 1..75: mol_type = other DNA
ccacgaaaaacgcaacgtttaatttatggggtaattcatcccgacctgtagttgcagagcttggtgatgattccg

SEQ ID NO: 763450 - DNA, 75 bp, synthetic construct
  source 1..75: mol_type = other DNA
gtgatttgatgaccggggagctgaaaatacgtggtgttaatgcattgaggatttttaacgaggcttttggcctta

SEQ ID NO: 763451 - DNA, 75 bp, synthetic construct
  source 1..75: mol_type = other DNA
ataaggggaacaagtccgagctggtagcgaatgatatcattaagggtattcctttgatttgccttcttgatagcg

SEQ ID NO: 763452 - DNA, 75 bp, synthetic construct
  source 1..75: mol_type = other DNA
cggaatgggtttttacagctgtgatgctgtttgtcggtaatgatctttcatcactaagagaatcactacatgacc

SEQ ID NO: 763453 - DNA, 75 bp, synthetic construct
  source 1..75: mol_type = other DNA
cttttaccttatctgacagaaagcactgaaaaagacgttgtggcgctgttattttgcgccccgtctgcaggcgag

SEQ ID NO: 763454 - DNA, 75 bp, synthetic construct
  source 1..75: mol_type = other DNA
atacaacatcattctcgaagggggggatttctggcagggtgtcggccgctatcactccaacacgccggcgcgtaa

SEQ ID NO: 763455 - DNA, 75 bp, synthetic construct
  source 1..75: mol_type = other DNA
attttattggctcacggcgtgatggtggatttgccgaatatattgtcgttaagcggaaaaatgtctttgctctac

SEQ ID NO: 763456 - DNA, 75 bp, synthetic construct
  source 1..75: mol_type = other DNA
cgctcaccgtggcggttttgaaagcttcgctcaggcggtgcgtgacatcgctcgcaataccatgccgggtaaggt

SEQ ID NO: 763457 - DNA, 75 bp, synthetic construct
  source 1..75: mol_type = other DNA
tcgagacggctggcgtcccgcaaaccgtcgaactggcggtagagattgccggtcctcatgcccaactggcgctgg

SEQ ID NO: 763458 - DNA, 75 bp, synthetic construct
  source 1..75: mol_type = other DNA
ttggatcacggcgcaacgggggattggcagaatatattgtggtgaatcgaaaaaatgtcttcgcactaccggagg

SEQ ID NO: 763459 - DNA, 75 bp, synthetic construct
  source 1..75: mol_type = other DNA
cattattaccccataacattagggcatgaatttagtggttttgttgatgctgtggggagtggggtaaatgattta

SEQ ID NO: 763460 - DNA, 75 bp, synthetic construct
  source 1..75: mol_type = other DNA
cgctcaccgtggaagctttgaaagcttcgcccaggcggtgcgtgacatcgctcgtaatgccatgccgggcaaagt

SEQ ID NO: 763461 - DNA, 75 bp, synthetic construct
  source 1..75: mol_type = other DNA
gggcttgccgcaggaagtgcacgggaaggagtaaacccaggaatactggctacatatggtgacgggggaatagtt

SEQ ID NO: 763462 - DNA, 75 bp, synthetic construct
  source 1..75: mol_type = other DNA
ggccatttatatcaaccgggtgagctaacaggttttatcaatcttcttgataaatatatctcaggtgaaattagc

SEQ ID NO: 763463 - DNA, 75 bp, synthetic construct
  source 1..75: mol_type = other DNA
ggtcaaaagcgcgtaaaagatctgcttgatggcttatcacaagtgcaaggtgactggaaacttcatgtattggga

SEQ ID NO: 763464 - DNA, 75 bp, synthetic construct
  source 1..75: mol_type = other DNA
ctgtttctggatttggcggcatggaaacagtcattcgtgatgttattactaccttcaggcaacaacatatccaaa

SEQ ID NO: 763465 - DNA, 75 bp, synthetic construct
  source 1..75: mol_type = other DNA
cgggcatgcacattctgctcaagttggcctcgctggtagtgatcctcgcgggcattcacgcagcggcagatatca

SEQ ID NO: 763466 - DNA, 75 bp, synthetic construct
  source 1..75: mol_type = other DNA
aaacgcccttcttgaactcaaaggcgaaacacgccctgtggttggccggggaccggcagatcaggtagtcatgtt

SEQ ID NO: 763467 - DNA, 75 bp, synthetic construct
  source 1..75: mol_type = other DNA
aaaaatgccaggcttatagtagagaactaaatattgatgatcgaattgtctggtatggttggcaacaacatccct

SEQ ID NO: 763468 - DNA, 75 bp, synthetic construct
  source 1..75: mol_type = other DNA
cccggctggcgaaaacgtgccatttatgcccggacaacgccaatgacaccgccagcctgaatgcacttattcaac

SEQ ID NO: 763469 - DNA, 75 bp, synthetic construct
  source 1..75: mol_type = other DNA
gccagcctgaatgcactcattcaacatattgaacagctaaaaaaagcctgttcaatgccgactctcgccaaggca

SEQ ID NO: 763470 - DNA, 75 bp, synthetic construct
  source 1..75: mol_type = other DNA
ggttctgctggtggcaacgcctgcgctgattaccgtactgttctggaaagagtggtcggtatacgccttgattgt

SEQ ID NO: 763471 - DNA, 75 bp, synthetic construct
  source 1..75: mol_type = other DNA
tggtgctggacaacacctttattcccaccattcaggccgtccgtgtcagcgggttgctcggggcattctccggcg

SEQ ID NO: 763472 - DNA, 75 bp, synthetic construct
  source 1..75: mol_type = other DNA
gatgcaacgttgcgtaccaacccgcgtgcggctgatgcctccgcgattgcagaactgctcgaggagttgttatga

SEQ ID NO: 763473 - DNA, 75 bp, synthetic construct
  source 1..75: mol_type = other DNA
gtttatacagcggaacgggaagtctcaacatactgagccgtttcacgaataggcacatctggattatttgcgacg

SEQ ID NO: 763474 - DNA, 75 bp, synthetic construct
  source 1..75: mol_type = other DNA
tgataatctttgcgctaatctggcctgcaaccgcgctcagagcggctgtgagcaaaacaacctgggcggatgcac

SEQ ID NO: 763475 - DNA, 75 bp, synthetic construct
  source 1..75: mol_type = other DNA
ttttgataccgatcagcgcaagccatggtttataaaagcgttaagagcggatgggcaaccattaacgtttggtta

SEQ ID NO: 763476 - DNA, 75 bp, synthetic construct
  source 1..75: mol_type = other DNA
agcgtgaaagaggcggacggttcggtaaccacctatctggtgccttatgcagcggtgccaaatatgctgcaaccc

SEQ ID NO: 763477 - DNA, 75 bp, synthetic construct
  source 1..75: mol_type = other DNA
aataccgccagcggttaatgtggcaattgataagcaacaagggctttcatgcacaatcaccttcggtaaagagat

SEQ ID NO: 763478 - DNA, 75 bp, synthetic construct
  source 1..75: mol_type = other DNA
ctcggcaacgtatgctggaagtcgtgcgcggcttaagtggtgtgtctgatatttcctacgatacggtggtagcgc

SEQ ID NO: 763479 - DNA, 75 bp, synthetic construct
  source 1..75: mol_type = other DNA
gggattactgggggcgcagcggcagtagtaaagattatcagttgagttactccaataactggcggcgaataagct

SEQ ID NO: 763480 - DNA, 75 bp, synthetic construct
  source 1..75: mol_type = other DNA
cgtgatgaaaacgatgtctatgacattgccgattattaccagaacgattttggccgtaaaaatagcttttctgcc

SEQ ID NO: 763481 - DNA, 75 bp, synthetic construct
  source 1..75: mol_type = other DNA
acagtgaatggcagttatagtcagtcgagtacttatcgacaggctggagccagtgtttcagggggcattgtcgcc

SEQ ID NO: 763482 - DNA, 75 bp, synthetic construct
  source 1..75: mol_type = other DNA
gaatacacgcattggcgcgatttctgtcgatgcaacaaaatctcatagtaagcaagataatggcgatatttttga

SEQ ID NO: 763483 - DNA, 75 bp, synthetic construct
  source 1..75: mol_type = other DNA
ccacgctgtttttaattttgattctctgcgggatcttgcagattggcagtaacggcatgtcttttgggcatttcg

SEQ ID NO: 763484 - DNA, 75 bp, synthetic construct
  source 1..75: mol_type = other DNA
ttatcgacaggtcggagccagtgtttcagggggactggttgcctggtctggtggcgttaatctggcgaaccgtct

SEQ ID NO: 763485 - DNA, 75 bp, synthetic construct
  source 1..75: mol_type = other DNA
tggtttataaaagcattaagagtggatgggcaaccgttaacatttggctacgaagtcaatgatatccacggtcat

SEQ ID NO: 763486 - DNA, 75 bp, synthetic construct
  source 1..75: mol_type = other DNA
gacaccacggcggcaaatatatatgtctaactcaacgacctttgacgatcagggttttgcctcaaacaatacagg

SEQ ID NO: 763487 - DNA, 75 bp, synthetic construct
  source 1..75: mol_type = other DNA
ctttaccgctgcggtgctcggtgggattggcagcattccgggggcgatgattggcgggctgatcctggggattgc

SEQ ID NO: 763488 - DNA, 75 bp, synthetic construct
  source 1..75: mol_type = other DNA
catttgccttactgattctggttctgctggtgatgccgacaggtattctgggtcgcccggaggtagagaaagtat

SEQ ID NO: 763489 - DNA, 75 bp, synthetic construct
  source 1..75: mol_type = other DNA
ccagcctgtttaacggtcagtgggtggtgggccatagcgaaaacttctctgcctctattactaccatgcaggcgg

SEQ ID NO: 763490 - DNA, 75 bp, synthetic construct
  source 1..75: mol_type = other DNA
gtcgtgcctgcgcagaagatctgaaaatggcgagcctgctcggcatcaacaccgaccgggtgattgcgctgactt

SEQ ID NO: 763491 - DNA, 75 bp, synthetic construct
  source 1..75: mol_type = other DNA
accgaccgggtgattgcgctgacctttgtgattggcgcggcgatggcggcggtggcgggtgtgctgctcggtcag

SEQ ID NO: 763492 - DNA, 75 bp, synthetic construct
  source 1..75: mol_type = other DNA
agtacggaatataaagatgtggtctcattcgccctgctgattctggtgctgctggtgatgccgaccggtattctg

SEQ ID NO: 763493 - DNA, 75 bp, synthetic construct
  source 1..75: mol_type = other DNA
catgactttgtcagcgaaagaagagttggctaatgaagcgcatccgattgatggcctgtctggtgaatatgcgga

SEQ ID NO: 763494 - DNA, 75 bp, synthetic construct
  source 1..75: mol_type = other DNA
gccgcatagcagataaacatggtcgcaaaaaatcgatgctgttatcggtgtgtatgatgtgtttcggctcactgg

SEQ ID NO: 763495 - DNA, 75 bp, synthetic construct
  source 1..75: mol_type = other DNA
attaaaaatggcgtgcctaggatttatttcgattcaaccgagcactataaccgtcaacgctttacagtagcgcat

SEQ ID NO: 763496 - DNA, 75 bp, synthetic construct
  source 1..75: mol_type = other DNA
gaggatgttgctgatgcagcggcttatgaagaatgcgtaaaaagagctgaatatttcgccgcccagcttcgcaaa

SEQ ID NO: 763497 - DNA, 75 bp, synthetic construct
  source 1..75: mol_type = other DNA
gagctggctcgtaaggcagttcaggcattctgcgatgttgttggcgacaacactgaggttatcgctgaggtggtt

SEQ ID NO: 763498 - DNA, 75 bp, synthetic construct
  source 1..75: mol_type = other DNA
cgatgttgttggcgacaacaccgaggttatcgctgaggaggttgggcgagatggcgttctggttattttggaggc

SEQ ID NO: 763499 - DNA, 75 bp, synthetic construct
  source 1..75: mol_type = other DNA
tcggctttatggccgggatgaaagcctttaccgctgcggtgctcggtgggattggcagtattccgggggcaatga

SEQ ID NO: 763500 - DNA, 75 bp, synthetic construct
  source 1..75: mol_type = other DNA
gtgtatacgggacacccacaacagccacaacagccacaacagccacaacagccacaacagccacaacagccgcaa

SEQ ID NO: 763501 - DNA, 75 bp, synthetic construct
  source 1..75: mol_type = other DNA
tgaaaccggaagaagagatggaacagcaactgccacccgggatcagtgaatccggtgaagtgatggatatggccg

SEQ ID NO: 763502 - DNA, 75 bp, synthetic construct
  source 1..75: mol_type = other DNA
aatccggtgaagtggtggatatggccgcttatgaggcatggcaacaggaaaatcatccggacatccagcagcaga

SEQ ID NO: 763503 - DNA, 75 bp, synthetic construct
  source 1..75: mol_type = other DNA
atctattgcatttttgccggggctggcggcagtagtgacgttatcaataacgcagcctcagacgcagaacgggcc

SEQ ID NO: 763504 - DNA, 75 bp, synthetic construct
  source 1..75: mol_type = other DNA
gtatgacgcctggctggcagatgagcagacacagcgggatatgcagcggcgtgaagaggtcaatatcaaccacag

SEQ ID NO: 763505 - DNA, 75 bp, synthetic construct
  source 1..75: mol_type = other DNA
aggagctgaaaatgaaaccggaagaagagatggaacagcaactgccacccgggatcagtgaatccggtgaagtgg

SEQ ID NO: 763506 - DNA, 75 bp, synthetic construct
  source 1..75: mol_type = other DNA
cagaaagaataaaagcaggcaagctatttaccgatatgtgcgaaggcttaccggaaaaaagacttcgtgggaaaa

SEQ ID NO: 763507 - DNA, 75 bp, synthetic construct
  source 1..75: mol_type = other DNA
ccaatgttactctttccgttacgggacaccctgtacaccatgaattaagaaaaaacggagagatgtactcttttg

SEQ ID NO: 763508 - DNA, 75 bp, synthetic construct
  source 1..75: mol_type = other DNA
ggttccaacatccatataggccgcaatttttatgcaaatttcaatttaaccatcgtcgatgattacacggtaacg

SEQ ID NO: 763509 - DNA, 75 bp, synthetic construct
  source 1..75: mol_type = other DNA
cttacggaccgaaaggtcaaggagaagcaggctatgaagcagcaaaaggcgatgttaatcgccctgatcgtcatc

SEQ ID NO: 763510 - DNA, 75 bp, synthetic construct
  source 1..75: mol_type = other DNA
tggtaacgaggaaagacctctgcgaggtacgaatccgaaccggccagacggaggtcgctgtcttcgtagactacg

SEQ ID NO: 763511 - DNA, 75 bp, synthetic construct
  source 1..75: mol_type = other DNA
tcatgtggtcattaatccaggcgtcaccatcggggataattctgttattggcgcgggtagtgtcgtcacaaaaga

SEQ ID NO: 763512 - DNA, 75 bp, synthetic construct
  source 1..75: mol_type = other DNA
gcgcggcttaagcggtgtgtctgatatttcatacgatacggtggtagcgcgttccgaatttgacattccgcgcga

SEQ ID NO: 763513 - DNA, 75 bp, synthetic construct
  source 1..75: mol_type = other DNA
atgattttatcccctcctgtcagaatattcaggtcagtaagaaactgcgtggttatctcaaagaggtgcagggag

SEQ ID NO: 763514 - DNA, 75 bp, synthetic construct
  source 1..75: mol_type = other DNA
cagaaatggctgccgccggggccgttgcactgcatgtttccggcagtttcccggatctgaacatgcaactgtggg

SEQ ID NO: 763515 - DNA, 75 bp, synthetic construct
  source 1..75: mol_type = other DNA
atgagcggtgcagaagatatgagcgcctatattacgctcccgctttgccgtatcagcgatcgccatgccgatggc

SEQ ID NO: 763516 - DNA, 75 bp, synthetic construct
  source 1..75: mol_type = other DNA
atccgtatgccatgcgtttatacgaatccctgtgtcagtaccgtaaacctgatggctctggtgtcgtgtccctga

SEQ ID NO: 763517 - DNA, 75 bp, synthetic construct
  source 1..75: mol_type = other DNA
tgaagccagtaaggatattcgacaggctttaaaaggttttgcgggtaaggaagtggttttctatcgccctgaaga

SEQ ID NO: 763518 - DNA, 75 bp, synthetic construct
  source 1..75: mol_type = other DNA
cccatcgcgcccgccgatcccagctccacccggaagatttctaccttgatcttgccgggttgctgggtgaactga

SEQ ID NO: 763519 - DNA, 75 bp, synthetic construct
  source 1..75: mol_type = other DNA
aaatcgactggatcatggagcgctaccagctacctcaaagttaccaacgtatgccggattttcgccggcgtttct

SEQ ID NO: 763520 - DNA, 75 bp, synthetic construct
  source 1..75: mol_type = other DNA
ttgagctgactatgcagttggttttcagttcgcgttctgatgacctggacgccatggtcctgcaaggtccggatg

SEQ ID NO: 763521 - DNA, 75 bp, synthetic construct
  source 1..75: mol_type = other DNA
cagaccactcgcagcatgtcgctggcagcaaccattgcacaggcagccactcctgccgccacatcaccggaaaca

SEQ ID NO: 763522 - DNA, 75 bp, synthetic construct
  source 1..75: mol_type = other DNA
gtttatctcaaagaggtacagggggccattggcggacgggcaagcgatctggcaaaccgtattggctctccggcg

SEQ ID NO: 763523 - DNA, 75 bp, synthetic construct
  source 1..75: mol_type = other DNA
tattcaggtcagtaagaaactgcgtgtttatctcaaagaggtacagggggccattggcggacgggcaagcgatct

SEQ ID NO: 763524 - DNA, 75 bp, synthetic construct
  source 1..75: mol_type = other DNA
cctgccctgcccgcttgatgtgtatgatcatcatgacctgaccaaaacatttaaaacgctgttaccggaagtcaa

SEQ ID NO: 763525 - DNA, 75 bp, synthetic construct
  source 1..75: mol_type = other DNA
acaaaaccggtttacgcagttccggctcagcaaaagagattaccaatccgtatgccatgcgtttatacgaatccc

SEQ ID NO: 763526 - DNA, 75 bp, synthetic construct
  source 1..75: mol_type = other DNA
ttctgaattgctcgccaccgctattagcggcaatgccgaattaaccatccaggggggcgcatctaccaccgaaga

SEQ ID NO: 763527 - DNA, 75 bp, synthetic construct
  source 1..75: mol_type = other DNA
agcgtccgcctgctgctgtgttatatgccaatgaactggcacaattaaaaaaaaatgatcgctcaccatgtcctc

SEQ ID NO: 763528 - DNA, 75 bp, synthetic construct
  source 1..75: mol_type = other DNA
ttctgaattgctcgcaacggccattagcggcgatgccggtttaaccattcagggcggcgcatcaaccaccgaaga

SEQ ID NO: 763529 - DNA, 75 bp, synthetic construct
  source 1..75: mol_type = other DNA
acgggcaagagaactggctatctaacccgtgggtatgggtaattgagtttaaacgtattcagggggcaaccagtg

SEQ ID NO: 763530 - DNA, 75 bp, synthetic construct
  source 1..75: mol_type = other DNA
ctccggcgacgtacaagattacaccgccggaagcggtttatcgcgttggctttggtgatatctggcgcggtattt

SEQ ID NO: 763531 - DNA, 75 bp, synthetic construct
  source 1..75: mol_type = other DNA
caacggatgcgctggtccctgccccgctttaccagggaatgcgcgacggcaaaatcgtccgctttgaagagatta

SEQ ID NO: 763532 - DNA, 75 bp, synthetic construct
  source 1..75: mol_type = other DNA
aaaaccggaagccttactgaaacgcattattctcgcctcttccaacccaggcgatatcgttctcgacccgtttgc

SEQ ID NO: 763533 - DNA, 75 bp, synthetic construct
  source 1..75: mol_type = other DNA
ttttgttgatctctactgccgcaagctttttaccatcaaaagccgcatcatctggtcatatgacagttccggcgt

SEQ ID NO: 763534 - DNA, 75 bp, synthetic construct
  source 1..75: mol_type = other DNA
gatttggtaatgaagcaaagaccatcatccagggtgatgcattaaccgaacttaaaaagatccccgccgaaagtg

SEQ ID NO: 763535 - DNA, 75 bp, synthetic construct
  source 1..75: mol_type = other DNA
acgtcgtttcgactttgaaaccgtctttccaatcatggatttcgcccaggagctggaactggtcgccagcgcttc

SEQ ID NO: 763536 - DNA, 75 bp, synthetic construct
  source 1..75: mol_type = other DNA
ggcctcgtgaacgccaccggcccgtgggtgaagcagttcttcgacgacgggatgcatctaccctcaccttatggc

SEQ ID NO: 763537 - DNA, 75 bp, synthetic construct
  source 1..75: mol_type = other DNA
ccttcaacccgtaatatcttattgctgctggtgatcctgccgtcgtggacttcgtttttgatccgcgtttacgcc

SEQ ID NO: 763538 - DNA, 75 bp, synthetic construct
  source 1..75: mol_type = other DNA
gaaaaacctgacacggcagaaacctccgcagaacatacggatgccactgcagcagcgccggcagaacagacaccg

SEQ ID NO: 763539 - DNA, 75 bp, synthetic construct
  source 1..75: mol_type = other DNA
cacgactgctgccccgcaggaagagcatgagaccgtcacgatggcgacagcgcaggactggcaacactttgagga

SEQ ID NO: 763540 - DNA, 75 bp, synthetic construct
  source 1..75: mol_type = other DNA
actggcagcacgttgaggaggagatgaaacagcccgaaaatatcgctgaccacgacgcggatggggcatccgcag

SEQ ID NO: 763541 - DNA, 75 bp, synthetic construct
  source 1..75: mol_type = other DNA
gctggaaggtgaagaacgagcagacagaaccgtcctgtacaaactggatggcaaacctgccttcattgaccgggt

SEQ ID NO: 763542 - DNA, 75 bp, synthetic construct
  source 1..75: mol_type = other DNA
attggtattccgggcaccttcagcgcccgtttgcagccaaatgacacccgtgacgacgtgcaaagtatcgccgcg

SEQ ID NO: 763543 - DNA, 75 bp, synthetic construct
  source 1..75: mol_type = other DNA
gatacccgtgacgacgtgcaaagtatcgccgcgcaaatctacgaagggctttccttcgggtgggcgatgcggtga

SEQ ID NO: 763544 - DNA, 75 bp, synthetic construct
  source 1..75: mol_type = other DNA
ttctgacgcggcgaaacaagacgcggccaaaatgctccagcaggttctgaatgccggtgccggtgatttgcgtgg

SEQ ID NO: 763545 - DNA, 75 bp, synthetic construct
  source 1..75: mol_type = other DNA
tatttagagattttatttttagaataaaagaaaattccttatcctgctttcaacatacggttagtattgaaccca

SEQ ID NO: 763546 - DNA, 75 bp, synthetic construct
  source 1..75: mol_type = other DNA
gctcctgccattcgtctgacgctccatcatgaaatcaaggatttttgcgcgacgctggagtcaccaggtgaatca

SEQ ID NO: 763547 - DNA, 75 bp, synthetic construct
  source 1..75: mol_type = other DNA
catgagccggtgacgaccgggaaagagatggcacaaccggaaaacatcgctgcccatgacactccggcagccccc

SEQ ID NO: 763548 - DNA, 75 bp, synthetic construct
  source 1..75: mol_type = other DNA
cggcgaaccggcattcctggataaactcaaccgtctggaaatggtggatggtgccagtgctgatgacaaaaaggt

SEQ ID NO: 763549 - DNA, 75 bp, synthetic construct
  source 1..75: mol_type = other DNA
gaacagaatcatccttatgacatccctgcagaagagacagacaatcaggcatatgaagatgactatgcagcatat

SEQ ID NO: 763550 - DNA, 75 bp, synthetic construct
  source 1..75: mol_type = other DNA
taggcgacgtgattggttatccaagtctggcttcagcggcctacgaccagggacgcatcgccgcacaggcgttgg

SEQ ID NO: 763551 - DNA, 75 bp, synthetic construct
  source 1..75: mol_type = other DNA
ggttatgaccacagctattattttatctccagttttattggcgaacatattgcgtaccacgccaacaaattgaat

SEQ ID NO: 763552 - DNA, 75 bp, synthetic construct
  source 1..75: mol_type = other DNA
gctttggcggctggcaaaatgtttatcggcattattcccaatcccttaattgtgaaatgaatgtcggcgtctatc

SEQ ID NO: 763553 - DNA, 75 bp, synthetic construct
  source 1..75: mol_type = other DNA
cgtatcgcttttggtaagcccattggtcataaccagatgatccaggaaaaactggcgctgatggcgattaagatc

SEQ ID NO: 763554 - DNA, 75 bp, synthetic construct
  source 1..75: mol_type = other DNA
atccccgcgccaaccatgccgcccagcagcaccgccagaatcaaggtaattgcctttttcgggctatcgcgacga

SEQ ID NO: 763555 - DNA, 75 bp, synthetic construct
  source 1..75: mol_type = other DNA
acgcagcgcgttacgccccagcacaatccccgcgccaaccatgccgcccagcagcaccgccagaatcaaggtgat

SEQ ID NO: 763556 - DNA, 75 bp, synthetic construct
  source 1..75: mol_type = other DNA
gcgttgcggaaatcatggttgatcaggggttgagtgatgatttttacgcagaacagctgcggactccaaatcttg

SEQ ID NO: 763557 - DNA, 75 bp, synthetic construct
  source 1..75: mol_type = other DNA
cattattaactctcgctgctgcacaaacgttcagatggcatttagttgcaggcagccgtcaaccagctatccaga

SEQ ID NO: 763558 - DNA, 75 bp, synthetic construct
  source 1..75: mol_type = other DNA
ataattttggagatgaaaagtcttttttctgacagggtcaagaatgtcaatgataaactgaatgagttggttaaa

SEQ ID NO: 763559 - DNA, 75 bp, synthetic construct
  source 1..75: mol_type = other DNA
actagcttctgattcaaggaaacctgatgatcaggaagtacttgttccttatgctgcagatgggtcgtgttttca

SEQ ID NO: 763560 - DNA, 75 bp, synthetic construct
  source 1..75: mol_type = other DNA
tacaaccaggcgtggaagaacgagatattaagcgtcgttatgcgcaactggtaaaaaattgccgcccggaagatt

SEQ ID NO: 763561 - DNA, 75 bp, synthetic construct
  source 1..75: mol_type = other DNA
tcgaaaaacaaattacccctttctttgccagtaacttgtctccactggaagaaatggaaaacgggaaggaaatgg

SEQ ID NO: 763562 - DNA, 75 bp, synthetic construct
  source 1..75: mol_type = other DNA
aaaagaaaaaatgattcgcaagtggaaattaacagaacgcttcaataatttagcaatgcaacatcatagtggata

SEQ ID NO: 763563 - DNA, 75 bp, synthetic construct
  source 1..75: mol_type = other DNA
atcatgaaatcgctgatttctgcgcgacgttggaggcacccggcgaaccggaaacgccggaagcaatacagcaag

SEQ ID NO: 763564 - DNA, 75 bp, synthetic construct
  source 1..75: mol_type = other DNA
ttaccgtcgtcccctcactgctgaaacggcagtgttgcgtagtggcctggttttatctgaatgaatcacaaccca

SEQ ID NO: 763565 - DNA, 75 bp, synthetic construct
  source 1..75: mol_type = other DNA
tggatacgaacggagcggcccctgaatccggggatttaccacaggttcagtctgatgcagcggtattcgggcgca

SEQ ID NO: 763566 - DNA, 75 bp, synthetic construct
  source 1..75: mol_type = other DNA
ggattcctcataaattcaatgaggagcaaatgaataagtttaaaaattcaaaaacagaaacttcagagttcataa

SEQ ID NO: 763567 - DNA, 75 bp, synthetic construct
  source 1..75: mol_type = other DNA
aggcgaaagtgttagccgcgagtttcaaaaccccgcgtcaggcgctggactgcttactggcaggatgtgaatcaa

SEQ ID NO: 763568 - DNA, 75 bp, synthetic construct
  source 1..75: mol_type = other DNA
tggtaaagcgttaccggcgcagcagcctggacgcgctgacatcggataaaaccgattcgggcgaaccggatgaca

SEQ ID NO: 763569 - DNA, 75 bp, synthetic construct
  source 1..75: mol_type = other DNA
ttttatctgaatgaatcacaacccaccgagcagctcatcgcaacttacagggacacggtgcgctggctggaacag

SEQ ID NO: 763570 - DNA, 75 bp, synthetic construct
  source 1..75: mol_type = other DNA
gcgaaatcgctgcaggcgatggatttcagcgctattacggataagaccacttacaacaatattagctggcctgag

SEQ ID NO: 763571 - DNA, 75 bp, synthetic construct
  source 1..75: mol_type = other DNA
ttactggttctaccgcaatgatgaatttgtttttgactacaaacttaaagcggaagatgagcgtgatgccctgtt

SEQ ID NO: 763572 - DNA, 75 bp, synthetic construct
  source 1..75: mol_type = other DNA
atatcagatgacaaaacggcatagtattgtctggcttttttcggaagatggcaaaaactggtatgaagaacagaa

SEQ ID NO: 763573 - DNA, 75 bp, synthetic construct
  source 1..75: mol_type = other DNA
caaagatcttgggctgaataaatcaaatgtctcacgcgcattcaaagagttatttgagagaaaaatacttattcg

SEQ ID NO: 763574 - DNA, 75 bp, synthetic construct
  source 1..75: mol_type = other DNA
attcgtttaatttttatcgtgccgggagtaaaacaaaatcagttaaaaactccagaagacgaaatcctgcagacg

SEQ ID NO: 763575 - DNA, 75 bp, synthetic construct
  source 1..75: mol_type = other DNA
tttgttttcgactacaaattaaaagcagaagacgaacgcgatgctctgttaaagcaggtcagtatcgtgaccagc

SEQ ID NO: 763576 - DNA, 75 bp, synthetic construct
  source 1..75: mol_type = other DNA
gctgctgtcggcgctggcgggcgcggaatatgttgcgccttacgttaatcgtattgatgctcagggcggaagtgg

SEQ ID NO: 763577 - DNA, 75 bp, synthetic construct
  source 1..75: mol_type = other DNA
ggatgctaagcgcggtaaaatcttcactaaaatcattcgtgagctggtgaccgcagctaaactgggcggcggcga

SEQ ID NO: 763578 - DNA, 75 bp, synthetic construct
  source 1..75: mol_type = other DNA
acaacagcatcgacccggaactggctcgcgaaaaatttgcggaactgcgcgctcagtacattgtaacgcgtgaca

SEQ ID NO: 763579 - DNA, 75 bp, synthetic construct
  source 1..75: mol_type = other DNA
ctgaccgcgcgtgaagcaaaagttctgcgtatgcgtttcggtatcgatatgaacaccgaccacacgctggaagaa

SEQ ID NO: 763580 - DNA, 75 bp, synthetic construct
  source 1..75: mol_type = other DNA
caccaccttcaactacccgacgatggcggaagcctatcgggtagctgcgctaaatggcttaaaccgcctgtttta

SEQ ID NO: 763581 - DNA, 75 bp, synthetic construct
  source 1..75: mol_type = other DNA
gcgtctgatcgatatgctggaagactgtgacgacgtgcaggaagtttaccataacggtgagatctctgatgaggt

SEQ ID NO: 763582 - DNA, 75 bp, synthetic construct
  source 1..75: mol_type = other DNA
atggaagcggcgctggaagcaggtgcagaagacgttgtgacctatgatgacggcgcaatcgacgtctacactgca

SEQ ID NO: 763583 - DNA, 75 bp, synthetic construct
  source 1..75: mol_type = other DNA
tggtaaagcgttaccagcgcagcaatctggacaaactgaccgctgataaatcggacaactttgaaccagatgatg

SEQ ID NO: 763584 - DNA, 75 bp, synthetic construct
  source 1..75: mol_type = other DNA
acagatgattagctatccggcggtggaagccgctgtggcgaagtttgagcaggactggcagggagcgtttggcag

SEQ ID NO: 763585 - DNA, 75 bp, synthetic construct
  source 1..75: mol_type = other DNA
gcagatgattagctatccggcagttgatgccgccgtggcgaagtttgagcaggactggcagggagcttttggcag

SEQ ID NO: 763586 - DNA, 75 bp, synthetic construct
  source 1..75: mol_type = other DNA
tatcgcggatcaggcgcgcaccatccgtattccagtgcatatgattgagactatcaacaagctcaaccgtatttc

SEQ ID NO: 763587 - DNA, 75 bp, synthetic construct
  source 1..75: mol_type = other DNA
gaaaaactgcacgatgtctctgaagaagtgcatcgcgccctgcagaaactgcagcagattgaagaagaaaccggc

SEQ ID NO: 763588 - DNA, 75 bp, synthetic construct
  source 1..75: mol_type = other DNA
atcagtccccgttaccagctgccattgtcagtggttcctgtaacgctggttcgtgtttgttgcgatattgctttt

SEQ ID NO: 763589 - DNA, 75 bp, synthetic construct
  source 1..75: mol_type = other DNA
aacagtgatcctgatgctgataatgggttacggcatcagtatggatgttgaaaacctgcgctttgcggtgctcga

SEQ ID NO: 763590 - DNA, 75 bp, synthetic construct
  source 1..75: mol_type = other DNA
ggttacggcatcagtatggatgtggaaaacctacgctttgcggtgctcgaccgcgaccagaccgtcagtagccag

SEQ ID NO: 763591 - DNA, 75 bp, synthetic construct
  source 1..75: mol_type = other DNA
attgttgattcttgatgagccaacaacgggggttgacccgctctcccgcgcccagttctgggatctgatcgacag

SEQ ID NO: 763592 - DNA, 75 bp, synthetic construct
  source 1..75: mol_type = other DNA
aaaaaagtatggacacccaaacaatatcagaaagaaataacgactcccgaaataatcgaaacggttgcttttctc

SEQ ID NO: 763593 - DNA, 75 bp, synthetic construct
  source 1..75: mol_type = other DNA
tcacggctggtggaaaaatcagtggcaactctgggttcagggcaaaaatcgtaaaatggtatgtgcattaacagg

SEQ ID NO: 763594 - DNA, 75 bp, synthetic construct
  source 1..75: mol_type = other DNA
atgtcgactctgtttacgattaatgcctgcaagtcgtttggttgccgtaatttagggcagccaacatcgacagat

SEQ ID NO: 763595 - DNA, 75 bp, synthetic construct
  source 1..75: mol_type = other DNA
gcggcgctgctgtatatcatcattgccaccggaatggggctgctgatctccacctttatgaaaagccagattgcc

SEQ ID NO: 763596 - DNA, 75 bp, synthetic construct
  source 1..75: mol_type = other DNA
aatttttacttggcaaacagctaccgtacatcgggctgggaatgctgaactttttcctgctctgcgccctgtcgg

SEQ ID NO: 763597 - DNA, 75 bp, synthetic construct
  source 1..75: mol_type = other DNA
tctgtttagctacagccgccgcgaagcactggaactgcgccgcgatccggtccgttcgacgctggcgctgatggg

SEQ ID NO: 763598 - DNA, 75 bp, synthetic construct
  source 1..75: mol_type = other DNA
acgcccgtggaactcggtgtctggatcgacggtgcgatgccgagccgcgccgaaacggtaaaaggctacgtgcag

SEQ ID NO: 763599 - DNA, 75 bp, synthetic construct
  source 1..75: mol_type = other DNA
tcgacggcgcgatgcccagccgcgctgaaacggtaaaaggttacgtgcaggcgatgcatcagaactggctacaga

SEQ ID NO: 763600 - DNA, 75 bp, synthetic construct
  source 1..75: mol_type = other DNA
tttatcccgttgctgatagccataccgctggtgatgggcttaagcatcctgctgctgaaaaaacaggagggatga

SEQ ID NO: 763601 - DNA, 75 bp, synthetic construct
  source 1..75: mol_type = other DNA
aacatcagacaggagacagtctgcggtacagttacaagggcaacacagaaccaactatgcaccatcacgatatcg

SEQ ID NO: 763602 - DNA, 75 bp, synthetic construct
  source 1..75: mol_type = other DNA
cgaatcaactgtcgattatcgaacgtgaaatacccaccccgtcagcgggtgaagtacgagtaaaagtgaaacttg

SEQ ID NO: 763603 - DNA, 75 bp, synthetic construct
  source 1..75: mol_type = other DNA
atcccatcaaaagccctccgccacgccgtcagccgtatcattgaattcaatcaaaacccaatttacagcgaccat

SEQ ID NO: 763604 - DNA, 75 bp, synthetic construct
  source 1..75: mol_type = other DNA
tcaacttggcctgaatataagccaagaggatattacaatatatgacaaagaaaatcattttgaacaactttcttt

SEQ ID NO: 763605 - DNA, 75 bp, synthetic construct
  source 1..75: mol_type = other DNA
tggaaacgagaacgatctattcttctcaaggacgggtcgctggaatagcgaaagcaagtggcattcatcgaagaa

SEQ ID NO: 763606 - DNA, 75 bp, synthetic construct
  source 1..75: mol_type = other DNA
ccgatggtatccaccgttcctatgttggaaacgagaacgatctattcttctcaaggacgggtcgctggaatagcg

SEQ ID NO: 763607 - DNA, 75 bp, synthetic construct
  source 1..75: mol_type = other DNA
gtgcatttgagcgtcgcctctaaggtattgctgttaaatacttttttacagtcagaaatcactcagcaagagtta

SEQ ID NO: 763608 - DNA, 75 bp, synthetic construct
  source 1..75: mol_type = other DNA
cccggattttggcccacgtctggcggaaatcaaagcgcaaactctgattgtctgggggcgtaacgaccgttttgt

SEQ ID NO: 763609 - DNA, 75 bp, synthetic construct
  source 1..75: mol_type = other DNA
taaagatatcaaccgtcgtatgtccatcggtgaagcgaaagcccgccgtgcgaagaaagagatggttgaagcgaa

SEQ ID NO: 763610 - DNA, 75 bp, synthetic construct
  source 1..75: mol_type = other DNA
agctttcccaggaagatctggacgatgacgaagatgaagacgaagaagatggcgatgacgacagcgccgatgatg

SEQ ID NO: 763611 - DNA, 75 bp, synthetic construct
  source 1..75: mol_type = other DNA
cctggcattttaagggaacgacataccatggttggtggcaaaatcagtggcagcgctgggagcaggggaataact

SEQ ID NO: 763612 - DNA, 75 bp, synthetic construct
  source 1..75: mol_type = other DNA
tgatatgtggactaatgataaacttgaaaaacaaataaaattcatgttggataatcattttcctttaacctacac

SEQ ID NO: 763613 - DNA, 75 bp, synthetic construct
  source 1..75: mol_type = other DNA
ttatgccatcatttaatagtgagaaaactattcaagctgcaatcgagtcggttagagcgcaaacatattctagtt

SEQ ID NO: 763614 - DNA, 75 bp, synthetic construct
  source 1..75: mol_type = other DNA
gctgattggcccggacggcgtcgggaagtcgagtttgttgtcactgatttccggtgcccgcgtcattgagcaggg

SEQ ID NO: 763615 - DNA, 75 bp, synthetic construct
  source 1..75: mol_type = other DNA
gcaacggtcagccggtactgtttgccgagggctatgccactgcggcctccctgcacgaagccacgggccttccgg

SEQ ID NO: 763616 - DNA, 75 bp, synthetic construct
  source 1..75: mol_type = other DNA
tcccttcagtaaccgtaacggcgcgatacgctcttaccagcgtattccggtcaccggggggaaagatgcccgcat

SEQ ID NO: 763617 - DNA, 75 bp, synthetic construct
  source 1..75: mol_type = other DNA
cgagggctacgccactgcggcctccctgcacgaagcaaccgggcttccggtgctgatgaccgtggatgccggcaa

SEQ ID NO: 763618 - DNA, 75 bp, synthetic construct
  source 1..75: mol_type = other DNA
gcccccagacgagagcttgaggatggtgactacgagcccatcctcacaggaaccaaaaccgcagagctgttcgct

SEQ ID NO: 763619 - DNA, 75 bp, synthetic construct
  source 1..75: mol_type = other DNA
ttccagctttatgtactgcgcgatcgcggctttatgcgtaacgcgctggagcgagcaaaagcagcgggttgttcg

SEQ ID NO: 763620 - DNA, 75 bp, synthetic construct
  source 1..75: mol_type = other DNA
atgcgcgtcgtggcgaagttcaggcagccaaagcggcggacgcgcatggcattccgtttactctctcgacggttt

SEQ ID NO: 763621 - DNA, 75 bp, synthetic construct
  source 1..75: mol_type = other DNA
atcgcgccgcagcgcaacgcattctgccgccgttcctgttccactatattgatgggggggcatattctgaataca

SEQ ID NO: 763622 - DNA, 75 bp, synthetic construct
  source 1..75: mol_type = other DNA
gaagccgttccccattatcagcaggcgttaagcgggatattcgcccatgaagcggcaatgatgctaagcctggcg

SEQ ID NO: 763623 - DNA, 75 bp, synthetic construct
  source 1..75: mol_type = other DNA
atgcattatgccgttgtcgtcatgcttgaactgctttgctgtattcacgcttaccgtaccggacaagagcggtac

SEQ ID NO: 763624 - DNA, 75 bp, synthetic construct
  source 1..75: mol_type = other DNA
ttttcagcatgtcatcaacgcccagttagaacatattggggtttccacccccaacagtaacaccccggaaatgcg

SEQ ID NO: 763625 - DNA, 75 bp, synthetic construct
  source 1..75: mol_type = other DNA
cgtctaatctcgctattgtgggtcgttacgtacttagcgcggatatttggccgttgctggcaaaaacccctcctg

SEQ ID NO: 763626 - DNA, 75 bp, synthetic construct
  source 1..75: mol_type = other DNA
atcgaaaaagagatgaaagtggcgatgacgctgactggcgcgaaaacgattagcgaaattacgcaagattcgctg

SEQ ID NO: 763627 - DNA, 75 bp, synthetic construct
  source 1..75: mol_type = other DNA
gctcaggggcgcattaaaacacgacctgagaacgccaaaccgtcagcaaagaaacggaagcccgttaaaaccgca

SEQ ID NO: 763628 - DNA, 75 bp, synthetic construct
  source 1..75: mol_type = other DNA
gagcttgaggcgctggcgcgtggggcaactgtaaattatgacgggaaaaaattcacgtatccggttgctgatgag

SEQ ID NO: 763629 - DNA, 75 bp, synthetic construct
  source 1..75: mol_type = other DNA
ctttgactttaaaaagcggcatcgccgcgcctcggagtcctgtcaataactgtggaaagctaactagcggtggcg

SEQ ID NO: 763630 - DNA, 75 bp, synthetic construct
  source 1..75: mol_type = other DNA
gagcttgaggcgctggcgcgtggggcaaccgtaaattatgacgggaaaaaattcacgtatccgattgctgaagag

SEQ ID NO: 763631 - DNA, 75 bp, synthetic construct
  source 1..75: mol_type = other DNA
cagattatcgaaatcatgcgtcgctatgcgctcaaagaggatggcgacgaaagaggtgcgtattttcatgaaagg

SEQ ID NO: 763632 - DNA, 75 bp, synthetic construct
  source 1..75: mol_type = other DNA
ctgattgagcgcggggttattggctggaatgagccggacgtcgtgaaggtgcttaacggggcgttaaaagctggc

SEQ ID NO: 763633 - DNA, 75 bp, synthetic construct
  source 1..75: mol_type = other DNA
caacggtgacatatggcgagaaaaaattcagttatgcggtcgctgatgagtggccgggatattccaatgtttcaa

SEQ ID NO: 763634 - DNA, 75 bp, synthetic construct
  source 1..75: mol_type = other DNA
aatgtcccgcgcgacggccagaccgtcagggtcgcccgtagcgtcagtgatgaggttaatgactacgaggaagat

SEQ ID NO: 763635 - DNA, 75 bp, synthetic construct
  source 1..75: mol_type = other DNA
tatgacgggaaaaaattcacgtatccggtcgctgatgagtggccggggttctcaaaagtaatggagtggacataa

SEQ ID NO: 763636 - DNA, 75 bp, synthetic construct
  source 1..75: mol_type = other DNA
ctgagaacaccaaatcgtcagcaaagaaacggaagcccgttaaaaccgcatgaaatagcgccatcagccaggctg

SEQ ID NO: 763637 - DNA, 75 bp, synthetic construct
  source 1..75: mol_type = other DNA
ctgccgggaatgaatgacaaggagctgaaaaagtttgccgcccgtatctcatcgcagcttttcatgatgtatgag

SEQ ID NO: 763638 - DNA, 75 bp, synthetic construct
  source 1..75: mol_type = other DNA
gcatcgaccttatcagtaaggtgatgggcagtatttctaatcctgaaattcgccggatggagctgatgaacacca

SEQ ID NO: 763639 - DNA, 75 bp, synthetic construct
  source 1..75: mol_type = other DNA
agtggacatcatggcaaaattcacgaggtaaagctgcacgcaaaatatttcgaccttgtgctggaaggaaagaaa

SEQ ID NO: 763640 - DNA, 75 bp, synthetic construct
  source 1..75: mol_type = other DNA
ccgacaatgggagcttaccgtgagctacgtaaattgcctcgcggcgtcagcattgctgatgaatttgacgaacgc

SEQ ID NO: 763641 - DNA, 75 bp, synthetic construct
  source 1..75: mol_type = other DNA
gtcgaggctgcacgcgccgccgcagacagtggtgattttgcgttgtatatcagcgcgcagggtggggcaaatgtt

SEQ ID NO: 763642 - DNA, 75 bp, synthetic construct
  source 1..75: mol_type = other DNA
ctcatcgcagcttttcatgatgtatggggaactctgcgatgcctgggtggatgcgcatggcgaaaaagaatcgct

SEQ ID NO: 763643 - DNA, 75 bp, synthetic construct
  source 1..75: mol_type = other DNA
tgaaatagcgccatcggccagactgacccggtcggaaagaatgcaaattacccgtatccgcgttgaccttgctca

SEQ ID NO: 763644 - DNA, 75 bp, synthetic construct
  source 1..75: mol_type = other DNA
gtcaatgacacacggacatacgttgttatggaagaagttaagcagagtaatcgtctggttattaagacgcgctaa

SEQ ID NO: 763645 - DNA, 75 bp, synthetic construct
  source 1..75: mol_type = other DNA
tcgaatggagtgacccggaggtcgtgagggcgctcaggggggcattaaaacacggactgagaagaccaaaccgcc

SEQ ID NO: 763646 - DNA, 75 bp, synthetic construct
  source 1..75: mol_type = other DNA
aaagtcgcgaaagacaaatatggcctggacgttgaactggtaaccttcaacgactacgtgctgccgaacgaagca

SEQ ID NO: 763647 - DNA, 75 bp, synthetic construct
  source 1..75: mol_type = other DNA
acttcggagacctgagaaaggcagtcgatcgcacttatgctgaaatgggtatagatggtgcaggcgatgaagtat

SEQ ID NO: 763648 - DNA, 75 bp, synthetic construct
  source 1..75: mol_type = other DNA
tgatcagcaactgaaagatcgtggctacaaactggtcgcagtaggcaatacttttgtttatccgattgctggtta

SEQ ID NO: 763649 - DNA, 75 bp, synthetic construct
  source 1..75: mol_type = other DNA
gaaaccgttttcaggcaaaacatcttaaccggggcggtgctgcggggtatatcgcgaaatacatctcaaaaaaca

SEQ ID NO: 763650 - DNA, 75 bp, synthetic construct
  source 1..75: mol_type = other DNA
gttgagtatccgtacttcgtacccgcatgctgagagcgagtgggtatttttatcgcgtaaggggaatccgctttc

SEQ ID NO: 763651 - DNA, 75 bp, synthetic construct
  source 1..75: mol_type = other DNA
gttagttcaggctatagatgaaggtaagctcatctttgttacgctaaaatccagaaaagtttacattggttacgt

SEQ ID NO: 763652 - DNA, 75 bp, synthetic construct
  source 1..75: mol_type = other DNA
gctggcgcgtggcgcgactgtaaattatgacgggaaaaaattcacgtatccggtcgctgatgagtggccgggatt

SEQ ID NO: 763653 - DNA, 75 bp, synthetic construct
  source 1..75: mol_type = other DNA
atctttgaagaactgttcccacttccgagcgccgctgagtgcgtaccgggcggtccttccgtcgcgtgttcttca

SEQ ID NO: 763654 - DNA, 75 bp, synthetic construct
  source 1..75: mol_type = other DNA
tggatcgacaccctgaaagaagtggcggcgcagcaggtttctgatcaacagctggaaactgcccgcttccgcttc

SEQ ID NO: 763655 - DNA, 75 bp, synthetic construct
  source 1..75: mol_type = other DNA
cgcaagcgtggcctggcggcagaaagagcagttctctgatggcgtcggttatagctggatcgacactctgaaaga

SEQ ID NO: 763656 - DNA, 75 bp, synthetic construct
  source 1..75: mol_type = other DNA
aaaacgagctgcgtcaggcactggaagattccgttaaaagccatctgatgtctgatgtgccttacggtgtgctgc

SEQ ID NO: 763657 - DNA, 75 bp, synthetic construct
  source 1..75: mol_type = other DNA
gcggtgaaagataacgtgaccgacaaaaacgagctgcgtcaggcactggaagattccgttaaaagccatctgatg

SEQ ID NO: 763658 - DNA, 75 bp, synthetic construct
  source 1..75: mol_type = other DNA
gctaaagcgatcgaatgggatgaagcgttcaaaaaaatggacgatccatctggtcgtgcggttggtgttcaccag

SEQ ID NO: 763659 - DNA, 75 bp, synthetic construct
  source 1..75: mol_type = other DNA
aataccgtaaagggcagatgaccacgaggcaggcatattctgccattgcccgtctgtttaacgatgagtggtgga

SEQ ID NO: 763660 - DNA, 75 bp, synthetic construct
  source 1..75: mol_type = other DNA
gcgctggcatgaggcgttactgattgctgtcggggaggtcaataaagaccgttctccttatgccagtaaacatgc

SEQ ID NO: 763661 - DNA, 75 bp, synthetic construct
  source 1..75: mol_type = other DNA
ggggctacgataccggtcctggtaacatgctgatggatgcctggatctggcgtcaggcaggtaaaccttacgata

SEQ ID NO: 763662 - DNA, 75 bp, synthetic construct
  source 1..75: mol_type = other DNA
cgaccgtaaattatgacgggaaaaaattcacgtatccggtcgctgatgagtggcctggatttttgttacccattt

SEQ ID NO: 763663 - DNA, 75 bp, synthetic construct
  source 1..75: mol_type = other DNA
atggtagatagcaagaggcgccctggcaaagatctcgaccgtatcgatcgtaacattcttaatgagttgcaaaag

SEQ ID NO: 763664 - DNA, 75 bp, synthetic construct
  source 1..75: mol_type = other DNA
gaaacggaagcccgttaaaaccgcatgaaatagcaccatcggccagactgaccaggtctgaacgattgcaaatca

SEQ ID NO: 763665 - DNA, 75 bp, synthetic construct
  source 1..75: mol_type = other DNA
attccaaggaattgaaaaatagagagcgaaatctgcaatcgtatatggatatattttcaaaaataaagagagagt

SEQ ID NO: 763666 - DNA, 75 bp, synthetic construct
  source 1..75: mol_type = other DNA
tagctcgattcttctctactggtatcactacagccacaacggcgaacgcatccagccggaaaccgatgacgactc

SEQ ID NO: 763667 - DNA, 75 bp, synthetic construct
  source 1..75: mol_type = other DNA
gacctcgcagaacattgcgaatttgaagaagtggcgcatctgctgatccacggcaaactgccgacccgtgacgaa

SEQ ID NO: 763668 - DNA, 75 bp, synthetic construct
  source 1..75: mol_type = other DNA
tcgaacaacgtcaggacaacaaaattatccgtccttccgctaattacatagggccggaagaccgcccgtttgttg

SEQ ID NO: 763669 - DNA, 75 bp, synthetic construct
  source 1..75: mol_type = other DNA
gtggcagaaagcaaataaaaataatgtgctatccgttacgcaaaaaaattagcgttagtttattaacaacattta

SEQ ID NO: 763670 - DNA, 75 bp, synthetic construct
  source 1..75: mol_type = other DNA
atgaaccggttgctgctggttgtgctggcgttattactggcgtcgctgggctggcagacgtggcggctggctgat

SEQ ID NO: 763671 - DNA, 75 bp, synthetic construct
  source 1..75: mol_type = other DNA
cggcaaactgccgacccgtgacgaactcgccgcttacaaaacgaaactaaaagccctacgtggcttaccggctaa

SEQ ID NO: 763672 - DNA, 75 bp, synthetic construct
  source 1..75: mol_type = other DNA
gaaggggccgagtacgtggagcatttctgcgggctggagtgctatcagcgcttccaggcgcgggccagcactgcg

SEQ ID NO: 763673 - DNA, 75 bp, synthetic construct
  source 1..75: mol_type = other DNA
aaaagaggggcataccgtctctggcgcgcgggatattgccgacaaactgctggcatcacttagctcgattctcct

SEQ ID NO: 763674 - DNA, 75 bp, synthetic construct
  source 1..75: mol_type = other DNA
ctcgccgcctacaaaacgaaactgaaagccctgcgcggtttaccggctaacgtgcgtactgtgctggaagcctta

SEQ ID NO: 763675 - DNA, 75 bp, synthetic construct
  source 1..75: mol_type = other DNA
ggcgtcgcatccgacaacaatctcgaccctacaaatgataacaatgacgaggacaatatgagcgacacaacgatc

SEQ ID NO: 763676 - DNA, 75 bp, synthetic construct
  source 1..75: mol_type = other DNA
gctctatgccgacgcagaacagaccagcgcgctgctgagacaacgacaacgccggattgaggaactgaaacgtga

SEQ ID NO: 763677 - DNA, 75 bp, synthetic construct
  source 1..75: mol_type = other DNA
ccgcgaatctactattcgtgctctgaatgccgcaggtttccgcatcactaacattactgatgtgactccgatccc

SEQ ID NO: 763678 - DNA, 75 bp, synthetic construct
  source 1..75: mol_type = other DNA
acccagcagccaaaatcaacaaaatgccaaaaggttctgttcctgccctgcaacaagaaatgctgcgacgtgtca

SEQ ID NO: 763679 - DNA, 75 bp, synthetic construct
  source 1..75: mol_type = other DNA
cgacgtgtcagtaaacgttatgacgatgtagaagtgatcatcaaatccaccagcaacgacgccctttcagctact

SEQ ID NO: 763680 - DNA, 75 bp, synthetic construct
  source 1..75: mol_type = other DNA
tggctgtacgtttcttatcctaggcagaggatgatgccttggggcgaccttaggtttcagcaaaaatcccgattt

SEQ ID NO: 763681 - DNA, 75 bp, synthetic construct
  source 1..75: mol_type = other DNA
gtgggtgtcaacgctgcctgctcacgtcaatatcaataccctggaaatgatgccggttacccaaagctatgccgg

SEQ ID NO: 763682 - DNA, 75 bp, synthetic construct
  source 1..75: mol_type = other DNA
tggcgttgggcatggagcctgcgcataaagccagcattgaagactgggaaacgatgattgataccaacaacaaag

SEQ ID NO: 763683 - DNA, 75 bp, synthetic construct
  source 1..75: mol_type = other DNA
aaatggaatcatttttaaaaagaccaggtgaagacagtcatgatatgtgggaggaattcgagtggggtaacttcc

SEQ ID NO: 763684 - DNA, 75 bp, synthetic construct
  source 1..75: mol_type = other DNA
atgcggaaaagcagaaaggcagttaatggacttcttttgcatacagataaaaaaataagatggttcactaccaga

SEQ ID NO: 763685 - DNA, 75 bp, synthetic construct
  source 1..75: mol_type = other DNA
tcatatagaagatgatgagtttgatatggtgtcacaggaaattcttttaaatggcgcatttgataagtggagtga

SEQ ID NO: 763686 - DNA, 75 bp, synthetic construct
  source 1..75: mol_type = other DNA
tttttcatcttatggcgaataaatgcactcttaaatccatcgccatacctgaacttgatttaataattgatagcg

SEQ ID NO: 763687 - DNA, 75 bp, synthetic construct
  source 1..75: mol_type = other DNA
gcttcacacgatccagtctgaacgattaaccaccgatttctctttattcaaaagacaaccatctattgaaagtgc

SEQ ID NO: 763688 - DNA, 75 bp, synthetic construct
  source 1..75: mol_type = other DNA
acttcatactattcagtctgaacgattgaatacagattgttctttattcaaaagacaaccgtctattgaaagcgt

SEQ ID NO: 763689 - DNA, 75 bp, synthetic construct
  source 1..75: mol_type = other DNA
aagaccgcgcgccggtggcgctgaaaggggccgcgctgacgcgccgcccctttcattacgcggacgttctgctgt

SEQ ID NO: 763690 - DNA, 75 bp, synthetic construct
  source 1..75: mol_type = other DNA
atgacacagggctggcgggaggataaatgcccgtctgtccgcgccgggaaaaaaccgcgcgccggtggcgctgaa

SEQ ID NO: 763691 - DNA, 75 bp, synthetic construct
  source 1..75: mol_type = other DNA
agcaccgttgccaacgcagctgtcgcactgggtgcgacgcgggtaatttatccggcaaaccagaaacaggtttta

SEQ ID NO: 763692 - DNA, 75 bp, synthetic construct
  source 1..75: mol_type = other DNA
atggtctgctaatggcctcagtgtcgcctgatgaggcagacaactcttttgccgtcttcgctatggttggttact

SEQ ID NO: 763693 - DNA, 75 bp, synthetic construct
  source 1..75: mol_type = other DNA
aaaaaatggctgcaatggtacttcttgcaggcgctgccctcagcattgcgcctgtacaggctgcctcctacccaa

SEQ ID NO: 763694 - DNA, 75 bp, synthetic construct
  source 1..75: mol_type = other DNA
atgacacagggcaggcgggaggataaatgcccgtctgcccgcgccgggaaaagagcgcgcgccggtggcgctgaa

SEQ ID NO: 763695 - DNA, 75 bp, synthetic construct
  source 1..75: mol_type = other DNA
ttccggcaacatgccgcgatttaataccatcagtatcagcggttaccacatgggtgaagcgggtgccaactgcgt

SEQ ID NO: 763696 - DNA, 75 bp, synthetic construct
  source 1..75: mol_type = other DNA
tgattaaagaaatcaaagagcgtataggtagcctggacgtgcgaggcaatattgagcgccgggcttatgaaattg

SEQ ID NO: 763697 - DNA, 75 bp, synthetic construct
  source 1..75: mol_type = other DNA
ggtgttatctcccgggagcaaatcgcccaggttcttgtaacagctctgagcaacgatgcggcaaaaaataaaacg

SEQ ID NO: 763698 - DNA, 75 bp, synthetic construct
  source 1..75: mol_type = other DNA
ggcggggctgcctggcaatctgccctcggtcactggcgcaagcgaggcgacggtattgggcgcaatttttcccgc

SEQ ID NO: 763699 - DNA, 75 bp, synthetic construct
  source 1..75: mol_type = other DNA
ctgctcattcctgggcaaccggtgggtggctacgataccggaccgggtaacatgctgatggatgcgtggatctgg

SEQ ID NO: 763700 - DNA, 75 bp, synthetic construct
  source 1..75: mol_type = other DNA
atgacgccgggcaggcgggaggataaatgcccgtctgcccgcgccgggaaaagaccgcgcgccggtggcgctgaa

SEQ ID NO: 763701 - DNA, 75 bp, synthetic construct
  source 1..75: mol_type = other DNA
atgacacagggctggcgggaggataaatgcccgtctgaccgcgcagggaaaaaaccgcgcgtcggtggcgctgaa

SEQ ID NO: 763702 - DNA, 75 bp, synthetic construct
  source 1..75: mol_type = other DNA
caattcgtgaaaatatctgtgggtttgcagaagaaacagacgacgaatggatgacagaatgtgccagagcaagtc

SEQ ID NO: 763703 - DNA, 75 bp, synthetic construct
  source 1..75: mol_type = other DNA
ggaatattatttatggatgaggctacaagttctcttgatacagaaagtgaacgtttcgtgaatgctgccataaaa

SEQ ID NO: 763704 - DNA, 75 bp, synthetic construct
  source 1..75: mol_type = other DNA
atgacacagggctggcgggaggataaatgcccgtctggccgcgcggggaaaaaaccgcgcgtcggtggcgctgaa

SEQ ID NO: 763705 - DNA, 75 bp, synthetic construct
  source 1..75: mol_type = other DNA
tgcgtgcagcaggtagcatttacgctcgccgatgggattgagtacatcaaagcagcaatctccgccgggctgaaa

SEQ ID NO: 763706 - DNA, 75 bp, synthetic construct
  source 1..75: mol_type = other DNA
gagtgggaaaaggatttattgctggggttaatcagcaacgaagacagggaaaagctgaaagcgtaccgcatttac

SEQ ID NO: 763707 - DNA, 75 bp, synthetic construct
  source 1..75: mol_type = other DNA
atggcctgtcagaaatcacatcaccttccctgtgattattctctttttcttcctgctctgattctgactactgca

SEQ ID NO: 763708 - DNA, 75 bp, synthetic construct
  source 1..75: mol_type = other DNA
atgacacagggctggcgggaggataaatgcccgtctgcccgcgcagggaaaacaccgcgcgtcggtggcgctgaa

SEQ ID NO: 763709 - DNA, 75 bp, synthetic construct
  source 1..75: mol_type = other DNA
atgacacagggctggcgggaggataaatgcccgtctgtccgcgctgggaaaaaaccgcgcgtcggtggcgctgaa

SEQ ID NO: 763710 - DNA, 75 bp, synthetic construct
  source 1..75: mol_type = other DNA
atgacacagggctggcgggaggataaatgcccgtctgtccgcgcagggaaaataccgcgcgtcggtggcgctgaa

SEQ ID NO: 763711 - DNA, 75 bp, synthetic construct
  source 1..75: mol_type = other DNA
atgacacagggctggcgggaggataaatgcccgtctggccgcgctgggaaaataccgcgcgtcggtggcgctgaa

SEQ ID NO: 763712 - DNA, 75 bp, synthetic construct
  source 1..75: mol_type = other DNA
atgacacagggctggcgggaggataaatgcccgtctggccgcgcagggaaaagaccgcgcgtcggtggcgctgaa

SEQ ID NO: 763713 - DNA, 75 bp, synthetic construct
  source 1..75: mol_type = other DNA
atgacacagggctggcgggaggataaatgcccgtctgcccgcgccgggaaaaaaccgcgcgtcggtggcgctgaa

SEQ ID NO: 763714 - DNA, 75 bp, synthetic construct
  source 1..75: mol_type = other DNA
ggggttgagtgatgatttttacgcggaacaactgcggactccaaatcttgaaaagatctgccaggagatgaatat

SEQ ID NO: 763715 - DNA, 75 bp, synthetic construct
  source 1..75: mol_type = other DNA
atggcggttcatgtagtaacaggcaaattaggctcaggcaagacactggttagtgtttccagaatacaggaaaga

SEQ ID NO: 763716 - DNA, 75 bp, synthetic construct
  source 1..75: mol_type = other DNA
gatttaccgagactatcaattaattctttctctcaacttggttttgatgtttccgttacgtttgttgatgctaag

SEQ ID NO: 763717 - DNA, 75 bp, synthetic construct
  source 1..75: mol_type = other DNA
gggttgatagcacaaccaacagtaatgtcggcctttacagagggattacctctgttgggactaacacaggactga

SEQ ID NO: 763718 - DNA, 75 bp, synthetic construct
  source 1..75: mol_type = other DNA
tctctggatgagcttaaccgggcgatcaatgatgcggagtcggtactggggacaacccgccgtcgccgtcgtccg

SEQ ID NO: 763719 - DNA, 75 bp, synthetic construct
  source 1..75: mol_type = other DNA
gggattaagtgacgccttttatgaagatcagttacgcactaaaagtcttgaaagagtgtgcaacgagatgaacat

SEQ ID NO: 763720 - DNA, 75 bp, synthetic construct
  source 1..75: mol_type = other DNA
tgccaccgcccagcctacggaaaaaaaagaagaagagtgggatccggcaatctggctgaaagaactggctacctt

SEQ ID NO: 763721 - DNA, 75 bp, synthetic construct
  source 1..75: mol_type = other DNA
ccagttccagactggatctgactgcgaagtgatcctcgcgttgtatcaggaaaaaggggcggaatttctcgacga

SEQ ID NO: 763722 - DNA, 75 bp, synthetic construct
  source 1..75: mol_type = other DNA
gtttgccgcacgattaaagagttcccggcggggagctatttgtggagtcaggacggcgaaatccgttcttattat

SEQ ID NO: 763723 - DNA, 75 bp, synthetic construct
  source 1..75: mol_type = other DNA
aaagcagcccaggaagtggcaaaccatctgggcacggtgcatcacgaaattcacttcactgtacaggaaggtctg

SEQ ID NO: 763724 - DNA, 75 bp, synthetic construct
  source 1..75: mol_type = other DNA
atgtactgcaccctggaggatttgcttgcgcaggtgccggaacgaacgctgatcgagctcaccagtgaagagatg

SEQ ID NO: 763725 - DNA, 75 bp, synthetic construct
  source 1..75: mol_type = other DNA
cgtccgccgtcctgaaggtgacctgcctgacactgtcaaggacgacaacaaagaggcacggcggcaactggaggc

SEQ ID NO: 763726 - DNA, 75 bp, synthetic construct
  source 1..75: mol_type = other DNA
tgagcacgccgcagcagtgcttaatctggtagatgacggtgttatcgaatggagtgacccggaggttgtgagggc

SEQ ID NO: 763727 - DNA, 75 bp, synthetic construct
  source 1..75: mol_type = other DNA
agagcgcgtggcggttgttggcgcgggttacatcgccgttgaactggcgggcgtgattaacggcctcggcgcgaa

SEQ ID NO: 763728 - DNA, 75 bp, synthetic construct
  source 1..75: mol_type = other DNA
tgaaatagcaccgtcggccagactgaccaggtcggaacgaatgcaaatcacccgtatccgcgttgaccttgttca

SEQ ID NO: 763729 - DNA, 75 bp, synthetic construct
  source 1..75: mol_type = other DNA
atggccgttaaagcctccgggcgttttgtccctccgtcagcatttgccgcaggcaccggtaagacgtttaccggt

SEQ ID NO: 763730 - DNA, 75 bp, synthetic construct
  source 1..75: mol_type = other DNA
ctgattgataaaggagtgattggttgggatgagccggatgttataaaggtgcttaacggcgcgttaaacgctggt

SEQ ID NO: 763731 - DNA, 75 bp, synthetic construct
  source 1..75: mol_type = other DNA
cttcgttatcggctcccacaccgactgagcacgccgcagcagtgcttaatctggttgatgagggtgtcatcgaat

SEQ ID NO: 763732 - DNA, 75 bp, synthetic construct
  source 1..75: mol_type = other DNA
ggaatgacccggaggtcgtgagggcgctaaggggcgcattaaaacacgacctaagaacgccaaatcgtcagcaaa

SEQ ID NO: 763733 - DNA, 75 bp, synthetic construct
  source 1..75: mol_type = other DNA
gagattgaggcgctggcgcgtggggcaaccgtaaattatgacgggaaaaaattcacgtatccggtcgctgatgag

SEQ ID NO: 763734 - DNA, 75 bp, synthetic construct
  source 1..75: mol_type = other DNA
tcatgttgtatagtgattgaatcttctccatcaaaattgttgaattttaaagttagaaggcaactcgacgatata

SEQ ID NO: 763735 - DNA, 75 bp, synthetic construct
  source 1..75: mol_type = other DNA
aaagtgatgtggcacgcggcgcaaatccgtgaagcgatccacatgtacggcccggattatggtttcgataccacc

SEQ ID NO: 763736 - DNA, 75 bp, synthetic construct
  source 1..75: mol_type = other DNA
cgaccgtatccatacctcctatgaaaacgtactcggtaaaaataacgtcgatgtaatcaaaggttttgctcgctt

SEQ ID NO: 763737 - DNA, 75 bp, synthetic construct
  source 1..75: mol_type = other DNA
tcgacggatatgcactggatggtcagctcgataatgataccggcagaccgctgaaagacacttgcgtattaccgt

SEQ ID NO: 763738 - DNA, 75 bp, synthetic construct
  source 1..75: mol_type = other DNA
tatttctaatcctgaaattcgccggatggagctgatgaacaccattgccggtattgagcgttacgccgccgcaga

SEQ ID NO: 763739 - DNA, 75 bp, synthetic construct
  source 1..75: mol_type = other DNA
tacagccatattacttcaagaaaaatgccgacttaatttttactgaaacagatgatgtcaacttgcgggtaacaa

SEQ ID NO: 763740 - DNA, 75 bp, synthetic construct
  source 1..75: mol_type = other DNA
atggctactattcaagacgcatttaataaactctgtaccaatattgactttatcgaggtatacaacgaccagacg

SEQ ID NO: 763741 - DNA, 75 bp, synthetic construct
  source 1..75: mol_type = other DNA
tattacaggtattcgattaggtacaaaatcgtctgtgcaaacatggaatggtcctggatggaacgataaatctgg

SEQ ID NO: 763742 - DNA, 75 bp, synthetic construct
  source 1..75: mol_type = other DNA
tgtggaactattcatcttgcaggttgcgttattgaggttatgggtaataaaggtgccatgactatccgtgtaacc

SEQ ID NO: 763743 - DNA, 75 bp, synthetic construct
  source 1..75: mol_type = other DNA
gccatgaccatccgtgtaaccaccccgagcacttccagcggtggcggaattactaacgctcaattcacctatatt

SEQ ID NO: 763744 - DNA, 75 bp, synthetic construct
  source 1..75: mol_type = other DNA
aaaccctcggcgggagatgttggtgcatacacgcaggcagaatgtaactcaaggtttattacaggtattcgcctt

SEQ ID NO: 763745 - DNA, 75 bp, synthetic construct
  source 1..75: mol_type = other DNA
tgcagacggcgcgcactattaacggtgtttcgtttgatggttctaaaaatattgagctaacggctgaaaatttaa

SEQ ID NO: 763746 - DNA, 75 bp, synthetic construct
  source 1..75: mol_type = other DNA
tcaaataaggacgaacttattgatacaactcaggcaaggccggtgcagtattgtatcaatggtacatggtataac

SEQ ID NO: 763747 - DNA, 75 bp, synthetic construct
  source 1..75: mol_type = other DNA
aattacaggaacggcggtattttttatcgttcagcgcgtgatggttacggattcgaagctgactggtcagaaatt

SEQ ID NO: 763748 - DNA, 75 bp, synthetic construct
  source 1..75: mol_type = other DNA
aagggaatcaggacacctctggcaatgcggctacagcgactaaattgcagacagcacgtactattaacggtgtct

SEQ ID NO: 763749 - DNA, 75 bp, synthetic construct
  source 1..75: mol_type = other DNA
gcgcttaccggtacaacgcaaggtgctgctactggattgcagatgtatgaggcatacaacaatggttatccgacg

SEQ ID NO: 763750 - DNA, 75 bp, synthetic construct
  source 1..75: mol_type = other DNA
atagcggcgtttatgatgcagatatcagtggcgcatcgacattaatcctccacttcaatatgaatgcggggagtt

SEQ ID NO: 763751 - DNA, 75 bp, synthetic construct
  source 1..75: mol_type = other DNA
tcttgcaggttgcgttattgaggttatgggtaataaaggtgccatgaccatccgtgtaaccaccccgagcacttc

SEQ ID NO: 763752 - DNA, 75 bp, synthetic construct
  source 1..75: mol_type = other DNA
gacgaaattaaaaacagccagaaacattaatggcgtcaggttcgatggttcggctgacattaatatcaatactct

SEQ ID NO: 763753 - DNA, 75 bp, synthetic construct
  source 1..75: mol_type = other DNA
cgcggcgcaatgaccatacgcgttaccacgccgagcacgtccagtggtggcggaattactaacgctcaattcacc

SEQ ID NO: 763754 - DNA, 75 bp, synthetic construct
  source 1..75: mol_type = other DNA
gcggcggtgtcagtgaaggcgggtaagctcctgtttctgaaagccggtagtgcaatgaccgccagcggcaagccc

SEQ ID NO: 763755 - DNA, 75 bp, synthetic construct
  source 1..75: mol_type = other DNA
tggcagggctccgcactggtcaacaaggggagtttcacggtcgatgaaatcgagcaccggggtgcgcctgatacg

SEQ ID NO: 763756 - DNA, 75 bp, synthetic construct
  source 1..75: mol_type = other DNA
ctcacgagcagaccactgctgaagagcgtcagaccaccttcaacgacatgatcaaaatcgcactggaatccgttc

SEQ ID NO: 763757 - DNA, 75 bp, synthetic construct
  source 1..75: mol_type = other DNA
tggaaggggcagccgcttttcccgaaagggacattcacggtggacgagattgaacacactggcgcaccggaccgc

SEQ ID NO: 763758 - DNA, 75 bp, synthetic construct
  source 1..75: mol_type = other DNA
actctctgagcaataatggattcacgacgagcctagagcttgaggtgaggcttacggatgttgaatacgagccaa

SEQ ID NO: 763759 - DNA, 75 bp, synthetic construct
  source 1..75: mol_type = other DNA
tgaacacagcggtgcccctgaccgactgaccatccgggcgcgtagtgcagatttccgtgagaccctgaatacacg

SEQ ID NO: 763760 - DNA, 75 bp, synthetic construct
  source 1..75: mol_type = other DNA
tccatactggatgtgtaaagggtcatggtcctatgccagaaacagggttattacggataccggttgtggaaatat

SEQ ID NO: 763761 - DNA, 75 bp, synthetic construct
  source 1..75: mol_type = other DNA
ttaattgatacaactcaggcaaggccaattcagtattgcattaatggaacgtggtataacgcggggagtatttaa

SEQ ID NO: 763762 - DNA, 75 bp, synthetic construct
  source 1..75: mol_type = other DNA
ttggcacccgcggcgcaatgaccatacgcgttaccacgccgagcacgtccagcggtggcggaatcactaacgctc

SEQ ID NO: 763763 - DNA, 75 bp, synthetic construct
  source 1..75: mol_type = other DNA
atggttagctggattgccaacaatacccacgttcaaggtgaccttgattcgctggagttaaccaatgatgacaaa

SEQ ID NO: 763764 - DNA, 75 bp, synthetic construct
  source 1..75: mol_type = other DNA
caaatggaacaattcgttttcattcgtccattaccacgttcggtatgcttctgcgcatgtttgcagtattaatgg

SEQ ID NO: 763765 - DNA, 75 bp, synthetic construct
  source 1..75: mol_type = other DNA
caaatggaacaatccgttttcattcgtccattaccacgttcggtatacttctgcgcatgtttgctgtattaatag

SEQ ID NO: 763766 - DNA, 75 bp, synthetic construct
  source 1..75: mol_type = other DNA
cagtcacctggctgaagggcggtcgcatttaccctgaacttgactgtttcggtattgtgaatgagatccgccgtg

SEQ ID NO: 763767 - DNA, 75 bp, synthetic construct
  source 1..75: mol_type = other DNA
atggataaaaacatgttgatcgcctcttgtttcgggctgtatgatgccggagtcgcccacatggcgaccaggttt

SEQ ID NO: 763768 - DNA, 75 bp, synthetic construct
  source 1..75: mol_type = other DNA
tttttgtgtccgtaaacctacccatacccgcattatggcggggcgtaacgggggagcctttgcgctcgctggttc

SEQ ID NO: 763769 - DNA, 75 bp, synthetic construct
  source 1..75: mol_type = other DNA
caaatagattaatgataaaaaaccacattgaaacattaggcaccttgaaggacgccaaccttatagttaagaata

SEQ ID NO: 763770 - DNA, 75 bp, synthetic construct
  source 1..75: mol_type = other DNA
ttttgtgtccgtaaacctacccatacccgcattatggcggggcgtaacgggggagcctttgcgctcgctggtttc

SEQ ID NO: 763771 - DNA, 75 bp, synthetic construct
  source 1..75: mol_type = other DNA
acagataggagcctttcacatggctgtatccgcacgcccttactttgtctggcgctttatgcagtgcctgacagg

SEQ ID NO: 763772 - DNA, 75 bp, synthetic construct
  source 1..75: mol_type = other DNA
gctgccactgagcacgaagcacgcgcccagctgccgcacgcacatcttgtttttgtcgcccgtatccgtcagggg

SEQ ID NO: 763773 - DNA, 75 bp, synthetic construct
  source 1..75: mol_type = other DNA
atgaatgagttagacggcatcaaacagttcaccactgttgtggcagacagcggtgatattgagtccattcgccat

SEQ ID NO: 763774 - DNA, 75 bp, synthetic construct
  source 1..75: mol_type = other DNA
catcgcgccgaacttgctgaaagagttgcaggaaaaagtctcgccggtggtacgtaaattaatcccgccttctca

SEQ ID NO: 763775 - DNA, 75 bp, synthetic construct
  source 1..75: mol_type = other DNA
aaaactgtctgagggtatccgcctgttcgctgtcgaccagcgcaaactggaagatcttcttgccgctaaactgta

SEQ ID NO: 763776 - DNA, 75 bp, synthetic construct
  source 1..75: mol_type = other DNA
acgctgccgctacaagcaggctttgtctatttaccgggactggcttttcaaaggcagtctcgaacggtgaagctc

SEQ ID NO: 763777 - DNA, 75 bp, synthetic construct
  source 1..75: mol_type = other DNA
tactttcggggaaaaatatttaccaggagattgagaaaatcatagcctcaatcgaacttgatccatcaattgaat

SEQ ID NO: 763778 - DNA, 75 bp, synthetic construct
  source 1..75: mol_type = other DNA
ccttcccgagagtggtaaaggagaggccctggaaataccccacagccccgaaaaagagccagtcagttgcttaac

SEQ ID NO: 763779 - DNA, 75 bp, synthetic construct
  source 1..75: mol_type = other DNA
ggggagcctttgcgctcgctggttcctgtagtgccagtctgctaaccccgttacgtctcgccaccatgtttagca

SEQ ID NO: 763780 - DNA, 75 bp, synthetic construct
  source 1..75: mol_type = other DNA
aagctgaacactattgtaatatagtaaatagtccatttcttgagaatgatgaacaagtaataagttttaacgatt

SEQ ID NO: 763781 - DNA, 75 bp, synthetic construct
  source 1..75: mol_type = other DNA
gcagttggctttacctgattgacctagaacacgcattacgcgtcgctggcattcgcatcaaaggagaggagcatg

SEQ ID NO: 763782 - DNA, 75 bp, synthetic construct
  source 1..75: mol_type = other DNA
gaaccttgacgaacaacgcgaaggatacgctccgattgaatcacggggttgggatgtgctgacgcagaacctgac

SEQ ID NO: 763783 - DNA, 75 bp, synthetic construct
  source 1..75: mol_type = other DNA
accaacagctacattgaaggggatgtggatatcgtttctggtcgcggcgcagtggtgttcgataacaccgaattc

SEQ ID NO: 763784 - DNA, 75 bp, synthetic construct
  source 1..75: mol_type = other DNA
tgcaatccccgcactaacgtaacctttctgccgctggcgcggtttgcgcgccgctttgttcgcgtggagtattac

SEQ ID NO: 763785 - DNA, 75 bp, synthetic construct
  source 1..75: mol_type = other DNA
gtgatgagtataagaataaattcaatgagattttgagaatgtgtgcagagaataaatactctgacggtatggctt

SEQ ID NO: 763786 - DNA, 75 bp, synthetic construct
  source 1..75: mol_type = other DNA
atggcgataaaaggtctggcgcaggccatgaaaaatctggatgcgattaaccgccttgccgttccccgggctgcc

SEQ ID NO: 763787 - DNA, 75 bp, synthetic construct
  source 1..75: mol_type = other DNA
catgatgcctaaagaaaatggcaactggctttatctggctgatttggagcacgcactacgtgttgctggcattcg

SEQ ID NO: 763788 - DNA, 75 bp, synthetic construct
  source 1..75: mol_type = other DNA
atgcgtaaaaaccgcttgcaaaaaattataacggggctgtatgcttcccccgtcgcccacatggcgaccgggttt

SEQ ID NO: 763789 - DNA, 75 bp, synthetic construct
  source 1..75: mol_type = other DNA
ctcgcgaacatctcctggcgacgggcgagcaactttgcctgcaacgtggattcaccgggatggggctaagcgaac

SEQ ID NO: 763790 - DNA, 75 bp, synthetic construct
  source 1..75: mol_type = other DNA
ggatgtaccgggaaaaattaccggcgcagatgatgaaagccatgacgcatcagttacgcctggtgctgaaaagaa

SEQ ID NO: 763791 - DNA, 75 bp, synthetic construct
  source 1..75: mol_type = other DNA
ctgccgatcgaagtggtgaagattacgactgccggaccgctggcagaaacctttgaacgtgaacgggaccggatg

SEQ ID NO: 763792 - DNA, 75 bp, synthetic construct
  source 1..75: mol_type = other DNA
gcttaaccgggcgatcaatgatgctgagttggtactggggacaacccgccgtcgccgtcgtccgctgggagtgag

SEQ ID NO: 763793 - DNA, 75 bp, synthetic construct
  source 1..75: mol_type = other DNA
cggagattaaatcattcatcactggttttctgagcgattcggcgcacgataaccaatcttcaaacagcctgcttg

SEQ ID NO: 763794 - DNA, 75 bp, synthetic construct
  source 1..75: mol_type = other DNA
agaacagactgacgctggcgtgcgttttaccgctgaagtgcgtagcggacaaaatattcgccgtcgcggtgaaga

SEQ ID NO: 763795 - DNA, 75 bp, synthetic construct
  source 1..75: mol_type = other DNA
aatggaccattacgactctgacacataccgtcagcccggataacggttttacgaccagtctggagcttgaagtga

SEQ ID NO: 763796 - DNA, 75 bp, synthetic construct
  source 1..75: mol_type = other DNA
cgcaacggcggtgaggtgtcggtaaaaatgggaaaactgttgtttctcaaagcggggcagggggtgacggccagc

SEQ ID NO: 763797 - DNA, 75 bp, synthetic construct
  source 1..75: mol_type = other DNA
tagctgcgcgtcacaagctgaagatggcactgggtaaagacctgtcggataagcccgtggaacatatagaccaga

SEQ ID NO: 763798 - DNA, 75 bp, synthetic construct
  source 1..75: mol_type = other DNA
tttactgctgaagtgcgtagcgggcaaaatattcgccgtcgcggtgaagatatctctgcaggtgcggttgttttc

SEQ ID NO: 763799 - DNA, 75 bp, synthetic construct
  source 1..75: mol_type = other DNA
gatcagctgctggcaccttgtgatggtgaacgcaccgaagaaggtatgcgcgccaacattcgcgtggctgtgcag

SEQ ID NO: 763800 - DNA, 75 bp, synthetic construct
  source 1..75: mol_type = other DNA
tcatcaaaaaacgttgagcaatggcaaaccggtgaccaaagccttgttccgccagatgctgggcgaagagatgaa

SEQ ID NO: 763801 - DNA, 75 bp, synthetic construct
  source 1..75: mol_type = other DNA
gcacagcgtcccgcctgaaaaaacgccaggacgtcttgatttccagcgcggcgtgctgcaacgcaacgccgatgg

SEQ ID NO: 763802 - DNA, 75 bp, synthetic construct
  source 1..75: mol_type = other DNA
tgcacctgatgctggaacagttaggttgcgaggtaattaacttagggattatccgtgacgacccgaacgcattac

SEQ ID NO: 763803 - DNA, 75 bp, synthetic construct
  source 1..75: mol_type = other DNA
atctacgataccaaccgtctcgccgtacacctgatgttagaacagctgggttgcgaggtaatcaacttagggatt

SEQ ID NO: 763804 - DNA, 75 bp, synthetic construct
  source 1..75: mol_type = other DNA
gatatcgagctcgatgataccgatggactggtcgagttgccgccgcgcggggcatcgctgaccctgtggctgggc

SEQ ID NO: 763805 - DNA, 75 bp, synthetic construct
  source 1..75: mol_type = other DNA
tgaatacataagaggttggcctcttgcgcatagtgattatgctgaaggatggaacgattgccgtgctgcaatgct

SEQ ID NO: 763806 - DNA, 75 bp, synthetic construct
  source 1..75: mol_type = other DNA
tggaaggggcagccgcttttccctaaaggggcattcacggtggacgagattgaacatactggcgcaccggaccgc

SEQ ID NO: 763807 - DNA, 75 bp, synthetic construct
  source 1..75: mol_type = other DNA
actttctgaataattccggcttcacgacgtccttagagcttgaggtcaggctttctgatgtggagtatgaaacag

SEQ ID NO: 763808 - DNA, 75 bp, synthetic construct
  source 1..75: mol_type = other DNA
tcgtcgaattttacggcgatggactggattcgctgccgctggcagatcgcgcgacaattgccaacatgtcaccgg

SEQ ID NO: 763809 - DNA, 75 bp, synthetic construct
  source 1..75: mol_type = other DNA
atatgccaaagcgcagggcatgtggcgtaatccgggcgatgaaccaatttttaccagtgtgttagaactggatat

SEQ ID NO: 763810 - DNA, 75 bp, synthetic construct
  source 1..75: mol_type = other DNA
aactgttgtttctcaaggcggggcagggggtgacggccagcggtaaaaaaatcccgcagattaccatcacccgca

SEQ ID NO: 763811 - DNA, 75 bp, synthetic construct
  source 1..75: mol_type = other DNA
caagcaaaaaagaaggggattatctggccggggccgaaggcaacgtttttgttatccgtaaaaccttcaagacgg

SEQ ID NO: 763812 - DNA, 75 bp, synthetic construct
  source 1..75: mol_type = other DNA
attaaaaacggtatgcttctgtttatcacgccgggcaagggagtaacgcagagcggcaagccgctgccggtgatc

SEQ ID NO: 763813 - DNA, 75 bp, synthetic construct
  source 1..75: mol_type = other DNA
atgaacaaacacaccgaacatgatactcgcgaacacctcctggctacgggtgagcagctttgcctgcaacgtgga

SEQ ID NO: 763814 - DNA, 75 bp, synthetic construct
  source 1..75: mol_type = other DNA
ccggggttttgaggctgaccagcttgatattgaactgaacgatgccgacgggcaggtcgggctgccggttcgtgg

SEQ ID NO: 763815 - DNA, 75 bp, synthetic construct
  source 1..75: mol_type = other DNA
ccatgcgcgccgctcaggcgaagtgggataaactgcaacggggtgtggcggagttctccatcagcctggctaccg

SEQ ID NO: 763816 - DNA, 75 bp, synthetic construct
  source 1..75: mol_type = other DNA
cgttgcggagttctccatcagcctggctaccggtcgtgcagatatttacacggaaacaccggtcaaagtgtcagg

SEQ ID NO: 763817 - DNA, 75 bp, synthetic construct
  source 1..75: mol_type = other DNA
aagatggtgatcaacgcgctcaacgccaatgtgaaagtctttatggccgatttcgaagattcactggccccggac

SEQ ID NO: 763818 - DNA, 75 bp, synthetic construct
  source 1..75: mol_type = other DNA
actaatagctacattgaaggggatgtggatatcgtttctggccgtggtgcagtggtgttcgataataccgaattc

SEQ ID NO: 763819 - DNA, 75 bp, synthetic construct
  source 1..75: mol_type = other DNA
ttctggtcacaaaacaatggtctgcaactgcaaaacctgaccattgaaaacaccctgggcgatagcgtagatgcg

SEQ ID NO: 763820 - DNA, 75 bp, synthetic construct
  source 1..75: mol_type = other DNA
gcttccggcagcctttttaccgggcgacagtttactggtgttggtcggcgtattgattgcgaaaggcgcgatggg

SEQ ID NO: 763821 - DNA, 75 bp, synthetic construct
  source 1..75: mol_type = other DNA
ccggggcgcgcattgcccctgattttatgctcacgctcgatggcgcagatatctcacagaatttcagcaaccggc

SEQ ID NO: 763822 - DNA, 75 bp, synthetic construct
  source 1..75: mol_type = other DNA
caataacgtcaatattctgggtcgtcagaatactttctttgtgactaacagtggcgtgcaaaaccgtctggaaac

SEQ ID NO: 763823 - DNA, 75 bp, synthetic construct
  source 1..75: mol_type = other DNA
attttcgtgaaacgctgaatacccgccgtgaaaagtcgtggcacaagaccacagtcggggaagtggtgaaggaaa

SEQ ID NO: 763824 - DNA, 75 bp, synthetic construct
  source 1..75: mol_type = other DNA
ggggaaaagacggatcccggacgcctttatcacccggctggctaacggacgctggcatgtgatgcagcgtatgcc

SEQ ID NO: 763825 - DNA, 75 bp, synthetic construct
  source 1..75: mol_type = other DNA
actgtcggggaagtggtcaaggaaatagccgcgcgtcacaagctgaagatggcactgggtaaagacctgtcggat

SEQ ID NO: 763826 - DNA, 75 bp, synthetic construct
  source 1..75: mol_type = other DNA
aaccctggccaatccgtcgatgattggcatgttgtattttgtcttgtttgtaattttgttccttgaaaacggctt

SEQ ID NO: 763827 - DNA, 75 bp, synthetic construct
  source 1..75: mol_type = other DNA
gcggtctcagtgaaagcgggtagattgctgatgctcaaagcgggaagcggtaccactgccagtggaaaagctatt

SEQ ID NO: 763828 - DNA, 75 bp, synthetic construct
  source 1..75: mol_type = other DNA
ccgtgaaaaatcttggcacaagaccaccgtcggggaagtggtaaaggaaatagccgcgcgtcacaagctgaagat

SEQ ID NO: 763829 - DNA, 75 bp, synthetic construct
  source 1..75: mol_type = other DNA
tatatgcatgcctcttttgtatcatcagtggatttcttttgatggggggaggagctttatttatttacctaacaa

SEQ ID NO: 763830 - DNA, 75 bp, synthetic construct
  source 1..75: mol_type = other DNA
ggcaatggatccaccatcaaaaaacgttgagcaatggcaaaccggtgaccaaagcactgttccgccagatgttgg

SEQ ID NO: 763831 - DNA, 75 bp, synthetic construct
  source 1..75: mol_type = other DNA
caccatcagctataccaatgaagcaggcaaaatttatcagctcaagcccaatccagcggttttgatttgtcgggt

SEQ ID NO: 763832 - DNA, 75 bp, synthetic construct
  source 1..75: mol_type = other DNA
gcacaggccatgcgtgccgctcaggcgaagtgggataagctgcaacggggtgtagcggagttctccatcagcctg

SEQ ID NO: 763833 - DNA, 75 bp, synthetic construct
  source 1..75: mol_type = other DNA
taaccaggtgctcaacaaagtaaaagcggataaatcgctggaagccaataacggtcacgatggcacatggattgc

SEQ ID NO: 763834 - DNA, 75 bp, synthetic construct
  source 1..75: mol_type = other DNA
acaacgcaataaacttctggcagcgcgcattcagcagcagcaggatatcgataacggaacgttgcctgattttat

SEQ ID NO: 763835 - DNA, 75 bp, synthetic construct
  source 1..75: mol_type = other DNA
cgttgggattacatcttcagctatatcaaaacgttgaaaaactatcccgatcgcgtcctgccagacagacaggca

SEQ ID NO: 763836 - DNA, 75 bp, synthetic construct
  source 1..75: mol_type = other DNA
ccatggtataacctatagtaaatggatgccattgctgggtaataatgcaacttttggcattcataagttttctat

SEQ ID NO: 763837 - DNA, 75 bp, synthetic construct
  source 1..75: mol_type = other DNA
attatggcttcttatttcctgtattttgtcgcgatccttgtttttgccagttatctctatgtcacgttacgcaat

SEQ ID NO: 763838 - DNA, 75 bp, synthetic construct
  source 1..75: mol_type = other DNA
aaggggcattcacagtggacgagattgaacacactggcgcaccggaccgcctgactatccgggcgcgaagtgctg

SEQ ID NO: 763839 - DNA, 75 bp, synthetic construct
  source 1..75: mol_type = other DNA
atctgttaccgcgatcggtatgcttctgcgcatgttggcggtattaatggggtcctcaattacctgtggtctggc

SEQ ID NO: 763840 - DNA, 75 bp, synthetic construct
  source 1..75: mol_type = other DNA
tttatcttttcagtatttcttgttttgcaggtcaatactttgcgctcggtttattcctgtttgctctcttgatct

SEQ ID NO: 763841 - DNA, 75 bp, synthetic construct
  source 1..75: mol_type = other DNA
atctgttaccgcgatcggtatgcttctgcgcatgttggcgttattaatgggggcctcaattacctgtggtctggc

SEQ ID NO: 763842 - DNA, 75 bp, synthetic construct
  source 1..75: mol_type = other DNA
atgccaacagttctctctcgcatggtgatgcaactcaaaaaagcaacctggataattcccgtcttcatggtttcg

SEQ ID NO: 763843 - DNA, 75 bp, synthetic construct
  source 1..75: mol_type = other DNA
acagcgtcaggctgtcggtgtggtcgaaacctggagtgtggcagcctgcattgatgctgccgattgcgctgttaa

SEQ ID NO: 763844 - DNA, 75 bp, synthetic construct
  source 1..75: mol_type = other DNA
ggcgcggtgcaacaggccatcaacagcggtgcttcccttgctggtgaaatgctggtcgacagtcttgtcctgccg

SEQ ID NO: 763845 - DNA, 75 bp, synthetic construct
  source 1..75: mol_type = other DNA
accggagataatcgatgtcaaaaccccgatggaccattgaacagaaaaggcagcacgttgctgcctggcgcgcca

SEQ ID NO: 763846 - DNA, 75 bp, synthetic construct
  source 1..75: mol_type = other DNA
caggtgaaagggcatgacctggcaaaatgggtataccaggaagaacccgaagatgctcagagtaacgcaataact

SEQ ID NO: 763847 - DNA, 75 bp, synthetic construct
  source 1..75: mol_type = other DNA
taccatgcttaacgggccgaaattcgtactcaccgattatcagttatcccgcgacgatgctgccccttcattcct

SEQ ID NO: 763848 - DNA, 75 bp, synthetic construct
  source 1..75: mol_type = other DNA
tatcgactggttaagcaaagggttaattaatcctgataaattaattacccatacatttgattatctgcatgttgc

SEQ ID NO: 763849 - DNA, 75 bp, synthetic construct
  source 1..75: mol_type = other DNA
gccgatcgcattgatgaacgactggaaaaagcgaaagagagcggggcagactgggcgattaataacagccagaca

SEQ ID NO: 763850 - DNA, 75 bp, synthetic construct
  source 1..75: mol_type = other DNA
cgtaggtgaaggtgtggataacgccagagttggcgaacgtgttgcggtagatcccgtagtcagctgcggacattg

SEQ ID NO: 763851 - DNA, 75 bp, synthetic construct
  source 1..75: mol_type = other DNA
ctctcatggatagatggccgtggatcaacctgtcaaaaccaccaagtccgacccactgggcttgtgtgaaccgtt

SEQ ID NO: 763852 - DNA, 75 bp, synthetic construct
  source 1..75: mol_type = other DNA
tagatggcacgttactttctcccgaccatacgttatccccttacgccaaagaaaccctgaagctgctcaccgcgc

SEQ ID NO: 763853 - DNA, 75 bp, synthetic construct
  source 1..75: mol_type = other DNA
tcaaaacccactttacagcgaccattcccgactgctccgctcttcttttgccgatatccttaaccatgccgataa

SEQ ID NO: 763854 - DNA, 75 bp, synthetic construct
  source 1..75: mol_type = other DNA
gcggataaatcgctggaagccaataacggtcacgatggcacatggatcgctcacccgggccttgctgatacggca

SEQ ID NO: 763855 - DNA, 75 bp, synthetic construct
  source 1..75: mol_type = other DNA
tttactgcatgaactggtgcaggcgcattatcccggcgacgtggtgtttaccactgctgccagcgatatggaaac

SEQ ID NO: 763856 - DNA, 75 bp, synthetic construct
  source 1..75: mol_type = other DNA
tggtggttaacgatctccagaccctgaaagacacaaaattcccggaattaagctggaaggtagacgacaaaaaag

SEQ ID NO: 763857 - DNA, 75 bp, synthetic construct
  source 1..75: mol_type = other DNA
agcgtgattccactggcaccgggccatgcctacgggatgtttatggaacgctttaacgaattatcggagttacgc

SEQ ID NO: 763858 - DNA, 75 bp, synthetic construct
  source 1..75: mol_type = other DNA
atccgtgagaaatacgggttacccccggttatgagcacgcctgtgaaatatgccgatctcatcatgctggcaacc

SEQ ID NO: 763859 - DNA, 75 bp, synthetic construct
  source 1..75: mol_type = other DNA
atccgtgagaaatacgggttacccccagttatgagtacgcccgtgaaatatgccgatctcatcatgctggcaacc

SEQ ID NO: 763860 - DNA, 75 bp, synthetic construct
  source 1..75: mol_type = other DNA
cgcccgtgaaatatgccgatctcatcatgctggcaaccgaacgccgcgatctcgggcttgatgatggctctttct

SEQ ID NO: 763861 - DNA, 75 bp, synthetic construct
  source 1..75: mol_type = other DNA
gcccagtcaggtcaaatccctaaactggttacccaggtggaaaaaattacttttagcgccgcctacgcacagcaa

SEQ ID NO: 763862 - DNA, 75 bp, synthetic construct
  source 1..75: mol_type = other DNA
gcaacgttagcctcgaagaagaagcgattgatatggatagctattcgatggcgctggcagcacacaacagcggcg

SEQ ID NO: 763863 - DNA, 75 bp, synthetic construct
  source 1..75: mol_type = other DNA
ttccgagcaaagatgaagagcgcaataaccaggtgctcgacaaagtaaaagcggataaatcgctggaagccaata

SEQ ID NO: 763864 - DNA, 75 bp, synthetic construct
  source 1..75: mol_type = other DNA
ccaaaaataccgcgcaaagcctgggcattaccgaccgcactgatgccgaacaaagcatcagcggcggcgcgcgtt

SEQ ID NO: 763865 - DNA, 75 bp, synthetic construct
  source 1..75: mol_type = other DNA
atggccttccgtccaattatcaagcacccacgcctgatggaaagtagcctgtttacgccgatggaggatgcatga

SEQ ID NO: 763866 - DNA, 75 bp, synthetic construct
  source 1..75: mol_type = other DNA
gcaaagtgtttgtacaggtgcgcgatgtactggaagctggcgccattgaacctcgcaaggtcaagctaccgggga

SEQ ID NO: 763867 - DNA, 75 bp, synthetic construct
  source 1..75: mol_type = other DNA
atcgttcaggtattaaagggtgtttataacgttaaaaatgtgattgtcaccgatcgcattgatgaacgactgaac

SEQ ID NO: 763868 - DNA, 75 bp, synthetic construct
  source 1..75: mol_type = other DNA
gtggcccatgaagatccgcaacgatgccaacagtaaatcgatgtggtggactgaatacggtggcggcgtgtatgc

SEQ ID NO: 763869 - DNA, 75 bp, synthetic construct
  source 1..75: mol_type = other DNA
catctgatgagtcagacgaaacagggattgtagcctgttccgcttatggtggtggcaagaatgctcagtattctg

SEQ ID NO: 763870 - DNA, 75 bp, synthetic construct
  source 1..75: mol_type = other DNA
taaccgcagcgcaccggatgcagataacgcaggacaagatccgcacggtgatagccatcgaccctgcgacaacgt

SEQ ID NO: 763871 - DNA, 75 bp, synthetic construct
  source 1..75: mol_type = other DNA
gccacactacgcaatgcagggttcaaaggccgcattgttaaggtgcacgcaagcaaaggtaaattcgcccgtgcc

SEQ ID NO: 763872 - DNA, 75 bp, synthetic construct
  source 1..75: mol_type = other DNA
caggatttaacggcgcgttaatcatcgacgacccattaaagcccgccgacgcttactctgacgtggtgagaaagc

SEQ ID NO: 763873 - DNA, 75 bp, synthetic construct
  source 1..75: mol_type = other DNA
tatggtgtggggcatcactgaattgagtcagcctcaagctataggccttatgttacctaagcgcctgcgcggatt

SEQ ID NO: 763874 - DNA, 75 bp, synthetic construct
  source 1..75: mol_type = other DNA
ggatagcggcctttagcggtgaagcttgtcctcatagcggggagtggtcgatttttgtagaaggtagacaagcga

SEQ ID NO: 763875 - DNA, 75 bp, synthetic construct
  source 1..75: mol_type = other DNA
ctgatatgctcggccttagcgaaggtgaactggcttatcatatcaacaacaatattttatttaaggggtacgagt

SEQ ID NO: 763876 - DNA, 75 bp, synthetic construct
  source 1..75: mol_type = other DNA
agcggtgactttcttgatatttcttccaactccgaagaaaaagaaatcaacaacaacgggatcaccgttaacgtt

SEQ ID NO: 763877 - DNA, 75 bp, synthetic construct
  source 1..75: mol_type = other DNA
tgccagtgaagatcgacaacagcgttgactaccgggatttgtatcctgaaaacgagttcgccatccctattcctc

SEQ ID NO: 763878 - DNA, 75 bp, synthetic construct
  source 1..75: mol_type = other DNA
cttatttctcgcaatgacgaatggtgtttcgattacatcaccgacttcagttatatgggagtggtttatcctgaa

SEQ ID NO: 763879 - DNA, 75 bp, synthetic construct
  source 1..75: mol_type = other DNA
gatgatgcaacacgcgcagaatctggagttcgaagaagcggcgcaaattcgtgaccagttgcatcagttgcgtga

SEQ ID NO: 763880 - DNA, 75 bp, synthetic construct
  source 1..75: mol_type = other DNA
aagttaacaccaactacaacgatacgcttgcttcacgtctggctgtgcaaacaacgccagttatcgtcattatgc

SEQ ID NO: 763881 - DNA, 75 bp, synthetic construct
  source 1..75: mol_type = other DNA
gctgtttttcctcgccgggttgcagagcattccggcctcgacgcgggaagcggcgctgatggagggggctacccg

SEQ ID NO: 763882 - DNA, 75 bp, synthetic construct
  source 1..75: mol_type = other DNA
ctggggcgttcggtgtatgacagcctgtttgatacccgcatggccaacgcgcaatacgtcgggctggataacttt

SEQ ID NO: 763883 - DNA, 75 bp, synthetic construct
  source 1..75: mol_type = other DNA
attgaacctgtggtgcgtccacctcgtcgcggttgggactttgatcgtgaaagcgccattgttgccgccgccgca

SEQ ID NO: 763884 - DNA, 75 bp, synthetic construct
  source 1..75: mol_type = other DNA
ggcagtgctatgcgccacggaagcagttcgctgacccggttgaccggccagtctgctatgacgccaggcacatgg

SEQ ID NO: 763885 - DNA, 75 bp, synthetic construct
  source 1..75: mol_type = other DNA
ctatccgtgctctataggtaaaccgaacgtttgtacgacactcgctgtattaggtgtgcacgctgacggtggttt

SEQ ID NO: 763886 - DNA, 75 bp, synthetic construct
  source 1..75: mol_type = other DNA
cgagacaattaaatcacgactggcgatcgagacgacgccgatgattgtcatcatgcagcggatccactaccacga

SEQ ID NO: 763887 - DNA, 75 bp, synthetic construct
  source 1..75: mol_type = other DNA
tttgaactggaagcaatgctggaaaaacgtgtaaaacgtcagctgcttgatgaagtgcagtctatttgcccgccg

SEQ ID NO: 763888 - DNA, 75 bp, synthetic construct
  source 1..75: mol_type = other DNA
gttgcataagcatagtgataaagatgaatcaactcttaaatcacatcgccgaacattcgaagctcaatatatgca

SEQ ID NO: 763889 - DNA, 75 bp, synthetic construct
  source 1..75: mol_type = other DNA
tggtgcacaagatccacaaactatgctgcgcgatgtctctgttcctcgtttacaacggttggcagaaattgtcga

SEQ ID NO: 763890 - DNA, 75 bp, synthetic construct
  source 1..75: mol_type = other DNA
ttttatcttcaggcagaaaactacgtttgcagcttcatgaaaaaatacgctgttggctatgatggcggctgctgg

SEQ ID NO: 763891 - DNA, 75 bp, synthetic construct
  source 1..75: mol_type = other DNA
atgttaaagttagtgaaagtacgtcagtacaatcgctatcgtttcggtaagtgggagacggtgtgtgaacaccgt

SEQ ID NO: 763892 - DNA, 75 bp, synthetic construct
  source 1..75: mol_type = other DNA
agcaacgtgtaaaagaattccactcagaaaaattttttcactcactccggagcacaacagcctttgctggcagaa

SEQ ID NO: 763893 - DNA, 75 bp, synthetic construct
  source 1..75: mol_type = other DNA
accccgaaaggcagtgtggaacaacatacccgacattatgtgtacgcttccgatgaccgttctgaccctaacttc

SEQ ID NO: 763894 - DNA, 75 bp, synthetic construct
  source 1..75: mol_type = other DNA
gcggccctggttgaccgctatcagccgcattcattttcagagcatctggcctggtccacgcatgatgatattttt

SEQ ID NO: 763895 - DNA, 75 bp, synthetic construct
  source 1..75: mol_type = other DNA
ctcgatcaattcgagttttacagcggtggcggcatcgacattactttcctcggcatgggcgagatggatcagcac

SEQ ID NO: 763896 - DNA, 75 bp, synthetic construct
  source 1..75: mol_type = other DNA
tttcctgcaaaccggacaccctcgcgacctgacgctaatccactcgctgggtattggcgatcgcgactgcaaagg

SEQ ID NO: 763897 - DNA, 75 bp, synthetic construct
  source 1..75: mol_type = other DNA
atacccggcattatgtttatgcttcagatgatgggtttgatcctaacttctacaccaagaaagctgacaccacac

SEQ ID NO: 763898 - DNA, 75 bp, synthetic construct
  source 1..75: mol_type = other DNA
ccgattttccatgctgattcttatggttaccgaccaggcaaatcagctcatgacgctctgaaacaatgtgccatc

SEQ ID NO: 763899 - DNA, 75 bp, synthetic construct
  source 1..75: mol_type = other DNA
aagttctggtccagaaatttcaactatcgactgtggagtgcaatgcagtcacgtctgctcaagtggatgcagtct

SEQ ID NO: 763900 - DNA, 75 bp, synthetic construct
  source 1..75: mol_type = other DNA
cagagcatcagcggtggcgtgcgttatttgcaggatatgatgagtaaagtgccggaaagtgtgccggagaacgaa

SEQ ID NO: 763901 - DNA, 75 bp, synthetic construct
  source 1..75: mol_type = other DNA
tacaccaaagaaacactcctgcgtgtgtgcagccacatagatcaggtccaggagaagctgaagcgtccgattttg

SEQ ID NO: 763902 - DNA, 75 bp, synthetic construct
  source 1..75: mol_type = other DNA
gctaacttgttccttcactatgcatttgatttgtggatggaaagagaatatcgggggtaccgtttgagaggtatg

SEQ ID NO: 763903 - DNA, 75 bp, synthetic construct
  source 1..75: mol_type = other DNA
caaaagcactggtctgggcatcatatctggatgtgcgtcgcaacaagggagcccccggatgcaacggacagactt

SEQ ID NO: 763904 - DNA, 75 bp, synthetic construct
  source 1..75: mol_type = other DNA
ttctggttgatggcatcgttgaacaccgcgaacaaccgcaaacctatcttggcggttacgacctgaccatcagcg

SEQ ID NO: 763905 - DNA, 75 bp, synthetic construct
  source 1..75: mol_type = other DNA
gatttaataaaacgaccgtggcagtcgctaacaaaaacgcgagaacaatctggtcgatgctgagaaatgagaccg

SEQ ID NO: 763906 - DNA, 75 bp, synthetic construct
  source 1..75: mol_type = other DNA
ggctaacgatggcgagctgattgtgcttggcggtctgatggacgaccaggcgggagaaagcgtggcgaaagtgcc

SEQ ID NO: 763907 - DNA, 75 bp, synthetic construct
  source 1..75: mol_type = other DNA
cctattggcacgctgggtgcagccatttctcaggcaaaaccgcagaaaggctcgacggtaatcagtgaaaacggc

SEQ ID NO: 763908 - DNA, 75 bp, synthetic construct
  source 1..75: mol_type = other DNA
agcgaagcggagttccgttgggagcacaatcaggatgcgatggcggtagaaaaactgtctgaaggcatccgcctg

SEQ ID NO: 763909 - DNA, 75 bp, synthetic construct
  source 1..75: mol_type = other DNA
accttaatttccgtgttcacgcttagcggccccggcccgctttccttgctgcgtcgccaggtgaatgaagtcgct

SEQ ID NO: 763910 - DNA, 75 bp, synthetic construct
  source 1..75: mol_type = other DNA
ggtcatgatttcaagaacggacgtcagtttagtgcctggctggggctaacaccaagacaacaaagttccgggggg

SEQ ID NO: 763911 - DNA, 75 bp, synthetic construct
  source 1..75: mol_type = other DNA
gaaaaaagtcggcatcatgctgaaagtcacgccgcagattaacgaaggtaacgcggtacagatggtgattgagca

SEQ ID NO: 763912 - DNA, 75 bp, synthetic construct
  source 1..75: mol_type = other DNA
tggttacccaggtggaaaaaattacttttagcgccgcatacgcacagcaaagcagtcaggaagtgctgtatatca

SEQ ID NO: 763913 - DNA, 75 bp, synthetic construct
  source 1..75: mol_type = other DNA
gtattccagttaacggcagaaggcgttgaattaattgaaatcgcgccgggtgtggagattgagcgcgacattctg

SEQ ID NO: 763914 - DNA, 75 bp, synthetic construct
  source 1..75: mol_type = other DNA
gcagtttgctaacggtacgcagatccctattggtacgctgggcgcagcgatttctcagaagcaaaaccgcagaaa

SEQ ID NO: 763915 - DNA, 75 bp, synthetic construct
  source 1..75: mol_type = other DNA
cctattggcacgctgggtgcagccatttctcaggcgaaaccgcagaaaggctccacggtgatcagtgaaaacggc

SEQ ID NO: 763916 - DNA, 75 bp, synthetic construct
  source 1..75: mol_type = other DNA
ggtgtttatccgcccgaccattctgcgtgacggtatggcggcagacggcgtgtcgcagcgcaaatataactacat

SEQ ID NO: 763917 - DNA, 75 bp, synthetic construct
  source 1..75: mol_type = other DNA
aaaaagccattcttcgttatgccgtggaaaagttgaattcttgtctggagattatgatccagcctgcagatatga

SEQ ID NO: 763918 - DNA, 75 bp, synthetic construct
  source 1..75: mol_type = other DNA
tctgtcgctttgccggccatctttcgcacttctacagggtcgcccaacatgcggtcctttgcagccagctcgtgc

SEQ ID NO: 763919 - DNA, 75 bp, synthetic construct
  source 1..75: mol_type = other DNA
tctgtcgctttgccggccatctttcgcacttctacagggtcgcccaacatgcggttctttgcagccagcttgtgc

SEQ ID NO: 763920 - DNA, 75 bp, synthetic construct
  source 1..75: mol_type = other DNA
tctgtcgctttgccggccatctttcgcacttctacagggtcgcccaacatgcggtactttgcagccagctagtgc

SEQ ID NO: 763921 - DNA, 75 bp, synthetic construct
  source 1..75: mol_type = other DNA
tcgcccaacatgcggttctttgcagccagctggtgccgcaggaatttgcttttgaagcgttaatgcatgatgcaa

SEQ ID NO: 763922 - DNA, 75 bp, synthetic construct
  source 1..75: mol_type = other DNA
tctgtcgctttgcgggccatctttcgcacttctacagggtcgcccaacatgcggtgctttgcagccagctcgtgc

SEQ ID NO: 763923 - DNA, 75 bp, synthetic construct
  source 1..75: mol_type = other DNA
tctgtcgctttgccggccatctttcgcacttctacagggtcgcccaacatgcggtgctttgcagccagctggtgc

SEQ ID NO: 763924 - DNA, 75 bp, synthetic construct
  source 1..75: mol_type = other DNA
gatatcgcagtttccctttcaaatatctgtcgctttgcaggacatctttcacacttctacagtgtcgcccagcat

SEQ ID NO: 763925 - DNA, 75 bp, synthetic construct
  source 1..75: mol_type = other DNA
gcgccatgattgtcgccgccgatgagttcattcctggcaacggtattccggtagatagcgtggtcattgaccgca

SEQ ID NO: 763926 - DNA, 75 bp, synthetic construct
  source 1..75: mol_type = other DNA
ggaaacatttttattatgacaagataaataaagacgacatcgatattaacgatatcgcggtttccctttcaaata

SEQ ID NO: 763927 - DNA, 75 bp, synthetic construct
  source 1..75: mol_type = other DNA
tctgtcgctttgcaggccatctttcgcacttctacagggtcgcccaacatgcggtactttgcagccagctcgtgc

SEQ ID NO: 763928 - DNA, 75 bp, synthetic construct
  source 1..75: mol_type = other DNA
gaagttattcctctggctcctggccatgcctacgggctgtttatggagcgttttaaagagctgcataagatacat

SEQ ID NO: 763929 - DNA, 75 bp, synthetic construct
  source 1..75: mol_type = other DNA
tgccaggatattcccgctccactgaaacgccttcttcctgactataaacggatggaagaaaaaattgacgccgta

SEQ ID NO: 763930 - DNA, 75 bp, synthetic construct
  source 1..75: mol_type = other DNA
ctcccgggctgaagaaaatacctttactgccagctttaaagatacagatttgaaatcattcatcgaaaccgtcgg

SEQ ID NO: 763931 - DNA, 75 bp, synthetic construct
  source 1..75: mol_type = other DNA
cagtgaaattacgcaagattcgctggtgcaggggctgggtaaagagttgcctgcggcgctggctccgatggcgaa

SEQ ID NO: 763932 - DNA, 75 bp, synthetic construct
  source 1..75: mol_type = other DNA
ttcgtaacgggcttgacgttgtgcgtatgatcgcactcggtgccgataccgtactgctgggccgtgctttcctgt

SEQ ID NO: 763933 - DNA, 75 bp, synthetic construct
  source 1..75: mol_type = other DNA
tattgcggatgcggtaaaaggcgatattgcgattctggcggatagcggtattcgtaacgggctggacgtggtgcg

SEQ ID NO: 763934 - DNA, 75 bp, synthetic construct
  source 1..75: mol_type = other DNA
ctgatactgcggggcagtaacgacttcagcaccattgtcaacgccaagattattggccgtttttcgccattttta

SEQ ID NO: 763935 - DNA, 75 bp, synthetic construct
  source 1..75: mol_type = other DNA
tagcgaaattacgcaagattcgctggtgcaggggctgggtaaagagttgccggcggcattggctccgatggcgaa

SEQ ID NO: 763936 - DNA, 75 bp, synthetic construct
  source 1..75: mol_type = other DNA
tgcgcattctgggatgagcggcccgaacgcggcaatgcgccgctatttgcaggcggtgacgcatccgcaatgggc

SEQ ID NO: 763937 - DNA, 75 bp, synthetic construct
  source 1..75: mol_type = other DNA
gtgttatcgtcagtgcagatcccgccacacgggacaaaatacgccgtctgatccgtcgcctggactcagaaatgg

SEQ ID NO: 763938 - DNA, 75 bp, synthetic construct
  source 1..75: mol_type = other DNA
acttcggtgtgcagtggatgtcaaaagataccgggtttatgcagtttgccaacggtacacagatcccgattggtt

SEQ ID NO: 763939 - DNA, 75 bp, synthetic construct
  source 1..75: mol_type = other DNA
caatgaacgtcagtattatcagttgttccttaatttgctggaagcccaggggtatgccgtcgtacccgtggagaa

SEQ ID NO: 763940 - DNA, 75 bp, synthetic construct
  source 1..75: mol_type = other DNA
ttcgtggcctctcttcctcccttaccaagcaggatctgatgcaactggaagagggctttgaatatcgtatcattg

SEQ ID NO: 763941 - DNA, 75 bp, synthetic construct
  source 1..75: mol_type = other DNA
caaagagtggggcattggtatcagcatttacaccgaggggaaacatcaagagtcctgcatcttcttacctgaatt

SEQ ID NO: 763942 - DNA, 75 bp, synthetic construct
  source 1..75: mol_type = other DNA
catctaccagggcatgtgctaatttcagaggaattagcccctttaggagatattgagtggaatcccaaaggttct

SEQ ID NO: 763943 - DNA, 75 bp, synthetic construct
  source 1..75: mol_type = other DNA
gcgcgtgccgcctttttcccgtccatcacgctgaccagcgggctttcggcaagcagcacggaattatccagcctc

SEQ ID NO: 763944 - DNA, 75 bp, synthetic construct
  source 1..75: mol_type = other DNA
agtgcttttattttctttccattgatgatatcgttttctatattcagtaacaatattattgtttttctgataggc

SEQ ID NO: 763945 - DNA, 75 bp, synthetic construct
  source 1..75: mol_type = other DNA
acttggaaaaaaattctgataaattaagaacaggggttagatggagcgctattgagagaattattactcaaatag

SEQ ID NO: 763946 - DNA, 75 bp, synthetic construct
  source 1..75: mol_type = other DNA
caaagaacgtttcatggtctggaggcaaagcagcggcatcagaaccgcgacattgagctgttgccagcgaaagcc

SEQ ID NO: 763947 - DNA, 75 bp, synthetic construct
  source 1..75: mol_type = other DNA
gttgttctcgacaagctcaagcccaaggcccggaaagacgggacgatggcgtacagcaccatcgacggcggcatg

SEQ ID NO: 763948 - DNA, 75 bp, synthetic construct
  source 1..75: mol_type = other DNA
ctgaccacctgcatgtgcatgtggccatcaacaaggttcatccgaccggcctacagaacatcgaaccttattacg

SEQ ID NO: 763949 - DNA, 75 bp, synthetic construct
  source 1..75: mol_type = other DNA
aggttgaagaggcccgagcccagttcaacgtcacggatgcagatcgttatccccagctgaatgcctcatccggga

SEQ ID NO: 763950 - DNA, 75 bp, synthetic construct
  source 1..75: mol_type = other DNA
gataaggcgaaggaagccatatctcaggcaaagagccaatatgaccattacaaaagcatcatgcagggcaatgat

SEQ ID NO: 763951 - DNA, 75 bp, synthetic construct
  source 1..75: mol_type = other DNA
aaaccgtttttgtccagcacagtaaatatccaactaaaccaatggagttcgctgtatttaccgccagtattcaat

SEQ ID NO: 763952 - DNA, 75 bp, synthetic construct
  source 1..75: mol_type = other DNA
taaatttaattttgctctgtccgcactgcgagcaggcttataacgcctttattcccactatggaattaaccccgg

SEQ ID NO: 763953 - DNA, 75 bp, synthetic construct
  source 1..75: mol_type = other DNA
ggctaatgctaatattggtgctgcgcgtgcggcatttttcccgtctatcagcctgaccagcggaatatcaaccgc

SEQ ID NO: 763954 - DNA, 75 bp, synthetic construct
  source 1..75: mol_type = other DNA
cagcctgcaaagagttaaattaccggcgggattgtcgtcgcaaatcttattgcagcgcccggatattatggaagc

SEQ ID NO: 763955 - DNA, 75 bp, synthetic construct
  source 1..75: mol_type = other DNA
gcgtggaggcgcactccggcatcgagacactgaccgggtacgcggctcgcgagctggccccggcgatgcggcagg

SEQ ID NO: 763956 - DNA, 75 bp, synthetic construct
  source 1..75: mol_type = other DNA
aacaaaaagcaagcgtgccgctggcggattccgtgaggaggaagaacgggccgctaaccgcaataactggatgta

SEQ ID NO: 763957 - DNA, 75 bp, synthetic construct
  source 1..75: mol_type = other DNA
cacgaaagcgaaccgtaaggcgggcatgtatcgcgaacaggaagaacgggcagcacaccgtaacgactggatgta

SEQ ID NO: 763958 - DNA, 75 bp, synthetic construct
  source 1..75: mol_type = other DNA
aaggcgggcatgtatcgcgagcaggaagaacgggcggcacatcgtaacgactggatgtatggcgatgatgactga

SEQ ID NO: 763959 - DNA, 75 bp, synthetic construct
  source 1..75: mol_type = other DNA
tatcaaatagaactttggtaaaagttccttatttacgtgttgcaaacgtccaacgcggatatcttgatcttacgg

SEQ ID NO: 763960 - DNA, 75 bp, synthetic construct
  source 1..75: mol_type = other DNA
ggcgtgaaaatttatttcgtgctttacgtgagttgtttagcctgtttgagtacgcgccgacgatattaacatcgg

SEQ ID NO: 763961 - DNA, 75 bp, synthetic construct
  source 1..75: mol_type = other DNA
cgatgcgttttgaagaaatgaacgacgtcgaacgtgaacgactggtttgtgcaattgatgaattgcgtggggcat

SEQ ID NO: 763962 - DNA, 75 bp, synthetic construct
  source 1..75: mol_type = other DNA
acgacatcacccctgaactgctggcacattttgcggcgctggagaagcagtacaaccttccggcaaacacgctgt

SEQ ID NO: 763963 - DNA, 75 bp, synthetic construct
  source 1..75: mol_type = other DNA
gtgaacctggaaaagagcacgcagaacctgattgatgccttcgggcgactgaacagttcgtcgcagaaggtggtg

SEQ ID NO: 763964 - DNA, 75 bp, synthetic construct
  source 1..75: mol_type = other DNA
taatctttatgatgcttcgaaagcggcatacagcctggatgtgaacgcaaggaacgccggaatgagcgtgagtgc

SEQ ID NO: 763965 - DNA, 75 bp, synthetic construct
  source 1..75: mol_type = other DNA
agcaaaaaaaataatgagtaaactacatattttttataaactatgtgaagaattaaagaatcatatccaatccgc

SEQ ID NO: 763966 - DNA, 75 bp, synthetic construct
  source 1..75: mol_type = other DNA
tgcgggatgaaatcagtcgcggtttcagcgaaaacaaaatccggctggacattaacgtcaccaacaccgccacgg

SEQ ID NO: 763967 - DNA, 75 bp, synthetic construct
  source 1..75: mol_type = other DNA
ccatgacggagtcttccgggcgggcggatgctgtcgggccgctcacccgttacggcacggcaaaggggatgtttc

SEQ ID NO: 763968 - DNA, 75 bp, synthetic construct
  source 1..75: mol_type = other DNA
agccggatatggaggtgaactcgcagccatcggtgcgtgaagtccgttttggtgacggatattcgcagcgtatgg

SEQ ID NO: 763969 - DNA, 75 bp, synthetic construct
  source 1..75: mol_type = other DNA
gctacggctggcgtttttatcctccggcattctcgaattttttacctcgctgtcaattgctctggtggcggtcta

SEQ ID NO: 763970 - DNA, 75 bp, synthetic construct
  source 1..75: mol_type = other DNA
aacgggtgggttatcacgccgggcagcatatccgctttgccatccgccgtcaggttctcgaccgtctgcaacaag

SEQ ID NO: 763971 - DNA, 75 bp, synthetic construct
  source 1..75: mol_type = other DNA
ttctgccgtcactcattaccggctgcgccggtttcacctctccgccggagactgaaaacgcagccactgcactgg

SEQ ID NO: 763972 - DNA, 75 bp, synthetic construct
  source 1..75: mol_type = other DNA
tggataacgcgtgggtcagtgagtttctaccgctcctgccacaaggcgttgatacgcctgttggcgaccaggctg

SEQ ID NO: 763973 - DNA, 75 bp, synthetic construct
  source 1..75: mol_type = other DNA
ctgggttgggcaaaacccacaattaccggcagcaacactacgggataacgtactactggcgcgacctgatgccaa

SEQ ID NO: 763974 - DNA, 75 bp, synthetic construct
  source 1..75: mol_type = other DNA
accagaatcatggcgtaaacatctctcctgggttgggcaaaaacccacaattaccggcagcaacattacgggata

SEQ ID NO: 763975 - DNA, 75 bp, synthetic construct
  source 1..75: mol_type = other DNA
aaagaatgcatccccatcttagcgatgagcacattcgatgttgcgttgaagtgcttgctaccatggtggaaggta

SEQ ID NO: 763976 - DNA, 75 bp, synthetic construct
  source 1..75: mol_type = other DNA
tcccagtcgctgaactataacggaactgcgggggctaacttcggtgcatggcgtctgcgtgcggactatcagggc

SEQ ID NO: 763977 - DNA, 75 bp, synthetic construct
  source 1..75: mol_type = other DNA
cgcggcagttccggtaaaattgatttgtatggcattaagaaattacgtgagctgattctggaactggcagtgcgc

SEQ ID NO: 763978 - DNA, 75 bp, synthetic construct
  source 1..75: mol_type = other DNA
atacgcctatgttgcccgtcatgatggcggaaggggcgttttcatttagccagctctcgtggattgccagcggca

SEQ ID NO: 763979 - DNA, 75 bp, synthetic construct
  source 1..75: mol_type = other DNA
gaaatatatcaggatattgttagtggatttgcccctatatttccagacacctgttatcacttaacccattactgg

SEQ ID NO: 763980 - DNA, 75 bp, synthetic construct
  source 1..75: mol_type = other DNA
cggaagtccttgccttgcggaaatccttaaatgaagacgacgacgcgttgatgctggaagtggccgcagaagcaa

SEQ ID NO: 763981 - DNA, 75 bp, synthetic construct
  source 1..75: mol_type = other DNA
gcggcatattaataattgcccaggcctggttcatggcgcgtattctgcaacatgtgattatggagaatattcccc

SEQ ID NO: 763982 - DNA, 75 bp, synthetic construct
  source 1..75: mol_type = other DNA
aggcgtttctgtggacaccgccttatgcctggcggcagataaaggtgacctgtgccgcctggtcatcacgggttc

SEQ ID NO: 763983 - DNA, 75 bp, synthetic construct
  source 1..75: mol_type = other DNA
tgacctgtgccgcctggtcatcacgggttcgcatgctgggggttgaattcagtgcagagtttaagcaggtggtga

SEQ ID NO: 763984 - DNA, 75 bp, synthetic construct
  source 1..75: mol_type = other DNA
tgacctgtgccgcctggtcatcacgggttcgcatgctgtgggttgaattcagggccgagtttaagcaggtggtga

SEQ ID NO: 763985 - DNA, 75 bp, synthetic construct
  source 1..75: mol_type = other DNA
ctcccagcgcgcgcctgccgggctgaatgccaacctgaaaacgtacagcgtgacgatttctgtcccccgttggga

SEQ ID NO: 763986 - DNA, 75 bp, synthetic construct
  source 1..75: mol_type = other DNA
aacgtacagcgtgacgctttctgttccccgttgggaggccacggcgcttgagtcgtttctggctgagcacggggg

SEQ ID NO: 763987 - DNA, 75 bp, synthetic construct
  source 1..75: mol_type = other DNA
aaaatattatttatccagatctcatgatgaaaatacgaacaaatgataatctactacctgaatatgcttcgattt

SEQ ID NO: 763988 - DNA, 75 bp, synthetic construct
  source 1..75: mol_type = other DNA
agggacgggtgctgtacgactcgatggtccccgcagggccattcagtattcaggacctggacagttcagttcgcg

SEQ ID NO: 763989 - DNA, 75 bp, synthetic construct
  source 1..75: mol_type = other DNA
gttgaatgcactttccggtttcctctcatatcagggatcgctacgggtcaacggtatcgaattgcgcgatttatc

SEQ ID NO: 763990 - DNA, 75 bp, synthetic construct
  source 1..75: mol_type = other DNA
tgacctgtgccgcctggtcatcacgggttcgcatgctgtgggttgaattcagcgcggagtttaagcaggtggtga

SEQ ID NO: 763991 - DNA, 75 bp, synthetic construct
  source 1..75: mol_type = other DNA
tgacctgtgccgcctggtcatcacgggttcgcatgctgagggttgaattcagcgctgagtttaagcaggtggtga

SEQ ID NO: 763992 - DNA, 75 bp, synthetic construct
  source 1..75: mol_type = other DNA
ggaggaggcccgacatctggaggcattcctggcagagcacggtggctggaaggcgtttctgtggacaccgcctta

SEQ ID NO: 763993 - DNA, 75 bp, synthetic construct
  source 1..75: mol_type = other DNA
gaaaatgatccggcagaaagatatccgggttgtggccgtcaacgttccgacaacctggctcgcatcgggtcacaa

SEQ ID NO: 763994 - DNA, 75 bp, synthetic construct
  source 1..75: mol_type = other DNA
gttgtggacagctttggtgcagatgatggctttatggcagggctgctttacagttttctggaaggaagtagtttc

SEQ ID NO: 763995 - DNA, 75 bp, synthetic construct
  source 1..75: mol_type = other DNA
catgtgcagcactgtcacgtgccagtgtaagcataaataacccaactctttccgttaataacgcgcaatatctgt

SEQ ID NO: 763996 - DNA, 75 bp, synthetic construct
  source 1..75: mol_type = other DNA
gctccccgcgtgcgattacgatcaactggaggccgcgtttaacgaactggtaaagcacccgaaagaccgacatca

SEQ ID NO: 763997 - DNA, 75 bp, synthetic construct
  source 1..75: mol_type = other DNA
aaggtgctagggtgcagccgtggcacaatcagtagcgcaataaaacgtaaatccgggctgaaatccagtagttag

SEQ ID NO: 763998 - DNA, 75 bp, synthetic construct
  source 1..75: mol_type = other DNA
tgctggctgctgtggctcgtcgtgattatgaacaacgccgggaacgtcaaaggcaggggattaataaagctcaaa

SEQ ID NO: 763999 - DNA, 75 bp, synthetic construct
  source 1..75: mol_type = other DNA
agccgattgggttaacccgggcgatgccgggaccgtctgcgggacgagttgattatcctgacgtgttcgaacggg

SEQ ID NO: 764000 - DNA, 75 bp, synthetic construct
  source 1..75: mol_type = other DNA
ccagcggcagtagtctcgccatcaacaacccgacgccgttctacattaccgtcagccgtatttcccgcgacggcg

SEQ ID NO: 764001 - DNA, 75 bp, synthetic construct
  source 1..75: mol_type = other DNA
gtttcatttttagttttgcggcccatgccaataatattattgttaacggtacccgctttatttatccaggaaatg

SEQ ID NO: 764002 - DNA, 75 bp, synthetic construct
  source 1..75: mol_type = other DNA
gccattaacgatatgctgctggatatgctggccgctgttgccagaagggactatgaacaacggcgggaacgccag

SEQ ID NO: 764003 - DNA, 75 bp, synthetic construct
  source 1..75: mol_type = other DNA
aaacaagggatagagaaagcaaagaaagacggcaaatataaagggcgtaaacctaatcaagccagacatgatgca

SEQ ID NO: 764004 - DNA, 75 bp, synthetic construct
  source 1..75: mol_type = other DNA
tgcaatggctggctaacatttctggccgcgatgacattgacgatatagacggcggtgaaattcgtgaactggcgc

SEQ ID NO: 764005 - DNA, 75 bp, synthetic construct
  source 1..75: mol_type = other DNA
ctcgattgctttatacgtgattgatatgggaaataaagatacttgtcgatatctacaagaaatattatcagagaa

SEQ ID NO: 764006 - DNA, 75 bp, synthetic construct
  source 1..75: mol_type = other DNA
gtagttacacccgactaggtttaaccgggtatctgttgagtagaggggttaaaaaagagaaatcaacgacattga

SEQ ID NO: 764007 - DNA, 75 bp, synthetic construct
  source 1..75: mol_type = other DNA
ggaagaattgggagtgggttgatgttggtatgggcatatcgaagccaatgccattagatccactgcctggggtta

SEQ ID NO: 764008 - DNA, 75 bp, synthetic construct
  source 1..75: mol_type = other DNA
gattcacaacccacggccatcagtacgaagtcgacgaaagcctgattgatcagggcatgacacgccgggattcac

SEQ ID NO: 764009 - DNA, 75 bp, synthetic construct
  source 1..75: mol_type = other DNA
ggagtatgaaactcatttctgccgttttctgatgccaaccattcgcggagccgataccggcagtaaaaagcgcta

SEQ ID NO: 764010 - DNA, 75 bp, synthetic construct
  source 1..75: mol_type = other DNA
acgcctggtttgcgactcacgatcctgatgtgatcatcggctggaacgtggtgcagttcgatctgcgaatgctgc

SEQ ID NO: 764011 - DNA, 75 bp, synthetic construct
  source 1..75: mol_type = other DNA
gcgacggacaacgggccgttgcaggttacgcttgcaccgcaagagtccgtggcgtttattcccgccgatcaggtt

SEQ ID NO: 764012 - DNA, 75 bp, synthetic construct
  source 1..75: mol_type = other DNA
aaagccaccggctggctgaaacgctatggcgcagtcacactattacttagctggatgccagtggttggcgattta

SEQ ID NO: 764013 - DNA, 75 bp, synthetic construct
  source 1..75: mol_type = other DNA
gaagtcgtgctggtggcaatgttgctttccggaatcagtcatccctgggttttagttttaacagcaacaatgggt

SEQ ID NO: 764014 - DNA, 75 bp, synthetic construct
  source 1..75: mol_type = other DNA
tctaattcaatgagatttgaaaaaatgtgggggataggtgacgcaaaaaagcaacattttgacccaaaatgtaaa

SEQ ID NO: 764015 - DNA, 75 bp, synthetic construct
  source 1..75: mol_type = other DNA
atgatccaggaatcaaccgttatcagattcacagccaacggccgtcagtacgaggtagacgaaagcctgattgac

SEQ ID NO: 764016 - DNA, 75 bp, synthetic construct
  source 1..75: mol_type = other DNA
tgccggagcgttggccactggtagtgtagctctcttacctggcggtgctcaggccatgtggggattaggggcagg

SEQ ID NO: 764017 - DNA, 75 bp, synthetic construct
  source 1..75: mol_type = other DNA
accaccatcggaaaatgatcctaagcagcaaaatgaaaaaactgtagataagcttaatcagaagcaagaaagtgc

SEQ ID NO: 764018 - DNA, 75 bp, synthetic construct
  source 1..75: mol_type = other DNA
cggcagtaacgtcggtctggcaaaagataaagagacgctgtggtggctgaacattctggagatcccgccggtgga

SEQ ID NO: 764019 - DNA, 75 bp, synthetic construct
  source 1..75: mol_type = other DNA
aatcagatgatggaacgcgaacggctaacggtttgctttcatgcgcagttaaaacagcgtcacgcaacgatgcgt

SEQ ID NO: 764020 - DNA, 75 bp, synthetic construct
  source 1..75: mol_type = other DNA
atgacagtgatgacgctcaatctcgttgaaaaacagccagcaactatgcgtcggataattggtaagcatcttgcc

SEQ ID NO: 764021 - DNA, 75 bp, synthetic construct
  source 1..75: mol_type = other DNA
gcggtatgcaaggctcacagatattacaaacaacgttatgtgcggccatcgatcgcacgctatggctatgtgaat

SEQ ID NO: 764022 - DNA, 75 bp, synthetic construct
  source 1..75: mol_type = other DNA
ctccatgcagccctggactgaagagttaaagcataaatcacatgcagagcttgaaaactgggctgtggcgcgcaa

SEQ ID NO: 764023 - DNA, 75 bp, synthetic construct
  source 1..75: mol_type = other DNA
taattctggtcggcaatttaggccaagatcctgaagtgcgttatatgccgaacggcggcgcggttgccaatatta

SEQ ID NO: 764024 - DNA, 75 bp, synthetic construct
  source 1..75: mol_type = other DNA
cattgcgtcatcgccatccggcaacactctccggcggggaaacccaacgcgtggtcatcgcttgtgctatcgcga

SEQ ID NO: 764025 - DNA, 75 bp, synthetic construct
  source 1..75: mol_type = other DNA
tgtggcgcgaatgcccgcaagaaattaacacgccagaattgctctcactggatgatgccgttacaggttgctatc

SEQ ID NO: 764026 - DNA, 75 bp, synthetic construct
  source 1..75: mol_type = other DNA
atgagcgagccgttaattgtcggcatccggcatcatagcccggcctgcgcccggctggtgaaatcgttaatcgaa

SEQ ID NO: 764027 - DNA, 75 bp, synthetic construct
  source 1..75: mol_type = other DNA
acctgcatttatcgccggtttcagcagccatttgaatcaactgagtgatgccaattttatcaatgccctgcccga

SEQ ID NO: 764028 - DNA, 75 bp, synthetic construct
  source 1..75: mol_type = other DNA
ggaatgcctgccccggtctggcaaagctggtgctggcagtggggcttacagcaggcgggagaacaactgctaaaa

SEQ ID NO: 764029 - DNA, 75 bp, synthetic construct
  source 1..75: mol_type = other DNA
attgaggccgcctgctttggtgccacactccaggaagccgcacgcaataaattagaagccgatatgctggacgcg

SEQ ID NO: 764030 - DNA, 75 bp, synthetic construct
  source 1..75: mol_type = other DNA
gtgacggattcggtaaacttgccccctctacgccacagccgcctctgccaaaagatgtcacctgcgaactggaac

SEQ ID NO: 764031 - DNA, 75 bp, synthetic construct
  source 1..75: mol_type = other DNA
aacaatgctttgactggtaacgagaaaataattagtctgccactaagtgtaatcgataaaaaatcttacctagca

SEQ ID NO: 764032 - DNA, 75 bp, synthetic construct
  source 1..75: mol_type = other DNA
catcggcggagaacgtatcctgccttcagtggggtttaaaacgtaatatcacgccatgcttcggcgctcgcctgg

SEQ ID NO: 764033 - DNA, 75 bp, synthetic construct
  source 1..75: mol_type = other DNA
tcaataggtaatcgctggcagattggtcatgaagatgaaatcttcgcgttctcgctctctaatagtattacgaat

SEQ ID NO: 764034 - DNA, 75 bp, synthetic construct
  source 1..75: mol_type = other DNA
gggaaaataaaaaaacaaaaaccgttgccgccaattagcgatgaggaaaaaccttttgaactgccggatgggtgg

SEQ ID NO: 764035 - DNA, 75 bp, synthetic construct
  source 1..75: mol_type = other DNA
ttgtacattgctcacgaaaccggacttgatcctgaaggggcttctaaggggcttcaaatggcttgcgaggctggt

SEQ ID NO: 764036 - DNA, 75 bp, synthetic construct
  source 1..75: mol_type = other DNA
agcattgcaatgatccagaggttaaaagcctttggcaaaagctattggaaaatccgacgtttgcttcaattgctt

SEQ ID NO: 764037 - DNA, 75 bp, synthetic construct
  source 1..75: mol_type = other DNA
tctggcgtgaatatccgcatcgggcagggtcaaacccgaagaaatccgcgttcaatgcctggagggccagattac

SEQ ID NO: 764038 - DNA, 75 bp, synthetic construct
  source 1..75: mol_type = other DNA
caatgggtgatggtgtgtatttcaaacccagaacaagaaagacaacgattatagaacctggcacattaaagaaat

SEQ ID NO: 764039 - DNA, 75 bp, synthetic construct
  source 1..75: mol_type = other DNA
taaaacgtattgaaaaaaacagtaacttcaattcaacaagacaacgtccaccgacacataccaataacgaaattc

SEQ ID NO: 764040 - DNA, 75 bp, synthetic construct
  source 1..75: mol_type = other DNA
ctatgtattatctatacagtctaaagcatcatctttgattgaaatgggtttaaaatctcatgaaaagctttgtag

SEQ ID NO: 764041 - DNA, 75 bp, synthetic construct
  source 1..75: mol_type = other DNA
agcgcgatatcacgccgcgcctgggaacacgtctggtgcaggagggcaaccagctgcactacctggctgaccggg

SEQ ID NO: 764042 - DNA, 75 bp, synthetic construct
  source 1..75: mol_type = other DNA
aaagagaaatggtggaaatgggtcaatgatggtggccttacaccagaagctaattgcttaaaattcccttaccca

SEQ ID NO: 764043 - DNA, 75 bp, synthetic construct
  source 1..75: mol_type = other DNA
tgaaacagaatcccctgaattaagcaatgaagaacaagaaataatcaaatcaatgccaggcgtttactttcgccc

SEQ ID NO: 764044 - DNA, 75 bp, synthetic construct
  source 1..75: mol_type = other DNA
cattaaaagcaagtcatgttggtgcgtttgccttagggaaaacaggaagcaccgttgcgaatgataaagcagttg

SEQ ID NO: 764045 - DNA, 75 bp, synthetic construct
  source 1..75: mol_type = other DNA
ctgaccggaacgccaacaacaccaactgcgcgacagggaacgaataatacccaaatcgcaagcacggcttatgtt

SEQ ID NO: 764046 - DNA, 75 bp, synthetic construct
  source 1..75: mol_type = other DNA
cagacagataaaatgcgaaaaaaaagctcgcactttcgtacgagctcttctttaaatatggcggtgaggggggga

SEQ ID NO: 764047 - DNA, 75 bp, synthetic construct
  source 1..75: mol_type = other DNA
attcggtttgaccgttctgacgatggcctttgctgttggtcatatttctggtggtcattttaacccggcggtcac

SEQ ID NO: 764048 - DNA, 75 bp, synthetic construct
  source 1..75: mol_type = other DNA
cgaatgccagaaatgggagagcgacaatgctatgtgttagcagctgactttaaaaacaactacccaccaaacatc

SEQ ID NO: 764049 - DNA, 75 bp, synthetic construct
  source 1..75: mol_type = other DNA
ttcgatatgattaaaaccgttggcgatggtgccagaggctccagcagttcgtttgtggctatcggtcaggttatt

SEQ ID NO: 764050 - DNA, 75 bp, synthetic construct
  source 1..75: mol_type = other DNA
tacaaattgtaaggatgtatccccaagaatctggggaggacaatgttgtcactatatctgcagatatggaacaat

SEQ ID NO: 764051 - DNA, 75 bp, synthetic construct
  source 1..75: mol_type = other DNA
gacacagggagctgtaagccattatctaaatggtcagacacctttaaatcttgaggctgttatcaagttcgcagg

SEQ ID NO: 764052 - DNA, 75 bp, synthetic construct
  source 1..75: mol_type = other DNA
aatgaaagagaaaaaggaaacgatggaagagacagttgcacgatggctagaagcgcagaaaggacgtcgcgccta

SEQ ID NO: 764053 - DNA, 75 bp, synthetic construct
  source 1..75: mol_type = other DNA
caaaggtggtgaaattcgcggcaaactgaacggtatcggctttgcccagaaactgaatctggaagttgatagcgc

SEQ ID NO: 764054 - DNA, 75 bp, synthetic construct
  source 1..75: mol_type = other DNA
tttgattcaacaacaaattgatgtattgatgaccggtcacgcatggcaacagcaatggatgttgactcgcctggg

SEQ ID NO: 764055 - DNA, 75 bp, synthetic construct
  source 1..75: mol_type = other DNA
acttcccggttcatcggctgaaggtctgccaggtgaaataaaacaacaactggaagagcttgaaagcgactggcg

SEQ ID NO: 764056 - DNA, 75 bp, synthetic construct
  source 1..75: mol_type = other DNA
gcgagcattcaccaggcggttattccatgctttccgcgctggtagttgaactggtattgagtgcaggtttcctgt

SEQ ID NO: 764057 - DNA, 75 bp, synthetic construct
  source 1..75: mol_type = other DNA
ctggataacctgtcacagcaaaaacttgttcacagagatgtgctgccgttctcgcttccggtaactccggatggt

SEQ ID NO: 764058 - DNA, 75 bp, synthetic construct
  source 1..75: mol_type = other DNA
ctggataacctgtcacagcaaaaacttgttcacaaagatgtgctgccgttctcgcttccggtgactccggatggt

SEQ ID NO: 764059 - DNA, 75 bp, synthetic construct
  source 1..75: mol_type = other DNA
aacgcggcaactctccggtaactccgggtggttggataagctgtagtgagcgaatgcccgctcaagatgattgga

SEQ ID NO: 764060 - DNA, 75 bp, synthetic construct
  source 1..75: mol_type = other DNA
cctctgtcgcgcctgcgctggcaatggcgatgctggcgattgttgcctggtcgctgtcggtcgtggatgtggcga

SEQ ID NO: 764061 - DNA, 75 bp, synthetic construct
  source 1..75: mol_type = other DNA
atgagcactatcactaaagaacgtatcgaattgttcattaaatacccgcttgaaaacgggcttacccgtggcgaa

SEQ ID NO: 764062 - DNA, 75 bp, synthetic construct
  source 1..75: mol_type = other DNA
tgattaaagaaatcaaagagcgcataggcagcctggacgttcgagacaatattgagcgccggtcgtatgaaattg

SEQ ID NO: 764063 - DNA, 75 bp, synthetic construct
  source 1..75: mol_type = other DNA
tggcatcactgaaacgcgaacagattcgccacgagcatgccaaatggtctgactccacatttggctgcgttggcc

SEQ ID NO: 764064 - DNA, 75 bp, synthetic construct
  source 1..75: mol_type = other DNA
ccgggcggttattccatgctttctgcactggtggttgaactggtactgagtgcgggtttcctgctggtgatccac

SEQ ID NO: 764065 - DNA, 75 bp, synthetic construct
  source 1..75: mol_type = other DNA
cattggttgttgaactggtattgagcgctggtttcttgctggtgatccacggtgcgaccgacaaattcgcgccgg

SEQ ID NO: 764066 - DNA, 75 bp, synthetic construct
  source 1..75: mol_type = other DNA
tgcacaacgccgtgctggcatcagcgatgctgaaattaccgctgctatggaagataaattgaagatcaacatgga

SEQ ID NO: 764067 - DNA, 75 bp, synthetic construct
  source 1..75: mol_type = other DNA
cgccagtggcctgaaccaaaagatggtgagcctcgcttgcacattaaagaacccggcaactctccgggaactccg

SEQ ID NO: 764068 - DNA, 75 bp, synthetic construct
  source 1..75: mol_type = other DNA
gatagcggcaaccatcctcaaactaatgaatatggtctgattagcaatgtaacccactggatgccgctaccagag

SEQ ID NO: 764069 - DNA, 75 bp, synthetic construct
  source 1..75: mol_type = other DNA
aacagaaatatcacagtacagaaatcgcagtgcaaagacaatttcacatcaaaagaaacagctctttgagaaact

SEQ ID NO: 764070 - DNA, 75 bp, synthetic construct
  source 1..75: mol_type = other DNA
caccatttcccgctgttgttaaacaaaaaagaagacctaatacctaagttgcgtctggcagcgcaagcggcataa

SEQ ID NO: 764071 - DNA, 75 bp, synthetic construct
  source 1..75: mol_type = other DNA
ggtggtggagctgagcgggcggcgtaataacggtgtgcctgtgtccctttcagtatcaacaggagcagagaatgg

SEQ ID NO: 764072 - DNA, 75 bp, synthetic construct
  source 1..75: mol_type = other DNA
gtagccgtcttgcccgtcgggaatatggctccctgctgtctgccctgattgaccagccacagaacccggcgctgc

SEQ ID NO: 764073 - DNA, 75 bp, synthetic construct
  source 1..75: mol_type = other DNA
acctgatttcgcaagagaagtttgatgttgatgcggcaatgaagaaagtctctgaactggaaacgctggtggcgc

SEQ ID NO: 764074 - DNA, 75 bp, synthetic construct
  source 1..75: mol_type = other DNA
aaagagcaacttcaggatgcaaacacaagctggatggtcgacgactcatttcccgagagcattatgcgagtacaa

SEQ ID NO: 764075 - DNA, 75 bp, synthetic construct
  source 1..75: mol_type = other DNA
tccacgagcgttatgcgattacaacgaaatggtcgatgaaatatttcagttaattgtaatcgcggggcgggtttg

SEQ ID NO: 764076 - DNA, 75 bp, synthetic construct
  source 1..75: mol_type = other DNA
atgacgctttatagcgggatgaacaataccagcggcaaagtcattactgatattgaccatctgcgccagtcggtg

SEQ ID NO: 764077 - DNA, 75 bp, synthetic construct
  source 1..75: mol_type = other DNA
atgaaatcccccgcaccttctcgcccgcaaaaaatggcgttaattccagcctgcatctttttgtgtttcgctgcg

SEQ ID NO: 764078 - DNA, 75 bp, synthetic construct
  source 1..75: mol_type = other DNA
ttcagcacacctatgaccgggagaaaaagctggtggagaaatatgatgtcagcaccaccggaacaggtggcggtg

SEQ ID NO: 764079 - DNA, 75 bp, synthetic construct
  source 1..75: mol_type = other DNA
tattgaccatctgcgccagtcggtgcgggacattttgctgacgccgcagggtagccgcattgcccgtcgtgaata

SEQ ID NO: 764080 - DNA, 75 bp, synthetic construct
  source 1..75: mol_type = other DNA
tggatctctgctgtcggctttaatagatcagccacaaaatccggcattacgcctgcaggtcatgtcggcagtgta

SEQ ID NO: 764081 - DNA, 75 bp, synthetic construct
  source 1..75: mol_type = other DNA
gcctgcaggtcatgtcggcagtgtatgtggcgctgagcgggcagcgtaataacggtgtgcctgtttccctttccg

SEQ ID NO: 764082 - DNA, 75 bp, synthetic construct
  source 1..75: mol_type = other DNA
ccagctggatggtcgacgactcatttccgcgagcgttacgcgagtacaacgaaatggtcgatgactataatagcc

SEQ ID NO: 764083 - DNA, 75 bp, synthetic construct
  source 1..75: mol_type = other DNA
tgatgccggtaaaacatttgctgccggacaatttccatattggcatcaacgtctcggcgggttgttttttggcag

SEQ ID NO: 764084 - DNA, 75 bp, synthetic construct
  source 1..75: mol_type = other DNA
cgtagtgcaaaaacaatttcacatcaaaagaaacaactgtacgaaaaactcggtattcagagtgatattaccttc

SEQ ID NO: 764085 - DNA, 75 bp, synthetic construct
  source 1..75: mol_type = other DNA
cgtaccagcgaactggacggtgctgtggtaacggatgaacaagtcaataaacttcaggcctactggggaatgcca

SEQ ID NO: 764086 - DNA, 75 bp, synthetic construct
  source 1..75: mol_type = other DNA
gcgttcactttttgcaagggtatttgttttctccgccggtaccgggtgagaaatttgtcactgaatgggttaaaa

SEQ ID NO: 764087 - DNA, 75 bp, synthetic construct
  source 1..75: mol_type = other DNA
gcgttcccggtcgattttattaagatcgataagtcgtttgtgcaaatggccagtgtggacgaaatctccggccat

SEQ ID NO: 764088 - DNA, 75 bp, synthetic construct
  source 1..75: mol_type = other DNA
ttctgcaagagttcggtacaacggttcatttgtcattgcccggtaacgtatccgagaaagagcgactgctactca

SEQ ID NO: 764089 - DNA, 75 bp, synthetic construct
  source 1..75: mol_type = other DNA
acgcagttccactctgctgactggtgctcagggtgacacctcaaccgcaaacaccagcggtaaaacgctgcttgg

SEQ ID NO: 764090 - DNA, 75 bp, synthetic construct
  source 1..75: mol_type = other DNA
gggcggtttaatctggcgcgactggttaggccttatcgaaacgggtaaatcagaaaacaatacggaacttcccgc

SEQ ID NO: 764091 - DNA, 75 bp, synthetic construct
  source 1..75: mol_type = other DNA
aacgtgatgccgcaggatgaagccgacttaccgctacccaaaaaatttgacgatctggttttcccctggcttggc

SEQ ID NO: 764092 - DNA, 75 bp, synthetic construct
  source 1..75: mol_type = other DNA
tttttgctggggctactacaaaccagctttgcgccaaaagatcatcgtcgttgggatgatatctgggaagacgga

SEQ ID NO: 764093 - DNA, 75 bp, synthetic construct
  source 1..75: mol_type = other DNA
ataccacgacagtcggcaactgcgatatttgcggtgagcagagcgacgcgctcctgagcctgatgacgaccaaaa

SEQ ID NO: 764094 - DNA, 75 bp, synthetic construct
  source 1..75: mol_type = other DNA
ccagtttggcccagattccccttcatttatgcaggattttgatgaattaaaagttaaggctattactattgcttc

SEQ ID NO: 764095 - DNA, 75 bp, synthetic construct
  source 1..75: mol_type = other DNA
tgtatggtattaagaaattgcgtgagctgattctggaactggcggtgcgcggtaaactggtgccgcaggatccga

SEQ ID NO: 764096 - DNA, 75 bp, synthetic construct
  source 1..75: mol_type = other DNA
tccttccgtcagggaggtgcgctttggtgatggctattcccagcgtgcgcctgccgggctgaacgctgacctgaa

SEQ ID NO: 764097 - DNA, 75 bp, synthetic construct
  source 1..75: mol_type = other DNA
ttcacttaattttagcaccgaggatattacaggtttgactccggccaactttcgaaagggagctttcttacatgc

SEQ ID NO: 764098 - DNA, 75 bp, synthetic construct
  source 1..75: mol_type = other DNA
atgaaaacctttcgctggaaagtgaaaccggatatggaggtgaactcgcagccatcggtgcgtgaagtgcgtttt

SEQ ID NO: 764099 - DNA, 75 bp, synthetic construct
  source 1..75: mol_type = other DNA
cggcagggctgaatgctgacctgaaaacatacagggtgacgctttccgtgacccgggaggaggcccggcatctgg

SEQ ID NO: 764100 - DNA, 75 bp, synthetic construct
  source 1..75: mol_type = other DNA
tgatattagtaaagagtcctggccatttaattatgtgacagaaacatgcagagaatccgatggtattacaacaac

SEQ ID NO: 764101 - DNA, 75 bp, synthetic construct
  source 1..75: mol_type = other DNA
ttatgaagagccctttcgatcctgttgaggactatacagttcatgaaataacattaggccctggttgcaatgttc

SEQ ID NO: 764102 - DNA, 75 bp, synthetic construct
  source 1..75: mol_type = other DNA
caggggtagcaaattcttccggattcgcccttgccgcattacttaatgctaatattgagttgggtaatgacccaa

SEQ ID NO: 764103 - DNA, 75 bp, synthetic construct
  source 1..75: mol_type = other DNA
gctgattctggaactggctgtgcgcggtaaactggtgccgcaggatccgaacgatgaaccggcgtcggagctgct

SEQ ID NO: 764104 - DNA, 75 bp, synthetic construct
  source 1..75: mol_type = other DNA
tgccacatcaagcccgacctgctgctgatctaccgcaagtccgacgccgacaccctgcgactggcgcggcttggc

SEQ ID NO: 764105 - DNA, 75 bp, synthetic construct
  source 1..75: mol_type = other DNA
atcctgttggccatgacactgggatgtctggaatatacccttgaagaaggagcgcgctggggatggctggatgat

SEQ ID NO: 764106 - DNA, 75 bp, synthetic construct
  source 1..75: mol_type = other DNA
cgcacatcagcaactggttgaaaccctgttgggaacgctgactgacagccaaaacgccgaggaactggctgaaaa

SEQ ID NO: 764107 - DNA, 75 bp, synthetic construct
  source 1..75: mol_type = other DNA
gtgatttcgcagcagggacgcatcctctatgactccaccgtgccggcaggtccgttcaccattcaggacctggac

SEQ ID NO: 764108 - DNA, 75 bp, synthetic construct
  source 1..75: mol_type = other DNA
ggtttccggtcgttcgcgtaactatgagcacaccatggaggggccggtctttgctgccggtgaggcatcctgggg

SEQ ID NO: 764109 - DNA, 75 bp, synthetic construct
  source 1..75: mol_type = other DNA
tgactgaggcgtcacaggaaaaagttacgtactggaataacggacaatgtgcggatttccgacagttatccggag

SEQ ID NO: 764110 - DNA, 75 bp, synthetic construct
  source 1..75: mol_type = other DNA
tgagaaggagctgtatacagccacattcaacaaaagcttcgaggactggaatacctcggtcaacctgcagtacag

SEQ ID NO: 764111 - DNA, 75 bp, synthetic construct
  source 1..75: mol_type = other DNA
gcggtgcaacgataaccgcaaaaggcgcggccctgcatgcagggggcatgaacggaggaacccggctgctggtag

SEQ ID NO: 764112 - DNA, 75 bp, synthetic construct
  source 1..75: mol_type = other DNA
acgtctgtccgtgccgtggggaaccggtacggccagctacagcggcagcatgagcaatgaccgttacaccaatac

SEQ ID NO: 764113 - DNA, 75 bp, synthetic construct
  source 1..75: mol_type = other DNA
tgatggtatttcaggattattgtttgactataacattaatgggacagtaaacaagccacaccaaacgggacaatc

SEQ ID NO: 764114 - DNA, 75 bp, synthetic construct
  source 1..75: mol_type = other DNA
tgatggtattccaggcttgttatttgactataacattaacggaacagtaaacaagccgcaccagggaggacaatc

SEQ ID NO: 764115 - DNA, 75 bp, synthetic construct
  source 1..75: mol_type = other DNA
ttaccgagcttggttcgttgctcgaccacaccgggccacacctggaagcggaagagtacatcgcgcggacttttg

SEQ ID NO: 764116 - DNA, 75 bp, synthetic construct
  source 1..75: mol_type = other DNA
gttttccactgacaacgcgggcattgcctacttaatttccggtatcggtttggggcgattgatcagtattttatt

SEQ ID NO: 764117 - DNA, 75 bp, synthetic construct
  source 1..75: mol_type = other DNA
ttatttgtcctgattacgctgatgctattgaaaagcaaattccccagtcagttggtggatgccagcgttgccaat

SEQ ID NO: 764118 - DNA, 75 bp, synthetic construct
  source 1..75: mol_type = other DNA
gtttcagtcatgtcagagttcttcccgaaaagcaaagccaaagtcaccagtatttatatgatgatgggtggtctg

SEQ ID NO: 764119 - DNA, 75 bp, synthetic construct
  source 1..75: mol_type = other DNA
ggattacaactaaatttatttatgaagagcccctccgatcctgtagaggactatactgtgcatgaaataacatta

SEQ ID NO: 764120 - DNA, 75 bp, synthetic construct
  source 1..75: mol_type = other DNA
atagctctctggttgaaccgctaatatgctccgcacgctataccggaagcacctttcggcgcggagatgcaacga

SEQ ID NO: 764121 - DNA, 75 bp, synthetic construct
  source 1..75: mol_type = other DNA
tcgcggaaacgtcaaccaactatccggtaattccggatggtttatccacggtatgcgctgaggcttatcaggttg

SEQ ID NO: 764122 - DNA, 75 bp, synthetic construct
  source 1..75: mol_type = other DNA
cgtggagttgagcgacggcactttatcgtggttagggaacgccttgtactggatgccgctaccagagcctccact

SEQ ID NO: 764123 - DNA, 75 bp, synthetic construct
  source 1..75: mol_type = other DNA
ggatgcacagcgccgtgctggtatcagtgatgctgaaattaccgctgctatggaaaataaattgaagatcaacat

SEQ ID NO: 764124 - DNA, 75 bp, synthetic construct
  source 1..75: mol_type = other DNA
tgattaaagaaatcaaagagcgtataggcagcctggacgtccgagacaatattgagcgtcgggcttatgaaatcg

SEQ ID NO: 764125 - DNA, 75 bp, synthetic construct
  source 1..75: mol_type = other DNA
atgccaaatggtctgactccacatttggctgcgttggcccccattggtccactgaaacacctctcaaaagaggct

SEQ ID NO: 764126 - DNA, 75 bp, synthetic construct
  source 1..75: mol_type = other DNA
ggccaaaatcttcttttacgtgaaatgcccgcttatgctgcgccctgcattgattgccttcgctgtcggattttc

SEQ ID NO: 764127 - DNA, 75 bp, synthetic construct
  source 1..75: mol_type = other DNA
cggcggcagcaacggtattctcgccgcccaggctttatggcaactgctgttaccgcttattatttttgccctgac

SEQ ID NO: 764128 - DNA, 75 bp, synthetic construct
  source 1..75: mol_type = other DNA
agaaagcggatttctgctgtggatcttagcggcagtattgagcgaaaaacggctgttgcagcaactcattgtgct

SEQ ID NO: 764129 - DNA, 75 bp, synthetic construct
  source 1..75: mol_type = other DNA
ggattcgctgggttacagccgttggcaatgtttgaactggctgctgttgccctccgttgctcctgcacttgcaat

SEQ ID NO: 764130 - DNA, 75 bp, synthetic construct
  source 1..75: mol_type = other DNA
attatggcgctgtggcctgggccgaaatggcagcgtatgtgcgcccgtctgccgtggctgctcgccattccccat

SEQ ID NO: 764131 - DNA, 75 bp, synthetic construct
  source 1..75: mol_type = other DNA
gacgctggcggtaattagctggcagtggttaacccagggcgacaccgatcaacagataaaaggcgcacttgccag

SEQ ID NO: 764132 - DNA, 75 bp, synthetic construct
  source 1..75: mol_type = other DNA
agtcgtagtgaaagacaatcatttcaagagttgttaaccgttttagagcctgtatctccacttcccaatgaatta

SEQ ID NO: 764133 - DNA, 75 bp, synthetic construct
  source 1..75: mol_type = other DNA
catgctgctatggcggcattagctgaattgctggcgcaaaaagaggaaaaaagctggcgtatgatgctgatgaca

SEQ ID NO: 764134 - DNA, 75 bp, synthetic construct
  source 1..75: mol_type = other DNA
gtctggaatatactcttgaagaaggagcgcgctggggatggctggatgataatactattttgctgacatcagttc

SEQ ID NO: 764135 - DNA, 75 bp, synthetic construct
  source 1..75: mol_type = other DNA
tgtcattttctggtgataacattgacacgagtaacaatgttataaggaacaaatcaggtgcaggttatgcatcag

SEQ ID NO: 764136 - DNA, 75 bp, synthetic construct
  source 1..75: mol_type = other DNA
aaaccgggctgctgattttcggtatcagcattgcgttgtataccgcctttggcggctttcgcgccagcgtgctga

SEQ ID NO: 764137 - DNA, 75 bp, synthetic construct
  source 1..75: mol_type = other DNA
tattctcggcaagaagttcgcgattcttgcgcgccgctacaatgcggtgacgctgaacgatatgctgtttgcccg

SEQ ID NO: 764138 - DNA, 75 bp, synthetic construct
  source 1..75: mol_type = other DNA
ctggcgagtttgagtttgctggttgcgttcgttggtgcgatgaccgtgcagtttatcggcggtgcgcgcctgctg

SEQ ID NO: 764139 - DNA, 75 bp, synthetic construct
  source 1..75: mol_type = other DNA
caatctttcaatgtgccagccttaatgttgacacatacaaggatctctcaagccagagaatacaatgtggaaaga

SEQ ID NO: 764140 - DNA, 75 bp, synthetic construct
  source 1..75: mol_type = other DNA
cagaagaaccccagcggtgaaagctatcaggcccgccgccgcaaaatcctgcgcacccagggcgggataaagttc

SEQ ID NO: 764141 - DNA, 75 bp, synthetic construct
  source 1..75: mol_type = other DNA
cccagcggagaaagctatacgccgcgccgccgtaagattttgcgcactcagggcggggttaaattcctgtggaaa

SEQ ID NO: 764142 - DNA, 75 bp, synthetic construct
  source 1..75: mol_type = other DNA
taaatgaagaactggaaaaagacctgaaagacaacatcgcgctgcgtatgaaaaacttgcaagattctctgaaga

SEQ ID NO: 764143 - DNA, 75 bp, synthetic construct
  source 1..75: mol_type = other DNA
agatttttgtgctcctagagtcaaacgaacaaaataggttattacaatctttacccatcgatcgccacatgccat

SEQ ID NO: 764144 - DNA, 75 bp, synthetic construct
  source 1..75: mol_type = other DNA
catactggggttctgataatggcgccagaagaccgccccaacgagatgggcatgttgacgaacaggacttcttat

SEQ ID NO: 764145 - DNA, 75 bp, synthetic construct
  source 1..75: mol_type = other DNA
gacggtatcgaggcgctgaaatccgcgttctggaatttctcttcattctcgctggaaaccgtcgctcaggagcta

SEQ ID NO: 764146 - DNA, 75 bp, synthetic construct
  source 1..75: mol_type = other DNA
taactttctcgggcagcttgatggtatccttcgccggcattcccgtcattttgccatgctttacttttctgacca

SEQ ID NO: 764147 - DNA, 75 bp, synthetic construct
  source 1..75: mol_type = other DNA
cttaaggaaacaacatgttgggtggagcggacaatccaaatggtgaattactgtcttatatcattggcgctgaca

SEQ ID NO: 764148 - DNA, 75 bp, synthetic construct
  source 1..75: mol_type = other DNA
atgctgttgttacaggaaacagaacgtgcactggcggataaatcctctccgaaggtgattttcctgcacatgatg

SEQ ID NO: 764149 - DNA, 75 bp, synthetic construct
  source 1..75: mol_type = other DNA
tttaggctcgtcggggattcgccgggtgctgcaaaaccatctacgctcaggactgggcgagatgaaaaactcgct

SEQ ID NO: 764150 - DNA, 75 bp, synthetic construct
  source 1..75: mol_type = other DNA
gtgctgcaaaaccatctacgctcaggactgggcgagataaaaaactcgctgtgcaaaagcggctatctgcggctg

SEQ ID NO: 764151 - DNA, 75 bp, synthetic construct
  source 1..75: mol_type = other DNA
tcgctgccgaagtcagcctggagacggtggcggataacgaggtgttaccgacgttgctcaaccccttacgacgca

SEQ ID NO: 764152 - DNA, 75 bp, synthetic construct
  source 1..75: mol_type = other DNA
gaggcgctggctgctttccgccagttggctgaagataactttggtgaaacagaagatattgcgccacaaactctg

SEQ ID NO: 764153 - DNA, 75 bp, synthetic construct
  source 1..75: mol_type = other DNA
accgtggctgaatacggcacccggtttatttattgacgattatacctcgacagcctccagtacagtgtcttccct

SEQ ID NO: 764154 - DNA, 75 bp, synthetic construct
  source 1..75: mol_type = other DNA
ccgaataattaccaggagcagttcccccggaagattgcctgttacctcgccagcatcagtaaactggataacttt

SEQ ID NO: 764155 - DNA, 75 bp, synthetic construct
  source 1..75: mol_type = other DNA
aggccagaggcggtgagattatttataacgccgaagtcagcgccctcagtgagcataaaaacggcgtggtgatac

SEQ ID NO: 764156 - DNA, 75 bp, synthetic construct
  source 1..75: mol_type = other DNA
gctttacttttctgaccatggtctgtcggtcagcgacagcgctaatcctgttcatcatgatggtcatgtgcaggg

SEQ ID NO: 764157 - DNA, 75 bp, synthetic construct
  source 1..75: mol_type = other DNA
agcccggtatcccacagcgccttaattgcccgtgaactgggcattggctgggtttgtcagcagggcgagaaactg

SEQ ID NO: 764158 - DNA, 75 bp, synthetic construct
  source 1..75: mol_type = other DNA
taacgccgaagtcagcgcccttaatgagcataaaaacggcgtggtgatacgtaccagtcagggcggtgaatatga

SEQ ID NO: 764159 - DNA, 75 bp, synthetic construct
  source 1..75: mol_type = other DNA
aagagtccggcccggcctgtcaccaaacgggccacaacagtggcgtgatccatgccggggtttattacacgcccg

SEQ ID NO: 764160 - DNA, 75 bp, synthetic construct
  source 1..75: mol_type = other DNA
accagattgttaaccacctgatttaccccattcccgacccggcaatgccgtttttgggcgttcatctcacccgca

SEQ ID NO: 764161 - DNA, 75 bp, synthetic construct
  source 1..75: mol_type = other DNA
gacgcacgcattgcgttgctggaaaaagagcccggcccggcctgtcaccaaacgggccacaacagtggcgtgatc

SEQ ID NO: 764162 - DNA, 75 bp, synthetic construct
  source 1..75: mol_type = other DNA
acaagagtctactcacatcagacaaaaatataatttgccttataattgtattgattgtaagctaatatcagctca

SEQ ID NO: 764163 - DNA, 75 bp, synthetic construct
  source 1..75: mol_type = other DNA
tttctgatatgatttctctcgaagaacaagagtctactcacatcagacaaaaatataatttgccttataattgta

SEQ ID NO: 764164 - DNA, 75 bp, synthetic construct
  source 1..75: mol_type = other DNA
ctgaaagttcatgatttaaatgaagatgcggaatttgatgagaacggagttgaggttagaagaggaacccagtga

SEQ ID NO: 764165 - DNA, 75 bp, synthetic construct
  source 1..75: mol_type = other DNA
attttctcctgtaggtgtattacctcatcttgaaacaagctctcaaggtgcggactgctacttggaacgttatgt

SEQ ID NO: 764166 - DNA, 75 bp, synthetic construct
  source 1..75: mol_type = other DNA
tacatctcaacgaagaatttgttcacattgaaccgcaatggctggatgaacgccgtttcgtgccagtcatcactg

SEQ ID NO: 764167 - DNA, 75 bp, synthetic construct
  source 1..75: mol_type = other DNA
aaatcaagcgattgccgatgggattcctgcaataatggttactggaagtcatattccatttgatagaaatggttt

SEQ ID NO: 764168 - DNA, 75 bp, synthetic construct
  source 1..75: mol_type = other DNA
catcttcaggaatccaatttggaactagtggggcgcgggggttagttattgactttactccaactgtctgctctg

SEQ ID NO: 764169 - DNA, 75 bp, synthetic construct
  source 1..75: mol_type = other DNA
agatacagaagctgttggtcatgatcttgttatccaggcaaaaaaatgggcgttagaatataaattagatgctat

SEQ ID NO: 764170 - DNA, 75 bp, synthetic construct
  source 1..75: mol_type = other DNA
tatacagaataactttaactttcgtattgttgccttagccattgataaccgcccaagtagttacgaaatagctca

SEQ ID NO: 764171 - DNA, 75 bp, synthetic construct
  source 1..75: mol_type = other DNA
agacgaagataatgaacccgttatggtttttaacggggagaggaatgtaccggcagacagtctgaaaccgcagcc

SEQ ID NO: 764172 - DNA, 75 bp, synthetic construct
  source 1..75: mol_type = other DNA
aaaatagctctactaaaaactataaaccggttttcattcgtttagttgatggtaatgaagaacagaaaattaaag

SEQ ID NO: 764173 - DNA, 75 bp, synthetic construct
  source 1..75: mol_type = other DNA
gtatgttgtctcacccggagactccggccgcgtttgaggtgctggatcatgtgccggaagtggcagaagctctgc

SEQ ID NO: 764174 - DNA, 75 bp, synthetic construct
  source 1..75: mol_type = other DNA
cctggacgcgttgtatcgcctggaacaggaaggcgatttccagcagaagacggcggcaaaagcgtttattccgtt

SEQ ID NO: 764175 - DNA, 75 bp, synthetic construct
  source 1..75: mol_type = other DNA
catattaaagattacttaccagttttcttccgcttgacagacggcaatgaagaacagaaaaagaaaaatctttaa

SEQ ID NO: 764176 - DNA, 75 bp, synthetic construct
  source 1..75: mol_type = other DNA
tcttttaaaaaaattaaatttgatcataaaaaaaacgatacctttgaagagaaatgggccccacataaaaagggc

SEQ ID NO: 764177 - DNA, 75 bp, synthetic construct
  source 1..75: mol_type = other DNA
agattttatatttagaaagggtattacttggtctgatgttacgtcaggtagtaatgcttttagagttttaccgca

SEQ ID NO: 764178 - DNA, 75 bp, synthetic construct
  source 1..75: mol_type = other DNA
ctcaaaatacatcctattacttcaagcaaggcgtaacctggggacaaactagtagcggaaagtcttcattcagat

SEQ ID NO: 764179 - DNA, 75 bp, synthetic construct
  source 1..75: mol_type = other DNA
atttagctcaggtaaacaaaaggcttttgagtgcttggtttacctgcaccgttataacgagggcacgctttcgcg

SEQ ID NO: 764180 - DNA, 75 bp, synthetic construct
  source 1..75: mol_type = other DNA
aaaatacacagttcttttttaaagaagctgtatcgtggaataaagtaggaacagctacaccctcattccgatttc

SEQ ID NO: 764181 - DNA, 75 bp, synthetic construct
  source 1..75: mol_type = other DNA
gcggtagatgacgaagcggaactgctgttgccggataacctgacccgtaccgactctattctgcgtgggctggtt

SEQ ID NO: 764182 - DNA, 75 bp, synthetic construct
  source 1..75: mol_type = other DNA
ctcttatagaaaaaaaagatggtattatcttgcatagtcaaaataactttatgaaaataccgggagctccttttg

SEQ ID NO: 764183 - DNA, 75 bp, synthetic construct
  source 1..75: mol_type = other DNA
aaggtgtgagctggggattgattacgtcagggttaccctctgctaggataattcctcaagggtgtatatttgatg

SEQ ID NO: 764184 - DNA, 75 bp, synthetic construct
  source 1..75: mol_type = other DNA
ataataaccatactgagttttaccgccccgtatttttccgcttaatcaatgggagtgaagaggaaaaaaaagtgc

SEQ ID NO: 764185 - DNA, 75 bp, synthetic construct
  source 1..75: mol_type = other DNA
tgacgccagcaaaggctttgaaaaccagggagacctgctgattaaaacccgtctggcggcagacgctgtgggcgc

SEQ ID NO: 764186 - DNA, 75 bp, synthetic construct
  source 1..75: mol_type = other DNA
taccgacgccatcgtcagccagtcaccggatggctggttaatccatttcagccgtggttctgacattagcgccac

SEQ ID NO: 764187 - DNA, 75 bp, synthetic construct
  source 1..75: mol_type = other DNA
gaggaccatatctacggctgcggcgaacagttttcctacttcgatctgcgtggcaaaccgttcccgctatggacc

SEQ ID NO: 764188 - DNA, 75 bp, synthetic construct
  source 1..75: mol_type = other DNA
tcagtcagcgacagtactaatcctgttcatcatgatggccatgtgcagggtggctacagcgttcccctgattatt

SEQ ID NO: 764189 - DNA, 75 bp, synthetic construct
  source 1..75: mol_type = other DNA
acattatattgatttaggaattcatacagaagtgcattacgtaggatatacacgtcatccgcatcggcgccctgt

SEQ ID NO: 764190 - DNA, 75 bp, synthetic construct
  source 1..75: mol_type = other DNA
ggaaaaatatacgagggaaagctgtgaaaagagatttatttatttcttaggttcaagaaaaaaagtgaggttttc

SEQ ID NO: 764191 - DNA, 75 bp, synthetic construct
  source 1..75: mol_type = other DNA
cggaacaaacgccggaagtgcaggcgcagctggcggcgattaccccagccagcattgaacccgaaagcattaaag

SEQ ID NO: 764192 - DNA, 75 bp, synthetic construct
  source 1..75: mol_type = other DNA
ggtatcctgccgctgatggatgacgagtggtttgacgacgacgtcacctctcgcgtcaaagagtttgtccgcacc

SEQ ID NO: 764193 - DNA, 75 bp, synthetic construct
  source 1..75: mol_type = other DNA
attaatttcaagagaagcttctatagaaaagagttacaaatataatctcattgaaaataaaaaaagaatagataa

SEQ ID NO: 764194 - DNA, 75 bp, synthetic construct
  source 1..75: mol_type = other DNA
tggagatactcgaaggccagcgggcagaagcgaaacaactacgtaagcaggccagaagagcgcacaggaactacg

SEQ ID NO: 764195 - DNA, 75 bp, synthetic construct
  source 1..75: mol_type = other DNA
gctggcacgttatcaggccaatatcgatcgcctgaacgatcaacttgatgaagcttctggcggtgaagccacacg

SEQ ID NO: 764196 - DNA, 75 bp, synthetic construct
  source 1..75: mol_type = other DNA
gaaactagtcgtctttcgagtaaatggaaaaaactaatcaaaggtggagattacaaaaaacattttggcaatgaa

SEQ ID NO: 764197 - DNA, 75 bp, synthetic construct
  source 1..75: mol_type = other DNA
acgttcaggtaggcggagcggaagctgaagcggcgattttaggagcgctcaccacgcctggcactacccgtccac

SEQ ID NO: 764198 - DNA, 75 bp, synthetic construct
  source 1..75: mol_type = other DNA
cagtaaccgcgcatggtgaaacgatcagcgtcctggagtttaatgaaccgactggtaaagacgttcgcgaacttg

SEQ ID NO: 764199 - DNA, 75 bp, synthetic construct
  source 1..75: mol_type = other DNA
gctggacgccgccctgttcaccatcttctcgatcaacggcgagcgctgcaccgccggttcgcgcatctttattca

SEQ ID NO: 764200 - DNA, 75 bp, synthetic construct
  source 1..75: mol_type = other DNA
gatgaatgggattatcaggcgatggaacaggcgattaatgctgagattcagtcgttgattgctgcctgccaacgt

SEQ ID NO: 764201 - DNA, 75 bp, synthetic construct
  source 1..75: mol_type = other DNA
tcggcaacgccaccaccgaggtggcgctggcgtccgacgacccgcaggcgagggcgtttgttgccagcgggatcg

SEQ ID NO: 764202 - DNA, 75 bp, synthetic construct
  source 1..75: mol_type = other DNA
ttcccgctggcaatatagaactgctgtcgcggggacgaactatccgtgtgaatgtagctgcaggcgctgaggcga

SEQ ID NO: 764203 - DNA, 75 bp, synthetic construct
  source 1..75: mol_type = other DNA
gagctcgtgatgtttctgcaaaattacagaaagaggttcttgcttctattctttatagtaaagaagatggtatcg

SEQ ID NO: 764204 - DNA, 75 bp, synthetic construct
  source 1..75: mol_type = other DNA
tttcaggctgtctgctgttggccgcccccgcgatgtccgcgaccctcagcggtacgctggcgccgacagtggtcc

SEQ ID NO: 764205 - DNA, 75 bp, synthetic construct
  source 1..75: mol_type = other DNA
cgtcagggcagcgtacccgatgagtatcagtctgtccccgtcacttctgaagtgctgcaggtgccggctggtctg

SEQ ID NO: 764206 - DNA, 75 bp, synthetic construct
  source 1..75: mol_type = other DNA
cagattgaacagcaaatgaaaaaactggagaaacaggtaaaggatcttcactacacgcccgttcaggtaacacgg

SEQ ID NO: 764207 - DNA, 75 bp, synthetic construct
  source 1..75: mol_type = other DNA
tgcaacccattctcctgaagttgcatctaaatataaaaacgccattttcaatatggagagattagtcaatgctaa

SEQ ID NO: 764208 - DNA, 75 bp, synthetic construct
  source 1..75: mol_type = other DNA
tggtttcactctcatctttatccgtctatagactaaggaatagtgacgactttgaggttagagacaaatacggct

SEQ ID NO: 764209 - DNA, 75 bp, synthetic construct
  source 1..75: mol_type = other DNA
atgatgattttggtgacaggtggtgcacggagcgggaagagtcggcacgccgaggcgcttattggggatactcca

SEQ ID NO: 764210 - DNA, 75 bp, synthetic construct
  source 1..75: mol_type = other DNA
gcaggatgcagttctgcgctacggtcaggtggaagtaccgctcccgccgggagccgacgttgagcgcacaacatg

SEQ ID NO: 764211 - DNA, 75 bp, synthetic construct
  source 1..75: mol_type = other DNA
tatccggctacaaagtagtgaaacgccgcaggagattttccgcaacaatcttgatgcgttagtcgatgaaccgtg

SEQ ID NO: 764212 - DNA, 75 bp, synthetic construct
  source 1..75: mol_type = other DNA
ggggtgaagatggcaatggtgacgccttccttacggcatgggcatggtacgccgactggcaggccagccaggcgc

SEQ ID NO: 764213 - DNA, 75 bp, synthetic construct
  source 1..75: mol_type = other DNA
gatgtgtcgcgatctttctgaactttcgacctattcattcgtggataacgttgcgtttcgtctgatgaaaaacaa

SEQ ID NO: 764214 - DNA, 75 bp, synthetic construct
  source 1..75: mol_type = other DNA
tatctcgggcagaaaccgacaacggttattgatcttaccgatgatacgccggtcgtggtgcgtgaaggcgtaggt

SEQ ID NO: 764215 - DNA, 75 bp, synthetic construct
  source 1..75: mol_type = other DNA
caggactgtttatcttcagtcagcaggataacgaaccggtggcgctggtgactaaatttgcaggcgctgagatgc

SEQ ID NO: 764216 - DNA, 75 bp, synthetic construct
  source 1..75: mol_type = other DNA
ttgggttggtcagggcgtgccggacattctctcttttggtgacgaattatcgccgcaaaatgtgcaggtccgctg

SEQ ID NO: 764217 - DNA, 75 bp, synthetic construct
  source 1..75: mol_type = other DNA
agcgcatgggcgaagaaacatcacccgcgctggtaccgtgaggtccgcaagacaacggaaaagaaagctgaatga

SEQ ID NO: 764218 - DNA, 75 bp, synthetic construct
  source 1..75: mol_type = other DNA
ttatggcggcgataaagacctgatgaatgggattatcaggcgatggaacaggcgattaatgctgagattcagtcg

SEQ ID NO: 764219 - DNA, 75 bp, synthetic construct
  source 1..75: mol_type = other DNA
atgcaatccaggccgcagccattttacgtggtttaaccactcaacaatctggtattgaacgcgcactgaccatga

SEQ ID NO: 764220 - DNA, 75 bp, synthetic construct
  source 1..75: mol_type = other DNA
ggtatttcagtcagcaaacccagtaccggaaagcaaaaaggacaactgctggaaaaagcacgtaatgaaatgggt

SEQ ID NO: 764221 - DNA, 75 bp, synthetic construct
  source 1..75: mol_type = other DNA
aacgccagttgtatcggcttatccccggtgaagaagagatgagctttactctgcagccggtgaccagcaatgaga

SEQ ID NO: 764222 - DNA, 75 bp, synthetic construct
  source 1..75: mol_type = other DNA
tattgccgtgagtaacaccgatccgaatctgttcacagtacctggagatcgcatcacggcgataaacagcctgga

SEQ ID NO: 764223 - DNA, 75 bp, synthetic construct
  source 1..75: mol_type = other DNA
atatcccttcccagatattgatactagtaactgggtagcgggtgtatggactgcaattattaacagtaccgtagc

SEQ ID NO: 764224 - DNA, 75 bp, synthetic construct
  source 1..75: mol_type = other DNA
acatcctctccgaaggtcattttcctgcacatgatgggttctcatccgaatccgtgtgaccggcttaactcctgg

SEQ ID NO: 764225 - DNA, 75 bp, synthetic construct
  source 1..75: mol_type = other DNA
actgctgctattcgtattatgctctgtaaacagctggccgttgcggatggttaaaggaactgttgtggggacaac

SEQ ID NO: 764226 - DNA, 75 bp, synthetic construct
  source 1..75: mol_type = other DNA
ggcggataaatcctctccgaaggtgatattcctgcacatgatggggtctcatccgaacccgtgtgaccggcttca

SEQ ID NO: 764227 - DNA, 75 bp, synthetic construct
  source 1..75: mol_type = other DNA
ctcgaaggaacaccggagcagcacaaagcgcaggacgtttacaacatcagacgtgacgaattagaaggagcgtct

SEQ ID NO: 764228 - DNA, 75 bp, synthetic construct
  source 1..75: mol_type = other DNA
aaaagcaaaaaccactgccggaaattagcgaggaagagaagccgtttgaattgccgcagggatgggagtgggtgc

SEQ ID NO: 764229 - DNA, 75 bp, synthetic construct
  source 1..75: mol_type = other DNA
ggaaacagaacgtgcgctggcagatacatccactccgaaggtgattttcctgcacatgatggggtctcatccgaa

SEQ ID NO: 764230 - DNA, 75 bp, synthetic construct
  source 1..75: mol_type = other DNA
cagcatcagtaaactggataactttctcggtcagcttgatggtatccttcgccggcattcccgtcattttgccat

SEQ ID NO: 764231 - DNA, 75 bp, synthetic construct
  source 1..75: mol_type = other DNA
ttgcacacagaaatactctcacatccattacagctctgttatttctgttctgttgtgcactgtatgcgcctgccg

SEQ ID NO: 764232 - DNA, 75 bp, synthetic construct
  source 1..75: mol_type = other DNA
acggagagaagaacgttcctgcagacagccttaagtcacagcaacttattcttcctgacagtaacaatcatacag

SEQ ID NO: 764233 - DNA, 75 bp, synthetic construct
  source 1..75: mol_type = other DNA
ccgtcatttcgcaggtatttttcagtggatgaccgatatttgtactgaaaatataccgccattcaatccgctgac

SEQ ID NO: 764234 - DNA, 75 bp, synthetic construct
  source 1..75: mol_type = other DNA
agaaatacagtgcggaaaaccccgtgttttacgaagatgaagtggatattcatctcaacccgaaaatcggtgttg

SEQ ID NO: 764235 - DNA, 75 bp, synthetic construct
  source 1..75: mol_type = other DNA
gcattcactgacgcagcattgcagaaaaacaccgtggaagagcttaaacaggcgttcgccaaagcgtggaagatg

SEQ ID NO: 764236 - DNA, 75 bp, synthetic construct
  source 1..75: mol_type = other DNA
taaaattgaagataaaaacgccatggagcgtatttgtcgaattcgccagctgccggacggtcacaactttaccct

SEQ ID NO: 764237 - DNA, 75 bp, synthetic construct
  source 1..75: mol_type = other DNA
ccagtgttgaaatgtgcggcaacacgcgtcagcaggcaatgagctggcttatcgatctggaaaggctgaccgcgc

SEQ ID NO: 764238 - DNA, 75 bp, synthetic construct
  source 1..75: mol_type = other DNA
ttttaccgtcagcacccggcaatcttcctcattgcgcgatgccttccagcttaatttctttatttgcaatagttg

SEQ ID NO: 764239 - DNA, 75 bp, synthetic construct
  source 1..75: mol_type = other DNA
gctcaacctgaaacgggtaagcgaggacatacgggaaaagctggcggaaatcaccaatgatgatgtgctgtctat

SEQ ID NO: 764240 - DNA, 75 bp, synthetic construct
  source 1..75: mol_type = other DNA
acactatccggcgttttgtacccatcagtgaccggcggtaaggtgagtctaactgtgctcgatacacaggcatac

SEQ ID NO: 764241 - DNA, 75 bp, synthetic construct
  source 1..75: mol_type = other DNA
acggtcatcgacctcaccgatgatacgccagtcgtggtgcgtgaaggtgtaggtgatgtgaagcctttcttataa

SEQ ID NO: 764242 - DNA, 75 bp, synthetic construct
  source 1..75: mol_type = other DNA
tctggcggctactacatcgcctctgctgcggacgagatctatgctgaccgcgcaagtctggtcggctctatcggc

SEQ ID NO: 764243 - DNA, 75 bp, synthetic construct
  source 1..75: mol_type = other DNA
cagcagcaaagcagtcaaaaccatcacctacacctgaacaggttctaaaagcattcactgacgcagcattgcaga

SEQ ID NO: 764244 - DNA, 75 bp, synthetic construct
  source 1..75: mol_type = other DNA
ctgaaaggtgacatgggcgacgtgcagcattttgccgatgacgttatcgcccagcgcggcgtgcggcacgggcat

SEQ ID NO: 764245 - DNA, 75 bp, synthetic construct
  source 1..75: mol_type = other DNA
attacggcgttcgccattcagcgtatggaatggacaaaaaggataagcggcagaagaagcaccattcttcgactt

SEQ ID NO: 764246 - DNA, 75 bp, synthetic construct
  source 1..75: mol_type = other DNA
caacaaataagatggctgtagtttttgtcggagtcagtgaaagcgaaagtgagtatcgtaccgcgcttgaatatc

SEQ ID NO: 764247 - DNA, 75 bp, synthetic construct
  source 1..75: mol_type = other DNA
gagtgaaggctggtcgaggtgatcgactgaaaggcgaccaagaggtgttttctgggttgctttggaatggggagc

SEQ ID NO: 764248 - DNA, 75 bp, synthetic construct
  source 1..75: mol_type = other DNA
tggtaggtgataaagcgaaagtgcgtcatggcttgcagtcgatcctgcgcgaaaccgacgccgatgagattatgg

SEQ ID NO: 764249 - DNA, 75 bp, synthetic construct
  source 1..75: mol_type = other DNA
ttgcaaacggggatgcgttcatacagtgctgttatgactggcattgccagtgctgccacgtcggtattgattggc

SEQ ID NO: 764250 - DNA, 75 bp, synthetic construct
  source 1..75: mol_type = other DNA
ctggggtctggcggcgtgatgttgcctaaccactcaccattggtgatcgccgaacagttcggcacgcttaatacg

SEQ ID NO: 764251 - DNA, 75 bp, synthetic construct
  source 1..75: mol_type = other DNA
tgtagatcacataaagtttgttaaagtaggacgtccttccttaaagcaaattgtaaaacaatctgttagtaataa

SEQ ID NO: 764252 - DNA, 75 bp, synthetic construct
  source 1..75: mol_type = other DNA
ccatcaggagcgtaacaacgtccgcgctgcttacatccatcttgctgagcatcttgatgagcggaggctaatgct

SEQ ID NO: 764253 - DNA, 75 bp, synthetic construct
  source 1..75: mol_type = other DNA
cagattttcgaccaccaggcacgcctgcagtcgtttgagctggcgatggatgtgaaggaagagttgttggggtag

SEQ ID NO: 764254 - DNA, 75 bp, synthetic construct
  source 1..75: mol_type = other DNA
gattgtctcctgccagccggttccggacagcccgctcgataaacccgaaatcgtcgccgccatggcattagcggc

SEQ ID NO: 764255 - DNA, 75 bp, synthetic construct
  source 1..75: mol_type = other DNA
tctggcgctggtgaaaacgttgagcgacgccggatgtcgggtaattgccgaaggacgttacaactcgccagcgca

SEQ ID NO: 764256 - DNA, 75 bp, synthetic construct
  source 1..75: mol_type = other DNA
gaccgcgtccggtgcctgttgaaacgctgctggcacgtattcaccatcacggtttactggcgatgaccgactgct

SEQ ID NO: 764257 - DNA, 75 bp, synthetic construct
  source 1..75: mol_type = other DNA
gcagctcagaaatgccccggccagtgtctcagtcattacttcagaacaactgcaaaaaaaaccggtttcagatct

SEQ ID NO: 764258 - DNA, 75 bp, synthetic construct
  source 1..75: mol_type = other DNA
ctgactggagggctgcgcctcgataaccatgaaatctatggcagttactggaatccaagattgtatgctgtttat

SEQ ID NO: 764259 - DNA, 75 bp, synthetic construct
  source 1..75: mol_type = other DNA
gatctggaggattctccggtacgcatcacggcctatattgaagatgttgatgcgctggcgcaggcgggcgcggac

SEQ ID NO: 764260 - DNA, 75 bp, synthetic construct
  source 1..75: mol_type = other DNA
aggagtgaaacactccagccgtggctctaagatgaaaacccctcaccttgttccattaagcaagcaggctttagc

SEQ ID NO: 764261 - DNA, 75 bp, synthetic construct
  source 1..75: mol_type = other DNA
tccttttattatgggcctggctgatggtttaatgaaaaatgatataccgtacaaattaatatcagaaggaaactg

SEQ ID NO: 764262 - DNA, 75 bp, synthetic construct
  source 1..75: mol_type = other DNA
ctggttagcctggcaaaatagaattctggaattacgtgacgtacagctcattgggcataattcctacgaacaaat

SEQ ID NO: 764263 - DNA, 75 bp, synthetic construct
  source 1..75: mol_type = other DNA
gactggaatgacgaattgcgttcacgtattggtgttatgaattatatccatcaacgtacacgcatatcacgttct

SEQ ID NO: 764264 - DNA, 75 bp, synthetic construct
  source 1..75: mol_type = other DNA
gacgccgcatttgataaccgcgataaatgcgagcagagtgccaacattaatgcctactgggagccgaatacttta

SEQ ID NO: 764265 - DNA, 75 bp, synthetic construct
  source 1..75: mol_type = other DNA
tattggttggcagcggtgaaaaaaagccgggtagtgacccggctcgctcaacgttagtaaaggcaacctcacaaa

SEQ ID NO: 764266 - DNA, 75 bp, synthetic construct
  source 1..75: mol_type = other DNA
atatttatatagcgattaattcaccagagatatttctgcttgtttgcccctcatcagaatttaacactaaaagag

SEQ ID NO: 764267 - DNA, 75 bp, synthetic construct
  source 1..75: mol_type = other DNA
gaaggttcttttcatgttattaccggtccttccggtgtcggaaaaagttccctgttgaacatacttggcttgttg

SEQ ID NO: 764268 - DNA, 75 bp, synthetic construct
  source 1..75: mol_type = other DNA
cctgcgcggcaatttcacgcgccagcggcagcttaaataaccctaccttgtctgccgataacgcgctttcattaa

SEQ ID NO: 764269 - DNA, 75 bp, synthetic construct
  source 1..75: mol_type = other DNA
gtttgatgaaccgtttgttgggcaagatcccatcactatgggcgtactggtgaagctgatttctgagctgaacag

SEQ ID NO: 764270 - DNA, 75 bp, synthetic construct
  source 1..75: mol_type = other DNA
ttgcgtaaaggcggctatatcgaaatgaataaaggcaaactggtcgctatcaaccgtttgccttcagagtattaa

SEQ ID NO: 764271 - DNA, 75 bp, synthetic construct
  source 1..75: mol_type = other DNA
agatactttcgttattttagagggcgttatctctctgcgtagagaagaaaacgtacttatcggtattacccaggc

SEQ ID NO: 764272 - DNA, 75 bp, synthetic construct
  source 1..75: mol_type = other DNA
cggctttactatctggtggcgaaaaacaacgagttgcgcttgcaagagctttaataaaaaaacctaaaatactgc

SEQ ID NO: 764273 - DNA, 75 bp, synthetic construct
  source 1..75: mol_type = other DNA
atgtcgttacttgcacaactggatcaaaaaatcgccgctaatggtggactgattgtctcctgccagccggttccg

SEQ ID NO: 764274 - DNA, 75 bp, synthetic construct
  source 1..75: mol_type = other DNA
aacagcaagagcagttattctgcggagcattgactgaacagacggtgacatgggctaaggaaagccagtttgcaa

SEQ ID NO: 764275 - DNA, 75 bp, synthetic construct
  source 1..75: mol_type = other DNA
cctccgcgctcgattttgaactggaatacgtcgccagccgcccgctgctactggaaaaacttaacgcctggtttg

SEQ ID NO: 764276 - DNA, 75 bp, synthetic construct
  source 1..75: mol_type = other DNA
cgcatcgtttatatgctggggccggagaatggcgacgcctccgcgctcgatttcgaactggaatacgtcgccagc

SEQ ID NO: 764277 - DNA, 75 bp, synthetic construct
  source 1..75: mol_type = other DNA
cgactttatcgaacaaaacgtcaatggcgtgctgctgaacaacgatccgcaaaaatggatcgaggcgttgtcgct

SEQ ID NO: 764278 - DNA, 75 bp, synthetic construct
  source 1..75: mol_type = other DNA
gccgtcacccggccggtaaaaattgcctatcacggttccagctcgcaccaggcagaaaagtactggctgcgggaa

SEQ ID NO: 764279 - DNA, 75 bp, synthetic construct
  source 1..75: mol_type = other DNA
tctttaaaccgtatctgaagttgcataagcaaagcagcgagacgcctgctgacaactgggcgtgccgctctctgt

SEQ ID NO: 764280 - DNA, 75 bp, synthetic construct
  source 1..75: mol_type = other DNA
ctctattttccgcgaatgcatcgcgctggttatgtcgcgcctaatctcggcgaagtgccgccgcacgccagccct

SEQ ID NO: 764281 - DNA, 75 bp, synthetic construct
  source 1..75: mol_type = other DNA
atcccgtcgggctggtggaaggcatggcgcagcctgatccagagcacagtaccgaaggttttctcgatgcctggt

SEQ ID NO: 764282 - DNA, 75 bp, synthetic construct
  source 1..75: mol_type = other DNA
ggcaccattaagtacgtatggaccaccaacggcccggagccgctggactaccaacgttcaccactggattacgaa

SEQ ID NO: 764283 - DNA, 75 bp, synthetic construct
  source 1..75: mol_type = other DNA
acgccccttgcaatatcagaaccgtggcaccattaaatatgtctggaccactaacggcccggagccgctggacta

SEQ ID NO: 764284 - DNA, 75 bp, synthetic construct
  source 1..75: mol_type = other DNA
cgcccgcagctgctggaaaaactcaacgcctggtttgcaaaccacgatcccgatgtgatcatcggctggaacgtg

SEQ ID NO: 764285 - DNA, 75 bp, synthetic construct
  source 1..75: mol_type = other DNA
aagaagaggcggcgaaaatcggtcgtgcactggtgcagcacgttaacgcctggtgggcggaaacgctgcaaaaac

SEQ ID NO: 764286 - DNA, 75 bp, synthetic construct
  source 1..75: mol_type = other DNA
actatggcttcaccgttctcaatctctataagctgtatctgatcgttgataaagagaatgaaaaagcgattcaca

SEQ ID NO: 764287 - DNA, 75 bp, synthetic construct
  source 1..75: mol_type = other DNA
gttgtagtggaaagggattcgtatctatcaaatcagctaatgttcatcgagctattcaaatatacattcccgatc

SEQ ID NO: 764288 - DNA, 75 bp, synthetic construct
  source 1..75: mol_type = other DNA
accgtagaaataaatgtctgctgattgtttttatagtccttattggatggattatattcagacctaaagcatata

SEQ ID NO: 764289 - DNA, 75 bp, synthetic construct
  source 1..75: mol_type = other DNA
ccgtttcagcagtttctgctcaggtatgagaaggaactcagaaataagcctgtagcagatccgcaggatgccccc

SEQ ID NO: 764290 - DNA, 75 bp, synthetic construct
  source 1..75: mol_type = other DNA
taaattaccagattctgccagacatgctgattaattttgccgttcttaacgtcacagacagaaagagcgaggata

SEQ ID NO: 764291 - DNA, 75 bp, synthetic construct
  source 1..75: mol_type = other DNA
cgggcattgccgtgatatgttctgcagtcatatcatcaggttatgccagttctgataaaaaagaagatacgcttg

SEQ ID NO: 764292 - DNA, 75 bp, synthetic construct
  source 1..75: mol_type = other DNA
gcccgcaccgtctgagaaacgggttactgctggctgcgttgatagcaataaccggatggctggcactcaaacccg

SEQ ID NO: 764293 - DNA, 75 bp, synthetic construct
  source 1..75: mol_type = other DNA
aatcaagaaagaaagggttgagcttatattcagtaaatggttggtcaatacagactggccgaaatatatcgcacc

SEQ ID NO: 764294 - DNA, 75 bp, synthetic construct
  source 1..75: mol_type = other DNA
tactgcatccgatgagttggcaaaattatcttgcgtataccaagactcatcatctggatatcgggttagcaccat

SEQ ID NO: 764295 - DNA, 75 bp, synthetic construct
  source 1..75: mol_type = other DNA
actgcctatttggctaataaatatgcacatcttaacccggagattgtttctgctaaaccgtcactggcactcatt

SEQ ID NO: 764296 - DNA, 75 bp, synthetic construct
  source 1..75: mol_type = other DNA
gataagaaaggaggaaataagttacttgagttgtcgatggattacagtattgacctcttacacgctgataacgca

SEQ ID NO: 764297 - DNA, 75 bp, synthetic construct
  source 1..75: mol_type = other DNA
aaacgttatataaagggaaacgcaaggtcaacggtcttgagatttcagagtggtggaataaacagcatgataatt

SEQ ID NO: 764298 - DNA, 75 bp, synthetic construct
  source 1..75: mol_type = other DNA
tcatagtttggcagatatagccgtcgaattagcaatttcccgcgaaagggtaagacaacttcaggagcgagcctt

SEQ ID NO: 764299 - DNA, 75 bp, synthetic construct
  source 1..75: mol_type = other DNA
cgtctggcggtgaagccacacgtctgaaacgcgaacgcgacagcctgatcaaaaaattcagcgaactgcgtagct

SEQ ID NO: 764300 - DNA, 75 bp, synthetic construct
  source 1..75: mol_type = other DNA
gcacgggcggagcggtttaccggatacagcggaaagcgggccagtgaatccgcacaggcacttgatgaagtggaa

SEQ ID NO: 764301 - DNA, 75 bp, synthetic construct
  source 1..75: mol_type = other DNA
atatgtgaaaaagtgcatgagtttatgttactagggattcttaactcaagttatgcaaggtatgtttttaatctt

SEQ ID NO: 764302 - DNA, 75 bp, synthetic construct
  source 1..75: mol_type = other DNA
tgccggataacctgactcgcaccgactccattctgcgcgggctggtggacacgattcctgaagaagactggaaac

SEQ ID NO: 764303 - DNA, 75 bp, synthetic construct
  source 1..75: mol_type = other DNA
catggctatcttgatcacggtttccgtatgctgtctcacccgaccctggaagggagttttgaggttctggatcat

SEQ ID NO: 764304 - DNA, 75 bp, synthetic construct
  source 1..75: mol_type = other DNA
tattagcgagcatttcgacaccctatttaccaccgaagccagcgtggatgcgttaaaacagaccattcttcaact

SEQ ID NO: 764305 - DNA, 75 bp, synthetic construct
  source 1..75: mol_type = other DNA
cttctgcccctgccgccccgctgatgccggtttctgataccgttcacgaacgctttatccgtctgcccgaagtga

SEQ ID NO: 764306 - DNA, 75 bp, synthetic construct
  source 1..75: mol_type = other DNA
ttttatcaaaaccgttttaatgaagatgcgtgcgctcattataccgacgccctgattcgtgaaatcgagctggaa

SEQ ID NO: 764307 - DNA, 75 bp, synthetic construct
  source 1..75: mol_type = other DNA
ctttatctgcaaggatgtgattttatggacgatgccggttggcgctgcatcagtaacagccactggggccgtacc

SEQ ID NO: 764308 - DNA, 75 bp, synthetic construct
  source 1..75: mol_type = other DNA
agctttttcgcagatttcaggtgaagtggttcagactacagcatcgataataaaaaataataagattgagtcata

SEQ ID NO: 764309 - DNA, 75 bp, synthetic construct
  source 1..75: mol_type = other DNA
tggtgcggccatcaccctcattatcttttccgtatttacacgcccagcgttgtacggataccacaactttttcaa

SEQ ID NO: 764310 - DNA, 75 bp, synthetic construct
  source 1..75: mol_type = other DNA
ccagaaagcgccgttgcctccagaagtatcaggggaactggttccagtaaacacacaagcaattatggatgaggt

SEQ ID NO: 764311 - DNA, 75 bp, synthetic construct
  source 1..75: mol_type = other DNA
tgaaacatcatgggacttcagtggttctccaacattaaaatttaacgaaaacacacttgaagaatgttataacag

SEQ ID NO: 764312 - DNA, 75 bp, synthetic construct
  source 1..75: mol_type = other DNA
aaaaagaaaattcttggaatttttacagaaacgcattgatagataaaaaaagtaacaatttaaaagaggctttac

SEQ ID NO: 764313 - DNA, 75 bp, synthetic construct
  source 1..75: mol_type = other DNA
tgctcgacccagcctgcggctccggtcatattttgattgaagcctataatgtgctgaaaaatatctacgaagagc

SEQ ID NO: 764314 - DNA, 75 bp, synthetic construct
  source 1..75: mol_type = other DNA
tatgtggtgccgctgctggcgcgttatcaggccaatatcgatcgcctgaacgatcaacttgatgaggcttctggc

SEQ ID NO: 764315 - DNA, 75 bp, synthetic construct
  source 1..75: mol_type = other DNA
atttctgatgtttttgaagtaagagaaggcttggggactcgaaacgatgatagattcttaagacgcttttgggaa

SEQ ID NO: 764316 - DNA, 75 bp, synthetic construct
  source 1..75: mol_type = other DNA
ctgcacggttatcttgagcacggcttccgtatgttgtcccatccggagacgccgaccgcgtttgaggtgctggat

SEQ ID NO: 764317 - DNA, 75 bp, synthetic construct
  source 1..75: mol_type = other DNA
tgccgataaaaaaggcaatttgcagattgccgaggccgaaaccattggcgagaccgtgcgttacggtcagtttga

SEQ ID NO: 764318 - DNA, 75 bp, synthetic construct
  source 1..75: mol_type = other DNA
gctaaaagctattacgcctgaatccatcgagcctgaaaccatcaaagtactcgatccggcttgtggctcgggcca

SEQ ID NO: 764319 - DNA, 75 bp, synthetic construct
  source 1..75: mol_type = other DNA
ttggacgatgaaacagaacttcttctaccagacaacctaacacgtaccgactcaattctgcgtggattggtagac

SEQ ID NO: 764320 - DNA, 75 bp, synthetic construct
  source 1..75: mol_type = other DNA
tgatatgcgtatttcactggatctggatgatggtgtgaaagtgaattacggcaagtttggtgatctgttggctga

SEQ ID NO: 764321 - DNA, 75 bp, synthetic construct
  source 1..75: mol_type = other DNA
tggtcaaatctctggagaagttgttcaaactaccgcatgggtgattaaaaataaccattcaggattttataaacc

SEQ ID NO: 764322 - DNA, 75 bp, synthetic construct
  source 1..75: mol_type = other DNA
agcattgagcctgaaagcattaaagtgctggatccggcctgcggttccgggcatatcctgacagaagcctataac

SEQ ID NO: 764323 - DNA, 75 bp, synthetic construct
  source 1..75: mol_type = other DNA
cgcagttatctggctttgcgctgatgatgatggctagagatgacgataagcgtatttttacccgtaacgtgcgac

SEQ ID NO: 764324 - DNA, 75 bp, synthetic construct
  source 1..75: mol_type = other DNA
attcagtcgtttaacagcaaaatccgcaagaaaatggcccgcacctcggatggcccaaccgccattgcgtttatg

SEQ ID NO: 764325 - DNA, 75 bp, synthetic construct
  source 1..75: mol_type = other DNA
aattgctaaaggcccggacgctgaacaagctctggcggcattccgtcaccttgccgaaaataacttcggtgaatc

SEQ ID NO: 764326 - DNA, 75 bp, synthetic construct
  source 1..75: mol_type = other DNA
ctggtctataccttgtcgtcgtttaatgcagacatgttgctggaaaaaaacggcaaatgcgtgataccagagagt

SEQ ID NO: 764327 - DNA, 75 bp, synthetic construct
  source 1..75: mol_type = other DNA
aactgggtttaccgtcctccgacactgaaatctctgacacatgtcctccgtacgatgaagaagcccgttctctgt

SEQ ID NO: 764328 - DNA, 75 bp, synthetic construct
  source 1..75: mol_type = other DNA
agaccgtgattatttaaacactatccctaatgtcgaagtgactggaactgttaatgatatcaatgaagcatgtag

SEQ ID NO: 764329 - DNA, 75 bp, synthetic construct
  source 1..75: mol_type = other DNA
tgctggctcccgagatcgccgcaaaagtacgtttgtgtgctgcaccgttggtcgaaggtacactggcagcaacgg

SEQ ID NO: 764330 - DNA, 75 bp, synthetic construct
  source 1..75: mol_type = other DNA
ggtttgtcagcaaggtgaaaaactgtatgcgatacaaccggaagagacattaacactggatgtaaaagcgcaaca

SEQ ID NO: 764331 - DNA, 75 bp, synthetic construct
  source 1..75: mol_type = other DNA
aacaagatgctggtatctggcacgcatactcaatggaagctgatcgacctccagtcggacctcttcactgtagta

SEQ ID NO: 764332 - DNA, 75 bp, synthetic construct
  source 1..75: mol_type = other DNA
gtgattacaccgattgcacaggccgcaaactaccttgctatcaaataacccgcgacggctttgcgtttcttgcta

SEQ ID NO: 764333 - DNA, 75 bp, synthetic construct
  source 1..75: mol_type = other DNA
cacgccagaattatggtgggctgggcaggggagccgaaaggctcgccggtttccgtatgcgccggtagttccaac

SEQ ID NO: 764334 - DNA, 75 bp, synthetic construct
  source 1..75: mol_type = other DNA
aaagtgatggaagccatcgaatccgttgccgacgcagaccatgtactggtcatgatggacatcggtagcgcgttg

SEQ ID NO: 764335 - DNA, 75 bp, synthetic construct
  source 1..75: mol_type = other DNA
ctgcaatttcgggacgttacactgttccggcaccttataaagcgggtgccgggattggcgtcctgaaattcaata

SEQ ID NO: 764336 - DNA, 75 bp, synthetic construct
  source 1..75: mol_type = other DNA
tcgcgcctatggcgatttagtgcgtggttattacatcacccgtgatggtctgatgatgctacagcttgggttaag

SEQ ID NO: 764337 - DNA, 75 bp, synthetic construct
  source 1..75: mol_type = other DNA
ataaagattatttatacccacaaggccatcataaagttaaagtttatggtaatggagttgacacaaaaaatttaa

SEQ ID NO: 764338 - DNA, 75 bp, synthetic construct
  source 1..75: mol_type = other DNA
cgatatcatggcgttcctcaatactaccgtggtcgccagcgccggacatgcgccgcaaatcttgcctcgtcgcga

SEQ ID NO: 764339 - DNA, 75 bp, synthetic construct
  source 1..75: mol_type = other DNA
gcgtgggcggtgacggtcggttctgccattacgcgtcttgaacacatttgtcagtggtacaacacagcgatgaaa

SEQ ID NO: 764340 - DNA, 75 bp, synthetic construct
  source 1..75: mol_type = other DNA
aagggcgttacaacacgcctgctcaggcggcagatgcgatgcgccacggcgcgtgggcggtgacggtcggttctg

SEQ ID NO: 764341 - DNA, 75 bp, synthetic construct
  source 1..75: mol_type = other DNA
gccgctgccggacatcacgcaggagcgttttttacgcctgccggaagtgatgcacctgtgcggcctgtcacgctc

SEQ ID NO: 764342 - DNA, 75 bp, synthetic construct
  source 1..75: mol_type = other DNA
actgtatccgtaagtggcgttgcctcttcaccgatggatatgcgtgaaatgctgaacaaaaaagcggaagagaag

SEQ ID NO: 764343 - DNA, 75 bp, synthetic construct
  source 1..75: mol_type = other DNA
gataccggctcgccccccagttacgcccgcacgttatacaaccgttttgttgtcaatttacagcaaactggctgt

SEQ ID NO: 764344 - DNA, 75 bp, synthetic construct
  source 1..75: mol_type = other DNA
tttctgcaaaaaattataatcatgttcacaaaattggatatttaaaactaataggagtgaaagcagataaagatc

SEQ ID NO: 764345 - DNA, 75 bp, synthetic construct
  source 1..75: mol_type = other DNA
catgatggcgaccctgaaatcgaacatgacgtgcctgaatattgcctgcgccggcgccctgattgacgccatgat

SEQ ID NO: 764346 - DNA, 75 bp, synthetic construct
  source 1..75: mol_type = other DNA
acatgatgcacaccaccacttctccgcactacggtatcgtggcgtccactgaaaccgctgcggcgatgatgaaag

SEQ ID NO: 764347 - DNA, 75 bp, synthetic construct
  source 1..75: mol_type = other DNA
ggtacgcatcacggcctatattgaagatgttgatgcgctggcgcaggcgggcgcggacattatcgccattgacgg

SEQ ID NO: 764348 - DNA, 75 bp, synthetic construct
  source 1..75: mol_type = other DNA
aaatttagccataagaaatttactagatggcgtggaattaactaacggggcacttaaaaaaaatcattcttttgg

SEQ ID NO: 764349 - DNA, 75 bp, synthetic construct
  source 1..75: mol_type = other DNA
gttctcttatgatgcaatatcacaagaacttgtcataaaaaaagaaaataacactgaaatcctctctggtggaaa

SEQ ID NO: 764350 - DNA, 75 bp, synthetic construct
  source 1..75: mol_type = other DNA
atgagcaataaccttaatgaatgtgacgatacattctggaatggcgttattctcggctattggctgaagtatacc

SEQ ID NO: 764351 - DNA, 75 bp, synthetic construct
  source 1..75: mol_type = other DNA
agataattccatcctccttcctgaaggaggatgatgctactcaaaaaaaaagtaatgaatttattgctgaagcca

SEQ ID NO: 764352 - DNA, 75 bp, synthetic construct
  source 1..75: mol_type = other DNA
acaggggatgcccttcaacattatggatggtcaattggctgtctattcacctaacggaactaaaaagagctgcgg

SEQ ID NO: 764353 - DNA, 75 bp, synthetic construct
  source 1..75: mol_type = other DNA
caatagcaaacaagccatatgacggcccgaacgagatagcagatcgcgacggcttgtctgccaggataagcccga

SEQ ID NO: 764354 - DNA, 75 bp, synthetic construct
  source 1..75: mol_type = other DNA
ttgatttcgacggtccgctggatgtcgatcagaatcctgaattcagggcgcagcagacctttgacgaaaatcagg

SEQ ID NO: 764355 - DNA, 75 bp, synthetic construct
  source 1..75: mol_type = other DNA
cgccacgctgtatggcattgaactggggtattacagccgtttgcgtctgtttaagctggtattgctgaatatcgc

SEQ ID NO: 764356 - DNA, 75 bp, synthetic construct
  source 1..75: mol_type = other DNA
ttgttgggtcacggcaattcgcccaccaaccgtaccggctggcaccgcgcggttgcgtctgaccttaactgcggc

SEQ ID NO: 764357 - DNA, 75 bp, synthetic construct
  source 1..75: mol_type = other DNA
atgaccgaaccgttaaaaccacgtattgatttcgacggtccgctggaggtcgatcagaaccctaaattcagggcg

SEQ ID NO: 764358 - DNA, 75 bp, synthetic construct
  source 1..75: mol_type = other DNA
cgctacgctctatggcattgaactgggttattacagccgtttgcgcctgttcaaactggtattgctgaatatcgc

SEQ ID NO: 764359 - DNA, 75 bp, synthetic construct
  source 1..75: mol_type = other DNA
caaacgcccaccacaggtggatgttttgatggggggcataccgtgtaccggcgcgtcaaagtcaggtcgcagtaa

SEQ ID NO: 764360 - DNA, 75 bp, synthetic construct
  source 1..75: mol_type = other DNA
tttaattctgttaatgaactataaccatccgtatacctttaaagcgcaaaaagcggttatttctattccagttgt

SEQ ID NO: 764361 - DNA, 75 bp, synthetic construct
  source 1..75: mol_type = other DNA
tgattttctttcttttctttttcactcaaaggatcgtatttatcgatatattcgcttgtttatctcaggaaaaat

SEQ ID NO: 764362 - DNA, 75 bp, synthetic construct
  source 1..75: mol_type = other DNA
attgttcagcgtttgcaaaaatcgaaaactgcattgtgggcgtttggcctgacggatgaagtttttgccgcagca

SEQ ID NO: 764363 - DNA, 75 bp, synthetic construct
  source 1..75: mol_type = other DNA
tcggaacccctgaacgttatcgcccagacaacagcgtttcgtgaaatgctgttacgccagcgggtcaatgagggt

SEQ ID NO: 764364 - DNA, 75 bp, synthetic construct
  source 1..75: mol_type = other DNA
gtgccggggtggatatgtcgcagctggcaaccgtcgatatctcgaaatatcagagcactacagaagcggtacaga

SEQ ID NO: 764365 - DNA, 75 bp, synthetic construct
  source 1..75: mol_type = other DNA
aacgctgggcagcgtagggatcccgctggaaggtctggcgtttattgccggtgttgaccgtatcctcgacatggc

SEQ ID NO: 764366 - DNA, 75 bp, synthetic construct
  source 1..75: mol_type = other DNA
tgacatggcggctgaatgcaaaactgtacttttaccccggcccggaatccgaacctattctggctgcggctgaat

SEQ ID NO: 764367 - DNA, 75 bp, synthetic construct
  source 1..75: mol_type = other DNA
tgcgggtaacctgaacaccgagcgcctggttcgtattccggctaccgaaaccaccgatgcagagatggaaagcga

SEQ ID NO: 764368 - DNA, 75 bp, synthetic construct
  source 1..75: mol_type = other DNA
taccgccgccgcaaattattgaggtgctggattttgaagtgattctggcggatgtcaaagccgtcatgatcgcgg

SEQ ID NO: 764369 - DNA, 75 bp, synthetic construct
  source 1..75: mol_type = other DNA
gaaaacattttatctaaatatgaaattcatacagataatgtatgcacgatgatgaaaaagatagaggaacagcaa

SEQ ID NO: 764370 - DNA, 75 bp, synthetic construct
  source 1..75: mol_type = other DNA
ttcccgctcactgtggaatgcggaacagtctcaggatgtagagacgctttgcgcatccgttattacaacatggtc

SEQ ID NO: 764371 - DNA, 75 bp, synthetic construct
  source 1..75: mol_type = other DNA
tgccgttcgatcccgcaacagccgggacttaccgtgggttcggcctgctgaatcaatttctggttcaagcccccg

SEQ ID NO: 764372 - DNA, 75 bp, synthetic construct
  source 1..75: mol_type = other DNA
aatgcgctggcggtgctggtgattgccaagtgggaacacaaatttgaccgtaagaaagcgctggcttatgagcgc

SEQ ID NO: 764373 - DNA, 75 bp, synthetic construct
  source 1..75: mol_type = other DNA
acctgtccatctggcaggaaatcattctggtgctgacgctgatggtgacctcgaaagggattgctggcgtgccgg

SEQ ID NO: 764374 - DNA, 75 bp, synthetic construct
  source 1..75: mol_type = other DNA
cattatgggcacgattttgtcgctggtgccgacgaacattgtggcgtcgatggcgaaaggcgaaatgctgccgat

SEQ ID NO: 764375 - DNA, 75 bp, synthetic construct
  source 1..75: mol_type = other DNA
gccactaatggaagcgcttggaaaagcaattgaggctggcgatcaggaggctgcaacgcgtctgttcgggcagct

SEQ ID NO: 764376 - DNA, 75 bp, synthetic construct
  source 1..75: mol_type = other DNA
gaatggttggtattcctctgtcggtactcacctgccttgcggatatcagtaccgcgttgagccgtctggcgggta

SEQ ID NO: 764377 - DNA, 75 bp, synthetic construct
  source 1..75: mol_type = other DNA
tggtgtgacaaccatattgtccacactgaacgagacaatagcgcggtgttgctgtgctggcatcacgataaccat

SEQ ID NO: 764378 - DNA, 75 bp, synthetic construct
  source 1..75: mol_type = other DNA
cgtatgacgatcgcgctacagcatatgttcagatgatggaagaacgcgccgcgccgatgcgtgcaaaagtatgcc

SEQ ID NO: 764379 - DNA, 75 bp, synthetic construct
  source 1..75: mol_type = other DNA
agaaatacaaccagcgacggcttgagtataacgatatgctggcgcgcgatcagcctgtgatggcggcgcttggaa

SEQ ID NO: 764380 - DNA, 75 bp, synthetic construct
  source 1..75: mol_type = other DNA
tcaaaaggctaagggggaacaggccagagatgatagtgcggcctctgcatctgagtttatccgtggtctgaaaca

SEQ ID NO: 764381 - DNA, 75 bp, synthetic construct
  source 1..75: mol_type = other DNA
actggtcggcaagtaataaccgtatttctgaagatattaattggtttcccgggattagcctggaacacgcattac

SEQ ID NO: 764382 - DNA, 75 bp, synthetic construct
  source 1..75: mol_type = other DNA
cgttggcgattattgcgctaatgaccctgttcaactccttaagcaaccatgcggtagggcgactggaagtgattc

SEQ ID NO: 764383 - DNA, 75 bp, synthetic construct
  source 1..75: mol_type = other DNA
tgttgattatgctgatgacggcggcactgaatttaggctcactcgccagcgttgccagcgccacctttttgattt

SEQ ID NO: 764384 - DNA, 75 bp, synthetic construct
  source 1..75: mol_type = other DNA
gggggcgagctatcccagcaatggcggcattatcgacttctttcgtcgcggattaggcaacggcgtcttttcgct

SEQ ID NO: 764385 - DNA, 75 bp, synthetic construct
  source 1..75: mol_type = other DNA
atttaagtattcaggagctgtgctggtgggctttcatgcgcaacatgatgcacctgatgccggaagaagtctgcc

SEQ ID NO: 764386 - DNA, 75 bp, synthetic construct
  source 1..75: mol_type = other DNA
aaagcgaatgcaaaatttgaggtcaaagccgctgcctttgaaggtgagttgatcccggcgtctcagatcgaccgc

SEQ ID NO: 764387 - DNA, 75 bp, synthetic construct
  source 1..75: mol_type = other DNA
gtacgttggtgatgttgttggtgatcgttggctttatctacagcctgtggtcccagggcagccgtgcgttgatat

SEQ ID NO: 764388 - DNA, 75 bp, synthetic construct
  source 1..75: mol_type = other DNA
ttctcgtgttggagcaggaataggtgaatgtgctgtaattgatacagatcttgaattttcaatttatgttagtac

SEQ ID NO: 764389 - DNA, 75 bp, synthetic construct
  source 1..75: mol_type = other DNA
ctgcaacgcgtctgttcgggcagttgccaaagggacatccattaattcttatgtcaaacgaaggctatgcagcga

SEQ ID NO: 764390 - DNA, 75 bp, synthetic construct
  source 1..75: mol_type = other DNA
attcaaaaggctaagagtgaacaggccagagatgatagcgcagcctctgcatctgagtttatccgtggactgaaa

SEQ ID NO: 764391 - DNA, 75 bp, synthetic construct
  source 1..75: mol_type = other DNA
tttaaatcggtgaagccgaagaaattgaatgccgagattatcaagccagtgttcctcgatgagaagaacggcaaa

SEQ ID NO: 764392 - DNA, 75 bp, synthetic construct
  source 1..75: mol_type = other DNA
atcaaaccgtgctggcggtgcctgttgataaggctgttgctcttgtcagggatcgcagtaaattcgcggaaattt

SEQ ID NO: 764393 - DNA, 75 bp, synthetic construct
  source 1..75: mol_type = other DNA
gaacataataaagacgttgatcagcggaactttgattacagagccaaagttgatgaccgcaattacacactgcag

SEQ ID NO: 764394 - DNA, 75 bp, synthetic construct
  source 1..75: mol_type = other DNA
gtacatatgatcttaatgtcaaaaatgccgatcgtgaatatgcgctgaaagagagggaacacgccgcagcgcaga

SEQ ID NO: 764395 - DNA, 75 bp, synthetic construct
  source 1..75: mol_type = other DNA
tctgagctctcagtaaatatcaatacggttctgacgagtcgcttactgtctagcaaagctagtgcgttattcaat

SEQ ID NO: 764396 - DNA, 75 bp, synthetic construct
  source 1..75: mol_type = other DNA
atgttattcaacaacaacgactggaaactgtcagtcaccgacatcaatctctacgagaatactgtgagtctggac

SEQ ID NO: 764397 - DNA, 75 bp, synthetic construct
  source 1..75: mol_type = other DNA
atgttattcaacaacaacaactggaagctgtcagtcaccgacatcaatctctacgagaatactgtgagtctggac

SEQ ID NO: 764398 - DNA, 75 bp, synthetic construct
  source 1..75: mol_type = other DNA
aaacgctcgattaccaaagcccgttgcccaccacgcgctatacgctgccggagctgttagacaattcccagcagt

SEQ ID NO: 764399 - DNA, 75 bp, synthetic construct
  source 1..75: mol_type = other DNA
cgtgagtctatggagctactggaagctctggctgaagctggtgtagctattggcaacttcttcagtaatgacctg

SEQ ID NO: 764400 - DNA, 75 bp, synthetic construct
  source 1..75: mol_type = other DNA
atcaatctctacgagaatactgtgagtctggacggtcagttctatccgctgtccctcgctatcaagaccctgatt

SEQ ID NO: 764401 - DNA, 75 bp, synthetic construct
  source 1..75: mol_type = other DNA
gggcattgccgacggattcttgatacataaccgcgacatcgtgcagcggatggatgattcggtggtgcgcgaaag

SEQ ID NO: 764402 - DNA, 75 bp, synthetic construct
  source 1..75: mol_type = other DNA
cggtacacacggcaaaaccaccaccgcgggaatggcgacctggattctggaacagtgtggttacaaaccgggatt

SEQ ID NO: 764403 - DNA, 75 bp, synthetic construct
  source 1..75: mol_type = other DNA
caggcatggagcagacaagaaggcatacaactggacacctacaaaagaagtcacttttaaaatcactggctcggg

SEQ ID NO: 764404 - DNA, 75 bp, synthetic construct
  source 1..75: mol_type = other DNA
cgcgatgatggcgaaagaggatcgcatcgttgccgaccgtcttagtcatgcttcgttgctggaggctgccagttt

SEQ ID NO: 764405 - DNA, 75 bp, synthetic construct
  source 1..75: mol_type = other DNA
tggcgcatcaggcgctggaagaagaactggccgagtggctgggctattcgcgggcgctgctgtttatctccggtt

SEQ ID NO: 764406 - DNA, 75 bp, synthetic construct
  source 1..75: mol_type = other DNA
gtggaattaacgcgccgctggcatcgtcgtgtggacgtttgttcgatgccgtagcggcggcgccggggtgggggc

SEQ ID NO: 764407 - DNA, 75 bp, synthetic construct
  source 1..75: mol_type = other DNA
cgtgcctggacaccgttcctgttcctgaccgctaccgtaacactgtggagtatcccgccgtttaaagccctgttc

SEQ ID NO: 764408 - DNA, 75 bp, synthetic construct
  source 1..75: mol_type = other DNA
ctggttctctgccaccggtactgccattctgtttgctgcgctgctctctatcgtctggctgaagatgaaaccctc

SEQ ID NO: 764409 - DNA, 75 bp, synthetic construct
  source 1..75: mol_type = other DNA
gcttcgggtggtgtgctgtatgagtgggtgatcaacattccggtgccgtatctcgacaaactggttgcccgtatg

SEQ ID NO: 764410 - DNA, 75 bp, synthetic construct
  source 1..75: mol_type = other DNA
cctgatgcaagcggcaaaagagagcggcttttgccaacgttttctgtttatctcttcgctggcggcgcgccatcc

SEQ ID NO: 764411 - DNA, 75 bp, synthetic construct
  source 1..75: mol_type = other DNA
ctggttctctgccaccggcaccgccattctgtttgctgccctgctctcgattgtctggctgaagatgaaaccatc

SEQ ID NO: 764412 - DNA, 75 bp, synthetic construct
  source 1..75: mol_type = other DNA
tttatgaccattatcgtgctgttctggatcatagcgattatggacggctggcgcggtatcaaagagacgtggcct

SEQ ID NO: 764413 - DNA, 75 bp, synthetic construct
  source 1..75: mol_type = other DNA
cgcgcctgcttgcttcctccagtccagggttgcgactggtggtgacagaaggcgtattcagtatggacggcgata

SEQ ID NO: 764414 - DNA, 75 bp, synthetic construct
  source 1..75: mol_type = other DNA
accacttgtcggcaagatcgcagtgcttatgccaacgcggctgagcggctattgatggctattgatggctattgg

SEQ ID NO: 764415 - DNA, 75 bp, synthetic construct
  source 1..75: mol_type = other DNA
aagcgtctgatcccattggcaaagataacgatagccacttgatacgtcttgttagcggtgccggactggttgtcg

SEQ ID NO: 764416 - DNA, 75 bp, synthetic construct
  source 1..75: mol_type = other DNA
gcaccactaccgtgactcaccgcttcactaaaaatctgcgtcaccacgtagaaaatgccgatctattgatcgttg

SEQ ID NO: 764417 - DNA, 75 bp, synthetic construct
  source 1..75: mol_type = other DNA
aaacgacaatgctgccattcccgctctatgtcgtattttgcgcaccagccataccttgtttaccgtgagcgaaca

SEQ ID NO: 764418 - DNA, 75 bp, synthetic construct
  source 1..75: mol_type = other DNA
attgcaagcccattggcgcaaaccgaacgggatttactcggtcatagcctaaacgacaatgctgccattcccgct

SEQ ID NO: 764419 - DNA, 75 bp, synthetic construct
  source 1..75: mol_type = other DNA
atgcgaacacggaaagcatcaaccgcctaaaccgcgtcctgagctcattcattgccgaattgttggcaaaaaaaa

SEQ ID NO: 764420 - DNA, 75 bp, synthetic construct
  source 1..75: mol_type = other DNA
tatgctgatgctcgacagcagggatattaccggcaatatcagcgaccgtctgatgagcatgaccctgacggataa

SEQ ID NO: 764421 - DNA, 75 bp, synthetic construct
  source 1..75: mol_type = other DNA
tgaagataaacatcatatcaaccaagcctttgataagcaaagtgatttatcaaatgtgctaacgtttcttgatat

SEQ ID NO: 764422 - DNA, 75 bp, synthetic construct
  source 1..75: mol_type = other DNA
cgggcgtgatcggtgaacaggggcgcggtagctgctggcaacagcaggtgaaaccggaacttctggtggtgactt

SEQ ID NO: 764423 - DNA, 75 bp, synthetic construct
  source 1..75: mol_type = other DNA
cgacggtattctggtgcagttaccgcttcctgcaggaattgattacgttaaagtgctggagcggattcacccgga

SEQ ID NO: 764424 - DNA, 75 bp, synthetic construct
  source 1..75: mol_type = other DNA
tacaacgtcggtcgtctgtgccagcgcgcgccgcgtctgcgtccctgcaccccgcgcggtatcgtcacgctgctt

SEQ ID NO: 764425 - DNA, 75 bp, synthetic construct
  source 1..75: mol_type = other DNA
gcgaaattcctgacccgtcttgcagaacgcaacggcggtgaggtgtcggtaaaaatgggaaaactgttgtttctc

SEQ ID NO: 764426 - DNA, 75 bp, synthetic construct
  source 1..75: mol_type = other DNA
ttgccattgctcaatacctcagctctaactttattgggccggaactgccagacattatctcttcgctggtatcgc

SEQ ID NO: 764427 - DNA, 75 bp, synthetic construct
  source 1..75: mol_type = other DNA
agagcttccgaagacttgatcgaaaaagtcagaaccgcactgagcgcggaggacgtccgcccggtgggagaccgt

SEQ ID NO: 764428 - DNA, 75 bp, synthetic construct
  source 1..75: mol_type = other DNA
tcggaacccctgaacgttatcgcccaggcaacagcgtttcgtgaaatgctgttacgccagcggatcaatgagggt

SEQ ID NO: 764429 - DNA, 75 bp, synthetic construct
  source 1..75: mol_type = other DNA
cgggcgtacgacggcctgagtgttgctggcccgtcaggtgcatacgagtattttgcacgcagcgccagcggtctg

SEQ ID NO: 764430 - DNA, 75 bp, synthetic construct
  source 1..75: mol_type = other DNA
gtgcactggctctgagtttaggtttggcgttatctccgctctctgcaacggcggctgagacttcttcagcaacga

SEQ ID NO: 764431 - DNA, 75 bp, synthetic construct
  source 1..75: mol_type = other DNA
tttaaatcagtgaaaccgaagaaactgaatgctgagattatcaagccggtgttcctcgatgagaagaacggcaag

SEQ ID NO: 764432 - DNA, 75 bp, synthetic construct
  source 1..75: mol_type = other DNA
atgagcgaaatcagatttgtaactctgtcatctgacactgacattaacaaggttattcaggaaggtcttactcaa

SEQ ID NO: 764433 - DNA, 75 bp, synthetic construct
  source 1..75: mol_type = other DNA
cgtctccggccaacgtgacggtttccattctgtccactgaaggcgacggcacagcaacggaggcgttgcttaata

SEQ ID NO: 764434 - DNA, 75 bp, synthetic construct
  source 1..75: mol_type = other DNA
tttcttgaggcactgaaagccagcggtaagcagcgaattttgctcaccaatgcgcatccgcacaacctggcggta

SEQ ID NO: 764435 - DNA, 75 bp, synthetic construct
  source 1..75: mol_type = other DNA
cctatcccgccgaacagcgtgaagccgtttccgccgcgctggagctggaatcggaaccccttaacgttatcgccc

SEQ ID NO: 764436 - DNA, 75 bp, synthetic construct
  source 1..75: mol_type = other DNA
cgggcatatgacggtctgagtgttgctggcccgtcaggtgcatacgagtattttgcccgcagcgccagcggtctg

SEQ ID NO: 764437 - DNA, 75 bp, synthetic construct
  source 1..75: mol_type = other DNA
gttacgccagcgggttaacgagggcgcacgcgcctgcatgttaagccacagcgccgggacagacctggacaacct

SEQ ID NO: 764438 - DNA, 75 bp, synthetic construct
  source 1..75: mol_type = other DNA
cgtctccggcctgtgtgacggtttccattctgtccactgaaggcgacggcacagcaacggaggcgttgcttaata

SEQ ID NO: 764439 - DNA, 75 bp, synthetic construct
  source 1..75: mol_type = other DNA
gccaggtgaaacgcggtgagctgggtattatggggactgagctgaactccgaactggcgaaagcgatgaaagttg

SEQ ID NO: 764440 - DNA, 75 bp, synthetic construct
  source 1..75: mol_type = other DNA
acgtgcgcaaaggcgaatggtcagcgaaagcggcggcgttgttacacgttccctgtacggcatttgcgccattgg

SEQ ID NO: 764441 - DNA, 75 bp, synthetic construct
  source 1..75: mol_type = other DNA
gtttgttaccgaatcgggcaagatatcatcaattacagcgttatcagcacaaatggaaaagctggtatcagttga

SEQ ID NO: 764442 - DNA, 75 bp, synthetic construct
  source 1..75: mol_type = other DNA
cttgggttctcgcaaccggtcagcgtgacgctggccggacatgaccatatggtgggtgcgcgggcgttgcagatg

SEQ ID NO: 764443 - DNA, 75 bp, synthetic construct
  source 1..75: mol_type = other DNA
attctgtttgctgcactgctctcgattgtctggctgaagatgaaaccgtctgacgctatcagcaccttcggcagc

SEQ ID NO: 764444 - DNA, 75 bp, synthetic construct
  source 1..75: mol_type = other DNA
atcccgccgggaatatctggctttccagtctgatagcatcgcttcccatcctgtttttcttctttgcgctgatta

SEQ ID NO: 764445 - DNA, 75 bp, synthetic construct
  source 1..75: mol_type = other DNA
ggttcgggttcgccctataaaaatcgccatacccgtggattattttatgggcttggcgatacgttaaatattgac

SEQ ID NO: 764446 - DNA, 75 bp, synthetic construct
  source 1..75: mol_type = other DNA
gacagaagtatttatggaaatggcaataaataactttagaaaacatcttcaggtcatgattgattgtatggggaa

SEQ ID NO: 764447 - DNA, 75 bp, synthetic construct
  source 1..75: mol_type = other DNA
ccaattggaaagatgttgtacatataccaaatgacatgatatccgattttgaaaattatattttgtcagaaaatg

SEQ ID NO: 764448 - DNA, 75 bp, synthetic construct
  source 1..75: mol_type = other DNA
gtgtggtgactgttacgaatgatgagacagaaatatttatggagatggctattaataactttaaaaagcatcttc

SEQ ID NO: 764449 - DNA, 75 bp, synthetic construct
  source 1..75: mol_type = other DNA
gtccggcgaaacgccgattgctggaagaagtggtgtacgtcataacagaaacagtgagaaaaacggcgaggcaaa

SEQ ID NO: 764450 - DNA, 75 bp, synthetic construct
  source 1..75: mol_type = other DNA
gtttcagcttttacccaaacaaattcccggagaaacgctccaggcagggaatgttaataccagtttgacggtcga

SEQ ID NO: 764451 - DNA, 75 bp, synthetic construct
  source 1..75: mol_type = other DNA
ttgtggtgactgttacgaatgatgaaactgaaatatttgtggagatggctattaataactttaaaaagcatcttc

SEQ ID NO: 764452 - DNA, 75 bp, synthetic construct
  source 1..75: mol_type = other DNA
gtccggtgaagtcacacccagtaaggcagaccggcttatcaccgaacgtctggtacaggcgctggccctggttga

SEQ ID NO: 764453 - DNA, 75 bp, synthetic construct
  source 1..75: mol_type = other DNA
atcgccgcaggcagcgcaaggcagaacgccagcgtcagcgcagcaccattgtgatggccgtttctgaatttcgct

SEQ ID NO: 764454 - DNA, 75 bp, synthetic construct
  source 1..75: mol_type = other DNA
ttttattattgacattttgagcaagcatcgaattgcggcatatgaacattggtggcgagacaaaacagaacagga

SEQ ID NO: 764455 - DNA, 75 bp, synthetic construct
  source 1..75: mol_type = other DNA
aaataacggtgctgatacgggttctgttaacgaacaaaatcctcaaggcggtgatgaatatgaacagtttaaaaa

SEQ ID NO: 764456 - DNA, 75 bp, synthetic construct
  source 1..75: mol_type = other DNA
agcaataacaataatgaaaccggcactgactttgccggtgacagcctgggtggtaatgatcaggctcaaaataat

SEQ ID NO: 764457 - DNA, 75 bp, synthetic construct
  source 1..75: mol_type = other DNA
aggcagaccggcttatcaccgaacgtctggtacaggcactgggcctggtggatatccgggtgccggaccatctga

SEQ ID NO: 764458 - DNA, 75 bp, synthetic construct
  source 1..75: mol_type = other DNA
tcggcgaactaaatgccaatctggatatcagtattgccgacccagccaaatcttcatcatccacaaacaaagata

SEQ ID NO: 764459 - DNA, 75 bp, synthetic construct
  source 1..75: mol_type = other DNA
caatttatcatccagtataacattgcgatgcagaatgaaccgccccgggaatcctggagactaaactccctgaga

SEQ ID NO: 764460 - DNA, 75 bp, synthetic construct
  source 1..75: mol_type = other DNA
atgatacgtaagtcagctacaggtgttattgttgcgttagccgtaatctggggtggtggcacatggtacacaggt

SEQ ID NO: 764461 - DNA, 75 bp, synthetic construct
  source 1..75: mol_type = other DNA
catttagaacgtgaagtacgtaaagctgtaaaagaacgggcattggataaaattaaactgttcggttctgatggc

SEQ ID NO: 764462 - DNA, 75 bp, synthetic construct
  source 1..75: mol_type = other DNA
aagataaagactttatcaatgctaatctgacttatggtattgagaaattaaccaaaggaaatcaggcgctaggta

SEQ ID NO: 764463 - DNA, 75 bp, synthetic construct
  source 1..75: mol_type = other DNA
accgcaaaacagcttaatttatctgaaggaatggatgcggaaaaagcgcaaaagcgggctgataaacaaatcagc

SEQ ID NO: 764464 - DNA, 75 bp, synthetic construct
  source 1..75: mol_type = other DNA
agatgcctcaggaggacagccaccaggatcagatggttccggcgggggaagcaagggttttgcggcctcgttctc

SEQ ID NO: 764465 - DNA, 75 bp, synthetic construct
  source 1..75: mol_type = other DNA
agttcgtcaggcagacctttgttgaatgggctgccaagacggttaattcatcatactgggccaaactgtattatc

SEQ ID NO: 764466 - DNA, 75 bp, synthetic construct
  source 1..75: mol_type = other DNA
tacttcagcaactggttgagcaacgtcgtcagttggttgaagataaacgacgctttgtgaaccggataatcaata

SEQ ID NO: 764467 - DNA, 75 bp, synthetic construct
  source 1..75: mol_type = other DNA
ggagcagtgggctgaactgctggttacgctggaaagtggtgaagattacaacgtcgtccccatgaaaaaatatag

SEQ ID NO: 764468 - DNA, 75 bp, synthetic construct
  source 1..75: mol_type = other DNA
agatatagttacgtctctctttttggtgttaattcattggacgcattaaaatactccatctttgaaaatacaatt

SEQ ID NO: 764469 - DNA, 75 bp, synthetic construct
  source 1..75: mol_type = other DNA
agttgtcagactttatttcatctgcagaacctgaggtaatggctattcagggtgagtgggggattgggaaaacct

SEQ ID NO: 764470 - DNA, 75 bp, synthetic construct
  source 1..75: mol_type = other DNA
ccggctaaccaggcatttgaacagtggctggggctgctggtaaaagatgccgtactggatgaagagacgataaag

SEQ ID NO: 764471 - DNA, 75 bp, synthetic construct
  source 1..75: mol_type = other DNA
tggtcgccaatgatatccaccattatgataacagtcgcgataatcgttttggtagtgatgtcccttatagcgata

SEQ ID NO: 764472 - DNA, 75 bp, synthetic construct
  source 1..75: mol_type = other DNA
gtgcttcaatgcaaggcattggtggctttggtgccggtgcaattattggggctgcagctgcagcaggagccgcaa

SEQ ID NO: 764473 - DNA, 75 bp, synthetic construct
  source 1..75: mol_type = other DNA
aaatactggttctatagatacacaaacatcacaaagtggtgatgaatacgaacaatttaaaaacaagtcaaagtt

SEQ ID NO: 764474 - DNA, 75 bp, synthetic construct
  source 1..75: mol_type = other DNA
ttaattattgggattggacaatcatttttagatcaatatttttctcttattaaagatgatgttcctgatctaaat

SEQ ID NO: 764475 - DNA, 75 bp, synthetic construct
  source 1..75: mol_type = other DNA
tatattgcttgggtttggtggttcgaaatggacctctgatatagcaattaattacttacgaactgttttatcgat

SEQ ID NO: 764476 - DNA, 75 bp, synthetic construct
  source 1..75: mol_type = other DNA
cgatcgtcagagtaaccacgaacagggtaatgactccaacttactgatagtgttttatgttcagataatgcccga

SEQ ID NO: 764477 - DNA, 75 bp, synthetic construct
  source 1..75: mol_type = other DNA
gctggagtcaaagtgaaggagtgagtatgagcgagttaaagccatgcccgttttgcggagacaacgcgatgatta

SEQ ID NO: 764478 - DNA, 75 bp, synthetic construct
  source 1..75: mol_type = other DNA
ttaagagcgcaacttactgaagcaaaatataatcttgagcagactgtcattcgcgcgccgagcaatggctacatt

SEQ ID NO: 764479 - DNA, 75 bp, synthetic construct
  source 1..75: mol_type = other DNA
tcgacgatgcgcggcaaaatttcctcgcgcaggatgcgctggtgaaaggctcggtggcggagcaggcgcagatcc

SEQ ID NO: 764480 - DNA, 75 bp, synthetic construct
  source 1..75: mol_type = other DNA
catgctcgtacacgtataacagatgaaagaacaggtgatacgtatgattatagccgccgtactgatttatatggg

SEQ ID NO: 764481 - DNA, 75 bp, synthetic construct
  source 1..75: mol_type = other DNA
tctggttcccccagcacatccgcgcacgcgtcaccggctatttcctgtttggtgccccactagcttttatcatcg

SEQ ID NO: 764482 - DNA, 75 bp, synthetic construct
  source 1..75: mol_type = other DNA
tttagtcattgcgtggttaatgagtaaaacgccattattcataccgttaatgcaggtcacggttcgtctgccgca

SEQ ID NO: 764483 - DNA, 75 bp, synthetic construct
  source 1..75: mol_type = other DNA
acgtggcgctggcgtggacggtctttaaaatcttccgcattccggtaaatcagtggacgctggcgacggcggcgc

SEQ ID NO: 764484 - DNA, 75 bp, synthetic construct
  source 1..75: mol_type = other DNA
aatgatgaaaaacaaaaacaaactgagatctgcgccacgaaaccagcggcaggtgaaatttatcgtttcccaagt

SEQ ID NO: 764485 - DNA, 75 bp, synthetic construct
  source 1..75: mol_type = other DNA
ctaactccttctatgccatccctacaagccagaagaagtaatgtgtcaaaatcaaagcctccgggctactggaaa

SEQ ID NO: 764486 - DNA, 75 bp, synthetic construct
  source 1..75: mol_type = other DNA
tgaaacacaatccggctcttctactgatgagaatcaaagagctgttttggttgcaccagctcctcatactcgtat

SEQ ID NO: 764487 - DNA, 75 bp, synthetic construct
  source 1..75: mol_type = other DNA
ttctgattctggtacaaatactattctgaaaacatccacctctcaaaacccaaacagggcatccagaagcgcccc

SEQ ID NO: 764488 - DNA, 75 bp, synthetic construct
  source 1..75: mol_type = other DNA
aatgaaacgcaaagacctgtacttgtagcaccacctcctcatactcgtatgcgaggtgttaaatcctatcgtgat

SEQ ID NO: 764489 - DNA, 75 bp, synthetic construct
  source 1..75: mol_type = other DNA
tgatcttgaaatcattgttgatgtcagaagctttactgtggctgttcttgctgaaccagaagagatcgtattacc

SEQ ID NO: 764490 - DNA, 75 bp, synthetic construct
  source 1..75: mol_type = other DNA
atgacaactactttgcatccaaattacgttgttgtatcaaagctaatatctaagtttgacattacacatgatagt

SEQ ID NO: 764491 - DNA, 75 bp, synthetic construct
  source 1..75: mol_type = other DNA
agatagcctcaagcacccgcagcaattttacttaactccctctacctcgccaatcagaaaatcgctccatgaaag

SEQ ID NO: 764492 - DNA, 75 bp, synthetic construct
  source 1..75: mol_type = other DNA
gttcctcaatgccggtaaacgcattgttgaattgaccaaacgttactacgagcaaaacgacgaaagtgcactgcc

SEQ ID NO: 764493 - DNA, 75 bp, synthetic construct
  source 1..75: mol_type = other DNA
ggaaatcgacttcaccatgagtgatattgataagctctcccgcaaggttccacagctgtgtaaagttgcgccaag

SEQ ID NO: 764494 - DNA, 75 bp, synthetic construct
  source 1..75: mol_type = other DNA
tgtggctgaaccggctcaggtgcgtattgcgctgtgggataaatggcttgctcccgtgacgccagataatcccgc

SEQ ID NO: 764495 - DNA, 75 bp, synthetic construct
  source 1..75: mol_type = other DNA
gcgtgccagagaagtggttcttagcgactgggagcctgaattgttgtttgaagttcaggcgcgccatctgaaact

SEQ ID NO: 764496 - DNA, 75 bp, synthetic construct
  source 1..75: mol_type = other DNA
tcccgccgacgttccctctctccagccaggcttttggggattaagcgaagaagacttgttgcaggaatttagcgt

SEQ ID NO: 764497 - DNA, 75 bp, synthetic construct
  source 1..75: mol_type = other DNA
ggccacgtctcgccggaagcggcaagcggcggcagcattggtctgattgaagacggcgatcttatcgctatcgac

SEQ ID NO: 764498 - DNA, 75 bp, synthetic construct
  source 1..75: mol_type = other DNA
aatatgtttcgtgcaggcccggcgggtatccgtaccacccaagcgttctcgcaggattgccgttgggactccctc

SEQ ID NO: 764499 - DNA, 75 bp, synthetic construct
  source 1..75: mol_type = other DNA
gtattctcggcgaactggatcgcgcggggttactgaaccgtgatgtgaaaaacgtacttggcctgacgttgccgc

SEQ ID NO: 764500 - DNA, 75 bp, synthetic construct
  source 1..75: mol_type = other DNA
aggcccgaaaggcggtccggggatgcaggaaatgctctacccaaccagcttcctgaaatcaatggggctcggtaa

SEQ ID NO: 764501 - DNA, 75 bp, synthetic construct
  source 1..75: mol_type = other DNA
cgccatgacgctggatatcgcgatgggcggctctaccaacaccgtacttcacctgctggcggcggcgcaggaagc

SEQ ID NO: 764502 - DNA, 75 bp, synthetic construct
  source 1..75: mol_type = other DNA
cgctgatcaccgacggacgcttctccggcggcacctctggtctttccatcggccacgtctcaccggaagcggcaa

SEQ ID NO: 764503 - DNA, 75 bp, synthetic construct
  source 1..75: mol_type = other DNA
tacctgaatcaggtaagaaaagtttacccaaatcaggtaaaggcgtttacccgaatcaggtaaacacaaaagaca

SEQ ID NO: 764504 - DNA, 75 bp, synthetic construct
  source 1..75: mol_type = other DNA
gatttaagcccggagcaattactgaagttgaatatattcttgacctatcagaatgaattaaacccttacagtgag

SEQ ID NO: 764505 - DNA, 75 bp, synthetic construct
  source 1..75: mol_type = other DNA
cggtaacgtgctaagtccggccaaactccgcgacaagtggacccagctcgaaatcaaccgaaacaagcaacaggc

SEQ ID NO: 764506 - DNA, 75 bp, synthetic construct
  source 1..75: mol_type = other DNA
acaagtgttctgctgcaaaaagtgttctggtaaagcgtgggattttgattcagagcgggcggaatatcggtatta

SEQ ID NO: 764507 - DNA, 75 bp, synthetic construct
  source 1..75: mol_type = other DNA
aaatcaaccgtaacaagcaacaggctggcgtgacagccggaaaaccaaaactcgacctgacaaacactgactgga

SEQ ID NO: 764508 - DNA, 75 bp, synthetic construct
  source 1..75: mol_type = other DNA
tatttttgatgaattaacaagagataaaatccccttctatatgctttcaaaaaatagtataaatcgttattctga

SEQ ID NO: 764509 - DNA, 75 bp, synthetic construct
  source 1..75: mol_type = other DNA
gatttaagtcctgagcaattattgaagctgaatatattcttgatctctcagagtgaattaaacccttacagcgag

SEQ ID NO: 764510 - DNA, 75 bp, synthetic construct
  source 1..75: mol_type = other DNA
atgtgttttatgggaaatctaaaaatgaacaattacccaatgcaaattatggttgaccaagaaactatgaattgg

SEQ ID NO: 764511 - DNA, 75 bp, synthetic construct
  source 1..75: mol_type = other DNA
aaggagcacttgctgaaggaactgagaatgaagctgagctttaccgttccttaactcaaaatggcaatgacagcc

SEQ ID NO: 764512 - DNA, 75 bp, synthetic construct
  source 1..75: mol_type = other DNA
ggccctgtgtgaacctcgcctccatgaacttcgggacctcattacatggggtcggcgtcggggttgattataatc

SEQ ID NO: 764513 - DNA, 75 bp, synthetic construct
  source 1..75: mol_type = other DNA
gctgcttctgacaataacaagactcagagcaccgtctccgaagtcatgagtatcatctccgctgttaatggtctc

SEQ ID NO: 764514 - DNA, 75 bp, synthetic construct
  source 1..75: mol_type = other DNA
ttcccccagtggatcgagtgtagcgaagggtactgtatattcaggtacactgactccagctaatgcagctactct

SEQ ID NO: 764515 - DNA, 75 bp, synthetic construct
  source 1..75: mol_type = other DNA
gctaccttgcggtgtttgtggtggcgatccgtctgcgtcatgatattcacgcctcgttgccaattctcattgtcg

SEQ ID NO: 764516 - DNA, 75 bp, synthetic construct
  source 1..75: mol_type = other DNA
aggtggaaaatataaatacatacggatgaataacattactccggatggttactgggattttgagaatcttaaata

SEQ ID NO: 764517 - DNA, 75 bp, synthetic construct
  source 1..75: mol_type = other DNA
gacacgtctaaatatcgtattgtatacaagaatgaacttgttgttgggtttcctattgacgagggagttcttgga

SEQ ID NO: 764518 - DNA, 75 bp, synthetic construct
  source 1..75: mol_type = other DNA
gagaaagcactggcaggcgtcgagcaaacggcgcaggatcttccggtgttgggcgcggacaccatcgtgattttg

SEQ ID NO: 764519 - DNA, 75 bp, synthetic construct
  source 1..75: mol_type = other DNA
gttctccgcgtcgtcaggagttacttgcgcaacttggcgtgacctttgaacgtattgttacgggcattgaggagc

SEQ ID NO: 764520 - DNA, 75 bp, synthetic construct
  source 1..75: mol_type = other DNA
catcaatggtctgttgaatattgccgaggataaacttagtgacgatgcttttgttgaagttattttcaacaaagc

SEQ ID NO: 764521 - DNA, 75 bp, synthetic construct
  source 1..75: mol_type = other DNA
atggtcaatacaatgcagcaaaaaaaaatgataagaaaaaataaaatggaaaagggtctttcacttattgaagca

SEQ ID NO: 764522 - DNA, 75 bp, synthetic construct
  source 1..75: mol_type = other DNA
taggtacatctttggtcgggatcggaactagttttggagatggaaacgtggctgatatagatcctgttgagttgg

SEQ ID NO: 764523 - DNA, 75 bp, synthetic construct
  source 1..75: mol_type = other DNA
gttacgtaaattatcgggacagacccatcaggtgatgaccgcagtggcgctggctgacagccaacacattgttga

SEQ ID NO: 764524 - DNA, 75 bp, synthetic construct
  source 1..75: mol_type = other DNA
tttctctggtggagaattagtaagtctacctcaagtcataaatctttcaggtacactaaggaatgaggaggttct

SEQ ID NO: 764525 - DNA, 75 bp, synthetic construct
  source 1..75: mol_type = other DNA
acatccgcaaaatctctctgatgggcagattcgtcagggactttccgcaatggtacagctgcttgagcattattt

SEQ ID NO: 764526 - DNA, 75 bp, synthetic construct
  source 1..75: mol_type = other DNA
atgattcttgagcgcgttgaaattgtgggttttcgcggtatcaaccgtttgtcgttgatgctggaacaaaacaac

SEQ ID NO: 764527 - DNA, 75 bp, synthetic construct
  source 1..75: mol_type = other DNA
gatctctaccattttgagcgcgacgatttctggtttccgccgggagatatcaacgggcgggaacatcatctgcat

SEQ ID NO: 764528 - DNA, 75 bp, synthetic construct
  source 1..75: mol_type = other DNA
acggacatccgattgatattgatgatattaacgagcaggcgcgccatctggtgcgcttaatgccagttctgcgct

SEQ ID NO: 764529 - DNA, 75 bp, synthetic construct
  source 1..75: mol_type = other DNA
tcggctttcgcggtatcaatcgattgtcgttgatgctggagcaaaacaacgtcctgatcggggagaacgcgtggg

SEQ ID NO: 764530 - DNA, 75 bp, synthetic construct
  source 1..75: mol_type = other DNA
gtcctcgcgcgttgccgcctggcgtctggggccaagtggcttgagcaccgaagacagccgccgcatctcttttca

SEQ ID NO: 764531 - DNA, 75 bp, synthetic construct
  source 1..75: mol_type = other DNA
tttatcttcagttgaaaaattgagaaagttgaatatggatattcaacttggtgatggagtatttaaaattatcga

SEQ ID NO: 764532 - DNA, 75 bp, synthetic construct
  source 1..75: mol_type = other DNA
aaaaaggcaagggatgccttgataagaattggagatgaatctgcgattaataaaatgcgtgtaaggcgatttttg

SEQ ID NO: 764533 - DNA, 75 bp, synthetic construct
  source 1..75: mol_type = other DNA
ctataaaggatgttctaataaaattatcaagtcagaatggttggtctgataggcacgaggaaatattggatgctg

SEQ ID NO: 764534 - DNA, 75 bp, synthetic construct
  source 1..75: mol_type = other DNA
tattaacgaactggcgcgccagtgtggacatcatttcgatgccgaagggattaaggtcattgaatttgcccagtc

SEQ ID NO: 764535 - DNA, 75 bp, synthetic construct
  source 1..75: mol_type = other DNA
aaccggatgattgaccgacctggagggcgctcgtatcgggttattttgctcggcctgtttgctactttattgcag

SEQ ID NO: 764536 - DNA, 75 bp, synthetic construct
  source 1..75: mol_type = other DNA
taaaactagatctttcaacagaaaatgtgaaattatcaggtgatctttcatataacagtggaaaaaatattggaa

SEQ ID NO: 764537 - DNA, 75 bp, synthetic construct
  source 1..75: mol_type = other DNA
ccgattatgctttcagtcgcctggcatctgttgaatcttctgcctttgcagcgtattaccaccaccaattctggt

SEQ ID NO: 764538 - DNA, 75 bp, synthetic construct
  source 1..75: mol_type = other DNA
tggtttatttttacccaaaagccatgactcccggctgtaccgtacaggcctgcggcttacgcgataacatggatg

SEQ ID NO: 764539 - DNA, 75 bp, synthetic construct
  source 1..75: mol_type = other DNA
gaacatgtctttgacgatttcaaaaccagcaatcaccacgacgtagtgattaactggctgaaagaacacgcctga

SEQ ID NO: 764540 - DNA, 75 bp, synthetic construct
  source 1..75: mol_type = other DNA
gtgaccgacactaaggcctttaccgacgccatcaacgctggcgatatcgaaaaagcgaaagcgctgtatgcgccg

SEQ ID NO: 764541 - DNA, 75 bp, synthetic construct
  source 1..75: mol_type = other DNA
tgtggtcgatttgcaaaaacgcatcagtgaactggctttcccaccttcaaaagtggtcggcggtgcagccggact

SEQ ID NO: 764542 - DNA, 75 bp, synthetic construct
  source 1..75: mol_type = other DNA
gaatttacagcctggcgaatacgatatgacctgcggtctgctgactaacccgaaagggaagttgatcgtcaaagg

SEQ ID NO: 764543 - DNA, 75 bp, synthetic construct
  source 1..75: mol_type = other DNA
cagagcgggcggaatataggcattaataatgtggtcagtgaatggtcaacattacccgaatcaggtaagaaaaat

SEQ ID NO: 764544 - DNA, 75 bp, synthetic construct
  source 1..75: mol_type = other DNA
aaacatatggctttaataaaaaactggattgggtgagcaacgagcaactttccgagttgaccgggatattgccgc

SEQ ID NO: 764545 - DNA, 75 bp, synthetic construct
  source 1..75: mol_type = other DNA
ccaattgattatattcgggataaatgaagttcttagaagaaaggggattgttatgccttatccggttgtttgttg

SEQ ID NO: 764546 - DNA, 75 bp, synthetic construct
  source 1..75: mol_type = other DNA
attttccagtgccggatgcggcacaaaaggagccgcgcgtggcagatctcgatgatggttatacgcgcattgcaa

SEQ ID NO: 764547 - DNA, 75 bp, synthetic construct
  source 1..75: mol_type = other DNA
gaacctcatcgaacgtttactgaaagagtggcagccggacgaaatcatcgtcggtttgccgctgaatatggacgg

SEQ ID NO: 764548 - DNA, 75 bp, synthetic construct
  source 1..75: mol_type = other DNA
tggaaaataaaatggaaggtcaaggagaacttggctgatccagatatatttgagcttgaggcccaatttggtgat

SEQ ID NO: 764549 - DNA, 75 bp, synthetic construct
  source 1..75: mol_type = other DNA
tggttgatgcaaaaaaacaactgcttattataacttccaaaaaaatcaatagtaggctgaatgcataccttttca

SEQ ID NO: 764550 - DNA, 75 bp, synthetic construct
  source 1..75: mol_type = other DNA
atatgtagggaaaagttttcatagaacatggtggaaagaaataaccaatagatctatttttaaatctaagcatcc

SEQ ID NO: 764551 - DNA, 75 bp, synthetic construct
  source 1..75: mol_type = other DNA
gtggcaagagattgatgttccggctcaagggctggatctgacgattccggtcgataaaacctggaatcgtcatga

SEQ ID NO: 764552 - DNA, 75 bp, synthetic construct
  source 1..75: mol_type = other DNA
tatcactaatcttaccgataaaccgcaaaaactgaacgttgctctgaccgccagtggcttgcttgaactggttag

SEQ ID NO: 764553 - DNA, 75 bp, synthetic construct
  source 1..75: mol_type = other DNA
aaaccgcaaaagctctctggtagagaacttgagcgatttaataaattaattgaaaatagagcttattcgattata

SEQ ID NO: 764554 - DNA, 75 bp, synthetic construct
  source 1..75: mol_type = other DNA
ttatatgtaatcgtatgacaattatggttatgacggcaacagtcgcaattcaaaatattgcaggtgtttccttca

SEQ ID NO: 764555 - DNA, 75 bp, synthetic construct
  source 1..75: mol_type = other DNA
tgctcgaattttgtatttctgttgtttttcattttttttatttacttgcagtggtcattagttggtatttgtatt

SEQ ID NO: 764556 - DNA, 75 bp, synthetic construct
  source 1..75: mol_type = other DNA
atagttcagtgtatatacaatggctggaaatggccatttgtgatcctttgtgaatataataaagttagacacctt

SEQ ID NO: 764557 - DNA, 75 bp, synthetic construct
  source 1..75: mol_type = other DNA
accaagtagagaagaaaactgctgtttttgaaatcgagtccctttcggatggtttttcaattcgtaggcctgata

SEQ ID NO: 764558 - DNA, 75 bp, synthetic construct
  source 1..75: mol_type = other DNA
ggtttgccttatttagattcagcagaaaaacaggtgttgataatatcatcctctcgagttaaatcgccattaaac

SEQ ID NO: 764559 - DNA, 75 bp, synthetic construct
  source 1..75: mol_type = other DNA
gcattactgcgccggaagacaggaaatggacgggggtgacgaaaagcatgaaaagacacatcgccgtccgtctga

SEQ ID NO: 764560 - DNA, 75 bp, synthetic construct
  source 1..75: mol_type = other DNA
accagaacctggctaacggcagcgccagcctggagcaaagtggtagcgaagtgcaaaacctactcagtcaaatgc

SEQ ID NO: 764561 - DNA, 75 bp, synthetic construct
  source 1..75: mol_type = other DNA
tggtctggttacagataaaagccagtaacagcgtgccggatgcgctggttgttgatttacttcctgccggtctgg

SEQ ID NO: 764562 - DNA, 75 bp, synthetic construct
  source 1..75: mol_type = other DNA
ggcagggtgcgacaacaacgataacgcgccaacagcggtgaaaaaagatgcgccttctgaagttactaaagcggc

SEQ ID NO: 764563 - DNA, 75 bp, synthetic construct
  source 1..75: mol_type = other DNA
aacctttcccgatcattggatgaagtccagttgacgctggatgataaagggcgcggcgaagtttctacagaaagt

SEQ ID NO: 764564 - DNA, 75 bp, synthetic construct
  source 1..75: mol_type = other DNA
gctgcgctggtgctggcccgtcagcaaaaagcaccactgggtgcgctgcgtgaaatctgggagcatcgtgcagat

SEQ ID NO: 764565 - DNA, 75 bp, synthetic construct
  source 1..75: mol_type = other DNA
gaaagtaacgcgttgttcctggctgcccgtgcgattcaggatttaccgggcaaatggcaggcgcaaacgtctttc

SEQ ID NO: 764566 - DNA, 75 bp, synthetic construct
  source 1..75: mol_type = other DNA
ctcaggcaaccagtgatgctcaggggcatgtgcagctggaaaatgataaaaacgcggcattactgctggcgcgta

SEQ ID NO: 764567 - DNA, 75 bp, synthetic construct
  source 1..75: mol_type = other DNA
gagcaaatcgctggattcgttacgtagcggcgatctggtactggtctggttgcaggtaaaagccaataacagcgt

SEQ ID NO: 764568 - DNA, 75 bp, synthetic construct
  source 1..75: mol_type = other DNA
cgaatttggcgatatcgctgccgaaaacctttcccgcacgctggatgaagttcagttgacgctggatgataaagg

SEQ ID NO: 764569 - DNA, 75 bp, synthetic construct
  source 1..75: mol_type = other DNA
gcggttgccgttgatgaatatcaaccagtcacgctggtgtatctggcgcgggcggtaacgccgggaacatacaat

SEQ ID NO: 764570 - DNA, 75 bp, synthetic construct
  source 1..75: mol_type = other DNA
tgccacgccaaaacgcgcgattggcgtattgcatctgccgcttggcgatgaaaaccgccgtctcgatctggcact

SEQ ID NO: 764571 - DNA, 75 bp, synthetic construct
  source 1..75: mol_type = other DNA
aacgcgataatggcggttttgcgctatgggataaatacagcgacgaagagtactggctgacggcttatgtgatgg

SEQ ID NO: 764572 - DNA, 75 bp, synthetic construct
  source 1..75: mol_type = other DNA
gcagacatatacgatatttacggtcaggtcattgaaggacagggacgcctggcagcactgcgttttggtggcgat

SEQ ID NO: 764573 - DNA, 75 bp, synthetic construct
  source 1..75: mol_type = other DNA
gtcgtgatgcaggcagggaacgtcaggatatcgtcaccctggtgaaacgacagctgacgcgtgaaatcgcggaag

SEQ ID NO: 764574 - DNA, 75 bp, synthetic construct
  source 1..75: mol_type = other DNA
agacagccacgaattagcggaaacagagcaatcacagcagcttactcagcgaatatgtctaagctaaaaggcttt

SEQ ID NO: 764575 - DNA, 75 bp, synthetic construct
  source 1..75: mol_type = other DNA
ccagcggcgcgatggtcgggtttaacgttcatttccactctctggcgagtgcctcgattactgcgatgtttagtt

SEQ ID NO: 764576 - DNA, 75 bp, synthetic construct
  source 1..75: mol_type = other DNA
ctacatttttaccgttcacgcgctggatgtagaacgtattgatgtcgatgaaggtgccagcggcgcgatggtcgg

SEQ ID NO: 764577 - DNA, 75 bp, synthetic construct
  source 1..75: mol_type = other DNA
tgctggtatagtcgctgtaaggtctgggattggtgctgtaggtggtatctggaacttaattagggctatttccac

SEQ ID NO: 764578 - DNA, 75 bp, synthetic construct
  source 1..75: mol_type = other DNA
cactgttaatcctccaaaacagccaagacagccacgaattagcggcaacagagcaatcacagcagcgcatagcgt

SEQ ID NO: 764579 - DNA, 75 bp, synthetic construct
  source 1..75: mol_type = other DNA
gttgttggtgtaaccagaagtatttacgggcttatgactgctatcacaagattaggtcaggtcgctgatacaaca

SEQ ID NO: 764580 - DNA, 75 bp, synthetic construct
  source 1..75: mol_type = other DNA
caaaactgaatgctaaaccggcacgcgtagtcatggagaaaccgctggggacgtcgctggcgacctcgcaggaaa

SEQ ID NO: 764581 - DNA, 75 bp, synthetic construct
  source 1..75: mol_type = other DNA
cagtcgcaaacgccggaaaaacgggcaaaatattggtcgtcggtacagatggaattccggaagccgcaaaatggt

SEQ ID NO: 764582 - DNA, 75 bp, synthetic construct
  source 1..75: mol_type = other DNA
gaaaggcgcgtcgttcattattgacaaattgggcgctgaagggggtgaagtcgcaatcattgagggtaaagccgg

SEQ ID NO: 764583 - DNA, 75 bp, synthetic construct
  source 1..75: mol_type = other DNA
ctggaaaccatgcgtggtattcaggcactgtttgtacgtcgtgatgaagtagaagaagcctggaaatgggtggac

SEQ ID NO: 764584 - DNA, 75 bp, synthetic construct
  source 1..75: mol_type = other DNA
tgcgtgggcagtacaccgcaggttttgcgcagggcaaaaaagtgccgggttatctggaagaagagggcgcgaaca

SEQ ID NO: 764585 - DNA, 75 bp, synthetic construct
  source 1..75: mol_type = other DNA
acatgattcagaaccacctgctacaaattctctgcatgattgcgatgtctccgccatctgacctgagcgcagaca

SEQ ID NO: 764586 - DNA, 75 bp, synthetic construct
  source 1..75: mol_type = other DNA
taatggaaaagaatgtcgataaaactgtttccaagattgagcagcgtcttaaaaacactagagcgtttaagatta

SEQ ID NO: 764587 - DNA, 75 bp, synthetic construct
  source 1..75: mol_type = other DNA
gagtcagagctaccagtgatgagtgaaagcggtcaggtatggacaggtgacgaaattcaggaggctaaagagcac

SEQ ID NO: 764588 - DNA, 75 bp, synthetic construct
  source 1..75: mol_type = other DNA
gcagcatggacttaaccagtctattaaagatgctcacaaaacagcgccaaaaagacagaaaggcgtttatgaggt

SEQ ID NO: 764589 - DNA, 75 bp, synthetic construct
  source 1..75: mol_type = other DNA
aacgagctgatatcaggaaaaaagatttacgggaaattcgtacaggtttttgtgaagagctgaagctgaagggct

SEQ ID NO: 764590 - DNA, 75 bp, synthetic construct
  source 1..75: mol_type = other DNA
acgacggttctatgctggattcggcaccagtcgatattacttttactgtccgcgatgatacctggcggtacctgg

SEQ ID NO: 764591 - DNA, 75 bp, synthetic construct
  source 1..75: mol_type = other DNA
tgattttgttgtgttttatccgggggaagtgcataaaccgctgtgcgcagtgggccgccagcccaggttcgcaaa

SEQ ID NO: 764592 - DNA, 75 bp, synthetic construct
  source 1..75: mol_type = other DNA
agggcaagcacgatatcgaaggcaatcgtctgttttatcttatctcggaagatatgaccgagccgtacgaagctc

SEQ ID NO: 764593 - DNA, 75 bp, synthetic construct
  source 1..75: mol_type = other DNA
aaggatttcgttaaagggtaatgactccaacttattgatagtgttttatgttcagataatgcccgatgactttgt

SEQ ID NO: 764594 - DNA, 75 bp, synthetic construct
  source 1..75: mol_type = other DNA
atggcaggggcatttaagctattcgctgaagcattgggtatgacaacagaccagcttgataaagccatgaaagac

SEQ ID NO: 764595 - DNA, 75 bp, synthetic construct
  source 1..75: mol_type = other DNA
cgctattaatcccccaaaacaaccgagacagccacgaattagcggcaacagagcaatcacagcagcgcatagtgt

SEQ ID NO: 764596 - DNA, 75 bp, synthetic construct
  source 1..75: mol_type = other DNA
cgaaggttaagccggaaggtttacttgattctgtcagaaaaacgcttaataaaaagtatcctaataatcgctttg

SEQ ID NO: 764597 - DNA, 75 bp, synthetic construct
  source 1..75: mol_type = other DNA
agaaatcaaagaagctaaagaacacatggtagacgctgccaatgacgctcaacacgtacatgatgacaaagggcg

SEQ ID NO: 764598 - DNA, 75 bp, synthetic construct
  source 1..75: mol_type = other DNA
ttccactggtattatttatctttttatggccggtattgtctgcagatattcatggacgggttgttcgtgtactgg

SEQ ID NO: 764599 - DNA, 75 bp, synthetic construct
  source 1..75: mol_type = other DNA
agccgcgcgacatggaaaactatagcgagtggaaattggtggtaaaatacacggtcgattataaaggggttttct

SEQ ID NO: 764600 - DNA, 75 bp, synthetic construct
  source 1..75: mol_type = other DNA
tggaccttgttaaaggatgttgacaagcgtgctaactctctgtcatggaaagtaaatattaaagaactaatggat

SEQ ID NO: 764601 - DNA, 75 bp, synthetic construct
  source 1..75: mol_type = other DNA
acgccacaaggcgctgacgatattctgtcacctgcgtttatgacgtcgttctgggtgctggtgtgttttggcgtg

SEQ ID NO: 764602 - DNA, 75 bp, synthetic construct
  source 1..75: mol_type = other DNA
acggagaaaaacccgatgacagtacctgtgcaaatcaccggcctgcttgggctggctgaatccgccacggtggac

SEQ ID NO: 764603 - DNA, 75 bp, synthetic construct
  source 1..75: mol_type = other DNA
gaccgacgccgaactggcgatgtgccgcagcatgggtattaccggggaagagttcctcgccgctaaacctaaaca

SEQ ID NO: 764604 - DNA, 75 bp, synthetic construct
  source 1..75: mol_type = other DNA
aaccgcgtgacatggaaaactattgtgaatggaaattgatagcaaaatatacggtcgattataaaggtgttttct

SEQ ID NO: 764605 - DNA, 75 bp, synthetic construct
  source 1..75: mol_type = other DNA
ggtatgaagcactttatcgaccatgagattaattcgattcagaactttatgtctgacgatatgaaggcgctgtat

SEQ ID NO: 764606 - DNA, 75 bp, synthetic construct
  source 1..75: mol_type = other DNA
cgacgatgcccgtcagtcgctgaaacaactggctgaacagtcactcgatacctcggcactggaagcgctagcgga

SEQ ID NO: 764607 - DNA, 75 bp, synthetic construct
  source 1..75: mol_type = other DNA
acgcgattctcgctggcgacgctttacaaacgctggcgttctcgattttaagcgatgccgatatgccggaagtgt

SEQ ID NO: 764608 - DNA, 75 bp, synthetic construct
  source 1..75: mol_type = other DNA
acgacaccatgcaagggctggtgatgctgattggcaccgttgtgctgcttattggcgtggtccatgctgctggcg

SEQ ID NO: 764609 - DNA, 75 bp, synthetic construct
  source 1..75: mol_type = other DNA
gaacaaaaattaccatttacagctgacattagtgaacggtaatacggtatcaatgctcgactctgagagatcccc

SEQ ID NO: 764610 - DNA, 75 bp, synthetic construct
  source 1..75: mol_type = other DNA
ctctagatcacgtcggactcgaccccagccgtattgctgctcaggtggtgacgggcgtcgggtttatcggtgcag

SEQ ID NO: 764611 - DNA, 75 bp, synthetic construct
  source 1..75: mol_type = other DNA
cgactggcagcgccagatgattcgtaaacaagaggtgccgctacctgccgttggtgtggcggtaacaggcatccc

SEQ ID NO: 764612 - DNA, 75 bp, synthetic construct
  source 1..75: mol_type = other DNA
aacgctgctggcaaccggttttatccgtgaaaaccatccggggcaggtgatgaataaattgcgtcgtctgtttac

SEQ ID NO: 764613 - DNA, 75 bp, synthetic construct
  source 1..75: mol_type = other DNA
tgactcccaggcgattgctctggcagcaggggccagcgatgtgattggtaatgctcacattgtcgatacactcga

SEQ ID NO: 764614 - DNA, 75 bp, synthetic construct
  source 1..75: mol_type = other DNA
accaattgaatctacaatcgggatgcgtctatggttatcgcaaaatccatttagatctgcgggacagcgggcaac

SEQ ID NO: 764615 - DNA, 75 bp, synthetic construct
  source 1..75: mol_type = other DNA
aaagctggtggaaaaatatgatgtcagcgccaccggaacggggggcggggtggcgaatatccattacaggatggc

SEQ ID NO: 764616 - DNA, 75 bp, synthetic construct
  source 1..75: mol_type = other DNA
ctggctgggatttcagctcgcgctggatggacaatccgcagcagttaaataccttacgcaccaccagcatcgtac

SEQ ID NO: 764617 - DNA, 75 bp, synthetic construct
  source 1..75: mol_type = other DNA
taaaatggagaaaatccttgcccgcgccagcaaagctgccggagatagcgcgctagccagccagtatgacactct

SEQ ID NO: 764618 - DNA, 75 bp, synthetic construct
  source 1..75: mol_type = other DNA
ataaaggctcaggtcggataccgaagcccgcgggcacgtaaaggcgaggccagtatcgtgtcacccaacaggctc

SEQ ID NO: 764619 - DNA, 75 bp, synthetic construct
  source 1..75: mol_type = other DNA
tgtcctgaacgcactgctgatggctgtatggcggcgtaatcccgaaaaacaggtgctggttcattcggatcaggg

SEQ ID NO: 764620 - DNA, 75 bp, synthetic construct
  source 1..75: mol_type = other DNA
gtgctggagcaggtaagtcgggcgctggaggtgatggtggtgctggtcaccgcctgcggtatgttgctgttgctg

SEQ ID NO: 764621 - DNA, 75 bp, synthetic construct
  source 1..75: mol_type = other DNA
ctgcgtgagagcgggcaacagtgcggagtaaacagagtctggagactgatgaaacgtgtcggaataaaggctcag

SEQ ID NO: 764622 - DNA, 75 bp, synthetic construct
  source 1..75: mol_type = other DNA
gcaaagttattggctggtcaatgcagccccggatgacaaaggatattgtcctgaatgcacttctgatggccgtgt

SEQ ID NO: 764623 - DNA, 75 bp, synthetic construct
  source 1..75: mol_type = other DNA
gtcggataccggagcccgcgggctcgtaaaggcaaggccagtatcgtgtcgcccaacaggcttcagcgacagttc

SEQ ID NO: 764624 - DNA, 75 bp, synthetic construct
  source 1..75: mol_type = other DNA
gcctgtgctgtgtctcggcgcggatctgaaaaacaccttctgcctggtgcgcggtgaacaagcggtgttgagtca

SEQ ID NO: 764625 - DNA, 75 bp, synthetic construct
  source 1..75: mol_type = other DNA
ataataatggtatgaaaatgaaatggtatgaactggctagatccagaatgaaagagctcggcataactcaagaga

SEQ ID NO: 764626 - DNA, 75 bp, synthetic construct
  source 1..75: mol_type = other DNA
atgcagtccatcgctcacattggcatgccaaacgcaagagttataaggtactgttctggcgagagatcaccccac

SEQ ID NO: 764627 - DNA, 75 bp, synthetic construct
  source 1..75: mol_type = other DNA
tactggcgattggctttaatcctgcactacgaatctcgttaaaaagctattttaagccattgaatttcagcatta

SEQ ID NO: 764628 - DNA, 75 bp, synthetic construct
  source 1..75: mol_type = other DNA
tcgatgcctggctttgctggccatgctacccggcgaactggtaacgcggccgttggaattgcaccggccggatac

SEQ ID NO: 764629 - DNA, 75 bp, synthetic construct
  source 1..75: mol_type = other DNA
aaccgccagcggcctgttcccgtcactttataccaacgcagcccaactgcaggcgttgggcatcaaaggcgacag

SEQ ID NO: 764630 - DNA, 75 bp, synthetic construct
  source 1..75: mol_type = other DNA
atatattaggtactgatggtaagagcaagtctctggactcgttgcgtagtggcgatctggtgctggtctggttgc

SEQ ID NO: 764631 - DNA, 75 bp, synthetic construct
  source 1..75: mol_type = other DNA
cagcaggcgcgcattattgccttcccgctggcgttggtggtgctgtacataatcattaaactcgccaccacaaaa

SEQ ID NO: 764632 - DNA, 75 bp, synthetic construct
  source 1..75: mol_type = other DNA
atgacaagtttttctacactgcttagtgttcatcttattagtctcgcgctttctgttgggctattaaccttacgt

SEQ ID NO: 764633 - DNA, 75 bp, synthetic construct
  source 1..75: mol_type = other DNA
taacgtattatgaatgtttctaccgttctgccctgtatccagtattggcgcatgtggatctgcattttgcaaagt

SEQ ID NO: 764634 - DNA, 75 bp, synthetic construct
  source 1..75: mol_type = other DNA
tgatcacaggccgctggctgtggaaatatcctcgtccagagcacgaaaagtatgaaaaagaaccgtttgtgtcgg

SEQ ID NO: 764635 - DNA, 75 bp, synthetic construct
  source 1..75: mol_type = other DNA
ggcgatggcggattgtctctggggcagggggttattgctgcggcgcgttggggggcgggggaagtccagaacgga

SEQ ID NO: 764636 - DNA, 75 bp, synthetic construct
  source 1..75: mol_type = other DNA
tacgctggtatttagcggcggggttattcataaccgtttgctgcgtgcacgtctggcgcattatctcgctgattt

SEQ ID NO: 764637 - DNA, 75 bp, synthetic construct
  source 1..75: mol_type = other DNA
atcgtgtgggcgtttgttcgatgctgtggcggcggcactgggctgtgcgccagccacgttaagttatgaaggtga

SEQ ID NO: 764638 - DNA, 75 bp, synthetic construct
  source 1..75: mol_type = other DNA
gagcacaggcggcaccatgaatacgcaaattgttcccgatgccgctacttgccctgcctgtcttgccgaaatgaa

SEQ ID NO: 764639 - DNA, 75 bp, synthetic construct
  source 1..75: mol_type = other DNA
tggatgattcggtggtgcgcgaaagcggcgaaatgctgcgccgttcgcgggggtatgtaccggacgcactggctt

SEQ ID NO: 764640 - DNA, 75 bp, synthetic construct
  source 1..75: mol_type = other DNA
caaattgtcccggatgccgctacttgccctgcttgccttgccgaaatgaataccccaggcgaacggcgttatcgt

SEQ ID NO: 764641 - DNA, 75 bp, synthetic construct
  source 1..75: mol_type = other DNA
cagggcatgagtacacgctatggatggacggcgaagaggtgatggttcgcgccaatcaactggaattcgctggcg

SEQ ID NO: 764642 - DNA, 75 bp, synthetic construct
  source 1..75: mol_type = other DNA
ctacgacgaagaaagcctgtcgctatgcggcgttgaggattttctgcaggtcgtggcggcttaccgcaatttcgt

SEQ ID NO: 764643 - DNA, 75 bp, synthetic construct
  source 1..75: mol_type = other DNA
ttaccggagtggtaaaggtgcgtatgtccatggggcatgaagtggtcgggcactggtttaatgaagaggtgaaag

SEQ ID NO: 764644 - DNA, 75 bp, synthetic construct
  source 1..75: mol_type = other DNA
gctggtgatgacctccggcaacctgagcggcaaacctccggctatcagcaacgaacaggcgctggcggatttgca

SEQ ID NO: 764645 - DNA, 75 bp, synthetic construct
  source 1..75: mol_type = other DNA
gagaaactatccacaagggcttgagataaagtgtactgttggtaacataacaactggagcgaatttacgcgcagg

SEQ ID NO: 764646 - DNA, 75 bp, synthetic construct
  source 1..75: mol_type = other DNA
cagcgcgaagtgattgaaatagttagtgaagctgagaaaggcaatggcagtaacgtaaagcaactaatgtcaaag

SEQ ID NO: 764647 - DNA, 75 bp, synthetic construct
  source 1..75: mol_type = other DNA
tttaaatgcacctatcaatgcttatgaaatggtgatctaccccatcgccttttttgtctgcttgtttggtcaaat

SEQ ID NO: 764648 - DNA, 75 bp, synthetic construct
  source 1..75: mol_type = other DNA
gcacctgtagtgttctgcccagagttagaggacgaagcactgaaggaatgtctgcgccccaaccgcagggttgaa

SEQ ID NO: 764649 - DNA, 75 bp, synthetic construct
  source 1..75: mol_type = other DNA
aggtctggggagtaggacgcagactgacggaaaagctgaatgcgctgggtattaacacagcactgcagctggcgc

SEQ ID NO: 764650 - DNA, 75 bp, synthetic construct
  source 1..75: mol_type = other DNA
ttatctctttaatttcaccggacctgacggagattatgtctgccagttcaagatccttttcgacagaaacatgga

SEQ ID NO: 764651 - DNA, 75 bp, synthetic construct
  source 1..75: mol_type = other DNA
ggtctcttgtttatcggtgttttaaacgcacctatcaatgcttatgaaatggtgatctaccccatcgcctttttt

SEQ ID NO: 764652 - DNA, 75 bp, synthetic construct
  source 1..75: mol_type = other DNA
atgcgcccattaacgcgtatgagatggtgatctatccgctcgcctttttcgtctgcttgtttggtcaaatgcgct

SEQ ID NO: 764653 - DNA, 75 bp, synthetic construct
  source 1..75: mol_type = other DNA
gcagcagggaacgctggagatcaaggggctgacaacaagcattaccgcgttaaacgcactggaaacgtcactccg

SEQ ID NO: 764654 - DNA, 75 bp, synthetic construct
  source 1..75: mol_type = other DNA
gattttttccatattaacaatggcctggtggagcgttaccacgatttggcgctggttgagattcttgagcaagac

SEQ ID NO: 764655 - DNA, 75 bp, synthetic construct
  source 1..75: mol_type = other DNA
gtctggggagtaggacgcagactgacggaaaagctgaatgcgctgggtattaacacagcactgcagctggcgcag

SEQ ID NO: 764656 - DNA, 75 bp, synthetic construct
  source 1..75: mol_type = other DNA
gtttctacgcctcatgtgaaaaagttttccgcccagaccttcgcaacgaaccggtcatcgtactcagcaataacg

SEQ ID NO: 764657 - DNA, 75 bp, synthetic construct
  source 1..75: mol_type = other DNA
gctggcagagcgcaacgtcagcgtgagccgtttttcgttaagcgtggaaggtgatgaccttttgttcacgctaca

SEQ ID NO: 764658 - DNA, 75 bp, synthetic construct
  source 1..75: mol_type = other DNA
cagcggggggccacgcagcaggatgcgcagggacgctggcaatttgagtatcagttaacaaggaaggttagcgat

SEQ ID NO: 764659 - DNA, 75 bp, synthetic construct
  source 1..75: mol_type = other DNA
gaaggcaggtgtcatgctggctgatttcacaccatcgggtatagcgcagccgggattatttgatgaaatccagcc

SEQ ID NO: 764660 - DNA, 75 bp, synthetic construct
  source 1..75: mol_type = other DNA
gaagggcggacgaaaacgtataggtgtaaataactatgtatacatgctttggcgttataacgattgctgcgtaag

SEQ ID NO: 764661 - DNA, 75 bp, synthetic construct
  source 1..75: mol_type = other DNA
ttatgttgatgccagtctgacgtatatcagcgaagtagatccaatgtgggaaagtgacctattgacgctcgtgct

SEQ ID NO: 764662 - DNA, 75 bp, synthetic construct
  source 1..75: mol_type = other DNA
cccgatggtaaaagcttggattttacagcaaagtaaaggtatatgtgaaaactgtggtaaaaatgctccgtttta

SEQ ID NO: 764663 - DNA, 75 bp, synthetic construct
  source 1..75: mol_type = other DNA
gcagttgttgatgatttgtgttcataaggtttttctcctcgtaaacatgttgattatgagcgcaaagatgctgcc

SEQ ID NO: 764664 - DNA, 75 bp, synthetic construct
  source 1..75: mol_type = other DNA
acgtccggcacccttttttcttttttcacatagccaggtttccggcagtcagagggggaggggacaccatggctg

SEQ ID NO: 764665 - DNA, 75 bp, synthetic construct
  source 1..75: mol_type = other DNA
atgagtttttttgatgagttgaaaacctctctggaagaggctgtcgagattaaacaaggtttgaaaaaacctgca

SEQ ID NO: 764666 - DNA, 75 bp, synthetic construct
  source 1..75: mol_type = other DNA
ggggcgaggaaccgcccctgagtggcaaatgaaacgggaaatgctttctcctgcgtataccaccagatggacaga

SEQ ID NO: 764667 - DNA, 75 bp, synthetic construct
  source 1..75: mol_type = other DNA
ctgtggaaaagcttccattacccacacaggacagccgggattatttgatgagatccagccccgtaaaaacagcga

SEQ ID NO: 764668 - DNA, 75 bp, synthetic construct
  source 1..75: mol_type = other DNA
tgggcaacacagcaatggccacagttttccggtgtggtcgcgctgacggcagaaaaccgtaatcggatctgcaag

SEQ ID NO: 764669 - DNA, 75 bp, synthetic construct
  source 1..75: mol_type = other DNA
tccaggtactgaataaagttcctggccttgaccacaaacataacctgcaaatcaccaagctggatctgagctatt

SEQ ID NO: 764670 - DNA, 75 bp, synthetic construct
  source 1..75: mol_type = other DNA
atattgcagccaaactacttcctgtactatcgcataaagaacaaaatagaataattataaaaatcaacgaattaa

SEQ ID NO: 764671 - DNA, 75 bp, synthetic construct
  source 1..75: mol_type = other DNA
attactctgatttaaaagaaacaacctcagcaacaggtaaacctgttttacgttgggtagacccgagttttgatc

SEQ ID NO: 764672 - DNA, 75 bp, synthetic construct
  source 1..75: mol_type = other DNA
atgggggtgggtattgcgcctacaaaaacgctggctaaaagtgcacagtgggcaacaaagcaatggccacagttt

SEQ ID NO: 764673 - DNA, 75 bp, synthetic construct
  source 1..75: mol_type = other DNA
ctatgacgaaggtaatcttttctcagccccgcgagcatggtggatgctgcgcacctttggtgtagagaaagtgtc

SEQ ID NO: 764674 - DNA, 75 bp, synthetic construct
  source 1..75: mol_type = other DNA
acatttgtacggacatccccctttgcagtaaaagaaccctgttacagcaatgccgctgtggaaaagctttcattg

SEQ ID NO: 764675 - DNA, 75 bp, synthetic construct
  source 1..75: mol_type = other DNA
ttcactccatcgggtatagcgcagccgggattatttgatgaaatccagccccgtaaaaacagtgaaaagttaatg

SEQ ID NO: 764676 - DNA, 75 bp, synthetic construct
  source 1..75: mol_type = other DNA
tgaactcgatgcgatattttttggttacggtatcagctatgacaaaccgattattgtcagctgcggctctggtgt

SEQ ID NO: 764677 - DNA, 75 bp, synthetic construct
  source 1..75: mol_type = other DNA
tgaactggatgcgatattttttggtcgcggcgtcagctacgacaaaccaattatcgtcagctgcggctctggtgt

SEQ ID NO: 764678 - DNA, 75 bp, synthetic construct
  source 1..75: mol_type = other DNA
aagaaggtgcagtagagctgccggaaggagagtttaacgccgcgtttaatcctgaagccgtggtgaaagtaaccg

SEQ ID NO: 764679 - DNA, 75 bp, synthetic construct
  source 1..75: mol_type = other DNA
gcgtacagatatcgatttaactaaaaataaagtcggcatttacagtcgtccggcaaaactgagcgatatcgtgcg

SEQ ID NO: 764680 - DNA, 75 bp, synthetic construct
  source 1..75: mol_type = other DNA
aacagggcggttatcgggcgcttaataaaggcaaagtcgactccgcctctgcggttatcattctcgaaagttatt

SEQ ID NO: 764681 - DNA, 75 bp, synthetic construct
  source 1..75: mol_type = other DNA
gcgcgtaaatttgccaaccgtattcatggccgtttcggtgttgaagtaaagctccatgacgagcgtcttagcacc

SEQ ID NO: 764682 - DNA, 75 bp, synthetic construct
  source 1..75: mol_type = other DNA
ctactggggctgcagccagttggtgaggtctggggagtaggacgcagactgacggaaaagctgaatgcgctgggt

SEQ ID NO: 764683 - DNA, 75 bp, synthetic construct
  source 1..75: mol_type = other DNA
atttttatcgcttacctgattgtcgcggtgctggtggtgatttcccagccgtttaaagcgaaaaaacgtgacctg

SEQ ID NO: 764684 - DNA, 75 bp, synthetic construct
  source 1..75: mol_type = other DNA
tgatggcgatcgggtggagatttatcgccctctcattgccgatccgaaagagctgcgcaggcaacgagcagaaaa

SEQ ID NO: 764685 - DNA, 75 bp, synthetic construct
  source 1..75: mol_type = other DNA
gccgcaatcctgaattaaaacgtaaagcctggctggcggtttttcttggttctgcacttttctgggtggttgtcg

SEQ ID NO: 764686 - DNA, 75 bp, synthetic construct
  source 1..75: mol_type = other DNA
atgttgcgatttttgaaccaatgttcacaggggcggggtgcttggttgttaatggcgcttaccgctctggcactg

SEQ ID NO: 764687 - DNA, 75 bp, synthetic construct
  source 1..75: mol_type = other DNA
ctcttgtcgagttcggacaacaagtgcgagagcgcataggccactggattgggatcaccgtctgtgtaggcattg

SEQ ID NO: 764688 - DNA, 75 bp, synthetic construct
  source 1..75: mol_type = other DNA
catgcgccgcaagtcgtgactatcccatgcctgtatttgccttggtggactgcaacaacttttacgccagttgtg

SEQ ID NO: 764689 - DNA, 75 bp, synthetic construct
  source 1..75: mol_type = other DNA
catatgaggccatgcgccaggccgtctgtcggtacgctgagcgtgcagctgaaaagctgcggggcgagtgtcagt

SEQ ID NO: 764690 - DNA, 75 bp, synthetic construct
  source 1..75: mol_type = other DNA
gttgcttacctgattgtcgcagtgctggtggtactctctcagccgtttaaagcgaaaaaacgtgacctgtttggt

SEQ ID NO: 764691 - DNA, 75 bp, synthetic construct
  source 1..75: mol_type = other DNA
tccgctgcgttatgtggcgatgatcatctggctgtatagtgcttttcgtggcgtgcaattaacttacgagcacac

SEQ ID NO: 764692 - DNA, 75 bp, synthetic construct
  source 1..75: mol_type = other DNA
gccacaacggctctggagcgtatctggagggatgagcaccggtatgccaaagccggagttatgttgaatgacttc

SEQ ID NO: 764693 - DNA, 75 bp, synthetic construct
  source 1..75: mol_type = other DNA
gttgcgcgctgagcgacagtactgccggcatatcagcaccttcatcaagacatccccttttgcggttaatgagcc

SEQ ID NO: 764694 - DNA, 75 bp, synthetic construct
  source 1..75: mol_type = other DNA
aagaggcgcagtttcctgaaaaactgtacgttttttccagcaactacgagctctacgcgagcctgagtaaccgtg

SEQ ID NO: 764695 - DNA, 75 bp, synthetic construct
  source 1..75: mol_type = other DNA
gctgccgtcagagctctggacagggtctggctggatggtcaccgttacgcaaaggcaggctgtatgctgaacgat

SEQ ID NO: 764696 - DNA, 75 bp, synthetic construct
  source 1..75: mol_type = other DNA
aaagtcctggatggtattaaccattcaggacttgggaaagtatggtttgcaggacgcgggattgcgccagaatgg

SEQ ID NO: 764697 - DNA, 75 bp, synthetic construct
  source 1..75: mol_type = other DNA
tctgggtgaatggccaccgctatgtaagggcaggctgcatgctgaacgattttacgccgaccggagtttcacagt

SEQ ID NO: 764698 - DNA, 75 bp, synthetic construct
  source 1..75: mol_type = other DNA
atggcgatgctggcgattgtcgcctggtcgctgtcggtcgtggatgtggcgattattcttgggccaggtaatccc

SEQ ID NO: 764699 - DNA, 75 bp, synthetic construct
  source 1..75: mol_type = other DNA
atgaccccggaatcgtcgtatctggcgtggatagacgtaagcgcggatgagagtagcgcaacgcagctaacccaa

SEQ ID NO: 764700 - DNA, 75 bp, synthetic construct
  source 1..75: mol_type = other DNA
tacgatctgccggtgatcctgcattcacggcgcacgcacgacaaactggcgatgcatcttaaacgccacgattta

SEQ ID NO: 764701 - DNA, 75 bp, synthetic construct
  source 1..75: mol_type = other DNA
cccttggtctttcaaaatatggagacagaaccataagaagatgggagcgcggggaaacaaaacctactggggcgg

SEQ ID NO: 764702 - DNA, 75 bp, synthetic construct
  source 1..75: mol_type = other DNA
gatgtagatgcttatttcagagaagccactaatgaagaattaacaagtttttcttctcatgaaaaattttcagta

SEQ ID NO: 764703 - DNA, 75 bp, synthetic construct
  source 1..75: mol_type = other DNA
agaagaacaattttccaaaaaccatttcaggcaagcaataccttttgccagtctactgagcatggtatagtcatc

SEQ ID NO: 764704 - DNA, 75 bp, synthetic construct
  source 1..75: mol_type = other DNA
tattgtttttgctgatagcggttgtggttggtggtggcgggttattgctggcgcaaaaagccttacataaaacgt

SEQ ID NO: 764705 - DNA, 75 bp, synthetic construct
  source 1..75: mol_type = other DNA
cctttcaaaccctctcgtataggcgagctggctaccgcgaatccaggtacggatctcacggttgttgatgccagc

SEQ ID NO: 764706 - DNA, 75 bp, synthetic construct
  source 1..75: mol_type = other DNA
ctggcgctagccacattaagtgaagaaggtatcaaggcgctcacggtaaacggggaatggcaggctgacgaatac

SEQ ID NO: 764707 - DNA, 75 bp, synthetic construct
  source 1..75: mol_type = other DNA
agttaccaatggcgcacatatttatcctttcaaaccttcccgcataggcgaactggccactgtgaatcctggtac

SEQ ID NO: 764708 - DNA, 75 bp, synthetic construct
  source 1..75: mol_type = other DNA
gattgccatattccaaagtcagggatggattatttatttgctaaattaaaagcatctaaagatatttatcatgaa

SEQ ID NO: 764709 - DNA, 75 bp, synthetic construct
  source 1..75: mol_type = other DNA
atggatgacaacgcggcgcatgagctggaaagtcaggccgctacttcagttactaatggcgcacatatttatcct

SEQ ID NO: 764710 - DNA, 75 bp, synthetic construct
  source 1..75: mol_type = other DNA
gcccggatctggtgctgtacgttaacggcattgcgctgggcgtgattgaacttaagcgttcgtcagtgcacgtca

SEQ ID NO: 764711 - DNA, 75 bp, synthetic construct
  source 1..75: mol_type = other DNA
gccgcaggatccgaatgacgaacccgcctctgaactgctcaaacgtattgcgcaggaaaaagctcaattggtgaa

SEQ ID NO: 764712 - DNA, 75 bp, synthetic construct
  source 1..75: mol_type = other DNA
tctcggttgatgtccggctgattgcggcgactcatcgcgatcttgccgcagaggtgaatgccggacgttttcgcc

SEQ ID NO: 764713 - DNA, 75 bp, synthetic construct
  source 1..75: mol_type = other DNA
ggagaaaacgggcggcaacaaaaccgaagccgcccgtcagttagggatcacgcgcaaaacgctattggcaaaact

SEQ ID NO: 764714 - DNA, 75 bp, synthetic construct
  source 1..75: mol_type = other DNA
cccacgaaatgggctttgcccgccacgtctccacgcatgtaatttttcttcatcaagggaaaattgaagaagagg

SEQ ID NO: 764715 - DNA, 75 bp, synthetic construct
  source 1..75: mol_type = other DNA
ttccttaaaggttcgctgaaattatttcctctccggtggttaacgctgccggagtatttcatggggaatttgcga

SEQ ID NO: 764716 - DNA, 75 bp, synthetic construct
  source 1..75: mol_type = other DNA
gactatgatttgggaaagtaacggtgagattagttttcttatcttaccattagcagcagtttttgttctgtgggt

SEQ ID NO: 764717 - DNA, 75 bp, synthetic construct
  source 1..75: mol_type = other DNA
aacttcttcactaccatccaactggtgatggccggtaatgatttagaagggcttcgctatggtgtaattgaaacg

SEQ ID NO: 764718 - DNA, 75 bp, synthetic construct
  source 1..75: mol_type = other DNA
tgtgaaggataaagaaggtgctggtgagcagaatcaaaccgtatggttggtggactggaaaaatccagaagccaa

SEQ ID NO: 764719 - DNA, 75 bp, synthetic construct
  source 1..75: mol_type = other DNA
atttatcgcacctccagcggcaacgatcttatcgcaacgctcaatcatcctaacccgtggctcatttgctcgctg

SEQ ID NO: 764720 - DNA, 75 bp, synthetic construct
  source 1..75: mol_type = other DNA
gcaaatcaaatccgcatcgatgttgagttttatacaaaagtccgcgacgaaataaaaatagccagtggcgatttc

SEQ ID NO: 764721 - DNA, 75 bp, synthetic construct
  source 1..75: mol_type = other DNA
ttgataagttattgactggctttgatgctccgtctgccacatacctctatatcgacaagaaaatggccgatcaca

SEQ ID NO: 764722 - DNA, 75 bp, synthetic construct
  source 1..75: mol_type = other DNA
tggaacagattgtggctgacatccttctcgattttgaacaaaagccacgactcgccgacggccgcggtaacgcta

SEQ ID NO: 764723 - DNA, 75 bp, synthetic construct
  source 1..75: mol_type = other DNA
gtgtatgatggtgtttttgaggtgctccagtggcttctgtttctatcacatgaagtgtattccgccaccgaaggc

SEQ ID NO: 764724 - DNA, 75 bp, synthetic construct
  source 1..75: mol_type = other DNA
cgttgctgccgatggaacagaatactatggaaaggatatggttctaccggcgctcggagaagggacctttactgt

SEQ ID NO: 764725 - DNA, 75 bp, synthetic construct
  source 1..75: mol_type = other DNA
gcagttcatgactcacgtgtaagcaccagtgttgtacccggcatttcttcgggatacgtcccgtttaaacgaggc

SEQ ID NO: 764726 - DNA, 75 bp, synthetic construct
  source 1..75: mol_type = other DNA
gtgagaatgacaccattaatctggtgaaagatgagcgaataatcgtcacgccaattaacgatatctattacgccg

SEQ ID NO: 764727 - DNA, 75 bp, synthetic construct
  source 1..75: mol_type = other DNA
acggtctggacgtgttgaagtttttgcagcataaccgcgtcgacgccatttttctggatatcaatattccgtcgc

SEQ ID NO: 764728 - DNA, 75 bp, synthetic construct
  source 1..75: mol_type = other DNA
tggcgtggaagaaagggaagtcttatcagatcctgaccaacaccaccgccgaaacgtcgccaaattcgctgaagc

SEQ ID NO: 764729 - DNA, 75 bp, synthetic construct
  source 1..75: mol_type = other DNA
ttgttcgcagcgaggtaatcaatgccgggcggcagttgttgatgatttgtattcatcttttttccattttaagtc

SEQ ID NO: 764730 - DNA, 75 bp, synthetic construct
  source 1..75: mol_type = other DNA
gctgaaatgcgcaaagtgctggcaaccaaaccggccatcatcgccctgcagattgtacgcggcaatgaaagcatc

SEQ ID NO: 764731 - DNA, 75 bp, synthetic construct
  source 1..75: mol_type = other DNA
ttaacgcagatcgccattgccgactccgataaactgcgcgtcggtgattttgccgtcgcggtcggtaacccgttt

SEQ ID NO: 764732 - DNA, 75 bp, synthetic construct
  source 1..75: mol_type = other DNA
attttgcagaaatatcatctgtcgattcatgaagtggcacagcgttgcggttttccggacagcgactatttttgt

SEQ ID NO: 764733 - DNA, 75 bp, synthetic construct
  source 1..75: mol_type = other DNA
acagcatttgtaactgggttcaggataactacgcccagccgctcacccgcgagagcgtggcgcagttttttaata

SEQ ID NO: 764734 - DNA, 75 bp, synthetic construct
  source 1..75: mol_type = other DNA
ttgttctggcgcgagataaccccgcttgctgttcctatcttcatggagaacgcctgtgtcctgttgatgggggtc

SEQ ID NO: 764735 - DNA, 75 bp, synthetic construct
  source 1..75: mol_type = other DNA
aagaacatgcggtagaagcgtttgaactggaggcgtttgactacattctcaaaccgtatcaggaatcacgcatta

SEQ ID NO: 764736 - DNA, 75 bp, synthetic construct
  source 1..75: mol_type = other DNA
actgccattttgattttccgccgtttagcggtgatgaagaggccagcctgcaacgcgcggcacaagcgggcgtag

SEQ ID NO: 764737 - DNA, 75 bp, synthetic construct
  source 1..75: mol_type = other DNA
gcgctggcggaaaattatcaaccgctgtacgccgcgttagggctacacccagggatgttggatcaacacaccgat

SEQ ID NO: 764738 - DNA, 75 bp, synthetic construct
  source 1..75: mol_type = other DNA
atccacgcgccagtaaaacccgcgatgtcatcgcaaaattaccgctggcatcgttgttgctggaaaccgacgcgc

SEQ ID NO: 764739 - DNA, 75 bp, synthetic construct
  source 1..75: mol_type = other DNA
tcacgctgctgcgctgtagcgtaaacgctgcccacagtcgtgagcaaatcgatgccatcattcaggcatttgcta

SEQ ID NO: 764740 - DNA, 75 bp, synthetic construct
  source 1..75: mol_type = other DNA
cagtaaaagtctggcctcgattggcggttttgctgtcggttcggaagcgatggaagtgctgcgctacggcagccg

SEQ ID NO: 764741 - DNA, 75 bp, synthetic construct
  source 1..75: mol_type = other DNA
gctcgtcgttaagaaccattgccacacaaccagagctgcggcaaaagctgatggataacgccaaccatctgtatg

SEQ ID NO: 764742 - DNA, 75 bp, synthetic construct
  source 1..75: mol_type = other DNA
ctccattggcggctatgtcggcgaccacctgcttgggactaaacgcaccattgttcttggggcgattgtgctggc

SEQ ID NO: 764743 - DNA, 75 bp, synthetic construct
  source 1..75: mol_type = other DNA
tgaactgtttattagcgcccttggcctggcgatgattgctgccctggtgccgcagcatttgatgggctttattct

SEQ ID NO: 764744 - DNA, 75 bp, synthetic construct
  source 1..75: mol_type = other DNA
tcaacatcggctcgttgatagcgttatcgctggcccctgtgatcgctgatagattcggctattcagtcacctaca

SEQ ID NO: 764745 - DNA, 75 bp, synthetic construct
  source 1..75: mol_type = other DNA
gctgtgcgggtgtttgacgtgctttgcgagttacgtccggaaccagaagatgagattgccgaagtgttgcttaat

SEQ ID NO: 764746 - DNA, 75 bp, synthetic construct
  source 1..75: mol_type = other DNA
ctcggcatgtttatgtgctcgctgggctttcttacagccgccgctgcgggaatgtggtttgctgatgcacaagga

SEQ ID NO: 764747 - DNA, 75 bp, synthetic construct
  source 1..75: mol_type = other DNA
ctgacgtcgccgtggtttatcgtgttggtttacttgttccagagtttaggtgaactgctgattagcgccctgggc

SEQ ID NO: 764748 - DNA, 75 bp, synthetic construct
  source 1..75: mol_type = other DNA
atggatactttcgatagtgaaaaatttctctcagagctggatgttttatcaaaagagatcatgcctggttgtggt

SEQ ID NO: 764749 - DNA, 75 bp, synthetic construct
  source 1..75: mol_type = other DNA
caaggtctggtcagatgcgcttggcgaactgacgcgcggcatagaggttgtcgaatttgcctgcgggatcccgca

SEQ ID NO: 764750 - DNA, 75 bp, synthetic construct
  source 1..75: mol_type = other DNA
atggtaaaacgacactgagcagcagcggcgagacgctaccggtggctaatccggccaccggtaaagtaattcgtc

SEQ ID NO: 764751 - DNA, 75 bp, synthetic construct
  source 1..75: mol_type = other DNA
atttatattctaatgagctgaattttataaaggttgtggctattctggagtataaatatttttcattagacatga

SEQ ID NO: 764752 - DNA, 75 bp, synthetic construct
  source 1..75: mol_type = other DNA
cgtgcgtttttacacccgccgcaaaacgattacgcagcgctgggtaaaacgcaagagccacgaagccgcccagtt

SEQ ID NO: 764753 - DNA, 75 bp, synthetic construct
  source 1..75: mol_type = other DNA
acctgactgcgtccgcccacggtaagcgctgtcaggcgctcggcggtgcgaaaaaccactgcattttaatgccgg

SEQ ID NO: 764754 - DNA, 75 bp, synthetic construct
  source 1..75: mol_type = other DNA
catgaagcttttcctgcatggagtaaaatggcaccgttgcgccgtgcaagaatcctttttgaatttaaagtgttg

SEQ ID NO: 764755 - DNA, 75 bp, synthetic construct
  source 1..75: mol_type = other DNA
ttgggcattttgtgcaacgccactgtttgacagcaagggccgattaacgggaacgatagctttggcgtgtccggt

SEQ ID NO: 764756 - DNA, 75 bp, synthetic construct
  source 1..75: mol_type = other DNA
ggctacaggcgacggaacgcctggttttactacttcatttacatgaagttaaaacaacaaactgtgcgactttca

SEQ ID NO: 764757 - DNA, 75 bp, synthetic construct
  source 1..75: mol_type = other DNA
cccgcctctgcgtatgcggcgtggcagcattccggcgcacgctaacatttttcagcatcgtttaagggctggtct

SEQ ID NO: 764758 - DNA, 75 bp, synthetic construct
  source 1..75: mol_type = other DNA
ttgcatggggatttatgagccacgatgacctggatcgccagatggtcaacgttcttacccattttaaacctgact

SEQ ID NO: 764759 - DNA, 75 bp, synthetic construct
  source 1..75: mol_type = other DNA
gtttggcctgactgtcgatgattctgtccgctataaaattgcgggtcttagtgacgggttcccgaactacattca

SEQ ID NO: 764760 - DNA, 75 bp, synthetic construct
  source 1..75: mol_type = other DNA
tgcagggattcgcaacagatgcggatcaagcagaatttaatgcattacttgatgttagcgcgacaatagactcag

SEQ ID NO: 764761 - DNA, 75 bp, synthetic construct
  source 1..75: mol_type = other DNA
caaccgcaatgcttttgagtggatgcggatatcatttcgcaaaccaggtagatgcgtacgatctaatgcctcgtc

SEQ ID NO: 764762 - DNA, 75 bp, synthetic construct
  source 1..75: mol_type = other DNA
cccggccccttgttacagttgtgtacaaggggcctgatttttatgacggcgaaaaaaaaccgccagtaaaccggc

SEQ ID NO: 764763 - DNA, 75 bp, synthetic construct
  source 1..75: mol_type = other DNA
atctgccagccattataggcatgatattgatttgtgccggagtgttggtaattaacttgttgtcacgaagcgcac

SEQ ID NO: 764764 - DNA, 75 bp, synthetic construct
  source 1..75: mol_type = other DNA
ttggcttatattcctacagggattgcttatgctatctggtcaggagtcggtatagtcctgattagtttactttcc

SEQ ID NO: 764765 - DNA, 75 bp, synthetic construct
  source 1..75: mol_type = other DNA
atctaccgcaacgtaaaaagcgatgcaaactttgactatcagcgtacacaacaatccatcgacgctatcatgtcc

SEQ ID NO: 764766 - DNA, 75 bp, synthetic construct
  source 1..75: mol_type = other DNA
ctcctggttcaggacgcagagccaaacttcgatgtaaatggcaactctccggtaactccggatggctggataagc

SEQ ID NO: 764767 - DNA, 75 bp, synthetic construct
  source 1..75: mol_type = other DNA
atctgccagccattataggcatgatgttgatttgtgccggagtgttggtaattaacttattgtcacgaagcgcac

SEQ ID NO: 764768 - DNA, 75 bp, synthetic construct
  source 1..75: mol_type = other DNA
gcggcgggtaaagttcagcagggccggctggtggtcaacggtgccagtatgccgcagagaattgaatccgatggt

SEQ ID NO: 764769 - DNA, 75 bp, synthetic construct
  source 1..75: mol_type = other DNA
acttcaccggcgccacggatattgccagcttcctcgtgcgcaacggcatgccgacggtgcaactgaatggcgtgc

SEQ ID NO: 764770 - DNA, 75 bp, synthetic construct
  source 1..75: mol_type = other DNA
gcgcggtatctgatgagcgtctgaccactgcccgtaagcacaacatgattgaaagcgttaactctggtattcgca

SEQ ID NO: 764771 - DNA, 75 bp, synthetic construct
  source 1..75: mol_type = other DNA
aaagccgacaaaaaatgcagttttactcaacgccgggtgctggggcgattcgcgcacgtttacggctggttctct

SEQ ID NO: 764772 - DNA, 75 bp, synthetic construct
  source 1..75: mol_type = other DNA
actactatggcggacgcagcgaaacggaattgacgaccgcccaactgacgctgatcaccgatgaaggatcggtta

SEQ ID NO: 764773 - DNA, 75 bp, synthetic construct
  source 1..75: mol_type = other DNA
atgagaaacaggaaacatttattgtaccgatgcgtaatgctggcgaactgacgctggtgaaaagttttgactggt

SEQ ID NO: 764774 - DNA, 75 bp, synthetic construct
  source 1..75: mol_type = other DNA
tccttagtcgttttggtgatccacaaacgctgcaccagcttagtgtcctgggattcaatgacggcacgtattgcg

SEQ ID NO: 764775 - DNA, 75 bp, synthetic construct
  source 1..75: mol_type = other DNA
caccttggaatggctgctcttggtccgattgattacttcaatgttcaggacaagatggctggtcgtgagattgat

SEQ ID NO: 764776 - DNA, 75 bp, synthetic construct
  source 1..75: mol_type = other DNA
agccgcaaagcaacaggaagcggatgctgcattccaaaaagaatatgcggcagccatccagtcaggtgatcggca

SEQ ID NO: 764777 - DNA, 75 bp, synthetic construct
  source 1..75: mol_type = other DNA
tttacaggacaagatggttggtcgccagcaggagcagcaaagaattaacgaaaccattcgcaataatgacatgac

SEQ ID NO: 764778 - DNA, 75 bp, synthetic construct
  source 1..75: mol_type = other DNA
agcgaatcgtaagttaacatcagtgttagcagaatatcatttcgctccaacggaaacagcaaaaataaatttatt

SEQ ID NO: 764779 - DNA, 75 bp, synthetic construct
  source 1..75: mol_type = other DNA
gcaggtgcgagatctgatgaccaaatatcctggtcaattagagaagattcagtctggcatgaagtgggcagacga

SEQ ID NO: 764780 - DNA, 75 bp, synthetic construct
  source 1..75: mol_type = other DNA
ctccagaagcaatgcaatcatggctgcaaaacaacgccaaggaactggcgcgcgtcggtgttgaccctaataacg

SEQ ID NO: 764781 - DNA, 75 bp, synthetic construct
  source 1..75: mol_type = other DNA
atgggggctttaagtaatgccgaggggcaaaaggtaatggatgctattggtagtttgtccccaaatcagtctgaa

SEQ ID NO: 764782 - DNA, 75 bp, synthetic construct
  source 1..75: mol_type = other DNA
aagaactgtaaccgtaggcgggaaacttcatggtgctggtgctaacgcgttctacgaaggtatagacaatgaggg

SEQ ID NO: 764783 - DNA, 75 bp, synthetic construct
  source 1..75: mol_type = other DNA
tttcatctgtcatggatatgtataagcagatggatcagcagaagcgacagcaagagtttcagcaggcttatgctg

SEQ ID NO: 764784 - DNA, 75 bp, synthetic construct
  source 1..75: mol_type = other DNA
gtttaagcagtcacaggcggcccttgaaagagcaggacaacttcaggatatggatgttttgtctcttaactcaca

SEQ ID NO: 764785 - DNA, 75 bp, synthetic construct
  source 1..75: mol_type = other DNA
aatcgcgtaatggcggtcagatattggggttggatgttaaaaaaggtgaatcattggggagtgccgttaagcggt

SEQ ID NO: 764786 - DNA, 75 bp, synthetic construct
  source 1..75: mol_type = other DNA
atgatgcatggcagctttatcaacaggatccagcaaggtttaatagcctgttaaatgcgagccgtcttgccactc

SEQ ID NO: 764787 - DNA, 75 bp, synthetic construct
  source 1..75: mol_type = other DNA
gggggcaacggtgccagtatgccgcagagaattgaatccgatggttcatttgcacgcccttatattttcactgaa

SEQ ID NO: 764788 - DNA, 75 bp, synthetic construct
  source 1..75: mol_type = other DNA
gtgctcgggatgctgtttggtctgtatgtcttcagccgctccggcagcgaagcggccaaccttaaccagctggcc

SEQ ID NO: 764789 - DNA, 75 bp, synthetic construct
  source 1..75: mol_type = other DNA
cggatggaacactcgatgtggcagctacggcagcggcctgtaataacgccacaagtaacacattagttttcacgt

SEQ ID NO: 764790 - DNA, 75 bp, synthetic construct
  source 1..75: mol_type = other DNA
atgcttccgtgctcttcgatatgccaagcccaactatgcgcatcctcaacgagctacacagcaagggctataacg

SEQ ID NO: 764791 - DNA, 75 bp, synthetic construct
  source 1..75: mol_type = other DNA
tttactgacctgattgtggctgtggtttcccccagtggtagcaaggagggcgagatcgcctcccgcgaaagagtc

SEQ ID NO: 764792 - DNA, 75 bp, synthetic construct
  source 1..75: mol_type = other DNA
ggtaagcatattccgaagtccatccttgtcatgcgtaaagcaggcggcaatccactggaatacctcaagtacacc

SEQ ID NO: 764793 - DNA, 75 bp, synthetic construct
  source 1..75: mol_type = other DNA
tagcaatggtttcgcccagcgggagtcaggggggagaaattgcttctcgtgagtcagtcgaactttctttcagca

SEQ ID NO: 764794 - DNA, 75 bp, synthetic construct
  source 1..75: mol_type = other DNA
tattcacagggaagcaacagttaaaaactatgaaacaggcaacaagaaaaccgacgacacccggagatattcttc

SEQ ID NO: 764795 - DNA, 75 bp, synthetic construct
  source 1..75: mol_type = other DNA
actactatggtgggcgcagcgaaacggaattaaccaccgcccaactgacgctgatcaccgatgaaggatcggtca

SEQ ID NO: 764796 - DNA, 75 bp, synthetic construct
  source 1..75: mol_type = other DNA
acggacaataccgacctcgatcttcacgttgtcacgcccgatggcgaacacgcctggtacggtaacaccgtgctg

SEQ ID NO: 764797 - DNA, 75 bp, synthetic construct
  source 1..75: mol_type = other DNA
gagctacacagcaaaggctataacgttgacgccgctgtcgccgaatttaacgccttcaagcatctgacggaagaa

SEQ ID NO: 764798 - DNA, 75 bp, synthetic construct
  source 1..75: mol_type = other DNA
gcagcagagtgtaccaagattatcactgcagcagcagggaatttctatacggcaggtgtaggaactgcaggtaat

SEQ ID NO: 764799 - DNA, 75 bp, synthetic construct
  source 1..75: mol_type = other DNA
gaggggtgctggatgtcgcagaaactgcaacacaatgtgaaagcggtgggaatagcaacacattaattttcacgt

SEQ ID NO: 764800 - DNA, 75 bp, synthetic construct
  source 1..75: mol_type = other DNA
tgcttaacgataatctgcaaccggaagagcagaaaaccgcatcaataccgattaacagcaaccttattgttcacg

SEQ ID NO: 764801 - DNA, 75 bp, synthetic construct
  source 1..75: mol_type = other DNA
agctacaagttactggcgtggatatcgacggtaactttatgccgtttgatatgcagccgagccagcttgcagtca

SEQ ID NO: 764802 - DNA, 75 bp, synthetic construct
  source 1..75: mol_type = other DNA
gatggacttcacctccggcctgaactggcaggagaaaaccctgaccctgaaaccgacgtcgctgaaaggcctgct

SEQ ID NO: 764803 - DNA, 75 bp, synthetic construct
  source 1..75: mol_type = other DNA
acagtgcggcgatgacctcgatgctgattggtctgggggttgcacaaagtggtcagattgtgggtaaaatcggcg

SEQ ID NO: 764804 - DNA, 75 bp, synthetic construct
  source 1..75: mol_type = other DNA
tcgacctcgccatgctgaaaccgtttatgccagaaaccactcaggccagcggtatcttcacgggtaaagcggacg

SEQ ID NO: 764805 - DNA, 75 bp, synthetic construct
  source 1..75: mol_type = other DNA
gcgtaacaaccgtgccgaattgggctggaccatccgcctgaccaataacggccagtttgatggacaggtgcaggt

SEQ ID NO: 764806 - DNA, 75 bp, synthetic construct
  source 1..75: mol_type = other DNA
ctgacccggcgatgtcgcaacaagctgcattgtcttatttgctacgtggacaagggctggagagcgatcagagcg

SEQ ID NO: 764807 - DNA, 75 bp, synthetic construct
  source 1..75: mol_type = other DNA
gctgccgcagggcagtatcaccctttcggggcgtaacgtgcaggtaacgcaaaccgtcaacgatgcggcgctgcc

SEQ ID NO: 764808 - DNA, 75 bp, synthetic construct
  source 1..75: mol_type = other DNA
ggaactggggccaaacagtgccgaagtgaaaggcgagctgggggtaaaagatctcaatcttgatgccaccatcaa

SEQ ID NO: 764809 - DNA, 75 bp, synthetic construct
  source 1..75: mol_type = other DNA
tcggggcgtaacgtgcaggtaacgcaaaccgtcaacgatgcggcgctgcccgtggcgtttcagacgctgaatctg

SEQ ID NO: 764810 - DNA, 75 bp, synthetic construct
  source 1..75: mol_type = other DNA
gtggcgtttcagacgctgaatctgacggcggagttgcgtaacaaccgtgccgaattgggctggaccatccgcctg

SEQ ID NO: 764811 - DNA, 75 bp, synthetic construct
  source 1..75: mol_type = other DNA
ttgcctgggacaccaccaaagaggggctgccacagggtagtatcaccctttctggacgtaacgtgcaggtgacgc

SEQ ID NO: 764812 - DNA, 75 bp, synthetic construct
  source 1..75: mol_type = other DNA
ttgatcgcaaagaagaacgctggaagggaacacttagcaatacccgcttccagacgccggtcggcccgtggtcgc

SEQ ID NO: 764813 - DNA, 75 bp, synthetic construct
  source 1..75: mol_type = other DNA
tgaacaagagagcctgttggatgaactgctggcggatgatttagcgcactgccaaacgtcgcagggaacgctaca

SEQ ID NO: 764814 - DNA, 75 bp, synthetic construct
  source 1..75: mol_type = other DNA
ggcacggcaggcgcgttatcaggcatttgcccgaacgctgttacccggagaagttctggtcactgcacaacatct

SEQ ID NO: 764815 - DNA, 75 bp, synthetic construct
  source 1..75: mol_type = other DNA
ctgccaacagtggcaggtgccgctggtggtcgaacgcgtacaacttgcgcaagaggggctggggattgaggccca

SEQ ID NO: 764816 - DNA, 75 bp, synthetic construct
  source 1..75: mol_type = other DNA
gattgcgccaatgatgacgatgagcgacgcccgtcgcgcggcgattatccgccgctggctggcagggcagaatgc

SEQ ID NO: 764817 - DNA, 75 bp, synthetic construct
  source 1..75: mol_type = other DNA
gaaacgttgattgcggcagcgggaatttttgttacacgtgaaggctttgctgaagatgaggctggtgtaagtttt

SEQ ID NO: 764818 - DNA, 75 bp, synthetic construct
  source 1..75: mol_type = other DNA
gccgctggctggctgggctgaatgcgccgatgccttcccgcgatgcgctggtacggatttggcaagaagttgcac

SEQ ID NO: 764819 - DNA, 75 bp, synthetic construct
  source 1..75: mol_type = other DNA
gcaggcagaacttatttgttctctgatgatgggtaacacaggtgaaatgactgagggtgagattgagtcattgct

SEQ ID NO: 764820 - DNA, 75 bp, synthetic construct
  source 1..75: mol_type = other DNA
tagctggcgcggtgagctaacgcttaatggcattaacaccgccaaagagttcccggagtggccgtcgaaactcaa

SEQ ID NO: 764821 - DNA, 75 bp, synthetic construct
  source 1..75: mol_type = other DNA
tgactgattacacgctctctatgcacatggcggtgaaggggcatgagatcccgccagcgaccattaccctcgatg

SEQ ID NO: 764822 - DNA, 75 bp, synthetic construct
  source 1..75: mol_type = other DNA
acccgggcggtagcgtacctgaaaatgtaaagatgagtgtaacgctgcactggcaccctttgctgcatggtggga

SEQ ID NO: 764823 - DNA, 75 bp, synthetic construct
  source 1..75: mol_type = other DNA
cccctgatgagtgttgggaaggatggtcagaagatacgaatcatggatgggttgaggtccctgcgggtatgcatc

SEQ ID NO: 764824 - DNA, 75 bp, synthetic construct
  source 1..75: mol_type = other DNA
acgatgttcgatgacccagactggccctttagtgaaagtattttagttatcacttctgcttcaccagaagaagtt

SEQ ID NO: 764825 - DNA, 75 bp, synthetic construct
  source 1..75: mol_type = other DNA
caccatcaacgcgccggggctggataacgcgctgccggggcttggcggtacagcgaaagggctggtgaaagtacg

SEQ ID NO: 764826 - DNA, 75 bp, synthetic construct
  source 1..75: mol_type = other DNA
tgggaacggatgccaatggcggcgatgtgctggcacgtattctctatggcacgcggatctcagttctgtttggcc

SEQ ID NO: 764827 - DNA, 75 bp, synthetic construct
  source 1..75: mol_type = other DNA
tcgctaccctcacctttttaccgtttattttatgtagttcgataaccaccctgacctcactcgatttcctcggct

SEQ ID NO: 764828 - DNA, 75 bp, synthetic construct
  source 1..75: mol_type = other DNA
ctcccggcaaaactggctgggaacggatgccaatggcggcgatgtgctggcacgcattctctatggcacgcggat

SEQ ID NO: 764829 - DNA, 75 bp, synthetic construct
  source 1..75: mol_type = other DNA
catggatcacttcatggactggctggctaaacagtacatcactgcactgaacatcatccactacatgcacgacaa

SEQ ID NO: 764830 - DNA, 75 bp, synthetic construct
  source 1..75: mol_type = other DNA
gctgattatcaggacccgtggctgaaacaacggctggaggataatggctgggtactgtgggcgccgattcgcttt

SEQ ID NO: 764831 - DNA, 75 bp, synthetic construct
  source 1..75: mol_type = other DNA
taaccgtcgcggctactggtcgttatggattttcctcgtcttgtttggtttgagtttgtgttctgaacttatcgc

SEQ ID NO: 764832 - DNA, 75 bp, synthetic construct
  source 1..75: mol_type = other DNA
ggacaacgctttattgaagtatggtcggggatgccgacgctgtttttgattattttactttccagcgtcgtacag

SEQ ID NO: 764833 - DNA, 75 bp, synthetic construct
  source 1..75: mol_type = other DNA
gctgtgcaggctttacgcagcaacgactgggatctctggcaggcagaagcctctatccgcaacaacaagatgtga

SEQ ID NO: 764834 - DNA, 75 bp, synthetic construct
  source 1..75: mol_type = other DNA
tgcaaaaaatcctcagacagatgaaatgatcagagatagttttgttgggaaactattacaacatacgattaattt

SEQ ID NO: 764835 - DNA, 75 bp, synthetic construct
  source 1..75: mol_type = other DNA
ctgacctcgctcgatttcctcggcttcggtctgccgctcggttcaccgtcactcggcgaactgctgttacaaggg

SEQ ID NO: 764836 - DNA, 75 bp, synthetic construct
  source 1..75: mol_type = other DNA
tgctggcgggggcgctgcaaggttattacggcggaaaagtggatctctgggggcagcgcttcattgaagtgtggt

SEQ ID NO: 764837 - DNA, 75 bp, synthetic construct
  source 1..75: mol_type = other DNA
cgtcagcgatcgcagtatcattctgcgtcatatgttgccaaatgcaatggtcgctaccctcacctttttaccgtt

SEQ ID NO: 764838 - DNA, 75 bp, synthetic construct
  source 1..75: mol_type = other DNA
catgcacgacaagtacagctacgaagcctctctgatggcgctgcacgaccgtgacgttatccgcaccatggcgtg

SEQ ID NO: 764839 - DNA, 75 bp, synthetic construct
  source 1..75: mol_type = other DNA
atgccggaagttttcagatggacgccgcaaagaagctacagcgtgaccagggaaccaaatgtgtcggtcgttaaa

SEQ ID NO: 764840 - DNA, 75 bp, synthetic construct
  source 1..75: mol_type = other DNA
cttggtgatggttatgaacagcgccaggcgaaagggattaacacgttgcttgatagctacaccctggtctttaaa

SEQ ID NO: 764841 - DNA, 75 bp, synthetic construct
  source 1..75: mol_type = other DNA
ggcagtagcgccggatgtggtgatggtggaaacgtagcaatccaggcggaagcattcttgagggcgcgcggcgcg

SEQ ID NO: 764842 - DNA, 75 bp, synthetic construct
  source 1..75: mol_type = other DNA
gccaggtgtggcggttaaagcgggtaatctgcatctggcggttgggctggagtgcctgtgggacagcagcgtttg

SEQ ID NO: 764843 - DNA, 75 bp, synthetic construct
  source 1..75: mol_type = other DNA
ggtgcacgatctgccggaaagcgcggtgggcgtctccagcgatgtggtgatgcttaacgataacctgcaaccgga

SEQ ID NO: 764844 - DNA, 75 bp, synthetic construct
  source 1..75: mol_type = other DNA
tgtctgccgaaaatggaacatgacgaaggatggccccgtattcacgctaaccgcgatgtttgagcaagtgatgaa

SEQ ID NO: 764845 - DNA, 75 bp, synthetic construct
  source 1..75: mol_type = other DNA
tgggtcgtatcgcgcgtgaatttaatctctacaccaaaatcaccggctcccagcgcctggcgatgtttggcgcac

SEQ ID NO: 764846 - DNA, 75 bp, synthetic construct
  source 1..75: mol_type = other DNA
cctgctcggtgcggtactggtgggcgataccagcgactacggcaacctgctgcaactggtgctgaatgctatcga

SEQ ID NO: 764847 - DNA, 75 bp, synthetic construct
  source 1..75: mol_type = other DNA
gcgttggcgctacttgaacttggtattgagctttttgccgtgctgatgttttgcgtcacgatgctggggaaattt

SEQ ID NO: 764848 - DNA, 75 bp, synthetic construct
  source 1..75: mol_type = other DNA
cgcaaagaagctacagcgtgaccaggaagccagacgtatctgttgttaagctgggcgatggttatgagcaaagac

SEQ ID NO: 764849 - DNA, 75 bp, synthetic construct
  source 1..75: mol_type = other DNA
acttcatcaacagcgacaagcgtgacccgaacgtgcagatggtgccagagcgcgaacagcaccgtccggcaacgc

SEQ ID NO: 764850 - DNA, 75 bp, synthetic construct
  source 1..75: mol_type = other DNA
cctgctcggtgcggtactggtgggcgataccagcgactacggtaacctgctgcaactggtgctgaacgctatcga

SEQ ID NO: 764851 - DNA, 75 bp, synthetic construct
  source 1..75: mol_type = other DNA
cattttgtggtgcgtggataaattctttttcgcacctaaacggcgggaacgtcaggcagcagcacaagcagctgc

SEQ ID NO: 764852 - DNA, 75 bp, synthetic construct
  source 1..75: mol_type = other DNA
gtcgtcatggatctttttgcccgcagggttatcggctggagcctgtcagcgaatgccgatactgccctgataagc

SEQ ID NO: 764853 - DNA, 75 bp, synthetic construct
  source 1..75: mol_type = other DNA
gcctcaccattacaacggtgggttgacgccggaagaatcagagaacagataccgtttttactgtaaaaccgtggc

SEQ ID NO: 764854 - DNA, 75 bp, synthetic construct
  source 1..75: mol_type = other DNA
gatgaaatatctgaacctgagcagttgtcagcctggaaaacatcagtataaaaatgcccgtcaggagcatacctg

SEQ ID NO: 764855 - DNA, 75 bp, synthetic construct
  source 1..75: mol_type = other DNA
ccgagccagatagggtatggtgcggagatattacgtatatctgggcaggaaatcgctggtgctatctggcggtcg

SEQ ID NO: 764856 - DNA, 75 bp, synthetic construct
  source 1..75: mol_type = other DNA
ttaaatacccggaagatccaaagcttgattacatcaagcgtgcggtgggtttaccgggcgataaagtcacttacg

SEQ ID NO: 764857 - DNA, 75 bp, synthetic construct
  source 1..75: mol_type = other DNA
gcgtgtgacagctcgccgcttaatcaatatcagcgacgctttagccaggatgtcgcgccgcaatatgtcgacatc

SEQ ID NO: 764858 - DNA, 75 bp, synthetic construct
  source 1..75: mol_type = other DNA
ttgctcaacgttgcgccgatcctcgccctgcttggcggtcgcttaaaacaacgcgaggcaccgtggtacgcgttg

SEQ ID NO: 764859 - DNA, 75 bp, synthetic construct
  source 1..75: mol_type = other DNA
cccgcagggttatcggctggagtctgtccgcacatgccgatactgcactgataagcgatgccctgcggatggcct

SEQ ID NO: 764860 - DNA, 75 bp, synthetic construct
  source 1..75: mol_type = other DNA
cgatactgccctgataagcagtgccctgcggatggcgtatgaggtgcgtggtcagccgcgggacgtcatgttcca

SEQ ID NO: 764861 - DNA, 75 bp, synthetic construct
  source 1..75: mol_type = other DNA
tacaacggtgggctgacgccggaagagtcagagaacagatatcgttcttactgtaaaaccgtggccagaattact

SEQ ID NO: 764862 - DNA, 75 bp, synthetic construct
  source 1..75: mol_type = other DNA
atctacaaccgcgctcttaatgtccgactcgctgaacggttcacgatagccgccagactaagtgacagccacacg

SEQ ID NO: 764863 - DNA, 75 bp, synthetic construct
  source 1..75: mol_type = other DNA
aactgctgggataatagtcctatggaacgcttcttccgcagtctgaaaacagaatgggtgccagggaatggttac

SEQ ID NO: 764864 - DNA, 75 bp, synthetic construct
  source 1..75: mol_type = other DNA
atgaagaaaaagctgcccaggagcgaatgcccggggcagatactccggatgagttacagaagaaggctagagaat

SEQ ID NO: 764865 - DNA, 75 bp, synthetic construct
  source 1..75: mol_type = other DNA
caacagcaccacgtcgtttggtcagatgatgtaccagaccggcagtggcgcaaccgccacacagacccgtgacgg

SEQ ID NO: 764866 - DNA, 75 bp, synthetic construct
  source 1..75: mol_type = other DNA
agccaggatattattgctgaccatcaggggcatcaggccattattgagcaaagaacgcaggacagtaatatccgt

SEQ ID NO: 764867 - DNA, 75 bp, synthetic construct
  source 1..75: mol_type = other DNA
ccgatggtccagaccattctgaccggaataaccattggtattttcccgcttctggtactggctgctgcatttaat

SEQ ID NO: 764868 - DNA, 75 bp, synthetic construct
  source 1..75: mol_type = other DNA
atcaggttgataatatggtcacagaatgccgaggcaatatcggggatactcagaacagcatacgtgacgaagaaa

SEQ ID NO: 764869 - DNA, 75 bp, synthetic construct
  source 1..75: mol_type = other DNA
gatgggttgccgtgtttgtacttatcagtctgctggttaatgtccgcacatcggtgcagattattgataacagtg

SEQ ID NO: 764870 - DNA, 75 bp, synthetic construct
  source 1..75: mol_type = other DNA
gtactggcggctgtcttcaacaaactgacgctgtccgtcctgaaaggttatgtgtttgccctgatgtggctgcag

SEQ ID NO: 764871 - DNA, 75 bp, synthetic construct
  source 1..75: mol_type = other DNA
gtttggttctaaccgggggagcagtgactctgtcaccggtggtgctgacagcacgatgagcgcacaggactccat

SEQ ID NO: 764872 - DNA, 75 bp, synthetic construct
  source 1..75: mol_type = other DNA
ttcgctgtccccgagccagaccaggtatggtgtggagatattacctatctctgggccggaaatcgctggtgctat

SEQ ID NO: 764873 - DNA, 75 bp, synthetic construct
  source 1..75: mol_type = other DNA
gatgttcatctggagaagaactttaaaccgaattttatgggggttggcggtggtattggtgtgaaggctggagtt

SEQ ID NO: 764874 - DNA, 75 bp, synthetic construct
  source 1..75: mol_type = other DNA
gatccccccgttgtcatggatgatggtaaaaggccttggcgcaggtttttccagcgtgtacagccacttcgcctc

SEQ ID NO: 764875 - DNA, 75 bp, synthetic construct
  source 1..75: mol_type = other DNA
caggactccatgatggccagccgtatgcgcagtgcagtggaaagctatgcgaaggcgcataatatcagtaatgag

SEQ ID NO: 764876 - DNA, 75 bp, synthetic construct
  source 1..75: mol_type = other DNA
gtcaggcctcaccattacaacggtgggttgacgccggaagaatcagagaacagataccgtttttactgtaaaacc

SEQ ID NO: 764877 - DNA, 75 bp, synthetic construct
  source 1..75: mol_type = other DNA
aaggtaaatatggcaatgtagtaaaactgaaaaaattgactggtcagttcgaacccgtatgtattgacataagtg

SEQ ID NO: 764878 - DNA, 75 bp, synthetic construct
  source 1..75: mol_type = other DNA
ggaaaacgtgaacggattcagctggagcaccaacagcaccacgtcgtttggtcagatgatgtaccagaccggcag

SEQ ID NO: 764879 - DNA, 75 bp, synthetic construct
  source 1..75: mol_type = other DNA
gtatgcgcagtgcagtggaaagctatgcgaaggcgcataatatcagtaatgagcaggcgactcaggaactggcat

SEQ ID NO: 764880 - DNA, 75 bp, synthetic construct
  source 1..75: mol_type = other DNA
aaaggaatggagagcgtaccttcgggcggtggcagccaggatattattgcagaccatcaggggcatctgggtatt

SEQ ID NO: 764881 - DNA, 75 bp, synthetic construct
  source 1..75: mol_type = other DNA
aaaagtcggcctgcaactaaattgtcgcgagctgcctgattatctgccgctgtatctggagtatttaagtgtgct

SEQ ID NO: 764882 - DNA, 75 bp, synthetic construct
  source 1..75: mol_type = other DNA
ttttgtcgggatgcactgttggtgattatgttcgcccattgttacccggtagtgtatatttgcaagacggacaga

SEQ ID NO: 764883 - DNA, 75 bp, synthetic construct
  source 1..75: mol_type = other DNA
tggtggacctgctggcggagtacgaaaaggtcggtctgcaactggattgtcgggaactgcccgattatctgccgc

SEQ ID NO: 764884 - DNA, 75 bp, synthetic construct
  source 1..75: mol_type = other DNA
tgacggcaccatcgtcattggtgaaggtgaaatcgacgaagcaccgatgctctacattggtgaaaaagtcggtac

SEQ ID NO: 764885 - DNA, 75 bp, synthetic construct
  source 1..75: mol_type = other DNA
gattcttacctgtatgccagacagtgaagttgacgtgctgtacggtattggcggcgccccagaaggcgtggtttc

SEQ ID NO: 764886 - DNA, 75 bp, synthetic construct
  source 1..75: mol_type = other DNA
ggtgctctcagaaatttcacagatacagctgaaatactccgatctggcttccactgccgggtatctttccatgat

SEQ ID NO: 764887 - DNA, 75 bp, synthetic construct
  source 1..75: mol_type = other DNA
gaatgccattgcagcatttatgagtacccggacctgggattccattgaaaaaattgcgctcgccctgtctgttgt

SEQ ID NO: 764888 - DNA, 75 bp, synthetic construct
  source 1..75: mol_type = other DNA
cgatgctcaccgattttgcactcgacctgctcaacgcgccgctgctggataaacaggccgaatggtgtgaagtgt

SEQ ID NO: 764889 - DNA, 75 bp, synthetic construct
  source 1..75: mol_type = other DNA
cctggcgggaatcccgtggcgatattggtaaaggaatggagagcgtaccttcgggtggtggcagccaggatatta

SEQ ID NO: 764890 - DNA, 75 bp, synthetic construct
  source 1..75: mol_type = other DNA
gttaaaagatgacttgccattgctggatcgtattatttcccatatcgatcagttttttatccgccatcagaaaaa

SEQ ID NO: 764891 - DNA, 75 bp, synthetic construct
  source 1..75: mol_type = other DNA
cagccagcacattagcgtcgaaagcactcagttttctaatcaggggacgatggcgggagccgcattggtaaaaga

SEQ ID NO: 764892 - DNA, 75 bp, synthetic construct
  source 1..75: mol_type = other DNA
gtggttgctgaaaaccagcctgggcacattgatcaaataaagcagaccaacgcgggcgcggtttatcgcctgatt

SEQ ID NO: 764893 - DNA, 75 bp, synthetic construct
  source 1..75: mol_type = other DNA
tttgatgctctgctgcaactggcgggaagctccctttcaagtgacagtgtcacaaaacagattcgcagcgaagag

SEQ ID NO: 764894 - DNA, 75 bp, synthetic construct
  source 1..75: mol_type = other DNA
tcaggagcatacctgcttgccgaatctgctcgggcgccagttcgctgtccccaagccagaccaggtatggtgtgg

SEQ ID NO: 764895 - DNA, 75 bp, synthetic construct
  source 1..75: mol_type = other DNA
ttgtacatcgcatgccgttctacgaggatgtaaaagagatgccgctcggcgaggcgctggagcagcataccggcg

SEQ ID NO: 764896 - DNA, 75 bp, synthetic construct
  source 1..75: mol_type = other DNA
aacagattttcacgatgattaccaaacggtaatggcatacaaagtttctgaagtcatcgatgcaatccgcgctac

SEQ ID NO: 764897 - DNA, 75 bp, synthetic construct
  source 1..75: mol_type = other DNA
atgaagaaaaagctgcccaggaacgaatgcccggggcagatactccggatgagttgctgaagaaggccaaagagt

SEQ ID NO: 764898 - DNA, 75 bp, synthetic construct
  source 1..75: mol_type = other DNA
tcggtgcagattattgataacagtgacctggtcaaagtccatcgggtggataatgtgccggtcggtctggcgatg

SEQ ID NO: 764899 - DNA, 75 bp, synthetic construct
  source 1..75: mol_type = other DNA
aaggaaaaaaagcaaagagtctggtatgtcgctcctacttaccagatggctcgccagattttgtgggacgatcta

SEQ ID NO: 764900 - DNA, 75 bp, synthetic construct
  source 1..75: mol_type = other DNA
atccgtcacttttatttcctgagaaaataaagttaaatggtttgttatcaattgatatgatcattgttatgagga

SEQ ID NO: 764901 - DNA, 75 bp, synthetic construct
  source 1..75: mol_type = other DNA
gctatttctacggtgccagccagtcggccagccagattatgcgtaagaatgtgacaataaatgcactgaaagagg

SEQ ID NO: 764902 - DNA, 75 bp, synthetic construct
  source 1..75: mol_type = other DNA
ccgaagtgattaatctggtgacagcgaaaatattacggctgatttgcaagggcgctatccgtggacagaagaaga

SEQ ID NO: 764903 - DNA, 75 bp, synthetic construct
  source 1..75: mol_type = other DNA
ggttggcaaacgcggggccgatgacgctgcgtctggataaagacactgcagatgcggtggccaaagacaatatga

SEQ ID NO: 764904 - DNA, 75 bp, synthetic construct
  source 1..75: mol_type = other DNA
gggggaatttactatgccgctagtgccggatggacttcctgtaagtgggcatgctactgcgacgttaaacttgcc

SEQ ID NO: 764905 - DNA, 75 bp, synthetic construct
  source 1..75: mol_type = other DNA
gatctggatgcacttaacgaactttccgagctaatctgtgccgcagaatgcggggaacatattgaaccgtataag

SEQ ID NO: 764906 - DNA, 75 bp, synthetic construct
  source 1..75: mol_type = other DNA
ggcatgacagcacgattacgctgaccgatctctccaccggtttcgaccagttacaatacggtacgatgacggtag

SEQ ID NO: 764907 - DNA, 75 bp, synthetic construct
  source 1..75: mol_type = other DNA
cacggggggcagcgtgttaccgccatcaaccttaaaatttagtgttgaagggcgcgaaccaacttatttcctctt

SEQ ID NO: 764908 - DNA, 75 bp, synthetic construct
  source 1..75: mol_type = other DNA
gcattttctgctgcgcctgaacaaggattccgcgcgggaggacacggcgtgttgaaaggcggtagtgcctggatg

SEQ ID NO: 764909 - DNA, 75 bp, synthetic construct
  source 1..75: mol_type = other DNA
tttggcgataatctccaggcatggttggagcagaacgcacgtctgccgggaaatgactgtccgcaaggaaaagag

SEQ ID NO: 764910 - DNA, 75 bp, synthetic construct
  source 1..75: mol_type = other DNA
gcaggttttcctttgagtggccgactgggtgtcaaagtcgacaactggcaggcagggcttgagaacgctctggtc

SEQ ID NO: 764911 - DNA, 75 bp, synthetic construct
  source 1..75: mol_type = other DNA
gaataatctctcgtccagcgaactggtcagcgccgttaacccgaaacaattcgccatgtctggcgcattcaacgg

SEQ ID NO: 764912 - DNA, 75 bp, synthetic construct
  source 1..75: mol_type = other DNA
attttgttttgccgttccgttttggtgacggggcatggcatttgggaacacggcgaccagtatcactccgtatag

SEQ ID NO: 764913 - DNA, 75 bp, synthetic construct
  source 1..75: mol_type = other DNA
ccgaagtgattaatctggtgacagcgaaaaatattacggctgatttgcaagggcgttatccgtggactgaagaag

SEQ ID NO: 764914 - DNA, 75 bp, synthetic construct
  source 1..75: mol_type = other DNA
gatccggacgcactcgacgagctttccatactcgtctgcgccgcagaaaacgggcatcacattgaaccgtataac

SEQ ID NO: 764915 - DNA, 75 bp, synthetic construct
  source 1..75: mol_type = other DNA
cgtgacgcccgatctgttaactaccgccaaagcgctgggcggcggtttcccggtcggtgcgttgttggcaaccga

SEQ ID NO: 764916 - DNA, 75 bp, synthetic construct
  source 1..75: mol_type = other DNA
tgtggtttgttcagtgaaatccgcggattaggtctgctaattggttgtgttttgaatgccgattacgccgggcaa

SEQ ID NO: 764917 - DNA, 75 bp, synthetic construct
  source 1..75: mol_type = other DNA
tgcgggtggcaatgtggtgcgttttgcgcctgcgctcaatgtcagcgaagaagaggtgacgaccgggctggatcg

SEQ ID NO: 764918 - DNA, 75 bp, synthetic construct
  source 1..75: mol_type = other DNA
ataatctctccagaacgatagagacggctacaaaagttcttaatagcccaggattcactggatatttcggaacaa

SEQ ID NO: 764919 - DNA, 75 bp, synthetic construct
  source 1..75: mol_type = other DNA
gttaaaaaacagtttgattatcaggagccagtacagaatacgccaggacaacaatctcctgctggcagtaacttt

SEQ ID NO: 764920 - DNA, 75 bp, synthetic construct
  source 1..75: mol_type = other DNA
gttcctggctctgatgcggctaactttgaagcaagactcgacacctttaaagctcaaactttcctccctatggtg

SEQ ID NO: 764921 - DNA, 75 bp, synthetic construct
  source 1..75: mol_type = other DNA
aggataccatgttccttttggggagtgatgcactggagtcgatggttaagcacgaagcgagccgtccgttggtgt

SEQ ID NO: 764922 - DNA, 75 bp, synthetic construct
  source 1..75: mol_type = other DNA
atctgctcgatattgaaaaactgaaagttgatccgaaaaccattcacgcctatcgttacgtgatgaagccgacgc

SEQ ID NO: 764923 - DNA, 75 bp, synthetic construct
  source 1..75: mol_type = other DNA
aattgatttacttgatttagtgctacagctgtggcgtggaaagtgggtaattggcgcttttgttgctgtttttat

SEQ ID NO: 764924 - DNA, 75 bp, synthetic construct
  source 1..75: mol_type = other DNA
gcaatccgctggcctcggcggtggcaggtaaagtgcttgatcttattaacacgccgaaaatgcttaacggggtta

SEQ ID NO: 764925 - DNA, 75 bp, synthetic construct
  source 1..75: mol_type = other DNA
ggaaccgtggcgactcggtaggtttgaagcgcgtttccggcgttcgttggcacgcaaaccatccccatggttagt

SEQ ID NO: 764926 - DNA, 75 bp, synthetic construct
  source 1..75: mol_type = other DNA
agttcgccgtctggaggaacaaaatacgatattaaaaaaggctaccgcgctcttaatgtccgactcgctgaacgg

SEQ ID NO: 764927 - DNA, 75 bp, synthetic construct
  source 1..75: mol_type = other DNA
tcgatgatggtactgaaatccccaacagtctacgggcagaaatacgcgaagatacgcgaatgaaacgcagagctg

SEQ ID NO: 764928 - DNA, 75 bp, synthetic construct
  source 1..75: mol_type = other DNA
aactgctgggataacagtccaatggaacgcttcttccgcagtctgaaaacagaatgggtgccgacggatggttac

SEQ ID NO: 764929 - DNA, 75 bp, synthetic construct
  source 1..75: mol_type = other DNA
tcgtgttccatagcgaccagggaagccagtatacaggccttaaatatcaacaacttctctggcgttgcagaataa

SEQ ID NO: 764930 - DNA, 75 bp, synthetic construct
  source 1..75: mol_type = other DNA
aagacgggaggcaagacctggcattattatgtgcagcagatatttggcggcagaccggacccggacctgttattc

SEQ ID NO: 764931 - DNA, 75 bp, synthetic construct
  source 1..75: mol_type = other DNA
atgcacgatgaaggcccatcactggcaagcctgcttaagcatggatgccaggttacacacttcaagaactcacgc

SEQ ID NO: 764932 - DNA, 75 bp, synthetic construct
  source 1..75: mol_type = other DNA
tgatagcgtgtggttagatattgatttcccaaacccagtcgtgaccttagctcgtgctcgtcagctaaatggcga

SEQ ID NO: 764933 - DNA, 75 bp, synthetic construct
  source 1..75: mol_type = other DNA
gtctgtgttctgctctgggaatacaccgcagcagttaccggtactggcaaaaacgacgcgatacggtgaatccgg

SEQ ID NO: 764934 - DNA, 75 bp, synthetic construct
  source 1..75: mol_type = other DNA
gtggggaatggttacggaacaacctgaatgccatcgctgcctttatgagtacccggacgtgggattccattgaaa

SEQ ID NO: 764935 - DNA, 75 bp, synthetic construct
  source 1..75: mol_type = other DNA
gggaggcgtcgaacagagcagaaagcgccctgcatgggttcagcagcagtattgccagtgcctggaactcgctca

SEQ ID NO: 764936 - DNA, 75 bp, synthetic construct
  source 1..75: mol_type = other DNA
gccctgcggatggcctatgagacgcgtggtcaaccacatgatgttatgttccatagcgaccacagtatacaggcc

SEQ ID NO: 764937 - DNA, 75 bp, synthetic construct
  source 1..75: mol_type = other DNA
cccgtcaggagcataccagcctgccgaatctgcttgagcgtcagttcgcagtaccggagccagaccgggtatggt

SEQ ID NO: 764938 - DNA, 75 bp, synthetic construct
  source 1..75: mol_type = other DNA
cggtcgtcatggatctttttgcccgcagggttatcggctggagcctgtcagcgaatgccgatactgccctgataa

SEQ ID NO: 764939 - DNA, 75 bp, synthetic construct
  source 1..75: mol_type = other DNA
agaaaaatctgcccaagagcgagtgcctggggcagatacatcggatgaactactgaaaaaggccagggaatacca

SEQ ID NO: 764940 - DNA, 75 bp, synthetic construct
  source 1..75: mol_type = other DNA
cagctgaaatactccgacctggcatcaaccgcaggttatctctcagcgatgatcccccctctgtcatggatgatg

SEQ ID NO: 764941 - DNA, 75 bp, synthetic construct
  source 1..75: mol_type = other DNA
gttggtgtcagaggcgggtttaagggaagtcttgatcgaacggatgatgattcacattctgcaagtagtggcagc

SEQ ID NO: 764942 - DNA, 75 bp, synthetic construct
  source 1..75: mol_type = other DNA
gatgggttgccgtgtttgtgcttatcagtctgctgattaatgtccgcacatcggtgcagattattgataacagtg

SEQ ID NO: 764943 - DNA, 75 bp, synthetic construct
  source 1..75: mol_type = other DNA
agaaaagctggctcaggaaagaatacctggagctgatagtccgaaagaacttttagagaaggcgaaaagctacca

SEQ ID NO: 764944 - DNA, 75 bp, synthetic construct
  source 1..75: mol_type = other DNA
acgtaatggtgattcggccagcctggtgaatctggccaccacgtcatcgatggagaaacaacgtctggcacatgt

SEQ ID NO: 764945 - DNA, 75 bp, synthetic construct
  source 1..75: mol_type = other DNA
gcaggcagtgtggttgacggtaattactcctacggcaacatgcagacggaaaacgtgaacggcttcagctggagc

SEQ ID NO: 764946 - DNA, 75 bp, synthetic construct
  source 1..75: mol_type = other DNA
accaggacgtgggattccattgaaaaaattgcgctcacattgtctgttctcgcggtggccgtgatgtgggtacag

SEQ ID NO: 764947 - DNA, 75 bp, synthetic construct
  source 1..75: mol_type = other DNA
tatcattgccgatcaccagaataataagaatattatagagcagaagacgcagggcagtaatattcgcaacgacgt

SEQ ID NO: 764948 - DNA, 75 bp, synthetic construct
  source 1..75: mol_type = other DNA
tccgaggcgaggaaaatattgtaaaagggcagtattctgaactacaaaatcatcataaaacagaagcattaactc

SEQ ID NO: 764949 - DNA, 75 bp, synthetic construct
  source 1..75: mol_type = other DNA
gatatgtctcaagagcgtaaatataatgaggaaaaagctgcccaggaacgaattcccggggcagatactccggat

SEQ ID NO: 764950 - DNA, 75 bp, synthetic construct
  source 1..75: mol_type = other DNA
ggagcatagaacagcaatataatgatttacagaactttcataaaacagaagatatgtctcaagagcgtaaatata

SEQ ID NO: 764951 - DNA, 75 bp, synthetic construct
  source 1..75: mol_type = other DNA
atatccgtaacgatgtgaagcagcaggttgataatatggtcatggattatcgttcggaaattgatacggtgagta

SEQ ID NO: 764952 - DNA, 75 bp, synthetic construct
  source 1..75: mol_type = other DNA
gccaaacgccgcaggggacgctgcagattgcgccaatgctggcgatgagtgatgcccgtcgcgcggcgattatcc

SEQ ID NO: 764953 - DNA, 75 bp, synthetic construct
  source 1..75: mol_type = other DNA
cattgggtaataactggggtgtaactgcttcaaactatccagtaactgacatgcgcggtaaagggtcaatggaga

SEQ ID NO: 764954 - DNA, 75 bp, synthetic construct
  source 1..75: mol_type = other DNA
gtaacctaaaggctatattattacctgaatcgttgtatttaaaaaatatttttgtcaagcatactggatataaat

SEQ ID NO: 764955 - DNA, 75 bp, synthetic construct
  source 1..75: mol_type = other DNA
ccgcttggacagatagcatcactggctacccgtttccagcaggcacgtctggctatgcagggggtgaatgaaata

SEQ ID NO: 764956 - DNA, 75 bp, synthetic construct
  source 1..75: mol_type = other DNA
gttttgtgatggcttatatcgatatccggctggggcggtttatttgcagttcaagcgcctggaatatcaccgacc

SEQ ID NO: 764957 - DNA, 75 bp, synthetic construct
  source 1..75: mol_type = other DNA
gtgcgagaagagaaagaccatatttagatccagcggttaggtatagatgttataattttgcagaggtcctgagag

SEQ ID NO: 764958 - DNA, 75 bp, synthetic construct
  source 1..75: mol_type = other DNA
tggaatatcaccgcgcgtgttctacgttacctgattgttgaccggacggcagcgcctgccgggatatctgcggag

SEQ ID NO: 764959 - DNA, 75 bp, synthetic construct
  source 1..75: mol_type = other DNA
atggtactgggttctccccgggtagttctgcttgatgaacccacgacgggtcttgatctgcagacagagaacatt

SEQ ID NO: 764960 - DNA, 75 bp, synthetic construct
  source 1..75: mol_type = other DNA
agtgatgacccacataaccgaatcaccatgggggcactgattgccgcagttattctttccggtcgtgcgctggca

SEQ ID NO: 764961 - DNA, 75 bp, synthetic construct
  source 1..75: mol_type = other DNA
atgaacgtttatgaccgggtcatacccaatcgctcctgggaaacgttatggatgctgagtatcggagtgattgca

SEQ ID NO: 764962 - DNA, 75 bp, synthetic construct
  source 1..75: mol_type = other DNA
tcagttcattcgtcggcatccgcggggactggacatgcagacaggagaaggtggaactgggctgtccggcggtca

SEQ ID NO: 764963 - DNA, 75 bp, synthetic construct
  source 1..75: mol_type = other DNA
ccggttgtgatcctggtgggagtgttactgcagcgcccgctggcccgtcatatcaactcatccgtccgggaatca

SEQ ID NO: 764964 - DNA, 75 bp, synthetic construct
  source 1..75: mol_type = other DNA
gaaaatgatggtggggctgtaccgtcagaacaggggacaaattactcttgacggtgttgccctgcagcaactgga

SEQ ID NO: 764965 - DNA, 75 bp, synthetic construct
  source 1..75: mol_type = other DNA
atggttgatgcaaaagttctgaatggtgtcagcacattattacgggcttacgggcgtctgacctgcggggttctg

SEQ ID NO: 764966 - DNA, 75 bp, synthetic construct
  source 1..75: mol_type = other DNA
aatcagtgcagtactggacaacaggaaaaacatttccacggagtgataagctcgcgcatttatcagagattagcg

SEQ ID NO: 764967 - DNA, 75 bp, synthetic construct
  source 1..75: mol_type = other DNA
aatcaccgcacgacatcacctttaatctcgatggcgagccattgaatgggcgaaaatttcgtattgaaatgcttc

SEQ ID NO: 764968 - DNA, 75 bp, synthetic construct
  source 1..75: mol_type = other DNA
gaggaggcccggaagttgggcgtcgcaacggtgattgccggtggtggcgatggcaccattaatgaagtttctacg

SEQ ID NO: 764969 - DNA, 75 bp, synthetic construct
  source 1..75: mol_type = other DNA
tacctcttgcctgtacactgaccaggataaccaaccggctcgcgtttcttacttcggtcagaaaatgaaaacggc

SEQ ID NO: 764970 - DNA, 75 bp, synthetic construct
  source 1..75: mol_type = other DNA
cagatagcgtcgtgtttaatgtacttgacgttgaatttagttgcggtaatgggacccatgtccgcggagacttta

SEQ ID NO: 764971 - DNA, 75 bp, synthetic construct
  source 1..75: mol_type = other DNA
atgaagaacgtcaaaaacacagaaaatagaatagccgcaatgctgaaagcaaaaggatggactcaggctcagctg

SEQ ID NO: 764972 - DNA, 75 bp, synthetic construct
  source 1..75: mol_type = other DNA
gtctgcgaattcttatctcgattggggtaatgaactgaaggaacccgcctatggatgcattgctattctgtctcg

SEQ ID NO: 764973 - DNA, 75 bp, synthetic construct
  source 1..75: mol_type = other DNA
tggaacatcaccgggcgcgttctgcgttacctgattattgaccggacagcggcatcggcagggatatctgcggag

SEQ ID NO: 764974 - DNA, 75 bp, synthetic construct
  source 1..75: mol_type = other DNA
atggttgatgcaaaagttttgaacggtgtcagcacattattacggacttacgggcgtctgacctgtggtgttctg

SEQ ID NO: 764975 - DNA, 75 bp, synthetic construct
  source 1..75: mol_type = other DNA
tcaaaggaaaaacatcaagcaagaactgacagtgtggtctttaacgtgctcgatgttgagtttagttgcggcgat

SEQ ID NO: 764976 - DNA, 75 bp, synthetic construct
  source 1..75: mol_type = other DNA
gtctggcggtggccacgttggttttgttgtcgggaaaaatgccgccggggatttaatgattttgggtggcaacca

SEQ ID NO: 764977 - DNA, 75 bp, synthetic construct
  source 1..75: mol_type = other DNA
gtctggcggtggtcacgtcggctttgttgtcgggaaaaatgccgccggggatttaatgattttggggggcaacca

SEQ ID NO: 764978 - DNA, 75 bp, synthetic construct
  source 1..75: mol_type = other DNA
tctgtcgctctgtatccggcccggagagcgggtgggtattattggctcaataggttgtggtaaatcgacgctgct

SEQ ID NO: 764979 - DNA, 75 bp, synthetic construct
  source 1..75: mol_type = other DNA
acaacctgctggacgccgccagcaaaaccgggttgtttgctaaaagcggtgtggcagcggaagccgttaacgttc

SEQ ID NO: 764980 - DNA, 75 bp, synthetic construct
  source 1..75: mol_type = other DNA
aaccggactatttgccaaaagcggcgtggcagcggatgccgttaacgttcccggcggctggaataatgacacttt

SEQ ID NO: 764981 - DNA, 75 bp, synthetic construct
  source 1..75: mol_type = other DNA
gaagggcaacatgccggaaggttatattggctaccgccagctggcggcaaaatgcggcctgactgaagccaaatg

SEQ ID NO: 764982 - DNA, 75 bp, synthetic construct
  source 1..75: mol_type = other DNA
tatgctgtacgcaggggtgaaagatgtgcgcctgctggatggcggctggcaaacgtggtctgatgcggggctgcc

SEQ ID NO: 764983 - DNA, 75 bp, synthetic construct
  source 1..75: mol_type = other DNA
ggcgctccgaaactttacctcctcagccatattcctggtgccgattacattgacaccaacgaagtggaaagcgaa

SEQ ID NO: 764984 - DNA, 75 bp, synthetic construct
  source 1..75: mol_type = other DNA
gcagcaccctcggcggtgccgaatatgtggcagaacacctggctgaaaagctggaagaggcgggttttaccaccg

SEQ ID NO: 764985 - DNA, 75 bp, synthetic construct
  source 1..75: mol_type = other DNA
tgtctatggccggattgaatgacgcctatctctttgtgcgtaagccatccgagatgtctgacggccagaaatacc

SEQ ID NO: 764986 - DNA, 75 bp, synthetic construct
  source 1..75: mol_type = other DNA
gaagggctttctgtagcctccatcgatgactttgccttcgacaatgaggttaacgtcattgaccagctgggcaaa

SEQ ID NO: 764987 - DNA, 75 bp, synthetic construct
  source 1..75: mol_type = other DNA
gcagtcagaaagtggagtccagcaaaaaagaagtgatcggtcttgaagacctaccaccgccgccgccagaagtaa

SEQ ID NO: 764988 - DNA, 75 bp, synthetic construct
  source 1..75: mol_type = other DNA
attgctcaagcacagaaaggctcgaaatttgactgtaacagagcttgcccaacgatctggtgtcagtcaggctat

SEQ ID NO: 764989 - DNA, 75 bp, synthetic construct
  source 1..75: mol_type = other DNA
tctctcgttgagctggtgagcacttatcaagaaataaatgcttctctcaaagctaaaattgcagaatttgaaaac

SEQ ID NO: 764990 - DNA, 75 bp, synthetic construct
  source 1..75: mol_type = other DNA
gtggtgtacatcaccggccaatccggttccggcaaatccgttgtgctgcgcgagttgcaacgccagatgaagaat

SEQ ID NO: 764991 - DNA, 75 bp, synthetic construct
  source 1..75: mol_type = other DNA
agaatttatcggtacgaccagcggttacagctacattaaaccaaaaggtgaaatagccggagcacgttggggaca

SEQ ID NO: 764992 - DNA, 75 bp, synthetic construct
  source 1..75: mol_type = other DNA
agcctgtcggatgtggatatgattaatgcagccggacgtttcgggtttgaccgttttatccggcatcatccccgc

SEQ ID NO: 764993 - DNA, 75 bp, synthetic construct
  source 1..75: mol_type = other DNA
ggcgctgcgtgctgatggttcaggaacggcggaccatagcgccctggtgtgctactacgaaaaactggcaaaaat

SEQ ID NO: 764994 - DNA, 75 bp, synthetic construct
  source 1..75: mol_type = other DNA
atgagcactacgaccaccacaccggctgtttacgtgggtacctaccataaatacaactgcggcagcattttcggc

SEQ ID NO: 764995 - DNA, 75 bp, synthetic construct
  source 1..75: mol_type = other DNA
ggtactgcaattgacgcccgaaaggatcgcgatgctaccgcaaggtagtcgctgcaacagttggcggctgggcac

SEQ ID NO: 764996 - DNA, 75 bp, synthetic construct
  source 1..75: mol_type = other DNA
atgaacgtttatgaccgggtcatacctaatcgatcctgggaaacgttatggatgctgagtatcggagggattgca

SEQ ID NO: 764997 - DNA, 75 bp, synthetic construct
  source 1..75: mol_type = other DNA
ggtccccgtgatgaaatactgaaaaaactgtcagggaaacagcagagtggggagagcagagcgataacttcatga

SEQ ID NO: 764998 - DNA, 75 bp, synthetic construct
  source 1..75: mol_type = other DNA
caacatttacgctacgtaaggccgcagagcttttcaacgcggcacctgaagatggctgcctgaagcgcgcaaaat

SEQ ID NO: 764999 - DNA, 75 bp, synthetic construct
  source 1..75: mol_type = other DNA
ctcagctctgaaattaaacggatagttgttctccctaaatatgattatactgatactatagaaaagataactact

SEQ ID NO: 765000 - DNA, 75 bp, synthetic construct
  source 1..75: mol_type = other DNA
tgaccctgcgcgatattcagcttatcaataaactgagtattgttgaccacctgaacaacgatgaaatctcttctc

SEQ ID NO: 765001 - DNA, 75 bp, synthetic construct
  source 1..75: mol_type = other DNA
ggcgagtgtgactatgacgcgtttgatgatgcgtaccgcggcgaggcggaaagcgaggaggactatgcgcgggag

SEQ ID NO: 765002 - DNA, 75 bp, synthetic construct
  source 1..75: mol_type = other DNA
atcgatcgtctggcaggtataaagatattgatgttctctgttttgatcacgataacagaaaagacatggatgcga

SEQ ID NO: 765003 - DNA, 75 bp, synthetic construct
  source 1..75: mol_type = other DNA
aggatatggtactgcactgggagatgatgctgcagccagaggaaaatcttccactgcggtgggggcgcaggctac

SEQ ID NO: 765004 - DNA, 75 bp, synthetic construct
  source 1..75: mol_type = other DNA
atgtgggactggcgccctgttttattgcccgaaggccctttctcacgcgaacaggcggttggcgtcacaacagct

SEQ ID NO: 765005 - DNA, 75 bp, synthetic construct
  source 1..75: mol_type = other DNA
atgtgggactgcccccctgttttattgcccgaaggccctttctcacgcgaacaggcggttggcgtcacaacagct

SEQ ID NO: 765006 - DNA, 75 bp, synthetic construct
  source 1..75: mol_type = other DNA
atgtgggactgacaccctgttttattgcccgaaggccctttctcacgcgaacaggcggttggcgtcacaacagct

SEQ ID NO: 765007 - DNA, 75 bp, synthetic construct
  source 1..75: mol_type = other DNA
cgcactggattacagaacggcgggccaaccattttgccgggctggcactggctgtttcgggtttcgagaacgaac

SEQ ID NO: 765008 - DNA, 75 bp, synthetic construct
  source 1..75: mol_type = other DNA
gcaagcgagcaacaggcgatggaaaaactgtggctggacgttaaacgtgttgccggacagagcgtgattttcgaa

SEQ ID NO: 765009 - DNA, 75 bp, synthetic construct
  source 1..75: mol_type = other DNA
gcaagcgagcaacaggcgatggaaaaactgtggctggacgttaaacgcgtcgccgggcagagcatgattttcgaa

SEQ ID NO: 765010 - DNA, 75 bp, synthetic construct
  source 1..75: mol_type = other DNA
attgctccgctggccctgacgatttttgtctgggtgttcctgatgaacctgatggacttactgcctatcgatctg

SEQ ID NO: 765011 - DNA, 75 bp, synthetic construct
  source 1..75: mol_type = other DNA
aggagcaacggaatgctacaataaaagtcagtccacacaaattcctgtatctctggggataaaaacaccttctcg

SEQ ID NO: 765012 - DNA, 75 bp, synthetic construct
  source 1..75: mol_type = other DNA
ggatagtgtgcagtactggactatgattaatagaacaatgttgaattatgataagagaatagaaaaactttgggt

SEQ ID NO: 765013 - DNA, 75 bp, synthetic construct
  source 1..75: mol_type = other DNA
atgtcggactggccccctgttttattgcccgaaggccctttctcacgcgaacaggcggttggcgtcacaacagct

SEQ ID NO: 765014 - DNA, 75 bp, synthetic construct
  source 1..75: mol_type = other DNA
atgttggactggctccctgttttattgcccgaaggccctttctcacgcgaacaggcggttggcgtcacaacagct

SEQ ID NO: 765015 - DNA, 75 bp, synthetic construct
  source 1..75: mol_type = other DNA
atgtaggactggcaccctgttttattgcccgaaggccctttctcacgcgaacaggcggttggcgtcacaacagct

SEQ ID NO: 765016 - DNA, 75 bp, synthetic construct
  source 1..75: mol_type = other DNA
cgttggctgagcggtcagaatattgccagcgagcatggctggattgaggttgttgagtccatgaccttatctgtc

SEQ ID NO: 765017 - DNA, 75 bp, synthetic construct
  source 1..75: mol_type = other DNA
aatatgacgataactttatgtccgtggtgcgtaaggctatcgaacaagatgcgaaagccgcgccagacgtccagt

SEQ ID NO: 765018 - DNA, 75 bp, synthetic construct
  source 1..75: mol_type = other DNA
ctgaagggcagctacgctggcggtgctggaattttgaacctgatgccggaaaacagctaaatccgtatctcgcca

SEQ ID NO: 765019 - DNA, 75 bp, synthetic construct
  source 1..75: mol_type = other DNA
tgttgctgtgcacagcgcctgttttcgctaaatccgttctgactgtttatacctacgattcctttgccgctgact

SEQ ID NO: 765020 - DNA, 75 bp, synthetic construct
  source 1..75: mol_type = other DNA
gggcgatttgattgctaagcattgggcggcaaaccaggattgggatctcaacaaagacggtcagattcaattcgt

SEQ ID NO: 765021 - DNA, 75 bp, synthetic construct
  source 1..75: mol_type = other DNA
gccgctgatggcaccaactggaaaatcgataacaaaattgtccgcgttccttatgttggcgtagacaaagataat

SEQ ID NO: 765022 - DNA, 75 bp, synthetic construct
  source 1..75: mol_type = other DNA
ggtgaaatccggtgcgatggcaggaaccgtgctgaatgatgctaacaaccaggcgaaagcgacgtttgatctggc

SEQ ID NO: 765023 - DNA, 75 bp, synthetic construct
  source 1..75: mol_type = other DNA
ctgacgggcatttttatactgatgttttccgggctgacaactgctcaggttcagatatttcatcagacgtccggc

SEQ ID NO: 765024 - DNA, 75 bp, synthetic construct
  source 1..75: mol_type = other DNA
gacaataaacgtcattcatttcacccatcaggccgcgtcttctccgggagacgtggcttttcatttattacacca

SEQ ID NO: 765025 - DNA, 75 bp, synthetic construct
  source 1..75: mol_type = other DNA
cgttggttaaacggccaggacatcgccagcgagcatggctggattgaggttgttgagtccatgaccttatctgtc

SEQ ID NO: 765026 - DNA, 75 bp, synthetic construct
  source 1..75: mol_type = other DNA
accacgctggagttcacaccagccgaagtggcggcacaacgtcaggcatggattagcgaatggcaacgcgccgtc

SEQ ID NO: 765027 - DNA, 75 bp, synthetic construct
  source 1..75: mol_type = other DNA
gccttcgtttatgacaagaacaaactgaaaaacccgccacaaagcctgaaagaactggttgagagcgatcaaaac

SEQ ID NO: 765028 - DNA, 75 bp, synthetic construct
  source 1..75: mol_type = other DNA
gctgttgtggatgcaaaaagtctatggcgatgacgccccacaagcctggcagaaactggcgaagaaaaccgtcac

SEQ ID NO: 765029 - DNA, 75 bp, synthetic construct
  source 1..75: mol_type = other DNA
ctgtcatactcatgaatccaagcaaggatagtgtgcagtactggactatgattaatagaacaatgttgaattatg

SEQ ID NO: 765030 - DNA, 75 bp, synthetic construct
  source 1..75: mol_type = other DNA
tcctgttcaacaacggttatgcagaccagatcacctccgttctgaaagctgctggcgttgaaaccgaagtgttct

SEQ ID NO: 765031 - DNA, 75 bp, synthetic construct
  source 1..75: mol_type = other DNA
ggtaaagagctgaaagccgttcaggacgttatcctgaaaaacggcgcactgaacgcagctatcgttggtcaaccg

SEQ ID NO: 765032 - DNA, 75 bp, synthetic construct
  source 1..75: mol_type = other DNA
tacaacgcgaacgacaacccgaccaagcagactgcattcagccagtatgaccgtccgcaagctcgccgtcgttat

SEQ ID NO: 765033 - DNA, 75 bp, synthetic construct
  source 1..75: mol_type = other DNA
agctgacccgacactgagcatcgttcgtaaaggtgcagaactggcaaactccttcaagccagacgtgatcatcgc

SEQ ID NO: 765034 - DNA, 75 bp, synthetic construct
  source 1..75: mol_type = other DNA
cccgatggacgccgcgaaaatcatgtgggttatgtatgagcacccggaaactcacttcgaagaactggcgctgcg

SEQ ID NO: 765035 - DNA, 75 bp, synthetic construct
  source 1..75: mol_type = other DNA
gctggcgttgaaaccgaagtgttctttgaagttgaagctgacccgactctgaccgttgttcgcaaaggtgctgag

SEQ ID NO: 765036 - DNA, 75 bp, synthetic construct
  source 1..75: mol_type = other DNA
tgagcgcaccgggcgaccgtactgctgctaagatcgagaaactgctggcatggctggaaacgctgaaagctgaac

SEQ ID NO: 765037 - DNA, 75 bp, synthetic construct
  source 1..75: mol_type = other DNA
tctgttgttgtggttgattctgtttatgatgctgtgcgtgaacgtttcgcgacccacggcggctacatgctgcag

SEQ ID NO: 765038 - DNA, 75 bp, synthetic construct
  source 1..75: mol_type = other DNA
gatcgcagtcaccaccacttctggtacaggttctgaagtcactccgtttgcggttgtaactgacgacgctactgg

SEQ ID NO: 765039 - DNA, 75 bp, synthetic construct
  source 1..75: mol_type = other DNA
tggatacctactatggtcgtgattatgtagaaggtgcaccagcagcaaaggaagcagctccggctaaagcagaga

SEQ ID NO: 765040 - DNA, 75 bp, synthetic construct
  source 1..75: mol_type = other DNA
tggctggaaagcctgaaagcggaactgggtattcctaaatccatccgtgaagctggcgttaaggaagctgacttt

SEQ ID NO: 765041 - DNA, 75 bp, synthetic construct
  source 1..75: mol_type = other DNA
atgttgtggcacaaactgccgaaatctatctacttccgccgtggctccctgccaatcgcgctggatgaagtgatt

SEQ ID NO: 765042 - DNA, 75 bp, synthetic construct
  source 1..75: mol_type = other DNA
atctgagttctctgatggtcaggctctgcaggcgctgaaactgctcaaagaatatctgccagcgtcttatcacga

SEQ ID NO: 765043 - DNA, 75 bp, synthetic construct
  source 1..75: mol_type = other DNA
gcgccaaactctccagtgctatttggcgtatggcagatgatttatggggtgatttcaaacacaccgattttgcgc

SEQ ID NO: 765044 - DNA, 75 bp, synthetic construct
  source 1..75: mol_type = other DNA
cgggcaaaaatctcaccacatctcagtttacgaaattgttggcgagcaggggctactgcatgaaaaaggtcgcta

SEQ ID NO: 765045 - DNA, 75 bp, synthetic construct
  source 1..75: mol_type = other DNA
gggtggcttcctcaccgatgccatgaaccatgtgggcgactacggtaaccgcgacaagatcccgccagtgctggt

SEQ ID NO: 765046 - DNA, 75 bp, synthetic construct
  source 1..75: mol_type = other DNA
aatataccaacaggccattcttcgcaatgtatgtgtatttacttatactcatttagctgttctggtaaagtatgc

SEQ ID NO: 765047 - DNA, 75 bp, synthetic construct
  source 1..75: mol_type = other DNA
atgatgcctggtggtatgattttgtttgtaacactggaaggttgttggaatatggatttaacaaatattgaattt

SEQ ID NO: 765048 - DNA, 75 bp, synthetic construct
  source 1..75: mol_type = other DNA
cttaggcgcgtcagacaccggcgacaacctagaacactacatcagccagttcagcaaaaacgttcgtaccatctt

SEQ ID NO: 765049 - DNA, 75 bp, synthetic construct
  source 1..75: mol_type = other DNA
gaataacgaagaatctctggctggttttactgggccgcatgatcttttcatcgttattaacgcggcagaaatcag

SEQ ID NO: 765050 - DNA, 75 bp, synthetic construct
  source 1..75: mol_type = other DNA
gaccgaaacattcctgaaggcactgagtgacatactggcccggcacgaacttaaacagagcagtaaagtggcttt

SEQ ID NO: 765051 - DNA, 75 bp, synthetic construct
  source 1..75: mol_type = other DNA
aaactgtctgaagacgcgtttgacgaccagtgcaccggtgctaacccgcgttacccactgatttctgagttgaaa

SEQ ID NO: 765052 - DNA, 75 bp, synthetic construct
  source 1..75: mol_type = other DNA
gtcaaatccagcaagacattgatcaccgcgctgatcaacgcctttggtcacaaagacccgaaagccgagccagtc

SEQ ID NO: 765053 - DNA, 75 bp, synthetic construct
  source 1..75: mol_type = other DNA
gaataacgaagagtctctggctggttttactggaccgcacgatcttttcatcgttattaactcggcggaaatcag

SEQ ID NO: 765054 - DNA, 75 bp, synthetic construct
  source 1..75: mol_type = other DNA
gttattctcggcaaaccataacgctataactgaatgggctaaacaaatcccctggcaggatgtggctgaagaggc

SEQ ID NO: 765055 - DNA, 75 bp, synthetic construct
  source 1..75: mol_type = other DNA
agataaggaaggtacagctcttgctccagagtttttatctcagggctatacattatttgttcttagttacagatt

SEQ ID NO: 765056 - DNA, 75 bp, synthetic construct
  source 1..75: mol_type = other DNA
tcctgcgtttttttacccagtcagagacgggaagcacctccggaaacgactctacaatgttgcctggttctggaa

SEQ ID NO: 765057 - DNA, 75 bp, synthetic construct
  source 1..75: mol_type = other DNA
ggtgaacagatgttgagttatgactcgcattcatcagggcgagtctattccagagaagaatatatgatgtgggaa

SEQ ID NO: 765058 - DNA, 75 bp, synthetic construct
  source 1..75: mol_type = other DNA
gcacctcaatgaatacaggaaagtgattatttctgggggttcatttcctacagatctcagtgatatttctgttgg

SEQ ID NO: 765059 - DNA, 75 bp, synthetic construct
  source 1..75: mol_type = other DNA
acacgggaagcatcgctcgatagccaaccagccacgattgagttcttagaagcagagttcagtgttgatttcgat

SEQ ID NO: 765060 - DNA, 75 bp, synthetic construct
  source 1..75: mol_type = other DNA
ttttctgctggggggcatatcgcctcaacgggtggggaatcagattcgtgatttcaaacgtccttctgacagtaa

SEQ ID NO: 765061 - DNA, 75 bp, synthetic construct
  source 1..75: mol_type = other DNA
tggcgcgtcatcggggagtctggtccggtgaggcggaacaatatctgctcgcccatgccgaggcgatttcccatg

SEQ ID NO: 765062 - DNA, 75 bp, synthetic construct
  source 1..75: mol_type = other DNA
tgtatctggagtatttaagcgtacttccggacgatcaggcgaaagaaggattactcaacgttgcgccgatcctcg

SEQ ID NO: 765063 - DNA, 75 bp, synthetic construct
  source 1..75: mol_type = other DNA
gtgagttttcatgtgagcgttacgatcatgattttggcggttgggtagaaagcgaatgtcttgggttatatctga

SEQ ID NO: 765064 - DNA, 75 bp, synthetic construct
  source 1..75: mol_type = other DNA
gcagattcaggatcaagcactggcggcgattctggcgcgtcatcaggggatctggtccggtgaggcggagcaata

SEQ ID NO: 765065 - DNA, 75 bp, synthetic construct
  source 1..75: mol_type = other DNA
gatagactacgcattgcatggaccgattaacccatcactgctgattgtcaccgatattaataacgacaaactgaa

SEQ ID NO: 765066 - DNA, 75 bp, synthetic construct
  source 1..75: mol_type = other DNA
gtgcctctcttcctggaaagaggcaacctgggtgaaaaccataaaaaagtacccgacgatgtggcgaccaaccca

SEQ ID NO: 765067 - DNA, 75 bp, synthetic construct
  source 1..75: mol_type = other DNA
gtcagcgcgaacttgcctatgtgcacctttactatcagccggtgtacaccaaagccccgctgccggaagaattcc

SEQ ID NO: 765068 - DNA, 75 bp, synthetic construct
  source 1..75: mol_type = other DNA
tgtcaaatccgtagcgaatgcagtacgtaagcagatggatatacgccaggatgttattgccatgtttgacatgaa

SEQ ID NO: 765069 - DNA, 75 bp, synthetic construct
  source 1..75: mol_type = other DNA
gcgcttggttgtggtatcggtcgtgacgagtacaacccggacaaactgcgttatcacagcatcatcatcatgacc

SEQ ID NO: 765070 - DNA, 75 bp, synthetic construct
  source 1..75: mol_type = other DNA
gccggtagccagcttcgagcaggcgctggactggctggtgaaagagtcccgtcgcggcctctccatccagcgtta

SEQ ID NO: 765071 - DNA, 75 bp, synthetic construct
  source 1..75: mol_type = other DNA
ttgaagacgaagactgggcacgtttctcacaaggagtggggcggatgaccgggcgcaatatctggatggtggacc

SEQ ID NO: 765072 - DNA, 75 bp, synthetic construct
  source 1..75: mol_type = other DNA
aacgcaatcatcataatttttcagaacttttgcttttttcttgcctgtctatttttgccgcatgcaaaggtttca

SEQ ID NO: 765073 - DNA, 75 bp, synthetic construct
  source 1..75: mol_type = other DNA
agagagtttctaaggagtaccgttgtcaaagtcacacgggtatgaatacgggcaacacgatgaatgctttagcta

SEQ ID NO: 765074 - DNA, 75 bp, synthetic construct
  source 1..75: mol_type = other DNA
atgctgcgaactggcgtaaaacagcttatcagtatggcaccagatatcaccgtggttggcgaagcgagtaatggc

SEQ ID NO: 765075 - DNA, 75 bp, synthetic construct
  source 1..75: mol_type = other DNA
tggaaggggttgaatccagcgttaccgttttccgtaacgatgtgaaagatcgtatcagcatcagccgtacgtctg

SEQ ID NO: 765076 - DNA, 75 bp, synthetic construct
  source 1..75: mol_type = other DNA
aatccggcgagccgggcccggttgtgccaagccagccacgcgcactggaaacccatgaagtgaaacgcatcaccg

SEQ ID NO: 765077 - DNA, 75 bp, synthetic construct
  source 1..75: mol_type = other DNA
atatcatttccataaacgaccttagtcgagatgaacttaatctggtactggcgacagcggcgaaattaaaagcaa

SEQ ID NO: 765078 - DNA, 75 bp, synthetic construct
  source 1..75: mol_type = other DNA
tgagcgcaattttggctgtagccggagttgagcacaactggcgcgccaatatccggcaaaccaaaagtatgggtt

SEQ ID NO: 765079 - DNA, 75 bp, synthetic construct
  source 1..75: mol_type = other DNA
agaagatgtggtcactgcgctgaaacgcggcgcagatggctatctgttaaaagatatggaacccgaagatctgct

SEQ ID NO: 765080 - DNA, 75 bp, synthetic construct
  source 1..75: mol_type = other DNA
ggcgacgttagttggtcgtttcagtacgacattttcggcattagcagaaacgctggataatcaggaagaacccga

SEQ ID NO: 765081 - DNA, 75 bp, synthetic construct
  source 1..75: mol_type = other DNA
atgccaggcgttgcgcgaagcacatcaacgcggtactcgcctggtttcgatatgctcgggcgtatttgtccttgc

SEQ ID NO: 765082 - DNA, 75 bp, synthetic construct
  source 1..75: mol_type = other DNA
gtcatggattgagggcggtaagacagatttacaactttttgttgatgaccagttagaagagttcggcaatcctgc

SEQ ID NO: 765083 - DNA, 75 bp, synthetic construct
  source 1..75: mol_type = other DNA
gaagcttctcatccttccccgcttgggcagaatatttaattgcggattcgtttgagagtttacggacttttgaaa

SEQ ID NO: 765084 - DNA, 75 bp, synthetic construct
  source 1..75: mol_type = other DNA
ggatagccgagcgtggggagaatattcaggtctggatagatccggtggtgtttaatgacctgctgaactggttaa

SEQ ID NO: 765085 - DNA, 75 bp, synthetic construct
  source 1..75: mol_type = other DNA
gaaaacaatgccgcgactgataaagcgccatccactcatacttcaccggtacctatgcaggcggcaccaagtgtt

SEQ ID NO: 765086 - DNA, 75 bp, synthetic construct
  source 1..75: mol_type = other DNA
caacagtacaacgaccgctagtcgctgtgctggcctatgacgggctttgtacttttgaattcggtgtagccgttg

SEQ ID NO: 765087 - DNA, 75 bp, synthetic construct
  source 1..75: mol_type = other DNA
gaatgtattgtcattaccttcaggatggaaagcaattacacctaaaaaaaacaatgccacatcggagataatagt

SEQ ID NO: 765088 - DNA, 75 bp, synthetic construct
  source 1..75: mol_type = other DNA
atgaaaaataaattttctggctttattgccagcggtcaaactcattcaaaaatcagccttggggatattttcaaa

SEQ ID NO: 765089 - DNA, 75 bp, synthetic construct
  source 1..75: mol_type = other DNA
gagcctggacgccagcaaaattgttccgctgaccgtaagctggggtggtgaagagattaaagctgatgcagcaac

SEQ ID NO: 765090 - DNA, 75 bp, synthetic construct
  source 1..75: mol_type = other DNA
agttcagggacttttgaaagtgatggtggtgggggaaggattactcagcgctgcgcgcttcgcccttcgggtcgt

SEQ ID NO: 765091 - DNA, 75 bp, synthetic construct
  source 1..75: mol_type = other DNA
ggcagaatatttaatcgcggattcgtttgagagttcacggacttttgaaagtgatggtggtgggggaaggattcg

SEQ ID NO: 765092 - DNA, 75 bp, synthetic construct
  source 1..75: mol_type = other DNA
cttgagagttcagggacttttgaaagtgatggtggtgggggaaggattactcagcgctgcgcgcttcgcccttcg

SEQ ID NO: 765093 - DNA, 75 bp, synthetic construct
  source 1..75: mol_type = other DNA
gacttcacttatcggacgttacagcactgcattctcagcattagcggaaacgttggataatcaggaagaacctga

SEQ ID NO: 765094 - DNA, 75 bp, synthetic construct
  source 1..75: mol_type = other DNA
agatgctcagaagcaacttgctgcttatattcagcaaattgacgataaagtgaacgtggaactgcataaggattt

SEQ ID NO: 765095 - DNA, 75 bp, synthetic construct
  source 1..75: mol_type = other DNA
tcaccaaactactatcagactcgtcaaaacctgctggatatcgaaaacttaaaggttgatgatcttgatattcat

SEQ ID NO: 765096 - DNA, 75 bp, synthetic construct
  source 1..75: mol_type = other DNA
cagctatcgttactcaacctgatgtggggcaaatcgctggttataccaacgcgatgaatgtgatttacggtccgg

SEQ ID NO: 765097 - DNA, 75 bp, synthetic construct
  source 1..75: mol_type = other DNA
gcgaagcactggggtcgatgattaagcacgaagcgactcgtccgcttgtgttctcgccaaactattatcagactc

SEQ ID NO: 765098 - DNA, 75 bp, synthetic construct
  source 1..75: mol_type = other DNA
agttggagtcattacccaccgaaagtatcggatttacaggagacgttaattggtcgcttcagttctgcattctct

SEQ ID NO: 765099 - DNA, 75 bp, synthetic construct
  source 1..75: mol_type = other DNA
cctttgatgagtggttcgatgcactggatgataccgatagagccaacgtgctggcttcgatgatggtgctgcgag

SEQ ID NO: 765100 - DNA, 75 bp, synthetic construct
  source 1..75: mol_type = other DNA
ctaccgataaatccaaaggttatggcaacgatgatcgtaataaccgccgttacgatgtgtggatcgactatcgac

SEQ ID NO: 765101 - DNA, 75 bp, synthetic construct
  source 1..75: mol_type = other DNA
tagtctgtgcagaacagccgcatggatttattgattatcgtcatgagtatcttgatgatactcgcacccacgcgg

SEQ ID NO: 765102 - DNA, 75 bp, synthetic construct
  source 1..75: mol_type = other DNA
tgtcttatgttggtgaaacacctgaaggtgcgcagaagcagctggcgaagtatatccagcaagttgacgaccagg

SEQ ID NO: 765103 - DNA, 75 bp, synthetic construct
  source 1..75: mol_type = other DNA
tcagcattagcggaaacgctggataaccaggaagaagcagagaagctgaccattgagcctaccgttaaaaatcag

SEQ ID NO: 765104 - DNA, 75 bp, synthetic construct
  source 1..75: mol_type = other DNA
gaaggttgatgatcttgatataaatgcctaccgttacgttatgaaacccacactgccaattcgtcgcgatagccc

SEQ ID NO: 765105 - DNA, 75 bp, synthetic construct
  source 1..75: mol_type = other DNA
ctttatccattctattaataccttgcattggaaacgctcaggaaattaaaattgatgaaagctggttacatcaaa

SEQ ID NO: 765106 - DNA, 75 bp, synthetic construct
  source 1..75: mol_type = other DNA
ctttatcgattctattaataccttgcattggaaacgctcaggaaattaaaagtgaggaaggctggttacatcaaa

SEQ ID NO: 765107 - DNA, 75 bp, synthetic construct
  source 1..75: mol_type = other DNA
cacggagataccaaaagaggacggcagtaaacggccgctggctatctcgtgcatcgaggataaactggtgcaact

SEQ ID NO: 765108 - DNA, 75 bp, synthetic construct
  source 1..75: mol_type = other DNA
tgcgcacgggcgatctctattcgccgtggccggaagaggctaaccgtacattgaccgggcatctggcgatgtatc

SEQ ID NO: 765109 - DNA, 75 bp, synthetic construct
  source 1..75: mol_type = other DNA
tgtattacatttttcaatgggggtaatttttggtgttgttgcaattcttattaattggtttgtattaattaaatg

SEQ ID NO: 765110 - DNA, 75 bp, synthetic construct
  source 1..75: mol_type = other DNA
aacgacctctaccctgaatatactgtagcaggaagaaaagactggtttgatttttatggttatgttgatctacca

SEQ ID NO: 765111 - DNA, 75 bp, synthetic construct
  source 1..75: mol_type = other DNA
gacacgctaaacaatacgctctatcaggccagtgtgattggcaattatccctggaccaggcaattcctgctgcgt

SEQ ID NO: 765112 - DNA, 75 bp, synthetic construct
  source 1..75: mol_type = other DNA
cgctacctttccggcgtctgccgaaactgtcgtgggtaccgtcaaattctggcagtacatgcaggcggatggctg

SEQ ID NO: 765113 - DNA, 75 bp, synthetic construct
  source 1..75: mol_type = other DNA
ggaattccagaaatacgccctcgagatgatcaaagcacaaggtgccattttcggttgggttactgattccaaagc

SEQ ID NO: 765114 - DNA, 75 bp, synthetic construct
  source 1..75: mol_type = other DNA
ctcgctgaatatgtgtgggggcactgatctgtcgggagccggatgcggtagttccgcaagtccggttctgaggag

SEQ ID NO: 765115 - DNA, 75 bp, synthetic construct
  source 1..75: mol_type = other DNA
gacacgctgaacaatacgctctaccaggccagtgtcattggcaattacccctggactaaacaatttctgctgcgt

SEQ ID NO: 765116 - DNA, 75 bp, synthetic construct
  source 1..75: mol_type = other DNA
cactggccgtcagtctatgcgctggtgctgcttttccggcgtctgccgaaactgtcgtgggtaccgtcaaattct

SEQ ID NO: 765117 - DNA, 75 bp, synthetic construct
  source 1..75: mol_type = other DNA
ggttgattttgactgactctggcggtattcaggaagaagcgccttcactgggtaaaccggtgctggtgatgcgcg

SEQ ID NO: 765118 - DNA, 75 bp, synthetic construct
  source 1..75: mol_type = other DNA
cgggaatgcttgcccgtaaggttgcagccgcacaggccgggtacatgggcgggcgtggttattatctcccggtcg

SEQ ID NO: 765119 - DNA, 75 bp, synthetic construct
  source 1..75: mol_type = other DNA
gggcgtggttattatctcccggtcggtgaatcccttttcaccgaactgcgcaataatgaaattttttcccgctgg

SEQ ID NO: 765120 - DNA, 75 bp, synthetic construct
  source 1..75: mol_type = other DNA
atgcttattggctatgtacgtgtatcaacaaatgaccagaacaccgatctacaacgtaatgcgttgaactgtgca

SEQ ID NO: 765121 - DNA, 75 bp, synthetic construct
  source 1..75: mol_type = other DNA
ttgagacgcttacccgtatatctgctactcgacacgtccggctctatgcacggagagcctatcgaagcggttaag

SEQ ID NO: 765122 - DNA, 75 bp, synthetic construct
  source 1..75: mol_type = other DNA
tgtaggggtattattaacaggcggatttatcgtatggctggcgatgttgtactggttatcgccaatactcgttga

SEQ ID NO: 765123 - DNA, 75 bp, synthetic construct
  source 1..75: mol_type = other DNA
ccaaagaacagttggcagagttgccacgcgaagggggattgcccgtcgcatttttatggctcggtattgcgctga

SEQ ID NO: 765124 - DNA, 75 bp, synthetic construct
  source 1..75: mol_type = other DNA
tcttttccattgtacctgactacgatctcaacataatgcagccaggacagggcctgacagagataacctgtcgga

SEQ ID NO: 765125 - DNA, 75 bp, synthetic construct
  source 1..75: mol_type = other DNA
cgaaaacgaatatcaagctatgagccgcgcccataacccgtatggtgatggtcaggcatgctctcgcattctgga

SEQ ID NO: 765126 - DNA, 75 bp, synthetic construct
  source 1..75: mol_type = other DNA
tatgagttttgcgaccatttctgttatcggactgggttacatcgggctgcctacagcagctgcgtttgcctcacg

SEQ ID NO: 765127 - DNA, 75 bp, synthetic construct
  source 1..75: mol_type = other DNA
acctcgcggcaaaacctgctgcgtgaaaacgtcgctgatagccgaatctttatcaccggcaataccgttatcgac

SEQ ID NO: 765128 - DNA, 75 bp, synthetic construct
  source 1..75: mol_type = other DNA
agaacgtcgctgatagtcgaatcttcattaccggtaatacggtcatcgacgccttgttgtgggtgcgcgatcagg

SEQ ID NO: 765129 - DNA, 75 bp, synthetic construct
  source 1..75: mol_type = other DNA
ggcggggttgcgcacgggcgatctctactcgccgtggccggaagaggctaaccgcacgttgaccgggcatctggc

SEQ ID NO: 765130 - DNA, 75 bp, synthetic construct
  source 1..75: mol_type = other DNA
gcgcgttttatcaaaccgacttacatctgattttgcaaaaccacggtatcaagacgctgatagtttgtggtgtta

SEQ ID NO: 765131 - DNA, 75 bp, synthetic construct
  source 1..75: mol_type = other DNA
aaacacttaatgaggcgttgcagaaattacgtgatgcgcatacctgtgaagcagctgaagatgccctgaaggatg

SEQ ID NO: 765132 - DNA, 75 bp, synthetic construct
  source 1..75: mol_type = other DNA
atgacaactccagtctggcgtaacgatgacctggaaggcgctgtcattggtgcgttctttctgcgcggggctgat

SEQ ID NO: 765133 - DNA, 75 bp, synthetic construct
  source 1..75: mol_type = other DNA
gtgtggaatccagacccaataaacgccccatgaactcggatctgaaaaattccggggaaatagaggcggatgccg

SEQ ID NO: 765134 - DNA, 75 bp, synthetic construct
  source 1..75: mol_type = other DNA
tgctgagtatgtccgcctggatgccgttggctttatgtggaaagagccgggaacaagctgcatccatctggaaaa

SEQ ID NO: 765135 - DNA, 75 bp, synthetic construct
  source 1..75: mol_type = other DNA
attatcaagctgttacggtcgattattgatgacgtagcaccaggtactgtgatcactaccgagaccaatgttcct

SEQ ID NO: 765136 - DNA, 75 bp, synthetic construct
  source 1..75: mol_type = other DNA
atgtttgattttgtctgcaaccacatgtcggctaaaagtgaatggtttaaaaactatttacaacaaaagccaggc

SEQ ID NO: 765137 - DNA, 75 bp, synthetic construct
  source 1..75: mol_type = other DNA
cctgaagtgatggatattctggccacattgccggcggacgttttttctgtacgagcgtatcgggatatctacaca

SEQ ID NO: 765138 - DNA, 75 bp, synthetic construct
  source 1..75: mol_type = other DNA
cggatgaccgggcgcaatatctggatggtggaccaggcgaacctgaccattgatgagatatgcgcaacaacgaaa

SEQ ID NO: 765139 - DNA, 75 bp, synthetic construct
  source 1..75: mol_type = other DNA
gctcaggtggcatcaccgacgctcaccgaattacgggcaaacccaacggcacgcgccgcgttatggcaacaaatt

SEQ ID NO: 765140 - DNA, 75 bp, synthetic construct
  source 1..75: mol_type = other DNA
aacgtaacggttctctggggacgatttaccggcgtttttataacggacattttctgcccgtagaccaggaaagcg

SEQ ID NO: 765141 - DNA, 75 bp, synthetic construct
  source 1..75: mol_type = other DNA
cactgccagcggacgttttttctgtacgagcgtatcgggatatctacacaggcatctgcagacaggcccgtgttt

SEQ ID NO: 765142 - DNA, 75 bp, synthetic construct
  source 1..75: mol_type = other DNA
attcagccggtacatattgatgatgtgcttccggaagtggttgagcgtgttgaatgccggaatcaggggctggag

SEQ ID NO: 765143 - DNA, 75 bp, synthetic construct
  source 1..75: mol_type = other DNA
cagtatctaaagaattaatgaccccatcaaattacatgatatgcatagaaaaaaatggcgaaagaataaaacgct

SEQ ID NO: 765144 - DNA, 75 bp, synthetic construct
  source 1..75: mol_type = other DNA
gtcatatcaactcatgccgaagataaaaataaacaaatcatcttcactacccatagagaaatggtaaccacttta

SEQ ID NO: 765145 - DNA, 75 bp, synthetic construct
  source 1..75: mol_type = other DNA
cggtgaagaccatcggttaatgcatttttttccacgcagtccacatgctgaatggaacggcagtgacttcattgt

SEQ ID NO: 765146 - DNA, 75 bp, synthetic construct
  source 1..75: mol_type = other DNA
gcaggtctggaaggctaacgccgatggtacaggttacgctttgcgcatcgtcgttgggatatcttttcccgcaga

SEQ ID NO: 765147 - DNA, 75 bp, synthetic construct
  source 1..75: mol_type = other DNA
aaattgcatttggtgacgatcgccgccgtacaactaaacacttctcaaaagaagacgagaaggagtttaatcgca

SEQ ID NO: 765148 - DNA, 75 bp, synthetic construct
  source 1..75: mol_type = other DNA
atgcacagaaaaaacgggcggcagcaaaagaagcggccttgcaacgtgagaaacagaaaaacaaggagcttcagc

SEQ ID NO: 765149 - DNA, 75 bp, synthetic construct
  source 1..75: mol_type = other DNA
aactgaccatggtctttgagtctttcggcttcaaacacggtatccctatcgatgcagattacgtctttgacgtgc

SEQ ID NO: 765150 - DNA, 75 bp, synthetic construct
  source 1..75: mol_type = other DNA
ggtgactgagcaggggcatggtgtccttctgttcacaatggaaatggcgaacatccagattggtgaacgcatggt

SEQ ID NO: 765151 - DNA, 75 bp, synthetic construct
  source 1..75: mol_type = other DNA
cggcgctggtggtggtcgattacctcggcctgattaaaacccgcagcacggggcgtcacgaccttgcggtggggg

SEQ ID NO: 765152 - DNA, 75 bp, synthetic construct
  source 1..75: mol_type = other DNA
cacgacacctacaactaaaaaaagtgaaatttattcactttttcacgcttatttatcgcgctgacctggtgatta

SEQ ID NO: 765153 - DNA, 75 bp, synthetic construct
  source 1..75: mol_type = other DNA
gatgctttctcaccgcaactgctgttcctggatgccgatcgtaacaccctgattcgtcgttacagcgatacgcgc

SEQ ID NO: 765154 - DNA, 75 bp, synthetic construct
  source 1..75: mol_type = other DNA
gttcaggttcaggtaaatctgtcgccctgcgtgcgctggaagatatggggttttactgcgtggataaccttcccg

SEQ ID NO: 765155 - DNA, 75 bp, synthetic construct
  source 1..75: mol_type = other DNA
ttcaaaactaacagtgttccccaaggtgtccgcgatcgggcattcgaagaatgggagcagatcatcatagataac

SEQ ID NO: 765156 - DNA, 75 bp, synthetic construct
  source 1..75: mol_type = other DNA
gggcctggcgcggggcgcgacgtcaccgcaggggcgattcagtcggatattaaccgcctggcgcagttgttgtaa

SEQ ID NO: 765157 - DNA, 75 bp, synthetic construct
  source 1..75: mol_type = other DNA
ggatgcgcgcccatccgtatgatgatttagtggtgttggacgttaccgccagccagcagcttgctgatcagtatc

SEQ ID NO: 765158 - DNA, 75 bp, synthetic construct
  source 1..75: mol_type = other DNA
ccccgccggacactcacggtgcaggaatacatgctggccaataaggcagaagcagcattccggctgttacagctg

SEQ ID NO: 765159 - DNA, 75 bp, synthetic construct
  source 1..75: mol_type = other DNA
tcgaggccttttatcaccgcctgtatggcagggcaccggaggatgacggggttcacatcatcgctatcggcggaa

SEQ ID NO: 765160 - DNA, 75 bp, synthetic construct
  source 1..75: mol_type = other DNA
gggatccttccctacgtcgacgagtacaggcagggttgaataaaggtgaggcccgcaatgcccttgttcgagcag

SEQ ID NO: 765161 - DNA, 75 bp, synthetic construct
  source 1..75: mol_type = other DNA
atatggtattcctataatagttgataacaacgagcctttttgtgttcaacgacatgtagctatacttaaatcatg

SEQ ID NO: 765162 - DNA, 75 bp, synthetic construct
  source 1..75: mol_type = other DNA
cctttgagcatgcgctgaattttattctgcgtcccgatatcgaaggcgtctatgtcaatgaccccactgaccgtg

SEQ ID NO: 765163 - DNA, 75 bp, synthetic construct
  source 1..75: mol_type = other DNA
tatgtcaatgaccccactgaccgtggcggagaaaccaggtacggcatctctgaccgccgcgacggtgtgattgac

SEQ ID NO: 765164 - DNA, 75 bp, synthetic construct
  source 1..75: mol_type = other DNA
accgcttctggcagcaactgaaaggccagccggtcgaatttacctggcagtccgatgacggcatcagcctggtgg

SEQ ID NO: 765165 - DNA, 75 bp, synthetic construct
  source 1..75: mol_type = other DNA
tcgcggcgctgctcgacagcggtattaatgatgcggtgtatgcagaagtggtgggccacggggaagtgtggtcgg

SEQ ID NO: 765166 - DNA, 75 bp, synthetic construct
  source 1..75: mol_type = other DNA
tcccctgggctgggaacatatcaatctgagtggagattacgtctggcgtaataatcttaagctgggatccggaaa

SEQ ID NO: 765167 - DNA, 75 bp, synthetic construct
  source 1..75: mol_type = other DNA
cggttatcctcatgctgtgccctgcgacggcaatttttgcagcccccttaaccgagcgcgaagagctaaccctgt

SEQ ID NO: 765168 - DNA, 75 bp, synthetic construct
  source 1..75: mol_type = other DNA
ccggtgcagagcaagctgccggcgttaaagccactcagacgggttggttcagcaaagataacctgccggaagagt

SEQ ID NO: 765169 - DNA, 75 bp, synthetic construct
  source 1..75: mol_type = other DNA
catcagcgagcacaaaccggaagcggtgaaaccgttggcagatgttcaggaacaagttaaggcactggttcagca

SEQ ID NO: 765170 - DNA, 75 bp, synthetic construct
  source 1..75: mol_type = other DNA
ctaaatatattagatgcgaatgaaatagataggatttcctctattttttcagagacttttgatgcattgattgat

SEQ ID NO: 765171 - DNA, 75 bp, synthetic construct
  source 1..75: mol_type = other DNA
aaaggcatcttccatttcgcccattttaagaaaaatccgtgtccatgcgatcaggttactcgccagcatcatcaa

SEQ ID NO: 765172 - DNA, 75 bp, synthetic construct
  source 1..75: mol_type = other DNA
atgggcgaagttattgattttgcagaaaggcaaaaaggcagaaagaagaaaaaggcatcttccattccgcccatt

SEQ ID NO: 765173 - DNA, 75 bp, synthetic construct
  source 1..75: mol_type = other DNA
tacccaacagctgattaacggcgttgccggtaccgattttatgctgaaaggtgaaaccgacgagctggcggcact

SEQ ID NO: 765174 - DNA, 75 bp, synthetic construct
  source 1..75: mol_type = other DNA
gcccagttacggctatccgtttatgctggcttcgcaggttgtttattcgctcaacgctcgcacgggcctttccgt

SEQ ID NO: 765175 - DNA, 75 bp, synthetic construct
  source 1..75: mol_type = other DNA
ccacactttcaaaaccattaatgaccaatgggaaatgactattactcatccacagcaggcgctttcagtcagcct

SEQ ID NO: 765176 - DNA, 75 bp, synthetic construct
  source 1..75: mol_type = other DNA
atgtcgttaattaaggtgccttgtatgcaaatcaccaatatgcattgcagtggacagaccgtttcacttgccgcg

SEQ ID NO: 765177 - DNA, 75 bp, synthetic construct
  source 1..75: mol_type = other DNA
acgagtacgcggatactaccgacaagataaattttacccatatgtggataccgaagggtacggcacaatcggtta

SEQ ID NO: 765178 - DNA, 75 bp, synthetic construct
  source 1..75: mol_type = other DNA
caggctaaagatagtctatggtatcgtcagacacctaaccgcgttaaagatatgatttatcaattagtaaacaaa

SEQ ID NO: 765179 - DNA, 75 bp, synthetic construct
  source 1..75: mol_type = other DNA
tcctctacaagcttacgcgataagctcattatgttattcgctatgttttccatgagggtacattacgaagcaaaa

SEQ ID NO: 765180 - DNA, 75 bp, synthetic construct
  source 1..75: mol_type = other DNA
atggaaaatcaaaaattctccccggcctttgagcatgcgctgaattttatcctgcgtcctgatatcgaaggcggc

SEQ ID NO: 765181 - DNA, 75 bp, synthetic construct
  source 1..75: mol_type = other DNA
cgatatggatctgtttgaggtccagccagcctcatctccacggggattactggcaaaatacctctttgagtcaga

SEQ ID NO: 765182 - DNA, 75 bp, synthetic construct
  source 1..75: mol_type = other DNA
cgatagcggtctggttggcagagaaccaacaaaatattgaagcgcattacggtaaatcgcttcatgaagttgtcg

SEQ ID NO: 765183 - DNA, 75 bp, synthetic construct
  source 1..75: mol_type = other DNA
tttcacaagatattttaaaaatggcacctatagctatcccgactacacatgaacaattaaaaataacagataaaa

SEQ ID NO: 765184 - DNA, 75 bp, synthetic construct
  source 1..75: mol_type = other DNA
aatatattcccgagtattgataccgatgtttgtgctgcatcagtgcgtagatttaacaaactggcaacagaaata

SEQ ID NO: 765185 - DNA, 75 bp, synthetic construct
  source 1..75: mol_type = other DNA
gtaccccgacgatggtcgccaattctattccgcaaatgggtagtaaagcacagtcctttactctcgtggcaaagg

SEQ ID NO: 765186 - DNA, 75 bp, synthetic construct
  source 1..75: mol_type = other DNA
atggctgacctggcaaaagctggagcaaaccggttttcttgattccatgattgcggcgtgttcacgtggtattaa

SEQ ID NO: 765187 - DNA, 75 bp, synthetic construct
  source 1..75: mol_type = other DNA
gaagaatgcgctctcttttgattataaagagcgtaaggatttaaaaacttccgagaccaaaatctacacacttca

SEQ ID NO: 765188 - DNA, 75 bp, synthetic construct
  source 1..75: mol_type = other DNA
cttgcgcccaaaagtttatttccggttattgcagcatggtaaggaccgttctgcaggtgcgcctgatattgttac

SEQ ID NO: 765189 - DNA, 75 bp, synthetic construct
  source 1..75: mol_type = other DNA
cgctccaatcgaaaaatgtgtttatcaaaatcacctgataagagttcgcgggataattgaaggttatcaagagtt

SEQ ID NO: 765190 - DNA, 75 bp, synthetic construct
  source 1..75: mol_type = other DNA
attcgcaacagttactccagataaagagacagaaaccaagcatacaactgcatgggaaaaggattattgccagat

SEQ ID NO: 765191 - DNA, 75 bp, synthetic construct
  source 1..75: mol_type = other DNA
gactatcgataatcggacgtacagaattcgtaaaaaatatgttttcagtcgccagtcagcgtgaaatacagacaa

SEQ ID NO: 765192 - DNA, 75 bp, synthetic construct
  source 1..75: mol_type = other DNA
aagaaatcatcccaaaatgagatagagttcccaggaataaaacctccgacatcagagagtaaaattaatataaca

SEQ ID NO: 765193 - DNA, 75 bp, synthetic construct
  source 1..75: mol_type = other DNA
caatgtgctttttagtgaattagtgaatgaaatcactaccgagccagattacgaaacagtcctgtctgtactgga

SEQ ID NO: 765194 - DNA, 75 bp, synthetic construct
  source 1..75: mol_type = other DNA
ggcatatcgcttcatgaagttgtcggtatcgtgacgccttttagcgcgcaggtatccactatcaaacaggcgctg

SEQ ID NO: 765195 - DNA, 75 bp, synthetic construct
  source 1..75: mol_type = other DNA
atggatgaaaatgctttagggtttacctcatactggcgcaactcgcttgctgatgctgagtcaggcaagggcagt

SEQ ID NO: 765196 - DNA, 75 bp, synthetic construct
  source 1..75: mol_type = other DNA
cgatcgcttcccacggcattcatatgcacgcgccggaagaaggtctgaggatgctcggtacggcgatggataaag

SEQ ID NO: 765197 - DNA, 75 bp, synthetic construct
  source 1..75: mol_type = other DNA
ctaaaatctggatctatgagaagggcgaggatagcgaaccgctgcttactctgacagaagcatggtggtataccg

SEQ ID NO: 765198 - DNA, 75 bp, synthetic construct
  source 1..75: mol_type = other DNA
aaaaatgatagtgaaatcagtgaaaccgaatttcgtaaactggtcagggctggtaaggtgaaaagccagtattct

SEQ ID NO: 765199 - DNA, 75 bp, synthetic construct
  source 1..75: mol_type = other DNA
aggaactgagcttctcacaggccgatgaactggctgatacgcagattcgcttccctgcatttttactgacgactc

SEQ ID NO: 765200 - DNA, 75 bp, synthetic construct
  source 1..75: mol_type = other DNA
atgcggcacgtgcgatggaagccattggtaagccttttgagaaaggtggtcgttttgaccagcagtcgatggtct

SEQ ID NO: 765201 - DNA, 75 bp, synthetic construct
  source 1..75: mol_type = other DNA
ttattactattccggttgaagaaacaggtagtgactccaacttactgatagtgttttatgttcagataatgcccg

SEQ ID NO: 765202 - DNA, 75 bp, synthetic construct
  source 1..75: mol_type = other DNA
taccacgttctctatcaactttgatgacagcgttgataagactgccgaaacggatgaagaacgggaagcacgata

SEQ ID NO: 765203 - DNA, 75 bp, synthetic construct
  source 1..75: mol_type = other DNA
cgccgaaaaacgctgaagatggtccgctaccgatggcatgctggagttgtaaaagcccggatgtggcgcgtctga

SEQ ID NO: 765204 - DNA, 75 bp, synthetic construct
  source 1..75: mol_type = other DNA
ccatacccaggacaaagccacgctgcaaaaagtggtcgcggagcgtaaacagtcgattaacgacctgaaaatcaa

SEQ ID NO: 765205 - DNA, 75 bp, synthetic construct
  source 1..75: mol_type = other DNA
aaattcccgtgggatgacggcatgaaagtcgaaaatatggagcagtattacgacaaaattgccttctctgactgg

SEQ ID NO: 765206 - DNA, 75 bp, synthetic construct
  source 1..75: mol_type = other DNA
tttccacggtcgcgtcagcgcgccgatggcgaaagtgctgattaaagaactggagccgtatcgcccgctgtttat

SEQ ID NO: 765207 - DNA, 75 bp, synthetic construct
  source 1..75: mol_type = other DNA
aactggagccgtatcgcccgctgtttattgaagagccggtgctggcagaacaagccgaatactacccgaaactgg

SEQ ID NO: 765208 - DNA, 75 bp, synthetic construct
  source 1..75: mol_type = other DNA
atcacaaaaaatgatgccaatgcttttaaactaaatgctgatgttaagtatagtattattcctgtctgtgttgat

SEQ ID NO: 765209 - DNA, 75 bp, synthetic construct
  source 1..75: mol_type = other DNA
ctttttgtctatccatcactgaccgtaacctgggacggtagcacaaccaatccccccaaaacgcgcgcatttggt

SEQ ID NO: 765210 - DNA, 75 bp, synthetic construct
  source 1..75: mol_type = other DNA
tgatgaaaacgcccgcaaacaaggtctttttgtctatccatcactgaccgtaacctgggacggtagcacaaccaa

SEQ ID NO: 765211 - DNA, 75 bp, synthetic construct
  source 1..75: mol_type = other DNA
cagcgcgcaatcacgcctgcgatcatctgccgtttgtgaagagcgcggagcgacccacttacgatgcacccacag

SEQ ID NO: 765212 - DNA, 75 bp, synthetic construct
  source 1..75: mol_type = other DNA
gggagttaaaccagagccaaagcagcaggctttaattcagtcgctttatgaccaggcatcaggaagcacctcttc

SEQ ID NO: 765213 - DNA, 75 bp, synthetic construct
  source 1..75: mol_type = other DNA
aactgcctccagagtcgctgaagaaggagcaccagagacagccttaacttttttatcaaaaattgggttaaataa

SEQ ID NO: 765214 - DNA, 75 bp, synthetic construct
  source 1..75: mol_type = other DNA
agatcgcaggctgaatggtttaatttgcaatatgaattattagtatctggctaccctgaacgtgcttacaattta

SEQ ID NO: 765215 - DNA, 75 bp, synthetic construct
  source 1..75: mol_type = other DNA
gcagttgccatgttttacggcagtgtgagcagagatagcgctgatgtccggcagtgcttttgccgttacgcacca

SEQ ID NO: 765216 - DNA, 75 bp, synthetic construct
  source 1..75: mol_type = other DNA
cccccgctcaggcactggaaagacttgatgcgttgtatgaacaatcggtgacagctttacgcagcgccattggca

SEQ ID NO: 765217 - DNA, 75 bp, synthetic construct
  source 1..75: mol_type = other DNA
gtggccgctgggcggcgtatcgatgcatgatttcagaacttttcgcggatcgctggatccgtcgaatttctgtca

SEQ ID NO: 765218 - DNA, 75 bp, synthetic construct
  source 1..75: mol_type = other DNA
ggatgttgaacaaaaaatacttgagatttactgcgcggcgatgcagcagccagtccacccagaatgggatgccac

SEQ ID NO: 765219 - DNA, 75 bp, synthetic construct
  source 1..75: mol_type = other DNA
gatccgcaattacagatgctaaaaacgcgcgatcgtctctggtggcaggatcaattaccgacgcttccccctgcc

SEQ ID NO: 765220 - DNA, 75 bp, synthetic construct
  source 1..75: mol_type = other DNA
gcaaaaagaggattattcgccaacagtgtaatgtcagcagtcgttctcgacacgctggcgctatgggcggaggat

SEQ ID NO: 765221 - DNA, 75 bp, synthetic construct
  source 1..75: mol_type = other DNA
ggctggcttcggtattcgcggcggcgcgctgttctccgaacgcgtccgcgaacagctcggtacattgaattgggt

SEQ ID NO: 765222 - DNA, 75 bp, synthetic construct
  source 1..75: mol_type = other DNA
acgccgaaaaacaacagcaaactgtgctgtccgtcctaccctcacctgtagagcgtattgatttaactacatgta

SEQ ID NO: 765223 - DNA, 75 bp, synthetic construct
  source 1..75: mol_type = other DNA
ttatgtacttgcacatgcttatttgcgtgatgaccacgttcttgatgcagttttgccgcccgatatccctattcc

SEQ ID NO: 765224 - DNA, 75 bp, synthetic construct
  source 1..75: mol_type = other DNA
agttgcgctactcagcttctgcattacgtttcaatttaagtcgtgcagtggcaattgatatggaaagcgcgacaa

SEQ ID NO: 765225 - DNA, 75 bp, synthetic construct
  source 1..75: mol_type = other DNA
gtcttgtttaccaactacacacgttatgtggatgaattcgttcgttggggatgcagccagatcctcgatcctgat

SEQ ID NO: 765226 - DNA, 75 bp, synthetic construct
  source 1..75: mol_type = other DNA
agccggagcggccgtaaatgccggctgtcagccggaacggcggaagggccgtttgccggtcgcaggcagggaacc

SEQ ID NO: 765227 - DNA, 75 bp, synthetic construct
  source 1..75: mol_type = other DNA
tcttgtagcgagagttgggagaattcccagttaaaacgtcagttgtctacacaacaagatgacattcaggctgaa

SEQ ID NO: 765228 - DNA, 75 bp, synthetic construct
  source 1..75: mol_type = other DNA
aacagaagcacctgaagaagcaatttccgacctcgcatggaaaaaacaccagatgcccgcctggcatttaatcac

SEQ ID NO: 765229 - DNA, 75 bp, synthetic construct
  source 1..75: mol_type = other DNA
taatgattttatctgttttttattctcatcaggttttatccagcgaacccactcagccggatgtttattctgtcg

SEQ ID NO: 765230 - DNA, 75 bp, synthetic construct
  source 1..75: mol_type = other DNA
gaagacgtgccgaaaatgaccgactttggtctgccactgccacatatgggctggaaccgcgtttacccgcaggca

SEQ ID NO: 765231 - DNA, 75 bp, synthetic construct
  source 1..75: mol_type = other DNA
attttcaagagagtttaaaaaaaacacaggctatacaccattgcagtatagaaagagcaatctatggaccttcaa

SEQ ID NO: 765232 - DNA, 75 bp, synthetic construct
  source 1..75: mol_type = other DNA
atccgctggcatcactgctgccgtgcgataacgtctttgccatcgaaagccgctggtatcgcgacaacccgctgg

SEQ ID NO: 765233 - DNA, 75 bp, synthetic construct
  source 1..75: mol_type = other DNA
ctggaaccgcgtttacccgcaggcaggcaaccgcctgtttcaggggattgaagacggtgcgtacttttactttgt

SEQ ID NO: 765234 - DNA, 75 bp, synthetic construct
  source 1..75: mol_type = other DNA
ttcaccgcggcggtacaaaaagataacttctacggcgtgcagttccacccggagcgttctggtgccgctggcgct

SEQ ID NO: 765235 - DNA, 75 bp, synthetic construct
  source 1..75: mol_type = other DNA
agcgcgagctgtttgatctcatcaaagcctgtacccaaccggtgctgggcatctgcttagggatgcaactgctgg

SEQ ID NO: 765236 - DNA, 75 bp, synthetic construct
  source 1..75: mol_type = other DNA
atgggcgatgttattgattttgcggaaaagcaaaaaggcagaaggaagaaaaaggcattttccattccgcccatt

SEQ ID NO: 765237 - DNA, 75 bp, synthetic construct
  source 1..75: mol_type = other DNA
taatcaagattttcacaattttaacgatttttgtttttattgtcgaatatatcgtaggcgatataggttacaaat

SEQ ID NO: 765238 - DNA, 75 bp, synthetic construct
  source 1..75: mol_type = other DNA
ctggcgagtgtatatctgaacaaactgttaaggacaaaaaatgaagaaactcttaatacctctgatagcagctgg

SEQ ID NO: 765239 - DNA, 75 bp, synthetic construct
  source 1..75: mol_type = other DNA
tggtgctgcgctacgtggcgcgtttcgatgccaacggcaaagcgcgtgtgggcgtggaggcggtgcgtgaagacc

SEQ ID NO: 765240 - DNA, 75 bp, synthetic construct
  source 1..75: mol_type = other DNA
gttctgtcggatagtgaaaagcaattaaagcttaaagatgttgagaggagtgatttagagggggaaatagccaag

SEQ ID NO: 765241 - DNA, 75 bp, synthetic construct
  source 1..75: mol_type = other DNA
gagaaaactctacaggtgcaatcagattatcaaataaaaaattacaaaccttaaagaaagttctacgttcacttt

SEQ ID NO: 765242 - DNA, 75 bp, synthetic construct
  source 1..75: mol_type = other DNA
gtcagccattgcgcgtcacggttatgaaccaaaagtcagccgtgacccggacgtagtgttgctggccgataaact

SEQ ID NO: 765243 - DNA, 75 bp, synthetic construct
  source 1..75: mol_type = other DNA
gctttccaggagaaacaattaggggctgttaataaagaaactccagttgttgattataaggcagcatttgagcag

SEQ ID NO: 765244 - DNA, 75 bp, synthetic construct
  source 1..75: mol_type = other DNA
aaagagtcattaaaaaacccgctgccgtttgggccatttctggcggctgcgggtttcgttgtaggttgggatagt

SEQ ID NO: 765245 - DNA, 75 bp, synthetic construct
  source 1..75: mol_type = other DNA
tatatcagttacggtggtgttcatcggtgaatacactggaaaagattatctgtaagaacacctatgatttactgg

SEQ ID NO: 765246 - DNA, 75 bp, synthetic construct
  source 1..75: mol_type = other DNA
accccgcagacgaaaatgagcgaaattaaaaccggcgacaaagtggcgtttaattttgtccagcagggcagcctt

SEQ ID NO: 765247 - DNA, 75 bp, synthetic construct
  source 1..75: mol_type = other DNA
tgactacatacagaacccgaacggcgtactgtcagagaaagctaaatcgcttcttactgattacaaggttactga

SEQ ID NO: 765248 - DNA, 75 bp, synthetic construct
  source 1..75: mol_type = other DNA
cgcaggatgcaacaaacgctgttgcacttgaacaactgaagttcgagaagctcaaatttcagtatcaaatgtatc

SEQ ID NO: 765249 - DNA, 75 bp, synthetic construct
  source 1..75: mol_type = other DNA
accagccaggatttcaaactggcgcataaagagatcgaccagatcctgaaacgtgctcaggtgcgcccactggcg

SEQ ID NO: 765250 - DNA, 75 bp, synthetic construct
  source 1..75: mol_type = other DNA
atgaacgtggtgatccttgataccggttgcgccaatctgaattcggtgaagtctgccattacgcgtcacggttat

SEQ ID NO: 765251 - DNA, 75 bp, synthetic construct
  source 1..75: mol_type = other DNA
ttcagttaagacgttgctcaacactcgacacacttgaaaagattattgaaaaaaaccaaaacagcctccctcctt

SEQ ID NO: 765252 - DNA, 75 bp, synthetic construct
  source 1..75: mol_type = other DNA
cgtcattagcgccaacaaactggcaggagcgagcgacagcaataaatatcgccagatccacgacgccttcgaaaa

SEQ ID NO: 765253 - DNA, 75 bp, synthetic construct
  source 1..75: mol_type = other DNA
tgaagaagccgatagcctcattagcgcttttgtcagcgatcttgagcgcctggcggcgctgctcgacagcggtat

SEQ ID NO: 765254 - DNA, 75 bp, synthetic construct
  source 1..75: mol_type = other DNA
ccatgaagcgacgctgctccagttactatcaagtcagattccaccagacgcgttcccgctccttcgtaacgtgat

SEQ ID NO: 765255 - DNA, 75 bp, synthetic construct
  source 1..75: mol_type = other DNA
gcttaaagaatataaaaccaccctgatcaacagcgccgtgacaggaaaaatcaagatcaccccagaaatggttga

SEQ ID NO: 765256 - DNA, 75 bp, synthetic construct
  source 1..75: mol_type = other DNA
tcgcaggtcagaaagagctcctggggatgcggctggccgaaaatgaaggggcgaatttctggttcaatgtgctga

SEQ ID NO: 765257 - DNA, 75 bp, synthetic construct
  source 1..75: mol_type = other DNA
ctcagcgcaccgcccggtgaacgcagcaacatgcgcaaacgcctgcggggactggcgctcatcctgcgcccggca

SEQ ID NO: 765258 - DNA, 75 bp, synthetic construct
  source 1..75: mol_type = other DNA
tcgagcccggcaggaatacagcgggggcaacagaagcctgccgacactacctggagcagcacctgccgttcggca

SEQ ID NO: 765259 - DNA, 75 bp, synthetic construct
  source 1..75: mol_type = other DNA
tggcgacggagcgcttcctacaaggctctgttagccaggaagcatatcaacagttcggagccatgttggaactga

SEQ ID NO: 765260 - DNA, 75 bp, synthetic construct
  source 1..75: mol_type = other DNA
gaaaagctgccgtcgatcgccgataaagacatcggttttattctcaagaataccgggatgacgctgctttccaac

SEQ ID NO: 765261 - DNA, 75 bp, synthetic construct
  source 1..75: mol_type = other DNA
tggcatcagtattgaaaacatcgttaaaaccgactcagtcgtgacaatttataatcttgttctcagtgctgattt

SEQ ID NO: 765262 - DNA, 75 bp, synthetic construct
  source 1..75: mol_type = other DNA
gtggaattagtggtgcggaaaaataccggtgtaacattaacacctgccggtcaattgttactctcccgttccgaa

SEQ ID NO: 765263 - DNA, 75 bp, synthetic construct
  source 1..75: mol_type = other DNA
gcaccaccacgctggagtcgttgaagaacgaacagtgggtgttgccacaaaccaatatggggtactacagcgaac

SEQ ID NO: 765264 - DNA, 75 bp, synthetic construct
  source 1..75: mol_type = other DNA
aattgtcttcattcttacccgcaatccgtgatgggcgtctggactttgcgattggtacgttgagtgcagaaatga

SEQ ID NO: 765265 - DNA, 75 bp, synthetic construct
  source 1..75: mol_type = other DNA
cgggaaaaccaagtcccgagggttacatcaaagcagctttggctttgggccttgagcctggtgaatgcgtggtat

SEQ ID NO: 765266 - DNA, 75 bp, synthetic construct
  source 1..75: mol_type = other DNA
ccttgccgccccctggatagtcggcctgaaccgcctggcgctccgcgacatgatgagcaccagtgatacgcgccg

SEQ ID NO: 765267 - DNA, 75 bp, synthetic construct
  source 1..75: mol_type = other DNA
gtattcatgctggctaaacgcttcacggccctgagcttcggctgcttccgtcacgacggtgagaatattacggtc

SEQ ID NO: 765268 - DNA, 75 bp, synthetic construct
  source 1..75: mol_type = other DNA
tcactcagggtacgctccagcaggacgctctgaatatctgtgataacgtggtccgcaccatcaatagccgcatgg

SEQ ID NO: 765269 - DNA, 75 bp, synthetic construct
  source 1..75: mol_type = other DNA
tctcatctctgagcagaccaagctctgggacgccaagtcatccaccggattcactcagggcacacttcagcagga

SEQ ID NO: 765270 - DNA, 75 bp, synthetic construct
  source 1..75: mol_type = other DNA
tctctcccgtctggctgctaaacaaggctttggtggtgaggacgctatcacggatatgctggggaccgacctcgc

SEQ ID NO: 765271 - DNA, 75 bp, synthetic construct
  source 1..75: mol_type = other DNA
agttcggcattgagccagcccgtatcaccaacactgacaacattcaggtctctgagtctggggccgctactgagc

SEQ ID NO: 765272 - DNA, 75 bp, synthetic construct
  source 1..75: mol_type = other DNA
caccgacaccgacaacattcggattaacgaaggtttgccgactaactcagaccctcaggtctacgcctttgagct

SEQ ID NO: 765273 - DNA, 75 bp, synthetic construct
  source 1..75: mol_type = other DNA
taaaatatatctgctaaaaagcatggggttagatttagaactattgaatacatttattgcacaaatatttgatgc

SEQ ID NO: 765274 - DNA, 75 bp, synthetic construct
  source 1..75: mol_type = other DNA
tgggagtacgcggtcacctactggaaccccgactggagtgagcagcaaaaacgcgaaattattaaagcagctgcg

SEQ ID NO: 765275 - DNA, 75 bp, synthetic construct
  source 1..75: mol_type = other DNA
tgatgagcaccagtgatacgcgccggcaggccggacgccgcgcactggatcacctgttgctgttcagccgccccg

SEQ ID NO: 765276 - DNA, 75 bp, synthetic construct
  source 1..75: mol_type = other DNA
cagggcttcggtggcgaagacgctatcgtggatatgctgggtaccgacatcgcgtattacaacggtgaggaccgt

SEQ ID NO: 765277 - DNA, 75 bp, synthetic construct
  source 1..75: mol_type = other DNA
atgactatgactaaagacgctttccagttcggcattgagccagtacgtatcaccgacaccgacaacattcagatt

SEQ ID NO: 765278 - DNA, 75 bp, synthetic construct
  source 1..75: mol_type = other DNA
ataccggcagatggtgatggcggcgtgaaattaaatggcggattatatatatcaggctcaccaattgttagttta

SEQ ID NO: 765279 - DNA, 75 bp, synthetic construct
  source 1..75: mol_type = other DNA
cttatgctcccctggctgggcgttttgttagtctcagtagtcggaggtgagtactgggccagtctagggccagtc

SEQ ID NO: 765280 - DNA, 75 bp, synthetic construct
  source 1..75: mol_type = other DNA
atgcgctatatagcaggcattgatatcggcaattcatcgacagaggttgcgctggcaacgctcagtgcgtctgga

SEQ ID NO: 765281 - DNA, 75 bp, synthetic construct
  source 1..75: mol_type = other DNA
ctattgtggatgaagtcctctacatcgatcgtattccgctcggcatgctggcagcaattgaagttgccgttcccg

SEQ ID NO: 765282 - DNA, 75 bp, synthetic construct
  source 1..75: mol_type = other DNA
cgctggatttcgaagtaccgcagttagtcaccgatgcattggcgcattatcgattggtcgccggacgggggaata

SEQ ID NO: 765283 - DNA, 75 bp, synthetic construct
  source 1..75: mol_type = other DNA
tctacgcattcctgcgtgagccgcagcgggtaatgagcgcggtgcgcaaagtgctttctgcgccgcagcaaaccc

SEQ ID NO: 765284 - DNA, 75 bp, synthetic construct
  source 1..75: mol_type = other DNA
aggatatccgtcgggcggatgttgctctgttgattacggatatcgagcttgccggtgccgagcgatttgaacatt

SEQ ID NO: 765285 - DNA, 75 bp, synthetic construct
  source 1..75: mol_type = other DNA
catcaccgaatcaaccatgatcggccacaacccgaaaacgccaggcggagtaggtctgggagtgggactcaccat

SEQ ID NO: 765286 - DNA, 75 bp, synthetic construct
  source 1..75: mol_type = other DNA
gaaatgtgacgctggaaaacaaatcatccctgaaaatcatggagaaattcaccggaggtattgaggcttatgaca

SEQ ID NO: 765287 - DNA, 75 bp, synthetic construct
  source 1..75: mol_type = other DNA
acctctgccagccagagcgactgggaaacccgtcagtttacgctgggaaaactgaaactcgatgctgcaacattc

SEQ ID NO: 765288 - DNA, 75 bp, synthetic construct
  source 1..75: mol_type = other DNA
gcgccggcagaagtgtctgacgtcggggcagtgagcggtgcctatcaggccggaggacgctttactgcattctat

SEQ ID NO: 765289 - DNA, 75 bp, synthetic construct
  source 1..75: mol_type = other DNA
ttggtttcagtaatgtcacgccggtaatcagcacagaaaaaacggatgatgccacaaaatggatgctgacagggt

SEQ ID NO: 765290 - DNA, 75 bp, synthetic construct
  source 1..75: mol_type = other DNA
gtaaatatgaataatgctctgtggtactctgacggaaactcaacgatcggaatgctgaagagtacggggggacga

SEQ ID NO: 765291 - DNA, 75 bp, synthetic construct
  source 1..75: mol_type = other DNA
ggctcttgatggttccgttaacctgccagaaggttcgataaccaagaagtccggtacgctgatattccagggcca

SEQ ID NO: 765292 - DNA, 75 bp, synthetic construct
  source 1..75: mol_type = other DNA
gctgggaacggagaatcgtttagcggacgaggatatccgtcgggcggatgttgcgctgttgattacggatatcga

SEQ ID NO: 765293 - DNA, 75 bp, synthetic construct
  source 1..75: mol_type = other DNA
tttgcccttgtcgacagccactcgttttacgtcattggttattttgaagaaaccaagttgcgccatatccgcgaa

SEQ ID NO: 765294 - DNA, 75 bp, synthetic construct
  source 1..75: mol_type = other DNA
ccgtccgctttgctctggataatgttcccagcgatgtcacgctggtatccggtacaacatgtagcatcgccgtag

SEQ ID NO: 765295 - DNA, 75 bp, synthetic construct
  source 1..75: mol_type = other DNA
ggataccgccaacctcaatgtcaaagcgatgcaggccagtgtcgatgccgcgcaagcaatgctgaaacaagcgca

SEQ ID NO: 765296 - DNA, 75 bp, synthetic construct
  source 1..75: mol_type = other DNA
atttaccttctgctcaacatttttatgctggcgctgggcgcattaatgctatttttctcggggcgagtggggaac

SEQ ID NO: 765297 - DNA, 75 bp, synthetic construct
  source 1..75: mol_type = other DNA
ctgttcgttttgctctcgataacgtccccggcgatgtcacgctggtatccggcaccacctgtagtatcgctgtag

SEQ ID NO: 765298 - DNA, 75 bp, synthetic construct
  source 1..75: mol_type = other DNA
aaccaagttgcgccatatccgcgaaggtgcaccagcacaaattaccctctatagtgataacaaaacgttacgggg

SEQ ID NO: 765299 - DNA, 75 bp, synthetic construct
  source 1..75: mol_type = other DNA
ttaccagttcgatttgctggcaaatggagaaactgttttacaggatgcttctggtaaaaaacacttcaaaggtga

SEQ ID NO: 765300 - DNA, 75 bp, synthetic construct
  source 1..75: mol_type = other DNA
gtttacaatggataaactgaagcttgatgcagcaacattccatctctccagaaatgctcgtatgcaaggagatat

SEQ ID NO: 765301 - DNA, 75 bp, synthetic construct
  source 1..75: mol_type = other DNA
gttgggaacggagaatcgtttagcggacgaggatatccgccgggcggatgttgcgctgttaattacggatatcga

SEQ ID NO: 765302 - DNA, 75 bp, synthetic construct
  source 1..75: mol_type = other DNA
tgggcgttattctgccgcaaggcactgcaatcgaactgcccgaaaccgacagcgccccgaaaaccgagacggtga

SEQ ID NO: 765303 - DNA, 75 bp, synthetic construct
  source 1..75: mol_type = other DNA
aaaagacagcaggatgctaatgaacgtgggaacgaatgtggaagttaaagacaatatgcgttttggtctggagtt

SEQ ID NO: 765304 - DNA, 75 bp, synthetic construct
  source 1..75: mol_type = other DNA
atggaaataaaagaaaacgcctctctgactctgacagggatcccttctgtaggaaagccggggtattattcacct

SEQ ID NO: 765305 - DNA, 75 bp, synthetic construct
  source 1..75: mol_type = other DNA
acgctgatgaatattctgacgtgccttgatacggcgacggaagggcaggtgtttcttgatggcaccgatgccgcc

SEQ ID NO: 765306 - DNA, 75 bp, synthetic construct
  source 1..75: mol_type = other DNA
gctggaacgcctgcagcaatatcatgaaatagatgaagcaacaatacttgccagaactattggcagagtaattaa

SEQ ID NO: 765307 - DNA, 75 bp, synthetic construct
  source 1..75: mol_type = other DNA
aaccataacatcctccacactacaacagaagaacaggaaattaaagatacaaattctgttgaatttttgggactc

SEQ ID NO: 765308 - DNA, 75 bp, synthetic construct
  source 1..75: mol_type = other DNA
gaaagaagggaaaataaaaaaacaaaaaccgttgccgccaattagtgatgaggaaaaaccgtttgaactgccgga

SEQ ID NO: 765309 - DNA, 75 bp, synthetic construct
  source 1..75: mol_type = other DNA
cgccaataaaattctgttggtaagtaacaaaaagaaacgtacagaaaagattgacgtgaatattcgtcttgcagg

SEQ ID NO: 765310 - DNA, 75 bp, synthetic construct
  source 1..75: mol_type = other DNA
tctccttttgaaaatgaatacaaaagtccctggaattgtgagaaaccagatactaacgatgtgagtaaacttaga

SEQ ID NO: 765311 - DNA, 75 bp, synthetic construct
  source 1..75: mol_type = other DNA
gatcgcctggaacagcgtctggcagaggaaaagatcaccgaagtgatcctcgcgaccaacccgacggtcgaaggt

SEQ ID NO: 765312 - DNA, 75 bp, synthetic construct
  source 1..75: mol_type = other DNA
agctttgcgcgcaatatgacgtggaagccagccgaatcgctcatggcgtaccggttggcggcgagctggaaatgg

SEQ ID NO: 765313 - DNA, 75 bp, synthetic construct
  source 1..75: mol_type = other DNA
ccggttggcggcgagctggaaatggtcgacggcaccacgttgtcacactcccttgccgggcgtcataagattcgt

SEQ ID NO: 765314 - DNA, 75 bp, synthetic construct
  source 1..75: mol_type = other DNA
tgccggtgacctttgttccgcggactatcactatcattgattttgtcgcactcatcaatggcagttactgctctg

SEQ ID NO: 765315 - DNA, 75 bp, synthetic construct
  source 1..75: mol_type = other DNA
cgtcattattgatacattaatgaataatgtatttcattctaattttctcactcaaattgaacgattaaaacctgt

SEQ ID NO: 765316 - DNA, 75 bp, synthetic construct
  source 1..75: mol_type = other DNA
gacggaggcaatccgctggcctgaaagtgtggatgaacacaaaaaggcaaatgcctttgccggcagtgccctgag

SEQ ID NO: 765317 - DNA, 75 bp, synthetic construct
  source 1..75: mol_type = other DNA
agttagagatgacactatttcctcttctaccgcaaagtgaacaagatcgcattatttcaaaaacggatgaattaa

SEQ ID NO: 765318 - DNA, 75 bp, synthetic construct
  source 1..75: mol_type = other DNA
gcgtactctactccgccgtcgcagcaccgtttaagtcgttgtcactgctgatgcgcacgctggtgttactttcgc

SEQ ID NO: 765319 - DNA, 75 bp, synthetic construct
  source 1..75: mol_type = other DNA
atccaggctttctggagccactatcgttttcgccagcaaaacgcgcgccttaatgcgctgctccaccagcaatta

SEQ ID NO: 765320 - DNA, 75 bp, synthetic construct
  source 1..75: mol_type = other DNA
catcacgtcagtcagttaagtaacagccaggatgcactggcccgccgttggttattgcgttggggggttgtacta

SEQ ID NO: 765321 - DNA, 75 bp, synthetic construct
  source 1..75: mol_type = other DNA
attcgggctgcgcgtgagcttattgctaatgatattgagcaatatctcgataatttaaataaattactttccgga

SEQ ID NO: 765322 - DNA, 75 bp, synthetic construct
  source 1..75: mol_type = other DNA
ctgaatcagacgtttgaagataccgataaacacatcacgattgtttctccgtggctgacctggcaaaagctggag

SEQ ID NO: 765323 - DNA, 75 bp, synthetic construct
  source 1..75: mol_type = other DNA
cgtgtgtgtatcgcccgggcgctggtcaacgaaccgccggttattttcgcggatgaaccgacgggcaacctggat

SEQ ID NO: 765324 - DNA, 75 bp, synthetic construct
  source 1..75: mol_type = other DNA
gctggcggcaattgtctggcggctgtactgctcgctttcgcaacttgagcaagcaccgccgcaaggtacgctggc

SEQ ID NO: 765325 - DNA, 75 bp, synthetic construct
  source 1..75: mol_type = other DNA
taacgtcgcgtatgcatttcaactggcgggctacacggctgccatcatcgcctttccgatggttaatattactga

SEQ ID NO: 765326 - DNA, 75 bp, synthetic construct
  source 1..75: mol_type = other DNA
gcgagaaattctcgaacagttgctgacggcgctcgccagttcgcaaacagatgtttacaccgtcgcacgtattat

SEQ ID NO: 765327 - DNA, 75 bp, synthetic construct
  source 1..75: mol_type = other DNA
accctggttatttctgttaagtatggcgacatggcttggcttttgtacctgggcttgtgcgcacttcaccaataa

SEQ ID NO: 765328 - DNA, 75 bp, synthetic construct
  source 1..75: mol_type = other DNA
ccagttcgcaaacagatgtttacaccgtcgcacgtattatcgccccgctacgcccgaccaacgtcgccgactacc

SEQ ID NO: 765329 - DNA, 75 bp, synthetic construct
  source 1..75: mol_type = other DNA
tgtcactgctgatgcgcacgctggtgttactttcgctattcagctttgtggtcaaatttggcctgatggtccaga

SEQ ID NO: 765330 - DNA, 75 bp, synthetic construct
  source 1..75: mol_type = other DNA
atgggatacggtttactggatattgcgaatcagtcacggcgtgaggcattacagggaataagtgacgcagaccga

SEQ ID NO: 765331 - DNA, 75 bp, synthetic construct
  source 1..75: mol_type = other DNA
tttagccgaagccgaaccggacaggatgctccccggaaaaagaccggtagcaaagcgaaaccggcgagaaaggcc

SEQ ID NO: 765332 - DNA, 75 bp, synthetic construct
  source 1..75: mol_type = other DNA
atgaatgaacatcacactgtggcagcaacagatgactcaggccttcaggtcagtggtgacaatcctgtcacggta

SEQ ID NO: 765333 - DNA, 75 bp, synthetic construct
  source 1..75: mol_type = other DNA
agatgtcggcgaacaacagcttttagctgcatgcgttgagcaaccaggagctttgttcatgacaggtgaccgtcg

SEQ ID NO: 765334 - DNA, 75 bp, synthetic construct
  source 1..75: mol_type = other DNA
cgggtgaaggttatctctatgaactgtgcgtcacagccaaaagccagacagagtgtgatatctacccgctgcgcg

SEQ ID NO: 765335 - DNA, 75 bp, synthetic construct
  source 1..75: mol_type = other DNA
gggccagccgaagaactgaataaaacctggcaaacccagccagcactgttagctgcatctgttgcgctgtatcgc

SEQ ID NO: 765336 - DNA, 75 bp, synthetic construct
  source 1..75: mol_type = other DNA
cggcaagttcatgcaggaagctgtaccggaagggactggcgcaatggcggcaatcatcggtctggatgatgcgtc

SEQ ID NO: 765337 - DNA, 75 bp, synthetic construct
  source 1..75: mol_type = other DNA
gctgtcaattgccttaggcttgataacggtaaatttcttcatgccaggcacaggaattaattttgttgcacacgg

SEQ ID NO: 765338 - DNA, 75 bp, synthetic construct
  source 1..75: mol_type = other DNA
tgctaaaatgggcgatgccaaagcccttggtcgtattttttctaaaacactctttttatttatttgcgcctcatt

SEQ ID NO: 765339 - DNA, 75 bp, synthetic construct
  source 1..75: mol_type = other DNA
ggctaagctggtgaaaacgatgctgaatggtgtgcttaaagacgctcaggagaacatcccattccccgtagagct

SEQ ID NO: 765340 - DNA, 75 bp, synthetic construct
  source 1..75: mol_type = other DNA
ccgtgctgatgtttctgctgggcgtaagcgcctgcaagtcgccgccacctgtgcaaagtcaacgaccggagccag

SEQ ID NO: 765341 - DNA, 75 bp, synthetic construct
  source 1..75: mol_type = other DNA
cggaacccgccctgctggcatttaccacatccagttctgaagcggcttttccgggaacgcttgaaaaactggagc

SEQ ID NO: 765342 - DNA, 75 bp, synthetic construct
  source 1..75: mol_type = other DNA
caggaattaattttgttgcacacggtgccgaaaccaccggagtggtcgcgtcagaaccctttacgctaaaagtat

SEQ ID NO: 765343 - DNA, 75 bp, synthetic construct
  source 1..75: mol_type = other DNA
aaactcgacccgacgcgtccgatcacctgtgtcaatgtaatgttctgcgacgctcacaccgataccatcagcgat

SEQ ID NO: 765344 - DNA, 75 bp, synthetic construct
  source 1..75: mol_type = other DNA
tatttgattggtcaggatccatcgcgcatcaatgacttatggcaagtgatgtatcgcgccggattttatcgtgga

SEQ ID NO: 765345 - DNA, 75 bp, synthetic construct
  source 1..75: mol_type = other DNA
cacctttgctgagcaggatgctttgctggatgacgtatttttccgttatcgcgtgctgcgctgctgtatggatca

SEQ ID NO: 765346 - DNA, 75 bp, synthetic construct
  source 1..75: mol_type = other DNA
gataaaaaaactgaccgctatatagattttctttcttcatcgcaaacgctaatgcagaaatatctttatgaatca

SEQ ID NO: 765347 - DNA, 75 bp, synthetic construct
  source 1..75: mol_type = other DNA
gccacgcttagtgtcaaacttcaccattttgaaaataatgcaaaaaaacgctgccttcttgcagcccgttaccat

SEQ ID NO: 765348 - DNA, 75 bp, synthetic construct
  source 1..75: mol_type = other DNA
ctgggtctgattgataactcccgcgcgatagatgcggcggtcaacaccgtggcacaaattcgtgaagcctttggt

SEQ ID NO: 765349 - DNA, 75 bp, synthetic construct
  source 1..75: mol_type = other DNA
ggacaaaaaccgcctggaacgccagaactactccgtcagccataatggggcgttgggattacggcaccagcgaac

SEQ ID NO: 765350 - DNA, 75 bp, synthetic construct
  source 1..75: mol_type = other DNA
ggggattactactggaccttctttccacaacccacgtttgttagcacgcagaagtattactgccatgttgataac

SEQ ID NO: 765351 - DNA, 75 bp, synthetic construct
  source 1..75: mol_type = other DNA
gttaatgcgcccatcggcaagccgccggtcttttatcgcgccgatagcgaatgggcggcactgttcgcgtcgtta

SEQ ID NO: 765352 - DNA, 75 bp, synthetic construct
  source 1..75: mol_type = other DNA
taggtcgcgacattctggtcgctccggtgcatgaagaaggccgtagcgactggacgctctatctgccggaggata

SEQ ID NO: 765353 - DNA, 75 bp, synthetic construct
  source 1..75: mol_type = other DNA
actaccagaaggcgtggtttatggaccgggccagattcaagattgggatgttcgcccgccagaccgggaaaacct

SEQ ID NO: 765354 - DNA, 75 bp, synthetic construct
  source 1..75: mol_type = other DNA
tttcaataaaaaaggcggcaatatcggagcggcaggttctgtcagctatatgtttgacaatacgggtgtgattgt

SEQ ID NO: 765355 - DNA, 75 bp, synthetic construct
  source 1..75: mol_type = other DNA
atatcaacccgtatgtagccagcgataaagatctctgcgaagaggcggcaaagcgcggttatctggcaaaagatg

SEQ ID NO: 765356 - DNA, 75 bp, synthetic construct
  source 1..75: mol_type = other DNA
aaacttttactgttatcttaatgtattttttctgttattatgtggcaagcaatggtaaatacaaaattattgtat

SEQ ID NO: 765357 - DNA, 75 bp, synthetic construct
  source 1..75: mol_type = other DNA
ccgaaggaatcatcggtacttgtgcgctatcgttagcggctatctctggtcaggcggtgaaaacgatagccgatc

SEQ ID NO: 765358 - DNA, 75 bp, synthetic construct
  source 1..75: mol_type = other DNA
cggcgtttaatacccattgatgtcaaagtgattgccacaacgaccgcggacctcgcaatgctggtggaacaaaat

SEQ ID NO: 765359 - DNA, 75 bp, synthetic construct
  source 1..75: mol_type = other DNA
gttcgtgaaaccagacctgtgcgcaatttctatgtcggcactaacgacccgcgggagattttgtgcctgacccgc

SEQ ID NO: 765360 - DNA, 75 bp, synthetic construct
  source 1..75: mol_type = other DNA
cccacctctgcgtatgcggcgcggcagtattccggcgctggtgaataataaattacgtaatctcgaaaaacgctt

SEQ ID NO: 765361 - DNA, 75 bp, synthetic construct
  source 1..75: mol_type = other DNA
gctcaaacatgtggaagcgacctttgaaagtcagcaccagtttattgatgcggtcattacccttaaaccgataat

SEQ ID NO: 765362 - DNA, 75 bp, synthetic construct
  source 1..75: mol_type = other DNA
caatttatcaacgcccaggcggcgcgagtcttgcgccttgacgcgacggcaagtcagggacgagcaatcactgaa

SEQ ID NO: 765363 - DNA, 75 bp, synthetic construct
  source 1..75: mol_type = other DNA
tacttccggagacattgcagatgcttttgctggttactcacggcagcgcgttctgcagtcagcaagcaagttacg

SEQ ID NO: 765364 - DNA, 75 bp, synthetic construct
  source 1..75: mol_type = other DNA
tgcaaagtgatctctatcatcaccctgaaagacctgattgcttacctggaagagaagccggaaatggcggaacat

SEQ ID NO: 765365 - DNA, 75 bp, synthetic construct
  source 1..75: mol_type = other DNA
ttgaatttgcgcttggcaagcaggtgttaaagtttggcgagtttacgttgaagtccgggcgcaaaagcccctatt

SEQ ID NO: 765366 - DNA, 75 bp, synthetic construct
  source 1..75: mol_type = other DNA
agcaaaagatccggaaaccacggcgcagtggattgagcgttgcctggctggcagcgaaccgattcccgaatcgct

SEQ ID NO: 765367 - DNA, 75 bp, synthetic construct
  source 1..75: mol_type = other DNA
agtgtttcgcatccggaatatgtcgggcgggtggcgaaattctttaacgacatcggtgggagggcgctgttaatg

SEQ ID NO: 765368 - DNA, 75 bp, synthetic construct
  source 1..75: mol_type = other DNA
acgcgaccaggagaacgaggatattgcgctaacggtagggaagctgagagttgagcttgaggaagtaaaacaaca

SEQ ID NO: 765369 - DNA, 75 bp, synthetic construct
  source 1..75: mol_type = other DNA
ataaaaactactacttcacgcagatctacggcgagcataaaaatacagataaccctgaccaacgtatcgctgaag

SEQ ID NO: 765370 - DNA, 75 bp, synthetic construct
  source 1..75: mol_type = other DNA
cctgattcagcaggcagaagatctggagtcaagaggtttatttcgtcgtgctgcaacggtgtggatggaggcatt

SEQ ID NO: 765371 - DNA, 75 bp, synthetic construct
  source 1..75: mol_type = other DNA
tgagctggaaggcaaagacaagctgattgcagagcttggaaaacaatgcgccgaatgggagcgaaaagcattaag

SEQ ID NO: 765372 - DNA, 75 bp, synthetic construct
  source 1..75: mol_type = other DNA
atgagtcttttgaatgacgttcagaaattcattgaagcccatccggggtgtacttccggagacattgcggatgct

SEQ ID NO: 765373 - DNA, 75 bp, synthetic construct
  source 1..75: mol_type = other DNA
aagagatgaacaacgccggtgcgattgaggtgttaatgccggtggttcagccatctgaactgtggcaagagagtg

SEQ ID NO: 765374 - DNA, 75 bp, synthetic construct
  source 1..75: mol_type = other DNA
ttctggcgcgtcgtgaacggtgtttacggaaaagcagtaagcgggctgcatcaggtgaagagtggtatctgtcag

SEQ ID NO: 765375 - DNA, 75 bp, synthetic construct
  source 1..75: mol_type = other DNA
tgtttacggaaaagcagcaagcgcgctgtatcgggtgatgagtggtatctgtcagggaattacgtgggggcgtaa

SEQ ID NO: 765376 - DNA, 75 bp, synthetic construct
  source 1..75: mol_type = other DNA
tgcgtttagtgcgtgaaaaactacccacaagcggcgtcattatggttacacatcaacccggtgtctggaacctgg

SEQ ID NO: 765377 - DNA, 75 bp, synthetic construct
  source 1..75: mol_type = other DNA
acgatcgctggggagatattctttccagcggcgaaaaacaacgtatcgccctggcacgattaattttacgacgtc

SEQ ID NO: 765378 - DNA, 75 bp, synthetic construct
  source 1..75: mol_type = other DNA
tacccacaagcggcgtcattatggttacacatcaacccggtgtctggaacctggcagatgatatttgtgacatta

SEQ ID NO: 765379 - DNA, 75 bp, synthetic construct
  source 1..75: mol_type = other DNA
atgagtctttttaatgacgttcagaaattcattgaagcccatccggggtgtacttccggtgacattgcggatgct

SEQ ID NO: 765380 - DNA, 75 bp, synthetic construct
  source 1..75: mol_type = other DNA
atgagtcttttaaatgacgttcagaaattcattgaagcccatccggggtgtacttccggggacattgcggatgct

SEQ ID NO: 765381 - DNA, 75 bp, synthetic construct
  source 1..75: mol_type = other DNA
agtatctctgtctgctgaagcccttttggctgcgtaagaataataaaacttcagtgttgttaatcattattatcc

SEQ ID NO: 765382 - DNA, 75 bp, synthetic construct
  source 1..75: mol_type = other DNA
actgaaatgccaatgagtcaggagcccttcttcatcattgccttcggttatgtgaaaaaagcagctgcgatggct

SEQ ID NO: 765383 - DNA, 75 bp, synthetic construct
  source 1..75: mol_type = other DNA
gtccttcccgacctgtccggaaaagccggcgatgaaacgacagcacaggacaatactgagggctgggcacaggct

SEQ ID NO: 765384 - DNA, 75 bp, synthetic construct
  source 1..75: mol_type = other DNA
tattcatcatcggcaaaaacacctttccaacgcgttaatgcgctttctggactactgcaatcctgccaatttacc

SEQ ID NO: 765385 - DNA, 75 bp, synthetic construct
  source 1..75: mol_type = other DNA
atgcctttagtcactcttactgccgcagaggctttagcgcgccttgaagagctgaggaggcactatgagcgataa

SEQ ID NO: 765386 - DNA, 75 bp, synthetic construct
  source 1..75: mol_type = other DNA
gccctttgaaccagaagtcaaacgtcaggctgtcatggcactctgtacacgacaagtatcagccagtgaaattgc

SEQ ID NO: 765387 - DNA, 75 bp, synthetic construct
  source 1..75: mol_type = other DNA
ccagtaaggccaacccggttgcgccctttgaaccagaagtcaaacgtcaggctgtcatggcactctctacacgac

SEQ ID NO: 765388 - DNA, 75 bp, synthetic construct
  source 1..75: mol_type = other DNA
caccttcccggcctgtccggcacagccggcgatgaaacaacagcaccggacaatcagaccactgagggctgggca

SEQ ID NO: 765389 - DNA, 75 bp, synthetic construct
  source 1..75: mol_type = other DNA
gtaaagaccagtcggttgatttgagaaatggcacgctgtatacgggttcaacaaaatcatttcagccttgcctgg

SEQ ID NO: 765390 - DNA, 75 bp, synthetic construct
  source 1..75: mol_type = other DNA
cctccggggtgaataaaatcagtaacaataatgaggactggccctatttctcaccaacaaccaaagcaaatgcca

SEQ ID NO: 765391 - DNA, 75 bp, synthetic construct
  source 1..75: mol_type = other DNA
gagtatcagccgcgtctcaatgagttacaggggctatataatgatcatccaagcgggacaatactgacagatttg

SEQ ID NO: 765392 - DNA, 75 bp, synthetic construct
  source 1..75: mol_type = other DNA
agatgcgcagggtaaccctgtgggaaataccgcatttaccctcaaacgaaacaccagcgtgaacagggccaatgt

SEQ ID NO: 765393 - DNA, 75 bp, synthetic construct
  source 1..75: mol_type = other DNA
tcgaaccgtagcgaagcgcaaaaaccggacgatacgacgtttattgtgagctgtgtcgataaagaagcgcccgat

SEQ ID NO: 765394 - DNA, 75 bp, synthetic construct
  source 1..75: mol_type = other DNA
gcccagcgcaacagcgaagaagggagaggttatcccgatgacggttacggtgcgagatagcgcaggcaatccact

SEQ ID NO: 765395 - DNA, 75 bp, synthetic construct
  source 1..75: mol_type = other DNA
ccggttgcgccctttgaaccagaagtcaaacgtcaggctgtcatggcactctgtacacgacaagtatcagccagt

SEQ ID NO: 765396 - DNA, 75 bp, synthetic construct
  source 1..75: mol_type = other DNA
tgcgtgaattgtgtgaccgccacaatgcgttgctgatctttgatgaagtacaaaccggtgtcgggcgcaccgggg

SEQ ID NO: 765397 - DNA, 75 bp, synthetic construct
  source 1..75: mol_type = other DNA
ttgccggattgccggattgccggattgccggattgccggatcacgtacacaacgcggcgcgtattcgttatccga

SEQ ID NO: 765398 - DNA, 75 bp, synthetic construct
  source 1..75: mol_type = other DNA
ggatgctggagcgccattgatatcgatgatgcattcgctactctacgcgtcctcaataaccgagccatctggcgc

SEQ ID NO: 765399 - DNA, 75 bp, synthetic construct
  source 1..75: mol_type = other DNA
gaagcataccatacaggcaaatccctccatcagatagtggttgtcgaacgtaagctactcacacaggaagaatgg

SEQ ID NO: 765400 - DNA, 75 bp, synthetic construct
  source 1..75: mol_type = other DNA
ctaattttggtcagtccaccaatgatacatatccgacagcattacatctggcattgctgctgcgaagcaatgtat

SEQ ID NO: 765401 - DNA, 75 bp, synthetic construct
  source 1..75: mol_type = other DNA
aacgcgctgggccatgcgcacccggaactgcgtgaggcgctgaacgaacaggcgagtaagttctggcataccggc

SEQ ID NO: 765402 - DNA, 75 bp, synthetic construct
  source 1..75: mol_type = other DNA
taaaaatgcgtggcacaggcgtatcgatgccaaataaacaactggcttgtgaatatgttgatgaattaacgccag

SEQ ID NO: 765403 - DNA, 75 bp, synthetic construct
  source 1..75: mol_type = other DNA
aggaagtcgcccgactgaatcaggaaatacgccaccggcagatggagctggatattctgaaaaaagcggaggaaa

SEQ ID NO: 765404 - DNA, 75 bp, synthetic construct
  source 1..75: mol_type = other DNA
aagtatcagccagtgaaatcggaaataacggagtaccgccttccatgccgctaacgcggcataaatctctgttcc

SEQ ID NO: 765405 - DNA, 75 bp, synthetic construct
  source 1..75: mol_type = other DNA
atgcgactgtggttaattcgtcatggtgaaacgcaagcgaatgtcgatggtctgtacagcggtcatgcgcccacc

SEQ ID NO: 765406 - DNA, 75 bp, synthetic construct
  source 1..75: mol_type = other DNA
atgatgatggctatctgcgtggctataacaccgacggcacgggccatattcgcgccattaaagagagcggttttg

SEQ ID NO: 765407 - DNA, 75 bp, synthetic construct
  source 1..75: mol_type = other DNA
tcgccgatcagcaagcctttgctgaagctctggtttccgccgatattttaaccaacggcaccaaagtaggaatga

SEQ ID NO: 765408 - DNA, 75 bp, synthetic construct
  source 1..75: mol_type = other DNA
taggcataatgcaaataaattcatctcatttaaatttgttaagtaaatttaacatatcagaggatgatttattac

SEQ ID NO: 765409 - DNA, 75 bp, synthetic construct
  source 1..75: mol_type = other DNA
tgggtactcgggacacgaccgttcaattatggatactctcaatacgttattgcattccggtagttgttttcctca
